United States Patent Application Publication US 2018/0305689 A1 - sequence listing, part 59

SEQ ID NO: 853698 - RNA, 19 nt, Artificial Sequence
  Description of Artificial Sequence: Synthetic oligonucleotide
  Sense strand starting at position 3305 of SEQ ID NO: 588274
ugcgcuugcauagauauca

SEQ ID NO: 853699 - RNA, 19 nt, Artificial Sequence
  Description of Artificial Sequence: Synthetic oligonucleotide
  Antisense strand to SEQ ID NO: 853698
ugauaucuaugcaagcgca

SEQ ID NO: 853700 - RNA, 19 nt, Artificial Sequence
  Description of Artificial Sequence: Synthetic oligonucleotide
  Sense strand starting at position 3321 of SEQ ID NO: 588274
ucaaauauuucgcaggaaa

SEQ ID NO: 853701 - RNA, 19 nt, Artificial Sequence
  Description of Artificial Sequence: Synthetic oligonucleotide
  Antisense strand to SEQ ID NO: 853700
uuuccugcgaaauauuuga

SEQ ID NO: 853702 - RNA, 19 nt, Artificial Sequence
  Description of Artificial Sequence: Synthetic oligonucleotide
  Sense strand starting at position 3371 of SEQ ID NO: 588274
ggaggugcuugagauacau

SEQ ID NO: 853703 - RNA, 19 nt, Artificial Sequence
  Description of Artificial Sequence: Synthetic oligonucleotide
  Antisense strand to SEQ ID NO: 853702
auguaucucaagcaccucc

SEQ ID NO: 853704 - RNA, 19 nt, Artificial Sequence
  Description of Artificial Sequence: Synthetic oligonucleotide
  Sense strand starting at position 3396 of SEQ ID NO: 588274
aagcaaauguuaguucuga

SEQ ID NO: 853705 - RNA, 19 nt, Artificial Sequence
  Description of Artificial Sequence: Synthetic oligonucleotide
  Antisense strand to SEQ ID NO: 853704
ucagaacuaacauuugcuu

SEQ ID NO: 853706 - RNA, 19 nt, Artificial Sequence
  Description of Artificial Sequence: Synthetic oligonucleotide
  Sense strand starting at position 3412 of SEQ ID NO: 588274
ugaccuguuuccuuguuga

SEQ ID NO: 853707 - RNA, 19 nt, Artificial Sequence
  Description of Artificial Sequence: Synthetic oligonucleotide
  Antisense strand to SEQ ID NO: 853706
ucaacaaggaaacagguca

SEQ ID NO: 853708 - RNA, 19 nt, Artificial Sequence
  Description of Artificial Sequence: Synthetic oligonucleotide
  Sense strand starting at position 3450 of SEQ ID NO: 588274
uuguauaaggcauauguga

SEQ ID NO: 853709 - RNA, 19 nt, Artificial Sequence
  Description of Artificial Sequence: Synthetic oligonucleotide
  Antisense strand to SEQ ID NO: 853708
ucacauaugccuuauacaa

SEQ ID NO: 853710 - RNA, 19 nt, Artificial Sequence
  Description of Artificial Sequence: Synthetic oligonucleotide
  Sense strand starting at position 3452 of SEQ ID NO: 588274
guauaaggcauaugugauc

SEQ ID NO: 853711 - RNA, 19 nt, Artificial Sequence
  Description of Artificial Sequence: Synthetic oligonucleotide
  Antisense strand to SEQ ID NO: 853710
gaucacauaugccuuauac

SEQ ID NO: 853712 - RNA, 19 nt, Artificial Sequence
  Description of Artificial Sequence: Synthetic oligonucleotide
  Sense strand starting at position 3457 of SEQ ID NO: 588274
aggcauaugugaucaggca

SEQ ID NO: 853713 - RNA, 19 nt, Artificial Sequence
  Description of Artificial Sequence: Synthetic oligonucleotide
  Antisense strand to SEQ ID NO: 853712
ugccugaucacauaugccu

SEQ ID NO: 853714 - RNA, 19 nt, Artificial Sequence
  Description of Artificial Sequence: Synthetic oligonucleotide
  Sense strand starting at position 3458 of SEQ ID NO: 588274
ggcauaugugaucaggcaa

SEQ ID NO: 853715 - RNA, 19 nt, Artificial Sequence
  Description of Artificial Sequence: Synthetic oligonucleotide
  Antisense strand to SEQ ID NO: 853714
uugccugaucacauaugcc

SEQ ID NO: 853716 - RNA, 19 nt, Artificial Sequence
  Description of Artificial Sequence: Synthetic oligonucleotide
  Sense strand starting at position 3485 of SEQ ID NO: 588274
gugaguugugugcaugugu

SEQ ID NO: 853717 - RNA, 19 nt, Artificial Sequence
  Description of Artificial Sequence: Synthetic oligonucleotide
  Antisense strand to SEQ ID NO: 853716
acacaugcacacaacucac

SEQ ID NO: 853718 - RNA, 19 nt, Artificial Sequence
  Description of Artificial Sequence: Synthetic oligonucleotide
  Sense strand starting at position 3527 of SEQ ID NO: 588274
cgugucugugcguugguua

SEQ ID NO: 853719 - RNA, 19 nt, Artificial Sequence
  Description of Artificial Sequence: Synthetic oligonucleotide
  Antisense strand to SEQ ID NO: 853718
uaaccaacgcacagacacg

SEQ ID NO: 853720 - RNA, 19 nt, Artificial Sequence
  Description of Artificial Sequence: Synthetic oligonucleotide
  Sense strand starting at position 3565 of SEQ ID NO: 588274
uuacuuucccuguggacuu

SEQ ID NO: 853721 - RNA, 19 nt, Artificial Sequence
  Description of Artificial Sequence: Synthetic oligonucleotide
  Antisense strand to SEQ ID NO: 853720
aaguccacagggaaaguaa

SEQ ID NO: 853722 - RNA, 19 nt, Artificial Sequence
  Description of Artificial Sequence: Synthetic oligonucleotide
  Sense strand starting at position 3575 of SEQ ID NO: 588274
uguggacuucaaugaguga

SEQ ID NO: 853723 - RNA, 19 nt, Artificial Sequence
  Description of Artificial Sequence: Synthetic oligonucleotide
  Antisense strand to SEQ ID NO: 853722
ucacucauugaaguccaca

SEQ ID NO: 853724 - RNA, 19 nt, Artificial Sequence
  Description of Artificial Sequence: Synthetic oligonucleotide
  Sense strand starting at position 3633 of SEQ ID NO: 588274
ugugcuugguccuuggagu

SEQ ID NO: 853725 - RNA, 19 nt, Artificial Sequence
  Description of Artificial Sequence: Synthetic oligonucleotide
  Antisense strand to SEQ ID NO: 853724
acuccaaggaccaagcaca

SEQ ID NO: 853726 - RNA, 19 nt, Artificial Sequence
  Description of Artificial Sequence: Synthetic oligonucleotide
  Sense strand starting at position 3715 of SEQ ID NO: 588274
uggccugguuaucagaaga

SEQ ID NO: 853727 - RNA, 19 nt, Artificial Sequence
  Description of Artificial Sequence: Synthetic oligonucleotide
  Antisense strand to SEQ ID NO: 853726
ucuucugauaaccaggcca

SEQ ID NO: 853728 - RNA, 19 nt, Artificial Sequence
  Description of Artificial Sequence: Synthetic oligonucleotide
  Sense strand starting at position 3779 of SEQ ID NO: 588274
uggaguuccuuucugacag

SEQ ID NO: 853729 - RNA, 19 nt, Artificial Sequence
  Description of Artificial Sequence: Synthetic oligonucleotide
  Antisense strand to SEQ ID NO: 853728
cugucagaaaggaacucca

SEQ ID NO: 853730 - RNA, 19 nt, Artificial Sequence
  Description of Artificial Sequence: Synthetic oligonucleotide
  Sense strand starting at position 3884 of SEQ ID NO: 588274
cgccuuaagagcugacacu

SEQ ID NO: 853731 - RNA, 19 nt, Artificial Sequence
  Description of Artificial Sequence: Synthetic oligonucleotide
  Antisense strand to SEQ ID NO: 853730
agugucagcucuuaaggcg

SEQ ID NO: 853732 - RNA, 19 nt, Artificial Sequence
  Description of Artificial Sequence: Synthetic oligonucleotide
  Sense strand starting at position 3932 of SEQ ID NO: 588274
uugacuucucagcaauggu

SEQ ID NO: 853733 - RNA, 19 nt, Artificial Sequence
  Description of Artificial Sequence: Synthetic oligonucleotide
  Antisense strand to SEQ ID NO: 853732
accauugcugagaagucaa

SEQ ID NO: 853734 - RNA, 19 nt, Artificial Sequence
  Description of Artificial Sequence: Synthetic oligonucleotide
  Sense strand starting at position 4 of SEQ ID NO: 588275
gugucuuaauuugugaagu

SEQ ID NO: 853735 - RNA, 19 nt, Artificial Sequence
  Description of Artificial Sequence: Synthetic oligonucleotide
  Antisense strand to SEQ ID NO: 853734
acuucacaaauuaagacac

SEQ ID NO: 853736 - RNA, 19 nt, Artificial Sequence
  Description of Artificial Sequence: Synthetic oligonucleotide
  Sense strand starting at position 33 of SEQ ID NO: 588275
ccuuucuuagcugguuaau

SEQ ID NO: 853737 - RNA, 19 nt, Artificial Sequence
  Description of Artificial Sequence: Synthetic oligonucleotide
  Antisense strand to SEQ ID NO: 853736
auuaaccagcuaagaaagg

SEQ ID NO: 853738 - RNA, 19 nt, Artificial Sequence
  Description of Artificial Sequence: Synthetic oligonucleotide
  Sense strand starting at position 912 of SEQ ID NO: 588275
uguagaacccuagaauguu

SEQ ID NO: 853739 - RNA, 19 nt, Artificial Sequence
  Description of Artificial Sequence: Synthetic oligonucleotide
  Antisense strand to SEQ ID NO: 853738
aacauucuaggguucuaca

SEQ ID NO: 853740 - RNA, 19 nt, Artificial Sequence
  Description of Artificial Sequence: Synthetic oligonucleotide
  Sense strand starting at position 1042 of SEQ ID NO: 588275
gacuuucuaguaggauauu

SEQ ID NO: 853741 - RNA, 19 nt, Artificial Sequence
  Description of Artificial Sequence: Synthetic oligonucleotide
  Antisense strand to SEQ ID NO: 853740
aauauccuacuagaaaguc

SEQ ID NO: 853742 - RNA, 19 nt, Artificial Sequence
  Description of Artificial Sequence: Synthetic oligonucleotide
  Sense strand starting at position 1059 of SEQ ID NO: 588275
uuauaaacugaucgguacu

SEQ ID NO: 853743 - RNA, 19 nt, Artificial Sequence
  Description of Artificial Sequence: Synthetic oligonucleotide
  Antisense strand to SEQ ID NO: 853742
aguaccgaucaguuuauaa

SEQ ID NO: 853744 - RNA, 19 nt, Artificial Sequence
  Description of Artificial Sequence: Synthetic oligonucleotide
  Sense strand starting at position 1061 of SEQ ID NO: 588275
auaaacugaucgguacuua

SEQ ID NO: 853745 - RNA, 19 nt, Artificial Sequence
  Description of Artificial Sequence: Synthetic oligonucleotide
  Antisense strand to SEQ ID NO: 853744
uaaguaccgaucaguuuau

SEQ ID NO: 853746 - RNA, 19 nt, Artificial Sequence
  Description of Artificial Sequence: Synthetic oligonucleotide
  Sense strand starting at position 1062 of SEQ ID NO: 588275
uaaacugaucgguacuuau

SEQ ID NO: 853747 - RNA, 19 nt, Artificial Sequence
  Description of Artificial Sequence: Synthetic oligonucleotide
  Antisense strand to SEQ ID NO: 853746
auaaguaccgaucaguuua

SEQ ID NO: 853748 - RNA, 19 nt, Artificial Sequence
  Description of Artificial Sequence: Synthetic oligonucleotide
  Sense strand starting at position 1065 of SEQ ID NO: 588275
acugaucgguacuuaugaa

SEQ ID NO: 853749 - RNA, 19 nt, Artificial Sequence
  Description of Artificial Sequence: Synthetic oligonucleotide
  Antisense strand to SEQ ID NO: 853748
uucauaaguaccgaucagu

SEQ ID NO: 853750 - RNA, 19 nt, Artificial Sequence
  Description of Artificial Sequence: Synthetic oligonucleotide
  Sense strand starting at position 1066 of SEQ ID NO: 588275
cugaucgguacuuaugaau

SEQ ID NO: 853751 - RNA, 19 nt, Artificial Sequence
  Description of Artificial Sequence: Synthetic oligonucleotide
  Antisense strand to SEQ ID NO: 853750
auucauaaguaccgaucag

SEQ ID NO: 853752 - RNA, 19 nt, Artificial Sequence
  Description of Artificial Sequence: Synthetic oligonucleotide
  Sense strand starting at position 1099 of SEQ ID NO: 588275
agauguucucaauauggcu

SEQ ID NO: 853753 - RNA, 19 nt, Artificial Sequence
  Description of Artificial Sequence: Synthetic oligonucleotide
  Antisense strand to SEQ ID NO: 853752
agccauauugagaacaucu

SEQ ID NO: 853754 - RNA, 19 nt, Artificial Sequence
  Description of Artificial Sequence: Synthetic oligonucleotide
  Sense strand starting at position 1105 of SEQ ID NO: 588275
ucucaauauggcugcauga

SEQ ID NO: 853755 - RNA, 19 nt, Artificial Sequence
  Description of Artificial Sequence: Synthetic oligonucleotide
  Antisense strand to SEQ ID NO: 853754
ucaugcagccauauugaga

SEQ ID NO: 853756 - RNA, 19 nt, Artificial Sequence
  Description of Artificial Sequence: Synthetic oligonucleotide
  Sense strand starting at position 1107 of SEQ ID NO: 588275
ucaauauggcugcaugaca

SEQ ID NO: 853757 - RNA, 19 nt, Artificial Sequence
  Description of Artificial Sequence: Synthetic oligonucleotide
  Antisense strand to SEQ ID NO: 853756
ugucaugcagccauauuga

SEQ ID NO: 853758 - RNA, 19 nt, Artificial Sequence
  Description of Artificial Sequence: Synthetic oligonucleotide
  Sense strand starting at position 1120 of SEQ ID NO: 588275
augacagauucucccaagu

SEQ ID NO: 853759 - RNA, 19 nt, Artificial Sequence
  Description of Artificial Sequence: Synthetic oligonucleotide
  Antisense strand to SEQ ID NO: 853758
acuugggagaaucugucau

SEQ ID NO: 853760 - RNA, 19 nt, Artificial Sequence
  Description of Artificial Sequence: Synthetic oligonucleotide
  Sense strand starting at position 2212 of SEQ ID NO: 588275
gggugagugccucgaacca

SEQ ID NO: 853761 - RNA, 19 nt, Artificial Sequence
  Description of Artificial Sequence: Synthetic oligonucleotide
  Antisense strand to SEQ ID NO: 853760
ugguucgaggcacucaccc

SEQ ID NO: 853762 - RNA, 19 nt, Artificial Sequence
  Description of Artificial Sequence: Synthetic oligonucleotide
  Sense strand starting at position 2390 of SEQ ID NO: 588275
gaaacugacucaguauugu

SEQ ID NO: 853763 - RNA, 19 nt, Artificial Sequence
  Description of Artificial Sequence: Synthetic oligonucleotide
  Antisense strand to SEQ ID NO: 853762
acaauacugagucaguuuc

SEQ ID NO: 853764 - RNA, 19 nt, Artificial Sequence
  Description of Artificial Sequence: Synthetic oligonucleotide
  Sense strand starting at position 2401 of SEQ ID NO: 588275
aguauuguuccuugucaca

SEQ ID NO: 853765 - RNA, 19 nt, Artificial Sequence
  Description of Artificial Sequence: Synthetic oligonucleotide
  Antisense strand to SEQ ID NO: 853764
ugugacaaggaacaauacu

SEQ ID NO: 853766 - RNA, 19 nt, Artificial Sequence
  Description of Artificial Sequence: Synthetic oligonucleotide
  Sense strand starting at position 2430 of SEQ ID NO: 588275
guuguagagucuguuugaa

SEQ ID NO: 853767 - RNA, 19 nt, Artificial Sequence
  Description of Artificial Sequence: Synthetic oligonucleotide
  Antisense strand to SEQ ID NO: 853766
uucaaacagacucuacaac

SEQ ID NO: 853768 - RNA, 19 nt, Artificial Sequence
  Description of Artificial Sequence: Synthetic oligonucleotide
  Sense strand starting at position 2432 of SEQ ID NO: 588275
uguagagucuguuugaauc

SEQ ID NO: 853769 - RNA, 19 nt, Artificial Sequence
  Description of Artificial Sequence: Synthetic oligonucleotide
  Antisense strand to SEQ ID NO: 853768
gauucaaacagacucuaca

SEQ ID NO: 853770 - RNA, 19 nt, Artificial Sequence
  Description of Artificial Sequence: Synthetic oligonucleotide
  Sense strand starting at position 2558 of SEQ ID NO: 588275
caagauauuccuggucagc

SEQ ID NO: 853771 - RNA, 19 nt, Artificial Sequence
  Description of Artificial Sequence: Synthetic oligonucleotide
  Antisense strand to SEQ ID NO: 853770
gcugaccaggaauaucuug

SEQ ID NO: 853772 - RNA, 19 nt, Artificial Sequence
  Description of Artificial Sequence: Synthetic oligonucleotide
  Sense strand starting at position 2560 of SEQ ID NO: 588275
agauauuccuggucagcau

SEQ ID NO: 853773 - RNA, 19 nt, Artificial Sequence
  Description of Artificial Sequence: Synthetic oligonucleotide
  Antisense strand to SEQ ID NO: 853772
augcugaccaggaauaucu

SEQ ID NO: 853774 - RNA, 19 nt, Artificial Sequence
  Description of Artificial Sequence: Synthetic oligonucleotide
  Sense strand starting at position 2760 of SEQ ID NO: 588275
auauauuaucucugugugu

SEQ ID NO: 853775 - RNA, 19 nt, Artificial Sequence
  Description of Artificial Sequence: Synthetic oligonucleotide
  Antisense strand to SEQ ID NO: 853774
acacacagagauaauauau

SEQ ID NO: 853776 - RNA, 19 nt, Artificial Sequence
  Description of Artificial Sequence: Synthetic oligonucleotide
  Sense strand starting at position 2900 of SEQ ID NO: 588275
ucaaccauccacuggguaa

SEQ ID NO: 853777 - RNA, 19 nt, Artificial Sequence
  Description of Artificial Sequence: Synthetic oligonucleotide
  Antisense strand to SEQ ID NO: 853776
uuacccaguggaugguuga

SEQ ID NO: 853778 - RNA, 19 nt, Artificial Sequence
  Description of Artificial Sequence: Synthetic oligonucleotide
  Sense strand starting at position 2940 of SEQ ID NO: 588275
gugugucacuucccaggaa

SEQ ID NO: 853779 - RNA, 19 nt, Artificial Sequence
  Description of Artificial Sequence: Synthetic oligonucleotide
  Antisense strand to SEQ ID NO: 853778
uuccugggaagugacacac

SEQ ID NO: 853780 - RNA, 19 nt, Artificial Sequence
  Description of Artificial Sequence: Synthetic oligonucleotide
  Sense strand starting at position 2943 of SEQ ID NO: 588275
ugucacuucccaggaaauc

SEQ ID NO: 853781 - RNA, 19 nt, Artificial Sequence
  Description of Artificial Sequence: Synthetic oligonucleotide
  Antisense strand to SEQ ID NO: 853780
gauuuccugggaagugaca

SEQ ID NO: 853782 - RNA, 19 nt, Artificial Sequence
  Description of Artificial Sequence: Synthetic oligonucleotide
  Sense strand starting at position 2972 of SEQ ID NO: 588275
gucagugucccagugcuca

SEQ ID NO: 853783 - RNA, 19 nt, Artificial Sequence
  Description of Artificial Sequence: Synthetic oligonucleotide
  Antisense strand to SEQ ID NO: 853782
ugagcacugggacacugac

SEQ ID NO: 853784 - RNA, 19 nt, Artificial Sequence
  Description of Artificial Sequence: Synthetic oligonucleotide
  Sense strand starting at position 3101 of SEQ ID NO: 588275
ugugauuuccguuggaacu

SEQ ID NO: 853785 - RNA, 19 nt, Artificial Sequence
  Description of Artificial Sequence: Synthetic oligonucleotide
  Antisense strand to SEQ ID NO: 853784
aguuccaacggaaaucaca

SEQ ID NO: 853786 - RNA, 19 nt, Artificial Sequence
  Description of Artificial Sequence: Synthetic oligonucleotide
  Sense strand starting at position 3102 of SEQ ID NO: 588275
gugauuuccguuggaacug

SEQ ID NO: 853787 - RNA, 19 nt, Artificial Sequence
  Description of Artificial Sequence: Synthetic oligonucleotide
  Antisense strand to SEQ ID NO: 853786
caguuccaacggaaaucac

SEQ ID NO: 853788 - RNA, 19 nt, Artificial Sequence
  Description of Artificial Sequence: Synthetic oligonucleotide
  Sense strand starting at position 3111 of SEQ ID NO: 588275
guuggaacugcucaacucu

SEQ ID NO: 853789 - RNA, 19 nt, Artificial Sequence
  Description of Artificial Sequence: Synthetic oligonucleotide
  Antisense strand to SEQ ID NO: 853788
agaguugagcaguuccaac

SEQ ID NO: 853790 - RNA, 19 nt, Artificial Sequence
  Description of Artificial Sequence: Synthetic oligonucleotide
  Sense strand starting at position 3148 of SEQ ID NO: 588275
agcuauagacaguaucuaa

SEQ ID NO: 853791 - RNA, 19 nt, Artificial Sequence
  Description of Artificial Sequence: Synthetic oligonucleotide
  Antisense strand to SEQ ID NO: 853790
uuagauacugucuauagcu

SEQ ID NO: 853792 - RNA, 19 nt, Artificial Sequence
  Description of Artificial Sequence: Synthetic oligonucleotide
  Sense strand starting at position 3169 of SEQ ID NO: 588275
gaaugagccuagcuguauu

SEQ ID NO: 853793 - RNA, 19 nt, Artificial Sequence
  Description of Artificial Sequence: Synthetic oligonucleotide
  Antisense strand to SEQ ID NO: 853792
aauacagcuaggcucauuc

SEQ ID NO: 853794 - RNA, 19 nt, Artificial Sequence
  Description of Artificial Sequence: Synthetic oligonucleotide
  Sense strand starting at position 3265 of SEQ ID NO: 588275
ccaugaguuccacauccca

SEQ ID NO: 853795 - RNA, 19 nt, Artificial Sequence
  Description of Artificial Sequence: Synthetic oligonucleotide
  Antisense strand to SEQ ID NO: 853794
ugggauguggaacucaugg

SEQ ID NO: 853796 - RNA, 19 nt, Artificial Sequence
  Description of Artificial Sequence: Synthetic oligonucleotide
  Sense strand starting at position 3299 of SEQ ID NO: 588275
uuggcaguauuugggaaga

SEQ ID NO: 853797 - RNA, 19 nt, Artificial Sequence
  Description of Artificial Sequence: Synthetic oligonucleotide
  Antisense strand to SEQ ID NO: 853796
ucuucccaaauacugccaa

SEQ ID NO: 853798 - RNA, 19 nt, Artificial Sequence
  Description of Artificial Sequence: Synthetic oligonucleotide
  Sense strand starting at position 3301 of SEQ ID NO: 588275
ggcaguauuugggaagaaa

SEQ ID NO: 853799 - RNA, 19 nt, Artificial Sequence
  Description of Artificial Sequence: Synthetic oligonucleotide
  Antisense strand to SEQ ID NO: 853798
uuucuucccaaauacugcc

SEQ ID NO: 853800 - RNA, 19 nt, Artificial Sequence
  Description of Artificial Sequence: Synthetic oligonucleotide
  Sense strand starting at position 3346 of SEQ ID NO: 588275
ugaauuugcugugcaccua

SEQ ID NO: 853801 - RNA, 19 nt, Artificial Sequence
  Description of Artificial Sequence: Synthetic oligonucleotide
  Antisense strand to SEQ ID NO: 853800
uaggugcacagcaaauuca

SEQ ID NO: 853802 - RNA, 19 nt, Artificial Sequence
  Description of Artificial Sequence: Synthetic oligonucleotide
  Sense strand starting at position 3359 of SEQ ID NO: 588275
caccuaguacuguguugaa

SEQ ID NO: 853803 - RNA, 19 nt, Artificial Sequence
  Description of Artificial Sequence: Synthetic oligonucleotide
  Antisense strand to SEQ ID NO: 853802
uucaacacaguacuaggug

SEQ ID NO: 853804 - RNA, 19 nt, Artificial Sequence
  Description of Artificial Sequence: Synthetic oligonucleotide
  Sense strand starting at position 3386 of SEQ ID NO: 588275
aggugaugcauaggcauua

SEQ ID NO: 853805 - RNA, 19 nt, Artificial Sequence
  Description of Artificial Sequence: Synthetic oligonucleotide
  Antisense strand to SEQ ID NO: 853804
uaaugccuaugcaucaccu

SEQ ID NO: 853806 - RNA, 19 nt, Artificial Sequence
  Description of Artificial Sequence: Synthetic oligonucleotide
  Sense strand starting at position 3387 of SEQ ID NO: 588275
ggugaugcauaggcauuau

SEQ ID NO: 853807 - RNA, 19 nt, Artificial Sequence
  Description of Artificial Sequence: Synthetic oligonucleotide
  Antisense strand to SEQ ID NO: 853806
auaaugccuaugcaucacc

SEQ ID NO: 853808 - RNA, 19 nt, Artificial Sequence
  Description of Artificial Sequence: Synthetic oligonucleotide
  Sense strand starting at position 3391 of SEQ ID NO: 588275
augcauaggcauuauauua

SEQ ID NO: 853809 - RNA, 19 nt, Artificial Sequence
  Description of Artificial Sequence: Synthetic oligonucleotide
  Antisense strand to SEQ ID NO: 853808
uaauauaaugccuaugcau

SEQ ID NO: 853810 - RNA, 19 nt, Artificial Sequence
  Description of Artificial Sequence: Synthetic oligonucleotide
  Sense strand starting at position 3399 of SEQ ID NO: 588275
gcauuauauuaggcauuau

SEQ ID NO: 853811 - RNA, 19 nt, Artificial Sequence
  Description of Artificial Sequence: Synthetic oligonucleotide
  Antisense strand to SEQ ID NO: 853810
auaaugccuaauauaaugc

SEQ ID NO: 853812 - RNA, 19 nt, Artificial Sequence
  Description of Artificial Sequence: Synthetic oligonucleotide
  Sense strand starting at position 3816 of SEQ ID NO: 588275
agccuaggaguuuaacauc

SEQ ID NO: 853813 - RNA, 19 nt, Artificial Sequence
  Description of Artificial Sequence: Synthetic oligonucleotide
  Antisense strand to SEQ ID NO: 853812
gauguuaaacuccuaggcu

SEQ ID NO: 853814 - RNA, 19 nt, Artificial Sequence
  Description of Artificial Sequence: Synthetic oligonucleotide
  Sense strand starting at position 29 of SEQ ID NO: 588276
gacagagcuguccagccau

SEQ ID NO: 853815 - RNA, 19 nt, Artificial Sequence
  Description of Artificial Sequence: Synthetic oligonucleotide
  Antisense strand to SEQ ID NO: 853814
auggcuggacagcucuguc

SEQ ID NO: 853816 - RNA, 19 nt, Artificial Sequence
  Description of Artificial Sequence: Synthetic oligonucleotide
  Sense strand starting at position 43 of SEQ ID NO: 588276
gccaucagcuguccugaga

SEQ ID NO: 853817 - RNA, 19 nt, Artificial Sequence
  Description of Artificial Sequence: Synthetic oligonucleotide
  Antisense strand to SEQ ID NO: 853816
ucucaggacagcugauggc

SEQ ID NO: 853818 - RNA, 19 nt, Artificial Sequence
  Description of Artificial Sequence: Synthetic oligonucleotide
  Sense strand starting at position 95 of SEQ ID NO: 588276
agcagagcuucuuucuguu

SEQ ID NO: 853819 - RNA, 19 nt, Artificial Sequence
  Description of Artificial Sequence: Synthetic oligonucleotide
  Antisense strand to SEQ ID NO: 853818
aacagaaagaagcucugcu

SEQ ID NO: 853820 - RNA, 19 nt, Artificial Sequence
  Description of Artificial Sequence: Synthetic oligonucleotide
  Sense strand starting at position 169 of SEQ ID NO: 588276
ucuccuuaucugggaguuu

SEQ ID NO: 853821 - RNA, 19 nt, Artificial Sequence
  Description of Artificial Sequence: Synthetic oligonucleotide
  Antisense strand to SEQ ID NO: 853820
aaacucccagauaaggaga

SEQ ID NO: 853822 - RNA, 19 nt, Artificial Sequence
  Description of Artificial Sequence: Synthetic oligonucleotide
  Sense strand starting at position 178 of SEQ ID NO: 588276
cugggaguuucgagcgaca

SEQ ID NO: 853823 - RNA, 19 nt, Artificial Sequence
  Description of Artificial Sequence: Synthetic oligonucleotide
  Antisense strand to SEQ ID NO: 853822
ugucgcucgaaacucccag

SEQ ID NO: 853824 - RNA, 19 nt, Artificial Sequence
  Description of Artificial Sequence: Synthetic oligonucleotide
  Sense strand starting at position 180 of SEQ ID NO: 588276
gggaguuucgagcgacaag

SEQ ID NO: 853825 - RNA, 19 nt, Artificial Sequence
  Description of Artificial Sequence: Synthetic oligonucleotide
  Antisense strand to SEQ ID NO: 853824
cuugucgcucgaaacuccc

SEQ ID NO: 853826 - RNA, 19 nt, Artificial Sequence
  Description of Artificial Sequence: Synthetic oligonucleotide
  Sense strand starting at position 377 of SEQ ID NO: 588276
gcugaagcucuguaacucu

SEQ ID NO: 853827 - RNA, 19 nt, Artificial Sequence
  Description of Artificial Sequence: Synthetic oligonucleotide
  Antisense strand to SEQ ID NO: 853826
agaguuacagagcuucagc

SEQ ID NO: 853828 - RNA, 19 nt, Artificial Sequence
  Description of Artificial Sequence: Synthetic oligonucleotide
  Sense strand starting at position 577 of SEQ ID NO: 588276
cccagacagcgucacuuau

SEQ ID NO: 853829 - RNA, 19 nt, Artificial Sequence
  Description of Artificial Sequence: Synthetic oligonucleotide
  Antisense strand to SEQ ID NO: 853828
auaagugacgcugucuggg

SEQ ID NO: 853830 - RNA, 19 nt, Artificial Sequence
  Description of Artificial Sequence: Synthetic oligonucleotide
  Sense strand starting at position 647 of SEQ ID NO: 588276
cagggucaucagggcuaaa

SEQ ID NO: 853831 - RNA, 19 nt, Artificial Sequence
  Description of Artificial Sequence: Synthetic oligonucleotide
  Antisense strand to SEQ ID NO: 853830
uuuagcccugaugacccug

SEQ ID NO: 853832 - RNA, 19 nt, Artificial Sequence
  Description of Artificial Sequence: Synthetic oligonucleotide
  Sense strand starting at position 693 of SEQ ID NO: 588276
auggaaaucugggaaguca

SEQ ID NO: 853833 - RNA, 19 nt, Artificial Sequence
  Description of Artificial Sequence: Synthetic oligonucleotide
  Antisense strand to SEQ ID NO: 853832
ugacuucccagauuuccau

SEQ ID NO: 853834 - RNA, 19 nt, Artificial Sequence
  Description of Artificial Sequence: Synthetic oligonucleotide
  Sense strand starting at position 973 of SEQ ID NO: 588276
gaggcaucaaaguguguaa

SEQ ID NO: 853835 - RNA, 19 nt, Artificial Sequence
  Description of Artificial Sequence: Synthetic oligonucleotide
  Antisense strand to SEQ ID NO: 853834
uuacacacuuugaugccuc

SEQ ID NO: 853836 - RNA, 19 nt, Artificial Sequence
  Description of Artificial Sequence: Synthetic oligonucleotide
  Sense strand starting at position 975 of SEQ ID NO: 588276
ggcaucaaaguguguaacu

SEQ ID NO: 853837 - RNA, 19 nt, Artificial Sequence
  Description of Artificial Sequence: Synthetic oligonucleotide
  Antisense strand to SEQ ID NO: 853836
aguuacacacuuugaugcc

SEQ ID NO: 853838 - RNA, 19 nt, Artificial Sequence
  Description of Artificial Sequence: Synthetic oligonucleotide
  Sense strand starting at position 1050 of SEQ ID NO: 588276
ggacauugagccugggaaa

SEQ ID NO: 853839 - RNA, 19 nt, Artificial Sequence
  Description of Artificial Sequence: Synthetic oligonucleotide
  Antisense strand to SEQ ID NO: 853838
uuucccaggcucaaugucc

SEQ ID NO: 853840 - RNA, 19 nt, Artificial Sequence
  Description of Artificial Sequence: Synthetic oligonucleotide
  Sense strand starting at position 1051 of SEQ ID NO: 588276
gacauugagccugggaaac

SEQ ID NO: 853841 - RNA, 19 nt, Artificial Sequence
  Description of Artificial Sequence: Synthetic oligonucleotide
  Antisense strand to SEQ ID NO: 853840
guuucccaggcucaauguc

SEQ ID NO: 853842 - RNA, 19 nt, Artificial Sequence
  Description of Artificial Sequence: Synthetic oligonucleotide
  Sense strand starting at position 1091 of SEQ ID NO: 588276
gcugguaucgaaggaagaa

SEQ ID NO: 853843 - RNA, 19 nt, Artificial Sequence
  Description of Artificial Sequence: Synthetic oligonucleotide
  Antisense strand to SEQ ID NO: 853842
uucuuccuucgauaccagc

SEQ ID NO: 853844 - RNA, 19 nt, Artificial Sequence
  Description of Artificial Sequence: Synthetic oligonucleotide
  Sense strand starting at position 1737 of SEQ ID NO: 588276
gcuuguuaacauggagaua

SEQ ID NO: 853845 - RNA, 19 nt, Artificial Sequence
  Description of Artificial Sequence: Synthetic oligonucleotide
  Antisense strand to SEQ ID NO: 853844
uaucuccauguuaacaagc

SEQ ID NO: 853846 - RNA, 19 nt, Artificial Sequence
  Description of Artificial Sequence: Synthetic oligonucleotide
  Sense strand starting at position 2006 of SEQ ID NO: 588276
ggcacuucugcccgcaaga

SEQ ID NO: 853847 - RNA, 19 nt, Artificial Sequence
  Description of Artificial Sequence: Synthetic oligonucleotide
  Antisense strand to SEQ ID NO: 853846
ucuugcgggcagaagugcc

SEQ ID NO: 853848 - RNA, 19 nt, Artificial Sequence
  Description of Artificial Sequence: Synthetic oligonucleotide
  Sense strand starting at position 2232 of SEQ ID NO: 588276
gugauucugucucuacaaa

SEQ ID NO: 853849 - RNA, 19 nt, Artificial Sequence
  Description of Artificial Sequence: Synthetic oligonucleotide
  Antisense strand to SEQ ID NO: 853848
uuuguagagacagaaucac

SEQ ID NO: 853850 - RNA, 19 nt, Artificial Sequence
  Description of Artificial Sequence: Synthetic oligonucleotide
  Sense strand starting at position 2292 of SEQ ID NO: 588276
uagaguuucugauucggca

SEQ ID NO: 853851 - RNA, 19 nt, Artificial Sequence
  Description of Artificial Sequence: Synthetic oligonucleotide
  Antisense strand to SEQ ID NO: 853850
ugccgaaucagaaacucua

SEQ ID NO: 853852 - RNA, 19 nt, Artificial Sequence
  Description of Artificial Sequence: Synthetic oligonucleotide
  Sense strand starting at position 2378 of SEQ ID NO: 588276
gggccacucuuugagaauc

SEQ ID NO: 853853 - RNA, 19 nt, Artificial Sequence
  Description of Artificial Sequence: Synthetic oligonucleotide
  Antisense strand to SEQ ID NO: 853852
gauucucaaagaguggccc

SEQ ID NO: 853854 - RNA, 19 nt, Artificial Sequence
  Description of Artificial Sequence: Synthetic oligonucleotide
  Sense strand starting at position 2405 of SEQ ID NO: 588276
acagcccagcucuaugauu

SEQ ID NO: 853855 - RNA, 19 nt, Artificial Sequence
  Description of Artificial Sequence: Synthetic oligonucleotide
  Antisense strand to SEQ ID NO: 853854
aaucauagagcugggcugu

SEQ ID NO: 853856 - RNA, 19 nt, Artificial Sequence
  Description of Artificial Sequence: Synthetic oligonucleotide
  Sense strand starting at position 2423 of SEQ ID NO: 588276
ucacaacuaucgcucaguu

SEQ ID NO: 853857 - RNA, 19 nt, Artificial Sequence
  Description of Artificial Sequence: Synthetic oligonucleotide
  Antisense strand to SEQ ID NO: 853856
aacugagcgauaguuguga

SEQ ID NO: 853858 - RNA, 19 nt, Artificial Sequence
  Description of Artificial Sequence: Synthetic oligonucleotide
  Sense strand starting at position 2425 of SEQ ID NO: 588276
acaacuaucgcucaguuua

SEQ ID NO: 853859 - RNA, 19 nt, Artificial Sequence
  Description of Artificial Sequence: Synthetic oligonucleotide
  Antisense strand to SEQ ID NO: 853858
uaaacugagcgauaguugu

SEQ ID NO: 853860 - RNA, 19 nt, Artificial Sequence
  Description of Artificial Sequence: Synthetic oligonucleotide
  Sense strand starting at position 2468 of SEQ ID NO: 588276
ggaggauuaucuccacuuc

SEQ ID NO: 853861 - RNA, 19 nt, Artificial Sequence
  Description of Artificial Sequence: Synthetic oligonucleotide
  Antisense strand to SEQ ID NO: 853860
gaaguggagauaauccucc

SEQ ID NO: 853862 - RNA, 19 nt, Artificial Sequence
  Description of Artificial Sequence: Synthetic oligonucleotide
  Sense strand starting at position 2636 of SEQ ID NO: 588276
uuggcuugcuuucuuaagu

SEQ ID NO: 853863 - RNA, 19 nt, Artificial Sequence
  Description of Artificial Sequence: Synthetic oligonucleotide
  Antisense strand to SEQ ID NO: 853862
acuuaagaaagcaagccaa

SEQ ID NO: 853864 - RNA, 19 nt, Artificial Sequence
  Description of Artificial Sequence: Synthetic oligonucleotide
  Sense strand starting at position 2768 of SEQ ID NO: 588276
uugcgucugcugucccaua

SEQ ID NO: 853865 - RNA, 19 nt, Artificial Sequence
  Description of Artificial Sequence: Synthetic oligonucleotide
  Antisense strand to SEQ ID NO: 853864
uaugggacagcagacgcaa

SEQ ID NO: 853866 - RNA, 19 nt, Artificial Sequence
  Description of Artificial Sequence: Synthetic oligonucleotide
  Sense strand starting at position 2801 of SEQ ID NO: 588276
caguacacgugcuuaagau

SEQ ID NO: 853867 - RNA, 19 nt, Artificial Sequence
  Description of Artificial Sequence: Synthetic oligonucleotide
  Antisense strand to SEQ ID NO: 853866
aucuuaagcacguguacug

SEQ ID NO: 853868 - RNA, 19 nt, Artificial Sequence
  Description of Artificial Sequence: Synthetic oligonucleotide
  Sense strand starting at position 2802 of SEQ ID NO: 588276
aguacacgugcuuaagaua

SEQ ID NO: 853869 - RNA, 19 nt, Artificial Sequence
  Description of Artificial Sequence: Synthetic oligonucleotide
  Antisense strand to SEQ ID NO: 853868
uaucuuaagcacguguacu

SEQ ID NO: 853870 - RNA, 19 nt, Artificial Sequence
  Description of Artificial Sequence: Synthetic oligonucleotide
  Sense strand starting at position 2899 of SEQ ID NO: 588276
guugcugugagaugagcaa

SEQ ID NO: 853871 - RNA, 19 nt, Artificial Sequence
  Description of Artificial Sequence: Synthetic oligonucleotide
  Antisense strand to SEQ ID NO: 853870
uugcucaucucacagcaac

SEQ ID NO: 853872 - RNA, 19 nt, Artificial Sequence
  Description of Artificial Sequence: Synthetic oligonucleotide
  Sense strand starting at position 3284 of SEQ ID NO: 588276
augguaaaguucucaauaa

SEQ ID NO: 853873 - RNA, 19 nt, Artificial Sequence
  Description of Artificial Sequence: Synthetic oligonucleotide
  Antisense strand to SEQ ID NO: 853872
uuauugagaacuuuaccau

SEQ ID NO: 853874 - RNA, 19 nt, Artificial Sequence
  Description of Artificial Sequence: Synthetic oligonucleotide
  Sense strand starting at position 3285 of SEQ ID NO: 588276
ugguaaaguucucaauaaa

SEQ ID NO: 853875 - RNA, 19 nt, Artificial Sequence
  Description of Artificial Sequence: Synthetic oligonucleotide
  Antisense strand to SEQ ID NO: 853874
uuuauugagaacuuuacca

SEQ ID NO: 853876 - RNA, 19 nt, Artificial Sequence
  Description of Artificial Sequence: Synthetic oligonucleotide
  Sense strand starting at position 3326 of SEQ ID NO: 588276
gcaagcauuugaguagcuu

SEQ ID NO: 853877 - RNA, 19 nt, Artificial Sequence
  Description of Artificial Sequence: Synthetic oligonucleotide
  Antisense strand to SEQ ID NO: 853876
aagcuacucaaaugcuugc

SEQ ID NO: 853878 - RNA, 19 nt, Artificial Sequence
  Description of Artificial Sequence: Synthetic oligonucleotide
  Sense strand starting at position 3334 of SEQ ID NO: 588276
uugaguagcuuuccuaaac

SEQ ID NO: 853879 - RNA, 19 nt, Artificial Sequence
  Description of Artificial Sequence: Synthetic oligonucleotide
  Antisense strand to SEQ ID NO: 853878
guuuaggaaagcuacucaa

SEQ ID NO: 853880 - RNA, 19 nt, Artificial Sequence
  Description of Artificial Sequence: Synthetic oligonucleotide
  Sense strand starting at position 3399 of SEQ ID NO: 588276
gcaccuaccuuauagagga

SEQ ID NO: 853881 - RNA, 19 nt, Artificial Sequence
  Description of Artificial Sequence: Synthetic oligonucleotide
  Antisense strand to SEQ ID NO: 853880
uccucuauaagguaggugc

SEQ ID NO: 853882 - RNA, 19 nt, Artificial Sequence
  Description of Artificial Sequence: Synthetic oligonucleotide
  Sense strand starting at position 3459 of SEQ ID NO: 588276
agugcucagccagguguua

SEQ ID NO: 853883 - RNA, 19 nt, Artificial Sequence
  Description of Artificial Sequence: Synthetic oligonucleotide
  Antisense strand to SEQ ID NO: 853882
uaacaccuggcugagcacu

SEQ ID NO: 853884 - RNA, 19 nt, Artificial Sequence
  Description of Artificial Sequence: Synthetic oligonucleotide
  Sense strand starting at position 3470 of SEQ ID NO: 588276
agguguuagucuccuacau

SEQ ID NO: 853885 - RNA, 19 nt, Artificial Sequence
  Description of Artificial Sequence: Synthetic oligonucleotide
  Antisense strand to SEQ ID NO: 853884
auguaggagacuaacaccu

SEQ ID NO: 853886 - RNA, 19 nt, Artificial Sequence
  Description of Artificial Sequence: Synthetic oligonucleotide
  Sense strand starting at position 3474 of SEQ ID NO: 588276
guuagucuccuacauguau

SEQ ID NO: 853887 - RNA, 19 nt, Artificial Sequence
  Description of Artificial Sequence: Synthetic oligonucleotide
  Antisense strand to SEQ ID NO: 853886
auacauguaggagacuaac

SEQ ID NO: 853888 - RNA, 19 nt, Artificial Sequence
  Description of Artificial Sequence: Synthetic oligonucleotide
  Sense strand starting at position 3600 of SEQ ID NO: 588276
aaaucuuggcagugauggu

SEQ ID NO: 853889 - RNA, 19 nt, Artificial Sequence
  Description of Artificial Sequence: Synthetic oligonucleotide
  Antisense strand to SEQ ID NO: 853888
accaucacugccaagauuu

SEQ ID NO: 853890 - RNA, 19 nt, Artificial Sequence
  Description of Artificial Sequence: Synthetic oligonucleotide
  Sense strand starting at position 3604 of SEQ ID NO: 588276
cuuggcagugauggugaua

SEQ ID NO: 853891 - RNA, 19 nt, Artificial Sequence
  Description of Artificial Sequence: Synthetic oligonucleotide
  Antisense strand to SEQ ID NO: 853890
uaucaccaucacugccaag

SEQ ID NO: 853892 - RNA, 19 nt, Artificial Sequence
  Description of Artificial Sequence: Synthetic oligonucleotide
  Sense strand starting at position 3952 of SEQ ID NO: 588276
auuauagcagugugagagu

SEQ ID NO: 853893 - RNA, 19 nt, Artificial Sequence
  Description of Artificial Sequence: Synthetic oligonucleotide
  Antisense strand to SEQ ID NO: 853892
acucucacacugcuauaau

SEQ ID NO: 853894 - RNA, 19 nt, Artificial Sequence
  Description of Artificial Sequence: Synthetic oligonucleotide
  Sense strand starting at position 87 of SEQ ID NO: 588277
agauuauacaugugucgag

SEQ ID NO: 853895 - RNA, 19 nt, Artificial Sequence
  Description of Artificial Sequence: Synthetic oligonucleotide
  Antisense strand to SEQ ID NO: 853894
cucgacacauguauaaucu

SEQ ID NO: 853896 - RNA, 19 nt, Artificial Sequence
  Description of Artificial Sequence: Synthetic oligonucleotide
  Sense strand starting at position 88 of SEQ ID NO: 588277
gauuauacaugugucgaga

SEQ ID NO: 853897 - RNA, 19 nt, Artificial Sequence
  Description of Artificial Sequence: Synthetic oligonucleotide
  Antisense strand to SEQ ID NO: 853896
ucucgacacauguauaauc

SEQ ID NO: 853898 - RNA, 19 nt, Artificial Sequence
  Description of Artificial Sequence: Synthetic oligonucleotide
  Sense strand starting at position 91 of SEQ ID NO: 588277
uauacaugugucgagauga

SEQ ID NO: 853899 - RNA, 19 nt, Artificial Sequence
  Description of Artificial Sequence: Synthetic oligonucleotide
  Antisense strand to SEQ ID NO: 853898
ucaucucgacacauguaua

SEQ ID NO: 853900 - RNA, 19 nt, Artificial Sequence
  Description of Artificial Sequence: Synthetic oligonucleotide
  Sense strand starting at position 331 of SEQ ID NO: 588277
uugaauaccugugaugaca

SEQ ID NO: 853901 - RNA, 19 nt, Artificial Sequence
  Description of Artificial Sequence: Synthetic oligonucleotide
  Antisense strand to SEQ ID NO: 853900
ugucaucacagguauucaa

SEQ ID NO: 853902 - RNA, 19 nt, Artificial Sequence
  Description of Artificial Sequence: Synthetic oligonucleotide
  Sense strand starting at position 333 of SEQ ID NO: 588277
gaauaccugugaugacaaa

SEQ ID NO: 853903 - RNA, 19 nt, Artificial Sequence
  Description of Artificial Sequence: Synthetic oligonucleotide
  Antisense strand to SEQ ID NO: 853902
uuugucaucacagguauuc

SEQ ID NO: 853904 - RNA, 19 nt, Artificial Sequence
  Description of Artificial Sequence: Synthetic oligonucleotide
  Sense strand starting at position 455 of SEQ ID NO: 588277
agaagugauuccuagaaac

SEQ ID NO: 853905 - RNA, 19 nt, Artificial Sequence
  Description of Artificial Sequence: Synthetic oligonucleotide
  Antisense strand to SEQ ID NO: 853904
guuucuaggaaucacuucu

SEQ ID NO: 853906 - RNA, 19 nt, Artificial Sequence
  Description of Artificial Sequence: Synthetic oligonucleotide
  Sense strand starting at position 828 of SEQ ID NO: 588277
gguuguuuguguguccaga

SEQ ID NO: 853907 - RNA, 19 nt, Artificial Sequence
  Description of Artificial Sequence: Synthetic oligonucleotide
  Antisense strand to SEQ ID NO: 853906
ucuggacacacaaacaacc

SEQ ID NO: 853908 - RNA, 19 nt, Artificial Sequence
  Description of Artificial Sequence: Synthetic oligonucleotide
  Sense strand starting at position 880 of SEQ ID NO: 588277
cagauuccagcuugguuua

SEQ ID NO: 853909 - RNA, 19 nt, Artificial Sequence
  Description of Artificial Sequence: Synthetic oligonucleotide
  Antisense strand to SEQ ID NO: 853908
uaaaccaagcuggaaucug

SEQ ID NO: 853910 - RNA, 19 nt, Artificial Sequence
  Description of Artificial Sequence: Synthetic oligonucleotide
  Sense strand starting at position 882 of SEQ ID NO: 588277
gauuccagcuugguuuaca

SEQ ID NO: 853911 - RNA, 19 nt, Artificial Sequence
  Description of Artificial Sequence: Synthetic oligonucleotide
  Antisense strand to SEQ ID NO: 853910
uguaaaccaagcuggaauc

SEQ ID NO: 853912 - RNA, 19 nt, Artificial Sequence
  Description of Artificial Sequence: Synthetic oligonucleotide
  Sense strand starting at position 883 of SEQ ID NO: 588277
auuccagcuugguuuacaa

SEQ ID NO: 853913 - RNA, 19 nt, Artificial Sequence
  Description of Artificial Sequence: Synthetic oligonucleotide
  Antisense strand to SEQ ID NO: 853912
uuguaaaccaagcuggaau

SEQ ID NO: 853914 - RNA, 19 nt, Artificial Sequence
  Description of Artificial Sequence: Synthetic oligonucleotide
  Sense strand starting at position 991 of SEQ ID NO: 588277
ggucuucuuuaccuaggga

SEQ ID NO: 853915 - RNA, 19 nt, Artificial Sequence
  Description of Artificial Sequence: Synthetic oligonucleotide
  Antisense strand to SEQ ID NO: 853914
ucccuagguaaagaagacc

SEQ ID NO: 853916 - RNA, 19 nt, Artificial Sequence
  Description of Artificial Sequence: Synthetic oligonucleotide
  Sense strand starting at position 1143 of SEQ ID NO: 588277
ugugucacaccuuaucaca

SEQ ID NO: 853917 - RNA, 19 nt, Artificial Sequence
  Description of Artificial Sequence: Synthetic oligonucleotide
  Antisense strand to SEQ ID NO: 853916
ugugauaaggugugacaca

SEQ ID NO: 853918 - RNA, 19 nt, Artificial Sequence
  Description of Artificial Sequence: Synthetic oligonucleotide
  Sense strand starting at position 1220 of SEQ ID NO: 588277
ggagcuauccuauaccacu

SEQ ID NO: 853919 - RNA, 19 nt, Artificial Sequence
  Description of Artificial Sequence: Synthetic oligonucleotide
  Antisense strand to SEQ ID NO: 853918
agugguauaggauagcucc

SEQ ID NO: 853920 - RNA, 19 nt, Artificial Sequence
  Description of Artificial Sequence: Synthetic oligonucleotide
  Sense strand starting at position 1470 of SEQ ID NO: 588277
ggagggucccgacaagagu

SEQ ID NO: 853921 - RNA, 19 nt, Artificial Sequence
  Description of Artificial Sequence: Synthetic oligonucleotide
  Antisense strand to SEQ ID NO: 853920
acucuugucgggacccucc

SEQ ID NO: 853922 - RNA, 19 nt, Artificial Sequence
  Description of Artificial Sequence: Synthetic oligonucleotide
  Sense strand starting at position 1481 of SEQ ID NO: 588277
acaagagucccauggagca

SEQ ID NO: 853923 - RNA, 19 nt, Artificial Sequence
  Description of Artificial Sequence: Synthetic oligonucleotide
  Antisense strand to SEQ ID NO: 853922
ugcuccaugggacucuugu

SEQ ID NO: 853924 - RNA, 19 nt, Artificial Sequence
  Description of Artificial Sequence: Synthetic oligonucleotide
  Sense strand starting at position 2263 of SEQ ID NO: 588277
cguggugugggaugaggaa

SEQ ID NO: 853925 - RNA, 19 nt, Artificial Sequence
  Description of Artificial Sequence: Synthetic oligonucleotide
  Antisense strand to SEQ ID NO: 853924
uuccucaucccacaccacg

SEQ ID NO: 853926 - RNA, 19 nt, Artificial Sequence
  Description of Artificial Sequence: Synthetic oligonucleotide
  Sense strand starting at position 2340 of SEQ ID NO: 588277
gccucuuaaggcuguuuga

SEQ ID NO: 853927 - RNA, 19 nt, Artificial Sequence
  Description of Artificial Sequence: Synthetic oligonucleotide
  Antisense strand to SEQ ID NO: 853926
ucaaacagccuuaagaggc

SEQ ID NO: 853928 - RNA, 19 nt, Artificial Sequence
  Description of Artificial Sequence: Synthetic oligonucleotide
  Sense strand starting at position 2353 of SEQ ID NO: 588277
guuugagcccuggauguga

SEQ ID NO: 853929 - RNA, 19 nt, Artificial Sequence
  Description of Artificial Sequence: Synthetic oligonucleotide
  Antisense strand to SEQ ID NO: 853928
ucacauccagggcucaaac

SEQ ID NO: 853930 - RNA, 19 nt, Artificial Sequence
  Description of Artificial Sequence: Synthetic oligonucleotide
  Sense strand starting at position 2693 of SEQ ID NO: 588277
cuaugagguugauaccauu

SEQ ID NO: 853931 - RNA, 19 nt, Artificial Sequence
  Description of Artificial Sequence: Synthetic oligonucleotide
  Antisense strand to SEQ ID NO: 853930
aaugguaucaaccucauag

SEQ ID NO: 853932 - RNA, 19 nt, Artificial Sequence
  Description of Artificial Sequence: Synthetic oligonucleotide
  Sense strand starting at position 2696 of SEQ ID NO: 588277
ugagguugauaccauuacu

SEQ ID NO: 853933 - RNA, 19 nt, Artificial Sequence
  Description of Artificial Sequence: Synthetic oligonucleotide
  Antisense strand to SEQ ID NO: 853932
aguaaugguaucaaccuca

SEQ ID NO: 853934 - RNA, 19 nt, Artificial Sequence
  Description of Artificial Sequence: Synthetic oligonucleotide
  Sense strand starting at position 2699 of SEQ ID NO: 588277
gguugauaccauuacucac

SEQ ID NO: 853935 - RNA, 19 nt, Artificial Sequence
  Description of Artificial Sequence: Synthetic oligonucleotide
  Antisense strand to SEQ ID NO: 853934
gugaguaaugguaucaacc

SEQ ID NO: 853936 - RNA, 19 nt, Artificial Sequence
  Description of Artificial Sequence: Synthetic oligonucleotide
  Sense strand starting at position 2748 of SEQ ID NO: 588277
gauauuaaguaccuagguu

SEQ ID NO: 853937 - RNA, 19 nt, Artificial Sequence
  Description of Artificial Sequence: Synthetic oligonucleotide
  Antisense strand to SEQ ID NO: 853936
aaccuagguacuuaauauc

SEQ ID NO: 853938 - RNA, 19 nt, Artificial Sequence
  Description of Artificial Sequence: Synthetic oligonucleotide
  Sense strand starting at position 2752 of SEQ ID NO: 588277
uuaaguaccuagguuaaga

SEQ ID NO: 853939 - RNA, 19 nt, Artificial Sequence
  Description of Artificial Sequence: Synthetic oligonucleotide
  Antisense strand to SEQ ID NO: 853938
ucuuaaccuagguacuuaa

SEQ ID NO: 853940 - RNA, 19 nt, Artificial Sequence
  Description of Artificial Sequence: Synthetic oligonucleotide
  Sense strand starting at position 2765 of SEQ ID NO: 588277
uuaagaucacccggcuagu

SEQ ID NO: 853941 - RNA, 19 nt, Artificial Sequence
  Description of Artificial Sequence: Synthetic oligonucleotide
  Antisense strand to SEQ ID NO: 853940
acuagccgggugaucuuaa

SEQ ID NO: 853942 - RNA, 19 nt, Artificial Sequence
  Description of Artificial Sequence: Synthetic oligonucleotide
  Sense strand starting at position 2939 of SEQ ID NO: 588277
auaguuguggaguggauaa

SEQ ID NO: 853943 - RNA, 19 nt, Artificial Sequence
  Description of Artificial Sequence: Synthetic oligonucleotide
  Antisense strand to SEQ ID NO: 853942
uuauccacuccacaacuau

SEQ ID NO: 853944 - RNA, 19 nt, Artificial Sequence
  Description of Artificial Sequence: Synthetic oligonucleotide
  Sense strand starting at position 2977 of SEQ ID NO: 588277
uuuacauaucuguaucguu

SEQ ID NO: 853945 - RNA, 19 nt, Artificial Sequence
  Description of Artificial Sequence: Synthetic oligonucleotide
  Antisense strand to SEQ ID NO: 853944
aacgauacagauauguaaa

SEQ ID NO: 853946 - RNA, 19 nt, Artificial Sequence
  Description of Artificial Sequence: Synthetic oligonucleotide
  Sense strand starting at position 2985 of SEQ ID NO: 588277
ucuguaucguuucuucuaa

SEQ ID NO: 853947 - RNA, 19 nt, Artificial Sequence
  Description of Artificial Sequence: Synthetic oligonucleotide
  Antisense strand to SEQ ID NO: 853946
uuagaagaaacgauacaga

SEQ ID NO: 853948 - RNA, 19 nt, Artificial Sequence
  Description of Artificial Sequence: Synthetic oligonucleotide
  Sense strand starting at position 2992 of SEQ ID NO: 588277
cguuucuucuaagcuucua

SEQ ID NO: 853949 - RNA, 19 nt, Artificial Sequence
  Description of Artificial Sequence: Synthetic oligonucleotide
  Antisense strand to SEQ ID NO: 853948
uagaagcuuagaagaaacg

SEQ ID NO: 853950 - RNA, 19 nt, Artificial Sequence
  Description of Artificial Sequence: Synthetic oligonucleotide
  Sense strand starting at position 3018 of SEQ ID NO: 588277
uggcuuuauuuagccacua

SEQ ID NO: 853951 - RNA, 19 nt, Artificial Sequence
  Description of Artificial Sequence: Synthetic oligonucleotide
  Antisense strand to SEQ ID NO: 853950
uaguggcuaaauaaagcca

SEQ ID NO: 853952 - RNA, 19 nt, Artificial Sequence
  Description of Artificial Sequence: Synthetic oligonucleotide
  Sense strand starting at position 3019 of SEQ ID NO: 588277
ggcuuuauuuagccacuau

SEQ ID NO: 853953 - RNA, 19 nt, Artificial Sequence
  Description of Artificial Sequence: Synthetic oligonucleotide
  Antisense strand to SEQ ID NO: 853952
auaguggcuaaauaaagcc

SEQ ID NO: 853954 - RNA, 19 nt, Artificial Sequence
  Description of Artificial Sequence: Synthetic oligonucleotide
  Sense strand starting at position 3116 of SEQ ID NO: 588277
gaaugugacucagcuucca

SEQ ID NO: 853955 - RNA, 19 nt, Artificial Sequence
  Description of Artificial Sequence: Synthetic oligonucleotide
  Antisense strand to SEQ ID NO: 853954
uggaagcugagucacauuc

SEQ ID NO: 853956 - RNA, 19 nt, Artificial Sequence
  Description of Artificial Sequence: Synthetic oligonucleotide
  Sense strand starting at position 3292 of SEQ ID NO: 588277
ugguguuagcgugcaagag

SEQ ID NO: 853957 - RNA, 19 nt, Artificial Sequence
  Description of Artificial Sequence: Synthetic oligonucleotide
  Antisense strand to SEQ ID NO: 853956
cucuugcacgcuaacacca

SEQ ID NO: 853958 - RNA, 19 nt, Artificial Sequence
  Description of Artificial Sequence: Synthetic oligonucleotide
  Sense strand starting at position 3293 of SEQ ID NO: 588277
gguguuagcgugcaagagu

SEQ ID NO: 853959 - RNA, 19 nt, Artificial Sequence
  Description of Artificial Sequence: Synthetic oligonucleotide
  Antisense strand to SEQ ID NO: 853958
acucuugcacgcuaacacc

SEQ ID NO: 853960 - RNA, 19 nt, Artificial Sequence
  Description of Artificial Sequence: Synthetic oligonucleotide
  Sense strand starting at position 3304 of SEQ ID NO: 588277
gcaagaguuggguaucaag

SEQ ID NO: 853961 - RNA, 19 nt, Artificial Sequence
  Description of Artificial Sequence: Synthetic oligonucleotide
  Antisense strand to SEQ ID NO: 853960
cuugauacccaacucuugc

SEQ ID NO: 853962 - RNA, 19 nt, Artificial Sequence
  Description of Artificial Sequence: Synthetic oligonucleotide
  Sense strand starting at position 3649 of SEQ ID NO: 588277
aucagaacauugugggaau

SEQ ID NO: 853963 - RNA, 19 nt, Artificial Sequence
  Description of Artificial Sequence: Synthetic oligonucleotide
  Antisense strand to SEQ ID NO: 853962
auucccacaauguucugau

SEQ ID NO: 853964 - RNA, 19 nt, Artificial Sequence
  Description of Artificial Sequence: Synthetic oligonucleotide
  Sense strand starting at position 3652 of SEQ ID NO: 588277
agaacauugugggaauucu

SEQ ID NO: 853965 - RNA, 19 nt, Artificial Sequence
  Description of Artificial Sequence: Synthetic oligonucleotide
  Antisense strand to SEQ ID NO: 853964
agaauucccacaauguucu

SEQ ID NO: 853966 - RNA, 19 nt, Artificial Sequence
  Description of Artificial Sequence: Synthetic oligonucleotide
  Sense strand starting at position 3662 of SEQ ID NO: 588277
gggaauucuuuauaaucau

SEQ ID NO: 853967 - RNA, 19 nt, Artificial Sequence
  Description of Artificial Sequence: Synthetic oligonucleotide
  Antisense strand to SEQ ID NO: 853966
augauuauaaagaauuccc

SEQ ID NO: 853968 - RNA, 19 nt, Artificial Sequence
  Description of Artificial Sequence: Synthetic oligonucleotide
  Sense strand starting at position 3720 of SEQ ID NO: 588277
ccaugaucuuucccaggcu

SEQ ID NO: 853969 - RNA, 19 nt, Artificial Sequence
  Description of Artificial Sequence: Synthetic oligonucleotide
  Antisense strand to SEQ ID NO: 853968
agccugggaaagaucaugg

SEQ ID NO: 853970 - RNA, 19 nt, Artificial Sequence
  Description of Artificial Sequence: Synthetic oligonucleotide
  Sense strand starting at position 3723 of SEQ ID NO: 588277
ugaucuuucccaggcuaag

SEQ ID NO: 853971 - RNA, 19 nt, Artificial Sequence
  Description of Artificial Sequence: Synthetic oligonucleotide
  Antisense strand to SEQ ID NO: 853970
cuuagccugggaaagauca

SEQ ID NO: 853972 - RNA, 19 nt, Artificial Sequence
  Description of Artificial Sequence: Synthetic oligonucleotide
  Sense strand starting at position 3745 of SEQ ID NO: 588277
ucugaauaacuuuguuguu

SEQ ID NO: 853973 - RNA, 19 nt, Artificial Sequence
  Description of Artificial Sequence: Synthetic oligonucleotide
  Antisense strand to SEQ ID NO: 853972
aacaacaaaguuauucaga

SEQ ID NO: 853974 - RNA, 19 nt, Artificial Sequence
  Description of Artificial Sequence: Synthetic oligonucleotide
  Sense strand starting at position 311 of SEQ ID NO: 588278
ccuggaaaguucuuuccuu

SEQ ID NO: 853975 - RNA, 19 nt, Artificial Sequence
  Description of Artificial Sequence: Synthetic oligonucleotide
  Antisense strand to SEQ ID NO: 853974
aaggaaagaacuuuccagg

SEQ ID NO: 853976 - RNA, 19 nt, Artificial Sequence
  Description of Artificial Sequence: Synthetic oligonucleotide
  Sense strand starting at position 312 of SEQ ID NO: 588278
cuggaaaguucuuuccuuu

SEQ ID NO: 853977 - RNA, 19 nt, Artificial Sequence
  Description of Artificial Sequence: Synthetic oligonucleotide
  Antisense strand to SEQ ID NO: 853976
aaaggaaagaacuuuccag

SEQ ID NO: 853978 - RNA, 19 nt, Artificial Sequence
  Description of Artificial Sequence: Synthetic oligonucleotide
  Sense strand starting at position 390 of SEQ ID NO: 588278
gucagaaucugcgaagauc

SEQ ID NO: 853979 - RNA, 19 nt, Artificial Sequence
  Description of Artificial Sequence: Synthetic oligonucleotide
  Antisense strand to SEQ ID NO: 853978
gaucuucgcagauucugac

SEQ ID NO: 853980 - RNA, 19 nt, Artificial Sequence
  Description of Artificial Sequence: Synthetic oligonucleotide
  Sense strand starting at position 477 of SEQ ID NO: 588278
gggaucgguccugaaauua

SEQ ID NO: 853981 - RNA, 19 nt, Artificial Sequence
  Description of Artificial Sequence: Synthetic oligonucleotide
  Antisense strand to SEQ ID NO: 853980
uaauuucaggaccgauccc

SEQ ID NO: 853982 - RNA, 19 nt, Artificial Sequence
  Description of Artificial Sequence: Synthetic oligonucleotide
  Sense strand starting at position 489 of SEQ ID NO: 588278
gaaauuaggguuggugcaa

SEQ ID NO: 853983 - RNA, 19 nt, Artificial Sequence
  Description of Artificial Sequence: Synthetic oligonucleotide
  Antisense strand to SEQ ID NO: 853982
uugcaccaacccuaauuuc

SEQ ID NO: 853984 - RNA, 19 nt, Artificial Sequence
  Description of Artificial Sequence: Synthetic oligonucleotide
  Sense strand starting at position 797 of SEQ ID NO: 588278
ucggaugguccuggaggau

SEQ ID NO: 853985 - RNA, 19 nt, Artificial Sequence
  Description of Artificial Sequence: Synthetic oligonucleotide
  Antisense strand to SEQ ID NO: 853984
auccuccaggaccauccga

SEQ ID NO: 853986 - RNA, 19 nt, Artificial Sequence
  Description of Artificial Sequence: Synthetic oligonucleotide
  Sense strand starting at position 812 of SEQ ID NO: 588278
ggaugaucuagaggcuguu

SEQ ID NO: 853987 - RNA, 19 nt, Artificial Sequence
  Description of Artificial Sequence: Synthetic oligonucleotide
  Antisense strand to SEQ ID NO: 853986
aacagccucuagaucaucc

SEQ ID NO: 853988 - RNA, 19 nt, Artificial Sequence
  Description of Artificial Sequence: Synthetic oligonucleotide
  Sense strand starting at position 824 of SEQ ID NO: 588278
ggcuguuugugggauggau

SEQ ID NO: 853989 - RNA, 19 nt, Artificial Sequence
  Description of Artificial Sequence: Synthetic oligonucleotide
  Antisense strand to SEQ ID NO: 853988
auccaucccacaaacagcc

SEQ ID NO: 853990 - RNA, 19 nt, Artificial Sequence
  Description of Artificial Sequence: Synthetic oligonucleotide
  Sense strand starting at position 981 of SEQ ID NO: 588278
gcaacauaugcuuggauca

SEQ ID NO: 853991 - RNA, 19 nt, Artificial Sequence
  Description of Artificial Sequence: Synthetic oligonucleotide
  Antisense strand to SEQ ID NO: 853990
ugauccaagcauauguugc

SEQ ID NO: 853992 - RNA, 19 nt, Artificial Sequence
  Description of Artificial Sequence: Synthetic oligonucleotide
  Sense strand starting at position 1013 of SEQ ID NO: 588278
cugaaauuaggcuagcauc

SEQ ID NO: 853993 - RNA, 19 nt, Artificial Sequence
  Description of Artificial Sequence: Synthetic oligonucleotide
  Antisense strand to SEQ ID NO: 853992
gaugcuagccuaauuucag

SEQ ID NO: 853994 - RNA, 19 nt, Artificial Sequence
  Description of Artificial Sequence: Synthetic oligonucleotide
  Sense strand starting at position 1229 of SEQ ID NO: 588278
guguuucucuggccacaca

SEQ ID NO: 853995 - RNA, 19 nt, Artificial Sequence
  Description of Artificial Sequence: Synthetic oligonucleotide
  Antisense strand to SEQ ID NO: 853994
uguguggccagagaaacac

SEQ ID NO: 853996 - RNA, 19 nt, Artificial Sequence
  Description of Artificial Sequence: Synthetic oligonucleotide
  Sense strand starting at position 1256 of SEQ ID NO: 588278
cagggaccgucugauaaac

SEQ ID NO: 853997 - RNA, 19 nt, Artificial Sequence
  Description of Artificial Sequence: Synthetic oligonucleotide
  Antisense strand to SEQ ID NO: 853996
guuuaucagacggucccug

SEQ ID NO: 853998 - RNA, 19 nt, Artificial Sequence
  Description of Artificial Sequence: Synthetic oligonucleotide
  Sense strand starting at position 1258 of SEQ ID NO: 588278
gggaccgucugauaaacca

SEQ ID NO: 853999 - RNA, 19 nt, Artificial Sequence
  Description of Artificial Sequence: Synthetic oligonucleotide
  Antisense strand to SEQ ID NO: 853998
ugguuuaucagacgguccc

SEQ ID NO: 854000 - RNA, 19 nt, Artificial Sequence
  Description of Artificial Sequence: Synthetic oligonucleotide
  Sense strand starting at position 1327 of SEQ ID NO: 588278
gugcgacgggugugucaau

SEQ ID NO: 854001 - RNA, 19 nt, Artificial Sequence
  Description of Artificial Sequence: Synthetic oligonucleotide
  Antisense strand to SEQ ID NO: 854000
auugacacacccgucgcac

SEQ ID NO: 854002 - RNA, 19 nt, Artificial Sequence
  Description of Artificial Sequence: Synthetic oligonucleotide
  Sense strand starting at position 1334 of SEQ ID NO: 588278
gggugugucaaucggagaa

SEQ ID NO: 854003 - RNA, 19 nt, Artificial Sequence
  Description of Artificial Sequence: Synthetic oligonucleotide
  Antisense strand to SEQ ID NO: 854002
uucuccgauugacacaccc

SEQ ID NO: 854004 - RNA, 19 nt, Artificial Sequence
  Description of Artificial Sequence: Synthetic oligonucleotide
  Sense strand starting at position 1336 of SEQ ID NO: 588278
gugugucaaucggagaaua

SEQ ID NO: 854005 - RNA, 19 nt, Artificial Sequence
  Description of Artificial Sequence: Synthetic oligonucleotide
  Antisense strand to SEQ ID NO: 854004
uauucuccgauugacacac

SEQ ID NO: 854006 - RNA, 19 nt, Artificial Sequence
  Description of Artificial Sequence: Synthetic oligonucleotide
  Sense strand starting at position 1338 of SEQ ID NO: 588278
gugucaaucggagaauaac

SEQ ID NO: 854007 - RNA, 19 nt, Artificial Sequence
  Description of Artificial Sequence: Synthetic oligonucleotide
  Antisense strand to SEQ ID NO: 854006
guuauucuccgauugacac

SEQ ID NO: 854008 - RNA, 19 nt, Artificial Sequence
  Description of Artificial Sequence: Synthetic oligonucleotide
  Sense strand starting at position 1827 of SEQ ID NO: 588278
ggccaaggucgcugaguua

SEQ ID NO: 854009 - RNA, 19 nt, Artificial Sequence
  Description of Artificial Sequence: Synthetic oligonucleotide
  Antisense strand to SEQ ID NO: 854008
uaacucagcgaccuuggcc

SEQ ID NO: 854010 - RNA, 19 nt, Artificial Sequence
  Description of Artificial Sequence: Synthetic oligonucleotide
  Sense strand starting at position 2016 of SEQ ID NO: 588278
ggcggagucuccuugagga

SEQ ID NO: 854011 - RNA, 19 nt, Artificial Sequence
  Description of Artificial Sequence: Synthetic oligonucleotide
  Antisense strand to SEQ ID NO: 854010
uccucaaggagacuccgcc

SEQ ID NO: 854012 - RNA, 19 nt, Artificial Sequence
  Description of Artificial Sequence: Synthetic oligonucleotide
  Sense strand starting at position 2150 of SEQ ID NO: 588278
gggcgagucauugagaccu

SEQ ID NO: 854013 - RNA, 19 nt, Artificial Sequence
  Description of Artificial Sequence: Synthetic oligonucleotide
  Antisense strand to SEQ ID NO: 854012
aggucucaaugacucgccc

SEQ ID NO: 854014 - RNA, 19 nt, Artificial Sequence
  Description of Artificial Sequence: Synthetic oligonucleotide
  Sense strand starting at position 2269 of SEQ ID NO: 588278
ucugguguccuugagccua

SEQ ID NO: 854015 - RNA, 19 nt, Artificial Sequence
  Description of Artificial Sequence: Synthetic oligonucleotide
  Antisense strand to SEQ ID NO: 854014
uaggcucaaggacaccaga

SEQ ID NO: 854016 - RNA, 19 nt, Artificial Sequence
  Description of Artificial Sequence: Synthetic oligonucleotide
  Sense strand starting at position 2281 of SEQ ID NO: 588278
gagccuaacucuuagagug

SEQ ID NO: 854017 - RNA, 19 nt, Artificial Sequence
  Description of Artificial Sequence: Synthetic oligonucleotide
  Antisense strand to SEQ ID NO: 854016
cacucuaagaguuaggcuc

SEQ ID NO: 854018 - RNA, 19 nt, Artificial Sequence
  Description of Artificial Sequence: Synthetic oligonucleotide
  Sense strand starting at position 2283 of SEQ ID NO: 588278
gccuaacucuuagagugau

SEQ ID NO: 854019 - RNA, 19 nt, Artificial Sequence
  Description of Artificial Sequence: Synthetic oligonucleotide
  Antisense strand to SEQ ID NO: 854018
aucacucuaagaguuaggc

SEQ ID NO: 854020 - RNA, 19 nt, Artificial Sequence
  Description of Artificial Sequence: Synthetic oligonucleotide
  Sense strand starting at position 2289 of SEQ ID NO: 588278
cucuuagagugauaggaaa

SEQ ID NO: 854021 - RNA, 19 nt, Artificial Sequence
  Description of Artificial Sequence: Synthetic oligonucleotide
  Antisense strand to SEQ ID NO: 854020
uuuccuaucacucuaagag

SEQ ID NO: 854022 - RNA, 19 nt, Artificial Sequence
  Description of Artificial Sequence: Synthetic oligonucleotide
  Sense strand starting at position 2335 of SEQ ID NO: 588278
cucuaauauuccuuggguu

SEQ ID NO: 854023 - RNA, 19 nt, Artificial Sequence
  Description of Artificial Sequence: Synthetic oligonucleotide
  Antisense strand to SEQ ID NO: 854022
aacccaaggaauauuagag

SEQ ID NO: 854024 - RNA, 19 nt, Artificial Sequence
  Description of Artificial Sequence: Synthetic oligonucleotide
  Sense strand starting at position 2336 of SEQ ID NO: 588278
ucuaauauuccuuggguua

SEQ ID NO: 854025 - RNA, 19 nt, Artificial Sequence
  Description of Artificial Sequence: Synthetic oligonucleotide
  Antisense strand to SEQ ID NO: 854024
uaacccaaggaauauuaga

SEQ ID NO: 854026 - RNA, 19 nt, Artificial Sequence
  Description of Artificial Sequence: Synthetic oligonucleotide
  Sense strand starting at position 2337 of SEQ ID NO: 588278
cuaauauuccuuggguuag

SEQ ID NO: 854027 - RNA, 19 nt, Artificial Sequence
  Description of Artificial Sequence: Synthetic oligonucleotide
  Antisense strand to SEQ ID NO: 854026
cuaacccaaggaauauuag

SEQ ID NO: 854028 - RNA, 19 nt, Artificial Sequence
  Description of Artificial Sequence: Synthetic oligonucleotide
  Sense strand starting at position 3201 of SEQ ID NO: 588278
gggcgaaagugauuccgga

SEQ ID NO: 854029 - RNA, 19 nt, Artificial Sequence
  Description of Artificial Sequence: Synthetic oligonucleotide
  Antisense strand to SEQ ID NO: 854028
uccggaaucacuuucgccc

SEQ ID NO: 854030 - RNA, 19 nt, Artificial Sequence
  Description of Artificial Sequence: Synthetic oligonucleotide
  Sense strand starting at position 3220 of SEQ ID NO: 588278
ggcugccgucuuuauuagu

SEQ ID NO: 854031 - RNA, 19 nt, Artificial Sequence
  Description of Artificial Sequence: Synthetic oligonucleotide
  Antisense strand to SEQ ID NO: 854030
acuaauaaagacggcagcc

SEQ ID NO: 854032 - RNA, 19 nt, Artificial Sequence
  Description of Artificial Sequence: Synthetic oligonucleotide
  Sense strand starting at position 3229 of SEQ ID NO: 588278
cuuuauuagucgcugcuua

SEQ ID NO: 854033 - RNA, 19 nt, Artificial Sequence
  Description of Artificial Sequence: Synthetic oligonucleotide
  Antisense strand to SEQ ID NO: 854032
uaagcagcgacuaauaaag

SEQ ID NO: 854034 - RNA, 19 nt, Artificial Sequence
  Description of Artificial Sequence: Synthetic oligonucleotide
  Sense strand starting at position 3338 of SEQ ID NO: 588278
gguuccagugccugagaau

SEQ ID NO: 854035 - RNA, 19 nt, Artificial Sequence
  Description of Artificial Sequence: Synthetic oligonucleotide
  Antisense strand to SEQ ID NO: 854034
auucucaggcacuggaacc

SEQ ID NO: 854036 - RNA, 19 nt, Artificial Sequence
  Description of Artificial Sequence: Synthetic oligonucleotide
  Sense strand starting at position 3339 of SEQ ID NO: 588278
guuccagugccugagaauu

SEQ ID NO: 854037 - RNA, 19 nt, Artificial Sequence
  Description of Artificial Sequence: Synthetic oligonucleotide
  Antisense strand to SEQ ID NO: 854036
aauucucaggcacuggaac

SEQ ID NO: 854038 - RNA, 19 nt, Artificial Sequence
  Description of Artificial Sequence: Synthetic oligonucleotide
  Sense strand starting at position 3349 of SEQ ID NO: 588278
cugagaauuuauugaggga

SEQ ID NO: 854039 - RNA, 19 nt, Artificial Sequence
  Description of Artificial Sequence: Synthetic oligonucleotide
  Antisense strand to SEQ ID NO: 854038
ucccucaauaaauucucag

SEQ ID NO: 854040 - RNA, 19 nt, Artificial Sequence
  Description of Artificial Sequence: Synthetic oligonucleotide
  Sense strand starting at position 3352 of SEQ ID NO: 588278
agaauuuauugagggaaac

SEQ ID NO: 854041 - RNA, 19 nt, Artificial Sequence
  Description of Artificial Sequence: Synthetic oligonucleotide
  Antisense strand to SEQ ID NO: 854040
guuucccucaauaaauucu

SEQ ID NO: 854042 - RNA, 19 nt, Artificial Sequence
  Description of Artificial Sequence: Synthetic oligonucleotide
  Sense strand starting at position 3370 of SEQ ID NO: 588278
cugcccguggugucuaaau

SEQ ID NO: 854043 - RNA, 19 nt, Artificial Sequence
  Description of Artificial Sequence: Synthetic oligonucleotide
  Antisense strand to SEQ ID NO: 854042
auuuagacaccacgggcag

SEQ ID NO: 854044 - RNA, 19 nt, Artificial Sequence
  Description of Artificial Sequence: Synthetic oligonucleotide
  Sense strand starting at position 3419 of SEQ ID NO: 588278
agguuagucucuccggcau

SEQ ID NO: 854045 - RNA, 19 nt, Artificial Sequence
  Description of Artificial Sequence: Synthetic oligonucleotide
  Antisense strand to SEQ ID NO: 854044
augccggagagacuaaccu

SEQ ID NO: 854046 - RNA, 19 nt, Artificial Sequence
  Description of Artificial Sequence: Synthetic oligonucleotide
  Sense strand starting at position 3442 of SEQ ID NO: 588278
uucgguaacucuuauuuac

SEQ ID NO: 854047 - RNA, 19 nt, Artificial Sequence
  Description of Artificial Sequence: Synthetic oligonucleotide
  Antisense strand to SEQ ID NO: 854046
guaaauaagaguuaccgaa

SEQ ID NO: 854048 - RNA, 19 nt, Artificial Sequence
  Description of Artificial Sequence: Synthetic oligonucleotide
  Sense strand starting at position 3509 of SEQ ID NO: 588278
acggaaggaucuuagagac

SEQ ID NO: 854049 - RNA, 19 nt, Artificial Sequence
  Description of Artificial Sequence: Synthetic oligonucleotide
  Antisense strand to SEQ ID NO: 854048
gucucuaagauccuuccgu

SEQ ID NO: 854050 - RNA, 19 nt, Artificial Sequence
  Description of Artificial Sequence: Synthetic oligonucleotide
  Sense strand starting at position 3652 of SEQ ID NO: 588278
uugaaagcauuugauauuc

SEQ ID NO: 854051 - RNA, 19 nt, Artificial Sequence
  Description of Artificial Sequence: Synthetic oligonucleotide
  Antisense strand to SEQ ID NO: 854050
gaauaucaaaugcuuucaa

SEQ ID NO: 854052 - RNA, 19 nt, Artificial Sequence
  Description of Artificial Sequence: Synthetic oligonucleotide
  Sense strand starting at position 3674 of SEQ ID NO: 588278
cuauccugucuccaauguu

SEQ ID NO: 854053 - RNA, 19 nt, Artificial Sequence
  Description of Artificial Sequence: Synthetic oligonucleotide
  Antisense strand to SEQ ID NO: 854052
aacauuggagacaggauag

SEQ ID NO: 854054 - RNA, 19 nt, Artificial Sequence
  Description of Artificial Sequence: Synthetic oligonucleotide
  Sense strand starting at position 52 of SEQ ID NO: 588279
gguaccagcaugcagaaau

SEQ ID NO: 854055 - RNA, 19 nt, Artificial Sequence
  Description of Artificial Sequence: Synthetic oligonucleotide
  Antisense strand to SEQ ID NO: 854054
auuucugcaugcugguacc

SEQ ID NO: 854056 - RNA, 19 nt, Artificial Sequence
  Description of Artificial Sequence: Synthetic oligonucleotide
  Sense strand starting at position 62 of SEQ ID NO: 588279
ugcagaaauggucaugccu

SEQ ID NO: 854057 - RNA, 19 nt, Artificial Sequence
  Description of Artificial Sequence: Synthetic oligonucleotide
  Antisense strand to SEQ ID NO: 854056
aggcaugaccauuucugca

SEQ ID NO: 854058 - RNA, 19 nt, Artificial Sequence
  Description of Artificial Sequence: Synthetic oligonucleotide
  Sense strand starting at position 70 of SEQ ID NO: 588279
uggucaugccugcagugua

SEQ ID NO: 854059 - RNA, 19 nt, Artificial Sequence
  Description of Artificial Sequence: Synthetic oligonucleotide
  Antisense strand to SEQ ID NO: 854058
uacacugcaggcaugacca

SEQ ID NO: 854060 - RNA, 19 nt, Artificial Sequence
  Description of Artificial Sequence: Synthetic oligonucleotide
  Sense strand starting at position 174 of SEQ ID NO: 588279
gccugauggguugagugua

SEQ ID NO: 854061 - RNA, 19 nt, Artificial Sequence
  Description of Artificial Sequence: Synthetic oligonucleotide
  Antisense strand to SEQ ID NO: 854060
uacacucaacccaucaggc

SEQ ID NO: 854062 - RNA, 19 nt, Artificial Sequence
  Description of Artificial Sequence: Synthetic oligonucleotide
  Sense strand starting at position 254 of SEQ ID NO: 588279
gugcacacugagugugaau

SEQ ID NO: 854063 - RNA, 19 nt, Artificial Sequence
  Description of Artificial Sequence: Synthetic oligonucleotide
  Antisense strand to SEQ ID NO: 854062
auucacacucagugugcac

SEQ ID NO: 854064 - RNA, 19 nt, Artificial Sequence
  Description of Artificial Sequence: Synthetic oligonucleotide
  Sense strand starting at position 343 of SEQ ID NO: 588279
ggugcaugugcugguagau

SEQ ID NO: 854065 - RNA, 19 nt, Artificial Sequence
  Description of Artificial Sequence: Synthetic oligonucleotide
  Antisense strand to SEQ ID NO: 854064
aucuaccagcacaugcacc

SEQ ID NO: 854066 - RNA, 19 nt, Artificial Sequence
  Description of Artificial Sequence: Synthetic oligonucleotide
  Sense strand starting at position 353 of SEQ ID NO: 588279
cugguagauccacaugugu

SEQ ID NO: 854067 - RNA, 19 nt, Artificial Sequence
  Description of Artificial Sequence: Synthetic oligonucleotide
  Antisense strand to SEQ ID NO: 854066
acacauguggaucuaccag

SEQ ID NO: 854068 - RNA, 19 nt, Artificial Sequence
  Description of Artificial Sequence: Synthetic oligonucleotide
  Sense strand starting at position 355 of SEQ ID NO: 588279
gguagauccacaugugucu

SEQ ID NO: 854069 - RNA, 19 nt, Artificial Sequence
  Description of Artificial Sequence: Synthetic oligonucleotide
  Antisense strand to SEQ ID NO: 854068
agacacauguggaucuacc

SEQ ID NO: 854070 - RNA, 19 nt, Artificial Sequence
  Description of Artificial Sequence: Synthetic oligonucleotide
  Sense strand starting at position 486 of SEQ ID NO: 588279
gaucucacgugcuuuguau

SEQ ID NO: 854071 - RNA, 19 nt, Artificial Sequence
  Description of Artificial Sequence: Synthetic oligonucleotide
  Antisense strand to SEQ ID NO: 854070
auacaaagcacgugagauc

SEQ ID NO: 854072 - RNA, 19 nt, Artificial Sequence
  Description of Artificial Sequence: Synthetic oligonucleotide
  Sense strand starting at position 493 of SEQ ID NO: 588279
cgugcuuuguaugcagaga

SEQ ID NO: 854073 - RNA, 19 nt, Artificial Sequence
  Description of Artificial Sequence: Synthetic oligonucleotide
  Antisense strand to SEQ ID NO: 854072
ucucugcauacaaagcacg

SEQ ID NO: 854074 - RNA, 19 nt, Artificial Sequence
  Description of Artificial Sequence: Synthetic oligonucleotide
  Sense strand starting at position 494 of SEQ ID NO: 588279
gugcuuuguaugcagagaa

SEQ ID NO: 854075 - RNA, 19 nt, Artificial Sequence
  Description of Artificial Sequence: Synthetic oligonucleotide
  Antisense strand to SEQ ID NO: 854074
uucucugcauacaaagcac

SEQ ID NO: 854076 - RNA, 19 nt, Artificial Sequence
  Description of Artificial Sequence: Synthetic oligonucleotide
  Sense strand starting at position 684 of SEQ ID NO: 588279
aaaugaaagcuuugugagu

SEQ ID NO: 854077 - RNA, 19 nt, Artificial Sequence
  Description of Artificial Sequence: Synthetic oligonucleotide
  Antisense strand to SEQ ID NO: 854076
acucacaaagcuuucauuu

SEQ ID NO: 854078 - RNA, 19 nt, Artificial Sequence
  Description of Artificial Sequence: Synthetic oligonucleotide
  Sense strand starting at position 690 of SEQ ID NO: 588279
aagcuuugugagugcggga

SEQ ID NO: 854079 - RNA, 19 nt, Artificial Sequence
  Description of Artificial Sequence: Synthetic oligonucleotide
  Antisense strand to SEQ ID NO: 854078
ucccgcacucacaaagcuu

SEQ ID NO: 854080 - RNA, 19 nt, Artificial Sequence
  Description of Artificial Sequence: Synthetic oligonucleotide
  Sense strand starting at position 692 of SEQ ID NO: 588279
gcuuugugagugcgggaaa

SEQ ID NO: 854081 - RNA, 19 nt, Artificial Sequence
  Description of Artificial Sequence: Synthetic oligonucleotide
  Antisense strand to SEQ ID NO: 854080
uuucccgcacucacaaagc

SEQ ID NO: 854082 - RNA, 19 nt, Artificial Sequence
  Description of Artificial Sequence: Synthetic oligonucleotide
  Sense strand starting at position 695 of SEQ ID NO: 588279
uugugagugcgggaaacau

SEQ ID NO: 854083 - RNA, 19 nt, Artificial Sequence
  Description of Artificial Sequence: Synthetic oligonucleotide
  Antisense strand to SEQ ID NO: 854082
auguuucccgcacucacaa

SEQ ID NO: 854084 - RNA, 19 nt, Artificial Sequence
  Description of Artificial Sequence: Synthetic oligonucleotide
  Sense strand starting at position 936 of SEQ ID NO: 588279
cuccgagagcuuggacaaa

SEQ ID NO: 854085 - RNA, 19 nt, Artificial Sequence
  Description of Artificial Sequence: Synthetic oligonucleotide
  Antisense strand to SEQ ID NO: 854084
uuuguccaagcucucggag

SEQ ID NO: 854086 - RNA, 19 nt, Artificial Sequence
  Description of Artificial Sequence: Synthetic oligonucleotide
  Sense strand starting at position 1000 of SEQ ID NO: 588279
ucagauuggccuuggaaug

SEQ ID NO: 854087 - RNA, 19 nt, Artificial Sequence
  Description of Artificial Sequence: Synthetic oligonucleotide
  Antisense strand to SEQ ID NO: 854086
cauuccaaggccaaucuga

SEQ ID NO: 854088 - RNA, 19 nt, Artificial Sequence
  Description of Artificial Sequence: Synthetic oligonucleotide
  Sense strand starting at position 1221 of SEQ ID NO: 588279
cccucauguugagagcaaa

SEQ ID NO: 854089 - RNA, 19 nt, Artificial Sequence
  Description of Artificial Sequence: Synthetic oligonucleotide
  Antisense strand to SEQ ID NO: 854088
uuugcucucaacaugaggg

SEQ ID NO: 854090 - RNA, 19 nt, Artificial Sequence
  Description of Artificial Sequence: Synthetic oligonucleotide
  Sense strand starting at position 1995 of SEQ ID NO: 588279
cacuaaugcuguggacaga

SEQ ID NO: 854091 - RNA, 19 nt, Artificial Sequence
  Description of Artificial Sequence: Synthetic oligonucleotide
  Antisense strand to SEQ ID NO: 854090
ucuguccacagcauuagug

SEQ ID NO: 854092 - RNA, 19 nt, Artificial Sequence
  Description of Artificial Sequence: Synthetic oligonucleotide
  Sense strand starting at position 2085 of SEQ ID NO: 588279
cguggacgucccuagacau

SEQ ID NO: 854093 - RNA, 19 nt, Artificial Sequence
  Description of Artificial Sequence: Synthetic oligonucleotide
  Antisense strand to SEQ ID NO: 854092
augucuagggacguccacg

SEQ ID NO: 854094 - RNA, 19 nt, Artificial Sequence
  Description of Artificial Sequence: Synthetic oligonucleotide
  Sense strand starting at position 2159 of SEQ ID NO: 588279
acugguuucucccuccuga

SEQ ID NO: 854095 - RNA, 19 nt, Artificial Sequence
  Description of Artificial Sequence: Synthetic oligonucleotide
  Antisense strand to SEQ ID NO: 854094
ucaggagggagaaaccagu

SEQ ID NO: 854096 - RNA, 19 nt, Artificial Sequence
  Description of Artificial Sequence: Synthetic oligonucleotide
  Sense strand starting at position 2209 of SEQ ID NO: 588279
gucagccuccuuggagaaa

SEQ ID NO: 854097 - RNA, 19 nt, Artificial Sequence
  Description of Artificial Sequence: Synthetic oligonucleotide
  Antisense strand to SEQ ID NO: 854096
uuucuccaaggaggcugac

SEQ ID NO: 854098 - RNA, 19 nt, Artificial Sequence
  Description of Artificial Sequence: Synthetic oligonucleotide
  Sense strand starting at position 2210 of SEQ ID NO: 588279
ucagccuccuuggagaaau

SEQ ID NO: 854099 - RNA, 19 nt, Artificial Sequence
  Description of Artificial Sequence: Synthetic oligonucleotide
  Antisense strand to SEQ ID NO: 854098
auuucuccaaggaggcuga

SEQ ID NO: 854100 - RNA, 19 nt, Artificial Sequence
  Description of Artificial Sequence: Synthetic oligonucleotide
  Sense strand starting at position 2220 of SEQ ID NO: 588279
uggagaaauuucuguccuu

SEQ ID NO: 854101 - RNA, 19 nt, Artificial Sequence
  Description of Artificial Sequence: Synthetic oligonucleotide
  Antisense strand to SEQ ID NO: 854100
aaggacagaaauuucucca

SEQ ID NO: 854102 - RNA, 19 nt, Artificial Sequence
  Description of Artificial Sequence: Synthetic oligonucleotide
  Sense strand starting at position 2287 of SEQ ID NO: 588279
cucccaaguccuuaguuau

SEQ ID NO: 854103 - RNA, 19 nt, Artificial Sequence
  Description of Artificial Sequence: Synthetic oligonucleotide
  Antisense strand to SEQ ID NO: 854102
auaacuaaggacuugggag

SEQ ID NO: 854104 - RNA, 19 nt, Artificial Sequence
  Description of Artificial Sequence: Synthetic oligonucleotide
  Sense strand starting at position 2859 of SEQ ID NO: 588279
aguccuucuuguugucuaa

SEQ ID NO: 854105 - RNA, 19 nt, Artificial Sequence
  Description of Artificial Sequence: Synthetic oligonucleotide
  Antisense strand to SEQ ID NO: 854104
uuagacaacaagaaggacu

SEQ ID NO: 854106 - RNA, 19 nt, Artificial Sequence
  Description of Artificial Sequence: Synthetic oligonucleotide
  Sense strand starting at position 2866 of SEQ ID NO: 588279
cuuguugucuaaccuuaua

SEQ ID NO: 854107 - RNA, 19 nt, Artificial Sequence
  Description of Artificial Sequence: Synthetic oligonucleotide
  Antisense strand to SEQ ID NO: 854106
uauaagguuagacaacaag

SEQ ID NO: 854108 - RNA, 19 nt, Artificial Sequence
  Description of Artificial Sequence: Synthetic oligonucleotide
  Sense strand starting at position 2974 of SEQ ID NO: 588279
gaagccaggucaucucaga

SEQ ID NO: 854109 - RNA, 19 nt, Artificial Sequence
  Description of Artificial Sequence: Synthetic oligonucleotide
  Antisense strand to SEQ ID NO: 854108
ucugagaugaccuggcuuc

SEQ ID NO: 854110 - RNA, 19 nt, Artificial Sequence
  Description of Artificial Sequence: Synthetic oligonucleotide
  Sense strand starting at position 3046 of SEQ ID NO: 588279
gggagagaauccucuugcu

SEQ ID NO: 854111 - RNA, 19 nt, Artificial Sequence
  Description of Artificial Sequence: Synthetic oligonucleotide
  Antisense strand to SEQ ID NO: 854110
agcaagaggauucucuccc

SEQ ID NO: 854112 - RNA, 19 nt, Artificial Sequence
  Description of Artificial Sequence: Synthetic oligonucleotide
  Sense strand starting at position 3066 of SEQ ID NO: 588279
aagggacuuuccugaaaug

SEQ ID NO: 854113 - RNA, 19 nt, Artificial Sequence
  Description of Artificial Sequence: Synthetic oligonucleotide
  Antisense strand to SEQ ID NO: 854112
cauuucaggaaagucccuu

SEQ ID NO: 854114 - RNA, 19 nt, Artificial Sequence
  Description of Artificial Sequence: Synthetic oligonucleotide
  Sense strand starting at position 3377 of SEQ ID NO: 588279
uggguagacuccuuaucca

SEQ ID NO: 854115 - RNA, 19 nt, Artificial Sequence
  Description of Artificial Sequence: Synthetic oligonucleotide
  Antisense strand to SEQ ID NO: 854114
uggauaaggagucuaccca

SEQ ID NO: 854116 - RNA, 19 nt, Artificial Sequence
  Description of Artificial Sequence: Synthetic oligonucleotide
  Sense strand starting at position 3453 of SEQ ID NO: 588279
cuugguuucugggacacua

SEQ ID NO: 854117 - RNA, 19 nt, Artificial Sequence
  Description of Artificial Sequence: Synthetic oligonucleotide
  Antisense strand to SEQ ID NO: 854116
uagugucccagaaaccaag

SEQ ID NO: 854118 - RNA, 19 nt, Artificial Sequence
  Description of Artificial Sequence: Synthetic oligonucleotide
  Sense strand starting at position 3580 of SEQ ID NO: 588279
gcguaagagaucuggguuc

SEQ ID NO: 854119 - RNA, 19 nt, Artificial Sequence
  Description of Artificial Sequence: Synthetic oligonucleotide
  Antisense strand to SEQ ID NO: 854118
gaacccagaucucuuacgc

SEQ ID NO: 854120 - RNA, 19 nt, Artificial Sequence
  Description of Artificial Sequence: Synthetic oligonucleotide
  Sense strand starting at position 3582 of SEQ ID NO: 588279
guaagagaucuggguucga

SEQ ID NO: 854121 - RNA, 19 nt, Artificial Sequence
  Description of Artificial Sequence: Synthetic oligonucleotide
  Antisense strand to SEQ ID NO: 854120
ucgaacccagaucucuuac

SEQ ID NO: 854122 - RNA, 19 nt, Artificial Sequence
  Description of Artificial Sequence: Synthetic oligonucleotide
  Sense strand starting at position 3944 of SEQ ID NO: 588279
ggaagugucuugugagguc

SEQ ID NO: 854123 - RNA, 19 nt, Artificial Sequence
  Description of Artificial Sequence: Synthetic oligonucleotide
  Antisense strand to SEQ ID NO: 854122
gaccucacaagacacuucc

SEQ ID NO: 854124 - RNA, 19 nt, Artificial Sequence
  Description of Artificial Sequence: Synthetic oligonucleotide
  Sense strand starting at position 3953 of SEQ ID NO: 588279
uugugaggucuggagggua

SEQ ID NO: 854125 - RNA, 19 nt, Artificial Sequence
  Description of Artificial Sequence: Synthetic oligonucleotide
  Antisense strand to SEQ ID NO: 854124
uacccuccagaccucacaa

SEQ ID NO: 854126 - RNA, 19 nt, Artificial Sequence
  Description of Artificial Sequence: Synthetic oligonucleotide
  Sense strand starting at position 9 of SEQ ID NO: 588280
ccaugaacuuucuuaguag

SEQ ID NO: 854127 - RNA, 19 nt, Artificial Sequence
  Description of Artificial Sequence: Synthetic oligonucleotide
  Antisense strand to SEQ ID NO: 854126
cuacuaagaaaguucaugg

SEQ ID NO: 854128 - RNA, 19 nt, Artificial Sequence
  Description of Artificial Sequence: Synthetic oligonucleotide
  Sense strand starting at position 12 of SEQ ID NO: 588280
ugaacuuucuuaguagcca

SEQ ID NO: 854129 - RNA, 19 nt, Artificial Sequence
  Description of Artificial Sequence: Synthetic oligonucleotide
  Antisense strand to SEQ ID NO: 854128
uggcuacuaagaaaguuca

SEQ ID NO: 854130 - RNA, 19 nt, Artificial Sequence
  Description of Artificial Sequence: Synthetic oligonucleotide
  Sense strand starting at position 37 of SEQ ID NO: 588280
acugcugacucaucuugua

SEQ ID NO: 854131 - RNA, 19 nt, Artificial Sequence
  Description of Artificial Sequence: Synthetic oligonucleotide
  Antisense strand to SEQ ID NO: 854130
uacaagaugagucagcagu

SEQ ID NO: 854132 - RNA, 19 nt, Artificial Sequence
  Description of Artificial Sequence: Synthetic oligonucleotide
  Sense strand starting at position 356 of SEQ ID NO: 588280
uucuauuaaugagcacuga

SEQ ID NO: 854133 - RNA, 19 nt, Artificial Sequence
  Description of Artificial Sequence: Synthetic oligonucleotide
  Antisense strand to SEQ ID NO: 854132
ucagugcucauuaauagaa

SEQ ID NO: 854134 - RNA, 19 nt, Artificial Sequence
  Description of Artificial Sequence: Synthetic oligonucleotide
  Sense strand starting at position 357 of SEQ ID NO: 588280
ucuauuaaugagcacugau

SEQ ID NO: 854135 - RNA, 19 nt, Artificial Sequence
  Description of Artificial Sequence: Synthetic oligonucleotide
  Antisense strand to SEQ ID NO: 854134
aucagugcucauuaauaga

SEQ ID NO: 854136 - RNA, 19 nt, Artificial Sequence
  Description of Artificial Sequence: Synthetic oligonucleotide
  Sense strand starting at position 823 of SEQ ID NO: 588280
augagagucuuaccuuagu

SEQ ID NO: 854137 - RNA, 19 nt, Artificial Sequence
  Description of Artificial Sequence: Synthetic oligonucleotide
  Antisense strand to SEQ ID NO: 854136
acuaagguaagacucucau

SEQ ID NO: 854138 - RNA, 19 nt, Artificial Sequence
  Description of Artificial Sequence: Synthetic oligonucleotide
  Sense strand starting at position 826 of SEQ ID NO: 588280
agagucuuaccuuagugag

SEQ ID NO: 854139 - RNA, 19 nt, Artificial Sequence
  Description of Artificial Sequence: Synthetic oligonucleotide
  Antisense strand to SEQ ID NO: 854138
cucacuaagguaagacucu

SEQ ID NO: 854140 - RNA, 19 nt, Artificial Sequence
  Description of Artificial Sequence: Synthetic oligonucleotide
  Sense strand starting at position 2341 of SEQ ID NO: 588280
ggguccuauuaguuggaga

SEQ ID NO: 854141 - RNA, 19 nt, Artificial Sequence
  Description of Artificial Sequence: Synthetic oligonucleotide
  Antisense strand to SEQ ID NO: 854140
ucuccaacuaauaggaccc

SEQ ID NO: 854142 - RNA, 19 nt, Artificial Sequence
  Description of Artificial Sequence: Synthetic oligonucleotide
  Sense strand starting at position 2342 of SEQ ID NO: 588280
gguccuauuaguuggagag

SEQ ID NO: 854143 - RNA, 19 nt, Artificial Sequence
  Description of Artificial Sequence: Synthetic oligonucleotide
  Antisense strand to SEQ ID NO: 854142
cucuccaacuaauaggacc

SEQ ID NO: 854144 - RNA, 19 nt, Artificial Sequence
  Description of Artificial Sequence: Synthetic oligonucleotide
  Sense strand starting at position 2346 of SEQ ID NO: 588280
cuauuaguuggagagguca

SEQ ID NO: 854145 - RNA, 19 nt, Artificial Sequence
  Description of Artificial Sequence: Synthetic oligonucleotide
  Antisense strand to SEQ ID NO: 854144
ugaccucuccaacuaauag

SEQ ID NO: 854146 - RNA, 19 nt, Artificial Sequence
  Description of Artificial Sequence: Synthetic oligonucleotide
  Sense strand starting at position 2437 of SEQ ID NO: 588280
caguccuaugucugggaua

SEQ ID NO: 854147 - RNA, 19 nt, Artificial Sequence
  Description of Artificial Sequence: Synthetic oligonucleotide
  Antisense strand to SEQ ID NO: 854146
uaucccagacauaggacug

SEQ ID NO: 854148 - RNA, 19 nt, Artificial Sequence
  Description of Artificial Sequence: Synthetic oligonucleotide
  Sense strand starting at position 2439 of SEQ ID NO: 588280
guccuaugucugggauagg

SEQ ID NO: 854149 - RNA, 19 nt, Artificial Sequence
  Description of Artificial Sequence: Synthetic oligonucleotide
  Antisense strand to SEQ ID NO: 854148
ccuaucccagacauaggac

SEQ ID NO: 854150 - RNA, 19 nt, Artificial Sequence
  Description of Artificial Sequence: Synthetic oligonucleotide
  Sense strand starting at position 2442 of SEQ ID NO: 588280
cuaugucugggauaggcuu

SEQ ID NO: 854151 - RNA, 19 nt, Artificial Sequence
  Description of Artificial Sequence: Synthetic oligonucleotide
  Antisense strand to SEQ ID NO: 854150
aagccuaucccagacauag

SEQ ID NO: 854152 - RNA, 19 nt, Artificial Sequence
  Description of Artificial Sequence: Synthetic oligonucleotide
  Sense strand starting at position 2540 of SEQ ID NO: 588280
guaggaaagcuuuggguga

SEQ ID NO: 854153 - RNA, 19 nt, Artificial Sequence
  Description of Artificial Sequence: Synthetic oligonucleotide
  Antisense strand to SEQ ID NO: 854152
ucacccaaagcuuuccuac

SEQ ID NO: 854154 - RNA, 19 nt, Artificial Sequence
  Description of Artificial Sequence: Synthetic oligonucleotide
  Sense strand starting at position 2585 of SEQ ID NO: 588280
ggaaucaagggucgcuaua

SEQ ID NO: 854155 - RNA, 19 nt, Artificial Sequence
  Description of Artificial Sequence: Synthetic oligonucleotide
  Antisense strand to SEQ ID NO: 854154
uauagcgacccuugauucc

SEQ ID NO: 854156 - RNA, 19 nt, Artificial Sequence
  Description of Artificial Sequence: Synthetic oligonucleotide
  Sense strand starting at position 2638 of SEQ ID NO: 588280
gugugagucagguccguuu

SEQ ID NO: 854157 - RNA, 19 nt, Artificial Sequence
  Description of Artificial Sequence: Synthetic oligonucleotide
  Antisense strand to SEQ ID NO: 854156
aaacggaccugacucacac

SEQ ID NO: 854158 - RNA, 19 nt, Artificial Sequence
  Description of Artificial Sequence: Synthetic oligonucleotide
  Sense strand starting at position 2671 of SEQ ID NO: 588280
uuagauuacggucauuauc

SEQ ID NO: 854159 - RNA, 19 nt, Artificial Sequence
  Description of Artificial Sequence: Synthetic oligonucleotide
  Antisense strand to SEQ ID NO: 854158
gauaaugaccguaaucuaa

SEQ ID NO: 854160 - RNA, 19 nt, Artificial Sequence
  Description of Artificial Sequence: Synthetic oligonucleotide
  Sense strand starting at position 2673 of SEQ ID NO: 588280
agauuacggucauuaucuu

SEQ ID NO: 854161 - RNA, 19 nt, Artificial Sequence
  Description of Artificial Sequence: Synthetic oligonucleotide
  Antisense strand to SEQ ID NO: 854160
aagauaaugaccguaaucu

SEQ ID NO: 854162 - RNA, 19 nt, Artificial Sequence
  Description of Artificial Sequence: Synthetic oligonucleotide
  Sense strand starting at position 2703 of SEQ ID NO: 588280
uggccaucauacgucauaa

SEQ ID NO: 854163 - RNA, 19 nt, Artificial Sequence
  Description of Artificial Sequence: Synthetic oligonucleotide
  Antisense strand to SEQ ID NO: 854162
uuaugacguaugauggcca

SEQ ID NO: 854164 - RNA, 19 nt, Artificial Sequence
  Description of Artificial Sequence: Synthetic oligonucleotide
  Sense strand starting at position 2705 of SEQ ID NO: 588280
gccaucauacgucauaauu

SEQ ID NO: 854165 - RNA, 19 nt, Artificial Sequence
  Description of Artificial Sequence: Synthetic oligonucleotide
  Antisense strand to SEQ ID NO: 854164
aauuaugacguaugauggc

SEQ ID NO: 854166 - RNA, 19 nt, Artificial Sequence
  Description of Artificial Sequence: Synthetic oligonucleotide
  Sense strand starting at position 2724 of SEQ ID NO: 588280
ugaguucagggucagguua

SEQ ID NO: 854167 - RNA, 19 nt, Artificial Sequence
  Description of Artificial Sequence: Synthetic oligonucleotide
  Antisense strand to SEQ ID NO: 854166
uaaccugacccugaacuca

SEQ ID NO: 854168 - RNA, 19 nt, Artificial Sequence
  Description of Artificial Sequence: Synthetic oligonucleotide
  Sense strand starting at position 2765 of SEQ ID NO: 588280
cagguuagagcuuguuuga

SEQ ID NO: 854169 - RNA, 19 nt, Artificial Sequence
  Description of Artificial Sequence: Synthetic oligonucleotide
  Antisense strand to SEQ ID NO: 854168
ucaaacaagcucuaaccug

SEQ ID NO: 854170 - RNA, 19 nt, Artificial Sequence
  Description of Artificial Sequence: Synthetic oligonucleotide
  Sense strand starting at position 2774 of SEQ ID NO: 588280
gcuuguuugagggauuaaa

SEQ ID NO: 854171 - RNA, 19 nt, Artificial Sequence
  Description of Artificial Sequence: Synthetic oligonucleotide
  Antisense strand to SEQ ID NO: 854170
uuuaaucccucaaacaagc

SEQ ID NO: 854172 - RNA, 19 nt, Artificial Sequence
  Description of Artificial Sequence: Synthetic oligonucleotide
  Sense strand starting at position 2789 of SEQ ID NO: 588280
uaaagaauguuggcauggu

SEQ ID NO: 854173 - RNA, 19 nt, Artificial Sequence
  Description of Artificial Sequence: Synthetic oligonucleotide
  Antisense strand to SEQ ID NO: 854172
accaugccaacauucuuua

SEQ ID NO: 854174 - RNA, 19 nt, Artificial Sequence
  Description of Artificial Sequence: Synthetic oligonucleotide
  Sense strand starting at position 2806 of SEQ ID NO: 588280
gucgguguuaaggauaaac

SEQ ID NO: 854175 - RNA, 19 nt, Artificial Sequence
  Description of Artificial Sequence: Synthetic oligonucleotide
  Antisense strand to SEQ ID NO: 854174
guuuauccuuaacaccgac

SEQ ID NO: 854176 - RNA, 19 nt, Artificial Sequence
  Description of Artificial Sequence: Synthetic oligonucleotide
  Sense strand starting at position 2824 of SEQ ID NO: 588280
cagugaaagcgugaguuag

SEQ ID NO: 854177 - RNA, 19 nt, Artificial Sequence
  Description of Artificial Sequence: Synthetic oligonucleotide
  Antisense strand to SEQ ID NO: 854176
cuaacucacgcuuucacug

SEQ ID NO: 854178 - RNA, 19 nt, Artificial Sequence
  Description of Artificial Sequence: Synthetic oligonucleotide
  Sense strand starting at position 2828 of SEQ ID NO: 588280
gaaagcgugaguuaggaau

SEQ ID NO: 854179 - RNA, 19 nt, Artificial Sequence
  Description of Artificial Sequence: Synthetic oligonucleotide
  Antisense strand to SEQ ID NO: 854178
auuccuaacucacgcuuuc

SEQ ID NO: 854180 - RNA, 19 nt, Artificial Sequence
  Description of Artificial Sequence: Synthetic oligonucleotide
  Sense strand starting at position 2944 of SEQ ID NO: 588280
agggauuggauaugagucu

SEQ ID NO: 854181 - RNA, 19 nt, Artificial Sequence
  Description of Artificial Sequence: Synthetic oligonucleotide
  Antisense strand to SEQ ID NO: 854180
agacucauauccaaucccu

SEQ ID NO: 854182 - RNA, 19 nt, Artificial Sequence
  Description of Artificial Sequence: Synthetic oligonucleotide
  Sense strand starting at position 2951 of SEQ ID NO: 588280
ggauaugagucugugcuag

SEQ ID NO: 854183 - RNA, 19 nt, Artificial Sequence
  Description of Artificial Sequence: Synthetic oligonucleotide
  Antisense strand to SEQ ID NO: 854182
cuagcacagacucauaucc

SEQ ID NO: 854184 - RNA, 19 nt, Artificial Sequence
  Description of Artificial Sequence: Synthetic oligonucleotide
  Sense strand starting at position 2953 of SEQ ID NO: 588280
auaugagucugugcuagga

SEQ ID NO: 854185 - RNA, 19 nt, Artificial Sequence
  Description of Artificial Sequence: Synthetic oligonucleotide
  Antisense strand to SEQ ID NO: 854184
uccuagcacagacucauau

SEQ ID NO: 854186 - RNA, 19 nt, Artificial Sequence
  Description of Artificial Sequence: Synthetic oligonucleotide
  Sense strand starting at position 3025 of SEQ ID NO: 588280
gguuaauguuaggaauuug

SEQ ID NO: 854187 - RNA, 19 nt, Artificial Sequence
  Description of Artificial Sequence: Synthetic oligonucleotide
  Antisense strand to SEQ ID NO: 854186
caaauuccuaacauuaacc

SEQ ID NO: 854188 - RNA, 19 nt, Artificial Sequence
  Description of Artificial Sequence: Synthetic oligonucleotide
  Sense strand starting at position 3061 of SEQ ID NO: 588280
gugguuugaggcuagcaua

SEQ ID NO: 854189 - RNA, 19 nt, Artificial Sequence
  Description of Artificial Sequence: Synthetic oligonucleotide
  Antisense strand to SEQ ID NO: 854188
uaugcuagccucaaaccac

SEQ ID NO: 854190 - RNA, 19 nt, Artificial Sequence
  Description of Artificial Sequence: Synthetic oligonucleotide
  Sense strand starting at position 3077 of SEQ ID NO: 588280
auaguugaccuugagcaga

SEQ ID NO: 854191 - RNA, 19 nt, Artificial Sequence
  Description of Artificial Sequence: Synthetic oligonucleotide
  Antisense strand to SEQ ID NO: 854190
ucugcucaaggucaacuau

SEQ ID NO: 854192 - RNA, 19 nt, Artificial Sequence
  Description of Artificial Sequence: Synthetic oligonucleotide
  Sense strand starting at position 3148 of SEQ ID NO: 588280
cuuuauuccuauguaguua

SEQ ID NO: 854193 - RNA, 19 nt, Artificial Sequence
  Description of Artificial Sequence: Synthetic oligonucleotide
  Antisense strand to SEQ ID NO: 854192
uaacuacauaggaauaaag

SEQ ID NO: 854194 - RNA, 19 nt, Artificial Sequence
  Description of Artificial Sequence: Synthetic oligonucleotide
  Sense strand starting at position 3210 of SEQ ID NO: 588280
agcguucuggcuuuagcua

SEQ ID NO: 854195 - RNA, 19 nt, Artificial Sequence
  Description of Artificial Sequence: Synthetic oligonucleotide
  Antisense strand to SEQ ID NO: 854194
uagcuaaagccagaacgcu

SEQ ID NO: 854196 - RNA, 19 nt, Artificial Sequence
  Description of Artificial Sequence: Synthetic oligonucleotide
  Sense strand starting at position 3231 of SEQ ID NO: 588280
auugcaggcaucugggauu

SEQ ID NO: 854197 - RNA, 19 nt, Artificial Sequence
  Description of Artificial Sequence: Synthetic oligonucleotide
  Antisense strand to SEQ ID NO: 854196
aaucccagaugccugcaau

SEQ ID NO: 854198 - RNA, 19 nt, Artificial Sequence
  Description of Artificial Sequence: Synthetic oligonucleotide
  Sense strand starting at position 3323 of SEQ ID NO: 588280
gacuguguuguuuacagac

SEQ ID NO: 854199 - RNA, 19 nt, Artificial Sequence
  Description of Artificial Sequence: Synthetic oligonucleotide
  Antisense strand to SEQ ID NO: 854198
gucuguaaacaacacaguc

SEQ ID NO: 854200 - RNA, 19 nt, Artificial Sequence
  Description of Artificial Sequence: Synthetic oligonucleotide
  Sense strand starting at position 3449 of SEQ ID NO: 588280
cacuguugccaugggagaa

SEQ ID NO: 854201 - RNA, 19 nt, Artificial Sequence
  Description of Artificial Sequence: Synthetic oligonucleotide
  Antisense strand to SEQ ID NO: 854200
uucucccauggcaacagug

SEQ ID NO: 854202 - RNA, 19 nt, Artificial Sequence
  Description of Artificial Sequence: Synthetic oligonucleotide
  Sense strand starting at position 3686 of SEQ ID NO: 588280
cgcacauccuaccugaauu

SEQ ID NO: 854203 - RNA, 19 nt, Artificial Sequence
  Description of Artificial Sequence: Synthetic oligonucleotide
  Antisense strand to SEQ ID NO: 854202
aauucagguaggaugugcg

SEQ ID NO: 854204 - RNA, 19 nt, Artificial Sequence
  Description of Artificial Sequence: Synthetic oligonucleotide
  Sense strand starting at position 3764 of SEQ ID NO: 588280
ccagucauguaccuacauu

SEQ ID NO: 854205 - RNA, 19 nt, Artificial Sequence
  Description of Artificial Sequence: Synthetic oligonucleotide
  Antisense strand to SEQ ID NO: 854204
aauguagguacaugacugg

SEQ ID NO: 854206 - RNA, 19 nt, Artificial Sequence
  Description of Artificial Sequence: Synthetic oligonucleotide
  Sense strand starting at position 27 of SEQ ID NO: 588281
ugcuucuaaucucuagaga

SEQ ID NO: 854207 - RNA, 19 nt, Artificial Sequence
  Description of Artificial Sequence: Synthetic oligonucleotide
  Antisense strand to SEQ ID NO: 854206
ucucuagagauuagaagca

SEQ ID NO: 854208 - RNA, 19 nt, Artificial Sequence
  Description of Artificial Sequence: Synthetic oligonucleotide
  Sense strand starting at position 28 of SEQ ID NO: 588281
gcuucuaaucucuagagag

SEQ ID NO: 854209 - RNA, 19 nt, Artificial Sequence
  Description of Artificial Sequence: Synthetic oligonucleotide
  Antisense strand to SEQ ID NO: 854208
cucucuagagauuagaagc

SEQ ID NO: 854210 - RNA, 19 nt, Artificial Sequence
  Description of Artificial Sequence: Synthetic oligonucleotide
  Sense strand starting at position 270 of SEQ ID NO: 588281
agcauuacauagguguuau

SEQ ID NO: 854211 - RNA, 19 nt, Artificial Sequence
  Description of Artificial Sequence: Synthetic oligonucleotide
  Antisense strand to SEQ ID NO: 854210
auaacaccuauguaaugcu

SEQ ID NO: 854212 - RNA, 19 nt, Artificial Sequence
  Description of Artificial Sequence: Synthetic oligonucleotide
  Sense strand starting at position 645 of SEQ ID NO: 588281
uuagaauucuaugcaacag

SEQ ID NO: 854213 - RNA, 19 nt, Artificial Sequence
  Description of Artificial Sequence: Synthetic oligonucleotide
  Antisense strand to SEQ ID NO: 854212
cuguugcauagaauucuaa

SEQ ID NO: 854214 - RNA, 19 nt, Artificial Sequence
  Description of Artificial Sequence: Synthetic oligonucleotide
  Sense strand starting at position 710 of SEQ ID NO: 588281
ccaggugucaaggaugcua

SEQ ID NO: 854215 - RNA, 19 nt, Artificial Sequence
  Description of Artificial Sequence: Synthetic oligonucleotide
  Antisense strand to SEQ ID NO: 854214
uagcauccuugacaccugg

SEQ ID NO: 854216 - RNA, 19 nt, Artificial Sequence
  Description of Artificial Sequence: Synthetic oligonucleotide
  Sense strand starting at position 712 of SEQ ID NO: 588281
aggugucaaggaugcuaaa

SEQ ID NO: 854217 - RNA, 19 nt, Artificial Sequence
  Description of Artificial Sequence: Synthetic oligonucleotide
  Antisense strand to SEQ ID NO: 854216
uuuagcauccuugacaccu

SEQ ID NO: 854218 - RNA, 19 nt, Artificial Sequence
  Description of Artificial Sequence: Synthetic oligonucleotide
  Sense strand starting at position 744 of SEQ ID NO: 588281
gucagauaaucuuuaagau

SEQ ID NO: 854219 - RNA, 19 nt, Artificial Sequence
  Description of Artificial Sequence: Synthetic oligonucleotide
  Antisense strand to SEQ ID NO: 854218
aucuuaaagauuaucugac

SEQ ID NO: 854220 - RNA, 19 nt, Artificial Sequence
  Description of Artificial Sequence: Synthetic oligonucleotide
  Sense strand starting at position 790 of SEQ ID NO: 588281
ccuaguaugagucacgaag

SEQ ID NO: 854221 - RNA, 19 nt, Artificial Sequence
  Description of Artificial Sequence: Synthetic oligonucleotide
  Antisense strand to SEQ ID NO: 854220
cuucgugacucauacuagg

SEQ ID NO: 854222 - RNA, 19 nt, Artificial Sequence
  Description of Artificial Sequence: Synthetic oligonucleotide
  Sense strand starting at position 808 of SEQ ID NO: 588281
gugguuacaaccuagaugu

SEQ ID NO: 854223 - RNA, 19 nt, Artificial Sequence
  Description of Artificial Sequence: Synthetic oligonucleotide
  Antisense strand to SEQ ID NO: 854222
acaucuagguuguaaccac

SEQ ID NO: 854224 - RNA, 19 nt, Artificial Sequence
  Description of Artificial Sequence: Synthetic oligonucleotide
  Sense strand starting at position 907 of SEQ ID NO: 588281
gaggaauucuagcccugaa

SEQ ID NO: 854225 - RNA, 19 nt, Artificial Sequence
  Description of Artificial Sequence: Synthetic oligonucleotide
  Antisense strand to SEQ ID NO: 854224
uucagggcuagaauuccuc

SEQ ID NO: 854226 - RNA, 19 nt, Artificial Sequence
  Description of Artificial Sequence: Synthetic oligonucleotide
  Sense strand starting at position 1139 of SEQ ID NO: 588281
uaggguggccgggaugaau

SEQ ID NO: 854227 - RNA, 19 nt, Artificial Sequence
  Description of Artificial Sequence: Synthetic oligonucleotide
  Antisense strand to SEQ ID NO: 854226
auucaucccggccacccua

SEQ ID NO: 854228 - RNA, 19 nt, Artificial Sequence
  Description of Artificial Sequence: Synthetic oligonucleotide
  Sense strand starting at position 1698 of SEQ ID NO: 588281
gccacuuuaccugagaaac

SEQ ID NO: 854229 - RNA, 19 nt, Artificial Sequence
  Description of Artificial Sequence: Synthetic oligonucleotide
  Antisense strand to SEQ ID NO: 854228
guuucucagguaaaguggc

SEQ ID NO: 854230 - RNA, 19 nt, Artificial Sequence
  Description of Artificial Sequence: Synthetic oligonucleotide
  Sense strand starting at position 2268 of SEQ ID NO: 588281
ccguccucucgauagguga

SEQ ID NO: 854231 - RNA, 19 nt, Artificial Sequence
  Description of Artificial Sequence: Synthetic oligonucleotide
  Antisense strand to SEQ ID NO: 854230
ucaccuaucgagaggacgg

SEQ ID NO: 854232 - RNA, 19 nt, Artificial Sequence
  Description of Artificial Sequence: Synthetic oligonucleotide
  Sense strand starting at position 2279 of SEQ ID NO: 588281
auaggugacucguccuaaa

SEQ ID NO: 854233 - RNA, 19 nt, Artificial Sequence
  Description of Artificial Sequence: Synthetic oligonucleotide
  Antisense strand to SEQ ID NO: 854232
uuuaggacgagucaccuau

SEQ ID NO: 854234 - RNA, 19 nt, Artificial Sequence
  Description of Artificial Sequence: Synthetic oligonucleotide
  Sense strand starting at position 2300 of SEQ ID NO: 588281
agcucugaauucccgcaaa

SEQ ID NO: 854235 - RNA, 19 nt, Artificial Sequence
  Description of Artificial Sequence: Synthetic oligonucleotide
  Antisense strand to SEQ ID NO: 854234
uuugcgggaauucagagcu

SEQ ID NO: 854236 - RNA, 19 nt, Artificial Sequence
  Description of Artificial Sequence: Synthetic oligonucleotide
  Sense strand starting at position 2303 of SEQ ID NO: 588281
ucugaauucccgcaaagac

SEQ ID NO: 854237 - RNA, 19 nt, Artificial Sequence
  Description of Artificial Sequence: Synthetic oligonucleotide
  Antisense strand to SEQ ID NO: 854236
gucuuugcgggaauucaga

SEQ ID NO: 854238 - RNA, 19 nt, Artificial Sequence
  Description of Artificial Sequence: Synthetic oligonucleotide
  Sense strand starting at position 2364 of SEQ ID NO: 588281
agaaucaagucuguuggga

SEQ ID NO: 854239 - RNA, 19 nt, Artificial Sequence
  Description of Artificial Sequence: Synthetic oligonucleotide
  Antisense strand to SEQ ID NO: 854238
ucccaacagacuugauucu

SEQ ID NO: 854240 - RNA, 19 nt, Artificial Sequence
  Description of Artificial Sequence: Synthetic oligonucleotide
  Sense strand starting at position 2401 of SEQ ID NO: 588281
cgggaauuccagugguaau

SEQ ID NO: 854241 - RNA, 19 nt, Artificial Sequence
  Description of Artificial Sequence: Synthetic oligonucleotide
  Antisense strand to SEQ ID NO: 854240
auuaccacuggaauucccg

SEQ ID NO: 854242 - RNA, 19 nt, Artificial Sequence
  Description of Artificial Sequence: Synthetic oligonucleotide
  Sense strand starting at position 2402 of SEQ ID NO: 588281
gggaauuccagugguaaug

SEQ ID NO: 854243 - RNA, 19 nt, Artificial Sequence
  Description of Artificial Sequence: Synthetic oligonucleotide
  Antisense strand to SEQ ID NO: 854242
cauuaccacuggaauuccc

SEQ ID NO: 854244 - RNA, 19 nt, Artificial Sequence
  Description of Artificial Sequence: Synthetic oligonucleotide
  Sense strand starting at position 2495 of SEQ ID NO: 588281
acacuuugagcuggauuga

SEQ ID NO: 854245 - RNA, 19 nt, Artificial Sequence
  Description of Artificial Sequence: Synthetic oligonucleotide
  Antisense strand to SEQ ID NO: 854244
ucaauccagcucaaagugu

SEQ ID NO: 854246 - RNA, 19 nt, Artificial Sequence
  Description of Artificial Sequence: Synthetic oligonucleotide
  Sense strand starting at position 2517 of SEQ ID NO: 588281
ggaaacauuugauaaugca

SEQ ID NO: 854247 - RNA, 19 nt, Artificial Sequence
  Description of Artificial Sequence: Synthetic oligonucleotide
  Antisense strand to SEQ ID NO: 854246
ugcauuaucaaauguuucc

SEQ ID NO: 854248 - RNA, 19 nt, Artificial Sequence
  Description of Artificial Sequence: Synthetic oligonucleotide
  Sense strand starting at position 2563 of SEQ ID NO: 588281
gcaggaagucaguauaucu

SEQ ID NO: 854249 - RNA, 19 nt, Artificial Sequence
  Description of Artificial Sequence: Synthetic oligonucleotide
  Antisense strand to SEQ ID NO: 854248
agauauacugacuuccugc

SEQ ID NO: 854250 - RNA, 19 nt, Artificial Sequence
  Description of Artificial Sequence: Synthetic oligonucleotide
  Sense strand starting at position 2583 of SEQ ID NO: 588281
ucacacuacuguuuagacu

SEQ ID NO: 854251 - RNA, 19 nt, Artificial Sequence
  Description of Artificial Sequence: Synthetic oligonucleotide
  Antisense strand to SEQ ID NO: 854250
agucuaaacaguaguguga

SEQ ID NO: 854252 - RNA, 19 nt, Artificial Sequence
  Description of Artificial Sequence: Synthetic oligonucleotide
  Sense strand starting at position 2746 of SEQ ID NO: 588281
guguauuucugacaacuca

SEQ ID NO: 854253 - RNA, 19 nt, Artificial Sequence
  Description of Artificial Sequence: Synthetic oligonucleotide
  Antisense strand to SEQ ID NO: 854252
ugaguugucagaaauacac

SEQ ID NO: 854254 - RNA, 19 nt, Artificial Sequence
  Description of Artificial Sequence: Synthetic oligonucleotide
  Sense strand starting at position 2776 of SEQ ID NO: 588281
ggguaagaaucaguucugu

SEQ ID NO: 854255 - RNA, 19 nt, Artificial Sequence
  Description of Artificial Sequence: Synthetic oligonucleotide
  Antisense strand to SEQ ID NO: 854254
acagaacugauucuuaccc

SEQ ID NO: 854256 - RNA, 19 nt, Artificial Sequence
  Description of Artificial Sequence: Synthetic oligonucleotide
  Sense strand starting at position 2781 of SEQ ID NO: 588281
agaaucaguucuguaagca

SEQ ID NO: 854257 - RNA, 19 nt, Artificial Sequence
  Description of Artificial Sequence: Synthetic oligonucleotide
  Antisense strand to SEQ ID NO: 854256
ugcuuacagaacugauucu

SEQ ID NO: 854258 - RNA, 19 nt, Artificial Sequence
  Description of Artificial Sequence: Synthetic oligonucleotide
  Sense strand starting at position 2782 of SEQ ID NO: 588281
gaaucaguucuguaagcac

SEQ ID NO: 854259 - RNA, 19 nt, Artificial Sequence
  Description of Artificial Sequence: Synthetic oligonucleotide
  Antisense strand to SEQ ID NO: 854258
gugcuuacagaacugauuc

SEQ ID NO: 854260 - RNA, 19 nt, Artificial Sequence
  Description of Artificial Sequence: Synthetic oligonucleotide
  Sense strand starting at position 2884 of SEQ ID NO: 588281
ggagguugucagcaguaug

SEQ ID NO: 854261 - RNA, 19 nt, Artificial Sequence
  Description of Artificial Sequence: Synthetic oligonucleotide
  Antisense strand to SEQ ID NO: 854260
cauacugcugacaaccucc

SEQ ID NO: 854262 - RNA, 19 nt, Artificial Sequence
  Description of Artificial Sequence: Synthetic oligonucleotide
  Sense strand starting at position 2895 of SEQ ID NO: 588281
gcaguaugcacgccgugaa

SEQ ID NO: 854263 - RNA, 19 nt, Artificial Sequence
  Description of Artificial Sequence: Synthetic oligonucleotide
  Antisense strand to SEQ ID NO: 854262
uucacggcgugcauacugc

SEQ ID NO: 854264 - RNA, 19 nt, Artificial Sequence
  Description of Artificial Sequence: Synthetic oligonucleotide
  Sense strand starting at position 2971 of SEQ ID NO: 588281
cauaucugccagugagaac

SEQ ID NO: 854265 - RNA, 19 nt, Artificial Sequence
  Description of Artificial Sequence: Synthetic oligonucleotide
  Antisense strand to SEQ ID NO: 854264
guucucacuggcagauaug

SEQ ID NO: 854266 - RNA, 19 nt, Artificial Sequence
  Description of Artificial Sequence: Synthetic oligonucleotide
  Sense strand starting at position 3033 of SEQ ID NO: 588281
acaccuuggccuggaucau

SEQ ID NO: 854267 - RNA, 19 nt, Artificial Sequence
  Description of Artificial Sequence: Synthetic oligonucleotide
  Antisense strand to SEQ ID NO: 854266
augauccaggccaaggugu

SEQ ID NO: 854268 - RNA, 19 nt, Artificial Sequence
  Description of Artificial Sequence: Synthetic oligonucleotide
  Sense strand starting at position 3034 of SEQ ID NO: 588281
caccuuggccuggaucauu

SEQ ID NO: 854269 - RNA, 19 nt, Artificial Sequence
  Description of Artificial Sequence: Synthetic oligonucleotide
  Antisense strand to SEQ ID NO: 854268
aaugauccaggccaaggug

SEQ ID NO: 854270 - RNA, 19 nt, Artificial Sequence
  Description of Artificial Sequence: Synthetic oligonucleotide
  Sense strand starting at position 3071 of SEQ ID NO: 588281
gauugaugagcuggguaca

SEQ ID NO: 854271 - RNA, 19 nt, Artificial Sequence
  Description of Artificial Sequence: Synthetic oligonucleotide
  Antisense strand to SEQ ID NO: 854270
uguacccagcucaucaauc

SEQ ID NO: 854272 - RNA, 19 nt, Artificial Sequence
  Description of Artificial Sequence: Synthetic oligonucleotide
  Sense strand starting at position 3072 of SEQ ID NO: 588281
auugaugagcuggguacau

SEQ ID NO: 854273 - RNA, 19 nt, Artificial Sequence
  Description of Artificial Sequence: Synthetic oligonucleotide
  Antisense strand to SEQ ID NO: 854272
auguacccagcucaucaau

SEQ ID NO: 854274 - RNA, 19 nt, Artificial Sequence
  Description of Artificial Sequence: Synthetic oligonucleotide
  Sense strand starting at position 3196 of SEQ ID NO: 588281
gucuuugguauugaagaua

SEQ ID NO: 854275 - RNA, 19 nt, Artificial Sequence
  Description of Artificial Sequence: Synthetic oligonucleotide
  Antisense strand to SEQ ID NO: 854274
uaucuucaauaccaaagac

SEQ ID NO: 854276 - RNA, 19 nt, Artificial Sequence
  Description of Artificial Sequence: Synthetic oligonucleotide
  Sense strand starting at position 3612 of SEQ ID NO: 588281
gaaguuacaucaguagguu

SEQ ID NO: 854277 - RNA, 19 nt, Artificial Sequence
  Description of Artificial Sequence: Synthetic oligonucleotide
  Antisense strand to SEQ ID NO: 854276
aaccuacugauguaacuuc

SEQ ID NO: 854278 - RNA, 19 nt, Artificial Sequence
  Description of Artificial Sequence: Synthetic oligonucleotide
  Sense strand starting at position 3618 of SEQ ID NO: 588281
acaucaguagguugucaaa

SEQ ID NO: 854279 - RNA, 19 nt, Artificial Sequence
  Description of Artificial Sequence: Synthetic oligonucleotide
  Antisense strand to SEQ ID NO: 854278
uuugacaaccuacugaugu

SEQ ID NO: 854280 - RNA, 19 nt, Artificial Sequence
  Description of Artificial Sequence: Synthetic oligonucleotide
  Sense strand starting at position 3656 of SEQ ID NO: 588281
gcauuugugugagaacaga

SEQ ID NO: 854281 - RNA, 19 nt, Artificial Sequence
  Description of Artificial Sequence: Synthetic oligonucleotide
  Antisense strand to SEQ ID NO: 854280
ucuguucucacacaaaugc

SEQ ID NO: 854282 - RNA, 19 nt, Artificial Sequence
  Description of Artificial Sequence: Synthetic oligonucleotide
  Sense strand starting at position 3757 of SEQ ID NO: 588281
agaguuauguaagcaauua

SEQ ID NO: 854283 - RNA, 19 nt, Artificial Sequence
  Description of Artificial Sequence: Synthetic oligonucleotide
  Antisense strand to SEQ ID NO: 854282
uaauugcuuacauaacucu

SEQ ID NO: 854284 - RNA, 19 nt, Artificial Sequence
  Description of Artificial Sequence: Synthetic oligonucleotide
  Sense strand starting at position 3958 of SEQ ID NO: 588281
aggauuugcuuccauacuu

SEQ ID NO: 854285 - RNA, 19 nt, Artificial Sequence
  Description of Artificial Sequence: Synthetic oligonucleotide
  Antisense strand to SEQ ID NO: 854284
aaguauggaagcaaauccu

SEQ ID NO: 854286 - RNA, 19 nt, Artificial Sequence
  Description of Artificial Sequence: Synthetic oligonucleotide
  Sense strand starting at position 93 of SEQ ID NO: 588282
ccaagugaaucugcagaca

SEQ ID NO: 854287 - RNA, 19 nt, Artificial Sequence
  Description of Artificial Sequence: Synthetic oligonucleotide
  Antisense strand to SEQ ID NO: 854286
ugucugcagauucacuugg

SEQ ID NO: 854288 - RNA, 19 nt, Artificial Sequence
  Description of Artificial Sequence: Synthetic oligonucleotide
  Sense strand starting at position 157 of SEQ ID NO: 588282
ggaugcuguucuccaaacu

SEQ ID NO: 854289 - RNA, 19 nt, Artificial Sequence
  Description of Artificial Sequence: Synthetic oligonucleotide
  Antisense strand to SEQ ID NO: 854288
aguuuggagaacagcaucc

SEQ ID NO: 854290 - RNA, 19 nt, Artificial Sequence
  Description of Artificial Sequence: Synthetic oligonucleotide
  Sense strand starting at position 186 of SEQ ID NO: 588282
aaggaugaauguccacauu

SEQ ID NO: 854291 - RNA, 19 nt, Artificial Sequence
  Description of Artificial Sequence: Synthetic oligonucleotide
  Antisense strand to SEQ ID NO: 854290
aauguggacauucauccuu

SEQ ID NO: 854292 - RNA, 19 nt, Artificial Sequence
  Description of Artificial Sequence: Synthetic oligonucleotide
  Sense strand starting at position 189 of SEQ ID NO: 588282
gaugaauguccacauugug

SEQ ID NO: 854293 - RNA, 19 nt, Artificial Sequence
  Description of Artificial Sequence: Synthetic oligonucleotide
  Antisense strand to SEQ ID NO: 854292
cacaauguggacauucauc

SEQ ID NO: 854294 - RNA, 19 nt, Artificial Sequence
  Description of Artificial Sequence: Synthetic oligonucleotide
  Sense strand starting at position 218 of SEQ ID NO: 588282
acgccauuagguuauuaca

SEQ ID NO: 854295 - RNA, 19 nt, Artificial Sequence
  Description of Artificial Sequence: Synthetic oligonucleotide
  Antisense strand to SEQ ID NO: 854294
uguaauaaccuaauggcgu

SEQ ID NO: 854296 - RNA, 19 nt, Artificial Sequence
  Description of Artificial Sequence: Synthetic oligonucleotide
  Sense strand starting at position 220 of SEQ ID NO: 588282
gccauuagguuauuacauu

SEQ ID NO: 854297 - RNA, 19 nt, Artificial Sequence
  Description of Artificial Sequence: Synthetic oligonucleotide
  Antisense strand to SEQ ID NO: 854296
aauguaauaaccuaauggc

SEQ ID NO: 854298 - RNA, 19 nt, Artificial Sequence
  Description of Artificial Sequence: Synthetic oligonucleotide
  Sense strand starting at position 226 of SEQ ID NO: 588282
agguuauuacauuaggcua

SEQ ID NO: 854299 - RNA, 19 nt, Artificial Sequence
  Description of Artificial Sequence: Synthetic oligonucleotide
  Antisense strand to SEQ ID NO: 854298
uagccuaauguaauaaccu

SEQ ID NO: 854300 - RNA, 19 nt, Artificial Sequence
  Description of Artificial Sequence: Synthetic oligonucleotide
  Sense strand starting at position 264 of SEQ ID NO: 588282
agaagcuacucucugacua

SEQ ID NO: 854301 - RNA, 19 nt, Artificial Sequence
  Description of Artificial Sequence: Synthetic oligonucleotide
  Antisense strand to SEQ ID NO: 854300
uagucagagaguagcuucu

SEQ ID NO: 854302 - RNA, 19 nt, Artificial Sequence
  Description of Artificial Sequence: Synthetic oligonucleotide
  Sense strand starting at position 326 of SEQ ID NO: 588282
cuaaccaugccguauaauc

SEQ ID NO: 854303 - RNA, 19 nt, Artificial Sequence
  Description of Artificial Sequence: Synthetic oligonucleotide
  Antisense strand to SEQ ID NO: 854302
gauuauacggcaugguuag

SEQ ID NO: 854304 - RNA, 19 nt, Artificial Sequence
  Description of Artificial Sequence: Synthetic oligonucleotide
  Sense strand starting at position 612 of SEQ ID NO: 588282
caaggaugugccuggagaa

SEQ ID NO: 854305 - RNA, 19 nt, Artificial Sequence
  Description of Artificial Sequence: Synthetic oligonucleotide
  Antisense strand to SEQ ID NO: 854304
uucuccaggcacauccuug

SEQ ID NO: 854306 - RNA, 19 nt, Artificial Sequence
  Description of Artificial Sequence: Synthetic oligonucleotide
  Sense strand starting at position 613 of SEQ ID NO: 588282
aaggaugugccuggagaaa

SEQ ID NO: 854307 - RNA, 19 nt, Artificial Sequence
  Description of Artificial Sequence: Synthetic oligonucleotide
  Antisense strand to SEQ ID NO: 854306
uuucuccaggcacauccuu

SEQ ID NO: 854308 - RNA, 19 nt, Artificial Sequence
  Description of Artificial Sequence: Synthetic oligonucleotide
  Sense strand starting at position 707 of SEQ ID NO: 588282
aguuuaugcgaugacaauu

SEQ ID NO: 854309 - RNA, 19 nt, Artificial Sequence
  Description of Artificial Sequence: Synthetic oligonucleotide
  Antisense strand to SEQ ID NO: 854308
aauugucaucgcauaaacu

SEQ ID NO: 854310 - RNA, 19 nt, Artificial Sequence
  Description of Artificial Sequence: Synthetic oligonucleotide
  Sense strand starting at position 721 of SEQ ID NO: 588282
caauuuagguuaugagaac

SEQ ID NO: 854311 - RNA, 19 nt, Artificial Sequence
  Description of Artificial Sequence: Synthetic oligonucleotide
  Antisense strand to SEQ ID NO: 854310
guucucauaaccuaaauug

SEQ ID NO: 854312 - RNA, 19 nt, Artificial Sequence
  Description of Artificial Sequence: Synthetic oligonucleotide
  Sense strand starting at position 727 of SEQ ID NO: 588282
agguuaugagaacgguaug

SEQ ID NO: 854313 - RNA, 19 nt, Artificial Sequence
  Description of Artificial Sequence: Synthetic oligonucleotide
  Antisense strand to SEQ ID NO: 854312
cauaccguucucauaaccu

SEQ ID NO: 854314 - RNA, 19 nt, Artificial Sequence
  Description of Artificial Sequence: Synthetic oligonucleotide
  Sense strand starting at position 728 of SEQ ID NO: 588282
gguuaugagaacgguauga

SEQ ID NO: 854315 - RNA, 19 nt, Artificial Sequence
  Description of Artificial Sequence: Synthetic oligonucleotide
  Antisense strand to SEQ ID NO: 854314
ucauaccguucucauaacc

SEQ ID NO: 854316 - RNA, 19 nt, Artificial Sequence
  Description of Artificial Sequence: Synthetic oligonucleotide
  Sense strand starting at position 732 of SEQ ID NO: 588282
augagaacgguaugaaacu

SEQ ID NO: 854317 - RNA, 19 nt, Artificial Sequence
  Description of Artificial Sequence: Synthetic oligonucleotide
  Antisense strand to SEQ ID NO: 854316
aguuucauaccguucucau

SEQ ID NO: 854318 - RNA, 19 nt, Artificial Sequence
  Description of Artificial Sequence: Synthetic oligonucleotide
  Sense strand starting at position 758 of SEQ ID NO: 588282
gugugagaagcuuaaggca

SEQ ID NO: 854319 - RNA, 19 nt, Artificial Sequence
  Description of Artificial Sequence: Synthetic oligonucleotide
  Antisense strand to SEQ ID NO: 854318
ugccuuaagcuucucacac

SEQ ID NO: 854320 - RNA, 19 nt, Artificial Sequence
  Description of Artificial Sequence: Synthetic oligonucleotide
  Sense strand starting at position 789 of SEQ ID NO: 588282
ccgggaaacgguugaucca

SEQ ID NO: 854321 - RNA, 19 nt, Artificial Sequence
  Description of Artificial Sequence: Synthetic oligonucleotide
  Antisense strand to SEQ ID NO: 854320
uggaucaaccguuucccgg

SEQ ID NO: 854322 - RNA, 19 nt, Artificial Sequence
  Description of Artificial Sequence: Synthetic oligonucleotide
  Sense strand starting at position 1053 of SEQ ID NO: 588282
gaguucaacggcgcgauau

SEQ ID NO: 854323 - RNA, 19 nt, Artificial Sequence
  Description of Artificial Sequence: Synthetic oligonucleotide
  Antisense strand to SEQ ID NO: 854322
auaucgcgccguugaacuc

SEQ ID NO: 854324 - RNA, 19 nt, Artificial Sequence
  Description of Artificial Sequence: Synthetic oligonucleotide
  Sense strand starting at position 1151 of SEQ ID NO: 588282
ccgccucgcccgucuaauu

SEQ ID NO: 854325 - RNA, 19 nt, Artificial Sequence
  Description of Artificial Sequence: Synthetic oligonucleotide
  Antisense strand to SEQ ID NO: 854324
aauuagacgggcgaggcgg

SEQ ID NO: 854326 - RNA, 19 nt, Artificial Sequence
  Description of Artificial Sequence: Synthetic oligonucleotide
  Sense strand starting at position 1325 of SEQ ID NO: 588282
ugaaaugcuuucccaggaa

SEQ ID NO: 854327 - RNA, 19 nt, Artificial Sequence
  Description of Artificial Sequence: Synthetic oligonucleotide
  Antisense strand to SEQ ID NO: 854326
uuccugggaaagcauuuca

SEQ ID NO: 854328 - RNA, 19 nt, Artificial Sequence
  Description of Artificial Sequence: Synthetic oligonucleotide
  Sense strand starting at position 1534 of SEQ ID NO: 588282
gcuguagcggucagaggau

SEQ ID NO: 854329 - RNA, 19 nt, Artificial Sequence
  Description of Artificial Sequence: Synthetic oligonucleotide
  Antisense strand to SEQ ID NO: 854328
auccucugaccgcuacagc

SEQ ID NO: 854330 - RNA, 19 nt, Artificial Sequence
  Description of Artificial Sequence: Synthetic oligonucleotide
  Sense strand starting at position 2074 of SEQ ID NO: 588282
gcgguucguggcuuguuua

SEQ ID NO: 854331 - RNA, 19 nt, Artificial Sequence
  Description of Artificial Sequence: Synthetic oligonucleotide
  Antisense strand to SEQ ID NO: 854330
uaaacaagccacgaaccgc

SEQ ID NO: 854332 - RNA, 19 nt, Artificial Sequence
  Description of Artificial Sequence: Synthetic oligonucleotide
  Sense strand starting at position 2195 of SEQ ID NO: 588282
gcucgagucaacuaaguac

SEQ ID NO: 854333 - RNA, 19 nt, Artificial Sequence
  Description of Artificial Sequence: Synthetic oligonucleotide
  Antisense strand to SEQ ID NO: 854332
guacuuaguugacucgagc

SEQ ID NO: 854334 - RNA, 19 nt, Artificial Sequence
  Description of Artificial Sequence: Synthetic oligonucleotide
  Sense strand starting at position 2331 of SEQ ID NO: 588282
gagagucaaguguacucua

SEQ ID NO: 854335 - RNA, 19 nt, Artificial Sequence
  Description of Artificial Sequence: Synthetic oligonucleotide
  Antisense strand to SEQ ID NO: 854334
uagaguacacuugacucuc

SEQ ID NO: 854336 - RNA, 19 nt, Artificial Sequence
  Description of Artificial Sequence: Synthetic oligonucleotide
  Sense strand starting at position 2336 of SEQ ID NO: 588282
ucaaguguacucuagucca

SEQ ID NO: 854337 - RNA, 19 nt, Artificial Sequence
  Description of Artificial Sequence: Synthetic oligonucleotide
  Antisense strand to SEQ ID NO: 854336
uggacuagaguacacuuga

SEQ ID NO: 854338 - RNA, 19 nt, Artificial Sequence
  Description of Artificial Sequence: Synthetic oligonucleotide
  Sense strand starting at position 2447 of SEQ ID NO: 588282
gcagcugggcuuuagaaga

SEQ ID NO: 854339 - RNA, 19 nt, Artificial Sequence
  Description of Artificial Sequence: Synthetic oligonucleotide
  Antisense strand to SEQ ID NO: 854338
ucuucuaaagcccagcugc

SEQ ID NO: 854340 - RNA, 19 nt, Artificial Sequence
  Description of Artificial Sequence: Synthetic oligonucleotide
  Sense strand starting at position 2460 of SEQ ID NO: 588282
agaagaaucugguaaggaa

SEQ ID NO: 854341 - RNA, 19 nt, Artificial Sequence
  Description of Artificial Sequence: Synthetic oligonucleotide
  Antisense strand to SEQ ID NO: 854340
uuccuuaccagauucuucu

SEQ ID NO: 854342 - RNA, 19 nt, Artificial Sequence
  Description of Artificial Sequence: Synthetic oligonucleotide
  Sense strand starting at position 2500 of SEQ ID NO: 588282
ugcuaucgucaagaccaga

SEQ ID NO: 854343 - RNA, 19 nt, Artificial Sequence
  Description of Artificial Sequence: Synthetic oligonucleotide
  Antisense strand to SEQ ID NO: 854342
ucuggucuugacgauagca

SEQ ID NO: 854344 - RNA, 19 nt, Artificial Sequence
  Description of Artificial Sequence: Synthetic oligonucleotide
  Sense strand starting at position 2658 of SEQ ID NO: 588282
acauuugguugacaggaga

SEQ ID NO: 854345 - RNA, 19 nt, Artificial Sequence
  Description of Artificial Sequence: Synthetic oligonucleotide
  Antisense strand to SEQ ID NO: 854344
ucuccugucaaccaaaugu

SEQ ID NO: 854346 - RNA, 19 nt, Artificial Sequence
  Description of Artificial Sequence: Synthetic oligonucleotide
  Sense strand starting at position 2717 of SEQ ID NO: 588282
cucucuaggcuauggauua

SEQ ID NO: 854347 - RNA, 19 nt, Artificial Sequence
  Description of Artificial Sequence: Synthetic oligonucleotide
  Antisense strand to SEQ ID NO: 854346
uaauccauagccuagagag

SEQ ID NO: 854348 - RNA, 19 nt, Artificial Sequence
  Description of Artificial Sequence: Synthetic oligonucleotide
  Sense strand starting at position 2785 of SEQ ID NO: 588282
gacauuuaaugucaggauu

SEQ ID NO: 854349 - RNA, 19 nt, Artificial Sequence
  Description of Artificial Sequence: Synthetic oligonucleotide
  Antisense strand to SEQ ID NO: 854348
aauccugacauuaaauguc

SEQ ID NO: 854350 - RNA, 19 nt, Artificial Sequence
  Description of Artificial Sequence: Synthetic oligonucleotide
  Sense strand starting at position 3204 of SEQ ID NO: 588282
uuguguaaccauuacuacu

SEQ ID NO: 854351 - RNA, 19 nt, Artificial Sequence
  Description of Artificial Sequence: Synthetic oligonucleotide
  Antisense strand to SEQ ID NO: 854350
aguaguaaugguuacacaa

SEQ ID NO: 854352 - RNA, 19 nt, Artificial Sequence
  Description of Artificial Sequence: Synthetic oligonucleotide
  Sense strand starting at position 3217 of SEQ ID NO: 588282
acuacuguuuauucccaga

SEQ ID NO: 854353 - RNA, 19 nt, Artificial Sequence
  Description of Artificial Sequence: Synthetic oligonucleotide
  Antisense strand to SEQ ID NO: 854352
ucugggaauaaacaguagu

SEQ ID NO: 854354 - RNA, 19 nt, Artificial Sequence
  Description of Artificial Sequence: Synthetic oligonucleotide
  Sense strand starting at position 3222 of SEQ ID NO: 588282
uguuuauucccagagcuug

SEQ ID NO: 854355 - RNA, 19 nt, Artificial Sequence
  Description of Artificial Sequence: Synthetic oligonucleotide
  Antisense strand to SEQ ID NO: 854354
caagcucugggaauaaaca

SEQ ID NO: 854356 - RNA, 19 nt, Artificial Sequence
  Description of Artificial Sequence: Synthetic oligonucleotide
  Sense strand starting at position 3263 of SEQ ID NO: 588282
guauccauugaauaauagu

SEQ ID NO: 854357 - RNA, 19 nt, Artificial Sequence
  Description of Artificial Sequence: Synthetic oligonucleotide
  Antisense strand to SEQ ID NO: 854356
acuauuauucaauggauac

SEQ ID NO: 854358 - RNA, 19 nt, Artificial Sequence
  Description of Artificial Sequence: Synthetic oligonucleotide
  Sense strand starting at position 3352 of SEQ ID NO: 588282
uuuggagauuauuccucuu

SEQ ID NO: 854359 - RNA, 19 nt, Artificial Sequence
  Description of Artificial Sequence: Synthetic oligonucleotide
  Antisense strand to SEQ ID NO: 854358
aagaggaauaaucuccaaa

SEQ ID NO: 854360 - RNA, 19 nt, Artificial Sequence
  Description of Artificial Sequence: Synthetic oligonucleotide
  Sense strand starting at position 3700 of SEQ ID NO: 588282
cagucacaauguguagaau

SEQ ID NO: 854361 - RNA, 19 nt, Artificial Sequence
  Description of Artificial Sequence: Synthetic oligonucleotide
  Antisense strand to SEQ ID NO: 854360
auucuacacauugugacug

SEQ ID NO: 854362 - RNA, 19 nt, Artificial Sequence
  Description of Artificial Sequence: Synthetic oligonucleotide
  Sense strand starting at position 3701 of SEQ ID NO: 588282
agucacaauguguagaaua

SEQ ID NO: 854363 - RNA, 19 nt, Artificial Sequence
  Description of Artificial Sequence: Synthetic oligonucleotide
  Antisense strand to SEQ ID NO: 854362
uauucuacacauugugacu

SEQ ID NO: 854364 - RNA, 19 nt, Artificial Sequence
  Description of Artificial Sequence: Synthetic oligonucleotide
  Sense strand starting at position 3784 of SEQ ID NO: 588282
uguaauuuaugagaacaac

SEQ ID NO: 854365 - RNA, 19 nt, Artificial Sequence
  Description of Artificial Sequence: Synthetic oligonucleotide
  Antisense strand to SEQ ID NO: 854364
guuguucucauaaauuaca

SEQ ID NO: 854366 - RNA, 19 nt, Artificial Sequence
  Description of Artificial Sequence: Synthetic oligonucleotide
  Sense strand starting at position 32 of SEQ ID NO: 588283
agccgauuugcgggcagaa

SEQ ID NO: 854367 - RNA, 19 nt, Artificial Sequence
  Description of Artificial Sequence: Synthetic oligonucleotide
  Antisense strand to SEQ ID NO: 854366
uucugcccgcaaaucggcu

SEQ ID NO: 854368 - RNA, 19 nt, Artificial Sequence
  Description of Artificial Sequence: Synthetic oligonucleotide
  Sense strand starting at position 78 of SEQ ID NO: 588283
gguugauacuucucuggga

SEQ ID NO: 854369 - RNA, 19 nt, Artificial Sequence
  Description of Artificial Sequence: Synthetic oligonucleotide
  Antisense strand to SEQ ID NO: 854368
ucccagagaaguaucaacc

SEQ ID NO: 854370 - RNA, 19 nt, Artificial Sequence
  Description of Artificial Sequence: Synthetic oligonucleotide
  Sense strand starting at position 94 of SEQ ID NO: 588283
ggagcuguucuccaagcca

SEQ ID NO: 854371 - RNA, 19 nt, Artificial Sequence
  Description of Artificial Sequence: Synthetic oligonucleotide
  Antisense strand to SEQ ID NO: 854370
uggcuuggagaacagcucc

SEQ ID NO: 854372 - RNA, 19 nt, Artificial Sequence
  Description of Artificial Sequence: Synthetic oligonucleotide
  Sense strand starting at position 160 of SEQ ID NO: 588283
uuagguuauugccugguaa

SEQ ID NO: 854373 - RNA, 19 nt, Artificial Sequence
  Description of Artificial Sequence: Synthetic oligonucleotide
  Antisense strand to SEQ ID NO: 854372
uuaccaggcaauaaccuaa

SEQ ID NO: 854374 - RNA, 19 nt, Artificial Sequence
  Description of Artificial Sequence: Synthetic oligonucleotide
  Sense strand starting at position 161 of SEQ ID NO: 588283
uagguuauugccugguaag

SEQ ID NO: 854375 - RNA, 19 nt, Artificial Sequence
  Description of Artificial Sequence: Synthetic oligonucleotide
  Antisense strand to SEQ ID NO: 854374
cuuaccaggcaauaaccua

SEQ ID NO: 854376 - RNA, 19 nt, Artificial Sequence
  Description of Artificial Sequence: Synthetic oligonucleotide
  Sense strand starting at position 162 of SEQ ID NO: 588283
agguuauugccugguaagg

SEQ ID NO: 854377 - RNA, 19 nt, Artificial Sequence
  Description of Artificial Sequence: Synthetic oligonucleotide
  Antisense strand to SEQ ID NO: 854376
ccuuaccaggcaauaaccu

SEQ ID NO: 854378 - RNA, 19 nt, Artificial Sequence
  Description of Artificial Sequence: Synthetic oligonucleotide
  Sense strand starting at position 195 of SEQ ID NO: 588283
gcuacucucuggcuaucaa

SEQ ID NO: 854379 - RNA, 19 nt, Artificial Sequence
  Description of Artificial Sequence: Synthetic oligonucleotide
  Antisense strand to SEQ ID NO: 854378
uugauagccagagaguagc

SEQ ID NO: 854380 - RNA, 19 nt, Artificial Sequence
  Description of Artificial Sequence: Synthetic oligonucleotide
  Sense strand starting at position 227 of SEQ ID NO: 588283
ggaccauucucuccagagu

SEQ ID NO: 854381 - RNA, 19 nt, Artificial Sequence
  Description of Artificial Sequence: Synthetic oligonucleotide
  Antisense strand to SEQ ID NO: 854380
acucuggagagaauggucc

SEQ ID NO: 854382 - RNA, 19 nt, Artificial Sequence
  Description of Artificial Sequence: Synthetic oligonucleotide
  Sense strand starting at position 278 of SEQ ID NO: 588283
gccauauaaucuucugugu

SEQ ID NO: 854383 - RNA, 19 nt, Artificial Sequence
  Description of Artificial Sequence: Synthetic oligonucleotide
  Antisense strand to SEQ ID NO: 854382
acacagaagauuauauggc

SEQ ID NO: 854384 - RNA, 19 nt, Artificial Sequence
  Description of Artificial Sequence: Synthetic oligonucleotide
  Sense strand starting at position 281 of SEQ ID NO: 588283
auauaaucuucuguguguu

SEQ ID NO: 854385 - RNA, 19 nt, Artificial Sequence
  Description of Artificial Sequence: Synthetic oligonucleotide
  Antisense strand to SEQ ID NO: 854384
aacacacagaagauuauau

SEQ ID NO: 854386 - RNA, 19 nt, Artificial Sequence
  Description of Artificial Sequence: Synthetic oligonucleotide
  Sense strand starting at position 282 of SEQ ID NO: 588283
uauaaucuucuguguguug

SEQ ID NO: 854387 - RNA, 19 nt, Artificial Sequence
  Description of Artificial Sequence: Synthetic oligonucleotide
  Antisense strand to SEQ ID NO: 854386
caacacacagaagauuaua

SEQ ID NO: 854388 - RNA, 19 nt, Artificial Sequence
  Description of Artificial Sequence: Synthetic oligonucleotide
  Sense strand starting at position 428 of SEQ ID NO: 588283
augaguaucugauuagacc

SEQ ID NO: 854389 - RNA, 19 nt, Artificial Sequence
  Description of Artificial Sequence: Synthetic oligonucleotide
  Antisense strand to SEQ ID NO: 854388
ggucuaaucagauacucau

SEQ ID NO: 854390 - RNA, 19 nt, Artificial Sequence
  Description of Artificial Sequence: Synthetic oligonucleotide
  Sense strand starting at position 590 of SEQ ID NO: 588283
cagaguuggaggcguugaa

SEQ ID NO: 854391 - RNA, 19 nt, Artificial Sequence
  Description of Artificial Sequence: Synthetic oligonucleotide
  Antisense strand to SEQ ID NO: 854390
uucaacgccuccaacucug

SEQ ID NO: 854392 - RNA, 19 nt, Artificial Sequence
  Description of Artificial Sequence: Synthetic oligonucleotide
  Sense strand starting at position 631 of SEQ ID NO: 588283
guaugagaagggugugaaa

SEQ ID NO: 854393 - RNA, 19 nt, Artificial Sequence
  Description of Artificial Sequence: Synthetic oligonucleotide
  Antisense strand to SEQ ID NO: 854392
uuucacacccuucucauac

SEQ ID NO: 854394 - RNA, 19 nt, Artificial Sequence
  Description of Artificial Sequence: Synthetic oligonucleotide
  Sense strand starting at position 634 of SEQ ID NO: 588283
ugagaagggugugaaagau

SEQ ID NO: 854395 - RNA, 19 nt, Artificial Sequence
  Description of Artificial Sequence: Synthetic oligonucleotide
  Antisense strand to SEQ ID NO: 854394
aucuuucacacccuucuca

SEQ ID NO: 854396 - RNA, 19 nt, Artificial Sequence
  Description of Artificial Sequence: Synthetic oligonucleotide
  Sense strand starting at position 660 of SEQ ID NO: 588283
gggugagaagcuuaaggca

SEQ ID NO: 854397 - RNA, 19 nt, Artificial Sequence
  Description of Artificial Sequence: Synthetic oligonucleotide
  Antisense strand to SEQ ID NO: 854396
ugccuuaagcuucucaccc

SEQ ID NO: 854398 - RNA, 19 nt, Artificial Sequence
  Description of Artificial Sequence: Synthetic oligonucleotide
  Sense strand starting at position 836 of SEQ ID NO: 588283
ggagaugagcuaugucuuc

SEQ ID NO: 854399 - RNA, 19 nt, Artificial Sequence
  Description of Artificial Sequence: Synthetic oligonucleotide
  Antisense strand to SEQ ID NO: 854398
gaagacauagcucaucucc

SEQ ID NO: 854400 - RNA, 19 nt, Artificial Sequence
  Description of Artificial Sequence: Synthetic oligonucleotide
  Sense strand starting at position 1899 of SEQ ID NO: 588283
cuguuuaguccacggcaaa

SEQ ID NO: 854401 - RNA, 19 nt, Artificial Sequence
  Description of Artificial Sequence: Synthetic oligonucleotide
  Antisense strand to SEQ ID NO: 854400
uuugccguggacuaaacag

SEQ ID NO: 854402 - RNA, 19 nt, Artificial Sequence
  Description of Artificial Sequence: Synthetic oligonucleotide
  Sense strand starting at position 1900 of SEQ ID NO: 588283
uguuuaguccacggcaaag

SEQ ID NO: 854403 - RNA, 19 nt, Artificial Sequence
  Description of Artificial Sequence: Synthetic oligonucleotide
  Antisense strand to SEQ ID NO: 854402
cuuugccguggacuaaaca

SEQ ID NO: 854404 - RNA, 19 nt, Artificial Sequence
  Description of Artificial Sequence: Synthetic oligonucleotide
  Sense strand starting at position 1983 of SEQ ID NO: 588283
gcaucagggcuuuagaaga

SEQ ID NO: 854405 - RNA, 19 nt, Artificial Sequence
  Description of Artificial Sequence: Synthetic oligonucleotide
  Antisense strand to SEQ ID NO: 854404
ucuucuaaagcccugaugc

SEQ ID NO: 854406 - RNA, 19 nt, Artificial Sequence
  Description of Artificial Sequence: Synthetic oligonucleotide
  Sense strand starting at position 1996 of SEQ ID NO: 588283
agaagaaucugguaaggaa

SEQ ID NO: 854407 - RNA, 19 nt, Artificial Sequence
  Description of Artificial Sequence: Synthetic oligonucleotide
  Antisense strand to SEQ ID NO: 854406
uuccuuaccagauucuucu

SEQ ID NO: 854408 - RNA, 19 nt, Artificial Sequence
  Description of Artificial Sequence: Synthetic oligonucleotide
  Sense strand starting at position 2233 of SEQ ID NO: 588283
aagcguugagaauggugaa

SEQ ID NO: 854409 - RNA, 19 nt, Artificial Sequence
  Description of Artificial Sequence: Synthetic oligonucleotide
  Antisense strand to SEQ ID NO: 854408
uucaccauucucaacgcuu

SEQ ID NO: 854410 - RNA, 19 nt, Artificial Sequence
  Description of Artificial Sequence: Synthetic oligonucleotide
  Sense strand starting at position 2234 of SEQ ID NO: 588283
agcguugagaauggugaaa

SEQ ID NO: 854411 - RNA, 19 nt, Artificial Sequence
  Description of Artificial Sequence: Synthetic oligonucleotide
  Antisense strand to SEQ ID NO: 854410
uuucaccauucucaacgcu

SEQ ID NO: 854412 - RNA, 19 nt, Artificial Sequence
  Description of Artificial Sequence: Synthetic oligonucleotide
  Sense strand starting at position 2281 of SEQ ID NO: 588283
agaaauggaguuuggcuaa

SEQ ID NO: 854413 - RNA, 19 nt, Artificial Sequence
  Description of Artificial Sequence: Synthetic oligonucleotide
  Antisense strand to SEQ ID NO: 854412
uuagccaaacuccauuucu

SEQ ID NO: 854414 - RNA, 19 nt, Artificial Sequence
  Description of Artificial Sequence: Synthetic oligonucleotide
  Sense strand starting at position 2284 of SEQ ID NO: 588283
aauggaguuuggcuaaguu

SEQ ID NO: 854415 - RNA, 19 nt, Artificial Sequence
  Description of Artificial Sequence: Synthetic oligonucleotide
  Antisense strand to SEQ ID NO: 854414
aacuuagccaaacuccauu

SEQ ID NO: 854416 - RNA, 19 nt, Artificial Sequence
  Description of Artificial Sequence: Synthetic oligonucleotide
  Sense strand starting at position 2294 of SEQ ID NO: 588283
ggcuaaguuuccuuaggcu

SEQ ID NO: 854417 - RNA, 19 nt, Artificial Sequence
  Description of Artificial Sequence: Synthetic oligonucleotide
  Antisense strand to SEQ ID NO: 854416
agccuaaggaaacuuagcc

SEQ ID NO: 854418 - RNA, 19 nt, Artificial Sequence
  Description of Artificial Sequence: Synthetic oligonucleotide
  Sense strand starting at position 2303 of SEQ ID NO: 588283
uccuuaggcugcucuugaa

SEQ ID NO: 854419 - RNA, 19 nt, Artificial Sequence
  Description of Artificial Sequence: Synthetic oligonucleotide
  Antisense strand to SEQ ID NO: 854418
uucaagagcagccuaagga

SEQ ID NO: 854420 - RNA, 19 nt, Artificial Sequence
  Description of Artificial Sequence: Synthetic oligonucleotide
  Sense strand starting at position 2395 of SEQ ID NO: 588283
cagucugagagugguggaa

SEQ ID NO: 854421 - RNA, 19 nt, Artificial Sequence
  Description of Artificial Sequence: Synthetic oligonucleotide
  Antisense strand to SEQ ID NO: 854420
uuccaccacucucagacug

SEQ ID NO: 854422 - RNA, 19 nt, Artificial Sequence
  Description of Artificial Sequence: Synthetic oligonucleotide
  Sense strand starting at position 2434 of SEQ ID NO: 588283
cucugcuuauggguuacaa

SEQ ID NO: 854423 - RNA, 19 nt, Artificial Sequence
  Description of Artificial Sequence: Synthetic oligonucleotide
  Antisense strand to SEQ ID NO: 854422
uuguaacccauaagcagag

SEQ ID NO: 854424 - RNA, 19 nt, Artificial Sequence
  Description of Artificial Sequence: Synthetic oligonucleotide
  Sense strand starting at position 2452 of SEQ ID NO: 588283
acgucucuuccucaguauu

SEQ ID NO: 854425 - RNA, 19 nt, Artificial Sequence
  Description of Artificial Sequence: Synthetic oligonucleotide
  Antisense strand to SEQ ID NO: 854424
aauacugaggaagagacgu

SEQ ID NO: 854426 - RNA, 19 nt, Artificial Sequence
  Description of Artificial Sequence: Synthetic oligonucleotide
  Sense strand starting at position 2847 of SEQ ID NO: 588283
ggugaugcaguuugaggaa

SEQ ID NO: 854427 - RNA, 19 nt, Artificial Sequence
  Description of Artificial Sequence: Synthetic oligonucleotide
  Antisense strand to SEQ ID NO: 854426
uuccucaaacugcaucacc

SEQ ID NO: 854428 - RNA, 19 nt, Artificial Sequence
  Description of Artificial Sequence: Synthetic oligonucleotide
  Sense strand starting at position 2861 of SEQ ID NO: 588283
aggaacugcucuuuaugga

SEQ ID NO: 854429 - RNA, 19 nt, Artificial Sequence
  Description of Artificial Sequence: Synthetic oligonucleotide
  Antisense strand to SEQ ID NO: 854428
uccauaaagagcaguuccu

SEQ ID NO: 854430 - RNA, 19 nt, Artificial Sequence
  Description of Artificial Sequence: Synthetic oligonucleotide
  Sense strand starting at position 2876 of SEQ ID NO: 588283
uggagaaauauauguagcu

SEQ ID NO: 854431 - RNA, 19 nt, Artificial Sequence
  Description of Artificial Sequence: Synthetic oligonucleotide
  Antisense strand to SEQ ID NO: 854430
agcuacauauauuucucca

SEQ ID NO: 854432 - RNA, 19 nt, Artificial Sequence
  Description of Artificial Sequence: Synthetic oligonucleotide
  Sense strand starting at position 3176 of SEQ ID NO: 588283
gugauuuaaguuuggccua

SEQ ID NO: 854433 - RNA, 19 nt, Artificial Sequence
  Description of Artificial Sequence: Synthetic oligonucleotide
  Antisense strand to SEQ ID NO: 854432
uaggccaaacuuaaaucac

SEQ ID NO: 854434 - RNA, 19 nt, Artificial Sequence
  Description of Artificial Sequence: Synthetic oligonucleotide
  Sense strand starting at position 3212 of SEQ ID NO: 588283
agcgaauuguaaucuaaau

SEQ ID NO: 854435 - RNA, 19 nt, Artificial Sequence
  Description of Artificial Sequence: Synthetic oligonucleotide
  Antisense strand to SEQ ID NO: 854434
auuuagauuacaauucgcu

SEQ ID NO: 854436 - RNA, 19 nt, Artificial Sequence
  Description of Artificial Sequence: Synthetic oligonucleotide
  Sense strand starting at position 3218 of SEQ ID NO: 588283
uuguaaucuaaauggaggu

SEQ ID NO: 854437 - RNA, 19 nt, Artificial Sequence
  Description of Artificial Sequence: Synthetic oligonucleotide
  Antisense strand to SEQ ID NO: 854436
accuccauuuagauuacaa

SEQ ID NO: 854438 - RNA, 19 nt, Artificial Sequence
  Description of Artificial Sequence: Synthetic oligonucleotide
  Sense strand starting at position 3222 of SEQ ID NO: 588283
aaucuaaauggagguguaa

SEQ ID NO: 854439 - RNA, 19 nt, Artificial Sequence
  Description of Artificial Sequence: Synthetic oligonucleotide
  Antisense strand to SEQ ID NO: 854438
uuacaccuccauuuagauu

SEQ ID NO: 854440 - RNA, 19 nt, Artificial Sequence
  Description of Artificial Sequence: Synthetic oligonucleotide
  Sense strand starting at position 3659 of SEQ ID NO: 588283
aaagcugucaggugguuau

SEQ ID NO: 854441 - RNA, 19 nt, Artificial Sequence
  Description of Artificial Sequence: Synthetic oligonucleotide
  Antisense strand to SEQ ID NO: 854440
auaaccaccugacagcuuu

SEQ ID NO: 854442 - RNA, 19 nt, Artificial Sequence
  Description of Artificial Sequence: Synthetic oligonucleotide
  Sense strand starting at position 3662 of SEQ ID NO: 588283
gcugucaggugguuauaua

SEQ ID NO: 854443 - RNA, 19 nt, Artificial Sequence
  Description of Artificial Sequence: Synthetic oligonucleotide
  Antisense strand to SEQ ID NO: 854442
uauauaaccaccugacagc

SEQ ID NO: 854444 - RNA, 19 nt, Artificial Sequence
  Description of Artificial Sequence: Synthetic oligonucleotide
  Sense strand starting at position 3663 of SEQ ID NO: 588283
cugucaggugguuauauaa

SEQ ID NO: 854445 - RNA, 19 nt, Artificial Sequence
  Description of Artificial Sequence: Synthetic oligonucleotide
  Antisense strand to SEQ ID NO: 854444
uuauauaaccaccugacag

SEQ ID NO: 854446 - RNA, 19 nt, Artificial Sequence
  Description of Artificial Sequence: Synthetic oligonucleotide
  Sense strand starting at position 40 of SEQ ID NO: 588284
auuucugguuucgaaagca

SEQ ID NO: 854447 - RNA, 19 nt, Artificial Sequence
  Description of Artificial Sequence: Synthetic oligonucleotide
  Antisense strand to SEQ ID NO: 854446
ugcuuucgaaaccagaaau

SEQ ID NO: 854448 - RNA, 19 nt, Artificial Sequence
  Description of Artificial Sequence: Synthetic oligonucleotide
  Sense strand starting at position 328 of SEQ ID NO: 588284
uggacuuuaugucuacuua

SEQ ID NO: 854449 - RNA, 19 nt, Artificial Sequence
  Description of Artificial Sequence: Synthetic oligonucleotide
  Antisense strand to SEQ ID NO: 854448
uaaguagacauaaagucca

SEQ ID NO: 854450 - RNA, 19 nt, Artificial Sequence
  Description of Artificial Sequence: Synthetic oligonucleotide
  Sense strand starting at position 329 of SEQ ID NO: 588284
ggacuuuaugucuacuuac

SEQ ID NO: 854451 - RNA, 19 nt, Artificial Sequence
  Description of Artificial Sequence: Synthetic oligonucleotide
  Antisense strand to SEQ ID NO: 854450
guaaguagacauaaagucc

SEQ ID NO: 854452 - RNA, 19 nt, Artificial Sequence
  Description of Artificial Sequence: Synthetic oligonucleotide
  Sense strand starting at position 365 of SEQ ID NO: 588284
agccgauuugcgggcagaa

SEQ ID NO: 854453 - RNA, 19 nt, Artificial Sequence
  Description of Artificial Sequence: Synthetic oligonucleotide
  Antisense strand to SEQ ID NO: 854452
uucugcccgcaaaucggcu

SEQ ID NO: 854454 - RNA, 19 nt, Artificial Sequence
  Description of Artificial Sequence: Synthetic oligonucleotide
  Sense strand starting at position 411 of SEQ ID NO: 588284
gguugauacuucucuggga

SEQ ID NO: 854455 - RNA, 19 nt, Artificial Sequence
  Description of Artificial Sequence: Synthetic oligonucleotide
  Antisense strand to SEQ ID NO: 854454
ucccagagaaguaucaacc

SEQ ID NO: 854456 - RNA, 19 nt, Artificial Sequence
  Description of Artificial Sequence: Synthetic oligonucleotide
  Sense strand starting at position 427 of SEQ ID NO: 588284
ggagcuguucuccaagcca

SEQ ID NO: 854457 - RNA, 19 nt, Artificial Sequence
  Description of Artificial Sequence: Synthetic oligonucleotide
  Antisense strand to SEQ ID NO: 854456
uggcuuggagaacagcucc

SEQ ID NO: 854458 - RNA, 19 nt, Artificial Sequence
  Description of Artificial Sequence: Synthetic oligonucleotide
  Sense strand starting at position 493 of SEQ ID NO: 588284
uuagguuauugccugguaa

SEQ ID NO: 854459 - RNA, 19 nt, Artificial Sequence
  Description of Artificial Sequence: Synthetic oligonucleotide
  Antisense strand to SEQ ID NO: 854458
uuaccaggcaauaaccuaa

SEQ ID NO: 854460 - RNA, 19 nt, Artificial Sequence
  Description of Artificial Sequence: Synthetic oligonucleotide
  Sense strand starting at position 494 of SEQ ID NO: 588284
uagguuauugccugguaag

SEQ ID NO: 854461 - RNA, 19 nt, Artificial Sequence
  Description of Artificial Sequence: Synthetic oligonucleotide
  Antisense strand to SEQ ID NO: 854460
cuuaccaggcaauaaccua

SEQ ID NO: 854462 - RNA, 19 nt, Artificial Sequence
  Description of Artificial Sequence: Synthetic oligonucleotide
  Sense strand starting at position 495 of SEQ ID NO: 588284
agguuauugccugguaagg

SEQ ID NO: 854463 - RNA, 19 nt, Artificial Sequence
  Description of Artificial Sequence: Synthetic oligonucleotide
  Antisense strand to SEQ ID NO: 854462
ccuuaccaggcaauaaccu

SEQ ID NO: 854464 - RNA, 19 nt, Artificial Sequence
  Description of Artificial Sequence: Synthetic oligonucleotide
  Sense strand starting at position 528 of SEQ ID NO: 588284
gcuacucucuggcuaucaa

SEQ ID NO: 854465 - RNA, 19 nt, Artificial Sequence
  Description of Artificial Sequence: Synthetic oligonucleotide
  Antisense strand to SEQ ID NO: 854464
uugauagccagagaguagc

SEQ ID NO: 854466 - RNA, 19 nt, Artificial Sequence
  Description of Artificial Sequence: Synthetic oligonucleotide
  Sense strand starting at position 560 of SEQ ID NO: 588284
ggaccauucucuccagagu

SEQ ID NO: 854467 - RNA, 19 nt, Artificial Sequence
  Description of Artificial Sequence: Synthetic oligonucleotide
  Antisense strand to SEQ ID NO: 854466
acucuggagagaauggucc

SEQ ID NO: 854468 - RNA, 19 nt, Artificial Sequence
  Description of Artificial Sequence: Synthetic oligonucleotide
  Sense strand starting at position 611 of SEQ ID NO: 588284
gccauauaaucuucugugu

SEQ ID NO: 854469 - RNA, 19 nt, Artificial Sequence
  Description of Artificial Sequence: Synthetic oligonucleotide
  Antisense strand to SEQ ID NO: 854468
acacagaagauuauauggc

SEQ ID NO: 854470 - RNA, 19 nt, Artificial Sequence
  Description of Artificial Sequence: Synthetic oligonucleotide
  Sense strand starting at position 614 of SEQ ID NO: 588284
auauaaucuucuguguguu

SEQ ID NO: 854471 - RNA, 19 nt, Artificial Sequence
  Description of Artificial Sequence: Synthetic oligonucleotide
  Antisense strand to SEQ ID NO: 854470
aacacacagaagauuauau

SEQ ID NO: 854472 - RNA, 19 nt, Artificial Sequence
  Description of Artificial Sequence: Synthetic oligonucleotide
  Sense strand starting at position 615 of SEQ ID NO: 588284
uauaaucuucuguguguug

SEQ ID NO: 854473 - RNA, 19 nt, Artificial Sequence
  Description of Artificial Sequence: Synthetic oligonucleotide
  Antisense strand to SEQ ID NO: 854472
caacacacagaagauuaua

SEQ ID NO: 854474 - RNA, 19 nt, Artificial Sequence
  Description of Artificial Sequence: Synthetic oligonucleotide
  Sense strand starting at position 761 of SEQ ID NO: 588284
augaguaucugauuagacc

SEQ ID NO: 854475 - RNA, 19 nt, Artificial Sequence
  Description of Artificial Sequence: Synthetic oligonucleotide
  Antisense strand to SEQ ID NO: 854474
ggucuaaucagauacucau

SEQ ID NO: 854476 - RNA, 19 nt, Artificial Sequence
  Description of Artificial Sequence: Synthetic oligonucleotide
  Sense strand starting at position 923 of SEQ ID NO: 588284
cagaguuggaggcguugaa

SEQ ID NO: 854477 - RNA, 19 nt, Artificial Sequence
  Description of Artificial Sequence: Synthetic oligonucleotide
  Antisense strand to SEQ ID NO: 854476
uucaacgccuccaacucug

SEQ ID NO: 854478 - RNA, 19 nt, Artificial Sequence
  Description of Artificial Sequence: Synthetic oligonucleotide
  Sense strand starting at position 964 of SEQ ID NO: 588284
guaugagaagggugugaaa

SEQ ID NO: 854479 - RNA, 19 nt, Artificial Sequence
  Description of Artificial Sequence: Synthetic oligonucleotide
  Antisense strand to SEQ ID NO: 854478
uuucacacccuucucauac

SEQ ID NO: 854480 - RNA, 19 nt, Artificial Sequence
  Description of Artificial Sequence: Synthetic oligonucleotide
  Sense strand starting at position 967 of SEQ ID NO: 588284
ugagaagggugugaaagau

SEQ ID NO: 854481 - RNA, 19 nt, Artificial Sequence
  Description of Artificial Sequence: Synthetic oligonucleotide
  Antisense strand to SEQ ID NO: 854480
aucuuucacacccuucuca

SEQ ID NO: 854482 - RNA, 19 nt, Artificial Sequence
  Description of Artificial Sequence: Synthetic oligonucleotide
  Sense strand starting at position 993 of SEQ ID NO: 588284
gggugagaagcuuaaggca

SEQ ID NO: 854483 - RNA, 19 nt, Artificial Sequence
  Description of Artificial Sequence: Synthetic oligonucleotide
  Antisense strand to SEQ ID NO: 854482
ugccuuaagcuucucaccc

SEQ ID NO: 854484 - RNA, 19 nt, Artificial Sequence
  Description of Artificial Sequence: Synthetic oligonucleotide
  Sense strand starting at position 1169 of SEQ ID NO: 588284
ggagaugagcuaugucuuc

SEQ ID NO: 854485 - RNA, 19 nt, Artificial Sequence
  Description of Artificial Sequence: Synthetic oligonucleotide
  Antisense strand to SEQ ID NO: 854484
gaagacauagcucaucucc

SEQ ID NO: 854486 - RNA, 19 nt, Artificial Sequence
  Description of Artificial Sequence: Synthetic oligonucleotide
  Sense strand starting at position 2232 of SEQ ID NO: 588284
cuguuuaguccacggcaaa

SEQ ID NO: 854487 - RNA, 19 nt, Artificial Sequence
  Description of Artificial Sequence: Synthetic oligonucleotide
  Antisense strand to SEQ ID NO: 854486
uuugccguggacuaaacag

SEQ ID NO: 854488 - RNA, 19 nt, Artificial Sequence
  Description of Artificial Sequence: Synthetic oligonucleotide
  Sense strand starting at position 2233 of SEQ ID NO: 588284
uguuuaguccacggcaaag

SEQ ID NO: 854489 - RNA, 19 nt, Artificial Sequence
  Description of Artificial Sequence: Synthetic oligonucleotide
  Antisense strand to SEQ ID NO: 854488
cuuugccguggacuaaaca

SEQ ID NO: 854490 - RNA, 19 nt, Artificial Sequence
  Description of Artificial Sequence: Synthetic oligonucleotide
  Sense strand starting at position 2316 of SEQ ID NO: 588284
gcaucagggcuuuagaaga

SEQ ID NO: 854491 - RNA, 19 nt, Artificial Sequence
  Description of Artificial Sequence: Synthetic oligonucleotide
  Antisense strand to SEQ ID NO: 854490
ucuucuaaagcccugaugc

SEQ ID NO: 854492 - RNA, 19 nt, Artificial Sequence
  Description of Artificial Sequence: Synthetic oligonucleotide
  Sense strand starting at position 2329 of SEQ ID NO: 588284
agaagaaucugguaaggaa

SEQ ID NO: 854493 - RNA, 19 nt, Artificial Sequence
  Description of Artificial Sequence: Synthetic oligonucleotide
  Antisense strand to SEQ ID NO: 854492
uuccuuaccagauucuucu

SEQ ID NO: 854494 - RNA, 19 nt, Artificial Sequence
  Description of Artificial Sequence: Synthetic oligonucleotide
  Sense strand starting at position 2566 of SEQ ID NO: 588284
aagcguugagaauggugaa

SEQ ID NO: 854495 - RNA, 19 nt, Artificial Sequence
  Description of Artificial Sequence: Synthetic oligonucleotide
  Antisense strand to SEQ ID NO: 854494
uucaccauucucaacgcuu

SEQ ID NO: 854496 - RNA, 19 nt, Artificial Sequence
  Description of Artificial Sequence: Synthetic oligonucleotide
  Sense strand starting at position 2567 of SEQ ID NO: 588284
agcguugagaauggugaaa

SEQ ID NO: 854497 - RNA, 19 nt, Artificial Sequence
  Description of Artificial Sequence: Synthetic oligonucleotide
  Antisense strand to SEQ ID NO: 854496
uuucaccauucucaacgcu

SEQ ID NO: 854498 - RNA, 19 nt, Artificial Sequence
  Description of Artificial Sequence: Synthetic oligonucleotide
  Sense strand starting at position 2614 of SEQ ID NO: 588284
agaaauggaguuuggcuaa

SEQ ID NO: 854499 - RNA, 19 nt, Artificial Sequence
  Description of Artificial Sequence: Synthetic oligonucleotide
  Antisense strand to SEQ ID NO: 854498
uuagccaaacuccauuucu

SEQ ID NO: 854500 - RNA, 19 nt, Artificial Sequence
  Description of Artificial Sequence: Synthetic oligonucleotide
  Sense strand starting at position 2617 of SEQ ID NO: 588284
aauggaguuuggcuaaguu

SEQ ID NO: 854501 - RNA, 19 nt, Artificial Sequence
  Description of Artificial Sequence: Synthetic oligonucleotide
  Antisense strand to SEQ ID NO: 854500
aacuuagccaaacuccauu

SEQ ID NO: 854502 - RNA, 19 nt, Artificial Sequence
  Description of Artificial Sequence: Synthetic oligonucleotide
  Sense strand starting at position 2627 of SEQ ID NO: 588284
ggcuaaguuuccuuaggcu

SEQ ID NO: 854503 - RNA, 19 nt, Artificial Sequence
  Description of Artificial Sequence: Synthetic oligonucleotide
  Antisense strand to SEQ ID NO: 854502
agccuaaggaaacuuagcc

SEQ ID NO: 854504 - RNA, 19 nt, Artificial Sequence
  Description of Artificial Sequence: Synthetic oligonucleotide
  Sense strand starting at position 2636 of SEQ ID NO: 588284
uccuuaggcugcucuugaa

SEQ ID NO: 854505 - RNA, 19 nt, Artificial Sequence
  Description of Artificial Sequence: Synthetic oligonucleotide
  Antisense strand to SEQ ID NO: 854504
uucaagagcagccuaagga

SEQ ID NO: 854506 - RNA, 19 nt, Artificial Sequence
  Description of Artificial Sequence: Synthetic oligonucleotide
  Sense strand starting at position 2728 of SEQ ID NO: 588284
cagucugagagugguggaa

SEQ ID NO: 854507 - RNA, 19 nt, Artificial Sequence
  Description of Artificial Sequence: Synthetic oligonucleotide
  Antisense strand to SEQ ID NO: 854506
uuccaccacucucagacug

SEQ ID NO: 854508 - RNA, 19 nt, Artificial Sequence
  Description of Artificial Sequence: Synthetic oligonucleotide
  Sense strand starting at position 2767 of SEQ ID NO: 588284
cucugcuuauggguuacaa

SEQ ID NO: 854509 - RNA, 19 nt, Artificial Sequence
  Description of Artificial Sequence: Synthetic oligonucleotide
  Antisense strand to SEQ ID NO: 854508
uuguaacccauaagcagag

SEQ ID NO: 854510 - RNA, 19 nt, Artificial Sequence
  Description of Artificial Sequence: Synthetic oligonucleotide
  Sense strand starting at position 2785 of SEQ ID NO: 588284
acgucucuuccucaguauu

SEQ ID NO: 854511 - RNA, 19 nt, Artificial Sequence
  Description of Artificial Sequence: Synthetic oligonucleotide
  Antisense strand to SEQ ID NO: 854510
aauacugaggaagagacgu

SEQ ID NO: 854512 - RNA, 19 nt, Artificial Sequence
  Description of Artificial Sequence: Synthetic oligonucleotide
  Sense strand starting at position 3180 of SEQ ID NO: 588284
ggugaugcaguuugaggaa

SEQ ID NO: 854513 - RNA, 19 nt, Artificial Sequence
  Description of Artificial Sequence: Synthetic oligonucleotide
  Antisense strand to SEQ ID NO: 854512
uuccucaaacugcaucacc

SEQ ID NO: 854514 - RNA, 19 nt, Artificial Sequence
  Description of Artificial Sequence: Synthetic oligonucleotide
  Sense strand starting at position 3194 of SEQ ID NO: 588284
aggaacugcucuuuaugga

SEQ ID NO: 854515 - RNA, 19 nt, Artificial Sequence
  Description of Artificial Sequence: Synthetic oligonucleotide
  Antisense strand to SEQ ID NO: 854514
uccauaaagagcaguuccu

SEQ ID NO: 854516 - RNA, 19 nt, Artificial Sequence
  Description of Artificial Sequence: Synthetic oligonucleotide
  Sense strand starting at position 3209 of SEQ ID NO: 588284
uggagaaauauauguagcu

SEQ ID NO: 854517 - RNA, 19 nt, Artificial Sequence
  Description of Artificial Sequence: Synthetic oligonucleotide
  Antisense strand to SEQ ID NO: 854516
agcuacauauauuucucca

SEQ ID NO: 854518 - RNA, 19 nt, Artificial Sequence
  Description of Artificial Sequence: Synthetic oligonucleotide
  Sense strand starting at position 3509 of SEQ ID NO: 588284
gugauuuaaguuuggccua

SEQ ID NO: 854519 - RNA, 19 nt, Artificial Sequence
  Description of Artificial Sequence: Synthetic oligonucleotide
  Antisense strand to SEQ ID NO: 854518
uaggccaaacuuaaaucac

SEQ ID NO: 854520 - RNA, 19 nt, Artificial Sequence
  Description of Artificial Sequence: Synthetic oligonucleotide
  Sense strand starting at position 3545 of SEQ ID NO: 588284
agcgaauuguaaucuaaau

SEQ ID NO: 854521 - RNA, 19 nt, Artificial Sequence
  Description of Artificial Sequence: Synthetic oligonucleotide
  Antisense strand to SEQ ID NO: 854520
auuuagauuacaauucgcu

SEQ ID NO: 854522 - RNA, 19 nt, Artificial Sequence
  Description of Artificial Sequence: Synthetic oligonucleotide
  Sense strand starting at position 3551 of SEQ ID NO: 588284
uuguaaucuaaauggaggu

SEQ ID NO: 854523 - RNA, 19 nt, Artificial Sequence
  Description of Artificial Sequence: Synthetic oligonucleotide
  Antisense strand to SEQ ID NO: 854522
accuccauuuagauuacaa

SEQ ID NO: 854524 - RNA, 19 nt, Artificial Sequence
  Description of Artificial Sequence: Synthetic oligonucleotide
  Sense strand starting at position 3555 of SEQ ID NO: 588284
aaucuaaauggagguguaa

SEQ ID NO: 854525 - RNA, 19 nt, Artificial Sequence
  Description of Artificial Sequence: Synthetic oligonucleotide
  Antisense strand to SEQ ID NO: 854524
uuacaccuccauuuagauu

SEQ ID NO: 854526 - RNA, 19 nt, Artificial Sequence
  Description of Artificial Sequence: Synthetic oligonucleotide
  Sense strand starting at position 18 of SEQ ID NO: 588285
agcaucuaguugguagaga

SEQ ID NO: 854527 - RNA, 19 nt, Artificial Sequence
  Description of Artificial Sequence: Synthetic oligonucleotide
  Antisense strand to SEQ ID NO: 854526
ucucuaccaacuagaugcu

SEQ ID NO: 854528 - RNA, 19 nt, Artificial Sequence
  Description of Artificial Sequence: Synthetic oligonucleotide
  Sense strand starting at position 182 of SEQ ID NO: 588285
ugucuacaucaaggugaau

SEQ ID NO: 854529 - RNA, 19 nt, Artificial Sequence
  Description of Artificial Sequence: Synthetic oligonucleotide
  Antisense strand to SEQ ID NO: 854528
auucaccuugauguagaca

SEQ ID NO: 854530 - RNA, 19 nt, Artificial Sequence
  Description of Artificial Sequence: Synthetic oligonucleotide
  Sense strand starting at position 397 of SEQ ID NO: 588285
uuauaaaugggcugaguug

SEQ ID NO: 854531 - RNA, 19 nt, Artificial Sequence
  Description of Artificial Sequence: Synthetic oligonucleotide
  Antisense strand to SEQ ID NO: 854530
caacucagcccauuuauaa

SEQ ID NO: 854532 - RNA, 19 nt, Artificial Sequence
  Description of Artificial Sequence: Synthetic oligonucleotide
  Sense strand starting at position 406 of SEQ ID NO: 588285
ggcugaguugacuaacaca

SEQ ID NO: 854533 - RNA, 19 nt, Artificial Sequence
  Description of Artificial Sequence: Synthetic oligonucleotide
  Antisense strand to SEQ ID NO: 854532
uguguuagucaacucagcc

SEQ ID NO: 854534 - RNA, 19 nt, Artificial Sequence
  Description of Artificial Sequence: Synthetic oligonucleotide
  Sense strand starting at position 576 of SEQ ID NO: 588285
gccauaggcacagaaaugu

SEQ ID NO: 854535 - RNA, 19 nt, Artificial Sequence
  Description of Artificial Sequence: Synthetic oligonucleotide
  Antisense strand to SEQ ID NO: 854534
acauuucugugccuauggc

SEQ ID NO: 854536 - RNA, 19 nt, Artificial Sequence
  Description of Artificial Sequence: Synthetic oligonucleotide
  Sense strand starting at position 612 of SEQ ID NO: 588285
cucugccauccuuagaaga

SEQ ID NO: 854537 - RNA, 19 nt, Artificial Sequence
  Description of Artificial Sequence: Synthetic oligonucleotide
  Antisense strand to SEQ ID NO: 854536
ucuucuaaggauggcagag

SEQ ID NO: 854538 - RNA, 19 nt, Artificial Sequence
  Description of Artificial Sequence: Synthetic oligonucleotide
  Sense strand starting at position 695 of SEQ ID NO: 588285
ugaauugggagcugucacu

SEQ ID NO: 854539 - RNA, 19 nt, Artificial Sequence
  Description of Artificial Sequence: Synthetic oligonucleotide
  Antisense strand to SEQ ID NO: 854538
agugacagcucccaauuca

SEQ ID NO: 854540 - RNA, 19 nt, Artificial Sequence
  Description of Artificial Sequence: Synthetic oligonucleotide
  Sense strand starting at position 782 of SEQ ID NO: 588285
gccauuugauuaugauuuc

SEQ ID NO: 854541 - RNA, 19 nt, Artificial Sequence
  Description of Artificial Sequence: Synthetic oligonucleotide
  Antisense strand to SEQ ID NO: 854540
gaaaucauaaucaaauggc

SEQ ID NO: 854542 - RNA, 19 nt, Artificial Sequence
  Description of Artificial Sequence: Synthetic oligonucleotide
  Sense strand starting at position 882 of SEQ ID NO: 588285
agagguuucuaaccauugu

SEQ ID NO: 854543 - RNA, 19 nt, Artificial Sequence
  Description of Artificial Sequence: Synthetic oligonucleotide
  Antisense strand to SEQ ID NO: 854542
acaaugguuagaaaccucu

SEQ ID NO: 854544 - RNA, 19 nt, Artificial Sequence
  Description of Artificial Sequence: Synthetic oligonucleotide
  Sense strand starting at position 918 of SEQ ID NO: 588285
gcuauuugaugcucaugau

SEQ ID NO: 854545 - RNA, 19 nt, Artificial Sequence
  Description of Artificial Sequence: Synthetic oligonucleotide
  Antisense strand to SEQ ID NO: 854544
aucaugagcaucaaauagc

SEQ ID NO: 854546 - RNA, 19 nt, Artificial Sequence
  Description of Artificial Sequence: Synthetic oligonucleotide
  Sense strand starting at position 922 of SEQ ID NO: 588285
uuugaugcucaugauaaca

SEQ ID NO: 854547 - RNA, 19 nt, Artificial Sequence
  Description of Artificial Sequence: Synthetic oligonucleotide
  Antisense strand to SEQ ID NO: 854546
uguuaucaugagcaucaaa

SEQ ID NO: 854548 - RNA, 19 nt, Artificial Sequence
  Description of Artificial Sequence: Synthetic oligonucleotide
  Sense strand starting at position 1137 of SEQ ID NO: 588285
ggcaccaguaucuauggaa

SEQ ID NO: 854549 - RNA, 19 nt, Artificial Sequence
  Description of Artificial Sequence: Synthetic oligonucleotide
  Antisense strand to SEQ ID NO: 854548
uuccauagauacuggugcc

SEQ ID NO: 854550 - RNA, 19 nt, Artificial Sequence
  Description of Artificial Sequence: Synthetic oligonucleotide
  Sense strand starting at position 1364 of SEQ ID NO: 588285
acuucucaugucuggauua

SEQ ID NO: 854551 - RNA, 19 nt, Artificial Sequence
  Description of Artificial Sequence: Synthetic oligonucleotide
  Antisense strand to SEQ ID NO: 854550
uaauccagacaugagaagu

SEQ ID NO: 854552 - RNA, 19 nt, Artificial Sequence
  Description of Artificial Sequence: Synthetic oligonucleotide
  Sense strand starting at position 1366 of SEQ ID NO: 588285
uucucaugucuggauuaua

SEQ ID NO: 854553 - RNA, 19 nt, Artificial Sequence
  Description of Artificial Sequence: Synthetic oligonucleotide
  Antisense strand to SEQ ID NO: 854552
uauaauccagacaugagaa

SEQ ID NO: 854554 - RNA, 19 nt, Artificial Sequence
  Description of Artificial Sequence: Synthetic oligonucleotide
  Sense strand starting at position 1376 of SEQ ID NO: 588285
uggauuauaugcuuuacau

SEQ ID NO: 854555 - RNA, 19 nt, Artificial Sequence
  Description of Artificial Sequence: Synthetic oligonucleotide
  Antisense strand to SEQ ID NO: 854554
auguaaagcauauaaucca

SEQ ID NO: 854556 - RNA, 19 nt, Artificial Sequence
  Description of Artificial Sequence: Synthetic oligonucleotide
  Sense strand starting at position 1488 of SEQ ID NO: 588285
aaagguuaacacugcgaua

SEQ ID NO: 854557 - RNA, 19 nt, Artificial Sequence
  Description of Artificial Sequence: Synthetic oligonucleotide
  Antisense strand to SEQ ID NO: 854556
uaucgcaguguuaaccuuu

SEQ ID NO: 854558 - RNA, 19 nt, Artificial Sequence
  Description of Artificial Sequence: Synthetic oligonucleotide
  Sense strand starting at position 1493 of SEQ ID NO: 588285
uuaacacugcgauauaaug

SEQ ID NO: 854559 - RNA, 19 nt, Artificial Sequence
  Description of Artificial Sequence: Synthetic oligonucleotide
  Antisense strand to SEQ ID NO: 854558
cauuauaucgcaguguuaa

SEQ ID NO: 854560 - RNA, 19 nt, Artificial Sequence
  Description of Artificial Sequence: Synthetic oligonucleotide
  Sense strand starting at position 1864 of SEQ ID NO: 588285
uguaaagcuaacgaguauu

SEQ ID NO: 854561 - RNA, 19 nt, Artificial Sequence
  Description of Artificial Sequence: Synthetic oligonucleotide
  Antisense strand to SEQ ID NO: 854560
aauacucguuagcuuuaca

SEQ ID NO: 854562 - RNA, 19 nt, Artificial Sequence
  Description of Artificial Sequence: Synthetic oligonucleotide
  Sense strand starting at position 2011 of SEQ ID NO: 588285
ccaagagcacuuggaauua

SEQ ID NO: 854563 - RNA, 19 nt, Artificial Sequence
  Description of Artificial Sequence: Synthetic oligonucleotide
  Antisense strand to SEQ ID NO: 854562
uaauuccaagugcucuugg

SEQ ID NO: 854564 - RNA, 19 nt, Artificial Sequence
  Description of Artificial Sequence: Synthetic oligonucleotide
  Sense strand starting at position 2110 of SEQ ID NO: 588285
gacuaaaucuagcuaggag

SEQ ID NO: 854565 - RNA, 19 nt, Artificial Sequence
  Description of Artificial Sequence: Synthetic oligonucleotide
  Antisense strand to SEQ ID NO: 854564
cuccuagcuagauuuaguc

SEQ ID NO: 854566 - RNA, 19 nt, Artificial Sequence
  Description of Artificial Sequence: Synthetic oligonucleotide
  Sense strand starting at position 2113 of SEQ ID NO: 588285
uaaaucuagcuaggaguuu

SEQ ID NO: 854567 - RNA, 19 nt, Artificial Sequence
  Description of Artificial Sequence: Synthetic oligonucleotide
  Antisense strand to SEQ ID NO: 854566
aaacuccuagcuagauuua

SEQ ID NO: 854568 - RNA, 19 nt, Artificial Sequence
  Description of Artificial Sequence: Synthetic oligonucleotide
  Sense strand starting at position 2232 of SEQ ID NO: 588285
acauuuaucugugaggauc

SEQ ID NO: 854569 - RNA, 19 nt, Artificial Sequence
  Description of Artificial Sequence: Synthetic oligonucleotide
  Antisense strand to SEQ ID NO: 854568
gauccucacagauaaaugu

SEQ ID NO: 854570 - RNA, 19 nt, Artificial Sequence
  Description of Artificial Sequence: Synthetic oligonucleotide
  Sense strand starting at position 2244 of SEQ ID NO: 588285
gaggaucagcuguaauccu

SEQ ID NO: 854571 - RNA, 19 nt, Artificial Sequence
  Description of Artificial Sequence: Synthetic oligonucleotide
  Antisense strand to SEQ ID NO: 854570
aggauuacagcugauccuc

SEQ ID NO: 854572 - RNA, 19 nt, Artificial Sequence
  Description of Artificial Sequence: Synthetic oligonucleotide
  Sense strand starting at position 2583 of SEQ ID NO: 588285
auauuaguaguuugacuca

SEQ ID NO: 854573 - RNA, 19 nt, Artificial Sequence
  Description of Artificial Sequence: Synthetic oligonucleotide
  Antisense strand to SEQ ID NO: 854572
ugagucaaacuacuaauau

SEQ ID NO: 854574 - RNA, 19 nt, Artificial Sequence
  Description of Artificial Sequence: Synthetic oligonucleotide
  Sense strand starting at position 2586 of SEQ ID NO: 588285
uuaguaguuugacucaaag

SEQ ID NO: 854575 - RNA, 19 nt, Artificial Sequence
  Description of Artificial Sequence: Synthetic oligonucleotide
  Antisense strand to SEQ ID NO: 854574
cuuugagucaaacuacuaa

SEQ ID NO: 854576 - RNA, 19 nt, Artificial Sequence
  Description of Artificial Sequence: Synthetic oligonucleotide
  Sense strand starting at position 2588 of SEQ ID NO: 588285
aguaguuugacucaaaguu

SEQ ID NO: 854577 - RNA, 19 nt, Artificial Sequence
  Description of Artificial Sequence: Synthetic oligonucleotide
  Antisense strand to SEQ ID NO: 854576
aacuuugagucaaacuacu

SEQ ID NO: 854578 - RNA, 19 nt, Artificial Sequence
  Description of Artificial Sequence: Synthetic oligonucleotide
  Sense strand starting at position 2655 of SEQ ID NO: 588285
augggagccuuuccauaau

SEQ ID NO: 854579 - RNA, 19 nt, Artificial Sequence
  Description of Artificial Sequence: Synthetic oligonucleotide
  Antisense strand to SEQ ID NO: 854578
auuauggaaaggcucccau

SEQ ID NO: 854580 - RNA, 19 nt, Artificial Sequence
  Description of Artificial Sequence: Synthetic oligonucleotide
  Sense strand starting at position 2870 of SEQ ID NO: 588285
cuaaauaaugacugggcaa

SEQ ID NO: 854581 - RNA, 19 nt, Artificial Sequence
  Description of Artificial Sequence: Synthetic oligonucleotide
  Antisense strand to SEQ ID NO: 854580
uugcccagucauuauuuag

SEQ ID NO: 854582 - RNA, 19 nt, Artificial Sequence
  Description of Artificial Sequence: Synthetic oligonucleotide
  Sense strand starting at position 2952 of SEQ ID NO: 588285
aaauguguaugaucuagua

SEQ ID NO: 854583 - RNA, 19 nt, Artificial Sequence
  Description of Artificial Sequence: Synthetic oligonucleotide
  Antisense strand to SEQ ID NO: 854582
uacuagaucauacacauuu

SEQ ID NO: 854584 - RNA, 19 nt, Artificial Sequence
  Description of Artificial Sequence: Synthetic oligonucleotide
  Sense strand starting at position 2954 of SEQ ID NO: 588285
auguguaugaucuaguaau

SEQ ID NO: 854585 - RNA, 19 nt, Artificial Sequence
  Description of Artificial Sequence: Synthetic oligonucleotide
  Antisense strand to SEQ ID NO: 854584
auuacuagaucauacacau

SEQ ID NO: 854586 - RNA, 19 nt, Artificial Sequence
  Description of Artificial Sequence: Synthetic oligonucleotide
  Sense strand starting at position 2967 of SEQ ID NO: 588285
aguaauaucuuagccaaug

SEQ ID NO: 854587 - RNA, 19 nt, Artificial Sequence
  Description of Artificial Sequence: Synthetic oligonucleotide
  Antisense strand to SEQ ID NO: 854586
cauuggcuaagauauuacu

SEQ ID NO: 854588 - RNA, 19 nt, Artificial Sequence
  Description of Artificial Sequence: Synthetic oligonucleotide
  Sense strand starting at position 2968 of SEQ ID NO: 588285
guaauaucuuagccaauga

SEQ ID NO: 854589 - RNA, 19 nt, Artificial Sequence
  Description of Artificial Sequence: Synthetic oligonucleotide
  Antisense strand to SEQ ID NO: 854588
ucauuggcuaagauauuac

SEQ ID NO: 854590 - RNA, 19 nt, Artificial Sequence
  Description of Artificial Sequence: Synthetic oligonucleotide
  Sense strand starting at position 3147 of SEQ ID NO: 588285
aucaaauugucagcugaac

SEQ ID NO: 854591 - RNA, 19 nt, Artificial Sequence
  Description of Artificial Sequence: Synthetic oligonucleotide
  Antisense strand to SEQ ID NO: 854590
guucagcugacaauuugau

SEQ ID NO: 854592 - RNA, 19 nt, Artificial Sequence
  Description of Artificial Sequence: Synthetic oligonucleotide
  Sense strand starting at position 3225 of SEQ ID NO: 588285
aauuuaaguccuuguggca

SEQ ID NO: 854593 - RNA, 19 nt, Artificial Sequence
  Description of Artificial Sequence: Synthetic oligonucleotide
  Antisense strand to SEQ ID NO: 854592
ugccacaaggacuuaaauu

SEQ ID NO: 854594 - RNA, 19 nt, Artificial Sequence
  Description of Artificial Sequence: Synthetic oligonucleotide
  Sense strand starting at position 3523 of SEQ ID NO: 588285
auauaaugggaaugcuauc

SEQ ID NO: 854595 - RNA, 19 nt, Artificial Sequence
  Description of Artificial Sequence: Synthetic oligonucleotide
  Antisense strand to SEQ ID NO: 854594
gauagcauucccauuauau

SEQ ID NO: 854596 - RNA, 19 nt, Artificial Sequence
  Description of Artificial Sequence: Synthetic oligonucleotide
  Sense strand starting at position 3934 of SEQ ID NO: 588285
ggagguuguccuugaacaa

SEQ ID NO: 854597 - RNA, 19 nt, Artificial Sequence
  Description of Artificial Sequence: Synthetic oligonucleotide
  Antisense strand to SEQ ID NO: 854596
uuguucaaggacaaccucc

SEQ ID NO: 854598 - RNA, 19 nt, Artificial Sequence
  Description of Artificial Sequence: Synthetic oligonucleotide
  Sense strand starting at position 3935 of SEQ ID NO: 588285
gagguuguccuugaacaag

SEQ ID NO: 854599 - RNA, 19 nt, Artificial Sequence
  Description of Artificial Sequence: Synthetic oligonucleotide
  Antisense strand to SEQ ID NO: 854598
cuuguucaaggacaaccuc

SEQ ID NO: 854600 - RNA, 19 nt, Artificial Sequence
  Description of Artificial Sequence: Synthetic oligonucleotide
  Sense strand starting at position 3938 of SEQ ID NO: 588285
guuguccuugaacaagaua

SEQ ID NO: 854601 - RNA, 19 nt, Artificial Sequence
  Description of Artificial Sequence: Synthetic oligonucleotide
  Antisense strand to SEQ ID NO: 854600
uaucuuguucaaggacaac

SEQ ID NO: 854602 - RNA, 19 nt, Artificial Sequence
  Description of Artificial Sequence: Synthetic oligonucleotide
  Sense strand starting at position 3970 of SEQ ID NO: 588285
uuugcaauacguuauuaac

SEQ ID NO: 854603 - RNA, 19 nt, Artificial Sequence
  Description of Artificial Sequence: Synthetic oligonucleotide
  Antisense strand to SEQ ID NO: 854602
guuaauaacguauugcaaa

SEQ ID NO: 854604 - RNA, 19 nt, Artificial Sequence
  Description of Artificial Sequence: Synthetic oligonucleotide
  Sense strand starting at position 3976 of SEQ ID NO: 588285
auacguuauuaacucagaa

SEQ ID NO: 854605 - RNA, 19 nt, Artificial Sequence
  Description of Artificial Sequence: Synthetic oligonucleotide
  Antisense strand to SEQ ID NO: 854604
uucugaguuaauaacguau

SEQ ID NO: 854606 - RNA, 19 nt, Artificial Sequence
  Description of Artificial Sequence: Synthetic oligonucleotide
  Sense strand starting at position 237 of SEQ ID NO: 588286
guguguucucggguccaca

SEQ ID NO: 854607 - RNA, 19 nt, Artificial Sequence
  Description of Artificial Sequence: Synthetic oligonucleotide
  Antisense strand to SEQ ID NO: 854606
uguggacccgagaacacac

SEQ ID NO: 854608 - RNA, 19 nt, Artificial Sequence
  Description of Artificial Sequence: Synthetic oligonucleotide
  Sense strand starting at position 1188 of SEQ ID NO: 588286
aggcuagugucaugggugu

SEQ ID NO: 854609 - RNA, 19 nt, Artificial Sequence
  Description of Artificial Sequence: Synthetic oligonucleotide
  Antisense strand to SEQ ID NO: 854608
acacccaugacacuagccu

SEQ ID NO: 854610 - RNA, 19 nt, Artificial Sequence
  Description of Artificial Sequence: Synthetic oligonucleotide
  Sense strand starting at position 1190 of SEQ ID NO: 588286
gcuagugucauggguguga

SEQ ID NO: 854611 - RNA, 19 nt, Artificial Sequence
  Description of Artificial Sequence: Synthetic oligonucleotide
  Antisense strand to SEQ ID NO: 854610
ucacacccaugacacuagc

SEQ ID NO: 854612 - RNA, 19 nt, Artificial Sequence
  Description of Artificial Sequence: Synthetic oligonucleotide
  Sense strand starting at position 1201 of SEQ ID NO: 588286
gggugugagccaaguguga

SEQ ID NO: 854613 - RNA, 19 nt, Artificial Sequence
  Description of Artificial Sequence: Synthetic oligonucleotide
  Antisense strand to SEQ ID NO: 854612
ucacacuuggcucacaccc

SEQ ID NO: 854614 - RNA, 19 nt, Artificial Sequence
  Description of Artificial Sequence: Synthetic oligonucleotide
  Sense strand starting at position 1284 of SEQ ID NO: 588286
uggcauugguccugggaug

SEQ ID NO: 854615 - RNA, 19 nt, Artificial Sequence
  Description of Artificial Sequence: Synthetic oligonucleotide
  Antisense strand to SEQ ID NO: 854614
caucccaggaccaaugcca

SEQ ID NO: 854616 - RNA, 19 nt, Artificial Sequence
  Description of Artificial Sequence: Synthetic oligonucleotide
  Sense strand starting at position 2348 of SEQ ID NO: 588286
ccggcuaauucuuuauaga

SEQ ID NO: 854617 - RNA, 19 nt, Artificial Sequence
  Description of Artificial Sequence: Synthetic oligonucleotide
  Antisense strand to SEQ ID NO: 854616
ucuauaaagaauuagccgg

SEQ ID NO: 854618 - RNA, 19 nt, Artificial Sequence
  Description of Artificial Sequence: Synthetic oligonucleotide
  Sense strand starting at position 2349 of SEQ ID NO: 588286
cggcuaauucuuuauagag

SEQ ID NO: 854619 - RNA, 19 nt, Artificial Sequence
  Description of Artificial Sequence: Synthetic oligonucleotide
  Antisense strand to SEQ ID NO: 854618
cucuauaaagaauuagccg

SEQ ID NO: 854620 - RNA, 19 nt, Artificial Sequence
  Description of Artificial Sequence: Synthetic oligonucleotide
  Sense strand starting at position 2351 of SEQ ID NO: 588286
gcuaauucuuuauagagau

SEQ ID NO: 854621 - RNA, 19 nt, Artificial Sequence
  Description of Artificial Sequence: Synthetic oligonucleotide
  Antisense strand to SEQ ID NO: 854620
aucucuauaaagaauuagc

SEQ ID NO: 854622 - RNA, 19 nt, Artificial Sequence
  Description of Artificial Sequence: Synthetic oligonucleotide
  Sense strand starting at position 2357 of SEQ ID NO: 588286
ucuuuauagagauguaggu

SEQ ID NO: 854623 - RNA, 19 nt, Artificial Sequence
  Description of Artificial Sequence: Synthetic oligonucleotide
  Antisense strand to SEQ ID NO: 854622
accuacaucucuauaaaga

SEQ ID NO: 854624 - RNA, 19 nt, Artificial Sequence
  Description of Artificial Sequence: Synthetic oligonucleotide
  Sense strand starting at position 2361 of SEQ ID NO: 588286
uauagagauguaggucuca

SEQ ID NO: 854625 - RNA, 19 nt, Artificial Sequence
  Description of Artificial Sequence: Synthetic oligonucleotide
  Antisense strand to SEQ ID NO: 854624
ugagaccuacaucucuaua

SEQ ID NO: 854626 - RNA, 19 nt, Artificial Sequence
  Description of Artificial Sequence: Synthetic oligonucleotide
  Sense strand starting at position 2528 of SEQ ID NO: 588286
ugucacaggucuuaucuua

SEQ ID NO: 854627 - RNA, 19 nt, Artificial Sequence
  Description of Artificial Sequence: Synthetic oligonucleotide
  Antisense strand to SEQ ID NO: 854626
uaagauaagaccugugaca

SEQ ID NO: 854628 - RNA, 19 nt, Artificial Sequence
  Description of Artificial Sequence: Synthetic oligonucleotide
  Sense strand starting at position 2535 of SEQ ID NO: 588286
ggucuuaucuuacaaucag

SEQ ID NO: 854629 - RNA, 19 nt, Artificial Sequence
  Description of Artificial Sequence: Synthetic oligonucleotide
  Antisense strand to SEQ ID NO: 854628
cugauuguaagauaagacc

SEQ ID NO: 854630 - RNA, 19 nt, Artificial Sequence
  Description of Artificial Sequence: Synthetic oligonucleotide
  Sense strand starting at position 2797 of SEQ ID NO: 588286
gcggguuccagucagacgu

SEQ ID NO: 854631 - RNA, 19 nt, Artificial Sequence
  Description of Artificial Sequence: Synthetic oligonucleotide
  Antisense strand to SEQ ID NO: 854630
acgucugacuggaacccgc

SEQ ID NO: 854632 - RNA, 19 nt, Artificial Sequence
  Description of Artificial Sequence: Synthetic oligonucleotide
  Sense strand starting at position 3024 of SEQ ID NO: 588286
guggaaauauuauugccca

SEQ ID NO: 854633 - RNA, 19 nt, Artificial Sequence
  Description of Artificial Sequence: Synthetic oligonucleotide
  Antisense strand to SEQ ID NO: 854632
ugggcaauaauauuuccac

SEQ ID NO: 854634 - RNA, 19 nt, Artificial Sequence
  Description of Artificial Sequence: Synthetic oligonucleotide
  Sense strand starting at position 3080 of SEQ ID NO: 588286
uucggaugugaccaauacu

SEQ ID NO: 854635 - RNA, 19 nt, Artificial Sequence
  Description of Artificial Sequence: Synthetic oligonucleotide
  Antisense strand to SEQ ID NO: 854634
aguauuggucacauccgaa

SEQ ID NO: 854636 - RNA, 19 nt, Artificial Sequence
  Description of Artificial Sequence: Synthetic oligonucleotide
  Sense strand starting at position 3387 of SEQ ID NO: 588286
cccuauugcucuucugagu

SEQ ID NO: 854637 - RNA, 19 nt, Artificial Sequence
  Description of Artificial Sequence: Synthetic oligonucleotide
  Antisense strand to SEQ ID NO: 854636
acucagaagagcaauaggg

SEQ ID NO: 854638 - RNA, 19 nt, Artificial Sequence
  Description of Artificial Sequence: Synthetic oligonucleotide
  Sense strand starting at position 3393 of SEQ ID NO: 588286
ugcucuucugagugacacu

SEQ ID NO: 854639 - RNA, 19 nt, Artificial Sequence
  Description of Artificial Sequence: Synthetic oligonucleotide
  Antisense strand to SEQ ID NO: 854638
agugucacucagaagagca

SEQ ID NO: 854640 - RNA, 19 nt, Artificial Sequence
  Description of Artificial Sequence: Synthetic oligonucleotide
  Sense strand starting at position 3938 of SEQ ID NO: 588286
cccuuagagucacagcgau

SEQ ID NO: 854641 - RNA, 19 nt, Artificial Sequence
  Description of Artificial Sequence: Synthetic oligonucleotide
  Antisense strand to SEQ ID NO: 854640
aucgcugugacucuaaggg

SEQ ID NO: 854642 - RNA, 19 nt, Artificial Sequence
  Description of Artificial Sequence: Synthetic oligonucleotide
  Sense strand starting at position 3946 of SEQ ID NO: 588286
gucacagcgaucuaucuga

SEQ ID NO: 854643 - RNA, 19 nt, Artificial Sequence
  Description of Artificial Sequence: Synthetic oligonucleotide
  Antisense strand to SEQ ID NO: 854642
ucagauagaucgcugugac

SEQ ID NO: 854644 - RNA, 19 nt, Artificial Sequence
  Description of Artificial Sequence: Synthetic oligonucleotide
  Sense strand starting at position 115 of SEQ ID NO: 588288
ccgucaaugccucagguuu

SEQ ID NO: 854645 - RNA, 19 nt, Artificial Sequence
  Description of Artificial Sequence: Synthetic oligonucleotide
  Antisense strand to SEQ ID NO: 854644
aaaccugaggcauugacgg

SEQ ID NO: 854646 - RNA, 19 nt, Artificial Sequence
  Description of Artificial Sequence: Synthetic oligonucleotide
  Sense strand starting at position 191 of SEQ ID NO: 588288
aagccugggucaccagaaa

SEQ ID NO: 854647 - RNA, 19 nt, Artificial Sequence
  Description of Artificial Sequence: Synthetic oligonucleotide
  Antisense strand to SEQ ID NO: 854646
uuucuggugacccaggcuu

SEQ ID NO: 854648 - RNA, 19 nt, Artificial Sequence
  Description of Artificial Sequence: Synthetic oligonucleotide
  Sense strand starting at position 237 of SEQ ID NO: 588288
cuggguggcugucuguaaa

SEQ ID NO: 854649 - RNA, 19 nt, Artificial Sequence
  Description of Artificial Sequence: Synthetic oligonucleotide
  Antisense strand to SEQ ID NO: 854648
uuuacagacagccacccag

SEQ ID NO: 854650 - RNA, 19 nt, Artificial Sequence
  Description of Artificial Sequence: Synthetic oligonucleotide
  Sense strand starting at position 331 of SEQ ID NO: 588288
cacugagacuuggcuguaa

SEQ ID NO: 854651 - RNA, 19 nt, Artificial Sequence
  Description of Artificial Sequence: Synthetic oligonucleotide
  Antisense strand to SEQ ID NO: 854650
uuacagccaagucucagug

SEQ ID NO: 854652 - RNA, 19 nt, Artificial Sequence
  Description of Artificial Sequence: Synthetic oligonucleotide
  Sense strand starting at position 333 of SEQ ID NO: 588288
cugagacuuggcuguaaca

SEQ ID NO: 854653 - RNA, 19 nt, Artificial Sequence
  Description of Artificial Sequence: Synthetic oligonucleotide
  Antisense strand to SEQ ID NO: 854652
uguuacagccaagucucag

SEQ ID NO: 854654 - RNA, 19 nt, Artificial Sequence
  Description of Artificial Sequence: Synthetic oligonucleotide
  Sense strand starting at position 384 of SEQ ID NO: 588288
auggguacuugcccaguaa

SEQ ID NO: 854655 - RNA, 19 nt, Artificial Sequence
  Description of Artificial Sequence: Synthetic oligonucleotide
  Antisense strand to SEQ ID NO: 854654
uuacugggcaaguacccau

SEQ ID NO: 854656 - RNA, 19 nt, Artificial Sequence
  Description of Artificial Sequence: Synthetic oligonucleotide
  Sense strand starting at position 385 of SEQ ID NO: 588288
uggguacuugcccaguaaa

SEQ ID NO: 854657 - RNA, 19 nt, Artificial Sequence
  Description of Artificial Sequence: Synthetic oligonucleotide
  Antisense strand to SEQ ID NO: 854656
uuuacugggcaaguaccca

SEQ ID NO: 854658 - RNA, 19 nt, Artificial Sequence
  Description of Artificial Sequence: Synthetic oligonucleotide
  Sense strand starting at position 388 of SEQ ID NO: 588288
guacuugcccaguaaagac

SEQ ID NO: 854659 - RNA, 19 nt, Artificial Sequence
  Description of Artificial Sequence: Synthetic oligonucleotide
  Antisense strand to SEQ ID NO: 854658
gucuuuacugggcaaguac

SEQ ID NO: 854660 - RNA, 19 nt, Artificial Sequence
  Description of Artificial Sequence: Synthetic oligonucleotide
  Sense strand starting at position 704 of SEQ ID NO: 588288
gucagcagucccuggcauu

SEQ ID NO: 854661 - RNA, 19 nt, Artificial Sequence
  Description of Artificial Sequence: Synthetic oligonucleotide
  Antisense strand to SEQ ID NO: 854660
aaugccagggacugcugac

SEQ ID NO: 854662 - RNA, 19 nt, Artificial Sequence
  Description of Artificial Sequence: Synthetic oligonucleotide
  Sense strand starting at position 724 of SEQ ID NO: 588288
cccaguucucaacggagca

SEQ ID NO: 854663 - RNA, 19 nt, Artificial Sequence
  Description of Artificial Sequence: Synthetic oligonucleotide
  Antisense strand to SEQ ID NO: 854662
ugcuccguugagaacuggg

SEQ ID NO: 854664 - RNA, 19 nt, Artificial Sequence
  Description of Artificial Sequence: Synthetic oligonucleotide
  Sense strand starting at position 889 of SEQ ID NO: 588288
aguggaugucugcguagag

SEQ ID NO: 854665 - RNA, 19 nt, Artificial Sequence
  Description of Artificial Sequence: Synthetic oligonucleotide
  Antisense strand to SEQ ID NO: 854664
cucuacgcagacauccacu

SEQ ID NO: 854666 - RNA, 19 nt, Artificial Sequence
  Description of Artificial Sequence: Synthetic oligonucleotide
  Sense strand starting at position 1207 of SEQ ID NO: 588288
gggacuaaucauggcuagu

SEQ ID NO: 854667 - RNA, 19 nt, Artificial Sequence
  Description of Artificial Sequence: Synthetic oligonucleotide
  Antisense strand to SEQ ID NO: 854666
acuagccaugauuaguccc

SEQ ID NO: 854668 - RNA, 19 nt, Artificial Sequence
  Description of Artificial Sequence: Synthetic oligonucleotide
  Sense strand starting at position 1209 of SEQ ID NO: 588288
gacuaaucauggcuaguuc

SEQ ID NO: 854669 - RNA, 19 nt, Artificial Sequence
  Description of Artificial Sequence: Synthetic oligonucleotide
  Antisense strand to SEQ ID NO: 854668
gaacuagccaugauuaguc

SEQ ID NO: 854670 - RNA, 19 nt, Artificial Sequence
  Description of Artificial Sequence: Synthetic oligonucleotide
  Sense strand starting at position 1239 of SEQ ID NO: 588288
uguuccaacucucuguaau

SEQ ID NO: 854671 - RNA, 19 nt, Artificial Sequence
  Description of Artificial Sequence: Synthetic oligonucleotide
  Antisense strand to SEQ ID NO: 854670
auuacagagaguuggaaca

SEQ ID NO: 854672 - RNA, 19 nt, Artificial Sequence
  Description of Artificial Sequence: Synthetic oligonucleotide
  Sense strand starting at position 1240 of SEQ ID NO: 588288
guuccaacucucuguaaug

SEQ ID NO: 854673 - RNA, 19 nt, Artificial Sequence
  Description of Artificial Sequence: Synthetic oligonucleotide
  Antisense strand to SEQ ID NO: 854672
cauuacagagaguuggaac

SEQ ID NO: 854674 - RNA, 19 nt, Artificial Sequence
  Description of Artificial Sequence: Synthetic oligonucleotide
  Sense strand starting at position 1241 of SEQ ID NO: 588288
uuccaacucucuguaaugu

SEQ ID NO: 854675 - RNA, 19 nt, Artificial Sequence
  Description of Artificial Sequence: Synthetic oligonucleotide
  Antisense strand to SEQ ID NO: 854674
acauuacagagaguuggaa

SEQ ID NO: 854676 - RNA, 19 nt, Artificial Sequence
  Description of Artificial Sequence: Synthetic oligonucleotide
  Sense strand starting at position 1396 of SEQ ID NO: 588288
ucggcuucugaggaagauu

SEQ ID NO: 854677 - RNA, 19 nt, Artificial Sequence
  Description of Artificial Sequence: Synthetic oligonucleotide
  Antisense strand to SEQ ID NO: 854676
aaucuuccucagaagccga

SEQ ID NO: 854678 - RNA, 19 nt, Artificial Sequence
  Description of Artificial Sequence: Synthetic oligonucleotide
  Sense strand starting at position 1566 of SEQ ID NO: 588288
ggcccagucucauuuguuc

SEQ ID NO: 854679 - RNA, 19 nt, Artificial Sequence
  Description of Artificial Sequence: Synthetic oligonucleotide
  Antisense strand to SEQ ID NO: 854678
gaacaaaugagacugggcc

SEQ ID NO: 854680 - RNA, 19 nt, Artificial Sequence
  Description of Artificial Sequence: Synthetic oligonucleotide
  Sense strand starting at position 1852 of SEQ ID NO: 588288
ugaggagucucaccuguca

SEQ ID NO: 854681 - RNA, 19 nt, Artificial Sequence
  Description of Artificial Sequence: Synthetic oligonucleotide
  Antisense strand to SEQ ID NO: 854680
ugacaggugagacuccuca

SEQ ID NO: 854682 - RNA, 19 nt, Artificial Sequence
  Description of Artificial Sequence: Synthetic oligonucleotide
  Sense strand starting at position 2139 of SEQ ID NO: 588288
uuccacuguccacaagagu

SEQ ID NO: 854683 - RNA, 19 nt, Artificial Sequence
  Description of Artificial Sequence: Synthetic oligonucleotide
  Antisense strand to SEQ ID NO: 854682
acucuuguggacaguggaa

SEQ ID NO: 854684 - RNA, 19 nt, Artificial Sequence
  Description of Artificial Sequence: Synthetic oligonucleotide
  Sense strand starting at position 2191 of SEQ ID NO: 588288
ugccuaguuacuggaauag

SEQ ID NO: 854685 - RNA, 19 nt, Artificial Sequence
  Description of Artificial Sequence: Synthetic oligonucleotide
  Antisense strand to SEQ ID NO: 854684
cuauuccaguaacuaggca

SEQ ID NO: 854686 - RNA, 19 nt, Artificial Sequence
  Description of Artificial Sequence: Synthetic oligonucleotide
  Sense strand starting at position 2646 of SEQ ID NO: 588288
uggcuaucuuuggucagaa

SEQ ID NO: 854687 - RNA, 19 nt, Artificial Sequence
  Description of Artificial Sequence: Synthetic oligonucleotide
  Antisense strand to SEQ ID NO: 854686
uucugaccaaagauagcca

SEQ ID NO: 854688 - RNA, 19 nt, Artificial Sequence
  Description of Artificial Sequence: Synthetic oligonucleotide
  Sense strand starting at position 2647 of SEQ ID NO: 588288
ggcuaucuuuggucagaaa

SEQ ID NO: 854689 - RNA, 19 nt, Artificial Sequence
  Description of Artificial Sequence: Synthetic oligonucleotide
  Antisense strand to SEQ ID NO: 854688
uuucugaccaaagauagcc

SEQ ID NO: 854690 - RNA, 19 nt, Artificial Sequence
  Description of Artificial Sequence: Synthetic oligonucleotide
  Sense strand starting at position 2745 of SEQ ID NO: 588288
cugugaugccuggaagcca

SEQ ID NO: 854691 - RNA, 19 nt, Artificial Sequence
  Description of Artificial Sequence: Synthetic oligonucleotide
  Antisense strand to SEQ ID NO: 854690
uggcuuccaggcaucacag

SEQ ID NO: 854692 - RNA, 19 nt, Artificial Sequence
  Description of Artificial Sequence: Synthetic oligonucleotide
  Sense strand starting at position 2775 of SEQ ID NO: 588288
gaauguguagccugauggu

SEQ ID NO: 854693 - RNA, 19 nt, Artificial Sequence
  Description of Artificial Sequence: Synthetic oligonucleotide
  Antisense strand to SEQ ID NO: 854692
accaucaggcuacacauuc

SEQ ID NO: 854694 - RNA, 19 nt, Artificial Sequence
  Description of Artificial Sequence: Synthetic oligonucleotide
  Sense strand starting at position 2848 of SEQ ID NO: 588288
uaaccuguguggucuugga

SEQ ID NO: 854695 - RNA, 19 nt, Artificial Sequence
  Description of Artificial Sequence: Synthetic oligonucleotide
  Antisense strand to SEQ ID NO: 854694
uccaagaccacacagguua

SEQ ID NO: 854696 - RNA, 19 nt, Artificial Sequence
  Description of Artificial Sequence: Synthetic oligonucleotide
  Sense strand starting at position 2855 of SEQ ID NO: 588288
uguggucuuggacagguua

SEQ ID NO: 854697 - RNA, 19 nt, Artificial Sequence
  Description of Artificial Sequence: Synthetic oligonucleotide
  Antisense strand to SEQ ID NO: 854696
uaaccuguccaagaccaca

SEQ ID NO: 854698 - RNA, 19 nt, Artificial Sequence
  Description of Artificial Sequence: Synthetic oligonucleotide
  Sense strand starting at position 3074 of SEQ ID NO: 588288
guggccaagucauuucuuu

SEQ ID NO: 854699 - RNA, 19 nt, Artificial Sequence
  Description of Artificial Sequence: Synthetic oligonucleotide
  Antisense strand to SEQ ID NO: 854698
aaagaaaugacuuggccac

SEQ ID NO: 854700 - RNA, 19 nt, Artificial Sequence
  Description of Artificial Sequence: Synthetic oligonucleotide
  Sense strand starting at position 3291 of SEQ ID NO: 588288
gcaagucugcugggugagu

SEQ ID NO: 854701 - RNA, 19 nt, Artificial Sequence
  Description of Artificial Sequence: Synthetic oligonucleotide
  Antisense strand to SEQ ID NO: 854700
acucacccagcagacuugc

SEQ ID NO: 854702 - RNA, 19 nt, Artificial Sequence
  Description of Artificial Sequence: Synthetic oligonucleotide
  Sense strand starting at position 3292 of SEQ ID NO: 588288
caagucugcugggugagua

SEQ ID NO: 854703 - RNA, 19 nt, Artificial Sequence
  Description of Artificial Sequence: Synthetic oligonucleotide
  Antisense strand to SEQ ID NO: 854702
uacucacccagcagacuug

SEQ ID NO: 854704 - RNA, 19 nt, Artificial Sequence
  Description of Artificial Sequence: Synthetic oligonucleotide
  Sense strand starting at position 3485 of SEQ ID NO: 588288
ggaguucugcaucagccau

SEQ ID NO: 854705 - RNA, 19 nt, Artificial Sequence
  Description of Artificial Sequence: Synthetic oligonucleotide
  Antisense strand to SEQ ID NO: 854704
auggcugaugcagaacucc

SEQ ID NO: 854706 - RNA, 19 nt, Artificial Sequence
  Description of Artificial Sequence: Synthetic oligonucleotide
  Sense strand starting at position 3551 of SEQ ID NO: 588288
caggcuuugccgcaagcau

SEQ ID NO: 854707 - RNA, 19 nt, Artificial Sequence
  Description of Artificial Sequence: Synthetic oligonucleotide
  Antisense strand to SEQ ID NO: 854706
augcuugcggcaaagccug

SEQ ID NO: 854708 - RNA, 19 nt, Artificial Sequence
  Description of Artificial Sequence: Synthetic oligonucleotide
  Sense strand starting at position 3718 of SEQ ID NO: 588288
agaacaucuggccacuauu

SEQ ID NO: 854709 - RNA, 19 nt, Artificial Sequence
  Description of Artificial Sequence: Synthetic oligonucleotide
  Antisense strand to SEQ ID NO: 854708
aauaguggccagauguucu

SEQ ID NO: 854710 - RNA, 19 nt, Artificial Sequence
  Description of Artificial Sequence: Synthetic oligonucleotide
  Sense strand starting at position 3728 of SEQ ID NO: 588288
gccacuauucuugagaggu

SEQ ID NO: 854711 - RNA, 19 nt, Artificial Sequence
  Description of Artificial Sequence: Synthetic oligonucleotide
  Antisense strand to SEQ ID NO: 854710
accucucaagaauaguggc

SEQ ID NO: 854712 - RNA, 19 nt, Artificial Sequence
  Description of Artificial Sequence: Synthetic oligonucleotide
  Sense strand starting at position 3730 of SEQ ID NO: 588288
cacuauucuugagagguag

SEQ ID NO: 854713 - RNA, 19 nt, Artificial Sequence
  Description of Artificial Sequence: Synthetic oligonucleotide
  Antisense strand to SEQ ID NO: 854712
cuaccucucaagaauagug

SEQ ID NO: 854714 - RNA, 19 nt, Artificial Sequence
  Description of Artificial Sequence: Synthetic oligonucleotide
  Sense strand starting at position 3732 of SEQ ID NO: 588288
cuauucuugagagguagua

SEQ ID NO: 854715 - RNA, 19 nt, Artificial Sequence
  Description of Artificial Sequence: Synthetic oligonucleotide
  Antisense strand to SEQ ID NO: 854714
uacuaccucucaagaauag

SEQ ID NO: 854716 - RNA, 19 nt, Artificial Sequence
  Description of Artificial Sequence: Synthetic oligonucleotide
  Sense strand starting at position 3794 of SEQ ID NO: 588288
caggauuagucaguaagaa

SEQ ID NO: 854717 - RNA, 19 nt, Artificial Sequence
  Description of Artificial Sequence: Synthetic oligonucleotide
  Antisense strand to SEQ ID NO: 854716
uucuuacugacuaauccug

SEQ ID NO: 854718 - RNA, 19 nt, Artificial Sequence
  Description of Artificial Sequence: Synthetic oligonucleotide
  Sense strand starting at position 3846 of SEQ ID NO: 588288
uccaauucuggucguguca

SEQ ID NO: 854719 - RNA, 19 nt, Artificial Sequence
  Description of Artificial Sequence: Synthetic oligonucleotide
  Antisense strand to SEQ ID NO: 854718
ugacacgaccagaauugga

SEQ ID NO: 854720 - RNA, 19 nt, Artificial Sequence
  Description of Artificial Sequence: Synthetic oligonucleotide
  Sense strand starting at position 3853 of SEQ ID NO: 588288
cuggucgugucauuuagca

SEQ ID NO: 854721 - RNA, 19 nt, Artificial Sequence
  Description of Artificial Sequence: Synthetic oligonucleotide
  Antisense strand to SEQ ID NO: 854720
ugcuaaaugacacgaccag

SEQ ID NO: 854722 - RNA, 19 nt, Artificial Sequence
  Description of Artificial Sequence: Synthetic oligonucleotide
  Sense strand starting at position 3855 of SEQ ID NO: 588288
ggucgugucauuuagcaac

SEQ ID NO: 854723 - RNA, 19 nt, Artificial Sequence
  Description of Artificial Sequence: Synthetic oligonucleotide
  Antisense strand to SEQ ID NO: 854722
guugcuaaaugacacgacc

SEQ ID NO: 854724 - RNA, 19 nt, Artificial Sequence
  Description of Artificial Sequence: Synthetic oligonucleotide
  Sense strand starting at position 291 of SEQ ID NO: 588289
gagaaauacucuguuacag

SEQ ID NO: 854725 - RNA, 19 nt, Artificial Sequence
  Description of Artificial Sequence: Synthetic oligonucleotide
  Antisense strand to SEQ ID NO: 854724
cuguaacagaguauuucuc

SEQ ID NO: 854726 - RNA, 19 nt, Artificial Sequence
  Description of Artificial Sequence: Synthetic oligonucleotide
  Sense strand starting at position 359 of SEQ ID NO: 588289
aguuaagcuuaguuuccau

SEQ ID NO: 854727 - RNA, 19 nt, Artificial Sequence
  Description of Artificial Sequence: Synthetic oligonucleotide
  Antisense strand to SEQ ID NO: 854726
auggaaacuaagcuuaacu

SEQ ID NO: 854728 - RNA, 19 nt, Artificial Sequence
  Description of Artificial Sequence: Synthetic oligonucleotide
  Sense strand starting at position 439 of SEQ ID NO: 588289
gaagcuuuguaucaggaca

SEQ ID NO: 854729 - RNA, 19 nt, Artificial Sequence
  Description of Artificial Sequence: Synthetic oligonucleotide
  Antisense strand to SEQ ID NO: 854728
uguccugauacaaagcuuc

SEQ ID NO: 854730 - RNA, 19 nt, Artificial Sequence
  Description of Artificial Sequence: Synthetic oligonucleotide
  Sense strand starting at position 710 of SEQ ID NO: 588289
uuuguuuaccuagaaacug

SEQ ID NO: 854731 - RNA, 19 nt, Artificial Sequence
  Description of Artificial Sequence: Synthetic oligonucleotide
  Antisense strand to SEQ ID NO: 854730
caguuucuagguaaacaaa

SEQ ID NO: 854732 - RNA, 19 nt, Artificial Sequence
  Description of Artificial Sequence: Synthetic oligonucleotide
  Sense strand starting at position 767 of SEQ ID NO: 588289
ggagguaugcucugaaucc

SEQ ID NO: 854733 - RNA, 19 nt, Artificial Sequence
  Description of Artificial Sequence: Synthetic oligonucleotide
  Antisense strand to SEQ ID NO: 854732
ggauucagagcauaccucc

SEQ ID NO: 854734 - RNA, 19 nt, Artificial Sequence
  Description of Artificial Sequence: Synthetic oligonucleotide
  Sense strand starting at position 873 of SEQ ID NO: 588289
uaaauuccugguuggaaga

SEQ ID NO: 854735 - RNA, 19 nt, Artificial Sequence
  Description of Artificial Sequence: Synthetic oligonucleotide
  Antisense strand to SEQ ID NO: 854734
ucuuccaaccaggaauuua

SEQ ID NO: 854736 - RNA, 19 nt, Artificial Sequence
  Description of Artificial Sequence: Synthetic oligonucleotide
  Sense strand starting at position 984 of SEQ ID NO: 588289
aggguaaaguacuaagauu

SEQ ID NO: 854737 - RNA, 19 nt, Artificial Sequence
  Description of Artificial Sequence: Synthetic oligonucleotide
  Antisense strand to SEQ ID NO: 854736
aaucuuaguacuuuacccu

SEQ ID NO: 854738 - RNA, 19 nt, Artificial Sequence
  Description of Artificial Sequence: Synthetic oligonucleotide
  Sense strand starting at position 1021 of SEQ ID NO: 588289
guuuguacccuccguuuaa

SEQ ID NO: 854739 - RNA, 19 nt, Artificial Sequence
  Description of Artificial Sequence: Synthetic oligonucleotide
  Antisense strand to SEQ ID NO: 854738
uuaaacggaggguacaaac

SEQ ID NO: 854740 - RNA, 19 nt, Artificial Sequence
  Description of Artificial Sequence: Synthetic oligonucleotide
  Sense strand starting at position 1022 of SEQ ID NO: 588289
uuuguacccuccguuuaaa

SEQ ID NO: 854741 - RNA, 19 nt, Artificial Sequence
  Description of Artificial Sequence: Synthetic oligonucleotide
  Antisense strand to SEQ ID NO: 854740
uuuaaacggaggguacaaa

SEQ ID NO: 854742 - RNA, 19 nt, Artificial Sequence
  Description of Artificial Sequence: Synthetic oligonucleotide
  Sense strand starting at position 1025 of SEQ ID NO: 588289
guacccuccguuuaaauca

SEQ ID NO: 854743 - RNA, 19 nt, Artificial Sequence
  Description of Artificial Sequence: Synthetic oligonucleotide
  Antisense strand to SEQ ID NO: 854742
ugauuuaaacggaggguac

SEQ ID NO: 854744 - RNA, 19 nt, Artificial Sequence
  Description of Artificial Sequence: Synthetic oligonucleotide
  Sense strand starting at position 1080 of SEQ ID NO: 588289
aguguuuguccuguuguca

SEQ ID NO: 854745 - RNA, 19 nt, Artificial Sequence
  Description of Artificial Sequence: Synthetic oligonucleotide
  Antisense strand to SEQ ID NO: 854744
ugacaacaggacaaacacu

SEQ ID NO: 854746 - RNA, 19 nt, Artificial Sequence
  Description of Artificial Sequence: Synthetic oligonucleotide
  Sense strand starting at position 1118 of SEQ ID NO: 588289
aagaguuagcacggacaau

SEQ ID NO: 854747 - RNA, 19 nt, Artificial Sequence
  Description of Artificial Sequence: Synthetic oligonucleotide
  Antisense strand to SEQ ID NO: 854746
auuguccgugcuaacucuu

SEQ ID NO: 854748 - RNA, 19 nt, Artificial Sequence
  Description of Artificial Sequence: Synthetic oligonucleotide
  Sense strand starting at position 1119 of SEQ ID NO: 588289
agaguuagcacggacaauu

SEQ ID NO: 854749 - RNA, 19 nt, Artificial Sequence
  Description of Artificial Sequence: Synthetic oligonucleotide
  Antisense strand to SEQ ID NO: 854748
aauuguccgugcuaacucu

SEQ ID NO: 854750 - RNA, 19 nt, Artificial Sequence
  Description of Artificial Sequence: Synthetic oligonucleotide
  Sense strand starting at position 1295 of SEQ ID NO: 588289
gagggagacgccugauuca

SEQ ID NO: 854751 - RNA, 19 nt, Artificial Sequence
  Description of Artificial Sequence: Synthetic oligonucleotide
  Antisense strand to SEQ ID NO: 854750
ugaaucaggcgucucccuc

SEQ ID NO: 854752 - RNA, 19 nt, Artificial Sequence
  Description of Artificial Sequence: Synthetic oligonucleotide
  Sense strand starting at position 1346 of SEQ ID NO: 588289
cguuaugcauuuccacaau

SEQ ID NO: 854753 - RNA, 19 nt, Artificial Sequence
  Description of Artificial Sequence: Synthetic oligonucleotide
  Antisense strand to SEQ ID NO: 854752
auuguggaaaugcauaacg

SEQ ID NO: 854754 - RNA, 19 nt, Artificial Sequence
  Description of Artificial Sequence: Synthetic oligonucleotide
  Sense strand starting at position 1698 of SEQ ID NO: 588289
aggagcacccuuuguuaaa

SEQ ID NO: 854755 - RNA, 19 nt, Artificial Sequence
  Description of Artificial Sequence: Synthetic oligonucleotide
  Antisense strand to SEQ ID NO: 854754
uuuaacaaagggugcuccu

SEQ ID NO: 854756 - RNA, 19 nt, Artificial Sequence
  Description of Artificial Sequence: Synthetic oligonucleotide
  Sense strand starting at position 1699 of SEQ ID NO: 588289
ggagcacccuuuguuaaag

SEQ ID NO: 854757 - RNA, 19 nt, Artificial Sequence
  Description of Artificial Sequence: Synthetic oligonucleotide
  Antisense strand to SEQ ID NO: 854756
cuuuaacaaagggugcucc

SEQ ID NO: 854758 - RNA, 19 nt, Artificial Sequence
  Description of Artificial Sequence: Synthetic oligonucleotide
  Sense strand starting at position 2170 of SEQ ID NO: 588289
gcagcaguucgcuccagau

SEQ ID NO: 854759 - RNA, 19 nt, Artificial Sequence
  Description of Artificial Sequence: Synthetic oligonucleotide
  Antisense strand to SEQ ID NO: 854758
aucuggagcgaacugcugc

SEQ ID NO: 854760 - RNA, 19 nt, Artificial Sequence
  Description of Artificial Sequence: Synthetic oligonucleotide
  Sense strand starting at position 2968 of SEQ ID NO: 588289
cugacuggguucuagggaa

SEQ ID NO: 854761 - RNA, 19 nt, Artificial Sequence
  Description of Artificial Sequence: Synthetic oligonucleotide
  Antisense strand to SEQ ID NO: 854760
uucccuagaacccagucag

SEQ ID NO: 854762 - RNA, 19 nt, Artificial Sequence
  Description of Artificial Sequence: Synthetic oligonucleotide
  Sense strand starting at position 2990 of SEQ ID NO: 588289
cgguucuuccgucccgaga

SEQ ID NO: 854763 - RNA, 19 nt, Artificial Sequence
  Description of Artificial Sequence: Synthetic oligonucleotide
  Antisense strand to SEQ ID NO: 854762
ucucgggacggaagaaccg

SEQ ID NO: 854764 - RNA, 19 nt, Artificial Sequence
  Description of Artificial Sequence: Synthetic oligonucleotide
  Sense strand starting at position 3040 of SEQ ID NO: 588289
cggugcuugguaugggaaa

SEQ ID NO: 854765 - RNA, 19 nt, Artificial Sequence
  Description of Artificial Sequence: Synthetic oligonucleotide
  Antisense strand to SEQ ID NO: 854764
uuucccauaccaagcaccg

SEQ ID NO: 854766 - RNA, 19 nt, Artificial Sequence
  Description of Artificial Sequence: Synthetic oligonucleotide
  Sense strand starting at position 3108 of SEQ ID NO: 588289
ugcauucuggugggacaga

SEQ ID NO: 854767 - RNA, 19 nt, Artificial Sequence
  Description of Artificial Sequence: Synthetic oligonucleotide
  Antisense strand to SEQ ID NO: 854766
ucugucccaccagaaugca

SEQ ID NO: 854768 - RNA, 19 nt, Artificial Sequence
  Description of Artificial Sequence: Synthetic oligonucleotide
  Sense strand starting at position 3109 of SEQ ID NO: 588289
gcauucuggugggacagau

SEQ ID NO: 854769 - RNA, 19 nt, Artificial Sequence
  Description of Artificial Sequence: Synthetic oligonucleotide
  Antisense strand to SEQ ID NO: 854768
aucugucccaccagaaugc

SEQ ID NO: 854770 - RNA, 19 nt, Artificial Sequence
  Description of Artificial Sequence: Synthetic oligonucleotide
  Sense strand starting at position 3169 of SEQ ID NO: 588289
ggaucaguccuacguuuac

SEQ ID NO: 854771 - RNA, 19 nt, Artificial Sequence
  Description of Artificial Sequence: Synthetic oligonucleotide
  Antisense strand to SEQ ID NO: 854770
guaaacguaggacugaucc

SEQ ID NO: 854772 - RNA, 19 nt, Artificial Sequence
  Description of Artificial Sequence: Synthetic oligonucleotide
  Sense strand starting at position 3178 of SEQ ID NO: 588289
cuacguuuaccacgaaaca

SEQ ID NO: 854773 - RNA, 19 nt, Artificial Sequence
  Description of Artificial Sequence: Synthetic oligonucleotide
  Antisense strand to SEQ ID NO: 854772
uguuucgugguaaacguag

SEQ ID NO: 854774 - RNA, 19 nt, Artificial Sequence
  Description of Artificial Sequence: Synthetic oligonucleotide
  Sense strand starting at position 3191 of SEQ ID NO: 588289
gaaacagguuaauggaaua

SEQ ID NO: 854775 - RNA, 19 nt, Artificial Sequence
  Description of Artificial Sequence: Synthetic oligonucleotide
  Antisense strand to SEQ ID NO: 854774
uauuccauuaaccuguuuc

SEQ ID NO: 854776 - RNA, 19 nt, Artificial Sequence
  Description of Artificial Sequence: Synthetic oligonucleotide
  Sense strand starting at position 3224 of SEQ ID NO: 588289
gggagcguaccucauuaga

SEQ ID NO: 854777 - RNA, 19 nt, Artificial Sequence
  Description of Artificial Sequence: Synthetic oligonucleotide
  Antisense strand to SEQ ID NO: 854776
ucuaaugagguacgcuccc

SEQ ID NO: 854778 - RNA, 19 nt, Artificial Sequence
  Description of Artificial Sequence: Synthetic oligonucleotide
  Sense strand starting at position 3226 of SEQ ID NO: 588289
gagcguaccucauuagacu

SEQ ID NO: 854779 - RNA, 19 nt, Artificial Sequence
  Description of Artificial Sequence: Synthetic oligonucleotide
  Antisense strand to SEQ ID NO: 854778
agucuaaugagguacgcuc

SEQ ID NO: 854780 - RNA, 19 nt, Artificial Sequence
  Description of Artificial Sequence: Synthetic oligonucleotide
  Sense strand starting at position 3292 of SEQ ID NO: 588289
agguuugcaaucugaagaa

SEQ ID NO: 854781 - RNA, 19 nt, Artificial Sequence
  Description of Artificial Sequence: Synthetic oligonucleotide
  Antisense strand to SEQ ID NO: 854780
uucuucagauugcaaaccu

SEQ ID NO: 854782 - RNA, 19 nt, Artificial Sequence
  Description of Artificial Sequence: Synthetic oligonucleotide
  Sense strand starting at position 3316 of SEQ ID NO: 588289
ugaggucuccgagacccaa

SEQ ID NO: 854783 - RNA, 19 nt, Artificial Sequence
  Description of Artificial Sequence: Synthetic oligonucleotide
  Antisense strand to SEQ ID NO: 854782
uugggucucggagaccuca

SEQ ID NO: 854784 - RNA, 19 nt, Artificial Sequence
  Description of Artificial Sequence: Synthetic oligonucleotide
  Sense strand starting at position 3341 of SEQ ID NO: 588289
aacagagacgcagaguuua

SEQ ID NO: 854785 - RNA, 19 nt, Artificial Sequence
  Description of Artificial Sequence: Synthetic oligonucleotide
  Antisense strand to SEQ ID NO: 854784
uaaacucugcgucucuguu

SEQ ID NO: 854786 - RNA, 19 nt, Artificial Sequence
  Description of Artificial Sequence: Synthetic oligonucleotide
  Sense strand starting at position 3351 of SEQ ID NO: 588289
cagaguuuauuugcgcuau

SEQ ID NO: 854787 - RNA, 19 nt, Artificial Sequence
  Description of Artificial Sequence: Synthetic oligonucleotide
  Antisense strand to SEQ ID NO: 854786
auagcgcaaauaaacucug

SEQ ID NO: 854788 - RNA, 19 nt, Artificial Sequence
  Description of Artificial Sequence: Synthetic oligonucleotide
  Sense strand starting at position 3355 of SEQ ID NO: 588289
guuuauuugcgcuauccca

SEQ ID NO: 854789 - RNA, 19 nt, Artificial Sequence
  Description of Artificial Sequence: Synthetic oligonucleotide
  Antisense strand to SEQ ID NO: 854788
ugggauagcgcaaauaaac

SEQ ID NO: 854790 - RNA, 19 nt, Artificial Sequence
  Description of Artificial Sequence: Synthetic oligonucleotide
  Sense strand starting at position 3362 of SEQ ID NO: 588289
ugcgcuaucccauaugcua

SEQ ID NO: 854791 - RNA, 19 nt, Artificial Sequence
  Description of Artificial Sequence: Synthetic oligonucleotide
  Antisense strand to SEQ ID NO: 854790
uagcauaugggauagcgca

SEQ ID NO: 854792 - RNA, 19 nt, Artificial Sequence
  Description of Artificial Sequence: Synthetic oligonucleotide
  Sense strand starting at position 3383 of SEQ ID NO: 588289
ggcuauuguugagcugaaa

SEQ ID NO: 854793 - RNA, 19 nt, Artificial Sequence
  Description of Artificial Sequence: Synthetic oligonucleotide
  Antisense strand to SEQ ID NO: 854792
uuucagcucaacaauagcc

SEQ ID NO: 854794 - RNA, 19 nt, Artificial Sequence
  Description of Artificial Sequence: Synthetic oligonucleotide
  Sense strand starting at position 3418 of SEQ ID NO: 588289
uuaauugugcuguaagugu

SEQ ID NO: 854795 - RNA, 19 nt, Artificial Sequence
  Description of Artificial Sequence: Synthetic oligonucleotide
  Antisense strand to SEQ ID NO: 854794
acacuuacagcacaauuaa

SEQ ID NO: 854796 - RNA, 19 nt, Artificial Sequence
  Description of Artificial Sequence: Synthetic oligonucleotide
  Sense strand starting at position 3533 of SEQ ID NO: 588289
uggauacguuggguuaaac

SEQ ID NO: 854797 - RNA, 19 nt, Artificial Sequence
  Description of Artificial Sequence: Synthetic oligonucleotide
  Antisense strand to SEQ ID NO: 854796
guuuaacccaacguaucca

SEQ ID NO: 854798 - RNA, 19 nt, Artificial Sequence
  Description of Artificial Sequence: Synthetic oligonucleotide
  Sense strand starting at position 3913 of SEQ ID NO: 588289
accuauguugcuugcauga

SEQ ID NO: 854799 - RNA, 19 nt, Artificial Sequence
  Description of Artificial Sequence: Synthetic oligonucleotide
  Antisense strand to SEQ ID NO: 854798
ucaugcaagcaacauaggu

SEQ ID NO: 854800 - RNA, 19 nt, Artificial Sequence
  Description of Artificial Sequence: Synthetic oligonucleotide
  Sense strand starting at position 3926 of SEQ ID NO: 588289
gcaugagauuucugaggac

SEQ ID NO: 854801 - RNA, 19 nt, Artificial Sequence
  Description of Artificial Sequence: Synthetic oligonucleotide
  Antisense strand to SEQ ID NO: 854800
guccucagaaaucucaugc

SEQ ID NO: 854802 - RNA, 19 nt, Artificial Sequence
  Description of Artificial Sequence: Synthetic oligonucleotide
  Sense strand starting at position 3929 of SEQ ID NO: 588289
ugagauuucugaggacugu

SEQ ID NO: 854803 - RNA, 19 nt, Artificial Sequence
  Description of Artificial Sequence: Synthetic oligonucleotide
  Antisense strand to SEQ ID NO: 854802
acaguccucagaaaucuca

SEQ ID NO: 854804 - RNA, 19 nt, Artificial Sequence
  Description of Artificial Sequence: Synthetic oligonucleotide
  Sense strand starting at position 19 of SEQ ID NO: 588290
uaaauuccugguuggaaga

SEQ ID NO: 854805 - RNA, 19 nt, Artificial Sequence
  Description of Artificial Sequence: Synthetic oligonucleotide
  Antisense strand to SEQ ID NO: 854804
ucuuccaaccaggaauuua

SEQ ID NO: 854806 - RNA, 19 nt, Artificial Sequence
  Description of Artificial Sequence: Synthetic oligonucleotide
  Sense strand starting at position 130 of SEQ ID NO: 588290
aggguaaaguacuaagauu

SEQ ID NO: 854807 - RNA, 19 nt, Artificial Sequence
  Description of Artificial Sequence: Synthetic oligonucleotide
  Antisense strand to SEQ ID NO: 854806
aaucuuaguacuuuacccu

SEQ ID NO: 854808 - RNA, 19 nt, Artificial Sequence
  Description of Artificial Sequence: Synthetic oligonucleotide
  Sense strand starting at position 168 of SEQ ID NO: 588290
uuuguacccuccguuuaaa

SEQ ID NO: 854809 - RNA, 19 nt, Artificial Sequence
  Description of Artificial Sequence: Synthetic oligonucleotide
  Antisense strand to SEQ ID NO: 854808
uuuaaacggaggguacaaa

SEQ ID NO: 854810 - RNA, 19 nt, Artificial Sequence
  Description of Artificial Sequence: Synthetic oligonucleotide
  Sense strand starting at position 171 of SEQ ID NO: 588290
guacccuccguuuaaauca

SEQ ID NO: 854811 - RNA, 19 nt, Artificial Sequence
  Description of Artificial Sequence: Synthetic oligonucleotide
  Antisense strand to SEQ ID NO: 854810
ugauuuaaacggaggguac

SEQ ID NO: 854812 - RNA, 19 nt, Artificial Sequence
  Description of Artificial Sequence: Synthetic oligonucleotide
  Sense strand starting at position 226 of SEQ ID NO: 588290
aguguuuguccuguuguca

SEQ ID NO: 854813 - RNA, 19 nt, Artificial Sequence
  Description of Artificial Sequence: Synthetic oligonucleotide
  Antisense strand to SEQ ID NO: 854812
ugacaacaggacaaacacu

SEQ ID NO: 854814 - RNA, 19 nt, Artificial Sequence
  Description of Artificial Sequence: Synthetic oligonucleotide
  Sense strand starting at position 264 of SEQ ID NO: 588290
aagaguuagcacggacaau

SEQ ID NO: 854815 - RNA, 19 nt, Artificial Sequence
  Description of Artificial Sequence: Synthetic oligonucleotide
  Antisense strand to SEQ ID NO: 854814
auuguccgugcuaacucuu

SEQ ID NO: 854816 - RNA, 19 nt, Artificial Sequence
  Description of Artificial Sequence: Synthetic oligonucleotide
  Sense strand starting at position 265 of SEQ ID NO: 588290
agaguuagcacggacaauu

SEQ ID NO: 854817 - RNA, 19 nt, Artificial Sequence
  Description of Artificial Sequence: Synthetic oligonucleotide
  Antisense strand to SEQ ID NO: 854816
aauuguccgugcuaacucu

SEQ ID NO: 854818 - RNA, 19 nt, Artificial Sequence
  Description of Artificial Sequence: Synthetic oligonucleotide
  Sense strand starting at position 441 of SEQ ID NO: 588290
gagggagacgccugauuca

SEQ ID NO: 854819 - RNA, 19 nt, Artificial Sequence
  Description of Artificial Sequence: Synthetic oligonucleotide
  Antisense strand to SEQ ID NO: 854818
ugaaucaggcgucucccuc

SEQ ID NO: 854820 - RNA, 19 nt, Artificial Sequence
  Description of Artificial Sequence: Synthetic oligonucleotide
  Sense strand starting at position 492 of SEQ ID NO: 588290
cguuaugcauuuccacaau

SEQ ID NO: 854821 - RNA, 19 nt, Artificial Sequence
  Description of Artificial Sequence: Synthetic oligonucleotide
  Antisense strand to SEQ ID NO: 854820
auuguggaaaugcauaacg

SEQ ID NO: 854822 - RNA, 19 nt, Artificial Sequence
  Description of Artificial Sequence: Synthetic oligonucleotide
  Sense strand starting at position 844 of SEQ ID NO: 588290
aggagcacccuuuguuaaa

SEQ ID NO: 854823 - RNA, 19 nt, Artificial Sequence
  Description of Artificial Sequence: Synthetic oligonucleotide
  Antisense strand to SEQ ID NO: 854822
uuuaacaaagggugcuccu

SEQ ID NO: 854824 - RNA, 19 nt, Artificial Sequence
  Description of Artificial Sequence: Synthetic oligonucleotide
  Sense strand starting at position 845 of SEQ ID NO: 588290
ggagcacccuuuguuaaag

SEQ ID NO: 854825 - RNA, 19 nt, Artificial Sequence
  Description of Artificial Sequence: Synthetic oligonucleotide
  Antisense strand to SEQ ID NO: 854824
cuuuaacaaagggugcucc

SEQ ID NO: 854826 - RNA, 19 nt, Artificial Sequence
  Description of Artificial Sequence: Synthetic oligonucleotide
  Sense strand starting at position 1316 of SEQ ID NO: 588290
gcagcaguucgcuccagau

SEQ ID NO: 854827 - RNA, 19 nt, Artificial Sequence
  Description of Artificial Sequence: Synthetic oligonucleotide
  Antisense strand to SEQ ID NO: 854826
aucuggagcgaacugcugc

SEQ ID NO: 854828 - RNA, 19 nt, Artificial Sequence
  Description of Artificial Sequence: Synthetic oligonucleotide
  Sense strand starting at position 2114 of SEQ ID NO: 588290
cugacuggguucuagggaa

SEQ ID NO: 854829 - RNA, 19 nt, Artificial Sequence
  Description of Artificial Sequence: Synthetic oligonucleotide
  Antisense strand to SEQ ID NO: 854828
uucccuagaacccagucag

SEQ ID NO: 854830 - RNA, 19 nt, Artificial Sequence
  Description of Artificial Sequence: Synthetic oligonucleotide
  Sense strand starting at position 2136 of SEQ ID NO: 588290
cgguucuuccgucccgaga

SEQ ID NO: 854831 - RNA, 19 nt, Artificial Sequence
  Description of Artificial Sequence: Synthetic oligonucleotide
  Antisense strand to SEQ ID NO: 854830
ucucgggacggaagaaccg

SEQ ID NO: 854832 - RNA, 19 nt, Artificial Sequence
  Description of Artificial Sequence: Synthetic oligonucleotide
  Sense strand starting at position 2186 of SEQ ID NO: 588290
cggugcuugguaugggaaa

SEQ ID NO: 854833 - RNA, 19 nt, Artificial Sequence
  Description of Artificial Sequence: Synthetic oligonucleotide
  Antisense strand to SEQ ID NO: 854832
uuucccauaccaagcaccg

SEQ ID NO: 854834 - RNA, 19 nt, Artificial Sequence
  Description of Artificial Sequence: Synthetic oligonucleotide
  Sense strand starting at position 2254 of SEQ ID NO: 588290
ugcauucuggugggacaga

SEQ ID NO: 854835 - RNA, 19 nt, Artificial Sequence
  Description of Artificial Sequence: Synthetic oligonucleotide
  Antisense strand to SEQ ID NO: 854834
ucugucccaccagaaugca

SEQ ID NO: 854836 - RNA, 19 nt, Artificial Sequence
  Description of Artificial Sequence: Synthetic oligonucleotide
  Sense strand starting at position 2315 of SEQ ID NO: 588290
ggaucaguccuacguuuac

SEQ ID NO: 854837 - RNA, 19 nt, Artificial Sequence
  Description of Artificial Sequence: Synthetic oligonucleotide
  Antisense strand to SEQ ID NO: 854836
guaaacguaggacugaucc

SEQ ID NO: 854838 - RNA, 19 nt, Artificial Sequence
  Description of Artificial Sequence: Synthetic oligonucleotide
  Sense strand starting at position 2324 of SEQ ID NO: 588290
cuacguuuaccacgaaaca

SEQ ID NO: 854839 - RNA, 19 nt, Artificial Sequence
  Description of Artificial Sequence: Synthetic oligonucleotide
  Antisense strand to SEQ ID NO: 854838
uguuucgugguaaacguag

SEQ ID NO: 854840 - RNA, 19 nt, Artificial Sequence
  Description of Artificial Sequence: Synthetic oligonucleotide
  Sense strand starting at position 2337 of SEQ ID NO: 588290
gaaacagguuaauggaaua

SEQ ID NO: 854841 - RNA, 19 nt, Artificial Sequence
  Description of Artificial Sequence: Synthetic oligonucleotide
  Antisense strand to SEQ ID NO: 854840
uauuccauuaaccuguuuc

SEQ ID NO: 854842 - RNA, 19 nt, Artificial Sequence
  Description of Artificial Sequence: Synthetic oligonucleotide
  Sense strand starting at position 2370 of SEQ ID NO: 588290
gggagcguaccucauuaga

SEQ ID NO: 854843 - RNA, 19 nt, Artificial Sequence
  Description of Artificial Sequence: Synthetic oligonucleotide
  Antisense strand to SEQ ID NO: 854842
ucuaaugagguacgcuccc

SEQ ID NO: 854844 - RNA, 19 nt, Artificial Sequence
  Description of Artificial Sequence: Synthetic oligonucleotide
  Sense strand starting at position 2372 of SEQ ID NO: 588290
gagcguaccucauuagacu

SEQ ID NO: 854845 - RNA, 19 nt, Artificial Sequence
  Description of Artificial Sequence: Synthetic oligonucleotide
  Antisense strand to SEQ ID NO: 854844
agucuaaugagguacgcuc

SEQ ID NO: 854846 - RNA, 19 nt, Artificial Sequence
  Description of Artificial Sequence: Synthetic oligonucleotide
  Sense strand starting at position 2438 of SEQ ID NO: 588290
agguuugcaaucugaagaa

SEQ ID NO: 854847 - RNA, 19 nt, Artificial Sequence
  Description of Artificial Sequence: Synthetic oligonucleotide
  Antisense strand to SEQ ID NO: 854846
uucuucagauugcaaaccu

SEQ ID NO: 854848 - RNA, 19 nt, Artificial Sequence
  Description of Artificial Sequence: Synthetic oligonucleotide
  Sense strand starting at position 2462 of SEQ ID NO: 588290
ugaggucuccgagacccaa

SEQ ID NO: 854849 - RNA, 19 nt, Artificial Sequence
  Description of Artificial Sequence: Synthetic oligonucleotide
  Antisense strand to SEQ ID NO: 854848
uugggucucggagaccuca

SEQ ID NO: 854850 - RNA, 19 nt, Artificial Sequence
  Description of Artificial Sequence: Synthetic oligonucleotide
  Sense strand starting at position 2487 of SEQ ID NO: 588290
aacagagacgcagaguuua

SEQ ID NO: 854851 - RNA, 19 nt, Artificial Sequence
  Description of Artificial Sequence: Synthetic oligonucleotide
  Antisense strand to SEQ ID NO: 854850
uaaacucugcgucucuguu

SEQ ID NO: 854852 - RNA, 19 nt, Artificial Sequence
  Description of Artificial Sequence: Synthetic oligonucleotide
  Sense strand starting at position 2497 of SEQ ID NO: 588290
cagaguuuauuugcgcuau

SEQ ID NO: 854853 - RNA, 19 nt, Artificial Sequence
  Description of Artificial Sequence: Synthetic oligonucleotide
  Antisense strand to SEQ ID NO: 854852
auagcgcaaauaaacucug

SEQ ID NO: 854854 - RNA, 19 nt, Artificial Sequence
  Description of Artificial Sequence: Synthetic oligonucleotide
  Sense strand starting at position 2501 of SEQ ID NO: 588290
guuuauuugcgcuauccca

SEQ ID NO: 854855 - RNA, 19 nt, Artificial Sequence
  Description of Artificial Sequence: Synthetic oligonucleotide
  Antisense strand to SEQ ID NO: 854854
ugggauagcgcaaauaaac

SEQ ID NO: 854856 - RNA, 19 nt, Artificial Sequence
  Description of Artificial Sequence: Synthetic oligonucleotide
  Sense strand starting at position 2508 of SEQ ID NO: 588290
ugcgcuaucccauaugcua

SEQ ID NO: 854857 - RNA, 19 nt, Artificial Sequence
  Description of Artificial Sequence: Synthetic oligonucleotide
  Antisense strand to SEQ ID NO: 854856
uagcauaugggauagcgca

SEQ ID NO: 854858 - RNA, 19 nt, Artificial Sequence
  Description of Artificial Sequence: Synthetic oligonucleotide
  Sense strand starting at position 2529 of SEQ ID NO: 588290
ggcuauuguugagcugaaa

SEQ ID NO: 854859 - RNA, 19 nt, Artificial Sequence
  Description of Artificial Sequence: Synthetic oligonucleotide
  Antisense strand to SEQ ID NO: 854858
uuucagcucaacaauagcc

SEQ ID NO: 854860 - RNA, 19 nt, Artificial Sequence
  Description of Artificial Sequence: Synthetic oligonucleotide
  Sense strand starting at position 2564 of SEQ ID NO: 588290
uuaauugugcuguaagugu

SEQ ID NO: 854861 - RNA, 19 nt, Artificial Sequence
  Description of Artificial Sequence: Synthetic oligonucleotide
  Antisense strand to SEQ ID NO: 854860
acacuuacagcacaauuaa

SEQ ID NO: 854862 - RNA, 19 nt, Artificial Sequence
  Description of Artificial Sequence: Synthetic oligonucleotide
  Sense strand starting at position 2679 of SEQ ID NO: 588290
uggauacguuggguuaaac

SEQ ID NO: 854863 - RNA, 19 nt, Artificial Sequence
  Description of Artificial Sequence: Synthetic oligonucleotide
  Antisense strand to SEQ ID NO: 854862
guuuaacccaacguaucca

SEQ ID NO: 854864 - RNA, 19 nt, Artificial Sequence
  Description of Artificial Sequence: Synthetic oligonucleotide
  Sense strand starting at position 3059 of SEQ ID NO: 588290
accuauguugcuugcauga

SEQ ID NO: 854865 - RNA, 19 nt, Artificial Sequence
  Description of Artificial Sequence: Synthetic oligonucleotide
  Antisense strand to SEQ ID NO: 854864
ucaugcaagcaacauaggu

SEQ ID NO: 854866 - RNA, 19 nt, Artificial Sequence
  Description of Artificial Sequence: Synthetic oligonucleotide
  Sense strand starting at position 3072 of SEQ ID NO: 588290
gcaugagauuucugaggac

SEQ ID NO: 854867 - RNA, 19 nt, Artificial Sequence
  Description of Artificial Sequence: Synthetic oligonucleotide
  Antisense strand to SEQ ID NO: 854866
guccucagaaaucucaugc

SEQ ID NO: 854868 - RNA, 19 nt, Artificial Sequence
  Description of Artificial Sequence: Synthetic oligonucleotide
  Sense strand starting at position 3075 of SEQ ID NO: 588290
ugagauuucugaggacugu

SEQ ID NO: 854869 - RNA, 19 nt, Artificial Sequence
  Description of Artificial Sequence: Synthetic oligonucleotide
  Antisense strand to SEQ ID NO: 854868
acaguccucagaaaucuca

SEQ ID NO: 854870 - RNA, 19 nt, Artificial Sequence
  Description of Artificial Sequence: Synthetic oligonucleotide
  Sense strand starting at position 3168 of SEQ ID NO: 588290
ccuaauguuuggguggaga

SEQ ID NO: 854871 - RNA, 19 nt, Artificial Sequence
  Description of Artificial Sequence: Synthetic oligonucleotide
  Antisense strand to SEQ ID NO: 854870
ucuccacccaaacauuagg

SEQ ID NO: 854872 - RNA, 19 nt, Artificial Sequence
  Description of Artificial Sequence: Synthetic oligonucleotide
  Sense strand starting at position 3293 of SEQ ID NO: 588290
ugaagagauuuccgaucca

SEQ ID NO: 854873 - RNA, 19 nt, Artificial Sequence
  Description of Artificial Sequence: Synthetic oligonucleotide
  Antisense strand to SEQ ID NO: 854872
uggaucggaaaucucuuca

SEQ ID NO: 854874 - RNA, 19 nt, Artificial Sequence
  Description of Artificial Sequence: Synthetic oligonucleotide
  Sense strand starting at position 3335 of SEQ ID NO: 588290
uuucuaaacugaguugguu

SEQ ID NO: 854875 - RNA, 19 nt, Artificial Sequence
  Description of Artificial Sequence: Synthetic oligonucleotide
  Antisense strand to SEQ ID NO: 854874
aaccaacucaguuuagaaa

SEQ ID NO: 854876 - RNA, 19 nt, Artificial Sequence
  Description of Artificial Sequence: Synthetic oligonucleotide
  Sense strand starting at position 3861 of SEQ ID NO: 588290
agcagugggcuugauaaua

SEQ ID NO: 854877 - RNA, 19 nt, Artificial Sequence
  Description of Artificial Sequence: Synthetic oligonucleotide
  Antisense strand to SEQ ID NO: 854876
uauuaucaagcccacugcu

SEQ ID NO: 854878 - RNA, 19 nt, Artificial Sequence
  Description of Artificial Sequence: Synthetic oligonucleotide
  Sense strand starting at position 3884 of SEQ ID NO: 588290
agggucuugagaggugaga

SEQ ID NO: 854879 - RNA, 19 nt, Artificial Sequence
  Description of Artificial Sequence: Synthetic oligonucleotide
  Antisense strand to SEQ ID NO: 854878
ucucaccucucaagacccu

SEQ ID NO: 854880 - RNA, 19 nt, Artificial Sequence
  Description of Artificial Sequence: Synthetic oligonucleotide
  Sense strand starting at position 3886 of SEQ ID NO: 588290
ggucuugagaggugagaaa

SEQ ID NO: 854881 - RNA, 19 nt, Artificial Sequence
  Description of Artificial Sequence: Synthetic oligonucleotide
  Antisense strand to SEQ ID NO: 854880
uuucucaccucucaagacc

SEQ ID NO: 854882 - RNA, 19 nt, Artificial Sequence
  Description of Artificial Sequence: Synthetic oligonucleotide
  Sense strand starting at position 3962 of SEQ ID NO: 588290
augaauacaucuguuggga

SEQ ID NO: 854883 - RNA, 19 nt, Artificial Sequence
  Description of Artificial Sequence: Synthetic oligonucleotide
  Antisense strand to SEQ ID NO: 854882
ucccaacagauguauucau

SEQ ID NO: 854884 - RNA, 19 nt, Artificial Sequence
  Description of Artificial Sequence: Synthetic oligonucleotide
  Sense strand starting at position 39 of SEQ ID NO: 588291
cguuaugcauuuccacaau

SEQ ID NO: 854885 - RNA, 19 nt, Artificial Sequence
  Description of Artificial Sequence: Synthetic oligonucleotide
  Antisense strand to SEQ ID NO: 854884
auuguggaaaugcauaacg

SEQ ID NO: 854886 - RNA, 19 nt, Artificial Sequence
  Description of Artificial Sequence: Synthetic oligonucleotide
  Sense strand starting at position 391 of SEQ ID NO: 588291
aggagcacccuuuguuaaa

SEQ ID NO: 854887 - RNA, 19 nt, Artificial Sequence
  Description of Artificial Sequence: Synthetic oligonucleotide
  Antisense strand to SEQ ID NO: 854886
uuuaacaaagggugcuccu

SEQ ID NO: 854888 - RNA, 19 nt, Artificial Sequence
  Description of Artificial Sequence: Synthetic oligonucleotide
  Sense strand starting at position 392 of SEQ ID NO: 588291
ggagcacccuuuguuaaag

SEQ ID NO: 854889 - RNA, 19 nt, Artificial Sequence
  Description of Artificial Sequence: Synthetic oligonucleotide
  Antisense strand to SEQ ID NO: 854888
cuuuaacaaagggugcucc

SEQ ID NO: 854890 - RNA, 19 nt, Artificial Sequence
  Description of Artificial Sequence: Synthetic oligonucleotide
  Sense strand starting at position 863 of SEQ ID NO: 588291
gcagcaguucgcuccagau

SEQ ID NO: 854891 - RNA, 19 nt, Artificial Sequence
  Description of Artificial Sequence: Synthetic oligonucleotide
  Antisense strand to SEQ ID NO: 854890
aucuggagcgaacugcugc

SEQ ID NO: 854892 - RNA, 19 nt, Artificial Sequence
  Description of Artificial Sequence: Synthetic oligonucleotide
  Sense strand starting at position 1683 of SEQ ID NO: 588291
cgguucuuccgucccgaga

SEQ ID NO: 854893 - RNA, 19 nt, Artificial Sequence
  Description of Artificial Sequence: Synthetic oligonucleotide
  Antisense strand to SEQ ID NO: 854892
ucucgggacggaagaaccg

SEQ ID NO: 854894 - RNA, 19 nt, Artificial Sequence
  Description of Artificial Sequence: Synthetic oligonucleotide
  Sense strand starting at position 1801 of SEQ ID NO: 588291
ugcauucuggugggacaga

SEQ ID NO: 854895 - RNA, 19 nt, Artificial Sequence
  Description of Artificial Sequence: Synthetic oligonucleotide
  Antisense strand to SEQ ID NO: 854894
ucugucccaccagaaugca

SEQ ID NO: 854896 - RNA, 19 nt, Artificial Sequence
  Description of Artificial Sequence: Synthetic oligonucleotide
  Sense strand starting at position 1871 of SEQ ID NO: 588291
cuacguuuaccacgaaaca

SEQ ID NO: 854897 - RNA, 19 nt, Artificial Sequence
  Description of Artificial Sequence: Synthetic oligonucleotide
  Antisense strand to SEQ ID NO: 854896
uguuucgugguaaacguag

SEQ ID NO: 854898 - RNA, 19 nt, Artificial Sequence
  Description of Artificial Sequence: Synthetic oligonucleotide
  Sense strand starting at position 1917 of SEQ ID NO: 588291
gggagcguaccucauuaga

SEQ ID NO: 854899 - RNA, 19 nt, Artificial Sequence
  Description of Artificial Sequence: Synthetic oligonucleotide
  Antisense strand to SEQ ID NO: 854898
ucuaaugagguacgcuccc

SEQ ID NO: 854900 - RNA, 19 nt, Artificial Sequence
  Description of Artificial Sequence: Synthetic oligonucleotide
  Sense strand starting at position 1985 of SEQ ID NO: 588291
agguuugcaaucugaagaa

SEQ ID NO: 854901 - RNA, 19 nt, Artificial Sequence
  Description of Artificial Sequence: Synthetic oligonucleotide
  Antisense strand to SEQ ID NO: 854900
uucuucagauugcaaaccu

SEQ ID NO: 854902 - RNA, 19 nt, Artificial Sequence
  Description of Artificial Sequence: Synthetic oligonucleotide
  Sense strand starting at position 2009 of SEQ ID NO: 588291
ugaggucuccgagacccaa

SEQ ID NO: 854903 - RNA, 19 nt, Artificial Sequence
  Description of Artificial Sequence: Synthetic oligonucleotide
  Antisense strand to SEQ ID NO: 854902
uugggucucggagaccuca

SEQ ID NO: 854904 - RNA, 19 nt, Artificial Sequence
  Description of Artificial Sequence: Synthetic oligonucleotide
  Sense strand starting at position 2034 of SEQ ID NO: 588291
aacagagacgcagaguuua

SEQ ID NO: 854905 - RNA, 19 nt, Artificial Sequence
  Description of Artificial Sequence: Synthetic oligonucleotide
  Antisense strand to SEQ ID NO: 854904
uaaacucugcgucucuguu

SEQ ID NO: 854906 - RNA, 19 nt, Artificial Sequence
  Description of Artificial Sequence: Synthetic oligonucleotide
  Sense strand starting at position 2044 of SEQ ID NO: 588291
cagaguuuauuugcgcuau

SEQ ID NO: 854907 - RNA, 19 nt, Artificial Sequence
  Description of Artificial Sequence: Synthetic oligonucleotide
  Antisense strand to SEQ ID NO: 854906
auagcgcaaauaaacucug

SEQ ID NO: 854908 - RNA, 19 nt, Artificial Sequence
  Description of Artificial Sequence: Synthetic oligonucleotide
  Sense strand starting at position 2048 of SEQ ID NO: 588291
guuuauuugcgcuauccca

SEQ ID NO: 854909 - RNA, 19 nt, Artificial Sequence
  Description of Artificial Sequence: Synthetic oligonucleotide
  Antisense strand to SEQ ID NO: 854908
ugggauagcgcaaauaaac

SEQ ID NO: 854910 - RNA, 19 nt, Artificial Sequence
  Description of Artificial Sequence: Synthetic oligonucleotide
  Sense strand starting at position 2076 of SEQ ID NO: 588291
ggcuauuguugagcugaaa

SEQ ID NO: 854911 - RNA, 19 nt, Artificial Sequence
  Description of Artificial Sequence: Synthetic oligonucleotide
  Antisense strand to SEQ ID NO: 854910
uuucagcucaacaauagcc

SEQ ID NO: 854912 - RNA, 19 nt, Artificial Sequence
  Description of Artificial Sequence: Synthetic oligonucleotide
  Sense strand starting at position 2226 of SEQ ID NO: 588291
uggauacguuggguuaaac

SEQ ID NO: 854913 - RNA, 19 nt, Artificial Sequence
  Description of Artificial Sequence: Synthetic oligonucleotide
  Antisense strand to SEQ ID NO: 854912
guuuaacccaacguaucca

SEQ ID NO: 854914 - RNA, 19 nt, Artificial Sequence
  Description of Artificial Sequence: Synthetic oligonucleotide
  Sense strand starting at position 2619 of SEQ ID NO: 588291
gcaugagauuucugaggac

SEQ ID NO: 854915 - RNA, 19 nt, Artificial Sequence
  Description of Artificial Sequence: Synthetic oligonucleotide
  Antisense strand to SEQ ID NO: 854914
guccucagaaaucucaugc

SEQ ID NO: 854916 - RNA, 19 nt, Artificial Sequence
  Description of Artificial Sequence: Synthetic oligonucleotide
  Sense strand starting at position 2715 of SEQ ID NO: 588291
ccuaauguuuggguggaga

SEQ ID NO: 854917 - RNA, 19 nt, Artificial Sequence
  Description of Artificial Sequence: Synthetic oligonucleotide
  Antisense strand to SEQ ID NO: 854916
ucuccacccaaacauuagg

SEQ ID NO: 854918 - RNA, 19 nt, Artificial Sequence
  Description of Artificial Sequence: Synthetic oligonucleotide
  Sense strand starting at position 2840 of SEQ ID NO: 588291
ugaagagauuuccgaucca

SEQ ID NO: 854919 - RNA, 19 nt, Artificial Sequence
  Description of Artificial Sequence: Synthetic oligonucleotide
  Antisense strand to SEQ ID NO: 854918
uggaucggaaaucucuuca

SEQ ID NO: 854920 - RNA, 19 nt, Artificial Sequence
  Description of Artificial Sequence: Synthetic oligonucleotide
  Sense strand starting at position 2882 of SEQ ID NO: 588291
uuucuaaacugaguugguu

SEQ ID NO: 854921 - RNA, 19 nt, Artificial Sequence
  Description of Artificial Sequence: Synthetic oligonucleotide
  Antisense strand to SEQ ID NO: 854920
aaccaacucaguuuagaaa

SEQ ID NO: 854922 - RNA, 19 nt, Artificial Sequence
  Description of Artificial Sequence: Synthetic oligonucleotide
  Sense strand starting at position 3408 of SEQ ID NO: 588291
agcagugggcuugauaaua

SEQ ID NO: 854923 - RNA, 19 nt, Artificial Sequence
  Description of Artificial Sequence: Synthetic oligonucleotide
  Antisense strand to SEQ ID NO: 854922
uauuaucaagcccacugcu

SEQ ID NO: 854924 - RNA, 19 nt, Artificial Sequence
  Description of Artificial Sequence: Synthetic oligonucleotide
  Sense strand starting at position 3431 of SEQ ID NO: 588291
agggucuugagaggugaga

SEQ ID NO: 854925 - RNA, 19 nt, Artificial Sequence
  Description of Artificial Sequence: Synthetic oligonucleotide
  Antisense strand to SEQ ID NO: 854924
ucucaccucucaagacccu

SEQ ID NO: 854926 - RNA, 19 nt, Artificial Sequence
  Description of Artificial Sequence: Synthetic oligonucleotide
  Sense strand starting at position 3433 of SEQ ID NO: 588291
ggucuugagaggugagaaa

SEQ ID NO: 854927 - RNA, 19 nt, Artificial Sequence
  Description of Artificial Sequence: Synthetic oligonucleotide
  Antisense strand to SEQ ID NO: 854926
uuucucaccucucaagacc

SEQ ID NO: 854928 - RNA, 19 nt, Artificial Sequence
  Description of Artificial Sequence: Synthetic oligonucleotide
  Sense strand starting at position 3509 of SEQ ID NO: 588291
augaauacaucuguuggga

SEQ ID NO: 854929 - RNA, 19 nt, Artificial Sequence
  Description of Artificial Sequence: Synthetic oligonucleotide
  Antisense strand to SEQ ID NO: 854928
ucccaacagauguauucau

SEQ ID NO: 854930 - RNA, 19 nt, Artificial Sequence
  Description of Artificial Sequence: Synthetic oligonucleotide
  Sense strand starting at position 3561 of SEQ ID NO: 588291
cuuggaagguguuuaugga

SEQ ID NO: 854931 - RNA, 19 nt, Artificial Sequence
  Description of Artificial Sequence: Synthetic oligonucleotide
  Antisense strand to SEQ ID NO: 854930
uccauaaacaccuuccaag

SEQ ID NO: 854932 - RNA, 19 nt, Artificial Sequence
  Description of Artificial Sequence: Synthetic oligonucleotide
  Sense strand starting at position 3562 of SEQ ID NO: 588291
uuggaagguguuuauggau

SEQ ID NO: 854933 - RNA, 19 nt, Artificial Sequence
  Description of Artificial Sequence: Synthetic oligonucleotide
  Antisense strand to SEQ ID NO: 854932
auccauaaacaccuuccaa

SEQ ID NO: 854934 - RNA, 19 nt, Artificial Sequence
  Description of Artificial Sequence: Synthetic oligonucleotide
  Sense strand starting at position 3577 of SEQ ID NO: 588291
ggaugacugccauaugggu

SEQ ID NO: 854935 - RNA, 19 nt, Artificial Sequence
  Description of Artificial Sequence: Synthetic oligonucleotide
  Antisense strand to SEQ ID NO: 854934
acccauauggcagucaucc

SEQ ID NO: 854936 - RNA, 19 nt, Artificial Sequence
  Description of Artificial Sequence: Synthetic oligonucleotide
  Sense strand starting at position 3579 of SEQ ID NO: 588291
augacugccauauggguaa

SEQ ID NO: 854937 - RNA, 19 nt, Artificial Sequence
  Description of Artificial Sequence: Synthetic oligonucleotide
  Antisense strand to SEQ ID NO: 854936
uuacccauauggcagucau

SEQ ID NO: 854938 - RNA, 19 nt, Artificial Sequence
  Description of Artificial Sequence: Synthetic oligonucleotide
  Sense strand starting at position 3582 of SEQ ID NO: 588291
acugccauauggguaauau

SEQ ID NO: 854939 - RNA, 19 nt, Artificial Sequence
  Description of Artificial Sequence: Synthetic oligonucleotide
  Antisense strand to SEQ ID NO: 854938
auauuacccauauggcagu

SEQ ID NO: 854940 - RNA, 19 nt, Artificial Sequence
  Description of Artificial Sequence: Synthetic oligonucleotide
  Sense strand starting at position 3583 of SEQ ID NO: 588291
cugccauauggguaauauu

SEQ ID NO: 854941 - RNA, 19 nt, Artificial Sequence
  Description of Artificial Sequence: Synthetic oligonucleotide
  Antisense strand to SEQ ID NO: 854940
aauauuacccauauggcag

SEQ ID NO: 854942 - RNA, 19 nt, Artificial Sequence
  Description of Artificial Sequence: Synthetic oligonucleotide
  Sense strand starting at position 3586 of SEQ ID NO: 588291
ccauauggguaauauuuau

SEQ ID NO: 854943 - RNA, 19 nt, Artificial Sequence
  Description of Artificial Sequence: Synthetic oligonucleotide
  Antisense strand to SEQ ID NO: 854942
auaaauauuacccauaugg

SEQ ID NO: 854944 - RNA, 19 nt, Artificial Sequence
  Description of Artificial Sequence: Synthetic oligonucleotide
  Sense strand starting at position 3620 of SEQ ID NO: 588291
aaauauauuguccgaggca

SEQ ID NO: 854945 - RNA, 19 nt, Artificial Sequence
  Description of Artificial Sequence: Synthetic oligonucleotide
  Antisense strand to SEQ ID NO: 854944
ugccucggacaauauauuu

SEQ ID NO: 854946 - RNA, 19 nt, Artificial Sequence
  Description of Artificial Sequence: Synthetic oligonucleotide
  Sense strand starting at position 3696 of SEQ ID NO: 588291
ugauguucaccggagauua

SEQ ID NO: 854947 - RNA, 19 nt, Artificial Sequence
  Description of Artificial Sequence: Synthetic oligonucleotide
  Antisense strand to SEQ ID NO: 854946
uaaucuccggugaacauca

SEQ ID NO: 854948 - RNA, 19 nt, Artificial Sequence
  Description of Artificial Sequence: Synthetic oligonucleotide
  Sense strand starting at position 3704 of SEQ ID NO: 588291
accggagauuaucuggagu

SEQ ID NO: 854949 - RNA, 19 nt, Artificial Sequence
  Description of Artificial Sequence: Synthetic oligonucleotide
  Antisense strand to SEQ ID NO: 854948
acuccagauaaucuccggu

SEQ ID NO: 854950 - RNA, 19 nt, Artificial Sequence
  Description of Artificial Sequence: Synthetic oligonucleotide
  Sense strand starting at position 3734 of SEQ ID NO: 588291
gcaugaaauuuggagucac

SEQ ID NO: 854951 - RNA, 19 nt, Artificial Sequence
  Description of Artificial Sequence: Synthetic oligonucleotide
  Antisense strand to SEQ ID NO: 854950
gugacuccaaauuucaugc

SEQ ID NO: 854952 - RNA, 19 nt, Artificial Sequence
  Description of Artificial Sequence: Synthetic oligonucleotide
  Sense strand starting at position 3759 of SEQ ID NO: 588291
agaucuaguauugguggaa

SEQ ID NO: 854953 - RNA, 19 nt, Artificial Sequence
  Description of Artificial Sequence: Synthetic oligonucleotide
  Antisense strand to SEQ ID NO: 854952
uuccaccaauacuagaucu

SEQ ID NO: 854954 - RNA, 19 nt, Artificial Sequence
  Description of Artificial Sequence: Synthetic oligonucleotide
  Sense strand starting at position 3760 of SEQ ID NO: 588291
gaucuaguauugguggaac

SEQ ID NO: 854955 - RNA, 19 nt, Artificial Sequence
  Description of Artificial Sequence: Synthetic oligonucleotide
  Antisense strand to SEQ ID NO: 854954
guuccaccaauacuagauc

SEQ ID NO: 854956 - RNA, 19 nt, Artificial Sequence
  Description of Artificial Sequence: Synthetic oligonucleotide
  Sense strand starting at position 3762 of SEQ ID NO: 588291
ucuaguauugguggaacca

SEQ ID NO: 854957 - RNA, 19 nt, Artificial Sequence
  Description of Artificial Sequence: Synthetic oligonucleotide
  Antisense strand to SEQ ID NO: 854956
ugguuccaccaauacuaga

SEQ ID NO: 854958 - RNA, 19 nt, Artificial Sequence
  Description of Artificial Sequence: Synthetic oligonucleotide
  Sense strand starting at position 3763 of SEQ ID NO: 588291
cuaguauugguggaaccau

SEQ ID NO: 854959 - RNA, 19 nt, Artificial Sequence
  Description of Artificial Sequence: Synthetic oligonucleotide
  Antisense strand to SEQ ID NO: 854958
augguuccaccaauacuag

SEQ ID NO: 854960 - RNA, 19 nt, Artificial Sequence
  Description of Artificial Sequence: Synthetic oligonucleotide
  Sense strand starting at position 3774 of SEQ ID NO: 588291
ggaaccauuuaacagcuua

SEQ ID NO: 854961 - RNA, 19 nt, Artificial Sequence
  Description of Artificial Sequence: Synthetic oligonucleotide
  Antisense strand to SEQ ID NO: 854960
uaagcuguuaaaugguucc

SEQ ID NO: 854962 - RNA, 19 nt, Artificial Sequence
  Description of Artificial Sequence: Synthetic oligonucleotide
  Sense strand starting at position 3788 of SEQ ID NO: 588291
gcuuaauaaccuuggauga

SEQ ID NO: 854963 - RNA, 19 nt, Artificial Sequence
  Description of Artificial Sequence: Synthetic oligonucleotide
  Antisense strand to SEQ ID NO: 854962
ucauccaagguuauuaagc

SEQ ID NO: 854964 - RNA, 19 nt, Artificial Sequence
  Description of Artificial Sequence: Synthetic oligonucleotide
  Sense strand starting at position 68 of SEQ ID NO: 588292
gcugguuugccgagagacu

SEQ ID NO: 854965 - RNA, 19 nt, Artificial Sequence
  Description of Artificial Sequence: Synthetic oligonucleotide
  Antisense strand to SEQ ID NO: 854964
agucucucggcaaaccagc

SEQ ID NO: 854966 - RNA, 19 nt, Artificial Sequence
  Description of Artificial Sequence: Synthetic oligonucleotide
  Sense strand starting at position 105 of SEQ ID NO: 588292
aaaguucgccugugauauu

SEQ ID NO: 854967 - RNA, 19 nt, Artificial Sequence
  Description of Artificial Sequence: Synthetic oligonucleotide
  Antisense strand to SEQ ID NO: 854966
aauaucacaggcgaacuuu

SEQ ID NO: 854968 - RNA, 19 nt, Artificial Sequence
  Description of Artificial Sequence: Synthetic oligonucleotide
  Sense strand starting at position 151 of SEQ ID NO: 588292
ugaacauauugcuuaggga

SEQ ID NO: 854969 - RNA, 19 nt, Artificial Sequence
  Description of Artificial Sequence: Synthetic oligonucleotide
  Antisense strand to SEQ ID NO: 854968
ucccuaagcaauauguuca

SEQ ID NO: 854970 - RNA, 19 nt, Artificial Sequence
  Description of Artificial Sequence: Synthetic oligonucleotide
  Sense strand starting at position 181 of SEQ ID NO: 588292
gcugacauuugcuuucgua

SEQ ID NO: 854971 - RNA, 19 nt, Artificial Sequence
  Description of Artificial Sequence: Synthetic oligonucleotide
  Antisense strand to SEQ ID NO: 854970
uacgaaagcaaaugucagc

SEQ ID NO: 854972 - RNA, 19 nt, Artificial Sequence
  Description of Artificial Sequence: Synthetic oligonucleotide
  Sense strand starting at position 185 of SEQ ID NO: 588292
acauuugcuuucguaggaa

SEQ ID NO: 854973 - RNA, 19 nt, Artificial Sequence
  Description of Artificial Sequence: Synthetic oligonucleotide
  Antisense strand to SEQ ID NO: 854972
uuccuacgaaagcaaaugu

SEQ ID NO: 854974 - RNA, 19 nt, Artificial Sequence
  Description of Artificial Sequence: Synthetic oligonucleotide
  Sense strand starting at position 188 of SEQ ID NO: 588292
uuugcuuucguaggaauuu

SEQ ID NO: 854975 - RNA, 19 nt, Artificial Sequence
  Description of Artificial Sequence: Synthetic oligonucleotide
  Antisense strand to SEQ ID NO: 854974
aaauuccuacgaaagcaaa

SEQ ID NO: 854976 - RNA, 19 nt, Artificial Sequence
  Description of Artificial Sequence: Synthetic oligonucleotide
  Sense strand starting at position 212 of SEQ ID NO: 588292
gcaaauuaaccuugccagu

SEQ ID NO: 854977 - RNA, 19 nt, Artificial Sequence
  Description of Artificial Sequence: Synthetic oligonucleotide
  Antisense strand to SEQ ID NO: 854976
acuggcaagguuaauuugc

SEQ ID NO: 854978 - RNA, 19 nt, Artificial Sequence
  Description of Artificial Sequence: Synthetic oligonucleotide
  Sense strand starting at position 436 of SEQ ID NO: 588292
aggucuuucuuggcuggaa

SEQ ID NO: 854979 - RNA, 19 nt, Artificial Sequence
  Description of Artificial Sequence: Synthetic oligonucleotide
  Antisense strand to SEQ ID NO: 854978
uuccagccaagaaagaccu

SEQ ID NO: 854980 - RNA, 19 nt, Artificial Sequence
  Description of Artificial Sequence: Synthetic oligonucleotide
  Sense strand starting at position 462 of SEQ ID NO: 588292
cacagagugucuuugugca

SEQ ID NO: 854981 - RNA, 19 nt, Artificial Sequence
  Description of Artificial Sequence: Synthetic oligonucleotide
  Antisense strand to SEQ ID NO: 854980
ugcacaaagacacucugug

SEQ ID NO: 854982 - RNA, 19 nt, Artificial Sequence
  Description of Artificial Sequence: Synthetic oligonucleotide
  Sense strand starting at position 464 of SEQ ID NO: 588292
cagagugucuuugugcaca

SEQ ID NO: 854983 - RNA, 19 nt, Artificial Sequence
  Description of Artificial Sequence: Synthetic oligonucleotide
  Antisense strand to SEQ ID NO: 854982
ugugcacaaagacacucug

SEQ ID NO: 854984 - RNA, 19 nt, Artificial Sequence
  Description of Artificial Sequence: Synthetic oligonucleotide
  Sense strand starting at position 469 of SEQ ID NO: 588292
ugucuuugugcacaggaau

SEQ ID NO: 854985 - RNA, 19 nt, Artificial Sequence
  Description of Artificial Sequence: Synthetic oligonucleotide
  Antisense strand to SEQ ID NO: 854984
auuccugugcacaaagaca

SEQ ID NO: 854986 - RNA, 19 nt, Artificial Sequence
  Description of Artificial Sequence: Synthetic oligonucleotide
  Sense strand starting at position 837 of SEQ ID NO: 588292
uuguguguuucuguggaga

SEQ ID NO: 854987 - RNA, 19 nt, Artificial Sequence
  Description of Artificial Sequence: Synthetic oligonucleotide
  Antisense strand to SEQ ID NO: 854986
ucuccacagaaacacacaa

SEQ ID NO: 854988 - RNA, 19 nt, Artificial Sequence
  Description of Artificial Sequence: Synthetic oligonucleotide
  Sense strand starting at position 840 of SEQ ID NO: 588292
uguguuucuguggagagag

SEQ ID NO: 854989 - RNA, 19 nt, Artificial Sequence
  Description of Artificial Sequence: Synthetic oligonucleotide
  Antisense strand to SEQ ID NO: 854988
cucucuccacagaaacaca

SEQ ID NO: 854990 - RNA, 19 nt, Artificial Sequence
  Description of Artificial Sequence: Synthetic oligonucleotide
  Sense strand starting at position 887 of SEQ ID NO: 588292
uggccagucccauguggaa

SEQ ID NO: 854991 - RNA, 19 nt, Artificial Sequence
  Description of Artificial Sequence: Synthetic oligonucleotide
  Antisense strand to SEQ ID NO: 854990
uuccacaugggacuggcca

SEQ ID NO: 854992 - RNA, 19 nt, Artificial Sequence
  Description of Artificial Sequence: Synthetic oligonucleotide
  Sense strand starting at position 993 of SEQ ID NO: 588292
uccaguuugaagggaaacu

SEQ ID NO: 854993 - RNA, 19 nt, Artificial Sequence
  Description of Artificial Sequence: Synthetic oligonucleotide
  Antisense strand to SEQ ID NO: 854992
aguuucccuucaaacugga

SEQ ID NO: 854994 - RNA, 19 nt, Artificial Sequence
  Description of Artificial Sequence: Synthetic oligonucleotide
  Sense strand starting at position 1045 of SEQ ID NO: 588292
gagguaaauuuggacggaa

SEQ ID NO: 854995 - RNA, 19 nt, Artificial Sequence
  Description of Artificial Sequence: Synthetic oligonucleotide
  Antisense strand to SEQ ID NO: 854994
uuccguccaaauuuaccuc

SEQ ID NO: 854996 - RNA, 19 nt, Artificial Sequence
  Description of Artificial Sequence: Synthetic oligonucleotide
  Sense strand starting at position 1376 of SEQ ID NO: 588292
cucuguguauaguuccauu

SEQ ID NO: 854997 - RNA, 19 nt, Artificial Sequence
  Description of Artificial Sequence: Synthetic oligonucleotide
  Antisense strand to SEQ ID NO: 854996
aauggaacuauacacagag

SEQ ID NO: 854998 - RNA, 19 nt, Artificial Sequence
  Description of Artificial Sequence: Synthetic oligonucleotide
  Sense strand starting at position 1386 of SEQ ID NO: 588292
aguuccauuccuugggauu

SEQ ID NO: 854999 - RNA, 19 nt, Artificial Sequence
  Description of Artificial Sequence: Synthetic oligonucleotide
  Antisense strand to SEQ ID NO: 854998
aaucccaaggaauggaacu

SEQ ID NO: 855000 - RNA, 19 nt, Artificial Sequence
  Description of Artificial Sequence: Synthetic oligonucleotide
  Sense strand starting at position 1387 of SEQ ID NO: 588292
guuccauuccuugggauua

SEQ ID NO: 855001 - RNA, 19 nt, Artificial Sequence
  Description of Artificial Sequence: Synthetic oligonucleotide
  Antisense strand to SEQ ID NO: 855000
uaaucccaaggaauggaac

SEQ ID NO: 855002 - RNA, 19 nt, Artificial Sequence
  Description of Artificial Sequence: Synthetic oligonucleotide
  Sense strand starting at position 1398 of SEQ ID NO: 588292
ugggauuacugggucccau

SEQ ID NO: 855003 - RNA, 19 nt, Artificial Sequence
  Description of Artificial Sequence: Synthetic oligonucleotide
  Antisense strand to SEQ ID NO: 855002
augggacccaguaauccca

SEQ ID NO: 855004 - RNA, 19 nt, Artificial Sequence
  Description of Artificial Sequence: Synthetic oligonucleotide
  Sense strand starting at position 1555 of SEQ ID NO: 588292
aagaacuuucuggguuaag

SEQ ID NO: 855005 - RNA, 19 nt, Artificial Sequence
  Description of Artificial Sequence: Synthetic oligonucleotide
  Antisense strand to SEQ ID NO: 855004
cuuaacccagaaaguucuu

SEQ ID NO: 855006 - RNA, 19 nt, Artificial Sequence
  Description of Artificial Sequence: Synthetic oligonucleotide
  Sense strand starting at position 1641 of SEQ ID NO: 588292
aggagagacucaccgcaaa

SEQ ID NO: 855007 - RNA, 19 nt, Artificial Sequence
  Description of Artificial Sequence: Synthetic oligonucleotide
  Antisense strand to SEQ ID NO: 855006
uuugcggugagucucuccu

SEQ ID NO: 855008 - RNA, 19 nt, Artificial Sequence
  Description of Artificial Sequence: Synthetic oligonucleotide
  Sense strand starting at position 2175 of SEQ ID NO: 588292
ggacgucaucagugggagu

SEQ ID NO: 855009 - RNA, 19 nt, Artificial Sequence
  Description of Artificial Sequence: Synthetic oligonucleotide
  Antisense strand to SEQ ID NO: 855008
acucccacugaugacgucc

SEQ ID NO: 855010 - RNA, 19 nt, Artificial Sequence
  Description of Artificial Sequence: Synthetic oligonucleotide
  Sense strand starting at position 2176 of SEQ ID NO: 588292
gacgucaucagugggaguu

SEQ ID NO: 855011 - RNA, 19 nt, Artificial Sequence
  Description of Artificial Sequence: Synthetic oligonucleotide
  Antisense strand to SEQ ID NO: 855010
aacucccacugaugacguc

SEQ ID NO: 855012 - RNA, 19 nt, Artificial Sequence
  Description of Artificial Sequence: Synthetic oligonucleotide
  Sense strand starting at position 2182 of SEQ ID NO: 588292
aucagugggaguugaagua

SEQ ID NO: 855013 - RNA, 19 nt, Artificial Sequence
  Description of Artificial Sequence: Synthetic oligonucleotide
  Antisense strand to SEQ ID NO: 855012
uacuucaacucccacugau

SEQ ID NO: 855014 - RNA, 19 nt, Artificial Sequence
  Description of Artificial Sequence: Synthetic oligonucleotide
  Sense strand starting at position 2222 of SEQ ID NO: 588292
cugagauggcucugaagag

SEQ ID NO: 855015 - RNA, 19 nt, Artificial Sequence
  Description of Artificial Sequence: Synthetic oligonucleotide
  Antisense strand to SEQ ID NO: 855014
cucuucagagccaucucag

SEQ ID NO: 855016 - RNA, 19 nt, Artificial Sequence
  Description of Artificial Sequence: Synthetic oligonucleotide
  Sense strand starting at position 2518 of SEQ ID NO: 588292
uccaaauagucccuguguu

SEQ ID NO: 855017 - RNA, 19 nt, Artificial Sequence
  Description of Artificial Sequence: Synthetic oligonucleotide
  Antisense strand to SEQ ID NO: 855016
aacacagggacuauuugga

SEQ ID NO: 855018 - RNA, 19 nt, Artificial Sequence
  Description of Artificial Sequence: Synthetic oligonucleotide
  Sense strand starting at position 2519 of SEQ ID NO: 588292
ccaaauagucccuguguuu

SEQ ID NO: 855019 - RNA, 19 nt, Artificial Sequence
  Description of Artificial Sequence: Synthetic oligonucleotide
  Antisense strand to SEQ ID NO: 855018
aaacacagggacuauuugg

SEQ ID NO: 855020 - RNA, 19 nt, Artificial Sequence
  Description of Artificial Sequence: Synthetic oligonucleotide
  Sense strand starting at position 2522 of SEQ ID NO: 588292
aauagucccuguguuuaga

SEQ ID NO: 855021 - RNA, 19 nt, Artificial Sequence
  Description of Artificial Sequence: Synthetic oligonucleotide
  Antisense strand to SEQ ID NO: 855020
ucuaaacacagggacuauu

SEQ ID NO: 855022 - RNA, 19 nt, Artificial Sequence
  Description of Artificial Sequence: Synthetic oligonucleotide
  Sense strand starting at position 3260 of SEQ ID NO: 588292
aaggaaugacugugucuuu

SEQ ID NO: 855023 - RNA, 19 nt, Artificial Sequence
  Description of Artificial Sequence: Synthetic oligonucleotide
  Antisense strand to SEQ ID NO: 855022
aaagacacagucauuccuu

SEQ ID NO: 855024 - RNA, 19 nt, Artificial Sequence
  Description of Artificial Sequence: Synthetic oligonucleotide
  Sense strand starting at position 3263 of SEQ ID NO: 588292
gaaugacugugucuuugca

SEQ ID NO: 855025 - RNA, 19 nt, Artificial Sequence
  Description of Artificial Sequence: Synthetic oligonucleotide
  Antisense strand to SEQ ID NO: 855024
ugcaaagacacagucauuc

SEQ ID NO: 855026 - RNA, 19 nt, Artificial Sequence
  Description of Artificial Sequence: Synthetic oligonucleotide
  Sense strand starting at position 3267 of SEQ ID NO: 588292
gacugugucuuugcacgaa

SEQ ID NO: 855027 - RNA, 19 nt, Artificial Sequence
  Description of Artificial Sequence: Synthetic oligonucleotide
  Antisense strand to SEQ ID NO: 855026
uucgugcaaagacacaguc

SEQ ID NO: 855028 - RNA, 19 nt, Artificial Sequence
  Description of Artificial Sequence: Synthetic oligonucleotide
  Sense strand starting at position 3276 of SEQ ID NO: 588292
uuugcacgaacgugaaauu

SEQ ID NO: 855029 - RNA, 19 nt, Artificial Sequence
  Description of Artificial Sequence: Synthetic oligonucleotide
  Antisense strand to SEQ ID NO: 855028
aauuucacguucgugcaaa

SEQ ID NO: 855030 - RNA, 19 nt, Artificial Sequence
  Description of Artificial Sequence: Synthetic oligonucleotide
  Sense strand starting at position 3285 of SEQ ID NO: 588292
acgugaaauuuggagaaag

SEQ ID NO: 855031 - RNA, 19 nt, Artificial Sequence
  Description of Artificial Sequence: Synthetic oligonucleotide
  Antisense strand to SEQ ID NO: 855030
cuuucuccaaauuucacgu

SEQ ID NO: 855032 - RNA, 19 nt, Artificial Sequence
  Description of Artificial Sequence: Synthetic oligonucleotide
  Sense strand starting at position 3476 of SEQ ID NO: 588292
ugcaauagaguguggcauu

SEQ ID NO: 855033 - RNA, 19 nt, Artificial Sequence
  Description of Artificial Sequence: Synthetic oligonucleotide
  Antisense strand to SEQ ID NO: 855032
aaugccacacucuauugca

SEQ ID NO: 855034 - RNA, 19 nt, Artificial Sequence
  Description of Artificial Sequence: Synthetic oligonucleotide
  Sense strand starting at position 3487 of SEQ ID NO: 588292
guggcauuggugugaaauu

SEQ ID NO: 855035 - RNA, 19 nt, Artificial Sequence
  Description of Artificial Sequence: Synthetic oligonucleotide
  Antisense strand to SEQ ID NO: 855034
aauuucacaccaaugccac

SEQ ID NO: 855036 - RNA, 19 nt, Artificial Sequence
  Description of Artificial Sequence: Synthetic oligonucleotide
  Sense strand starting at position 3496 of SEQ ID NO: 588292
gugugaaauugucucccag

SEQ ID NO: 855037 - RNA, 19 nt, Artificial Sequence
  Description of Artificial Sequence: Synthetic oligonucleotide
  Antisense strand to SEQ ID NO: 855036
cugggagacaauuucacac

SEQ ID NO: 855038 - RNA, 19 nt, Artificial Sequence
  Description of Artificial Sequence: Synthetic oligonucleotide
  Sense strand starting at position 3533 of SEQ ID NO: 588292
uugggaguucucuggugag

SEQ ID NO: 855039 - RNA, 19 nt, Artificial Sequence
  Description of Artificial Sequence: Synthetic oligonucleotide
  Antisense strand to SEQ ID NO: 855038
cucaccagagaacucccaa

SEQ ID NO: 855040 - RNA, 19 nt, Artificial Sequence
  Description of Artificial Sequence: Synthetic oligonucleotide
  Sense strand starting at position 3582 of SEQ ID NO: 588292
uggcuuucccaucaggaca

SEQ ID NO: 855041 - RNA, 19 nt, Artificial Sequence
  Description of Artificial Sequence: Synthetic oligonucleotide
  Antisense strand to SEQ ID NO: 855040
uguccugaugggaaagcca

SEQ ID NO: 855042 - RNA, 19 nt, Artificial Sequence
  Description of Artificial Sequence: Synthetic oligonucleotide
  Sense strand starting at position 3637 of SEQ ID NO: 588292
gccucagauuaguuccaaa

SEQ ID NO: 855043 - RNA, 19 nt, Artificial Sequence
  Description of Artificial Sequence: Synthetic oligonucleotide
  Antisense strand to SEQ ID NO: 855042
uuuggaacuaaucugaggc

SEQ ID NO: 855044 - RNA, 19 nt, Artificial Sequence
  Description of Artificial Sequence: Synthetic oligonucleotide
  Sense strand starting at position 23 of SEQ ID NO: 588293
augauaugcugcccuucua

SEQ ID NO: 855045 - RNA, 19 nt, Artificial Sequence
  Description of Artificial Sequence: Synthetic oligonucleotide
  Antisense strand to SEQ ID NO: 855044
uagaagggcagcauaucau

SEQ ID NO: 855046 - RNA, 19 nt, Artificial Sequence
  Description of Artificial Sequence: Synthetic oligonucleotide
  Sense strand starting at position 37 of SEQ ID NO: 588293
uucuacgaccuuugacaua

SEQ ID NO: 855047 - RNA, 19 nt, Artificial Sequence
  Description of Artificial Sequence: Synthetic oligonucleotide
  Antisense strand to SEQ ID NO: 855046
uaugucaaaggucguagaa

SEQ ID NO: 855048 - RNA, 19 nt, Artificial Sequence
  Description of Artificial Sequence: Synthetic oligonucleotide
  Sense strand starting at position 143 of SEQ ID NO: 588293
gugccacuuccucagggaa

SEQ ID NO: 855049 - RNA, 19 nt, Artificial Sequence
  Description of Artificial Sequence: Synthetic oligonucleotide
  Antisense strand to SEQ ID NO: 855048
uucccugaggaaguggcac

SEQ ID NO: 855050 - RNA, 19 nt, Artificial Sequence
  Description of Artificial Sequence: Synthetic oligonucleotide
  Sense strand starting at position 354 of SEQ ID NO: 588293
acaaauauacgccgaauga

SEQ ID NO: 855051 - RNA, 19 nt, Artificial Sequence
  Description of Artificial Sequence: Synthetic oligonucleotide
  Antisense strand to SEQ ID NO: 855050
ucauucggcguauauuugu

SEQ ID NO: 855052 - RNA, 19 nt, Artificial Sequence
  Description of Artificial Sequence: Synthetic oligonucleotide
  Sense strand starting at position 534 of SEQ ID NO: 588293
uuuggaaaguucccuuuaa

SEQ ID NO: 855053 - RNA, 19 nt, Artificial Sequence
  Description of Artificial Sequence: Synthetic oligonucleotide
  Antisense strand to SEQ ID NO: 855052
uuaaagggaacuuuccaaa

SEQ ID NO: 855054 - RNA, 19 nt, Artificial Sequence
  Description of Artificial Sequence: Synthetic oligonucleotide
  Sense strand starting at position 535 of SEQ ID NO: 588293
uuggaaaguucccuuuaaa

SEQ ID NO: 855055 - RNA, 19 nt, Artificial Sequence
  Description of Artificial Sequence: Synthetic oligonucleotide
  Antisense strand to SEQ ID NO: 855054
uuuaaagggaacuuuccaa

SEQ ID NO: 855056 - RNA, 19 nt, Artificial Sequence
  Description of Artificial Sequence: Synthetic oligonucleotide
  Sense strand starting at position 646 of SEQ ID NO: 588293
ucucuacagugucuuagua

SEQ ID NO: 855057 - RNA, 19 nt, Artificial Sequence
  Description of Artificial Sequence: Synthetic oligonucleotide
  Antisense strand to SEQ ID NO: 855056
uacuaagacacuguagaga

SEQ ID NO: 855058 - RNA, 19 nt, Artificial Sequence
  Description of Artificial Sequence: Synthetic oligonucleotide
  Sense strand starting at position 664 of SEQ ID NO: 588293
acuguaucuuccuugagca

SEQ ID NO: 855059 - RNA, 19 nt, Artificial Sequence
  Description of Artificial Sequence: Synthetic oligonucleotide
  Antisense strand to SEQ ID NO: 855058
ugcucaaggaagauacagu

SEQ ID NO: 855060 - RNA, 19 nt, Artificial Sequence
  Description of Artificial Sequence: Synthetic oligonucleotide
  Sense strand starting at position 665 of SEQ ID NO: 588293
cuguaucuuccuugagcaa

SEQ ID NO: 855061 - RNA, 19 nt, Artificial Sequence
  Description of Artificial Sequence: Synthetic oligonucleotide
  Antisense strand to SEQ ID NO: 855060
uugcucaaggaagauacag

SEQ ID NO: 855062 - RNA, 19 nt, Artificial Sequence
  Description of Artificial Sequence: Synthetic oligonucleotide
  Sense strand starting at position 666 of SEQ ID NO: 588293
uguaucuuccuugagcaaa

SEQ ID NO: 855063 - RNA, 19 nt, Artificial Sequence
  Description of Artificial Sequence: Synthetic oligonucleotide
  Antisense strand to SEQ ID NO: 855062
uuugcucaaggaagauaca

SEQ ID NO: 855064 - RNA, 19 nt, Artificial Sequence
  Description of Artificial Sequence: Synthetic oligonucleotide
  Sense strand starting at position 844 of SEQ ID NO: 588293
accagaaagcccuaguugu

SEQ ID NO: 855065 - RNA, 19 nt, Artificial Sequence
  Description of Artificial Sequence: Synthetic oligonucleotide
  Antisense strand to SEQ ID NO: 855064
acaacuagggcuuucuggu

SEQ ID NO: 855066 - RNA, 19 nt, Artificial Sequence
  Description of Artificial Sequence: Synthetic oligonucleotide
  Sense strand starting at position 2019 of SEQ ID NO: 588293
cugugaggcugaguaugua

SEQ ID NO: 855067 - RNA, 19 nt, Artificial Sequence
  Description of Artificial Sequence: Synthetic oligonucleotide
  Antisense strand to SEQ ID NO: 855066
uacauacucagccucacag

SEQ ID NO: 855068 - RNA, 19 nt, Artificial Sequence
  Description of Artificial Sequence: Synthetic oligonucleotide
  Sense strand starting at position 2058 of SEQ ID NO: 588293
ugggaucagcgagggauua

SEQ ID NO: 855069 - RNA, 19 nt, Artificial Sequence
  Description of Artificial Sequence: Synthetic oligonucleotide
  Antisense strand to SEQ ID NO: 855068
uaaucccucgcugauccca

SEQ ID NO: 855070 - RNA, 19 nt, Artificial Sequence
  Description of Artificial Sequence: Synthetic oligonucleotide
  Sense strand starting at position 2059 of SEQ ID NO: 588293
gggaucagcgagggauuaa

SEQ ID NO: 855071 - RNA, 19 nt, Artificial Sequence
  Description of Artificial Sequence: Synthetic oligonucleotide
  Antisense strand to SEQ ID NO: 855070
uuaaucccucgcugauccc

SEQ ID NO: 855072 - RNA, 19 nt, Artificial Sequence
  Description of Artificial Sequence: Synthetic oligonucleotide
  Sense strand starting at position 2072 of SEQ ID NO: 588293
gauuaagaauuagugcauu

SEQ ID NO: 855073 - RNA, 19 nt, Artificial Sequence
  Description of Artificial Sequence: Synthetic oligonucleotide
  Antisense strand to SEQ ID NO: 855072
aaugcacuaauucuuaauc

SEQ ID NO: 855074 - RNA, 19 nt, Artificial Sequence
  Description of Artificial Sequence: Synthetic oligonucleotide
  Sense strand starting at position 2483 of SEQ ID NO: 588293
accuauuugucacaaggca

SEQ ID NO: 855075 - RNA, 19 nt, Artificial Sequence
  Description of Artificial Sequence: Synthetic oligonucleotide
  Antisense strand to SEQ ID NO: 855074
ugccuugugacaaauaggu

SEQ ID NO: 855076 - RNA, 19 nt, Artificial Sequence
  Description of Artificial Sequence: Synthetic oligonucleotide
  Sense strand starting at position 2565 of SEQ ID NO: 588293
cuguguaucugggcuuaaa

SEQ ID NO: 855077 - RNA, 19 nt, Artificial Sequence
  Description of Artificial Sequence: Synthetic oligonucleotide
  Antisense strand to SEQ ID NO: 855076
uuuaagcccagauacacag

SEQ ID NO: 855078 - RNA, 19 nt, Artificial Sequence
  Description of Artificial Sequence: Synthetic oligonucleotide
  Sense strand starting at position 2568 of SEQ ID NO: 588293
uguaucugggcuuaaauga

SEQ ID NO: 855079 - RNA, 19 nt, Artificial Sequence
  Description of Artificial Sequence: Synthetic oligonucleotide
  Antisense strand to SEQ ID NO: 855078
ucauuuaagcccagauaca

SEQ ID NO: 855080 - RNA, 19 nt, Artificial Sequence
  Description of Artificial Sequence: Synthetic oligonucleotide
  Sense strand starting at position 2590 of SEQ ID NO: 588293
auggcaaauaggugauagu

SEQ ID NO: 855081 - RNA, 19 nt, Artificial Sequence
  Description of Artificial Sequence: Synthetic oligonucleotide
  Antisense strand to SEQ ID NO: 855080
acuaucaccuauuugccau

SEQ ID NO: 855082 - RNA, 19 nt, Artificial Sequence
  Description of Artificial Sequence: Synthetic oligonucleotide
  Sense strand starting at position 2591 of SEQ ID NO: 588293
uggcaaauaggugauaguu

SEQ ID NO: 855083 - RNA, 19 nt, Artificial Sequence
  Description of Artificial Sequence: Synthetic oligonucleotide
  Antisense strand to SEQ ID NO: 855082
aacuaucaccuauuugcca

SEQ ID NO: 855084 - RNA, 19 nt, Artificial Sequence
  Description of Artificial Sequence: Synthetic oligonucleotide
  Sense strand starting at position 2688 of SEQ ID NO: 588293
ggguguuuccaggacagau

SEQ ID NO: 855085 - RNA, 19 nt, Artificial Sequence
  Description of Artificial Sequence: Synthetic oligonucleotide
  Antisense strand to SEQ ID NO: 855084
aucuguccuggaaacaccc

SEQ ID NO: 855086 - RNA, 19 nt, Artificial Sequence
  Description of Artificial Sequence: Synthetic oligonucleotide
  Sense strand starting at position 2698 of SEQ ID NO: 588293
aggacagauuagcauuuga

SEQ ID NO: 855087 - RNA, 19 nt, Artificial Sequence
  Description of Artificial Sequence: Synthetic oligonucleotide
  Antisense strand to SEQ ID NO: 855086
ucaaaugcuaaucuguccu

SEQ ID NO: 855088 - RNA, 19 nt, Artificial Sequence
  Description of Artificial Sequence: Synthetic oligonucleotide
  Sense strand starting at position 2909 of SEQ ID NO: 588293
agucuuggaccgggaguua

SEQ ID NO: 855089 - RNA, 19 nt, Artificial Sequence
  Description of Artificial Sequence: Synthetic oligonucleotide
  Antisense strand to SEQ ID NO: 855088
uaacucccgguccaagacu

SEQ ID NO: 855090 - RNA, 19 nt, Artificial Sequence
  Description of Artificial Sequence: Synthetic oligonucleotide
  Sense strand starting at position 3090 of SEQ ID NO: 588293
guucuacuucucuggagac

SEQ ID NO: 855091 - RNA, 19 nt, Artificial Sequence
  Description of Artificial Sequence: Synthetic oligonucleotide
  Antisense strand to SEQ ID NO: 855090
gucuccagagaaguagaac

SEQ ID NO: 855092 - RNA, 19 nt, Artificial Sequence
  Description of Artificial Sequence: Synthetic oligonucleotide
  Sense strand starting at position 3166 of SEQ ID NO: 588293
auguguaugccagcacgua

SEQ ID NO: 855093 - RNA, 19 nt, Artificial Sequence
  Description of Artificial Sequence: Synthetic oligonucleotide
  Antisense strand to SEQ ID NO: 855092
uacgugcuggcauacacau

SEQ ID NO: 855094 - RNA, 19 nt, Artificial Sequence
  Description of Artificial Sequence: Synthetic oligonucleotide
  Sense strand starting at position 3170 of SEQ ID NO: 588293
guaugccagcacguauauu

SEQ ID NO: 855095 - RNA, 19 nt, Artificial Sequence
  Description of Artificial Sequence: Synthetic oligonucleotide
  Antisense strand to SEQ ID NO: 855094
aauauacgugcuggcauac

SEQ ID NO: 855096 - RNA, 19 nt, Artificial Sequence
  Description of Artificial Sequence: Synthetic oligonucleotide
  Sense strand starting at position 3269 of SEQ ID NO: 588293
ggacaacuauuugaguaac

SEQ ID NO: 855097 - RNA, 19 nt, Artificial Sequence
  Description of Artificial Sequence: Synthetic oligonucleotide
  Antisense strand to SEQ ID NO: 855096
guuacucaaauaguugucc

SEQ ID NO: 855098 - RNA, 19 nt, Artificial Sequence
  Description of Artificial Sequence: Synthetic oligonucleotide
  Sense strand starting at position 3283 of SEQ ID NO: 588293
guaaccaggcuauagauua

SEQ ID NO: 855099 - RNA, 19 nt, Artificial Sequence
  Description of Artificial Sequence: Synthetic oligonucleotide
  Antisense strand to SEQ ID NO: 855098
uaaucuauagccugguuac

SEQ ID NO: 855100 - RNA, 19 nt, Artificial Sequence
  Description of Artificial Sequence: Synthetic oligonucleotide
  Sense strand starting at position 3332 of SEQ ID NO: 588293
agucuuugcccauacagac

SEQ ID NO: 855101 - RNA, 19 nt, Artificial Sequence
  Description of Artificial Sequence: Synthetic oligonucleotide
  Antisense strand to SEQ ID NO: 855100
gucuguaugggcaaagacu

SEQ ID NO: 855102 - RNA, 19 nt, Artificial Sequence
  Description of Artificial Sequence: Synthetic oligonucleotide
  Sense strand starting at position 3349 of SEQ ID NO: 588293
acucaugcucuugggaauu

SEQ ID NO: 855103 - RNA, 19 nt, Artificial Sequence
  Description of Artificial Sequence: Synthetic oligonucleotide
  Antisense strand to SEQ ID NO: 855102
aauucccaagagcaugagu

SEQ ID NO: 855104 - RNA, 19 nt, Artificial Sequence
  Description of Artificial Sequence: Synthetic oligonucleotide
  Sense strand starting at position 3363 of SEQ ID NO: 588293
gaauuugaauugggaaauc

SEQ ID NO: 855105 - RNA, 19 nt, Artificial Sequence
  Description of Artificial Sequence: Synthetic oligonucleotide
  Antisense strand to SEQ ID NO: 855104
gauuucccaauucaaauuc

SEQ ID NO: 855106 - RNA, 19 nt, Artificial Sequence
  Description of Artificial Sequence: Synthetic oligonucleotide
  Sense strand starting at position 3397 of SEQ ID NO: 588293
ggccaugaugguugggauu

SEQ ID NO: 855107 - RNA, 19 nt, Artificial Sequence
  Description of Artificial Sequence: Synthetic oligonucleotide
  Antisense strand to SEQ ID NO: 855106
aaucccaaccaucauggcc

SEQ ID NO: 855108 - RNA, 19 nt, Artificial Sequence
  Description of Artificial Sequence: Synthetic oligonucleotide
  Sense strand starting at position 3472 of SEQ ID NO: 588293
gagaaaucaugagaaagca

SEQ ID NO: 855109 - RNA, 19 nt, Artificial Sequence
  Description of Artificial Sequence: Synthetic oligonucleotide
  Antisense strand to SEQ ID NO: 855108
ugcuuucucaugauuucuc

SEQ ID NO: 855110 - RNA, 19 nt, Artificial Sequence
  Description of Artificial Sequence: Synthetic oligonucleotide
  Sense strand starting at position 3502 of SEQ ID NO: 588293
agaacagacuugggauaga

SEQ ID NO: 855111 - RNA, 19 nt, Artificial Sequence
  Description of Artificial Sequence: Synthetic oligonucleotide
  Antisense strand to SEQ ID NO: 855110
ucuaucccaagucuguucu

SEQ ID NO: 855112 - RNA, 19 nt, Artificial Sequence
  Description of Artificial Sequence: Synthetic oligonucleotide
  Sense strand starting at position 3590 of SEQ ID NO: 588293
agacuuguucuuggcagag

SEQ ID NO: 855113 - RNA, 19 nt, Artificial Sequence
  Description of Artificial Sequence: Synthetic oligonucleotide
  Antisense strand to SEQ ID NO: 855112
cucugccaagaacaagucu

SEQ ID NO: 855114 - RNA, 19 nt, Artificial Sequence
  Description of Artificial Sequence: Synthetic oligonucleotide
  Sense strand starting at position 3626 of SEQ ID NO: 588293
ugcagagucccuugaggua

SEQ ID NO: 855115 - RNA, 19 nt, Artificial Sequence
  Description of Artificial Sequence: Synthetic oligonucleotide
  Antisense strand to SEQ ID NO: 855114
uaccucaagggacucugca

SEQ ID NO: 855116 - RNA, 19 nt, Artificial Sequence
  Description of Artificial Sequence: Synthetic oligonucleotide
  Sense strand starting at position 3646 of SEQ ID NO: 588293
cagaaugauggcugcucaa

SEQ ID NO: 855117 - RNA, 19 nt, Artificial Sequence
  Description of Artificial Sequence: Synthetic oligonucleotide
  Antisense strand to SEQ ID NO: 855116
uugagcagccaucauucug

SEQ ID NO: 855118 - RNA, 19 nt, Artificial Sequence
  Description of Artificial Sequence: Synthetic oligonucleotide
  Sense strand starting at position 3672 of SEQ ID NO: 588293
uucaguuuccugugggaug

SEQ ID NO: 855119 - RNA, 19 nt, Artificial Sequence
  Description of Artificial Sequence: Synthetic oligonucleotide
  Antisense strand to SEQ ID NO: 855118
caucccacaggaaacugaa

SEQ ID NO: 855120 - RNA, 19 nt, Artificial Sequence
  Description of Artificial Sequence: Synthetic oligonucleotide
  Sense strand starting at position 3674 of SEQ ID NO: 588293
caguuuccugugggaugau

SEQ ID NO: 855121 - RNA, 19 nt, Artificial Sequence
  Description of Artificial Sequence: Synthetic oligonucleotide
  Antisense strand to SEQ ID NO: 855120
aucaucccacaggaaacug

SEQ ID NO: 855122 - RNA, 19 nt, Artificial Sequence
  Description of Artificial Sequence: Synthetic oligonucleotide
  Sense strand starting at position 3719 of SEQ ID NO: 588293
ggacuuaugcacugacaaa

SEQ ID NO: 855123 - RNA, 19 nt, Artificial Sequence
  Description of Artificial Sequence: Synthetic oligonucleotide
  Antisense strand to SEQ ID NO: 855122
uuugucagugcauaagucc

SEQ ID NO: 855124 - RNA, 19 nt, Artificial Sequence
  Description of Artificial Sequence: Synthetic oligonucleotide
  Sense strand starting at position 91 of SEQ ID NO: 588294
caccacgugugauuaggaa

SEQ ID NO: 855125 - RNA, 19 nt, Artificial Sequence
  Description of Artificial Sequence: Synthetic oligonucleotide
  Antisense strand to SEQ ID NO: 855124
uuccuaaucacacguggug

SEQ ID NO: 855126 - RNA, 19 nt, Artificial Sequence
  Description of Artificial Sequence: Synthetic oligonucleotide
  Sense strand starting at position 97 of SEQ ID NO: 588294
gugugauuaggaagcgcuu

SEQ ID NO: 855127 - RNA, 19 nt, Artificial Sequence
  Description of Artificial Sequence: Synthetic oligonucleotide
  Antisense strand to SEQ ID NO: 855126
aagcgcuuccuaaucacac

SEQ ID NO: 855128 - RNA, 19 nt, Artificial Sequence
  Description of Artificial Sequence: Synthetic oligonucleotide
  Sense strand starting at position 111 of SEQ ID NO: 588294
cgcuuccaucauugaaaug

SEQ ID NO: 855129 - RNA, 19 nt, Artificial Sequence
  Description of Artificial Sequence: Synthetic oligonucleotide
  Antisense strand to SEQ ID NO: 855128
cauuucaaugauggaagcg

SEQ ID NO: 855130 - RNA, 19 nt, Artificial Sequence
  Description of Artificial Sequence: Synthetic oligonucleotide
  Sense strand starting at position 136 of SEQ ID NO: 588294
agucuacuugcucacagua

SEQ ID NO: 855131 - RNA, 19 nt, Artificial Sequence
  Description of Artificial Sequence: Synthetic oligonucleotide
  Antisense strand to SEQ ID NO: 855130
uacugugagcaaguagacu

SEQ ID NO: 855132 - RNA, 19 nt, Artificial Sequence
  Description of Artificial Sequence: Synthetic oligonucleotide
  Sense strand starting at position 151 of SEQ ID NO: 588294
aguaacuccuguuucuauu

SEQ ID NO: 855133 - RNA, 19 nt, Artificial Sequence
  Description of Artificial Sequence: Synthetic oligonucleotide
  Antisense strand to SEQ ID NO: 855132
aauagaaacaggaguuacu

SEQ ID NO: 855134 - RNA, 19 nt, Artificial Sequence
  Description of Artificial Sequence: Synthetic oligonucleotide
  Sense strand starting at position 269 of SEQ ID NO: 588294
uucuacgaccuuugacaua

SEQ ID NO: 855135 - RNA, 19 nt, Artificial Sequence
  Description of Artificial Sequence: Synthetic oligonucleotide
  Antisense strand to SEQ ID NO: 855134
uaugucaaaggucguagaa

SEQ ID NO: 855136 - RNA, 19 nt, Artificial Sequence
  Description of Artificial Sequence: Synthetic oligonucleotide
  Sense strand starting at position 375 of SEQ ID NO: 588294
gugccacuuccucagggaa

SEQ ID NO: 855137 - RNA, 19 nt, Artificial Sequence
  Description of Artificial Sequence: Synthetic oligonucleotide
  Antisense strand to SEQ ID NO: 855136
uucccugaggaaguggcac

SEQ ID NO: 855138 - RNA, 19 nt, Artificial Sequence
  Description of Artificial Sequence: Synthetic oligonucleotide
  Sense strand starting at position 586 of SEQ ID NO: 588294
acaaauauacgccgaauga

SEQ ID NO: 855139 - RNA, 19 nt, Artificial Sequence
  Description of Artificial Sequence: Synthetic oligonucleotide
  Antisense strand to SEQ ID NO: 855138
ucauucggcguauauuugu

SEQ ID NO: 855140 - RNA, 19 nt, Artificial Sequence
  Description of Artificial Sequence: Synthetic oligonucleotide
  Sense strand starting at position 766 of SEQ ID NO: 588294
uuuggaaaguucccuuuaa

SEQ ID NO: 855141 - RNA, 19 nt, Artificial Sequence
  Description of Artificial Sequence: Synthetic oligonucleotide
  Antisense strand to SEQ ID NO: 855140
uuaaagggaacuuuccaaa

SEQ ID NO: 855142 - RNA, 19 nt, Artificial Sequence
  Description of Artificial Sequence: Synthetic oligonucleotide
  Sense strand starting at position 767 of SEQ ID NO: 588294
uuggaaaguucccuuuaaa

SEQ ID NO: 855143 - RNA, 19 nt, Artificial Sequence
  Description of Artificial Sequence: Synthetic oligonucleotide
  Antisense strand to SEQ ID NO: 855142
uuuaaagggaacuuuccaa

SEQ ID NO: 855144 - RNA, 19 nt, Artificial Sequence
  Description of Artificial Sequence: Synthetic oligonucleotide
  Sense strand starting at position 896 of SEQ ID NO: 588294
acuguaucuuccuugagca

SEQ ID NO: 855145 - RNA, 19 nt, Artificial Sequence
  Description of Artificial Sequence: Synthetic oligonucleotide
  Antisense strand to SEQ ID NO: 855144
ugcucaaggaagauacagu

SEQ ID NO: 855146 - RNA, 19 nt, Artificial Sequence
  Description of Artificial Sequence: Synthetic oligonucleotide
  Sense strand starting at position 897 of SEQ ID NO: 588294
cuguaucuuccuugagcaa

SEQ ID NO: 855147 - RNA, 19 nt, Artificial Sequence
  Description of Artificial Sequence: Synthetic oligonucleotide
  Antisense strand to SEQ ID NO: 855146
uugcucaaggaagauacag

SEQ ID NO: 855148 - RNA, 19 nt, Artificial Sequence
  Description of Artificial Sequence: Synthetic oligonucleotide
  Sense strand starting at position 898 of SEQ ID NO: 588294
uguaucuuccuugagcaaa

SEQ ID NO: 855149 - RNA, 19 nt, Artificial Sequence
  Description of Artificial Sequence: Synthetic oligonucleotide
  Antisense strand to SEQ ID NO: 855148
uuugcucaaggaagauaca

SEQ ID NO: 855150 - RNA, 19 nt, Artificial Sequence
  Description of Artificial Sequence: Synthetic oligonucleotide
  Sense strand starting at position 1076 of SEQ ID NO: 588294
accagaaagcccuaguugu

SEQ ID NO: 855151 - RNA, 19 nt, Artificial Sequence
  Description of Artificial Sequence: Synthetic oligonucleotide
  Antisense strand to SEQ ID NO: 855150
acaacuagggcuuucuggu

SEQ ID NO: 855152 - RNA, 19 nt, Artificial Sequence
  Description of Artificial Sequence: Synthetic oligonucleotide
  Sense strand starting at position 2290 of SEQ ID NO: 588294
ugggaucagcgagggauua

SEQ ID NO: 855153 - RNA, 19 nt, Artificial Sequence
  Description of Artificial Sequence: Synthetic oligonucleotide
  Antisense strand to SEQ ID NO: 855152
uaaucccucgcugauccca

SEQ ID NO: 855154 - RNA, 19 nt, Artificial Sequence
  Description of Artificial Sequence: Synthetic oligonucleotide
  Sense strand starting at position 2291 of SEQ ID NO: 588294
gggaucagcgagggauuaa

SEQ ID NO: 855155 - RNA, 19 nt, Artificial Sequence
  Description of Artificial Sequence: Synthetic oligonucleotide
  Antisense strand to SEQ ID NO: 855154
uuaaucccucgcugauccc

SEQ ID NO: 855156 - RNA, 19 nt, Artificial Sequence
  Description of Artificial Sequence: Synthetic oligonucleotide
  Sense strand starting at position 2304 of SEQ ID NO: 588294
gauuaagaauuagugcauu

SEQ ID NO: 855157 - RNA, 19 nt, Artificial Sequence
  Description of Artificial Sequence: Synthetic oligonucleotide
  Antisense strand to SEQ ID NO: 855156
aaugcacuaauucuuaauc

SEQ ID NO: 855158 - RNA, 19 nt, Artificial Sequence
  Description of Artificial Sequence: Synthetic oligonucleotide
  Sense strand starting at position 2715 of SEQ ID NO: 588294
accuauuugucacaaggca

SEQ ID NO: 855159 - RNA, 19 nt, Artificial Sequence
  Description of Artificial Sequence: Synthetic oligonucleotide
  Antisense strand to SEQ ID NO: 855158
ugccuugugacaaauaggu

SEQ ID NO: 855160 - RNA, 19 nt, Artificial Sequence
  Description of Artificial Sequence: Synthetic oligonucleotide
  Sense strand starting at position 2800 of SEQ ID NO: 588294
uguaucugggcuuaaauga

SEQ ID NO: 855161 - RNA, 19 nt, Artificial Sequence
  Description of Artificial Sequence: Synthetic oligonucleotide
  Antisense strand to SEQ ID NO: 855160
ucauuuaagcccagauaca

SEQ ID NO: 855162 - RNA, 19 nt, Artificial Sequence
  Description of Artificial Sequence: Synthetic oligonucleotide
  Sense strand starting at position 2822 of SEQ ID NO: 588294
auggcaaauaggugauagu

SEQ ID NO: 855163 - RNA, 19 nt, Artificial Sequence
  Description of Artificial Sequence: Synthetic oligonucleotide
  Antisense strand to SEQ ID NO: 855162
acuaucaccuauuugccau

SEQ ID NO: 855164 - RNA, 19 nt, Artificial Sequence
  Description of Artificial Sequence: Synthetic oligonucleotide
  Sense strand starting at position 2823 of SEQ ID NO: 588294
uggcaaauaggugauaguu

SEQ ID NO: 855165 - RNA, 19 nt, Artificial Sequence
  Description of Artificial Sequence: Synthetic oligonucleotide
  Antisense strand to SEQ ID NO: 855164
aacuaucaccuauuugcca

SEQ ID NO: 855166 - RNA, 19 nt, Artificial Sequence
  Description of Artificial Sequence: Synthetic oligonucleotide
  Sense strand starting at position 2920 of SEQ ID NO: 588294
ggguguuuccaggacagau

SEQ ID NO: 855167 - RNA, 19 nt, Artificial Sequence
  Description of Artificial Sequence: Synthetic oligonucleotide
  Antisense strand to SEQ ID NO: 855166
aucuguccuggaaacaccc

SEQ ID NO: 855168 - RNA, 19 nt, Artificial Sequence
  Description of Artificial Sequence: Synthetic oligonucleotide
  Sense strand starting at position 2930 of SEQ ID NO: 588294
aggacagauuagcauuuga

SEQ ID NO: 855169 - RNA, 19 nt, Artificial Sequence
  Description of Artificial Sequence: Synthetic oligonucleotide
  Antisense strand to SEQ ID NO: 855168
ucaaaugcuaaucuguccu

SEQ ID NO: 855170 - RNA, 19 nt, Artificial Sequence
  Description of Artificial Sequence: Synthetic oligonucleotide
  Sense strand starting at position 3141 of SEQ ID NO: 588294
agucuuggaccgggaguua

SEQ ID NO: 855171 - RNA, 19 nt, Artificial Sequence
  Description of Artificial Sequence: Synthetic oligonucleotide
  Antisense strand to SEQ ID NO: 855170
uaacucccgguccaagacu

SEQ ID NO: 855172 - RNA, 19 nt, Artificial Sequence
  Description of Artificial Sequence: Synthetic oligonucleotide
  Sense strand starting at position 3322 of SEQ ID NO: 588294
guucuacuucucuggagac

SEQ ID NO: 855173 - RNA, 19 nt, Artificial Sequence
  Description of Artificial Sequence: Synthetic oligonucleotide
  Antisense strand to SEQ ID NO: 855172
gucuccagagaaguagaac

SEQ ID NO: 855174 - RNA, 19 nt, Artificial Sequence
  Description of Artificial Sequence: Synthetic oligonucleotide
  Sense strand starting at position 3398 of SEQ ID NO: 588294
auguguaugccagcacgua

SEQ ID NO: 855175 - RNA, 19 nt, Artificial Sequence
  Description of Artificial Sequence: Synthetic oligonucleotide
  Antisense strand to SEQ ID NO: 855174
uacgugcuggcauacacau

SEQ ID NO: 855176 - RNA, 19 nt, Artificial Sequence
  Description of Artificial Sequence: Synthetic oligonucleotide
  Sense strand starting at position 3402 of SEQ ID NO: 588294
guaugccagcacguauauu

SEQ ID NO: 855177 - RNA, 19 nt, Artificial Sequence
  Description of Artificial Sequence: Synthetic oligonucleotide
  Antisense strand to SEQ ID NO: 855176
aauauacgugcuggcauac

SEQ ID NO: 855178 - RNA, 19 nt, Artificial Sequence
  Description of Artificial Sequence: Synthetic oligonucleotide
  Sense strand starting at position 3501 of SEQ ID NO: 588294
ggacaacuauuugaguaac

SEQ ID NO: 855179 - RNA, 19 nt, Artificial Sequence
  Description of Artificial Sequence: Synthetic oligonucleotide
  Antisense strand to SEQ ID NO: 855178
guuacucaaauaguugucc

SEQ ID NO: 855180 - RNA, 19 nt, Artificial Sequence
  Description of Artificial Sequence: Synthetic oligonucleotide
  Sense strand starting at position 3515 of SEQ ID NO: 588294
guaaccaggcuauagauua

SEQ ID NO: 855181 - RNA, 19 nt, Artificial Sequence
  Description of Artificial Sequence: Synthetic oligonucleotide
  Antisense strand to SEQ ID NO: 855180
uaaucuauagccugguuac

SEQ ID NO: 855182 - RNA, 19 nt, Artificial Sequence
  Description of Artificial Sequence: Synthetic oligonucleotide
  Sense strand starting at position 3564 of SEQ ID NO: 588294
agucuuugcccauacagac

SEQ ID NO: 855183 - RNA, 19 nt, Artificial Sequence
  Description of Artificial Sequence: Synthetic oligonucleotide
  Antisense strand to SEQ ID NO: 855182
gucuguaugggcaaagacu

SEQ ID NO: 855184 - RNA, 19 nt, Artificial Sequence
  Description of Artificial Sequence: Synthetic oligonucleotide
  Sense strand starting at position 3581 of SEQ ID NO: 588294
acucaugcucuugggaauu

SEQ ID NO: 855185 - RNA, 19 nt, Artificial Sequence
  Description of Artificial Sequence: Synthetic oligonucleotide
  Antisense strand to SEQ ID NO: 855184
aauucccaagagcaugagu

SEQ ID NO: 855186 - RNA, 19 nt, Artificial Sequence
  Description of Artificial Sequence: Synthetic oligonucleotide
  Sense strand starting at position 3595 of SEQ ID NO: 588294
gaauuugaauugggaaauc

SEQ ID NO: 855187 - RNA, 19 nt, Artificial Sequence
  Description of Artificial Sequence: Synthetic oligonucleotide
  Antisense strand to SEQ ID NO: 855186
gauuucccaauucaaauuc

SEQ ID NO: 855188 - RNA, 19 nt, Artificial Sequence
  Description of Artificial Sequence: Synthetic oligonucleotide
  Sense strand starting at position 3629 of SEQ ID NO: 588294
ggccaugaugguugggauu

SEQ ID NO: 855189 - RNA, 19 nt, Artificial Sequence
  Description of Artificial Sequence: Synthetic oligonucleotide
  Antisense strand to SEQ ID NO: 855188
aaucccaaccaucauggcc

SEQ ID NO: 855190 - RNA, 19 nt, Artificial Sequence
  Description of Artificial Sequence: Synthetic oligonucleotide
  Sense strand starting at position 3704 of SEQ ID NO: 588294
gagaaaucaugagaaagca

SEQ ID NO: 855191 - RNA, 19 nt, Artificial Sequence
  Description of Artificial Sequence: Synthetic oligonucleotide
  Antisense strand to SEQ ID NO: 855190
ugcuuucucaugauuucuc

SEQ ID NO: 855192 - RNA, 19 nt, Artificial Sequence
  Description of Artificial Sequence: Synthetic oligonucleotide
  Sense strand starting at position 3822 of SEQ ID NO: 588294
agacuuguucuuggcagag

SEQ ID NO: 855193 - RNA, 19 nt, Artificial Sequence
  Description of Artificial Sequence: Synthetic oligonucleotide
  Antisense strand to SEQ ID NO: 855192
cucugccaagaacaagucu

SEQ ID NO: 855194 - RNA, 19 nt, Artificial Sequence
  Description of Artificial Sequence: Synthetic oligonucleotide
  Sense strand starting at position 3858 of SEQ ID NO: 588294
ugcagagucccuugaggua

SEQ ID NO: 855195 - RNA, 19 nt, Artificial Sequence
  Description of Artificial Sequence: Synthetic oligonucleotide
  Antisense strand to SEQ ID NO: 855194
uaccucaagggacucugca

SEQ ID NO: 855196 - RNA, 19 nt, Artificial Sequence
  Description of Artificial Sequence: Synthetic oligonucleotide
  Sense strand starting at position 3878 of SEQ ID NO: 588294
cagaaugauggcugcucaa

SEQ ID NO: 855197 - RNA, 19 nt, Artificial Sequence
  Description of Artificial Sequence: Synthetic oligonucleotide
  Antisense strand to SEQ ID NO: 855196
uugagcagccaucauucug

SEQ ID NO: 855198 - RNA, 19 nt, Artificial Sequence
  Description of Artificial Sequence: Synthetic oligonucleotide
  Sense strand starting at position 3904 of SEQ ID NO: 588294
uucaguuuccugugggaug

SEQ ID NO: 855199 - RNA, 19 nt, Artificial Sequence
  Description of Artificial Sequence: Synthetic oligonucleotide
  Antisense strand to SEQ ID NO: 855198
caucccacaggaaacugaa

SEQ ID NO: 855200 - RNA, 19 nt, Artificial Sequence
  Description of Artificial Sequence: Synthetic oligonucleotide
  Sense strand starting at position 3906 of SEQ ID NO: 588294
caguuuccugugggaugau

SEQ ID NO: 855201 - RNA, 19 nt, Artificial Sequence
  Description of Artificial Sequence: Synthetic oligonucleotide
  Antisense strand to SEQ ID NO: 855200
aucaucccacaggaaacug

SEQ ID NO: 855202 - RNA, 19 nt, Artificial Sequence
  Description of Artificial Sequence: Synthetic oligonucleotide
  Sense strand starting at position 3951 of SEQ ID NO: 588294
ggacuuaugcacugacaaa

SEQ ID NO: 855203 - RNA, 19 nt, Artificial Sequence
  Description of Artificial Sequence: Synthetic oligonucleotide
  Antisense strand to SEQ ID NO: 855202
uuugucagugcauaagucc

SEQ ID NO: 855204 - RNA, 19 nt, Artificial Sequence
  Description of Artificial Sequence: Synthetic oligonucleotide
  Sense strand starting at position 63 of SEQ ID NO: 588295
aaagaaauguaugagugaa

SEQ ID NO: 855205 - RNA, 19 nt, Artificial Sequence
  Description of Artificial Sequence: Synthetic oligonucleotide
  Antisense strand to SEQ ID NO: 855204
uucacucauacauuucuuu

SEQ ID NO: 855206 - RNA, 19 nt, Artificial Sequence
  Description of Artificial Sequence: Synthetic oligonucleotide
  Sense strand starting at position 189 of SEQ ID NO: 588295
gagcaaguggagcaauaua

SEQ ID NO: 855207 - RNA, 19 nt, Artificial Sequence
  Description of Artificial Sequence: Synthetic oligonucleotide
  Antisense strand to SEQ ID NO: 855206
uauauugcuccacuugcuc

SEQ ID NO: 855208 - RNA, 19 nt, Artificial Sequence
  Description of Artificial Sequence: Synthetic oligonucleotide
  Sense strand starting at position 200 of SEQ ID NO: 588295
gcaauauauccacgaccua

SEQ ID NO: 855209 - RNA, 19 nt, Artificial Sequence
  Description of Artificial Sequence: Synthetic oligonucleotide
  Antisense strand to SEQ ID NO: 855208
uaggucguggauauauugc

SEQ ID NO: 855210 - RNA, 19 nt, Artificial Sequence
  Description of Artificial Sequence: Synthetic oligonucleotide
  Sense strand starting at position 241 of SEQ ID NO: 588295
ggcacuuaccguguugcau

SEQ ID NO: 855211 - RNA, 19 nt, Artificial Sequence
  Description of Artificial Sequence: Synthetic oligonucleotide
  Antisense strand to SEQ ID NO: 855210
augcaacacgguaagugcc

SEQ ID NO: 855212 - RNA, 19 nt, Artificial Sequence
  Description of Artificial Sequence: Synthetic oligonucleotide
  Sense strand starting at position 242 of SEQ ID NO: 588295
gcacuuaccguguugcauu

SEQ ID NO: 855213 - RNA, 19 nt, Artificial Sequence
  Description of Artificial Sequence: Synthetic oligonucleotide
  Antisense strand to SEQ ID NO: 855212
aaugcaacacgguaagugc

SEQ ID NO: 855214 - RNA, 19 nt, Artificial Sequence
  Description of Artificial Sequence: Synthetic oligonucleotide
  Sense strand starting at position 357 of SEQ ID NO: 588295
gaaguugcugugcugcaua

SEQ ID NO: 855215 - RNA, 19 nt, Artificial Sequence
  Description of Artificial Sequence: Synthetic oligonucleotide
  Antisense strand to SEQ ID NO: 855214
uaugcagcacagcaacuuc

SEQ ID NO: 855216 - RNA, 19 nt, Artificial Sequence
  Description of Artificial Sequence: Synthetic oligonucleotide
  Sense strand starting at position 368 of SEQ ID NO: 588295
gcugcauaaccaugcaaca

SEQ ID NO: 855217 - RNA, 19 nt, Artificial Sequence
  Description of Artificial Sequence: Synthetic oligonucleotide
  Antisense strand to SEQ ID NO: 855216
uguugcaugguuaugcagc

SEQ ID NO: 855218 - RNA, 19 nt, Artificial Sequence
  Description of Artificial Sequence: Synthetic oligonucleotide
  Sense strand starting at position 378 of SEQ ID NO: 588295
caugcaacacucgagagua

SEQ ID NO: 855219 - RNA, 19 nt, Artificial Sequence
  Description of Artificial Sequence: Synthetic oligonucleotide
  Antisense strand to SEQ ID NO: 855218
uacucucgaguguugcaug

SEQ ID NO: 855220 - RNA, 19 nt, Artificial Sequence
  Description of Artificial Sequence: Synthetic oligonucleotide
  Sense strand starting at position 650 of SEQ ID NO: 588295
uccagaaagucguuuaacu

SEQ ID NO: 855221 - RNA, 19 nt, Artificial Sequence
  Description of Artificial Sequence: Synthetic oligonucleotide
  Antisense strand to SEQ ID NO: 855220
aguuaaacgacuuucugga

SEQ ID NO: 855222 - RNA, 19 nt, Artificial Sequence
  Description of Artificial Sequence: Synthetic oligonucleotide
  Sense strand starting at position 652 of SEQ ID NO: 588295
cagaaagucguuuaacucu

SEQ ID NO: 855223 - RNA, 19 nt, Artificial Sequence
  Description of Artificial Sequence: Synthetic oligonucleotide
  Antisense strand to SEQ ID NO: 855222
agaguuaaacgacuuucug

SEQ ID NO: 855224 - RNA, 19 nt, Artificial Sequence
  Description of Artificial Sequence: Synthetic oligonucleotide
  Sense strand starting at position 713 of SEQ ID NO: 588295
gugaauuacaagggcugaa

SEQ ID NO: 855225 - RNA, 19 nt, Artificial Sequence
  Description of Artificial Sequence: Synthetic oligonucleotide
  Antisense strand to SEQ ID NO: 855224
uucagcccuuguaauucac

SEQ ID NO: 855226 - RNA, 19 nt, Artificial Sequence
  Description of Artificial Sequence: Synthetic oligonucleotide
  Sense strand starting at position 811 of SEQ ID NO: 588295
gagguagagugauucccau

SEQ ID NO: 855227 - RNA, 19 nt, Artificial Sequence
  Description of Artificial Sequence: Synthetic oligonucleotide
  Antisense strand to SEQ ID NO: 855226
augggaaucacucuaccuc

SEQ ID NO: 855228 - RNA, 19 nt, Artificial Sequence
  Description of Artificial Sequence: Synthetic oligonucleotide
  Sense strand starting at position 817 of SEQ ID NO: 588295
gagugauucccauaccgac

SEQ ID NO: 855229 - RNA, 19 nt, Artificial Sequence
  Description of Artificial Sequence: Synthetic oligonucleotide
  Antisense strand to SEQ ID NO: 855228
gucgguaugggaaucacuc

SEQ ID NO: 855230 - RNA, 19 nt, Artificial Sequence
  Description of Artificial Sequence: Synthetic oligonucleotide
  Sense strand starting at position 931 of SEQ ID NO: 588295
aggucuuccagggaugcau

SEQ ID NO: 855231 - RNA, 19 nt, Artificial Sequence
  Description of Artificial Sequence: Synthetic oligonucleotide
  Antisense strand to SEQ ID NO: 855230
augcaucccuggaagaccu

SEQ ID NO: 855232 - RNA, 19 nt, Artificial Sequence
  Description of Artificial Sequence: Synthetic oligonucleotide
  Sense strand starting at position 940 of SEQ ID NO: 588295
agggaugcaucaucaauga

SEQ ID NO: 855233 - RNA, 19 nt, Artificial Sequence
  Description of Artificial Sequence: Synthetic oligonucleotide
  Antisense strand to SEQ ID NO: 855232
ucauugaugaugcaucccu

SEQ ID NO: 855234 - RNA, 19 nt, Artificial Sequence
  Description of Artificial Sequence: Synthetic oligonucleotide
  Sense strand starting at position 1038 of SEQ ID NO: 588295
cgggaaaucagaggccaua

SEQ ID NO: 855235 - RNA, 19 nt, Artificial Sequence
  Description of Artificial Sequence: Synthetic oligonucleotide
  Antisense strand to SEQ ID NO: 855234
uauggccucugauuucccg

SEQ ID NO: 855236 - RNA, 19 nt, Artificial Sequence
  Description of Artificial Sequence: Synthetic oligonucleotide
  Sense strand starting at position 1049 of SEQ ID NO: 588295
aggccauaucuauguccaa

SEQ ID NO: 855237 - RNA, 19 nt, Artificial Sequence
  Description of Artificial Sequence: Synthetic oligonucleotide
  Antisense strand to SEQ ID NO: 855236
uuggacauagauauggccu

SEQ ID NO: 855238 - RNA, 19 nt, Artificial Sequence
  Description of Artificial Sequence: Synthetic oligonucleotide
  Sense strand starting at position 1050 of SEQ ID NO: 588295
ggccauaucuauguccaag

SEQ ID NO: 855239 - RNA, 19 nt, Artificial Sequence
  Description of Artificial Sequence: Synthetic oligonucleotide
  Antisense strand to SEQ ID NO: 855238
cuuggacauagauauggcc

SEQ ID NO: 855240 - RNA, 19 nt, Artificial Sequence
  Description of Artificial Sequence: Synthetic oligonucleotide
  Sense strand starting at position 1157 of SEQ ID NO: 588295
caggguuggguauacauau

SEQ ID NO: 855241 - RNA, 19 nt, Artificial Sequence
  Description of Artificial Sequence: Synthetic oligonucleotide
  Antisense strand to SEQ ID NO: 855240
auauguauacccaacccug

SEQ ID NO: 855242 - RNA, 19 nt, Artificial Sequence
  Description of Artificial Sequence: Synthetic oligonucleotide
  Sense strand starting at position 1254 of SEQ ID NO: 588295
accagaguuuguuuccgau

SEQ ID NO: 855243 - RNA, 19 nt, Artificial Sequence
  Description of Artificial Sequence: Synthetic oligonucleotide
  Antisense strand to SEQ ID NO: 855242
aucggaaacaaacucuggu

SEQ ID NO: 855244 - RNA, 19 nt, Artificial Sequence
  Description of Artificial Sequence: Synthetic oligonucleotide
  Sense strand starting at position 1305 of SEQ ID NO: 588295
ccaagauucugguuucuuu

SEQ ID NO: 855245 - RNA, 19 nt, Artificial Sequence
  Description of Artificial Sequence: Synthetic oligonucleotide
  Antisense strand to SEQ ID NO: 855244
aaagaaaccagaaucuugg

SEQ ID NO: 855246 - RNA, 19 nt, Artificial Sequence
  Description of Artificial Sequence: Synthetic oligonucleotide
  Sense strand starting at position 1839 of SEQ ID NO: 588295
aaggacuugagccgggaaa

SEQ ID NO: 855247 - RNA, 19 nt, Artificial Sequence
  Description of Artificial Sequence: Synthetic oligonucleotide
  Antisense strand to SEQ ID NO: 855246
uuucccggcucaaguccuu

SEQ ID NO: 855248 - RNA, 19 nt, Artificial Sequence
  Description of Artificial Sequence: Synthetic oligonucleotide
  Sense strand starting at position 2036 of SEQ ID NO: 588295
ggaagauaguucucuggug

SEQ ID NO: 855249 - RNA, 19 nt, Artificial Sequence
  Description of Artificial Sequence: Synthetic oligonucleotide
  Antisense strand to SEQ ID NO: 855248
caccagagaacuaucuucc

SEQ ID NO: 855250 - RNA, 19 nt, Artificial Sequence
  Description of Artificial Sequence: Synthetic oligonucleotide
  Sense strand starting at position 2037 of SEQ ID NO: 588295
gaagauaguucucuggugu

SEQ ID NO: 855251 - RNA, 19 nt, Artificial Sequence
  Description of Artificial Sequence: Synthetic oligonucleotide
  Antisense strand to SEQ ID NO: 855250
acaccagagaacuaucuuc

SEQ ID NO: 855252 - RNA, 19 nt, Artificial Sequence
  Description of Artificial Sequence: Synthetic oligonucleotide
  Sense strand starting at position 2038 of SEQ ID NO: 588295
aagauaguucucugguguu

SEQ ID NO: 855253 - RNA, 19 nt, Artificial Sequence
  Description of Artificial Sequence: Synthetic oligonucleotide
  Antisense strand to SEQ ID NO: 855252
aacaccagagaacuaucuu

SEQ ID NO: 855254 - RNA, 19 nt, Artificial Sequence
  Description of Artificial Sequence: Synthetic oligonucleotide
  Sense strand starting at position 2219 of SEQ ID NO: 588295
aggaauccucccuagugca

SEQ ID NO: 855255 - RNA, 19 nt, Artificial Sequence
  Description of Artificial Sequence: Synthetic oligonucleotide
  Antisense strand to SEQ ID NO: 855254
ugcacuagggaggauuccu

SEQ ID NO: 855256 - RNA, 19 nt, Artificial Sequence
  Description of Artificial Sequence: Synthetic oligonucleotide
  Sense strand starting at position 2267 of SEQ ID NO: 588295
accaaacguuucccugaau

SEQ ID NO: 855257 - RNA, 19 nt, Artificial Sequence
  Description of Artificial Sequence: Synthetic oligonucleotide
  Antisense strand to SEQ ID NO: 855256
auucagggaaacguuuggu

SEQ ID NO: 855258 - RNA, 19 nt, Artificial Sequence
  Description of Artificial Sequence: Synthetic oligonucleotide
  Sense strand starting at position 2268 of SEQ ID NO: 588295
ccaaacguuucccugaauc

SEQ ID NO: 855259 - RNA, 19 nt, Artificial Sequence
  Description of Artificial Sequence: Synthetic oligonucleotide
  Antisense strand to SEQ ID NO: 855258
gauucagggaaacguuugg

SEQ ID NO: 855260 - RNA, 19 nt, Artificial Sequence
  Description of Artificial Sequence: Synthetic oligonucleotide
  Sense strand starting at position 2270 of SEQ ID NO: 588295
aaacguuucccugaaucug

SEQ ID NO: 855261 - RNA, 19 nt, Artificial Sequence
  Description of Artificial Sequence: Synthetic oligonucleotide
  Antisense strand to SEQ ID NO: 855260
cagauucagggaaacguuu

SEQ ID NO: 855262 - RNA, 19 nt, Artificial Sequence
  Description of Artificial Sequence: Synthetic oligonucleotide
  Sense strand starting at position 2672 of SEQ ID NO: 588295
gucaucacgcuguaaacuu

SEQ ID NO: 855263 - RNA, 19 nt, Artificial Sequence
  Description of Artificial Sequence: Synthetic oligonucleotide
  Antisense strand to SEQ ID NO: 855262
aaguuuacagcgugaugac

SEQ ID NO: 855264 - RNA, 19 nt, Artificial Sequence
  Description of Artificial Sequence: Synthetic oligonucleotide
  Sense strand starting at position 2680 of SEQ ID NO: 588295
gcuguaaacuuaucuguag

SEQ ID NO: 855265 - RNA, 19 nt, Artificial Sequence
  Description of Artificial Sequence: Synthetic oligonucleotide
  Antisense strand to SEQ ID NO: 855264
cuacagauaaguuuacagc

SEQ ID NO: 855266 - RNA, 19 nt, Artificial Sequence
  Description of Artificial Sequence: Synthetic oligonucleotide
  Sense strand starting at position 2764 of SEQ ID NO: 588295
aggaaagagaguggucauu

SEQ ID NO: 855267 - RNA, 19 nt, Artificial Sequence
  Description of Artificial Sequence: Synthetic oligonucleotide
  Antisense strand to SEQ ID NO: 855266
aaugaccacucucuuuccu

SEQ ID NO: 855268 - RNA, 19 nt, Artificial Sequence
  Description of Artificial Sequence: Synthetic oligonucleotide
  Sense strand starting at position 2809 of SEQ ID NO: 588295
ggcauuggccuccaaacaa

SEQ ID NO: 855269 - RNA, 19 nt, Artificial Sequence
  Description of Artificial Sequence: Synthetic oligonucleotide
  Antisense strand to SEQ ID NO: 855268
uuguuuggaggccaaugcc

SEQ ID NO: 855270 - RNA, 19 nt, Artificial Sequence
  Description of Artificial Sequence: Synthetic oligonucleotide
  Sense strand starting at position 2841 of SEQ ID NO: 588295
ggaucacccuugccaacau

SEQ ID NO: 855271 - RNA, 19 nt, Artificial Sequence
  Description of Artificial Sequence: Synthetic oligonucleotide
  Antisense strand to SEQ ID NO: 855270
auguuggcaagggugaucc

SEQ ID NO: 855272 - RNA, 19 nt, Artificial Sequence
  Description of Artificial Sequence: Synthetic oligonucleotide
  Sense strand starting at position 3044 of SEQ ID NO: 588295
aucucaaguucugucaaca

SEQ ID NO: 855273 - RNA, 19 nt, Artificial Sequence
  Description of Artificial Sequence: Synthetic oligonucleotide
  Antisense strand to SEQ ID NO: 855272
uguugacagaacuugagau

SEQ ID NO: 855274 - RNA, 19 nt, Artificial Sequence
  Description of Artificial Sequence: Synthetic oligonucleotide
  Sense strand starting at position 3052 of SEQ ID NO: 588295
uucugucaacaaggagauu

SEQ ID NO: 855275 - RNA, 19 nt, Artificial Sequence
  Description of Artificial Sequence: Synthetic oligonucleotide
  Antisense strand to SEQ ID NO: 855274
aaucuccuuguugacagaa

SEQ ID NO: 855276 - RNA, 19 nt, Artificial Sequence
  Description of Artificial Sequence: Synthetic oligonucleotide
  Sense strand starting at position 3172 of SEQ ID NO: 588295
gcuccaucuuauuugguca

SEQ ID NO: 855277 - RNA, 19 nt, Artificial Sequence
  Description of Artificial Sequence: Synthetic oligonucleotide
  Antisense strand to SEQ ID NO: 855276
ugaccaaauaagauggagc

SEQ ID NO: 855278 - RNA, 19 nt, Artificial Sequence
  Description of Artificial Sequence: Synthetic oligonucleotide
  Sense strand starting at position 3228 of SEQ ID NO: 588295
ucaggagugggucagcuuu

SEQ ID NO: 855279 - RNA, 19 nt, Artificial Sequence
  Description of Artificial Sequence: Synthetic oligonucleotide
  Antisense strand to SEQ ID NO: 855278
aaagcugacccacuccuga

SEQ ID NO: 855280 - RNA, 19 nt, Artificial Sequence
  Description of Artificial Sequence: Synthetic oligonucleotide
  Sense strand starting at position 3319 of SEQ ID NO: 588295
ucuggaauccuuugagaau

SEQ ID NO: 855281 - RNA, 19 nt, Artificial Sequence
  Description of Artificial Sequence: Synthetic oligonucleotide
  Antisense strand to SEQ ID NO: 855280
auucucaaaggauuccaga

SEQ ID NO: 855282 - RNA, 19 nt, Artificial Sequence
  Description of Artificial Sequence: Synthetic oligonucleotide
  Sense strand starting at position 3332 of SEQ ID NO: 588295
gagaaucucuaggcucaga

SEQ ID NO: 855283 - RNA, 19 nt, Artificial Sequence
  Description of Artificial Sequence: Synthetic oligonucleotide
  Antisense strand to SEQ ID NO: 855282
ucugagccuagagauucuc

SEQ ID NO: 855284 - RNA, 19 nt, Artificial Sequence
  Description of Artificial Sequence: Synthetic oligonucleotide
  Sense strand starting at position 3 of SEQ ID NO: 588296
aauugaauuggguguaggu

SEQ ID NO: 855285 - RNA, 19 nt, Artificial Sequence
  Description of Artificial Sequence: Synthetic oligonucleotide
  Antisense strand to SEQ ID NO: 855284
accuacacccaauucaauu

SEQ ID NO: 855286 - RNA, 19 nt, Artificial Sequence
  Description of Artificial Sequence: Synthetic oligonucleotide
  Sense strand starting at position 5 of SEQ ID NO: 588296
uugaauuggguguagguaa

SEQ ID NO: 855287 - RNA, 19 nt, Artificial Sequence
  Description of Artificial Sequence: Synthetic oligonucleotide
  Antisense strand to SEQ ID NO: 855286
uuaccuacacccaauucaa

SEQ ID NO: 855288 - RNA, 19 nt, Artificial Sequence
  Description of Artificial Sequence: Synthetic oligonucleotide
  Sense strand starting at position 16 of SEQ ID NO: 588296
guagguaaauguccucaua

SEQ ID NO: 855289 - RNA, 19 nt, Artificial Sequence
  Description of Artificial Sequence: Synthetic oligonucleotide
  Antisense strand to SEQ ID NO: 855288
uaugaggacauuuaccuac

SEQ ID NO: 855290 - RNA, 19 nt, Artificial Sequence
  Description of Artificial Sequence: Synthetic oligonucleotide
  Sense strand starting at position 18 of SEQ ID NO: 588296
agguaaauguccucauaau

SEQ ID NO: 855291 - RNA, 19 nt, Artificial Sequence
  Description of Artificial Sequence: Synthetic oligonucleotide
  Antisense strand to SEQ ID NO: 855290
auuaugaggacauuuaccu

SEQ ID NO: 855292 - RNA, 19 nt, Artificial Sequence
  Description of Artificial Sequence: Synthetic oligonucleotide
  Sense strand starting at position 19 of SEQ ID NO: 588296
gguaaauguccucauaauc

SEQ ID NO: 855293 - RNA, 19 nt, Artificial Sequence
  Description of Artificial Sequence: Synthetic oligonucleotide
  Antisense strand to SEQ ID NO: 855292
gauuaugaggacauuuacc

SEQ ID NO: 855294 - RNA, 19 nt, Artificial Sequence
  Description of Artificial Sequence: Synthetic oligonucleotide
  Sense strand starting at position 52 of SEQ ID NO: 588296
gggcuauuccagugaccua

SEQ ID NO: 855295 - RNA, 19 nt, Artificial Sequence
  Description of Artificial Sequence: Synthetic oligonucleotide
  Antisense strand to SEQ ID NO: 855294
uaggucacuggaauagccc

SEQ ID NO: 855296 - RNA, 19 nt, Artificial Sequence
  Description of Artificial Sequence: Synthetic oligonucleotide
  Sense strand starting at position 179 of SEQ ID NO: 588296
ucccucuugcuggaaaugu

SEQ ID NO: 855297 - RNA, 19 nt, Artificial Sequence
  Description of Artificial Sequence: Synthetic oligonucleotide
  Antisense strand to SEQ ID NO: 855296
acauuuccagcaagaggga

SEQ ID NO: 855298 - RNA, 19 nt, Artificial Sequence
  Description of Artificial Sequence: Synthetic oligonucleotide
  Sense strand starting at position 242 of SEQ ID NO: 588296
aagggaaguggugguuaau

SEQ ID NO: 855299 - RNA, 19 nt, Artificial Sequence
  Description of Artificial Sequence: Synthetic oligonucleotide
  Antisense strand to SEQ ID NO: 855298
auuaaccaccacuucccuu

SEQ ID NO: 855300 - RNA, 19 nt, Artificial Sequence
  Description of Artificial Sequence: Synthetic oligonucleotide
  Sense strand starting at position 529 of SEQ ID NO: 588296
uggguuugggcaugagaaa

SEQ ID NO: 855301 - RNA, 19 nt, Artificial Sequence
  Description of Artificial Sequence: Synthetic oligonucleotide
  Antisense strand to SEQ ID NO: 855300
uuucucaugcccaaaccca

SEQ ID NO: 855302 - RNA, 19 nt, Artificial Sequence
  Description of Artificial Sequence: Synthetic oligonucleotide
  Sense strand starting at position 656 of SEQ ID NO: 588296
cugggaucccaaugauggu

SEQ ID NO: 855303 - RNA, 19 nt, Artificial Sequence
  Description of Artificial Sequence: Synthetic oligonucleotide
  Antisense strand to SEQ ID NO: 855302
accaucauugggaucccag

SEQ ID NO: 855304 - RNA, 19 nt, Artificial Sequence
  Description of Artificial Sequence: Synthetic oligonucleotide
  Sense strand starting at position 671 of SEQ ID NO: 588296
uggugcaaucacugaauua

SEQ ID NO: 855305 - RNA, 19 nt, Artificial Sequence
  Description of Artificial Sequence: Synthetic oligonucleotide
  Antisense strand to SEQ ID NO: 855304
uaauucagugauugcacca

SEQ ID NO: 855306 - RNA, 19 nt, Artificial Sequence
  Description of Artificial Sequence: Synthetic oligonucleotide
  Sense strand starting at position 672 of SEQ ID NO: 588296
ggugcaaucacugaauuag

SEQ ID NO: 855307 - RNA, 19 nt, Artificial Sequence
  Description of Artificial Sequence: Synthetic oligonucleotide
  Antisense strand to SEQ ID NO: 855306
cuaauucagugauugcacc

SEQ ID NO: 855308 - RNA, 19 nt, Artificial Sequence
  Description of Artificial Sequence: Synthetic oligonucleotide
  Sense strand starting at position 738 of SEQ ID NO: 588296
gggcauacagauugaguuu

SEQ ID NO: 855309 - RNA, 19 nt, Artificial Sequence
  Description of Artificial Sequence: Synthetic oligonucleotide
  Antisense strand to SEQ ID NO: 855308
aaacucaaucuguaugccc

SEQ ID NO: 855310 - RNA, 19 nt, Artificial Sequence
  Description of Artificial Sequence: Synthetic oligonucleotide
  Sense strand starting at position 741 of SEQ ID NO: 588296
cauacagauugaguuugaa

SEQ ID NO: 855311 - RNA, 19 nt, Artificial Sequence
  Description of Artificial Sequence: Synthetic oligonucleotide
  Antisense strand to SEQ ID NO: 855310
uucaaacucaaucuguaug

SEQ ID NO: 855312 - RNA, 19 nt, Artificial Sequence
  Description of Artificial Sequence: Synthetic oligonucleotide
  Sense strand starting at position 809 of SEQ ID NO: 588296
aaagucugguucucagaac

SEQ ID NO: 855313 - RNA, 19 nt, Artificial Sequence
  Description of Artificial Sequence: Synthetic oligonucleotide
  Antisense strand to SEQ ID NO: 855312
guucugagaaccagacuuu

SEQ ID NO: 855314 - RNA, 19 nt, Artificial Sequence
  Description of Artificial Sequence: Synthetic oligonucleotide
  Sense strand starting at position 843 of SEQ ID NO: 588296
agauauacauuugagacau

SEQ ID NO: 855315 - RNA, 19 nt, Artificial Sequence
  Description of Artificial Sequence: Synthetic oligonucleotide
  Antisense strand to SEQ ID NO: 855314
augucucaaauguauaucu

SEQ ID NO: 855316 - RNA, 19 nt, Artificial Sequence
  Description of Artificial Sequence: Synthetic oligonucleotide
  Sense strand starting at position 897 of SEQ ID NO: 588296
gagugagccuaccuaaagu

SEQ ID NO: 855317 - RNA, 19 nt, Artificial Sequence
  Description of Artificial Sequence: Synthetic oligonucleotide
  Antisense strand to SEQ ID NO: 855316
acuuuagguaggcucacuc

SEQ ID NO: 855318 - RNA, 19 nt, Artificial Sequence
  Description of Artificial Sequence: Synthetic oligonucleotide
  Sense strand starting at position 1078 of SEQ ID NO: 588296
gagggucagcgucauagau

SEQ ID NO: 855319 - RNA, 19 nt, Artificial Sequence
  Description of Artificial Sequence: Synthetic oligonucleotide
  Antisense strand to SEQ ID NO: 855318
aucuaugacgcugacccuc

SEQ ID NO: 855320 - RNA, 19 nt, Artificial Sequence
  Description of Artificial Sequence: Synthetic oligonucleotide
  Sense strand starting at position 1115 of SEQ ID NO: 588296
uugagaaguuaguucugaa

SEQ ID NO: 855321 - RNA, 19 nt, Artificial Sequence
  Description of Artificial Sequence: Synthetic oligonucleotide
  Antisense strand to SEQ ID NO: 855320
uucagaacuaacuucucaa

SEQ ID NO: 855322 - RNA, 19 nt, Artificial Sequence
  Description of Artificial Sequence: Synthetic oligonucleotide
  Sense strand starting at position 1291 of SEQ ID NO: 588296
cugagcuucguaguuguca

SEQ ID NO: 855323 - RNA, 19 nt, Artificial Sequence
  Description of Artificial Sequence: Synthetic oligonucleotide
  Antisense strand to SEQ ID NO: 855322
ugacaacuacgaagcucag

SEQ ID NO: 855324 - RNA, 19 nt, Artificial Sequence
  Description of Artificial Sequence: Synthetic oligonucleotide
  Sense strand starting at position 1333 of SEQ ID NO: 588296
agugcuaguccacaucuga

SEQ ID NO: 855325 - RNA, 19 nt, Artificial Sequence
  Description of Artificial Sequence: Synthetic oligonucleotide
  Antisense strand to SEQ ID NO: 855324
ucagauguggacuagcacu

SEQ ID NO: 855326 - RNA, 19 nt, Artificial Sequence
  Description of Artificial Sequence: Synthetic oligonucleotide
  Sense strand starting at position 1493 of SEQ ID NO: 588296
uuaauuaugcagggcucua

SEQ ID NO: 855327 - RNA, 19 nt, Artificial Sequence
  Description of Artificial Sequence: Synthetic oligonucleotide
  Antisense strand to SEQ ID NO: 855326
uagagcccugcauaauuaa

SEQ ID NO: 855328 - RNA, 19 nt, Artificial Sequence
  Description of Artificial Sequence: Synthetic oligonucleotide
  Sense strand starting at position 1611 of SEQ ID NO: 588296
cggagucucagcuacagua

SEQ ID NO: 855329 - RNA, 19 nt, Artificial Sequence
  Description of Artificial Sequence: Synthetic oligonucleotide
  Antisense strand to SEQ ID NO: 855328
uacuguagcugagacuccg

SEQ ID NO: 855330 - RNA, 19 nt, Artificial Sequence
  Description of Artificial Sequence: Synthetic oligonucleotide
  Sense strand starting at position 1830 of SEQ ID NO: 588296
ggaccagacuacucaccuu

SEQ ID NO: 855331 - RNA, 19 nt, Artificial Sequence
  Description of Artificial Sequence: Synthetic oligonucleotide
  Antisense strand to SEQ ID NO: 855330
aaggugaguagucuggucc

SEQ ID NO: 855332 - RNA, 19 nt, Artificial Sequence
  Description of Artificial Sequence: Synthetic oligonucleotide
  Sense strand starting at position 2033 of SEQ ID NO: 588296
cccuuuaugcaggaaguga

SEQ ID NO: 855333 - RNA, 19 nt, Artificial Sequence
  Description of Artificial Sequence: Synthetic oligonucleotide
  Antisense strand to SEQ ID NO: 855332
ucacuuccugcauaaaggg

SEQ ID NO: 855334 - RNA, 19 nt, Artificial Sequence
  Description of Artificial Sequence: Synthetic oligonucleotide
  Sense strand starting at position 2103 of SEQ ID NO: 588296
agcugauuaccuuggcaac

SEQ ID NO: 855335 - RNA, 19 nt, Artificial Sequence
  Description of Artificial Sequence: Synthetic oligonucleotide
  Antisense strand to SEQ ID NO: 855334
guugccaagguaaucagcu

SEQ ID NO: 855336 - RNA, 19 nt, Artificial Sequence
  Description of Artificial Sequence: Synthetic oligonucleotide
  Sense strand starting at position 2240 of SEQ ID NO: 588296
gguccauucccauagauac

SEQ ID NO: 855337 - RNA, 19 nt, Artificial Sequence
  Description of Artificial Sequence: Synthetic oligonucleotide
  Antisense strand to SEQ ID NO: 855336
guaucuaugggaauggacc

SEQ ID NO: 855338 - RNA, 19 nt, Artificial Sequence
  Description of Artificial Sequence: Synthetic oligonucleotide
  Sense strand starting at position 2271 of SEQ ID NO: 588296
cuccgugaguuaccauaaa

SEQ ID NO: 855339 - RNA, 19 nt, Artificial Sequence
  Description of Artificial Sequence: Synthetic oligonucleotide
  Antisense strand to SEQ ID NO: 855338
uuuaugguaacucacggag

SEQ ID NO: 855340 - RNA, 19 nt, Artificial Sequence
  Description of Artificial Sequence: Synthetic oligonucleotide
  Sense strand starting at position 2465 of SEQ ID NO: 588296
gccuauguuccacaucauu

SEQ ID NO: 855341 - RNA, 19 nt, Artificial Sequence
  Description of Artificial Sequence: Synthetic oligonucleotide
  Antisense strand to SEQ ID NO: 855340
aaugauguggaacauaggc

SEQ ID NO: 855342 - RNA, 19 nt, Artificial Sequence
  Description of Artificial Sequence: Synthetic oligonucleotide
  Sense strand starting at position 2539 of SEQ ID NO: 588296
cagcuuuauugucuagaug

SEQ ID NO: 855343 - RNA, 19 nt, Artificial Sequence
  Description of Artificial Sequence: Synthetic oligonucleotide
  Antisense strand to SEQ ID NO: 855342
caucuagacaauaaagcug

SEQ ID NO: 855344 - RNA, 19 nt, Artificial Sequence
  Description of Artificial Sequence: Synthetic oligonucleotide
  Sense strand starting at position 2542 of SEQ ID NO: 588296
cuuuauugucuagauguga

SEQ ID NO: 855345 - RNA, 19 nt, Artificial Sequence
  Description of Artificial Sequence: Synthetic oligonucleotide
  Antisense strand to SEQ ID NO: 855344
ucacaucuagacaauaaag

SEQ ID NO: 855346 - RNA, 19 nt, Artificial Sequence
  Description of Artificial Sequence: Synthetic oligonucleotide
  Sense strand starting at position 2551 of SEQ ID NO: 588296
cuagaugugaccugaggga

SEQ ID NO: 855347 - RNA, 19 nt, Artificial Sequence
  Description of Artificial Sequence: Synthetic oligonucleotide
  Antisense strand to SEQ ID NO: 855346
ucccucaggucacaucuag

SEQ ID NO: 855348 - RNA, 19 nt, Artificial Sequence
  Description of Artificial Sequence: Synthetic oligonucleotide
  Sense strand starting at position 2644 of SEQ ID NO: 588296
ggguccuagagaugacauu

SEQ ID NO: 855349 - RNA, 19 nt, Artificial Sequence
  Description of Artificial Sequence: Synthetic oligonucleotide
  Antisense strand to SEQ ID NO: 855348
aaugucaucucuaggaccc

SEQ ID NO: 855350 - RNA, 19 nt, Artificial Sequence
  Description of Artificial Sequence: Synthetic oligonucleotide
  Sense strand starting at position 2752 of SEQ ID NO: 588296
cucccuuuacaaugaggua

SEQ ID NO: 855351 - RNA, 19 nt, Artificial Sequence
  Description of Artificial Sequence: Synthetic oligonucleotide
  Antisense strand to SEQ ID NO: 855350
uaccucauuguaaagggag

SEQ ID NO: 855352 - RNA, 19 nt, Artificial Sequence
  Description of Artificial Sequence: Synthetic oligonucleotide
  Sense strand starting at position 2761 of SEQ ID NO: 588296
caaugagguagguguaaca

SEQ ID NO: 855353 - RNA, 19 nt, Artificial Sequence
  Description of Artificial Sequence: Synthetic oligonucleotide
  Antisense strand to SEQ ID NO: 855352
uguuacaccuaccucauug

SEQ ID NO: 855354 - RNA, 19 nt, Artificial Sequence
  Description of Artificial Sequence: Synthetic oligonucleotide
  Sense strand starting at position 3286 of SEQ ID NO: 588296
guacucaugccagagaggu

SEQ ID NO: 855355 - RNA, 19 nt, Artificial Sequence
  Description of Artificial Sequence: Synthetic oligonucleotide
  Antisense strand to SEQ ID NO: 855354
accucucuggcaugaguac

SEQ ID NO: 855356 - RNA, 19 nt, Artificial Sequence
  Description of Artificial Sequence: Synthetic oligonucleotide
  Sense strand starting at position 3707 of SEQ ID NO: 588296
ucacacaguugucuacaga

SEQ ID NO: 855357 - RNA, 19 nt, Artificial Sequence
  Description of Artificial Sequence: Synthetic oligonucleotide
  Antisense strand to SEQ ID NO: 855356
ucuguagacaacuguguga

SEQ ID NO: 855358 - RNA, 19 nt, Artificial Sequence
  Description of Artificial Sequence: Synthetic oligonucleotide
  Sense strand starting at position 3714 of SEQ ID NO: 588296
guugucuacagaggaaucu

SEQ ID NO: 855359 - RNA, 19 nt, Artificial Sequence
  Description of Artificial Sequence: Synthetic oligonucleotide
  Antisense strand to SEQ ID NO: 855358
agauuccucuguagacaac

SEQ ID NO: 855360 - RNA, 19 nt, Artificial Sequence
  Description of Artificial Sequence: Synthetic oligonucleotide
  Sense strand starting at position 3768 of SEQ ID NO: 588296
ucaauccucccucagugua

SEQ ID NO: 855361 - RNA, 19 nt, Artificial Sequence
  Description of Artificial Sequence: Synthetic oligonucleotide
  Antisense strand to SEQ ID NO: 855360
uacacugagggaggauuga

SEQ ID NO: 855362 - RNA, 19 nt, Artificial Sequence
  Description of Artificial Sequence: Synthetic oligonucleotide
  Sense strand starting at position 3933 of SEQ ID NO: 588296
caauuucucccguguaggu

SEQ ID NO: 855363 - RNA, 19 nt, Artificial Sequence
  Description of Artificial Sequence: Synthetic oligonucleotide
  Antisense strand to SEQ ID NO: 855362
accuacacgggagaaauug

SEQ ID NO: 855364 - RNA, 19 nt, Artificial Sequence
  Description of Artificial Sequence: Synthetic oligonucleotide
  Sense strand starting at position 607 of SEQ ID NO: 588297
gguugaguuugucuaaaca

SEQ ID NO: 855365 - RNA, 19 nt, Artificial Sequence
  Description of Artificial Sequence: Synthetic oligonucleotide
  Antisense strand to SEQ ID NO: 855364
uguuuagacaaacucaacc

SEQ ID NO: 855366 - RNA, 19 nt, Artificial Sequence
  Description of Artificial Sequence: Synthetic oligonucleotide
  Sense strand starting at position 722 of SEQ ID NO: 588297
agacaaguguuuccuauuc

SEQ ID NO: 855367 - RNA, 19 nt, Artificial Sequence
  Description of Artificial Sequence: Synthetic oligonucleotide
  Antisense strand to SEQ ID NO: 855366
gaauaggaaacacuugucu

SEQ ID NO: 855368 - RNA, 19 nt, Artificial Sequence
  Description of Artificial Sequence: Synthetic oligonucleotide
  Sense strand starting at position 741 of SEQ ID NO: 588297
agaucuuugaaagguggua

SEQ ID NO: 855369 - RNA, 19 nt, Artificial Sequence
  Description of Artificial Sequence: Synthetic oligonucleotide
  Antisense strand to SEQ ID NO: 855368
uaccaccuuucaaagaucu

SEQ ID NO: 855370 - RNA, 19 nt, Artificial Sequence
  Description of Artificial Sequence: Synthetic oligonucleotide
  Sense strand starting at position 743 of SEQ ID NO: 588297
aucuuugaaaggugguaga

SEQ ID NO: 855371 - RNA, 19 nt, Artificial Sequence
  Description of Artificial Sequence: Synthetic oligonucleotide
  Antisense strand to SEQ ID NO: 855370
ucuaccaccuuucaaagau

SEQ ID NO: 855372 - RNA, 19 nt, Artificial Sequence
  Description of Artificial Sequence: Synthetic oligonucleotide
  Sense strand starting at position 821 of SEQ ID NO: 588297
agauucuuugcagaugcaa

SEQ ID NO: 855373 - RNA, 19 nt, Artificial Sequence
  Description of Artificial Sequence: Synthetic oligonucleotide
  Antisense strand to SEQ ID NO: 855372
uugcaucugcaaagaaucu

SEQ ID NO: 855374 - RNA, 19 nt, Artificial Sequence
  Description of Artificial Sequence: Synthetic oligonucleotide
  Sense strand starting at position 897 of SEQ ID NO: 588297
ggcaaagaaacauguuuag

SEQ ID NO: 855375 - RNA, 19 nt, Artificial Sequence
  Description of Artificial Sequence: Synthetic oligonucleotide
  Antisense strand to SEQ ID NO: 855374
cuaaacauguuucuuugcc

SEQ ID NO: 855376 - RNA, 19 nt, Artificial Sequence
  Description of Artificial Sequence: Synthetic oligonucleotide
  Sense strand starting at position 999 of SEQ ID NO: 588297
augaaagccaucugaugag

SEQ ID NO: 855377 - RNA, 19 nt, Artificial Sequence
  Description of Artificial Sequence: Synthetic oligonucleotide
  Antisense strand to SEQ ID NO: 855376
cucaucagauggcuuucau

SEQ ID NO: 855378 - RNA, 19 nt, Artificial Sequence
  Description of Artificial Sequence: Synthetic oligonucleotide
  Sense strand starting at position 1033 of SEQ ID NO: 588297
gggcaugacucuucccaga

SEQ ID NO: 855379 - RNA, 19 nt, Artificial Sequence
  Description of Artificial Sequence: Synthetic oligonucleotide
  Antisense strand to SEQ ID NO: 855378
ucugggaagagucaugccc

SEQ ID NO: 855380 - RNA, 19 nt, Artificial Sequence
  Description of Artificial Sequence: Synthetic oligonucleotide
  Sense strand starting at position 1035 of SEQ ID NO: 588297
gcaugacucuucccagaca

SEQ ID NO: 855381 - RNA, 19 nt, Artificial Sequence
  Description of Artificial Sequence: Synthetic oligonucleotide
  Antisense strand to SEQ ID NO: 855380
ugucugggaagagucaugc

SEQ ID NO: 855382 - RNA, 19 nt, Artificial Sequence
  Description of Artificial Sequence: Synthetic oligonucleotide
  Sense strand starting at position 1051 of SEQ ID NO: 588297
acaggaaugugggcaagau

SEQ ID NO: 855383 - RNA, 19 nt, Artificial Sequence
  Description of Artificial Sequence: Synthetic oligonucleotide
  Antisense strand to SEQ ID NO: 855382
aucuugcccacauuccugu

SEQ ID NO: 855384 - RNA, 19 nt, Artificial Sequence
  Description of Artificial Sequence: Synthetic oligonucleotide
  Sense strand starting at position 1095 of SEQ ID NO: 588297
gcacucagucgaggaaacu

SEQ ID NO: 855385 - RNA, 19 nt, Artificial Sequence
  Description of Artificial Sequence: Synthetic oligonucleotide
  Antisense strand to SEQ ID NO: 855384
aguuuccucgacugagugc

SEQ ID NO: 855386 - RNA, 19 nt, Artificial Sequence
  Description of Artificial Sequence: Synthetic oligonucleotide
  Sense strand starting at position 1127 of SEQ ID NO: 588297
uaagcuuuggccugggacu

SEQ ID NO: 855387 - RNA, 19 nt, Artificial Sequence
  Description of Artificial Sequence: Synthetic oligonucleotide
  Antisense strand to SEQ ID NO: 855386
agucccaggccaaagcuua

SEQ ID NO: 855388 - RNA, 19 nt, Artificial Sequence
  Description of Artificial Sequence: Synthetic oligonucleotide
  Sense strand starting at position 1280 of SEQ ID NO: 588297
ugguguuccgguuagagac

SEQ ID NO: 855389 - RNA, 19 nt, Artificial Sequence
  Description of Artificial Sequence: Synthetic oligonucleotide
  Antisense strand to SEQ ID NO: 855388
gucucuaaccggaacacca

SEQ ID NO: 855390 - RNA, 19 nt, Artificial Sequence
  Description of Artificial Sequence: Synthetic oligonucleotide
  Sense strand starting at position 1299 of SEQ ID NO: 588297
acguguuucggcgcaacuu

SEQ ID NO: 855391 - RNA, 19 nt, Artificial Sequence
  Description of Artificial Sequence: Synthetic oligonucleotide
  Antisense strand to SEQ ID NO: 855390
aaguugcgccgaaacacgu

SEQ ID NO: 855392 - RNA, 19 nt, Artificial Sequence
  Description of Artificial Sequence: Synthetic oligonucleotide
  Sense strand starting at position 1333 of SEQ ID NO: 588297
ggugucuuucucccgcuua

SEQ ID NO: 855393 - RNA, 19 nt, Artificial Sequence
  Description of Artificial Sequence: Synthetic oligonucleotide
  Antisense strand to SEQ ID NO: 855392
uaagcgggagaaagacacc

SEQ ID NO: 855394 - RNA, 19 nt, Artificial Sequence
  Description of Artificial Sequence: Synthetic oligonucleotide
  Sense strand starting at position 1347 of SEQ ID NO: 588297
gcuuaacuccgugaaugac

SEQ ID NO: 855395 - RNA, 19 nt, Artificial Sequence
  Description of Artificial Sequence: Synthetic oligonucleotide
  Antisense strand to SEQ ID NO: 855394
gucauucacggaguuaagc

SEQ ID NO: 855396 - RNA, 19 nt, Artificial Sequence
  Description of Artificial Sequence: Synthetic oligonucleotide
  Sense strand starting at position 1353 of SEQ ID NO: 588297
cuccgugaaugacucgaaa

SEQ ID NO: 855397 - RNA, 19 nt, Artificial Sequence
  Description of Artificial Sequence: Synthetic oligonucleotide
  Antisense strand to SEQ ID NO: 855396
uuucgagucauucacggag

SEQ ID NO: 855398 - RNA, 19 nt, Artificial Sequence
  Description of Artificial Sequence: Synthetic oligonucleotide
  Sense strand starting at position 1779 of SEQ ID NO: 588297
uuacauucggccgagaguu

SEQ ID NO: 855399 - RNA, 19 nt, Artificial Sequence
  Description of Artificial Sequence: Synthetic oligonucleotide
  Antisense strand to SEQ ID NO: 855398
aacucucggccgaauguaa

SEQ ID NO: 855400 - RNA, 19 nt, Artificial Sequence
  Description of Artificial Sequence: Synthetic oligonucleotide
  Sense strand starting at position 1814 of SEQ ID NO: 588297
ucugaaugccucugagaag

SEQ ID NO: 855401 - RNA, 19 nt, Artificial Sequence
  Description of Artificial Sequence: Synthetic oligonucleotide
  Antisense strand to SEQ ID NO: 855400
cuucucagaggcauucaga

SEQ ID NO: 855402 - RNA, 19 nt, Artificial Sequence
  Description of Artificial Sequence: Synthetic oligonucleotide
  Sense strand starting at position 3032 of SEQ ID NO: 588297
ggucccauccauugucuua

SEQ ID NO: 855403 - RNA, 19 nt, Artificial Sequence
  Description of Artificial Sequence: Synthetic oligonucleotide
  Antisense strand to SEQ ID NO: 855402
uaagacaauggaugggacc

SEQ ID NO: 855404 - RNA, 19 nt, Artificial Sequence
  Description of Artificial Sequence: Synthetic oligonucleotide
  Sense strand starting at position 3148 of SEQ ID NO: 588297
agcuaaacaucuuugggau

SEQ ID NO: 855405 - RNA, 19 nt, Artificial Sequence
  Description of Artificial Sequence: Synthetic oligonucleotide
  Antisense strand to SEQ ID NO: 855404
aucccaaagauguuuagcu

SEQ ID NO: 855406 - RNA, 19 nt, Artificial Sequence
  Description of Artificial Sequence: Synthetic oligonucleotide
  Sense strand starting at position 3149 of SEQ ID NO: 588297
gcuaaacaucuuugggaug

SEQ ID NO: 855407 - RNA, 19 nt, Artificial Sequence
  Description of Artificial Sequence: Synthetic oligonucleotide
  Antisense strand to SEQ ID NO: 855406
caucccaaagauguuuagc

SEQ ID NO: 855408 - RNA, 19 nt, Artificial Sequence
  Description of Artificial Sequence: Synthetic oligonucleotide
  Sense strand starting at position 3303 of SEQ ID NO: 588297
uuacaugugaacugucagu

SEQ ID NO: 855409 - RNA, 19 nt, Artificial Sequence
  Description of Artificial Sequence: Synthetic oligonucleotide
  Antisense strand to SEQ ID NO: 855408
acugacaguucacauguaa

SEQ ID NO: 855410 - RNA, 19 nt, Artificial Sequence
  Description of Artificial Sequence: Synthetic oligonucleotide
  Sense strand starting at position 3384 of SEQ ID NO: 588297
gaaauaaagcaguguacaa

SEQ ID NO: 855411 - RNA, 19 nt, Artificial Sequence
  Description of Artificial Sequence: Synthetic oligonucleotide
  Antisense strand to SEQ ID NO: 855410
uuguacacugcuuuauuuc

SEQ ID NO: 855412 - RNA, 19 nt, Artificial Sequence
  Description of Artificial Sequence: Synthetic oligonucleotide
  Sense strand starting at position 3425 of SEQ ID NO: 588297
agcuuacauucuuuggcaa

SEQ ID NO: 855413 - RNA, 19 nt, Artificial Sequence
  Description of Artificial Sequence: Synthetic oligonucleotide
  Antisense strand to SEQ ID NO: 855412
uugccaaagaauguaagcu

SEQ ID NO: 855414 - RNA, 19 nt, Artificial Sequence
  Description of Artificial Sequence: Synthetic oligonucleotide
  Sense strand starting at position 3462 of SEQ ID NO: 588297
gguccugucagguagugau

SEQ ID NO: 855415 - RNA, 19 nt, Artificial Sequence
  Description of Artificial Sequence: Synthetic oligonucleotide
  Antisense strand to SEQ ID NO: 855414
aucacuaccugacaggacc

SEQ ID NO: 855416 - RNA, 19 nt, Artificial Sequence
  Description of Artificial Sequence: Synthetic oligonucleotide
  Sense strand starting at position 3472 of SEQ ID NO: 588297
gguagugauaagcacugua

SEQ ID NO: 855417 - RNA, 19 nt, Artificial Sequence
  Description of Artificial Sequence: Synthetic oligonucleotide
  Antisense strand to SEQ ID NO: 855416
uacagugcuuaucacuacc

SEQ ID NO: 855418 - RNA, 19 nt, Artificial Sequence
  Description of Artificial Sequence: Synthetic oligonucleotide
  Sense strand starting at position 3475 of SEQ ID NO: 588297
agugauaagcacuguaaag

SEQ ID NO: 855419 - RNA, 19 nt, Artificial Sequence
  Description of Artificial Sequence: Synthetic oligonucleotide
  Antisense strand to SEQ ID NO: 855418
cuuuacagugcuuaucacu

SEQ ID NO: 855420 - RNA, 19 nt, Artificial Sequence
  Description of Artificial Sequence: Synthetic oligonucleotide
  Sense strand starting at position 3490 of SEQ ID NO: 588297
aaagauguguauccgcaca

SEQ ID NO: 855421 - RNA, 19 nt, Artificial Sequence
  Description of Artificial Sequence: Synthetic oligonucleotide
  Antisense strand to SEQ ID NO: 855420
ugugcggauacacaucuuu

SEQ ID NO: 855422 - RNA, 19 nt, Artificial Sequence
  Description of Artificial Sequence: Synthetic oligonucleotide
  Sense strand starting at position 3510 of SEQ ID NO: 588297
agagaacauguuuaugugu

SEQ ID NO: 855423 - RNA, 19 nt, Artificial Sequence
  Description of Artificial Sequence: Synthetic oligonucleotide
  Antisense strand to SEQ ID NO: 855422
acacauaaacauguucucu

SEQ ID NO: 855424 - RNA, 19 nt, Artificial Sequence
  Description of Artificial Sequence: Synthetic oligonucleotide
  Sense strand starting at position 3564 of SEQ ID NO: 588297
ugagucauuagcuauaggu

SEQ ID NO: 855425 - RNA, 19 nt, Artificial Sequence
  Description of Artificial Sequence: Synthetic oligonucleotide
  Antisense strand to SEQ ID NO: 855424
accuauagcuaaugacuca

SEQ ID NO: 855426 - RNA, 19 nt, Artificial Sequence
  Description of Artificial Sequence: Synthetic oligonucleotide
  Sense strand starting at position 3636 of SEQ ID NO: 588297
aucuuucuguuguuagauu

SEQ ID NO: 855427 - RNA, 19 nt, Artificial Sequence
  Description of Artificial Sequence: Synthetic oligonucleotide
  Antisense strand to SEQ ID NO: 855426
aaucuaacaacagaaagau

SEQ ID NO: 855428 - RNA, 19 nt, Artificial Sequence
  Description of Artificial Sequence: Synthetic oligonucleotide
  Sense strand starting at position 3670 of SEQ ID NO: 588297
ugacuaagcuuccucuaag

SEQ ID NO: 855429 - RNA, 19 nt, Artificial Sequence
  Description of Artificial Sequence: Synthetic oligonucleotide
  Antisense strand to SEQ ID NO: 855428
cuuagaggaagcuuaguca

SEQ ID NO: 855430 - RNA, 19 nt, Artificial Sequence
  Description of Artificial Sequence: Synthetic oligonucleotide
  Sense strand starting at position 3755 of SEQ ID NO: 588297
cuaugaaauugagaaauac

SEQ ID NO: 855431 - RNA, 19 nt, Artificial Sequence
  Description of Artificial Sequence: Synthetic oligonucleotide
  Antisense strand to SEQ ID NO: 855430
guauuucucaauuucauag

SEQ ID NO: 855432 - RNA, 19 nt, Artificial Sequence
  Description of Artificial Sequence: Synthetic oligonucleotide
  Sense strand starting at position 3812 of SEQ ID NO: 588297
uaucuucugcuguaaagga

SEQ ID NO: 855433 - RNA, 19 nt, Artificial Sequence
  Description of Artificial Sequence: Synthetic oligonucleotide
  Antisense strand to SEQ ID NO: 855432
uccuuuacagcagaagaua

SEQ ID NO: 855434 - RNA, 19 nt, Artificial Sequence
  Description of Artificial Sequence: Synthetic oligonucleotide
  Sense strand starting at position 3835 of SEQ ID NO: 588297
aacuguuuccaaggauguu

SEQ ID NO: 855435 - RNA, 19 nt, Artificial Sequence
  Description of Artificial Sequence: Synthetic oligonucleotide
  Antisense strand to SEQ ID NO: 855434
aacauccuuggaaacaguu

SEQ ID NO: 855436 - RNA, 19 nt, Artificial Sequence
  Description of Artificial Sequence: Synthetic oligonucleotide
  Sense strand starting at position 3879 of SEQ ID NO: 588297
uauguaugucaguauagua

SEQ ID NO: 855437 - RNA, 19 nt, Artificial Sequence
  Description of Artificial Sequence: Synthetic oligonucleotide
  Antisense strand to SEQ ID NO: 855436
uacuauacugacauacaua

SEQ ID NO: 855438 - RNA, 19 nt, Artificial Sequence
  Description of Artificial Sequence: Synthetic oligonucleotide
  Sense strand starting at position 3891 of SEQ ID NO: 588297
uauaguagacaucgaauac

SEQ ID NO: 855439 - RNA, 19 nt, Artificial Sequence
  Description of Artificial Sequence: Synthetic oligonucleotide
  Antisense strand to SEQ ID NO: 855438
guauucgaugucuacuaua

SEQ ID NO: 855440 - RNA, 19 nt, Artificial Sequence
  Description of Artificial Sequence: Synthetic oligonucleotide
  Sense strand starting at position 3895 of SEQ ID NO: 588297
guagacaucgaauaccuua

SEQ ID NO: 855441 - RNA, 19 nt, Artificial Sequence
  Description of Artificial Sequence: Synthetic oligonucleotide
  Antisense strand to SEQ ID NO: 855440
uaagguauucgaugucuac

SEQ ID NO: 855442 - RNA, 19 nt, Artificial Sequence
  Description of Artificial Sequence: Synthetic oligonucleotide
  Sense strand starting at position 3902 of SEQ ID NO: 588297
ucgaauaccuuagcagaga

SEQ ID NO: 855443 - RNA, 19 nt, Artificial Sequence
  Description of Artificial Sequence: Synthetic oligonucleotide
  Antisense strand to SEQ ID NO: 855442
ucucugcuaagguauucga

SEQ ID NO: 855444 - RNA, 19 nt, Artificial Sequence
  Description of Artificial Sequence: Synthetic oligonucleotide
  Sense strand starting at position 327 of SEQ ID NO: 588301
agguacuauuggccaaagu

SEQ ID NO: 855445 - RNA, 19 nt, Artificial Sequence
  Description of Artificial Sequence: Synthetic oligonucleotide
  Antisense strand to SEQ ID NO: 855444
acuuuggccaauaguaccu

SEQ ID NO: 855446 - RNA, 19 nt, Artificial Sequence
  Description of Artificial Sequence: Synthetic oligonucleotide
  Sense strand starting at position 456 of SEQ ID NO: 588301
uguggauugaguggcagaa

SEQ ID NO: 855447 - RNA, 19 nt, Artificial Sequence
  Description of Artificial Sequence: Synthetic oligonucleotide
  Antisense strand to SEQ ID NO: 855446
uucugccacucaauccaca

SEQ ID NO: 855448 - RNA, 19 nt, Artificial Sequence
  Description of Artificial Sequence: Synthetic oligonucleotide
  Sense strand starting at position 516 of SEQ ID NO: 588301
gccuauaugacaggcagau

SEQ ID NO: 855449 - RNA, 19 nt, Artificial Sequence
  Description of Artificial Sequence: Synthetic oligonucleotide
  Antisense strand to SEQ ID NO: 855448
aucugccugucauauaggc

SEQ ID NO: 855450 - RNA, 19 nt, Artificial Sequence
  Description of Artificial Sequence: Synthetic oligonucleotide
  Sense strand starting at position 655 of SEQ ID NO: 588301
gcaugcuauagugaucaag

SEQ ID NO: 855451 - RNA, 19 nt, Artificial Sequence
  Description of Artificial Sequence: Synthetic oligonucleotide
  Antisense strand to SEQ ID NO: 855450
cuugaucacuauagcaugc

SEQ ID NO: 855452 - RNA, 19 nt, Artificial Sequence
  Description of Artificial Sequence: Synthetic oligonucleotide
  Sense strand starting at position 657 of SEQ ID NO: 588301
augcuauagugaucaagaa

SEQ ID NO: 855453 - RNA, 19 nt, Artificial Sequence
  Description of Artificial Sequence: Synthetic oligonucleotide
  Antisense strand to SEQ ID NO: 855452
uucuugaucacuauagcau

SEQ ID NO: 855454 - RNA, 19 nt, Artificial Sequence
  Description of Artificial Sequence: Synthetic oligonucleotide
  Sense strand starting at position 658 of SEQ ID NO: 588301
ugcuauagugaucaagaau

SEQ ID NO: 855455 - RNA, 19 nt, Artificial Sequence
  Description of Artificial Sequence: Synthetic oligonucleotide
  Antisense strand to SEQ ID NO: 855454
auucuugaucacuauagca

SEQ ID NO: 855456 - RNA, 19 nt, Artificial Sequence
  Description of Artificial Sequence: Synthetic oligonucleotide
  Sense strand starting at position 728 of SEQ ID NO: 588301
ugcucuuaucgcguguaca

SEQ ID NO: 855457 - RNA, 19 nt, Artificial Sequence
  Description of Artificial Sequence: Synthetic oligonucleotide
  Antisense strand to SEQ ID NO: 855456
uguacacgcgauaagagca

SEQ ID NO: 855458 - RNA, 19 nt, Artificial Sequence
  Description of Artificial Sequence: Synthetic oligonucleotide
  Sense strand starting at position 730 of SEQ ID NO: 588301
cucuuaucgcguguacaca

SEQ ID NO: 855459 - RNA, 19 nt, Artificial Sequence
  Description of Artificial Sequence: Synthetic oligonucleotide
  Antisense strand to SEQ ID NO: 855458
uguguacacgcgauaagag

SEQ ID NO: 855460 - RNA, 19 nt, Artificial Sequence
  Description of Artificial Sequence: Synthetic oligonucleotide
  Sense strand starting at position 925 of SEQ ID NO: 588301
cggguuugcacacaauuaa

SEQ ID NO: 855461 - RNA, 19 nt, Artificial Sequence
  Description of Artificial Sequence: Synthetic oligonucleotide
  Antisense strand to SEQ ID NO: 855460
uuaauugugugcaaacccg

SEQ ID NO: 855462 - RNA, 19 nt, Artificial Sequence
  Description of Artificial Sequence: Synthetic oligonucleotide
  Sense strand starting at position 1136 of SEQ ID NO: 588301
cuggguaauuccuuauuag

SEQ ID NO: 855463 - RNA, 19 nt, Artificial Sequence
  Description of Artificial Sequence: Synthetic oligonucleotide
  Antisense strand to SEQ ID NO: 855462
cuaauaaggaauuacccag

SEQ ID NO: 855464 - RNA, 19 nt, Artificial Sequence
  Description of Artificial Sequence: Synthetic oligonucleotide
  Sense strand starting at position 1137 of SEQ ID NO: 588301
uggguaauuccuuauuagu

SEQ ID NO: 855465 - RNA, 19 nt, Artificial Sequence
  Description of Artificial Sequence: Synthetic oligonucleotide
  Antisense strand to SEQ ID NO: 855464
acuaauaaggaauuaccca

SEQ ID NO: 855466 - RNA, 19 nt, Artificial Sequence
  Description of Artificial Sequence: Synthetic oligonucleotide
  Sense strand starting at position 1145 of SEQ ID NO: 588301
uccuuauuagugcagauaa

SEQ ID NO: 855467 - RNA, 19 nt, Artificial Sequence
  Description of Artificial Sequence: Synthetic oligonucleotide
  Antisense strand to SEQ ID NO: 855466
uuaucugcacuaauaagga

SEQ ID NO: 855468 - RNA, 19 nt, Artificial Sequence
  Description of Artificial Sequence: Synthetic oligonucleotide
  Sense strand starting at position 1166 of SEQ ID NO: 588301
gacggucuucgagagggaa

SEQ ID NO: 855469 - RNA, 19 nt, Artificial Sequence
  Description of Artificial Sequence: Synthetic oligonucleotide
  Antisense strand to SEQ ID NO: 855468
uucccucucgaagaccguc

SEQ ID NO: 855470 - RNA, 19 nt, Artificial Sequence
  Description of Artificial Sequence: Synthetic oligonucleotide
  Sense strand starting at position 1252 of SEQ ID NO: 588301
guuacagcucuuuacagga

SEQ ID NO: 855471 - RNA, 19 nt, Artificial Sequence
  Description of Artificial Sequence: Synthetic oligonucleotide
  Antisense strand to SEQ ID NO: 855470
uccuguaaagagcuguaac

SEQ ID NO: 855472 - RNA, 19 nt, Artificial Sequence
  Description of Artificial Sequence: Synthetic oligonucleotide
  Sense strand starting at position 1267 of SEQ ID NO: 588301
aggagucagccuuaggacu

SEQ ID NO: 855473 - RNA, 19 nt, Artificial Sequence
  Description of Artificial Sequence: Synthetic oligonucleotide
  Antisense strand to SEQ ID NO: 855472
aguccuaaggcugacuccu

SEQ ID NO: 855474 - RNA, 19 nt, Artificial Sequence
  Description of Artificial Sequence: Synthetic oligonucleotide
  Sense strand starting at position 1305 of SEQ ID NO: 588301
uuagucacuccagaguuaa

SEQ ID NO: 855475 - RNA, 19 nt, Artificial Sequence
  Description of Artificial Sequence: Synthetic oligonucleotide
  Antisense strand to SEQ ID NO: 855474
uuaacucuggagugacuaa

SEQ ID NO: 855476 - RNA, 19 nt, Artificial Sequence
  Description of Artificial Sequence: Synthetic oligonucleotide
  Sense strand starting at position 1626 of SEQ ID NO: 588301
gcgcuuguacgcaaacgau

SEQ ID NO: 855477 - RNA, 19 nt, Artificial Sequence
  Description of Artificial Sequence: Synthetic oligonucleotide
  Antisense strand to SEQ ID NO: 855476
aucguuugcguacaagcgc

SEQ ID NO: 855478 - RNA, 19 nt, Artificial Sequence
  Description of Artificial Sequence: Synthetic oligonucleotide
  Sense strand starting at position 2166 of SEQ ID NO: 588301
cgcugugagccgucggaca

SEQ ID NO: 855479 - RNA, 19 nt, Artificial Sequence
  Description of Artificial Sequence: Synthetic oligonucleotide
  Antisense strand to SEQ ID NO: 855478
uguccgacggcucacagcg

SEQ ID NO: 855480 - RNA, 19 nt, Artificial Sequence
  Description of Artificial Sequence: Synthetic oligonucleotide
  Sense strand starting at position 2720 of SEQ ID NO: 588301
aggacagugccgggagaua

SEQ ID NO: 855481 - RNA, 19 nt, Artificial Sequence
  Description of Artificial Sequence: Synthetic oligonucleotide
  Antisense strand to SEQ ID NO: 855480
uaucucccggcacuguccu

SEQ ID NO: 855482 - RNA, 19 nt, Artificial Sequence
  Description of Artificial Sequence: Synthetic oligonucleotide
  Sense strand starting at position 2729 of SEQ ID NO: 588301
ccgggagauacgugaagau

SEQ ID NO: 855483 - RNA, 19 nt, Artificial Sequence
  Description of Artificial Sequence: Synthetic oligonucleotide
  Antisense strand to SEQ ID NO: 855482
aucuucacguaucucccgg

SEQ ID NO: 855484 - RNA, 19 nt, Artificial Sequence
  Description of Artificial Sequence: Synthetic oligonucleotide
  Sense strand starting at position 2738 of SEQ ID NO: 588301
acgugaagauuccuuccca

SEQ ID NO: 855485 - RNA, 19 nt, Artificial Sequence
  Description of Artificial Sequence: Synthetic oligonucleotide
  Antisense strand to SEQ ID NO: 855484
ugggaaggaaucuucacgu

SEQ ID NO: 855486 - RNA, 19 nt, Artificial Sequence
  Description of Artificial Sequence: Synthetic oligonucleotide
  Sense strand starting at position 2739 of SEQ ID NO: 588301
cgugaagauuccuucccag

SEQ ID NO: 855487 - RNA, 19 nt, Artificial Sequence
  Description of Artificial Sequence: Synthetic oligonucleotide
  Antisense strand to SEQ ID NO: 855486
cugggaaggaaucuucacg

SEQ ID NO: 855488 - RNA, 19 nt, Artificial Sequence
  Description of Artificial Sequence: Synthetic oligonucleotide
  Sense strand starting at position 2767 of SEQ ID NO: 588301
cuggaauucccacgcauga

SEQ ID NO: 855489 - RNA, 19 nt, Artificial Sequence
  Description of Artificial Sequence: Synthetic oligonucleotide
  Antisense strand to SEQ ID NO: 855488
ucaugcgugggaauuccag

SEQ ID NO: 855490 - RNA, 19 nt, Artificial Sequence
  Description of Artificial Sequence: Synthetic oligonucleotide
  Sense strand starting at position 2769 of SEQ ID NO: 588301
ggaauucccacgcaugagu

SEQ ID NO: 855491 - RNA, 19 nt, Artificial Sequence
  Description of Artificial Sequence: Synthetic oligonucleotide
  Antisense strand to SEQ ID NO: 855490
acucaugcgugggaauucc

SEQ ID NO: 855492 - RNA, 19 nt, Artificial Sequence
  Description of Artificial Sequence: Synthetic oligonucleotide
  Sense strand starting at position 2917 of SEQ ID NO: 588301
agaaaucgcucauuugcau

SEQ ID NO: 855493 - RNA, 19 nt, Artificial Sequence
  Description of Artificial Sequence: Synthetic oligonucleotide
  Antisense strand to SEQ ID NO: 855492
augcaaaugagcgauuucu

SEQ ID NO: 855494 - RNA, 19 nt, Artificial Sequence
  Description of Artificial Sequence: Synthetic oligonucleotide
  Sense strand starting at position 3074 of SEQ ID NO: 588301
acuaguuauuuaggaagaa

SEQ ID NO: 855495 - RNA, 19 nt, Artificial Sequence
  Description of Artificial Sequence: Synthetic oligonucleotide
  Antisense strand to SEQ ID NO: 855494
uucuuccuaaauaacuagu

SEQ ID NO: 855496 - RNA, 19 nt, Artificial Sequence
  Description of Artificial Sequence: Synthetic oligonucleotide
  Sense strand starting at position 3075 of SEQ ID NO: 588301
cuaguuauuuaggaagaag

SEQ ID NO: 855497 - RNA, 19 nt, Artificial Sequence
  Description of Artificial Sequence: Synthetic oligonucleotide
  Antisense strand to SEQ ID NO: 855496
cuucuuccuaaauaacuag

SEQ ID NO: 855498 - RNA, 19 nt, Artificial Sequence
  Description of Artificial Sequence: Synthetic oligonucleotide
  Sense strand starting at position 3157 of SEQ ID NO: 588301
gauuccauggcaggucaaa

SEQ ID NO: 855499 - RNA, 19 nt, Artificial Sequence
  Description of Artificial Sequence: Synthetic oligonucleotide
  Antisense strand to SEQ ID NO: 855498
uuugaccugccauggaauc

SEQ ID NO: 855500 - RNA, 19 nt, Artificial Sequence
  Description of Artificial Sequence: Synthetic oligonucleotide
  Sense strand starting at position 3196 of SEQ ID NO: 588301
ugcauaucuggugaguauc

SEQ ID NO: 855501 - RNA, 19 nt, Artificial Sequence
  Description of Artificial Sequence: Synthetic oligonucleotide
  Antisense strand to SEQ ID NO: 855500
gauacucaccagauaugca

SEQ ID NO: 855502 - RNA, 19 nt, Artificial Sequence
  Description of Artificial Sequence: Synthetic oligonucleotide
  Sense strand starting at position 3202 of SEQ ID NO: 588301
ucuggugaguauccacaua

SEQ ID NO: 855503 - RNA, 19 nt, Artificial Sequence
  Description of Artificial Sequence: Synthetic oligonucleotide
  Antisense strand to SEQ ID NO: 855502
uauguggauacucaccaga

SEQ ID NO: 855504 - RNA, 19 nt, Artificial Sequence
  Description of Artificial Sequence: Synthetic oligonucleotide
  Sense strand starting at position 3282 of SEQ ID NO: 588301
ugagauuauaccuggguca

SEQ ID NO: 855505 - RNA, 19 nt, Artificial Sequence
  Description of Artificial Sequence: Synthetic oligonucleotide
  Antisense strand to SEQ ID NO: 855504
ugacccagguauaaucuca

SEQ ID NO: 855506 - RNA, 19 nt, Artificial Sequence
  Description of Artificial Sequence: Synthetic oligonucleotide
  Sense strand starting at position 3283 of SEQ ID NO: 588301
gagauuauaccugggucau

SEQ ID NO: 855507 - RNA, 19 nt, Artificial Sequence
  Description of Artificial Sequence: Synthetic oligonucleotide
  Antisense strand to SEQ ID NO: 855506
augacccagguauaaucuc

SEQ ID NO: 855508 - RNA, 19 nt, Artificial Sequence
  Description of Artificial Sequence: Synthetic oligonucleotide
  Sense strand starting at position 3284 of SEQ ID NO: 588301
agauuauaccugggucaua

SEQ ID NO: 855509 - RNA, 19 nt, Artificial Sequence
  Description of Artificial Sequence: Synthetic oligonucleotide
  Antisense strand to SEQ ID NO: 855508
uaugacccagguauaaucu

SEQ ID NO: 855510 - RNA, 19 nt, Artificial Sequence
  Description of Artificial Sequence: Synthetic oligonucleotide
  Sense strand starting at position 3285 of SEQ ID NO: 588301
gauuauaccugggucauaa

SEQ ID NO: 855511 - RNA, 19 nt, Artificial Sequence
  Description of Artificial Sequence: Synthetic oligonucleotide
  Antisense strand to SEQ ID NO: 855510
uuaugacccagguauaauc

SEQ ID NO: 855512 - RNA, 19 nt, Artificial Sequence
  Description of Artificial Sequence: Synthetic oligonucleotide
  Sense strand starting at position 3305 of SEQ ID NO: 588301
ugcacugcuguccauuuau

SEQ ID NO: 855513 - RNA, 19 nt, Artificial Sequence
  Description of Artificial Sequence: Synthetic oligonucleotide
  Antisense strand to SEQ ID NO: 855512
auaaauggacagcagugca

SEQ ID NO: 855514 - RNA, 19 nt, Artificial Sequence
  Description of Artificial Sequence: Synthetic oligonucleotide
  Sense strand starting at position 3335 of SEQ ID NO: 588301
auugcauagccauggauaa

SEQ ID NO: 855515 - RNA, 19 nt, Artificial Sequence
  Description of Artificial Sequence: Synthetic oligonucleotide
  Antisense strand to SEQ ID NO: 855514
uuauccauggcuaugcaau

SEQ ID NO: 855516 - RNA, 19 nt, Artificial Sequence
  Description of Artificial Sequence: Synthetic oligonucleotide
  Sense strand starting at position 3336 of SEQ ID NO: 588301
uugcauagccauggauaau

SEQ ID NO: 855517 - RNA, 19 nt, Artificial Sequence
  Description of Artificial Sequence: Synthetic oligonucleotide
  Antisense strand to SEQ ID NO: 855516
auuauccauggcuaugcaa

SEQ ID NO: 855518 - RNA, 19 nt, Artificial Sequence
  Description of Artificial Sequence: Synthetic oligonucleotide
  Sense strand starting at position 3419 of SEQ ID NO: 588301
agaagaaaugcgcagcaau

SEQ ID NO: 855519 - RNA, 19 nt, Artificial Sequence
  Description of Artificial Sequence: Synthetic oligonucleotide
  Antisense strand to SEQ ID NO: 855518
auugcugcgcauuucuucu

SEQ ID NO: 855520 - RNA, 19 nt, Artificial Sequence
  Description of Artificial Sequence: Synthetic oligonucleotide
  Sense strand starting at position 3422 of SEQ ID NO: 588301
agaaaugcgcagcaauaaa

SEQ ID NO: 855521 - RNA, 19 nt, Artificial Sequence
  Description of Artificial Sequence: Synthetic oligonucleotide
  Antisense strand to SEQ ID NO: 855520
uuuauugcugcgcauuucu

SEQ ID NO: 855522 - RNA, 19 nt, Artificial Sequence
  Description of Artificial Sequence: Synthetic oligonucleotide
  Sense strand starting at position 3487 of SEQ ID NO: 588301
ggaaacuaucuuugacauu

SEQ ID NO: 855523 - RNA, 19 nt, Artificial Sequence
  Description of Artificial Sequence: Synthetic oligonucleotide
  Antisense strand to SEQ ID NO: 855522
aaugucaaagauaguuucc

SEQ ID NO: 855524 - RNA, 19 nt, Artificial Sequence
  Description of Artificial Sequence: Synthetic oligonucleotide
  Sense strand starting at position 76 of SEQ ID NO: 588302
gcaaauaguccauggcuua

SEQ ID NO: 855525 - RNA, 19 nt, Artificial Sequence
  Description of Artificial Sequence: Synthetic oligonucleotide
  Antisense strand to SEQ ID NO: 855524
uaagccauggacuauuugc

SEQ ID NO: 855526 - RNA, 19 nt, Artificial Sequence
  Description of Artificial Sequence: Synthetic oligonucleotide
  Sense strand starting at position 208 of SEQ ID NO: 588302
cuugauuuaucagaaagag

SEQ ID NO: 855527 - RNA, 19 nt, Artificial Sequence
  Description of Artificial Sequence: Synthetic oligonucleotide
  Antisense strand to SEQ ID NO: 855526
cucuuucugauaaaucaag

SEQ ID NO: 855528 - RNA, 19 nt, Artificial Sequence
  Description of Artificial Sequence: Synthetic oligonucleotide
  Sense strand starting at position 471 of SEQ ID NO: 588302
uacuaaaugcaauguggua

SEQ ID NO: 855529 - RNA, 19 nt, Artificial Sequence
  Description of Artificial Sequence: Synthetic oligonucleotide
  Antisense strand to SEQ ID NO: 855528
uaccacauugcauuuagua

SEQ ID NO: 855530 - RNA, 19 nt, Artificial Sequence
  Description of Artificial Sequence: Synthetic oligonucleotide
  Sense strand starting at position 540 of SEQ ID NO: 588302
aagucugaaguccaguuaa

SEQ ID NO: 855531 - RNA, 19 nt, Artificial Sequence
  Description of Artificial Sequence: Synthetic oligonucleotide
  Antisense strand to SEQ ID NO: 855530
uuaacuggacuucagacuu

SEQ ID NO: 855532 - RNA, 19 nt, Artificial Sequence
  Description of Artificial Sequence: Synthetic oligonucleotide
  Sense strand starting at position 550 of SEQ ID NO: 588302
uccaguuaacaguaaugua

SEQ ID NO: 855533 - RNA, 19 nt, Artificial Sequence
  Description of Artificial Sequence: Synthetic oligonucleotide
  Antisense strand to SEQ ID NO: 855532
uacauuacuguuaacugga

SEQ ID NO: 855534 - RNA, 19 nt, Artificial Sequence
  Description of Artificial Sequence: Synthetic oligonucleotide
  Sense strand starting at position 654 of SEQ ID NO: 588302
gcagucugugccuaguaga

SEQ ID NO: 855535 - RNA, 19 nt, Artificial Sequence
  Description of Artificial Sequence: Synthetic oligonucleotide
  Antisense strand to SEQ ID NO: 855534
ucuacuaggcacagacugc

SEQ ID NO: 855536 - RNA, 19 nt, Artificial Sequence
  Description of Artificial Sequence: Synthetic oligonucleotide
  Sense strand starting at position 726 of SEQ ID NO: 588302
guggaaaugugucaacagu

SEQ ID NO: 855537 - RNA, 19 nt, Artificial Sequence
  Description of Artificial Sequence: Synthetic oligonucleotide
  Antisense strand to SEQ ID NO: 855536
acuguugacacauuuccac

SEQ ID NO: 855538 - RNA, 19 nt, Artificial Sequence
  Description of Artificial Sequence: Synthetic oligonucleotide
  Sense strand starting at position 873 of SEQ ID NO: 588302
ggguuaauguaacacaaag

SEQ ID NO: 855539 - RNA, 19 nt, Artificial Sequence
  Description of Artificial Sequence: Synthetic oligonucleotide
  Antisense strand to SEQ ID NO: 855538
cuuuguguuacauuaaccc

SEQ ID NO: 855540 - RNA, 19 nt, Artificial Sequence
  Description of Artificial Sequence: Synthetic oligonucleotide
  Sense strand starting at position 932 of SEQ ID NO: 588302
guccaugucaggcagguua

SEQ ID NO: 855541 - RNA, 19 nt, Artificial Sequence
  Description of Artificial Sequence: Synthetic oligonucleotide
  Antisense strand to SEQ ID NO: 855540
uaaccugccugacauggac

SEQ ID NO: 855542 - RNA, 19 nt, Artificial Sequence
  Description of Artificial Sequence: Synthetic oligonucleotide
  Sense strand starting at position 945 of SEQ ID NO: 588302
agguuaugugucccgccau

SEQ ID NO: 855543 - RNA, 19 nt, Artificial Sequence
  Description of Artificial Sequence: Synthetic oligonucleotide
  Antisense strand to SEQ ID NO: 855542
auggcgggacacauaaccu

SEQ ID NO: 855544 - RNA, 19 nt, Artificial Sequence
  Description of Artificial Sequence: Synthetic oligonucleotide
  Sense strand starting at position 1135 of SEQ ID NO: 588302
aggguuuauucucaggcuu

SEQ ID NO: 855545 - RNA, 19 nt, Artificial Sequence
  Description of Artificial Sequence: Synthetic oligonucleotide
  Antisense strand to SEQ ID NO: 855544
aagccugagaauaaacccu

SEQ ID NO: 855546 - RNA, 19 nt, Artificial Sequence
  Description of Artificial Sequence: Synthetic oligonucleotide
  Sense strand starting at position 1228 of SEQ ID NO: 588302
gcugcucugagucacaguu

SEQ ID NO: 855547 - RNA, 19 nt, Artificial Sequence
  Description of Artificial Sequence: Synthetic oligonucleotide
  Antisense strand to SEQ ID NO: 855546
aacugugacucagagcagc

SEQ ID NO: 855548 - RNA, 19 nt, Artificial Sequence
  Description of Artificial Sequence: Synthetic oligonucleotide
  Sense strand starting at position 1258 of SEQ ID NO: 588302
ugguguuacugagggagau

SEQ ID NO: 855549 - RNA, 19 nt, Artificial Sequence
  Description of Artificial Sequence: Synthetic oligonucleotide
  Antisense strand to SEQ ID NO: 855548
aucucccucaguaacacca

SEQ ID NO: 855550 - RNA, 19 nt, Artificial Sequence
  Description of Artificial Sequence: Synthetic oligonucleotide
  Sense strand starting at position 1487 of SEQ ID NO: 588302
ccuugugaccguuaaguua

SEQ ID NO: 855551 - RNA, 19 nt, Artificial Sequence
  Description of Artificial Sequence: Synthetic oligonucleotide
  Antisense strand to SEQ ID NO: 855550
uaacuuaacggucacaagg

SEQ ID NO: 855552 - RNA, 19 nt, Artificial Sequence
  Description of Artificial Sequence: Synthetic oligonucleotide
  Sense strand starting at position 1569 of SEQ ID NO: 588302
guaucuuuagugcauaaau

SEQ ID NO: 855553 - RNA, 19 nt, Artificial Sequence
  Description of Artificial Sequence: Synthetic oligonucleotide
  Antisense strand to SEQ ID NO: 855552
auuuaugcacuaaagauac

SEQ ID NO: 855554 - RNA, 19 nt, Artificial Sequence
  Description of Artificial Sequence: Synthetic oligonucleotide
  Sense strand starting at position 1692 of SEQ ID NO: 588302
gaggaauuguugcauggaa

SEQ ID NO: 855555 - RNA, 19 nt, Artificial Sequence
  Description of Artificial Sequence: Synthetic oligonucleotide
  Antisense strand to SEQ ID NO: 855554
uuccaugcaacaauuccuc

SEQ ID NO: 855556 - RNA, 19 nt, Artificial Sequence
  Description of Artificial Sequence: Synthetic oligonucleotide
  Sense strand starting at position 1694 of SEQ ID NO: 588302
ggaauuguugcauggaaac

SEQ ID NO: 855557 - RNA, 19 nt, Artificial Sequence
  Description of Artificial Sequence: Synthetic oligonucleotide
  Antisense strand to SEQ ID NO: 855556
guuuccaugcaacaauucc

SEQ ID NO: 855558 - RNA, 19 nt, Artificial Sequence
  Description of Artificial Sequence: Synthetic oligonucleotide
  Sense strand starting at position 2097 of SEQ ID NO: 588302
acuucuuguacgcaaagga

SEQ ID NO: 855559 - RNA, 19 nt, Artificial Sequence
  Description of Artificial Sequence: Synthetic oligonucleotide
  Antisense strand to SEQ ID NO: 855558
uccuuugcguacaagaagu

SEQ ID NO: 855560 - RNA, 19 nt, Artificial Sequence
  Description of Artificial Sequence: Synthetic oligonucleotide
  Sense strand starting at position 2220 of SEQ ID NO: 588302
ggcuguagaucaguaagca

SEQ ID NO: 855561 - RNA, 19 nt, Artificial Sequence
  Description of Artificial Sequence: Synthetic oligonucleotide
  Antisense strand to SEQ ID NO: 855560
ugcuuacugaucuacagcc

SEQ ID NO: 855562 - RNA, 19 nt, Artificial Sequence
  Description of Artificial Sequence: Synthetic oligonucleotide
  Sense strand starting at position 2221 of SEQ ID NO: 588302
gcuguagaucaguaagcac

SEQ ID NO: 855563 - RNA, 19 nt, Artificial Sequence
  Description of Artificial Sequence: Synthetic oligonucleotide
  Antisense strand to SEQ ID NO: 855562
gugcuuacugaucuacagc

SEQ ID NO: 855564 - RNA, 19 nt, Artificial Sequence
  Description of Artificial Sequence: Synthetic oligonucleotide
  Sense strand starting at position 2260 of SEQ ID NO: 588302
ugauuaaaucccuggaagc

SEQ ID NO: 855565 - RNA, 19 nt, Artificial Sequence
  Description of Artificial Sequence: Synthetic oligonucleotide
  Antisense strand to SEQ ID NO: 855564
gcuuccagggauuuaauca

SEQ ID NO: 855566 - RNA, 19 nt, Artificial Sequence
  Description of Artificial Sequence: Synthetic oligonucleotide
  Sense strand starting at position 2277 of SEQ ID NO: 588302
gccuguugucaugagguua

SEQ ID NO: 855567 - RNA, 19 nt, Artificial Sequence
  Description of Artificial Sequence: Synthetic oligonucleotide
  Antisense strand to SEQ ID NO: 855566
uaaccucaugacaacaggc

SEQ ID NO: 855568 - RNA, 19 nt, Artificial Sequence
  Description of Artificial Sequence: Synthetic oligonucleotide
  Sense strand starting at position 2599 of SEQ ID NO: 588302
acagaauggcaguagcaaa

SEQ ID NO: 855569 - RNA, 19 nt, Artificial Sequence
  Description of Artificial Sequence: Synthetic oligonucleotide
  Antisense strand to SEQ ID NO: 855568
uuugcuacugccauucugu

SEQ ID NO: 855570 - RNA, 19 nt, Artificial Sequence
  Description of Artificial Sequence: Synthetic oligonucleotide
  Sense strand starting at position 2707 of SEQ ID NO: 588302
gcucaaguauuuguuacua

SEQ ID NO: 855571 - RNA, 19 nt, Artificial Sequence
  Description of Artificial Sequence: Synthetic oligonucleotide
  Antisense strand to SEQ ID NO: 855570
uaguaacaaauacuugagc

SEQ ID NO: 855572 - RNA, 19 nt, Artificial Sequence
  Description of Artificial Sequence: Synthetic oligonucleotide
  Sense strand starting at position 2709 of SEQ ID NO: 588302
ucaaguauuuguuacuauc

SEQ ID NO: 855573 - RNA, 19 nt, Artificial Sequence
  Description of Artificial Sequence: Synthetic oligonucleotide
  Antisense strand to SEQ ID NO: 855572
gauaguaacaaauacuuga

SEQ ID NO: 855574 - RNA, 19 nt, Artificial Sequence
  Description of Artificial Sequence: Synthetic oligonucleotide
  Sense strand starting at position 2761 of SEQ ID NO: 588302
gggccaugucugugcagaa

SEQ ID NO: 855575 - RNA, 19 nt, Artificial Sequence
  Description of Artificial Sequence: Synthetic oligonucleotide
  Antisense strand to SEQ ID NO: 855574
uucugcacagacauggccc

SEQ ID NO: 855576 - RNA, 19 nt, Artificial Sequence
  Description of Artificial Sequence: Synthetic oligonucleotide
  Sense strand starting at position 2762 of SEQ ID NO: 588302
ggccaugucugugcagaac

SEQ ID NO: 855577 - RNA, 19 nt, Artificial Sequence
  Description of Artificial Sequence: Synthetic oligonucleotide
  Antisense strand to SEQ ID NO: 855576
guucugcacagacauggcc

SEQ ID NO: 855578 - RNA, 19 nt, Artificial Sequence
  Description of Artificial Sequence: Synthetic oligonucleotide
  Sense strand starting at position 2797 of SEQ ID NO: 588302
gagagcuauuugcucugua

SEQ ID NO: 855579 - RNA, 19 nt, Artificial Sequence
  Description of Artificial Sequence: Synthetic oligonucleotide
  Antisense strand to SEQ ID NO: 855578
uacagagcaaauagcucuc

SEQ ID NO: 855580 - RNA, 19 nt, Artificial Sequence
  Description of Artificial Sequence: Synthetic oligonucleotide
  Sense strand starting at position 2798 of SEQ ID NO: 588302
agagcuauuugcucuguaa

SEQ ID NO: 855581 - RNA, 19 nt, Artificial Sequence
  Description of Artificial Sequence: Synthetic oligonucleotide
  Antisense strand to SEQ ID NO: 855580
uuacagagcaaauagcucu

SEQ ID NO: 855582 - RNA, 19 nt, Artificial Sequence
  Description of Artificial Sequence: Synthetic oligonucleotide
  Sense strand starting at position 2800 of SEQ ID NO: 588302
agcuauuugcucuguaagc

SEQ ID NO: 855583 - RNA, 19 nt, Artificial Sequence
  Description of Artificial Sequence: Synthetic oligonucleotide
  Antisense strand to SEQ ID NO: 855582
gcuuacagagcaaauagcu

SEQ ID NO: 855584 - RNA, 19 nt, Artificial Sequence
  Description of Artificial Sequence: Synthetic oligonucleotide
  Sense strand starting at position 2801 of SEQ ID NO: 588302
gcuauuugcucuguaagcu

SEQ ID NO: 855585 - RNA, 19 nt, Artificial Sequence
  Description of Artificial Sequence: Synthetic oligonucleotide
  Antisense strand to SEQ ID NO: 855584
agcuuacagagcaaauagc

SEQ ID NO: 855586 - RNA, 19 nt, Artificial Sequence
  Description of Artificial Sequence: Synthetic oligonucleotide
  Sense strand starting at position 2802 of SEQ ID NO: 588302
cuauuugcucuguaagcua

SEQ ID NO: 855587 - RNA, 19 nt, Artificial Sequence
  Description of Artificial Sequence: Synthetic oligonucleotide
  Antisense strand to SEQ ID NO: 855586
uagcuuacagagcaaauag

SEQ ID NO: 855588 - RNA, 19 nt, Artificial Sequence
  Description of Artificial Sequence: Synthetic oligonucleotide
  Sense strand starting at position 2995 of SEQ ID NO: 588302
gggccagggauuugucguu

SEQ ID NO: 855589 - RNA, 19 nt, Artificial Sequence
  Description of Artificial Sequence: Synthetic oligonucleotide
  Antisense strand to SEQ ID NO: 855588
aacgacaaaucccuggccc

SEQ ID NO: 855590 - RNA, 19 nt, Artificial Sequence
  Description of Artificial Sequence: Synthetic oligonucleotide
  Sense strand starting at position 3007 of SEQ ID NO: 588302
ugucguugacgcgcagaau

SEQ ID NO: 855591 - RNA, 19 nt, Artificial Sequence
  Description of Artificial Sequence: Synthetic oligonucleotide
  Antisense strand to SEQ ID NO: 855590
auucugcgcgucaacgaca

SEQ ID NO: 855592 - RNA, 19 nt, Artificial Sequence
  Description of Artificial Sequence: Synthetic oligonucleotide
  Sense strand starting at position 3042 of SEQ ID NO: 588302
aguccuuccuucucagcua

SEQ ID NO: 855593 - RNA, 19 nt, Artificial Sequence
  Description of Artificial Sequence: Synthetic oligonucleotide
  Antisense strand to SEQ ID NO: 855592
uagcugagaaggaaggacu

SEQ ID NO: 855594 - RNA, 19 nt, Artificial Sequence
  Description of Artificial Sequence: Synthetic oligonucleotide
  Sense strand starting at position 3255 of SEQ ID NO: 588302
gccguguauuggucgaaga

SEQ ID NO: 855595 - RNA, 19 nt, Artificial Sequence
  Description of Artificial Sequence: Synthetic oligonucleotide
  Antisense strand to SEQ ID NO: 855594
ucuucgaccaauacacggc

SEQ ID NO: 855596 - RNA, 19 nt, Artificial Sequence
  Description of Artificial Sequence: Synthetic oligonucleotide
  Sense strand starting at position 3256 of SEQ ID NO: 588302
ccguguauuggucgaagag

SEQ ID NO: 855597 - RNA, 19 nt, Artificial Sequence
  Description of Artificial Sequence: Synthetic oligonucleotide
  Antisense strand to SEQ ID NO: 855596
cucuucgaccaauacacgg

SEQ ID NO: 855598 - RNA, 19 nt, Artificial Sequence
  Description of Artificial Sequence: Synthetic oligonucleotide
  Sense strand starting at position 3257 of SEQ ID NO: 588302
cguguauuggucgaagagc

SEQ ID NO: 855599 - RNA, 19 nt, Artificial Sequence
  Description of Artificial Sequence: Synthetic oligonucleotide
  Antisense strand to SEQ ID NO: 855598
gcucuucgaccaauacacg

SEQ ID NO: 855600 - RNA, 19 nt, Artificial Sequence
  Description of Artificial Sequence: Synthetic oligonucleotide
  Sense strand starting at position 3258 of SEQ ID NO: 588302
guguauuggucgaagagca

SEQ ID NO: 855601 - RNA, 19 nt, Artificial Sequence
  Description of Artificial Sequence: Synthetic oligonucleotide
  Antisense strand to SEQ ID NO: 855600
ugcucuucgaccaauacac

SEQ ID NO: 855602 - RNA, 19 nt, Artificial Sequence
  Description of Artificial Sequence: Synthetic oligonucleotide
  Sense strand starting at position 3388 of SEQ ID NO: 588302
cgugguaagcguucaggca

SEQ ID NO: 855603 - RNA, 19 nt, Artificial Sequence
  Description of Artificial Sequence: Synthetic oligonucleotide
  Antisense strand to SEQ ID NO: 855602
ugccugaacgcuuaccacg

SEQ ID NO: 855604 - RNA, 19 nt, Artificial Sequence
  Description of Artificial Sequence: Synthetic oligonucleotide
  Sense strand starting at position 19 of SEQ ID NO: 588303
ugauuaaaucccuggaagc

SEQ ID NO: 855605 - RNA, 19 nt, Artificial Sequence
  Description of Artificial Sequence: Synthetic oligonucleotide
  Antisense strand to SEQ ID NO: 855604
gcuuccagggauuuaauca

SEQ ID NO: 855606 - RNA, 19 nt, Artificial Sequence
  Description of Artificial Sequence: Synthetic oligonucleotide
  Sense strand starting at position 36 of SEQ ID NO: 588303
gccuguugucaugagguua

SEQ ID NO: 855607 - RNA, 19 nt, Artificial Sequence
  Description of Artificial Sequence: Synthetic oligonucleotide
  Antisense strand to SEQ ID NO: 855606
uaaccucaugacaacaggc

SEQ ID NO: 855608 - RNA, 19 nt, Artificial Sequence
  Description of Artificial Sequence: Synthetic oligonucleotide
  Sense strand starting at position 358 of SEQ ID NO: 588303
acagaauggcaguagcaaa

SEQ ID NO: 855609 - RNA, 19 nt, Artificial Sequence
  Description of Artificial Sequence: Synthetic oligonucleotide
  Antisense strand to SEQ ID NO: 855608
uuugcuacugccauucugu

SEQ ID NO: 855610 - RNA, 19 nt, Artificial Sequence
  Description of Artificial Sequence: Synthetic oligonucleotide
  Sense strand starting at position 466 of SEQ ID NO: 588303
gcucaaguauuuguuacua

SEQ ID NO: 855611 - RNA, 19 nt, Artificial Sequence
  Description of Artificial Sequence: Synthetic oligonucleotide
  Antisense strand to SEQ ID NO: 855610
uaguaacaaauacuugagc

SEQ ID NO: 855612 - RNA, 19 nt, Artificial Sequence
  Description of Artificial Sequence: Synthetic oligonucleotide
  Sense strand starting at position 556 of SEQ ID NO: 588303
gagagcuauuugcucugua

SEQ ID NO: 855613 - RNA, 19 nt, Artificial Sequence
  Description of Artificial Sequence: Synthetic oligonucleotide
  Antisense strand to SEQ ID NO: 855612
uacagagcaaauagcucuc

SEQ ID NO: 855614 - RNA, 19 nt, Artificial Sequence
  Description of Artificial Sequence: Synthetic oligonucleotide
  Sense strand starting at position 557 of SEQ ID NO: 588303
agagcuauuugcucuguaa

SEQ ID NO: 855615 - RNA, 19 nt, Artificial Sequence
  Description of Artificial Sequence: Synthetic oligonucleotide
  Antisense strand to SEQ ID NO: 855614
uuacagagcaaauagcucu

SEQ ID NO: 855616 - RNA, 19 nt, Artificial Sequence
  Description of Artificial Sequence: Synthetic oligonucleotide
  Sense strand starting at position 559 of SEQ ID NO: 588303
agcuauuugcucuguaagc

SEQ ID NO: 855617 - RNA, 19 nt, Artificial Sequence
  Description of Artificial Sequence: Synthetic oligonucleotide
  Antisense strand to SEQ ID NO: 855616
gcuuacagagcaaauagcu

SEQ ID NO: 855618 - RNA, 19 nt, Artificial Sequence
  Description of Artificial Sequence: Synthetic oligonucleotide
  Sense strand starting at position 560 of SEQ ID NO: 588303
gcuauuugcucuguaagcu

SEQ ID NO: 855619 - RNA, 19 nt, Artificial Sequence
  Description of Artificial Sequence: Synthetic oligonucleotide
  Antisense strand to SEQ ID NO: 855618
agcuuacagagcaaauagc

SEQ ID NO: 855620 - RNA, 19 nt, Artificial Sequence
  Description of Artificial Sequence: Synthetic oligonucleotide
  Sense strand starting at position 561 of SEQ ID NO: 588303
cuauuugcucuguaagcua

SEQ ID NO: 855621 - RNA, 19 nt, Artificial Sequence
  Description of Artificial Sequence: Synthetic oligonucleotide
  Antisense strand to SEQ ID NO: 855620
uagcuuacagagcaaauag

SEQ ID NO: 855622 - RNA, 19 nt, Artificial Sequence
  Description of Artificial Sequence: Synthetic oligonucleotide
  Sense strand starting at position 754 of SEQ ID NO: 588303
gggccagggauuugucguu

SEQ ID NO: 855623 - RNA, 19 nt, Artificial Sequence
  Description of Artificial Sequence: Synthetic oligonucleotide
  Antisense strand to SEQ ID NO: 855622
aacgacaaaucccuggccc

SEQ ID NO: 855624 - RNA, 19 nt, Artificial Sequence
  Description of Artificial Sequence: Synthetic oligonucleotide
  Sense strand starting at position 766 of SEQ ID NO: 588303
ugucguugacgcgcagaau

SEQ ID NO: 855625 - RNA, 19 nt, Artificial Sequence
  Description of Artificial Sequence: Synthetic oligonucleotide
  Antisense strand to SEQ ID NO: 855624
auucugcgcgucaacgaca

SEQ ID NO: 855626 - RNA, 19 nt, Artificial Sequence
  Description of Artificial Sequence: Synthetic oligonucleotide
  Sense strand starting at position 1147 of SEQ ID NO: 588303
cgugguaagcguucaggca

SEQ ID NO: 855627 - RNA, 19 nt, Artificial Sequence
  Description of Artificial Sequence: Synthetic oligonucleotide
  Antisense strand to SEQ ID NO: 855626
ugccugaacgcuuaccacg

SEQ ID NO: 855628 - RNA, 19 nt, Artificial Sequence
  Description of Artificial Sequence: Synthetic oligonucleotide
  Sense strand starting at position 1836 of SEQ ID NO: 588303
gcucuagucccagagcacu

SEQ ID NO: 855629 - RNA, 19 nt, Artificial Sequence
  Description of Artificial Sequence: Synthetic oligonucleotide
  Antisense strand to SEQ ID NO: 855628
agugcucugggacuagagc

SEQ ID NO: 855630 - RNA, 19 nt, Artificial Sequence
  Description of Artificial Sequence: Synthetic oligonucleotide
  Sense strand starting at position 2010 of SEQ ID NO: 588303
ccgagucuuccagcgaguu

SEQ ID NO: 855631 - RNA, 19 nt, Artificial Sequence
  Description of Artificial Sequence: Synthetic oligonucleotide
  Antisense strand to SEQ ID NO: 855630
aacucgcuggaagacucgg

SEQ ID NO: 855632 - RNA, 19 nt, Artificial Sequence
  Description of Artificial Sequence: Synthetic oligonucleotide
  Sense strand starting at position 2101 of SEQ ID NO: 588303
cgggcuccucaggaaauga

SEQ ID NO: 855633 - RNA, 19 nt, Artificial Sequence
  Description of Artificial Sequence: Synthetic oligonucleotide
  Antisense strand to SEQ ID NO: 855632
ucauuuccugaggagcccg

SEQ ID NO: 855634 - RNA, 19 nt, Artificial Sequence
  Description of Artificial Sequence: Synthetic oligonucleotide
  Sense strand starting at position 2301 of SEQ ID NO: 588303
ccaggaucgcuuuggagua

SEQ ID NO: 855635 - RNA, 19 nt, Artificial Sequence
  Description of Artificial Sequence: Synthetic oligonucleotide
  Antisense strand to SEQ ID NO: 855634
uacuccaaagcgauccugg

SEQ ID NO: 855636 - RNA, 19 nt, Artificial Sequence
  Description of Artificial Sequence: Synthetic oligonucleotide
  Sense strand starting at position 2306 of SEQ ID NO: 588303
aucgcuuuggaguaauuag

SEQ ID NO: 855637 - RNA, 19 nt, Artificial Sequence
  Description of Artificial Sequence: Synthetic oligonucleotide
  Antisense strand to SEQ ID NO: 855636
cuaauuacuccaaagcgau

SEQ ID NO: 855638 - RNA, 19 nt, Artificial Sequence
  Description of Artificial Sequence: Synthetic oligonucleotide
  Sense strand starting at position 2314 of SEQ ID NO: 588303
ggaguaauuagccggcuag

SEQ ID NO: 855639 - RNA, 19 nt, Artificial Sequence
  Description of Artificial Sequence: Synthetic oligonucleotide
  Antisense strand to SEQ ID NO: 855638
cuagccggcuaauuacucc

SEQ ID NO: 855640 - RNA, 19 nt, Artificial Sequence
  Description of Artificial Sequence: Synthetic oligonucleotide
  Sense strand starting at position 2317 of SEQ ID NO: 588303
guaauuagccggcuagcua

SEQ ID NO: 855641 - RNA, 19 nt, Artificial Sequence
  Description of Artificial Sequence: Synthetic oligonucleotide
  Antisense strand to SEQ ID NO: 855640
uagcuagccggcuaauuac

SEQ ID NO: 855642 - RNA, 19 nt, Artificial Sequence
  Description of Artificial Sequence: Synthetic oligonucleotide
  Sense strand starting at position 2452 of SEQ ID NO: 588303
gcgcccugacaugacaaau

SEQ ID NO: 855643 - RNA, 19 nt, Artificial Sequence
  Description of Artificial Sequence: Synthetic oligonucleotide
  Antisense strand to SEQ ID NO: 855642
auuugucaugucagggcgc

SEQ ID NO: 855644 - RNA, 19 nt, Artificial Sequence
  Description of Artificial Sequence: Synthetic oligonucleotide
  Sense strand starting at position 2463 of SEQ ID NO: 588303
ugacaaauuccaggguuua

SEQ ID NO: 855645 - RNA, 19 nt, Artificial Sequence
  Description of Artificial Sequence: Synthetic oligonucleotide
  Antisense strand to SEQ ID NO: 855644
uaaacccuggaauuuguca

SEQ ID NO: 855646 - RNA, 19 nt, Artificial Sequence
  Description of Artificial Sequence: Synthetic oligonucleotide
  Sense strand starting at position 2464 of SEQ ID NO: 588303
gacaaauuccaggguuuau

SEQ ID NO: 855647 - RNA, 19 nt, Artificial Sequence
  Description of Artificial Sequence: Synthetic oligonucleotide
  Antisense strand to SEQ ID NO: 855646
auaaacccuggaauuuguc

SEQ ID NO: 855648 - RNA, 19 nt, Artificial Sequence
  Description of Artificial Sequence: Synthetic oligonucleotide
  Sense strand starting at position 2690 of SEQ ID NO: 588303
gugaaaucugaguaaggug

SEQ ID NO: 855649 - RNA, 19 nt, Artificial Sequence
  Description of Artificial Sequence: Synthetic oligonucleotide
  Antisense strand to SEQ ID NO: 855648
caccuuacucagauuucac

SEQ ID NO: 855650 - RNA, 19 nt, Artificial Sequence
  Description of Artificial Sequence: Synthetic oligonucleotide
  Sense strand starting at position 2698 of SEQ ID NO: 588303
ugaguaagguggguggauu

SEQ ID NO: 855651 - RNA, 19 nt, Artificial Sequence
  Description of Artificial Sequence: Synthetic oligonucleotide
  Antisense strand to SEQ ID NO: 855650
aauccacccaccuuacuca

SEQ ID NO: 855652 - RNA, 19 nt, Artificial Sequence
  Description of Artificial Sequence: Synthetic oligonucleotide
  Sense strand starting at position 2737 of SEQ ID NO: 588303
guugccaucgugucaacau

SEQ ID NO: 855653 - RNA, 19 nt, Artificial Sequence
  Description of Artificial Sequence: Synthetic oligonucleotide
  Antisense strand to SEQ ID NO: 855652
auguugacacgauggcaac

SEQ ID NO: 855654 - RNA, 19 nt, Artificial Sequence
  Description of Artificial Sequence: Synthetic oligonucleotide
  Sense strand starting at position 2774 of SEQ ID NO: 588303
ggguacauggcaugucuau

SEQ ID NO: 855655 - RNA, 19 nt, Artificial Sequence
  Description of Artificial Sequence: Synthetic oligonucleotide
  Antisense strand to SEQ ID NO: 855654
auagacaugccauguaccc

SEQ ID NO: 855656 - RNA, 19 nt, Artificial Sequence
  Description of Artificial Sequence: Synthetic oligonucleotide
  Sense strand starting at position 2780 of SEQ ID NO: 588303
auggcaugucuauguauua

SEQ ID NO: 855657 - RNA, 19 nt, Artificial Sequence
  Description of Artificial Sequence: Synthetic oligonucleotide
  Antisense strand to SEQ ID NO: 855656
uaauacauagacaugccau

SEQ ID NO: 855658 - RNA, 19 nt, Artificial Sequence
  Description of Artificial Sequence: Synthetic oligonucleotide
  Sense strand starting at position 2781 of SEQ ID NO: 588303
uggcaugucuauguauuau

SEQ ID NO: 855659 - RNA, 19 nt, Artificial Sequence
  Description of Artificial Sequence: Synthetic oligonucleotide
  Antisense strand to SEQ ID NO: 855658
auaauacauagacaugcca

SEQ ID NO: 855660 - RNA, 19 nt, Artificial Sequence
  Description of Artificial Sequence: Synthetic oligonucleotide
  Sense strand starting at position 2856 of SEQ ID NO: 588303
uuugaaguggcuuggagaa

SEQ ID NO: 855661 - RNA, 19 nt, Artificial Sequence
  Description of Artificial Sequence: Synthetic oligonucleotide
  Antisense strand to SEQ ID NO: 855660
uucuccaagccacuucaaa

SEQ ID NO: 855662 - RNA, 19 nt, Artificial Sequence
  Description of Artificial Sequence: Synthetic oligonucleotide
  Sense strand starting at position 3098 of SEQ ID NO: 588303
gcuacucuucuauguauuu

SEQ ID NO: 855663 - RNA, 19 nt, Artificial Sequence
  Description of Artificial Sequence: Synthetic oligonucleotide
  Antisense strand to SEQ ID NO: 855662
aaauacauagaagaguagc

SEQ ID NO: 855664 - RNA, 19 nt, Artificial Sequence
  Description of Artificial Sequence: Synthetic oligonucleotide
  Sense strand starting at position 3461 of SEQ ID NO: 588303
gcgacaccugaaugaagaa

SEQ ID NO: 855665 - RNA, 19 nt, Artificial Sequence
  Description of Artificial Sequence: Synthetic oligonucleotide
  Antisense strand to SEQ ID NO: 855664
uucuucauucaggugucgc

SEQ ID NO: 855666 - RNA, 19 nt, Artificial Sequence
  Description of Artificial Sequence: Synthetic oligonucleotide
  Sense strand starting at position 3493 of SEQ ID NO: 588303
cggacuuucuccucuagac

SEQ ID NO: 855667 - RNA, 19 nt, Artificial Sequence
  Description of Artificial Sequence: Synthetic oligonucleotide
  Antisense strand to SEQ ID NO: 855666
gucuagaggagaaaguccg

SEQ ID NO: 855668 - RNA, 19 nt, Artificial Sequence
  Description of Artificial Sequence: Synthetic oligonucleotide
  Sense strand starting at position 3546 of SEQ ID NO: 588303
gacuuaaugcauugaggcu

SEQ ID NO: 855669 - RNA, 19 nt, Artificial Sequence
  Description of Artificial Sequence: Synthetic oligonucleotide
  Antisense strand to SEQ ID NO: 855668
agccucaaugcauuaaguc

SEQ ID NO: 855670 - RNA, 19 nt, Artificial Sequence
  Description of Artificial Sequence: Synthetic oligonucleotide
  Sense strand starting at position 3552 of SEQ ID NO: 588303
augcauugaggcuaggaau

SEQ ID NO: 855671 - RNA, 19 nt, Artificial Sequence
  Description of Artificial Sequence: Synthetic oligonucleotide
  Antisense strand to SEQ ID NO: 855670
auuccuagccucaaugcau

SEQ ID NO: 855672 - RNA, 19 nt, Artificial Sequence
  Description of Artificial Sequence: Synthetic oligonucleotide
  Sense strand starting at position 3738 of SEQ ID NO: 588303
aguuaauggugucuauccu

SEQ ID NO: 855673 - RNA, 19 nt, Artificial Sequence
  Description of Artificial Sequence: Synthetic oligonucleotide
  Antisense strand to SEQ ID NO: 855672
aggauagacaccauuaacu

SEQ ID NO: 855674 - RNA, 19 nt, Artificial Sequence
  Description of Artificial Sequence: Synthetic oligonucleotide
  Sense strand starting at position 3739 of SEQ ID NO: 588303
guuaauggugucuauccuu

SEQ ID NO: 855675 - RNA, 19 nt, Artificial Sequence
  Description of Artificial Sequence: Synthetic oligonucleotide
  Antisense strand to SEQ ID NO: 855674
aaggauagacaccauuaac

SEQ ID NO: 855676 - RNA, 19 nt, Artificial Sequence
  Description of Artificial Sequence: Synthetic oligonucleotide
  Sense strand starting at position 3957 of SEQ ID NO: 588303
uaauuacugugauugguuu

SEQ ID NO: 855677 - RNA, 19 nt, Artificial Sequence
  Description of Artificial Sequence: Synthetic oligonucleotide
  Antisense strand to SEQ ID NO: 855676
aaaccaaucacaguaauua

SEQ ID NO: 855678 - RNA, 19 nt, Artificial Sequence
  Description of Artificial Sequence: Synthetic oligonucleotide
  Sense strand starting at position 3959 of SEQ ID NO: 588303
auuacugugauugguuuga

SEQ ID NO: 855679 - RNA, 19 nt, Artificial Sequence
  Description of Artificial Sequence: Synthetic oligonucleotide
  Antisense strand to SEQ ID NO: 855678
ucaaaccaaucacaguaau

SEQ ID NO: 855680 - RNA, 19 nt, Artificial Sequence
  Description of Artificial Sequence: Synthetic oligonucleotide
  Sense strand starting at position 3961 of SEQ ID NO: 588303
uacugugauugguuugaua

SEQ ID NO: 855681 - RNA, 19 nt, Artificial Sequence
  Description of Artificial Sequence: Synthetic oligonucleotide
  Antisense strand to SEQ ID NO: 855680
uaucaaaccaaucacagua

SEQ ID NO: 855682 - RNA, 19 nt, Artificial Sequence
  Description of Artificial Sequence: Synthetic oligonucleotide
  Sense strand starting at position 3963 of SEQ ID NO: 588303
cugugauugguuugauaaa

SEQ ID NO: 855683 - RNA, 19 nt, Artificial Sequence
  Description of Artificial Sequence: Synthetic oligonucleotide
  Antisense strand to SEQ ID NO: 855682
uuuaucaaaccaaucacag

SEQ ID NO: 855684 - RNA, 19 nt, Artificial Sequence
  Description of Artificial Sequence: Synthetic oligonucleotide
  Sense strand starting at position 8 of SEQ ID NO: 588304
uggcauuugucacagggaa

SEQ ID NO: 855685 - RNA, 19 nt, Artificial Sequence
  Description of Artificial Sequence: Synthetic oligonucleotide
  Antisense strand to SEQ ID NO: 855684
uucccugugacaaaugcca

SEQ ID NO: 855686 - RNA, 19 nt, Artificial Sequence
  Description of Artificial Sequence: Synthetic oligonucleotide
  Sense strand starting at position 179 of SEQ ID NO: 588304
ucaguaagauaugcaguau

SEQ ID NO: 855687 - RNA, 19 nt, Artificial Sequence
  Description of Artificial Sequence: Synthetic oligonucleotide
  Antisense strand to SEQ ID NO: 855686
auacugcauaucuuacuga

SEQ ID NO: 855688 - RNA, 19 nt, Artificial Sequence
  Description of Artificial Sequence: Synthetic oligonucleotide
  Sense strand starting at position 235 of SEQ ID NO: 588304
ucaugugugguguauagga

SEQ ID NO: 855689 - RNA, 19 nt, Artificial Sequence
  Description of Artificial Sequence: Synthetic oligonucleotide
  Antisense strand to SEQ ID NO: 855688
uccuauacaccacacauga

SEQ ID NO: 855690 - RNA, 19 nt, Artificial Sequence
  Description of Artificial Sequence: Synthetic oligonucleotide
  Sense strand starting at position 237 of SEQ ID NO: 588304
augugugguguauaggaua

SEQ ID NO: 855691 - RNA, 19 nt, Artificial Sequence
  Description of Artificial Sequence: Synthetic oligonucleotide
  Antisense strand to SEQ ID NO: 855690
uauccuauacaccacacau

SEQ ID NO: 855692 - RNA, 19 nt, Artificial Sequence
  Description of Artificial Sequence: Synthetic oligonucleotide
  Sense strand starting at position 244 of SEQ ID NO: 588304
guguauaggauacgaacaa

SEQ ID NO: 855693 - RNA, 19 nt, Artificial Sequence
  Description of Artificial Sequence: Synthetic oligonucleotide
  Antisense strand to SEQ ID NO: 855692
uuguucguauccuauacac

SEQ ID NO: 855694 - RNA, 19 nt, Artificial Sequence
  Description of Artificial Sequence: Synthetic oligonucleotide
  Sense strand starting at position 315 of SEQ ID NO: 588304
ggaaacugcuuugcugaga

SEQ ID NO: 855695 - RNA, 19 nt, Artificial Sequence
  Description of Artificial Sequence: Synthetic oligonucleotide
  Antisense strand to SEQ ID NO: 855694
ucucagcaaagcaguuucc

SEQ ID NO: 855696 - RNA, 19 nt, Artificial Sequence
  Description of Artificial Sequence: Synthetic oligonucleotide
  Sense strand starting at position 316 of SEQ ID NO: 588304
gaaacugcuuugcugagaa

SEQ ID NO: 855697 - RNA, 19 nt, Artificial Sequence
  Description of Artificial Sequence: Synthetic oligonucleotide
  Antisense strand to SEQ ID NO: 855696
uucucagcaaagcaguuuc

SEQ ID NO: 855698 - RNA, 19 nt, Artificial Sequence
  Description of Artificial Sequence: Synthetic oligonucleotide
  Sense strand starting at position 318 of SEQ ID NO: 588304
aacugcuuugcugagaaug

SEQ ID NO: 855699 - RNA, 19 nt, Artificial Sequence
  Description of Artificial Sequence: Synthetic oligonucleotide
  Antisense strand to SEQ ID NO: 855698
cauucucagcaaagcaguu

SEQ ID NO: 855700 - RNA, 19 nt, Artificial Sequence
  Description of Artificial Sequence: Synthetic oligonucleotide
  Sense strand starting at position 328 of SEQ ID NO: 588304
cugagaaugcuggguuguu

SEQ ID NO: 855701 - RNA, 19 nt, Artificial Sequence
  Description of Artificial Sequence: Synthetic oligonucleotide
  Antisense strand to SEQ ID NO: 855700
aacaacccagcauucucag

SEQ ID NO: 855702 - RNA, 19 nt, Artificial Sequence
  Description of Artificial Sequence: Synthetic oligonucleotide
  Sense strand starting at position 329 of SEQ ID NO: 588304
ugagaaugcuggguuguua

SEQ ID NO: 855703 - RNA, 19 nt, Artificial Sequence
  Description of Artificial Sequence: Synthetic oligonucleotide
  Antisense strand to SEQ ID NO: 855702
uaacaacccagcauucuca

SEQ ID NO: 855704 - RNA, 19 nt, Artificial Sequence
  Description of Artificial Sequence: Synthetic oligonucleotide
  Sense strand starting at position 333 of SEQ ID NO: 588304
aaugcuggguuguuagaca

SEQ ID NO: 855705 - RNA, 19 nt, Artificial Sequence
  Description of Artificial Sequence: Synthetic oligonucleotide
  Antisense strand to SEQ ID NO: 855704
ugucuaacaacccagcauu

SEQ ID NO: 855706 - RNA, 19 nt, Artificial Sequence
  Description of Artificial Sequence: Synthetic oligonucleotide
  Sense strand starting at position 582 of SEQ ID NO: 588304
ccgggacuauuaccaaauu

SEQ ID NO: 855707 - RNA, 19 nt, Artificial Sequence
  Description of Artificial Sequence: Synthetic oligonucleotide
  Antisense strand to SEQ ID NO: 855706
aauuugguaauagucccgg

SEQ ID NO: 855708 - RNA, 19 nt, Artificial Sequence
  Description of Artificial Sequence: Synthetic oligonucleotide
  Sense strand starting at position 606 of SEQ ID NO: 588304
ccauauguuaaaugggaug

SEQ ID NO: 855709 - RNA, 19 nt, Artificial Sequence
  Description of Artificial Sequence: Synthetic oligonucleotide
  Antisense strand to SEQ ID NO: 855708
caucccauuuaacauaugg

SEQ ID NO: 855710 - RNA, 19 nt, Artificial Sequence
  Description of Artificial Sequence: Synthetic oligonucleotide
  Sense strand starting at position 855 of SEQ ID NO: 588304
uccaaaugucacuggaaau

SEQ ID NO: 855711 - RNA, 19 nt, Artificial Sequence
  Description of Artificial Sequence: Synthetic oligonucleotide
  Antisense strand to SEQ ID NO: 855710
auuuccagugacauuugga

SEQ ID NO: 855712 - RNA, 19 nt, Artificial Sequence
  Description of Artificial Sequence: Synthetic oligonucleotide
  Sense strand starting at position 883 of SEQ ID NO: 588304
ugugacugauuugaaaugu

SEQ ID NO: 855713 - RNA, 19 nt, Artificial Sequence
  Description of Artificial Sequence: Synthetic oligonucleotide
  Antisense strand to SEQ ID NO: 855712
acauuucaaaucagucaca

SEQ ID NO: 855714 - RNA, 19 nt, Artificial Sequence
  Description of Artificial Sequence: Synthetic oligonucleotide
  Sense strand starting at position 1306 of SEQ ID NO: 588304
gggagcugucagcagucau

SEQ ID NO: 855715 - RNA, 19 nt, Artificial Sequence
  Description of Artificial Sequence: Synthetic oligonucleotide
  Antisense strand to SEQ ID NO: 855714
augacugcugacagcuccc

SEQ ID NO: 855716 - RNA, 19 nt, Artificial Sequence
  Description of Artificial Sequence: Synthetic oligonucleotide
  Sense strand starting at position 1318 of SEQ ID NO: 588304
cagucauugucaucugaug

SEQ ID NO: 855717 - RNA, 19 nt, Artificial Sequence
  Description of Artificial Sequence: Synthetic oligonucleotide
  Antisense strand to SEQ ID NO: 855716
caucagaugacaaugacug

SEQ ID NO: 855718 - RNA, 19 nt, Artificial Sequence
  Description of Artificial Sequence: Synthetic oligonucleotide
  Sense strand starting at position 1324 of SEQ ID NO: 588304
uugucaucugaugggaaac

SEQ ID NO: 855719 - RNA, 19 nt, Artificial Sequence
  Description of Artificial Sequence: Synthetic oligonucleotide
  Antisense strand to SEQ ID NO: 855718
guuucccaucagaugacaa

SEQ ID NO: 855720 - RNA, 19 nt, Artificial Sequence
  Description of Artificial Sequence: Synthetic oligonucleotide
  Sense strand starting at position 1623 of SEQ ID NO: 588304
acaccugcacaguagaauu

SEQ ID NO: 855721 - RNA, 19 nt, Artificial Sequence
  Description of Artificial Sequence: Synthetic oligonucleotide
  Antisense strand to SEQ ID NO: 855720
aauucuacugugcaggugu

SEQ ID NO: 855722 - RNA, 19 nt, Artificial Sequence
  Description of Artificial Sequence: Synthetic oligonucleotide
  Sense strand starting at position 1675 of SEQ ID NO: 588304
cccuaauaauacguaagau

SEQ ID NO: 855723 - RNA, 19 nt, Artificial Sequence
  Description of Artificial Sequence: Synthetic oligonucleotide
  Antisense strand to SEQ ID NO: 855722
aucuuacguauuauuaggg

SEQ ID NO: 855724 - RNA, 19 nt, Artificial Sequence
  Description of Artificial Sequence: Synthetic oligonucleotide
  Sense strand starting at position 2281 of SEQ ID NO: 588304
gcgccuguucgccuccaaa

SEQ ID NO: 855725 - RNA, 19 nt, Artificial Sequence
  Description of Artificial Sequence: Synthetic oligonucleotide
  Antisense strand to SEQ ID NO: 855724
uuuggaggcgaacaggcgc

SEQ ID NO: 855726 - RNA, 19 nt, Artificial Sequence
  Description of Artificial Sequence: Synthetic oligonucleotide
  Sense strand starting at position 2537 of SEQ ID NO: 588304
ccacacaguguagauuaau

SEQ ID NO: 855727 - RNA, 19 nt, Artificial Sequence
  Description of Artificial Sequence: Synthetic oligonucleotide
  Antisense strand to SEQ ID NO: 855726
auuaaucuacacugugugg

SEQ ID NO: 855728 - RNA, 19 nt, Artificial Sequence
  Description of Artificial Sequence: Synthetic oligonucleotide
  Sense strand starting at position 2569 of SEQ ID NO: 588304
auaggauccuaugacaaca

SEQ ID NO: 855729 - RNA, 19 nt, Artificial Sequence
  Description of Artificial Sequence: Synthetic oligonucleotide
  Antisense strand to SEQ ID NO: 855728
uguugucauaggauccuau

SEQ ID NO: 855730 - RNA, 19 nt, Artificial Sequence
  Description of Artificial Sequence: Synthetic oligonucleotide
  Sense strand starting at position 2597 of SEQ ID NO: 588304
gcaagcuuggauuagaauu

SEQ ID NO: 855731 - RNA, 19 nt, Artificial Sequence
  Description of Artificial Sequence: Synthetic oligonucleotide
  Antisense strand to SEQ ID NO: 855730
aauucuaauccaagcuugc

SEQ ID NO: 855732 - RNA, 19 nt, Artificial Sequence
  Description of Artificial Sequence: Synthetic oligonucleotide
  Sense strand starting at position 2651 of SEQ ID NO: 588304
agcaaaugaccacguuuau

SEQ ID NO: 855733 - RNA, 19 nt, Artificial Sequence
  Description of Artificial Sequence: Synthetic oligonucleotide
  Antisense strand to SEQ ID NO: 855732
auaaacguggucauuugcu

SEQ ID NO: 855734 - RNA, 19 nt, Artificial Sequence
  Description of Artificial Sequence: Synthetic oligonucleotide
  Sense strand starting at position 2696 of SEQ ID NO: 588304
caaagacgcguugauuaaa

SEQ ID NO: 855735 - RNA, 19 nt, Artificial Sequence
  Description of Artificial Sequence: Synthetic oligonucleotide
  Antisense strand to SEQ ID NO: 855734
uuuaaucaacgcgucuuug

SEQ ID NO: 855736 - RNA, 19 nt, Artificial Sequence
  Description of Artificial Sequence: Synthetic oligonucleotide
  Sense strand starting at position 2717 of SEQ ID NO: 588304
acaggugaaucagcaagaa

SEQ ID NO: 855737 - RNA, 19 nt, Artificial Sequence
  Description of Artificial Sequence: Synthetic oligonucleotide
  Antisense strand to SEQ ID NO: 855736
uucuugcugauucaccugu

SEQ ID NO: 855738 - RNA, 19 nt, Artificial Sequence
  Description of Artificial Sequence: Synthetic oligonucleotide
  Sense strand starting at position 2777 of SEQ ID NO: 588304
agugcuugagcauaacauu

SEQ ID NO: 855739 - RNA, 19 nt, Artificial Sequence
  Description of Artificial Sequence: Synthetic oligonucleotide
  Antisense strand to SEQ ID NO: 855738
aauguuaugcucaagcacu

SEQ ID NO: 855740 - RNA, 19 nt, Artificial Sequence
  Description of Artificial Sequence: Synthetic oligonucleotide
  Sense strand starting at position 2783 of SEQ ID NO: 588304
ugagcauaacauugaucca

SEQ ID NO: 855741 - RNA, 19 nt, Artificial Sequence
  Description of Artificial Sequence: Synthetic oligonucleotide
  Antisense strand to SEQ ID NO: 855740
uggaucaauguuaugcuca

SEQ ID NO: 855742 - RNA, 19 nt, Artificial Sequence
  Description of Artificial Sequence: Synthetic oligonucleotide
  Sense strand starting at position 2786 of SEQ ID NO: 588304
gcauaacauugauccaugu

SEQ ID NO: 855743 - RNA, 19 nt, Artificial Sequence
  Description of Artificial Sequence: Synthetic oligonucleotide
  Antisense strand to SEQ ID NO: 855742
acauggaucaauguuaugc

SEQ ID NO: 855744 - RNA, 19 nt, Artificial Sequence
  Description of Artificial Sequence: Synthetic oligonucleotide
  Sense strand starting at position 2833 of SEQ ID NO: 588304
uuucuucucuugguuauau

SEQ ID NO: 855745 - RNA, 19 nt, Artificial Sequence
  Description of Artificial Sequence: Synthetic oligonucleotide
  Antisense strand to SEQ ID NO: 855744
auauaaccaagagaagaaa

SEQ ID NO: 855746 - RNA, 19 nt, Artificial Sequence
  Description of Artificial Sequence: Synthetic oligonucleotide
  Sense strand starting at position 2834 of SEQ ID NO: 588304
uucuucucuugguuauauu

SEQ ID NO: 855747 - RNA, 19 nt, Artificial Sequence
  Description of Artificial Sequence: Synthetic oligonucleotide
  Antisense strand to SEQ ID NO: 855746
aauauaaccaagagaagaa

SEQ ID NO: 855748 - RNA, 19 nt, Artificial Sequence
  Description of Artificial Sequence: Synthetic oligonucleotide
  Sense strand starting at position 2835 of SEQ ID NO: 588304
ucuucucuugguuauauua

SEQ ID NO: 855749 - RNA, 19 nt, Artificial Sequence
  Description of Artificial Sequence: Synthetic oligonucleotide
  Antisense strand to SEQ ID NO: 855748
uaauauaaccaagagaaga

SEQ ID NO: 855750 - RNA, 19 nt, Artificial Sequence
  Description of Artificial Sequence: Synthetic oligonucleotide
  Sense strand starting at position 2843 of SEQ ID NO: 588304
ugguuauauuacucauucu

SEQ ID NO: 855751 - RNA, 19 nt, Artificial Sequence
  Description of Artificial Sequence: Synthetic oligonucleotide
  Antisense strand to SEQ ID NO: 855750
agaaugaguaauauaacca

SEQ ID NO: 855752 - RNA, 19 nt, Artificial Sequence
  Description of Artificial Sequence: Synthetic oligonucleotide
  Sense strand starting at position 3128 of SEQ ID NO: 588304
uccuaauucuggccuugau

SEQ ID NO: 855753 - RNA, 19 nt, Artificial Sequence
  Description of Artificial Sequence: Synthetic oligonucleotide
  Antisense strand to SEQ ID NO: 855752
aucaaggccagaauuagga

SEQ ID NO: 855754 - RNA, 19 nt, Artificial Sequence
  Description of Artificial Sequence: Synthetic oligonucleotide
  Sense strand starting at position 3146 of SEQ ID NO: 588304
uccuacagccauuggaaua

SEQ ID NO: 855755 - RNA, 19 nt, Artificial Sequence
  Description of Artificial Sequence: Synthetic oligonucleotide
  Antisense strand to SEQ ID NO: 855754
uauuccaauggcuguagga

SEQ ID NO: 855756 - RNA, 19 nt, Artificial Sequence
  Description of Artificial Sequence: Synthetic oligonucleotide
  Sense strand starting at position 3291 of SEQ ID NO: 588304
aggaauauauggccacuca

SEQ ID NO: 855757 - RNA, 19 nt, Artificial Sequence
  Description of Artificial Sequence: Synthetic oligonucleotide
  Antisense strand to SEQ ID NO: 855756
ugaguggccauauauuccu

SEQ ID NO: 855758 - RNA, 19 nt, Artificial Sequence
  Description of Artificial Sequence: Synthetic oligonucleotide
  Sense strand starting at position 3437 of SEQ ID NO: 588304
aaauguagguuaucagguu

SEQ ID NO: 855759 - RNA, 19 nt, Artificial Sequence
  Description of Artificial Sequence: Synthetic oligonucleotide
  Antisense strand to SEQ ID NO: 855758
aaccugauaaccuacauuu

SEQ ID NO: 855760 - RNA, 19 nt, Artificial Sequence
  Description of Artificial Sequence: Synthetic oligonucleotide
  Sense strand starting at position 3630 of SEQ ID NO: 588304
auuauuuguucugagaaug

SEQ ID NO: 855761 - RNA, 19 nt, Artificial Sequence
  Description of Artificial Sequence: Synthetic oligonucleotide
  Antisense strand to SEQ ID NO: 855760
cauucucagaacaaauaau

SEQ ID NO: 855762 - RNA, 19 nt, Artificial Sequence
  Description of Artificial Sequence: Synthetic oligonucleotide
  Sense strand starting at position 3681 of SEQ ID NO: 588304
aggagcaacucacuuaaua

SEQ ID NO: 855763 - RNA, 19 nt, Artificial Sequence
  Description of Artificial Sequence: Synthetic oligonucleotide
  Antisense strand to SEQ ID NO: 855762
uauuaagugaguugcuccu

SEQ ID NO: 855764 - RNA, 19 nt, Artificial Sequence
  Description of Artificial Sequence: Synthetic oligonucleotide
  Sense strand starting at position 995 of SEQ ID NO: 588306
aauucuaagugcucuguga

SEQ ID NO: 855765 - RNA, 19 nt, Artificial Sequence
  Description of Artificial Sequence: Synthetic oligonucleotide
  Antisense strand to SEQ ID NO: 855764
ucacagagcacuuagaauu

SEQ ID NO: 855766 - RNA, 19 nt, Artificial Sequence
  Description of Artificial Sequence: Synthetic oligonucleotide
  Sense strand starting at position 1008 of SEQ ID NO: 588306
cugugaguaccugaccuuu

SEQ ID NO: 855767 - RNA, 19 nt, Artificial Sequence
  Description of Artificial Sequence: Synthetic oligonucleotide
  Antisense strand to SEQ ID NO: 855766
aaaggucagguacucacag

SEQ ID NO: 855768 - RNA, 19 nt, Artificial Sequence
  Description of Artificial Sequence: Synthetic oligonucleotide
  Sense strand starting at position 1010 of SEQ ID NO: 588306
gugaguaccugaccuuuaa

SEQ ID NO: 855769 - RNA, 19 nt, Artificial Sequence
  Description of Artificial Sequence: Synthetic oligonucleotide
  Antisense strand to SEQ ID NO: 855768
uuaaaggucagguacucac

SEQ ID NO: 855770 - RNA, 19 nt, Artificial Sequence
  Description of Artificial Sequence: Synthetic oligonucleotide
  Sense strand starting at position 1051 of SEQ ID NO: 588306
acgggcuuuccggacaagu

SEQ ID NO: 855771 - RNA, 19 nt, Artificial Sequence
  Description of Artificial Sequence: Synthetic oligonucleotide
  Antisense strand to SEQ ID NO: 855770
acuuguccggaaagcccgu

SEQ ID NO: 855772 - RNA, 19 nt, Artificial Sequence
  Description of Artificial Sequence: Synthetic oligonucleotide
  Sense strand starting at position 1061 of SEQ ID NO: 588306
cggacaagucccuggguaa

SEQ ID NO: 855773 - RNA, 19 nt, Artificial Sequence
  Description of Artificial Sequence: Synthetic oligonucleotide
  Antisense strand to SEQ ID NO: 855772
uuacccagggacuuguccg

SEQ ID NO: 855774 - RNA, 19 nt, Artificial Sequence
  Description of Artificial Sequence: Synthetic oligonucleotide
  Sense strand starting at position 1062 of SEQ ID NO: 588306
ggacaagucccuggguaac

SEQ ID NO: 855775 - RNA, 19 nt, Artificial Sequence
  Description of Artificial Sequence: Synthetic oligonucleotide
  Antisense strand to SEQ ID NO: 855774
guuacccagggacuugucc

SEQ ID NO: 855776 - RNA, 19 nt, Artificial Sequence
  Description of Artificial Sequence: Synthetic oligonucleotide
  Sense strand starting at position 1072 of SEQ ID NO: 588306
cuggguaacucacuuauca

SEQ ID NO: 855777 - RNA, 19 nt, Artificial Sequence
  Description of Artificial Sequence: Synthetic oligonucleotide
  Antisense strand to SEQ ID NO: 855776
ugauaagugaguuacccag

SEQ ID NO: 855778 - RNA, 19 nt, Artificial Sequence
  Description of Artificial Sequence: Synthetic oligonucleotide
  Sense strand starting at position 1155 of SEQ ID NO: 588306
caacuaguauggccaugau

SEQ ID NO: 855779 - RNA, 19 nt, Artificial Sequence
  Description of Artificial Sequence: Synthetic oligonucleotide
  Antisense strand to SEQ ID NO: 855778
aucauggccauacuaguug

SEQ ID NO: 855780 - RNA, 19 nt, Artificial Sequence
  Description of Artificial Sequence: Synthetic oligonucleotide
  Sense strand starting at position 1159 of SEQ ID NO: 588306
uaguauggccaugaugcau

SEQ ID NO: 855781 - RNA, 19 nt, Artificial Sequence
  Description of Artificial Sequence: Synthetic oligonucleotide
  Antisense strand to SEQ ID NO: 855780
augcaucauggccauacua

SEQ ID NO: 855782 - RNA, 19 nt, Artificial Sequence
  Description of Artificial Sequence: Synthetic oligonucleotide
  Sense strand starting at position 1464 of SEQ ID NO: 588306
uacuuaggccuugguuuau

SEQ ID NO: 855783 - RNA, 19 nt, Artificial Sequence
  Description of Artificial Sequence: Synthetic oligonucleotide
  Antisense strand to SEQ ID NO: 855782
auaaaccaaggccuaagua

SEQ ID NO: 855784 - RNA, 19 nt, Artificial Sequence
  Description of Artificial Sequence: Synthetic oligonucleotide
  Sense strand starting at position 1468 of SEQ ID NO: 588306
uaggccuugguuuauauau

SEQ ID NO: 855785 - RNA, 19 nt, Artificial Sequence
  Description of Artificial Sequence: Synthetic oligonucleotide
  Antisense strand to SEQ ID NO: 855784
auauauaaaccaaggccua

SEQ ID NO: 855786 - RNA, 19 nt, Artificial Sequence
  Description of Artificial Sequence: Synthetic oligonucleotide
  Sense strand starting at position 2091 of SEQ ID NO: 588306
gugaauacugauuggccga

SEQ ID NO: 855787 - RNA, 19 nt, Artificial Sequence
  Description of Artificial Sequence: Synthetic oligonucleotide
  Antisense strand to SEQ ID NO: 855786
ucggccaaucaguauucac

SEQ ID NO: 855788 - RNA, 19 nt, Artificial Sequence
  Description of Artificial Sequence: Synthetic oligonucleotide
  Sense strand starting at position 2218 of SEQ ID NO: 588306
agaaucuaaacccgaggua

SEQ ID NO: 855789 - RNA, 19 nt, Artificial Sequence
  Description of Artificial Sequence: Synthetic oligonucleotide
  Antisense strand to SEQ ID NO: 855788
uaccucggguuuagauucu

SEQ ID NO: 855790 - RNA, 19 nt, Artificial Sequence
  Description of Artificial Sequence: Synthetic oligonucleotide
  Sense strand starting at position 2221 of SEQ ID NO: 588306
aucuaaacccgagguauga

SEQ ID NO: 855791 - RNA, 19 nt, Artificial Sequence
  Description of Artificial Sequence: Synthetic oligonucleotide
  Antisense strand to SEQ ID NO: 855790
ucauaccucggguuuagau

SEQ ID NO: 855792 - RNA, 19 nt, Artificial Sequence
  Description of Artificial Sequence: Synthetic oligonucleotide
  Sense strand starting at position 2306 of SEQ ID NO: 588306
aggaaugcguuguccacaa

SEQ ID NO: 855793 - RNA, 19 nt, Artificial Sequence
  Description of Artificial Sequence: Synthetic oligonucleotide
  Antisense strand to SEQ ID NO: 855792
uuguggacaacgcauuccu

SEQ ID NO: 855794 - RNA, 19 nt, Artificial Sequence
  Description of Artificial Sequence: Synthetic oligonucleotide
  Sense strand starting at position 2308 of SEQ ID NO: 588306
gaaugcguuguccacaaga

SEQ ID NO: 855795 - RNA, 19 nt, Artificial Sequence
  Description of Artificial Sequence: Synthetic oligonucleotide
  Antisense strand to SEQ ID NO: 855794
ucuuguggacaacgcauuc

SEQ ID NO: 855796 - RNA, 19 nt, Artificial Sequence
  Description of Artificial Sequence: Synthetic oligonucleotide
  Sense strand starting at position 2310 of SEQ ID NO: 588306
augcguuguccacaagaga

SEQ ID NO: 855797 - RNA, 19 nt, Artificial Sequence
  Description of Artificial Sequence: Synthetic oligonucleotide
  Antisense strand to SEQ ID NO: 855796
ucucuuguggacaacgcau

SEQ ID NO: 855798 - RNA, 19 nt, Artificial Sequence
  Description of Artificial Sequence: Synthetic oligonucleotide
  Sense strand starting at position 2330 of SEQ ID NO: 588306
gguaauaaacgacgaggaa

SEQ ID NO: 855799 - RNA, 19 nt, Artificial Sequence
  Description of Artificial Sequence: Synthetic oligonucleotide
  Antisense strand to SEQ ID NO: 855798
uuccucgucguuuauuacc

SEQ ID NO: 855800 - RNA, 19 nt, Artificial Sequence
  Description of Artificial Sequence: Synthetic oligonucleotide
  Sense strand starting at position 2370 of SEQ ID NO: 588306
ggccucuaucagcaucaca

SEQ ID NO: 855801 - RNA, 19 nt, Artificial Sequence
  Description of Artificial Sequence: Synthetic oligonucleotide
  Antisense strand to SEQ ID NO: 855800
ugugaugcugauagaggcc

SEQ ID NO: 855802 - RNA, 19 nt, Artificial Sequence
  Description of Artificial Sequence: Synthetic oligonucleotide
  Sense strand starting at position 2471 of SEQ ID NO: 588306
uucuuucuccugcaagagu

SEQ ID NO: 855803 - RNA, 19 nt, Artificial Sequence
  Description of Artificial Sequence: Synthetic oligonucleotide
  Antisense strand to SEQ ID NO: 855802
acucuugcaggagaaagaa

SEQ ID NO: 855804 - RNA, 19 nt, Artificial Sequence
  Description of Artificial Sequence: Synthetic oligonucleotide
  Sense strand starting at position 2479 of SEQ ID NO: 588306
ccugcaagaguacaucaau

SEQ ID NO: 855805 - RNA, 19 nt, Artificial Sequence
  Description of Artificial Sequence: Synthetic oligonucleotide
  Antisense strand to SEQ ID NO: 855804
auugauguacucuugcagg

SEQ ID NO: 855806 - RNA, 19 nt, Artificial Sequence
  Description of Artificial Sequence: Synthetic oligonucleotide
  Sense strand starting at position 2482 of SEQ ID NO: 588306
gcaagaguacaucaauggu

SEQ ID NO: 855807 - RNA, 19 nt, Artificial Sequence
  Description of Artificial Sequence: Synthetic oligonucleotide
  Antisense strand to SEQ ID NO: 855806
accauugauguacucuugc

SEQ ID NO: 855808 - RNA, 19 nt, Artificial Sequence
  Description of Artificial Sequence: Synthetic oligonucleotide
  Sense strand starting at position 2485 of SEQ ID NO: 588306
agaguacaucaaugguuac

SEQ ID NO: 855809 - RNA, 19 nt, Artificial Sequence
  Description of Artificial Sequence: Synthetic oligonucleotide
  Antisense strand to SEQ ID NO: 855808
guaaccauugauguacucu

SEQ ID NO: 855810 - RNA, 19 nt, Artificial Sequence
  Description of Artificial Sequence: Synthetic oligonucleotide
  Sense strand starting at position 2511 of SEQ ID NO: 588306
cgaaacuccuaguuagcau

SEQ ID NO: 855811 - RNA, 19 nt, Artificial Sequence
  Description of Artificial Sequence: Synthetic oligonucleotide
  Antisense strand to SEQ ID NO: 855810
augcuaacuaggaguuucg

SEQ ID NO: 855812 - RNA, 19 nt, Artificial Sequence
  Description of Artificial Sequence: Synthetic oligonucleotide
  Sense strand starting at position 2528 of SEQ ID NO: 588306
auacaaauagccuguugau

SEQ ID NO: 855813 - RNA, 19 nt, Artificial Sequence
  Description of Artificial Sequence: Synthetic oligonucleotide
  Antisense strand to SEQ ID NO: 855812
aucaacaggcuauuuguau

SEQ ID NO: 855814 - RNA, 19 nt, Artificial Sequence
  Description of Artificial Sequence: Synthetic oligonucleotide
  Sense strand starting at position 2541 of SEQ ID NO: 588306
guugauauuucugugucua

SEQ ID NO: 855815 - RNA, 19 nt, Artificial Sequence
  Description of Artificial Sequence: Synthetic oligonucleotide
  Antisense strand to SEQ ID NO: 855814
uagacacagaaauaucaac

SEQ ID NO: 855816 - RNA, 19 nt, Artificial Sequence
  Description of Artificial Sequence: Synthetic oligonucleotide
  Sense strand starting at position 2543 of SEQ ID NO: 588306
ugauauuucugugucuagu

SEQ ID NO: 855817 - RNA, 19 nt, Artificial Sequence
  Description of Artificial Sequence: Synthetic oligonucleotide
  Antisense strand to SEQ ID NO: 855816
acuagacacagaaauauca

SEQ ID NO: 855818 - RNA, 19 nt, Artificial Sequence
  Description of Artificial Sequence: Synthetic oligonucleotide
  Sense strand starting at position 2625 of SEQ ID NO: 588306
ggccaagucgacuacaagu

SEQ ID NO: 855819 - RNA, 19 nt, Artificial Sequence
  Description of Artificial Sequence: Synthetic oligonucleotide
  Antisense strand to SEQ ID NO: 855818
acuuguagucgacuuggcc

SEQ ID NO: 855820 - RNA, 19 nt, Artificial Sequence
  Description of Artificial Sequence: Synthetic oligonucleotide
  Sense strand starting at position 2695 of SEQ ID NO: 588306
aucagaaaugcaugcuauu

SEQ ID NO: 855821 - RNA, 19 nt, Artificial Sequence
  Description of Artificial Sequence: Synthetic oligonucleotide
  Antisense strand to SEQ ID NO: 855820
aauagcaugcauuucugau

SEQ ID NO: 855822 - RNA, 19 nt, Artificial Sequence
  Description of Artificial Sequence: Synthetic oligonucleotide
  Sense strand starting at position 2805 of SEQ ID NO: 588306
uuuauagacuuucuaacga

SEQ ID NO: 855823 - RNA, 19 nt, Artificial Sequence
  Description of Artificial Sequence: Synthetic oligonucleotide
  Antisense strand to SEQ ID NO: 855822
ucguuagaaagucuauaaa

SEQ ID NO: 855824 - RNA, 19 nt, Artificial Sequence
  Description of Artificial Sequence: Synthetic oligonucleotide
  Sense strand starting at position 2885 of SEQ ID NO: 588306
aggaauuagucuucuaauu

SEQ ID NO: 855825 - RNA, 19 nt, Artificial Sequence
  Description of Artificial Sequence: Synthetic oligonucleotide
  Antisense strand to SEQ ID NO: 855824
aauuagaagacuaauuccu

SEQ ID NO: 855826 - RNA, 19 nt, Artificial Sequence
  Description of Artificial Sequence: Synthetic oligonucleotide
  Sense strand starting at position 2908 of SEQ ID NO: 588306
gcugcauucuauuucuuga

SEQ ID NO: 855827 - RNA, 19 nt, Artificial Sequence
  Description of Artificial Sequence: Synthetic oligonucleotide
  Antisense strand to SEQ ID NO: 855826
ucaagaaauagaaugcagc

SEQ ID NO: 855828 - RNA, 19 nt, Artificial Sequence
  Description of Artificial Sequence: Synthetic oligonucleotide
  Sense strand starting at position 2979 of SEQ ID NO: 588306
agaccucucgaguaggauc

SEQ ID NO: 855829 - RNA, 19 nt, Artificial Sequence
  Description of Artificial Sequence: Synthetic oligonucleotide
  Antisense strand to SEQ ID NO: 855828
gauccuacucgagaggucu

SEQ ID NO: 855830 - RNA, 19 nt, Artificial Sequence
  Description of Artificial Sequence: Synthetic oligonucleotide
  Sense strand starting at position 2986 of SEQ ID NO: 588306
ucgaguaggaucuguuuag

SEQ ID NO: 855831 - RNA, 19 nt, Artificial Sequence
  Description of Artificial Sequence: Synthetic oligonucleotide
  Antisense strand to SEQ ID NO: 855830
cuaaacagauccuacucga

SEQ ID NO: 855832 - RNA, 19 nt, Artificial Sequence
  Description of Artificial Sequence: Synthetic oligonucleotide
  Sense strand starting at position 3021 of SEQ ID NO: 588306
guaucauugcacugaguac

SEQ ID NO: 855833 - RNA, 19 nt, Artificial Sequence
  Description of Artificial Sequence: Synthetic oligonucleotide
  Antisense strand to SEQ ID NO: 855832
guacucagugcaaugauac

SEQ ID NO: 855834 - RNA, 19 nt, Artificial Sequence
  Description of Artificial Sequence: Synthetic oligonucleotide
  Sense strand starting at position 3061 of SEQ ID NO: 588306
uuuguugaagggugggaau

SEQ ID NO: 855835 - RNA, 19 nt, Artificial Sequence
  Description of Artificial Sequence: Synthetic oligonucleotide
  Antisense strand to SEQ ID NO: 855834
auucccacccuucaacaaa

SEQ ID NO: 855836 - RNA, 19 nt, Artificial Sequence
  Description of Artificial Sequence: Synthetic oligonucleotide
  Sense strand starting at position 3072 of SEQ ID NO: 588306
gugggaauuccugacguaa

SEQ ID NO: 855837 - RNA, 19 nt, Artificial Sequence
  Description of Artificial Sequence: Synthetic oligonucleotide
  Antisense strand to SEQ ID NO: 855836
uuacgucaggaauucccac

SEQ ID NO: 855838 - RNA, 19 nt, Artificial Sequence
  Description of Artificial Sequence: Synthetic oligonucleotide
  Sense strand starting at position 3522 of SEQ ID NO: 588306
gcguuuaaauucuugacag

SEQ ID NO: 855839 - RNA, 19 nt, Artificial Sequence
  Description of Artificial Sequence: Synthetic oligonucleotide
  Antisense strand to SEQ ID NO: 855838
cugucaagaauuuaaacgc

SEQ ID NO: 855840 - RNA, 19 nt, Artificial Sequence
  Description of Artificial Sequence: Synthetic oligonucleotide
  Sense strand starting at position 3524 of SEQ ID NO: 588306
guuuaaauucuugacagca

SEQ ID NO: 855841 - RNA, 19 nt, Artificial Sequence
  Description of Artificial Sequence: Synthetic oligonucleotide
  Antisense strand to SEQ ID NO: 855840
ugcugucaagaauuuaaac

SEQ ID NO: 855842 - RNA, 19 nt, Artificial Sequence
  Description of Artificial Sequence: Synthetic oligonucleotide
  Sense strand starting at position 3611 of SEQ ID NO: 588306
cccaguagucucgggaaga

SEQ ID NO: 855843 - RNA, 19 nt, Artificial Sequence
  Description of Artificial Sequence: Synthetic oligonucleotide
  Antisense strand to SEQ ID NO: 855842
ucuucccgagacuacuggg

SEQ ID NO: 855844 - RNA, 19 nt, Artificial Sequence
  Description of Artificial Sequence: Synthetic oligonucleotide
  Sense strand starting at position 987 of SEQ ID NO: 588307
aauucuaagugcucuguga

SEQ ID NO: 855845 - RNA, 19 nt, Artificial Sequence
  Description of Artificial Sequence: Synthetic oligonucleotide
  Antisense strand to SEQ ID NO: 855844
ucacagagcacuuagaauu

SEQ ID NO: 855846 - RNA, 19 nt, Artificial Sequence
  Description of Artificial Sequence: Synthetic oligonucleotide
  Sense strand starting at position 1000 of SEQ ID NO: 588307
cugugaguaccugaccuuu

SEQ ID NO: 855847 - RNA, 19 nt, Artificial Sequence
  Description of Artificial Sequence: Synthetic oligonucleotide
  Antisense strand to SEQ ID NO: 855846
aaaggucagguacucacag

SEQ ID NO: 855848 - RNA, 19 nt, Artificial Sequence
  Description of Artificial Sequence: Synthetic oligonucleotide
  Sense strand starting at position 1002 of SEQ ID NO: 588307
gugaguaccugaccuuuaa

SEQ ID NO: 855849 - RNA, 19 nt, Artificial Sequence
  Description of Artificial Sequence: Synthetic oligonucleotide
  Antisense strand to SEQ ID NO: 855848
uuaaaggucagguacucac

SEQ ID NO: 855850 - RNA, 19 nt, Artificial Sequence
  Description of Artificial Sequence: Synthetic oligonucleotide
  Sense strand starting at position 1043 of SEQ ID NO: 588307
acgggcuuuccggacaagu

SEQ ID NO: 855851 - RNA, 19 nt, Artificial Sequence
  Description of Artificial Sequence: Synthetic oligonucleotide
  Antisense strand to SEQ ID NO: 855850
acuuguccggaaagcccgu

SEQ ID NO: 855852 - RNA, 19 nt, Artificial Sequence
  Description of Artificial Sequence: Synthetic oligonucleotide
  Sense strand starting at position 1053 of SEQ ID NO: 588307
cggacaagucccuggguaa

SEQ ID NO: 855853 - RNA, 19 nt, Artificial Sequence
  Description of Artificial Sequence: Synthetic oligonucleotide
  Antisense strand to SEQ ID NO: 855852
uuacccagggacuuguccg

SEQ ID NO: 855854 - RNA, 19 nt, Artificial Sequence
  Description of Artificial Sequence: Synthetic oligonucleotide
  Sense strand starting at position 1054 of SEQ ID NO: 588307
ggacaagucccuggguaac

SEQ ID NO: 855855 - RNA, 19 nt, Artificial Sequence
  Description of Artificial Sequence: Synthetic oligonucleotide
  Antisense strand to SEQ ID NO: 855854
guuacccagggacuugucc

SEQ ID NO: 855856 - RNA, 19 nt, Artificial Sequence
  Description of Artificial Sequence: Synthetic oligonucleotide
  Sense strand starting at position 1064 of SEQ ID NO: 588307
cuggguaacucacuuauca

SEQ ID NO: 855857 - RNA, 19 nt, Artificial Sequence
  Description of Artificial Sequence: Synthetic oligonucleotide
  Antisense strand to SEQ ID NO: 855856
ugauaagugaguuacccag

SEQ ID NO: 855858 - RNA, 19 nt, Artificial Sequence
  Description of Artificial Sequence: Synthetic oligonucleotide
  Sense strand starting at position 1147 of SEQ ID NO: 588307
caacuaguauggccaugau

SEQ ID NO: 855859 - RNA, 19 nt, Artificial Sequence
  Description of Artificial Sequence: Synthetic oligonucleotide
  Antisense strand to SEQ ID NO: 855858
aucauggccauacuaguug

SEQ ID NO: 855860 - RNA, 19 nt, Artificial Sequence
  Description of Artificial Sequence: Synthetic oligonucleotide
  Sense strand starting at position 1151 of SEQ ID NO: 588307
uaguauggccaugaugcau

SEQ ID NO: 855861 - RNA, 19 nt, Artificial Sequence
  Description of Artificial Sequence: Synthetic oligonucleotide
  Antisense strand to SEQ ID NO: 855860
augcaucauggccauacua

SEQ ID NO: 855862 - RNA, 19 nt, Artificial Sequence
  Description of Artificial Sequence: Synthetic oligonucleotide
  Sense strand starting at position 1456 of SEQ ID NO: 588307
uacuuaggccuugguuuau

SEQ ID NO: 855863 - RNA, 19 nt, Artificial Sequence
  Description of Artificial Sequence: Synthetic oligonucleotide
  Antisense strand to SEQ ID NO: 855862
auaaaccaaggccuaagua

SEQ ID NO: 855864 - RNA, 19 nt, Artificial Sequence
  Description of Artificial Sequence: Synthetic oligonucleotide
  Sense strand starting at position 1460 of SEQ ID NO: 588307
uaggccuugguuuauauau

SEQ ID NO: 855865 - RNA, 19 nt, Artificial Sequence
  Description of Artificial Sequence: Synthetic oligonucleotide
  Antisense strand to SEQ ID NO: 855864
auauauaaaccaaggccua

SEQ ID NO: 855866 - RNA, 19 nt, Artificial Sequence
  Description of Artificial Sequence: Synthetic oligonucleotide
  Sense strand starting at position 2083 of SEQ ID NO: 588307
gugaauacugauuggccga

SEQ ID NO: 855867 - RNA, 19 nt, Artificial Sequence
  Description of Artificial Sequence: Synthetic oligonucleotide
  Antisense strand to SEQ ID NO: 855866
ucggccaaucaguauucac

SEQ ID NO: 855868 - RNA, 19 nt, Artificial Sequence
  Description of Artificial Sequence: Synthetic oligonucleotide
  Sense strand starting at position 2210 of SEQ ID NO: 588307
agaaucuaaacccgaggua

SEQ ID NO: 855869 - RNA, 19 nt, Artificial Sequence
  Description of Artificial Sequence: Synthetic oligonucleotide
  Antisense strand to SEQ ID NO: 855868
uaccucggguuuagauucu

SEQ ID NO: 855870 - RNA, 19 nt, Artificial Sequence
  Description of Artificial Sequence: Synthetic oligonucleotide
  Sense strand starting at position 2213 of SEQ ID NO: 588307
aucuaaacccgagguauga

SEQ ID NO: 855871 - RNA, 19 nt, Artificial Sequence
  Description of Artificial Sequence: Synthetic oligonucleotide
  Antisense strand to SEQ ID NO: 855870
ucauaccucggguuuagau

SEQ ID NO: 855872 - RNA, 19 nt, Artificial Sequence
  Description of Artificial Sequence: Synthetic oligonucleotide
  Sense strand starting at position 2298 of SEQ ID NO: 588307
aggaaugcguuguccacaa

SEQ ID NO: 855873 - RNA, 19 nt, Artificial Sequence
  Description of Artificial Sequence: Synthetic oligonucleotide
  Antisense strand to SEQ ID NO: 855872
uuguggacaacgcauuccu

SEQ ID NO: 855874 - RNA, 19 nt, Artificial Sequence
  Description of Artificial Sequence: Synthetic oligonucleotide
  Sense strand starting at position 2300 of SEQ ID NO: 588307
gaaugcguuguccacaaga

SEQ ID NO: 855875 - RNA, 19 nt, Artificial Sequence
  Description of Artificial Sequence: Synthetic oligonucleotide
  Antisense strand to SEQ ID NO: 855874
ucuuguggacaacgcauuc

SEQ ID NO: 855876 - RNA, 19 nt, Artificial Sequence
  Description of Artificial Sequence: Synthetic oligonucleotide
  Sense strand starting at position 2302 of SEQ ID NO: 588307
augcguuguccacaagaga

SEQ ID NO: 855877 - RNA, 19 nt, Artificial Sequence
  Description of Artificial Sequence: Synthetic oligonucleotide
  Antisense strand to SEQ ID NO: 855876
ucucuuguggacaacgcau

SEQ ID NO: 855878 - RNA, 19 nt, Artificial Sequence
  Description of Artificial Sequence: Synthetic oligonucleotide
  Sense strand starting at position 2322 of SEQ ID NO: 588307
gguaauaaacgacgaggaa

SEQ ID NO: 855879 - RNA, 19 nt, Artificial Sequence
  Description of Artificial Sequence: Synthetic oligonucleotide
  Antisense strand to SEQ ID NO: 855878
uuccucgucguuuauuacc

SEQ ID NO: 855880 - RNA, 19 nt, Artificial Sequence
  Description of Artificial Sequence: Synthetic oligonucleotide
  Sense strand starting at position 2362 of SEQ ID NO: 588307
ggccucuaucagcaucaca

SEQ ID NO: 855881 - RNA, 19 nt, Artificial Sequence
  Description of Artificial Sequence: Synthetic oligonucleotide
  Antisense strand to SEQ ID NO: 855880
ugugaugcugauagaggcc

SEQ ID NO: 855882 - RNA, 19 nt, Artificial Sequence
  Description of Artificial Sequence: Synthetic oligonucleotide
  Sense strand starting at position 2463 of SEQ ID NO: 588307
uucuuucuccugcaagagu

SEQ ID NO: 855883 - RNA, 19 nt, Artificial Sequence
  Description of Artificial Sequence: Synthetic oligonucleotide
  Antisense strand to SEQ ID NO: 855882
acucuugcaggagaaagaa

SEQ ID NO: 855884 - RNA, 19 nt, Artificial Sequence
  Description of Artificial Sequence: Synthetic oligonucleotide
  Sense strand starting at position 2471 of SEQ ID NO: 588307
ccugcaagaguacaucaau

SEQ ID NO: 855885 - RNA, 19 nt, Artificial Sequence
  Description of Artificial Sequence: Synthetic oligonucleotide
  Antisense strand to SEQ ID NO: 855884
auugauguacucuugcagg

SEQ ID NO: 855886 - RNA, 19 nt, Artificial Sequence
  Description of Artificial Sequence: Synthetic oligonucleotide
  Sense strand starting at position 2474 of SEQ ID NO: 588307
gcaagaguacaucaauggu

SEQ ID NO: 855887 - RNA, 19 nt, Artificial Sequence
  Description of Artificial Sequence: Synthetic oligonucleotide
  Antisense strand to SEQ ID NO: 855886
accauugauguacucuugc

SEQ ID NO: 855888 - RNA, 19 nt, Artificial Sequence
  Description of Artificial Sequence: Synthetic oligonucleotide
  Sense strand starting at position 2477 of SEQ ID NO: 588307
agaguacaucaaugguuac

SEQ ID NO: 855889 - RNA, 19 nt, Artificial Sequence
  Description of Artificial Sequence: Synthetic oligonucleotide
  Antisense strand to SEQ ID NO: 855888
guaaccauugauguacucu

SEQ ID NO: 855890 - RNA, 19 nt, Artificial Sequence
  Description of Artificial Sequence: Synthetic oligonucleotide
  Sense strand starting at position 2503 of SEQ ID NO: 588307
cgaaacuccuaguuagcau

SEQ ID NO: 855891 - RNA, 19 nt, Artificial Sequence
  Description of Artificial Sequence: Synthetic oligonucleotide
  Antisense strand to SEQ ID NO: 855890
augcuaacuaggaguuucg

SEQ ID NO: 855892 - RNA, 19 nt, Artificial Sequence
  Description of Artificial Sequence: Synthetic oligonucleotide
  Sense strand starting at position 2520 of SEQ ID NO: 588307
auacaaauagccuguugau

SEQ ID NO: 855893 - RNA, 19 nt, Artificial Sequence
  Description of Artificial Sequence: Synthetic oligonucleotide
  Antisense strand to SEQ ID NO: 855892
aucaacaggcuauuuguau

SEQ ID NO: 855894 - RNA, 19 nt, Artificial Sequence
  Description of Artificial Sequence: Synthetic oligonucleotide
  Sense strand starting at position 2533 of SEQ ID NO: 588307
guugauauuucugugucua

SEQ ID NO: 855895 - RNA, 19 nt, Artificial Sequence
  Description of Artificial Sequence: Synthetic oligonucleotide
  Antisense strand to SEQ ID NO: 855894
uagacacagaaauaucaac

SEQ ID NO: 855896 - RNA, 19 nt, Artificial Sequence
  Description of Artificial Sequence: Synthetic oligonucleotide
  Sense strand starting at position 2535 of SEQ ID NO: 588307
ugauauuucugugucuagu

SEQ ID NO: 855897 - RNA, 19 nt, Artificial Sequence
  Description of Artificial Sequence: Synthetic oligonucleotide
  Antisense strand to SEQ ID NO: 855896
acuagacacagaaauauca

SEQ ID NO: 855898 - RNA, 19 nt, Artificial Sequence
  Description of Artificial Sequence: Synthetic oligonucleotide
  Sense strand starting at position 2617 of SEQ ID NO: 588307
ggccaagucgacuacaagu

SEQ ID NO: 855899 - RNA, 19 nt, Artificial Sequence
  Description of Artificial Sequence: Synthetic oligonucleotide
  Antisense strand to SEQ ID NO: 855898
acuuguagucgacuuggcc

SEQ ID NO: 855900 - RNA, 19 nt, Artificial Sequence
  Description of Artificial Sequence: Synthetic oligonucleotide
  Sense strand starting at position 2687 of SEQ ID NO: 588307
aucagaaaugcaugcuauu

SEQ ID NO: 855901 - RNA, 19 nt, Artificial Sequence
  Description of Artificial Sequence: Synthetic oligonucleotide
  Antisense strand to SEQ ID NO: 855900
aauagcaugcauuucugau

SEQ ID NO: 855902 - RNA, 19 nt, Artificial Sequence
  Description of Artificial Sequence: Synthetic oligonucleotide
  Sense strand starting at position 2797 of SEQ ID NO: 588307
uuuauagacuuucuaacga

SEQ ID NO: 855903 - RNA, 19 nt, Artificial Sequence
  Description of Artificial Sequence: Synthetic oligonucleotide
  Antisense strand to SEQ ID NO: 855902
ucguuagaaagucuauaaa

SEQ ID NO: 855904 - RNA, 19 nt, Artificial Sequence
  Description of Artificial Sequence: Synthetic oligonucleotide
  Sense strand starting at position 2877 of SEQ ID NO: 588307
aggaauuagucuucuaauu

SEQ ID NO: 855905 - RNA, 19 nt, Artificial Sequence
  Description of Artificial Sequence: Synthetic oligonucleotide
  Antisense strand to SEQ ID NO: 855904
aauuagaagacuaauuccu

SEQ ID NO: 855906 - RNA, 19 nt, Artificial Sequence
  Description of Artificial Sequence: Synthetic oligonucleotide
  Sense strand starting at position 2900 of SEQ ID NO: 588307
gcugcauucuauuucuuga

SEQ ID NO: 855907 - RNA, 19 nt, Artificial Sequence
  Description of Artificial Sequence: Synthetic oligonucleotide
  Antisense strand to SEQ ID NO: 855906
ucaagaaauagaaugcagc

SEQ ID NO: 855908 - RNA, 19 nt, Artificial Sequence
  Description of Artificial Sequence: Synthetic oligonucleotide
  Sense strand starting at position 2971 of SEQ ID NO: 588307
agaccucucgaguaggauc

SEQ ID NO: 855909 - RNA, 19 nt, Artificial Sequence
  Description of Artificial Sequence: Synthetic oligonucleotide
  Antisense strand to SEQ ID NO: 855908
gauccuacucgagaggucu

SEQ ID NO: 855910 - RNA, 19 nt, Artificial Sequence
  Description of Artificial Sequence: Synthetic oligonucleotide
  Sense strand starting at position 2978 of SEQ ID NO: 588307
ucgaguaggaucuguuuag

SEQ ID NO: 855911 - RNA, 19 nt, Artificial Sequence
  Description of Artificial Sequence: Synthetic oligonucleotide
  Antisense strand to SEQ ID NO: 855910
cuaaacagauccuacucga

SEQ ID NO: 855912 - RNA, 19 nt, Artificial Sequence
  Description of Artificial Sequence: Synthetic oligonucleotide
  Sense strand starting at position 3013 of SEQ ID NO: 588307
guaucauugcacugaguac

SEQ ID NO: 855913 - RNA, 19 nt, Artificial Sequence
  Description of Artificial Sequence: Synthetic oligonucleotide
  Antisense strand to SEQ ID NO: 855912
guacucagugcaaugauac

SEQ ID NO: 855914 - RNA, 19 nt, Artificial Sequence
  Description of Artificial Sequence: Synthetic oligonucleotide
  Sense strand starting at position 3053 of SEQ ID NO: 588307
uuuguugaagggugggaau

SEQ ID NO: 855915 - RNA, 19 nt, Artificial Sequence
  Description of Artificial Sequence: Synthetic oligonucleotide
  Antisense strand to SEQ ID NO: 855914
auucccacccuucaacaaa

SEQ ID NO: 855916 - RNA, 19 nt, Artificial Sequence
  Description of Artificial Sequence: Synthetic oligonucleotide
  Sense strand starting at position 3064 of SEQ ID NO: 588307
gugggaauuccugacguaa

SEQ ID NO: 855917 - RNA, 19 nt, Artificial Sequence
  Description of Artificial Sequence: Synthetic oligonucleotide
  Antisense strand to SEQ ID NO: 855916
uuacgucaggaauucccac

SEQ ID NO: 855918 - RNA, 19 nt, Artificial Sequence
  Description of Artificial Sequence: Synthetic oligonucleotide
  Sense strand starting at position 3514 of SEQ ID NO: 588307
gcguuuaaauucuugacag

SEQ ID NO: 855919 - RNA, 19 nt, Artificial Sequence
  Description of Artificial Sequence: Synthetic oligonucleotide
  Antisense strand to SEQ ID NO: 855918
cugucaagaauuuaaacgc

SEQ ID NO: 855920 - RNA, 19 nt, Artificial Sequence
  Description of Artificial Sequence: Synthetic oligonucleotide
  Sense strand starting at position 3516 of SEQ ID NO: 588307
guuuaaauucuugacagca

SEQ ID NO: 855921 - RNA, 19 nt, Artificial Sequence
  Description of Artificial Sequence: Synthetic oligonucleotide
  Antisense strand to SEQ ID NO: 855920
ugcugucaagaauuuaaac

SEQ ID NO: 855922 - RNA, 19 nt, Artificial Sequence
  Description of Artificial Sequence: Synthetic oligonucleotide
  Sense strand starting at position 3603 of SEQ ID NO: 588307
cccaguagucucgggaaga

SEQ ID NO: 855923 - RNA, 19 nt, Artificial Sequence
  Description of Artificial Sequence: Synthetic oligonucleotide
  Antisense strand to SEQ ID NO: 855922
ucuucccgagacuacuggg

SEQ ID NO: 855924 - RNA, 19 nt, Artificial Sequence
  Description of Artificial Sequence: Synthetic oligonucleotide
  Sense strand starting at position 1261 of SEQ ID NO: 588308
aauucuaagugcucuguga

SEQ ID NO: 855925 - RNA, 19 nt, Artificial Sequence
  Description of Artificial Sequence: Synthetic oligonucleotide
  Antisense strand to SEQ ID NO: 855924
ucacagagcacuuagaauu

SEQ ID NO: 855926 - RNA, 19 nt, Artificial Sequence
  Description of Artificial Sequence: Synthetic oligonucleotide
  Sense strand starting at position 1274 of SEQ ID NO: 588308
cugugaguaccugaccuuu

SEQ ID NO: 855927 - RNA, 19 nt, Artificial Sequence
  Description of Artificial Sequence: Synthetic oligonucleotide
  Antisense strand to SEQ ID NO: 855926
aaaggucagguacucacag

SEQ ID NO: 855928 - RNA, 19 nt, Artificial Sequence
  Description of Artificial Sequence: Synthetic oligonucleotide
  Sense strand starting at position 1276 of SEQ ID NO: 588308
gugaguaccugaccuuuaa

SEQ ID NO: 855929 - RNA, 19 nt, Artificial Sequence
  Description of Artificial Sequence: Synthetic oligonucleotide
  Antisense strand to SEQ ID NO: 855928
uuaaaggucagguacucac

SEQ ID NO: 855930 - RNA, 19 nt, Artificial Sequence
  Description of Artificial Sequence: Synthetic oligonucleotide
  Sense strand starting at position 1317 of SEQ ID NO: 588308
acgggcuuuccggacaagu

SEQ ID NO: 855931 - RNA, 19 nt, Artificial Sequence
  Description of Artificial Sequence: Synthetic oligonucleotide
  Antisense strand to SEQ ID NO: 855930
acuuguccggaaagcccgu

SEQ ID NO: 855932 - RNA, 19 nt, Artificial Sequence
  Description of Artificial Sequence: Synthetic oligonucleotide
  Sense strand starting at position 1327 of SEQ ID NO: 588308
cggacaagucccuggguaa

SEQ ID NO: 855933 - RNA, 19 nt, Artificial Sequence
  Description of Artificial Sequence: Synthetic oligonucleotide
  Antisense strand to SEQ ID NO: 855932
uuacccagggacuuguccg

SEQ ID NO: 855934 - RNA, 19 nt, Artificial Sequence
  Description of Artificial Sequence: Synthetic oligonucleotide
  Sense strand starting at position 1328 of SEQ ID NO: 588308
ggacaagucccuggguaac

SEQ ID NO: 855935 - RNA, 19 nt, Artificial Sequence
  Description of Artificial Sequence: Synthetic oligonucleotide
  Antisense strand to SEQ ID NO: 855934
guuacccagggacuugucc

SEQ ID NO: 855936 - RNA, 19 nt, Artificial Sequence
  Description of Artificial Sequence: Synthetic oligonucleotide
  Sense strand starting at position 1338 of SEQ ID NO: 588308
cuggguaacucacuuauca

SEQ ID NO: 855937 - RNA, 19 nt, Artificial Sequence
  Description of Artificial Sequence: Synthetic oligonucleotide
  Antisense strand to SEQ ID NO: 855936
ugauaagugaguuacccag

SEQ ID NO: 855938 - RNA, 19 nt, Artificial Sequence
  Description of Artificial Sequence: Synthetic oligonucleotide
  Sense strand starting at position 1421 of SEQ ID NO: 588308
caacuaguauggccaugau

SEQ ID NO: 855939 - RNA, 19 nt, Artificial Sequence
  Description of Artificial Sequence: Synthetic oligonucleotide
  Antisense strand to SEQ ID NO: 855938
aucauggccauacuaguug

SEQ ID NO: 855940 - RNA, 19 nt, Artificial Sequence
  Description of Artificial Sequence: Synthetic oligonucleotide
  Sense strand starting at position 1425 of SEQ ID NO: 588308
uaguauggccaugaugcau

SEQ ID NO: 855941 - RNA, 19 nt, Artificial Sequence
  Description of Artificial Sequence: Synthetic oligonucleotide
  Antisense strand to SEQ ID NO: 855940
augcaucauggccauacua

SEQ ID NO: 855942 - RNA, 19 nt, Artificial Sequence
  Description of Artificial Sequence: Synthetic oligonucleotide
  Sense strand starting at position 1730 of SEQ ID NO: 588308
uacuuaggccuugguuuau

SEQ ID NO: 855943 - RNA, 19 nt, Artificial Sequence
  Description of Artificial Sequence: Synthetic oligonucleotide
  Antisense strand to SEQ ID NO: 855942
auaaaccaaggccuaagua

SEQ ID NO: 855944 - RNA, 19 nt, Artificial Sequence
  Description of Artificial Sequence: Synthetic oligonucleotide
  Sense strand starting at position 1734 of SEQ ID NO: 588308
uaggccuugguuuauauau

SEQ ID NO: 855945 - RNA, 19 nt, Artificial Sequence
  Description of Artificial Sequence: Synthetic oligonucleotide
  Antisense strand to SEQ ID NO: 855944
auauauaaaccaaggccua

SEQ ID NO: 855946 - RNA, 19 nt, Artificial Sequence
  Description of Artificial Sequence: Synthetic oligonucleotide
  Sense strand starting at position 2357 of SEQ ID NO: 588308
gugaauacugauuggccga

SEQ ID NO: 855947 - RNA, 19 nt, Artificial Sequence
  Description of Artificial Sequence: Synthetic oligonucleotide
  Antisense strand to SEQ ID NO: 855946
ucggccaaucaguauucac

SEQ ID NO: 855948 - RNA, 19 nt, Artificial Sequence
  Description of Artificial Sequence: Synthetic oligonucleotide
  Sense strand starting at position 2484 of SEQ ID NO: 588308
agaaucuaaacccgaggua

SEQ ID NO: 855949 - RNA, 19 nt, Artificial Sequence
  Description of Artificial Sequence: Synthetic oligonucleotide
  Antisense strand to SEQ ID NO: 855948
uaccucggguuuagauucu

SEQ ID NO: 855950 - RNA, 19 nt, Artificial Sequence
  Description of Artificial Sequence: Synthetic oligonucleotide
  Sense strand starting at position 2487 of SEQ ID NO: 588308
aucuaaacccgagguauga

SEQ ID NO: 855951 - RNA, 19 nt, Artificial Sequence
  Description of Artificial Sequence: Synthetic oligonucleotide
  Antisense strand to SEQ ID NO: 855950
ucauaccucggguuuagau

SEQ ID NO: 855952 - RNA, 19 nt, Artificial Sequence
  Description of Artificial Sequence: Synthetic oligonucleotide
  Sense strand starting at position 2572 of SEQ ID NO: 588308
aggaaugcguuguccacaa

SEQ ID NO: 855953 - RNA, 19 nt, Artificial Sequence
  Description of Artificial Sequence: Synthetic oligonucleotide
  Antisense strand to SEQ ID NO: 855952
uuguggacaacgcauuccu

SEQ ID NO: 855954 - RNA, 19 nt, Artificial Sequence
  Description of Artificial Sequence: Synthetic oligonucleotide
  Sense strand starting at position 2574 of SEQ ID NO: 588308
gaaugcguuguccacaaga

SEQ ID NO: 855955 - RNA, 19 nt, Artificial Sequence
  Description of Artificial Sequence: Synthetic oligonucleotide
  Antisense strand to SEQ ID NO: 855954
ucuuguggacaacgcauuc

SEQ ID NO: 855956 - RNA, 19 nt, Artificial Sequence
  Description of Artificial Sequence: Synthetic oligonucleotide
  Sense strand starting at position 2576 of SEQ ID NO: 588308
augcguuguccacaagaga

SEQ ID NO: 855957 - RNA, 19 nt, Artificial Sequence
  Description of Artificial Sequence: Synthetic oligonucleotide
  Antisense strand to SEQ ID NO: 855956
ucucuuguggacaacgcau

SEQ ID NO: 855958 - RNA, 19 nt, Artificial Sequence
  Description of Artificial Sequence: Synthetic oligonucleotide
  Sense strand starting at position 2596 of SEQ ID NO: 588308
gguaauaaacgacgaggaa

SEQ ID NO: 855959 - RNA, 19 nt, Artificial Sequence
  Description of Artificial Sequence: Synthetic oligonucleotide
  Antisense strand to SEQ ID NO: 855958
uuccucgucguuuauuacc

SEQ ID NO: 855960 - RNA, 19 nt, Artificial Sequence
  Description of Artificial Sequence: Synthetic oligonucleotide
  Sense strand starting at position 2636 of SEQ ID NO: 588308
ggccucuaucagcaucaca

SEQ ID NO: 855961 - RNA, 19 nt, Artificial Sequence
  Description of Artificial Sequence: Synthetic oligonucleotide
  Antisense strand to SEQ ID NO: 855960
ugugaugcugauagaggcc

SEQ ID NO: 855962 - RNA, 19 nt, Artificial Sequence
  Description of Artificial Sequence: Synthetic oligonucleotide
  Sense strand starting at position 2737 of SEQ ID NO: 588308
uucuuucuccugcaagagu

SEQ ID NO: 855963 - RNA, 19 nt, Artificial Sequence
  Description of Artificial Sequence: Synthetic oligonucleotide
  Antisense strand to SEQ ID NO: 855962
acucuugcaggagaaagaa

SEQ ID NO: 855964 - RNA, 19 nt, Artificial Sequence
  Description of Artificial Sequence: Synthetic oligonucleotide
  Sense strand starting at position 2745 of SEQ ID NO: 588308
ccugcaagaguacaucaau

SEQ ID NO: 855965 - RNA, 19 nt, Artificial Sequence
  Description of Artificial Sequence: Synthetic oligonucleotide
  Antisense strand to SEQ ID NO: 855964
auugauguacucuugcagg

SEQ ID NO: 855966 - RNA, 19 nt, Artificial Sequence
  Description of Artificial Sequence: Synthetic oligonucleotide
  Sense strand starting at position 2748 of SEQ ID NO: 588308
gcaagaguacaucaauggu

SEQ ID NO: 855967 - RNA, 19 nt, Artificial Sequence
  Description of Artificial Sequence: Synthetic oligonucleotide
  Antisense strand to SEQ ID NO: 855966
accauugauguacucuugc

SEQ ID NO: 855968 - RNA, 19 nt, Artificial Sequence
  Description of Artificial Sequence: Synthetic oligonucleotide
  Sense strand starting at position 2751 of SEQ ID NO: 588308
agaguacaucaaugguuac

SEQ ID NO: 855969 - RNA, 19 nt, Artificial Sequence
  Description of Artificial Sequence: Synthetic oligonucleotide
  Antisense strand to SEQ ID NO: 855968
guaaccauugauguacucu

SEQ ID NO: 855970 - RNA, 19 nt, Artificial Sequence
  Description of Artificial Sequence: Synthetic oligonucleotide
  Sense strand starting at position 2777 of SEQ ID NO: 588308
cgaaacuccuaguuagcau

SEQ ID NO: 855971 - RNA, 19 nt, Artificial Sequence
  Description of Artificial Sequence: Synthetic oligonucleotide
  Antisense strand to SEQ ID NO: 855970
augcuaacuaggaguuucg

SEQ ID NO: 855972 - RNA, 19 nt, Artificial Sequence
  Description of Artificial Sequence: Synthetic oligonucleotide
  Sense strand starting at position 2794 of SEQ ID NO: 588308
auacaaauagccuguugau

SEQ ID NO: 855973 - RNA, 19 nt, Artificial Sequence
  Description of Artificial Sequence: Synthetic oligonucleotide
  Antisense strand to SEQ ID NO: 855972
aucaacaggcuauuuguau

SEQ ID NO: 855974 - RNA, 19 nt, Artificial Sequence
  Description of Artificial Sequence: Synthetic oligonucleotide
  Sense strand starting at position 2807 of SEQ ID NO: 588308
guugauauuucugugucua

SEQ ID NO: 855975 - RNA, 19 nt, Artificial Sequence
  Description of Artificial Sequence: Synthetic oligonucleotide
  Antisense strand to SEQ ID NO: 855974
uagacacagaaauaucaac

SEQ ID NO: 855976 - RNA, 19 nt, Artificial Sequence
  Description of Artificial Sequence: Synthetic oligonucleotide
  Sense strand starting at position 2809 of SEQ ID NO: 588308
ugauauuucugugucuagu

SEQ ID NO: 855977 - RNA, 19 nt, Artificial Sequence
  Description of Artificial Sequence: Synthetic oligonucleotide
  Antisense strand to SEQ ID NO: 855976
acuagacacagaaauauca

SEQ ID NO: 855978 - RNA, 19 nt, Artificial Sequence
  Description of Artificial Sequence: Synthetic oligonucleotide
  Sense strand starting at position 2891 of SEQ ID NO: 588308
ggccaagucgacuacaagu

SEQ ID NO: 855979 - RNA, 19 nt, Artificial Sequence
  Description of Artificial Sequence: Synthetic oligonucleotide
  Antisense strand to SEQ ID NO: 855978
acuuguagucgacuuggcc

SEQ ID NO: 855980 - RNA, 19 nt, Artificial Sequence
  Description of Artificial Sequence: Synthetic oligonucleotide
  Sense strand starting at position 2961 of SEQ ID NO: 588308
aucagaaaugcaugcuauu

SEQ ID NO: 855981 - RNA, 19 nt, Artificial Sequence
  Description of Artificial Sequence: Synthetic oligonucleotide
  Antisense strand to SEQ ID NO: 855980
aauagcaugcauuucugau

SEQ ID NO: 855982 - RNA, 19 nt, Artificial Sequence
  Description of Artificial Sequence: Synthetic oligonucleotide
  Sense strand starting at position 3071 of SEQ ID NO: 588308
uuuauagacuuucuaacga

SEQ ID NO: 855983 - RNA, 19 nt, Artificial Sequence
  Description of Artificial Sequence: Synthetic oligonucleotide
  Antisense strand to SEQ ID NO: 855982
ucguuagaaagucuauaaa

SEQ ID NO: 855984 - RNA, 19 nt, Artificial Sequence
  Description of Artificial Sequence: Synthetic oligonucleotide
  Sense strand starting at position 3151 of SEQ ID NO: 588308
aggaauuagucuucuaauu

SEQ ID NO: 855985 - RNA, 19 nt, Artificial Sequence
  Description of Artificial Sequence: Synthetic oligonucleotide
  Antisense strand to SEQ ID NO: 855984
aauuagaagacuaauuccu

SEQ ID NO: 855986 - RNA, 19 nt, Artificial Sequence
  Description of Artificial Sequence: Synthetic oligonucleotide
  Sense strand starting at position 3174 of SEQ ID NO: 588308
gcugcauucuauuucuuga

SEQ ID NO: 855987 - RNA, 19 nt, Artificial Sequence
  Description of Artificial Sequence: Synthetic oligonucleotide
  Antisense strand to SEQ ID NO: 855986
ucaagaaauagaaugcagc

SEQ ID NO: 855988 - RNA, 19 nt, Artificial Sequence
  Description of Artificial Sequence: Synthetic oligonucleotide
  Sense strand starting at position 3245 of SEQ ID NO: 588308
agaccucucgaguaggauc

SEQ ID NO: 855989 - RNA, 19 nt, Artificial Sequence
  Description of Artificial Sequence: Synthetic oligonucleotide
  Antisense strand to SEQ ID NO: 855988
gauccuacucgagaggucu

SEQ ID NO: 855990 - RNA, 19 nt, Artificial Sequence
  Description of Artificial Sequence: Synthetic oligonucleotide
  Sense strand starting at position 3252 of SEQ ID NO: 588308
ucgaguaggaucuguuuag

SEQ ID NO: 855991 - RNA, 19 nt, Artificial Sequence
  Description of Artificial Sequence: Synthetic oligonucleotide
  Antisense strand to SEQ ID NO: 855990
cuaaacagauccuacucga

SEQ ID NO: 855992 - RNA, 19 nt, Artificial Sequence
  Description of Artificial Sequence: Synthetic oligonucleotide
  Sense strand starting at position 3287 of SEQ ID NO: 588308
guaucauugcacugaguac

SEQ ID NO: 855993 - RNA, 19 nt, Artificial Sequence
  Description of Artificial Sequence: Synthetic oligonucleotide
  Antisense strand to SEQ ID NO: 855992
guacucagugcaaugauac

SEQ ID NO: 855994 - RNA, 19 nt, Artificial Sequence
  Description of Artificial Sequence: Synthetic oligonucleotide
  Sense strand starting at position 3327 of SEQ ID NO: 588308
uuuguugaagggugggaau

SEQ ID NO: 855995 - RNA, 19 nt, Artificial Sequence
  Description of Artificial Sequence: Synthetic oligonucleotide
  Antisense strand to SEQ ID NO: 855994
auucccacccuucaacaaa

SEQ ID NO: 855996 - RNA, 19 nt, Artificial Sequence
  Description of Artificial Sequence: Synthetic oligonucleotide
  Sense strand starting at position 3338 of SEQ ID NO: 588308
gugggaauuccugacguaa

SEQ ID NO: 855997 - RNA, 19 nt, Artificial Sequence
  Description of Artificial Sequence: Synthetic oligonucleotide
  Antisense strand to SEQ ID NO: 855996
uuacgucaggaauucccac

SEQ ID NO: 855998 - RNA, 19 nt, Artificial Sequence
  Description of Artificial Sequence: Synthetic oligonucleotide
  Sense strand starting at position 3788 of SEQ ID NO: 588308
gcguuuaaauucuugacag

SEQ ID NO: 855999 - RNA, 19 nt, Artificial Sequence
  Description of Artificial Sequence: Synthetic oligonucleotide
  Antisense strand to SEQ ID NO: 855998
cugucaagaauuuaaacgc

SEQ ID NO: 856000 - RNA, 19 nt, Artificial Sequence
  Description of Artificial Sequence: Synthetic oligonucleotide
  Sense strand starting at position 3790 of SEQ ID NO: 588308
guuuaaauucuugacagca

SEQ ID NO: 856001 - RNA, 19 nt, Artificial Sequence
  Description of Artificial Sequence: Synthetic oligonucleotide
  Antisense strand to SEQ ID NO: 856000
ugcugucaagaauuuaaac

SEQ ID NO: 856002 - RNA, 19 nt, Artificial Sequence
  Description of Artificial Sequence: Synthetic oligonucleotide
  Sense strand starting at position 3877 of SEQ ID NO: 588308
cccaguagucucgggaaga

SEQ ID NO: 856003 - RNA, 19 nt, Artificial Sequence
  Description of Artificial Sequence: Synthetic oligonucleotide
  Antisense strand to SEQ ID NO: 856002
ucuucccgagacuacuggg

SEQ ID NO: 856004 - RNA, 19 nt, Artificial Sequence
  Description of Artificial Sequence: Synthetic oligonucleotide
  Sense strand starting at position 55 of SEQ ID NO: 588309
ccucuucgucugugacaaa

SEQ ID NO: 856005 - RNA, 19 nt, Artificial Sequence
  Description of Artificial Sequence: Synthetic oligonucleotide
  Antisense strand to SEQ ID NO: 856004
uuugucacagacgaagagg

SEQ ID NO: 856006 - RNA, 19 nt, Artificial Sequence
  Description of Artificial Sequence: Synthetic oligonucleotide
  Sense strand starting at position 108 of SEQ ID NO: 588309
gagacaacuggcgaucauu

SEQ ID NO: 856007 - RNA, 19 nt, Artificial Sequence
  Description of Artificial Sequence: Synthetic oligonucleotide
  Antisense strand to SEQ ID NO: 856006
aaugaucgccaguugucuc

SEQ ID NO: 856008 - RNA, 19 nt, Artificial Sequence
  Description of Artificial Sequence: Synthetic oligonucleotide
  Sense strand starting at position 117 of SEQ ID NO: 588309
ggcgaucauuucugagaaa

SEQ ID NO: 856009 - RNA, 19 nt, Artificial Sequence
  Description of Artificial Sequence: Synthetic oligonucleotide
  Antisense strand to SEQ ID NO: 856008
uuucucagaaaugaucgcc

SEQ ID NO: 856010 - RNA, 19 nt, Artificial Sequence
  Description of Artificial Sequence: Synthetic oligonucleotide
  Sense strand starting at position 118 of SEQ ID NO: 588309
gcgaucauuucugagaaac

SEQ ID NO: 856011 - RNA, 19 nt, Artificial Sequence
  Description of Artificial Sequence: Synthetic oligonucleotide
  Antisense strand to SEQ ID NO: 856010
guuucucagaaaugaucgc

SEQ ID NO: 856012 - RNA, 19 nt, Artificial Sequence
  Description of Artificial Sequence: Synthetic oligonucleotide
  Sense strand starting at position 120 of SEQ ID NO: 588309
gaucauuucugagaaacgu

SEQ ID NO: 856013 - RNA, 19 nt, Artificial Sequence
  Description of Artificial Sequence: Synthetic oligonucleotide
  Antisense strand to SEQ ID NO: 856012
acguuucucagaaaugauc

SEQ ID NO: 856014 - RNA, 19 nt, Artificial Sequence
  Description of Artificial Sequence: Synthetic oligonucleotide
  Sense strand starting at position 138 of SEQ ID NO: 588309
uuuauaugcuaacuuggau

SEQ ID NO: 856015 - RNA, 19 nt, Artificial Sequence
  Description of Artificial Sequence: Synthetic oligonucleotide
  Antisense strand to SEQ ID NO: 856014
auccaaguuagcauauaaa

SEQ ID NO: 856016 - RNA, 19 nt, Artificial Sequence
  Description of Artificial Sequence: Synthetic oligonucleotide
  Sense strand starting at position 141 of SEQ ID NO: 588309
auaugcuaacuuggauuaa

SEQ ID NO: 856017 - RNA, 19 nt, Artificial Sequence
  Description of Artificial Sequence: Synthetic oligonucleotide
  Antisense strand to SEQ ID NO: 856016
uuaauccaaguuagcauau

SEQ ID NO: 856018 - RNA, 19 nt, Artificial Sequence
  Description of Artificial Sequence: Synthetic oligonucleotide
  Sense strand starting at position 300 of SEQ ID NO: 588309
cccguugacucaccaugaa

SEQ ID NO: 856019 - RNA, 19 nt, Artificial Sequence
  Description of Artificial Sequence: Synthetic oligonucleotide
  Antisense strand to SEQ ID NO: 856018
uucauggugagucaacggg

SEQ ID NO: 856020 - RNA, 19 nt, Artificial Sequence
  Description of Artificial Sequence: Synthetic oligonucleotide
  Sense strand starting at position 303 of SEQ ID NO: 588309
guugacucaccaugaaaca

SEQ ID NO: 856021 - RNA, 19 nt, Artificial Sequence
  Description of Artificial Sequence: Synthetic oligonucleotide
  Antisense strand to SEQ ID NO: 856020
uguuucauggugagucaac

SEQ ID NO: 856022 - RNA, 19 nt, Artificial Sequence
  Description of Artificial Sequence: Synthetic oligonucleotide
  Sense strand starting at position 380 of SEQ ID NO: 588309
cugaaagccuuucuccgaa

SEQ ID NO: 856023 - RNA, 19 nt, Artificial Sequence
  Description of Artificial Sequence: Synthetic oligonucleotide
  Antisense strand to SEQ ID NO: 856022
uucggagaaaggcuuucag

SEQ ID NO: 856024 - RNA, 19 nt, Artificial Sequence
  Description of Artificial Sequence: Synthetic oligonucleotide
  Sense strand starting at position 527 of SEQ ID NO: 588309
ggcuguguuccuuugcaca

SEQ ID NO: 856025 - RNA, 19 nt, Artificial Sequence
  Description of Artificial Sequence: Synthetic oligonucleotide
  Antisense strand to SEQ ID NO: 856024
ugugcaaaggaacacagcc

SEQ ID NO: 856026 - RNA, 19 nt, Artificial Sequence
  Description of Artificial Sequence: Synthetic oligonucleotide
  Sense strand starting at position 609 of SEQ ID NO: 588309
gcucuugagcugggcagaa

SEQ ID NO: 856027 - RNA, 19 nt, Artificial Sequence
  Description of Artificial Sequence: Synthetic oligonucleotide
  Antisense strand to SEQ ID NO: 856026
uucugcccagcucaagagc

SEQ ID NO: 856028 - RNA, 19 nt, Artificial Sequence
  Description of Artificial Sequence: Synthetic oligonucleotide
  Sense strand starting at position 819 of SEQ ID NO: 588309
gaauucugggcgcaucaga

SEQ ID NO: 856029 - RNA, 19 nt, Artificial Sequence
  Description of Artificial Sequence: Synthetic oligonucleotide
  Antisense strand to SEQ ID NO: 856028
ucugaugcgcccagaauuc

SEQ ID NO: 856030 - RNA, 19 nt, Artificial Sequence
  Description of Artificial Sequence: Synthetic oligonucleotide
  Sense strand starting at position 957 of SEQ ID NO: 588309
gguucugagaguuggauac

SEQ ID NO: 856031 - RNA, 19 nt, Artificial Sequence
  Description of Artificial Sequence: Synthetic oligonucleotide
  Antisense strand to SEQ ID NO: 856030
guauccaacucucagaacc

SEQ ID NO: 856032 - RNA, 19 nt, Artificial Sequence
  Description of Artificial Sequence: Synthetic oligonucleotide
  Sense strand starting at position 961 of SEQ ID NO: 588309
cugagaguuggauacuugu

SEQ ID NO: 856033 - RNA, 19 nt, Artificial Sequence
  Description of Artificial Sequence: Synthetic oligonucleotide
  Antisense strand to SEQ ID NO: 856032
acaaguauccaacucucag

SEQ ID NO: 856034 - RNA, 19 nt, Artificial Sequence
  Description of Artificial Sequence: Synthetic oligonucleotide
  Sense strand starting at position 967 of SEQ ID NO: 588309
guuggauacuuguccucac

SEQ ID NO: 856035 - RNA, 19 nt, Artificial Sequence
  Description of Artificial Sequence: Synthetic oligonucleotide
  Antisense strand to SEQ ID NO: 856034
gugaggacaaguauccaac

SEQ ID NO: 856036 - RNA, 19 nt, Artificial Sequence
  Description of Artificial Sequence: Synthetic oligonucleotide
  Sense strand starting at position 970 of SEQ ID NO: 588309
ggauacuuguccucacuca

SEQ ID NO: 856037 - RNA, 19 nt, Artificial Sequence
  Description of Artificial Sequence: Synthetic oligonucleotide
  Antisense strand to SEQ ID NO: 856036
ugagugaggacaaguaucc

SEQ ID NO: 856038 - RNA, 19 nt, Artificial Sequence
  Description of Artificial Sequence: Synthetic oligonucleotide
  Sense strand starting at position 1198 of SEQ ID NO: 588309
cguugucucccugcucaau

SEQ ID NO: 856039 - RNA, 19 nt, Artificial Sequence
  Description of Artificial Sequence: Synthetic oligonucleotide
  Antisense strand to SEQ ID NO: 856038
auugagcagggagacaacg

SEQ ID NO: 856040 - RNA, 19 nt, Artificial Sequence
  Description of Artificial Sequence: Synthetic oligonucleotide
  Sense strand starting at position 2286 of SEQ ID NO: 588309
cugauuaaggucugagcca

SEQ ID NO: 856041 - RNA, 19 nt, Artificial Sequence
  Description of Artificial Sequence: Synthetic oligonucleotide
  Antisense strand to SEQ ID NO: 856040
uggcucagaccuuaaucag

SEQ ID NO: 856042 - RNA, 19 nt, Artificial Sequence
  Description of Artificial Sequence: Synthetic oligonucleotide
  Sense strand starting at position 2737 of SEQ ID NO: 588309
ccgacauuuggccgcagaa

SEQ ID NO: 856043 - RNA, 19 nt, Artificial Sequence
  Description of Artificial Sequence: Synthetic oligonucleotide
  Antisense strand to SEQ ID NO: 856042
uucugcggccaaaugucgg

SEQ ID NO: 856044 - RNA, 19 nt, Artificial Sequence
  Description of Artificial Sequence: Synthetic oligonucleotide
  Sense strand starting at position 2837 of SEQ ID NO: 588309
aagugauguugguuuagga

SEQ ID NO: 856045 - RNA, 19 nt, Artificial Sequence
  Description of Artificial Sequence: Synthetic oligonucleotide
  Antisense strand to SEQ ID NO: 856044
uccuaaaccaacaucacuu

SEQ ID NO: 856046 - RNA, 19 nt, Artificial Sequence
  Description of Artificial Sequence: Synthetic oligonucleotide
  Sense strand starting at position 2851 of SEQ ID NO: 588309
uaggaaaguuaggcucuuu

SEQ ID NO: 856047 - RNA, 19 nt, Artificial Sequence
  Description of Artificial Sequence: Synthetic oligonucleotide
  Antisense strand to SEQ ID NO: 856046
aaagagccuaacuuuccua

SEQ ID NO: 856048 - RNA, 19 nt, Artificial Sequence
  Description of Artificial Sequence: Synthetic oligonucleotide
  Sense strand starting at position 2930 of SEQ ID NO: 588309
uggagaucugccggcccaa

SEQ ID NO: 856049 - RNA, 19 nt, Artificial Sequence
  Description of Artificial Sequence: Synthetic oligonucleotide
  Antisense strand to SEQ ID NO: 856048
uugggccggcagaucucca

SEQ ID NO: 856050 - RNA, 19 nt, Artificial Sequence
  Description of Artificial Sequence: Synthetic oligonucleotide
  Sense strand starting at position 3022 of SEQ ID NO: 588309
cugaaaggucagggacgua

SEQ ID NO: 856051 - RNA, 19 nt, Artificial Sequence
  Description of Artificial Sequence: Synthetic oligonucleotide
  Antisense strand to SEQ ID NO: 856050
uacgucccugaccuuucag

SEQ ID NO: 856052 - RNA, 19 nt, Artificial Sequence
  Description of Artificial Sequence: Synthetic oligonucleotide
  Sense strand starting at position 3035 of SEQ ID NO: 588309
gacguacgugcuccuguaa

SEQ ID NO: 856053 - RNA, 19 nt, Artificial Sequence
  Description of Artificial Sequence: Synthetic oligonucleotide
  Antisense strand to SEQ ID NO: 856052
uuacaggagcacguacguc

SEQ ID NO: 856054 - RNA, 19 nt, Artificial Sequence
  Description of Artificial Sequence: Synthetic oligonucleotide
  Sense strand starting at position 3036 of SEQ ID NO: 588309
acguacgugcuccuguaaa

SEQ ID NO: 856055 - RNA, 19 nt, Artificial Sequence
  Description of Artificial Sequence: Synthetic oligonucleotide
  Antisense strand to SEQ ID NO: 856054
uuuacaggagcacguacgu

SEQ ID NO: 856056 - RNA, 19 nt, Artificial Sequence
  Description of Artificial Sequence: Synthetic oligonucleotide
  Sense strand starting at position 3206 of SEQ ID NO: 588309
cggauucugugauucaguu

SEQ ID NO: 856057 - RNA, 19 nt, Artificial Sequence
  Description of Artificial Sequence: Synthetic oligonucleotide
  Antisense strand to SEQ ID NO: 856056
aacugaaucacagaauccg

SEQ ID NO: 856058 - RNA, 19 nt, Artificial Sequence
  Description of Artificial Sequence: Synthetic oligonucleotide
  Sense strand starting at position 3220 of SEQ ID NO: 588309
caguuauggauaugggaug

SEQ ID NO: 856059 - RNA, 19 nt, Artificial Sequence
  Description of Artificial Sequence: Synthetic oligonucleotide
  Antisense strand to SEQ ID NO: 856058
caucccauauccauaacug

SEQ ID NO: 856060 - RNA, 19 nt, Artificial Sequence
  Description of Artificial Sequence: Synthetic oligonucleotide
  Sense strand starting at position 3330 of SEQ ID NO: 588309
uuuagauuauuugcguguu

SEQ ID NO: 856061 - RNA, 19 nt, Artificial Sequence
  Description of Artificial Sequence: Synthetic oligonucleotide
  Antisense strand to SEQ ID NO: 856060
aacacgcaaauaaucuaaa

SEQ ID NO: 856062 - RNA, 19 nt, Artificial Sequence
  Description of Artificial Sequence: Synthetic oligonucleotide
  Sense strand starting at position 3336 of SEQ ID NO: 588309
uuauuugcguguucccauu

SEQ ID NO: 856063 - RNA, 19 nt, Artificial Sequence
  Description of Artificial Sequence: Synthetic oligonucleotide
  Antisense strand to SEQ ID NO: 856062
aaugggaacacgcaaauaa

SEQ ID NO: 856064 - RNA, 19 nt, Artificial Sequence
  Description of Artificial Sequence: Synthetic oligonucleotide
  Sense strand starting at position 3342 of SEQ ID NO: 588309
gcguguucccauucuccca

SEQ ID NO: 856065 - RNA, 19 nt, Artificial Sequence
  Description of Artificial Sequence: Synthetic oligonucleotide
  Antisense strand to SEQ ID NO: 856064
ugggagaaugggaacacgc

SEQ ID NO: 856066 - RNA, 19 nt, Artificial Sequence
  Description of Artificial Sequence: Synthetic oligonucleotide
  Sense strand starting at position 3382 of SEQ ID NO: 588309
ugcagacuaucgcuauaua

SEQ ID NO: 856067 - RNA, 19 nt, Artificial Sequence
  Description of Artificial Sequence: Synthetic oligonucleotide
  Antisense strand to SEQ ID NO: 856066
uauauagcgauagucugca

SEQ ID NO: 856068 - RNA, 19 nt, Artificial Sequence
  Description of Artificial Sequence: Synthetic oligonucleotide
  Sense strand starting at position 3383 of SEQ ID NO: 588309
gcagacuaucgcuauauau

SEQ ID NO: 856069 - RNA, 19 nt, Artificial Sequence
  Description of Artificial Sequence: Synthetic oligonucleotide
  Antisense strand to SEQ ID NO: 856068
auauauagcgauagucugc

SEQ ID NO: 856070 - RNA, 19 nt, Artificial Sequence
  Description of Artificial Sequence: Synthetic oligonucleotide
  Sense strand starting at position 3509 of SEQ ID NO: 588309
gcacaauagcucuaugcga

SEQ ID NO: 856071 - RNA, 19 nt, Artificial Sequence
  Description of Artificial Sequence: Synthetic oligonucleotide
  Antisense strand to SEQ ID NO: 856070
ucgcauagagcuauugugc

SEQ ID NO: 856072 - RNA, 19 nt, Artificial Sequence
  Description of Artificial Sequence: Synthetic oligonucleotide
  Sense strand starting at position 3511 of SEQ ID NO: 588309
acaauagcucuaugcgaag

SEQ ID NO: 856073 - RNA, 19 nt, Artificial Sequence
  Description of Artificial Sequence: Synthetic oligonucleotide
  Antisense strand to SEQ ID NO: 856072
cuucgcauagagcuauugu

SEQ ID NO: 856074 - RNA, 19 nt, Artificial Sequence
  Description of Artificial Sequence: Synthetic oligonucleotide
  Sense strand starting at position 3597 of SEQ ID NO: 588309
ggaaucaaaugcuagauga

SEQ ID NO: 856075 - RNA, 19 nt, Artificial Sequence
  Description of Artificial Sequence: Synthetic oligonucleotide
  Antisense strand to SEQ ID NO: 856074
ucaucuagcauuugauucc

SEQ ID NO: 856076 - RNA, 19 nt, Artificial Sequence
  Description of Artificial Sequence: Synthetic oligonucleotide
  Sense strand starting at position 3695 of SEQ ID NO: 588309
cuguacugcccuggaagua

SEQ ID NO: 856077 - RNA, 19 nt, Artificial Sequence
  Description of Artificial Sequence: Synthetic oligonucleotide
  Antisense strand to SEQ ID NO: 856076
uacuuccagggcaguacag

SEQ ID NO: 856078 - RNA, 19 nt, Artificial Sequence
  Description of Artificial Sequence: Synthetic oligonucleotide
  Sense strand starting at position 3696 of SEQ ID NO: 588309
uguacugcccuggaaguaa

SEQ ID NO: 856079 - RNA, 19 nt, Artificial Sequence
  Description of Artificial Sequence: Synthetic oligonucleotide
  Antisense strand to SEQ ID NO: 856078
uuacuuccagggcaguaca

SEQ ID NO: 856080 - RNA, 19 nt, Artificial Sequence
  Description of Artificial Sequence: Synthetic oligonucleotide
  Sense strand starting at position 3845 of SEQ ID NO: 588309
uuguguguuucccuugaag

SEQ ID NO: 856081 - RNA, 19 nt, Artificial Sequence
  Description of Artificial Sequence: Synthetic oligonucleotide
  Antisense strand to SEQ ID NO: 856080
cuucaagggaaacacacaa

SEQ ID NO: 856082 - RNA, 19 nt, Artificial Sequence
  Description of Artificial Sequence: Synthetic oligonucleotide
  Sense strand starting at position 3910 of SEQ ID NO: 588309
gggacacugaccugguaga

SEQ ID NO: 856083 - RNA, 19 nt, Artificial Sequence
  Description of Artificial Sequence: Synthetic oligonucleotide
  Antisense strand to SEQ ID NO: 856082
ucuaccaggucaguguccc

SEQ ID NO: 856084 - RNA, 19 nt, Artificial Sequence
  Description of Artificial Sequence: Synthetic oligonucleotide
  Sense strand starting at position 61 of SEQ ID NO: 588310
gaauguacugugugaguag

SEQ ID NO: 856085 - RNA, 19 nt, Artificial Sequence
  Description of Artificial Sequence: Synthetic oligonucleotide
  Antisense strand to SEQ ID NO: 856084
cuacucacacaguacauuc

SEQ ID NO: 856086 - RNA, 19 nt, Artificial Sequence
  Description of Artificial Sequence: Synthetic oligonucleotide
  Sense strand starting at position 64 of SEQ ID NO: 588310
uguacugugugaguagaac

SEQ ID NO: 856087 - RNA, 19 nt, Artificial Sequence
  Description of Artificial Sequence: Synthetic oligonucleotide
  Antisense strand to SEQ ID NO: 856086
guucuacucacacaguaca

SEQ ID NO: 856088 - RNA, 19 nt, Artificial Sequence
  Description of Artificial Sequence: Synthetic oligonucleotide
  Sense strand starting at position 273 of SEQ ID NO: 588310
uguggagggcuaugaaguu

SEQ ID NO: 856089 - RNA, 19 nt, Artificial Sequence
  Description of Artificial Sequence: Synthetic oligonucleotide
  Antisense strand to SEQ ID NO: 856088
aacuucauagcccuccaca

SEQ ID NO: 856090 - RNA, 19 nt, Artificial Sequence
  Description of Artificial Sequence: Synthetic oligonucleotide
  Sense strand starting at position 402 of SEQ ID NO: 588310
ugaaauucuuaccuauggu

SEQ ID NO: 856091 - RNA, 19 nt, Artificial Sequence
  Description of Artificial Sequence: Synthetic oligonucleotide
  Antisense strand to SEQ ID NO: 856090
accauagguaagaauuuca

SEQ ID NO: 856092 - RNA, 19 nt, Artificial Sequence
  Description of Artificial Sequence: Synthetic oligonucleotide
  Sense strand starting at position 467 of SEQ ID NO: 588310
gaaagacgaugguuuggua

SEQ ID NO: 856093 - RNA, 19 nt, Artificial Sequence
  Description of Artificial Sequence: Synthetic oligonucleotide
  Antisense strand to SEQ ID NO: 856092
uaccaaaccaucgucuuuc

SEQ ID NO: 856094 - RNA, 19 nt, Artificial Sequence
  Description of Artificial Sequence: Synthetic oligonucleotide
  Sense strand starting at position 471 of SEQ ID NO: 588310
gacgaugguuugguagauu

SEQ ID NO: 856095 - RNA, 19 nt, Artificial Sequence
  Description of Artificial Sequence: Synthetic oligonucleotide
  Antisense strand to SEQ ID NO: 856094
aaucuaccaaaccaucguc

SEQ ID NO: 856096 - RNA, 19 nt, Artificial Sequence
  Description of Artificial Sequence: Synthetic oligonucleotide
  Sense strand starting at position 702 of SEQ ID NO: 588310
ugagauccugucuggaaag

SEQ ID NO: 856097 - RNA, 19 nt, Artificial Sequence
  Description of Artificial Sequence: Synthetic oligonucleotide
  Antisense strand to SEQ ID NO: 856096
cuuuccagacaggaucuca

SEQ ID NO: 856098 - RNA, 19 nt, Artificial Sequence
  Description of Artificial Sequence: Synthetic oligonucleotide
  Sense strand starting at position 827 of SEQ ID NO: 588310
acucuacuccuagggugaa

SEQ ID NO: 856099 - RNA, 19 nt, Artificial Sequence
  Description of Artificial Sequence: Synthetic oligonucleotide
  Antisense strand to SEQ ID NO: 856098
uucacccuaggaguagagu

SEQ ID NO: 856100 - RNA, 19 nt, Artificial Sequence
  Description of Artificial Sequence: Synthetic oligonucleotide
  Sense strand starting at position 841 of SEQ ID NO: 588310
gugaauugcucauuuguua

SEQ ID NO: 856101 - RNA, 19 nt, Artificial Sequence
  Description of Artificial Sequence: Synthetic oligonucleotide
  Antisense strand to SEQ ID NO: 856100
uaacaaaugagcaauucac

SEQ ID NO: 856102 - RNA, 19 nt, Artificial Sequence
  Description of Artificial Sequence: Synthetic oligonucleotide
  Sense strand starting at position 912 of SEQ ID NO: 588310
aguaaauuccuccaaagug

SEQ ID NO: 856103 - RNA, 19 nt, Artificial Sequence
  Description of Artificial Sequence: Synthetic oligonucleotide
  Antisense strand to SEQ ID NO: 856102
cacuuuggaggaauuuacu

SEQ ID NO: 856104 - RNA, 19 nt, Artificial Sequence
  Description of Artificial Sequence: Synthetic oligonucleotide
  Sense strand starting at position 1070 of SEQ ID NO: 588310
accauuccuugagcaaaga

SEQ ID NO: 856105 - RNA, 19 nt, Artificial Sequence
  Description of Artificial Sequence: Synthetic oligonucleotide
  Antisense strand to SEQ ID NO: 856104
ucuuugcucaaggaauggu

SEQ ID NO: 856106 - RNA, 19 nt, Artificial Sequence
  Description of Artificial Sequence: Synthetic oligonucleotide
  Sense strand starting at position 2216 of SEQ ID NO: 588310
cuaggaguucucgacgucu

SEQ ID NO: 856107 - RNA, 19 nt, Artificial Sequence
  Description of Artificial Sequence: Synthetic oligonucleotide
  Antisense strand to SEQ ID NO: 856106
agacgucgagaacuccuag

SEQ ID NO: 856108 - RNA, 19 nt, Artificial Sequence
  Description of Artificial Sequence: Synthetic oligonucleotide
  Sense strand starting at position 2369 of SEQ ID NO: 588310
cggguucccagaugaaguc

SEQ ID NO: 856109 - RNA, 19 nt, Artificial Sequence
  Description of Artificial Sequence: Synthetic oligonucleotide
  Antisense strand to SEQ ID NO: 856108
gacuucaucugggaacccg

SEQ ID NO: 856110 - RNA, 19 nt, Artificial Sequence
  Description of Artificial Sequence: Synthetic oligonucleotide
  Sense strand starting at position 2483 of SEQ ID NO: 588310
gucuuaggacagcaucaaa

SEQ ID NO: 856111 - RNA, 19 nt, Artificial Sequence
  Description of Artificial Sequence: Synthetic oligonucleotide
  Antisense strand to SEQ ID NO: 856110
uuugaugcuguccuaagac

SEQ ID NO: 856112 - RNA, 19 nt, Artificial Sequence
  Description of Artificial Sequence: Synthetic oligonucleotide
  Sense strand starting at position 2571 of SEQ ID NO: 588310
augcgaauuuggguugugu

SEQ ID NO: 856113 - RNA, 19 nt, Artificial Sequence
  Description of Artificial Sequence: Synthetic oligonucleotide
  Antisense strand to SEQ ID NO: 856112
acacaacccaaauucgcau

SEQ ID NO: 856114 - RNA, 19 nt, Artificial Sequence
  Description of Artificial Sequence: Synthetic oligonucleotide
  Sense strand starting at position 2573 of SEQ ID NO: 588310
gcgaauuuggguugugugu

SEQ ID NO: 856115 - RNA, 19 nt, Artificial Sequence
  Description of Artificial Sequence: Synthetic oligonucleotide
  Antisense strand to SEQ ID NO: 856114
acacacaacccaaauucgc

SEQ ID NO: 856116 - RNA, 19 nt, Artificial Sequence
  Description of Artificial Sequence: Synthetic oligonucleotide
  Sense strand starting at position 2579 of SEQ ID NO: 588310
uuggguuguguguacucua

SEQ ID NO: 856117 - RNA, 19 nt, Artificial Sequence
  Description of Artificial Sequence: Synthetic oligonucleotide
  Antisense strand to SEQ ID NO: 856116
uagaguacacacaacccaa

SEQ ID NO: 856118 - RNA, 19 nt, Artificial Sequence
  Description of Artificial Sequence: Synthetic oligonucleotide
  Sense strand starting at position 2582 of SEQ ID NO: 588310
gguuguguguacucuauuu

SEQ ID NO: 856119 - RNA, 19 nt, Artificial Sequence
  Description of Artificial Sequence: Synthetic oligonucleotide
  Antisense strand to SEQ ID NO: 856118
aaauagaguacacacaacc

SEQ ID NO: 856120 - RNA, 19 nt, Artificial Sequence
  Description of Artificial Sequence: Synthetic oligonucleotide
  Sense strand starting at position 2635 of SEQ ID NO: 588310
cuucucugcgccuauuuau

SEQ ID NO: 856121 - RNA, 19 nt, Artificial Sequence
  Description of Artificial Sequence: Synthetic oligonucleotide
  Antisense strand to SEQ ID NO: 856120
auaaauaggcgcagagaag

SEQ ID NO: 856122 - RNA, 19 nt, Artificial Sequence
  Description of Artificial Sequence: Synthetic oligonucleotide
  Sense strand starting at position 2644 of SEQ ID NO: 588310
gccuauuuauaggcagcga

SEQ ID NO: 856123 - RNA, 19 nt, Artificial Sequence
  Description of Artificial Sequence: Synthetic oligonucleotide
  Antisense strand to SEQ ID NO: 856122
ucgcugccuauaaauaggc

SEQ ID NO: 856124 - RNA, 19 nt, Artificial Sequence
  Description of Artificial Sequence: Synthetic oligonucleotide
  Sense strand starting at position 2711 of SEQ ID NO: 588310
gggaaagucguuuagauca

SEQ ID NO: 856125 - RNA, 19 nt, Artificial Sequence
  Description of Artificial Sequence: Synthetic oligonucleotide
  Antisense strand to SEQ ID NO: 856124
ugaucuaaacgacuuuccc

SEQ ID NO: 856126 - RNA, 19 nt, Artificial Sequence
  Description of Artificial Sequence: Synthetic oligonucleotide
  Sense strand starting at position 2716 of SEQ ID NO: 588310
agucguuuagaucauuauu

SEQ ID NO: 856127 - RNA, 19 nt, Artificial Sequence
  Description of Artificial Sequence: Synthetic oligonucleotide
  Antisense strand to SEQ ID NO: 856126
aauaaugaucuaaacgacu

SEQ ID NO: 856128 - RNA, 19 nt, Artificial Sequence
  Description of Artificial Sequence: Synthetic oligonucleotide
  Sense strand starting at position 2738 of SEQ ID NO: 588310
auaugcugucaugaaugca

SEQ ID NO: 856129 - RNA, 19 nt, Artificial Sequence
  Description of Artificial Sequence: Synthetic oligonucleotide
  Antisense strand to SEQ ID NO: 856128
ugcauucaugacagcauau

SEQ ID NO: 856130 - RNA, 19 nt, Artificial Sequence
  Description of Artificial Sequence: Synthetic oligonucleotide
  Sense strand starting at position 2799 of SEQ ID NO: 588310
ccauaaggcguuuaaguca

SEQ ID NO: 856131 - RNA, 19 nt, Artificial Sequence
  Description of Artificial Sequence: Synthetic oligonucleotide
  Antisense strand to SEQ ID NO: 856130
ugacuuaaacgccuuaugg

SEQ ID NO: 856132 - RNA, 19 nt, Artificial Sequence
  Description of Artificial Sequence: Synthetic oligonucleotide
  Sense strand starting at position 2845 of SEQ ID NO: 588310
gaauguuuauucuuaaugg

SEQ ID NO: 856133 - RNA, 19 nt, Artificial Sequence
  Description of Artificial Sequence: Synthetic oligonucleotide
  Antisense strand to SEQ ID NO: 856132
ccauuaagaauaaacauuc

SEQ ID NO: 856134 - RNA, 19 nt, Artificial Sequence
  Description of Artificial Sequence: Synthetic oligonucleotide
  Sense strand starting at position 2892 of SEQ ID NO: 588310
ucaagaugguauccaacua

SEQ ID NO: 856135 - RNA, 19 nt, Artificial Sequence
  Description of Artificial Sequence: Synthetic oligonucleotide
  Antisense strand to SEQ ID NO: 856134
uaguuggauaccaucuuga

SEQ ID NO: 856136 - RNA, 19 nt, Artificial Sequence
  Description of Artificial Sequence: Synthetic oligonucleotide
  Sense strand starting at position 2993 of SEQ ID NO: 588310
gcagauauugcugaucuau

SEQ ID NO: 856137 - RNA, 19 nt, Artificial Sequence
  Description of Artificial Sequence: Synthetic oligonucleotide
  Antisense strand to SEQ ID NO: 856136
auagaucagcaauaucugc

SEQ ID NO: 856138 - RNA, 19 nt, Artificial Sequence
  Description of Artificial Sequence: Synthetic oligonucleotide
  Sense strand starting at position 2995 of SEQ ID NO: 588310
agauauugcugaucuaucu

SEQ ID NO: 856139 - RNA, 19 nt, Artificial Sequence
  Description of Artificial Sequence: Synthetic oligonucleotide
  Antisense strand to SEQ ID NO: 856138
agauagaucagcaauaucu

SEQ ID NO: 856140 - RNA, 19 nt, Artificial Sequence
  Description of Artificial Sequence: Synthetic oligonucleotide
  Sense strand starting at position 3074 of SEQ ID NO: 588310
cauccuaucguagaaguuu

SEQ ID NO: 856141 - RNA, 19 nt, Artificial Sequence
  Description of Artificial Sequence: Synthetic oligonucleotide
  Antisense strand to SEQ ID NO: 856140
aaacuucuacgauaggaug

SEQ ID NO: 856142 - RNA, 19 nt, Artificial Sequence
  Description of Artificial Sequence: Synthetic oligonucleotide
  Sense strand starting at position 3146 of SEQ ID NO: 588310
acuccaaucuacguaaugu

SEQ ID NO: 856143 - RNA, 19 nt, Artificial Sequence
  Description of Artificial Sequence: Synthetic oligonucleotide
  Antisense strand to SEQ ID NO: 856142
acauuacguagauuggagu

SEQ ID NO: 856144 - RNA, 19 nt, Artificial Sequence
  Description of Artificial Sequence: Synthetic oligonucleotide
  Sense strand starting at position 3155 of SEQ ID NO: 588310
uacguaauguauucugauu

SEQ ID NO: 856145 - RNA, 19 nt, Artificial Sequence
  Description of Artificial Sequence: Synthetic oligonucleotide
  Antisense strand to SEQ ID NO: 856144
aaucagaauacauuacgua

SEQ ID NO: 856146 - RNA, 19 nt, Artificial Sequence
  Description of Artificial Sequence: Synthetic oligonucleotide
  Sense strand starting at position 3185 of SEQ ID NO: 588310
ugucuuaaacucugaaggu

SEQ ID NO: 856147 - RNA, 19 nt, Artificial Sequence
  Description of Artificial Sequence: Synthetic oligonucleotide
  Antisense strand to SEQ ID NO: 856146
accuucagaguuuaagaca

SEQ ID NO: 856148 - RNA, 19 nt, Artificial Sequence
  Description of Artificial Sequence: Synthetic oligonucleotide
  Sense strand starting at position 3346 of SEQ ID NO: 588310
ucacauccguccuuugaga

SEQ ID NO: 856149 - RNA, 19 nt, Artificial Sequence
  Description of Artificial Sequence: Synthetic oligonucleotide
  Antisense strand to SEQ ID NO: 856148
ucucaaaggacggauguga

SEQ ID NO: 856150 - RNA, 19 nt, Artificial Sequence
  Description of Artificial Sequence: Synthetic oligonucleotide
  Sense strand starting at position 3348 of SEQ ID NO: 588310
acauccguccuuugagaga

SEQ ID NO: 856151 - RNA, 19 nt, Artificial Sequence
  Description of Artificial Sequence: Synthetic oligonucleotide
  Antisense strand to SEQ ID NO: 856150
ucucucaaaggacggaugu

SEQ ID NO: 856152 - RNA, 19 nt, Artificial Sequence
  Description of Artificial Sequence: Synthetic oligonucleotide
  Sense strand starting at position 3353 of SEQ ID NO: 588310
cguccuuugagagaugagu

SEQ ID NO: 856153 - RNA, 19 nt, Artificial Sequence
  Description of Artificial Sequence: Synthetic oligonucleotide
  Antisense strand to SEQ ID NO: 856152
acucaucucucaaaggacg

SEQ ID NO: 856154 - RNA, 19 nt, Artificial Sequence
  Description of Artificial Sequence: Synthetic oligonucleotide
  Sense strand starting at position 3355 of SEQ ID NO: 588310
uccuuugagagaugaguuu

SEQ ID NO: 856155 - RNA, 19 nt, Artificial Sequence
  Description of Artificial Sequence: Synthetic oligonucleotide
  Antisense strand to SEQ ID NO: 856154
aaacucaucucucaaagga

SEQ ID NO: 856156 - RNA, 19 nt, Artificial Sequence
  Description of Artificial Sequence: Synthetic oligonucleotide
  Sense strand starting at position 3762 of SEQ ID NO: 588310
aaacauugucuuggugguu

SEQ ID NO: 856157 - RNA, 19 nt, Artificial Sequence
  Description of Artificial Sequence: Synthetic oligonucleotide
  Antisense strand to SEQ ID NO: 856156
aaccaccaagacaauguuu

SEQ ID NO: 856158 - RNA, 19 nt, Artificial Sequence
  Description of Artificial Sequence: Synthetic oligonucleotide
  Sense strand starting at position 3881 of SEQ ID NO: 588310
ucauaugguuacuugagga

SEQ ID NO: 856159 - RNA, 19 nt, Artificial Sequence
  Description of Artificial Sequence: Synthetic oligonucleotide
  Antisense strand to SEQ ID NO: 856158
uccucaaguaaccauauga

SEQ ID NO: 856160 - RNA, 19 nt, Artificial Sequence
  Description of Artificial Sequence: Synthetic oligonucleotide
  Sense strand starting at position 3905 of SEQ ID NO: 588310
cgagauaacuuaccuaaau

SEQ ID NO: 856161 - RNA, 19 nt, Artificial Sequence
  Description of Artificial Sequence: Synthetic oligonucleotide
  Antisense strand to SEQ ID NO: 856160
auuuagguaaguuaucucg

SEQ ID NO: 856162 - RNA, 19 nt, Artificial Sequence
  Description of Artificial Sequence: Synthetic oligonucleotide
  Sense strand starting at position 3963 of SEQ ID NO: 588310
acaccuagguucucgauau

SEQ ID NO: 856163 - RNA, 19 nt, Artificial Sequence
  Description of Artificial Sequence: Synthetic oligonucleotide
  Antisense strand to SEQ ID NO: 856162
auaucgagaaccuaggugu

SEQ ID NO: 856164 - RNA, 19 nt, Artificial Sequence
  Description of Artificial Sequence: Synthetic oligonucleotide
  Sense strand starting at position 110 of SEQ ID NO: 588311
gcaaacugccuguaaauau

SEQ ID NO: 856165 - RNA, 19 nt, Artificial Sequence
  Description of Artificial Sequence: Synthetic oligonucleotide
  Antisense strand to SEQ ID NO: 856164
auauuuacaggcaguuugc

SEQ ID NO: 856166 - RNA, 19 nt, Artificial Sequence
  Description of Artificial Sequence: Synthetic oligonucleotide
  Sense strand starting at position 335 of SEQ ID NO: 588311
ucauaaguagcauggagau

SEQ ID NO: 856167 - RNA, 19 nt, Artificial Sequence
  Description of Artificial Sequence: Synthetic oligonucleotide
  Antisense strand to SEQ ID NO: 856166
aucuccaugcuacuuauga

SEQ ID NO: 856168 - RNA, 19 nt, Artificial Sequence
  Description of Artificial Sequence: Synthetic oligonucleotide
  Sense strand starting at position 345 of SEQ ID NO: 588311
cauggagauuggcucucua

SEQ ID NO: 856169 - RNA, 19 nt, Artificial Sequence
  Description of Artificial Sequence: Synthetic oligonucleotide
  Antisense strand to SEQ ID NO: 856168
uagagagccaaucuccaug

SEQ ID NO: 856170 - RNA, 19 nt, Artificial Sequence
  Description of Artificial Sequence: Synthetic oligonucleotide
  Sense strand starting at position 442 of SEQ ID NO: 588311
acacauuagccugaguggu

SEQ ID NO: 856171 - RNA, 19 nt, Artificial Sequence
  Description of Artificial Sequence: Synthetic oligonucleotide
  Antisense strand to SEQ ID NO: 856170
accacucaggcuaaugugu

SEQ ID NO: 856172 - RNA, 19 nt, Artificial Sequence
  Description of Artificial Sequence: Synthetic oligonucleotide
  Sense strand starting at position 444 of SEQ ID NO: 588311
acauuagccugagugguaa

SEQ ID NO: 856173 - RNA, 19 nt, Artificial Sequence
  Description of Artificial Sequence: Synthetic oligonucleotide
  Antisense strand to SEQ ID NO: 856172
uuaccacucaggcuaaugu

SEQ ID NO: 856174 - RNA, 19 nt, Artificial Sequence
  Description of Artificial Sequence: Synthetic oligonucleotide
  Sense strand starting at position 446 of SEQ ID NO: 588311
auuagccugagugguaauu

SEQ ID NO: 856175 - RNA, 19 nt, Artificial Sequence
  Description of Artificial Sequence: Synthetic oligonucleotide
  Antisense strand to SEQ ID NO: 856174
aauuaccacucaggcuaau

SEQ ID NO: 856176 - RNA, 19 nt, Artificial Sequence
  Description of Artificial Sequence: Synthetic oligonucleotide
  Sense strand starting at position 514 of SEQ ID NO: 588311
gaagacuccuugggaaacu

SEQ ID NO: 856177 - RNA, 19 nt, Artificial Sequence
  Description of Artificial Sequence: Synthetic oligonucleotide
  Antisense strand to SEQ ID NO: 856176
aguuucccaaggagucuuc

SEQ ID NO: 856178 - RNA, 19 nt, Artificial Sequence
  Description of Artificial Sequence: Synthetic oligonucleotide
  Sense strand starting at position 572 of SEQ ID NO: 588311
gcagaacucugugcucagu

SEQ ID NO: 856179 - RNA, 19 nt, Artificial Sequence
  Description of Artificial Sequence: Synthetic oligonucleotide
  Antisense strand to SEQ ID NO: 856178
acugagcacagaguucugc

SEQ ID NO: 856180 - RNA, 19 nt, Artificial Sequence
  Description of Artificial Sequence: Synthetic oligonucleotide
  Sense strand starting at position 578 of SEQ ID NO: 588311
cucugugcucaguggguua

SEQ ID NO: 856181 - RNA, 19 nt, Artificial Sequence
  Description of Artificial Sequence: Synthetic oligonucleotide
  Antisense strand to SEQ ID NO: 856180
uaacccacugagcacagag

SEQ ID NO: 856182 - RNA, 19 nt, Artificial Sequence
  Description of Artificial Sequence: Synthetic oligonucleotide
  Sense strand starting at position 610 of SEQ ID NO: 588311
ucggguuuccugugagaag

SEQ ID NO: 856183 - RNA, 19 nt, Artificial Sequence
  Description of Artificial Sequence: Synthetic oligonucleotide
  Antisense strand to SEQ ID NO: 856182
cuucucacaggaaacccga

SEQ ID NO: 856184 - RNA, 19 nt, Artificial Sequence
  Description of Artificial Sequence: Synthetic oligonucleotide
  Sense strand starting at position 633 of SEQ ID NO: 588311
gacaucuguccagguggua

SEQ ID NO: 856185 - RNA, 19 nt, Artificial Sequence
  Description of Artificial Sequence: Synthetic oligonucleotide
  Antisense strand to SEQ ID NO: 856184
uaccaccuggacagauguc

SEQ ID NO: 856186 - RNA, 19 nt, Artificial Sequence
  Description of Artificial Sequence: Synthetic oligonucleotide
  Sense strand starting at position 636 of SEQ ID NO: 588311
aucuguccaggugguaaua

SEQ ID NO: 856187 - RNA, 19 nt, Artificial Sequence
  Description of Artificial Sequence: Synthetic oligonucleotide
  Antisense strand to SEQ ID NO: 856186
uauuaccaccuggacagau

SEQ ID NO: 856188 - RNA, 19 nt, Artificial Sequence
  Description of Artificial Sequence: Synthetic oligonucleotide
  Sense strand starting at position 649 of SEQ ID NO: 588311
guaauaagagcauaauguu

SEQ ID NO: 856189 - RNA, 19 nt, Artificial Sequence
  Description of Artificial Sequence: Synthetic oligonucleotide
  Antisense strand to SEQ ID NO: 856188
aacauuaugcucuuauuac

SEQ ID NO: 856190 - RNA, 19 nt, Artificial Sequence
  Description of Artificial Sequence: Synthetic oligonucleotide
  Sense strand starting at position 675 of SEQ ID NO: 588311
cugaaugaaucauaggagu

SEQ ID NO: 856191 - RNA, 19 nt, Artificial Sequence
  Description of Artificial Sequence: Synthetic oligonucleotide
  Antisense strand to SEQ ID NO: 856190
acuccuaugauucauucag

SEQ ID NO: 856192 - RNA, 19 nt, Artificial Sequence
  Description of Artificial Sequence: Synthetic oligonucleotide
  Sense strand starting at position 889 of SEQ ID NO: 588311
ccuguauucuguuuaguuc

SEQ ID NO: 856193 - RNA, 19 nt, Artificial Sequence
  Description of Artificial Sequence: Synthetic oligonucleotide
  Antisense strand to SEQ ID NO: 856192
gaacuaaacagaauacagg

SEQ ID NO: 856194 - RNA, 19 nt, Artificial Sequence
  Description of Artificial Sequence: Synthetic oligonucleotide
  Sense strand starting at position 896 of SEQ ID NO: 588311
ucuguuuaguucucuugca

SEQ ID NO: 856195 - RNA, 19 nt, Artificial Sequence
  Description of Artificial Sequence: Synthetic oligonucleotide
  Antisense strand to SEQ ID NO: 856194
ugcaagagaacuaaacaga

SEQ ID NO: 856196 - RNA, 19 nt, Artificial Sequence
  Description of Artificial Sequence: Synthetic oligonucleotide
  Sense strand starting at position 941 of SEQ ID NO: 588311
agagcuguguucccaccua

SEQ ID NO: 856197 - RNA, 19 nt, Artificial Sequence
  Description of Artificial Sequence: Synthetic oligonucleotide
  Antisense strand to SEQ ID NO: 856196
uaggugggaacacagcucu

SEQ ID NO: 856198 - RNA, 19 nt, Artificial Sequence
  Description of Artificial Sequence: Synthetic oligonucleotide
  Sense strand starting at position 976 of SEQ ID NO: 588311
acagcaaaggguuggauaa

SEQ ID NO: 856199 - RNA, 19 nt, Artificial Sequence
  Description of Artificial Sequence: Synthetic oligonucleotide
  Antisense strand to SEQ ID NO: 856198
uuauccaacccuuugcugu

SEQ ID NO: 856200 - RNA, 19 nt, Artificial Sequence
  Description of Artificial Sequence: Synthetic oligonucleotide
  Sense strand starting at position 977 of SEQ ID NO: 588311
cagcaaaggguuggauaaa

SEQ ID NO: 856201 - RNA, 19 nt, Artificial Sequence
  Description of Artificial Sequence: Synthetic oligonucleotide
  Antisense strand to SEQ ID NO: 856200
uuuauccaacccuuugcug

SEQ ID NO: 856202 - RNA, 19 nt, Artificial Sequence
  Description of Artificial Sequence: Synthetic oligonucleotide
  Sense strand starting at position 993 of SEQ ID NO: 588311
aaagaaugccuuugaggcu

SEQ ID NO: 856203 - RNA, 19 nt, Artificial Sequence
  Description of Artificial Sequence: Synthetic oligonucleotide
  Antisense strand to SEQ ID NO: 856202
agccucaaaggcauucuuu

SEQ ID NO: 856204 - RNA, 19 nt, Artificial Sequence
  Description of Artificial Sequence: Synthetic oligonucleotide
  Sense strand starting at position 1341 of SEQ ID NO: 588311
ggacaagaaugugagaaca

SEQ ID NO: 856205 - RNA, 19 nt, Artificial Sequence
  Description of Artificial Sequence: Synthetic oligonucleotide
  Antisense strand to SEQ ID NO: 856204
uguucucacauucuugucc

SEQ ID NO: 856206 - RNA, 19 nt, Artificial Sequence
  Description of Artificial Sequence: Synthetic oligonucleotide
  Sense strand starting at position 1343 of SEQ ID NO: 588311
acaagaaugugagaacaag

SEQ ID NO: 856207 - RNA, 19 nt, Artificial Sequence
  Description of Artificial Sequence: Synthetic oligonucleotide
  Antisense strand to SEQ ID NO: 856206
cuuguucucacauucuugu

SEQ ID NO: 856208 - RNA, 19 nt, Artificial Sequence
  Description of Artificial Sequence: Synthetic oligonucleotide
  Sense strand starting at position 1507 of SEQ ID NO: 588311
agaggaggccgggauuagu

SEQ ID NO: 856209 - RNA, 19 nt, Artificial Sequence
  Description of Artificial Sequence: Synthetic oligonucleotide
  Antisense strand to SEQ ID NO: 856208
acuaaucccggccuccucu

SEQ ID NO: 856210 - RNA, 19 nt, Artificial Sequence
  Description of Artificial Sequence: Synthetic oligonucleotide
  Sense strand starting at position 1515 of SEQ ID NO: 588311
ccgggauuagugggaaaga

SEQ ID NO: 856211 - RNA, 19 nt, Artificial Sequence
  Description of Artificial Sequence: Synthetic oligonucleotide
  Antisense strand to SEQ ID NO: 856210
ucuuucccacuaaucccgg

SEQ ID NO: 856212 - RNA, 19 nt, Artificial Sequence
  Description of Artificial Sequence: Synthetic oligonucleotide
  Sense strand starting at position 1623 of SEQ ID NO: 588311
guaggagagguaugauuag

SEQ ID NO: 856213 - RNA, 19 nt, Artificial Sequence
  Description of Artificial Sequence: Synthetic oligonucleotide
  Antisense strand to SEQ ID NO: 856212
cuaaucauaccucuccuac

SEQ ID NO: 856214 - RNA, 19 nt, Artificial Sequence
  Description of Artificial Sequence: Synthetic oligonucleotide
  Sense strand starting at position 1629 of SEQ ID NO: 588311
gagguaugauuagugguca

SEQ ID NO: 856215 - RNA, 19 nt, Artificial Sequence
  Description of Artificial Sequence: Synthetic oligonucleotide
  Antisense strand to SEQ ID NO: 856214
ugaccacuaaucauaccuc

SEQ ID NO: 856216 - RNA, 19 nt, Artificial Sequence
  Description of Artificial Sequence: Synthetic oligonucleotide
  Sense strand starting at position 1680 of SEQ ID NO: 588311
ggaaggugugcguacguua

SEQ ID NO: 856217 - RNA, 19 nt, Artificial Sequence
  Description of Artificial Sequence: Synthetic oligonucleotide
  Antisense strand to SEQ ID NO: 856216
uaacguacgcacaccuucc

SEQ ID NO: 856218 - RNA, 19 nt, Artificial Sequence
  Description of Artificial Sequence: Synthetic oligonucleotide
  Sense strand starting at position 2122 of SEQ ID NO: 588311
ccgccuccucaugaauaau

SEQ ID NO: 856219 - RNA, 19 nt, Artificial Sequence
  Description of Artificial Sequence: Synthetic oligonucleotide
  Antisense strand to SEQ ID NO: 856218
auuauucaugaggaggcgg

SEQ ID NO: 856220 - RNA, 19 nt, Artificial Sequence
  Description of Artificial Sequence: Synthetic oligonucleotide
  Sense strand starting at position 2912 of SEQ ID NO: 588311
ggaggcguuuaguccuaga

SEQ ID NO: 856221 - RNA, 19 nt, Artificial Sequence
  Description of Artificial Sequence: Synthetic oligonucleotide
  Antisense strand to SEQ ID NO: 856220
ucuaggacuaaacgccucc

SEQ ID NO: 856222 - RNA, 19 nt, Artificial Sequence
  Description of Artificial Sequence: Synthetic oligonucleotide
  Sense strand starting at position 2923 of SEQ ID NO: 588311
guccuagaggccugugaug

SEQ ID NO: 856223 - RNA, 19 nt, Artificial Sequence
  Description of Artificial Sequence: Synthetic oligonucleotide
  Antisense strand to SEQ ID NO: 856222
caucacaggccucuaggac

SEQ ID NO: 856224 - RNA, 19 nt, Artificial Sequence
  Description of Artificial Sequence: Synthetic oligonucleotide
  Sense strand starting at position 3079 of SEQ ID NO: 588311
ggugcagaaccugggaauu

SEQ ID NO: 856225 - RNA, 19 nt, Artificial Sequence
  Description of Artificial Sequence: Synthetic oligonucleotide
  Antisense strand to SEQ ID NO: 856224
aauucccagguucugcacc

SEQ ID NO: 856226 - RNA, 19 nt, Artificial Sequence
  Description of Artificial Sequence: Synthetic oligonucleotide
  Sense strand starting at position 3190 of SEQ ID NO: 588311
agaugagagugcucgggaa

SEQ ID NO: 856227 - RNA, 19 nt, Artificial Sequence
  Description of Artificial Sequence: Synthetic oligonucleotide
  Antisense strand to SEQ ID NO: 856226
uucccgagcacucucaucu

SEQ ID NO: 856228 - RNA, 19 nt, Artificial Sequence
  Description of Artificial Sequence: Synthetic oligonucleotide
  Sense strand starting at position 3194 of SEQ ID NO: 588311
gagagugcucgggaaccga

SEQ ID NO: 856229 - RNA, 19 nt, Artificial Sequence
  Description of Artificial Sequence: Synthetic oligonucleotide
  Antisense strand to SEQ ID NO: 856228
ucgguucccgagcacucuc

SEQ ID NO: 856230 - RNA, 19 nt, Artificial Sequence
  Description of Artificial Sequence: Synthetic oligonucleotide
  Sense strand starting at position 3351 of SEQ ID NO: 588311
gaaugaugucaucgcugcu

SEQ ID NO: 856231 - RNA, 19 nt, Artificial Sequence
  Description of Artificial Sequence: Synthetic oligonucleotide
  Antisense strand to SEQ ID NO: 856230
agcagcgaugacaucauuc

SEQ ID NO: 856232 - RNA, 19 nt, Artificial Sequence
  Description of Artificial Sequence: Synthetic oligonucleotide
  Sense strand starting at position 3507 of SEQ ID NO: 588311
ggccuagccagcucguaua

SEQ ID NO: 856233 - RNA, 19 nt, Artificial Sequence
  Description of Artificial Sequence: Synthetic oligonucleotide
  Antisense strand to SEQ ID NO: 856232
uauacgagcuggcuaggcc

SEQ ID NO: 856234 - RNA, 19 nt, Artificial Sequence
  Description of Artificial Sequence: Synthetic oligonucleotide
  Sense strand starting at position 3666 of SEQ ID NO: 588311
agagcugaguucuccaagu

SEQ ID NO: 856235 - RNA, 19 nt, Artificial Sequence
  Description of Artificial Sequence: Synthetic oligonucleotide
  Antisense strand to SEQ ID NO: 856234
acuuggagaacucagcucu

SEQ ID NO: 856236 - RNA, 19 nt, Artificial Sequence
  Description of Artificial Sequence: Synthetic oligonucleotide
  Sense strand starting at position 3759 of SEQ ID NO: 588311
acagaugugcuuuguagcu

SEQ ID NO: 856237 - RNA, 19 nt, Artificial Sequence
  Description of Artificial Sequence: Synthetic oligonucleotide
  Antisense strand to SEQ ID NO: 856236
agcuacaaagcacaucugu

SEQ ID NO: 856238 - RNA, 19 nt, Artificial Sequence
  Description of Artificial Sequence: Synthetic oligonucleotide
  Sense strand starting at position 3773 of SEQ ID NO: 588311
uagcuuccugggcgaguaa

SEQ ID NO: 856239 - RNA, 19 nt, Artificial Sequence
  Description of Artificial Sequence: Synthetic oligonucleotide
  Antisense strand to SEQ ID NO: 856238
uuacucgcccaggaagcua

SEQ ID NO: 856240 - RNA, 19 nt, Artificial Sequence
  Description of Artificial Sequence: Synthetic oligonucleotide
  Sense strand starting at position 3782 of SEQ ID NO: 588311
gggcgaguaaccuacccau

SEQ ID NO: 856241 - RNA, 19 nt, Artificial Sequence
  Description of Artificial Sequence: Synthetic oligonucleotide
  Antisense strand to SEQ ID NO: 856240
auggguagguuacucgccc

SEQ ID NO: 856242 - RNA, 19 nt, Artificial Sequence
  Description of Artificial Sequence: Synthetic oligonucleotide
  Sense strand starting at position 3887 of SEQ ID NO: 588311
gccacuuagcaggagacaa

SEQ ID NO: 856243 - RNA, 19 nt, Artificial Sequence
  Description of Artificial Sequence: Synthetic oligonucleotide
  Antisense strand to SEQ ID NO: 856242
uugucuccugcuaaguggc

SEQ ID NO: 856244 - RNA, 19 nt, Artificial Sequence
  Description of Artificial Sequence: Synthetic oligonucleotide
  Sense strand starting at position 92 of SEQ ID NO: 588312
ggcaauuuguggucaguuu

SEQ ID NO: 856245 - RNA, 19 nt, Artificial Sequence
  Description of Artificial Sequence: Synthetic oligonucleotide
  Antisense strand to SEQ ID NO: 856244
aaacugaccacaaauugcc

SEQ ID NO: 856246 - RNA, 19 nt, Artificial Sequence
  Description of Artificial Sequence: Synthetic oligonucleotide
  Sense strand starting at position 103 of SEQ ID NO: 588312
gucaguuugcaacauuaua

SEQ ID NO: 856247 - RNA, 19 nt, Artificial Sequence
  Description of Artificial Sequence: Synthetic oligonucleotide
  Antisense strand to SEQ ID NO: 856246
uauaauguugcaaacugac

SEQ ID NO: 856248 - RNA, 19 nt, Artificial Sequence
  Description of Artificial Sequence: Synthetic oligonucleotide
  Sense strand starting at position 156 of SEQ ID NO: 588312
ucucaaagaucugcucuga

SEQ ID NO: 856249 - RNA, 19 nt, Artificial Sequence
  Description of Artificial Sequence: Synthetic oligonucleotide
  Antisense strand to SEQ ID NO: 856248
ucagagcagaucuuugaga

SEQ ID NO: 856250 - RNA, 19 nt, Artificial Sequence
  Description of Artificial Sequence: Synthetic oligonucleotide
  Sense strand starting at position 392 of SEQ ID NO: 588312
uguuuaaacuguuugagaa

SEQ ID NO: 856251 - RNA, 19 nt, Artificial Sequence
  Description of Artificial Sequence: Synthetic oligonucleotide
  Antisense strand to SEQ ID NO: 856250
uucucaaacaguuuaaaca

SEQ ID NO: 856252 - RNA, 19 nt, Artificial Sequence
  Description of Artificial Sequence: Synthetic oligonucleotide
  Sense strand starting at position 393 of SEQ ID NO: 588312
guuuaaacuguuugagaaa

SEQ ID NO: 856253 - RNA, 19 nt, Artificial Sequence
  Description of Artificial Sequence: Synthetic oligonucleotide
  Antisense strand to SEQ ID NO: 856252
uuucucaaacaguuuaaac

SEQ ID NO: 856254 - RNA, 19 nt, Artificial Sequence
  Description of Artificial Sequence: Synthetic oligonucleotide
  Sense strand starting at position 442 of SEQ ID NO: 588312
aguguuaccuagcuacauu

SEQ ID NO: 856255 - RNA, 19 nt, Artificial Sequence
  Description of Artificial Sequence: Synthetic oligonucleotide
  Antisense strand to SEQ ID NO: 856254
aauguagcuagguaacacu

SEQ ID NO: 856256 - RNA, 19 nt, Artificial Sequence
  Description of Artificial Sequence: Synthetic oligonucleotide
  Sense strand starting at position 484 of SEQ ID NO: 588312
ccgagaagugaucauaguu

SEQ ID NO: 856257 - RNA, 19 nt, Artificial Sequence
  Description of Artificial Sequence: Synthetic oligonucleotide
  Antisense strand to SEQ ID NO: 856256
aacuaugaucacuucucgg

SEQ ID NO: 856258 - RNA, 19 nt, Artificial Sequence
  Description of Artificial Sequence: Synthetic oligonucleotide
  Sense strand starting at position 539 of SEQ ID NO: 588312
auacuauacgucuggcaaa

SEQ ID NO: 856259 - RNA, 19 nt, Artificial Sequence
  Description of Artificial Sequence: Synthetic oligonucleotide
  Antisense strand to SEQ ID NO: 856258
uuugccagacguauaguau

SEQ ID NO: 856260 - RNA, 19 nt, Artificial Sequence
  Description of Artificial Sequence: Synthetic oligonucleotide
  Sense strand starting at position 570 of SEQ ID NO: 588312
uacguuuaagaguagauac

SEQ ID NO: 856261 - RNA, 19 nt, Artificial Sequence
  Description of Artificial Sequence: Synthetic oligonucleotide
  Antisense strand to SEQ ID NO: 856260
guaucuacucuuaaacgua

SEQ ID NO: 856262 - RNA, 19 nt, Artificial Sequence
  Description of Artificial Sequence: Synthetic oligonucleotide
  Sense strand starting at position 572 of SEQ ID NO: 588312
cguuuaagaguagauacua

SEQ ID NO: 856263 - RNA, 19 nt, Artificial Sequence
  Description of Artificial Sequence: Synthetic oligonucleotide
  Antisense strand to SEQ ID NO: 856262
uaguaucuacucuuaaacg

SEQ ID NO: 856264 - RNA, 19 nt, Artificial Sequence
  Description of Artificial Sequence: Synthetic oligonucleotide
  Sense strand starting at position 807 of SEQ ID NO: 588312
cgagcaaucucuuugcaaa

SEQ ID NO: 856265 - RNA, 19 nt, Artificial Sequence
  Description of Artificial Sequence: Synthetic oligonucleotide
  Antisense strand to SEQ ID NO: 856264
uuugcaaagagauugcucg

SEQ ID NO: 856266 - RNA, 19 nt, Artificial Sequence
  Description of Artificial Sequence: Synthetic oligonucleotide
  Sense strand starting at position 1081 of SEQ ID NO: 588312
cagucuaccggucauuaca

SEQ ID NO: 856267 - RNA, 19 nt, Artificial Sequence
  Description of Artificial Sequence: Synthetic oligonucleotide
  Antisense strand to SEQ ID NO: 856266
uguaaugaccgguagacug

SEQ ID NO: 856268 - RNA, 19 nt, Artificial Sequence
  Description of Artificial Sequence: Synthetic oligonucleotide
  Sense strand starting at position 1089 of SEQ ID NO: 588312
cggucauuacacuaucacu

SEQ ID NO: 856269 - RNA, 19 nt, Artificial Sequence
  Description of Artificial Sequence: Synthetic oligonucleotide
  Antisense strand to SEQ ID NO: 856268
agugauaguguaaugaccg

SEQ ID NO: 856270 - RNA, 19 nt, Artificial Sequence
  Description of Artificial Sequence: Synthetic oligonucleotide
  Sense strand starting at position 1100 of SEQ ID NO: 588312
cuaucacugucuuuggcaa

SEQ ID NO: 856271 - RNA, 19 nt, Artificial Sequence
  Description of Artificial Sequence: Synthetic oligonucleotide
  Antisense strand to SEQ ID NO: 856270
uugccaaagacagugauag

SEQ ID NO: 856272 - RNA, 19 nt, Artificial Sequence
  Description of Artificial Sequence: Synthetic oligonucleotide
  Sense strand starting at position 1575 of SEQ ID NO: 588312
gacaguagcuccuuggaga

SEQ ID NO: 856273 - RNA, 19 nt, Artificial Sequence
  Description of Artificial Sequence: Synthetic oligonucleotide
  Antisense strand to SEQ ID NO: 856272
ucuccaaggagcuacuguc

SEQ ID NO: 856274 - RNA, 19 nt, Artificial Sequence
  Description of Artificial Sequence: Synthetic oligonucleotide
  Sense strand starting at position 1576 of SEQ ID NO: 588312
acaguagcuccuuggagau

SEQ ID NO: 856275 - RNA, 19 nt, Artificial Sequence
  Description of Artificial Sequence: Synthetic oligonucleotide
  Antisense strand to SEQ ID NO: 856274
aucuccaaggagcuacugu

SEQ ID NO: 856276 - RNA, 19 nt, Artificial Sequence
  Description of Artificial Sequence: Synthetic oligonucleotide
  Sense strand starting at position 2311 of SEQ ID NO: 588312
gggaaagcucuuggaacag

SEQ ID NO: 856277 - RNA, 19 nt, Artificial Sequence
  Description of Artificial Sequence: Synthetic oligonucleotide
  Antisense strand to SEQ ID NO: 856276
cuguuccaagagcuuuccc

SEQ ID NO: 856278 - RNA, 19 nt, Artificial Sequence
  Description of Artificial Sequence: Synthetic oligonucleotide
  Sense strand starting at position 2467 of SEQ ID NO: 588312
gguccaaggcggcauaauu

SEQ ID NO: 856279 - RNA, 19 nt, Artificial Sequence
  Description of Artificial Sequence: Synthetic oligonucleotide
  Antisense strand to SEQ ID NO: 856278
aauuaugccgccuuggacc

SEQ ID NO: 856280 - RNA, 19 nt, Artificial Sequence
  Description of Artificial Sequence: Synthetic oligonucleotide
  Sense strand starting at position 2476 of SEQ ID NO: 588312
cggcauaauuaaucaaauu

SEQ ID NO: 856281 - RNA, 19 nt, Artificial Sequence
  Description of Artificial Sequence: Synthetic oligonucleotide
  Antisense strand to SEQ ID NO: 856280
aauuugauuaauuaugccg

SEQ ID NO: 856282 - RNA, 19 nt, Artificial Sequence
  Description of Artificial Sequence: Synthetic oligonucleotide
  Sense strand starting at position 2562 of SEQ ID NO: 588312
cugauucgugcagauugag

SEQ ID NO: 856283 - RNA, 19 nt, Artificial Sequence
  Description of Artificial Sequence: Synthetic oligonucleotide
  Antisense strand to SEQ ID NO: 856282
cucaaucugcacgaaucag

SEQ ID NO: 856284 - RNA, 19 nt, Artificial Sequence
  Description of Artificial Sequence: Synthetic oligonucleotide
  Sense strand starting at position 2648 of SEQ ID NO: 588312
ggacuccucuggucagguu

SEQ ID NO: 856285 - RNA, 19 nt, Artificial Sequence
  Description of Artificial Sequence: Synthetic oligonucleotide
  Antisense strand to SEQ ID NO: 856284
aaccugaccagaggagucc

SEQ ID NO: 856286 - RNA, 19 nt, Artificial Sequence
  Description of Artificial Sequence: Synthetic oligonucleotide
  Sense strand starting at position 2672 of SEQ ID NO: 588312
ccaguuuggcuacagagua

SEQ ID NO: 856287 - RNA, 19 nt, Artificial Sequence
  Description of Artificial Sequence: Synthetic oligonucleotide
  Antisense strand to SEQ ID NO: 856286
uacucuguagccaaacugg

SEQ ID NO: 856288 - RNA, 19 nt, Artificial Sequence
  Description of Artificial Sequence: Synthetic oligonucleotide
  Sense strand starting at position 2782 of SEQ ID NO: 588312
aacguaagaccucggacuu

SEQ ID NO: 856289 - RNA, 19 nt, Artificial Sequence
  Description of Artificial Sequence: Synthetic oligonucleotide
  Antisense strand to SEQ ID NO: 856288
aaguccgaggucuuacguu

SEQ ID NO: 856290 - RNA, 19 nt, Artificial Sequence
  Description of Artificial Sequence: Synthetic oligonucleotide
  Sense strand starting at position 2841 of SEQ ID NO: 588312
cuucuuuauccagggacac

SEQ ID NO: 856291 - RNA, 19 nt, Artificial Sequence
  Description of Artificial Sequence: Synthetic oligonucleotide
  Antisense strand to SEQ ID NO: 856290
gugucccuggauaaagaag

SEQ ID NO: 856292 - RNA, 19 nt, Artificial Sequence
  Description of Artificial Sequence: Synthetic oligonucleotide
  Sense strand starting at position 2842 of SEQ ID NO: 588312
uucuuuauccagggacaca

SEQ ID NO: 856293 - RNA, 19 nt, Artificial Sequence
  Description of Artificial Sequence: Synthetic oligonucleotide
  Antisense strand to SEQ ID NO: 856292
ugugucccuggauaaagaa

SEQ ID NO: 856294 - RNA, 19 nt, Artificial Sequence
  Description of Artificial Sequence: Synthetic oligonucleotide
  Sense strand starting at position 2862 of SEQ ID NO: 588312
cagguaugucaguaucuag

SEQ ID NO: 856295 - RNA, 19 nt, Artificial Sequence
  Description of Artificial Sequence: Synthetic oligonucleotide
  Antisense strand to SEQ ID NO: 856294
cuagauacugacauaccug

SEQ ID NO: 856296 - RNA, 19 nt, Artificial Sequence
  Description of Artificial Sequence: Synthetic oligonucleotide
  Sense strand starting at position 3060 of SEQ ID NO: 588312
ccaguuagacuuuagugag

SEQ ID NO: 856297 - RNA, 19 nt, Artificial Sequence
  Description of Artificial Sequence: Synthetic oligonucleotide
  Antisense strand to SEQ ID NO: 856296
cucacuaaagucuaacugg

SEQ ID NO: 856298 - RNA, 19 nt, Artificial Sequence
  Description of Artificial Sequence: Synthetic oligonucleotide
  Sense strand starting at position 3152 of SEQ ID NO: 588312
ccugauagaucagagagaa

SEQ ID NO: 856299 - RNA, 19 nt, Artificial Sequence
  Description of Artificial Sequence: Synthetic oligonucleotide
  Antisense strand to SEQ ID NO: 856298
uucucucugaucuaucagg

SEQ ID NO: 856300 - RNA, 19 nt, Artificial Sequence
  Description of Artificial Sequence: Synthetic oligonucleotide
  Sense strand starting at position 3167 of SEQ ID NO: 588312
agaauuucuuugggaaagu

SEQ ID NO: 856301 - RNA, 19 nt, Artificial Sequence
  Description of Artificial Sequence: Synthetic oligonucleotide
  Antisense strand to SEQ ID NO: 856300
acuuucccaaagaaauucu

SEQ ID NO: 856302 - RNA, 19 nt, Artificial Sequence
  Description of Artificial Sequence: Synthetic oligonucleotide
  Sense strand starting at position 3168 of SEQ ID NO: 588312
gaauuucuuugggaaagug

SEQ ID NO: 856303 - RNA, 19 nt, Artificial Sequence
  Description of Artificial Sequence: Synthetic oligonucleotide
  Antisense strand to SEQ ID NO: 856302
cacuuucccaaagaaauuc

SEQ ID NO: 856304 - RNA, 19 nt, Artificial Sequence
  Description of Artificial Sequence: Synthetic oligonucleotide
  Sense strand starting at position 3185 of SEQ ID NO: 588312
uggcaauugagcugaguuu

SEQ ID NO: 856305 - RNA, 19 nt, Artificial Sequence
  Description of Artificial Sequence: Synthetic oligonucleotide
  Antisense strand to SEQ ID NO: 856304
aaacucagcucaauugcca

SEQ ID NO: 856306 - RNA, 19 nt, Artificial Sequence
  Description of Artificial Sequence: Synthetic oligonucleotide
  Sense strand starting at position 3244 of SEQ ID NO: 588312
gcuauacuaagguguggaa

SEQ ID NO: 856307 - RNA, 19 nt, Artificial Sequence
  Description of Artificial Sequence: Synthetic oligonucleotide
  Antisense strand to SEQ ID NO: 856306
uuccacaccuuaguauagc

SEQ ID NO: 856308 - RNA, 19 nt, Artificial Sequence
  Description of Artificial Sequence: Synthetic oligonucleotide
  Sense strand starting at position 3246 of SEQ ID NO: 588312
uauacuaagguguggaaga

SEQ ID NO: 856309 - RNA, 19 nt, Artificial Sequence
  Description of Artificial Sequence: Synthetic oligonucleotide
  Antisense strand to SEQ ID NO: 856308
ucuuccacaccuuaguaua

SEQ ID NO: 856310 - RNA, 19 nt, Artificial Sequence
  Description of Artificial Sequence: Synthetic oligonucleotide
  Sense strand starting at position 3256 of SEQ ID NO: 588312
uguggaagaauaugauguu

SEQ ID NO: 856311 - RNA, 19 nt, Artificial Sequence
  Description of Artificial Sequence: Synthetic oligonucleotide
  Antisense strand to SEQ ID NO: 856310
aacaucauauucuuccaca

SEQ ID NO: 856312 - RNA, 19 nt, Artificial Sequence
  Description of Artificial Sequence: Synthetic oligonucleotide
  Sense strand starting at position 3295 of SEQ ID NO: 588312
uggauauagccauagcuaa

SEQ ID NO: 856313 - RNA, 19 nt, Artificial Sequence
  Description of Artificial Sequence: Synthetic oligonucleotide
  Antisense strand to SEQ ID NO: 856312
uuagcuauggcuauaucca

SEQ ID NO: 856314 - RNA, 19 nt, Artificial Sequence
  Description of Artificial Sequence: Synthetic oligonucleotide
  Sense strand starting at position 3360 of SEQ ID NO: 588312
ugccuuugucuguugguau

SEQ ID NO: 856315 - RNA, 19 nt, Artificial Sequence
  Description of Artificial Sequence: Synthetic oligonucleotide
  Antisense strand to SEQ ID NO: 856314
auaccaacagacaaaggca

SEQ ID NO: 856316 - RNA, 19 nt, Artificial Sequence
  Description of Artificial Sequence: Synthetic oligonucleotide
  Sense strand starting at position 3399 of SEQ ID NO: 588312
ugaacuuuauccuuggaag

SEQ ID NO: 856317 - RNA, 19 nt, Artificial Sequence
  Description of Artificial Sequence: Synthetic oligonucleotide
  Antisense strand to SEQ ID NO: 856316
cuuccaaggauaaaguuca

SEQ ID NO: 856318 - RNA, 19 nt, Artificial Sequence
  Description of Artificial Sequence: Synthetic oligonucleotide
  Sense strand starting at position 3479 of SEQ ID NO: 588312
acagaacuauccgcaguuu

SEQ ID NO: 856319 - RNA, 19 nt, Artificial Sequence
  Description of Artificial Sequence: Synthetic oligonucleotide
  Antisense strand to SEQ ID NO: 856318
aaacugcggauaguucugu

SEQ ID NO: 856320 - RNA, 19 nt, Artificial Sequence
  Description of Artificial Sequence: Synthetic oligonucleotide
  Sense strand starting at position 3587 of SEQ ID NO: 588312
ucaccucugguauaaaguu

SEQ ID NO: 856321 - RNA, 19 nt, Artificial Sequence
  Description of Artificial Sequence: Synthetic oligonucleotide
  Antisense strand to SEQ ID NO: 856320
aacuuuauaccagagguga

SEQ ID NO: 856322 - RNA, 19 nt, Artificial Sequence
  Description of Artificial Sequence: Synthetic oligonucleotide
  Sense strand starting at position 3653 of SEQ ID NO: 588312
guacuagggcuuuguaaua

SEQ ID NO: 856323 - RNA, 19 nt, Artificial Sequence
  Description of Artificial Sequence: Synthetic oligonucleotide
  Antisense strand to SEQ ID NO: 856322
uauuacaaagcccuaguac

SEQ ID NO: 856324 - RNA, 19 nt, Artificial Sequence
  Description of Artificial Sequence: Synthetic oligonucleotide
  Sense strand starting at position 386 of SEQ ID NO: 588313
cacugccuuugauggagaa

SEQ ID NO: 856325 - RNA, 19 nt, Artificial Sequence
  Description of Artificial Sequence: Synthetic oligonucleotide
  Antisense strand to SEQ ID NO: 856324
uucuccaucaaaggcagug

SEQ ID NO: 856326 - RNA, 19 nt, Artificial Sequence
  Description of Artificial Sequence: Synthetic oligonucleotide
  Sense strand starting at position 486 of SEQ ID NO: 588313
ggagauggcugauacagaa

SEQ ID NO: 856327 - RNA, 19 nt, Artificial Sequence
  Description of Artificial Sequence: Synthetic oligonucleotide
  Antisense strand to SEQ ID NO: 856326
uucuguaucagccaucucc

SEQ ID NO: 856328 - RNA, 19 nt, Artificial Sequence
  Description of Artificial Sequence: Synthetic oligonucleotide
  Sense strand starting at position 561 of SEQ ID NO: 588313
uggguuaaugauggguuga

SEQ ID NO: 856329 - RNA, 19 nt, Artificial Sequence
  Description of Artificial Sequence: Synthetic oligonucleotide
  Antisense strand to SEQ ID NO: 856328
ucaacccaucauuaaccca

SEQ ID NO: 856330 - RNA, 19 nt, Artificial Sequence
  Description of Artificial Sequence: Synthetic oligonucleotide
  Sense strand starting at position 562 of SEQ ID NO: 588313
ggguuaaugauggguugaa

SEQ ID NO: 856331 - RNA, 19 nt, Artificial Sequence
  Description of Artificial Sequence: Synthetic oligonucleotide
  Antisense strand to SEQ ID NO: 856330
uucaacccaucauuaaccc

SEQ ID NO: 856332 - RNA, 19 nt, Artificial Sequence
  Description of Artificial Sequence: Synthetic oligonucleotide
  Sense strand starting at position 563 of SEQ ID NO: 588313
gguuaaugauggguugaaa

SEQ ID NO: 856333 - RNA, 19 nt, Artificial Sequence
  Description of Artificial Sequence: Synthetic oligonucleotide
  Antisense strand to SEQ ID NO: 856332
uuucaacccaucauuaacc

SEQ ID NO: 856334 - RNA, 19 nt, Artificial Sequence
  Description of Artificial Sequence: Synthetic oligonucleotide
  Sense strand starting at position 583 of SEQ ID NO: 588313
ggaggaauguggagaguug

SEQ ID NO: 856335 - RNA, 19 nt, Artificial Sequence
  Description of Artificial Sequence: Synthetic oligonucleotide
  Antisense strand to SEQ ID NO: 856334
caacucuccacauuccucc

SEQ ID NO: 856336 - RNA, 19 nt, Artificial Sequence
  Description of Artificial Sequence: Synthetic oligonucleotide
  Sense strand starting at position 609 of SEQ ID NO: 588313
ggaggaaaugucuguggaa

SEQ ID NO: 856337 - RNA, 19 nt, Artificial Sequence
  Description of Artificial Sequence: Synthetic oligonucleotide
  Antisense strand to SEQ ID NO: 856336
uuccacagacauuuccucc

SEQ ID NO: 856338 - RNA, 19 nt, Artificial Sequence
  Description of Artificial Sequence: Synthetic oligonucleotide
  Sense strand starting at position 779 of SEQ ID NO: 588313
ggaggguuugacuggguau

SEQ ID NO: 856339 - RNA, 19 nt, Artificial Sequence
  Description of Artificial Sequence: Synthetic oligonucleotide
  Antisense strand to SEQ ID NO: 856338
auacccagucaaacccucc

SEQ ID NO: 856340 - RNA, 19 nt, Artificial Sequence
  Description of Artificial Sequence: Synthetic oligonucleotide
  Sense strand starting at position 780 of SEQ ID NO: 588313
gaggguuugacuggguaug

SEQ ID NO: 856341 - RNA, 19 nt, Artificial Sequence
  Description of Artificial Sequence: Synthetic oligonucleotide
  Antisense strand to SEQ ID NO: 856340
cauacccagucaaacccuc

SEQ ID NO: 856342 - RNA, 19 nt, Artificial Sequence
  Description of Artificial Sequence: Synthetic oligonucleotide
  Sense strand starting at position 1997 of SEQ ID NO: 588313
cucagccuccacugugauu

SEQ ID NO: 856343 - RNA, 19 nt, Artificial Sequence
  Description of Artificial Sequence: Synthetic oligonucleotide
  Antisense strand to SEQ ID NO: 856342
aaucacaguggaggcugag

SEQ ID NO: 856344 - RNA, 19 nt, Artificial Sequence
  Description of Artificial Sequence: Synthetic oligonucleotide
  Sense strand starting at position 2006 of SEQ ID NO: 588313
cacugugauugggcaguuu

SEQ ID NO: 856345 - RNA, 19 nt, Artificial Sequence
  Description of Artificial Sequence: Synthetic oligonucleotide
  Antisense strand to SEQ ID NO: 856344
aaacugcccaaucacagug

SEQ ID NO: 856346 - RNA, 19 nt, Artificial Sequence
  Description of Artificial Sequence: Synthetic oligonucleotide
  Sense strand starting at position 2095 of SEQ ID NO: 588313
ggcagugauugguguggau

SEQ ID NO: 856347 - RNA, 19 nt, Artificial Sequence
  Description of Artificial Sequence: Synthetic oligonucleotide
  Antisense strand to SEQ ID NO: 856346
auccacaccaaucacugcc

SEQ ID NO: 856348 - RNA, 19 nt, Artificial Sequence
  Description of Artificial Sequence: Synthetic oligonucleotide
  Sense strand starting at position 2097 of SEQ ID NO: 588313
cagugauugguguggaucu

SEQ ID NO: 856349 - RNA, 19 nt, Artificial Sequence
  Description of Artificial Sequence: Synthetic oligonucleotide
  Antisense strand to SEQ ID NO: 856348
agauccacaccaaucacug

SEQ ID NO: 856350 - RNA, 19 nt, Artificial Sequence
  Description of Artificial Sequence: Synthetic oligonucleotide
  Sense strand starting at position 2099 of SEQ ID NO: 588313
gugauugguguggaucuga

SEQ ID NO: 856351 - RNA, 19 nt, Artificial Sequence
  Description of Artificial Sequence: Synthetic oligonucleotide
  Antisense strand to SEQ ID NO: 856350
ucagauccacaccaaucac

SEQ ID NO: 856352 - RNA, 19 nt, Artificial Sequence
  Description of Artificial Sequence: Synthetic oligonucleotide
  Sense strand starting at position 2154 of SEQ ID NO: 588313
gccaucuugucgugccauu

SEQ ID NO: 856353 - RNA, 19 nt, Artificial Sequence
  Description of Artificial Sequence: Synthetic oligonucleotide
  Antisense strand to SEQ ID NO: 856352
aauggcacgacaagauggc

SEQ ID NO: 856354 - RNA, 19 nt, Artificial Sequence
  Description of Artificial Sequence: Synthetic oligonucleotide
  Sense strand starting at position 2197 of SEQ ID NO: 588313
ccucgcucgcccuuugauu

SEQ ID NO: 856355 - RNA, 19 nt, Artificial Sequence
  Description of Artificial Sequence: Synthetic oligonucleotide
  Antisense strand to SEQ ID NO: 856354
aaucaaagggcgagcgagg

SEQ ID NO: 856356 - RNA, 19 nt, Artificial Sequence
  Description of Artificial Sequence: Synthetic oligonucleotide
  Sense strand starting at position 2219 of SEQ ID NO: 588313
uugguucgugccugagacu

SEQ ID NO: 856357 - RNA, 19 nt, Artificial Sequence
  Description of Artificial Sequence: Synthetic oligonucleotide
  Antisense strand to SEQ ID NO: 856356
agucucaggcacgaaccaa

SEQ ID NO: 856358 - RNA, 19 nt, Artificial Sequence
  Description of Artificial Sequence: Synthetic oligonucleotide
  Sense strand starting at position 2267 of SEQ ID NO: 588313
aguccaaucuccggguuga

SEQ ID NO: 856359 - RNA, 19 nt, Artificial Sequence
  Description of Artificial Sequence: Synthetic oligonucleotide
  Antisense strand to SEQ ID NO: 856358
ucaacccggagauuggacu

SEQ ID NO: 856360 - RNA, 19 nt, Artificial Sequence
  Description of Artificial Sequence: Synthetic oligonucleotide
  Sense strand starting at position 2334 of SEQ ID NO: 588313
gaacccuugcgacgucaaa

SEQ ID NO: 856361 - RNA, 19 nt, Artificial Sequence
  Description of Artificial Sequence: Synthetic oligonucleotide
  Antisense strand to SEQ ID NO: 856360
uuugacgucgcaaggguuc

SEQ ID NO: 856362 - RNA, 19 nt, Artificial Sequence
  Description of Artificial Sequence: Synthetic oligonucleotide
  Sense strand starting at position 2573 of SEQ ID NO: 588313
ccugaugugaccuaacgga

SEQ ID NO: 856363 - RNA, 19 nt, Artificial Sequence
  Description of Artificial Sequence: Synthetic oligonucleotide
  Antisense strand to SEQ ID NO: 856362
uccguuaggucacaucagg

SEQ ID NO: 856364 - RNA, 19 nt, Artificial Sequence
  Description of Artificial Sequence: Synthetic oligonucleotide
  Sense strand starting at position 2824 of SEQ ID NO: 588313
ccuucuuggcccuagauga

SEQ ID NO: 856365 - RNA, 19 nt, Artificial Sequence
  Description of Artificial Sequence: Synthetic oligonucleotide
  Antisense strand to SEQ ID NO: 856364
ucaucuagggccaagaagg

SEQ ID NO: 856366 - RNA, 19 nt, Artificial Sequence
  Description of Artificial Sequence: Synthetic oligonucleotide
  Sense strand starting at position 2834 of SEQ ID NO: 588313
ccuagaugaucuccugucu

SEQ ID NO: 856367 - RNA, 19 nt, Artificial Sequence
  Description of Artificial Sequence: Synthetic oligonucleotide
  Antisense strand to SEQ ID NO: 856366
agacaggagaucaucuagg

SEQ ID NO: 856368 - RNA, 19 nt, Artificial Sequence
  Description of Artificial Sequence: Synthetic oligonucleotide
  Sense strand starting at position 2850 of SEQ ID NO: 588313
ucuuccuucccgcagugau

SEQ ID NO: 856369 - RNA, 19 nt, Artificial Sequence
  Description of Artificial Sequence: Synthetic oligonucleotide
  Antisense strand to SEQ ID NO: 856368
aucacugcgggaaggaaga

SEQ ID NO: 856370 - RNA, 19 nt, Artificial Sequence
  Description of Artificial Sequence: Synthetic oligonucleotide
  Sense strand starting at position 2875 of SEQ ID NO: 588313
ugucuuauucuugguucuu

SEQ ID NO: 856371 - RNA, 19 nt, Artificial Sequence
  Description of Artificial Sequence: Synthetic oligonucleotide
  Antisense strand to SEQ ID NO: 856370
aagaaccaagaauaagaca

SEQ ID NO: 856372 - RNA, 19 nt, Artificial Sequence
  Description of Artificial Sequence: Synthetic oligonucleotide
  Sense strand starting at position 2876 of SEQ ID NO: 588313
gucuuauucuugguucuuu

SEQ ID NO: 856373 - RNA, 19 nt, Artificial Sequence
  Description of Artificial Sequence: Synthetic oligonucleotide
  Antisense strand to SEQ ID NO: 856372
aaagaaccaagaauaagac

SEQ ID NO: 856374 - RNA, 19 nt, Artificial Sequence
  Description of Artificial Sequence: Synthetic oligonucleotide
  Sense strand starting at position 2881 of SEQ ID NO: 588313
auucuugguucuuucuuua

SEQ ID NO: 856375 - RNA, 19 nt, Artificial Sequence
  Description of Artificial Sequence: Synthetic oligonucleotide
  Antisense strand to SEQ ID NO: 856374
uaaagaaagaaccaagaau

SEQ ID NO: 856376 - RNA, 19 nt, Artificial Sequence
  Description of Artificial Sequence: Synthetic oligonucleotide
  Sense strand starting at position 3291 of SEQ ID NO: 588313
gaggucuugcuagaaacug

SEQ ID NO: 856377 - RNA, 19 nt, Artificial Sequence
  Description of Artificial Sequence: Synthetic oligonucleotide
  Antisense strand to SEQ ID NO: 856376
caguuucuagcaagaccuc

SEQ ID NO: 856378 - RNA, 19 nt, Artificial Sequence
  Description of Artificial Sequence: Synthetic oligonucleotide
  Sense strand starting at position 3366 of SEQ ID NO: 588313
uggagucaugucuguagau

SEQ ID NO: 856379 - RNA, 19 nt, Artificial Sequence
  Description of Artificial Sequence: Synthetic oligonucleotide
  Antisense strand to SEQ ID NO: 856378
aucuacagacaugacucca

SEQ ID NO: 856380 - RNA, 19 nt, Artificial Sequence
  Description of Artificial Sequence: Synthetic oligonucleotide
  Sense strand starting at position 3367 of SEQ ID NO: 588313
ggagucaugucuguagauu

SEQ ID NO: 856381 - RNA, 19 nt, Artificial Sequence
  Description of Artificial Sequence: Synthetic oligonucleotide
  Antisense strand to SEQ ID NO: 856380
aaucuacagacaugacucc

SEQ ID NO: 856382 - RNA, 19 nt, Artificial Sequence
  Description of Artificial Sequence: Synthetic oligonucleotide
  Sense strand starting at position 3368 of SEQ ID NO: 588313
gagucaugucuguagauuc

SEQ ID NO: 856383 - RNA, 19 nt, Artificial Sequence
  Description of Artificial Sequence: Synthetic oligonucleotide
  Antisense strand to SEQ ID NO: 856382
gaaucuacagacaugacuc

SEQ ID NO: 856384 - RNA, 19 nt, Artificial Sequence
  Description of Artificial Sequence: Synthetic oligonucleotide
  Sense strand starting at position 3439 of SEQ ID NO: 588313
gggcaugaggugugaagga

SEQ ID NO: 856385 - RNA, 19 nt, Artificial Sequence
  Description of Artificial Sequence: Synthetic oligonucleotide
  Antisense strand to SEQ ID NO: 856384
uccuucacaccucaugccc

SEQ ID NO: 856386 - RNA, 19 nt, Artificial Sequence
  Description of Artificial Sequence: Synthetic oligonucleotide
  Sense strand starting at position 3518 of SEQ ID NO: 588313
agcagagaugggugaugaa

SEQ ID NO: 856387 - RNA, 19 nt, Artificial Sequence
  Description of Artificial Sequence: Synthetic oligonucleotide
  Antisense strand to SEQ ID NO: 856386
uucaucacccaucucugcu

SEQ ID NO: 856388 - RNA, 19 nt, Artificial Sequence
  Description of Artificial Sequence: Synthetic oligonucleotide
  Sense strand starting at position 3521 of SEQ ID NO: 588313
agagaugggugaugaaugu

SEQ ID NO: 856389 - RNA, 19 nt, Artificial Sequence
  Description of Artificial Sequence: Synthetic oligonucleotide
  Antisense strand to SEQ ID NO: 856388
acauucaucacccaucucu

SEQ ID NO: 856390 - RNA, 19 nt, Artificial Sequence
  Description of Artificial Sequence: Synthetic oligonucleotide
  Sense strand starting at position 3544 of SEQ ID NO: 588313
aaaugagcaugaggaauuu

SEQ ID NO: 856391 - RNA, 19 nt, Artificial Sequence
  Description of Artificial Sequence: Synthetic oligonucleotide
  Antisense strand to SEQ ID NO: 856390
aaauuccucaugcucauuu

SEQ ID NO: 856392 - RNA, 19 nt, Artificial Sequence
  Description of Artificial Sequence: Synthetic oligonucleotide
  Sense strand starting at position 3864 of SEQ ID NO: 588313
gauggacaucucuguguga

SEQ ID NO: 856393 - RNA, 19 nt, Artificial Sequence
  Description of Artificial Sequence: Synthetic oligonucleotide
  Antisense strand to SEQ ID NO: 856392
ucacacagagauguccauc

SEQ ID NO: 856394 - RNA, 19 nt, Artificial Sequence
  Description of Artificial Sequence: Synthetic oligonucleotide
  Sense strand starting at position 3866 of SEQ ID NO: 588313
uggacaucucugugugaca

SEQ ID NO: 856395 - RNA, 19 nt, Artificial Sequence
  Description of Artificial Sequence: Synthetic oligonucleotide
  Antisense strand to SEQ ID NO: 856394
ugucacacagagaugucca

SEQ ID NO: 856396 - RNA, 19 nt, Artificial Sequence
  Description of Artificial Sequence: Synthetic oligonucleotide
  Sense strand starting at position 3867 of SEQ ID NO: 588313
ggacaucucugugugacac

SEQ ID NO: 856397 - RNA, 19 nt, Artificial Sequence
  Description of Artificial Sequence: Synthetic oligonucleotide
  Antisense strand to SEQ ID NO: 856396
gugucacacagagaugucc

SEQ ID NO: 856398 - RNA, 19 nt, Artificial Sequence
  Description of Artificial Sequence: Synthetic oligonucleotide
  Sense strand starting at position 3868 of SEQ ID NO: 588313
gacaucucugugugacaca

SEQ ID NO: 856399 - RNA, 19 nt, Artificial Sequence
  Description of Artificial Sequence: Synthetic oligonucleotide
  Antisense strand to SEQ ID NO: 856398
ugugucacacagagauguc

SEQ ID NO: 856400 - RNA, 19 nt, Artificial Sequence
  Description of Artificial Sequence: Synthetic oligonucleotide
  Sense strand starting at position 3873 of SEQ ID NO: 588313
cucugugugacacagagau

SEQ ID NO: 856401 - RNA, 19 nt, Artificial Sequence
  Description of Artificial Sequence: Synthetic oligonucleotide
  Antisense strand to SEQ ID NO: 856400
aucucugugucacacagag

SEQ ID NO: 856402 - RNA, 19 nt, Artificial Sequence
  Description of Artificial Sequence: Synthetic oligonucleotide
  Sense strand starting at position 41 of SEQ ID NO: 588314
aggagcauuuguuauaaga

SEQ ID NO: 856403 - RNA, 19 nt, Artificial Sequence
  Description of Artificial Sequence: Synthetic oligonucleotide
  Antisense strand to SEQ ID NO: 856402
ucuuauaacaaaugcuccu

SEQ ID NO: 856404 - RNA, 19 nt, Artificial Sequence
  Description of Artificial Sequence: Synthetic oligonucleotide
  Sense strand starting at position 43 of SEQ ID NO: 588314
gagcauuuguuauaagaga

SEQ ID NO: 856405 - RNA, 19 nt, Artificial Sequence
  Description of Artificial Sequence: Synthetic oligonucleotide
  Antisense strand to SEQ ID NO: 856404
ucucuuauaacaaaugcuc

SEQ ID NO: 856406 - RNA, 19 nt, Artificial Sequence
  Description of Artificial Sequence: Synthetic oligonucleotide
  Sense strand starting at position 48 of SEQ ID NO: 588314
uuuguuauaagagaaacgu

SEQ ID NO: 856407 - RNA, 19 nt, Artificial Sequence
  Description of Artificial Sequence: Synthetic oligonucleotide
  Antisense strand to SEQ ID NO: 856406
acguuucucuuauaacaaa

SEQ ID NO: 856408 - RNA, 19 nt, Artificial Sequence
  Description of Artificial Sequence: Synthetic oligonucleotide
  Sense strand starting at position 102 of SEQ ID NO: 588314
cggugugucugugguggau

SEQ ID NO: 856409 - RNA, 19 nt, Artificial Sequence
  Description of Artificial Sequence: Synthetic oligonucleotide
  Antisense strand to SEQ ID NO: 856408
auccaccacagacacaccg

SEQ ID NO: 856410 - RNA, 19 nt, Artificial Sequence
  Description of Artificial Sequence: Synthetic oligonucleotide
  Sense strand starting at position 104 of SEQ ID NO: 588314
gugugucugugguggauau

SEQ ID NO: 856411 - RNA, 19 nt, Artificial Sequence
  Description of Artificial Sequence: Synthetic oligonucleotide
  Antisense strand to SEQ ID NO: 856410
auauccaccacagacacac

SEQ ID NO: 856412 - RNA, 19 nt, Artificial Sequence
  Description of Artificial Sequence: Synthetic oligonucleotide
  Sense strand starting at position 106 of SEQ ID NO: 588314
gugucugugguggauauca

SEQ ID NO: 856413 - RNA, 19 nt, Artificial Sequence
  Description of Artificial Sequence: Synthetic oligonucleotide
  Antisense strand to SEQ ID NO: 856412
ugauauccaccacagacac

SEQ ID NO: 856414 - RNA, 19 nt, Artificial Sequence
  Description of Artificial Sequence: Synthetic oligonucleotide
  Sense strand starting at position 226 of SEQ ID NO: 588314
accagagucuuucuagcaa

SEQ ID NO: 856415 - RNA, 19 nt, Artificial Sequence
  Description of Artificial Sequence: Synthetic oligonucleotide
  Antisense strand to SEQ ID NO: 856414
uugcuagaaagacucuggu

SEQ ID NO: 856416 - RNA, 19 nt, Artificial Sequence
  Description of Artificial Sequence: Synthetic oligonucleotide
  Sense strand starting at position 230 of SEQ ID NO: 588314
gagucuuucuagcaauguc

SEQ ID NO: 856417 - RNA, 19 nt, Artificial Sequence
  Description of Artificial Sequence: Synthetic oligonucleotide
  Antisense strand to SEQ ID NO: 856416
gacauugcuagaaagacuc

SEQ ID NO: 856418 - RNA, 19 nt, Artificial Sequence
  Description of Artificial Sequence: Synthetic oligonucleotide
  Sense strand starting at position 318 of SEQ ID NO: 588314
gguguccuuccaggaguga

SEQ ID NO: 856419 - RNA, 19 nt, Artificial Sequence
  Description of Artificial Sequence: Synthetic oligonucleotide
  Antisense strand to SEQ ID NO: 856418
ucacuccuggaaggacacc

SEQ ID NO: 856420 - RNA, 19 nt, Artificial Sequence
  Description of Artificial Sequence: Synthetic oligonucleotide
  Sense strand starting at position 432 of SEQ ID NO: 588314
uggguugacucaugguucu

SEQ ID NO: 856421 - RNA, 19 nt, Artificial Sequence
  Description of Artificial Sequence: Synthetic oligonucleotide
  Antisense strand to SEQ ID NO: 856420
agaaccaugagucaaccca

SEQ ID NO: 856422 - RNA, 19 nt, Artificial Sequence
  Description of Artificial Sequence: Synthetic oligonucleotide
  Sense strand starting at position 438 of SEQ ID NO: 588314
gacucaugguucugggagu

SEQ ID NO: 856423 - RNA, 19 nt, Artificial Sequence
  Description of Artificial Sequence: Synthetic oligonucleotide
  Antisense strand to SEQ ID NO: 856422
acucccagaaccaugaguc

SEQ ID NO: 856424 - RNA, 19 nt, Artificial Sequence
  Description of Artificial Sequence: Synthetic oligonucleotide
  Sense strand starting at position 455 of SEQ ID NO: 588314
gucaccuuucucugacgaa

SEQ ID NO: 856425 - RNA, 19 nt, Artificial Sequence
  Description of Artificial Sequence: Synthetic oligonucleotide
  Antisense strand to SEQ ID NO: 856424
uucgucagagaaaggugac

SEQ ID NO: 856426 - RNA, 19 nt, Artificial Sequence
  Description of Artificial Sequence: Synthetic oligonucleotide
  Sense strand starting at position 458 of SEQ ID NO: 588314
accuuucucugacgaagaa

SEQ ID NO: 856427 - RNA, 19 nt, Artificial Sequence
  Description of Artificial Sequence: Synthetic oligonucleotide
  Antisense strand to SEQ ID NO: 856426
uucuucgucagagaaaggu

SEQ ID NO: 856428 - RNA, 19 nt, Artificial Sequence
  Description of Artificial Sequence: Synthetic oligonucleotide
  Sense strand starting at position 1015 of SEQ ID NO: 588314
cacugccuuugauggagaa

SEQ ID NO: 856429 - RNA, 19 nt, Artificial Sequence
  Description of Artificial Sequence: Synthetic oligonucleotide
  Antisense strand to SEQ ID NO: 856428
uucuccaucaaaggcagug

SEQ ID NO: 856430 - RNA, 19 nt, Artificial Sequence
  Description of Artificial Sequence: Synthetic oligonucleotide
  Sense strand starting at position 1115 of SEQ ID NO: 588314
ggagauggcugauacagaa

SEQ ID NO: 856431 - RNA, 19 nt, Artificial Sequence
  Description of Artificial Sequence: Synthetic oligonucleotide
  Antisense strand to SEQ ID NO: 856430
uucuguaucagccaucucc

SEQ ID NO: 856432 - RNA, 19 nt, Artificial Sequence
  Description of Artificial Sequence: Synthetic oligonucleotide
  Sense strand starting at position 1190 of SEQ ID NO: 588314
uggguuaaugauggguuga

SEQ ID NO: 856433 - RNA, 19 nt, Artificial Sequence
  Description of Artificial Sequence: Synthetic oligonucleotide
  Antisense strand to SEQ ID NO: 856432
ucaacccaucauuaaccca

SEQ ID NO: 856434 - RNA, 19 nt, Artificial Sequence
  Description of Artificial Sequence: Synthetic oligonucleotide
  Sense strand starting at position 1191 of SEQ ID NO: 588314
ggguuaaugauggguugaa

SEQ ID NO: 856435 - RNA, 19 nt, Artificial Sequence
  Description of Artificial Sequence: Synthetic oligonucleotide
  Antisense strand to SEQ ID NO: 856434
uucaacccaucauuaaccc

SEQ ID NO: 856436 - RNA, 19 nt, Artificial Sequence
  Description of Artificial Sequence: Synthetic oligonucleotide
  Sense strand starting at position 1192 of SEQ ID NO: 588314
gguuaaugauggguugaaa

SEQ ID NO: 856437 - RNA, 19 nt, Artificial Sequence
  Description of Artificial Sequence: Synthetic oligonucleotide
  Antisense strand to SEQ ID NO: 856436
uuucaacccaucauuaacc

SEQ ID NO: 856438 - RNA, 19 nt, Artificial Sequence
  Description of Artificial Sequence: Synthetic oligonucleotide
  Sense strand starting at position 1212 of SEQ ID NO: 588314
ggaggaauguggagaguug

SEQ ID NO: 856439 - RNA, 19 nt, Artificial Sequence
  Description of Artificial Sequence: Synthetic oligonucleotide
  Antisense strand to SEQ ID NO: 856438
caacucuccacauuccucc

SEQ ID NO: 856440 - RNA, 19 nt, Artificial Sequence
  Description of Artificial Sequence: Synthetic oligonucleotide
  Sense strand starting at position 1238 of SEQ ID NO: 588314
ggaggaaaugucuguggaa

SEQ ID NO: 856441 - RNA, 19 nt, Artificial Sequence
  Description of Artificial Sequence: Synthetic oligonucleotide
  Antisense strand to SEQ ID NO: 856440
uuccacagacauuuccucc

SEQ ID NO: 856442 - RNA, 19 nt, Artificial Sequence
  Description of Artificial Sequence: Synthetic oligonucleotide
  Sense strand starting at position 1408 of SEQ ID NO: 588314
ggaggguuugacuggguau

SEQ ID NO: 856443 - RNA, 19 nt, Artificial Sequence
  Description of Artificial Sequence: Synthetic oligonucleotide
  Antisense strand to SEQ ID NO: 856442
auacccagucaaacccucc

SEQ ID NO: 856444 - RNA, 19 nt, Artificial Sequence
  Description of Artificial Sequence: Synthetic oligonucleotide
  Sense strand starting at position 1409 of SEQ ID NO: 588314
gaggguuugacuggguaug

SEQ ID NO: 856445 - RNA, 19 nt, Artificial Sequence
  Description of Artificial Sequence: Synthetic oligonucleotide
  Antisense strand to SEQ ID NO: 856444
cauacccagucaaacccuc

SEQ ID NO: 856446 - RNA, 19 nt, Artificial Sequence
  Description of Artificial Sequence: Synthetic oligonucleotide
  Sense strand starting at position 2626 of SEQ ID NO: 588314
cucagccuccacugugauu

SEQ ID NO: 856447 - RNA, 19 nt, Artificial Sequence
  Description of Artificial Sequence: Synthetic oligonucleotide
  Antisense strand to SEQ ID NO: 856446
aaucacaguggaggcugag

SEQ ID NO: 856448 - RNA, 19 nt, Artificial Sequence
  Description of Artificial Sequence: Synthetic oligonucleotide
  Sense strand starting at position 2635 of SEQ ID NO: 588314
cacugugauugggcaguuu

SEQ ID NO: 856449 - RNA, 19 nt, Artificial Sequence
  Description of Artificial Sequence: Synthetic oligonucleotide
  Antisense strand to SEQ ID NO: 856448
aaacugcccaaucacagug

SEQ ID NO: 856450 - RNA, 19 nt, Artificial Sequence
  Description of Artificial Sequence: Synthetic oligonucleotide
  Sense strand starting at position 2724 of SEQ ID NO: 588314
ggcagugauugguguggau

SEQ ID NO: 856451 - RNA, 19 nt, Artificial Sequence
  Description of Artificial Sequence: Synthetic oligonucleotide
  Antisense strand to SEQ ID NO: 856450
auccacaccaaucacugcc

SEQ ID NO: 856452 - RNA, 19 nt, Artificial Sequence
  Description of Artificial Sequence: Synthetic oligonucleotide
  Sense strand starting at position 2726 of SEQ ID NO: 588314
cagugauugguguggaucu

SEQ ID NO: 856453 - RNA, 19 nt, Artificial Sequence
  Description of Artificial Sequence: Synthetic oligonucleotide
  Antisense strand to SEQ ID NO: 856452
agauccacaccaaucacug

SEQ ID NO: 856454 - RNA, 19 nt, Artificial Sequence
  Description of Artificial Sequence: Synthetic oligonucleotide
  Sense strand starting at position 2728 of SEQ ID NO: 588314
gugauugguguggaucuga

SEQ ID NO: 856455 - RNA, 19 nt, Artificial Sequence
  Description of Artificial Sequence: Synthetic oligonucleotide
  Antisense strand to SEQ ID NO: 856454
ucagauccacaccaaucac

SEQ ID NO: 856456 - RNA, 19 nt, Artificial Sequence
  Description of Artificial Sequence: Synthetic oligonucleotide
  Sense strand starting at position 2783 of SEQ ID NO: 588314
gccaucuugucgugccauu

SEQ ID NO: 856457 - RNA, 19 nt, Artificial Sequence
  Description of Artificial Sequence: Synthetic oligonucleotide
  Antisense strand to SEQ ID NO: 856456
aauggcacgacaagauggc

SEQ ID NO: 856458 - RNA, 19 nt, Artificial Sequence
  Description of Artificial Sequence: Synthetic oligonucleotide
  Sense strand starting at position 2826 of SEQ ID NO: 588314
ccucgcucgcccuuugauu

SEQ ID NO: 856459 - RNA, 19 nt, Artificial Sequence
  Description of Artificial Sequence: Synthetic oligonucleotide
  Antisense strand to SEQ ID NO: 856458
aaucaaagggcgagcgagg

SEQ ID NO: 856460 - RNA, 19 nt, Artificial Sequence
  Description of Artificial Sequence: Synthetic oligonucleotide
  Sense strand starting at position 2848 of SEQ ID NO: 588314
uugguucgugccugagacu

SEQ ID NO: 856461 - RNA, 19 nt, Artificial Sequence
  Description of Artificial Sequence: Synthetic oligonucleotide
  Antisense strand to SEQ ID NO: 856460
agucucaggcacgaaccaa

SEQ ID NO: 856462 - RNA, 19 nt, Artificial Sequence
  Description of Artificial Sequence: Synthetic oligonucleotide
  Sense strand starting at position 2896 of SEQ ID NO: 588314
aguccaaucuccggguuga

SEQ ID NO: 856463 - RNA, 19 nt, Artificial Sequence
  Description of Artificial Sequence: Synthetic oligonucleotide
  Antisense strand to SEQ ID NO: 856462
ucaacccggagauuggacu

SEQ ID NO: 856464 - RNA, 19 nt, Artificial Sequence
  Description of Artificial Sequence: Synthetic oligonucleotide
  Sense strand starting at position 2963 of SEQ ID NO: 588314
gaacccuugcgacgucaaa

SEQ ID NO: 856465 - RNA, 19 nt, Artificial Sequence
  Description of Artificial Sequence: Synthetic oligonucleotide
  Antisense strand to SEQ ID NO: 856464
uuugacgucgcaaggguuc

SEQ ID NO: 856466 - RNA, 19 nt, Artificial Sequence
  Description of Artificial Sequence: Synthetic oligonucleotide
  Sense strand starting at position 3202 of SEQ ID NO: 588314
ccugaugugaccuaacgga

SEQ ID NO: 856467 - RNA, 19 nt, Artificial Sequence
  Description of Artificial Sequence: Synthetic oligonucleotide
  Antisense strand to SEQ ID NO: 856466
uccguuaggucacaucagg

SEQ ID NO: 856468 - RNA, 19 nt, Artificial Sequence
  Description of Artificial Sequence: Synthetic oligonucleotide
  Sense strand starting at position 3453 of SEQ ID NO: 588314
ccuucuuggcccuagauga

SEQ ID NO: 856469 - RNA, 19 nt, Artificial Sequence
  Description of Artificial Sequence: Synthetic oligonucleotide
  Antisense strand to SEQ ID NO: 856468
ucaucuagggccaagaagg

SEQ ID NO: 856470 - RNA, 19 nt, Artificial Sequence
  Description of Artificial Sequence: Synthetic oligonucleotide
  Sense strand starting at position 3463 of SEQ ID NO: 588314
ccuagaugaucuccugucu

SEQ ID NO: 856471 - RNA, 19 nt, Artificial Sequence
  Description of Artificial Sequence: Synthetic oligonucleotide
  Antisense strand to SEQ ID NO: 856470
agacaggagaucaucuagg

SEQ ID NO: 856472 - RNA, 19 nt, Artificial Sequence
  Description of Artificial Sequence: Synthetic oligonucleotide
  Sense strand starting at position 3479 of SEQ ID NO: 588314
ucuuccuucccgcagugau

SEQ ID NO: 856473 - RNA, 19 nt, Artificial Sequence
  Description of Artificial Sequence: Synthetic oligonucleotide
  Antisense strand to SEQ ID NO: 856472
aucacugcgggaaggaaga

SEQ ID NO: 856474 - RNA, 19 nt, Artificial Sequence
  Description of Artificial Sequence: Synthetic oligonucleotide
  Sense strand starting at position 3504 of SEQ ID NO: 588314
ugucuuauucuugguucuu

SEQ ID NO: 856475 - RNA, 19 nt, Artificial Sequence
  Description of Artificial Sequence: Synthetic oligonucleotide
  Antisense strand to SEQ ID NO: 856474
aagaaccaagaauaagaca

SEQ ID NO: 856476 - RNA, 19 nt, Artificial Sequence
  Description of Artificial Sequence: Synthetic oligonucleotide
  Sense strand starting at position 3505 of SEQ ID NO: 588314
gucuuauucuugguucuuu

SEQ ID NO: 856477 - RNA, 19 nt, Artificial Sequence
  Description of Artificial Sequence: Synthetic oligonucleotide
  Antisense strand to SEQ ID NO: 856476
aaagaaccaagaauaagac

SEQ ID NO: 856478 - RNA, 19 nt, Artificial Sequence
  Description of Artificial Sequence: Synthetic oligonucleotide
  Sense strand starting at position 3510 of SEQ ID NO: 588314
auucuugguucuuucuuua

SEQ ID NO: 856479 - RNA, 19 nt, Artificial Sequence
  Description of Artificial Sequence: Synthetic oligonucleotide
  Antisense strand to SEQ ID NO: 856478
uaaagaaagaaccaagaau

SEQ ID NO: 856480 - RNA, 19 nt, Artificial Sequence
  Description of Artificial Sequence: Synthetic oligonucleotide
  Sense strand starting at position 3920 of SEQ ID NO: 588314
gaggucuugcuagaaacug

SEQ ID NO: 856481 - RNA, 19 nt, Artificial Sequence
  Description of Artificial Sequence: Synthetic oligonucleotide
  Antisense strand to SEQ ID NO: 856480
caguuucuagcaagaccuc

SEQ ID NO: 856482 - RNA, 19 nt, Artificial Sequence
  Description of Artificial Sequence: Synthetic oligonucleotide
  Sense strand starting at position 173 of SEQ ID NO: 588315
gggcuucuggcugacuaca

SEQ ID NO: 856483 - RNA, 19 nt, Artificial Sequence
  Description of Artificial Sequence: Synthetic oligonucleotide
  Antisense strand to SEQ ID NO: 856482
uguagucagccagaagccc

SEQ ID NO: 856484 - RNA, 19 nt, Artificial Sequence
  Description of Artificial Sequence: Synthetic oligonucleotide
  Sense strand starting at position 231 of SEQ ID NO: 588315
gauggagaguucuuuccua

SEQ ID NO: 856485 - RNA, 19 nt, Artificial Sequence
  Description of Artificial Sequence: Synthetic oligonucleotide
  Antisense strand to SEQ ID NO: 856484
uaggaaagaacucuccauc

SEQ ID NO: 856486 - RNA, 19 nt, Artificial Sequence
  Description of Artificial Sequence: Synthetic oligonucleotide
  Sense strand starting at position 279 of SEQ ID NO: 588315
uuuacauaaucggcaacaa

SEQ ID NO: 856487 - RNA, 19 nt, Artificial Sequence
  Description of Artificial Sequence: Synthetic oligonucleotide
  Antisense strand to SEQ ID NO: 856486
uuguugccgauuauguaaa

SEQ ID NO: 856488 - RNA, 19 nt, Artificial Sequence
  Description of Artificial Sequence: Synthetic oligonucleotide
  Sense strand starting at position 373 of SEQ ID NO: 588315
acuaacgcuagugagaauu

SEQ ID NO: 856489 - RNA, 19 nt, Artificial Sequence
  Description of Artificial Sequence: Synthetic oligonucleotide
  Antisense strand to SEQ ID NO: 856488
aauucucacuagcguuagu

SEQ ID NO: 856490 - RNA, 19 nt, Artificial Sequence
  Description of Artificial Sequence: Synthetic oligonucleotide
  Sense strand starting at position 383 of SEQ ID NO: 588315
gugagaauuuaaugaacua

SEQ ID NO: 856491 - RNA, 19 nt, Artificial Sequence
  Description of Artificial Sequence: Synthetic oligonucleotide
  Antisense strand to SEQ ID NO: 856490
uaguucauuaaauucucac

SEQ ID NO: 856492 - RNA, 19 nt, Artificial Sequence
  Description of Artificial Sequence: Synthetic oligonucleotide
  Sense strand starting at position 693 of SEQ ID NO: 588315
aucgcugacgcauuaguau

SEQ ID NO: 856493 - RNA, 19 nt, Artificial Sequence
  Description of Artificial Sequence: Synthetic oligonucleotide
  Antisense strand to SEQ ID NO: 856492
auacuaaugcgucagcgau

SEQ ID NO: 856494 - RNA, 19 nt, Artificial Sequence
  Description of Artificial Sequence: Synthetic oligonucleotide
  Sense strand starting at position 747 of SEQ ID NO: 588315
uacgauuuauacuucguga

SEQ ID NO: 856495 - RNA, 19 nt, Artificial Sequence
  Description of Artificial Sequence: Synthetic oligonucleotide
  Antisense strand to SEQ ID NO: 856494
ucacgaaguauaaaucgua

SEQ ID NO: 856496 - RNA, 19 nt, Artificial Sequence
  Description of Artificial Sequence: Synthetic oligonucleotide
  Sense strand starting at position 749 of SEQ ID NO: 588315
cgauuuauacuucgugaug

SEQ ID NO: 856497 - RNA, 19 nt, Artificial Sequence
  Description of Artificial Sequence: Synthetic oligonucleotide
  Antisense strand to SEQ ID NO: 856496
caucacgaaguauaaaucg

SEQ ID NO: 856498 - RNA, 19 nt, Artificial Sequence
  Description of Artificial Sequence: Synthetic oligonucleotide
  Sense strand starting at position 750 of SEQ ID NO: 588315
gauuuauacuucgugaugu

SEQ ID NO: 856499 - RNA, 19 nt, Artificial Sequence
  Description of Artificial Sequence: Synthetic oligonucleotide
  Antisense strand to SEQ ID NO: 856498
acaucacgaaguauaaauc

SEQ ID NO: 856500 - RNA, 19 nt, Artificial Sequence
  Description of Artificial Sequence: Synthetic oligonucleotide
  Sense strand starting at position 766 of SEQ ID NO: 588315
uguccuagaugguuugauu

SEQ ID NO: 856501 - RNA, 19 nt, Artificial Sequence
  Description of Artificial Sequence: Synthetic oligonucleotide
  Antisense strand to SEQ ID NO: 856500
aaucaaaccaucuaggaca

SEQ ID NO: 856502 - RNA, 19 nt, Artificial Sequence
  Description of Artificial Sequence: Synthetic oligonucleotide
  Sense strand starting at position 786 of SEQ ID NO: 588315
uuugcaguaguagaagaaa

SEQ ID NO: 856503 - RNA, 19 nt, Artificial Sequence
  Description of Artificial Sequence: Synthetic oligonucleotide
  Antisense strand to SEQ ID NO: 856502
uuucuucuacuacugcaaa

SEQ ID NO: 856504 - RNA, 19 nt, Artificial Sequence
  Description of Artificial Sequence: Synthetic oligonucleotide
  Sense strand starting at position 935 of SEQ ID NO: 588315
auuuauggauccuauggaa

SEQ ID NO: 856505 - RNA, 19 nt, Artificial Sequence
  Description of Artificial Sequence: Synthetic oligonucleotide
  Antisense strand to SEQ ID NO: 856504
uuccauaggauccauaaau

SEQ ID NO: 856506 - RNA, 19 nt, Artificial Sequence
  Description of Artificial Sequence: Synthetic oligonucleotide
  Sense strand starting at position 960 of SEQ ID NO: 588315
gcgguucgcacacuuauca

SEQ ID NO: 856507 - RNA, 19 nt, Artificial Sequence
  Description of Artificial Sequence: Synthetic oligonucleotide
  Antisense strand to SEQ ID NO: 856506
ugauaagugugcgaaccgc

SEQ ID NO: 856508 - RNA, 19 nt, Artificial Sequence
  Description of Artificial Sequence: Synthetic oligonucleotide
  Sense strand starting at position 1005 of SEQ ID NO: 588315
gagguaucauggccuuaau

SEQ ID NO: 856509 - RNA, 19 nt, Artificial Sequence
  Description of Artificial Sequence: Synthetic oligonucleotide
  Antisense strand to SEQ ID NO: 856508
auuaaggccaugauaccuc

SEQ ID NO: 856510 - RNA, 19 nt, Artificial Sequence
  Description of Artificial Sequence: Synthetic oligonucleotide
  Sense strand starting at position 1060 of SEQ ID NO: 588315
gucacuauccaaggucaua

SEQ ID NO: 856511 - RNA, 19 nt, Artificial Sequence
  Description of Artificial Sequence: Synthetic oligonucleotide
  Antisense strand to SEQ ID NO: 856510
uaugaccuuggauagugac

SEQ ID NO: 856512 - RNA, 19 nt, Artificial Sequence
  Description of Artificial Sequence: Synthetic oligonucleotide
  Sense strand starting at position 1218 of SEQ ID NO: 588315
aacugaugcgaucacaguu

SEQ ID NO: 856513 - RNA, 19 nt, Artificial Sequence
  Description of Artificial Sequence: Synthetic oligonucleotide
  Antisense strand to SEQ ID NO: 856512
aacugugaucgcaucaguu

SEQ ID NO: 856514 - RNA, 19 nt, Artificial Sequence
  Description of Artificial Sequence: Synthetic oligonucleotide
  Sense strand starting at position 1241 of SEQ ID NO: 588315
cuugauauucgagacuuuc

SEQ ID NO: 856515 - RNA, 19 nt, Artificial Sequence
  Description of Artificial Sequence: Synthetic oligonucleotide
  Antisense strand to SEQ ID NO: 856514
gaaagucucgaauaucaag

SEQ ID NO: 856516 - RNA, 19 nt, Artificial Sequence
  Description of Artificial Sequence: Synthetic oligonucleotide
  Sense strand starting at position 1315 of SEQ ID NO: 588315
ugaaaugcacguuauuaaa

SEQ ID NO: 856517 - RNA, 19 nt, Artificial Sequence
  Description of Artificial Sequence: Synthetic oligonucleotide
  Antisense strand to SEQ ID NO: 856516
uuuaauaacgugcauuuca

SEQ ID NO: 856518 - RNA, 19 nt, Artificial Sequence
  Description of Artificial Sequence: Synthetic oligonucleotide
  Sense strand starting at position 1348 of SEQ ID NO: 588315
ucguaagauggccaaaguu

SEQ ID NO: 856519 - RNA, 19 nt, Artificial Sequence
  Description of Artificial Sequence: Synthetic oligonucleotide
  Antisense strand to SEQ ID NO: 856518
aacuuuggccaucuuacga

SEQ ID NO: 856520 - RNA, 19 nt, Artificial Sequence
  Description of Artificial Sequence: Synthetic oligonucleotide
  Sense strand starting at position 1462 of SEQ ID NO: 588315
ugggaaacgugaguaucuu

SEQ ID NO: 856521 - RNA, 19 nt, Artificial Sequence
  Description of Artificial Sequence: Synthetic oligonucleotide
  Antisense strand to SEQ ID NO: 856520
aagauacucacguuuccca

SEQ ID NO: 856522 - RNA, 19 nt, Artificial Sequence
  Description of Artificial Sequence: Synthetic oligonucleotide
  Sense strand starting at position 1463 of SEQ ID NO: 588315
gggaaacgugaguaucuua

SEQ ID NO: 856523 - RNA, 19 nt, Artificial Sequence
  Description of Artificial Sequence: Synthetic oligonucleotide
  Antisense strand to SEQ ID NO: 856522
uaagauacucacguuuccc

SEQ ID NO: 856524 - RNA, 19 nt, Artificial Sequence
  Description of Artificial Sequence: Synthetic oligonucleotide
  Sense strand starting at position 1466 of SEQ ID NO: 588315
aaacgugaguaucuuaaag

SEQ ID NO: 856525 - RNA, 19 nt, Artificial Sequence
  Description of Artificial Sequence: Synthetic oligonucleotide
  Antisense strand to SEQ ID NO: 856524
cuuuaagauacucacguuu

SEQ ID NO: 856526 - RNA, 19 nt, Artificial Sequence
  Description of Artificial Sequence: Synthetic oligonucleotide
  Sense strand starting at position 2245 of SEQ ID NO: 588315
gcgcuuuaccuuccacagu

SEQ ID NO: 856527 - RNA, 19 nt, Artificial Sequence
  Description of Artificial Sequence: Synthetic oligonucleotide
  Antisense strand to SEQ ID NO: 856526
acuguggaagguaaagcgc

SEQ ID NO: 856528 - RNA, 19 nt, Artificial Sequence
  Description of Artificial Sequence: Synthetic oligonucleotide
  Sense strand starting at position 2551 of SEQ ID NO: 588315
agauaauucuuugccuuug

SEQ ID NO: 856529 - RNA, 19 nt, Artificial Sequence
  Description of Artificial Sequence: Synthetic oligonucleotide
  Antisense strand to SEQ ID NO: 856528
caaaggcaaagaauuaucu

SEQ ID NO: 856530 - RNA, 19 nt, Artificial Sequence
  Description of Artificial Sequence: Synthetic oligonucleotide
  Sense strand starting at position 2901 of SEQ ID NO: 588315
ucugguaaauguuuauuga

SEQ ID NO: 856531 - RNA, 19 nt, Artificial Sequence
  Description of Artificial Sequence: Synthetic oligonucleotide
  Antisense strand to SEQ ID NO: 856530
ucaauaaacauuuaccaga

SEQ ID NO: 856532 - RNA, 19 nt, Artificial Sequence
  Description of Artificial Sequence: Synthetic oligonucleotide
  Sense strand starting at position 2902 of SEQ ID NO: 588315
cugguaaauguuuauugag

SEQ ID NO: 856533 - RNA, 19 nt, Artificial Sequence
  Description of Artificial Sequence: Synthetic oligonucleotide
  Antisense strand to SEQ ID NO: 856532
cucaauaaacauuuaccag

SEQ ID NO: 856534 - RNA, 19 nt, Artificial Sequence
  Description of Artificial Sequence: Synthetic oligonucleotide
  Sense strand starting at position 2904 of SEQ ID NO: 588315
gguaaauguuuauugaguc

SEQ ID NO: 856535 - RNA, 19 nt, Artificial Sequence
  Description of Artificial Sequence: Synthetic oligonucleotide
  Antisense strand to SEQ ID NO: 856534
gacucaauaaacauuuacc

SEQ ID NO: 856536 - RNA, 19 nt, Artificial Sequence
  Description of Artificial Sequence: Synthetic oligonucleotide
  Sense strand starting at position 3021 of SEQ ID NO: 588315
ggaugacagucaguaacaa

SEQ ID NO: 856537 - RNA, 19 nt, Artificial Sequence
  Description of Artificial Sequence: Synthetic oligonucleotide
  Antisense strand to SEQ ID NO: 856536
uuguuacugacugucaucc

SEQ ID NO: 856538 - RNA, 19 nt, Artificial Sequence
  Description of Artificial Sequence: Synthetic oligonucleotide
  Sense strand starting at position 3226 of SEQ ID NO: 588315
acauauaugucucugucau

SEQ ID NO: 856539 - RNA, 19 nt, Artificial Sequence
  Description of Artificial Sequence: Synthetic oligonucleotide
  Antisense strand to SEQ ID NO: 856538
augacagagacauauaugu

SEQ ID NO: 856540 - RNA, 19 nt, Artificial Sequence
  Description of Artificial Sequence: Synthetic oligonucleotide
  Sense strand starting at position 3233 of SEQ ID NO: 588315
ugucucugucauuacauau

SEQ ID NO: 856541 - RNA, 19 nt, Artificial Sequence
  Description of Artificial Sequence: Synthetic oligonucleotide
  Antisense strand to SEQ ID NO: 856540
auauguaaugacagagaca

SEQ ID NO: 856542 - RNA, 19 nt, Artificial Sequence
  Description of Artificial Sequence: Synthetic oligonucleotide
  Sense strand starting at position 3287 of SEQ ID NO: 588315
cuaaauauugcaugggacu

SEQ ID NO: 856543 - RNA, 19 nt, Artificial Sequence
  Description of Artificial Sequence: Synthetic oligonucleotide
  Antisense strand to SEQ ID NO: 856542
agucccaugcaauauuuag

SEQ ID NO: 856544 - RNA, 19 nt, Artificial Sequence
  Description of Artificial Sequence: Synthetic oligonucleotide
  Sense strand starting at position 3531 of SEQ ID NO: 588315
auuauuaggaucgggauca

SEQ ID NO: 856545 - RNA, 19 nt, Artificial Sequence
  Description of Artificial Sequence: Synthetic oligonucleotide
  Antisense strand to SEQ ID NO: 856544
ugaucccgauccuaauaau

SEQ ID NO: 856546 - RNA, 19 nt, Artificial Sequence
  Description of Artificial Sequence: Synthetic oligonucleotide
  Sense strand starting at position 3613 of SEQ ID NO: 588315
uggcuugaaggaugugaau

SEQ ID NO: 856547 - RNA, 19 nt, Artificial Sequence
  Description of Artificial Sequence: Synthetic oligonucleotide
  Antisense strand to SEQ ID NO: 856546
auucacauccuucaagcca

SEQ ID NO: 856548 - RNA, 19 nt, Artificial Sequence
  Description of Artificial Sequence: Synthetic oligonucleotide
  Sense strand starting at position 3615 of SEQ ID NO: 588315
gcuugaaggaugugaauua

SEQ ID NO: 856549 - RNA, 19 nt, Artificial Sequence
  Description of Artificial Sequence: Synthetic oligonucleotide
  Antisense strand to SEQ ID NO: 856548
uaauucacauccuucaagc

SEQ ID NO: 856550 - RNA, 19 nt, Artificial Sequence
  Description of Artificial Sequence: Synthetic oligonucleotide
  Sense strand starting at position 3626 of SEQ ID NO: 588315
gugaauuagagaggaguuu

SEQ ID NO: 856551 - RNA, 19 nt, Artificial Sequence
  Description of Artificial Sequence: Synthetic oligonucleotide
  Antisense strand to SEQ ID NO: 856550
aaacuccucucuaauucac

SEQ ID NO: 856552 - RNA, 19 nt, Artificial Sequence
  Description of Artificial Sequence: Synthetic oligonucleotide
  Sense strand starting at position 3739 of SEQ ID NO: 588315
ccuauaugacuaggaguag

SEQ ID NO: 856553 - RNA, 19 nt, Artificial Sequence
  Description of Artificial Sequence: Synthetic oligonucleotide
  Antisense strand to SEQ ID NO: 856552
cuacuccuagucauauagg

SEQ ID NO: 856554 - RNA, 19 nt, Artificial Sequence
  Description of Artificial Sequence: Synthetic oligonucleotide
  Sense strand starting at position 3765 of SEQ ID NO: 588315
gaguguaggagaugaaacu

SEQ ID NO: 856555 - RNA, 19 nt, Artificial Sequence
  Description of Artificial Sequence: Synthetic oligonucleotide
  Antisense strand to SEQ ID NO: 856554
aguuucaucuccuacacuc

SEQ ID NO: 856556 - RNA, 19 nt, Artificial Sequence
  Description of Artificial Sequence: Synthetic oligonucleotide
  Sense strand starting at position 3889 of SEQ ID NO: 588315
acaccuucggauugacauu

SEQ ID NO: 856557 - RNA, 19 nt, Artificial Sequence
  Description of Artificial Sequence: Synthetic oligonucleotide
  Antisense strand to SEQ ID NO: 856556
aaugucaauccgaaggugu

SEQ ID NO: 856558 - RNA, 19 nt, Artificial Sequence
  Description of Artificial Sequence: Synthetic oligonucleotide
  Sense strand starting at position 3914 of SEQ ID NO: 588315
ccauuacucugccugggaa

SEQ ID NO: 856559 - RNA, 19 nt, Artificial Sequence
  Description of Artificial Sequence: Synthetic oligonucleotide
  Antisense strand to SEQ ID NO: 856558
uucccaggcagaguaaugg

SEQ ID NO: 856560 - RNA, 19 nt, Artificial Sequence
  Description of Artificial Sequence: Synthetic oligonucleotide
  Sense strand starting at position 3969 of SEQ ID NO: 588315
caguuaugaguccaaguag

SEQ ID NO: 856561 - RNA, 19 nt, Artificial Sequence
  Description of Artificial Sequence: Synthetic oligonucleotide
  Antisense strand to SEQ ID NO: 856560
cuacuuggacucauaacug

SEQ ID NO: 856562 - RNA, 19 nt, Artificial Sequence
  Description of Artificial Sequence: Synthetic oligonucleotide
  Sense strand starting at position 173 of SEQ ID NO: 588316
gggcuucuggcugacuaca

SEQ ID NO: 856563 - RNA, 19 nt, Artificial Sequence
  Description of Artificial Sequence: Synthetic oligonucleotide
  Antisense strand to SEQ ID NO: 856562
uguagucagccagaagccc

SEQ ID NO: 856564 - RNA, 19 nt, Artificial Sequence
  Description of Artificial Sequence: Synthetic oligonucleotide
  Sense strand starting at position 231 of SEQ ID NO: 588316
gauggagaguucuuuccua

SEQ ID NO: 856565 - RNA, 19 nt, Artificial Sequence
  Description of Artificial Sequence: Synthetic oligonucleotide
  Antisense strand to SEQ ID NO: 856564
uaggaaagaacucuccauc

SEQ ID NO: 856566 - RNA, 19 nt, Artificial Sequence
  Description of Artificial Sequence: Synthetic oligonucleotide
  Sense strand starting at position 279 of SEQ ID NO: 588316
uuuacauaaucggcaacaa

SEQ ID NO: 856567 - RNA, 19 nt, Artificial Sequence
  Description of Artificial Sequence: Synthetic oligonucleotide
  Antisense strand to SEQ ID NO: 856566
uuguugccgauuauguaaa

SEQ ID NO: 856568 - RNA, 19 nt, Artificial Sequence
  Description of Artificial Sequence: Synthetic oligonucleotide
  Sense strand starting at position 373 of SEQ ID NO: 588316
acuaacgcuagugagaauu

SEQ ID NO: 856569 - RNA, 19 nt, Artificial Sequence
  Description of Artificial Sequence: Synthetic oligonucleotide
  Antisense strand to SEQ ID NO: 856568
aauucucacuagcguuagu

SEQ ID NO: 856570 - RNA, 19 nt, Artificial Sequence
  Description of Artificial Sequence: Synthetic oligonucleotide
  Sense strand starting at position 383 of SEQ ID NO: 588316
gugagaauuuaaugaacua

SEQ ID NO: 856571 - RNA, 19 nt, Artificial Sequence
  Description of Artificial Sequence: Synthetic oligonucleotide
  Antisense strand to SEQ ID NO: 856570
uaguucauuaaauucucac

SEQ ID NO: 856572 - RNA, 19 nt, Artificial Sequence
  Description of Artificial Sequence: Synthetic oligonucleotide
  Sense strand starting at position 693 of SEQ ID NO: 588316
aucgcugacgcauuaguau

SEQ ID NO: 856573 - RNA, 19 nt, Artificial Sequence
  Description of Artificial Sequence: Synthetic oligonucleotide
  Antisense strand to SEQ ID NO: 856572
auacuaaugcgucagcgau

SEQ ID NO: 856574 - RNA, 19 nt, Artificial Sequence
  Description of Artificial Sequence: Synthetic oligonucleotide
  Sense strand starting at position 747 of SEQ ID NO: 588316
uacgauuuauacuucguga

SEQ ID NO: 856575 - RNA, 19 nt, Artificial Sequence
  Description of Artificial Sequence: Synthetic oligonucleotide
  Antisense strand to SEQ ID NO: 856574
ucacgaaguauaaaucgua

SEQ ID NO: 856576 - RNA, 19 nt, Artificial Sequence
  Description of Artificial Sequence: Synthetic oligonucleotide
  Sense strand starting at position 749 of SEQ ID NO: 588316
cgauuuauacuucgugaug

SEQ ID NO: 856577 - RNA, 19 nt, Artificial Sequence
  Description of Artificial Sequence: Synthetic oligonucleotide
  Antisense strand to SEQ ID NO: 856576
caucacgaaguauaaaucg

SEQ ID NO: 856578 - RNA, 19 nt, Artificial Sequence
  Description of Artificial Sequence: Synthetic oligonucleotide
  Sense strand starting at position 750 of SEQ ID NO: 588316
gauuuauacuucgugaugu

SEQ ID NO: 856579 - RNA, 19 nt, Artificial Sequence
  Description of Artificial Sequence: Synthetic oligonucleotide
  Antisense strand to SEQ ID NO: 856578
acaucacgaaguauaaauc

SEQ ID NO: 856580 - RNA, 19 nt, Artificial Sequence
  Description of Artificial Sequence: Synthetic oligonucleotide
  Sense strand starting at position 766 of SEQ ID NO: 588316
uguccuagaugguuugauu

SEQ ID NO: 856581 - RNA, 19 nt, Artificial Sequence
  Description of Artificial Sequence: Synthetic oligonucleotide
  Antisense strand to SEQ ID NO: 856580
aaucaaaccaucuaggaca

SEQ ID NO: 856582 - RNA, 19 nt, Artificial Sequence
  Description of Artificial Sequence: Synthetic oligonucleotide
  Sense strand starting at position 786 of SEQ ID NO: 588316
uuugcaguaguagaagaaa

SEQ ID NO: 856583 - RNA, 19 nt, Artificial Sequence
  Description of Artificial Sequence: Synthetic oligonucleotide
  Antisense strand to SEQ ID NO: 856582
uuucuucuacuacugcaaa

SEQ ID NO: 856584 - RNA, 19 nt, Artificial Sequence
  Description of Artificial Sequence: Synthetic oligonucleotide
  Sense strand starting at position 935 of SEQ ID NO: 588316
auuuauggauccuauggaa

SEQ ID NO: 856585 - RNA, 19 nt, Artificial Sequence
  Description of Artificial Sequence: Synthetic oligonucleotide
  Antisense strand to SEQ ID NO: 856584
uuccauaggauccauaaau

SEQ ID NO: 856586 - RNA, 19 nt, Artificial Sequence
  Description of Artificial Sequence: Synthetic oligonucleotide
  Sense strand starting at position 960 of SEQ ID NO: 588316
gcgguucgcacacuuauca

SEQ ID NO: 856587 - RNA, 19 nt, Artificial Sequence
  Description of Artificial Sequence: Synthetic oligonucleotide
  Antisense strand to SEQ ID NO: 856586
ugauaagugugcgaaccgc

SEQ ID NO: 856588 - RNA, 19 nt, Artificial Sequence
  Description of Artificial Sequence: Synthetic oligonucleotide
  Sense strand starting at position 1005 of SEQ ID NO: 588316
gagguaucauggccuuaau

SEQ ID NO: 856589 - RNA, 19 nt, Artificial Sequence
  Description of Artificial Sequence: Synthetic oligonucleotide
  Antisense strand to SEQ ID NO: 856588
auuaaggccaugauaccuc

SEQ ID NO: 856590 - RNA, 19 nt, Artificial Sequence
  Description of Artificial Sequence: Synthetic oligonucleotide
  Sense strand starting at position 1060 of SEQ ID NO: 588316
gucacuauccaaggucaua

SEQ ID NO: 856591 - RNA, 19 nt, Artificial Sequence
  Description of Artificial Sequence: Synthetic oligonucleotide
  Antisense strand to SEQ ID NO: 856590
uaugaccuuggauagugac

SEQ ID NO: 856592 - RNA, 19 nt, Artificial Sequence
  Description of Artificial Sequence: Synthetic oligonucleotide
  Sense strand starting at position 1218 of SEQ ID NO: 588316
aacugaugcgaucacaguu

SEQ ID NO: 856593 - RNA, 19 nt, Artificial Sequence
  Description of Artificial Sequence: Synthetic oligonucleotide
  Antisense strand to SEQ ID NO: 856592
aacugugaucgcaucaguu

SEQ ID NO: 856594 - RNA, 19 nt, Artificial Sequence
  Description of Artificial Sequence: Synthetic oligonucleotide
  Sense strand starting at position 1241 of SEQ ID NO: 588316
cuugauauucgagacuuuc

SEQ ID NO: 856595 - RNA, 19 nt, Artificial Sequence
  Description of Artificial Sequence: Synthetic oligonucleotide
  Antisense strand to SEQ ID NO: 856594
gaaagucucgaauaucaag

SEQ ID NO: 856596 - RNA, 19 nt, Artificial Sequence
  Description of Artificial Sequence: Synthetic oligonucleotide
  Sense strand starting at position 1315 of SEQ ID NO: 588316
ugaaaugcacguuauuaaa

SEQ ID NO: 856597 - RNA, 19 nt, Artificial Sequence
  Description of Artificial Sequence: Synthetic oligonucleotide
  Antisense strand to SEQ ID NO: 856596
uuuaauaacgugcauuuca

SEQ ID NO: 856598 - RNA, 19 nt, Artificial Sequence
  Description of Artificial Sequence: Synthetic oligonucleotide
  Sense strand starting at position 1348 of SEQ ID NO: 588316
ucguaagauggccaaaguu

SEQ ID NO: 856599 - RNA, 19 nt, Artificial Sequence
  Description of Artificial Sequence: Synthetic oligonucleotide
  Antisense strand to SEQ ID NO: 856598
aacuuuggccaucuuacga

SEQ ID NO: 856600 - RNA, 19 nt, Artificial Sequence
  Description of Artificial Sequence: Synthetic oligonucleotide
  Sense strand starting at position 1462 of SEQ ID NO: 588316
ugggaaacgugaguaucuu

SEQ ID NO: 856601 - RNA, 19 nt, Artificial Sequence
  Description of Artificial Sequence: Synthetic oligonucleotide
  Antisense strand to SEQ ID NO: 856600
aagauacucacguuuccca

SEQ ID NO: 856602 - RNA, 19 nt, Artificial Sequence
  Description of Artificial Sequence: Synthetic oligonucleotide
  Sense strand starting at position 1463 of SEQ ID NO: 588316
gggaaacgugaguaucuua

SEQ ID NO: 856603 - RNA, 19 nt, Artificial Sequence
  Description of Artificial Sequence: Synthetic oligonucleotide
  Antisense strand to SEQ ID NO: 856602
uaagauacucacguuuccc

SEQ ID NO: 856604 - RNA, 19 nt, Artificial Sequence
  Description of Artificial Sequence: Synthetic oligonucleotide
  Sense strand starting at position 1466 of SEQ ID NO: 588316
aaacgugaguaucuuaaag

SEQ ID NO: 856605 - RNA, 19 nt, Artificial Sequence
  Description of Artificial Sequence: Synthetic oligonucleotide
  Antisense strand to SEQ ID NO: 856604
cuuuaagauacucacguuu

SEQ ID NO: 856606 - RNA, 19 nt, Artificial Sequence
  Description of Artificial Sequence: Synthetic oligonucleotide
  Sense strand starting at position 2245 of SEQ ID NO: 588316
gcgcuuuaccuuccacagu

SEQ ID NO: 856607 - RNA, 19 nt, Artificial Sequence
  Description of Artificial Sequence: Synthetic oligonucleotide
  Antisense strand to SEQ ID NO: 856606
acuguggaagguaaagcgc

SEQ ID NO: 856608 - RNA, 19 nt, Artificial Sequence
  Description of Artificial Sequence: Synthetic oligonucleotide
  Sense strand starting at position 2551 of SEQ ID NO: 588316
agauaauucuuugccuuug

SEQ ID NO: 856609 - RNA, 19 nt, Artificial Sequence
  Description of Artificial Sequence: Synthetic oligonucleotide
  Antisense strand to SEQ ID NO: 856608
caaaggcaaagaauuaucu

SEQ ID NO: 856610 - RNA, 19 nt, Artificial Sequence
  Description of Artificial Sequence: Synthetic oligonucleotide
  Sense strand starting at position 2901 of SEQ ID NO: 588316
ucugguaaauguuuauuga

SEQ ID NO: 856611 - RNA, 19 nt, Artificial Sequence
  Description of Artificial Sequence: Synthetic oligonucleotide
  Antisense strand to SEQ ID NO: 856610
ucaauaaacauuuaccaga

SEQ ID NO: 856612 - RNA, 19 nt, Artificial Sequence
  Description of Artificial Sequence: Synthetic oligonucleotide
  Sense strand starting at position 2902 of SEQ ID NO: 588316
cugguaaauguuuauugag

SEQ ID NO: 856613 - RNA, 19 nt, Artificial Sequence
  Description of Artificial Sequence: Synthetic oligonucleotide
  Antisense strand to SEQ ID NO: 856612
cucaauaaacauuuaccag

SEQ ID NO: 856614 - RNA, 19 nt, Artificial Sequence
  Description of Artificial Sequence: Synthetic oligonucleotide
  Sense strand starting at position 2904 of SEQ ID NO: 588316
gguaaauguuuauugaguc

SEQ ID NO: 856615 - RNA, 19 nt, Artificial Sequence
  Description of Artificial Sequence: Synthetic oligonucleotide
  Antisense strand to SEQ ID NO: 856614
gacucaauaaacauuuacc

SEQ ID NO: 856616 - RNA, 19 nt, Artificial Sequence
  Description of Artificial Sequence: Synthetic oligonucleotide
  Sense strand starting at position 3021 of SEQ ID NO: 588316
ggaugacagucaguaacaa

SEQ ID NO: 856617 - RNA, 19 nt, Artificial Sequence
  Description of Artificial Sequence: Synthetic oligonucleotide
  Antisense strand to SEQ ID NO: 856616
uuguuacugacugucaucc

SEQ ID NO: 856618 - RNA, 19 nt, Artificial Sequence
  Description of Artificial Sequence: Synthetic oligonucleotide
  Sense strand starting at position 3226 of SEQ ID NO: 588316
acauauaugucucugucau

SEQ ID NO: 856619 - RNA, 19 nt, Artificial Sequence
  Description of Artificial Sequence: Synthetic oligonucleotide
  Antisense strand to SEQ ID NO: 856618
augacagagacauauaugu

SEQ ID NO: 856620 - RNA, 19 nt, Artificial Sequence
  Description of Artificial Sequence: Synthetic oligonucleotide
  Sense strand starting at position 3233 of SEQ ID NO: 588316
ugucucugucauuacauau

SEQ ID NO: 856621 - RNA, 19 nt, Artificial Sequence
  Description of Artificial Sequence: Synthetic oligonucleotide
  Antisense strand to SEQ ID NO: 856620
auauguaaugacagagaca

SEQ ID NO: 856622 - RNA, 19 nt, Artificial Sequence
  Description of Artificial Sequence: Synthetic oligonucleotide
  Sense strand starting at position 3287 of SEQ ID NO: 588316
cuaaauauugcaugggacu

SEQ ID NO: 856623 - RNA, 19 nt, Artificial Sequence
  Description of Artificial Sequence: Synthetic oligonucleotide
  Antisense strand to SEQ ID NO: 856622
agucccaugcaauauuuag

SEQ ID NO: 856624 - RNA, 19 nt, Artificial Sequence
  Description of Artificial Sequence: Synthetic oligonucleotide
  Sense strand starting at position 3531 of SEQ ID NO: 588316
auuauuaggaucgggauca

SEQ ID NO: 856625 - RNA, 19 nt, Artificial Sequence
  Description of Artificial Sequence: Synthetic oligonucleotide
  Antisense strand to SEQ ID NO: 856624
ugaucccgauccuaauaau

SEQ ID NO: 856626 - RNA, 19 nt, Artificial Sequence
  Description of Artificial Sequence: Synthetic oligonucleotide
  Sense strand starting at position 3613 of SEQ ID NO: 588316
uggcuugaaggaugugaau

SEQ ID NO: 856627 - RNA, 19 nt, Artificial Sequence
  Description of Artificial Sequence: Synthetic oligonucleotide
  Antisense strand to SEQ ID NO: 856626
auucacauccuucaagcca

SEQ ID NO: 856628 - RNA, 19 nt, Artificial Sequence
  Description of Artificial Sequence: Synthetic oligonucleotide
  Sense strand starting at position 3615 of SEQ ID NO: 588316
gcuugaaggaugugaauua

SEQ ID NO: 856629 - RNA, 19 nt, Artificial Sequence
  Description of Artificial Sequence: Synthetic oligonucleotide
  Antisense strand to SEQ ID NO: 856628
uaauucacauccuucaagc

SEQ ID NO: 856630 - RNA, 19 nt, Artificial Sequence
  Description of Artificial Sequence: Synthetic oligonucleotide
  Sense strand starting at position 3626 of SEQ ID NO: 588316
gugaauuagagaggaguuu

SEQ ID NO: 856631 - RNA, 19 nt, Artificial Sequence
  Description of Artificial Sequence: Synthetic oligonucleotide
  Antisense strand to SEQ ID NO: 856630
aaacuccucucuaauucac

SEQ ID NO: 856632 - RNA, 19 nt, Artificial Sequence
  Description of Artificial Sequence: Synthetic oligonucleotide
  Sense strand starting at position 3739 of SEQ ID NO: 588316
ccuauaugacuaggaguag

SEQ ID NO: 856633 - RNA, 19 nt, Artificial Sequence
  Description of Artificial Sequence: Synthetic oligonucleotide
  Antisense strand to SEQ ID NO: 856632
cuacuccuagucauauagg

SEQ ID NO: 856634 - RNA, 19 nt, Artificial Sequence
  Description of Artificial Sequence: Synthetic oligonucleotide
  Sense strand starting at position 3765 of SEQ ID NO: 588316
gaguguaggagaugaaacu

SEQ ID NO: 856635 - RNA, 19 nt, Artificial Sequence
  Description of Artificial Sequence: Synthetic oligonucleotide
  Antisense strand to SEQ ID NO: 856634
aguuucaucuccuacacuc

SEQ ID NO: 856636 - RNA, 19 nt, Artificial Sequence
  Description of Artificial Sequence: Synthetic oligonucleotide
  Sense strand starting at position 3889 of SEQ ID NO: 588316
acaccuucggauugacauu

SEQ ID NO: 856637 - RNA, 19 nt, Artificial Sequence
  Description of Artificial Sequence: Synthetic oligonucleotide
  Antisense strand to SEQ ID NO: 856636
aaugucaauccgaaggugu

SEQ ID NO: 856638 - RNA, 19 nt, Artificial Sequence
  Description of Artificial Sequence: Synthetic oligonucleotide
  Sense strand starting at position 3914 of SEQ ID NO: 588316
ccauuacucugccugggaa

SEQ ID NO: 856639 - RNA, 19 nt, Artificial Sequence
  Description of Artificial Sequence: Synthetic oligonucleotide
  Antisense strand to SEQ ID NO: 856638
uucccaggcagaguaaugg

SEQ ID NO: 856640 - RNA, 19 nt, Artificial Sequence
  Description of Artificial Sequence: Synthetic oligonucleotide
  Sense strand starting at position 3969 of SEQ ID NO: 588316
caguuaugaguccaaguag

SEQ ID NO: 856641 - RNA, 19 nt, Artificial Sequence
  Description of Artificial Sequence: Synthetic oligonucleotide
  Antisense strand to SEQ ID NO: 856640
cuacuuggacucauaacug

SEQ ID NO: 856642 - RNA, 19 nt, Artificial Sequence
  Description of Artificial Sequence: Synthetic oligonucleotide
  Sense strand starting at position 25 of SEQ ID NO: 588317
agggauucagagcaaucgu

SEQ ID NO: 856643 - RNA, 19 nt, Artificial Sequence
  Description of Artificial Sequence: Synthetic oligonucleotide
  Antisense strand to SEQ ID NO: 856642
acgauugcucugaaucccu

SEQ ID NO: 856644 - RNA, 19 nt, Artificial Sequence
  Description of Artificial Sequence: Synthetic oligonucleotide
  Sense strand starting at position 93 of SEQ ID NO: 588317
ggaaguaaugucuguuuau

SEQ ID NO: 856645 - RNA, 19 nt, Artificial Sequence
  Description of Artificial Sequence: Synthetic oligonucleotide
  Antisense strand to SEQ ID NO: 856644
auaaacagacauuacuucc

SEQ ID NO: 856646 - RNA, 19 nt, Artificial Sequence
  Description of Artificial Sequence: Synthetic oligonucleotide
  Sense strand starting at position 96 of SEQ ID NO: 588317
aguaaugucuguuuauuga

SEQ ID NO: 856647 - RNA, 19 nt, Artificial Sequence
  Description of Artificial Sequence: Synthetic oligonucleotide
  Antisense strand to SEQ ID NO: 856646
ucaauaaacagacauuacu

SEQ ID NO: 856648 - RNA, 19 nt, Artificial Sequence
  Description of Artificial Sequence: Synthetic oligonucleotide
  Sense strand starting at position 100 of SEQ ID NO: 588317
augucuguuuauugauaga

SEQ ID NO: 856649 - RNA, 19 nt, Artificial Sequence
  Description of Artificial Sequence: Synthetic oligonucleotide
  Antisense strand to SEQ ID NO: 856648
ucuaucaauaaacagacau

SEQ ID NO: 856650 - RNA, 19 nt, Artificial Sequence
  Description of Artificial Sequence: Synthetic oligonucleotide
  Sense strand starting at position 347 of SEQ ID NO: 588317
ccgucaggaucucuucgau

SEQ ID NO: 856651 - RNA, 19 nt, Artificial Sequence
  Description of Artificial Sequence: Synthetic oligonucleotide
  Antisense strand to SEQ ID NO: 856650
aucgaagagauccugacgg

SEQ ID NO: 856652 - RNA, 19 nt, Artificial Sequence
  Description of Artificial Sequence: Synthetic oligonucleotide
  Sense strand starting at position 350 of SEQ ID NO: 588317
ucaggaucucuucgauauu

SEQ ID NO: 856653 - RNA, 19 nt, Artificial Sequence
  Description of Artificial Sequence: Synthetic oligonucleotide
  Antisense strand to SEQ ID NO: 856652
aauaucgaagagauccuga

SEQ ID NO: 856654 - RNA, 19 nt, Artificial Sequence
  Description of Artificial Sequence: Synthetic oligonucleotide
  Sense strand starting at position 351 of SEQ ID NO: 588317
caggaucucuucgauauuu

SEQ ID NO: 856655 - RNA, 19 nt, Artificial Sequence
  Description of Artificial Sequence: Synthetic oligonucleotide
  Antisense strand to SEQ ID NO: 856654
aaauaucgaagagauccug

SEQ ID NO: 856656 - RNA, 19 nt, Artificial Sequence
  Description of Artificial Sequence: Synthetic oligonucleotide
  Sense strand starting at position 594 of SEQ ID NO: 588317
cccuaugugccagagggaa

SEQ ID NO: 856657 - RNA, 19 nt, Artificial Sequence
  Description of Artificial Sequence: Synthetic oligonucleotide
  Antisense strand to SEQ ID NO: 856656
uucccucuggcacauaggg

SEQ ID NO: 856658 - RNA, 19 nt, Artificial Sequence
  Description of Artificial Sequence: Synthetic oligonucleotide
  Sense strand starting at position 679 of SEQ ID NO: 588317
cuggcaugcuggucucaga

SEQ ID NO: 856659 - RNA, 19 nt, Artificial Sequence
  Description of Artificial Sequence: Synthetic oligonucleotide
  Antisense strand to SEQ ID NO: 856658
ucugagaccagcaugccag

SEQ ID NO: 856660 - RNA, 19 nt, Artificial Sequence
  Description of Artificial Sequence: Synthetic oligonucleotide
  Sense strand starting at position 889 of SEQ ID NO: 588317
ggacaaggcugccagugau

SEQ ID NO: 856661 - RNA, 19 nt, Artificial Sequence
  Description of Artificial Sequence: Synthetic oligonucleotide
  Antisense strand to SEQ ID NO: 856660
aucacuggcagccuugucc

SEQ ID NO: 856662 - RNA, 19 nt, Artificial Sequence
  Description of Artificial Sequence: Synthetic oligonucleotide
  Sense strand starting at position 1008 of SEQ ID NO: 588317
cuaucugggcuuuauagga

SEQ ID NO: 856663 - RNA, 19 nt, Artificial Sequence
  Description of Artificial Sequence: Synthetic oligonucleotide
  Antisense strand to SEQ ID NO: 856662
uccuauaaagcccagauag

SEQ ID NO: 856664 - RNA, 19 nt, Artificial Sequence
  Description of Artificial Sequence: Synthetic oligonucleotide
  Sense strand starting at position 1012 of SEQ ID NO: 588317
cugggcuuuauaggaaauu

SEQ ID NO: 856665 - RNA, 19 nt, Artificial Sequence
  Description of Artificial Sequence: Synthetic oligonucleotide
  Antisense strand to SEQ ID NO: 856664
aauuuccuauaaagcccag

SEQ ID NO: 856666 - RNA, 19 nt, Artificial Sequence
  Description of Artificial Sequence: Synthetic oligonucleotide
  Sense strand starting at position 1031 of SEQ ID NO: 588317
cucauuuaacugugugucu

SEQ ID NO: 856667 - RNA, 19 nt, Artificial Sequence
  Description of Artificial Sequence: Synthetic oligonucleotide
  Antisense strand to SEQ ID NO: 856666
agacacacaguuaaaugag

SEQ ID NO: 856668 - RNA, 19 nt, Artificial Sequence
  Description of Artificial Sequence: Synthetic oligonucleotide
  Sense strand starting at position 1032 of SEQ ID NO: 588317
ucauuuaacugugugucuu

SEQ ID NO: 856669 - RNA, 19 nt, Artificial Sequence
  Description of Artificial Sequence: Synthetic oligonucleotide
  Antisense strand to SEQ ID NO: 856668
aagacacacaguuaaauga

SEQ ID NO: 856670 - RNA, 19 nt, Artificial Sequence
  Description of Artificial Sequence: Synthetic oligonucleotide
  Sense strand starting at position 1036 of SEQ ID NO: 588317
uuaacugugugucuuguau

SEQ ID NO: 856671 - RNA, 19 nt, Artificial Sequence
  Description of Artificial Sequence: Synthetic oligonucleotide
  Antisense strand to SEQ ID NO: 856670
auacaagacacacaguuaa

SEQ ID NO: 856672 - RNA, 19 nt, Artificial Sequence
  Description of Artificial Sequence: Synthetic oligonucleotide
  Sense strand starting at position 1054 of SEQ ID NO: 588317
uugauaagguggcuggauu

SEQ ID NO: 856673 - RNA, 19 nt, Artificial Sequence
  Description of Artificial Sequence: Synthetic oligonucleotide
  Antisense strand to SEQ ID NO: 856672
aauccagccaccuuaucaa

SEQ ID NO: 856674 - RNA, 19 nt, Artificial Sequence
  Description of Artificial Sequence: Synthetic oligonucleotide
  Sense strand starting at position 1206 of SEQ ID NO: 588317
ccagguugucagcgaugau

SEQ ID NO: 856675 - RNA, 19 nt, Artificial Sequence
  Description of Artificial Sequence: Synthetic oligonucleotide
  Antisense strand to SEQ ID NO: 856674
aucaucgcugacaaccugg

SEQ ID NO: 856676 - RNA, 19 nt, Artificial Sequence
  Description of Artificial Sequence: Synthetic oligonucleotide
  Sense strand starting at position 1207 of SEQ ID NO: 588317
cagguugucagcgaugaua

SEQ ID NO: 856677 - RNA, 19 nt, Artificial Sequence
  Description of Artificial Sequence: Synthetic oligonucleotide
  Antisense strand to SEQ ID NO: 856676
uaucaucgcugacaaccug

SEQ ID NO: 856678 - RNA, 19 nt, Artificial Sequence
  Description of Artificial Sequence: Synthetic oligonucleotide
  Sense strand starting at position 1209 of SEQ ID NO: 588317
gguugucagcgaugauaug

SEQ ID NO: 856679 - RNA, 19 nt, Artificial Sequence
  Description of Artificial Sequence: Synthetic oligonucleotide
  Antisense strand to SEQ ID NO: 856678
cauaucaucgcugacaacc

SEQ ID NO: 856680 - RNA, 19 nt, Artificial Sequence
  Description of Artificial Sequence: Synthetic oligonucleotide
  Sense strand starting at position 1257 of SEQ ID NO: 588317
ugaccacgccuuggugaua

SEQ ID NO: 856681 - RNA, 19 nt, Artificial Sequence
  Description of Artificial Sequence: Synthetic oligonucleotide
  Antisense strand to SEQ ID NO: 856680
uaucaccaaggcgugguca

SEQ ID NO: 856682 - RNA, 19 nt, Artificial Sequence
  Description of Artificial Sequence: Synthetic oligonucleotide
  Sense strand starting at position 1620 of SEQ ID NO: 588317
ggccguguagcgucagaua

SEQ ID NO: 856683 - RNA, 19 nt, Artificial Sequence
  Description of Artificial Sequence: Synthetic oligonucleotide
  Antisense strand to SEQ ID NO: 856682
uaucugacgcuacacggcc

SEQ ID NO: 856684 - RNA, 19 nt, Artificial Sequence
  Description of Artificial Sequence: Synthetic oligonucleotide
  Sense strand starting at position 2127 of SEQ ID NO: 588317
cgaguguccgagcgggaau

SEQ ID NO: 856685 - RNA, 19 nt, Artificial Sequence
  Description of Artificial Sequence: Synthetic oligonucleotide
  Antisense strand to SEQ ID NO: 856684
auucccgcucggacacucg

SEQ ID NO: 856686 - RNA, 19 nt, Artificial Sequence
  Description of Artificial Sequence: Synthetic oligonucleotide
  Sense strand starting at position 2148 of SEQ ID NO: 588317
gggucacccgugcuguuua

SEQ ID NO: 856687 - RNA, 19 nt, Artificial Sequence
  Description of Artificial Sequence: Synthetic oligonucleotide
  Antisense strand to SEQ ID NO: 856686
uaaacagcacgggugaccc

SEQ ID NO: 856688 - RNA, 19 nt, Artificial Sequence
  Description of Artificial Sequence: Synthetic oligonucleotide
  Sense strand starting at position 2205 of SEQ ID NO: 588317
gcauguauuguguguuaca

SEQ ID NO: 856689 - RNA, 19 nt, Artificial Sequence
  Description of Artificial Sequence: Synthetic oligonucleotide
  Antisense strand to SEQ ID NO: 856688
uguaacacacaauacaugc

SEQ ID NO: 856690 - RNA, 19 nt, Artificial Sequence
  Description of Artificial Sequence: Synthetic oligonucleotide
  Sense strand starting at position 2206 of SEQ ID NO: 588317
cauguauuguguguuacau

SEQ ID NO: 856691 - RNA, 19 nt, Artificial Sequence
  Description of Artificial Sequence: Synthetic oligonucleotide
  Antisense strand to SEQ ID NO: 856690
auguaacacacaauacaug

SEQ ID NO: 856692 - RNA, 19 nt, Artificial Sequence
  Description of Artificial Sequence: Synthetic oligonucleotide
  Sense strand starting at position 2212 of SEQ ID NO: 588317
uuguguguuacauggugaa

SEQ ID NO: 856693 - RNA, 19 nt, Artificial Sequence
  Description of Artificial Sequence: Synthetic oligonucleotide
  Antisense strand to SEQ ID NO: 856692
uucaccauguaacacacaa

SEQ ID NO: 856694 - RNA, 19 nt, Artificial Sequence
  Description of Artificial Sequence: Synthetic oligonucleotide
  Sense strand starting at position 2215 of SEQ ID NO: 588317
uguguuacauggugaaaca

SEQ ID NO: 856695 - RNA, 19 nt, Artificial Sequence
  Description of Artificial Sequence: Synthetic oligonucleotide
  Antisense strand to SEQ ID NO: 856694
uguuucaccauguaacaca

SEQ ID NO: 856696 - RNA, 19 nt, Artificial Sequence
  Description of Artificial Sequence: Synthetic oligonucleotide
  Sense strand starting at position 2232 of SEQ ID NO: 588317
cagaacagauccugaaguu

SEQ ID NO: 856697 - RNA, 19 nt, Artificial Sequence
  Description of Artificial Sequence: Synthetic oligonucleotide
  Antisense strand to SEQ ID NO: 856696
aacuucaggaucuguucug

SEQ ID NO: 856698 - RNA, 19 nt, Artificial Sequence
  Description of Artificial Sequence: Synthetic oligonucleotide
  Sense strand starting at position 2303 of SEQ ID NO: 588317
augagugccgcuuaacaaa

SEQ ID NO: 856699 - RNA, 19 nt, Artificial Sequence
  Description of Artificial Sequence: Synthetic oligonucleotide
  Antisense strand to SEQ ID NO: 856698
uuuguuaagcggcacucau

SEQ ID NO: 856700 - RNA, 19 nt, Artificial Sequence
  Description of Artificial Sequence: Synthetic oligonucleotide
  Sense strand starting at position 2582 of SEQ ID NO: 588317
gcgcgcuuccugugaagac

SEQ ID NO: 856701 - RNA, 19 nt, Artificial Sequence
  Description of Artificial Sequence: Synthetic oligonucleotide
  Antisense strand to SEQ ID NO: 856700
gucuucacaggaagcgcgc

SEQ ID NO: 856702 - RNA, 19 nt, Artificial Sequence
  Description of Artificial Sequence: Synthetic oligonucleotide
  Sense strand starting at position 2929 of SEQ ID NO: 588317
guggguagccugcauuuca

SEQ ID NO: 856703 - RNA, 19 nt, Artificial Sequence
  Description of Artificial Sequence: Synthetic oligonucleotide
  Antisense strand to SEQ ID NO: 856702
ugaaaugcaggcuacccac

SEQ ID NO: 856704 - RNA, 19 nt, Artificial Sequence
  Description of Artificial Sequence: Synthetic oligonucleotide
  Sense strand starting at position 2998 of SEQ ID NO: 588317
gggccauuguuucuacaac

SEQ ID NO: 856705 - RNA, 19 nt, Artificial Sequence
  Description of Artificial Sequence: Synthetic oligonucleotide
  Antisense strand to SEQ ID NO: 856704
guuguagaaacaauggccc

SEQ ID NO: 856706 - RNA, 19 nt, Artificial Sequence
  Description of Artificial Sequence: Synthetic oligonucleotide
  Sense strand starting at position 2999 of SEQ ID NO: 588317
ggccauuguuucuacaaca

SEQ ID NO: 856707 - RNA, 19 nt, Artificial Sequence
  Description of Artificial Sequence: Synthetic oligonucleotide
  Antisense strand to SEQ ID NO: 856706
uguuguagaaacaauggcc

SEQ ID NO: 856708 - RNA, 19 nt, Artificial Sequence
  Description of Artificial Sequence: Synthetic oligonucleotide
  Sense strand starting at position 3130 of SEQ ID NO: 588317
ugcugcagugcccaagaaa

SEQ ID NO: 856709 - RNA, 19 nt, Artificial Sequence
  Description of Artificial Sequence: Synthetic oligonucleotide
  Antisense strand to SEQ ID NO: 856708
uuucuugggcacugcagca

SEQ ID NO: 856710 - RNA, 19 nt, Artificial Sequence
  Description of Artificial Sequence: Synthetic oligonucleotide
  Sense strand starting at position 3259 of SEQ ID NO: 588317
gagccacucucccugugau

SEQ ID NO: 856711 - RNA, 19 nt, Artificial Sequence
  Description of Artificial Sequence: Synthetic oligonucleotide
  Antisense strand to SEQ ID NO: 856710
aucacagggagaguggcuc

SEQ ID NO: 856712 - RNA, 19 nt, Artificial Sequence
  Description of Artificial Sequence: Synthetic oligonucleotide
  Sense strand starting at position 3415 of SEQ ID NO: 588317
gagagucgugccuguggga

SEQ ID NO: 856713 - RNA, 19 nt, Artificial Sequence
  Description of Artificial Sequence: Synthetic oligonucleotide
  Antisense strand to SEQ ID NO: 856712
ucccacaggcacgacucuc

SEQ ID NO: 856714 - RNA, 19 nt, Artificial Sequence
  Description of Artificial Sequence: Synthetic oligonucleotide
  Sense strand starting at position 3541 of SEQ ID NO: 588317
agacucugcuuucuguaga

SEQ ID NO: 856715 - RNA, 19 nt, Artificial Sequence
  Description of Artificial Sequence: Synthetic oligonucleotide
  Antisense strand to SEQ ID NO: 856714
ucuacagaaagcagagucu

SEQ ID NO: 856716 - RNA, 19 nt, Artificial Sequence
  Description of Artificial Sequence: Synthetic oligonucleotide
  Sense strand starting at position 3544 of SEQ ID NO: 588317
cucugcuuucuguagauga

SEQ ID NO: 856717 - RNA, 19 nt, Artificial Sequence
  Description of Artificial Sequence: Synthetic oligonucleotide
  Antisense strand to SEQ ID NO: 856716
ucaucuacagaaagcagag

SEQ ID NO: 856718 - RNA, 19 nt, Artificial Sequence
  Description of Artificial Sequence: Synthetic oligonucleotide
  Sense strand starting at position 3546 of SEQ ID NO: 588317
cugcuuucuguagaugaga

SEQ ID NO: 856719 - RNA, 19 nt, Artificial Sequence
  Description of Artificial Sequence: Synthetic oligonucleotide
  Antisense strand to SEQ ID NO: 856718
ucucaucuacagaaagcag

SEQ ID NO: 856720 - RNA, 19 nt, Artificial Sequence
  Description of Artificial Sequence: Synthetic oligonucleotide
  Sense strand starting at position 3548 of SEQ ID NO: 588317
gcuuucuguagaugagacu

SEQ ID NO: 856721 - RNA, 19 nt, Artificial Sequence
  Description of Artificial Sequence: Synthetic oligonucleotide
  Antisense strand to SEQ ID NO: 856720
agucucaucuacagaaagc

SEQ ID NO: 856722 - RNA, 19 nt, Artificial Sequence
  Description of Artificial Sequence: Synthetic oligonucleotide
  Sense strand starting at position 111 of SEQ ID NO: 588318
ggaauaugguuucuccauu

SEQ ID NO: 856723 - RNA, 19 nt, Artificial Sequence
  Description of Artificial Sequence: Synthetic oligonucleotide
  Antisense strand to SEQ ID NO: 856722
aauggagaaaccauauucc

SEQ ID NO: 856724 - RNA, 19 nt, Artificial Sequence
  Description of Artificial Sequence: Synthetic oligonucleotide
  Sense strand starting at position 128 of SEQ ID NO: 588318
uucuaaacugcuggauauc

SEQ ID NO: 856725 - RNA, 19 nt, Artificial Sequence
  Description of Artificial Sequence: Synthetic oligonucleotide
  Antisense strand to SEQ ID NO: 856724
gauauccagcaguuuagaa

SEQ ID NO: 856726 - RNA, 19 nt, Artificial Sequence
  Description of Artificial Sequence: Synthetic oligonucleotide
  Sense strand starting at position 138 of SEQ ID NO: 588318
cuggauaucccugacugcu

SEQ ID NO: 856727 - RNA, 19 nt, Artificial Sequence
  Description of Artificial Sequence: Synthetic oligonucleotide
  Antisense strand to SEQ ID NO: 856726
agcagucagggauauccag

SEQ ID NO: 856728 - RNA, 19 nt, Artificial Sequence
  Description of Artificial Sequence: Synthetic oligonucleotide
  Sense strand starting at position 375 of SEQ ID NO: 588318
auggguuucccaggacauu

SEQ ID NO: 856729 - RNA, 19 nt, Artificial Sequence
  Description of Artificial Sequence: Synthetic oligonucleotide
  Antisense strand to SEQ ID NO: 856728
aauguccugggaaacccau

SEQ ID NO: 856730 - RNA, 19 nt, Artificial Sequence
  Description of Artificial Sequence: Synthetic oligonucleotide
  Sense strand starting at position 466 of SEQ ID NO: 588318
agugacuugccugagguuu

SEQ ID NO: 856731 - RNA, 19 nt, Artificial Sequence
  Description of Artificial Sequence: Synthetic oligonucleotide
  Antisense strand to SEQ ID NO: 856730
aaaccucaggcaagucacu

SEQ ID NO: 856732 - RNA, 19 nt, Artificial Sequence
  Description of Artificial Sequence: Synthetic oligonucleotide
  Sense strand starting at position 594 of SEQ ID NO: 588318
aagcaagaguuucugaaga

SEQ ID NO: 856733 - RNA, 19 nt, Artificial Sequence
  Description of Artificial Sequence: Synthetic oligonucleotide
  Antisense strand to SEQ ID NO: 856732
ucuucagaaacucuugcuu

SEQ ID NO: 856734 - RNA, 19 nt, Artificial Sequence
  Description of Artificial Sequence: Synthetic oligonucleotide
  Sense strand starting at position 641 of SEQ ID NO: 588318
aguguaaacucucucacuu

SEQ ID NO: 856735 - RNA, 19 nt, Artificial Sequence
  Description of Artificial Sequence: Synthetic oligonucleotide
  Antisense strand to SEQ ID NO: 856734
aagugagagaguuuacacu

SEQ ID NO: 856736 - RNA, 19 nt, Artificial Sequence
  Description of Artificial Sequence: Synthetic oligonucleotide
  Sense strand starting at position 895 of SEQ ID NO: 588318
ggauuagguucugcaaaug

SEQ ID NO: 856737 - RNA, 19 nt, Artificial Sequence
  Description of Artificial Sequence: Synthetic oligonucleotide
  Antisense strand to SEQ ID NO: 856736
cauuugcagaaccuaaucc

SEQ ID NO: 856738 - RNA, 19 nt, Artificial Sequence
  Description of Artificial Sequence: Synthetic oligonucleotide
  Sense strand starting at position 925 of SEQ ID NO: 588318
ccgccaucccugucuuagu

SEQ ID NO: 856739 - RNA, 19 nt, Artificial Sequence
  Description of Artificial Sequence: Synthetic oligonucleotide
  Antisense strand to SEQ ID NO: 856738
acuaagacagggauggcgg

SEQ ID NO: 856740 - RNA, 19 nt, Artificial Sequence
  Description of Artificial Sequence: Synthetic oligonucleotide
  Sense strand starting at position 1451 of SEQ ID NO: 588318
gagcguugucugcccuaaa

SEQ ID NO: 856741 - RNA, 19 nt, Artificial Sequence
  Description of Artificial Sequence: Synthetic oligonucleotide
  Antisense strand to SEQ ID NO: 856740
uuuagggcagacaacgcuc

SEQ ID NO: 856742 - RNA, 19 nt, Artificial Sequence
  Description of Artificial Sequence: Synthetic oligonucleotide
  Sense strand starting at position 2093 of SEQ ID NO: 588318
gcaucaugggugucguagu

SEQ ID NO: 856743 - RNA, 19 nt, Artificial Sequence
  Description of Artificial Sequence: Synthetic oligonucleotide
  Antisense strand to SEQ ID NO: 856742
acuacgacacccaugaugc

SEQ ID NO: 856744 - RNA, 19 nt, Artificial Sequence
  Description of Artificial Sequence: Synthetic oligonucleotide
  Sense strand starting at position 2219 of SEQ ID NO: 588318
cuuggagaguggucuggau

SEQ ID NO: 856745 - RNA, 19 nt, Artificial Sequence
  Description of Artificial Sequence: Synthetic oligonucleotide
  Antisense strand to SEQ ID NO: 856744
auccagaccacucuccaag

SEQ ID NO: 856746 - RNA, 19 nt, Artificial Sequence
  Description of Artificial Sequence: Synthetic oligonucleotide
  Sense strand starting at position 2221 of SEQ ID NO: 588318
uggagaguggucuggaugu

SEQ ID NO: 856747 - RNA, 19 nt, Artificial Sequence
  Description of Artificial Sequence: Synthetic oligonucleotide
  Antisense strand to SEQ ID NO: 856746
acauccagaccacucucca

SEQ ID NO: 856748 - RNA, 19 nt, Artificial Sequence
  Description of Artificial Sequence: Synthetic oligonucleotide
  Sense strand starting at position 2223 of SEQ ID NO: 588318
gagaguggucuggauguuu

SEQ ID NO: 856749 - RNA, 19 nt, Artificial Sequence
  Description of Artificial Sequence: Synthetic oligonucleotide
  Antisense strand to SEQ ID NO: 856748
aaacauccagaccacucuc

SEQ ID NO: 856750 - RNA, 19 nt, Artificial Sequence
  Description of Artificial Sequence: Synthetic oligonucleotide
  Sense strand starting at position 2367 of SEQ ID NO: 588318
ccuagauccugacucugau

SEQ ID NO: 856751 - RNA, 19 nt, Artificial Sequence
  Description of Artificial Sequence: Synthetic oligonucleotide
  Antisense strand to SEQ ID NO: 856750
aucagagucaggaucuagg

SEQ ID NO: 856752 - RNA, 19 nt, Artificial Sequence
  Description of Artificial Sequence: Synthetic oligonucleotide
  Sense strand starting at position 2499 of SEQ ID NO: 588318
guccuaggcacugaagauu

SEQ ID NO: 856753 - RNA, 19 nt, Artificial Sequence
  Description of Artificial Sequence: Synthetic oligonucleotide
  Antisense strand to SEQ ID NO: 856752
aaucuucagugccuaggac

SEQ ID NO: 856754 - RNA, 19 nt, Artificial Sequence
  Description of Artificial Sequence: Synthetic oligonucleotide
  Sense strand starting at position 2540 of SEQ ID NO: 588318
ggccucugcccucauagau

SEQ ID NO: 856755 - RNA, 19 nt, Artificial Sequence
  Description of Artificial Sequence: Synthetic oligonucleotide
  Antisense strand to SEQ ID NO: 856754
aucuaugagggcagaggcc

SEQ ID NO: 856756 - RNA, 19 nt, Artificial Sequence
  Description of Artificial Sequence: Synthetic oligonucleotide
  Sense strand starting at position 2585 of SEQ ID NO: 588318
guaaauaaguaagcagaua

SEQ ID NO: 856757 - RNA, 19 nt, Artificial Sequence
  Description of Artificial Sequence: Synthetic oligonucleotide
  Antisense strand to SEQ ID NO: 856756
uaucugcuuacuuauuuac

SEQ ID NO: 856758 - RNA, 19 nt, Artificial Sequence
  Description of Artificial Sequence: Synthetic oligonucleotide
  Sense strand starting at position 2735 of SEQ ID NO: 588318
agugacauuugagaagaga

SEQ ID NO: 856759 - RNA, 19 nt, Artificial Sequence
  Description of Artificial Sequence: Synthetic oligonucleotide
  Antisense strand to SEQ ID NO: 856758
ucucuucucaaaugucacu

SEQ ID NO: 856760 - RNA, 19 nt, Artificial Sequence
  Description of Artificial Sequence: Synthetic oligonucleotide
  Sense strand starting at position 2871 of SEQ ID NO: 588318
gcucuuguccuagagagug

SEQ ID NO: 856761 - RNA, 19 nt, Artificial Sequence
  Description of Artificial Sequence: Synthetic oligonucleotide
  Antisense strand to SEQ ID NO: 856760
cacucucuaggacaagagc

SEQ ID NO: 856762 - RNA, 19 nt, Artificial Sequence
  Description of Artificial Sequence: Synthetic oligonucleotide
  Sense strand starting at position 3019 of SEQ ID NO: 588318
ccguccaucucugcauuua

SEQ ID NO: 856763 - RNA, 19 nt, Artificial Sequence
  Description of Artificial Sequence: Synthetic oligonucleotide
  Antisense strand to SEQ ID NO: 856762
uaaaugcagagauggacgg

SEQ ID NO: 856764 - RNA, 19 nt, Artificial Sequence
  Description of Artificial Sequence: Synthetic oligonucleotide
  Sense strand starting at position 3020 of SEQ ID NO: 588318
cguccaucucugcauuuaa

SEQ ID NO: 856765 - RNA, 19 nt, Artificial Sequence
  Description of Artificial Sequence: Synthetic oligonucleotide
  Antisense strand to SEQ ID NO: 856764
uuaaaugcagagauggacg

SEQ ID NO: 856766 - RNA, 19 nt, Artificial Sequence
  Description of Artificial Sequence: Synthetic oligonucleotide
  Sense strand starting at position 3102 of SEQ ID NO: 588318
gggagucggugagucauuu

SEQ ID NO: 856767 - RNA, 19 nt, Artificial Sequence
  Description of Artificial Sequence: Synthetic oligonucleotide
  Antisense strand to SEQ ID NO: 856766
aaaugacucaccgacuccc

SEQ ID NO: 856768 - RNA, 19 nt, Artificial Sequence
  Description of Artificial Sequence: Synthetic oligonucleotide
  Sense strand starting at position 3151 of SEQ ID NO: 588318
cugacaaaguggucuguga

SEQ ID NO: 856769 - RNA, 19 nt, Artificial Sequence
  Description of Artificial Sequence: Synthetic oligonucleotide
  Antisense strand to SEQ ID NO: 856768
ucacagaccacuuugucag

SEQ ID NO: 856770 - RNA, 19 nt, Artificial Sequence
  Description of Artificial Sequence: Synthetic oligonucleotide
  Sense strand starting at position 3153 of SEQ ID NO: 588318
gacaaaguggucugugaau

SEQ ID NO: 856771 - RNA, 19 nt, Artificial Sequence
  Description of Artificial Sequence: Synthetic oligonucleotide
  Antisense strand to SEQ ID NO: 856770
auucacagaccacuuuguc

SEQ ID NO: 856772 - RNA, 19 nt, Artificial Sequence
  Description of Artificial Sequence: Synthetic oligonucleotide
  Sense strand starting at position 3155 of SEQ ID NO: 588318
caaaguggucugugaauug

SEQ ID NO: 856773 - RNA, 19 nt, Artificial Sequence
  Description of Artificial Sequence: Synthetic oligonucleotide
  Antisense strand to SEQ ID NO: 856772
caauucacagaccacuuug

SEQ ID NO: 856774 - RNA, 19 nt, Artificial Sequence
  Description of Artificial Sequence: Synthetic oligonucleotide
  Sense strand starting at position 3164 of SEQ ID NO: 588318
cugugaauuggagacuguu

SEQ ID NO: 856775 - RNA, 19 nt, Artificial Sequence
  Description of Artificial Sequence: Synthetic oligonucleotide
  Antisense strand to SEQ ID NO: 856774
aacagucuccaauucacag

SEQ ID NO: 856776 - RNA, 19 nt, Artificial Sequence
  Description of Artificial Sequence: Synthetic oligonucleotide
  Sense strand starting at position 3220 of SEQ ID NO: 588318
gguacuaugcuagacucca

SEQ ID NO: 856777 - RNA, 19 nt, Artificial Sequence
  Description of Artificial Sequence: Synthetic oligonucleotide
  Antisense strand to SEQ ID NO: 856776
uggagucuagcauaguacc

SEQ ID NO: 856778 - RNA, 19 nt, Artificial Sequence
  Description of Artificial Sequence: Synthetic oligonucleotide
  Sense strand starting at position 3239 of SEQ ID NO: 588318
gagauaaagcagugagcaa

SEQ ID NO: 856779 - RNA, 19 nt, Artificial Sequence
  Description of Artificial Sequence: Synthetic oligonucleotide
  Antisense strand to SEQ ID NO: 856778
uugcucacugcuuuaucuc

SEQ ID NO: 856780 - RNA, 19 nt, Artificial Sequence
  Description of Artificial Sequence: Synthetic oligonucleotide
  Sense strand starting at position 3260 of SEQ ID NO: 588318
cggacaaaguccuuaccca

SEQ ID NO: 856781 - RNA, 19 nt, Artificial Sequence
  Description of Artificial Sequence: Synthetic oligonucleotide
  Antisense strand to SEQ ID NO: 856780
uggguaaggacuuuguccg

SEQ ID NO: 856782 - RNA, 19 nt, Artificial Sequence
  Description of Artificial Sequence: Synthetic oligonucleotide
  Sense strand starting at position 3275 of SEQ ID NO: 588318
cccacauguggcugacaau

SEQ ID NO: 856783 - RNA, 19 nt, Artificial Sequence
  Description of Artificial Sequence: Synthetic oligonucleotide
  Antisense strand to SEQ ID NO: 856782
auugucagccacauguggg

SEQ ID NO: 856784 - RNA, 19 nt, Artificial Sequence
  Description of Artificial Sequence: Synthetic oligonucleotide
  Sense strand starting at position 3276 of SEQ ID NO: 588318
ccacauguggcugacaauu

SEQ ID NO: 856785 - RNA, 19 nt, Artificial Sequence
  Description of Artificial Sequence: Synthetic oligonucleotide
  Antisense strand to SEQ ID NO: 856784
aauugucagccacaugugg

SEQ ID NO: 856786 - RNA, 19 nt, Artificial Sequence
  Description of Artificial Sequence: Synthetic oligonucleotide
  Sense strand starting at position 3441 of SEQ ID NO: 588318
gaaucuucgaggcaggcau

SEQ ID NO: 856787 - RNA, 19 nt, Artificial Sequence
  Description of Artificial Sequence: Synthetic oligonucleotide
  Antisense strand to SEQ ID NO: 856786
augccugccucgaagauuc

SEQ ID NO: 856788 - RNA, 19 nt, Artificial Sequence
  Description of Artificial Sequence: Synthetic oligonucleotide
  Sense strand starting at position 3508 of SEQ ID NO: 588318
agucuaaucugggccuuaa

SEQ ID NO: 856789 - RNA, 19 nt, Artificial Sequence
  Description of Artificial Sequence: Synthetic oligonucleotide
  Antisense strand to SEQ ID NO: 856788
uuaaggcccagauuagacu

SEQ ID NO: 856790 - RNA, 19 nt, Artificial Sequence
  Description of Artificial Sequence: Synthetic oligonucleotide
  Sense strand starting at position 3555 of SEQ ID NO: 588318
gucucugaaccucaguuaa

SEQ ID NO: 856791 - RNA, 19 nt, Artificial Sequence
  Description of Artificial Sequence: Synthetic oligonucleotide
  Antisense strand to SEQ ID NO: 856790
uuaacugagguucagagac

SEQ ID NO: 856792 - RNA, 19 nt, Artificial Sequence
  Description of Artificial Sequence: Synthetic oligonucleotide
  Sense strand starting at position 3566 of SEQ ID NO: 588318
ucaguuaacuaaucuggau

SEQ ID NO: 856793 - RNA, 19 nt, Artificial Sequence
  Description of Artificial Sequence: Synthetic oligonucleotide
  Antisense strand to SEQ ID NO: 856792
auccagauuaguuaacuga

SEQ ID NO: 856794 - RNA, 19 nt, Artificial Sequence
  Description of Artificial Sequence: Synthetic oligonucleotide
  Sense strand starting at position 3600 of SEQ ID NO: 588318
agaucaaaugccuguguag

SEQ ID NO: 856795 - RNA, 19 nt, Artificial Sequence
  Description of Artificial Sequence: Synthetic oligonucleotide
  Antisense strand to SEQ ID NO: 856794
cuacacaggcauuugaucu

SEQ ID NO: 856796 - RNA, 19 nt, Artificial Sequence
  Description of Artificial Sequence: Synthetic oligonucleotide
  Sense strand starting at position 3668 of SEQ ID NO: 588318
ugaggaugccaaugauaac

SEQ ID NO: 856797 - RNA, 19 nt, Artificial Sequence
  Description of Artificial Sequence: Synthetic oligonucleotide
  Antisense strand to SEQ ID NO: 856796
guuaucauuggcauccuca

SEQ ID NO: 856798 - RNA, 19 nt, Artificial Sequence
  Description of Artificial Sequence: Synthetic oligonucleotide
  Sense strand starting at position 3832 of SEQ ID NO: 588318
uauagauguuugccuagag

SEQ ID NO: 856799 - RNA, 19 nt, Artificial Sequence
  Description of Artificial Sequence: Synthetic oligonucleotide
  Antisense strand to SEQ ID NO: 856798
cucuaggcaaacaucuaua

SEQ ID NO: 856800 - RNA, 19 nt, Artificial Sequence
  Description of Artificial Sequence: Synthetic oligonucleotide
  Sense strand starting at position 3836 of SEQ ID NO: 588318
gauguuugccuagagggca

SEQ ID NO: 856801 - RNA, 19 nt, Artificial Sequence
  Description of Artificial Sequence: Synthetic oligonucleotide
  Antisense strand to SEQ ID NO: 856800
ugcccucuaggcaaacauc

SEQ ID NO: 856802 - RNA, 19 nt, Artificial Sequence
  Description of Artificial Sequence: Synthetic oligonucleotide
  Sense strand starting at position 76 of SEQ ID NO: 588321
gguccacuccacugucaaa

SEQ ID NO: 856803 - RNA, 19 nt, Artificial Sequence
  Description of Artificial Sequence: Synthetic oligonucleotide
  Antisense strand to SEQ ID NO: 856802
uuugacaguggaguggacc

SEQ ID NO: 856804 - RNA, 19 nt, Artificial Sequence
  Description of Artificial Sequence: Synthetic oligonucleotide
  Sense strand starting at position 89 of SEQ ID NO: 588321
gucaaagauuaagaucaga

SEQ ID NO: 856805 - RNA, 19 nt, Artificial Sequence
  Description of Artificial Sequence: Synthetic oligonucleotide
  Antisense strand to SEQ ID NO: 856804
ucugaucuuaaucuuugac

SEQ ID NO: 856806 - RNA, 19 nt, Artificial Sequence
  Description of Artificial Sequence: Synthetic oligonucleotide
  Sense strand starting at position 112 of SEQ ID NO: 588321
cagaaaugaucugcgcaaa

SEQ ID NO: 856807 - RNA, 19 nt, Artificial Sequence
  Description of Artificial Sequence: Synthetic oligonucleotide
  Antisense strand to SEQ ID NO: 856806
uuugcgcagaucauuucug

SEQ ID NO: 856808 - RNA, 19 nt, Artificial Sequence
  Description of Artificial Sequence: Synthetic oligonucleotide
  Sense strand starting at position 113 of SEQ ID NO: 588321
agaaaugaucugcgcaaau

SEQ ID NO: 856809 - RNA, 19 nt, Artificial Sequence
  Description of Artificial Sequence: Synthetic oligonucleotide
  Antisense strand to SEQ ID NO: 856808
auuugcgcagaucauuucu

SEQ ID NO: 856810 - RNA, 19 nt, Artificial Sequence
  Description of Artificial Sequence: Synthetic oligonucleotide
  Sense strand starting at position 125 of SEQ ID NO: 588321
cgcaaauauagaugucaug

SEQ ID NO: 856811 - RNA, 19 nt, Artificial Sequence
  Description of Artificial Sequence: Synthetic oligonucleotide
  Antisense strand to SEQ ID NO: 856810
caugacaucuauauuugcg

SEQ ID NO: 856812 - RNA, 19 nt, Artificial Sequence
  Description of Artificial Sequence: Synthetic oligonucleotide
  Sense strand starting at position 338 of SEQ ID NO: 588321
cagguagaugugugucaga

SEQ ID NO: 856813 - RNA, 19 nt, Artificial Sequence
  Description of Artificial Sequence: Synthetic oligonucleotide
  Antisense strand to SEQ ID NO: 856812
ucugacacacaucuaccug

SEQ ID NO: 856814 - RNA, 19 nt, Artificial Sequence
  Description of Artificial Sequence: Synthetic oligonucleotide
  Sense strand starting at position 343 of SEQ ID NO: 588321
agaugugugucagaaugag

SEQ ID NO: 856815 - RNA, 19 nt, Artificial Sequence
  Description of Artificial Sequence: Synthetic oligonucleotide
  Antisense strand to SEQ ID NO: 856814
cucauucugacacacaucu

SEQ ID NO: 856816 - RNA, 19 nt, Artificial Sequence
  Description of Artificial Sequence: Synthetic oligonucleotide
  Sense strand starting at position 394 of SEQ ID NO: 588321
acaggaagcuccguagagu

SEQ ID NO: 856817 - RNA, 19 nt, Artificial Sequence
  Description of Artificial Sequence: Synthetic oligonucleotide
  Antisense strand to SEQ ID NO: 856816
acucuacggagcuuccugu

SEQ ID NO: 856818 - RNA, 19 nt, Artificial Sequence
  Description of Artificial Sequence: Synthetic oligonucleotide
  Sense strand starting at position 442 of SEQ ID NO: 588321
gcacauacuccaggaagau

SEQ ID NO: 856819 - RNA, 19 nt, Artificial Sequence
  Description of Artificial Sequence: Synthetic oligonucleotide
  Antisense strand to SEQ ID NO: 856818
aucuuccuggaguaugugc

SEQ ID NO: 856820 - RNA, 19 nt, Artificial Sequence
  Description of Artificial Sequence: Synthetic oligonucleotide
  Sense strand starting at position 493 of SEQ ID NO: 588321
agagcaguggccggucaaa

SEQ ID NO: 856821 - RNA, 19 nt, Artificial Sequence
  Description of Artificial Sequence: Synthetic oligonucleotide
  Antisense strand to SEQ ID NO: 856820
uuugaccggccacugcucu

SEQ ID NO: 856822 - RNA, 19 nt, Artificial Sequence
  Description of Artificial Sequence: Synthetic oligonucleotide
  Sense strand starting at position 512 of SEQ ID NO: 588321
gaugauaccugggauguag

SEQ ID NO: 856823 - RNA, 19 nt, Artificial Sequence
  Description of Artificial Sequence: Synthetic oligonucleotide
  Antisense strand to SEQ ID NO: 856822
cuacaucccagguaucauc

SEQ ID NO: 856824 - RNA, 19 nt, Artificial Sequence
  Description of Artificial Sequence: Synthetic oligonucleotide
  Sense strand starting at position 583 of SEQ ID NO: 588321
gcuucuuggacucggaaga

SEQ ID NO: 856825 - RNA, 19 nt, Artificial Sequence
  Description of Artificial Sequence: Synthetic oligonucleotide
  Antisense strand to SEQ ID NO: 856824
ucuuccgaguccaagaagc

SEQ ID NO: 856826 - RNA, 19 nt, Artificial Sequence
  Description of Artificial Sequence: Synthetic oligonucleotide
  Sense strand starting at position 584 of SEQ ID NO: 588321
cuucuuggacucggaagau

SEQ ID NO: 856827 - RNA, 19 nt, Artificial Sequence
  Description of Artificial Sequence: Synthetic oligonucleotide
  Antisense strand to SEQ ID NO: 856826
aucuuccgaguccaagaag

SEQ ID NO: 856828 - RNA, 19 nt, Artificial Sequence
  Description of Artificial Sequence: Synthetic oligonucleotide
  Sense strand starting at position 681 of SEQ ID NO: 588321
cgggugucugucuggaaga

SEQ ID NO: 856829 - RNA, 19 nt, Artificial Sequence
  Description of Artificial Sequence: Synthetic oligonucleotide
  Antisense strand to SEQ ID NO: 856828
ucuuccagacagacacccg

SEQ ID NO: 856830 - RNA, 19 nt, Artificial Sequence
  Description of Artificial Sequence: Synthetic oligonucleotide
  Sense strand starting at position 683 of SEQ ID NO: 588321
ggugucugucuggaagaga

SEQ ID NO: 856831 - RNA, 19 nt, Artificial Sequence
  Description of Artificial Sequence: Synthetic oligonucleotide
  Antisense strand to SEQ ID NO: 856830
ucucuuccagacagacacc

SEQ ID NO: 856832 - RNA, 19 nt, Artificial Sequence
  Description of Artificial Sequence: Synthetic oligonucleotide
  Sense strand starting at position 818 of SEQ ID NO: 588321
gccugaguccaugaagaca

SEQ ID NO: 856833 - RNA, 19 nt, Artificial Sequence
  Description of Artificial Sequence: Synthetic oligonucleotide
  Antisense strand to SEQ ID NO: 856832
ugucuucauggacucaggc

SEQ ID NO: 856834 - RNA, 19 nt, Artificial Sequence
  Description of Artificial Sequence: Synthetic oligonucleotide
  Sense strand starting at position 835 of SEQ ID NO: 588321
caaacagagugcugaagaa

SEQ ID NO: 856835 - RNA, 19 nt, Artificial Sequence
  Description of Artificial Sequence: Synthetic oligonucleotide
  Antisense strand to SEQ ID NO: 856834
uucuucagcacucuguuug

SEQ ID NO: 856836 - RNA, 19 nt, Artificial Sequence
  Description of Artificial Sequence: Synthetic oligonucleotide
  Sense strand starting at position 1030 of SEQ ID NO: 588321
ggaucauguugagauaaac

SEQ ID NO: 856837 - RNA, 19 nt, Artificial Sequence
  Description of Artificial Sequence: Synthetic oligonucleotide
  Antisense strand to SEQ ID NO: 856836
guuuaucucaacaugaucc

SEQ ID NO: 856838 - RNA, 19 nt, Artificial Sequence
  Description of Artificial Sequence: Synthetic oligonucleotide
  Sense strand starting at position 1036 of SEQ ID NO: 588321
uguugagauaaacgaagau

SEQ ID NO: 856839 - RNA, 19 nt, Artificial Sequence
  Description of Artificial Sequence: Synthetic oligonucleotide
  Antisense strand to SEQ ID NO: 856838
aucuucguuuaucucaaca

SEQ ID NO: 856840 - RNA, 19 nt, Artificial Sequence
  Description of Artificial Sequence: Synthetic oligonucleotide
  Sense strand starting at position 1171 of SEQ ID NO: 588321
gagugaugccgagcgccaa

SEQ ID NO: 856841 - RNA, 19 nt, Artificial Sequence
  Description of Artificial Sequence: Synthetic oligonucleotide
  Antisense strand to SEQ ID NO: 856840
uuggcgcucggcaucacuc

SEQ ID NO: 856842 - RNA, 19 nt, Artificial Sequence
  Description of Artificial Sequence: Synthetic oligonucleotide
  Sense strand starting at position 1285 of SEQ ID NO: 588321
ucaugacuaguccaagcaa

SEQ ID NO: 856843 - RNA, 19 nt, Artificial Sequence
  Description of Artificial Sequence: Synthetic oligonucleotide
  Antisense strand to SEQ ID NO: 856842
uugcuuggacuagucauga

SEQ ID NO: 856844 - RNA, 19 nt, Artificial Sequence
  Description of Artificial Sequence: Synthetic oligonucleotide
  Sense strand starting at position 1390 of SEQ ID NO: 588321
cccacuuguauuggacgua

SEQ ID NO: 856845 - RNA, 19 nt, Artificial Sequence
  Description of Artificial Sequence: Synthetic oligonucleotide
  Antisense strand to SEQ ID NO: 856844
uacguccaauacaaguggg

SEQ ID NO: 856846 - RNA, 19 nt, Artificial Sequence
  Description of Artificial Sequence: Synthetic oligonucleotide
  Sense strand starting at position 1393 of SEQ ID NO: 588321
acuuguauuggacguagaa

SEQ ID NO: 856847 - RNA, 19 nt, Artificial Sequence
  Description of Artificial Sequence: Synthetic oligonucleotide
  Antisense strand to SEQ ID NO: 856846
uucuacguccaauacaagu

SEQ ID NO: 856848 - RNA, 19 nt, Artificial Sequence
  Description of Artificial Sequence: Synthetic oligonucleotide
  Sense strand starting at position 1439 of SEQ ID NO: 588321
ccacgaguaucggucccau

SEQ ID NO: 856849 - RNA, 19 nt, Artificial Sequence
  Description of Artificial Sequence: Synthetic oligonucleotide
  Antisense strand to SEQ ID NO: 856848
augggaccgauacucgugg

SEQ ID NO: 856850 - RNA, 19 nt, Artificial Sequence
  Description of Artificial Sequence: Synthetic oligonucleotide
  Sense strand starting at position 1564 of SEQ ID NO: 588321
gggucauaucucuagaccu

SEQ ID NO: 856851 - RNA, 19 nt, Artificial Sequence
  Description of Artificial Sequence: Synthetic oligonucleotide
  Antisense strand to SEQ ID NO: 856850
aggucuagagauaugaccc

SEQ ID NO: 856852 - RNA, 19 nt, Artificial Sequence
  Description of Artificial Sequence: Synthetic oligonucleotide
  Sense strand starting at position 2470 of SEQ ID NO: 588321
ccgcgaucuguucuuguua

SEQ ID NO: 856853 - RNA, 19 nt, Artificial Sequence
  Description of Artificial Sequence: Synthetic oligonucleotide
  Antisense strand to SEQ ID NO: 856852
uaacaagaacagaucgcgg

SEQ ID NO: 856854 - RNA, 19 nt, Artificial Sequence
  Description of Artificial Sequence: Synthetic oligonucleotide
  Sense strand starting at position 2611 of SEQ ID NO: 588321
gggauugaacuaggcuuua

SEQ ID NO: 856855 - RNA, 19 nt, Artificial Sequence
  Description of Artificial Sequence: Synthetic oligonucleotide
  Antisense strand to SEQ ID NO: 856854
uaaagccuaguucaauccc

SEQ ID NO: 856856 - RNA, 19 nt, Artificial Sequence
  Description of Artificial Sequence: Synthetic oligonucleotide
  Sense strand starting at position 2662 of SEQ ID NO: 588321
cuacaauucugacaaagug

SEQ ID NO: 856857 - RNA, 19 nt, Artificial Sequence
  Description of Artificial Sequence: Synthetic oligonucleotide
  Antisense strand to SEQ ID NO: 856856
cacuuugucagaauuguag

SEQ ID NO: 856858 - RNA, 19 nt, Artificial Sequence
  Description of Artificial Sequence: Synthetic oligonucleotide
  Sense strand starting at position 2704 of SEQ ID NO: 588321
gagcgcuucccaggaguua

SEQ ID NO: 856859 - RNA, 19 nt, Artificial Sequence
  Description of Artificial Sequence: Synthetic oligonucleotide
  Antisense strand to SEQ ID NO: 856858
uaacuccugggaagcgcuc

SEQ ID NO: 856860 - RNA, 19 nt, Artificial Sequence
  Description of Artificial Sequence: Synthetic oligonucleotide
  Sense strand starting at position 2705 of SEQ ID NO: 588321
agcgcuucccaggaguuau

SEQ ID NO: 856861 - RNA, 19 nt, Artificial Sequence
  Description of Artificial Sequence: Synthetic oligonucleotide
  Antisense strand to SEQ ID NO: 856860
auaacuccugggaagcgcu

SEQ ID NO: 856862 - RNA, 19 nt, Artificial Sequence
  Description of Artificial Sequence: Synthetic oligonucleotide
  Sense strand starting at position 2830 of SEQ ID NO: 588321
ugcguaccuccagugcuau

SEQ ID NO: 856863 - RNA, 19 nt, Artificial Sequence
  Description of Artificial Sequence: Synthetic oligonucleotide
  Antisense strand to SEQ ID NO: 856862
auagcacuggagguacgca

SEQ ID NO: 856864 - RNA, 19 nt, Artificial Sequence
  Description of Artificial Sequence: Synthetic oligonucleotide
  Sense strand starting at position 2831 of SEQ ID NO: 588321
gcguaccuccagugcuaua

SEQ ID NO: 856865 - RNA, 19 nt, Artificial Sequence
  Description of Artificial Sequence: Synthetic oligonucleotide
  Antisense strand to SEQ ID NO: 856864
uauagcacuggagguacgc

SEQ ID NO: 856866 - RNA, 19 nt, Artificial Sequence
  Description of Artificial Sequence: Synthetic oligonucleotide
  Sense strand starting at position 3287 of SEQ ID NO: 588321
cggcccuaacaauauuauu

SEQ ID NO: 856867 - RNA, 19 nt, Artificial Sequence
  Description of Artificial Sequence: Synthetic oligonucleotide
  Antisense strand to SEQ ID NO: 856866
aauaauauuguuagggccg

SEQ ID NO: 856868 - RNA, 19 nt, Artificial Sequence
  Description of Artificial Sequence: Synthetic oligonucleotide
  Sense strand starting at position 3397 of SEQ ID NO: 588321
aguguacaaguuuguauga

SEQ ID NO: 856869 - RNA, 19 nt, Artificial Sequence
  Description of Artificial Sequence: Synthetic oligonucleotide
  Antisense strand to SEQ ID NO: 856868
ucauacaaacuuguacacu

SEQ ID NO: 856870 - RNA, 19 nt, Artificial Sequence
  Description of Artificial Sequence: Synthetic oligonucleotide
  Sense strand starting at position 3398 of SEQ ID NO: 588321
guguacaaguuuguaugau

SEQ ID NO: 856871 - RNA, 19 nt, Artificial Sequence
  Description of Artificial Sequence: Synthetic oligonucleotide
  Antisense strand to SEQ ID NO: 856870
aucauacaaacuuguacac

SEQ ID NO: 856872 - RNA, 19 nt, Artificial Sequence
  Description of Artificial Sequence: Synthetic oligonucleotide
  Sense strand starting at position 3402 of SEQ ID NO: 588321
acaaguuuguaugaucaga

SEQ ID NO: 856873 - RNA, 19 nt, Artificial Sequence
  Description of Artificial Sequence: Synthetic oligonucleotide
  Antisense strand to SEQ ID NO: 856872
ucugaucauacaaacuugu

SEQ ID NO: 856874 - RNA, 19 nt, Artificial Sequence
  Description of Artificial Sequence: Synthetic oligonucleotide
  Sense strand starting at position 3404 of SEQ ID NO: 588321
aaguuuguaugaucagaaa

SEQ ID NO: 856875 - RNA, 19 nt, Artificial Sequence
  Description of Artificial Sequence: Synthetic oligonucleotide
  Antisense strand to SEQ ID NO: 856874
uuucugaucauacaaacuu

SEQ ID NO: 856876 - RNA, 19 nt, Artificial Sequence
  Description of Artificial Sequence: Synthetic oligonucleotide
  Sense strand starting at position 3407 of SEQ ID NO: 588321
uuuguaugaucagaaagag

SEQ ID NO: 856877 - RNA, 19 nt, Artificial Sequence
  Description of Artificial Sequence: Synthetic oligonucleotide
  Antisense strand to SEQ ID NO: 856876
cucuuucugaucauacaaa

SEQ ID NO: 856878 - RNA, 19 nt, Artificial Sequence
  Description of Artificial Sequence: Synthetic oligonucleotide
  Sense strand starting at position 3519 of SEQ ID NO: 588321
ugguguucuugaguggguu

SEQ ID NO: 856879 - RNA, 19 nt, Artificial Sequence
  Description of Artificial Sequence: Synthetic oligonucleotide
  Antisense strand to SEQ ID NO: 856878
aacccacucaagaacacca

SEQ ID NO: 856880 - RNA, 19 nt, Artificial Sequence
  Description of Artificial Sequence: Synthetic oligonucleotide
  Sense strand starting at position 3542 of SEQ ID NO: 588321
ggguucuuuguguagcuuu

SEQ ID NO: 856881 - RNA, 19 nt, Artificial Sequence
  Description of Artificial Sequence: Synthetic oligonucleotide
  Antisense strand to SEQ ID NO: 856880
aaagcuacacaaagaaccc

SEQ ID NO: 856882 - RNA, 19 nt, Artificial Sequence
  Description of Artificial Sequence: Synthetic oligonucleotide
  Sense strand starting at position 183 of SEQ ID NO: 588322
ugaggucugacgggagaau

SEQ ID NO: 856883 - RNA, 19 nt, Artificial Sequence
  Description of Artificial Sequence: Synthetic oligonucleotide
  Antisense strand to SEQ ID NO: 856882
auucucccgucagaccuca

SEQ ID NO: 856884 - RNA, 19 nt, Artificial Sequence
  Description of Artificial Sequence: Synthetic oligonucleotide
  Sense strand starting at position 194 of SEQ ID NO: 588322
gggagaaucugccauccag

SEQ ID NO: 856885 - RNA, 19 nt, Artificial Sequence
  Description of Artificial Sequence: Synthetic oligonucleotide
  Antisense strand to SEQ ID NO: 856884
cuggauggcagauucuccc

SEQ ID NO: 856886 - RNA, 19 nt, Artificial Sequence
  Description of Artificial Sequence: Synthetic oligonucleotide
  Sense strand starting at position 222 of SEQ ID NO: 588322
augauccacuaauguagau

SEQ ID NO: 856887 - RNA, 19 nt, Artificial Sequence
  Description of Artificial Sequence: Synthetic oligonucleotide
  Antisense strand to SEQ ID NO: 856886
aucuacauuaguggaucau

SEQ ID NO: 856888 - RNA, 19 nt, Artificial Sequence
  Description of Artificial Sequence: Synthetic oligonucleotide
  Sense strand starting at position 231 of SEQ ID NO: 588322
uaauguagauaucaggaca

SEQ ID NO: 856889 - RNA, 19 nt, Artificial Sequence
  Description of Artificial Sequence: Synthetic oligonucleotide
  Antisense strand to SEQ ID NO: 856888
uguccugauaucuacauua

SEQ ID NO: 856890 - RNA, 19 nt, Artificial Sequence
  Description of Artificial Sequence: Synthetic oligonucleotide
  Sense strand starting at position 316 of SEQ ID NO: 588322
ggcucuuaacugggcucaa

SEQ ID NO: 856891 - RNA, 19 nt, Artificial Sequence
  Description of Artificial Sequence: Synthetic oligonucleotide
  Antisense strand to SEQ ID NO: 856890
uugagcccaguuaagagcc

SEQ ID NO: 856892 - RNA, 19 nt, Artificial Sequence
  Description of Artificial Sequence: Synthetic oligonucleotide
  Sense strand starting at position 317 of SEQ ID NO: 588322
gcucuuaacugggcucaaa

SEQ ID NO: 856893 - RNA, 19 nt, Artificial Sequence
  Description of Artificial Sequence: Synthetic oligonucleotide
  Antisense strand to SEQ ID NO: 856892
uuugagcccaguuaagagc

SEQ ID NO: 856894 - RNA, 19 nt, Artificial Sequence
  Description of Artificial Sequence: Synthetic oligonucleotide
  Sense strand starting at position 471 of SEQ ID NO: 588322
uguaucaugcugcacacaa

SEQ ID NO: 856895 - RNA, 19 nt, Artificial Sequence
  Description of Artificial Sequence: Synthetic oligonucleotide
  Antisense strand to SEQ ID NO: 856894
uugugugcagcaugauaca

SEQ ID NO: 856896 - RNA, 19 nt, Artificial Sequence
  Description of Artificial Sequence: Synthetic oligonucleotide
  Sense strand starting at position 648 of SEQ ID NO: 588322
gcaggaaugcagggauauu

SEQ ID NO: 856897 - RNA, 19 nt, Artificial Sequence
  Description of Artificial Sequence: Synthetic oligonucleotide
  Antisense strand to SEQ ID NO: 856896
aauaucccugcauuccugc

SEQ ID NO: 856898 - RNA, 19 nt, Artificial Sequence
  Description of Artificial Sequence: Synthetic oligonucleotide
  Sense strand starting at position 658 of SEQ ID NO: 588322
agggauauuucaggccugu

SEQ ID NO: 856899 - RNA, 19 nt, Artificial Sequence
  Description of Artificial Sequence: Synthetic oligonucleotide
  Antisense strand to SEQ ID NO: 856898
acaggccugaaauaucccu

SEQ ID NO: 856900 - RNA, 19 nt, Artificial Sequence
  Description of Artificial Sequence: Synthetic oligonucleotide
  Sense strand starting at position 706 of SEQ ID NO: 588322
gggccuagcacucagaagu

SEQ ID NO: 856901 - RNA, 19 nt, Artificial Sequence
  Description of Artificial Sequence: Synthetic oligonucleotide
  Antisense strand to SEQ ID NO: 856900
acuucugagugcuaggccc

SEQ ID NO: 856902 - RNA, 19 nt, Artificial Sequence
  Description of Artificial Sequence: Synthetic oligonucleotide
  Sense strand starting at position 716 of SEQ ID NO: 588322
cucagaaguguucagugga

SEQ ID NO: 856903 - RNA, 19 nt, Artificial Sequence
  Description of Artificial Sequence: Synthetic oligonucleotide
  Antisense strand to SEQ ID NO: 856902
uccacugaacacuucugag

SEQ ID NO: 856904 - RNA, 19 nt, Artificial Sequence
  Description of Artificial Sequence: Synthetic oligonucleotide
  Sense strand starting at position 719 of SEQ ID NO: 588322
agaaguguucaguggauau

SEQ ID NO: 856905 - RNA, 19 nt, Artificial Sequence
  Description of Artificial Sequence: Synthetic oligonucleotide
  Antisense strand to SEQ ID NO: 856904
auauccacugaacacuucu

SEQ ID NO: 856906 - RNA, 19 nt, Artificial Sequence
  Description of Artificial Sequence: Synthetic oligonucleotide
  Sense strand starting at position 841 of SEQ ID NO: 588322
gucaacguucuuuggcauu

SEQ ID NO: 856907 - RNA, 19 nt, Artificial Sequence
  Description of Artificial Sequence: Synthetic oligonucleotide
  Antisense strand to SEQ ID NO: 856906
aaugccaaagaacguugac

SEQ ID NO: 856908 - RNA, 19 nt, Artificial Sequence
  Description of Artificial Sequence: Synthetic oligonucleotide
  Sense strand starting at position 994 of SEQ ID NO: 588322
ggucuugcaaggugggaua

SEQ ID NO: 856909 - RNA, 19 nt, Artificial Sequence
  Description of Artificial Sequence: Synthetic oligonucleotide
  Antisense strand to SEQ ID NO: 856908
uaucccaccuugcaagacc

SEQ ID NO: 856910 - RNA, 19 nt, Artificial Sequence
  Description of Artificial Sequence: Synthetic oligonucleotide
  Sense strand starting at position 1111 of SEQ ID NO: 588322
gaagguaagcacuguaauc

SEQ ID NO: 856911 - RNA, 19 nt, Artificial Sequence
  Description of Artificial Sequence: Synthetic oligonucleotide
  Antisense strand to SEQ ID NO: 856910
gauuacagugcuuaccuuc

SEQ ID NO: 856912 - RNA, 19 nt, Artificial Sequence
  Description of Artificial Sequence: Synthetic oligonucleotide
  Sense strand starting at position 1128 of SEQ ID NO: 588322
ucagucccacuuuagagau

SEQ ID NO: 856913 - RNA, 19 nt, Artificial Sequence
  Description of Artificial Sequence: Synthetic oligonucleotide
  Antisense strand to SEQ ID NO: 856912
aucucuaaagugggacuga

SEQ ID NO: 856914 - RNA, 19 nt, Artificial Sequence
  Description of Artificial Sequence: Synthetic oligonucleotide
  Sense strand starting at position 1234 of SEQ ID NO: 588322
gcgccacucuuacuagaca

SEQ ID NO: 856915 - RNA, 19 nt, Artificial Sequence
  Description of Artificial Sequence: Synthetic oligonucleotide
  Antisense strand to SEQ ID NO: 856914
ugucuaguaagaguggcgc

SEQ ID NO: 856916 - RNA, 19 nt, Artificial Sequence
  Description of Artificial Sequence: Synthetic oligonucleotide
  Sense strand starting at position 1299 of SEQ ID NO: 588322
cuucgagaggugugucuga

SEQ ID NO: 856917 - RNA, 19 nt, Artificial Sequence
  Description of Artificial Sequence: Synthetic oligonucleotide
  Antisense strand to SEQ ID NO: 856916
ucagacacaccucucgaag

SEQ ID NO: 856918 - RNA, 19 nt, Artificial Sequence
  Description of Artificial Sequence: Synthetic oligonucleotide
  Sense strand starting at position 1308 of SEQ ID NO: 588322
gugugucugaugggaagca

SEQ ID NO: 856919 - RNA, 19 nt, Artificial Sequence
  Description of Artificial Sequence: Synthetic oligonucleotide
  Antisense strand to SEQ ID NO: 856918
ugcuucccaucagacacac

SEQ ID NO: 856920 - RNA, 19 nt, Artificial Sequence
  Description of Artificial Sequence: Synthetic oligonucleotide
  Sense strand starting at position 1458 of SEQ ID NO: 588322
gggagcucuuucucuuaca

SEQ ID NO: 856921 - RNA, 19 nt, Artificial Sequence
  Description of Artificial Sequence: Synthetic oligonucleotide
  Antisense strand to SEQ ID NO: 856920
uguaagagaaagagcuccc

SEQ ID NO: 856922 - RNA, 19 nt, Artificial Sequence
  Description of Artificial Sequence: Synthetic oligonucleotide
  Sense strand starting at position 1459 of SEQ ID NO: 588322
ggagcucuuucucuuacaa

SEQ ID NO: 856923 - RNA, 19 nt, Artificial Sequence
  Description of Artificial Sequence: Synthetic oligonucleotide
  Antisense strand to SEQ ID NO: 856922
uuguaagagaaagagcucc

SEQ ID NO: 856924 - RNA, 19 nt, Artificial Sequence
  Description of Artificial Sequence: Synthetic oligonucleotide
  Sense strand starting at position 1485 of SEQ ID NO: 588322
aaagcacuguucgaaggaa

SEQ ID NO: 856925 - RNA, 19 nt, Artificial Sequence
  Description of Artificial Sequence: Synthetic oligonucleotide
  Antisense strand to SEQ ID NO: 856924
uuccuucgaacagugcuuu

SEQ ID NO: 856926 - RNA, 19 nt, Artificial Sequence
  Description of Artificial Sequence: Synthetic oligonucleotide
  Sense strand starting at position 1688 of SEQ ID NO: 588322
gagcgagcgccucacaauu

SEQ ID NO: 856927 - RNA, 19 nt, Artificial Sequence
  Description of Artificial Sequence: Synthetic oligonucleotide
  Antisense strand to SEQ ID NO: 856926
aauugugaggcgcucgcuc

SEQ ID NO: 856928 - RNA, 19 nt, Artificial Sequence
  Description of Artificial Sequence: Synthetic oligonucleotide
  Sense strand starting at position 1989 of SEQ ID NO: 588322
ggcuucuucgagcagccaa

SEQ ID NO: 856929 - RNA, 19 nt, Artificial Sequence
  Description of Artificial Sequence: Synthetic oligonucleotide
  Antisense strand to SEQ ID NO: 856928
uuggcugcucgaagaagcc

SEQ ID NO: 856930 - RNA, 19 nt, Artificial Sequence
  Description of Artificial Sequence: Synthetic oligonucleotide
  Sense strand starting at position 2022 of SEQ ID NO: 588322
ggcggugguccugaccuau

SEQ ID NO: 856931 - RNA, 19 nt, Artificial Sequence
  Description of Artificial Sequence: Synthetic oligonucleotide
  Antisense strand to SEQ ID NO: 856930
auaggucaggaccaccgcc

SEQ ID NO: 856932 - RNA, 19 nt, Artificial Sequence
  Description of Artificial Sequence: Synthetic oligonucleotide
  Sense strand starting at position 2367 of SEQ ID NO: 588322
ggaccugcgcccugaauga

SEQ ID NO: 856933 - RNA, 19 nt, Artificial Sequence
  Description of Artificial Sequence: Synthetic oligonucleotide
  Antisense strand to SEQ ID NO: 856932
ucauucagggcgcaggucc

SEQ ID NO: 856934 - RNA, 19 nt, Artificial Sequence
  Description of Artificial Sequence: Synthetic oligonucleotide
  Sense strand starting at position 2507 of SEQ ID NO: 588322
cgaguaaacugagaccaga

SEQ ID NO: 856935 - RNA, 19 nt, Artificial Sequence
  Description of Artificial Sequence: Synthetic oligonucleotide
  Antisense strand to SEQ ID NO: 856934
ucuggucucaguuuacucg

SEQ ID NO: 856936 - RNA, 19 nt, Artificial Sequence
  Description of Artificial Sequence: Synthetic oligonucleotide
  Sense strand starting at position 2686 of SEQ ID NO: 588322
gaagcuuagcuacaguuaa

SEQ ID NO: 856937 - RNA, 19 nt, Artificial Sequence
  Description of Artificial Sequence: Synthetic oligonucleotide
  Antisense strand to SEQ ID NO: 856936
uuaacuguagcuaagcuuc

SEQ ID NO: 856938 - RNA, 19 nt, Artificial Sequence
  Description of Artificial Sequence: Synthetic oligonucleotide
  Sense strand starting at position 2755 of SEQ ID NO: 588322
cgucuaugcuacuuaauga

SEQ ID NO: 856939 - RNA, 19 nt, Artificial Sequence
  Description of Artificial Sequence: Synthetic oligonucleotide
  Antisense strand to SEQ ID NO: 856938
ucauuaaguagcauagacg

SEQ ID NO: 856940 - RNA, 19 nt, Artificial Sequence
  Description of Artificial Sequence: Synthetic oligonucleotide
  Sense strand starting at position 2775 of SEQ ID NO: 588322
gcgucuugggagcauuuca

SEQ ID NO: 856941 - RNA, 19 nt, Artificial Sequence
  Description of Artificial Sequence: Synthetic oligonucleotide
  Antisense strand to SEQ ID NO: 856940
ugaaaugcucccaagacgc

SEQ ID NO: 856942 - RNA, 19 nt, Artificial Sequence
  Description of Artificial Sequence: Synthetic oligonucleotide
  Sense strand starting at position 2833 of SEQ ID NO: 588322
aagacauuccugcgugaac

SEQ ID NO: 856943 - RNA, 19 nt, Artificial Sequence
  Description of Artificial Sequence: Synthetic oligonucleotide
  Antisense strand to SEQ ID NO: 856942
guucacgcaggaaugucuu

SEQ ID NO: 856944 - RNA, 19 nt, Artificial Sequence
  Description of Artificial Sequence: Synthetic oligonucleotide
  Sense strand starting at position 2834 of SEQ ID NO: 588322
agacauuccugcgugaaca

SEQ ID NO: 856945 - RNA, 19 nt, Artificial Sequence
  Description of Artificial Sequence: Synthetic oligonucleotide
  Antisense strand to SEQ ID NO: 856944
uguucacgcaggaaugucu

SEQ ID NO: 856946 - RNA, 19 nt, Artificial Sequence
  Description of Artificial Sequence: Synthetic oligonucleotide
  Sense strand starting at position 2835 of SEQ ID NO: 588322
gacauuccugcgugaacag

SEQ ID NO: 856947 - RNA, 19 nt, Artificial Sequence
  Description of Artificial Sequence: Synthetic oligonucleotide
  Antisense strand to SEQ ID NO: 856946
cuguucacgcaggaauguc

SEQ ID NO: 856948 - RNA, 19 nt, Artificial Sequence
  Description of Artificial Sequence: Synthetic oligonucleotide
  Sense strand starting at position 3043 of SEQ ID NO: 588322
gaacgaucuugcucagccu

SEQ ID NO: 856949 - RNA, 19 nt, Artificial Sequence
  Description of Artificial Sequence: Synthetic oligonucleotide
  Antisense strand to SEQ ID NO: 856948
aggcugagcaagaucguuc

SEQ ID NO: 856950 - RNA, 19 nt, Artificial Sequence
  Description of Artificial Sequence: Synthetic oligonucleotide
  Sense strand starting at position 3548 of SEQ ID NO: 588322
ggugucuccucggcuuaca

SEQ ID NO: 856951 - RNA, 19 nt, Artificial Sequence
  Description of Artificial Sequence: Synthetic oligonucleotide
  Antisense strand to SEQ ID NO: 856950
uguaagccgaggagacacc

SEQ ID NO: 856952 - RNA, 19 nt, Artificial Sequence
  Description of Artificial Sequence: Synthetic oligonucleotide
  Sense strand starting at position 3705 of SEQ ID NO: 588322
cugagaucagccuguagaa

SEQ ID NO: 856953 - RNA, 19 nt, Artificial Sequence
  Description of Artificial Sequence: Synthetic oligonucleotide
  Antisense strand to SEQ ID NO: 856952
uucuacaggcugaucucag

SEQ ID NO: 856954 - RNA, 19 nt, Artificial Sequence
  Description of Artificial Sequence: Synthetic oligonucleotide
  Sense strand starting at position 3726 of SEQ ID NO: 588322
cacagauuccugggucaca

SEQ ID NO: 856955 - RNA, 19 nt, Artificial Sequence
  Description of Artificial Sequence: Synthetic oligonucleotide
  Antisense strand to SEQ ID NO: 856954
ugugacccaggaaucugug

SEQ ID NO: 856956 - RNA, 19 nt, Artificial Sequence
  Description of Artificial Sequence: Synthetic oligonucleotide
  Sense strand starting at position 3727 of SEQ ID NO: 588322
acagauuccugggucacaa

SEQ ID NO: 856957 - RNA, 19 nt, Artificial Sequence
  Description of Artificial Sequence: Synthetic oligonucleotide
  Antisense strand to SEQ ID NO: 856956
uugugacccaggaaucugu

SEQ ID NO: 856958 - RNA, 19 nt, Artificial Sequence
  Description of Artificial Sequence: Synthetic oligonucleotide
  Sense strand starting at position 3908 of SEQ ID NO: 588322
uagagcaagugucugauaa

SEQ ID NO: 856959 - RNA, 19 nt, Artificial Sequence
  Description of Artificial Sequence: Synthetic oligonucleotide
  Antisense strand to SEQ ID NO: 856958
uuaucagacacuugcucua

SEQ ID NO: 856960 - RNA, 19 nt, Artificial Sequence
  Description of Artificial Sequence: Synthetic oligonucleotide
  Sense strand starting at position 3909 of SEQ ID NO: 588322
agagcaagugucugauaag

SEQ ID NO: 856961 - RNA, 19 nt, Artificial Sequence
  Description of Artificial Sequence: Synthetic oligonucleotide
  Antisense strand to SEQ ID NO: 856960
cuuaucagacacuugcucu

SEQ ID NO: 856962 - RNA, 19 nt, Artificial Sequence
  Description of Artificial Sequence: Synthetic oligonucleotide
  Sense strand starting at position 164 of SEQ ID NO: 588323
gggcaucuccauuacguua

SEQ ID NO: 856963 - RNA, 19 nt, Artificial Sequence
  Description of Artificial Sequence: Synthetic oligonucleotide
  Antisense strand to SEQ ID NO: 856962
uaacguaauggagaugccc

SEQ ID NO: 856964 - RNA, 19 nt, Artificial Sequence
  Description of Artificial Sequence: Synthetic oligonucleotide
  Sense strand starting at position 195 of SEQ ID NO: 588323
gguauacgugcuccauugu

SEQ ID NO: 856965 - RNA, 19 nt, Artificial Sequence
  Description of Artificial Sequence: Synthetic oligonucleotide
  Antisense strand to SEQ ID NO: 856964
acaauggagcacguauacc

SEQ ID NO: 856966 - RNA, 19 nt, Artificial Sequence
  Description of Artificial Sequence: Synthetic oligonucleotide
  Sense strand starting at position 280 of SEQ ID NO: 588323
cuacaacuguguucucaaa

SEQ ID NO: 856967 - RNA, 19 nt, Artificial Sequence
  Description of Artificial Sequence: Synthetic oligonucleotide
  Antisense strand to SEQ ID NO: 856966
uuugagaacacaguuguag

SEQ ID NO: 856968 - RNA, 19 nt, Artificial Sequence
  Description of Artificial Sequence: Synthetic oligonucleotide
  Sense strand starting at position 282 of SEQ ID NO: 588323
acaacuguguucucaaaca

SEQ ID NO: 856969 - RNA, 19 nt, Artificial Sequence
  Description of Artificial Sequence: Synthetic oligonucleotide
  Antisense strand to SEQ ID NO: 856968
uguuugagaacacaguugu

SEQ ID NO: 856970 - RNA, 19 nt, Artificial Sequence
  Description of Artificial Sequence: Synthetic oligonucleotide
  Sense strand starting at position 439 of SEQ ID NO: 588323
augcaaugccugucuuguu

SEQ ID NO: 856971 - RNA, 19 nt, Artificial Sequence
  Description of Artificial Sequence: Synthetic oligonucleotide
  Antisense strand to SEQ ID NO: 856970
aacaagacaggcauugcau

SEQ ID NO: 856972 - RNA, 19 nt, Artificial Sequence
  Description of Artificial Sequence: Synthetic oligonucleotide
  Sense strand starting at position 446 of SEQ ID NO: 588323
gccugucuuguugaaggca

SEQ ID NO: 856973 - RNA, 19 nt, Artificial Sequence
  Description of Artificial Sequence: Synthetic oligonucleotide
  Antisense strand to SEQ ID NO: 856972
ugccuucaacaagacaggc

SEQ ID NO: 856974 - RNA, 19 nt, Artificial Sequence
  Description of Artificial Sequence: Synthetic oligonucleotide
  Sense strand starting at position 449 of SEQ ID NO: 588323
ugucuuguugaaggcauca

SEQ ID NO: 856975 - RNA, 19 nt, Artificial Sequence
  Description of Artificial Sequence: Synthetic oligonucleotide
  Antisense strand to SEQ ID NO: 856974
ugaugccuucaacaagaca

SEQ ID NO: 856976 - RNA, 19 nt, Artificial Sequence
  Description of Artificial Sequence: Synthetic oligonucleotide
  Sense strand starting at position 469 of SEQ ID NO: 588323
gcaucaggcuucccugauu

SEQ ID NO: 856977 - RNA, 19 nt, Artificial Sequence
  Description of Artificial Sequence: Synthetic oligonucleotide
  Antisense strand to SEQ ID NO: 856976
aaucagggaagccugaugc

SEQ ID NO: 856978 - RNA, 19 nt, Artificial Sequence
  Description of Artificial Sequence: Synthetic oligonucleotide
  Sense strand starting at position 481 of SEQ ID NO: 588323
ccugauugcuacucaugac

SEQ ID NO: 856979 - RNA, 19 nt, Artificial Sequence
  Description of Artificial Sequence: Synthetic oligonucleotide
  Antisense strand to SEQ ID NO: 856978
gucaugaguagcaaucagg

SEQ ID NO: 856980 - RNA, 19 nt, Artificial Sequence
  Description of Artificial Sequence: Synthetic oligonucleotide
  Sense strand starting at position 587 of SEQ ID NO: 588323
ggugaauagaguuguuguc

SEQ ID NO: 856981 - RNA, 19 nt, Artificial Sequence
  Description of Artificial Sequence: Synthetic oligonucleotide
  Antisense strand to SEQ ID NO: 856980
gacaacaacucuauucacc

SEQ ID NO: 856982 - RNA, 19 nt, Artificial Sequence
  Description of Artificial Sequence: Synthetic oligonucleotide
  Sense strand starting at position 589 of SEQ ID NO: 588323
ugaauagaguuguugucau

SEQ ID NO: 856983 - RNA, 19 nt, Artificial Sequence
  Description of Artificial Sequence: Synthetic oligonucleotide
  Antisense strand to SEQ ID NO: 856982
augacaacaacucuauuca

SEQ ID NO: 856984 - RNA, 19 nt, Artificial Sequence
  Description of Artificial Sequence: Synthetic oligonucleotide
  Sense strand starting at position 596 of SEQ ID NO: 588323
aguuguugucauugaaacu

SEQ ID NO: 856985 - RNA, 19 nt, Artificial Sequence
  Description of Artificial Sequence: Synthetic oligonucleotide
  Antisense strand to SEQ ID NO: 856984
aguuucaaugacaacaacu

SEQ ID NO: 856986 - RNA, 19 nt, Artificial Sequence
  Description of Artificial Sequence: Synthetic oligonucleotide
  Sense strand starting at position 597 of SEQ ID NO: 588323
guuguugucauugaaacug

SEQ ID NO: 856987 - RNA, 19 nt, Artificial Sequence
  Description of Artificial Sequence: Synthetic oligonucleotide
  Antisense strand to SEQ ID NO: 856986
caguuucaaugacaacaac

SEQ ID NO: 856988 - RNA, 19 nt, Artificial Sequence
  Description of Artificial Sequence: Synthetic oligonucleotide
  Sense strand starting at position 640 of SEQ ID NO: 588323
accugaggcuccuuaacuu

SEQ ID NO: 856989 - RNA, 19 nt, Artificial Sequence
  Description of Artificial Sequence: Synthetic oligonucleotide
  Antisense strand to SEQ ID NO: 856988
aaguuaaggagccucaggu

SEQ ID NO: 856990 - RNA, 19 nt, Artificial Sequence
  Description of Artificial Sequence: Synthetic oligonucleotide
  Sense strand starting at position 682 of SEQ ID NO: 588323
agagguagucucugauuau

SEQ ID NO: 856991 - RNA, 19 nt, Artificial Sequence
  Description of Artificial Sequence: Synthetic oligonucleotide
  Antisense strand to SEQ ID NO: 856990
auaaucagagacuaccucu

SEQ ID NO: 856992 - RNA, 19 nt, Artificial Sequence
  Description of Artificial Sequence: Synthetic oligonucleotide
  Sense strand starting at position 689 of SEQ ID NO: 588323
gucucugauuaucccaaga

SEQ ID NO: 856993 - RNA, 19 nt, Artificial Sequence
  Description of Artificial Sequence: Synthetic oligonucleotide
  Antisense strand to SEQ ID NO: 856992
ucuugggauaaucagagac

SEQ ID NO: 856994 - RNA, 19 nt, Artificial Sequence
  Description of Artificial Sequence: Synthetic oligonucleotide
  Sense strand starting at position 751 of SEQ ID NO: 588323
aaagguuugccaugacuaa

SEQ ID NO: 856995 - RNA, 19 nt, Artificial Sequence
  Description of Artificial Sequence: Synthetic oligonucleotide
  Antisense strand to SEQ ID NO: 856994
uuagucauggcaaaccuuu

SEQ ID NO: 856996 - RNA, 19 nt, Artificial Sequence
  Description of Artificial Sequence: Synthetic oligonucleotide
  Sense strand starting at position 752 of SEQ ID NO: 588323
aagguuugccaugacuaaa

SEQ ID NO: 856997 - RNA, 19 nt, Artificial Sequence
  Description of Artificial Sequence: Synthetic oligonucleotide
  Antisense strand to SEQ ID NO: 856996
uuuagucauggcaaaccuu

SEQ ID NO: 856998 - RNA, 19 nt, Artificial Sequence
  Description of Artificial Sequence: Synthetic oligonucleotide
  Sense strand starting at position 755 of SEQ ID NO: 588323
guuugccaugacuaaagga

SEQ ID NO: 856999 - RNA, 19 nt, Artificial Sequence
  Description of Artificial Sequence: Synthetic oligonucleotide
  Antisense strand to SEQ ID NO: 856998
uccuuuagucauggcaaac

SEQ ID NO: 857000 - RNA, 19 nt, Artificial Sequence
  Description of Artificial Sequence: Synthetic oligonucleotide
  Sense strand starting at position 774 of SEQ ID NO: 588323
guggaauucugccuggaag

SEQ ID NO: 857001 - RNA, 19 nt, Artificial Sequence
  Description of Artificial Sequence: Synthetic oligonucleotide
  Antisense strand to SEQ ID NO: 857000
cuuccaggcagaauuccac

SEQ ID NO: 857002 - RNA, 19 nt, Artificial Sequence
  Description of Artificial Sequence: Synthetic oligonucleotide
  Sense strand starting at position 775 of SEQ ID NO: 588323
uggaauucugccuggaagg

SEQ ID NO: 857003 - RNA, 19 nt, Artificial Sequence
  Description of Artificial Sequence: Synthetic oligonucleotide
  Antisense strand to SEQ ID NO: 857002
ccuuccaggcagaauucca

SEQ ID NO: 857004 - RNA, 19 nt, Artificial Sequence
  Description of Artificial Sequence: Synthetic oligonucleotide
  Sense strand starting at position 776 of SEQ ID NO: 588323
ggaauucugccuggaagga

SEQ ID NO: 857005 - RNA, 19 nt, Artificial Sequence
  Description of Artificial Sequence: Synthetic oligonucleotide
  Antisense strand to SEQ ID NO: 857004
uccuuccaggcagaauucc

SEQ ID NO: 857006 - RNA, 19 nt, Artificial Sequence
  Description of Artificial Sequence: Synthetic oligonucleotide
  Sense strand starting at position 828 of SEQ ID NO: 588323
auuaaugaguaggugaaca

SEQ ID NO: 857007 - RNA, 19 nt, Artificial Sequence
  Description of Artificial Sequence: Synthetic oligonucleotide
  Antisense strand to SEQ ID NO: 857006
uguucaccuacucauuaau

SEQ ID NO: 857008 - RNA, 19 nt, Artificial Sequence
  Description of Artificial Sequence: Synthetic oligonucleotide
  Sense strand starting at position 922 of SEQ ID NO: 588323
ccaguuugccugggacagu

SEQ ID NO: 857009 - RNA, 19 nt, Artificial Sequence
  Description of Artificial Sequence: Synthetic oligonucleotide
  Antisense strand to SEQ ID NO: 857008
acugucccaggcaaacugg

SEQ ID NO: 857010 - RNA, 19 nt, Artificial Sequence
  Description of Artificial Sequence: Synthetic oligonucleotide
  Sense strand starting at position 983 of SEQ ID NO: 588323
auauguacccaccagaagu

SEQ ID NO: 857011 - RNA, 19 nt, Artificial Sequence
  Description of Artificial Sequence: Synthetic oligonucleotide
  Antisense strand to SEQ ID NO: 857010
acuucugguggguacauau

SEQ ID NO: 857012 - RNA, 19 nt, Artificial Sequence
  Description of Artificial Sequence: Synthetic oligonucleotide
  Sense strand starting at position 993 of SEQ ID NO: 588323
accagaaguuaagauauaa

SEQ ID NO: 857013 - RNA, 19 nt, Artificial Sequence
  Description of Artificial Sequence: Synthetic oligonucleotide
  Antisense strand to SEQ ID NO: 857012
uuauaucuuaacuucuggu

SEQ ID NO: 857014 - RNA, 19 nt, Artificial Sequence
  Description of Artificial Sequence: Synthetic oligonucleotide
  Sense strand starting at position 1054 of SEQ ID NO: 588323
gccacaccuguauauagaa

SEQ ID NO: 857015 - RNA, 19 nt, Artificial Sequence
  Description of Artificial Sequence: Synthetic oligonucleotide
  Antisense strand to SEQ ID NO: 857014
uucuauauacagguguggc

SEQ ID NO: 857016 - RNA, 19 nt, Artificial Sequence
  Description of Artificial Sequence: Synthetic oligonucleotide
  Sense strand starting at position 2137 of SEQ ID NO: 588323
gaccgaaggcuucgggaaa

SEQ ID NO: 857017 - RNA, 19 nt, Artificial Sequence
  Description of Artificial Sequence: Synthetic oligonucleotide
  Antisense strand to SEQ ID NO: 857016
uuucccgaagccuucgguc

SEQ ID NO: 857018 - RNA, 19 nt, Artificial Sequence
  Description of Artificial Sequence: Synthetic oligonucleotide
  Sense strand starting at position 2195 of SEQ ID NO: 588323
gugacagagccguagguuu

SEQ ID NO: 857019 - RNA, 19 nt, Artificial Sequence
  Description of Artificial Sequence: Synthetic oligonucleotide
  Antisense strand to SEQ ID NO: 857018
aaaccuacggcucugucac

SEQ ID NO: 857020 - RNA, 19 nt, Artificial Sequence
  Description of Artificial Sequence: Synthetic oligonucleotide
  Sense strand starting at position 2496 of SEQ ID NO: 588323
agggucuuugcuugucuga

SEQ ID NO: 857021 - RNA, 19 nt, Artificial Sequence
  Description of Artificial Sequence: Synthetic oligonucleotide
  Antisense strand to SEQ ID NO: 857020
ucagacaagcaaagacccu

SEQ ID NO: 857022 - RNA, 19 nt, Artificial Sequence
  Description of Artificial Sequence: Synthetic oligonucleotide
  Sense strand starting at position 2498 of SEQ ID NO: 588323
ggucuuugcuugucugaca

SEQ ID NO: 857023 - RNA, 19 nt, Artificial Sequence
  Description of Artificial Sequence: Synthetic oligonucleotide
  Antisense strand to SEQ ID NO: 857022
ugucagacaagcaaagacc

SEQ ID NO: 857024 - RNA, 19 nt, Artificial Sequence
  Description of Artificial Sequence: Synthetic oligonucleotide
  Sense strand starting at position 2646 of SEQ ID NO: 588323
cuaggagcuuuggacaaga

SEQ ID NO: 857025 - RNA, 19 nt, Artificial Sequence
  Description of Artificial Sequence: Synthetic oligonucleotide
  Antisense strand to SEQ ID NO: 857024
ucuuguccaaagcuccuag

SEQ ID NO: 857026 - RNA, 19 nt, Artificial Sequence
  Description of Artificial Sequence: Synthetic oligonucleotide
  Sense strand starting at position 3361 of SEQ ID NO: 588323
gagccuagacugugaauuc

SEQ ID NO: 857027 - RNA, 19 nt, Artificial Sequence
  Description of Artificial Sequence: Synthetic oligonucleotide
  Antisense strand to SEQ ID NO: 857026
gaauucacagucuaggcuc

SEQ ID NO: 857028 - RNA, 19 nt, Artificial Sequence
  Description of Artificial Sequence: Synthetic oligonucleotide
  Sense strand starting at position 3370 of SEQ ID NO: 588323
cugugaauucccgcugcuu

SEQ ID NO: 857029 - RNA, 19 nt, Artificial Sequence
  Description of Artificial Sequence: Synthetic oligonucleotide
  Antisense strand to SEQ ID NO: 857028
aagcagcgggaauucacag

SEQ ID NO: 857030 - RNA, 19 nt, Artificial Sequence
  Description of Artificial Sequence: Synthetic oligonucleotide
  Sense strand starting at position 3438 of SEQ ID NO: 588323
ggcggacuugacugaaaua

SEQ ID NO: 857031 - RNA, 19 nt, Artificial Sequence
  Description of Artificial Sequence: Synthetic oligonucleotide
  Antisense strand to SEQ ID NO: 857030
uauuucagucaaguccgcc

SEQ ID NO: 857032 - RNA, 19 nt, Artificial Sequence
  Description of Artificial Sequence: Synthetic oligonucleotide
  Sense strand starting at position 3439 of SEQ ID NO: 588323
gcggacuugacugaaauau

SEQ ID NO: 857033 - RNA, 19 nt, Artificial Sequence
  Description of Artificial Sequence: Synthetic oligonucleotide
  Antisense strand to SEQ ID NO: 857032
auauuucagucaaguccgc

SEQ ID NO: 857034 - RNA, 19 nt, Artificial Sequence
  Description of Artificial Sequence: Synthetic oligonucleotide
  Sense strand starting at position 3719 of SEQ ID NO: 588323
cgucuuagauaccuggcua

SEQ ID NO: 857035 - RNA, 19 nt, Artificial Sequence
  Description of Artificial Sequence: Synthetic oligonucleotide
  Antisense strand to SEQ ID NO: 857034
uagccagguaucuaagacg

SEQ ID NO: 857036 - RNA, 19 nt, Artificial Sequence
  Description of Artificial Sequence: Synthetic oligonucleotide
  Sense strand starting at position 3723 of SEQ ID NO: 588323
uuagauaccuggcuacgaa

SEQ ID NO: 857037 - RNA, 19 nt, Artificial Sequence
  Description of Artificial Sequence: Synthetic oligonucleotide
  Antisense strand to SEQ ID NO: 857036
uucguagccagguaucuaa

SEQ ID NO: 857038 - RNA, 19 nt, Artificial Sequence
  Description of Artificial Sequence: Synthetic oligonucleotide
  Sense strand starting at position 3775 of SEQ ID NO: 588323
ugaccagaggauuggguau

SEQ ID NO: 857039 - RNA, 19 nt, Artificial Sequence
  Description of Artificial Sequence: Synthetic oligonucleotide
  Antisense strand to SEQ ID NO: 857038
auacccaauccucugguca

SEQ ID NO: 857040 - RNA, 19 nt, Artificial Sequence
  Description of Artificial Sequence: Synthetic oligonucleotide
  Sense strand starting at position 3965 of SEQ ID NO: 588323
augaaugacugccaaacaa

SEQ ID NO: 857041 - RNA, 19 nt, Artificial Sequence
  Description of Artificial Sequence: Synthetic oligonucleotide
  Antisense strand to SEQ ID NO: 857040
uuguuuggcagucauucau

SEQ ID NO: 857042 - RNA, 19 nt, Artificial Sequence
  Description of Artificial Sequence: Synthetic oligonucleotide
  Sense strand starting at position 56 of SEQ ID NO: 588324
ggugaugacuuacccacaa

SEQ ID NO: 857043 - RNA, 19 nt, Artificial Sequence
  Description of Artificial Sequence: Synthetic oligonucleotide
  Antisense strand to SEQ ID NO: 857042
uuguggguaagucaucacc

SEQ ID NO: 857044 - RNA, 19 nt, Artificial Sequence
  Description of Artificial Sequence: Synthetic oligonucleotide
  Sense strand starting at position 102 of SEQ ID NO: 588324
gugggauggcgacagcaua

SEQ ID NO: 857045 - RNA, 19 nt, Artificial Sequence
  Description of Artificial Sequence: Synthetic oligonucleotide
  Antisense strand to SEQ ID NO: 857044
uaugcugucgccaucccac

SEQ ID NO: 857046 - RNA, 19 nt, Artificial Sequence
  Description of Artificial Sequence: Synthetic oligonucleotide
  Sense strand starting at position 129 of SEQ ID NO: 588324
gcaggaaauacuuguggau

SEQ ID NO: 857047 - RNA, 19 nt, Artificial Sequence
  Description of Artificial Sequence: Synthetic oligonucleotide
  Antisense strand to SEQ ID NO: 857046
auccacaaguauuuccugc

SEQ ID NO: 857048 - RNA, 19 nt, Artificial Sequence
  Description of Artificial Sequence: Synthetic oligonucleotide
  Sense strand starting at position 450 of SEQ ID NO: 588324
gcaaaugguacuugaggaa

SEQ ID NO: 857049 - RNA, 19 nt, Artificial Sequence
  Description of Artificial Sequence: Synthetic oligonucleotide
  Antisense strand to SEQ ID NO: 857048
uuccucaaguaccauuugc

SEQ ID NO: 857050 - RNA, 19 nt, Artificial Sequence
  Description of Artificial Sequence: Synthetic oligonucleotide
  Sense strand starting at position 620 of SEQ ID NO: 588324
cacaaauaucacuggcguu

SEQ ID NO: 857051 - RNA, 19 nt, Artificial Sequence
  Description of Artificial Sequence: Synthetic oligonucleotide
  Antisense strand to SEQ ID NO: 857050
aacgccagugauauuugug

SEQ ID NO: 857052 - RNA, 19 nt, Artificial Sequence
  Description of Artificial Sequence: Synthetic oligonucleotide
  Sense strand starting at position 634 of SEQ ID NO: 588324
gcguuugccaugccuaaga

SEQ ID NO: 857053 - RNA, 19 nt, Artificial Sequence
  Description of Artificial Sequence: Synthetic oligonucleotide
  Antisense strand to SEQ ID NO: 857052
ucuuaggcauggcaaacgc

SEQ ID NO: 857054 - RNA, 19 nt, Artificial Sequence
  Description of Artificial Sequence: Synthetic oligonucleotide
  Sense strand starting at position 802 of SEQ ID NO: 588324
cuggcaucuuccucauaga

SEQ ID NO: 857055 - RNA, 19 nt, Artificial Sequence
  Description of Artificial Sequence: Synthetic oligonucleotide
  Antisense strand to SEQ ID NO: 857054
ucuaugaggaagaugccag

SEQ ID NO: 857056 - RNA, 19 nt, Artificial Sequence
  Description of Artificial Sequence: Synthetic oligonucleotide
  Sense strand starting at position 813 of SEQ ID NO: 588324
cucauagaguuguucugga

SEQ ID NO: 857057 - RNA, 19 nt, Artificial Sequence
  Description of Artificial Sequence: Synthetic oligonucleotide
  Antisense strand to SEQ ID NO: 857056
uccagaacaacucuaugag

SEQ ID NO: 857058 - RNA, 19 nt, Artificial Sequence
  Description of Artificial Sequence: Synthetic oligonucleotide
  Sense strand starting at position 818 of SEQ ID NO: 588324
agaguuguucuggagaguu

SEQ ID NO: 857059 - RNA, 19 nt, Artificial Sequence
  Description of Artificial Sequence: Synthetic oligonucleotide
  Antisense strand to SEQ ID NO: 857058
aacucuccagaacaacucu

SEQ ID NO: 857060 - RNA, 19 nt, Artificial Sequence
  Description of Artificial Sequence: Synthetic oligonucleotide
  Sense strand starting at position 820 of SEQ ID NO: 588324
aguuguucuggagaguuca

SEQ ID NO: 857061 - RNA, 19 nt, Artificial Sequence
  Description of Artificial Sequence: Synthetic oligonucleotide
  Antisense strand to SEQ ID NO: 857060
ugaacucuccagaacaacu

SEQ ID NO: 857062 - RNA, 19 nt, Artificial Sequence
  Description of Artificial Sequence: Synthetic oligonucleotide
  Sense strand starting at position 1051 of SEQ ID NO: 588324
ggaggucucagcugacgaa

SEQ ID NO: 857063 - RNA, 19 nt, Artificial Sequence
  Description of Artificial Sequence: Synthetic oligonucleotide
  Antisense strand to SEQ ID NO: 857062
uucgucagcugagaccucc

SEQ ID NO: 857064 - RNA, 19 nt, Artificial Sequence
  Description of Artificial Sequence: Synthetic oligonucleotide
  Sense strand starting at position 1075 of SEQ ID NO: 588324
ccucuauuucggcgcacua

SEQ ID NO: 857065 - RNA, 19 nt, Artificial Sequence
  Description of Artificial Sequence: Synthetic oligonucleotide
  Antisense strand to SEQ ID NO: 857064
uagugcgccgaaauagagg

SEQ ID NO: 857066 - RNA, 19 nt, Artificial Sequence
  Description of Artificial Sequence: Synthetic oligonucleotide
  Sense strand starting at position 1077 of SEQ ID NO: 588324
ucuauuucggcgcacuaau

SEQ ID NO: 857067 - RNA, 19 nt, Artificial Sequence
  Description of Artificial Sequence: Synthetic oligonucleotide
  Antisense strand to SEQ ID NO: 857066
auuagugcgccgaaauaga

SEQ ID NO: 857068 - RNA, 19 nt, Artificial Sequence
  Description of Artificial Sequence: Synthetic oligonucleotide
  Sense strand starting at position 1169 of SEQ ID NO: 588324
caguuucuaggcugggaga

SEQ ID NO: 857069 - RNA, 19 nt, Artificial Sequence
  Description of Artificial Sequence: Synthetic oligonucleotide
  Antisense strand to SEQ ID NO: 857068
ucucccagccuagaaacug

SEQ ID NO: 857070 - RNA, 19 nt, Artificial Sequence
  Description of Artificial Sequence: Synthetic oligonucleotide
  Sense strand starting at position 1492 of SEQ ID NO: 588324
ugcauaucggcgaagugua

SEQ ID NO: 857071 - RNA, 19 nt, Artificial Sequence
  Description of Artificial Sequence: Synthetic oligonucleotide
  Antisense strand to SEQ ID NO: 857070
uacacuucgccgauaugca

SEQ ID NO: 857072 - RNA, 19 nt, Artificial Sequence
  Description of Artificial Sequence: Synthetic oligonucleotide
  Sense strand starting at position 1499 of SEQ ID NO: 588324
cggcgaaguguaguucuca

SEQ ID NO: 857073 - RNA, 19 nt, Artificial Sequence
  Description of Artificial Sequence: Synthetic oligonucleotide
  Antisense strand to SEQ ID NO: 857072
ugagaacuacacuucgccg

SEQ ID NO: 857074 - RNA, 19 nt, Artificial Sequence
  Description of Artificial Sequence: Synthetic oligonucleotide
  Sense strand starting at position 1507 of SEQ ID NO: 588324
uguaguucucaagagcauu

SEQ ID NO: 857075 - RNA, 19 nt, Artificial Sequence
  Description of Artificial Sequence: Synthetic oligonucleotide
  Antisense strand to SEQ ID NO: 857074
aaugcucuugagaacuaca

SEQ ID NO: 857076 - RNA, 19 nt, Artificial Sequence
  Description of Artificial Sequence: Synthetic oligonucleotide
  Sense strand starting at position 1541 of SEQ ID NO: 588324
gcccgaaucucucuaggga

SEQ ID NO: 857077 - RNA, 19 nt, Artificial Sequence
  Description of Artificial Sequence: Synthetic oligonucleotide
  Antisense strand to SEQ ID NO: 857076
ucccuagagagauucgggc

SEQ ID NO: 857078 - RNA, 19 nt, Artificial Sequence
  Description of Artificial Sequence: Synthetic oligonucleotide
  Sense strand starting at position 1544 of SEQ ID NO: 588324
cgaaucucucuagggaaug

SEQ ID NO: 857079 - RNA, 19 nt, Artificial Sequence
  Description of Artificial Sequence: Synthetic oligonucleotide
  Antisense strand to SEQ ID NO: 857078
cauucccuagagagauucg

SEQ ID NO: 857080 - RNA, 19 nt, Artificial Sequence
  Description of Artificial Sequence: Synthetic oligonucleotide
  Sense strand starting at position 1717 of SEQ ID NO: 588324
ggcucagagaaagguagau

SEQ ID NO: 857081 - RNA, 19 nt, Artificial Sequence
  Description of Artificial Sequence: Synthetic oligonucleotide
  Antisense strand to SEQ ID NO: 857080
aucuaccuuucucugagcc

SEQ ID NO: 857082 - RNA, 19 nt, Artificial Sequence
  Description of Artificial Sequence: Synthetic oligonucleotide
  Sense strand starting at position 2050 of SEQ ID NO: 588324
aagagauguugggccagau

SEQ ID NO: 857083 - RNA, 19 nt, Artificial Sequence
  Description of Artificial Sequence: Synthetic oligonucleotide
  Antisense strand to SEQ ID NO: 857082
aucuggcccaacaucucuu

SEQ ID NO: 857084 - RNA, 19 nt, Artificial Sequence
  Description of Artificial Sequence: Synthetic oligonucleotide
  Sense strand starting at position 2221 of SEQ ID NO: 588324
gacggaguucuauguuauc

SEQ ID NO: 857085 - RNA, 19 nt, Artificial Sequence
  Description of Artificial Sequence: Synthetic oligonucleotide
  Antisense strand to SEQ ID NO: 857084
gauaacauagaacuccguc

SEQ ID NO: 857086 - RNA, 19 nt, Artificial Sequence
  Description of Artificial Sequence: Synthetic oligonucleotide
  Sense strand starting at position 2421 of SEQ ID NO: 588324
ggaggcuuggcccaaagaa

SEQ ID NO: 857087 - RNA, 19 nt, Artificial Sequence
  Description of Artificial Sequence: Synthetic oligonucleotide
  Antisense strand to SEQ ID NO: 857086
uucuuugggccaagccucc

SEQ ID NO: 857088 - RNA, 19 nt, Artificial Sequence
  Description of Artificial Sequence: Synthetic oligonucleotide
  Sense strand starting at position 2767 of SEQ ID NO: 588324
uugaaccugucagcuuuaa

SEQ ID NO: 857089 - RNA, 19 nt, Artificial Sequence
  Description of Artificial Sequence: Synthetic oligonucleotide
  Antisense strand to SEQ ID NO: 857088
uuaaagcugacagguucaa

SEQ ID NO: 857090 - RNA, 19 nt, Artificial Sequence
  Description of Artificial Sequence: Synthetic oligonucleotide
  Sense strand starting at position 2771 of SEQ ID NO: 588324
accugucagcuuuaagauu

SEQ ID NO: 857091 - RNA, 19 nt, Artificial Sequence
  Description of Artificial Sequence: Synthetic oligonucleotide
  Antisense strand to SEQ ID NO: 857090
aaucuuaaagcugacaggu

SEQ ID NO: 857092 - RNA, 19 nt, Artificial Sequence
  Description of Artificial Sequence: Synthetic oligonucleotide
  Sense strand starting at position 2777 of SEQ ID NO: 588324
cagcuuuaagauugaguga

SEQ ID NO: 857093 - RNA, 19 nt, Artificial Sequence
  Description of Artificial Sequence: Synthetic oligonucleotide
  Antisense strand to SEQ ID NO: 857092
ucacucaaucuuaaagcug

SEQ ID NO: 857094 - RNA, 19 nt, Artificial Sequence
  Description of Artificial Sequence: Synthetic oligonucleotide
  Sense strand starting at position 2778 of SEQ ID NO: 588324
agcuuuaagauugagugau

SEQ ID NO: 857095 - RNA, 19 nt, Artificial Sequence
  Description of Artificial Sequence: Synthetic oligonucleotide
  Antisense strand to SEQ ID NO: 857094
aucacucaaucuuaaagcu

SEQ ID NO: 857096 - RNA, 19 nt, Artificial Sequence
  Description of Artificial Sequence: Synthetic oligonucleotide
  Sense strand starting at position 2780 of SEQ ID NO: 588324
cuuuaagauugagugauug

SEQ ID NO: 857097 - RNA, 19 nt, Artificial Sequence
  Description of Artificial Sequence: Synthetic oligonucleotide
  Antisense strand to SEQ ID NO: 857096
caaucacucaaucuuaaag

SEQ ID NO: 857098 - RNA, 19 nt, Artificial Sequence
  Description of Artificial Sequence: Synthetic oligonucleotide
  Sense strand starting at position 2782 of SEQ ID NO: 588324
uuaagauugagugauuguu

SEQ ID NO: 857099 - RNA, 19 nt, Artificial Sequence
  Description of Artificial Sequence: Synthetic oligonucleotide
  Antisense strand to SEQ ID NO: 857098
aacaaucacucaaucuuaa

SEQ ID NO: 857100 - RNA, 19 nt, Artificial Sequence
  Description of Artificial Sequence: Synthetic oligonucleotide
  Sense strand starting at position 2784 of SEQ ID NO: 588324
aagauugagugauuguuua

SEQ ID NO: 857101 - RNA, 19 nt, Artificial Sequence
  Description of Artificial Sequence: Synthetic oligonucleotide
  Antisense strand to SEQ ID NO: 857100
uaaacaaucacucaaucuu

SEQ ID NO: 857102 - RNA, 19 nt, Artificial Sequence
  Description of Artificial Sequence: Synthetic oligonucleotide
  Sense strand starting at position 2788 of SEQ ID NO: 588324
uugagugauuguuuagaua

SEQ ID NO: 857103 - RNA, 19 nt, Artificial Sequence
  Description of Artificial Sequence: Synthetic oligonucleotide
  Antisense strand to SEQ ID NO: 857102
uaucuaaacaaucacucaa

SEQ ID NO: 857104 - RNA, 19 nt, Artificial Sequence
  Description of Artificial Sequence: Synthetic oligonucleotide
  Sense strand starting at position 2932 of SEQ ID NO: 588324
gcauuuaucuccuugguug

SEQ ID NO: 857105 - RNA, 19 nt, Artificial Sequence
  Description of Artificial Sequence: Synthetic oligonucleotide
  Antisense strand to SEQ ID NO: 857104
caaccaaggagauaaaugc

SEQ ID NO: 857106 - RNA, 19 nt, Artificial Sequence
  Description of Artificial Sequence: Synthetic oligonucleotide
  Sense strand starting at position 3390 of SEQ ID NO: 588324
uccucaguugugcauauaa

SEQ ID NO: 857107 - RNA, 19 nt, Artificial Sequence
  Description of Artificial Sequence: Synthetic oligonucleotide
  Antisense strand to SEQ ID NO: 857106
uuauaugcacaacugagga

SEQ ID NO: 857108 - RNA, 19 nt, Artificial Sequence
  Description of Artificial Sequence: Synthetic oligonucleotide
  Sense strand starting at position 3392 of SEQ ID NO: 588324
cucaguugugcauauaaca

SEQ ID NO: 857109 - RNA, 19 nt, Artificial Sequence
  Description of Artificial Sequence: Synthetic oligonucleotide
  Antisense strand to SEQ ID NO: 857108
uguuauaugcacaacugag

SEQ ID NO: 857110 - RNA, 19 nt, Artificial Sequence
  Description of Artificial Sequence: Synthetic oligonucleotide
  Sense strand starting at position 3482 of SEQ ID NO: 588324
ggugaaugcuaucccagga

SEQ ID NO: 857111 - RNA, 19 nt, Artificial Sequence
  Description of Artificial Sequence: Synthetic oligonucleotide
  Antisense strand to SEQ ID NO: 857110
uccugggauagcauucacc

SEQ ID NO: 857112 - RNA, 19 nt, Artificial Sequence
  Description of Artificial Sequence: Synthetic oligonucleotide
  Sense strand starting at position 3722 of SEQ ID NO: 588324
ggcugcacacucguguuau

SEQ ID NO: 857113 - RNA, 19 nt, Artificial Sequence
  Description of Artificial Sequence: Synthetic oligonucleotide
  Antisense strand to SEQ ID NO: 857112
auaacacgagugugcagcc

SEQ ID NO: 857114 - RNA, 19 nt, Artificial Sequence
  Description of Artificial Sequence: Synthetic oligonucleotide
  Sense strand starting at position 3728 of SEQ ID NO: 588324
acacucguguuauuugaua

SEQ ID NO: 857115 - RNA, 19 nt, Artificial Sequence
  Description of Artificial Sequence: Synthetic oligonucleotide
  Antisense strand to SEQ ID NO: 857114
uaucaaauaacacgagugu

SEQ ID NO: 857116 - RNA, 19 nt, Artificial Sequence
  Description of Artificial Sequence: Synthetic oligonucleotide
  Sense strand starting at position 3778 of SEQ ID NO: 588324
aguuauuuguccucaggca

SEQ ID NO: 857117 - RNA, 19 nt, Artificial Sequence
  Description of Artificial Sequence: Synthetic oligonucleotide
  Antisense strand to SEQ ID NO: 857116
ugccugaggacaaauaacu

SEQ ID NO: 857118 - RNA, 19 nt, Artificial Sequence
  Description of Artificial Sequence: Synthetic oligonucleotide
  Sense strand starting at position 3893 of SEQ ID NO: 588324
agguaacgaucuucucagu

SEQ ID NO: 857119 - RNA, 19 nt, Artificial Sequence
  Description of Artificial Sequence: Synthetic oligonucleotide
  Antisense strand to SEQ ID NO: 857118
acugagaagaucguuaccu

SEQ ID NO: 857120 - RNA, 19 nt, Artificial Sequence
  Description of Artificial Sequence: Synthetic oligonucleotide
  Sense strand starting at position 3930 of SEQ ID NO: 588324
gaacgaugaaggugaugau

SEQ ID NO: 857121 - RNA, 19 nt, Artificial Sequence
  Description of Artificial Sequence: Synthetic oligonucleotide
  Antisense strand to SEQ ID NO: 857120
aucaucaccuucaucguuc

SEQ ID NO: 857122 - RNA, 19 nt, Artificial Sequence
  Description of Artificial Sequence: Synthetic oligonucleotide
  Sense strand starting at position 284 of SEQ ID NO: 588325
aggcauuccgggcgaacau

SEQ ID NO: 857123 - RNA, 19 nt, Artificial Sequence
  Description of Artificial Sequence: Synthetic oligonucleotide
  Antisense strand to SEQ ID NO: 857122
auguucgcccggaaugccu

SEQ ID NO: 857124 - RNA, 19 nt, Artificial Sequence
  Description of Artificial Sequence: Synthetic oligonucleotide
  Sense strand starting at position 316 of SEQ ID NO: 588325
agguccuucucgucugaca

SEQ ID NO: 857125 - RNA, 19 nt, Artificial Sequence
  Description of Artificial Sequence: Synthetic oligonucleotide
  Antisense strand to SEQ ID NO: 857124
ugucagacgagaaggaccu

SEQ ID NO: 857126 - RNA, 19 nt, Artificial Sequence
  Description of Artificial Sequence: Synthetic oligonucleotide
  Sense strand starting at position 471 of SEQ ID NO: 588325
aggaacaaguccuugaucu

SEQ ID NO: 857127 - RNA, 19 nt, Artificial Sequence
  Description of Artificial Sequence: Synthetic oligonucleotide
  Antisense strand to SEQ ID NO: 857126
agaucaaggacuuguuccu

SEQ ID NO: 857128 - RNA, 19 nt, Artificial Sequence
  Description of Artificial Sequence: Synthetic oligonucleotide
  Sense strand starting at position 473 of SEQ ID NO: 588325
gaacaaguccuugaucugu

SEQ ID NO: 857129 - RNA, 19 nt, Artificial Sequence
  Description of Artificial Sequence: Synthetic oligonucleotide
  Antisense strand to SEQ ID NO: 857128
acagaucaaggacuuguuc

SEQ ID NO: 857130 - RNA, 19 nt, Artificial Sequence
  Description of Artificial Sequence: Synthetic oligonucleotide
  Sense strand starting at position 620 of SEQ ID NO: 588325
ccgugacgucccggaagaa

SEQ ID NO: 857131 - RNA, 19 nt, Artificial Sequence
  Description of Artificial Sequence: Synthetic oligonucleotide
  Antisense strand to SEQ ID NO: 857130
uucuuccgggacgucacgg

SEQ ID NO: 857132 - RNA, 19 nt, Artificial Sequence
  Description of Artificial Sequence: Synthetic oligonucleotide
  Sense strand starting at position 890 of SEQ ID NO: 588325
ugcagcucucacugggaaa

SEQ ID NO: 857133 - RNA, 19 nt, Artificial Sequence
  Description of Artificial Sequence: Synthetic oligonucleotide
  Antisense strand to SEQ ID NO: 857132
uuucccagugagagcugca

SEQ ID NO: 857134 - RNA, 19 nt, Artificial Sequence
  Description of Artificial Sequence: Synthetic oligonucleotide
  Sense strand starting at position 891 of SEQ ID NO: 588325
gcagcucucacugggaaag

SEQ ID NO: 857135 - RNA, 19 nt, Artificial Sequence
  Description of Artificial Sequence: Synthetic oligonucleotide
  Antisense strand to SEQ ID NO: 857134
cuuucccagugagagcugc

SEQ ID NO: 857136 - RNA, 19 nt, Artificial Sequence
  Description of Artificial Sequence: Synthetic oligonucleotide
  Sense strand starting at position 1547 of SEQ ID NO: 588325
cgacgaaggccgaguuguu

SEQ ID NO: 857137 - RNA, 19 nt, Artificial Sequence
  Description of Artificial Sequence: Synthetic oligonucleotide
  Antisense strand to SEQ ID NO: 857136
aacaacucggccuucgucg

SEQ ID NO: 857138 - RNA, 19 nt, Artificial Sequence
  Description of Artificial Sequence: Synthetic oligonucleotide
  Sense strand starting at position 1586 of SEQ ID NO: 588325
ccucguucccaguguagaa

SEQ ID NO: 857139 - RNA, 19 nt, Artificial Sequence
  Description of Artificial Sequence: Synthetic oligonucleotide
  Antisense strand to SEQ ID NO: 857138
uucuacacugggaacgagg

SEQ ID NO: 857140 - RNA, 19 nt, Artificial Sequence
  Description of Artificial Sequence: Synthetic oligonucleotide
  Sense strand starting at position 1753 of SEQ ID NO: 588325
ugccgaagcgcucgaaguu

SEQ ID NO: 857141 - RNA, 19 nt, Artificial Sequence
  Description of Artificial Sequence: Synthetic oligonucleotide
  Antisense strand to SEQ ID NO: 857140
aacuucgagcgcuucggca

SEQ ID NO: 857142 - RNA, 19 nt, Artificial Sequence
  Description of Artificial Sequence: Synthetic oligonucleotide
  Sense strand starting at position 3618 of SEQ ID NO: 588325
gcugguaaccuguaaccuu

SEQ ID NO: 857143 - RNA, 19 nt, Artificial Sequence
  Description of Artificial Sequence: Synthetic oligonucleotide
  Antisense strand to SEQ ID NO: 857142
aagguuacagguuaccagc

SEQ ID NO: 857144 - RNA, 19 nt, Artificial Sequence
  Description of Artificial Sequence: Synthetic oligonucleotide
  Sense strand starting at position 48 of SEQ ID NO: 588326
ucucuuugucugugaagga

SEQ ID NO: 857145 - RNA, 19 nt, Artificial Sequence
  Description of Artificial Sequence: Synthetic oligonucleotide
  Antisense strand to SEQ ID NO: 857144
uccuucacagacaaagaga

SEQ ID NO: 857146 - RNA, 19 nt, Artificial Sequence
  Description of Artificial Sequence: Synthetic oligonucleotide
  Sense strand starting at position 121 of SEQ ID NO: 588326
uguauauucgugcauuuau

SEQ ID NO: 857147 - RNA, 19 nt, Artificial Sequence
  Description of Artificial Sequence: Synthetic oligonucleotide
  Antisense strand to SEQ ID NO: 857146
auaaaugcacgaauauaca

SEQ ID NO: 857148 - RNA, 19 nt, Artificial Sequence
  Description of Artificial Sequence: Synthetic oligonucleotide
  Sense strand starting at position 331 of SEQ ID NO: 588326
aacggcagucucuaaagua

SEQ ID NO: 857149 - RNA, 19 nt, Artificial Sequence
  Description of Artificial Sequence: Synthetic oligonucleotide
  Antisense strand to SEQ ID NO: 857148
uacuuuagagacugccguu

SEQ ID NO: 857150 - RNA, 19 nt, Artificial Sequence
  Description of Artificial Sequence: Synthetic oligonucleotide
  Sense strand starting at position 593 of SEQ ID NO: 588326
guaguauguuggaagggaa

SEQ ID NO: 857151 - RNA, 19 nt, Artificial Sequence
  Description of Artificial Sequence: Synthetic oligonucleotide
  Antisense strand to SEQ ID NO: 857150
uucccuuccaacauacuac

SEQ ID NO: 857152 - RNA, 19 nt, Artificial Sequence
  Description of Artificial Sequence: Synthetic oligonucleotide
  Sense strand starting at position 596 of SEQ ID NO: 588326
guauguuggaagggaauaa

SEQ ID NO: 857153 - RNA, 19 nt, Artificial Sequence
  Description of Artificial Sequence: Synthetic oligonucleotide
  Antisense strand to SEQ ID NO: 857152
uuauucccuuccaacauac

SEQ ID NO: 857154 - RNA, 19 nt, Artificial Sequence
  Description of Artificial Sequence: Synthetic oligonucleotide
  Sense strand starting at position 696 of SEQ ID NO: 588326
ugugcucugauggauauca

SEQ ID NO: 857155 - RNA, 19 nt, Artificial Sequence
  Description of Artificial Sequence: Synthetic oligonucleotide
  Antisense strand to SEQ ID NO: 857154
ugauauccaucagagcaca

SEQ ID NO: 857156 - RNA, 19 nt, Artificial Sequence
  Description of Artificial Sequence: Synthetic oligonucleotide
  Sense strand starting at position 698 of SEQ ID NO: 588326
ugcucugauggauaucaua

SEQ ID NO: 857157 - RNA, 19 nt, Artificial Sequence
  Description of Artificial Sequence: Synthetic oligonucleotide
  Antisense strand to SEQ ID NO: 857156
uaugauauccaucagagca

SEQ ID NO: 857158 - RNA, 19 nt, Artificial Sequence
  Description of Artificial Sequence: Synthetic oligonucleotide
  Sense strand starting at position 722 of SEQ ID NO: 588326
ucugcaaugcaugaaaugu

SEQ ID NO: 857159 - RNA, 19 nt, Artificial Sequence
  Description of Artificial Sequence: Synthetic oligonucleotide
  Antisense strand to SEQ ID NO: 857158
acauuucaugcauugcaga

SEQ ID NO: 857160 - RNA, 19 nt, Artificial Sequence
  Description of Artificial Sequence: Synthetic oligonucleotide
  Sense strand starting at position 730 of SEQ ID NO: 588326
gcaugaaauguauacauug

SEQ ID NO: 857161 - RNA, 19 nt, Artificial Sequence
  Description of Artificial Sequence: Synthetic oligonucleotide
  Antisense strand to SEQ ID NO: 857160
caauguauacauuucaugc

SEQ ID NO: 857162 - RNA, 19 nt, Artificial Sequence
  Description of Artificial Sequence: Synthetic oligonucleotide
  Sense strand starting at position 763 of SEQ ID NO: 588326
uaacaauuguaugugcaga

SEQ ID NO: 857163 - RNA, 19 nt, Artificial Sequence
  Description of Artificial Sequence: Synthetic oligonucleotide
  Antisense strand to SEQ ID NO: 857162
ucugcacauacaauuguua

SEQ ID NO: 857164 - RNA, 19 nt, Artificial Sequence
  Description of Artificial Sequence: Synthetic oligonucleotide
  Sense strand starting at position 969 of SEQ ID NO: 588326
ccaguauccucauucugga

SEQ ID NO: 857165 - RNA, 19 nt, Artificial Sequence
  Description of Artificial Sequence: Synthetic oligonucleotide
  Antisense strand to SEQ ID NO: 857164
uccagaaugaggauacugg

SEQ ID NO: 857166 - RNA, 19 nt, Artificial Sequence
  Description of Artificial Sequence: Synthetic oligonucleotide
  Sense strand starting at position 1116 of SEQ ID NO: 588326
ucacuacaguguuuaaaua

SEQ ID NO: 857167 - RNA, 19 nt, Artificial Sequence
  Description of Artificial Sequence: Synthetic oligonucleotide
  Antisense strand to SEQ ID NO: 857166
uauuuaaacacuguaguga

SEQ ID NO: 857168 - RNA, 19 nt, Artificial Sequence
  Description of Artificial Sequence: Synthetic oligonucleotide
  Sense strand starting at position 1141 of SEQ ID NO: 588326
aggaaauggucucucaaua

SEQ ID NO: 857169 - RNA, 19 nt, Artificial Sequence
  Description of Artificial Sequence: Synthetic oligonucleotide
  Antisense strand to SEQ ID NO: 857168
uauugagagaccauuuccu

SEQ ID NO: 857170 - RNA, 19 nt, Artificial Sequence
  Description of Artificial Sequence: Synthetic oligonucleotide
  Sense strand starting at position 1262 of SEQ ID NO: 588326
guuugccuccuagagguaa

SEQ ID NO: 857171 - RNA, 19 nt, Artificial Sequence
  Description of Artificial Sequence: Synthetic oligonucleotide
  Antisense strand to SEQ ID NO: 857170
uuaccucuaggaggcaaac

SEQ ID NO: 857172 - RNA, 19 nt, Artificial Sequence
  Description of Artificial Sequence: Synthetic oligonucleotide
  Sense strand starting at position 1413 of SEQ ID NO: 588326
cuuaccaguuaucuuaagu

SEQ ID NO: 857173 - RNA, 19 nt, Artificial Sequence
  Description of Artificial Sequence: Synthetic oligonucleotide
  Antisense strand to SEQ ID NO: 857172
acuuaagauaacugguaag

SEQ ID NO: 857174 - RNA, 19 nt, Artificial Sequence
  Description of Artificial Sequence: Synthetic oligonucleotide
  Sense strand starting at position 1477 of SEQ ID NO: 588326
ucaugagaugucuauuauc

SEQ ID NO: 857175 - RNA, 19 nt, Artificial Sequence
  Description of Artificial Sequence: Synthetic oligonucleotide
  Antisense strand to SEQ ID NO: 857174
gauaauagacaucucauga

SEQ ID NO: 857176 - RNA, 19 nt, Artificial Sequence
  Description of Artificial Sequence: Synthetic oligonucleotide
  Sense strand starting at position 1645 of SEQ ID NO: 588326
cuaaguauacaaggucuga

SEQ ID NO: 857177 - RNA, 19 nt, Artificial Sequence
  Description of Artificial Sequence: Synthetic oligonucleotide
  Antisense strand to SEQ ID NO: 857176
ucagaccuuguauacuuag

SEQ ID NO: 857178 - RNA, 19 nt, Artificial Sequence
  Description of Artificial Sequence: Synthetic oligonucleotide
  Sense strand starting at position 1649 of SEQ ID NO: 588326
guauacaaggucugaaaua

SEQ ID NO: 857179 - RNA, 19 nt, Artificial Sequence
  Description of Artificial Sequence: Synthetic oligonucleotide
  Antisense strand to SEQ ID NO: 857178
uauuucagaccuuguauac

SEQ ID NO: 857180 - RNA, 19 nt, Artificial Sequence
  Description of Artificial Sequence: Synthetic oligonucleotide
  Sense strand starting at position 1659 of SEQ ID NO: 588326
ucugaaauacuugggaagu

SEQ ID NO: 857181 - RNA, 19 nt, Artificial Sequence
  Description of Artificial Sequence: Synthetic oligonucleotide
  Antisense strand to SEQ ID NO: 857180
acuucccaaguauuucaga

SEQ ID NO: 857182 - RNA, 19 nt, Artificial Sequence
  Description of Artificial Sequence: Synthetic oligonucleotide
  Sense strand starting at position 1670 of SEQ ID NO: 588326
ugggaaguacaucgugaaa

SEQ ID NO: 857183 - RNA, 19 nt, Artificial Sequence
  Description of Artificial Sequence: Synthetic oligonucleotide
  Antisense strand to SEQ ID NO: 857182
uuucacgauguacuuccca

SEQ ID NO: 857184 - RNA, 19 nt, Artificial Sequence
  Description of Artificial Sequence: Synthetic oligonucleotide
  Sense strand starting at position 1799 of SEQ ID NO: 588326
uccacaugcuaaguagaaa

SEQ ID NO: 857185 - RNA, 19 nt, Artificial Sequence
  Description of Artificial Sequence: Synthetic oligonucleotide
  Antisense strand to SEQ ID NO: 857184
uuucuacuuagcaugugga

SEQ ID NO: 857186 - RNA, 19 nt, Artificial Sequence
  Description of Artificial Sequence: Synthetic oligonucleotide
  Sense strand starting at position 2234 of SEQ ID NO: 588326
aguuuauacuagccaggau

SEQ ID NO: 857187 - RNA, 19 nt, Artificial Sequence
  Description of Artificial Sequence: Synthetic oligonucleotide
  Antisense strand to SEQ ID NO: 857186
auccuggcuaguauaaacu

SEQ ID NO: 857188 - RNA, 19 nt, Artificial Sequence
  Description of Artificial Sequence: Synthetic oligonucleotide
  Sense strand starting at position 2237 of SEQ ID NO: 588326
uuauacuagccaggaugau

SEQ ID NO: 857189 - RNA, 19 nt, Artificial Sequence
  Description of Artificial Sequence: Synthetic oligonucleotide
  Antisense strand to SEQ ID NO: 857188
aucauccuggcuaguauaa

SEQ ID NO: 857190 - RNA, 19 nt, Artificial Sequence
  Description of Artificial Sequence: Synthetic oligonucleotide
  Sense strand starting at position 2257 of SEQ ID NO: 588326
ucacuugagcuuuaucaga

SEQ ID NO: 857191 - RNA, 19 nt, Artificial Sequence
  Description of Artificial Sequence: Synthetic oligonucleotide
  Antisense strand to SEQ ID NO: 857190
ucugauaaagcucaaguga

SEQ ID NO: 857192 - RNA, 19 nt, Artificial Sequence
  Description of Artificial Sequence: Synthetic oligonucleotide
  Sense strand starting at position 2259 of SEQ ID NO: 588326
acuugagcuuuaucagauu

SEQ ID NO: 857193 - RNA, 19 nt, Artificial Sequence
  Description of Artificial Sequence: Synthetic oligonucleotide
  Antisense strand to SEQ ID NO: 857192
aaucugauaaagcucaagu

SEQ ID NO: 857194 - RNA, 19 nt, Artificial Sequence
  Description of Artificial Sequence: Synthetic oligonucleotide
  Sense strand starting at position 2285 of SEQ ID NO: 588326
ugauauucucgucagcuaa

SEQ ID NO: 857195 - RNA, 19 nt, Artificial Sequence
  Description of Artificial Sequence: Synthetic oligonucleotide
  Antisense strand to SEQ ID NO: 857194
uuagcugacgagaauauca

SEQ ID NO: 857196 - RNA, 19 nt, Artificial Sequence
  Description of Artificial Sequence: Synthetic oligonucleotide
  Sense strand starting at position 2308 of SEQ ID NO: 588326
uguguauaucuggaaucua

SEQ ID NO: 857197 - RNA, 19 nt, Artificial Sequence
  Description of Artificial Sequence: Synthetic oligonucleotide
  Antisense strand to SEQ ID NO: 857196
uagauuccagauauacaca

SEQ ID NO: 857198 - RNA, 19 nt, Artificial Sequence
  Description of Artificial Sequence: Synthetic oligonucleotide
  Sense strand starting at position 2422 of SEQ ID NO: 588326
guauuaauaucaguggaaa

SEQ ID NO: 857199 - RNA, 19 nt, Artificial Sequence
  Description of Artificial Sequence: Synthetic oligonucleotide
  Antisense strand to SEQ ID NO: 857198
uuuccacugauauuaauac

SEQ ID NO: 857200 - RNA, 19 nt, Artificial Sequence
  Description of Artificial Sequence: Synthetic oligonucleotide
  Sense strand starting at position 2433 of SEQ ID NO: 588326
aguggaaauuauguaacuu

SEQ ID NO: 857201 - RNA, 19 nt, Artificial Sequence
  Description of Artificial Sequence: Synthetic oligonucleotide
  Antisense strand to SEQ ID NO: 857200
aaguuacauaauuuccacu

SEQ ID NO: 857202 - RNA, 19 nt, Artificial Sequence
  Description of Artificial Sequence: Synthetic oligonucleotide
  Sense strand starting at position 2613 of SEQ ID NO: 588326
gagggaccuugaguaaguu

SEQ ID NO: 857203 - RNA, 19 nt, Artificial Sequence
  Description of Artificial Sequence: Synthetic oligonucleotide
  Antisense strand to SEQ ID NO: 857202
aacuuacucaaggucccuc

SEQ ID NO: 857204 - RNA, 19 nt, Artificial Sequence
  Description of Artificial Sequence: Synthetic oligonucleotide
  Sense strand starting at position 2621 of SEQ ID NO: 588326
uugaguaaguuacuuaaug

SEQ ID NO: 857205 - RNA, 19 nt, Artificial Sequence
  Description of Artificial Sequence: Synthetic oligonucleotide
  Antisense strand to SEQ ID NO: 857204
cauuaaguaacuuacucaa

SEQ ID NO: 857206 - RNA, 19 nt, Artificial Sequence
  Description of Artificial Sequence: Synthetic oligonucleotide
  Sense strand starting at position 2839 of SEQ ID NO: 588326
gugaucucagcacacugaa

SEQ ID NO: 857207 - RNA, 19 nt, Artificial Sequence
  Description of Artificial Sequence: Synthetic oligonucleotide
  Antisense strand to SEQ ID NO: 857206
uucagugugcugagaucac

SEQ ID NO: 857208 - RNA, 19 nt, Artificial Sequence
  Description of Artificial Sequence: Synthetic oligonucleotide
  Sense strand starting at position 3147 of SEQ ID NO: 588326
uuuaaaugacgugguuaga

SEQ ID NO: 857209 - RNA, 19 nt, Artificial Sequence
  Description of Artificial Sequence: Synthetic oligonucleotide
  Antisense strand to SEQ ID NO: 857208
ucuaaccacgucauuuaaa

SEQ ID NO: 857210 - RNA, 19 nt, Artificial Sequence
  Description of Artificial Sequence: Synthetic oligonucleotide
  Sense strand starting at position 3641 of SEQ ID NO: 588326
gaggaaaugucagugguca

SEQ ID NO: 857211 - RNA, 19 nt, Artificial Sequence
  Description of Artificial Sequence: Synthetic oligonucleotide
  Antisense strand to SEQ ID NO: 857210
ugaccacugacauuuccuc

SEQ ID NO: 857212 - RNA, 19 nt, Artificial Sequence
  Description of Artificial Sequence: Synthetic oligonucleotide
  Sense strand starting at position 3642 of SEQ ID NO: 588326
aggaaaugucaguggucaa

SEQ ID NO: 857213 - RNA, 19 nt, Artificial Sequence
  Description of Artificial Sequence: Synthetic oligonucleotide
  Antisense strand to SEQ ID NO: 857212
uugaccacugacauuuccu

SEQ ID NO: 857214 - RNA, 19 nt, Artificial Sequence
  Description of Artificial Sequence: Synthetic oligonucleotide
  Sense strand starting at position 3643 of SEQ ID NO: 588326
ggaaaugucaguggucaau

SEQ ID NO: 857215 - RNA, 19 nt, Artificial Sequence
  Description of Artificial Sequence: Synthetic oligonucleotide
  Antisense strand to SEQ ID NO: 857214
auugaccacugacauuucc

SEQ ID NO: 857216 - RNA, 19 nt, Artificial Sequence
  Description of Artificial Sequence: Synthetic oligonucleotide
  Sense strand starting at position 3645 of SEQ ID NO: 588326
aaaugucaguggucaauaa

SEQ ID NO: 857217 - RNA, 19 nt, Artificial Sequence
  Description of Artificial Sequence: Synthetic oligonucleotide
  Antisense strand to SEQ ID NO: 857216
uuauugaccacugacauuu

SEQ ID NO: 857218 - RNA, 19 nt, Artificial Sequence
  Description of Artificial Sequence: Synthetic oligonucleotide
  Sense strand starting at position 3646 of SEQ ID NO: 588326
aaugucaguggucaauaaa

SEQ ID NO: 857219 - RNA, 19 nt, Artificial Sequence
  Description of Artificial Sequence: Synthetic oligonucleotide
  Antisense strand to SEQ ID NO: 857218
uuuauugaccacugacauu

SEQ ID NO: 857220 - RNA, 19 nt, Artificial Sequence
  Description of Artificial Sequence: Synthetic oligonucleotide
  Sense strand starting at position 3813 of SEQ ID NO: 588326
cuugaagaccacugcuaau

SEQ ID NO: 857221 - RNA, 19 nt, Artificial Sequence
  Description of Artificial Sequence: Synthetic oligonucleotide
  Antisense strand to SEQ ID NO: 857220
auuagcaguggucuucaag

SEQ ID NO: 857222 - RNA, 19 nt, Artificial Sequence
  Description of Artificial Sequence: Synthetic oligonucleotide
  Sense strand starting at position 3898 of SEQ ID NO: 588326
cuguguuggccagugugua

SEQ ID NO: 857223 - RNA, 19 nt, Artificial Sequence
  Description of Artificial Sequence: Synthetic oligonucleotide
  Antisense strand to SEQ ID NO: 857222
uacacacuggccaacacag

SEQ ID NO: 857224 - RNA, 19 nt, Artificial Sequence
  Description of Artificial Sequence: Synthetic oligonucleotide
  Sense strand starting at position 41 of SEQ ID NO: 588327
gcugguaugcguuagugga

SEQ ID NO: 857225 - RNA, 19 nt, Artificial Sequence
  Description of Artificial Sequence: Synthetic oligonucleotide
  Antisense strand to SEQ ID NO: 857224
uccacuaacgcauaccagc

SEQ ID NO: 857226 - RNA, 19 nt, Artificial Sequence
  Description of Artificial Sequence: Synthetic oligonucleotide
  Sense strand starting at position 42 of SEQ ID NO: 588327
cugguaugcguuaguggau

SEQ ID NO: 857227 - RNA, 19 nt, Artificial Sequence
  Description of Artificial Sequence: Synthetic oligonucleotide
  Antisense strand to SEQ ID NO: 857226
auccacuaacgcauaccag

SEQ ID NO: 857228 - RNA, 19 nt, Artificial Sequence
  Description of Artificial Sequence: Synthetic oligonucleotide
  Sense strand starting at position 43 of SEQ ID NO: 588327
ugguaugcguuaguggauu

SEQ ID NO: 857229 - RNA, 19 nt, Artificial Sequence
  Description of Artificial Sequence: Synthetic oligonucleotide
  Antisense strand to SEQ ID NO: 857228
aauccacuaacgcauacca

SEQ ID NO: 857230 - RNA, 19 nt, Artificial Sequence
  Description of Artificial Sequence: Synthetic oligonucleotide
  Sense strand starting at position 152 of SEQ ID NO: 588327
ggccuuccucccugaaucu

SEQ ID NO: 857231 - RNA, 19 nt, Artificial Sequence
  Description of Artificial Sequence: Synthetic oligonucleotide
  Antisense strand to SEQ ID NO: 857230
agauucagggaggaaggcc

SEQ ID NO: 857232 - RNA, 19 nt, Artificial Sequence
  Description of Artificial Sequence: Synthetic oligonucleotide
  Sense strand starting at position 164 of SEQ ID NO: 588327
ugaaucugguuccuaguaa

SEQ ID NO: 857233 - RNA, 19 nt, Artificial Sequence
  Description of Artificial Sequence: Synthetic oligonucleotide
  Antisense strand to SEQ ID NO: 857232
uuacuaggaaccagauuca

SEQ ID NO: 857234 - RNA, 19 nt, Artificial Sequence
  Description of Artificial Sequence: Synthetic oligonucleotide
  Sense strand starting at position 165 of SEQ ID NO: 588327
gaaucugguuccuaguaac

SEQ ID NO: 857235 - RNA, 19 nt, Artificial Sequence
  Description of Artificial Sequence: Synthetic oligonucleotide
  Antisense strand to SEQ ID NO: 857234
guuacuaggaaccagauuc

SEQ ID NO: 857236 - RNA, 19 nt, Artificial Sequence
  Description of Artificial Sequence: Synthetic oligonucleotide
  Sense strand starting at position 168 of SEQ ID NO: 588327
ucugguuccuaguaacaca

SEQ ID NO: 857237 - RNA, 19 nt, Artificial Sequence
  Description of Artificial Sequence: Synthetic oligonucleotide
  Antisense strand to SEQ ID NO: 857236
uguguuacuaggaaccaga

SEQ ID NO: 857238 - RNA, 19 nt, Artificial Sequence
  Description of Artificial Sequence: Synthetic oligonucleotide
  Sense strand starting at position 209 of SEQ ID NO: 588327
ccugcaggcucuccagaaa

SEQ ID NO: 857239 - RNA, 19 nt, Artificial Sequence
  Description of Artificial Sequence: Synthetic oligonucleotide
  Antisense strand to SEQ ID NO: 857238
uuucuggagagccugcagg

SEQ ID NO: 857240 - RNA, 19 nt, Artificial Sequence
  Description of Artificial Sequence: Synthetic oligonucleotide
  Sense strand starting at position 212 of SEQ ID NO: 588327
gcaggcucuccagaaacau

SEQ ID NO: 857241 - RNA, 19 nt, Artificial Sequence
  Description of Artificial Sequence: Synthetic oligonucleotide
  Antisense strand to SEQ ID NO: 857240
auguuucuggagagccugc

SEQ ID NO: 857242 - RNA, 19 nt, Artificial Sequence
  Description of Artificial Sequence: Synthetic oligonucleotide
  Sense strand starting at position 604 of SEQ ID NO: 588327
agaggagugacuuguggag

SEQ ID NO: 857243 - RNA, 19 nt, Artificial Sequence
  Description of Artificial Sequence: Synthetic oligonucleotide
  Antisense strand to SEQ ID NO: 857242
cuccacaagucacuccucu

SEQ ID NO: 857244 - RNA, 19 nt, Artificial Sequence
  Description of Artificial Sequence: Synthetic oligonucleotide
  Sense strand starting at position 606 of SEQ ID NO: 588327
aggagugacuuguggagca

SEQ ID NO: 857245 - RNA, 19 nt, Artificial Sequence
  Description of Artificial Sequence: Synthetic oligonucleotide
  Antisense strand to SEQ ID NO: 857244
ugcuccacaagucacuccu

SEQ ID NO: 857246 - RNA, 19 nt, Artificial Sequence
  Description of Artificial Sequence: Synthetic oligonucleotide
  Sense strand starting at position 611 of SEQ ID NO: 588327
ugacuuguggagcauccua

SEQ ID NO: 857247 - RNA, 19 nt, Artificial Sequence
  Description of Artificial Sequence: Synthetic oligonucleotide
  Antisense strand to SEQ ID NO: 857246
uaggaugcuccacaaguca

SEQ ID NO: 857248 - RNA, 19 nt, Artificial Sequence
  Description of Artificial Sequence: Synthetic oligonucleotide
  Sense strand starting at position 619 of SEQ ID NO: 588327
ggagcauccuaagugugau

SEQ ID NO: 857249 - RNA, 19 nt, Artificial Sequence
  Description of Artificial Sequence: Synthetic oligonucleotide
  Antisense strand to SEQ ID NO: 857248
aucacacuuaggaugcucc

SEQ ID NO: 857250 - RNA, 19 nt, Artificial Sequence
  Description of Artificial Sequence: Synthetic oligonucleotide
  Sense strand starting at position 631 of SEQ ID NO: 588327
gugugaucugcucacagau

SEQ ID NO: 857251 - RNA, 19 nt, Artificial Sequence
  Description of Artificial Sequence: Synthetic oligonucleotide
  Antisense strand to SEQ ID NO: 857250
aucugugagcagaucacac

SEQ ID NO: 857252 - RNA, 19 nt, Artificial Sequence
  Description of Artificial Sequence: Synthetic oligonucleotide
  Sense strand starting at position 657 of SEQ ID NO: 588327
cgcaauuauucccaugacu

SEQ ID NO: 857253 - RNA, 19 nt, Artificial Sequence
  Description of Artificial Sequence: Synthetic oligonucleotide
  Antisense strand to SEQ ID NO: 857252
agucaugggaauaauugcg

SEQ ID NO: 857254 - RNA, 19 nt, Artificial Sequence
  Description of Artificial Sequence: Synthetic oligonucleotide
  Sense strand starting at position 676 of SEQ ID NO: 588327
ccuagcuuguggccauuaa

SEQ ID NO: 857255 - RNA, 19 nt, Artificial Sequence
  Description of Artificial Sequence: Synthetic oligonucleotide
  Antisense strand to SEQ ID NO: 857254
uuaauggccacaagcuagg

SEQ ID NO: 857256 - RNA, 19 nt, Artificial Sequence
  Description of Artificial Sequence: Synthetic oligonucleotide
  Sense strand starting at position 680 of SEQ ID NO: 588327
gcuuguggccauuaaguuu

SEQ ID NO: 857257 - RNA, 19 nt, Artificial Sequence
  Description of Artificial Sequence: Synthetic oligonucleotide
  Antisense strand to SEQ ID NO: 857256
aaacuuaauggccacaagc

SEQ ID NO: 857258 - RNA, 19 nt, Artificial Sequence
  Description of Artificial Sequence: Synthetic oligonucleotide
  Sense strand starting at position 927 of SEQ ID NO: 588327
guaaucuccuuccacaagu

SEQ ID NO: 857259 - RNA, 19 nt, Artificial Sequence
  Description of Artificial Sequence: Synthetic oligonucleotide
  Antisense strand to SEQ ID NO: 857258
acuuguggaaggagauuac

SEQ ID NO: 857260 - RNA, 19 nt, Artificial Sequence
  Description of Artificial Sequence: Synthetic oligonucleotide
  Sense strand starting at position 3077 of SEQ ID NO: 588327
guguauauguuauaugaca

SEQ ID NO: 857261 - RNA, 19 nt, Artificial Sequence
  Description of Artificial Sequence: Synthetic oligonucleotide
  Antisense strand to SEQ ID NO: 857260
ugucauauaacauauacac

SEQ ID NO: 857262 - RNA, 19 nt, Artificial Sequence
  Description of Artificial Sequence: Synthetic oligonucleotide
  Sense strand starting at position 3127 of SEQ ID NO: 588327
uuuguauaaugagaaaggu

SEQ ID NO: 857263 - RNA, 19 nt, Artificial Sequence
  Description of Artificial Sequence: Synthetic oligonucleotide
  Antisense strand to SEQ ID NO: 857262
accuuucucauuauacaaa

SEQ ID NO: 857264 - RNA, 19 nt, Artificial Sequence
  Description of Artificial Sequence: Synthetic oligonucleotide
  Sense strand starting at position 3225 of SEQ ID NO: 588327
gcacaacauugagaucuca

SEQ ID NO: 857265 - RNA, 19 nt, Artificial Sequence
  Description of Artificial Sequence: Synthetic oligonucleotide
  Antisense strand to SEQ ID NO: 857264
ugagaucucaauguugugc

SEQ ID NO: 857266 - RNA, 19 nt, Artificial Sequence
  Description of Artificial Sequence: Synthetic oligonucleotide
  Sense strand starting at position 3442 of SEQ ID NO: 588327
aggcccuaaucauaguauu

SEQ ID NO: 857267 - RNA, 19 nt, Artificial Sequence
  Description of Artificial Sequence: Synthetic oligonucleotide
  Antisense strand to SEQ ID NO: 857266
aauacuaugauuagggccu

SEQ ID NO: 857268 - RNA, 19 nt, Artificial Sequence
  Description of Artificial Sequence: Synthetic oligonucleotide
  Sense strand starting at position 3473 of SEQ ID NO: 588327
uugaauagaugcuccacaa

SEQ ID NO: 857269 - RNA, 19 nt, Artificial Sequence
  Description of Artificial Sequence: Synthetic oligonucleotide
  Antisense strand to SEQ ID NO: 857268
uuguggagcaucuauucaa

SEQ ID NO: 857270 - RNA, 19 nt, Artificial Sequence
  Description of Artificial Sequence: Synthetic oligonucleotide
  Sense strand starting at position 3598 of SEQ ID NO: 588327
cuguaauucuaaccaggca

SEQ ID NO: 857271 - RNA, 19 nt, Artificial Sequence
  Description of Artificial Sequence: Synthetic oligonucleotide
  Antisense strand to SEQ ID NO: 857270
ugccugguuagaauuacag

SEQ ID NO: 857272 - RNA, 19 nt, Artificial Sequence
  Description of Artificial Sequence: Synthetic oligonucleotide
  Sense strand starting at position 3621 of SEQ ID NO: 588327
gaaguugagucuucugcuu

SEQ ID NO: 857273 - RNA, 19 nt, Artificial Sequence
  Description of Artificial Sequence: Synthetic oligonucleotide
  Antisense strand to SEQ ID NO: 857272
aagcagaagacucaacuuc

SEQ ID NO: 857274 - RNA, 19 nt, Artificial Sequence
  Description of Artificial Sequence: Synthetic oligonucleotide
  Sense strand starting at position 3623 of SEQ ID NO: 588327
aguugagucuucugcuuac

SEQ ID NO: 857275 - RNA, 19 nt, Artificial Sequence
  Description of Artificial Sequence: Synthetic oligonucleotide
  Antisense strand to SEQ ID NO: 857274
guaagcagaagacucaacu

SEQ ID NO: 857276 - RNA, 19 nt, Artificial Sequence
  Description of Artificial Sequence: Synthetic oligonucleotide
  Sense strand starting at position 3626 of SEQ ID NO: 588327
ugagucuucugcuuaccgu

SEQ ID NO: 857277 - RNA, 19 nt, Artificial Sequence
  Description of Artificial Sequence: Synthetic oligonucleotide
  Antisense strand to SEQ ID NO: 857276
acgguaagcagaagacuca

SEQ ID NO: 857278 - RNA, 19 nt, Artificial Sequence
  Description of Artificial Sequence: Synthetic oligonucleotide
  Sense strand starting at position 3627 of SEQ ID NO: 588327
gagucuucugcuuaccguu

SEQ ID NO: 857279 - RNA, 19 nt, Artificial Sequence
  Description of Artificial Sequence: Synthetic oligonucleotide
  Antisense strand to SEQ ID NO: 857278
aacgguaagcagaagacuc

SEQ ID NO: 857280 - RNA, 19 nt, Artificial Sequence
  Description of Artificial Sequence: Synthetic oligonucleotide
  Sense strand starting at position 3681 of SEQ ID NO: 588327
cacugauggcuccguccau

SEQ ID NO: 857281 - RNA, 19 nt, Artificial Sequence
  Description of Artificial Sequence: Synthetic oligonucleotide
  Antisense strand to SEQ ID NO: 857280
auggacggagccaucagug

SEQ ID NO: 857282 - RNA, 19 nt, Artificial Sequence
  Description of Artificial Sequence: Synthetic oligonucleotide
  Sense strand starting at position 3682 of SEQ ID NO: 588327
acugauggcuccguccaua

SEQ ID NO: 857283 - RNA, 19 nt, Artificial Sequence
  Description of Artificial Sequence: Synthetic oligonucleotide
  Antisense strand to SEQ ID NO: 857282
uauggacggagccaucagu

SEQ ID NO: 857284 - RNA, 19 nt, Artificial Sequence
  Description of Artificial Sequence: Synthetic oligonucleotide
  Sense strand starting at position 3685 of SEQ ID NO: 588327
gauggcuccguccauacaa

SEQ ID NO: 857285 - RNA, 19 nt, Artificial Sequence
  Description of Artificial Sequence: Synthetic oligonucleotide
  Antisense strand to SEQ ID NO: 857284
uuguauggacggagccauc

SEQ ID NO: 857286 - RNA, 19 nt, Artificial Sequence
  Description of Artificial Sequence: Synthetic oligonucleotide
  Sense strand starting at position 3787 of SEQ ID NO: 588327
augugcuuccacugaauga

SEQ ID NO: 857287 - RNA, 19 nt, Artificial Sequence
  Description of Artificial Sequence: Synthetic oligonucleotide
  Antisense strand to SEQ ID NO: 857286
ucauucaguggaagcacau

SEQ ID NO: 857288 - RNA, 19 nt, Artificial Sequence
  Description of Artificial Sequence: Synthetic oligonucleotide
  Sense strand starting at position 63 of SEQ ID NO: 588328
gccagcgcccugugucaua

SEQ ID NO: 857289 - RNA, 19 nt, Artificial Sequence
  Description of Artificial Sequence: Synthetic oligonucleotide
  Antisense strand to SEQ ID NO: 857288
uaugacacagggcgcuggc

SEQ ID NO: 857290 - RNA, 19 nt, Artificial Sequence
  Description of Artificial Sequence: Synthetic oligonucleotide
  Sense strand starting at position 101 of SEQ ID NO: 588328
ugagaaguguucccucgga

SEQ ID NO: 857291 - RNA, 19 nt, Artificial Sequence
  Description of Artificial Sequence: Synthetic oligonucleotide
  Antisense strand to SEQ ID NO: 857290
uccgagggaacacuucuca

SEQ ID NO: 857292 - RNA, 19 nt, Artificial Sequence
  Description of Artificial Sequence: Synthetic oligonucleotide
  Sense strand starting at position 243 of SEQ ID NO: 588328
ggagaggaguuguggguua

SEQ ID NO: 857293 - RNA, 19 nt, Artificial Sequence
  Description of Artificial Sequence: Synthetic oligonucleotide
  Antisense strand to SEQ ID NO: 857292
uaacccacaacuccucucc

SEQ ID NO: 857294 - RNA, 19 nt, Artificial Sequence
  Description of Artificial Sequence: Synthetic oligonucleotide
  Sense strand starting at position 245 of SEQ ID NO: 588328
agaggaguuguggguuagu

SEQ ID NO: 857295 - RNA, 19 nt, Artificial Sequence
  Description of Artificial Sequence: Synthetic oligonucleotide
  Antisense strand to SEQ ID NO: 857294
acuaacccacaacuccucu

SEQ ID NO: 857296 - RNA, 19 nt, Artificial Sequence
  Description of Artificial Sequence: Synthetic oligonucleotide
  Sense strand starting at position 254 of SEQ ID NO: 588328
guggguuagugccuaugca

SEQ ID NO: 857297 - RNA, 19 nt, Artificial Sequence
  Description of Artificial Sequence: Synthetic oligonucleotide
  Antisense strand to SEQ ID NO: 857296
ugcauaggcacuaacccac

SEQ ID NO: 857298 - RNA, 19 nt, Artificial Sequence
  Description of Artificial Sequence: Synthetic oligonucleotide
  Sense strand starting at position 406 of SEQ ID NO: 588328
agcugauuguccucucgga

SEQ ID NO: 857299 - RNA, 19 nt, Artificial Sequence
  Description of Artificial Sequence: Synthetic oligonucleotide
  Antisense strand to SEQ ID NO: 857298
uccgagaggacaaucagcu

SEQ ID NO: 857300 - RNA, 19 nt, Artificial Sequence
  Description of Artificial Sequence: Synthetic oligonucleotide
  Sense strand starting at position 759 of SEQ ID NO: 588328
gggcguuccucaucugacu

SEQ ID NO: 857301 - RNA, 19 nt, Artificial Sequence
  Description of Artificial Sequence: Synthetic oligonucleotide
  Antisense strand to SEQ ID NO: 857300
agucagaugaggaacgccc

SEQ ID NO: 857302 - RNA, 19 nt, Artificial Sequence
  Description of Artificial Sequence: Synthetic oligonucleotide
  Sense strand starting at position 840 of SEQ ID NO: 588328
cagugaaguguucagagug

SEQ ID NO: 857303 - RNA, 19 nt, Artificial Sequence
  Description of Artificial Sequence: Synthetic oligonucleotide
  Antisense strand to SEQ ID NO: 857302
cacucugaacacuucacug

SEQ ID NO: 857304 - RNA, 19 nt, Artificial Sequence
  Description of Artificial Sequence: Synthetic oligonucleotide
  Sense strand starting at position 928 of SEQ ID NO: 588328
uggaucugcggucacuuaa

SEQ ID NO: 857305 - RNA, 19 nt, Artificial Sequence
  Description of Artificial Sequence: Synthetic oligonucleotide
  Antisense strand to SEQ ID NO: 857304
uuaagugaccgcagaucca

SEQ ID NO: 857306 - RNA, 19 nt, Artificial Sequence
  Description of Artificial Sequence: Synthetic oligonucleotide
  Sense strand starting at position 1099 of SEQ ID NO: 588328
gguguggacguaugagaca

SEQ ID NO: 857307 - RNA, 19 nt, Artificial Sequence
  Description of Artificial Sequence: Synthetic oligonucleotide
  Antisense strand to SEQ ID NO: 857306
ugucucauacguccacacc

SEQ ID NO: 857308 - RNA, 19 nt, Artificial Sequence
  Description of Artificial Sequence: Synthetic oligonucleotide
  Sense strand starting at position 1573 of SEQ ID NO: 588328
gggugaaguguuggaguca

SEQ ID NO: 857309 - RNA, 19 nt, Artificial Sequence
  Description of Artificial Sequence: Synthetic oligonucleotide
  Antisense strand to SEQ ID NO: 857308
ugacuccaacacuucaccc

SEQ ID NO: 857310 - RNA, 19 nt, Artificial Sequence
  Description of Artificial Sequence: Synthetic oligonucleotide
  Sense strand starting at position 1574 of SEQ ID NO: 588328
ggugaaguguuggagucag

SEQ ID NO: 857311 - RNA, 19 nt, Artificial Sequence
  Description of Artificial Sequence: Synthetic oligonucleotide
  Antisense strand to SEQ ID NO: 857310
cugacuccaacacuucacc

SEQ ID NO: 857312 - RNA, 19 nt, Artificial Sequence
  Description of Artificial Sequence: Synthetic oligonucleotide
  Sense strand starting at position 1655 of SEQ ID NO: 588328
uggccuccucugugcagaa

SEQ ID NO: 857313 - RNA, 19 nt, Artificial Sequence
  Description of Artificial Sequence: Synthetic oligonucleotide
  Antisense strand to SEQ ID NO: 857312
uucugcacagaggaggcca

SEQ ID NO: 857314 - RNA, 19 nt, Artificial Sequence
  Description of Artificial Sequence: Synthetic oligonucleotide
  Sense strand starting at position 2096 of SEQ ID NO: 588328
guguguucuccgcugauaa

SEQ ID NO: 857315 - RNA, 19 nt, Artificial Sequence
  Description of Artificial Sequence: Synthetic oligonucleotide
  Antisense strand to SEQ ID NO: 857314
uuaucagcggagaacacac

SEQ ID NO: 857316 - RNA, 19 nt, Artificial Sequence
  Description of Artificial Sequence: Synthetic oligonucleotide
  Sense strand starting at position 2097 of SEQ ID NO: 588328
uguguucuccgcugauaac

SEQ ID NO: 857317 - RNA, 19 nt, Artificial Sequence
  Description of Artificial Sequence: Synthetic oligonucleotide
  Antisense strand to SEQ ID NO: 857316
guuaucagcggagaacaca

SEQ ID NO: 857318 - RNA, 19 nt, Artificial Sequence
  Description of Artificial Sequence: Synthetic oligonucleotide
  Sense strand starting at position 2117 of SEQ ID NO: 588328
gggacgugucgucggacaa

SEQ ID NO: 857319 - RNA, 19 nt, Artificial Sequence
  Description of Artificial Sequence: Synthetic oligonucleotide
  Antisense strand to SEQ ID NO: 857318
uuguccgacgacacguccc

SEQ ID NO: 857320 - RNA, 19 nt, Artificial Sequence
  Description of Artificial Sequence: Synthetic oligonucleotide
  Sense strand starting at position 2118 of SEQ ID NO: 588328
ggacgugucgucggacaaa

SEQ ID NO: 857321 - RNA, 19 nt, Artificial Sequence
  Description of Artificial Sequence: Synthetic oligonucleotide
  Antisense strand to SEQ ID NO: 857320
uuuguccgacgacacgucc

SEQ ID NO: 857322 - RNA, 19 nt, Artificial Sequence
  Description of Artificial Sequence: Synthetic oligonucleotide
  Sense strand starting at position 2373 of SEQ ID NO: 588328
gcaucuuugggccaaggau

SEQ ID NO: 857323 - RNA, 19 nt, Artificial Sequence
  Description of Artificial Sequence: Synthetic oligonucleotide
  Antisense strand to SEQ ID NO: 857322
auccuuggcccaaagaugc

SEQ ID NO: 857324 - RNA, 19 nt, Artificial Sequence
  Description of Artificial Sequence: Synthetic oligonucleotide
  Sense strand starting at position 2485 of SEQ ID NO: 588328
agccuugaccagugaggga

SEQ ID NO: 857325 - RNA, 19 nt, Artificial Sequence
  Description of Artificial Sequence: Synthetic oligonucleotide
  Antisense strand to SEQ ID NO: 857324
ucccucacuggucaaggcu

SEQ ID NO: 857326 - RNA, 19 nt, Artificial Sequence
  Description of Artificial Sequence: Synthetic oligonucleotide
  Sense strand starting at position 3048 of SEQ ID NO: 588328
cggccugaugccugggaca

SEQ ID NO: 857327 - RNA, 19 nt, Artificial Sequence
  Description of Artificial Sequence: Synthetic oligonucleotide
  Antisense strand to SEQ ID NO: 857326
ugucccaggcaucaggccg

SEQ ID NO: 857328 - RNA, 19 nt, Artificial Sequence
  Description of Artificial Sequence: Synthetic oligonucleotide
  Sense strand starting at position 3362 of SEQ ID NO: 588328
uggucacugagcugguuua

SEQ ID NO: 857329 - RNA, 19 nt, Artificial Sequence
  Description of Artificial Sequence: Synthetic oligonucleotide
  Antisense strand to SEQ ID NO: 857328
uaaaccagcucagugacca

SEQ ID NO: 857330 - RNA, 19 nt, Artificial Sequence
  Description of Artificial Sequence: Synthetic oligonucleotide
  Sense strand starting at position 3363 of SEQ ID NO: 588328
ggucacugagcugguuuaa

SEQ ID NO: 857331 - RNA, 19 nt, Artificial Sequence
  Description of Artificial Sequence: Synthetic oligonucleotide
  Antisense strand to SEQ ID NO: 857330
uuaaaccagcucagugacc

SEQ ID NO: 857332 - RNA, 19 nt, Artificial Sequence
  Description of Artificial Sequence: Synthetic oligonucleotide
  Sense strand starting at position 8 of SEQ ID NO: 588329
uucucaucugaguguggaa

SEQ ID NO: 857333 - RNA, 19 nt, Artificial Sequence
  Description of Artificial Sequence: Synthetic oligonucleotide
  Antisense strand to SEQ ID NO: 857332
uuccacacucagaugagaa

SEQ ID NO: 857334 - RNA, 19 nt, Artificial Sequence
  Description of Artificial Sequence: Synthetic oligonucleotide
  Sense strand starting at position 141 of SEQ ID NO: 588329
cugggauaugugugcaauc

SEQ ID NO: 857335 - RNA, 19 nt, Artificial Sequence
  Description of Artificial Sequence: Synthetic oligonucleotide
  Antisense strand to SEQ ID NO: 857334
gauugcacacauaucccag

SEQ ID NO: 857336 - RNA, 19 nt, Artificial Sequence
  Description of Artificial Sequence: Synthetic oligonucleotide
  Sense strand starting at position 142 of SEQ ID NO: 588329
ugggauaugugugcaauca

SEQ ID NO: 857337 - RNA, 19 nt, Artificial Sequence
  Description of Artificial Sequence: Synthetic oligonucleotide
  Antisense strand to SEQ ID NO: 857336
ugauugcacacauauccca

SEQ ID NO: 857338 - RNA, 19 nt, Artificial Sequence
  Description of Artificial Sequence: Synthetic oligonucleotide
  Sense strand starting at position 143 of SEQ ID NO: 588329
gggauaugugugcaaucag

SEQ ID NO: 857339 - RNA, 19 nt, Artificial Sequence
  Description of Artificial Sequence: Synthetic oligonucleotide
  Antisense strand to SEQ ID NO: 857338
cugauugcacacauauccc

SEQ ID NO: 857340 - RNA, 19 nt, Artificial Sequence
  Description of Artificial Sequence: Synthetic oligonucleotide
  Sense strand starting at position 287 of SEQ ID NO: 588329
gggugaggcuuccugagag

SEQ ID NO: 857341 - RNA, 19 nt, Artificial Sequence
  Description of Artificial Sequence: Synthetic oligonucleotide
  Antisense strand to SEQ ID NO: 857340
cucucaggaagccucaccc

SEQ ID NO: 857342 - RNA, 19 nt, Artificial Sequence
  Description of Artificial Sequence: Synthetic oligonucleotide
  Sense strand starting at position 291 of SEQ ID NO: 588329
gaggcuuccugagagcaug

SEQ ID NO: 857343 - RNA, 19 nt, Artificial Sequence
  Description of Artificial Sequence: Synthetic oligonucleotide
  Antisense strand to SEQ ID NO: 857342
caugcucucaggaagccuc

SEQ ID NO: 857344 - RNA, 19 nt, Artificial Sequence
  Description of Artificial Sequence: Synthetic oligonucleotide
  Sense strand starting at position 319 of SEQ ID NO: 588329
aauuaauggucuguggcaa

SEQ ID NO: 857345 - RNA, 19 nt, Artificial Sequence
  Description of Artificial Sequence: Synthetic oligonucleotide
  Antisense strand to SEQ ID NO: 857344
uugccacagaccauuaauu

SEQ ID NO: 857346 - RNA, 19 nt, Artificial Sequence
  Description of Artificial Sequence: Synthetic oligonucleotide
  Sense strand starting at position 320 of SEQ ID NO: 588329
auuaauggucuguggcaau

SEQ ID NO: 857347 - RNA, 19 nt, Artificial Sequence
  Description of Artificial Sequence: Synthetic oligonucleotide
  Antisense strand to SEQ ID NO: 857346
auugccacagaccauuaau

SEQ ID NO: 857348 - RNA, 19 nt, Artificial Sequence
  Description of Artificial Sequence: Synthetic oligonucleotide
  Sense strand starting at position 901 of SEQ ID NO: 588329
cagagcuggcuggagauua

SEQ ID NO: 857349 - RNA, 19 nt, Artificial Sequence
  Description of Artificial Sequence: Synthetic oligonucleotide
  Antisense strand to SEQ ID NO: 857348
uaaucuccagccagcucug

SEQ ID NO: 857350 - RNA, 19 nt, Artificial Sequence
  Description of Artificial Sequence: Synthetic oligonucleotide
  Sense strand starting at position 1145 of SEQ ID NO: 588329
cccacaauuccugagaguc

SEQ ID NO: 857351 - RNA, 19 nt, Artificial Sequence
  Description of Artificial Sequence: Synthetic oligonucleotide
  Antisense strand to SEQ ID NO: 857350
gacucucaggaauuguggg

SEQ ID NO: 857352 - RNA, 19 nt, Artificial Sequence
  Description of Artificial Sequence: Synthetic oligonucleotide
  Sense strand starting at position 2544 of SEQ ID NO: 588329
agccuuagcguguuagguu

SEQ ID NO: 857353 - RNA, 19 nt, Artificial Sequence
  Description of Artificial Sequence: Synthetic oligonucleotide
  Antisense strand to SEQ ID NO: 857352
aaccuaacacgcuaaggcu

SEQ ID NO: 857354 - RNA, 19 nt, Artificial Sequence
  Description of Artificial Sequence: Synthetic oligonucleotide
  Sense strand starting at position 2696 of SEQ ID NO: 588329
cccagagagucuccucaca

SEQ ID NO: 857355 - RNA, 19 nt, Artificial Sequence
  Description of Artificial Sequence: Synthetic oligonucleotide
  Antisense strand to SEQ ID NO: 857354
ugugaggagacucucuggg

SEQ ID NO: 857356 - RNA, 19 nt, Artificial Sequence
  Description of Artificial Sequence: Synthetic oligonucleotide
  Sense strand starting at position 2908 of SEQ ID NO: 588329
gccagcgcccugugucaua

SEQ ID NO: 857357 - RNA, 19 nt, Artificial Sequence
  Description of Artificial Sequence: Synthetic oligonucleotide
  Antisense strand to SEQ ID NO: 857356
uaugacacagggcgcuggc

SEQ ID NO: 857358 - RNA, 19 nt, Artificial Sequence
  Description of Artificial Sequence: Synthetic oligonucleotide
  Sense strand starting at position 2946 of SEQ ID NO: 588329
ugagaaguguucccucgga

SEQ ID NO: 857359 - RNA, 19 nt, Artificial Sequence
  Description of Artificial Sequence: Synthetic oligonucleotide
  Antisense strand to SEQ ID NO: 857358
uccgagggaacacuucuca

SEQ ID NO: 857360 - RNA, 19 nt, Artificial Sequence
  Description of Artificial Sequence: Synthetic oligonucleotide
  Sense strand starting at position 3088 of SEQ ID NO: 588329
ggagaggaguuguggguua

SEQ ID NO: 857361 - RNA, 19 nt, Artificial Sequence
  Description of Artificial Sequence: Synthetic oligonucleotide
  Antisense strand to SEQ ID NO: 857360
uaacccacaacuccucucc

SEQ ID NO: 857362 - RNA, 19 nt, Artificial Sequence
  Description of Artificial Sequence: Synthetic oligonucleotide
  Sense strand starting at position 3090 of SEQ ID NO: 588329
agaggaguuguggguuagu

SEQ ID NO: 857363 - RNA, 19 nt, Artificial Sequence
  Description of Artificial Sequence: Synthetic oligonucleotide
  Antisense strand to SEQ ID NO: 857362
acuaacccacaacuccucu

SEQ ID NO: 857364 - RNA, 19 nt, Artificial Sequence
  Description of Artificial Sequence: Synthetic oligonucleotide
  Sense strand starting at position 3099 of SEQ ID NO: 588329
guggguuagugccuaugca

SEQ ID NO: 857365 - RNA, 19 nt, Artificial Sequence
  Description of Artificial Sequence: Synthetic oligonucleotide
  Antisense strand to SEQ ID NO: 857364
ugcauaggcacuaacccac

SEQ ID NO: 857366 - RNA, 19 nt, Artificial Sequence
  Description of Artificial Sequence: Synthetic oligonucleotide
  Sense strand starting at position 3251 of SEQ ID NO: 588329
agcugauuguccucucgga

SEQ ID NO: 857367 - RNA, 19 nt, Artificial Sequence
  Description of Artificial Sequence: Synthetic oligonucleotide
  Antisense strand to SEQ ID NO: 857366
uccgagaggacaaucagcu

SEQ ID NO: 857368 - RNA, 19 nt, Artificial Sequence
  Description of Artificial Sequence: Synthetic oligonucleotide
  Sense strand starting at position 3604 of SEQ ID NO: 588329
gggcguuccucaucugacu

SEQ ID NO: 857369 - RNA, 19 nt, Artificial Sequence
  Description of Artificial Sequence: Synthetic oligonucleotide
  Antisense strand to SEQ ID NO: 857368
agucagaugaggaacgccc

SEQ ID NO: 857370 - RNA, 19 nt, Artificial Sequence
  Description of Artificial Sequence: Synthetic oligonucleotide
  Sense strand starting at position 3685 of SEQ ID NO: 588329
cagugaaguguucagagug

SEQ ID NO: 857371 - RNA, 19 nt, Artificial Sequence
  Description of Artificial Sequence: Synthetic oligonucleotide
  Antisense strand to SEQ ID NO: 857370
cacucugaacacuucacug

SEQ ID NO: 857372 - RNA, 19 nt, Artificial Sequence
  Description of Artificial Sequence: Synthetic oligonucleotide
  Sense strand starting at position 3773 of SEQ ID NO: 588329
uggaucugcggucacuuaa

SEQ ID NO: 857373 - RNA, 19 nt, Artificial Sequence
  Description of Artificial Sequence: Synthetic oligonucleotide
  Antisense strand to SEQ ID NO: 857372
uuaagugaccgcagaucca

SEQ ID NO: 857374 - RNA, 19 nt, Artificial Sequence
  Description of Artificial Sequence: Synthetic oligonucleotide
  Sense strand starting at position 3944 of SEQ ID NO: 588329
gguguggacguaugagaca

SEQ ID NO: 857375 - RNA, 19 nt, Artificial Sequence
  Description of Artificial Sequence: Synthetic oligonucleotide
  Antisense strand to SEQ ID NO: 857374
ugucucauacguccacacc

SEQ ID NO: 857376 - RNA, 19 nt, Artificial Sequence
  Description of Artificial Sequence: Synthetic oligonucleotide
  Sense strand starting at position 27 of SEQ ID NO: 588330
ugcugcuaggcucaaauua

SEQ ID NO: 857377 - RNA, 19 nt, Artificial Sequence
  Description of Artificial Sequence: Synthetic oligonucleotide
  Antisense strand to SEQ ID NO: 857376
uaauuugagccuagcagca

SEQ ID NO: 857378 - RNA, 19 nt, Artificial Sequence
  Description of Artificial Sequence: Synthetic oligonucleotide
  Sense strand starting at position 34 of SEQ ID NO: 588330
aggcucaaauuauugaauu

SEQ ID NO: 857379 - RNA, 19 nt, Artificial Sequence
  Description of Artificial Sequence: Synthetic oligonucleotide
  Antisense strand to SEQ ID NO: 857378
aauucaauaauuugagccu

SEQ ID NO: 857380 - RNA, 19 nt, Artificial Sequence
  Description of Artificial Sequence: Synthetic oligonucleotide
  Sense strand starting at position 118 of SEQ ID NO: 588330
auucucaucagguguguaa

SEQ ID NO: 857381 - RNA, 19 nt, Artificial Sequence
  Description of Artificial Sequence: Synthetic oligonucleotide
  Antisense strand to SEQ ID NO: 857380
uuacacaccugaugagaau

SEQ ID NO: 857382 - RNA, 19 nt, Artificial Sequence
  Description of Artificial Sequence: Synthetic oligonucleotide
  Sense strand starting at position 120 of SEQ ID NO: 588330
ucucaucagguguguaaag

SEQ ID NO: 857383 - RNA, 19 nt, Artificial Sequence
  Description of Artificial Sequence: Synthetic oligonucleotide
  Antisense strand to SEQ ID NO: 857382
cuuuacacaccugaugaga

SEQ ID NO: 857384 - RNA, 19 nt, Artificial Sequence
  Description of Artificial Sequence: Synthetic oligonucleotide
  Sense strand starting at position 176 of SEQ ID NO: 588330
gagccauuugcucaucggu

SEQ ID NO: 857385 - RNA, 19 nt, Artificial Sequence
  Description of Artificial Sequence: Synthetic oligonucleotide
  Antisense strand to SEQ ID NO: 857384
accgaugagcaaauggcuc

SEQ ID NO: 857386 - RNA, 19 nt, Artificial Sequence
  Description of Artificial Sequence: Synthetic oligonucleotide
  Sense strand starting at position 178 of SEQ ID NO: 588330
gccauuugcucaucgguca

SEQ ID NO: 857387 - RNA, 19 nt, Artificial Sequence
  Description of Artificial Sequence: Synthetic oligonucleotide
  Antisense strand to SEQ ID NO: 857386
ugaccgaugagcaaauggc

SEQ ID NO: 857388 - RNA, 19 nt, Artificial Sequence
  Description of Artificial Sequence: Synthetic oligonucleotide
  Sense strand starting at position 179 of SEQ ID NO: 588330
ccauuugcucaucggucau

SEQ ID NO: 857389 - RNA, 19 nt, Artificial Sequence
  Description of Artificial Sequence: Synthetic oligonucleotide
  Antisense strand to SEQ ID NO: 857388
augaccgaugagcaaaugg

SEQ ID NO: 857390 - RNA, 19 nt, Artificial Sequence
  Description of Artificial Sequence: Synthetic oligonucleotide
  Sense strand starting at position 183 of SEQ ID NO: 588330
uugcucaucggucauguau

SEQ ID NO: 857391 - RNA, 19 nt, Artificial Sequence
  Description of Artificial Sequence: Synthetic oligonucleotide
  Antisense strand to SEQ ID NO: 857390
auacaugaccgaugagcaa

SEQ ID NO: 857392 - RNA, 19 nt, Artificial Sequence
  Description of Artificial Sequence: Synthetic oligonucleotide
  Sense strand starting at position 466 of SEQ ID NO: 588330
gggagacuccuuugagccu

SEQ ID NO: 857393 - RNA, 19 nt, Artificial Sequence
  Description of Artificial Sequence: Synthetic oligonucleotide
  Antisense strand to SEQ ID NO: 857392
aggcucaaaggagucuccc

SEQ ID NO: 857394 - RNA, 19 nt, Artificial Sequence
  Description of Artificial Sequence: Synthetic oligonucleotide
  Sense strand starting at position 632 of SEQ ID NO: 588330
gagggaggcgccugaucua

SEQ ID NO: 857395 - RNA, 19 nt, Artificial Sequence
  Description of Artificial Sequence: Synthetic oligonucleotide
  Antisense strand to SEQ ID NO: 857394
uagaucaggcgccucccuc

SEQ ID NO: 857396 - RNA, 19 nt, Artificial Sequence
  Description of Artificial Sequence: Synthetic oligonucleotide
  Sense strand starting at position 768 of SEQ ID NO: 588330
uguucucagugacuaauau

SEQ ID NO: 857397 - RNA, 19 nt, Artificial Sequence
  Description of Artificial Sequence: Synthetic oligonucleotide
  Antisense strand to SEQ ID NO: 857396
auauuagucacugagaaca

SEQ ID NO: 857398 - RNA, 19 nt, Artificial Sequence
  Description of Artificial Sequence: Synthetic oligonucleotide
  Sense strand starting at position 769 of SEQ ID NO: 588330
guucucagugacuaauauu

SEQ ID NO: 857399 - RNA, 19 nt, Artificial Sequence
  Description of Artificial Sequence: Synthetic oligonucleotide
  Antisense strand to SEQ ID NO: 857398
aauauuagucacugagaac

SEQ ID NO: 857400 - RNA, 19 nt, Artificial Sequence
  Description of Artificial Sequence: Synthetic oligonucleotide
  Sense strand starting at position 792 of SEQ ID NO: 588330
ccuugaaugcugcagauac

SEQ ID NO: 857401 - RNA, 19 nt, Artificial Sequence
  Description of Artificial Sequence: Synthetic oligonucleotide
  Antisense strand to SEQ ID NO: 857400
guaucugcagcauucaagg

SEQ ID NO: 857402 - RNA, 19 nt, Artificial Sequence
  Description of Artificial Sequence: Synthetic oligonucleotide
  Sense strand starting at position 913 of SEQ ID NO: 588330
gccauacauuaccugaguu

SEQ ID NO: 857403 - RNA, 19 nt, Artificial Sequence
  Description of Artificial Sequence: Synthetic oligonucleotide
  Antisense strand to SEQ ID NO: 857402
aacucagguaauguauggc

SEQ ID NO: 857404 - RNA, 19 nt, Artificial Sequence
  Description of Artificial Sequence: Synthetic oligonucleotide
  Sense strand starting at position 945 of SEQ ID NO: 588330
aagucuaugcaccaggaua

SEQ ID NO: 857405 - RNA, 19 nt, Artificial Sequence
  Description of Artificial Sequence: Synthetic oligonucleotide
  Antisense strand to SEQ ID NO: 857404
uauccuggugcauagacuu

SEQ ID NO: 857406 - RNA, 19 nt, Artificial Sequence
  Description of Artificial Sequence: Synthetic oligonucleotide
  Sense strand starting at position 990 of SEQ ID NO: 588330
cuuucuaagcuuuagaagu

SEQ ID NO: 857407 - RNA, 19 nt, Artificial Sequence
  Description of Artificial Sequence: Synthetic oligonucleotide
  Antisense strand to SEQ ID NO: 857406
acuucuaaagcuuagaaag

SEQ ID NO: 857408 - RNA, 19 nt, Artificial Sequence
  Description of Artificial Sequence: Synthetic oligonucleotide
  Sense strand starting at position 1042 of SEQ ID NO: 588330
auacuucuacgcugacagu

SEQ ID NO: 857409 - RNA, 19 nt, Artificial Sequence
  Description of Artificial Sequence: Synthetic oligonucleotide
  Antisense strand to SEQ ID NO: 857408
acugucagcguagaaguau

SEQ ID NO: 857410 - RNA, 19 nt, Artificial Sequence
  Description of Artificial Sequence: Synthetic oligonucleotide
  Sense strand starting at position 1158 of SEQ ID NO: 588330
gccagugguccacucgcaa

SEQ ID NO: 857411 - RNA, 19 nt, Artificial Sequence
  Description of Artificial Sequence: Synthetic oligonucleotide
  Antisense strand to SEQ ID NO: 857410
uugcgaguggaccacuggc

SEQ ID NO: 857412 - RNA, 19 nt, Artificial Sequence
  Description of Artificial Sequence: Synthetic oligonucleotide
  Sense strand starting at position 1165 of SEQ ID NO: 588330
guccacucgcaagacuuua

SEQ ID NO: 857413 - RNA, 19 nt, Artificial Sequence
  Description of Artificial Sequence: Synthetic oligonucleotide
  Antisense strand to SEQ ID NO: 857412
uaaagucuugcgaguggac

SEQ ID NO: 857414 - RNA, 19 nt, Artificial Sequence
  Description of Artificial Sequence: Synthetic oligonucleotide
  Sense strand starting at position 1176 of SEQ ID NO: 588330
agacuuuaaucucuacgcu

SEQ ID NO: 857415 - RNA, 19 nt, Artificial Sequence
  Description of Artificial Sequence: Synthetic oligonucleotide
  Antisense strand to SEQ ID NO: 857414
agcguagagauuaaagucu

SEQ ID NO: 857416 - RNA, 19 nt, Artificial Sequence
  Description of Artificial Sequence: Synthetic oligonucleotide
  Sense strand starting at position 1286 of SEQ ID NO: 588330
ucgagagcccuuuaaagcu

SEQ ID NO: 857417 - RNA, 19 nt, Artificial Sequence
  Description of Artificial Sequence: Synthetic oligonucleotide
  Antisense strand to SEQ ID NO: 857416
agcuuuaaagggcucucga

SEQ ID NO: 857418 - RNA, 19 nt, Artificial Sequence
  Description of Artificial Sequence: Synthetic oligonucleotide
  Sense strand starting at position 1348 of SEQ ID NO: 588330
cgugcuuuccugcuucuga

SEQ ID NO: 857419 - RNA, 19 nt, Artificial Sequence
  Description of Artificial Sequence: Synthetic oligonucleotide
  Antisense strand to SEQ ID NO: 857418
ucagaagcaggaaagcacg

SEQ ID NO: 857420 - RNA, 19 nt, Artificial Sequence
  Description of Artificial Sequence: Synthetic oligonucleotide
  Sense strand starting at position 1439 of SEQ ID NO: 588330
gugccauccuacucagaac

SEQ ID NO: 857421 - RNA, 19 nt, Artificial Sequence
  Description of Artificial Sequence: Synthetic oligonucleotide
  Antisense strand to SEQ ID NO: 857420
guucugaguaggauggcac

SEQ ID NO: 857422 - RNA, 19 nt, Artificial Sequence
  Description of Artificial Sequence: Synthetic oligonucleotide
  Sense strand starting at position 2540 of SEQ ID NO: 588330
gucccuaacggcgggaaua

SEQ ID NO: 857423 - RNA, 19 nt, Artificial Sequence
  Description of Artificial Sequence: Synthetic oligonucleotide
  Antisense strand to SEQ ID NO: 857422
uauucccgccguuagggac

SEQ ID NO: 857424 - RNA, 19 nt, Artificial Sequence
  Description of Artificial Sequence: Synthetic oligonucleotide
  Sense strand starting at position 2641 of SEQ ID NO: 588330
gguguucugcuaggaggau

SEQ ID NO: 857425 - RNA, 19 nt, Artificial Sequence
  Description of Artificial Sequence: Synthetic oligonucleotide
  Antisense strand to SEQ ID NO: 857424
auccuccuagcagaacacc

SEQ ID NO: 857426 - RNA, 19 nt, Artificial Sequence
  Description of Artificial Sequence: Synthetic oligonucleotide
  Sense strand starting at position 2954 of SEQ ID NO: 588330
gacugaauuugagguuucu

SEQ ID NO: 857427 - RNA, 19 nt, Artificial Sequence
  Description of Artificial Sequence: Synthetic oligonucleotide
  Antisense strand to SEQ ID NO: 857426
agaaaccucaaauucaguc

SEQ ID NO: 857428 - RNA, 19 nt, Artificial Sequence
  Description of Artificial Sequence: Synthetic oligonucleotide
  Sense strand starting at position 3014 of SEQ ID NO: 588330
agaaaugagccuugaaggu

SEQ ID NO: 857429 - RNA, 19 nt, Artificial Sequence
  Description of Artificial Sequence: Synthetic oligonucleotide
  Antisense strand to SEQ ID NO: 857428
accuucaaggcucauuucu

SEQ ID NO: 857430 - RNA, 19 nt, Artificial Sequence
  Description of Artificial Sequence: Synthetic oligonucleotide
  Sense strand starting at position 3065 of SEQ ID NO: 588330
ucggacuccggagaauuau

SEQ ID NO: 857431 - RNA, 19 nt, Artificial Sequence
  Description of Artificial Sequence: Synthetic oligonucleotide
  Antisense strand to SEQ ID NO: 857430
auaauucuccggaguccga

SEQ ID NO: 857432 - RNA, 19 nt, Artificial Sequence
  Description of Artificial Sequence: Synthetic oligonucleotide
  Sense strand starting at position 3071 of SEQ ID NO: 588330
uccggagaauuaucucaag

SEQ ID NO: 857433 - RNA, 19 nt, Artificial Sequence
  Description of Artificial Sequence: Synthetic oligonucleotide
  Antisense strand to SEQ ID NO: 857432
cuugagauaauucuccgga

SEQ ID NO: 857434 - RNA, 19 nt, Artificial Sequence
  Description of Artificial Sequence: Synthetic oligonucleotide
  Sense strand starting at position 3174 of SEQ ID NO: 588330
gcuaaacugcucugucaaa

SEQ ID NO: 857435 - RNA, 19 nt, Artificial Sequence
  Description of Artificial Sequence: Synthetic oligonucleotide
  Antisense strand to SEQ ID NO: 857434
uuugacagagcaguuuagc

SEQ ID NO: 857436 - RNA, 19 nt, Artificial Sequence
  Description of Artificial Sequence: Synthetic oligonucleotide
  Sense strand starting at position 3175 of SEQ ID NO: 588330
cuaaacugcucugucaaag

SEQ ID NO: 857437 - RNA, 19 nt, Artificial Sequence
  Description of Artificial Sequence: Synthetic oligonucleotide
  Antisense strand to SEQ ID NO: 857436
cuuugacagagcaguuuag

SEQ ID NO: 857438 - RNA, 19 nt, Artificial Sequence
  Description of Artificial Sequence: Synthetic oligonucleotide
  Sense strand starting at position 3297 of SEQ ID NO: 588330
gucugucccuucccugaaa

SEQ ID NO: 857439 - RNA, 19 nt, Artificial Sequence
  Description of Artificial Sequence: Synthetic oligonucleotide
  Antisense strand to SEQ ID NO: 857438
uuucagggaagggacagac

SEQ ID NO: 857440 - RNA, 19 nt, Artificial Sequence
  Description of Artificial Sequence: Synthetic oligonucleotide
  Sense strand starting at position 3317 of SEQ ID NO: 588330
cuuuauuucgagugucuuu

SEQ ID NO: 857441 - RNA, 19 nt, Artificial Sequence
  Description of Artificial Sequence: Synthetic oligonucleotide
  Antisense strand to SEQ ID NO: 857440
aaagacacucgaaauaaag

SEQ ID NO: 857442 - RNA, 19 nt, Artificial Sequence
  Description of Artificial Sequence: Synthetic oligonucleotide
  Sense strand starting at position 3346 of SEQ ID NO: 588330
ucuuuaccauccuugaguu

SEQ ID NO: 857443 - RNA, 19 nt, Artificial Sequence
  Description of Artificial Sequence: Synthetic oligonucleotide
  Antisense strand to SEQ ID NO: 857442
aacucaaggaugguaaaga

SEQ ID NO: 857444 - RNA, 19 nt, Artificial Sequence
  Description of Artificial Sequence: Synthetic oligonucleotide
  Sense strand starting at position 3348 of SEQ ID NO: 588330
uuuaccauccuugaguuga

SEQ ID NO: 857445 - RNA, 19 nt, Artificial Sequence
  Description of Artificial Sequence: Synthetic oligonucleotide
  Antisense strand to SEQ ID NO: 857444
ucaacucaaggaugguaaa

SEQ ID NO: 857446 - RNA, 19 nt, Artificial Sequence
  Description of Artificial Sequence: Synthetic oligonucleotide
  Sense strand starting at position 3471 of SEQ ID NO: 588330
ucaugugacucucccacau

SEQ ID NO: 857447 - RNA, 19 nt, Artificial Sequence
  Description of Artificial Sequence: Synthetic oligonucleotide
  Antisense strand to SEQ ID NO: 857446
augugggagagucacauga

SEQ ID NO: 857448 - RNA, 19 nt, Artificial Sequence
  Description of Artificial Sequence: Synthetic oligonucleotide
  Sense strand starting at position 3486 of SEQ ID NO: 588330
acauccugauuuggaauau

SEQ ID NO: 857449 - RNA, 19 nt, Artificial Sequence
  Description of Artificial Sequence: Synthetic oligonucleotide
  Antisense strand to SEQ ID NO: 857448
auauuccaaaucaggaugu

SEQ ID NO: 857450 - RNA, 19 nt, Artificial Sequence
  Description of Artificial Sequence: Synthetic oligonucleotide
  Sense strand starting at position 3498 of SEQ ID NO: 588330
ggaauauugucucccuacu

SEQ ID NO: 857451 - RNA, 19 nt, Artificial Sequence
  Description of Artificial Sequence: Synthetic oligonucleotide
  Antisense strand to SEQ ID NO: 857450
aguagggagacaauauucc

SEQ ID NO: 857452 - RNA, 19 nt, Artificial Sequence
  Description of Artificial Sequence: Synthetic oligonucleotide
  Sense strand starting at position 3526 of SEQ ID NO: 588330
guccauggugccuagaaca

SEQ ID NO: 857453 - RNA, 19 nt, Artificial Sequence
  Description of Artificial Sequence: Synthetic oligonucleotide
  Antisense strand to SEQ ID NO: 857452
uguucuaggcaccauggac

SEQ ID NO: 857454 - RNA, 19 nt, Artificial Sequence
  Description of Artificial Sequence: Synthetic oligonucleotide
  Sense strand starting at position 3899 of SEQ ID NO: 588330
gaguuagaaugugaagaaa

SEQ ID NO: 857455 - RNA, 19 nt, Artificial Sequence
  Description of Artificial Sequence: Synthetic oligonucleotide
  Antisense strand to SEQ ID NO: 857454
uuucuucacauucuaacuc

SEQ ID NO: 857456 - RNA, 19 nt, Artificial Sequence
  Description of Artificial Sequence: Synthetic oligonucleotide
  Sense strand starting at position 30 of SEQ ID NO: 588331
auaguuugcaagcgaacuu

SEQ ID NO: 857457 - RNA, 19 nt, Artificial Sequence
  Description of Artificial Sequence: Synthetic oligonucleotide
  Antisense strand to SEQ ID NO: 857456
aaguucgcuugcaaacuau

SEQ ID NO: 857458 - RNA, 19 nt, Artificial Sequence
  Description of Artificial Sequence: Synthetic oligonucleotide
  Sense strand starting at position 41 of SEQ ID NO: 588331
gcgaacuucccguaaguau

SEQ ID NO: 857459 - RNA, 19 nt, Artificial Sequence
  Description of Artificial Sequence: Synthetic oligonucleotide
  Antisense strand to SEQ ID NO: 857458
auacuuacgggaaguucgc

SEQ ID NO: 857460 - RNA, 19 nt, Artificial Sequence
  Description of Artificial Sequence: Synthetic oligonucleotide
  Sense strand starting at position 73 of SEQ ID NO: 588331
ccuuaaguguuguuaccuu

SEQ ID NO: 857461 - RNA, 19 nt, Artificial Sequence
  Description of Artificial Sequence: Synthetic oligonucleotide
  Antisense strand to SEQ ID NO: 857460
aagguaacaacacuuaagg

SEQ ID NO: 857462 - RNA, 19 nt, Artificial Sequence
  Description of Artificial Sequence: Synthetic oligonucleotide
  Sense strand starting at position 77 of SEQ ID NO: 588331
aaguguuguuaccuuagca

SEQ ID NO: 857463 - RNA, 19 nt, Artificial Sequence
  Description of Artificial Sequence: Synthetic oligonucleotide
  Antisense strand to SEQ ID NO: 857462
ugcuaagguaacaacacuu

SEQ ID NO: 857464 - RNA, 19 nt, Artificial Sequence
  Description of Artificial Sequence: Synthetic oligonucleotide
  Sense strand starting at position 148 of SEQ ID NO: 588331
ggguccacucagcaauaca

SEQ ID NO: 857465 - RNA, 19 nt, Artificial Sequence
  Description of Artificial Sequence: Synthetic oligonucleotide
  Antisense strand to SEQ ID NO: 857464
uguauugcugaguggaccc

SEQ ID NO: 857466 - RNA, 19 nt, Artificial Sequence
  Description of Artificial Sequence: Synthetic oligonucleotide
  Sense strand starting at position 184 of SEQ ID NO: 588331
cccaaagguuacuaagaca

SEQ ID NO: 857467 - RNA, 19 nt, Artificial Sequence
  Description of Artificial Sequence: Synthetic oligonucleotide
  Antisense strand to SEQ ID NO: 857466
ugucuuaguaaccuuuggg

SEQ ID NO: 857468 - RNA, 19 nt, Artificial Sequence
  Description of Artificial Sequence: Synthetic oligonucleotide
  Sense strand starting at position 293 of SEQ ID NO: 588331
gcgaaacgauucuugagaa

SEQ ID NO: 857469 - RNA, 19 nt, Artificial Sequence
  Description of Artificial Sequence: Synthetic oligonucleotide
  Antisense strand to SEQ ID NO: 857468
uucucaagaaucguuucgc

SEQ ID NO: 857470 - RNA, 19 nt, Artificial Sequence
  Description of Artificial Sequence: Synthetic oligonucleotide
  Sense strand starting at position 382 of SEQ ID NO: 588331
agcaauugauauucgaaug

SEQ ID NO: 857471 - RNA, 19 nt, Artificial Sequence
  Description of Artificial Sequence: Synthetic oligonucleotide
  Antisense strand to SEQ ID NO: 857470
cauucgaauaucaauugcu

SEQ ID NO: 857472 - RNA, 19 nt, Artificial Sequence
  Description of Artificial Sequence: Synthetic oligonucleotide
  Sense strand starting at position 409 of SEQ ID NO: 588331
uggacugauucgccguaag

SEQ ID NO: 857473 - RNA, 19 nt, Artificial Sequence
  Description of Artificial Sequence: Synthetic oligonucleotide
  Antisense strand to SEQ ID NO: 857472
cuuacggcgaaucagucca

SEQ ID NO: 857474 - RNA, 19 nt, Artificial Sequence
  Description of Artificial Sequence: Synthetic oligonucleotide
  Sense strand starting at position 412 of SEQ ID NO: 588331
acugauucgccguaaguuu

SEQ ID NO: 857475 - RNA, 19 nt, Artificial Sequence
  Description of Artificial Sequence: Synthetic oligonucleotide
  Antisense strand to SEQ ID NO: 857474
aaacuuacggcgaaucagu

SEQ ID NO: 857476 - RNA, 19 nt, Artificial Sequence
  Description of Artificial Sequence: Synthetic oligonucleotide
  Sense strand starting at position 541 of SEQ ID NO: 588331
agaaccguucuuugaggga

SEQ ID NO: 857477 - RNA, 19 nt, Artificial Sequence
  Description of Artificial Sequence: Synthetic oligonucleotide
  Antisense strand to SEQ ID NO: 857476
ucccucaaagaacgguucu

SEQ ID NO: 857478 - RNA, 19 nt, Artificial Sequence
  Description of Artificial Sequence: Synthetic oligonucleotide
  Sense strand starting at position 645 of SEQ ID NO: 588331
ugucauaaagauggucuuu

SEQ ID NO: 857479 - RNA, 19 nt, Artificial Sequence
  Description of Artificial Sequence: Synthetic oligonucleotide
  Antisense strand to SEQ ID NO: 857478
aaagaccaucuuuaugaca

SEQ ID NO: 857480 - RNA, 19 nt, Artificial Sequence
  Description of Artificial Sequence: Synthetic oligonucleotide
  Sense strand starting at position 647 of SEQ ID NO: 588331
ucauaaagauggucuuuaa

SEQ ID NO: 857481 - RNA, 19 nt, Artificial Sequence
  Description of Artificial Sequence: Synthetic oligonucleotide
  Antisense strand to SEQ ID NO: 857480
uuaaagaccaucuuuauga

SEQ ID NO: 857482 - RNA, 19 nt, Artificial Sequence
  Description of Artificial Sequence: Synthetic oligonucleotide
  Sense strand starting at position 711 of SEQ ID NO: 588331
ugcucauagcucgcaucua

SEQ ID NO: 857483 - RNA, 19 nt, Artificial Sequence
  Description of Artificial Sequence: Synthetic oligonucleotide
  Antisense strand to SEQ ID NO: 857482
uagaugcgagcuaugagca

SEQ ID NO: 857484 - RNA, 19 nt, Artificial Sequence
  Description of Artificial Sequence: Synthetic oligonucleotide
  Sense strand starting at position 744 of SEQ ID NO: 588331
cgcucuggcccugaaggau

SEQ ID NO: 857485 - RNA, 19 nt, Artificial Sequence
  Description of Artificial Sequence: Synthetic oligonucleotide
  Antisense strand to SEQ ID NO: 857484
auccuucagggccagagcg

SEQ ID NO: 857486 - RNA, 19 nt, Artificial Sequence
  Description of Artificial Sequence: Synthetic oligonucleotide
  Sense strand starting at position 778 of SEQ ID NO: 588331
aaggaaaugccgugagaaa

SEQ ID NO: 857487 - RNA, 19 nt, Artificial Sequence
  Description of Artificial Sequence: Synthetic oligonucleotide
  Antisense strand to SEQ ID NO: 857486
uuucucacggcauuuccuu

SEQ ID NO: 857488 - RNA, 19 nt, Artificial Sequence
  Description of Artificial Sequence: Synthetic oligonucleotide
  Sense strand starting at position 1032 of SEQ ID NO: 588331
gcgcaaacccgagauguga

SEQ ID NO: 857489 - RNA, 19 nt, Artificial Sequence
  Description of Artificial Sequence: Synthetic oligonucleotide
  Antisense strand to SEQ ID NO: 857488
ucacaucucggguuugcgc

SEQ ID NO: 857490 - RNA, 19 nt, Artificial Sequence
  Description of Artificial Sequence: Synthetic oligonucleotide
  Sense strand starting at position 1169 of SEQ ID NO: 588331
gguguuaagucuccaaacg

SEQ ID NO: 857491 - RNA, 19 nt, Artificial Sequence
  Description of Artificial Sequence: Synthetic oligonucleotide
  Antisense strand to SEQ ID NO: 857490
cguuuggagacuuaacacc

SEQ ID NO: 857492 - RNA, 19 nt, Artificial Sequence
  Description of Artificial Sequence: Synthetic oligonucleotide
  Sense strand starting at position 1564 of SEQ ID NO: 588331
ggcugagcucuaggaacuu

SEQ ID NO: 857493 - RNA, 19 nt, Artificial Sequence
  Description of Artificial Sequence: Synthetic oligonucleotide
  Antisense strand to SEQ ID NO: 857492
aaguuccuagagcucagcc

SEQ ID NO: 857494 - RNA, 19 nt, Artificial Sequence
  Description of Artificial Sequence: Synthetic oligonucleotide
  Sense strand starting at position 1610 of SEQ ID NO: 588331
caguguucccgcccagagu

SEQ ID NO: 857495 - RNA, 19 nt, Artificial Sequence
  Description of Artificial Sequence: Synthetic oligonucleotide
  Antisense strand to SEQ ID NO: 857494
acucugggcgggaacacug

SEQ ID NO: 857496 - RNA, 19 nt, Artificial Sequence
  Description of Artificial Sequence: Synthetic oligonucleotide
  Sense strand starting at position 2423 of SEQ ID NO: 588331
gguccugucccuggacaga

SEQ ID NO: 857497 - RNA, 19 nt, Artificial Sequence
  Description of Artificial Sequence: Synthetic oligonucleotide
  Antisense strand to SEQ ID NO: 857496
ucuguccagggacaggacc

SEQ ID NO: 857498 - RNA, 19 nt, Artificial Sequence
  Description of Artificial Sequence: Synthetic oligonucleotide
  Sense strand starting at position 2498 of SEQ ID NO: 588331
uuuaaauaagcccagagua

SEQ ID NO: 857499 - RNA, 19 nt, Artificial Sequence
  Description of Artificial Sequence: Synthetic oligonucleotide
  Antisense strand to SEQ ID NO: 857498
uacucugggcuuauuuaaa

SEQ ID NO: 857500 - RNA, 19 nt, Artificial Sequence
  Description of Artificial Sequence: Synthetic oligonucleotide
  Sense strand starting at position 2554 of SEQ ID NO: 588331
uaggaaauccugcacucga

SEQ ID NO: 857501 - RNA, 19 nt, Artificial Sequence
  Description of Artificial Sequence: Synthetic oligonucleotide
  Antisense strand to SEQ ID NO: 857500
ucgagugcaggauuuccua

SEQ ID NO: 857502 - RNA, 19 nt, Artificial Sequence
  Description of Artificial Sequence: Synthetic oligonucleotide
  Sense strand starting at position 2804 of SEQ ID NO: 588331
cugcucggccgcuuaauua

SEQ ID NO: 857503 - RNA, 19 nt, Artificial Sequence
  Description of Artificial Sequence: Synthetic oligonucleotide
  Antisense strand to SEQ ID NO: 857502
uaauuaagcggccgagcag

SEQ ID NO: 857504 - RNA, 19 nt, Artificial Sequence
  Description of Artificial Sequence: Synthetic oligonucleotide
  Sense strand starting at position 2920 of SEQ ID NO: 588331
ccugaaauuguaggaggua

SEQ ID NO: 857505 - RNA, 19 nt, Artificial Sequence
  Description of Artificial Sequence: Synthetic oligonucleotide
  Antisense strand to SEQ ID NO: 857504
uaccuccuacaauuucagg

SEQ ID NO: 857506 - RNA, 19 nt, Artificial Sequence
  Description of Artificial Sequence: Synthetic oligonucleotide
  Sense strand starting at position 2979 of SEQ ID NO: 588331
gaacgugaccgagguuaca

SEQ ID NO: 857507 - RNA, 19 nt, Artificial Sequence
  Description of Artificial Sequence: Synthetic oligonucleotide
  Antisense strand to SEQ ID NO: 857506
uguaaccucggucacguuc

SEQ ID NO: 857508 - RNA, 19 nt, Artificial Sequence
  Description of Artificial Sequence: Synthetic oligonucleotide
  Sense strand starting at position 3005 of SEQ ID NO: 588331
gggcaugaugcagguuuga

SEQ ID NO: 857509 - RNA, 19 nt, Artificial Sequence
  Description of Artificial Sequence: Synthetic oligonucleotide
  Antisense strand to SEQ ID NO: 857508
ucaaaccugcaucaugccc

SEQ ID NO: 857510 - RNA, 19 nt, Artificial Sequence
  Description of Artificial Sequence: Synthetic oligonucleotide
  Sense strand starting at position 3152 of SEQ ID NO: 588331
ggcgaagucuaaucagcau

SEQ ID NO: 857511 - RNA, 19 nt, Artificial Sequence
  Description of Artificial Sequence: Synthetic oligonucleotide
  Antisense strand to SEQ ID NO: 857510
augcugauuagacuucgcc

SEQ ID NO: 857512 - RNA, 19 nt, Artificial Sequence
  Description of Artificial Sequence: Synthetic oligonucleotide
  Sense strand starting at position 3155 of SEQ ID NO: 588331
gaagucuaaucagcauagu

SEQ ID NO: 857513 - RNA, 19 nt, Artificial Sequence
  Description of Artificial Sequence: Synthetic oligonucleotide
  Antisense strand to SEQ ID NO: 857512
acuaugcugauuagacuuc

SEQ ID NO: 857514 - RNA, 19 nt, Artificial Sequence
  Description of Artificial Sequence: Synthetic oligonucleotide
  Sense strand starting at position 3158 of SEQ ID NO: 588331
gucuaaucagcauagugaa

SEQ ID NO: 857515 - RNA, 19 nt, Artificial Sequence
  Description of Artificial Sequence: Synthetic oligonucleotide
  Antisense strand to SEQ ID NO: 857514
uucacuaugcugauuagac

SEQ ID NO: 857516 - RNA, 19 nt, Artificial Sequence
  Description of Artificial Sequence: Synthetic oligonucleotide
  Sense strand starting at position 3217 of SEQ ID NO: 588331
ccuuaauuugugcgaccca

SEQ ID NO: 857517 - RNA, 19 nt, Artificial Sequence
  Description of Artificial Sequence: Synthetic oligonucleotide
  Antisense strand to SEQ ID NO: 857516
ugggucgcacaaauuaagg

SEQ ID NO: 857518 - RNA, 19 nt, Artificial Sequence
  Description of Artificial Sequence: Synthetic oligonucleotide
  Sense strand starting at position 3520 of SEQ ID NO: 588331
cuuccugacgcugacuaaa

SEQ ID NO: 857519 - RNA, 19 nt, Artificial Sequence
  Description of Artificial Sequence: Synthetic oligonucleotide
  Antisense strand to SEQ ID NO: 857518
uuuagucagcgucaggaag

SEQ ID NO: 857520 - RNA, 19 nt, Artificial Sequence
  Description of Artificial Sequence: Synthetic oligonucleotide
  Sense strand starting at position 3522 of SEQ ID NO: 588331
uccugacgcugacuaaauu

SEQ ID NO: 857521 - RNA, 19 nt, Artificial Sequence
  Description of Artificial Sequence: Synthetic oligonucleotide
  Antisense strand to SEQ ID NO: 857520
aauuuagucagcgucagga

SEQ ID NO: 857522 - RNA, 19 nt, Artificial Sequence
  Description of Artificial Sequence: Synthetic oligonucleotide
  Sense strand starting at position 3523 of SEQ ID NO: 588331
ccugacgcugacuaaauua

SEQ ID NO: 857523 - RNA, 19 nt, Artificial Sequence
  Description of Artificial Sequence: Synthetic oligonucleotide
  Antisense strand to SEQ ID NO: 857522
uaauuuagucagcgucagg

SEQ ID NO: 857524 - RNA, 19 nt, Artificial Sequence
  Description of Artificial Sequence: Synthetic oligonucleotide
  Sense strand starting at position 3530 of SEQ ID NO: 588331
cugacuaaauuaugggaga

SEQ ID NO: 857525 - RNA, 19 nt, Artificial Sequence
  Description of Artificial Sequence: Synthetic oligonucleotide
  Antisense strand to SEQ ID NO: 857524
ucucccauaauuuagucag

SEQ ID NO: 857526 - RNA, 19 nt, Artificial Sequence
  Description of Artificial Sequence: Synthetic oligonucleotide
  Sense strand starting at position 3625 of SEQ ID NO: 588331
acagguuagcuuuaugaag

SEQ ID NO: 857527 - RNA, 19 nt, Artificial Sequence
  Description of Artificial Sequence: Synthetic oligonucleotide
  Antisense strand to SEQ ID NO: 857526
cuucauaaagcuaaccugu

SEQ ID NO: 857528 - RNA, 19 nt, Artificial Sequence
  Description of Artificial Sequence: Synthetic oligonucleotide
  Sense strand starting at position 3650 of SEQ ID NO: 588331
gcccaagcacuugguuaaa

SEQ ID NO: 857529 - RNA, 19 nt, Artificial Sequence
  Description of Artificial Sequence: Synthetic oligonucleotide
  Antisense strand to SEQ ID NO: 857528
uuuaaccaagugcuugggc

SEQ ID NO: 857530 - RNA, 19 nt, Artificial Sequence
  Description of Artificial Sequence: Synthetic oligonucleotide
  Sense strand starting at position 3680 of SEQ ID NO: 588331
ggaagaagugccugcugua

SEQ ID NO: 857531 - RNA, 19 nt, Artificial Sequence
  Description of Artificial Sequence: Synthetic oligonucleotide
  Antisense strand to SEQ ID NO: 857530
uacagcaggcacuucuucc

SEQ ID NO: 857532 - RNA, 19 nt, Artificial Sequence
  Description of Artificial Sequence: Synthetic oligonucleotide
  Sense strand starting at position 3723 of SEQ ID NO: 588331
auaaguaagggcgagaguu

SEQ ID NO: 857533 - RNA, 19 nt, Artificial Sequence
  Description of Artificial Sequence: Synthetic oligonucleotide
  Antisense strand to SEQ ID NO: 857532
aacucucgcccuuacuuau

SEQ ID NO: 857534 - RNA, 19 nt, Artificial Sequence
  Description of Artificial Sequence: Synthetic oligonucleotide
  Sense strand starting at position 3725 of SEQ ID NO: 588331
aaguaagggcgagaguuaa

SEQ ID NO: 857535 - RNA, 19 nt, Artificial Sequence
  Description of Artificial Sequence: Synthetic oligonucleotide
  Antisense strand to SEQ ID NO: 857534
uuaacucucgcccuuacuu

SEQ ID NO: 857536 - RNA, 19 nt, Artificial Sequence
  Description of Artificial Sequence: Synthetic oligonucleotide
  Sense strand starting at position 39 of SEQ ID NO: 588332
gaaagugugugagcacuga

SEQ ID NO: 857537 - RNA, 19 nt, Artificial Sequence
  Description of Artificial Sequence: Synthetic oligonucleotide
  Antisense strand to SEQ ID NO: 857536
ucagugcucacacacuuuc

SEQ ID NO: 857538 - RNA, 19 nt, Artificial Sequence
  Description of Artificial Sequence: Synthetic oligonucleotide
  Sense strand starting at position 43 of SEQ ID NO: 588332
gugugugagcacugaauau

SEQ ID NO: 857539 - RNA, 19 nt, Artificial Sequence
  Description of Artificial Sequence: Synthetic oligonucleotide
  Antisense strand to SEQ ID NO: 857538
auauucagugcucacacac

SEQ ID NO: 857540 - RNA, 19 nt, Artificial Sequence
  Description of Artificial Sequence: Synthetic oligonucleotide
  Sense strand starting at position 64 of SEQ ID NO: 588332
cugacuugauuguuccuga

SEQ ID NO: 857541 - RNA, 19 nt, Artificial Sequence
  Description of Artificial Sequence: Synthetic oligonucleotide
  Antisense strand to SEQ ID NO: 857540
ucaggaacaaucaagucag

SEQ ID NO: 857542 - RNA, 19 nt, Artificial Sequence
  Description of Artificial Sequence: Synthetic oligonucleotide
  Sense strand starting at position 65 of SEQ ID NO: 588332
ugacuugauuguuccugaa

SEQ ID NO: 857543 - RNA, 19 nt, Artificial Sequence
  Description of Artificial Sequence: Synthetic oligonucleotide
  Antisense strand to SEQ ID NO: 857542
uucaggaacaaucaaguca

SEQ ID NO: 857544 - RNA, 19 nt, Artificial Sequence
  Description of Artificial Sequence: Synthetic oligonucleotide
  Sense strand starting at position 67 of SEQ ID NO: 588332
acuugauuguuccugaaag

SEQ ID NO: 857545 - RNA, 19 nt, Artificial Sequence
  Description of Artificial Sequence: Synthetic oligonucleotide
  Antisense strand to SEQ ID NO: 857544
cuuucaggaacaaucaagu

SEQ ID NO: 857546 - RNA, 19 nt, Artificial Sequence
  Description of Artificial Sequence: Synthetic oligonucleotide
  Sense strand starting at position 350 of SEQ ID NO: 588332
uggccuuuaucuuccagau

SEQ ID NO: 857547 - RNA, 19 nt, Artificial Sequence
  Description of Artificial Sequence: Synthetic oligonucleotide
  Antisense strand to SEQ ID NO: 857546
aucuggaagauaaaggcca

SEQ ID NO: 857548 - RNA, 19 nt, Artificial Sequence
  Description of Artificial Sequence: Synthetic oligonucleotide
  Sense strand starting at position 354 of SEQ ID NO: 588332
cuuuaucuuccagauguuu

SEQ ID NO: 857549 - RNA, 19 nt, Artificial Sequence
  Description of Artificial Sequence: Synthetic oligonucleotide
  Antisense strand to SEQ ID NO: 857548
aaacaucuggaagauaaag

SEQ ID NO: 857550 - RNA, 19 nt, Artificial Sequence
  Description of Artificial Sequence: Synthetic oligonucleotide
  Sense strand starting at position 395 of SEQ ID NO: 588332
auaguuugcaagcgaacuu

SEQ ID NO: 857551 - RNA, 19 nt, Artificial Sequence
  Description of Artificial Sequence: Synthetic oligonucleotide
  Antisense strand to SEQ ID NO: 857550
aaguucgcuugcaaacuau

SEQ ID NO: 857552 - RNA, 19 nt, Artificial Sequence
  Description of Artificial Sequence: Synthetic oligonucleotide
  Sense strand starting at position 406 of SEQ ID NO: 588332
gcgaacuucccguaaguau

SEQ ID NO: 857553 - RNA, 19 nt, Artificial Sequence
  Description of Artificial Sequence: Synthetic oligonucleotide
  Antisense strand to SEQ ID NO: 857552
auacuuacgggaaguucgc

SEQ ID NO: 857554 - RNA, 19 nt, Artificial Sequence
  Description of Artificial Sequence: Synthetic oligonucleotide
  Sense strand starting at position 438 of SEQ ID NO: 588332
ccuuaaguguuguuaccuu

SEQ ID NO: 857555 - RNA, 19 nt, Artificial Sequence
  Description of Artificial Sequence: Synthetic oligonucleotide
  Antisense strand to SEQ ID NO: 857554
aagguaacaacacuuaagg

SEQ ID NO: 857556 - RNA, 19 nt, Artificial Sequence
  Description of Artificial Sequence: Synthetic oligonucleotide
  Sense strand starting at position 442 of SEQ ID NO: 588332
aaguguuguuaccuuagca

SEQ ID NO: 857557 - RNA, 19 nt, Artificial Sequence
  Description of Artificial Sequence: Synthetic oligonucleotide
  Antisense strand to SEQ ID NO: 857556
ugcuaagguaacaacacuu

SEQ ID NO: 857558 - RNA, 19 nt, Artificial Sequence
  Description of Artificial Sequence: Synthetic oligonucleotide
  Sense strand starting at position 513 of SEQ ID NO: 588332
ggguccacucagcaauaca

SEQ ID NO: 857559 - RNA, 19 nt, Artificial Sequence
  Description of Artificial Sequence: Synthetic oligonucleotide
  Antisense strand to SEQ ID NO: 857558
uguauugcugaguggaccc

SEQ ID NO: 857560 - RNA, 19 nt, Artificial Sequence
  Description of Artificial Sequence: Synthetic oligonucleotide
  Sense strand starting at position 549 of SEQ ID NO: 588332
cccaaagguuacuaagaca

SEQ ID NO: 857561 - RNA, 19 nt, Artificial Sequence
  Description of Artificial Sequence: Synthetic oligonucleotide
  Antisense strand to SEQ ID NO: 857560
ugucuuaguaaccuuuggg

SEQ ID NO: 857562 - RNA, 19 nt, Artificial Sequence
  Description of Artificial Sequence: Synthetic oligonucleotide
  Sense strand starting at position 658 of SEQ ID NO: 588332
gcgaaacgauucuugagaa

SEQ ID NO: 857563 - RNA, 19 nt, Artificial Sequence
  Description of Artificial Sequence: Synthetic oligonucleotide
  Antisense strand to SEQ ID NO: 857562
uucucaagaaucguuucgc

SEQ ID NO: 857564 - RNA, 19 nt, Artificial Sequence
  Description of Artificial Sequence: Synthetic oligonucleotide
  Sense strand starting at position 747 of SEQ ID NO: 588332
agcaauugauauucgaaug

SEQ ID NO: 857565 - RNA, 19 nt, Artificial Sequence
  Description of Artificial Sequence: Synthetic oligonucleotide
  Antisense strand to SEQ ID NO: 857564
cauucgaauaucaauugcu

SEQ ID NO: 857566 - RNA, 19 nt, Artificial Sequence
  Description of Artificial Sequence: Synthetic oligonucleotide
  Sense strand starting at position 774 of SEQ ID NO: 588332
uggacugauucgccguaag

SEQ ID NO: 857567 - RNA, 19 nt, Artificial Sequence
  Description of Artificial Sequence: Synthetic oligonucleotide
  Antisense strand to SEQ ID NO: 857566
cuuacggcgaaucagucca

SEQ ID NO: 857568 - RNA, 19 nt, Artificial Sequence
  Description of Artificial Sequence: Synthetic oligonucleotide
  Sense strand starting at position 906 of SEQ ID NO: 588332
agaaccguucuuugaggga

SEQ ID NO: 857569 - RNA, 19 nt, Artificial Sequence
  Description of Artificial Sequence: Synthetic oligonucleotide
  Antisense strand to SEQ ID NO: 857568
ucccucaaagaacgguucu

SEQ ID NO: 857570 - RNA, 19 nt, Artificial Sequence
  Description of Artificial Sequence: Synthetic oligonucleotide
  Sense strand starting at position 1010 of SEQ ID NO: 588332
ugucauaaagauggucuuu

SEQ ID NO: 857571 - RNA, 19 nt, Artificial Sequence
  Description of Artificial Sequence: Synthetic oligonucleotide
  Antisense strand to SEQ ID NO: 857570
aaagaccaucuuuaugaca

SEQ ID NO: 857572 - RNA, 19 nt, Artificial Sequence
  Description of Artificial Sequence: Synthetic oligonucleotide
  Sense strand starting at position 1012 of SEQ ID NO: 588332
ucauaaagauggucuuuaa

SEQ ID NO: 857573 - RNA, 19 nt, Artificial Sequence
  Description of Artificial Sequence: Synthetic oligonucleotide
  Antisense strand to SEQ ID NO: 857572
uuaaagaccaucuuuauga

SEQ ID NO: 857574 - RNA, 19 nt, Artificial Sequence
  Description of Artificial Sequence: Synthetic oligonucleotide
  Sense strand starting at position 1076 of SEQ ID NO: 588332
ugcucauagcucgcaucua

SEQ ID NO: 857575 - RNA, 19 nt, Artificial Sequence
  Description of Artificial Sequence: Synthetic oligonucleotide
  Antisense strand to SEQ ID NO: 857574
uagaugcgagcuaugagca

SEQ ID NO: 857576 - RNA, 19 nt, Artificial Sequence
  Description of Artificial Sequence: Synthetic oligonucleotide
  Sense strand starting at position 1109 of SEQ ID NO: 588332
cgcucuggcccugaaggau

SEQ ID NO: 857577 - RNA, 19 nt, Artificial Sequence
  Description of Artificial Sequence: Synthetic oligonucleotide
  Antisense strand to SEQ ID NO: 857576
auccuucagggccagagcg

SEQ ID NO: 857578 - RNA, 19 nt, Artificial Sequence
  Description of Artificial Sequence: Synthetic oligonucleotide
  Sense strand starting at position 1143 of SEQ ID NO: 588332
aaggaaaugccgugagaaa

SEQ ID NO: 857579 - RNA, 19 nt, Artificial Sequence
  Description of Artificial Sequence: Synthetic oligonucleotide
  Antisense strand to SEQ ID NO: 857578
uuucucacggcauuuccuu

SEQ ID NO: 857580 - RNA, 19 nt, Artificial Sequence
  Description of Artificial Sequence: Synthetic oligonucleotide
  Sense strand starting at position 1397 of SEQ ID NO: 588332
gcgcaaacccgagauguga

SEQ ID NO: 857581 - RNA, 19 nt, Artificial Sequence
  Description of Artificial Sequence: Synthetic oligonucleotide
  Antisense strand to SEQ ID NO: 857580
ucacaucucggguuugcgc

SEQ ID NO: 857582 - RNA, 19 nt, Artificial Sequence
  Description of Artificial Sequence: Synthetic oligonucleotide
  Sense strand starting at position 1534 of SEQ ID NO: 588332
gguguuaagucuccaaacg

SEQ ID NO: 857583 - RNA, 19 nt, Artificial Sequence
  Description of Artificial Sequence: Synthetic oligonucleotide
  Antisense strand to SEQ ID NO: 857582
cguuuggagacuuaacacc

SEQ ID NO: 857584 - RNA, 19 nt, Artificial Sequence
  Description of Artificial Sequence: Synthetic oligonucleotide
  Sense strand starting at position 1929 of SEQ ID NO: 588332
ggcugagcucuaggaacuu

SEQ ID NO: 857585 - RNA, 19 nt, Artificial Sequence
  Description of Artificial Sequence: Synthetic oligonucleotide
  Antisense strand to SEQ ID NO: 857584
aaguuccuagagcucagcc

SEQ ID NO: 857586 - RNA, 19 nt, Artificial Sequence
  Description of Artificial Sequence: Synthetic oligonucleotide
  Sense strand starting at position 1975 of SEQ ID NO: 588332
caguguucccgcccagagu

SEQ ID NO: 857587 - RNA, 19 nt, Artificial Sequence
  Description of Artificial Sequence: Synthetic oligonucleotide
  Antisense strand to SEQ ID NO: 857586
acucugggcgggaacacug

SEQ ID NO: 857588 - RNA, 19 nt, Artificial Sequence
  Description of Artificial Sequence: Synthetic oligonucleotide
  Sense strand starting at position 2788 of SEQ ID NO: 588332
gguccugucccuggacaga

SEQ ID NO: 857589 - RNA, 19 nt, Artificial Sequence
  Description of Artificial Sequence: Synthetic oligonucleotide
  Antisense strand to SEQ ID NO: 857588
ucuguccagggacaggacc

SEQ ID NO: 857590 - RNA, 19 nt, Artificial Sequence
  Description of Artificial Sequence: Synthetic oligonucleotide
  Sense strand starting at position 2863 of SEQ ID NO: 588332
uuuaaauaagcccagagua

SEQ ID NO: 857591 - RNA, 19 nt, Artificial Sequence
  Description of Artificial Sequence: Synthetic oligonucleotide
  Antisense strand to SEQ ID NO: 857590
uacucugggcuuauuuaaa

SEQ ID NO: 857592 - RNA, 19 nt, Artificial Sequence
  Description of Artificial Sequence: Synthetic oligonucleotide
  Sense strand starting at position 2919 of SEQ ID NO: 588332
uaggaaauccugcacucga

SEQ ID NO: 857593 - RNA, 19 nt, Artificial Sequence
  Description of Artificial Sequence: Synthetic oligonucleotide
  Antisense strand to SEQ ID NO: 857592
ucgagugcaggauuuccua

SEQ ID NO: 857594 - RNA, 19 nt, Artificial Sequence
  Description of Artificial Sequence: Synthetic oligonucleotide
  Sense strand starting at position 3169 of SEQ ID NO: 588332
cugcucggccgcuuaauua

SEQ ID NO: 857595 - RNA, 19 nt, Artificial Sequence
  Description of Artificial Sequence: Synthetic oligonucleotide
  Antisense strand to SEQ ID NO: 857594
uaauuaagcggccgagcag

SEQ ID NO: 857596 - RNA, 19 nt, Artificial Sequence
  Description of Artificial Sequence: Synthetic oligonucleotide
  Sense strand starting at position 3285 of SEQ ID NO: 588332
ccugaaauuguaggaggua

SEQ ID NO: 857597 - RNA, 19 nt, Artificial Sequence
  Description of Artificial Sequence: Synthetic oligonucleotide
  Antisense strand to SEQ ID NO: 857596
uaccuccuacaauuucagg

SEQ ID NO: 857598 - RNA, 19 nt, Artificial Sequence
  Description of Artificial Sequence: Synthetic oligonucleotide
  Sense strand starting at position 3344 of SEQ ID NO: 588332
gaacgugaccgagguuaca

SEQ ID NO: 857599 - RNA, 19 nt, Artificial Sequence
  Description of Artificial Sequence: Synthetic oligonucleotide
  Antisense strand to SEQ ID NO: 857598
uguaaccucggucacguuc

SEQ ID NO: 857600 - RNA, 19 nt, Artificial Sequence
  Description of Artificial Sequence: Synthetic oligonucleotide
  Sense strand starting at position 3370 of SEQ ID NO: 588332
gggcaugaugcagguuuga

SEQ ID NO: 857601 - RNA, 19 nt, Artificial Sequence
  Description of Artificial Sequence: Synthetic oligonucleotide
  Antisense strand to SEQ ID NO: 857600
ucaaaccugcaucaugccc

SEQ ID NO: 857602 - RNA, 19 nt, Artificial Sequence
  Description of Artificial Sequence: Synthetic oligonucleotide
  Sense strand starting at position 3517 of SEQ ID NO: 588332
ggcgaagucuaaucagcau

SEQ ID NO: 857603 - RNA, 19 nt, Artificial Sequence
  Description of Artificial Sequence: Synthetic oligonucleotide
  Antisense strand to SEQ ID NO: 857602
augcugauuagacuucgcc

SEQ ID NO: 857604 - RNA, 19 nt, Artificial Sequence
  Description of Artificial Sequence: Synthetic oligonucleotide
  Sense strand starting at position 3520 of SEQ ID NO: 588332
gaagucuaaucagcauagu

SEQ ID NO: 857605 - RNA, 19 nt, Artificial Sequence
  Description of Artificial Sequence: Synthetic oligonucleotide
  Antisense strand to SEQ ID NO: 857604
acuaugcugauuagacuuc

SEQ ID NO: 857606 - RNA, 19 nt, Artificial Sequence
  Description of Artificial Sequence: Synthetic oligonucleotide
  Sense strand starting at position 3523 of SEQ ID NO: 588332
gucuaaucagcauagugaa

SEQ ID NO: 857607 - RNA, 19 nt, Artificial Sequence
  Description of Artificial Sequence: Synthetic oligonucleotide
  Antisense strand to SEQ ID NO: 857606
uucacuaugcugauuagac

SEQ ID NO: 857608 - RNA, 19 nt, Artificial Sequence
  Description of Artificial Sequence: Synthetic oligonucleotide
  Sense strand starting at position 3582 of SEQ ID NO: 588332
ccuuaauuugugcgaccca

SEQ ID NO: 857609 - RNA, 19 nt, Artificial Sequence
  Description of Artificial Sequence: Synthetic oligonucleotide
  Antisense strand to SEQ ID NO: 857608
ugggucgcacaaauuaagg

SEQ ID NO: 857610 - RNA, 19 nt, Artificial Sequence
  Description of Artificial Sequence: Synthetic oligonucleotide
  Sense strand starting at position 3885 of SEQ ID NO: 588332
cuuccugacgcugacuaaa

SEQ ID NO: 857611 - RNA, 19 nt, Artificial Sequence
  Description of Artificial Sequence: Synthetic oligonucleotide
  Antisense strand to SEQ ID NO: 857610
uuuagucagcgucaggaag

SEQ ID NO: 857612 - RNA, 19 nt, Artificial Sequence
  Description of Artificial Sequence: Synthetic oligonucleotide
  Sense strand starting at position 3887 of SEQ ID NO: 588332
uccugacgcugacuaaauu

SEQ ID NO: 857613 - RNA, 19 nt, Artificial Sequence
  Description of Artificial Sequence: Synthetic oligonucleotide
  Antisense strand to SEQ ID NO: 857612
aauuuagucagcgucagga

SEQ ID NO: 857614 - RNA, 19 nt, Artificial Sequence
  Description of Artificial Sequence: Synthetic oligonucleotide
  Sense strand starting at position 3888 of SEQ ID NO: 588332
ccugacgcugacuaaauua

SEQ ID NO: 857615 - RNA, 19 nt, Artificial Sequence
  Description of Artificial Sequence: Synthetic oligonucleotide
  Antisense strand to SEQ ID NO: 857614
uaauuuagucagcgucagg

SEQ ID NO: 857616 - RNA, 19 nt, Artificial Sequence
  Description of Artificial Sequence: Synthetic oligonucleotide
  Sense strand starting at position 179 of SEQ ID NO: 588333
aguuguauagcuuucguau

SEQ ID NO: 857617 - RNA, 19 nt, Artificial Sequence
  Description of Artificial Sequence: Synthetic oligonucleotide
  Antisense strand to SEQ ID NO: 857616
auacgaaagcuauacaacu

SEQ ID NO: 857618 - RNA, 19 nt, Artificial Sequence
  Description of Artificial Sequence: Synthetic oligonucleotide
  Sense strand starting at position 180 of SEQ ID NO: 588333
guuguauagcuuucguauu

SEQ ID NO: 857619 - RNA, 19 nt, Artificial Sequence
  Description of Artificial Sequence: Synthetic oligonucleotide
  Antisense strand to SEQ ID NO: 857618
aauacgaaagcuauacaac

SEQ ID NO: 857620 - RNA, 19 nt, Artificial Sequence
  Description of Artificial Sequence: Synthetic oligonucleotide
  Sense strand starting at position 194 of SEQ ID NO: 588333
guauuaauucuguacagac

SEQ ID NO: 857621 - RNA, 19 nt, Artificial Sequence
  Description of Artificial Sequence: Synthetic oligonucleotide
  Antisense strand to SEQ ID NO: 857620
gucuguacagaauuaauac

SEQ ID NO: 857622 - RNA, 19 nt, Artificial Sequence
  Description of Artificial Sequence: Synthetic oligonucleotide
  Sense strand starting at position 244 of SEQ ID NO: 588333
ggcauaaauuaagcaacaa

SEQ ID NO: 857623 - RNA, 19 nt, Artificial Sequence
  Description of Artificial Sequence: Synthetic oligonucleotide
  Antisense strand to SEQ ID NO: 857622
uuguugcuuaauuuaugcc

SEQ ID NO: 857624 - RNA, 19 nt, Artificial Sequence
  Description of Artificial Sequence: Synthetic oligonucleotide
  Sense strand starting at position 632 of SEQ ID NO: 588333
ucucuuuggcaguagaaag

SEQ ID NO: 857625 - RNA, 19 nt, Artificial Sequence
  Description of Artificial Sequence: Synthetic oligonucleotide
  Antisense strand to SEQ ID NO: 857624
cuuucuacugccaaagaga

SEQ ID NO: 857626 - RNA, 19 nt, Artificial Sequence
  Description of Artificial Sequence: Synthetic oligonucleotide
  Sense strand starting at position 739 of SEQ ID NO: 588333
uucuccuggcgucaauuua

SEQ ID NO: 857627 - RNA, 19 nt, Artificial Sequence
  Description of Artificial Sequence: Synthetic oligonucleotide
  Antisense strand to SEQ ID NO: 857626
uaaauugacgccaggagaa

SEQ ID NO: 857628 - RNA, 19 nt, Artificial Sequence
  Description of Artificial Sequence: Synthetic oligonucleotide
  Sense strand starting at position 757 of SEQ ID NO: 588333
aacaauagcuauucgagga

SEQ ID NO: 857629 - RNA, 19 nt, Artificial Sequence
  Description of Artificial Sequence: Synthetic oligonucleotide
  Antisense strand to SEQ ID NO: 857628
uccucgaauagcuauuguu

SEQ ID NO: 857630 - RNA, 19 nt, Artificial Sequence
  Description of Artificial Sequence: Synthetic oligonucleotide
  Sense strand starting at position 1024 of SEQ ID NO: 588333
ccgguacaggcuuaagaau

SEQ ID NO: 857631 - RNA, 19 nt, Artificial Sequence
  Description of Artificial Sequence: Synthetic oligonucleotide
  Antisense strand to SEQ ID NO: 857630
auucuuaagccuguaccgg

SEQ ID NO: 857632 - RNA, 19 nt, Artificial Sequence
  Description of Artificial Sequence: Synthetic oligonucleotide
  Sense strand starting at position 1087 of SEQ ID NO: 588333
auuggaguccgugaaucag

SEQ ID NO: 857633 - RNA, 19 nt, Artificial Sequence
  Description of Artificial Sequence: Synthetic oligonucleotide
  Antisense strand to SEQ ID NO: 857632
cugauucacggacuccaau

SEQ ID NO: 857634 - RNA, 19 nt, Artificial Sequence
  Description of Artificial Sequence: Synthetic oligonucleotide
  Sense strand starting at position 1113 of SEQ ID NO: 588333
auacaaugaugaguucuga

SEQ ID NO: 857635 - RNA, 19 nt, Artificial Sequence
  Description of Artificial Sequence: Synthetic oligonucleotide
  Antisense strand to SEQ ID NO: 857634
ucagaacucaucauuguau

SEQ ID NO: 857636 - RNA, 19 nt, Artificial Sequence
  Description of Artificial Sequence: Synthetic oligonucleotide
  Sense strand starting at position 1531 of SEQ ID NO: 588333
auggacauuuacgaauauu

SEQ ID NO: 857637 - RNA, 19 nt, Artificial Sequence
  Description of Artificial Sequence: Synthetic oligonucleotide
  Antisense strand to SEQ ID NO: 857636
aauauucguaaauguccau

SEQ ID NO: 857638 - RNA, 19 nt, Artificial Sequence
  Description of Artificial Sequence: Synthetic oligonucleotide
  Sense strand starting at position 1614 of SEQ ID NO: 588333
guagcuuugaaaugagaca

SEQ ID NO: 857639 - RNA, 19 nt, Artificial Sequence
  Description of Artificial Sequence: Synthetic oligonucleotide
  Antisense strand to SEQ ID NO: 857638
ugucucauuucaaagcuac

SEQ ID NO: 857640 - RNA, 19 nt, Artificial Sequence
  Description of Artificial Sequence: Synthetic oligonucleotide
  Sense strand starting at position 1821 of SEQ ID NO: 588333
cuggauaguucucuuaaga

SEQ ID NO: 857641 - RNA, 19 nt, Artificial Sequence
  Description of Artificial Sequence: Synthetic oligonucleotide
  Antisense strand to SEQ ID NO: 857640
ucuuaagagaacuauccag

SEQ ID NO: 857642 - RNA, 19 nt, Artificial Sequence
  Description of Artificial Sequence: Synthetic oligonucleotide
  Sense strand starting at position 2200 of SEQ ID NO: 588333
gauuuauagcaccguauca

SEQ ID NO: 857643 - RNA, 19 nt, Artificial Sequence
  Description of Artificial Sequence: Synthetic oligonucleotide
  Antisense strand to SEQ ID NO: 857642
ugauacggugcuauaaauc

SEQ ID NO: 857644 - RNA, 19 nt, Artificial Sequence
  Description of Artificial Sequence: Synthetic oligonucleotide
  Sense strand starting at position 2389 of SEQ ID NO: 588333
cgcgugagacgauuggcua

SEQ ID NO: 857645 - RNA, 19 nt, Artificial Sequence
  Description of Artificial Sequence: Synthetic oligonucleotide
  Antisense strand to SEQ ID NO: 857644
uagccaaucgucucacgcg

SEQ ID NO: 857646 - RNA, 19 nt, Artificial Sequence
  Description of Artificial Sequence: Synthetic oligonucleotide
  Sense strand starting at position 2539 of SEQ ID NO: 588333
gaggguuggaacuguacua

SEQ ID NO: 857647 - RNA, 19 nt, Artificial Sequence
  Description of Artificial Sequence: Synthetic oligonucleotide
  Antisense strand to SEQ ID NO: 857646
uaguacaguuccaacccuc

SEQ ID NO: 857648 - RNA, 19 nt, Artificial Sequence
  Description of Artificial Sequence: Synthetic oligonucleotide
  Sense strand starting at position 2638 of SEQ ID NO: 588333
gcugcaucuguggcauauu

SEQ ID NO: 857649 - RNA, 19 nt, Artificial Sequence
  Description of Artificial Sequence: Synthetic oligonucleotide
  Antisense strand to SEQ ID NO: 857648
aauaugccacagaugcagc

SEQ ID NO: 857650 - RNA, 19 nt, Artificial Sequence
  Description of Artificial Sequence: Synthetic oligonucleotide
  Sense strand starting at position 2646 of SEQ ID NO: 588333
uguggcauauuucuuuaua

SEQ ID NO: 857651 - RNA, 19 nt, Artificial Sequence
  Description of Artificial Sequence: Synthetic oligonucleotide
  Antisense strand to SEQ ID NO: 857650
uauaaagaaauaugccaca

SEQ ID NO: 857652 - RNA, 19 nt, Artificial Sequence
  Description of Artificial Sequence: Synthetic oligonucleotide
  Sense strand starting at position 2667 of SEQ ID NO: 588333
auuuaacucuguccgguau

SEQ ID NO: 857653 - RNA, 19 nt, Artificial Sequence
  Description of Artificial Sequence: Synthetic oligonucleotide
  Antisense strand to SEQ ID NO: 857652
auaccggacagaguuaaau

SEQ ID NO: 857654 - RNA, 19 nt, Artificial Sequence
  Description of Artificial Sequence: Synthetic oligonucleotide
  Sense strand starting at position 2682 of SEQ ID NO: 588333
guauguaugagucauugag

SEQ ID NO: 857655 - RNA, 19 nt, Artificial Sequence
  Description of Artificial Sequence: Synthetic oligonucleotide
  Antisense strand to SEQ ID NO: 857654
cucaaugacucauacauac

SEQ ID NO: 857656 - RNA, 19 nt, Artificial Sequence
  Description of Artificial Sequence: Synthetic oligonucleotide
  Sense strand starting at position 2684 of SEQ ID NO: 588333
auguaugagucauugagag

SEQ ID NO: 857657 - RNA, 19 nt, Artificial Sequence
  Description of Artificial Sequence: Synthetic oligonucleotide
  Antisense strand to SEQ ID NO: 857656
cucucaaugacucauacau

SEQ ID NO: 857658 - RNA, 19 nt, Artificial Sequence
  Description of Artificial Sequence: Synthetic oligonucleotide
  Sense strand starting at position 2686 of SEQ ID NO: 588333
guaugagucauugagagcu

SEQ ID NO: 857659 - RNA, 19 nt, Artificial Sequence
  Description of Artificial Sequence: Synthetic oligonucleotide
  Antisense strand to SEQ ID NO: 857658
agcucucaaugacucauac

SEQ ID NO: 857660 - RNA, 19 nt, Artificial Sequence
  Description of Artificial Sequence: Synthetic oligonucleotide
  Sense strand starting at position 2711 of SEQ ID NO: 588333
cuuugaucugagugaaagg

SEQ ID NO: 857661 - RNA, 19 nt, Artificial Sequence
  Description of Artificial Sequence: Synthetic oligonucleotide
  Antisense strand to SEQ ID NO: 857660
ccuuucacucagaucaaag

SEQ ID NO: 857662 - RNA, 19 nt, Artificial Sequence
  Description of Artificial Sequence: Synthetic oligonucleotide
  Sense strand starting at position 2767 of SEQ ID NO: 588333
uucgauuuguguucaguac

SEQ ID NO: 857663 - RNA, 19 nt, Artificial Sequence
  Description of Artificial Sequence: Synthetic oligonucleotide
  Antisense strand to SEQ ID NO: 857662
guacugaacacaaaucgaa

SEQ ID NO: 857664 - RNA, 19 nt, Artificial Sequence
  Description of Artificial Sequence: Synthetic oligonucleotide
  Sense strand starting at position 2768 of SEQ ID NO: 588333
ucgauuuguguucaguacu

SEQ ID NO: 857665 - RNA, 19 nt, Artificial Sequence
  Description of Artificial Sequence: Synthetic oligonucleotide
  Antisense strand to SEQ ID NO: 857664
aguacugaacacaaaucga

SEQ ID NO: 857666 - RNA, 19 nt, Artificial Sequence
  Description of Artificial Sequence: Synthetic oligonucleotide
  Sense strand starting at position 2796 of SEQ ID NO: 588333
auuagauguuagguaauug

SEQ ID NO: 857667 - RNA, 19 nt, Artificial Sequence
  Description of Artificial Sequence: Synthetic oligonucleotide
  Antisense strand to SEQ ID NO: 857666
caauuaccuaacaucuaau

SEQ ID NO: 857668 - RNA, 19 nt, Artificial Sequence
  Description of Artificial Sequence: Synthetic oligonucleotide
  Sense strand starting at position 2797 of SEQ ID NO: 588333
uuagauguuagguaauugu

SEQ ID NO: 857669 - RNA, 19 nt, Artificial Sequence
  Description of Artificial Sequence: Synthetic oligonucleotide
  Antisense strand to SEQ ID NO: 857668
acaauuaccuaacaucuaa

SEQ ID NO: 857670 - RNA, 19 nt, Artificial Sequence
  Description of Artificial Sequence: Synthetic oligonucleotide
  Sense strand starting at position 2997 of SEQ ID NO: 588333
agagguauugaguagagcu

SEQ ID NO: 857671 - RNA, 19 nt, Artificial Sequence
  Description of Artificial Sequence: Synthetic oligonucleotide
  Antisense strand to SEQ ID NO: 857670
agcucuacucaauaccucu

SEQ ID NO: 857672 - RNA, 19 nt, Artificial Sequence
  Description of Artificial Sequence: Synthetic oligonucleotide
  Sense strand starting at position 2999 of SEQ ID NO: 588333
agguauugaguagagcuaa

SEQ ID NO: 857673 - RNA, 19 nt, Artificial Sequence
  Description of Artificial Sequence: Synthetic oligonucleotide
  Antisense strand to SEQ ID NO: 857672
uuagcucuacucaauaccu

SEQ ID NO: 857674 - RNA, 19 nt, Artificial Sequence
  Description of Artificial Sequence: Synthetic oligonucleotide
  Sense strand starting at position 3027 of SEQ ID NO: 588333
cuucgaggugucuaaugau

SEQ ID NO: 857675 - RNA, 19 nt, Artificial Sequence
  Description of Artificial Sequence: Synthetic oligonucleotide
  Antisense strand to SEQ ID NO: 857674
aucauuagacaccucgaag

SEQ ID NO: 857676 - RNA, 19 nt, Artificial Sequence
  Description of Artificial Sequence: Synthetic oligonucleotide
  Sense strand starting at position 3329 of SEQ ID NO: 588333
aagugagguccucaggauc

SEQ ID NO: 857677 - RNA, 19 nt, Artificial Sequence
  Description of Artificial Sequence: Synthetic oligonucleotide
  Antisense strand to SEQ ID NO: 857676
gauccugaggaccucacuu

SEQ ID NO: 857678 - RNA, 19 nt, Artificial Sequence
  Description of Artificial Sequence: Synthetic oligonucleotide
  Sense strand starting at position 3341 of SEQ ID NO: 588333
caggaucgucuggauguau

SEQ ID NO: 857679 - RNA, 19 nt, Artificial Sequence
  Description of Artificial Sequence: Synthetic oligonucleotide
  Antisense strand to SEQ ID NO: 857678
auacauccagacgauccug

SEQ ID NO: 857680 - RNA, 19 nt, Artificial Sequence
  Description of Artificial Sequence: Synthetic oligonucleotide
  Sense strand starting at position 3459 of SEQ ID NO: 588333
uucuuaccagaauguguaa

SEQ ID NO: 857681 - RNA, 19 nt, Artificial Sequence
  Description of Artificial Sequence: Synthetic oligonucleotide
  Antisense strand to SEQ ID NO: 857680
uuacacauucugguaagaa

SEQ ID NO: 857682 - RNA, 19 nt, Artificial Sequence
  Description of Artificial Sequence: Synthetic oligonucleotide
  Sense strand starting at position 3607 of SEQ ID NO: 588333
guaagaguuagagauugca

SEQ ID NO: 857683 - RNA, 19 nt, Artificial Sequence
  Description of Artificial Sequence: Synthetic oligonucleotide
  Antisense strand to SEQ ID NO: 857682
ugcaaucucuaacucuuac

SEQ ID NO: 857684 - RNA, 19 nt, Artificial Sequence
  Description of Artificial Sequence: Synthetic oligonucleotide
  Sense strand starting at position 3701 of SEQ ID NO: 588333
aaaucaguguucuuugaga

SEQ ID NO: 857685 - RNA, 19 nt, Artificial Sequence
  Description of Artificial Sequence: Synthetic oligonucleotide
  Antisense strand to SEQ ID NO: 857684
ucucaaagaacacugauuu

SEQ ID NO: 857686 - RNA, 19 nt, Artificial Sequence
  Description of Artificial Sequence: Synthetic oligonucleotide
  Sense strand starting at position 3762 of SEQ ID NO: 588333
ccuguuuaucucccgugua

SEQ ID NO: 857687 - RNA, 19 nt, Artificial Sequence
  Description of Artificial Sequence: Synthetic oligonucleotide
  Antisense strand to SEQ ID NO: 857686
uacacgggagauaaacagg

SEQ ID NO: 857688 - RNA, 19 nt, Artificial Sequence
  Description of Artificial Sequence: Synthetic oligonucleotide
  Sense strand starting at position 3806 of SEQ ID NO: 588333
guuacuuugcaugacaaua

SEQ ID NO: 857689 - RNA, 19 nt, Artificial Sequence
  Description of Artificial Sequence: Synthetic oligonucleotide
  Antisense strand to SEQ ID NO: 857688
uauugucaugcaaaguaac

SEQ ID NO: 857690 - RNA, 19 nt, Artificial Sequence
  Description of Artificial Sequence: Synthetic oligonucleotide
  Sense strand starting at position 3953 of SEQ ID NO: 588333
uucucuagaccugggugaa

SEQ ID NO: 857691 - RNA, 19 nt, Artificial Sequence
  Description of Artificial Sequence: Synthetic oligonucleotide
  Antisense strand to SEQ ID NO: 857690
uucacccaggucuagagaa

SEQ ID NO: 857692 - RNA, 19 nt, Artificial Sequence
  Description of Artificial Sequence: Synthetic oligonucleotide
  Sense strand starting at position 3954 of SEQ ID NO: 588333
ucucuagaccugggugaaa

SEQ ID NO: 857693 - RNA, 19 nt, Artificial Sequence
  Description of Artificial Sequence: Synthetic oligonucleotide
  Antisense strand to SEQ ID NO: 857692
uuucacccaggucuagaga

SEQ ID NO: 857694 - RNA, 19 nt, Artificial Sequence
  Description of Artificial Sequence: Synthetic oligonucleotide
  Sense strand starting at position 3956 of SEQ ID NO: 588333
ucuagaccugggugaaacu

SEQ ID NO: 857695 - RNA, 19 nt, Artificial Sequence
  Description of Artificial Sequence: Synthetic oligonucleotide
  Antisense strand to SEQ ID NO: 857694
aguuucacccaggucuaga

SEQ ID NO: 857696 - RNA, 19 nt, Artificial Sequence
  Description of Artificial Sequence: Synthetic oligonucleotide
  Sense strand starting at position 378 of SEQ ID NO: 588334
ccaggugucugccucgaaa

SEQ ID NO: 857697 - RNA, 19 nt, Artificial Sequence
  Description of Artificial Sequence: Synthetic oligonucleotide
  Antisense strand to SEQ ID NO: 857696
uuucgaggcagacaccugg

SEQ ID NO: 857698 - RNA, 19 nt, Artificial Sequence
  Description of Artificial Sequence: Synthetic oligonucleotide
  Sense strand starting at position 380 of SEQ ID NO: 588334
aggugucugccucgaaacu

SEQ ID NO: 857699 - RNA, 19 nt, Artificial Sequence
  Description of Artificial Sequence: Synthetic oligonucleotide
  Antisense strand to SEQ ID NO: 857698
aguuucgaggcagacaccu

SEQ ID NO: 857700 - RNA, 19 nt, Artificial Sequence
  Description of Artificial Sequence: Synthetic oligonucleotide
  Sense strand starting at position 609 of SEQ ID NO: 588334
gcggcuggagauugucaua

SEQ ID NO: 857701 - RNA, 19 nt, Artificial Sequence
  Description of Artificial Sequence: Synthetic oligonucleotide
  Antisense strand to SEQ ID NO: 857700
uaugacaaucuccagccgc

SEQ ID NO: 857702 - RNA, 19 nt, Artificial Sequence
  Description of Artificial Sequence: Synthetic oligonucleotide
  Sense strand starting at position 612 of SEQ ID NO: 588334
gcuggagauugucauagga

SEQ ID NO: 857703 - RNA, 19 nt, Artificial Sequence
  Description of Artificial Sequence: Synthetic oligonucleotide
  Antisense strand to SEQ ID NO: 857702
uccuaugacaaucuccagc

SEQ ID NO: 857704 - RNA, 19 nt, Artificial Sequence
  Description of Artificial Sequence: Synthetic oligonucleotide
  Sense strand starting at position 614 of SEQ ID NO: 588334
uggagauugucauaggagc

SEQ ID NO: 857705 - RNA, 19 nt, Artificial Sequence
  Description of Artificial Sequence: Synthetic oligonucleotide
  Antisense strand to SEQ ID NO: 857704
gcuccuaugacaaucucca

SEQ ID NO: 857706 - RNA, 19 nt, Artificial Sequence
  Description of Artificial Sequence: Synthetic oligonucleotide
  Sense strand starting at position 616 of SEQ ID NO: 588334
gagauugucauaggagcug

SEQ ID NO: 857707 - RNA, 19 nt, Artificial Sequence
  Description of Artificial Sequence: Synthetic oligonucleotide
  Antisense strand to SEQ ID NO: 857706
cagcuccuaugacaaucuc

SEQ ID NO: 857708 - RNA, 19 nt, Artificial Sequence
  Description of Artificial Sequence: Synthetic oligonucleotide
  Sense strand starting at position 631 of SEQ ID NO: 588334
gcuggaacccuauggugaa

SEQ ID NO: 857709 - RNA, 19 nt, Artificial Sequence
  Description of Artificial Sequence: Synthetic oligonucleotide
  Antisense strand to SEQ ID NO: 857708
uucaccauaggguuccagc

SEQ ID NO: 857710 - RNA, 19 nt, Artificial Sequence
  Description of Artificial Sequence: Synthetic oligonucleotide
  Sense strand starting at position 771 of SEQ ID NO: 588334
auccuacauuacugugagu

SEQ ID NO: 857711 - RNA, 19 nt, Artificial Sequence
  Description of Artificial Sequence: Synthetic oligonucleotide
  Antisense strand to SEQ ID NO: 857710
acucacaguaauguaggau

SEQ ID NO: 857712 - RNA, 19 nt, Artificial Sequence
  Description of Artificial Sequence: Synthetic oligonucleotide
  Sense strand starting at position 773 of SEQ ID NO: 588334
ccuacauuacugugaguug

SEQ ID NO: 857713 - RNA, 19 nt, Artificial Sequence
  Description of Artificial Sequence: Synthetic oligonucleotide
  Antisense strand to SEQ ID NO: 857712
caacucacaguaauguagg

SEQ ID NO: 857714 - RNA, 19 nt, Artificial Sequence
  Description of Artificial Sequence: Synthetic oligonucleotide
  Sense strand starting at position 774 of SEQ ID NO: 588334
cuacauuacugugaguugu

SEQ ID NO: 857715 - RNA, 19 nt, Artificial Sequence
  Description of Artificial Sequence: Synthetic oligonucleotide
  Antisense strand to SEQ ID NO: 857714
acaacucacaguaauguag

SEQ ID NO: 857716 - RNA, 19 nt, Artificial Sequence
  Description of Artificial Sequence: Synthetic oligonucleotide
  Sense strand starting at position 776 of SEQ ID NO: 588334
acauuacugugaguuguau

SEQ ID NO: 857717 - RNA, 19 nt, Artificial Sequence
  Description of Artificial Sequence: Synthetic oligonucleotide
  Antisense strand to SEQ ID NO: 857716
auacaacucacaguaaugu

SEQ ID NO: 857718 - RNA, 19 nt, Artificial Sequence
  Description of Artificial Sequence: Synthetic oligonucleotide
  Sense strand starting at position 778 of SEQ ID NO: 588334
auuacugugaguuguauau

SEQ ID NO: 857719 - RNA, 19 nt, Artificial Sequence
  Description of Artificial Sequence: Synthetic oligonucleotide
  Antisense strand to SEQ ID NO: 857718
auauacaacucacaguaau

SEQ ID NO: 857720 - RNA, 19 nt, Artificial Sequence
  Description of Artificial Sequence: Synthetic oligonucleotide
  Sense strand starting at position 780 of SEQ ID NO: 588334
uacugugaguuguauauuu

SEQ ID NO: 857721 - RNA, 19 nt, Artificial Sequence
  Description of Artificial Sequence: Synthetic oligonucleotide
  Antisense strand to SEQ ID NO: 857720
aaauauacaacucacagua

SEQ ID NO: 857722 - RNA, 19 nt, Artificial Sequence
  Description of Artificial Sequence: Synthetic oligonucleotide
  Sense strand starting at position 966 of SEQ ID NO: 588334
gccuucuucugcuguguga

SEQ ID NO: 857723 - RNA, 19 nt, Artificial Sequence
  Description of Artificial Sequence: Synthetic oligonucleotide
  Antisense strand to SEQ ID NO: 857722
ucacacagcagaagaaggc

SEQ ID NO: 857724 - RNA, 19 nt, Artificial Sequence
  Description of Artificial Sequence: Synthetic oligonucleotide
  Sense strand starting at position 968 of SEQ ID NO: 588334
cuucuucugcugugugaca

SEQ ID NO: 857725 - RNA, 19 nt, Artificial Sequence
  Description of Artificial Sequence: Synthetic oligonucleotide
  Antisense strand to SEQ ID NO: 857724
ugucacacagcagaagaag

SEQ ID NO: 857726 - RNA, 19 nt, Artificial Sequence
  Description of Artificial Sequence: Synthetic oligonucleotide
  Sense strand starting at position 994 of SEQ ID NO: 588334
cgucacuuugccucuguga

SEQ ID NO: 857727 - RNA, 19 nt, Artificial Sequence
  Description of Artificial Sequence: Synthetic oligonucleotide
  Antisense strand to SEQ ID NO: 857726
ucacagaggcaaagugacg

SEQ ID NO: 857728 - RNA, 19 nt, Artificial Sequence
  Description of Artificial Sequence: Synthetic oligonucleotide
  Sense strand starting at position 1042 of SEQ ID NO: 588334
gaaggugaauaacgguauu

SEQ ID NO: 857729 - RNA, 19 nt, Artificial Sequence
  Description of Artificial Sequence: Synthetic oligonucleotide
  Antisense strand to SEQ ID NO: 857728
aauaccguuauucaccuuc

SEQ ID NO: 857730 - RNA, 19 nt, Artificial Sequence
  Description of Artificial Sequence: Synthetic oligonucleotide
  Sense strand starting at position 1045 of SEQ ID NO: 588334
ggugaauaacgguauuauc

SEQ ID NO: 857731 - RNA, 19 nt, Artificial Sequence
  Description of Artificial Sequence: Synthetic oligonucleotide
  Antisense strand to SEQ ID NO: 857730
gauaauaccguuauucacc

SEQ ID NO: 857732 - RNA, 19 nt, Artificial Sequence
  Description of Artificial Sequence: Synthetic oligonucleotide
  Sense strand starting at position 1183 of SEQ ID NO: 588334
acgggaugucacugcgaug

SEQ ID NO: 857733 - RNA, 19 nt, Artificial Sequence
  Description of Artificial Sequence: Synthetic oligonucleotide
  Antisense strand to SEQ ID NO: 857732
caucgcagugacaucccgu

SEQ ID NO: 857734 - RNA, 19 nt, Artificial Sequence
  Description of Artificial Sequence: Synthetic oligonucleotide
  Sense strand starting at position 2010 of SEQ ID NO: 588334
uccuuucuuugcgcauuua

SEQ ID NO: 857735 - RNA, 19 nt, Artificial Sequence
  Description of Artificial Sequence: Synthetic oligonucleotide
  Antisense strand to SEQ ID NO: 857734
uaaaugcgcaaagaaagga

SEQ ID NO: 857736 - RNA, 19 nt, Artificial Sequence
  Description of Artificial Sequence: Synthetic oligonucleotide
  Sense strand starting at position 2011 of SEQ ID NO: 588334
ccuuucuuugcgcauuuaa

SEQ ID NO: 857737 - RNA, 19 nt, Artificial Sequence
  Description of Artificial Sequence: Synthetic oligonucleotide
  Antisense strand to SEQ ID NO: 857736
uuaaaugcgcaaagaaagg

SEQ ID NO: 857738 - RNA, 19 nt, Artificial Sequence
  Description of Artificial Sequence: Synthetic oligonucleotide
  Sense strand starting at position 2163 of SEQ ID NO: 588334
gggagcuccugcuuaauac

SEQ ID NO: 857739 - RNA, 19 nt, Artificial Sequence
  Description of Artificial Sequence: Synthetic oligonucleotide
  Antisense strand to SEQ ID NO: 857738
guauuaagcaggagcuccc

SEQ ID NO: 857740 - RNA, 19 nt, Artificial Sequence
  Description of Artificial Sequence: Synthetic oligonucleotide
  Sense strand starting at position 2226 of SEQ ID NO: 588334
ugcuuagucucacccucua

SEQ ID NO: 857741 - RNA, 19 nt, Artificial Sequence
  Description of Artificial Sequence: Synthetic oligonucleotide
  Antisense strand to SEQ ID NO: 857740
uagagggugagacuaagca

SEQ ID NO: 857742 - RNA, 19 nt, Artificial Sequence
  Description of Artificial Sequence: Synthetic oligonucleotide
  Sense strand starting at position 2292 of SEQ ID NO: 588334
ccagguauaucuggcccua

SEQ ID NO: 857743 - RNA, 19 nt, Artificial Sequence
  Description of Artificial Sequence: Synthetic oligonucleotide
  Antisense strand to SEQ ID NO: 857742
uagggccagauauaccugg

SEQ ID NO: 857744 - RNA, 19 nt, Artificial Sequence
  Description of Artificial Sequence: Synthetic oligonucleotide
  Sense strand starting at position 2342 of SEQ ID NO: 588334
ccgcaauucuaccagauug

SEQ ID NO: 857745 - RNA, 19 nt, Artificial Sequence
  Description of Artificial Sequence: Synthetic oligonucleotide
  Antisense strand to SEQ ID NO: 857744
caaucugguagaauugcgg

SEQ ID NO: 857746 - RNA, 19 nt, Artificial Sequence
  Description of Artificial Sequence: Synthetic oligonucleotide
  Sense strand starting at position 2347 of SEQ ID NO: 588334
auucuaccagauuggcaaa

SEQ ID NO: 857747 - RNA, 19 nt, Artificial Sequence
  Description of Artificial Sequence: Synthetic oligonucleotide
  Antisense strand to SEQ ID NO: 857746
uuugccaaucugguagaau

SEQ ID NO: 857748 - RNA, 19 nt, Artificial Sequence
  Description of Artificial Sequence: Synthetic oligonucleotide
  Sense strand starting at position 2671 of SEQ ID NO: 588334
ggcccagauuggcaaagau

SEQ ID NO: 857749 - RNA, 19 nt, Artificial Sequence
  Description of Artificial Sequence: Synthetic oligonucleotide
  Antisense strand to SEQ ID NO: 857748
aucuuugccaaucugggcc

SEQ ID NO: 857750 - RNA, 19 nt, Artificial Sequence
  Description of Artificial Sequence: Synthetic oligonucleotide
  Sense strand starting at position 2871 of SEQ ID NO: 588334
aaggaucucgaacgcaaau

SEQ ID NO: 857751 - RNA, 19 nt, Artificial Sequence
  Description of Artificial Sequence: Synthetic oligonucleotide
  Antisense strand to SEQ ID NO: 857750
auuugcguucgagauccuu

SEQ ID NO: 857752 - RNA, 19 nt, Artificial Sequence
  Description of Artificial Sequence: Synthetic oligonucleotide
  Sense strand starting at position 2873 of SEQ ID NO: 588334
ggaucucgaacgcaaauau

SEQ ID NO: 857753 - RNA, 19 nt, Artificial Sequence
  Description of Artificial Sequence: Synthetic oligonucleotide
  Antisense strand to SEQ ID NO: 857752
auauuugcguucgagaucc

SEQ ID NO: 857754 - RNA, 19 nt, Artificial Sequence
  Description of Artificial Sequence: Synthetic oligonucleotide
  Sense strand starting at position 3309 of SEQ ID NO: 588334
cgaacuaacuccugaccuu

SEQ ID NO: 857755 - RNA, 19 nt, Artificial Sequence
  Description of Artificial Sequence: Synthetic oligonucleotide
  Antisense strand to SEQ ID NO: 857754
aaggucaggaguuaguucg

SEQ ID NO: 857756 - RNA, 19 nt, Artificial Sequence
  Description of Artificial Sequence: Synthetic oligonucleotide
  Sense strand starting at position 3772 of SEQ ID NO: 588334
aguggaccgugccuguaau

SEQ ID NO: 857757 - RNA, 19 nt, Artificial Sequence
  Description of Artificial Sequence: Synthetic oligonucleotide
  Antisense strand to SEQ ID NO: 857756
auuacaggcacgguccacu

SEQ ID NO: 857758 - RNA, 19 nt, Artificial Sequence
  Description of Artificial Sequence: Synthetic oligonucleotide
  Sense strand starting at position 3970 of SEQ ID NO: 588334
aagugaucugugggccuca

SEQ ID NO: 857759 - RNA, 19 nt, Artificial Sequence
  Description of Artificial Sequence: Synthetic oligonucleotide
  Antisense strand to SEQ ID NO: 857758
ugaggcccacagaucacuu

SEQ ID NO: 857760 - RNA, 19 nt, Artificial Sequence
  Description of Artificial Sequence: Synthetic oligonucleotide
  Sense strand starting at position 2 of SEQ ID NO: 588335
gaguacuuacgcugugaaa

SEQ ID NO: 857761 - RNA, 19 nt, Artificial Sequence
  Description of Artificial Sequence: Synthetic oligonucleotide
  Antisense strand to SEQ ID NO: 857760
uuucacagcguaaguacuc

SEQ ID NO: 857762 - RNA, 19 nt, Artificial Sequence
  Description of Artificial Sequence: Synthetic oligonucleotide
  Sense strand starting at position 73 of SEQ ID NO: 588335
gcauaucacugccuuugau

SEQ ID NO: 857763 - RNA, 19 nt, Artificial Sequence
  Description of Artificial Sequence: Synthetic oligonucleotide
  Antisense strand to SEQ ID NO: 857762
aucaaaggcagugauaugc

SEQ ID NO: 857764 - RNA, 19 nt, Artificial Sequence
  Description of Artificial Sequence: Synthetic oligonucleotide
  Sense strand starting at position 106 of SEQ ID NO: 588335
cccuaaaugucugcaugga

SEQ ID NO: 857765 - RNA, 19 nt, Artificial Sequence
  Description of Artificial Sequence: Synthetic oligonucleotide
  Antisense strand to SEQ ID NO: 857764
uccaugcagacauuuaggg

SEQ ID NO: 857766 - RNA, 19 nt, Artificial Sequence
  Description of Artificial Sequence: Synthetic oligonucleotide
  Sense strand starting at position 142 of SEQ ID NO: 588335
agaggaagagaguguuacu

SEQ ID NO: 857767 - RNA, 19 nt, Artificial Sequence
  Description of Artificial Sequence: Synthetic oligonucleotide
  Antisense strand to SEQ ID NO: 857766
aguaacacucucuuccucu

SEQ ID NO: 857768 - RNA, 19 nt, Artificial Sequence
  Description of Artificial Sequence: Synthetic oligonucleotide
  Sense strand starting at position 154 of SEQ ID NO: 588335
uguuacugcagcgacaaau

SEQ ID NO: 857769 - RNA, 19 nt, Artificial Sequence
  Description of Artificial Sequence: Synthetic oligonucleotide
  Antisense strand to SEQ ID NO: 857768
auuugucgcugcaguaaca

SEQ ID NO: 857770 - RNA, 19 nt, Artificial Sequence
  Description of Artificial Sequence: Synthetic oligonucleotide
  Sense strand starting at position 207 of SEQ ID NO: 588335
cuccgucuuagccauguga

SEQ ID NO: 857771 - RNA, 19 nt, Artificial Sequence
  Description of Artificial Sequence: Synthetic oligonucleotide
  Antisense strand to SEQ ID NO: 857770
ucacauggcuaagacggag

SEQ ID NO: 857772 - RNA, 19 nt, Artificial Sequence
  Description of Artificial Sequence: Synthetic oligonucleotide
  Sense strand starting at position 222 of SEQ ID NO: 588335
gugaacuuggcagguuaga

SEQ ID NO: 857773 - RNA, 19 nt, Artificial Sequence
  Description of Artificial Sequence: Synthetic oligonucleotide
  Antisense strand to SEQ ID NO: 857772
ucuaaccugccaaguucac

SEQ ID NO: 857774 - RNA, 19 nt, Artificial Sequence
  Description of Artificial Sequence: Synthetic oligonucleotide
  Sense strand starting at position 315 of SEQ ID NO: 588335
gaggguucgcccuaucaca

SEQ ID NO: 857775 - RNA, 19 nt, Artificial Sequence
  Description of Artificial Sequence: Synthetic oligonucleotide
  Antisense strand to SEQ ID NO: 857774
ugugauagggcgaacccuc

SEQ ID NO: 857776 - RNA, 19 nt, Artificial Sequence
  Description of Artificial Sequence: Synthetic oligonucleotide
  Sense strand starting at position 331 of SEQ ID NO: 588335
acaccuuacuaggagcaaa

SEQ ID NO: 857777 - RNA, 19 nt, Artificial Sequence
  Description of Artificial Sequence: Synthetic oligonucleotide
  Antisense strand to SEQ ID NO: 857776
uuugcuccuaguaaggugu

SEQ ID NO: 857778 - RNA, 19 nt, Artificial Sequence
  Description of Artificial Sequence: Synthetic oligonucleotide
  Sense strand starting at position 371 of SEQ ID NO: 588335
ggagucaaaucccugcuaa

SEQ ID NO: 857779 - RNA, 19 nt, Artificial Sequence
  Description of Artificial Sequence: Synthetic oligonucleotide
  Antisense strand to SEQ ID NO: 857778
uuagcagggauuugacucc

SEQ ID NO: 857780 - RNA, 19 nt, Artificial Sequence
  Description of Artificial Sequence: Synthetic oligonucleotide
  Sense strand starting at position 372 of SEQ ID NO: 588335
gagucaaaucccugcuaag

SEQ ID NO: 857781 - RNA, 19 nt, Artificial Sequence
  Description of Artificial Sequence: Synthetic oligonucleotide
  Antisense strand to SEQ ID NO: 857780
cuuagcagggauuugacuc

SEQ ID NO: 857782 - RNA, 19 nt, Artificial Sequence
  Description of Artificial Sequence: Synthetic oligonucleotide
  Sense strand starting at position 393 of SEQ ID NO: 588335
acuuaauaugucugagacu

SEQ ID NO: 857783 - RNA, 19 nt, Artificial Sequence
  Description of Artificial Sequence: Synthetic oligonucleotide
  Antisense strand to SEQ ID NO: 857782
agucucagacauauuaagu

SEQ ID NO: 857784 - RNA, 19 nt, Artificial Sequence
  Description of Artificial Sequence: Synthetic oligonucleotide
  Sense strand starting at position 407 of SEQ ID NO: 588335
agacucaguuuccugucaa

SEQ ID NO: 857785 - RNA, 19 nt, Artificial Sequence
  Description of Artificial Sequence: Synthetic oligonucleotide
  Antisense strand to SEQ ID NO: 857784
uugacaggaaacugagucu

SEQ ID NO: 857786 - RNA, 19 nt, Artificial Sequence
  Description of Artificial Sequence: Synthetic oligonucleotide
  Sense strand starting at position 1020 of SEQ ID NO: 588335
agggaagucuguucucuuc

SEQ ID NO: 857787 - RNA, 19 nt, Artificial Sequence
  Description of Artificial Sequence: Synthetic oligonucleotide
  Antisense strand to SEQ ID NO: 857786
gaagagaacagacuucccu

SEQ ID NO: 857788 - RNA, 19 nt, Artificial Sequence
  Description of Artificial Sequence: Synthetic oligonucleotide
  Sense strand starting at position 1088 of SEQ ID NO: 588335
ggaagugccuaugugagau

SEQ ID NO: 857789 - RNA, 19 nt, Artificial Sequence
  Description of Artificial Sequence: Synthetic oligonucleotide
  Antisense strand to SEQ ID NO: 857788
aucucacauaggcacuucc

SEQ ID NO: 857790 - RNA, 19 nt, Artificial Sequence
  Description of Artificial Sequence: Synthetic oligonucleotide
  Sense strand starting at position 1092 of SEQ ID NO: 588335
gugccuaugugagauuuga

SEQ ID NO: 857791 - RNA, 19 nt, Artificial Sequence
  Description of Artificial Sequence: Synthetic oligonucleotide
  Antisense strand to SEQ ID NO: 857790
ucaaaucucacauaggcac

SEQ ID NO: 857792 - RNA, 19 nt, Artificial Sequence
  Description of Artificial Sequence: Synthetic oligonucleotide
  Sense strand starting at position 1215 of SEQ ID NO: 588335
cacagcauucugggaccua

SEQ ID NO: 857793 - RNA, 19 nt, Artificial Sequence
  Description of Artificial Sequence: Synthetic oligonucleotide
  Antisense strand to SEQ ID NO: 857792
uaggucccagaaugcugug

SEQ ID NO: 857794 - RNA, 19 nt, Artificial Sequence
  Description of Artificial Sequence: Synthetic oligonucleotide
  Sense strand starting at position 1275 of SEQ ID NO: 588335
gccagagaccaggguuaaa

SEQ ID NO: 857795 - RNA, 19 nt, Artificial Sequence
  Description of Artificial Sequence: Synthetic oligonucleotide
  Antisense strand to SEQ ID NO: 857794
uuuaacccuggucucuggc

SEQ ID NO: 857796 - RNA, 19 nt, Artificial Sequence
  Description of Artificial Sequence: Synthetic oligonucleotide
  Sense strand starting at position 1610 of SEQ ID NO: 588335
ggccuuauccuguguccag

SEQ ID NO: 857797 - RNA, 19 nt, Artificial Sequence
  Description of Artificial Sequence: Synthetic oligonucleotide
  Antisense strand to SEQ ID NO: 857796
cuggacacaggauaaggcc

SEQ ID NO: 857798 - RNA, 19 nt, Artificial Sequence
  Description of Artificial Sequence: Synthetic oligonucleotide
  Sense strand starting at position 1782 of SEQ ID NO: 588335
ggaguugcuguccgaagga

SEQ ID NO: 857799 - RNA, 19 nt, Artificial Sequence
  Description of Artificial Sequence: Synthetic oligonucleotide
  Antisense strand to SEQ ID NO: 857798
uccuucggacagcaacucc

SEQ ID NO: 857800 - RNA, 19 nt, Artificial Sequence
  Description of Artificial Sequence: Synthetic oligonucleotide
  Sense strand starting at position 1866 of SEQ ID NO: 588335
gcagaugaaggcuguggua

SEQ ID NO: 857801 - RNA, 19 nt, Artificial Sequence
  Description of Artificial Sequence: Synthetic oligonucleotide
  Antisense strand to SEQ ID NO: 857800
uaccacagccuucaucugc

SEQ ID NO: 857802 - RNA, 19 nt, Artificial Sequence
  Description of Artificial Sequence: Synthetic oligonucleotide
  Sense strand starting at position 1941 of SEQ ID NO: 588335
aaaugcgcuuccuuagaga

SEQ ID NO: 857803 - RNA, 19 nt, Artificial Sequence
  Description of Artificial Sequence: Synthetic oligonucleotide
  Antisense strand to SEQ ID NO: 857802
ucucuaaggaagcgcauuu

SEQ ID NO: 857804 - RNA, 19 nt, Artificial Sequence
  Description of Artificial Sequence: Synthetic oligonucleotide
  Sense strand starting at position 2201 of SEQ ID NO: 588335
gccggucuuggcuaaagua

SEQ ID NO: 857805 - RNA, 19 nt, Artificial Sequence
  Description of Artificial Sequence: Synthetic oligonucleotide
  Antisense strand to SEQ ID NO: 857804
uacuuuagccaagaccggc

SEQ ID NO: 857806 - RNA, 19 nt, Artificial Sequence
  Description of Artificial Sequence: Synthetic oligonucleotide
  Sense strand starting at position 2245 of SEQ ID NO: 588335
ugagcucacugaucccauu

SEQ ID NO: 857807 - RNA, 19 nt, Artificial Sequence
  Description of Artificial Sequence: Synthetic oligonucleotide
  Antisense strand to SEQ ID NO: 857806
aaugggaucagugagcuca

SEQ ID NO: 857808 - RNA, 19 nt, Artificial Sequence
  Description of Artificial Sequence: Synthetic oligonucleotide
  Sense strand starting at position 2278 of SEQ ID NO: 588335
acagaaauccgauguguug

SEQ ID NO: 857809 - RNA, 19 nt, Artificial Sequence
  Description of Artificial Sequence: Synthetic oligonucleotide
  Antisense strand to SEQ ID NO: 857808
caacacaucggauuucugu

SEQ ID NO: 857810 - RNA, 19 nt, Artificial Sequence
  Description of Artificial Sequence: Synthetic oligonucleotide
  Sense strand starting at position 2281 of SEQ ID NO: 588335
gaaauccgauguguugaga

SEQ ID NO: 857811 - RNA, 19 nt, Artificial Sequence
  Description of Artificial Sequence: Synthetic oligonucleotide
  Antisense strand to SEQ ID NO: 857810
ucucaacacaucggauuuc

SEQ ID NO: 857812 - RNA, 19 nt, Artificial Sequence
  Description of Artificial Sequence: Synthetic oligonucleotide
  Sense strand starting at position 2284 of SEQ ID NO: 588335
auccgauguguugagauca

SEQ ID NO: 857813 - RNA, 19 nt, Artificial Sequence
  Description of Artificial Sequence: Synthetic oligonucleotide
  Antisense strand to SEQ ID NO: 857812
ugaucucaacacaucggau

SEQ ID NO: 857814 - RNA, 19 nt, Artificial Sequence
  Description of Artificial Sequence: Synthetic oligonucleotide
  Sense strand starting at position 2354 of SEQ ID NO: 588335
cgucuugucgggcaucaaa

SEQ ID NO: 857815 - RNA, 19 nt, Artificial Sequence
  Description of Artificial Sequence: Synthetic oligonucleotide
  Antisense strand to SEQ ID NO: 857814
uuugaugcccgacaagacg

SEQ ID NO: 857816 - RNA, 19 nt, Artificial Sequence
  Description of Artificial Sequence: Synthetic oligonucleotide
  Sense strand starting at position 3044 of SEQ ID NO: 588335
ccaagccauuaugagauuu

SEQ ID NO: 857817 - RNA, 19 nt, Artificial Sequence
  Description of Artificial Sequence: Synthetic oligonucleotide
  Antisense strand to SEQ ID NO: 857816
aaaucucauaauggcuugg

SEQ ID NO: 857818 - RNA, 19 nt, Artificial Sequence
  Description of Artificial Sequence: Synthetic oligonucleotide
  Sense strand starting at position 3052 of SEQ ID NO: 588335
uuaugagauuucugagggu

SEQ ID NO: 857819 - RNA, 19 nt, Artificial Sequence
  Description of Artificial Sequence: Synthetic oligonucleotide
  Antisense strand to SEQ ID NO: 857818
acccucagaaaucucauaa

SEQ ID NO: 857820 - RNA, 19 nt, Artificial Sequence
  Description of Artificial Sequence: Synthetic oligonucleotide
  Sense strand starting at position 3055 of SEQ ID NO: 588335
ugagauuucugagggucag

SEQ ID NO: 857821 - RNA, 19 nt, Artificial Sequence
  Description of Artificial Sequence: Synthetic oligonucleotide
  Antisense strand to SEQ ID NO: 857820
cugacccucagaaaucuca

SEQ ID NO: 857822 - RNA, 19 nt, Artificial Sequence
  Description of Artificial Sequence: Synthetic oligonucleotide
  Sense strand starting at position 3084 of SEQ ID NO: 588335
cacugagcccugggacaua

SEQ ID NO: 857823 - RNA, 19 nt, Artificial Sequence
  Description of Artificial Sequence: Synthetic oligonucleotide
  Antisense strand to SEQ ID NO: 857822
uaugucccagggcucagug

SEQ ID NO: 857824 - RNA, 19 nt, Artificial Sequence
  Description of Artificial Sequence: Synthetic oligonucleotide
  Sense strand starting at position 3291 of SEQ ID NO: 588335
aggccugcccuuugaaaga

SEQ ID NO: 857825 - RNA, 19 nt, Artificial Sequence
  Description of Artificial Sequence: Synthetic oligonucleotide
  Antisense strand to SEQ ID NO: 857824
ucuuucaaagggcaggccu

SEQ ID NO: 857826 - RNA, 19 nt, Artificial Sequence
  Description of Artificial Sequence: Synthetic oligonucleotide
  Sense strand starting at position 3481 of SEQ ID NO: 588335
ccucaaaugccaggacuuu

SEQ ID NO: 857827 - RNA, 19 nt, Artificial Sequence
  Description of Artificial Sequence: Synthetic oligonucleotide
  Antisense strand to SEQ ID NO: 857826
aaaguccuggcauuugagg

SEQ ID NO: 857828 - RNA, 19 nt, Artificial Sequence
  Description of Artificial Sequence: Synthetic oligonucleotide
  Sense strand starting at position 3521 of SEQ ID NO: 588335
cauggagaguucuugagca

SEQ ID NO: 857829 - RNA, 19 nt, Artificial Sequence
  Description of Artificial Sequence: Synthetic oligonucleotide
  Antisense strand to SEQ ID NO: 857828
ugcucaagaacucuccaug

SEQ ID NO: 857830 - RNA, 19 nt, Artificial Sequence
  Description of Artificial Sequence: Synthetic oligonucleotide
  Sense strand starting at position 3523 of SEQ ID NO: 588335
uggagaguucuugagcaga

SEQ ID NO: 857831 - RNA, 19 nt, Artificial Sequence
  Description of Artificial Sequence: Synthetic oligonucleotide
  Antisense strand to SEQ ID NO: 857830
ucugcucaagaacucucca

SEQ ID NO: 857832 - RNA, 19 nt, Artificial Sequence
  Description of Artificial Sequence: Synthetic oligonucleotide
  Sense strand starting at position 3525 of SEQ ID NO: 588335
gagaguucuugagcagaag

SEQ ID NO: 857833 - RNA, 19 nt, Artificial Sequence
  Description of Artificial Sequence: Synthetic oligonucleotide
  Antisense strand to SEQ ID NO: 857832
cuucugcucaagaacucuc

SEQ ID NO: 857834 - RNA, 19 nt, Artificial Sequence
  Description of Artificial Sequence: Synthetic oligonucleotide
  Sense strand starting at position 3569 of SEQ ID NO: 588335
aggccaaaucuuugugugu

SEQ ID NO: 857835 - RNA, 19 nt, Artificial Sequence
  Description of Artificial Sequence: Synthetic oligonucleotide
  Antisense strand to SEQ ID NO: 857834
acacacaaagauuuggccu

SEQ ID NO: 857836 - RNA, 19 nt, Artificial Sequence
  Description of Artificial Sequence: Synthetic oligonucleotide
  Sense strand starting at position 3618 of SEQ ID NO: 588335
gaagguucuucucccugga

SEQ ID NO: 857837 - RNA, 19 nt, Artificial Sequence
  Description of Artificial Sequence: Synthetic oligonucleotide
  Antisense strand to SEQ ID NO: 857836
uccagggagaagaaccuuc

SEQ ID NO: 857838 - RNA, 19 nt, Artificial Sequence
  Description of Artificial Sequence: Synthetic oligonucleotide
  Sense strand starting at position 3930 of SEQ ID NO: 588335
gggagaguguccucuccca

SEQ ID NO: 857839 - RNA, 19 nt, Artificial Sequence
  Description of Artificial Sequence: Synthetic oligonucleotide
  Antisense strand to SEQ ID NO: 857838
ugggagaggacacucuccc

SEQ ID NO: 857840 - RNA, 19 nt, Artificial Sequence
  Description of Artificial Sequence: Synthetic oligonucleotide
  Sense strand starting at position 263 of SEQ ID NO: 588336
ccuuauaugucgucucucu

SEQ ID NO: 857841 - RNA, 19 nt, Artificial Sequence
  Description of Artificial Sequence: Synthetic oligonucleotide
  Antisense strand to SEQ ID NO: 857840
agagagacgacauauaagg

SEQ ID NO: 857842 - RNA, 19 nt, Artificial Sequence
  Description of Artificial Sequence: Synthetic oligonucleotide
  Sense strand starting at position 308 of SEQ ID NO: 588336
ucuggagugccuggacaua

SEQ ID NO: 857843 - RNA, 19 nt, Artificial Sequence
  Description of Artificial Sequence: Synthetic oligonucleotide
  Antisense strand to SEQ ID NO: 857842
uauguccaggcacuccaga

SEQ ID NO: 857844 - RNA, 19 nt, Artificial Sequence
  Description of Artificial Sequence: Synthetic oligonucleotide
  Sense strand starting at position 386 of SEQ ID NO: 588336
gcccaaugcuuaccagcua

SEQ ID NO: 857845 - RNA, 19 nt, Artificial Sequence
  Description of Artificial Sequence: Synthetic oligonucleotide
  Antisense strand to SEQ ID NO: 857844
uagcugguaagcauugggc

SEQ ID NO: 857846 - RNA, 19 nt, Artificial Sequence
  Description of Artificial Sequence: Synthetic oligonucleotide
  Sense strand starting at position 405 of SEQ ID NO: 588336
uguggcucuggugaaugau

SEQ ID NO: 857847 - RNA, 19 nt, Artificial Sequence
  Description of Artificial Sequence: Synthetic oligonucleotide
  Antisense strand to SEQ ID NO: 857846
aucauucaccagagccaca

SEQ ID NO: 857848 - RNA, 19 nt, Artificial Sequence
  Description of Artificial Sequence: Synthetic oligonucleotide
  Sense strand starting at position 852 of SEQ ID NO: 588336
gccggcagcuuucucuuaa

SEQ ID NO: 857849 - RNA, 19 nt, Artificial Sequence
  Description of Artificial Sequence: Synthetic oligonucleotide
  Antisense strand to SEQ ID NO: 857848
uuaagagaaagcugccggc

SEQ ID NO: 857850 - RNA, 19 nt, Artificial Sequence
  Description of Artificial Sequence: Synthetic oligonucleotide
  Sense strand starting at position 853 of SEQ ID NO: 588336
ccggcagcuuucucuuaau

SEQ ID NO: 857851 - RNA, 19 nt, Artificial Sequence
  Description of Artificial Sequence: Synthetic oligonucleotide
  Antisense strand to SEQ ID NO: 857850
auuaagagaaagcugccgg

SEQ ID NO: 857852 - RNA, 19 nt, Artificial Sequence
  Description of Artificial Sequence: Synthetic oligonucleotide
  Sense strand starting at position 891 of SEQ ID NO: 588336
ucagucacuguagaauuga

SEQ ID NO: 857853 - RNA, 19 nt, Artificial Sequence
  Description of Artificial Sequence: Synthetic oligonucleotide
  Antisense strand to SEQ ID NO: 857852
ucaauucuacagugacuga

SEQ ID NO: 857854 - RNA, 19 nt, Artificial Sequence
  Description of Artificial Sequence: Synthetic oligonucleotide
  Sense strand starting at position 899 of SEQ ID NO: 588336
uguagaauugacuguucua

SEQ ID NO: 857855 - RNA, 19 nt, Artificial Sequence
  Description of Artificial Sequence: Synthetic oligonucleotide
  Antisense strand to SEQ ID NO: 857854
uagaacagucaauucuaca

SEQ ID NO: 857856 - RNA, 19 nt, Artificial Sequence
  Description of Artificial Sequence: Synthetic oligonucleotide
  Sense strand starting at position 902 of SEQ ID NO: 588336
agaauugacuguucuaagg

SEQ ID NO: 857857 - RNA, 19 nt, Artificial Sequence
  Description of Artificial Sequence: Synthetic oligonucleotide
  Antisense strand to SEQ ID NO: 857856
ccuuagaacagucaauucu

SEQ ID NO: 857858 - RNA, 19 nt, Artificial Sequence
  Description of Artificial Sequence: Synthetic oligonucleotide
  Sense strand starting at position 1099 of SEQ ID NO: 588336
gcagguuccuuggcuguua

SEQ ID NO: 857859 - RNA, 19 nt, Artificial Sequence
  Description of Artificial Sequence: Synthetic oligonucleotide
  Antisense strand to SEQ ID NO: 857858
uaacagccaaggaaccugc

SEQ ID NO: 857860 - RNA, 19 nt, Artificial Sequence
  Description of Artificial Sequence: Synthetic oligonucleotide
  Sense strand starting at position 1240 of SEQ ID NO: 588336
cagugucuggccugcagau

SEQ ID NO: 857861 - RNA, 19 nt, Artificial Sequence
  Description of Artificial Sequence: Synthetic oligonucleotide
  Antisense strand to SEQ ID NO: 857860
aucugcaggccagacacug

SEQ ID NO: 857862 - RNA, 19 nt, Artificial Sequence
  Description of Artificial Sequence: Synthetic oligonucleotide
  Sense strand starting at position 1242 of SEQ ID NO: 588336
gugucuggccugcagauua

SEQ ID NO: 857863 - RNA, 19 nt, Artificial Sequence
  Description of Artificial Sequence: Synthetic oligonucleotide
  Antisense strand to SEQ ID NO: 857862
uaaucugcaggccagacac

SEQ ID NO: 857864 - RNA, 19 nt, Artificial Sequence
  Description of Artificial Sequence: Synthetic oligonucleotide
  Sense strand starting at position 1396 of SEQ ID NO: 588336
aagccuggccauuauguaa

SEQ ID NO: 857865 - RNA, 19 nt, Artificial Sequence
  Description of Artificial Sequence: Synthetic oligonucleotide
  Antisense strand to SEQ ID NO: 857864
uuacauaauggccaggcuu

SEQ ID NO: 857866 - RNA, 19 nt, Artificial Sequence
  Description of Artificial Sequence: Synthetic oligonucleotide
  Sense strand starting at position 1409 of SEQ ID NO: 588336
auguaaugaucagauaaca

SEQ ID NO: 857867 - RNA, 19 nt, Artificial Sequence
  Description of Artificial Sequence: Synthetic oligonucleotide
  Antisense strand to SEQ ID NO: 857866
uguuaucugaucauuacau

SEQ ID NO: 857868 - RNA, 19 nt, Artificial Sequence
  Description of Artificial Sequence: Synthetic oligonucleotide
  Sense strand starting at position 1808 of SEQ ID NO: 588336
gccagauggccuggaucaa

SEQ ID NO: 857869 - RNA, 19 nt, Artificial Sequence
  Description of Artificial Sequence: Synthetic oligonucleotide
  Antisense strand to SEQ ID NO: 857868
uugauccaggccaucuggc

SEQ ID NO: 857870 - RNA, 19 nt, Artificial Sequence
  Description of Artificial Sequence: Synthetic oligonucleotide
  Sense strand starting at position 1850 of SEQ ID NO: 588336
gcuggucaccuugagcaga

SEQ ID NO: 857871 - RNA, 19 nt, Artificial Sequence
  Description of Artificial Sequence: Synthetic oligonucleotide
  Antisense strand to SEQ ID NO: 857870
ucugcucaaggugaccagc

SEQ ID NO: 857872 - RNA, 19 nt, Artificial Sequence
  Description of Artificial Sequence: Synthetic oligonucleotide
  Sense strand starting at position 1956 of SEQ ID NO: 588336
ggcagcuuuacacgaguga

SEQ ID NO: 857873 - RNA, 19 nt, Artificial Sequence
  Description of Artificial Sequence: Synthetic oligonucleotide
  Antisense strand to SEQ ID NO: 857872
ucacucguguaaagcugcc

SEQ ID NO: 857874 - RNA, 19 nt, Artificial Sequence
  Description of Artificial Sequence: Synthetic oligonucleotide
  Sense strand starting at position 1957 of SEQ ID NO: 588336
gcagcuuuacacgagugaa

SEQ ID NO: 857875 - RNA, 19 nt, Artificial Sequence
  Description of Artificial Sequence: Synthetic oligonucleotide
  Antisense strand to SEQ ID NO: 857874
uucacucguguaaagcugc

SEQ ID NO: 857876 - RNA, 19 nt, Artificial Sequence
  Description of Artificial Sequence: Synthetic oligonucleotide
  Sense strand starting at position 1960 of SEQ ID NO: 588336
gcuuuacacgagugaacuc

SEQ ID NO: 857877 - RNA, 19 nt, Artificial Sequence
  Description of Artificial Sequence: Synthetic oligonucleotide
  Antisense strand to SEQ ID NO: 857876
gaguucacucguguaaagc

SEQ ID NO: 857878 - RNA, 19 nt, Artificial Sequence
  Description of Artificial Sequence: Synthetic oligonucleotide
  Sense strand starting at position 2105 of SEQ ID NO: 588336
gugucacggccuggauuua

SEQ ID NO: 857879 - RNA, 19 nt, Artificial Sequence
  Description of Artificial Sequence: Synthetic oligonucleotide
  Antisense strand to SEQ ID NO: 857878
uaaauccaggccgugacac

SEQ ID NO: 857880 - RNA, 19 nt, Artificial Sequence
  Description of Artificial Sequence: Synthetic oligonucleotide
  Sense strand starting at position 2167 of SEQ ID NO: 588336
cugagugugucaguuugau

SEQ ID NO: 857881 - RNA, 19 nt, Artificial Sequence
  Description of Artificial Sequence: Synthetic oligonucleotide
  Antisense strand to SEQ ID NO: 857880
aucaaacugacacacucag

SEQ ID NO: 857882 - RNA, 19 nt, Artificial Sequence
  Description of Artificial Sequence: Synthetic oligonucleotide
  Sense strand starting at position 2197 of SEQ ID NO: 588336
uguugagugccugguacua

SEQ ID NO: 857883 - RNA, 19 nt, Artificial Sequence
  Description of Artificial Sequence: Synthetic oligonucleotide
  Antisense strand to SEQ ID NO: 857882
uaguaccaggcacucaaca

SEQ ID NO: 857884 - RNA, 19 nt, Artificial Sequence
  Description of Artificial Sequence: Synthetic oligonucleotide
  Sense strand starting at position 2228 of SEQ ID NO: 588336
agacacagaagcugugaau

SEQ ID NO: 857885 - RNA, 19 nt, Artificial Sequence
  Description of Artificial Sequence: Synthetic oligonucleotide
  Antisense strand to SEQ ID NO: 857884
auucacagcuucugugucu

SEQ ID NO: 857886 - RNA, 19 nt, Artificial Sequence
  Description of Artificial Sequence: Synthetic oligonucleotide
  Sense strand starting at position 2231 of SEQ ID NO: 588336
cacagaagcugugaauauu

SEQ ID NO: 857887 - RNA, 19 nt, Artificial Sequence
  Description of Artificial Sequence: Synthetic oligonucleotide
  Antisense strand to SEQ ID NO: 857886
aauauucacagcuucugug

SEQ ID NO: 857888 - RNA, 19 nt, Artificial Sequence
  Description of Artificial Sequence: Synthetic oligonucleotide
  Sense strand starting at position 2234 of SEQ ID NO: 588336
agaagcugugaauauuauu

SEQ ID NO: 857889 - RNA, 19 nt, Artificial Sequence
  Description of Artificial Sequence: Synthetic oligonucleotide
  Antisense strand to SEQ ID NO: 857888
aauaauauucacagcuucu

SEQ ID NO: 857890 - RNA, 19 nt, Artificial Sequence
  Description of Artificial Sequence: Synthetic oligonucleotide
  Sense strand starting at position 2253 of SEQ ID NO: 588336
ucaucauacuaggacagau

SEQ ID NO: 857891 - RNA, 19 nt, Artificial Sequence
  Description of Artificial Sequence: Synthetic oligonucleotide
  Antisense strand to SEQ ID NO: 857890
aucuguccuaguaugauga

SEQ ID NO: 857892 - RNA, 19 nt, Artificial Sequence
  Description of Artificial Sequence: Synthetic oligonucleotide
  Sense strand starting at position 2564 of SEQ ID NO: 588336
ggguccuucuugcugcaau

SEQ ID NO: 857893 - RNA, 19 nt, Artificial Sequence
  Description of Artificial Sequence: Synthetic oligonucleotide
  Antisense strand to SEQ ID NO: 857892
auugcagcaagaaggaccc

SEQ ID NO: 857894 - RNA, 19 nt, Artificial Sequence
  Description of Artificial Sequence: Synthetic oligonucleotide
  Sense strand starting at position 2919 of SEQ ID NO: 588336
caagcaggccaguaaauua

SEQ ID NO: 857895 - RNA, 19 nt, Artificial Sequence
  Description of Artificial Sequence: Synthetic oligonucleotide
  Antisense strand to SEQ ID NO: 857894
uaauuuacuggccugcuug

SEQ ID NO: 857896 - RNA, 19 nt, Artificial Sequence
  Description of Artificial Sequence: Synthetic oligonucleotide
  Sense strand starting at position 2987 of SEQ ID NO: 588336
acuggugacuacuaucaca

SEQ ID NO: 857897 - RNA, 19 nt, Artificial Sequence
  Description of Artificial Sequence: Synthetic oligonucleotide
  Antisense strand to SEQ ID NO: 857896
ugugauaguagucaccagu

SEQ ID NO: 857898 - RNA, 19 nt, Artificial Sequence
  Description of Artificial Sequence: Synthetic oligonucleotide
  Sense strand starting at position 2990 of SEQ ID NO: 588336
ggugacuacuaucacaauu

SEQ ID NO: 857899 - RNA, 19 nt, Artificial Sequence
  Description of Artificial Sequence: Synthetic oligonucleotide
  Antisense strand to SEQ ID NO: 857898
aauugugauaguagucacc

SEQ ID NO: 857900 - RNA, 19 nt, Artificial Sequence
  Description of Artificial Sequence: Synthetic oligonucleotide
  Sense strand starting at position 3093 of SEQ ID NO: 588336
acacucauccuuuguuuga

SEQ ID NO: 857901 - RNA, 19 nt, Artificial Sequence
  Description of Artificial Sequence: Synthetic oligonucleotide
  Antisense strand to SEQ ID NO: 857900
ucaaacaaaggaugagugu

SEQ ID NO: 857902 - RNA, 19 nt, Artificial Sequence
  Description of Artificial Sequence: Synthetic oligonucleotide
  Sense strand starting at position 3470 of SEQ ID NO: 588336
gccagucccuccuuucuua

SEQ ID NO: 857903 - RNA, 19 nt, Artificial Sequence
  Description of Artificial Sequence: Synthetic oligonucleotide
  Antisense strand to SEQ ID NO: 857902
uaagaaaggagggacuggc

SEQ ID NO: 857904 - RNA, 19 nt, Artificial Sequence
  Description of Artificial Sequence: Synthetic oligonucleotide
  Sense strand starting at position 3502 of SEQ ID NO: 588336
uuggguguccuuggagaac

SEQ ID NO: 857905 - RNA, 19 nt, Artificial Sequence
  Description of Artificial Sequence: Synthetic oligonucleotide
  Antisense strand to SEQ ID NO: 857904
guucuccaaggacacccaa

SEQ ID NO: 857906 - RNA, 19 nt, Artificial Sequence
  Description of Artificial Sequence: Synthetic oligonucleotide
  Sense strand starting at position 3548 of SEQ ID NO: 588336
uuugauuugucaguguguc

SEQ ID NO: 857907 - RNA, 19 nt, Artificial Sequence
  Description of Artificial Sequence: Synthetic oligonucleotide
  Antisense strand to SEQ ID NO: 857906
gacacacugacaaaucaaa

SEQ ID NO: 857908 - RNA, 19 nt, Artificial Sequence
  Description of Artificial Sequence: Synthetic oligonucleotide
  Sense strand starting at position 3549 of SEQ ID NO: 588336
uugauuugucagugugucu

SEQ ID NO: 857909 - RNA, 19 nt, Artificial Sequence
  Description of Artificial Sequence: Synthetic oligonucleotide
  Antisense strand to SEQ ID NO: 857908
agacacacugacaaaucaa

SEQ ID NO: 857910 - RNA, 19 nt, Artificial Sequence
  Description of Artificial Sequence: Synthetic oligonucleotide
  Sense strand starting at position 3631 of SEQ ID NO: 588336
ucaguuaguccagggcuca

SEQ ID NO: 857911 - RNA, 19 nt, Artificial Sequence
  Description of Artificial Sequence: Synthetic oligonucleotide
  Antisense strand to SEQ ID NO: 857910
ugagcccuggacuaacuga

SEQ ID NO: 857912 - RNA, 19 nt, Artificial Sequence
  Description of Artificial Sequence: Synthetic oligonucleotide
  Sense strand starting at position 3746 of SEQ ID NO: 588336
aguuuaacuuccucauggu

SEQ ID NO: 857913 - RNA, 19 nt, Artificial Sequence
  Description of Artificial Sequence: Synthetic oligonucleotide
  Antisense strand to SEQ ID NO: 857912
accaugaggaaguuaaacu

SEQ ID NO: 857914 - RNA, 19 nt, Artificial Sequence
  Description of Artificial Sequence: Synthetic oligonucleotide
  Sense strand starting at position 3747 of SEQ ID NO: 588336
guuuaacuuccucaugguu

SEQ ID NO: 857915 - RNA, 19 nt, Artificial Sequence
  Description of Artificial Sequence: Synthetic oligonucleotide
  Antisense strand to SEQ ID NO: 857914
aaccaugaggaaguuaaac

SEQ ID NO: 857916 - RNA, 19 nt, Artificial Sequence
  Description of Artificial Sequence: Synthetic oligonucleotide
  Sense strand starting at position 3838 of SEQ ID NO: 588336
gacucauccuggucaugug

SEQ ID NO: 857917 - RNA, 19 nt, Artificial Sequence
  Description of Artificial Sequence: Synthetic oligonucleotide
  Antisense strand to SEQ ID NO: 857916
cacaugaccaggaugaguc

SEQ ID NO: 857918 - RNA, 19 nt, Artificial Sequence
  Description of Artificial Sequence: Synthetic oligonucleotide
  Sense strand starting at position 3854 of SEQ ID NO: 588336
gugcuuugaccucacaaac

SEQ ID NO: 857919 - RNA, 19 nt, Artificial Sequence
  Description of Artificial Sequence: Synthetic oligonucleotide
  Antisense strand to SEQ ID NO: 857918
guuugugaggucaaagcac

SEQ ID NO: 857920 - RNA, 19 nt, Artificial Sequence
  Description of Artificial Sequence: Synthetic oligonucleotide
  Sense strand starting at position 77 of SEQ ID NO: 588337
cuauuauugccauggguuc

SEQ ID NO: 857921 - RNA, 19 nt, Artificial Sequence
  Description of Artificial Sequence: Synthetic oligonucleotide
  Antisense strand to SEQ ID NO: 857920
gaacccauggcaauaauag

SEQ ID NO: 857922 - RNA, 19 nt, Artificial Sequence
  Description of Artificial Sequence: Synthetic oligonucleotide
  Sense strand starting at position 347 of SEQ ID NO: 588337
ggcugaacucugggauccu

SEQ ID NO: 857923 - RNA, 19 nt, Artificial Sequence
  Description of Artificial Sequence: Synthetic oligonucleotide
  Antisense strand to SEQ ID NO: 857922
aggaucccagaguucagcc

SEQ ID NO: 857924 - RNA, 19 nt, Artificial Sequence
  Description of Artificial Sequence: Synthetic oligonucleotide
  Sense strand starting at position 774 of SEQ ID NO: 588337
cagugauuccugggcagug

SEQ ID NO: 857925 - RNA, 19 nt, Artificial Sequence
  Description of Artificial Sequence: Synthetic oligonucleotide
  Antisense strand to SEQ ID NO: 857924
cacugcccaggaaucacug

SEQ ID NO: 857926 - RNA, 19 nt, Artificial Sequence
  Description of Artificial Sequence: Synthetic oligonucleotide
  Sense strand starting at position 792 of SEQ ID NO: 588337
ggagaugucuaccugcagu

SEQ ID NO: 857927 - RNA, 19 nt, Artificial Sequence
  Description of Artificial Sequence: Synthetic oligonucleotide
  Antisense strand to SEQ ID NO: 857926
acugcagguagacaucucc

SEQ ID NO: 857928 - RNA, 19 nt, Artificial Sequence
  Description of Artificial Sequence: Synthetic oligonucleotide
  Sense strand starting at position 916 of SEQ ID NO: 588337
ucuggccucccuggugaaa

SEQ ID NO: 857929 - RNA, 19 nt, Artificial Sequence
  Description of Artificial Sequence: Synthetic oligonucleotide
  Antisense strand to SEQ ID NO: 857928
uuucaccagggaggccaga

SEQ ID NO: 857930 - RNA, 19 nt, Artificial Sequence
  Description of Artificial Sequence: Synthetic oligonucleotide
  Sense strand starting at position 1464 of SEQ ID NO: 588337
cugaguaugucuccucuau

SEQ ID NO: 857931 - RNA, 19 nt, Artificial Sequence
  Description of Artificial Sequence: Synthetic oligonucleotide
  Antisense strand to SEQ ID NO: 857930
auagaggagacauacucag

SEQ ID NO: 857932 - RNA, 19 nt, Artificial Sequence
  Description of Artificial Sequence: Synthetic oligonucleotide
  Sense strand starting at position 1466 of SEQ ID NO: 588337
gaguaugucuccucuaugu

SEQ ID NO: 857933 - RNA, 19 nt, Artificial Sequence
  Description of Artificial Sequence: Synthetic oligonucleotide
  Antisense strand to SEQ ID NO: 857932
acauagaggagacauacuc

SEQ ID NO: 857934 - RNA, 19 nt, Artificial Sequence
  Description of Artificial Sequence: Synthetic oligonucleotide
  Sense strand starting at position 1468 of SEQ ID NO: 588337
guaugucuccucuaugucu

SEQ ID NO: 857935 - RNA, 19 nt, Artificial Sequence
  Description of Artificial Sequence: Synthetic oligonucleotide
  Antisense strand to SEQ ID NO: 857934
agacauagaggagacauac

SEQ ID NO: 857936 - RNA, 19 nt, Artificial Sequence
  Description of Artificial Sequence: Synthetic oligonucleotide
  Sense strand starting at position 1728 of SEQ ID NO: 588337
cccuucuuaccugaguuga

SEQ ID NO: 857937 - RNA, 19 nt, Artificial Sequence
  Description of Artificial Sequence: Synthetic oligonucleotide
  Antisense strand to SEQ ID NO: 857936
ucaacucagguaagaaggg

SEQ ID NO: 857938 - RNA, 19 nt, Artificial Sequence
  Description of Artificial Sequence: Synthetic oligonucleotide
  Sense strand starting at position 2509 of SEQ ID NO: 588337
aaguaagucauccggagga

SEQ ID NO: 857939 - RNA, 19 nt, Artificial Sequence
  Description of Artificial Sequence: Synthetic oligonucleotide
  Antisense strand to SEQ ID NO: 857938
uccuccggaugacuuacuu

SEQ ID NO: 857940 - RNA, 19 nt, Artificial Sequence
  Description of Artificial Sequence: Synthetic oligonucleotide
  Sense strand starting at position 2511 of SEQ ID NO: 588337
guaagucauccggaggaag

SEQ ID NO: 857941 - RNA, 19 nt, Artificial Sequence
  Description of Artificial Sequence: Synthetic oligonucleotide
  Antisense strand to SEQ ID NO: 857940
cuuccuccggaugacuuac

SEQ ID NO: 857942 - RNA, 19 nt, Artificial Sequence
  Description of Artificial Sequence: Synthetic oligonucleotide
  Sense strand starting at position 2663 of SEQ ID NO: 588337
ggcccuaagaggugugaaa

SEQ ID NO: 857943 - RNA, 19 nt, Artificial Sequence
  Description of Artificial Sequence: Synthetic oligonucleotide
  Antisense strand to SEQ ID NO: 857942
uuucacaccucuuagggcc

SEQ ID NO: 857944 - RNA, 19 nt, Artificial Sequence
  Description of Artificial Sequence: Synthetic oligonucleotide
  Sense strand starting at position 2717 of SEQ ID NO: 588337
ugaguuccuacccaguguu

SEQ ID NO: 857945 - RNA, 19 nt, Artificial Sequence
  Description of Artificial Sequence: Synthetic oligonucleotide
  Antisense strand to SEQ ID NO: 857944
aacacuggguaggaacuca

SEQ ID NO: 857946 - RNA, 19 nt, Artificial Sequence
  Description of Artificial Sequence: Synthetic oligonucleotide
  Sense strand starting at position 2781 of SEQ ID NO: 588337
uggaguguccugagcgaug

SEQ ID NO: 857947 - RNA, 19 nt, Artificial Sequence
  Description of Artificial Sequence: Synthetic oligonucleotide
  Antisense strand to SEQ ID NO: 857946
caucgcucaggacacucca

SEQ ID NO: 857948 - RNA, 19 nt, Artificial Sequence
  Description of Artificial Sequence: Synthetic oligonucleotide
  Sense strand starting at position 2833 of SEQ ID NO: 588337
uggaaauccugccuugcca

SEQ ID NO: 857949 - RNA, 19 nt, Artificial Sequence
  Description of Artificial Sequence: Synthetic oligonucleotide
  Antisense strand to SEQ ID NO: 857948
uggcaaggcaggauuucca

SEQ ID NO: 857950 - RNA, 19 nt, Artificial Sequence
  Description of Artificial Sequence: Synthetic oligonucleotide
  Sense strand starting at position 2978 of SEQ ID NO: 588337
acaugcucuccuuggagga

SEQ ID NO: 857951 - RNA, 19 nt, Artificial Sequence
  Description of Artificial Sequence: Synthetic oligonucleotide
  Antisense strand to SEQ ID NO: 857950
uccuccaaggagagcaugu

SEQ ID NO: 857952 - RNA, 19 nt, Artificial Sequence
  Description of Artificial Sequence: Synthetic oligonucleotide
  Sense strand starting at position 2979 of SEQ ID NO: 588337
caugcucuccuuggaggau

SEQ ID NO: 857953 - RNA, 19 nt, Artificial Sequence
  Description of Artificial Sequence: Synthetic oligonucleotide
  Antisense strand to SEQ ID NO: 857952
auccuccaaggagagcaug

SEQ ID NO: 857954 - RNA, 19 nt, Artificial Sequence
  Description of Artificial Sequence: Synthetic oligonucleotide
  Sense strand starting at position 2994 of SEQ ID NO: 588337
ggaucacaucccugaagcu

SEQ ID NO: 857955 - RNA, 19 nt, Artificial Sequence
  Description of Artificial Sequence: Synthetic oligonucleotide
  Antisense strand to SEQ ID NO: 857954
agcuucagggaugugaucc

SEQ ID NO: 857956 - RNA, 19 nt, Artificial Sequence
  Description of Artificial Sequence: Synthetic oligonucleotide
  Sense strand starting at position 3046 of SEQ ID NO: 588337
gccuuaacuucucucugga

SEQ ID NO: 857957 - RNA, 19 nt, Artificial Sequence
  Description of Artificial Sequence: Synthetic oligonucleotide
  Antisense strand to SEQ ID NO: 857956
uccagagagaaguuaaggc

SEQ ID NO: 857958 - RNA, 19 nt, Artificial Sequence
  Description of Artificial Sequence: Synthetic oligonucleotide
  Sense strand starting at position 3129 of SEQ ID NO: 588337
cuaacuuugugaucuugag

SEQ ID NO: 857959 - RNA, 19 nt, Artificial Sequence
  Description of Artificial Sequence: Synthetic oligonucleotide
  Antisense strand to SEQ ID NO: 857958
cucaagaucacaaaguuag

SEQ ID NO: 857960 - RNA, 19 nt, Artificial Sequence
  Description of Artificial Sequence: Synthetic oligonucleotide
  Sense strand starting at position 3206 of SEQ ID NO: 588337
accucucaggguuguuauu

SEQ ID NO: 857961 - RNA, 19 nt, Artificial Sequence
  Description of Artificial Sequence: Synthetic oligonucleotide
  Antisense strand to SEQ ID NO: 857960
aauaacaacccugagaggu

SEQ ID NO: 857962 - RNA, 19 nt, Artificial Sequence
  Description of Artificial Sequence: Synthetic oligonucleotide
  Sense strand starting at position 3342 of SEQ ID NO: 588337
ccuguaaauccagaugcua

SEQ ID NO: 857963 - RNA, 19 nt, Artificial Sequence
  Description of Artificial Sequence: Synthetic oligonucleotide
  Antisense strand to SEQ ID NO: 857962
uagcaucuggauuuacagg

SEQ ID NO: 857964 - RNA, 19 nt, Artificial Sequence
  Description of Artificial Sequence: Synthetic oligonucleotide
  Sense strand starting at position 3350 of SEQ ID NO: 588337
uccagaugcuaucuugaaa

SEQ ID NO: 857965 - RNA, 19 nt, Artificial Sequence
  Description of Artificial Sequence: Synthetic oligonucleotide
  Antisense strand to SEQ ID NO: 857964
uuucaagauagcaucugga

SEQ ID NO: 857966 - RNA, 19 nt, Artificial Sequence
  Description of Artificial Sequence: Synthetic oligonucleotide
  Sense strand starting at position 3406 of SEQ ID NO: 588337
guacuuagagacugucuaa

SEQ ID NO: 857967 - RNA, 19 nt, Artificial Sequence
  Description of Artificial Sequence: Synthetic oligonucleotide
  Antisense strand to SEQ ID NO: 857966
uuagacagucucuaaguac

SEQ ID NO: 857968 - RNA, 19 nt, Artificial Sequence
  Description of Artificial Sequence: Synthetic oligonucleotide
  Sense strand starting at position 3430 of SEQ ID NO: 588337
auuauuggauccuauagag

SEQ ID NO: 857969 - RNA, 19 nt, Artificial Sequence
  Description of Artificial Sequence: Synthetic oligonucleotide
  Antisense strand to SEQ ID NO: 857968
cucuauaggauccaauaau

SEQ ID NO: 857970 - RNA, 19 nt, Artificial Sequence
  Description of Artificial Sequence: Synthetic oligonucleotide
  Sense strand starting at position 3447 of SEQ ID NO: 588337
aguuuaccagaguggauua

SEQ ID NO: 857971 - RNA, 19 nt, Artificial Sequence
  Description of Artificial Sequence: Synthetic oligonucleotide
  Antisense strand to SEQ ID NO: 857970
uaauccacucugguaaacu

SEQ ID NO: 857972 - RNA, 19 nt, Artificial Sequence
  Description of Artificial Sequence: Synthetic oligonucleotide
  Sense strand starting at position 3500 of SEQ ID NO: 588337
gggugagggcauugugaga

SEQ ID NO: 857973 - RNA, 19 nt, Artificial Sequence
  Description of Artificial Sequence: Synthetic oligonucleotide
  Antisense strand to SEQ ID NO: 857972
ucucacaaugcccucaccc

SEQ ID NO: 857974 - RNA, 19 nt, Artificial Sequence
  Description of Artificial Sequence: Synthetic oligonucleotide
  Sense strand starting at position 3514 of SEQ ID NO: 588337
ugagaaagaucagccuagu

SEQ ID NO: 857975 - RNA, 19 nt, Artificial Sequence
  Description of Artificial Sequence: Synthetic oligonucleotide
  Antisense strand to SEQ ID NO: 857974
acuaggcugaucuuucuca

SEQ ID NO: 857976 - RNA, 19 nt, Artificial Sequence
  Description of Artificial Sequence: Synthetic oligonucleotide
  Sense strand starting at position 3517 of SEQ ID NO: 588337
gaaagaucagccuaguuau

SEQ ID NO: 857977 - RNA, 19 nt, Artificial Sequence
  Description of Artificial Sequence: Synthetic oligonucleotide
  Antisense strand to SEQ ID NO: 857976
auaacuaggcugaucuuuc

SEQ ID NO: 857978 - RNA, 19 nt, Artificial Sequence
  Description of Artificial Sequence: Synthetic oligonucleotide
  Sense strand starting at position 3548 of SEQ ID NO: 588337
agacuuaaaucaucgcaca

SEQ ID NO: 857979 - RNA, 19 nt, Artificial Sequence
  Description of Artificial Sequence: Synthetic oligonucleotide
  Antisense strand to SEQ ID NO: 857978
ugugcgaugauuuaagucu

SEQ ID NO: 857980 - RNA, 19 nt, Artificial Sequence
  Description of Artificial Sequence: Synthetic oligonucleotide
  Sense strand starting at position 3572 of SEQ ID NO: 588337
guguaaugugagcgaauuu

SEQ ID NO: 857981 - RNA, 19 nt, Artificial Sequence
  Description of Artificial Sequence: Synthetic oligonucleotide
  Antisense strand to SEQ ID NO: 857980
aaauucgcucacauuacac

SEQ ID NO: 857982 - RNA, 19 nt, Artificial Sequence
  Description of Artificial Sequence: Synthetic oligonucleotide
  Sense strand starting at position 3660 of SEQ ID NO: 588337
agaagaguaaugcgaucau

SEQ ID NO: 857983 - RNA, 19 nt, Artificial Sequence
  Description of Artificial Sequence: Synthetic oligonucleotide
  Antisense strand to SEQ ID NO: 857982
augaucgcauuacucuucu

SEQ ID NO: 857984 - RNA, 19 nt, Artificial Sequence
  Description of Artificial Sequence: Synthetic oligonucleotide
  Sense strand starting at position 3664 of SEQ ID NO: 588337
gaguaaugcgaucauaucc

SEQ ID NO: 857985 - RNA, 19 nt, Artificial Sequence
  Description of Artificial Sequence: Synthetic oligonucleotide
  Antisense strand to SEQ ID NO: 857984
ggauaugaucgcauuacuc

SEQ ID NO: 857986 - RNA, 19 nt, Artificial Sequence
  Description of Artificial Sequence: Synthetic oligonucleotide
  Sense strand starting at position 3669 of SEQ ID NO: 588337
augcgaucauauccagaaa

SEQ ID NO: 857987 - RNA, 19 nt, Artificial Sequence
  Description of Artificial Sequence: Synthetic oligonucleotide
  Antisense strand to SEQ ID NO: 857986
uuucuggauaugaucgcau

SEQ ID NO: 857988 - RNA, 19 nt, Artificial Sequence
  Description of Artificial Sequence: Synthetic oligonucleotide
  Sense strand starting at position 3683 of SEQ ID NO: 588337
agaaauuaguaggaugauu

SEQ ID NO: 857989 - RNA, 19 nt, Artificial Sequence
  Description of Artificial Sequence: Synthetic oligonucleotide
  Antisense strand to SEQ ID NO: 857988
aaucauccuacuaauuucu

SEQ ID NO: 857990 - RNA, 19 nt, Artificial Sequence
  Description of Artificial Sequence: Synthetic oligonucleotide
  Sense strand starting at position 3728 of SEQ ID NO: 588337
gaaagcauuugagagugaa

SEQ ID NO: 857991 - RNA, 19 nt, Artificial Sequence
  Description of Artificial Sequence: Synthetic oligonucleotide
  Antisense strand to SEQ ID NO: 857990
uucacucucaaaugcuuuc

SEQ ID NO: 857992 - RNA, 19 nt, Artificial Sequence
  Description of Artificial Sequence: Synthetic oligonucleotide
  Sense strand starting at position 3750 of SEQ ID NO: 588337
aaggauuaauaauaaggga

SEQ ID NO: 857993 - RNA, 19 nt, Artificial Sequence
  Description of Artificial Sequence: Synthetic oligonucleotide
  Antisense strand to SEQ ID NO: 857992
ucccuuauuauuaauccuu

SEQ ID NO: 857994 - RNA, 19 nt, Artificial Sequence
  Description of Artificial Sequence: Synthetic oligonucleotide
  Sense strand starting at position 3892 of SEQ ID NO: 588337
ggaugacucccggguuagu

SEQ ID NO: 857995 - RNA, 19 nt, Artificial Sequence
  Description of Artificial Sequence: Synthetic oligonucleotide
  Antisense strand to SEQ ID NO: 857994
acuaacccgggagucaucc

SEQ ID NO: 857996 - RNA, 19 nt, Artificial Sequence
  Description of Artificial Sequence: Synthetic oligonucleotide
  Sense strand starting at position 3902 of SEQ ID NO: 588337
cggguuagugacgagggau

SEQ ID NO: 857997 - RNA, 19 nt, Artificial Sequence
  Description of Artificial Sequence: Synthetic oligonucleotide
  Antisense strand to SEQ ID NO: 857996
aucccucgucacuaacccg

SEQ ID NO: 857998 - RNA, 19 nt, Artificial Sequence
  Description of Artificial Sequence: Synthetic oligonucleotide
  Sense strand starting at position 3955 of SEQ ID NO: 588337
gagagagguccaggcuaaa

SEQ ID NO: 857999 - RNA, 19 nt, Artificial Sequence
  Description of Artificial Sequence: Synthetic oligonucleotide
  Antisense strand to SEQ ID NO: 857998
uuuagccuggaccucucuc

SEQ ID NO: 858000 - RNA, 19 nt, Artificial Sequence
  Description of Artificial Sequence: Synthetic oligonucleotide
  Sense strand starting at position 55 of SEQ ID NO: 588338
gggcuucugccuggaguga

SEQ ID NO: 858001 - RNA, 19 nt, Artificial Sequence
  Description of Artificial Sequence: Synthetic oligonucleotide
  Antisense strand to SEQ ID NO: 858000
ucacuccaggcagaagccc

SEQ ID NO: 858002 - RNA, 19 nt, Artificial Sequence
  Description of Artificial Sequence: Synthetic oligonucleotide
  Sense strand starting at position 207 of SEQ ID NO: 588338
ccacaaugccugugucguu

SEQ ID NO: 858003 - RNA, 19 nt, Artificial Sequence
  Description of Artificial Sequence: Synthetic oligonucleotide
  Antisense strand to SEQ ID NO: 858002
aacgacacaggcauugugg

SEQ ID NO: 858004 - RNA, 19 nt, Artificial Sequence
  Description of Artificial Sequence: Synthetic oligonucleotide
  Sense strand starting at position 236 of SEQ ID NO: 588338
gccggccacuuguagauaa

SEQ ID NO: 858005 - RNA, 19 nt, Artificial Sequence
  Description of Artificial Sequence: Synthetic oligonucleotide
  Antisense strand to SEQ ID NO: 858004
uuaucuacaaguggccggc

SEQ ID NO: 858006 - RNA, 19 nt, Artificial Sequence
  Description of Artificial Sequence: Synthetic oligonucleotide
  Sense strand starting at position 252 of SEQ ID NO: 588338
uaaacauggacguguguga

SEQ ID NO: 858007 - RNA, 19 nt, Artificial Sequence
  Description of Artificial Sequence: Synthetic oligonucleotide
  Antisense strand to SEQ ID NO: 858006
ucacacacguccauguuua

SEQ ID NO: 858008 - RNA, 19 nt, Artificial Sequence
  Description of Artificial Sequence: Synthetic oligonucleotide
  Sense strand starting at position 256 of SEQ ID NO: 588338
cauggacgugugugaagaa

SEQ ID NO: 858009 - RNA, 19 nt, Artificial Sequence
  Description of Artificial Sequence: Synthetic oligonucleotide
  Antisense strand to SEQ ID NO: 858008
uucuucacacacguccaug

SEQ ID NO: 858010 - RNA, 19 nt, Artificial Sequence
  Description of Artificial Sequence: Synthetic oligonucleotide
  Sense strand starting at position 259 of SEQ ID NO: 588338
ggacgugugugaagaacca

SEQ ID NO: 858011 - RNA, 19 nt, Artificial Sequence
  Description of Artificial Sequence: Synthetic oligonucleotide
  Antisense strand to SEQ ID NO: 858010
ugguucuucacacacgucc

SEQ ID NO: 858012 - RNA, 19 nt, Artificial Sequence
  Description of Artificial Sequence: Synthetic oligonucleotide
  Sense strand starting at position 498 of SEQ ID NO: 588338
ggugacucuucccuccuga

SEQ ID NO: 858013 - RNA, 19 nt, Artificial Sequence
  Description of Artificial Sequence: Synthetic oligonucleotide
  Antisense strand to SEQ ID NO: 858012
ucaggagggaagagucacc

SEQ ID NO: 858014 - RNA, 19 nt, Artificial Sequence
  Description of Artificial Sequence: Synthetic oligonucleotide
  Sense strand starting at position 652 of SEQ ID NO: 588338
agaggaagcuccucugcaa

SEQ ID NO: 858015 - RNA, 19 nt, Artificial Sequence
  Description of Artificial Sequence: Synthetic oligonucleotide
  Antisense strand to SEQ ID NO: 858014
uugcagaggagcuuccucu

SEQ ID NO: 858016 - RNA, 19 nt, Artificial Sequence
  Description of Artificial Sequence: Synthetic oligonucleotide
  Sense strand starting at position 928 of SEQ ID NO: 588338
guggcacgagcuuguaaau

SEQ ID NO: 858017 - RNA, 19 nt, Artificial Sequence
  Description of Artificial Sequence: Synthetic oligonucleotide
  Antisense strand to SEQ ID NO: 858016
auuuacaagcucgugccac

SEQ ID NO: 858018 - RNA, 19 nt, Artificial Sequence
  Description of Artificial Sequence: Synthetic oligonucleotide
  Sense strand starting at position 1735 of SEQ ID NO: 588338
ggcugauccugcucagguu

SEQ ID NO: 858019 - RNA, 19 nt, Artificial Sequence
  Description of Artificial Sequence: Synthetic oligonucleotide
  Antisense strand to SEQ ID NO: 858018
aaccugagcaggaucagcc

SEQ ID NO: 858020 - RNA, 19 nt, Artificial Sequence
  Description of Artificial Sequence: Synthetic oligonucleotide
  Sense strand starting at position 2884 of SEQ ID NO: 588338
gccucuacguggccugaaa

SEQ ID NO: 858021 - RNA, 19 nt, Artificial Sequence
  Description of Artificial Sequence: Synthetic oligonucleotide
  Antisense strand to SEQ ID NO: 858020
uuucaggccacguagaggc

SEQ ID NO: 858022 - RNA, 19 nt, Artificial Sequence
  Description of Artificial Sequence: Synthetic oligonucleotide
  Sense strand starting at position 3110 of SEQ ID NO: 588338
ugggaauucuugucccaau

SEQ ID NO: 858023 - RNA, 19 nt, Artificial Sequence
  Description of Artificial Sequence: Synthetic oligonucleotide
  Antisense strand to SEQ ID NO: 858022
auugggacaagaauuccca

SEQ ID NO: 858024 - RNA, 19 nt, Artificial Sequence
  Description of Artificial Sequence: Synthetic oligonucleotide
  Sense strand starting at position 3111 of SEQ ID NO: 588338
gggaauucuugucccaaua

SEQ ID NO: 858025 - RNA, 19 nt, Artificial Sequence
  Description of Artificial Sequence: Synthetic oligonucleotide
  Antisense strand to SEQ ID NO: 858024
uauugggacaagaauuccc

SEQ ID NO: 858026 - RNA, 19 nt, Artificial Sequence
  Description of Artificial Sequence: Synthetic oligonucleotide
  Sense strand starting at position 3254 of SEQ ID NO: 588338
ugacaauugugcugggauu

SEQ ID NO: 858027 - RNA, 19 nt, Artificial Sequence
  Description of Artificial Sequence: Synthetic oligonucleotide
  Antisense strand to SEQ ID NO: 858026
aaucccagcacaauuguca

SEQ ID NO: 858028 - RNA, 19 nt, Artificial Sequence
  Description of Artificial Sequence: Synthetic oligonucleotide
  Sense strand starting at position 3255 of SEQ ID NO: 588338
gacaauugugcugggauug

SEQ ID NO: 858029 - RNA, 19 nt, Artificial Sequence
  Description of Artificial Sequence: Synthetic oligonucleotide
  Antisense strand to SEQ ID NO: 858028
caaucccagcacaauuguc

SEQ ID NO: 858030 - RNA, 19 nt, Artificial Sequence
  Description of Artificial Sequence: Synthetic oligonucleotide
  Sense strand starting at position 3413 of SEQ ID NO: 588338
caggcaaucucuggguguu

SEQ ID NO: 858031 - RNA, 19 nt, Artificial Sequence
  Description of Artificial Sequence: Synthetic oligonucleotide
  Antisense strand to SEQ ID NO: 858030
aacacccagagauugccug

SEQ ID NO: 858032 - RNA, 19 nt, Artificial Sequence
  Description of Artificial Sequence: Synthetic oligonucleotide
  Sense strand starting at position 3424 of SEQ ID NO: 588338
uggguguugccggugcuaa

SEQ ID NO: 858033 - RNA, 19 nt, Artificial Sequence
  Description of Artificial Sequence: Synthetic oligonucleotide
  Antisense strand to SEQ ID NO: 858032
uuagcaccggcaacaccca

SEQ ID NO: 858034 - RNA, 19 nt, Artificial Sequence
  Description of Artificial Sequence: Synthetic oligonucleotide
  Sense strand starting at position 1869 of SEQ ID NO: 588339
ggaggaagcugugcuuaga

SEQ ID NO: 858035 - RNA, 19 nt, Artificial Sequence
  Description of Artificial Sequence: Synthetic oligonucleotide
  Antisense strand to SEQ ID NO: 858034
ucuaagcacagcuuccucc

SEQ ID NO: 858036 - RNA, 19 nt, Artificial Sequence
  Description of Artificial Sequence: Synthetic oligonucleotide
  Sense strand starting at position 2583 of SEQ ID NO: 588339
ucucuuuacugguagcaua

SEQ ID NO: 858037 - RNA, 19 nt, Artificial Sequence
  Description of Artificial Sequence: Synthetic oligonucleotide
  Antisense strand to SEQ ID NO: 858036
uaugcuaccaguaaagaga

SEQ ID NO: 858038 - RNA, 19 nt, Artificial Sequence
  Description of Artificial Sequence: Synthetic oligonucleotide
  Sense strand starting at position 2594 of SEQ ID NO: 588339
guagcauauuuggugucau

SEQ ID NO: 858039 - RNA, 19 nt, Artificial Sequence
  Description of Artificial Sequence: Synthetic oligonucleotide
  Antisense strand to SEQ ID NO: 858038
augacaccaaauaugcuac

SEQ ID NO: 858040 - RNA, 19 nt, Artificial Sequence
  Description of Artificial Sequence: Synthetic oligonucleotide
  Sense strand starting at position 2595 of SEQ ID NO: 588339
uagcauauuuggugucaug

SEQ ID NO: 858041 - RNA, 19 nt, Artificial Sequence
  Description of Artificial Sequence: Synthetic oligonucleotide
  Antisense strand to SEQ ID NO: 858040
caugacaccaaauaugcua

SEQ ID NO: 858042 - RNA, 19 nt, Artificial Sequence
  Description of Artificial Sequence: Synthetic oligonucleotide
  Sense strand starting at position 2598 of SEQ ID NO: 588339
cauauuuggugucaugugu

SEQ ID NO: 858043 - RNA, 19 nt, Artificial Sequence
  Description of Artificial Sequence: Synthetic oligonucleotide
  Antisense strand to SEQ ID NO: 858042
acacaugacaccaaauaug

SEQ ID NO: 858044 - RNA, 19 nt, Artificial Sequence
  Description of Artificial Sequence: Synthetic oligonucleotide
  Sense strand starting at position 2650 of SEQ ID NO: 588339
uguuuauaauggcgucuca

SEQ ID NO: 858045 - RNA, 19 nt, Artificial Sequence
  Description of Artificial Sequence: Synthetic oligonucleotide
  Antisense strand to SEQ ID NO: 858044
ugagacgccauuauaaaca

SEQ ID NO: 858046 - RNA, 19 nt, Artificial Sequence
  Description of Artificial Sequence: Synthetic oligonucleotide
  Sense strand starting at position 2665 of SEQ ID NO: 588339
cucagcauagugcagaaau

SEQ ID NO: 858047 - RNA, 19 nt, Artificial Sequence
  Description of Artificial Sequence: Synthetic oligonucleotide
  Antisense strand to SEQ ID NO: 858046
auuucugcacuaugcugag

SEQ ID NO: 858048 - RNA, 19 nt, Artificial Sequence
  Description of Artificial Sequence: Synthetic oligonucleotide
  Sense strand starting at position 2696 of SEQ ID NO: 588339
agaugcacuuuacagagaa

SEQ ID NO: 858049 - RNA, 19 nt, Artificial Sequence
  Description of Artificial Sequence: Synthetic oligonucleotide
  Antisense strand to SEQ ID NO: 858048
uucucuguaaagugcaucu

SEQ ID NO: 858050 - RNA, 19 nt, Artificial Sequence
  Description of Artificial Sequence: Synthetic oligonucleotide
  Sense strand starting at position 2731 of SEQ ID NO: 588339
gcuucauucgugcaagagu

SEQ ID NO: 858051 - RNA, 19 nt, Artificial Sequence
  Description of Artificial Sequence: Synthetic oligonucleotide
  Antisense strand to SEQ ID NO: 858050
acucuugcacgaaugaagc

SEQ ID NO: 858052 - RNA, 19 nt, Artificial Sequence
  Description of Artificial Sequence: Synthetic oligonucleotide
  Sense strand starting at position 2742 of SEQ ID NO: 588339
gcaagaguuagcgcuguug

SEQ ID NO: 858053 - RNA, 19 nt, Artificial Sequence
  Description of Artificial Sequence: Synthetic oligonucleotide
  Antisense strand to SEQ ID NO: 858052
caacagcgcuaacucuugc

SEQ ID NO: 858054 - RNA, 19 nt, Artificial Sequence
  Description of Artificial Sequence: Synthetic oligonucleotide
  Sense strand starting at position 2795 of SEQ ID NO: 588339
uaaguaaggugcccuuaaa

SEQ ID NO: 858055 - RNA, 19 nt, Artificial Sequence
  Description of Artificial Sequence: Synthetic oligonucleotide
  Antisense strand to SEQ ID NO: 858054
uuuaagggcaccuuacuua

SEQ ID NO: 858056 - RNA, 19 nt, Artificial Sequence
  Description of Artificial Sequence: Synthetic oligonucleotide
  Sense strand starting at position 2898 of SEQ ID NO: 588339
gcauuucccuuaggagcaa

SEQ ID NO: 858057 - RNA, 19 nt, Artificial Sequence
  Description of Artificial Sequence: Synthetic oligonucleotide
  Antisense strand to SEQ ID NO: 858056
uugcuccuaagggaaaugc

SEQ ID NO: 858058 - RNA, 19 nt, Artificial Sequence
  Description of Artificial Sequence: Synthetic oligonucleotide
  Sense strand starting at position 2910 of SEQ ID NO: 588339
ggagcaauaguuuagcaua

SEQ ID NO: 858059 - RNA, 19 nt, Artificial Sequence
  Description of Artificial Sequence: Synthetic oligonucleotide
  Antisense strand to SEQ ID NO: 858058
uaugcuaaacuauugcucc

SEQ ID NO: 858060 - RNA, 19 nt, Artificial Sequence
  Description of Artificial Sequence: Synthetic oligonucleotide
  Sense strand starting at position 2912 of SEQ ID NO: 588339
agcaauaguuuagcauauu

SEQ ID NO: 858061 - RNA, 19 nt, Artificial Sequence
  Description of Artificial Sequence: Synthetic oligonucleotide
  Antisense strand to SEQ ID NO: 858060
aauaugcuaaacuauugcu

SEQ ID NO: 858062 - RNA, 19 nt, Artificial Sequence
  Description of Artificial Sequence: Synthetic oligonucleotide
  Sense strand starting at position 2913 of SEQ ID NO: 588339
gcaauaguuuagcauauuc

SEQ ID NO: 858063 - RNA, 19 nt, Artificial Sequence
  Description of Artificial Sequence: Synthetic oligonucleotide
  Antisense strand to SEQ ID NO: 858062
gaauaugcuaaacuauugc

SEQ ID NO: 858064 - RNA, 19 nt, Artificial Sequence
  Description of Artificial Sequence: Synthetic oligonucleotide
  Sense strand starting at position 2963 of SEQ ID NO: 588339
cuagcugccaugggucaua

SEQ ID NO: 858065 - RNA, 19 nt, Artificial Sequence
  Description of Artificial Sequence: Synthetic oligonucleotide
  Antisense strand to SEQ ID NO: 858064
uaugacccauggcagcuag

SEQ ID NO: 858066 - RNA, 19 nt, Artificial Sequence
  Description of Artificial Sequence: Synthetic oligonucleotide
  Sense strand starting at position 2966 of SEQ ID NO: 588339
gcugccaugggucauaaga

SEQ ID NO: 858067 - RNA, 19 nt, Artificial Sequence
  Description of Artificial Sequence: Synthetic oligonucleotide
  Antisense strand to SEQ ID NO: 858066
ucuuaugacccauggcagc

SEQ ID NO: 858068 - RNA, 19 nt, Artificial Sequence
  Description of Artificial Sequence: Synthetic oligonucleotide
  Sense strand starting at position 2968 of SEQ ID NO: 588339
ugccaugggucauaagagu

SEQ ID NO: 858069 - RNA, 19 nt, Artificial Sequence
  Description of Artificial Sequence: Synthetic oligonucleotide
  Antisense strand to SEQ ID NO: 858068
acucuuaugacccauggca

SEQ ID NO: 858070 - RNA, 19 nt, Artificial Sequence
  Description of Artificial Sequence: Synthetic oligonucleotide
  Sense strand starting at position 2975 of SEQ ID NO: 588339
ggucauaagagucaaaugu

SEQ ID NO: 858071 - RNA, 19 nt, Artificial Sequence
  Description of Artificial Sequence: Synthetic oligonucleotide
  Antisense strand to SEQ ID NO: 858070
acauuugacucuuaugacc

SEQ ID NO: 858072 - RNA, 19 nt, Artificial Sequence
  Description of Artificial Sequence: Synthetic oligonucleotide
  Sense strand starting at position 2982 of SEQ ID NO: 588339
agagucaaauguguuuguu

SEQ ID NO: 858073 - RNA, 19 nt, Artificial Sequence
  Description of Artificial Sequence: Synthetic oligonucleotide
  Antisense strand to SEQ ID NO: 858072
aacaaacacauuugacucu

SEQ ID NO: 858074 - RNA, 19 nt, Artificial Sequence
  Description of Artificial Sequence: Synthetic oligonucleotide
  Sense strand starting at position 2984 of SEQ ID NO: 588339
agucaaauguguuuguuga

SEQ ID NO: 858075 - RNA, 19 nt, Artificial Sequence
  Description of Artificial Sequence: Synthetic oligonucleotide
  Antisense strand to SEQ ID NO: 858074
ucaacaaacacauuugacu

SEQ ID NO: 858076 - RNA, 19 nt, Artificial Sequence
  Description of Artificial Sequence: Synthetic oligonucleotide
  Sense strand starting at position 2985 of SEQ ID NO: 588339
gucaaauguguuuguugag

SEQ ID NO: 858077 - RNA, 19 nt, Artificial Sequence
  Description of Artificial Sequence: Synthetic oligonucleotide
  Antisense strand to SEQ ID NO: 858076
cucaacaaacacauuugac

SEQ ID NO: 858078 - RNA, 19 nt, Artificial Sequence
  Description of Artificial Sequence: Synthetic oligonucleotide
  Sense strand starting at position 2988 of SEQ ID NO: 588339
aaauguguuuguugaggau

SEQ ID NO: 858079 - RNA, 19 nt, Artificial Sequence
  Description of Artificial Sequence: Synthetic oligonucleotide
  Antisense strand to SEQ ID NO: 858078
auccucaacaaacacauuu

SEQ ID NO: 858080 - RNA, 19 nt, Artificial Sequence
  Description of Artificial Sequence: Synthetic oligonucleotide
  Sense strand starting at position 3067 of SEQ ID NO: 588339
gggauaaugcugggcuuau

SEQ ID NO: 858081 - RNA, 19 nt, Artificial Sequence
  Description of Artificial Sequence: Synthetic oligonucleotide
  Antisense strand to SEQ ID NO: 858080
auaagcccagcauuauccc

SEQ ID NO: 858082 - RNA, 19 nt, Artificial Sequence
  Description of Artificial Sequence: Synthetic oligonucleotide
  Sense strand starting at position 3068 of SEQ ID NO: 588339
ggauaaugcugggcuuaua

SEQ ID NO: 858083 - RNA, 19 nt, Artificial Sequence
  Description of Artificial Sequence: Synthetic oligonucleotide
  Antisense strand to SEQ ID NO: 858082
uauaagcccagcauuaucc

SEQ ID NO: 858084 - RNA, 19 nt, Artificial Sequence
  Description of Artificial Sequence: Synthetic oligonucleotide
  Sense strand starting at position 3087 of SEQ ID NO: 588339
aaaugagucugggaaguug

SEQ ID NO: 858085 - RNA, 19 nt, Artificial Sequence
  Description of Artificial Sequence: Synthetic oligonucleotide
  Antisense strand to SEQ ID NO: 858084
caacuucccagacucauuu

SEQ ID NO: 858086 - RNA, 19 nt, Artificial Sequence
  Description of Artificial Sequence: Synthetic oligonucleotide
  Sense strand starting at position 3474 of SEQ ID NO: 588339
uuuguauaauuugguggua

SEQ ID NO: 858087 - RNA, 19 nt, Artificial Sequence
  Description of Artificial Sequence: Synthetic oligonucleotide
  Antisense strand to SEQ ID NO: 858086
uaccaccaaauuauacaaa

SEQ ID NO: 858088 - RNA, 19 nt, Artificial Sequence
  Description of Artificial Sequence: Synthetic oligonucleotide
  Sense strand starting at position 3476 of SEQ ID NO: 588339
uguauaauuuggugguaaa

SEQ ID NO: 858089 - RNA, 19 nt, Artificial Sequence
  Description of Artificial Sequence: Synthetic oligonucleotide
  Antisense strand to SEQ ID NO: 858088
uuuaccaccaaauuauaca

SEQ ID NO: 858090 - RNA, 19 nt, Artificial Sequence
  Description of Artificial Sequence: Synthetic oligonucleotide
  Sense strand starting at position 3669 of SEQ ID NO: 588339
auaguacuuccugguuauc

SEQ ID NO: 858091 - RNA, 19 nt, Artificial Sequence
  Description of Artificial Sequence: Synthetic oligonucleotide
  Antisense strand to SEQ ID NO: 858090
gauaaccaggaaguacuau

SEQ ID NO: 858092 - RNA, 19 nt, Artificial Sequence
  Description of Artificial Sequence: Synthetic oligonucleotide
  Sense strand starting at position 3750 of SEQ ID NO: 588339
cucugugucucucaucagu

SEQ ID NO: 858093 - RNA, 19 nt, Artificial Sequence
  Description of Artificial Sequence: Synthetic oligonucleotide
  Antisense strand to SEQ ID NO: 858092
acugaugagagacacagag

SEQ ID NO: 858094 - RNA, 19 nt, Artificial Sequence
  Description of Artificial Sequence: Synthetic oligonucleotide
  Sense strand starting at position 3761 of SEQ ID NO: 588339
ucaucaguguugcuagcua

SEQ ID NO: 858095 - RNA, 19 nt, Artificial Sequence
  Description of Artificial Sequence: Synthetic oligonucleotide
  Antisense strand to SEQ ID NO: 858094
uagcuagcaacacugauga

SEQ ID NO: 858096 - RNA, 19 nt, Artificial Sequence
  Description of Artificial Sequence: Synthetic oligonucleotide
  Sense strand starting at position 3770 of SEQ ID NO: 588339
uugcuagcuagagguuuau

SEQ ID NO: 858097 - RNA, 19 nt, Artificial Sequence
  Description of Artificial Sequence: Synthetic oligonucleotide
  Antisense strand to SEQ ID NO: 858096
auaaaccucuagcuagcaa

SEQ ID NO: 858098 - RNA, 19 nt, Artificial Sequence
  Description of Artificial Sequence: Synthetic oligonucleotide
  Sense strand starting at position 3774 of SEQ ID NO: 588339
uagcuagagguuuauccau

SEQ ID NO: 858099 - RNA, 19 nt, Artificial Sequence
  Description of Artificial Sequence: Synthetic oligonucleotide
  Antisense strand to SEQ ID NO: 858098
auggauaaaccucuagcua

SEQ ID NO: 858100 - RNA, 19 nt, Artificial Sequence
  Description of Artificial Sequence: Synthetic oligonucleotide
  Sense strand starting at position 31 of SEQ ID NO: 588340
cgggaaggccuauauacuu

SEQ ID NO: 858101 - RNA, 19 nt, Artificial Sequence
  Description of Artificial Sequence: Synthetic oligonucleotide
  Antisense strand to SEQ ID NO: 858100
aaguauauaggccuucccg

SEQ ID NO: 858102 - RNA, 19 nt, Artificial Sequence
  Description of Artificial Sequence: Synthetic oligonucleotide
  Sense strand starting at position 40 of SEQ ID NO: 588340
cuauauacuuccuuggaag

SEQ ID NO: 858103 - RNA, 19 nt, Artificial Sequence
  Description of Artificial Sequence: Synthetic oligonucleotide
  Antisense strand to SEQ ID NO: 858102
cuuccaaggaaguauauag

SEQ ID NO: 858104 - RNA, 19 nt, Artificial Sequence
  Description of Artificial Sequence: Synthetic oligonucleotide
  Sense strand starting at position 64 of SEQ ID NO: 588340
guauguuauuucuucccuu

SEQ ID NO: 858105 - RNA, 19 nt, Artificial Sequence
  Description of Artificial Sequence: Synthetic oligonucleotide
  Antisense strand to SEQ ID NO: 858104
aagggaagaaauaacauac

SEQ ID NO: 858106 - RNA, 19 nt, Artificial Sequence
  Description of Artificial Sequence: Synthetic oligonucleotide
  Sense strand starting at position 79 of SEQ ID NO: 588340
ccuugacauccucgagaug

SEQ ID NO: 858107 - RNA, 19 nt, Artificial Sequence
  Description of Artificial Sequence: Synthetic oligonucleotide
  Antisense strand to SEQ ID NO: 858106
caucucgaggaugucaagg

SEQ ID NO: 858108 - RNA, 19 nt, Artificial Sequence
  Description of Artificial Sequence: Synthetic oligonucleotide
  Sense strand starting at position 90 of SEQ ID NO: 588340
ucgagaugaucuguaacau

SEQ ID NO: 858109 - RNA, 19 nt, Artificial Sequence
  Description of Artificial Sequence: Synthetic oligonucleotide
  Antisense strand to SEQ ID NO: 858108
auguuacagaucaucucga

SEQ ID NO: 858110 - RNA, 19 nt, Artificial Sequence
  Description of Artificial Sequence: Synthetic oligonucleotide
  Sense strand starting at position 91 of SEQ ID NO: 588340
cgagaugaucuguaacauu

SEQ ID NO: 858111 - RNA, 19 nt, Artificial Sequence
  Description of Artificial Sequence: Synthetic oligonucleotide
  Antisense strand to SEQ ID NO: 858110
aauguuacagaucaucucg

SEQ ID NO: 858112 - RNA, 19 nt, Artificial Sequence
  Description of Artificial Sequence: Synthetic oligonucleotide
  Sense strand starting at position 148 of SEQ ID NO: 588340
ccagaaauucccgaaggca

SEQ ID NO: 858113 - RNA, 19 nt, Artificial Sequence
  Description of Artificial Sequence: Synthetic oligonucleotide
  Antisense strand to SEQ ID NO: 858112
ugccuucgggaauuucugg

SEQ ID NO: 858114 - RNA, 19 nt, Artificial Sequence
  Description of Artificial Sequence: Synthetic oligonucleotide
  Sense strand starting at position 248 of SEQ ID NO: 588340
ggaagacucacugguaacu

SEQ ID NO: 858115 - RNA, 19 nt, Artificial Sequence
  Description of Artificial Sequence: Synthetic oligonucleotide
  Antisense strand to SEQ ID NO: 858114
aguuaccagugagucuucc

SEQ ID NO: 858116 - RNA, 19 nt, Artificial Sequence
  Description of Artificial Sequence: Synthetic oligonucleotide
  Sense strand starting at position 1035 of SEQ ID NO: 588340
ugaggagugcucggagaag

SEQ ID NO: 858117 - RNA, 19 nt, Artificial Sequence
  Description of Artificial Sequence: Synthetic oligonucleotide
  Antisense strand to SEQ ID NO: 858116
cuucuccgagcacuccuca

SEQ ID NO: 858118 - RNA, 19 nt, Artificial Sequence
  Description of Artificial Sequence: Synthetic oligonucleotide
  Sense strand starting at position 2175 of SEQ ID NO: 588340
aggugugcucacgugugua

SEQ ID NO: 858119 - RNA, 19 nt, Artificial Sequence
  Description of Artificial Sequence: Synthetic oligonucleotide
  Antisense strand to SEQ ID NO: 858118
uacacacgugagcacaccu

SEQ ID NO: 858120 - RNA, 19 nt, Artificial Sequence
  Description of Artificial Sequence: Synthetic oligonucleotide
  Sense strand starting at position 2352 of SEQ ID NO: 588340
acuguuuccucuucuggaa

SEQ ID NO: 858121 - RNA, 19 nt, Artificial Sequence
  Description of Artificial Sequence: Synthetic oligonucleotide
  Antisense strand to SEQ ID NO: 858120
uuccagaagaggaaacagu

SEQ ID NO: 858122 - RNA, 19 nt, Artificial Sequence
  Description of Artificial Sequence: Synthetic oligonucleotide
  Sense strand starting at position 2386 of SEQ ID NO: 588340
cuagguaaucaacacggua

SEQ ID NO: 858123 - RNA, 19 nt, Artificial Sequence
  Description of Artificial Sequence: Synthetic oligonucleotide
  Antisense strand to SEQ ID NO: 858122
uaccguguugauuaccuag

SEQ ID NO: 858124 - RNA, 19 nt, Artificial Sequence
  Description of Artificial Sequence: Synthetic oligonucleotide
  Sense strand starting at position 2388 of SEQ ID NO: 588340
agguaaucaacacgguaau

SEQ ID NO: 858125 - RNA, 19 nt, Artificial Sequence
  Description of Artificial Sequence: Synthetic oligonucleotide
  Antisense strand to SEQ ID NO: 858124
auuaccguguugauuaccu

SEQ ID NO: 858126 - RNA, 19 nt, Artificial Sequence
  Description of Artificial Sequence: Synthetic oligonucleotide
  Sense strand starting at position 2540 of SEQ ID NO: 588340
ccaauaugcuacgcaagaa

SEQ ID NO: 858127 - RNA, 19 nt, Artificial Sequence
  Description of Artificial Sequence: Synthetic oligonucleotide
  Antisense strand to SEQ ID NO: 858126
uucuugcguagcauauugg

SEQ ID NO: 858128 - RNA, 19 nt, Artificial Sequence
  Description of Artificial Sequence: Synthetic oligonucleotide
  Sense strand starting at position 2573 of SEQ ID NO: 588340
agaucucagguccaguauu

SEQ ID NO: 858129 - RNA, 19 nt, Artificial Sequence
  Description of Artificial Sequence: Synthetic oligonucleotide
  Antisense strand to SEQ ID NO: 858128
aauacuggaccugagaucu

SEQ ID NO: 858130 - RNA, 19 nt, Artificial Sequence
  Description of Artificial Sequence: Synthetic oligonucleotide
  Sense strand starting at position 2603 of SEQ ID NO: 588340
cuggauaaauaacagagaa

SEQ ID NO: 858131 - RNA, 19 nt, Artificial Sequence
  Description of Artificial Sequence: Synthetic oligonucleotide
  Antisense strand to SEQ ID NO: 858130
uucucuguuauuuauccag

SEQ ID NO: 858132 - RNA, 19 nt, Artificial Sequence
  Description of Artificial Sequence: Synthetic oligonucleotide
  Sense strand starting at position 2675 of SEQ ID NO: 588340
augaauaguguaggacaca

SEQ ID NO: 858133 - RNA, 19 nt, Artificial Sequence
  Description of Artificial Sequence: Synthetic oligonucleotide
  Antisense strand to SEQ ID NO: 858132
uguguccuacacuauucau

SEQ ID NO: 858134 - RNA, 19 nt, Artificial Sequence
  Description of Artificial Sequence: Synthetic oligonucleotide
  Sense strand starting at position 2732 of SEQ ID NO: 588340
guggcccuccaguauacaa

SEQ ID NO: 858135 - RNA, 19 nt, Artificial Sequence
  Description of Artificial Sequence: Synthetic oligonucleotide
  Antisense strand to SEQ ID NO: 858134
uuguauacuggagggccac

SEQ ID NO: 858136 - RNA, 19 nt, Artificial Sequence
  Description of Artificial Sequence: Synthetic oligonucleotide
  Sense strand starting at position 2893 of SEQ ID NO: 588340
cgugcuaagcccuuuccau

SEQ ID NO: 858137 - RNA, 19 nt, Artificial Sequence
  Description of Artificial Sequence: Synthetic oligonucleotide
  Antisense strand to SEQ ID NO: 858136
auggaaagggcuuagcacg

SEQ ID NO: 858138 - RNA, 19 nt, Artificial Sequence
  Description of Artificial Sequence: Synthetic oligonucleotide
  Sense strand starting at position 2929 of SEQ ID NO: 588340
acaacagccugguuagaua

SEQ ID NO: 858139 - RNA, 19 nt, Artificial Sequence
  Description of Artificial Sequence: Synthetic oligonucleotide
  Antisense strand to SEQ ID NO: 858138
uaucuaaccaggcuguugu

SEQ ID NO: 858140 - RNA, 19 nt, Artificial Sequence
  Description of Artificial Sequence: Synthetic oligonucleotide
  Sense strand starting at position 3010 of SEQ ID NO: 588340
uccagauuccaugguuaag

SEQ ID NO: 858141 - RNA, 19 nt, Artificial Sequence
  Description of Artificial Sequence: Synthetic oligonucleotide
  Antisense strand to SEQ ID NO: 858140
cuuaaccauggaaucugga

SEQ ID NO: 858142 - RNA, 19 nt, Artificial Sequence
  Description of Artificial Sequence: Synthetic oligonucleotide
  Sense strand starting at position 3012 of SEQ ID NO: 588340
cagauuccaugguuaagac

SEQ ID NO: 858143 - RNA, 19 nt, Artificial Sequence
  Description of Artificial Sequence: Synthetic oligonucleotide
  Antisense strand to SEQ ID NO: 858142
gucuuaaccauggaaucug

SEQ ID NO: 858144 - RNA, 19 nt, Artificial Sequence
  Description of Artificial Sequence: Synthetic oligonucleotide
  Sense strand starting at position 3203 of SEQ ID NO: 588340
acagacauuuauuaaggau

SEQ ID NO: 858145 - RNA, 19 nt, Artificial Sequence
  Description of Artificial Sequence: Synthetic oligonucleotide
  Antisense strand to SEQ ID NO: 858144
auccuuaauaaaugucugu

SEQ ID NO: 858146 - RNA, 19 nt, Artificial Sequence
  Description of Artificial Sequence: Synthetic oligonucleotide
  Sense strand starting at position 3282 of SEQ ID NO: 588340
ccagguauucuauguaacc

SEQ ID NO: 858147 - RNA, 19 nt, Artificial Sequence
  Description of Artificial Sequence: Synthetic oligonucleotide
  Antisense strand to SEQ ID NO: 858146
gguuacauagaauaccugg

SEQ ID NO: 858148 - RNA, 19 nt, Artificial Sequence
  Description of Artificial Sequence: Synthetic oligonucleotide
  Sense strand starting at position 3325 of SEQ ID NO: 588340
cgggucuuaagagaaguaa

SEQ ID NO: 858149 - RNA, 19 nt, Artificial Sequence
  Description of Artificial Sequence: Synthetic oligonucleotide
  Antisense strand to SEQ ID NO: 858148
uuacuucucuuaagacccg

SEQ ID NO: 858150 - RNA, 19 nt, Artificial Sequence
  Description of Artificial Sequence: Synthetic oligonucleotide
  Sense strand starting at position 3393 of SEQ ID NO: 588340
ucacucauugucuaauguu

SEQ ID NO: 858151 - RNA, 19 nt, Artificial Sequence
  Description of Artificial Sequence: Synthetic oligonucleotide
  Antisense strand to SEQ ID NO: 858150
aacauuagacaaugaguga

SEQ ID NO: 858152 - RNA, 19 nt, Artificial Sequence
  Description of Artificial Sequence: Synthetic oligonucleotide
  Sense strand starting at position 3428 of SEQ ID NO: 588340
ggaggucucccaugugaca

SEQ ID NO: 858153 - RNA, 19 nt, Artificial Sequence
  Description of Artificial Sequence: Synthetic oligonucleotide
  Antisense strand to SEQ ID NO: 858152
ugucacaugggagaccucc

SEQ ID NO: 858154 - RNA, 19 nt, Artificial Sequence
  Description of Artificial Sequence: Synthetic oligonucleotide
  Sense strand starting at position 3441 of SEQ ID NO: 588340
gugacaguguucucugaga

SEQ ID NO: 858155 - RNA, 19 nt, Artificial Sequence
  Description of Artificial Sequence: Synthetic oligonucleotide
  Antisense strand to SEQ ID NO: 858154
ucucagagaacacugucac

SEQ ID NO: 858156 - RNA, 19 nt, Artificial Sequence
  Description of Artificial Sequence: Synthetic oligonucleotide
  Sense strand starting at position 3443 of SEQ ID NO: 588340
gacaguguucucugagagg

SEQ ID NO: 858157 - RNA, 19 nt, Artificial Sequence
  Description of Artificial Sequence: Synthetic oligonucleotide
  Antisense strand to SEQ ID NO: 858156
ccucucagagaacacuguc

SEQ ID NO: 858158 - RNA, 19 nt, Artificial Sequence
  Description of Artificial Sequence: Synthetic oligonucleotide
  Sense strand starting at position 3574 of SEQ ID NO: 588340
gcuuacugguuucuaagga

SEQ ID NO: 858159 - RNA, 19 nt, Artificial Sequence
  Description of Artificial Sequence: Synthetic oligonucleotide
  Antisense strand to SEQ ID NO: 858158
uccuuagaaaccaguaagc

SEQ ID NO: 858160 - RNA, 19 nt, Artificial Sequence
  Description of Artificial Sequence: Synthetic oligonucleotide
  Sense strand starting at position 3605 of SEQ ID NO: 588340
uacuauauagcccaggagu

SEQ ID NO: 858161 - RNA, 19 nt, Artificial Sequence
  Description of Artificial Sequence: Synthetic oligonucleotide
  Antisense strand to SEQ ID NO: 858160
acuccugggcuauauagua

SEQ ID NO: 858162 - RNA, 19 nt, Artificial Sequence
  Description of Artificial Sequence: Synthetic oligonucleotide
  Sense strand starting at position 3651 of SEQ ID NO: 588340
caaagauguccgcagacca

SEQ ID NO: 858163 - RNA, 19 nt, Artificial Sequence
  Description of Artificial Sequence: Synthetic oligonucleotide
  Antisense strand to SEQ ID NO: 858162
uggucugcggacaucuuug

SEQ ID NO: 858164 - RNA, 19 nt, Artificial Sequence
  Description of Artificial Sequence: Synthetic oligonucleotide
  Sense strand starting at position 3662 of SEQ ID NO: 588340
gcagaccaauugcuagaau

SEQ ID NO: 858165 - RNA, 19 nt, Artificial Sequence
  Description of Artificial Sequence: Synthetic oligonucleotide
  Antisense strand to SEQ ID NO: 858164
auucuagcaauuggucugc

SEQ ID NO: 858166 - RNA, 19 nt, Artificial Sequence
  Description of Artificial Sequence: Synthetic oligonucleotide
  Sense strand starting at position 3671 of SEQ ID NO: 588340
uugcuagaauccgugaaua

SEQ ID NO: 858167 - RNA, 19 nt, Artificial Sequence
  Description of Artificial Sequence: Synthetic oligonucleotide
  Antisense strand to SEQ ID NO: 858166
uauucacggauucuagcaa

SEQ ID NO: 858168 - RNA, 19 nt, Artificial Sequence
  Description of Artificial Sequence: Synthetic oligonucleotide
  Sense strand starting at position 3673 of SEQ ID NO: 588340
gcuagaauccgugaauaug

SEQ ID NO: 858169 - RNA, 19 nt, Artificial Sequence
  Description of Artificial Sequence: Synthetic oligonucleotide
  Antisense strand to SEQ ID NO: 858168
cauauucacggauucuagc

SEQ ID NO: 858170 - RNA, 19 nt, Artificial Sequence
  Description of Artificial Sequence: Synthetic oligonucleotide
  Sense strand starting at position 3683 of SEQ ID NO: 588340
gugaauaugucccuuuaug

SEQ ID NO: 858171 - RNA, 19 nt, Artificial Sequence
  Description of Artificial Sequence: Synthetic oligonucleotide
  Antisense strand to SEQ ID NO: 858170
cauaaagggacauauucac

SEQ ID NO: 858172 - RNA, 19 nt, Artificial Sequence
  Description of Artificial Sequence: Synthetic oligonucleotide
  Sense strand starting at position 3731 of SEQ ID NO: 588340
aguuaaggaguuugaagua

SEQ ID NO: 858173 - RNA, 19 nt, Artificial Sequence
  Description of Artificial Sequence: Synthetic oligonucleotide
  Antisense strand to SEQ ID NO: 858172
uacuucaaacuccuuaacu

SEQ ID NO: 858174 - RNA, 19 nt, Artificial Sequence
  Description of Artificial Sequence: Synthetic oligonucleotide
  Sense strand starting at position 3741 of SEQ ID NO: 588340
uuugaaguagggcgauuau

SEQ ID NO: 858175 - RNA, 19 nt, Artificial Sequence
  Description of Artificial Sequence: Synthetic oligonucleotide
  Antisense strand to SEQ ID NO: 858174
auaaucgcccuacuucaaa

SEQ ID NO: 858176 - RNA, 19 nt, Artificial Sequence
  Description of Artificial Sequence: Synthetic oligonucleotide
  Sense strand starting at position 3763 of SEQ ID NO: 588340
guauuaauccaacguaauc

SEQ ID NO: 858177 - RNA, 19 nt, Artificial Sequence
  Description of Artificial Sequence: Synthetic oligonucleotide
  Antisense strand to SEQ ID NO: 858176
gauuacguuggauuaauac

SEQ ID NO: 858178 - RNA, 19 nt, Artificial Sequence
  Description of Artificial Sequence: Synthetic oligonucleotide
  Sense strand starting at position 3845 of SEQ ID NO: 588340
agcagaagucagcauaaug

SEQ ID NO: 858179 - RNA, 19 nt, Artificial Sequence
  Description of Artificial Sequence: Synthetic oligonucleotide
  Antisense strand to SEQ ID NO: 858178
cauuaugcugacuucugcu

SEQ ID NO: 858180 - RNA, 19 nt, Artificial Sequence
  Description of Artificial Sequence: Synthetic oligonucleotide
  Sense strand starting at position 104 of SEQ ID NO: 588341
agcaauuccugagacagag

SEQ ID NO: 858181 - RNA, 19 nt, Artificial Sequence
  Description of Artificial Sequence: Synthetic oligonucleotide
  Antisense strand to SEQ ID NO: 858180
cucugucucaggaauugcu

SEQ ID NO: 858182 - RNA, 19 nt, Artificial Sequence
  Description of Artificial Sequence: Synthetic oligonucleotide
  Sense strand starting at position 154 of SEQ ID NO: 588341
acacucaugccaugaguua

SEQ ID NO: 858183 - RNA, 19 nt, Artificial Sequence
  Description of Artificial Sequence: Synthetic oligonucleotide
  Antisense strand to SEQ ID NO: 858182
uaacucauggcaugagugu

SEQ ID NO: 858184 - RNA, 19 nt, Artificial Sequence
  Description of Artificial Sequence: Synthetic oligonucleotide
  Sense strand starting at position 194 of SEQ ID NO: 588341
acugguaucuuucuaggga

SEQ ID NO: 858185 - RNA, 19 nt, Artificial Sequence
  Description of Artificial Sequence: Synthetic oligonucleotide
  Antisense strand to SEQ ID NO: 858184
ucccuagaaagauaccagu

SEQ ID NO: 858186 - RNA, 19 nt, Artificial Sequence
  Description of Artificial Sequence: Synthetic oligonucleotide
  Sense strand starting at position 197 of SEQ ID NO: 588341
gguaucuuucuagggacag

SEQ ID NO: 858187 - RNA, 19 nt, Artificial Sequence
  Description of Artificial Sequence: Synthetic oligonucleotide
  Antisense strand to SEQ ID NO: 858186
cugucccuagaaagauacc

SEQ ID NO: 858188 - RNA, 19 nt, Artificial Sequence
  Description of Artificial Sequence: Synthetic oligonucleotide
  Sense strand starting at position 233 of SEQ ID NO: 588341
guauaacaauuggccuaau

SEQ ID NO: 858189 - RNA, 19 nt, Artificial Sequence
  Description of Artificial Sequence: Synthetic oligonucleotide
  Antisense strand to SEQ ID NO: 858188
auuaggccaauuguuauac

SEQ ID NO: 858190 - RNA, 19 nt, Artificial Sequence
  Description of Artificial Sequence: Synthetic oligonucleotide
  Sense strand starting at position 254 of SEQ ID NO: 588341
caucuuagaguuugguuaa

SEQ ID NO: 858191 - RNA, 19 nt, Artificial Sequence
  Description of Artificial Sequence: Synthetic oligonucleotide
  Antisense strand to SEQ ID NO: 858190
uuaaccaaacucuaagaug

SEQ ID NO: 858192 - RNA, 19 nt, Artificial Sequence
  Description of Artificial Sequence: Synthetic oligonucleotide
  Sense strand starting at position 257 of SEQ ID NO: 588341
cuuagaguuugguuaauua

SEQ ID NO: 858193 - RNA, 19 nt, Artificial Sequence
  Description of Artificial Sequence: Synthetic oligonucleotide
  Antisense strand to SEQ ID NO: 858192
uaauuaaccaaacucuaag

SEQ ID NO: 858194 - RNA, 19 nt, Artificial Sequence
  Description of Artificial Sequence: Synthetic oligonucleotide
  Sense strand starting at position 305 of SEQ ID NO: 588341
guguuagacacuuggcuau

SEQ ID NO: 858195 - RNA, 19 nt, Artificial Sequence
  Description of Artificial Sequence: Synthetic oligonucleotide
  Antisense strand to SEQ ID NO: 858194
auagccaagugucuaacac

SEQ ID NO: 858196 - RNA, 19 nt, Artificial Sequence
  Description of Artificial Sequence: Synthetic oligonucleotide
  Sense strand starting at position 1214 of SEQ ID NO: 588341
agcagcaucuuggcagaaa

SEQ ID NO: 858197 - RNA, 19 nt, Artificial Sequence
  Description of Artificial Sequence: Synthetic oligonucleotide
  Antisense strand to SEQ ID NO: 858196
uuucugccaagaugcugcu

SEQ ID NO: 858198 - RNA, 19 nt, Artificial Sequence
  Description of Artificial Sequence: Synthetic oligonucleotide
  Sense strand starting at position 1506 of SEQ ID NO: 588341
uucucauuagcaggagcau

SEQ ID NO: 858199 - RNA, 19 nt, Artificial Sequence
  Description of Artificial Sequence: Synthetic oligonucleotide
  Antisense strand to SEQ ID NO: 858198
augcuccugcuaaugagaa

SEQ ID NO: 858200 - RNA, 19 nt, Artificial Sequence
  Description of Artificial Sequence: Synthetic oligonucleotide
  Sense strand starting at position 1507 of SEQ ID NO: 588341
ucucauuagcaggagcaua

SEQ ID NO: 858201 - RNA, 19 nt, Artificial Sequence
  Description of Artificial Sequence: Synthetic oligonucleotide
  Antisense strand to SEQ ID NO: 858200
uaugcuccugcuaaugaga

SEQ ID NO: 858202 - RNA, 19 nt, Artificial Sequence
  Description of Artificial Sequence: Synthetic oligonucleotide
  Sense strand starting at position 1627 of SEQ ID NO: 588341
ucagaaauauguugauuuc

SEQ ID NO: 858203 - RNA, 19 nt, Artificial Sequence
  Description of Artificial Sequence: Synthetic oligonucleotide
  Antisense strand to SEQ ID NO: 858202
gaaaucaacauauuucuga

SEQ ID NO: 858204 - RNA, 19 nt, Artificial Sequence
  Description of Artificial Sequence: Synthetic oligonucleotide
  Sense strand starting at position 1781 of SEQ ID NO: 588341
augauuaugggucauccuu

SEQ ID NO: 858205 - RNA, 19 nt, Artificial Sequence
  Description of Artificial Sequence: Synthetic oligonucleotide
  Antisense strand to SEQ ID NO: 858204
aaggaugacccauaaucau

SEQ ID NO: 858206 - RNA, 19 nt, Artificial Sequence
  Description of Artificial Sequence: Synthetic oligonucleotide
  Sense strand starting at position 1789 of SEQ ID NO: 588341
gggucauccuucuuaccua

SEQ ID NO: 858207 - RNA, 19 nt, Artificial Sequence
  Description of Artificial Sequence: Synthetic oligonucleotide
  Antisense strand to SEQ ID NO: 858206
uagguaagaaggaugaccc

SEQ ID NO: 858208 - RNA, 19 nt, Artificial Sequence
  Description of Artificial Sequence: Synthetic oligonucleotide
  Sense strand starting at position 1984 of SEQ ID NO: 588341
cagguccugugucuaacua

SEQ ID NO: 858209 - RNA, 19 nt, Artificial Sequence
  Description of Artificial Sequence: Synthetic oligonucleotide
  Antisense strand to SEQ ID NO: 858208
uaguuagacacaggaccug

SEQ ID NO: 858210 - RNA, 19 nt, Artificial Sequence
  Description of Artificial Sequence: Synthetic oligonucleotide
  Sense strand starting at position 1991 of SEQ ID NO: 588341
ugugucuaacuaggacauu

SEQ ID NO: 858211 - RNA, 19 nt, Artificial Sequence
  Description of Artificial Sequence: Synthetic oligonucleotide
  Antisense strand to SEQ ID NO: 858210
aauguccuaguuagacaca

SEQ ID NO: 858212 - RNA, 19 nt, Artificial Sequence
  Description of Artificial Sequence: Synthetic oligonucleotide
  Sense strand starting at position 2002 of SEQ ID NO: 588341
aggacauuaugacaucacu

SEQ ID NO: 858213 - RNA, 19 nt, Artificial Sequence
  Description of Artificial Sequence: Synthetic oligonucleotide
  Antisense strand to SEQ ID NO: 858212
agugaugucauaauguccu

SEQ ID NO: 858214 - RNA, 19 nt, Artificial Sequence
  Description of Artificial Sequence: Synthetic oligonucleotide
  Sense strand starting at position 2008 of SEQ ID NO: 588341
uuaugacaucacugucaga

SEQ ID NO: 858215 - RNA, 19 nt, Artificial Sequence
  Description of Artificial Sequence: Synthetic oligonucleotide
  Antisense strand to SEQ ID NO: 858214
ucugacagugaugucauaa

SEQ ID NO: 858216 - RNA, 19 nt, Artificial Sequence
  Description of Artificial Sequence: Synthetic oligonucleotide
  Sense strand starting at position 2067 of SEQ ID NO: 588341
cuuugugacucagucugaa

SEQ ID NO: 858217 - RNA, 19 nt, Artificial Sequence
  Description of Artificial Sequence: Synthetic oligonucleotide
  Antisense strand to SEQ ID NO: 858216
uucagacugagucacaaag

SEQ ID NO: 858218 - RNA, 19 nt, Artificial Sequence
  Description of Artificial Sequence: Synthetic oligonucleotide
  Sense strand starting at position 2077 of SEQ ID NO: 588341
cagucugaagacugcuuua

SEQ ID NO: 858219 - RNA, 19 nt, Artificial Sequence
  Description of Artificial Sequence: Synthetic oligonucleotide
  Antisense strand to SEQ ID NO: 858218
uaaagcagucuucagacug

SEQ ID NO: 858220 - RNA, 19 nt, Artificial Sequence
  Description of Artificial Sequence: Synthetic oligonucleotide
  Sense strand starting at position 2080 of SEQ ID NO: 588341
ucugaagacugcuuuaucu

SEQ ID NO: 858221 - RNA, 19 nt, Artificial Sequence
  Description of Artificial Sequence: Synthetic oligonucleotide
  Antisense strand to SEQ ID NO: 858220
agauaaagcagucuucaga

SEQ ID NO: 858222 - RNA, 19 nt, Artificial Sequence
  Description of Artificial Sequence: Synthetic oligonucleotide
  Sense strand starting at position 2082 of SEQ ID NO: 588341
ugaagacugcuuuaucuca

SEQ ID NO: 858223 - RNA, 19 nt, Artificial Sequence
  Description of Artificial Sequence: Synthetic oligonucleotide
  Antisense strand to SEQ ID NO: 858222
ugagauaaagcagucuuca

SEQ ID NO: 858224 - RNA, 19 nt, Artificial Sequence
  Description of Artificial Sequence: Synthetic oligonucleotide
  Sense strand starting at position 2156 of SEQ ID NO: 588341
gaaaguuaauaaguguguu

SEQ ID NO: 858225 - RNA, 19 nt, Artificial Sequence
  Description of Artificial Sequence: Synthetic oligonucleotide
  Antisense strand to SEQ ID NO: 858224
aacacacuuauuaacuuuc

SEQ ID NO: 858226 - RNA, 19 nt, Artificial Sequence
  Description of Artificial Sequence: Synthetic oligonucleotide
  Sense strand starting at position 2297 of SEQ ID NO: 588341
gggacgaaugcgggaauaa

SEQ ID NO: 858227 - RNA, 19 nt, Artificial Sequence
  Description of Artificial Sequence: Synthetic oligonucleotide
  Antisense strand to SEQ ID NO: 858226
uuauucccgcauucguccc

SEQ ID NO: 858228 - RNA, 19 nt, Artificial Sequence
  Description of Artificial Sequence: Synthetic oligonucleotide
  Sense strand starting at position 2404 of SEQ ID NO: 588341
cuguauuuauuaggcaaga

SEQ ID NO: 858229 - RNA, 19 nt, Artificial Sequence
  Description of Artificial Sequence: Synthetic oligonucleotide
  Antisense strand to SEQ ID NO: 858228
ucuugccuaauaaauacag

SEQ ID NO: 858230 - RNA, 19 nt, Artificial Sequence
  Description of Artificial Sequence: Synthetic oligonucleotide
  Sense strand starting at position 2558 of SEQ ID NO: 588341
gcaggagcagucgugaguu

SEQ ID NO: 858231 - RNA, 19 nt, Artificial Sequence
  Description of Artificial Sequence: Synthetic oligonucleotide
  Antisense strand to SEQ ID NO: 858230
aacucacgacugcuccugc

SEQ ID NO: 858232 - RNA, 19 nt, Artificial Sequence
  Description of Artificial Sequence: Synthetic oligonucleotide
  Sense strand starting at position 2680 of SEQ ID NO: 588341
ccauuaauauuguuaagag

SEQ ID NO: 858233 - RNA, 19 nt, Artificial Sequence
  Description of Artificial Sequence: Synthetic oligonucleotide
  Antisense strand to SEQ ID NO: 858232
cucuuaacaauauuaaugg

SEQ ID NO: 858234 - RNA, 19 nt, Artificial Sequence
  Description of Artificial Sequence: Synthetic oligonucleotide
  Sense strand starting at position 3105 of SEQ ID NO: 588341
ugccaaaugcccuacaagu

SEQ ID NO: 858235 - RNA, 19 nt, Artificial Sequence
  Description of Artificial Sequence: Synthetic oligonucleotide
  Antisense strand to SEQ ID NO: 858234
acuuguagggcauuuggca

SEQ ID NO: 858236 - RNA, 19 nt, Artificial Sequence
  Description of Artificial Sequence: Synthetic oligonucleotide
  Sense strand starting at position 3136 of SEQ ID NO: 588341
guuaauggauuaucuuaac

SEQ ID NO: 858237 - RNA, 19 nt, Artificial Sequence
  Description of Artificial Sequence: Synthetic oligonucleotide
  Antisense strand to SEQ ID NO: 858236
guuaagauaauccauuaac

SEQ ID NO: 858238 - RNA, 19 nt, Artificial Sequence
  Description of Artificial Sequence: Synthetic oligonucleotide
  Sense strand starting at position 3356 of SEQ ID NO: 588341
cuugguugcauugaugaau

SEQ ID NO: 858239 - RNA, 19 nt, Artificial Sequence
  Description of Artificial Sequence: Synthetic oligonucleotide
  Antisense strand to SEQ ID NO: 858238
auucaucaaugcaaccaag

SEQ ID NO: 858240 - RNA, 19 nt, Artificial Sequence
  Description of Artificial Sequence: Synthetic oligonucleotide
  Sense strand starting at position 3367 of SEQ ID NO: 588341
ugaugaauuguauaguggu

SEQ ID NO: 858241 - RNA, 19 nt, Artificial Sequence
  Description of Artificial Sequence: Synthetic oligonucleotide
  Antisense strand to SEQ ID NO: 858240
accacuauacaauucauca

SEQ ID NO: 858242 - RNA, 19 nt, Artificial Sequence
  Description of Artificial Sequence: Synthetic oligonucleotide
  Sense strand starting at position 3414 of SEQ ID NO: 588341
cccgguaguguauauugaa

SEQ ID NO: 858243 - RNA, 19 nt, Artificial Sequence
  Description of Artificial Sequence: Synthetic oligonucleotide
  Antisense strand to SEQ ID NO: 858242
uucaauauacacuaccggg

SEQ ID NO: 858244 - RNA, 19 nt, Artificial Sequence
  Description of Artificial Sequence: Synthetic oligonucleotide
  Sense strand starting at position 3542 of SEQ ID NO: 588341
gcacuuauaagugagagca

SEQ ID NO: 858245 - RNA, 19 nt, Artificial Sequence
  Description of Artificial Sequence: Synthetic oligonucleotide
  Antisense strand to SEQ ID NO: 858244
ugcucucacuuauaagugc

SEQ ID NO: 858246 - RNA, 19 nt, Artificial Sequence
  Description of Artificial Sequence: Synthetic oligonucleotide
  Sense strand starting at position 3713 of SEQ ID NO: 588341
ucaguuaaugggcacuuaa

SEQ ID NO: 858247 - RNA, 19 nt, Artificial Sequence
  Description of Artificial Sequence: Synthetic oligonucleotide
  Antisense strand to SEQ ID NO: 858246
uuaagugcccauuaacuga

SEQ ID NO: 858248 - RNA, 19 nt, Artificial Sequence
  Description of Artificial Sequence: Synthetic oligonucleotide
  Sense strand starting at position 3755 of SEQ ID NO: 588341
gugaauugugcugggauaa

SEQ ID NO: 858249 - RNA, 19 nt, Artificial Sequence
  Description of Artificial Sequence: Synthetic oligonucleotide
  Antisense strand to SEQ ID NO: 858248
uuaucccagcacaauucac

SEQ ID NO: 858250 - RNA, 19 nt, Artificial Sequence
  Description of Artificial Sequence: Synthetic oligonucleotide
  Sense strand starting at position 3756 of SEQ ID NO: 588341
ugaauugugcugggauaaa

SEQ ID NO: 858251 - RNA, 19 nt, Artificial Sequence
  Description of Artificial Sequence: Synthetic oligonucleotide
  Antisense strand to SEQ ID NO: 858250
uuuaucccagcacaauuca

SEQ ID NO: 858252 - RNA, 19 nt, Artificial Sequence
  Description of Artificial Sequence: Synthetic oligonucleotide
  Sense strand starting at position 3767 of SEQ ID NO: 588341
gggauaaacauaugugugu

SEQ ID NO: 858253 - RNA, 19 nt, Artificial Sequence
  Description of Artificial Sequence: Synthetic oligonucleotide
  Antisense strand to SEQ ID NO: 858252
acacacauauguuuauccc

SEQ ID NO: 858254 - RNA, 19 nt, Artificial Sequence
  Description of Artificial Sequence: Synthetic oligonucleotide
  Sense strand starting at position 3768 of SEQ ID NO: 588341
ggauaaacauaugugugua

SEQ ID NO: 858255 - RNA, 19 nt, Artificial Sequence
  Description of Artificial Sequence: Synthetic oligonucleotide
  Antisense strand to SEQ ID NO: 858254
uacacacauauguuuaucc

SEQ ID NO: 858256 - RNA, 19 nt, Artificial Sequence
  Description of Artificial Sequence: Synthetic oligonucleotide
  Sense strand starting at position 3838 of SEQ ID NO: 588341
ugggauugcaaaggguaga

SEQ ID NO: 858257 - RNA, 19 nt, Artificial Sequence
  Description of Artificial Sequence: Synthetic oligonucleotide
  Antisense strand to SEQ ID NO: 858256
ucuacccuuugcaauccca

SEQ ID NO: 858258 - RNA, 19 nt, Artificial Sequence
  Description of Artificial Sequence: Synthetic oligonucleotide
  Sense strand starting at position 3839 of SEQ ID NO: 588341
gggauugcaaaggguagau

SEQ ID NO: 858259 - RNA, 19 nt, Artificial Sequence
  Description of Artificial Sequence: Synthetic oligonucleotide
  Antisense strand to SEQ ID NO: 858258
aucuacccuuugcaauccc

SEQ ID NO: 858260 - RNA, 19 nt, Artificial Sequence
  Description of Artificial Sequence: Synthetic oligonucleotide
  Sense strand starting at position 181 of SEQ ID NO: 588342
gugcuaugagaagggagua

SEQ ID NO: 858261 - RNA, 19 nt, Artificial Sequence
  Description of Artificial Sequence: Synthetic oligonucleotide
  Antisense strand to SEQ ID NO: 858260
uacucccuucucauagcac

SEQ ID NO: 858262 - RNA, 19 nt, Artificial Sequence
  Description of Artificial Sequence: Synthetic oligonucleotide
  Sense strand starting at position 227 of SEQ ID NO: 588342
gggucuaagaacuguaucu

SEQ ID NO: 858263 - RNA, 19 nt, Artificial Sequence
  Description of Artificial Sequence: Synthetic oligonucleotide
  Antisense strand to SEQ ID NO: 858262
agauacaguucuuagaccc

SEQ ID NO: 858264 - RNA, 19 nt, Artificial Sequence
  Description of Artificial Sequence: Synthetic oligonucleotide
  Sense strand starting at position 229 of SEQ ID NO: 588342
gucuaagaacuguaucuca

SEQ ID NO: 858265 - RNA, 19 nt, Artificial Sequence
  Description of Artificial Sequence: Synthetic oligonucleotide
  Antisense strand to SEQ ID NO: 858264
ugagauacaguucuuagac

SEQ ID NO: 858266 - RNA, 19 nt, Artificial Sequence
  Description of Artificial Sequence: Synthetic oligonucleotide
  Sense strand starting at position 238 of SEQ ID NO: 588342
cuguaucucagauaagugu

SEQ ID NO: 858267 - RNA, 19 nt, Artificial Sequence
  Description of Artificial Sequence: Synthetic oligonucleotide
  Antisense strand to SEQ ID NO: 858266
acacuuaucugagauacag

SEQ ID NO: 858268 - RNA, 19 nt, Artificial Sequence
  Description of Artificial Sequence: Synthetic oligonucleotide
  Sense strand starting at position 329 of SEQ ID NO: 588342
gauaauuucuaggacgaaa

SEQ ID NO: 858269 - RNA, 19 nt, Artificial Sequence
  Description of Artificial Sequence: Synthetic oligonucleotide
  Antisense strand to SEQ ID NO: 858268
uuucguccuagaaauuauc

SEQ ID NO: 858270 - RNA, 19 nt, Artificial Sequence
  Description of Artificial Sequence: Synthetic oligonucleotide
  Sense strand starting at position 369 of SEQ ID NO: 588342
uggaaucucucaguaucca

SEQ ID NO: 858271 - RNA, 19 nt, Artificial Sequence
  Description of Artificial Sequence: Synthetic oligonucleotide
  Antisense strand to SEQ ID NO: 858270
uggauacugagagauucca

SEQ ID NO: 858272 - RNA, 19 nt, Artificial Sequence
  Description of Artificial Sequence: Synthetic oligonucleotide
  Sense strand starting at position 415 of SEQ ID NO: 588342
aagauuuccuguuggauuu

SEQ ID NO: 858273 - RNA, 19 nt, Artificial Sequence
  Description of Artificial Sequence: Synthetic oligonucleotide
  Antisense strand to SEQ ID NO: 858272
aaauccaacaggaaaucuu

SEQ ID NO: 858274 - RNA, 19 nt, Artificial Sequence
  Description of Artificial Sequence: Synthetic oligonucleotide
  Sense strand starting at position 564 of SEQ ID NO: 588342
ucaagcauuccucaagggu

SEQ ID NO: 858275 - RNA, 19 nt, Artificial Sequence
  Description of Artificial Sequence: Synthetic oligonucleotide
  Antisense strand to SEQ ID NO: 858274
acccuugaggaaugcuuga

SEQ ID NO: 858276 - RNA, 19 nt, Artificial Sequence
  Description of Artificial Sequence: Synthetic oligonucleotide
  Sense strand starting at position 636 of SEQ ID NO: 588342
uaccaagagugacuagauu

SEQ ID NO: 858277 - RNA, 19 nt, Artificial Sequence
  Description of Artificial Sequence: Synthetic oligonucleotide
  Antisense strand to SEQ ID NO: 858276
aaucuagucacucuuggua

SEQ ID NO: 858278 - RNA, 19 nt, Artificial Sequence
  Description of Artificial Sequence: Synthetic oligonucleotide
  Sense strand starting at position 753 of SEQ ID NO: 588342
gaauuacagcgucaucaau

SEQ ID NO: 858279 - RNA, 19 nt, Artificial Sequence
  Description of Artificial Sequence: Synthetic oligonucleotide
  Antisense strand to SEQ ID NO: 858278
auugaugacgcuguaauuc

SEQ ID NO: 858280 - RNA, 19 nt, Artificial Sequence
  Description of Artificial Sequence: Synthetic oligonucleotide
  Sense strand starting at position 809 of SEQ ID NO: 588342
ucugaacuuuagcucugaa

SEQ ID NO: 858281 - RNA, 19 nt, Artificial Sequence
  Description of Artificial Sequence: Synthetic oligonucleotide
  Antisense strand to SEQ ID NO: 858280
uucagagcuaaaguucaga

SEQ ID NO: 858282 - RNA, 19 nt, Artificial Sequence
  Description of Artificial Sequence: Synthetic oligonucleotide
  Sense strand starting at position 845 of SEQ ID NO: 588342
aucgauaucuuccucaaag

SEQ ID NO: 858283 - RNA, 19 nt, Artificial Sequence
  Description of Artificial Sequence: Synthetic oligonucleotide
  Antisense strand to SEQ ID NO: 858282
cuuugaggaagauaucgau

SEQ ID NO: 858284 - RNA, 19 nt, Artificial Sequence
  Description of Artificial Sequence: Synthetic oligonucleotide
  Sense strand starting at position 846 of SEQ ID NO: 588342
ucgauaucuuccucaaagg

SEQ ID NO: 858285 - RNA, 19 nt, Artificial Sequence
  Description of Artificial Sequence: Synthetic oligonucleotide
  Antisense strand to SEQ ID NO: 858284
ccuuugaggaagauaucga

SEQ ID NO: 858286 - RNA, 19 nt, Artificial Sequence
  Description of Artificial Sequence: Synthetic oligonucleotide
  Sense strand starting at position 886 of SEQ ID NO: 588342
uauugcugggcucaggaaa

SEQ ID NO: 858287 - RNA, 19 nt, Artificial Sequence
  Description of Artificial Sequence: Synthetic oligonucleotide
  Antisense strand to SEQ ID NO: 858286
uuuccugagcccagcaaua

SEQ ID NO: 858288 - RNA, 19 nt, Artificial Sequence
  Description of Artificial Sequence: Synthetic oligonucleotide
  Sense strand starting at position 988 of SEQ ID NO: 588342
ugacuugugguagauaauc

SEQ ID NO: 858289 - RNA, 19 nt, Artificial Sequence
  Description of Artificial Sequence: Synthetic oligonucleotide
  Antisense strand to SEQ ID NO: 858288
gauuaucuaccacaaguca

SEQ ID NO: 858290 - RNA, 19 nt, Artificial Sequence
  Description of Artificial Sequence: Synthetic oligonucleotide
  Sense strand starting at position 1036 of SEQ ID NO: 588342
agaauauaaugcccugacu

SEQ ID NO: 858291 - RNA, 19 nt, Artificial Sequence
  Description of Artificial Sequence: Synthetic oligonucleotide
  Antisense strand to SEQ ID NO: 858290
agucagggcauuauauucu

SEQ ID NO: 858292 - RNA, 19 nt, Artificial Sequence
  Description of Artificial Sequence: Synthetic oligonucleotide
  Sense strand starting at position 1295 of SEQ ID NO: 588342
aaaguugcucagcaaguaa

SEQ ID NO: 858293 - RNA, 19 nt, Artificial Sequence
  Description of Artificial Sequence: Synthetic oligonucleotide
  Antisense strand to SEQ ID NO: 858292
uuacuugcugagcaacuuu

SEQ ID NO: 858294 - RNA, 19 nt, Artificial Sequence
  Description of Artificial Sequence: Synthetic oligonucleotide
  Sense strand starting at position 1366 of SEQ ID NO: 588342
aacacugaaucggagauuu

SEQ ID NO: 858295 - RNA, 19 nt, Artificial Sequence
  Description of Artificial Sequence: Synthetic oligonucleotide
  Antisense strand to SEQ ID NO: 858294
aaaucuccgauucaguguu

SEQ ID NO: 858296 - RNA, 19 nt, Artificial Sequence
  Description of Artificial Sequence: Synthetic oligonucleotide
  Sense strand starting at position 2007 of SEQ ID NO: 588342
gggaucucgcgagaacgaa

SEQ ID NO: 858297 - RNA, 19 nt, Artificial Sequence
  Description of Artificial Sequence: Synthetic oligonucleotide
  Antisense strand to SEQ ID NO: 858296
uucguucucgcgagauccc

SEQ ID NO: 858298 - RNA, 19 nt, Artificial Sequence
  Description of Artificial Sequence: Synthetic oligonucleotide
  Sense strand starting at position 2310 of SEQ ID NO: 588342
accaguccuuccuuggaga

SEQ ID NO: 858299 - RNA, 19 nt, Artificial Sequence
  Description of Artificial Sequence: Synthetic oligonucleotide
  Antisense strand to SEQ ID NO: 858298
ucuccaaggaaggacuggu

SEQ ID NO: 858300 - RNA, 19 nt, Artificial Sequence
  Description of Artificial Sequence: Synthetic oligonucleotide
  Sense strand starting at position 2386 of SEQ ID NO: 588342
acuuuauagugagucauaa

SEQ ID NO: 858301 - RNA, 19 nt, Artificial Sequence
  Description of Artificial Sequence: Synthetic oligonucleotide
  Antisense strand to SEQ ID NO: 858300
uuaugacucacuauaaagu

SEQ ID NO: 858302 - RNA, 19 nt, Artificial Sequence
  Description of Artificial Sequence: Synthetic oligonucleotide
  Sense strand starting at position 2714 of SEQ ID NO: 588342
gccuguauccguucccuau

SEQ ID NO: 858303 - RNA, 19 nt, Artificial Sequence
  Description of Artificial Sequence: Synthetic oligonucleotide
  Antisense strand to SEQ ID NO: 858302
auagggaacggauacaggc

SEQ ID NO: 858304 - RNA, 19 nt, Artificial Sequence
  Description of Artificial Sequence: Synthetic oligonucleotide
  Sense strand starting at position 2872 of SEQ ID NO: 588342
ggugacuccacaggacaau

SEQ ID NO: 858305 - RNA, 19 nt, Artificial Sequence
  Description of Artificial Sequence: Synthetic oligonucleotide
  Antisense strand to SEQ ID NO: 858304
auuguccuguggagucacc

SEQ ID NO: 858306 - RNA, 19 nt, Artificial Sequence
  Description of Artificial Sequence: Synthetic oligonucleotide
  Sense strand starting at position 2881 of SEQ ID NO: 588342
acaggacaauccuuagcuu

SEQ ID NO: 858307 - RNA, 19 nt, Artificial Sequence
  Description of Artificial Sequence: Synthetic oligonucleotide
  Antisense strand to SEQ ID NO: 858306
aagcuaaggauuguccugu

SEQ ID NO: 858308 - RNA, 19 nt, Artificial Sequence
  Description of Artificial Sequence: Synthetic oligonucleotide
  Sense strand starting at position 3028 of SEQ ID NO: 588342
gagggcucaccugaguaau

SEQ ID NO: 858309 - RNA, 19 nt, Artificial Sequence
  Description of Artificial Sequence: Synthetic oligonucleotide
  Antisense strand to SEQ ID NO: 858308
auuacucaggugagcccuc

SEQ ID NO: 858310 - RNA, 19 nt, Artificial Sequence
  Description of Artificial Sequence: Synthetic oligonucleotide
  Sense strand starting at position 3031 of SEQ ID NO: 588342
ggcucaccugaguaaucca

SEQ ID NO: 858311 - RNA, 19 nt, Artificial Sequence
  Description of Artificial Sequence: Synthetic oligonucleotide
  Antisense strand to SEQ ID NO: 858310
uggauuacucaggugagcc

SEQ ID NO: 858312 - RNA, 19 nt, Artificial Sequence
  Description of Artificial Sequence: Synthetic oligonucleotide
  Sense strand starting at position 3034 of SEQ ID NO: 588342
ucaccugaguaauccagga

SEQ ID NO: 858313 - RNA, 19 nt, Artificial Sequence
  Description of Artificial Sequence: Synthetic oligonucleotide
  Antisense strand to SEQ ID NO: 858312
uccuggauuacucagguga

SEQ ID NO: 858314 - RNA, 19 nt, Artificial Sequence
  Description of Artificial Sequence: Synthetic oligonucleotide
  Sense strand starting at position 3038 of SEQ ID NO: 588342
cugaguaauccaggaucau

SEQ ID NO: 858315 - RNA, 19 nt, Artificial Sequence
  Description of Artificial Sequence: Synthetic oligonucleotide
  Antisense strand to SEQ ID NO: 858314
augauccuggauuacucag

SEQ ID NO: 858316 - RNA, 19 nt, Artificial Sequence
  Description of Artificial Sequence: Synthetic oligonucleotide
  Sense strand starting at position 3079 of SEQ ID NO: 588342
ccuugaucacaucagcaga

SEQ ID NO: 858317 - RNA, 19 nt, Artificial Sequence
  Description of Artificial Sequence: Synthetic oligonucleotide
  Antisense strand to SEQ ID NO: 858316
ucugcugaugugaucaagg

SEQ ID NO: 858318 - RNA, 19 nt, Artificial Sequence
  Description of Artificial Sequence: Synthetic oligonucleotide
  Sense strand starting at position 3081 of SEQ ID NO: 588342
uugaucacaucagcagaau

SEQ ID NO: 858319 - RNA, 19 nt, Artificial Sequence
  Description of Artificial Sequence: Synthetic oligonucleotide
  Antisense strand to SEQ ID NO: 858318
auucugcugaugugaucaa

SEQ ID NO: 858320 - RNA, 19 nt, Artificial Sequence
  Description of Artificial Sequence: Synthetic oligonucleotide
  Sense strand starting at position 3125 of SEQ ID NO: 588342
ucacgaauuccggaaauua

SEQ ID NO: 858321 - RNA, 19 nt, Artificial Sequence
  Description of Artificial Sequence: Synthetic oligonucleotide
  Antisense strand to SEQ ID NO: 858320
uaauuuccggaauucguga

SEQ ID NO: 858322 - RNA, 19 nt, Artificial Sequence
  Description of Artificial Sequence: Synthetic oligonucleotide
  Sense strand starting at position 3222 of SEQ ID NO: 588342
aucucaauucuauggcaga

SEQ ID NO: 858323 - RNA, 19 nt, Artificial Sequence
  Description of Artificial Sequence: Synthetic oligonucleotide
  Antisense strand to SEQ ID NO: 858322
ucugccauagaauugagau

SEQ ID NO: 858324 - RNA, 19 nt, Artificial Sequence
  Description of Artificial Sequence: Synthetic oligonucleotide
  Sense strand starting at position 3317 of SEQ ID NO: 588342
cuuuaagccuaagugaaac

SEQ ID NO: 858325 - RNA, 19 nt, Artificial Sequence
  Description of Artificial Sequence: Synthetic oligonucleotide
  Antisense strand to SEQ ID NO: 858324
guuucacuuaggcuuaaag

SEQ ID NO: 858326 - RNA, 19 nt, Artificial Sequence
  Description of Artificial Sequence: Synthetic oligonucleotide
  Sense strand starting at position 3358 of SEQ ID NO: 588342
ugaguuguuggccagauca

SEQ ID NO: 858327 - RNA, 19 nt, Artificial Sequence
  Description of Artificial Sequence: Synthetic oligonucleotide
  Antisense strand to SEQ ID NO: 858326
ugaucuggccaacaacuca

SEQ ID NO: 858328 - RNA, 19 nt, Artificial Sequence
  Description of Artificial Sequence: Synthetic oligonucleotide
  Sense strand starting at position 3547 of SEQ ID NO: 588342
augcauccacuugaaaguu

SEQ ID NO: 858329 - RNA, 19 nt, Artificial Sequence
  Description of Artificial Sequence: Synthetic oligonucleotide
  Antisense strand to SEQ ID NO: 858328
aacuuucaaguggaugcau

SEQ ID NO: 858330 - RNA, 19 nt, Artificial Sequence
  Description of Artificial Sequence: Synthetic oligonucleotide
  Sense strand starting at position 3571 of SEQ ID NO: 588342
cuacauagccauuauguca

SEQ ID NO: 858331 - RNA, 19 nt, Artificial Sequence
  Description of Artificial Sequence: Synthetic oligonucleotide
  Antisense strand to SEQ ID NO: 858330
ugacauaauggcuauguag

SEQ ID NO: 858332 - RNA, 19 nt, Artificial Sequence
  Description of Artificial Sequence: Synthetic oligonucleotide
  Sense strand starting at position 3903 of SEQ ID NO: 588342
uguaauucuugauucugac

SEQ ID NO: 858333 - RNA, 19 nt, Artificial Sequence
  Description of Artificial Sequence: Synthetic oligonucleotide
  Antisense strand to SEQ ID NO: 858332
gucagaaucaagaauuaca

SEQ ID NO: 858334 - RNA, 19 nt, Artificial Sequence
  Description of Artificial Sequence: Synthetic oligonucleotide
  Sense strand starting at position 3918 of SEQ ID NO: 588342
ugacaugcacccugauauu

SEQ ID NO: 858335 - RNA, 19 nt, Artificial Sequence
  Description of Artificial Sequence: Synthetic oligonucleotide
  Antisense strand to SEQ ID NO: 858334
aauaucagggugcauguca

SEQ ID NO: 858336 - RNA, 19 nt, Artificial Sequence
  Description of Artificial Sequence: Synthetic oligonucleotide
  Sense strand starting at position 3964 of SEQ ID NO: 588342
cugcuuguuauugauggau

SEQ ID NO: 858337 - RNA, 19 nt, Artificial Sequence
  Description of Artificial Sequence: Synthetic oligonucleotide
  Antisense strand to SEQ ID NO: 858336
auccaucaauaacaagcag

SEQ ID NO: 858338 - RNA, 19 nt, Artificial Sequence
  Description of Artificial Sequence: Synthetic oligonucleotide
  Sense strand starting at position 3967 of SEQ ID NO: 588342
cuuguuauugauggauuau

SEQ ID NO: 858339 - RNA, 19 nt, Artificial Sequence
  Description of Artificial Sequence: Synthetic oligonucleotide
  Antisense strand to SEQ ID NO: 858338
auaauccaucaauaacaag

SEQ ID NO: 858340 - RNA, 19 nt, Artificial Sequence
  Description of Artificial Sequence: Synthetic oligonucleotide
  Sense strand starting at position 584 of SEQ ID NO: 588343
acuccugaacguuacagau

SEQ ID NO: 858341 - RNA, 19 nt, Artificial Sequence
  Description of Artificial Sequence: Synthetic oligonucleotide
  Antisense strand to SEQ ID NO: 858340
aucuguaacguucaggagu

SEQ ID NO: 858342 - RNA, 19 nt, Artificial Sequence
  Description of Artificial Sequence: Synthetic oligonucleotide
  Sense strand starting at position 596 of SEQ ID NO: 588343
uacagauucuggguuaaug

SEQ ID NO: 858343 - RNA, 19 nt, Artificial Sequence
  Description of Artificial Sequence: Synthetic oligonucleotide
  Antisense strand to SEQ ID NO: 858342
cauuaacccagaaucugua

SEQ ID NO: 858344 - RNA, 19 nt, Artificial Sequence
  Description of Artificial Sequence: Synthetic oligonucleotide
  Sense strand starting at position 624 of SEQ ID NO: 588343
agcagaaaccaaugagcaa

SEQ ID NO: 858345 - RNA, 19 nt, Artificial Sequence
  Description of Artificial Sequence: Synthetic oligonucleotide
  Antisense strand to SEQ ID NO: 858344
uugcucauugguuucugcu

SEQ ID NO: 858346 - RNA, 19 nt, Artificial Sequence
  Description of Artificial Sequence: Synthetic oligonucleotide
  Sense strand starting at position 1064 of SEQ ID NO: 588343
acugcagggaucugagaau

SEQ ID NO: 858347 - RNA, 19 nt, Artificial Sequence
  Description of Artificial Sequence: Synthetic oligonucleotide
  Antisense strand to SEQ ID NO: 858346
auucucagaucccugcagu

SEQ ID NO: 858348 - RNA, 19 nt, Artificial Sequence
  Description of Artificial Sequence: Synthetic oligonucleotide
  Sense strand starting at position 1075 of SEQ ID NO: 588343
cugagaauuuaucagacug

SEQ ID NO: 858349 - RNA, 19 nt, Artificial Sequence
  Description of Artificial Sequence: Synthetic oligonucleotide
  Antisense strand to SEQ ID NO: 858348
cagucugauaaauucucag

SEQ ID NO: 858350 - RNA, 19 nt, Artificial Sequence
  Description of Artificial Sequence: Synthetic oligonucleotide
  Sense strand starting at position 1112 of SEQ ID NO: 588343
ggcgguguuccagaaagag

SEQ ID NO: 858351 - RNA, 19 nt, Artificial Sequence
  Description of Artificial Sequence: Synthetic oligonucleotide
  Antisense strand to SEQ ID NO: 858350
cucuuucuggaacaccgcc

SEQ ID NO: 858352 - RNA, 19 nt, Artificial Sequence
  Description of Artificial Sequence: Synthetic oligonucleotide
  Sense strand starting at position 1154 of SEQ ID NO: 588343
ggcuguaacccucagaaag

SEQ ID NO: 858353 - RNA, 19 nt, Artificial Sequence
  Description of Artificial Sequence: Synthetic oligonucleotide
  Antisense strand to SEQ ID NO: 858352
cuuucugaggguuacagcc

SEQ ID NO: 858354 - RNA, 19 nt, Artificial Sequence
  Description of Artificial Sequence: Synthetic oligonucleotide
  Sense strand starting at position 1170 of SEQ ID NO: 588343
aaguuagaacagugcacua

SEQ ID NO: 858355 - RNA, 19 nt, Artificial Sequence
  Description of Artificial Sequence: Synthetic oligonucleotide
  Antisense strand to SEQ ID NO: 858354
uagugcacuguucuaacuu

SEQ ID NO: 858356 - RNA, 19 nt, Artificial Sequence
  Description of Artificial Sequence: Synthetic oligonucleotide
  Sense strand starting at position 1290 of SEQ ID NO: 588343
gaagcuguuccagaauaug

SEQ ID NO: 858357 - RNA, 19 nt, Artificial Sequence
  Description of Artificial Sequence: Synthetic oligonucleotide
  Antisense strand to SEQ ID NO: 858356
cauauucuggaacagcuuc

SEQ ID NO: 858358 - RNA, 19 nt, Artificial Sequence
  Description of Artificial Sequence: Synthetic oligonucleotide
  Sense strand starting at position 2060 of SEQ ID NO: 588343
gggccaaacuucuucugau

SEQ ID NO: 858359 - RNA, 19 nt, Artificial Sequence
  Description of Artificial Sequence: Synthetic oligonucleotide
  Antisense strand to SEQ ID NO: 858358
aucagaagaaguuuggccc

SEQ ID NO: 858360 - RNA, 19 nt, Artificial Sequence
  Description of Artificial Sequence: Synthetic oligonucleotide
  Sense strand starting at position 2061 of SEQ ID NO: 588343
ggccaaacuucuucugauu

SEQ ID NO: 858361 - RNA, 19 nt, Artificial Sequence
  Description of Artificial Sequence: Synthetic oligonucleotide
  Antisense strand to SEQ ID NO: 858360
aaucagaagaaguuuggcc

SEQ ID NO: 858362 - RNA, 19 nt, Artificial Sequence
  Description of Artificial Sequence: Synthetic oligonucleotide
  Sense strand starting at position 2326 of SEQ ID NO: 588343
ggcuuucguaaggaaggaa

SEQ ID NO: 858363 - RNA, 19 nt, Artificial Sequence
  Description of Artificial Sequence: Synthetic oligonucleotide
  Antisense strand to SEQ ID NO: 858362
uuccuuccuuacgaaagcc

SEQ ID NO: 858364 - RNA, 19 nt, Artificial Sequence
  Description of Artificial Sequence: Synthetic oligonucleotide
  Sense strand starting at position 2329 of SEQ ID NO: 588343
uuucguaaggaaggaauau

SEQ ID NO: 858365 - RNA, 19 nt, Artificial Sequence
  Description of Artificial Sequence: Synthetic oligonucleotide
  Antisense strand to SEQ ID NO: 858364
auauuccuuccuuacgaaa

SEQ ID NO: 858366 - RNA, 19 nt, Artificial Sequence
  Description of Artificial Sequence: Synthetic oligonucleotide
  Sense strand starting at position 2560 of SEQ ID NO: 588343
ggucaaguccuuuaauaca

SEQ ID NO: 858367 - RNA, 19 nt, Artificial Sequence
  Description of Artificial Sequence: Synthetic oligonucleotide
  Antisense strand to SEQ ID NO: 858366
uguauuaaaggacuugacc

SEQ ID NO: 858368 - RNA, 19 nt, Artificial Sequence
  Description of Artificial Sequence: Synthetic oligonucleotide
  Sense strand starting at position 2614 of SEQ ID NO: 588343
ggaaauaucuuuguuccca

SEQ ID NO: 858369 - RNA, 19 nt, Artificial Sequence
  Description of Artificial Sequence: Synthetic oligonucleotide
  Antisense strand to SEQ ID NO: 858368
ugggaacaaagauauuucc

SEQ ID NO: 858370 - RNA, 19 nt, Artificial Sequence
  Description of Artificial Sequence: Synthetic oligonucleotide
  Sense strand starting at position 2700 of SEQ ID NO: 588343
acagcauucuguuccacua

SEQ ID NO: 858371 - RNA, 19 nt, Artificial Sequence
  Description of Artificial Sequence: Synthetic oligonucleotide
  Antisense strand to SEQ ID NO: 858370
uaguggaacagaaugcugu

SEQ ID NO: 858372 - RNA, 19 nt, Artificial Sequence
  Description of Artificial Sequence: Synthetic oligonucleotide
  Sense strand starting at position 2814 of SEQ ID NO: 588343
agauccuagugauuaucua

SEQ ID NO: 858373 - RNA, 19 nt, Artificial Sequence
  Description of Artificial Sequence: Synthetic oligonucleotide
  Antisense strand to SEQ ID NO: 858372
uagauaaucacuaggaucu

SEQ ID NO: 858374 - RNA, 19 nt, Artificial Sequence
  Description of Artificial Sequence: Synthetic oligonucleotide
  Sense strand starting at position 2818 of SEQ ID NO: 588343
ccuagugauuaucuagucu

SEQ ID NO: 858375 - RNA, 19 nt, Artificial Sequence
  Description of Artificial Sequence: Synthetic oligonucleotide
  Antisense strand to SEQ ID NO: 858374
agacuagauaaucacuagg

SEQ ID NO: 858376 - RNA, 19 nt, Artificial Sequence
  Description of Artificial Sequence: Synthetic oligonucleotide
  Sense strand starting at position 2903 of SEQ ID NO: 588343
cuacauuagcaugagcauu

SEQ ID NO: 858377 - RNA, 19 nt, Artificial Sequence
  Description of Artificial Sequence: Synthetic oligonucleotide
  Antisense strand to SEQ ID NO: 858376
aaugcucaugcuaauguag

SEQ ID NO: 858378 - RNA, 19 nt, Artificial Sequence
  Description of Artificial Sequence: Synthetic oligonucleotide
  Sense strand starting at position 2905 of SEQ ID NO: 588343
acauuagcaugagcauuaa

SEQ ID NO: 858379 - RNA, 19 nt, Artificial Sequence
  Description of Artificial Sequence: Synthetic oligonucleotide
  Antisense strand to SEQ ID NO: 858378
uuaaugcucaugcuaaugu

SEQ ID NO: 858380 - RNA, 19 nt, Artificial Sequence
  Description of Artificial Sequence: Synthetic oligonucleotide
  Sense strand starting at position 3126 of SEQ ID NO: 588343
ucacaugcuguuugaauua

SEQ ID NO: 858381 - RNA, 19 nt, Artificial Sequence
  Description of Artificial Sequence: Synthetic oligonucleotide
  Antisense strand to SEQ ID NO: 858380
uaauucaaacagcauguga

SEQ ID NO: 858382 - RNA, 19 nt, Artificial Sequence
  Description of Artificial Sequence: Synthetic oligonucleotide
  Sense strand starting at position 3135 of SEQ ID NO: 588343
guuugaauuaccuggagug

SEQ ID NO: 858383 - RNA, 19 nt, Artificial Sequence
  Description of Artificial Sequence: Synthetic oligonucleotide
  Antisense strand to SEQ ID NO: 858382
cacuccagguaauucaaac

SEQ ID NO: 858384 - RNA, 19 nt, Artificial Sequence
  Description of Artificial Sequence: Synthetic oligonucleotide
  Sense strand starting at position 3136 of SEQ ID NO: 588343
uuugaauuaccuggagugu

SEQ ID NO: 858385 - RNA, 19 nt, Artificial Sequence
  Description of Artificial Sequence: Synthetic oligonucleotide
  Antisense strand to SEQ ID NO: 858384
acacuccagguaauucaaa

SEQ ID NO: 858386 - RNA, 19 nt, Artificial Sequence
  Description of Artificial Sequence: Synthetic oligonucleotide
  Sense strand starting at position 3137 of SEQ ID NO: 588343
uugaauuaccuggaguguu

SEQ ID NO: 858387 - RNA, 19 nt, Artificial Sequence
  Description of Artificial Sequence: Synthetic oligonucleotide
  Antisense strand to SEQ ID NO: 858386
aacacuccagguaauucaa

SEQ ID NO: 858388 - RNA, 19 nt, Artificial Sequence
  Description of Artificial Sequence: Synthetic oligonucleotide
  Sense strand starting at position 3212 of SEQ ID NO: 588343
gugguacuuccucaagcaa

SEQ ID NO: 858389 - RNA, 19 nt, Artificial Sequence
  Description of Artificial Sequence: Synthetic oligonucleotide
  Antisense strand to SEQ ID NO: 858388
uugcuugaggaaguaccac

SEQ ID NO: 858390 - RNA, 19 nt, Artificial Sequence
  Description of Artificial Sequence: Synthetic oligonucleotide
  Sense strand starting at position 3399 of SEQ ID NO: 588343
gacacauaguauguaguca

SEQ ID NO: 858391 - RNA, 19 nt, Artificial Sequence
  Description of Artificial Sequence: Synthetic oligonucleotide
  Antisense strand to SEQ ID NO: 858390
ugacuacauacuauguguc

SEQ ID NO: 858392 - RNA, 19 nt, Artificial Sequence
  Description of Artificial Sequence: Synthetic oligonucleotide
  Sense strand starting at position 3403 of SEQ ID NO: 588343
cauaguauguagucaauag

SEQ ID NO: 858393 - RNA, 19 nt, Artificial Sequence
  Description of Artificial Sequence: Synthetic oligonucleotide
  Antisense strand to SEQ ID NO: 858392
cuauugacuacauacuaug

SEQ ID NO: 858394 - RNA, 19 nt, Artificial Sequence
  Description of Artificial Sequence: Synthetic oligonucleotide
  Sense strand starting at position 3404 of SEQ ID NO: 588343
auaguauguagucaauaga

SEQ ID NO: 858395 - RNA, 19 nt, Artificial Sequence
  Description of Artificial Sequence: Synthetic oligonucleotide
  Antisense strand to SEQ ID NO: 858394
ucuauugacuacauacuau

SEQ ID NO: 858396 - RNA, 19 nt, Artificial Sequence
  Description of Artificial Sequence: Synthetic oligonucleotide
  Sense strand starting at position 3407 of SEQ ID NO: 588343
guauguagucaauagauau

SEQ ID NO: 858397 - RNA, 19 nt, Artificial Sequence
  Description of Artificial Sequence: Synthetic oligonucleotide
  Antisense strand to SEQ ID NO: 858396
auaucuauugacuacauac

SEQ ID NO: 858398 - RNA, 19 nt, Artificial Sequence
  Description of Artificial Sequence: Synthetic oligonucleotide
  Sense strand starting at position 3505 of SEQ ID NO: 588343
gucuguaagcacuaugaga

SEQ ID NO: 858399 - RNA, 19 nt, Artificial Sequence
  Description of Artificial Sequence: Synthetic oligonucleotide
  Antisense strand to SEQ ID NO: 858398
ucucauagugcuuacagac

SEQ ID NO: 858400 - RNA, 19 nt, Artificial Sequence
  Description of Artificial Sequence: Synthetic oligonucleotide
  Sense strand starting at position 3507 of SEQ ID NO: 588343
cuguaagcacuaugagacu

SEQ ID NO: 858401 - RNA, 19 nt, Artificial Sequence
  Description of Artificial Sequence: Synthetic oligonucleotide
  Antisense strand to SEQ ID NO: 858400
agucucauagugcuuacag

SEQ ID NO: 858402 - RNA, 19 nt, Artificial Sequence
  Description of Artificial Sequence: Synthetic oligonucleotide
  Sense strand starting at position 3568 of SEQ ID NO: 588343
ugcuuagcucuggauaaga

SEQ ID NO: 858403 - RNA, 19 nt, Artificial Sequence
  Description of Artificial Sequence: Synthetic oligonucleotide
  Antisense strand to SEQ ID NO: 858402
ucuuauccagagcuaagca

SEQ ID NO: 858404 - RNA, 19 nt, Artificial Sequence
  Description of Artificial Sequence: Synthetic oligonucleotide
  Sense strand starting at position 3597 of SEQ ID NO: 588343
uggucauaacuauauguau

SEQ ID NO: 858405 - RNA, 19 nt, Artificial Sequence
  Description of Artificial Sequence: Synthetic oligonucleotide
  Antisense strand to SEQ ID NO: 858404
auacauauaguuaugacca

SEQ ID NO: 858406 - RNA, 19 nt, Artificial Sequence
  Description of Artificial Sequence: Synthetic oligonucleotide
  Sense strand starting at position 3759 of SEQ ID NO: 588343
uuuaguacacauggcauua

SEQ ID NO: 858407 - RNA, 19 nt, Artificial Sequence
  Description of Artificial Sequence: Synthetic oligonucleotide
  Antisense strand to SEQ ID NO: 858406
uaaugccauguguacuaaa

SEQ ID NO: 858408 - RNA, 19 nt, Artificial Sequence
  Description of Artificial Sequence: Synthetic oligonucleotide
  Sense strand starting at position 3804 of SEQ ID NO: 588343
cguguauuuaucuguggua

SEQ ID NO: 858409 - RNA, 19 nt, Artificial Sequence
  Description of Artificial Sequence: Synthetic oligonucleotide
  Antisense strand to SEQ ID NO: 858408
uaccacagauaaauacacg

SEQ ID NO: 858410 - RNA, 19 nt, Artificial Sequence
  Description of Artificial Sequence: Synthetic oligonucleotide
  Sense strand starting at position 3805 of SEQ ID NO: 588343
guguauuuaucugugguaa

SEQ ID NO: 858411 - RNA, 19 nt, Artificial Sequence
  Description of Artificial Sequence: Synthetic oligonucleotide
  Antisense strand to SEQ ID NO: 858410
uuaccacagauaaauacac

SEQ ID NO: 858412 - RNA, 19 nt, Artificial Sequence
  Description of Artificial Sequence: Synthetic oligonucleotide
  Sense strand starting at position 3806 of SEQ ID NO: 588343
uguauuuaucugugguaau

SEQ ID NO: 858413 - RNA, 19 nt, Artificial Sequence
  Description of Artificial Sequence: Synthetic oligonucleotide
  Antisense strand to SEQ ID NO: 858412
auuaccacagauaaauaca

SEQ ID NO: 858414 - RNA, 19 nt, Artificial Sequence
  Description of Artificial Sequence: Synthetic oligonucleotide
  Sense strand starting at position 3816 of SEQ ID NO: 588343
ugugguaaugcagaugaua

SEQ ID NO: 858415 - RNA, 19 nt, Artificial Sequence
  Description of Artificial Sequence: Synthetic oligonucleotide
  Antisense strand to SEQ ID NO: 858414
uaucaucugcauuaccaca

SEQ ID NO: 858416 - RNA, 19 nt, Artificial Sequence
  Description of Artificial Sequence: Synthetic oligonucleotide
  Sense strand starting at position 3847 of SEQ ID NO: 588343
ggcuucagugaggauuaga

SEQ ID NO: 858417 - RNA, 19 nt, Artificial Sequence
  Description of Artificial Sequence: Synthetic oligonucleotide
  Antisense strand to SEQ ID NO: 858416
ucuaauccucacugaagcc

SEQ ID NO: 858418 - RNA, 19 nt, Artificial Sequence
  Description of Artificial Sequence: Synthetic oligonucleotide
  Sense strand starting at position 3941 of SEQ ID NO: 588343
ugugaaagauccucacaua

SEQ ID NO: 858419 - RNA, 19 nt, Artificial Sequence
  Description of Artificial Sequence: Synthetic oligonucleotide
  Antisense strand to SEQ ID NO: 858418
uaugugaggaucuuucaca

SEQ ID NO: 858420 - RNA, 19 nt, Artificial Sequence
  Description of Artificial Sequence: Synthetic oligonucleotide
  Sense strand starting at position 51 of SEQ ID NO: 588344
gccuuuacauuugcuuaga

SEQ ID NO: 858421 - RNA, 19 nt, Artificial Sequence
  Description of Artificial Sequence: Synthetic oligonucleotide
  Antisense strand to SEQ ID NO: 858420
ucuaagcaaauguaaaggc

SEQ ID NO: 858422 - RNA, 19 nt, Artificial Sequence
  Description of Artificial Sequence: Synthetic oligonucleotide
  Sense strand starting at position 220 of SEQ ID NO: 588344
accauaccauuugaggaaa

SEQ ID NO: 858423 - RNA, 19 nt, Artificial Sequence
  Description of Artificial Sequence: Synthetic oligonucleotide
  Antisense strand to SEQ ID NO: 858422
uuuccucaaaugguauggu

SEQ ID NO: 858424 - RNA, 19 nt, Artificial Sequence
  Description of Artificial Sequence: Synthetic oligonucleotide
  Sense strand starting at position 222 of SEQ ID NO: 588344
cauaccauuugaggaaagu

SEQ ID NO: 858425 - RNA, 19 nt, Artificial Sequence
  Description of Artificial Sequence: Synthetic oligonucleotide
  Antisense strand to SEQ ID NO: 858424
acuuuccucaaaugguaug

SEQ ID NO: 858426 - RNA, 19 nt, Artificial Sequence
  Description of Artificial Sequence: Synthetic oligonucleotide
  Sense strand starting at position 359 of SEQ ID NO: 588344
uggauaagauuaguaucca

SEQ ID NO: 858427 - RNA, 19 nt, Artificial Sequence
  Description of Artificial Sequence: Synthetic oligonucleotide
  Antisense strand to SEQ ID NO: 858426
uggauacuaaucuuaucca

SEQ ID NO: 858428 - RNA, 19 nt, Artificial Sequence
  Description of Artificial Sequence: Synthetic oligonucleotide
  Sense strand starting at position 387 of SEQ ID NO: 588344
aggagagaguggucucuaa

SEQ ID NO: 858429 - RNA, 19 nt, Artificial Sequence
  Description of Artificial Sequence: Synthetic oligonucleotide
  Antisense strand to SEQ ID NO: 858428
uuagagaccacucucuccu

SEQ ID NO: 858430 - RNA, 19 nt, Artificial Sequence
  Description of Artificial Sequence: Synthetic oligonucleotide
  Sense strand starting at position 515 of SEQ ID NO: 588344
acuguuguauacuuauaag

SEQ ID NO: 858431 - RNA, 19 nt, Artificial Sequence
  Description of Artificial Sequence: Synthetic oligonucleotide
  Antisense strand to SEQ ID NO: 858430
cuuauaaguauacaacagu

SEQ ID NO: 858432 - RNA, 19 nt, Artificial Sequence
  Description of Artificial Sequence: Synthetic oligonucleotide
  Sense strand starting at position 703 of SEQ ID NO: 588344
augggauauggcggaauaa

SEQ ID NO: 858433 - RNA, 19 nt, Artificial Sequence
  Description of Artificial Sequence: Synthetic oligonucleotide
  Antisense strand to SEQ ID NO: 858432
uuauuccgccauaucccau

SEQ ID NO: 858434 - RNA, 19 nt, Artificial Sequence
  Description of Artificial Sequence: Synthetic oligonucleotide
  Sense strand starting at position 714 of SEQ ID NO: 588344
cggaauaagcacuggaagu

SEQ ID NO: 858435 - RNA, 19 nt, Artificial Sequence
  Description of Artificial Sequence: Synthetic oligonucleotide
  Antisense strand to SEQ ID NO: 858434
acuuccagugcuuauuccg

SEQ ID NO: 858436 - RNA, 19 nt, Artificial Sequence
  Description of Artificial Sequence: Synthetic oligonucleotide
  Sense strand starting at position 732 of SEQ ID NO: 588344
ucaagagacuuguuucuaa

SEQ ID NO: 858437 - RNA, 19 nt, Artificial Sequence
  Description of Artificial Sequence: Synthetic oligonucleotide
  Antisense strand to SEQ ID NO: 858436
uuagaaacaagucucuuga

SEQ ID NO: 858438 - RNA, 19 nt, Artificial Sequence
  Description of Artificial Sequence: Synthetic oligonucleotide
  Sense strand starting at position 934 of SEQ ID NO: 588344
guguuuaguccuucgcuuu

SEQ ID NO: 858439 - RNA, 19 nt, Artificial Sequence
  Description of Artificial Sequence: Synthetic oligonucleotide
  Antisense strand to SEQ ID NO: 858438
aaagcgaaggacuaaacac

SEQ ID NO: 858440 - RNA, 19 nt, Artificial Sequence
  Description of Artificial Sequence: Synthetic oligonucleotide
  Sense strand starting at position 1061 of SEQ ID NO: 588344
agguuaggcaguuaggaau

SEQ ID NO: 858441 - RNA, 19 nt, Artificial Sequence
  Description of Artificial Sequence: Synthetic oligonucleotide
  Antisense strand to SEQ ID NO: 858440
auuccuaacugccuaaccu

SEQ ID NO: 858442 - RNA, 19 nt, Artificial Sequence
  Description of Artificial Sequence: Synthetic oligonucleotide
  Sense strand starting at position 1156 of SEQ ID NO: 588344
gaggccuugagcugagauu

SEQ ID NO: 858443 - RNA, 19 nt, Artificial Sequence
  Description of Artificial Sequence: Synthetic oligonucleotide
  Antisense strand to SEQ ID NO: 858442
aaucucagcucaaggccuc

SEQ ID NO: 858444 - RNA, 19 nt, Artificial Sequence
  Description of Artificial Sequence: Synthetic oligonucleotide
  Sense strand starting at position 1207 of SEQ ID NO: 588344
cuauucucccaguggaauc

SEQ ID NO: 858445 - RNA, 19 nt, Artificial Sequence
  Description of Artificial Sequence: Synthetic oligonucleotide
  Antisense strand to SEQ ID NO: 858444
gauuccacugggagaauag

SEQ ID NO: 858446 - RNA, 19 nt, Artificial Sequence
  Description of Artificial Sequence: Synthetic oligonucleotide
  Sense strand starting at position 1382 of SEQ ID NO: 588344
gaaggaacgcuaggucuau

SEQ ID NO: 858447 - RNA, 19 nt, Artificial Sequence
  Description of Artificial Sequence: Synthetic oligonucleotide
  Antisense strand to SEQ ID NO: 858446
auagaccuagcguuccuuc

SEQ ID NO: 858448 - RNA, 19 nt, Artificial Sequence
  Description of Artificial Sequence: Synthetic oligonucleotide
  Sense strand starting at position 1754 of SEQ ID NO: 588344
ucugaggucggguaaggau

SEQ ID NO: 858449 - RNA, 19 nt, Artificial Sequence
  Description of Artificial Sequence: Synthetic oligonucleotide
  Antisense strand to SEQ ID NO: 858448
auccuuacccgaccucaga

SEQ ID NO: 858450 - RNA, 19 nt, Artificial Sequence
  Description of Artificial Sequence: Synthetic oligonucleotide
  Sense strand starting at position 1847 of SEQ ID NO: 588344
guuggguuggguuaggaaa

SEQ ID NO: 858451 - RNA, 19 nt, Artificial Sequence
  Description of Artificial Sequence: Synthetic oligonucleotide
  Antisense strand to SEQ ID NO: 858450
uuuccuaacccaacccaac

SEQ ID NO: 858452 - RNA, 19 nt, Artificial Sequence
  Description of Artificial Sequence: Synthetic oligonucleotide
  Sense strand starting at position 2010 of SEQ ID NO: 588344
ggugcacuucgggaaaugu

SEQ ID NO: 858453 - RNA, 19 nt, Artificial Sequence
  Description of Artificial Sequence: Synthetic oligonucleotide
  Antisense strand to SEQ ID NO: 858452
acauuucccgaagugcacc

SEQ ID NO: 858454 - RNA, 19 nt, Artificial Sequence
  Description of Artificial Sequence: Synthetic oligonucleotide
  Sense strand starting at position 2051 of SEQ ID NO: 588344
gcacgucguccgucaucua

SEQ ID NO: 858455 - RNA, 19 nt, Artificial Sequence
  Description of Artificial Sequence: Synthetic oligonucleotide
  Antisense strand to SEQ ID NO: 858454
uagaugacggacgacgugc

SEQ ID NO: 858456 - RNA, 19 nt, Artificial Sequence
  Description of Artificial Sequence: Synthetic oligonucleotide
  Sense strand starting at position 2058 of SEQ ID NO: 588344
guccgucaucuagaacuuc

SEQ ID NO: 858457 - RNA, 19 nt, Artificial Sequence
  Description of Artificial Sequence: Synthetic oligonucleotide
  Antisense strand to SEQ ID NO: 858456
gaaguucuagaugacggac

SEQ ID NO: 858458 - RNA, 19 nt, Artificial Sequence
  Description of Artificial Sequence: Synthetic oligonucleotide
  Sense strand starting at position 2555 of SEQ ID NO: 588344
gccucaguugaaugaguca

SEQ ID NO: 858459 - RNA, 19 nt, Artificial Sequence
  Description of Artificial Sequence: Synthetic oligonucleotide
  Antisense strand to SEQ ID NO: 858458
ugacucauucaacugaggc

SEQ ID NO: 858460 - RNA, 19 nt, Artificial Sequence
  Description of Artificial Sequence: Synthetic oligonucleotide
  Sense strand starting at position 2570 of SEQ ID NO: 588344
gucaaugacuuaucccuga

SEQ ID NO: 858461 - RNA, 19 nt, Artificial Sequence
  Description of Artificial Sequence: Synthetic oligonucleotide
  Antisense strand to SEQ ID NO: 858460
ucagggauaagucauugac

SEQ ID NO: 858462 - RNA, 19 nt, Artificial Sequence
  Description of Artificial Sequence: Synthetic oligonucleotide
  Sense strand starting at position 2574 of SEQ ID NO: 588344
augacuuaucccugauugu

SEQ ID NO: 858463 - RNA, 19 nt, Artificial Sequence
  Description of Artificial Sequence: Synthetic oligonucleotide
  Antisense strand to SEQ ID NO: 858462
acaaucagggauaagucau

SEQ ID NO: 858464 - RNA, 19 nt, Artificial Sequence
  Description of Artificial Sequence: Synthetic oligonucleotide
  Sense strand starting at position 2575 of SEQ ID NO: 588344
ugacuuaucccugauuguc

SEQ ID NO: 858465 - RNA, 19 nt, Artificial Sequence
  Description of Artificial Sequence: Synthetic oligonucleotide
  Antisense strand to SEQ ID NO: 858464
gacaaucagggauaaguca

SEQ ID NO: 858466 - RNA, 19 nt, Artificial Sequence
  Description of Artificial Sequence: Synthetic oligonucleotide
  Sense strand starting at position 2603 of SEQ ID NO: 588344
uccuguaaggaguagaugu

SEQ ID NO: 858467 - RNA, 19 nt, Artificial Sequence
  Description of Artificial Sequence: Synthetic oligonucleotide
  Antisense strand to SEQ ID NO: 858466
acaucuacuccuuacagga

SEQ ID NO: 858468 - RNA, 19 nt, Artificial Sequence
  Description of Artificial Sequence: Synthetic oligonucleotide
  Sense strand starting at position 2688 of SEQ ID NO: 588344
ucgcuccuccaguauaauu

SEQ ID NO: 858469 - RNA, 19 nt, Artificial Sequence
  Description of Artificial Sequence: Synthetic oligonucleotide
  Antisense strand to SEQ ID NO: 858468
aauuauacuggaggagcga

SEQ ID NO: 858470 - RNA, 19 nt, Artificial Sequence
  Description of Artificial Sequence: Synthetic oligonucleotide
  Sense strand starting at position 2693 of SEQ ID NO: 588344
ccuccaguauaauuacgaa

SEQ ID NO: 858471 - RNA, 19 nt, Artificial Sequence
  Description of Artificial Sequence: Synthetic oligonucleotide
  Antisense strand to SEQ ID NO: 858470
uucguaauuauacuggagg

SEQ ID NO: 858472 - RNA, 19 nt, Artificial Sequence
  Description of Artificial Sequence: Synthetic oligonucleotide
  Sense strand starting at position 2705 of SEQ ID NO: 588344
uuacgaaauucccuagcaa

SEQ ID NO: 858473 - RNA, 19 nt, Artificial Sequence
  Description of Artificial Sequence: Synthetic oligonucleotide
  Antisense strand to SEQ ID NO: 858472
uugcuagggaauuucguaa

SEQ ID NO: 858474 - RNA, 19 nt, Artificial Sequence
  Description of Artificial Sequence: Synthetic oligonucleotide
  Sense strand starting at position 2801 of SEQ ID NO: 588344
acgcgaucucugcuuagua

SEQ ID NO: 858475 - RNA, 19 nt, Artificial Sequence
  Description of Artificial Sequence: Synthetic oligonucleotide
  Antisense strand to SEQ ID NO: 858474
uacuaagcagagaucgcgu

SEQ ID NO: 858476 - RNA, 19 nt, Artificial Sequence
  Description of Artificial Sequence: Synthetic oligonucleotide
  Sense strand starting at position 2912 of SEQ ID NO: 588344
cuggaaugcuaucuuaaau

SEQ ID NO: 858477 - RNA, 19 nt, Artificial Sequence
  Description of Artificial Sequence: Synthetic oligonucleotide
  Antisense strand to SEQ ID NO: 858476
auuuaagauagcauuccag

SEQ ID NO: 858478 - RNA, 19 nt, Artificial Sequence
  Description of Artificial Sequence: Synthetic oligonucleotide
  Sense strand starting at position 2929 of SEQ ID NO: 588344
augucaccaucucugagaa

SEQ ID NO: 858479 - RNA, 19 nt, Artificial Sequence
  Description of Artificial Sequence: Synthetic oligonucleotide
  Antisense strand to SEQ ID NO: 858478
uucucagagauggugacau

SEQ ID NO: 858480 - RNA, 19 nt, Artificial Sequence
  Description of Artificial Sequence: Synthetic oligonucleotide
  Sense strand starting at position 3044 of SEQ ID NO: 588344
gcauuuauuacacgggcuu

SEQ ID NO: 858481 - RNA, 19 nt, Artificial Sequence
  Description of Artificial Sequence: Synthetic oligonucleotide
  Antisense strand to SEQ ID NO: 858480
aagcccguguaauaaaugc

SEQ ID NO: 858482 - RNA, 19 nt, Artificial Sequence
  Description of Artificial Sequence: Synthetic oligonucleotide
  Sense strand starting at position 3057 of SEQ ID NO: 588344
gggcuuguuguauaauuag

SEQ ID NO: 858483 - RNA, 19 nt, Artificial Sequence
  Description of Artificial Sequence: Synthetic oligonucleotide
  Antisense strand to SEQ ID NO: 858482
cuaauuauacaacaagccc

SEQ ID NO: 858484 - RNA, 19 nt, Artificial Sequence
  Description of Artificial Sequence: Synthetic oligonucleotide
  Sense strand starting at position 3064 of SEQ ID NO: 588344
uuguauaauuaggcaagga

SEQ ID NO: 858485 - RNA, 19 nt, Artificial Sequence
  Description of Artificial Sequence: Synthetic oligonucleotide
  Antisense strand to SEQ ID NO: 858484
uccuugccuaauuauacaa

SEQ ID NO: 858486 - RNA, 19 nt, Artificial Sequence
  Description of Artificial Sequence: Synthetic oligonucleotide
  Sense strand starting at position 3212 of SEQ ID NO: 588344
uggcuuucucagggugaca

SEQ ID NO: 858487 - RNA, 19 nt, Artificial Sequence
  Description of Artificial Sequence: Synthetic oligonucleotide
  Antisense strand to SEQ ID NO: 858486
ugucacccugagaaagcca

SEQ ID NO: 858488 - RNA, 19 nt, Artificial Sequence
  Description of Artificial Sequence: Synthetic oligonucleotide
  Sense strand starting at position 3214 of SEQ ID NO: 588344
gcuuucucagggugacaaa

SEQ ID NO: 858489 - RNA, 19 nt, Artificial Sequence
  Description of Artificial Sequence: Synthetic oligonucleotide
  Antisense strand to SEQ ID NO: 858488
uuugucacccugagaaagc

SEQ ID NO: 858490 - RNA, 19 nt, Artificial Sequence
  Description of Artificial Sequence: Synthetic oligonucleotide
  Sense strand starting at position 3270 of SEQ ID NO: 588344
gccuaacuccuagacuagu

SEQ ID NO: 858491 - RNA, 19 nt, Artificial Sequence
  Description of Artificial Sequence: Synthetic oligonucleotide
  Antisense strand to SEQ ID NO: 858490
acuagucuaggaguuaggc

SEQ ID NO: 858492 - RNA, 19 nt, Artificial Sequence
  Description of Artificial Sequence: Synthetic oligonucleotide
  Sense strand starting at position 3320 of SEQ ID NO: 588344
gcccaaagauaguugaaau

SEQ ID NO: 858493 - RNA, 19 nt, Artificial Sequence
  Description of Artificial Sequence: Synthetic oligonucleotide
  Antisense strand to SEQ ID NO: 858492
auuucaacuaucuuugggc

SEQ ID NO: 858494 - RNA, 19 nt, Artificial Sequence
  Description of Artificial Sequence: Synthetic oligonucleotide
  Sense strand starting at position 3352 of SEQ ID NO: 588344
agagcagagacuuguaagu

SEQ ID NO: 858495 - RNA, 19 nt, Artificial Sequence
  Description of Artificial Sequence: Synthetic oligonucleotide
  Antisense strand to SEQ ID NO: 858494
acuuacaagucucugcucu

SEQ ID NO: 858496 - RNA, 19 nt, Artificial Sequence
  Description of Artificial Sequence: Synthetic oligonucleotide
  Sense strand starting at position 3357 of SEQ ID NO: 588344
agagacuuguaaguaugaa

SEQ ID NO: 858497 - RNA, 19 nt, Artificial Sequence
  Description of Artificial Sequence: Synthetic oligonucleotide
  Antisense strand to SEQ ID NO: 858496
uucauacuuacaagucucu

SEQ ID NO: 858498 - RNA, 19 nt, Artificial Sequence
  Description of Artificial Sequence: Synthetic oligonucleotide
  Sense strand starting at position 3462 of SEQ ID NO: 588344
cugaguacuggcuauauac

SEQ ID NO: 858499 - RNA, 19 nt, Artificial Sequence
  Description of Artificial Sequence: Synthetic oligonucleotide
  Antisense strand to SEQ ID NO: 858498
guauauagccaguacucag

SEQ ID NO: 858500 - RNA, 19 nt, Artificial Sequence
  Description of Artificial Sequence: Synthetic oligonucleotide
  Sense strand starting at position 42 of SEQ ID NO: 588345
gccaaucaccacuguugua

SEQ ID NO: 858501 - RNA, 19 nt, Artificial Sequence
  Description of Artificial Sequence: Synthetic oligonucleotide
  Antisense strand to SEQ ID NO: 858500
uacaacaguggugauuggc

SEQ ID NO: 858502 - RNA, 19 nt, Artificial Sequence
  Description of Artificial Sequence: Synthetic oligonucleotide
  Sense strand starting at position 52 of SEQ ID NO: 588345
acuguuguacuuuaggcaa

SEQ ID NO: 858503 - RNA, 19 nt, Artificial Sequence
  Description of Artificial Sequence: Synthetic oligonucleotide
  Antisense strand to SEQ ID NO: 858502
uugccuaaaguacaacagu

SEQ ID NO: 858504 - RNA, 19 nt, Artificial Sequence
  Description of Artificial Sequence: Synthetic oligonucleotide
  Sense strand starting at position 55 of SEQ ID NO: 588345
guuguacuuuaggcaaaua

SEQ ID NO: 858505 - RNA, 19 nt, Artificial Sequence
  Description of Artificial Sequence: Synthetic oligonucleotide
  Antisense strand to SEQ ID NO: 858504
uauuugccuaaaguacaac

SEQ ID NO: 858506 - RNA, 19 nt, Artificial Sequence
  Description of Artificial Sequence: Synthetic oligonucleotide
  Sense strand starting at position 66 of SEQ ID NO: 588345
ggcaaauaaucaggccaaa

SEQ ID NO: 858507 - RNA, 19 nt, Artificial Sequence
  Description of Artificial Sequence: Synthetic oligonucleotide
  Antisense strand to SEQ ID NO: 858506
uuuggccugauuauuugcc

SEQ ID NO: 858508 - RNA, 19 nt, Artificial Sequence
  Description of Artificial Sequence: Synthetic oligonucleotide
  Sense strand starting at position 110 of SEQ ID NO: 588345
guaaauuggucuuaccaag

SEQ ID NO: 858509 - RNA, 19 nt, Artificial Sequence
  Description of Artificial Sequence: Synthetic oligonucleotide
  Antisense strand to SEQ ID NO: 858508
cuugguaagaccaauuuac

SEQ ID NO: 858510 - RNA, 19 nt, Artificial Sequence
  Description of Artificial Sequence: Synthetic oligonucleotide
  Sense strand starting at position 186 of SEQ ID NO: 588345
cagcauaccuguuacugga

SEQ ID NO: 858511 - RNA, 19 nt, Artificial Sequence
  Description of Artificial Sequence: Synthetic oligonucleotide
  Antisense strand to SEQ ID NO: 858510
uccaguaacagguaugcug

SEQ ID NO: 858512 - RNA, 19 nt, Artificial Sequence
  Description of Artificial Sequence: Synthetic oligonucleotide
  Sense strand starting at position 188 of SEQ ID NO: 588345
gcauaccuguuacuggauu

SEQ ID NO: 858513 - RNA, 19 nt, Artificial Sequence
  Description of Artificial Sequence: Synthetic oligonucleotide
  Antisense strand to SEQ ID NO: 858512
aauccaguaacagguaugc

SEQ ID NO: 858514 - RNA, 19 nt, Artificial Sequence
  Description of Artificial Sequence: Synthetic oligonucleotide
  Sense strand starting at position 199 of SEQ ID NO: 588345
acuggauucuagcccugau

SEQ ID NO: 858515 - RNA, 19 nt, Artificial Sequence
  Description of Artificial Sequence: Synthetic oligonucleotide
  Antisense strand to SEQ ID NO: 858514
aucagggcuagaauccagu

SEQ ID NO: 858516 - RNA, 19 nt, Artificial Sequence
  Description of Artificial Sequence: Synthetic oligonucleotide
  Sense strand starting at position 202 of SEQ ID NO: 588345
ggauucuagcccugaucau

SEQ ID NO: 858517 - RNA, 19 nt, Artificial Sequence
  Description of Artificial Sequence: Synthetic oligonucleotide
  Antisense strand to SEQ ID NO: 858516
augaucagggcuagaaucc

SEQ ID NO: 858518 - RNA, 19 nt, Artificial Sequence
  Description of Artificial Sequence: Synthetic oligonucleotide
  Sense strand starting at position 209 of SEQ ID NO: 588345
agcccugaucauuguauuu

SEQ ID NO: 858519 - RNA, 19 nt, Artificial Sequence
  Description of Artificial Sequence: Synthetic oligonucleotide
  Antisense strand to SEQ ID NO: 858518
aaauacaaugaucagggcu

SEQ ID NO: 858520 - RNA, 19 nt, Artificial Sequence
  Description of Artificial Sequence: Synthetic oligonucleotide
  Sense strand starting at position 245 of SEQ ID NO: 588345
uggacuaaauccugaacaa

SEQ ID NO: 858521 - RNA, 19 nt, Artificial Sequence
  Description of Artificial Sequence: Synthetic oligonucleotide
  Antisense strand to SEQ ID NO: 858520
uuguucaggauuuagucca

SEQ ID NO: 858522 - RNA, 19 nt, Artificial Sequence
  Description of Artificial Sequence: Synthetic oligonucleotide
  Sense strand starting at position 688 of SEQ ID NO: 588345
guuauaguccuauguguua

SEQ ID NO: 858523 - RNA, 19 nt, Artificial Sequence
  Description of Artificial Sequence: Synthetic oligonucleotide
  Antisense strand to SEQ ID NO: 858522
uaacacauaggacuauaac

SEQ ID NO: 858524 - RNA, 19 nt, Artificial Sequence
  Description of Artificial Sequence: Synthetic oligonucleotide
  Sense strand starting at position 695 of SEQ ID NO: 588345
uccuauguguuacuucuga

SEQ ID NO: 858525 - RNA, 19 nt, Artificial Sequence
  Description of Artificial Sequence: Synthetic oligonucleotide
  Antisense strand to SEQ ID NO: 858524
ucagaaguaacacauagga

SEQ ID NO: 858526 - RNA, 19 nt, Artificial Sequence
  Description of Artificial Sequence: Synthetic oligonucleotide
  Sense strand starting at position 761 of SEQ ID NO: 588345
ggugacagcaguuguauaa

SEQ ID NO: 858527 - RNA, 19 nt, Artificial Sequence
  Description of Artificial Sequence: Synthetic oligonucleotide
  Antisense strand to SEQ ID NO: 858526
uuauacaacugcugucacc

SEQ ID NO: 858528 - RNA, 19 nt, Artificial Sequence
  Description of Artificial Sequence: Synthetic oligonucleotide
  Sense strand starting at position 765 of SEQ ID NO: 588345
acagcaguuguauaaauua

SEQ ID NO: 858529 - RNA, 19 nt, Artificial Sequence
  Description of Artificial Sequence: Synthetic oligonucleotide
  Antisense strand to SEQ ID NO: 858528
uaauuuauacaacugcugu

SEQ ID NO: 858530 - RNA, 19 nt, Artificial Sequence
  Description of Artificial Sequence: Synthetic oligonucleotide
  Sense strand starting at position 1075 of SEQ ID NO: 588345
cccagaaagcuugauguua

SEQ ID NO: 858531 - RNA, 19 nt, Artificial Sequence
  Description of Artificial Sequence: Synthetic oligonucleotide
  Antisense strand to SEQ ID NO: 858530
uaacaucaagcuuucuggg

SEQ ID NO: 858532 - RNA, 19 nt, Artificial Sequence
  Description of Artificial Sequence: Synthetic oligonucleotide
  Sense strand starting at position 1084 of SEQ ID NO: 588345
cuugauguuaagugccaga

SEQ ID NO: 858533 - RNA, 19 nt, Artificial Sequence
  Description of Artificial Sequence: Synthetic oligonucleotide
  Antisense strand to SEQ ID NO: 858532
ucuggcacuuaacaucaag

SEQ ID NO: 858534 - RNA, 19 nt, Artificial Sequence
  Description of Artificial Sequence: Synthetic oligonucleotide
  Sense strand starting at position 1087 of SEQ ID NO: 588345
gauguuaagugccagaaag

SEQ ID NO: 858535 - RNA, 19 nt, Artificial Sequence
  Description of Artificial Sequence: Synthetic oligonucleotide
  Antisense strand to SEQ ID NO: 858534
cuuucuggcacuuaacauc

SEQ ID NO: 858536 - RNA, 19 nt, Artificial Sequence
  Description of Artificial Sequence: Synthetic oligonucleotide
  Sense strand starting at position 1089 of SEQ ID NO: 588345
uguuaagugccagaaagca

SEQ ID NO: 858537 - RNA, 19 nt, Artificial Sequence
  Description of Artificial Sequence: Synthetic oligonucleotide
  Antisense strand to SEQ ID NO: 858536
ugcuuucuggcacuuaaca

SEQ ID NO: 858538 - RNA, 19 nt, Artificial Sequence
  Description of Artificial Sequence: Synthetic oligonucleotide
  Sense strand starting at position 1149 of SEQ ID NO: 588345
guaacuauccacugaugac

SEQ ID NO: 858539 - RNA, 19 nt, Artificial Sequence
  Description of Artificial Sequence: Synthetic oligonucleotide
  Antisense strand to SEQ ID NO: 858538
gucaucaguggauaguuac

SEQ ID NO: 858540 - RNA, 19 nt, Artificial Sequence
  Description of Artificial Sequence: Synthetic oligonucleotide
  Sense strand starting at position 1166 of SEQ ID NO: 588345
acaccaagccguggucaau

SEQ ID NO: 858541 - RNA, 19 nt, Artificial Sequence
  Description of Artificial Sequence: Synthetic oligonucleotide
  Antisense strand to SEQ ID NO: 858540
auugaccacggcuuggugu

SEQ ID NO: 858542 - RNA, 19 nt, Artificial Sequence
  Description of Artificial Sequence: Synthetic oligonucleotide
  Sense strand starting at position 1176 of SEQ ID NO: 588345
guggucaaucgcgaaccaa

SEQ ID NO: 858543 - RNA, 19 nt, Artificial Sequence
  Description of Artificial Sequence: Synthetic oligonucleotide
  Antisense strand to SEQ ID NO: 858542
uugguucgcgauugaccac

SEQ ID NO: 858544 - RNA, 19 nt, Artificial Sequence
  Description of Artificial Sequence: Synthetic oligonucleotide
  Sense strand starting at position 1325 of SEQ ID NO: 588345
cgaccucugugccugaaua

SEQ ID NO: 858545 - RNA, 19 nt, Artificial Sequence
  Description of Artificial Sequence: Synthetic oligonucleotide
  Antisense strand to SEQ ID NO: 858544
uauucaggcacagaggucg

SEQ ID NO: 858546 - RNA, 19 nt, Artificial Sequence
  Description of Artificial Sequence: Synthetic oligonucleotide
  Sense strand starting at position 1326 of SEQ ID NO: 588345
gaccucugugccugaauaa

SEQ ID NO: 858547 - RNA, 19 nt, Artificial Sequence
  Description of Artificial Sequence: Synthetic oligonucleotide
  Antisense strand to SEQ ID NO: 858546
uuauucaggcacagagguc

SEQ ID NO: 858548 - RNA, 19 nt, Artificial Sequence
  Description of Artificial Sequence: Synthetic oligonucleotide
  Sense strand starting at position 1327 of SEQ ID NO: 588345
accucugugccugaauaaa

SEQ ID NO: 858549 - RNA, 19 nt, Artificial Sequence
  Description of Artificial Sequence: Synthetic oligonucleotide
  Antisense strand to SEQ ID NO: 858548
uuuauucaggcacagaggu

SEQ ID NO: 858550 - RNA, 19 nt, Artificial Sequence
  Description of Artificial Sequence: Synthetic oligonucleotide
  Sense strand starting at position 1543 of SEQ ID NO: 588345
ugugauguccgugcucgga

SEQ ID NO: 858551 - RNA, 19 nt, Artificial Sequence
  Description of Artificial Sequence: Synthetic oligonucleotide
  Antisense strand to SEQ ID NO: 858550
uccgagcacggacaucaca

SEQ ID NO: 858552 - RNA, 19 nt, Artificial Sequence
  Description of Artificial Sequence: Synthetic oligonucleotide
  Sense strand starting at position 1544 of SEQ ID NO: 588345
gugauguccgugcucggaa

SEQ ID NO: 858553 - RNA, 19 nt, Artificial Sequence
  Description of Artificial Sequence: Synthetic oligonucleotide
  Antisense strand to SEQ ID NO: 858552
uuccgagcacggacaucac

SEQ ID NO: 858554 - RNA, 19 nt, Artificial Sequence
  Description of Artificial Sequence: Synthetic oligonucleotide
  Sense strand starting at position 1929 of SEQ ID NO: 588345
gcuuuauccggcgcaccaa

SEQ ID NO: 858555 - RNA, 19 nt, Artificial Sequence
  Description of Artificial Sequence: Synthetic oligonucleotide
  Antisense strand to SEQ ID NO: 858554
uuggugcgccggauaaagc

SEQ ID NO: 858556 - RNA, 19 nt, Artificial Sequence
  Description of Artificial Sequence: Synthetic oligonucleotide
  Sense strand starting at position 2993 of SEQ ID NO: 588345
uacugaaggcucggugaca

SEQ ID NO: 858557 - RNA, 19 nt, Artificial Sequence
  Description of Artificial Sequence: Synthetic oligonucleotide
  Antisense strand to SEQ ID NO: 858556
ugucaccgagccuucagua

SEQ ID NO: 858558 - RNA, 19 nt, Artificial Sequence
  Description of Artificial Sequence: Synthetic oligonucleotide
  Sense strand starting at position 3004 of SEQ ID NO: 588345
cggugacagcagugauuua

SEQ ID NO: 858559 - RNA, 19 nt, Artificial Sequence
  Description of Artificial Sequence: Synthetic oligonucleotide
  Antisense strand to SEQ ID NO: 858558
uaaaucacugcugucaccg

SEQ ID NO: 858560 - RNA, 19 nt, Artificial Sequence
  Description of Artificial Sequence: Synthetic oligonucleotide
  Sense strand starting at position 3127 of SEQ ID NO: 588345
ugucuuaaagcugcguaca

SEQ ID NO: 858561 - RNA, 19 nt, Artificial Sequence
  Description of Artificial Sequence: Synthetic oligonucleotide
  Antisense strand to SEQ ID NO: 858560
uguacgcagcuuuaagaca

SEQ ID NO: 858562 - RNA, 19 nt, Artificial Sequence
  Description of Artificial Sequence: Synthetic oligonucleotide
  Sense strand starting at position 3128 of SEQ ID NO: 588345
gucuuaaagcugcguacaa

SEQ ID NO: 858563 - RNA, 19 nt, Artificial Sequence
  Description of Artificial Sequence: Synthetic oligonucleotide
  Antisense strand to SEQ ID NO: 858562
uuguacgcagcuuuaagac

SEQ ID NO: 858564 - RNA, 19 nt, Artificial Sequence
  Description of Artificial Sequence: Synthetic oligonucleotide
  Sense strand starting at position 3129 of SEQ ID NO: 588345
ucuuaaagcugcguacaaa

SEQ ID NO: 858565 - RNA, 19 nt, Artificial Sequence
  Description of Artificial Sequence: Synthetic oligonucleotide
  Antisense strand to SEQ ID NO: 858564
uuuguacgcagcuuuaaga

SEQ ID NO: 858566 - RNA, 19 nt, Artificial Sequence
  Description of Artificial Sequence: Synthetic oligonucleotide
  Sense strand starting at position 3130 of SEQ ID NO: 588345
cuuaaagcugcguacaaau

SEQ ID NO: 858567 - RNA, 19 nt, Artificial Sequence
  Description of Artificial Sequence: Synthetic oligonucleotide
  Antisense strand to SEQ ID NO: 858566
auuuguacgcagcuuuaag

SEQ ID NO: 858568 - RNA, 19 nt, Artificial Sequence
  Description of Artificial Sequence: Synthetic oligonucleotide
  Sense strand starting at position 3432 of SEQ ID NO: 588345
acccauaguggugggauua

SEQ ID NO: 858569 - RNA, 19 nt, Artificial Sequence
  Description of Artificial Sequence: Synthetic oligonucleotide
  Antisense strand to SEQ ID NO: 858568
uaaucccaccacuaugggu

SEQ ID NO: 858570 - RNA, 19 nt, Artificial Sequence
  Description of Artificial Sequence: Synthetic oligonucleotide
  Sense strand starting at position 3617 of SEQ ID NO: 588345
cagugaaagucauacgacu

SEQ ID NO: 858571 - RNA, 19 nt, Artificial Sequence
  Description of Artificial Sequence: Synthetic oligonucleotide
  Antisense strand to SEQ ID NO: 858570
agucguaugacuuucacug

SEQ ID NO: 858572 - RNA, 19 nt, Artificial Sequence
  Description of Artificial Sequence: Synthetic oligonucleotide
  Sense strand starting at position 3619 of SEQ ID NO: 588345
gugaaagucauacgacuaa

SEQ ID NO: 858573 - RNA, 19 nt, Artificial Sequence
  Description of Artificial Sequence: Synthetic oligonucleotide
  Antisense strand to SEQ ID NO: 858572
uuagucguaugacuuucac

SEQ ID NO: 858574 - RNA, 19 nt, Artificial Sequence
  Description of Artificial Sequence: Synthetic oligonucleotide
  Sense strand starting at position 3647 of SEQ ID NO: 588345
uaugcauguuaggaauaug

SEQ ID NO: 858575 - RNA, 19 nt, Artificial Sequence
  Description of Artificial Sequence: Synthetic oligonucleotide
  Antisense strand to SEQ ID NO: 858574
cauauuccuaacaugcaua

SEQ ID NO: 858576 - RNA, 19 nt, Artificial Sequence
  Description of Artificial Sequence: Synthetic oligonucleotide
  Sense strand starting at position 3655 of SEQ ID NO: 588345
uuaggaauaugggaacuua

SEQ ID NO: 858577 - RNA, 19 nt, Artificial Sequence
  Description of Artificial Sequence: Synthetic oligonucleotide
  Antisense strand to SEQ ID NO: 858576
uaaguucccauauuccuaa

SEQ ID NO: 858578 - RNA, 19 nt, Artificial Sequence
  Description of Artificial Sequence: Synthetic oligonucleotide
  Sense strand starting at position 3907 of SEQ ID NO: 588345
cagccagauuugugaaaga

SEQ ID NO: 858579 - RNA, 19 nt, Artificial Sequence
  Description of Artificial Sequence: Synthetic oligonucleotide
  Antisense strand to SEQ ID NO: 858578
ucuuucacaaaucuggcug

SEQ ID NO: 858580 - RNA, 19 nt, Artificial Sequence
  Description of Artificial Sequence: Synthetic oligonucleotide
  Sense strand starting at position 27 of SEQ ID NO: 588346
accuacagucauggucaaa

SEQ ID NO: 858581 - RNA, 19 nt, Artificial Sequence
  Description of Artificial Sequence: Synthetic oligonucleotide
  Antisense strand to SEQ ID NO: 858580
uuugaccaugacuguaggu

SEQ ID NO: 858582 - RNA, 19 nt, Artificial Sequence
  Description of Artificial Sequence: Synthetic oligonucleotide
  Sense strand starting at position 335 of SEQ ID NO: 588346
agaacaacguguuccucaa

SEQ ID NO: 858583 - RNA, 19 nt, Artificial Sequence
  Description of Artificial Sequence: Synthetic oligonucleotide
  Antisense strand to SEQ ID NO: 858582
uugaggaacacguuguucu

SEQ ID NO: 858584 - RNA, 19 nt, Artificial Sequence
  Description of Artificial Sequence: Synthetic oligonucleotide
  Sense strand starting at position 339 of SEQ ID NO: 588346
caacguguuccucaaagcu

SEQ ID NO: 858585 - RNA, 19 nt, Artificial Sequence
  Description of Artificial Sequence: Synthetic oligonucleotide
  Antisense strand to SEQ ID NO: 858584
agcuuugaggaacacguug

SEQ ID NO: 858586 - RNA, 19 nt, Artificial Sequence
  Description of Artificial Sequence: Synthetic oligonucleotide
  Sense strand starting at position 628 of SEQ ID NO: 588346
ucuaucucucccuguuaga

SEQ ID NO: 858587 - RNA, 19 nt, Artificial Sequence
  Description of Artificial Sequence: Synthetic oligonucleotide
  Antisense strand to SEQ ID NO: 858586
ucuaacagggagagauaga

SEQ ID NO: 858588 - RNA, 19 nt, Artificial Sequence
  Description of Artificial Sequence: Synthetic oligonucleotide
  Sense strand starting at position 988 of SEQ ID NO: 588346
ccgagaucgcacgacugau

SEQ ID NO: 858589 - RNA, 19 nt, Artificial Sequence
  Description of Artificial Sequence: Synthetic oligonucleotide
  Antisense strand to SEQ ID NO: 858588
aucagucgugcgaucucgg

SEQ ID NO: 858590 - RNA, 19 nt, Artificial Sequence
  Description of Artificial Sequence: Synthetic oligonucleotide
  Sense strand starting at position 994 of SEQ ID NO: 588346
ucgcacgacugaucuaaga

SEQ ID NO: 858591 - RNA, 19 nt, Artificial Sequence
  Description of Artificial Sequence: Synthetic oligonucleotide
  Antisense strand to SEQ ID NO: 858590
ucuuagaucagucgugcga

SEQ ID NO: 858592 - RNA, 19 nt, Artificial Sequence
  Description of Artificial Sequence: Synthetic oligonucleotide
  Sense strand starting at position 996 of SEQ ID NO: 588346
gcacgacugaucuaagaca

SEQ ID NO: 858593 - RNA, 19 nt, Artificial Sequence
  Description of Artificial Sequence: Synthetic oligonucleotide
  Antisense strand to SEQ ID NO: 858592
ugucuuagaucagucgugc

SEQ ID NO: 858594 - RNA, 19 nt, Artificial Sequence
  Description of Artificial Sequence: Synthetic oligonucleotide
  Sense strand starting at position 1149 of SEQ ID NO: 588346
acacuaguguuaucuauga

SEQ ID NO: 858595 - RNA, 19 nt, Artificial Sequence
  Description of Artificial Sequence: Synthetic oligonucleotide
  Antisense strand to SEQ ID NO: 858594
ucauagauaacacuagugu

SEQ ID NO: 858596 - RNA, 19 nt, Artificial Sequence
  Description of Artificial Sequence: Synthetic oligonucleotide
  Sense strand starting at position 1153 of SEQ ID NO: 588346
uaguguuaucuaugaugau

SEQ ID NO: 858597 - RNA, 19 nt, Artificial Sequence
  Description of Artificial Sequence: Synthetic oligonucleotide
  Antisense strand to SEQ ID NO: 858596
aucaucauagauaacacua

SEQ ID NO: 858598 - RNA, 19 nt, Artificial Sequence
  Description of Artificial Sequence: Synthetic oligonucleotide
  Sense strand starting at position 1218 of SEQ ID NO: 588346
uccucauuaccguaucaua

SEQ ID NO: 858599 - RNA, 19 nt, Artificial Sequence
  Description of Artificial Sequence: Synthetic oligonucleotide
  Antisense strand to SEQ ID NO: 858598
uaugauacgguaaugagga

SEQ ID NO: 858600 - RNA, 19 nt, Artificial Sequence
  Description of Artificial Sequence: Synthetic oligonucleotide
  Sense strand starting at position 1281 of SEQ ID NO: 588346
aggcaaugccgcuaauaag

SEQ ID NO: 858601 - RNA, 19 nt, Artificial Sequence
  Description of Artificial Sequence: Synthetic oligonucleotide
  Antisense strand to SEQ ID NO: 858600
cuuauuagcggcauugccu

SEQ ID NO: 858602 - RNA, 19 nt, Artificial Sequence
  Description of Artificial Sequence: Synthetic oligonucleotide
  Sense strand starting at position 1289 of SEQ ID NO: 588346
ccgcuaauaagaugugaug

SEQ ID NO: 858603 - RNA, 19 nt, Artificial Sequence
  Description of Artificial Sequence: Synthetic oligonucleotide
  Antisense strand to SEQ ID NO: 858602
caucacaucuuauuagcgg

SEQ ID NO: 858604 - RNA, 19 nt, Artificial Sequence
  Description of Artificial Sequence: Synthetic oligonucleotide
  Sense strand starting at position 1291 of SEQ ID NO: 588346
gcuaauaagaugugauggu

SEQ ID NO: 858605 - RNA, 19 nt, Artificial Sequence
  Description of Artificial Sequence: Synthetic oligonucleotide
  Antisense strand to SEQ ID NO: 858604
accaucacaucuuauuagc

SEQ ID NO: 858606 - RNA, 19 nt, Artificial Sequence
  Description of Artificial Sequence: Synthetic oligonucleotide
  Sense strand starting at position 1295 of SEQ ID NO: 588346
auaagaugugaugguagca

SEQ ID NO: 858607 - RNA, 19 nt, Artificial Sequence
  Description of Artificial Sequence: Synthetic oligonucleotide
  Antisense strand to SEQ ID NO: 858606
ugcuaccaucacaucuuau

SEQ ID NO: 858608 - RNA, 19 nt, Artificial Sequence
  Description of Artificial Sequence: Synthetic oligonucleotide
  Sense strand starting at position 1325 of SEQ ID NO: 588346
ccaacugucugacucaaga

SEQ ID NO: 858609 - RNA, 19 nt, Artificial Sequence
  Description of Artificial Sequence: Synthetic oligonucleotide
  Antisense strand to SEQ ID NO: 858608
ucuugagucagacaguugg

SEQ ID NO: 858610 - RNA, 19 nt, Artificial Sequence
  Description of Artificial Sequence: Synthetic oligonucleotide
  Sense strand starting at position 1394 of SEQ ID NO: 588346
uguguauaaaugggugcau

SEQ ID NO: 858611 - RNA, 19 nt, Artificial Sequence
  Description of Artificial Sequence: Synthetic oligonucleotide
  Antisense strand to SEQ ID NO: 858610
augcacccauuuauacaca

SEQ ID NO: 858612 - RNA, 19 nt, Artificial Sequence
  Description of Artificial Sequence: Synthetic oligonucleotide
  Sense strand starting at position 1423 of SEQ ID NO: 588346
guaacuguuugcccuaaga

SEQ ID NO: 858613 - RNA, 19 nt, Artificial Sequence
  Description of Artificial Sequence: Synthetic oligonucleotide
  Antisense strand to SEQ ID NO: 858612
ucuuagggcaaacaguuac

SEQ ID NO: 858614 - RNA, 19 nt, Artificial Sequence
  Description of Artificial Sequence: Synthetic oligonucleotide
  Sense strand starting at position 2103 of SEQ ID NO: 588346
agaggccauguuuacaauu

SEQ ID NO: 858615 - RNA, 19 nt, Artificial Sequence
  Description of Artificial Sequence: Synthetic oligonucleotide
  Antisense strand to SEQ ID NO: 858614
aauuguaaacauggccucu

SEQ ID NO: 858616 - RNA, 19 nt, Artificial Sequence
  Description of Artificial Sequence: Synthetic oligonucleotide
  Sense strand starting at position 2182 of SEQ ID NO: 588346
ggaagcacccguggaauaa

SEQ ID NO: 858617 - RNA, 19 nt, Artificial Sequence
  Description of Artificial Sequence: Synthetic oligonucleotide
  Antisense strand to SEQ ID NO: 858616
uuauuccacgggugcuucc

SEQ ID NO: 858618 - RNA, 19 nt, Artificial Sequence
  Description of Artificial Sequence: Synthetic oligonucleotide
  Sense strand starting at position 2183 of SEQ ID NO: 588346
gaagcacccguggaauaau

SEQ ID NO: 858619 - RNA, 19 nt, Artificial Sequence
  Description of Artificial Sequence: Synthetic oligonucleotide
  Antisense strand to SEQ ID NO: 858618
auuauuccacgggugcuuc

SEQ ID NO: 858620 - RNA, 19 nt, Artificial Sequence
  Description of Artificial Sequence: Synthetic oligonucleotide
  Sense strand starting at position 2186 of SEQ ID NO: 588346
gcacccguggaauaauaaa

SEQ ID NO: 858621 - RNA, 19 nt, Artificial Sequence
  Description of Artificial Sequence: Synthetic oligonucleotide
  Antisense strand to SEQ ID NO: 858620
uuuauuauuccacgggugc

SEQ ID NO: 858622 - RNA, 19 nt, Artificial Sequence
  Description of Artificial Sequence: Synthetic oligonucleotide
  Sense strand starting at position 2240 of SEQ ID NO: 588346
acugucuuguacucaucau

SEQ ID NO: 858623 - RNA, 19 nt, Artificial Sequence
  Description of Artificial Sequence: Synthetic oligonucleotide
  Antisense strand to SEQ ID NO: 858622
augaugaguacaagacagu

SEQ ID NO: 858624 - RNA, 19 nt, Artificial Sequence
  Description of Artificial Sequence: Synthetic oligonucleotide
  Sense strand starting at position 2266 of SEQ ID NO: 588346
auuguuuaccaggguuaga

SEQ ID NO: 858625 - RNA, 19 nt, Artificial Sequence
  Description of Artificial Sequence: Synthetic oligonucleotide
  Antisense strand to SEQ ID NO: 858624
ucuaacccugguaaacaau

SEQ ID NO: 858626 - RNA, 19 nt, Artificial Sequence
  Description of Artificial Sequence: Synthetic oligonucleotide
  Sense strand starting at position 2269 of SEQ ID NO: 588346
guuuaccaggguuagagau

SEQ ID NO: 858627 - RNA, 19 nt, Artificial Sequence
  Description of Artificial Sequence: Synthetic oligonucleotide
  Antisense strand to SEQ ID NO: 858626
aucucuaacccugguaaac

SEQ ID NO: 858628 - RNA, 19 nt, Artificial Sequence
  Description of Artificial Sequence: Synthetic oligonucleotide
  Sense strand starting at position 2303 of SEQ ID NO: 588346
cucugaguuucuguccaau

SEQ ID NO: 858629 - RNA, 19 nt, Artificial Sequence
  Description of Artificial Sequence: Synthetic oligonucleotide
  Antisense strand to SEQ ID NO: 858628
auuggacagaaacucagag

SEQ ID NO: 858630 - RNA, 19 nt, Artificial Sequence
  Description of Artificial Sequence: Synthetic oligonucleotide
  Sense strand starting at position 2305 of SEQ ID NO: 588346
cugaguuucuguccaauuc

SEQ ID NO: 858631 - RNA, 19 nt, Artificial Sequence
  Description of Artificial Sequence: Synthetic oligonucleotide
  Antisense strand to SEQ ID NO: 858630
gaauuggacagaaacucag

SEQ ID NO: 858632 - RNA, 19 nt, Artificial Sequence
  Description of Artificial Sequence: Synthetic oligonucleotide
  Sense strand starting at position 2306 of SEQ ID NO: 588346
ugaguuucuguccaauucu

SEQ ID NO: 858633 - RNA, 19 nt, Artificial Sequence
  Description of Artificial Sequence: Synthetic oligonucleotide
  Antisense strand to SEQ ID NO: 858632
agaauuggacagaaacuca

SEQ ID NO: 858634 - RNA, 19 nt, Artificial Sequence
  Description of Artificial Sequence: Synthetic oligonucleotide
  Sense strand starting at position 2516 of SEQ ID NO: 588346
agauacuucucacuugguu

SEQ ID NO: 858635 - RNA, 19 nt, Artificial Sequence
  Description of Artificial Sequence: Synthetic oligonucleotide
  Antisense strand to SEQ ID NO: 858634
aaccaagugagaaguaucu

SEQ ID NO: 858636 - RNA, 19 nt, Artificial Sequence
  Description of Artificial Sequence: Synthetic oligonucleotide
  Sense strand starting at position 2639 of SEQ ID NO: 588346
agguauauuugguagggaa

SEQ ID NO: 858637 - RNA, 19 nt, Artificial Sequence
  Description of Artificial Sequence: Synthetic oligonucleotide
  Antisense strand to SEQ ID NO: 858636
uucccuaccaaauauaccu

SEQ ID NO: 858638 - RNA, 19 nt, Artificial Sequence
  Description of Artificial Sequence: Synthetic oligonucleotide
  Sense strand starting at position 2688 of SEQ ID NO: 588346
gcuugcauuuaguuacaca

SEQ ID NO: 858639 - RNA, 19 nt, Artificial Sequence
  Description of Artificial Sequence: Synthetic oligonucleotide
  Antisense strand to SEQ ID NO: 858638
uguguaacuaaaugcaagc

SEQ ID NO: 858640 - RNA, 19 nt, Artificial Sequence
  Description of Artificial Sequence: Synthetic oligonucleotide
  Sense strand starting at position 2942 of SEQ ID NO: 588346
aucagcuguggucaguaaa

SEQ ID NO: 858641 - RNA, 19 nt, Artificial Sequence
  Description of Artificial Sequence: Synthetic oligonucleotide
  Antisense strand to SEQ ID NO: 858640
uuuacugaccacagcugau

SEQ ID NO: 858642 - RNA, 19 nt, Artificial Sequence
  Description of Artificial Sequence: Synthetic oligonucleotide
  Sense strand starting at position 2976 of SEQ ID NO: 588346
ccgccuccugaagaaagau

SEQ ID NO: 858643 - RNA, 19 nt, Artificial Sequence
  Description of Artificial Sequence: Synthetic oligonucleotide
  Antisense strand to SEQ ID NO: 858642
aucuuucuucaggaggcgg

SEQ ID NO: 858644 - RNA, 19 nt, Artificial Sequence
  Description of Artificial Sequence: Synthetic oligonucleotide
  Sense strand starting at position 3096 of SEQ ID NO: 588346
cgaugacaugaaugcuagu

SEQ ID NO: 858645 - RNA, 19 nt, Artificial Sequence
  Description of Artificial Sequence: Synthetic oligonucleotide
  Antisense strand to SEQ ID NO: 858644
acuagcauucaugucaucg

SEQ ID NO: 858646 - RNA, 19 nt, Artificial Sequence
  Description of Artificial Sequence: Synthetic oligonucleotide
  Sense strand starting at position 3321 of SEQ ID NO: 588346
aaguucuucccgggaggga

SEQ ID NO: 858647 - RNA, 19 nt, Artificial Sequence
  Description of Artificial Sequence: Synthetic oligonucleotide
  Antisense strand to SEQ ID NO: 858646
ucccucccgggaagaacuu

SEQ ID NO: 858648 - RNA, 19 nt, Artificial Sequence
  Description of Artificial Sequence: Synthetic oligonucleotide
  Sense strand starting at position 3574 of SEQ ID NO: 588346
uguuauguauuccucacuu

SEQ ID NO: 858649 - RNA, 19 nt, Artificial Sequence
  Description of Artificial Sequence: Synthetic oligonucleotide
  Antisense strand to SEQ ID NO: 858648
aagugaggaauacauaaca

SEQ ID NO: 858650 - RNA, 19 nt, Artificial Sequence
  Description of Artificial Sequence: Synthetic oligonucleotide
  Sense strand starting at position 3593 of SEQ ID NO: 588346
ucagcccaucuucgagaua

SEQ ID NO: 858651 - RNA, 19 nt, Artificial Sequence
  Description of Artificial Sequence: Synthetic oligonucleotide
  Antisense strand to SEQ ID NO: 858650
uaucucgaagaugggcuga

SEQ ID NO: 858652 - RNA, 19 nt, Artificial Sequence
  Description of Artificial Sequence: Synthetic oligonucleotide
  Sense strand starting at position 3598 of SEQ ID NO: 588346
ccaucuucgagauaggcau

SEQ ID NO: 858653 - RNA, 19 nt, Artificial Sequence
  Description of Artificial Sequence: Synthetic oligonucleotide
  Antisense strand to SEQ ID NO: 858652
augccuaucucgaagaugg

SEQ ID NO: 858654 - RNA, 19 nt, Artificial Sequence
  Description of Artificial Sequence: Synthetic oligonucleotide
  Sense strand starting at position 3605 of SEQ ID NO: 588346
cgagauaggcauugcuauc

SEQ ID NO: 858655 - RNA, 19 nt, Artificial Sequence
  Description of Artificial Sequence: Synthetic oligonucleotide
  Antisense strand to SEQ ID NO: 858654
gauagcaaugccuaucucg

SEQ ID NO: 858656 - RNA, 19 nt, Artificial Sequence
  Description of Artificial Sequence: Synthetic oligonucleotide
  Sense strand starting at position 3611 of SEQ ID NO: 588346
aggcauugcuaucccugau

SEQ ID NO: 858657 - RNA, 19 nt, Artificial Sequence
  Description of Artificial Sequence: Synthetic oligonucleotide
  Antisense strand to SEQ ID NO: 858656
aucagggauagcaaugccu

SEQ ID NO: 858658 - RNA, 19 nt, Artificial Sequence
  Description of Artificial Sequence: Synthetic oligonucleotide
  Sense strand starting at position 3615 of SEQ ID NO: 588346
auugcuaucccugaugauc

SEQ ID NO: 858659 - RNA, 19 nt, Artificial Sequence
  Description of Artificial Sequence: Synthetic oligonucleotide
  Antisense strand to SEQ ID NO: 858658
gaucaucagggauagcaau

SEQ ID NO: 858660 - RNA, 19 nt, Artificial Sequence
  Description of Artificial Sequence: Synthetic oligonucleotide
  Sense strand starting at position 151 of SEQ ID NO: 588347
cguggaggcagggauuaau

SEQ ID NO: 858661 - RNA, 19 nt, Artificial Sequence
  Description of Artificial Sequence: Synthetic oligonucleotide
  Antisense strand to SEQ ID NO: 858660
auuaaucccugccuccacg

SEQ ID NO: 858662 - RNA, 19 nt, Artificial Sequence
  Description of Artificial Sequence: Synthetic oligonucleotide
  Sense strand starting at position 254 of SEQ ID NO: 588347
agaaucaaauaggaucaaa

SEQ ID NO: 858663 - RNA, 19 nt, Artificial Sequence
  Description of Artificial Sequence: Synthetic oligonucleotide
  Antisense strand to SEQ ID NO: 858662
uuugauccuauuugauucu

SEQ ID NO: 858664 - RNA, 19 nt, Artificial Sequence
  Description of Artificial Sequence: Synthetic oligonucleotide
  Sense strand starting at position 289 of SEQ ID NO: 588347
aaauuugcaugagaaguga

SEQ ID NO: 858665 - RNA, 19 nt, Artificial Sequence
  Description of Artificial Sequence: Synthetic oligonucleotide
  Antisense strand to SEQ ID NO: 858664
ucacuucucaugcaaauuu

SEQ ID NO: 858666 - RNA, 19 nt, Artificial Sequence
  Description of Artificial Sequence: Synthetic oligonucleotide
  Sense strand starting at position 293 of SEQ ID NO: 588347
uugcaugagaagugaauga

SEQ ID NO: 858667 - RNA, 19 nt, Artificial Sequence
  Description of Artificial Sequence: Synthetic oligonucleotide
  Antisense strand to SEQ ID NO: 858666
ucauucacuucucaugcaa

SEQ ID NO: 858668 - RNA, 19 nt, Artificial Sequence
  Description of Artificial Sequence: Synthetic oligonucleotide
  Sense strand starting at position 350 of SEQ ID NO: 588347
acaagaagaguguggcuau

SEQ ID NO: 858669 - RNA, 19 nt, Artificial Sequence
  Description of Artificial Sequence: Synthetic oligonucleotide
  Antisense strand to SEQ ID NO: 858668
auagccacacucuucuugu

SEQ ID NO: 858670 - RNA, 19 nt, Artificial Sequence
  Description of Artificial Sequence: Synthetic oligonucleotide
  Sense strand starting at position 537 of SEQ ID NO: 588347
aaauaauggcgaugauaga

SEQ ID NO: 858671 - RNA, 19 nt, Artificial Sequence
  Description of Artificial Sequence: Synthetic oligonucleotide
  Antisense strand to SEQ ID NO: 858670
ucuaucaucgccauuauuu

SEQ ID NO: 858672 - RNA, 19 nt, Artificial Sequence
  Description of Artificial Sequence: Synthetic oligonucleotide
  Sense strand starting at position 710 of SEQ ID NO: 588347
agcucagagaucuagguca

SEQ ID NO: 858673 - RNA, 19 nt, Artificial Sequence
  Description of Artificial Sequence: Synthetic oligonucleotide
  Antisense strand to SEQ ID NO: 858672
ugaccuagaucucugagcu

SEQ ID NO: 858674 - RNA, 19 nt, Artificial Sequence
  Description of Artificial Sequence: Synthetic oligonucleotide
  Sense strand starting at position 712 of SEQ ID NO: 588347
cucagagaucuaggucaug

SEQ ID NO: 858675 - RNA, 19 nt, Artificial Sequence
  Description of Artificial Sequence: Synthetic oligonucleotide
  Antisense strand to SEQ ID NO: 858674
caugaccuagaucucugag

SEQ ID NO: 858676 - RNA, 19 nt, Artificial Sequence
  Description of Artificial Sequence: Synthetic oligonucleotide
  Sense strand starting at position 715 of SEQ ID NO: 588347
agagaucuaggucaugcuu

SEQ ID NO: 858677 - RNA, 19 nt, Artificial Sequence
  Description of Artificial Sequence: Synthetic oligonucleotide
  Antisense strand to SEQ ID NO: 858676
aagcaugaccuagaucucu

SEQ ID NO: 858678 - RNA, 19 nt, Artificial Sequence
  Description of Artificial Sequence: Synthetic oligonucleotide
  Sense strand starting at position 726 of SEQ ID NO: 588347
ucaugcuuuggagacaauu

SEQ ID NO: 858679 - RNA, 19 nt, Artificial Sequence
  Description of Artificial Sequence: Synthetic oligonucleotide
  Antisense strand to SEQ ID NO: 858678
aauugucuccaaagcauga

SEQ ID NO: 858680 - RNA, 19 nt, Artificial Sequence
  Description of Artificial Sequence: Synthetic oligonucleotide
  Sense strand starting at position 747 of SEQ ID NO: 588347
gauagccuucuggauaugu

SEQ ID NO: 858681 - RNA, 19 nt, Artificial Sequence
  Description of Artificial Sequence: Synthetic oligonucleotide
  Antisense strand to SEQ ID NO: 858680
acauauccagaaggcuauc

SEQ ID NO: 858682 - RNA, 19 nt, Artificial Sequence
  Description of Artificial Sequence: Synthetic oligonucleotide
  Sense strand starting at position 749 of SEQ ID NO: 588347
uagccuucuggauauguga

SEQ ID NO: 858683 - RNA, 19 nt, Artificial Sequence
  Description of Artificial Sequence: Synthetic oligonucleotide
  Antisense strand to SEQ ID NO: 858682
ucacauauccagaaggcua

SEQ ID NO: 858684 - RNA, 19 nt, Artificial Sequence
  Description of Artificial Sequence: Synthetic oligonucleotide
  Sense strand starting at position 764 of SEQ ID NO: 588347
gugaguguucuagggaaug

SEQ ID NO: 858685 - RNA, 19 nt, Artificial Sequence
  Description of Artificial Sequence: Synthetic oligonucleotide
  Antisense strand to SEQ ID NO: 858684
cauucccuagaacacucac

SEQ ID NO: 858686 - RNA, 19 nt, Artificial Sequence
  Description of Artificial Sequence: Synthetic oligonucleotide
  Sense strand starting at position 824 of SEQ ID NO: 588347
gcacauuuggucuguuucu

SEQ ID NO: 858687 - RNA, 19 nt, Artificial Sequence
  Description of Artificial Sequence: Synthetic oligonucleotide
  Antisense strand to SEQ ID NO: 858686
agaaacagaccaaaugugc

SEQ ID NO: 858688 - RNA, 19 nt, Artificial Sequence
  Description of Artificial Sequence: Synthetic oligonucleotide
  Sense strand starting at position 1146 of SEQ ID NO: 588347
ucuguuaauugaguccaaa

SEQ ID NO: 858689 - RNA, 19 nt, Artificial Sequence
  Description of Artificial Sequence: Synthetic oligonucleotide
  Antisense strand to SEQ ID NO: 858688
uuuggacucaauuaacaga

SEQ ID NO: 858690 - RNA, 19 nt, Artificial Sequence
  Description of Artificial Sequence: Synthetic oligonucleotide
  Sense strand starting at position 1149 of SEQ ID NO: 588347
guuaauugaguccaaacuc

SEQ ID NO: 858691 - RNA, 19 nt, Artificial Sequence
  Description of Artificial Sequence: Synthetic oligonucleotide
  Antisense strand to SEQ ID NO: 858690
gaguuuggacucaauuaac

SEQ ID NO: 858692 - RNA, 19 nt, Artificial Sequence
  Description of Artificial Sequence: Synthetic oligonucleotide
  Sense strand starting at position 1284 of SEQ ID NO: 588347
auucuuaccuguucuagga

SEQ ID NO: 858693 - RNA, 19 nt, Artificial Sequence
  Description of Artificial Sequence: Synthetic oligonucleotide
  Antisense strand to SEQ ID NO: 858692
uccuagaacagguaagaau

SEQ ID NO: 858694 - RNA, 19 nt, Artificial Sequence
  Description of Artificial Sequence: Synthetic oligonucleotide
  Sense strand starting at position 1288 of SEQ ID NO: 588347
uuaccuguucuaggagaaa

SEQ ID NO: 858695 - RNA, 19 nt, Artificial Sequence
  Description of Artificial Sequence: Synthetic oligonucleotide
  Antisense strand to SEQ ID NO: 858694
uuucuccuagaacagguaa

SEQ ID NO: 858696 - RNA, 19 nt, Artificial Sequence
  Description of Artificial Sequence: Synthetic oligonucleotide
  Sense strand starting at position 1514 of SEQ ID NO: 588347
cuagguuugccugaacaaa

SEQ ID NO: 858697 - RNA, 19 nt, Artificial Sequence
  Description of Artificial Sequence: Synthetic oligonucleotide
  Antisense strand to SEQ ID NO: 858696
uuuguucaggcaaaccuag

SEQ ID NO: 858698 - RNA, 19 nt, Artificial Sequence
  Description of Artificial Sequence: Synthetic oligonucleotide
  Sense strand starting at position 2055 of SEQ ID NO: 588347
uuggauucggaccaguuua

SEQ ID NO: 858699 - RNA, 19 nt, Artificial Sequence
  Description of Artificial Sequence: Synthetic oligonucleotide
  Antisense strand to SEQ ID NO: 858698
uaaacugguccgaauccaa

SEQ ID NO: 858700 - RNA, 19 nt, Artificial Sequence
  Description of Artificial Sequence: Synthetic oligonucleotide
  Sense strand starting at position 2267 of SEQ ID NO: 588347
acuuaagaguuucuuggga

SEQ ID NO: 858701 - RNA, 19 nt, Artificial Sequence
  Description of Artificial Sequence: Synthetic oligonucleotide
  Antisense strand to SEQ ID NO: 858700
ucccaagaaacucuuaagu

SEQ ID NO: 858702 - RNA, 19 nt, Artificial Sequence
  Description of Artificial Sequence: Synthetic oligonucleotide
  Sense strand starting at position 2678 of SEQ ID NO: 588347
agaagaguggcugaccuuu

SEQ ID NO: 858703 - RNA, 19 nt, Artificial Sequence
  Description of Artificial Sequence: Synthetic oligonucleotide
  Antisense strand to SEQ ID NO: 858702
aaaggucagccacucuucu

SEQ ID NO: 858704 - RNA, 19 nt, Artificial Sequence
  Description of Artificial Sequence: Synthetic oligonucleotide
  Sense strand starting at position 2738 of SEQ ID NO: 588347
uugguuguuagagaucuag

SEQ ID NO: 858705 - RNA, 19 nt, Artificial Sequence
  Description of Artificial Sequence: Synthetic oligonucleotide
  Antisense strand to SEQ ID NO: 858704
cuagaucucuaacaaccaa

SEQ ID NO: 858706 - RNA, 19 nt, Artificial Sequence
  Description of Artificial Sequence: Synthetic oligonucleotide
  Sense strand starting at position 2748 of SEQ ID NO: 588347
gagaucuagucacauuuag

SEQ ID NO: 858707 - RNA, 19 nt, Artificial Sequence
  Description of Artificial Sequence: Synthetic oligonucleotide
  Antisense strand to SEQ ID NO: 858706
cuaaaugugacuagaucuc

SEQ ID NO: 858708 - RNA, 19 nt, Artificial Sequence
  Description of Artificial Sequence: Synthetic oligonucleotide
  Sense strand starting at position 2862 of SEQ ID NO: 588347
caagguguggcaugaaaua

SEQ ID NO: 858709 - RNA, 19 nt, Artificial Sequence
  Description of Artificial Sequence: Synthetic oligonucleotide
  Antisense strand to SEQ ID NO: 858708
uauuucaugccacaccuug

SEQ ID NO: 858710 - RNA, 19 nt, Artificial Sequence
  Description of Artificial Sequence: Synthetic oligonucleotide
  Sense strand starting at position 2867 of SEQ ID NO: 588347
uguggcaugaaauagguaa

SEQ ID NO: 858711 - RNA, 19 nt, Artificial Sequence
  Description of Artificial Sequence: Synthetic oligonucleotide
  Antisense strand to SEQ ID NO: 858710
uuaccuauuucaugccaca

SEQ ID NO: 858712 - RNA, 19 nt, Artificial Sequence
  Description of Artificial Sequence: Synthetic oligonucleotide
  Sense strand starting at position 2869 of SEQ ID NO: 588347
uggcaugaaauagguaaua

SEQ ID NO: 858713 - RNA, 19 nt, Artificial Sequence
  Description of Artificial Sequence: Synthetic oligonucleotide
  Antisense strand to SEQ ID NO: 858712
uauuaccuauuucaugcca

SEQ ID NO: 858714 - RNA, 19 nt, Artificial Sequence
  Description of Artificial Sequence: Synthetic oligonucleotide
  Sense strand starting at position 2908 of SEQ ID NO: 588347
auuccuuugguguguauuu

SEQ ID NO: 858715 - RNA, 19 nt, Artificial Sequence
  Description of Artificial Sequence: Synthetic oligonucleotide
  Antisense strand to SEQ ID NO: 858714
aaauacacaccaaaggaau

SEQ ID NO: 858716 - RNA, 19 nt, Artificial Sequence
  Description of Artificial Sequence: Synthetic oligonucleotide
  Sense strand starting at position 2915 of SEQ ID NO: 588347
ugguguguauuucucccua

SEQ ID NO: 858717 - RNA, 19 nt, Artificial Sequence
  Description of Artificial Sequence: Synthetic oligonucleotide
  Antisense strand to SEQ ID NO: 858716
uagggagaaauacacacca

SEQ ID NO: 858718 - RNA, 19 nt, Artificial Sequence
  Description of Artificial Sequence: Synthetic oligonucleotide
  Sense strand starting at position 2917 of SEQ ID NO: 588347
guguguauuucucccuaga

SEQ ID NO: 858719 - RNA, 19 nt, Artificial Sequence
  Description of Artificial Sequence: Synthetic oligonucleotide
  Antisense strand to SEQ ID NO: 858718
ucuagggagaaauacacac

SEQ ID NO: 858720 - RNA, 19 nt, Artificial Sequence
  Description of Artificial Sequence: Synthetic oligonucleotide
  Sense strand starting at position 2919 of SEQ ID NO: 588347
guguauuucucccuagacu

SEQ ID NO: 858721 - RNA, 19 nt, Artificial Sequence
  Description of Artificial Sequence: Synthetic oligonucleotide
  Antisense strand to SEQ ID NO: 858720
agucuagggagaaauacac

SEQ ID NO: 858722 - RNA, 19 nt, Artificial Sequence
  Description of Artificial Sequence: Synthetic oligonucleotide
  Sense strand starting at position 2980 of SEQ ID NO: 588347
cccuacauggccuggaaua

SEQ ID NO: 858723 - RNA, 19 nt, Artificial Sequence
  Description of Artificial Sequence: Synthetic oligonucleotide
  Antisense strand to SEQ ID NO: 858722
uauuccaggccauguaggg

SEQ ID NO: 858724 - RNA, 19 nt, Artificial Sequence
  Description of Artificial Sequence: Synthetic oligonucleotide
  Sense strand starting at position 2981 of SEQ ID NO: 588347
ccuacauggccuggaauau

SEQ ID NO: 858725 - RNA, 19 nt, Artificial Sequence
  Description of Artificial Sequence: Synthetic oligonucleotide
  Antisense strand to SEQ ID NO: 858724
auauuccaggccauguagg

SEQ ID NO: 858726 - RNA, 19 nt, Artificial Sequence
  Description of Artificial Sequence: Synthetic oligonucleotide
  Sense strand starting at position 2990 of SEQ ID NO: 588347
ccuggaauaucaguaacuc

SEQ ID NO: 858727 - RNA, 19 nt, Artificial Sequence
  Description of Artificial Sequence: Synthetic oligonucleotide
  Antisense strand to SEQ ID NO: 858726
gaguuacugauauuccagg

SEQ ID NO: 858728 - RNA, 19 nt, Artificial Sequence
  Description of Artificial Sequence: Synthetic oligonucleotide
  Sense strand starting at position 3028 of SEQ ID NO: 588347
uuaguugcgcacgugagaa

SEQ ID NO: 858729 - RNA, 19 nt, Artificial Sequence
  Description of Artificial Sequence: Synthetic oligonucleotide
  Antisense strand to SEQ ID NO: 858728
uucucacgugcgcaacuaa

SEQ ID NO: 858730 - RNA, 19 nt, Artificial Sequence
  Description of Artificial Sequence: Synthetic oligonucleotide
  Sense strand starting at position 3141 of SEQ ID NO: 588347
caauuagugcuugaucaga

SEQ ID NO: 858731 - RNA, 19 nt, Artificial Sequence
  Description of Artificial Sequence: Synthetic oligonucleotide
  Antisense strand to SEQ ID NO: 858730
ucugaucaagcacuaauug

SEQ ID NO: 858732 - RNA, 19 nt, Artificial Sequence
  Description of Artificial Sequence: Synthetic oligonucleotide
  Sense strand starting at position 3173 of SEQ ID NO: 588347
guagaauuccuagggucug

SEQ ID NO: 858733 - RNA, 19 nt, Artificial Sequence
  Description of Artificial Sequence: Synthetic oligonucleotide
  Antisense strand to SEQ ID NO: 858732
cagacccuaggaauucuac

SEQ ID NO: 858734 - RNA, 19 nt, Artificial Sequence
  Description of Artificial Sequence: Synthetic oligonucleotide
  Sense strand starting at position 3739 of SEQ ID NO: 588347
gcguaaauugugcucucuu

SEQ ID NO: 858735 - RNA, 19 nt, Artificial Sequence
  Description of Artificial Sequence: Synthetic oligonucleotide
  Antisense strand to SEQ ID NO: 858734
aagagagcacaauuuacgc

SEQ ID NO: 858736 - RNA, 19 nt, Artificial Sequence
  Description of Artificial Sequence: Synthetic oligonucleotide
  Sense strand starting at position 3767 of SEQ ID NO: 588347
agaaguauucggugaccac

SEQ ID NO: 858737 - RNA, 19 nt, Artificial Sequence
  Description of Artificial Sequence: Synthetic oligonucleotide
  Antisense strand to SEQ ID NO: 858736
guggucaccgaauacuucu

SEQ ID NO: 858738 - RNA, 19 nt, Artificial Sequence
  Description of Artificial Sequence: Synthetic oligonucleotide
  Sense strand starting at position 3912 of SEQ ID NO: 588347
uagugaagucucuggagga

SEQ ID NO: 858739 - RNA, 19 nt, Artificial Sequence
  Description of Artificial Sequence: Synthetic oligonucleotide
  Antisense strand to SEQ ID NO: 858738
uccuccagagacuucacua

SEQ ID NO: 858740 - RNA, 19 nt, Artificial Sequence
  Description of Artificial Sequence: Synthetic oligonucleotide
  Sense strand starting at position 375 of SEQ ID NO: 588348
ucaggagacugagauauga

SEQ ID NO: 858741 - RNA, 19 nt, Artificial Sequence
  Description of Artificial Sequence: Synthetic oligonucleotide
  Antisense strand to SEQ ID NO: 858740
ucauaucucagucuccuga

SEQ ID NO: 858742 - RNA, 19 nt, Artificial Sequence
  Description of Artificial Sequence: Synthetic oligonucleotide
  Sense strand starting at position 622 of SEQ ID NO: 588348
cuaaguucucgcugcugca

SEQ ID NO: 858743 - RNA, 19 nt, Artificial Sequence
  Description of Artificial Sequence: Synthetic oligonucleotide
  Antisense strand to SEQ ID NO: 858742
ugcagcagcgagaacuuag

SEQ ID NO: 858744 - RNA, 19 nt, Artificial Sequence
  Description of Artificial Sequence: Synthetic oligonucleotide
  Sense strand starting at position 658 of SEQ ID NO: 588348
aggcucacuuuccagaaga

SEQ ID NO: 858745 - RNA, 19 nt, Artificial Sequence
  Description of Artificial Sequence: Synthetic oligonucleotide
  Antisense strand to SEQ ID NO: 858744
ucuucuggaaagugagccu

SEQ ID NO: 858746 - RNA, 19 nt, Artificial Sequence
  Description of Artificial Sequence: Synthetic oligonucleotide
  Sense strand starting at position 720 of SEQ ID NO: 588348
guagaaguccaaggcucuu

SEQ ID NO: 858747 - RNA, 19 nt, Artificial Sequence
  Description of Artificial Sequence: Synthetic oligonucleotide
  Antisense strand to SEQ ID NO: 858746
aagagccuuggacuucuac

SEQ ID NO: 858748 - RNA, 19 nt, Artificial Sequence
  Description of Artificial Sequence: Synthetic oligonucleotide
  Sense strand starting at position 726 of SEQ ID NO: 588348
guccaaggcucuucggaga

SEQ ID NO: 858749 - RNA, 19 nt, Artificial Sequence
  Description of Artificial Sequence: Synthetic oligonucleotide
  Antisense strand to SEQ ID NO: 858748
ucuccgaagagccuuggac

SEQ ID NO: 858750 - RNA, 19 nt, Artificial Sequence
  Description of Artificial Sequence: Synthetic oligonucleotide
  Sense strand starting at position 1149 of SEQ ID NO: 588348
ugcacaaucgcucagggua

SEQ ID NO: 858751 - RNA, 19 nt, Artificial Sequence
  Description of Artificial Sequence: Synthetic oligonucleotide
  Antisense strand to SEQ ID NO: 858750
uacccugagcgauugugca

SEQ ID NO: 858752 - RNA, 19 nt, Artificial Sequence
  Description of Artificial Sequence: Synthetic oligonucleotide
  Sense strand starting at position 1154 of SEQ ID NO: 588348
aaucgcucaggguacaaau

SEQ ID NO: 858753 - RNA, 19 nt, Artificial Sequence
  Description of Artificial Sequence: Synthetic oligonucleotide
  Antisense strand to SEQ ID NO: 858752
auuuguacccugagcgauu

SEQ ID NO: 858754 - RNA, 19 nt, Artificial Sequence
  Description of Artificial Sequence: Synthetic oligonucleotide
  Sense strand starting at position 1164 of SEQ ID NO: 588348
gguacaaaucccugauagg

SEQ ID NO: 858755 - RNA, 19 nt, Artificial Sequence
  Description of Artificial Sequence: Synthetic oligonucleotide
  Antisense strand to SEQ ID NO: 858754
ccuaucagggauuuguacc

SEQ ID NO: 858756 - RNA, 19 nt, Artificial Sequence
  Description of Artificial Sequence: Synthetic oligonucleotide
  Sense strand starting at position 1187 of SEQ ID NO: 588348
acaugcaagucugcagaau

SEQ ID NO: 858757 - RNA, 19 nt, Artificial Sequence
  Description of Artificial Sequence: Synthetic oligonucleotide
  Antisense strand to SEQ ID NO: 858756
auucugcagacuugcaugu

SEQ ID NO: 858758 - RNA, 19 nt, Artificial Sequence
  Description of Artificial Sequence: Synthetic oligonucleotide
  Sense strand starting at position 1310 of SEQ ID NO: 588348
ccaguccugccuugugcaa

SEQ ID NO: 858759 - RNA, 19 nt, Artificial Sequence
  Description of Artificial Sequence: Synthetic oligonucleotide
  Antisense strand to SEQ ID NO: 858758
uugcacaaggcaggacugg

SEQ ID NO: 858760 - RNA, 19 nt, Artificial Sequence
  Description of Artificial Sequence: Synthetic oligonucleotide
  Sense strand starting at position 1542 of SEQ ID NO: 588348
cagcuccuccagggugaaa

SEQ ID NO: 858761 - RNA, 19 nt, Artificial Sequence
  Description of Artificial Sequence: Synthetic oligonucleotide
  Antisense strand to SEQ ID NO: 858760
uuucacccuggaggagcug

SEQ ID NO: 858762 - RNA, 19 nt, Artificial Sequence
  Description of Artificial Sequence: Synthetic oligonucleotide
  Sense strand starting at position 1553 of SEQ ID NO: 588348
gggugaaaguaguuuggaa

SEQ ID NO: 858763 - RNA, 19 nt, Artificial Sequence
  Description of Artificial Sequence: Synthetic oligonucleotide
  Antisense strand to SEQ ID NO: 858762
uuccaaacuacuuucaccc

SEQ ID NO: 858764 - RNA, 19 nt, Artificial Sequence
  Description of Artificial Sequence: Synthetic oligonucleotide
  Sense strand starting at position 1555 of SEQ ID NO: 588348
gugaaaguaguuuggaauu

SEQ ID NO: 858765 - RNA, 19 nt, Artificial Sequence
  Description of Artificial Sequence: Synthetic oligonucleotide
  Antisense strand to SEQ ID NO: 858764
aauuccaaacuacuuucac

SEQ ID NO: 858766 - RNA, 19 nt, Artificial Sequence
  Description of Artificial Sequence: Synthetic oligonucleotide
  Sense strand starting at position 1592 of SEQ ID NO: 588348
ucaagaaagccaugagcga

SEQ ID NO: 858767 - RNA, 19 nt, Artificial Sequence
  Description of Artificial Sequence: Synthetic oligonucleotide
  Antisense strand to SEQ ID NO: 858766
ucgcucauggcuuucuuga

SEQ ID NO: 858768 - RNA, 19 nt, Artificial Sequence
  Description of Artificial Sequence: Synthetic oligonucleotide
  Sense strand starting at position 1605 of SEQ ID NO: 588348
gagcgaguucccugagucu

SEQ ID NO: 858769 - RNA, 19 nt, Artificial Sequence
  Description of Artificial Sequence: Synthetic oligonucleotide
  Antisense strand to SEQ ID NO: 858768
agacucagggaacucgcuc

SEQ ID NO: 858770 - RNA, 19 nt, Artificial Sequence
  Description of Artificial Sequence: Synthetic oligonucleotide
  Sense strand starting at position 1608 of SEQ ID NO: 588348
cgaguucccugagucugaa

SEQ ID NO: 858771 - RNA, 19 nt, Artificial Sequence
  Description of Artificial Sequence: Synthetic oligonucleotide
  Antisense strand to SEQ ID NO: 858770
uucagacucagggaacucg

SEQ ID NO: 858772 - RNA, 19 nt, Artificial Sequence
  Description of Artificial Sequence: Synthetic oligonucleotide
  Sense strand starting at position 1657 of SEQ ID NO: 588348
cgggauuccuuucccuaca

SEQ ID NO: 858773 - RNA, 19 nt, Artificial Sequence
  Description of Artificial Sequence: Synthetic oligonucleotide
  Antisense strand to SEQ ID NO: 858772
uguagggaaaggaaucccg

SEQ ID NO: 858774 - RNA, 19 nt, Artificial Sequence
  Description of Artificial Sequence: Synthetic oligonucleotide
  Sense strand starting at position 1759 of SEQ ID NO: 588348
gucugagagauccaccagu

SEQ ID NO: 858775 - RNA, 19 nt, Artificial Sequence
  Description of Artificial Sequence: Synthetic oligonucleotide
  Antisense strand to SEQ ID NO: 858774
acugguggaucucucagac

SEQ ID NO: 858776 - RNA, 19 nt, Artificial Sequence
  Description of Artificial Sequence: Synthetic oligonucleotide
  Sense strand starting at position 1844 of SEQ ID NO: 588348
ggaccucaccggcauguaa

SEQ ID NO: 858777 - RNA, 19 nt, Artificial Sequence
  Description of Artificial Sequence: Synthetic oligonucleotide
  Antisense strand to SEQ ID NO: 858776
uuacaugccggugaggucc

SEQ ID NO: 858778 - RNA, 19 nt, Artificial Sequence
  Description of Artificial Sequence: Synthetic oligonucleotide
  Sense strand starting at position 2818 of SEQ ID NO: 588348
cagacuugagcucguagaa

SEQ ID NO: 858779 - RNA, 19 nt, Artificial Sequence
  Description of Artificial Sequence: Synthetic oligonucleotide
  Antisense strand to SEQ ID NO: 858778
uucuacgagcucaagucug

SEQ ID NO: 858780 - RNA, 19 nt, Artificial Sequence
  Description of Artificial Sequence: Synthetic oligonucleotide
  Sense strand starting at position 2858 of SEQ ID NO: 588348
uagcgagucuccuuucuca

SEQ ID NO: 858781 - RNA, 19 nt, Artificial Sequence
  Description of Artificial Sequence: Synthetic oligonucleotide
  Antisense strand to SEQ ID NO: 858780
ugagaaaggagacucgcua

SEQ ID NO: 858782 - RNA, 19 nt, Artificial Sequence
  Description of Artificial Sequence: Synthetic oligonucleotide
  Sense strand starting at position 2861 of SEQ ID NO: 588348
cgagucuccuuucucagaa

SEQ ID NO: 858783 - RNA, 19 nt, Artificial Sequence
  Description of Artificial Sequence: Synthetic oligonucleotide
  Antisense strand to SEQ ID NO: 858782
uucugagaaaggagacucg

SEQ ID NO: 858784 - RNA, 19 nt, Artificial Sequence
  Description of Artificial Sequence: Synthetic oligonucleotide
  Sense strand starting at position 2863 of SEQ ID NO: 588348
agucuccuuucucagaaag

SEQ ID NO: 858785 - RNA, 19 nt, Artificial Sequence
  Description of Artificial Sequence: Synthetic oligonucleotide
  Antisense strand to SEQ ID NO: 858784
cuuucugagaaaggagacu

SEQ ID NO: 858786 - RNA, 19 nt, Artificial Sequence
  Description of Artificial Sequence: Synthetic oligonucleotide
  Sense strand starting at position 2910 of SEQ ID NO: 588348
ucgcuugcucgcccugaau

SEQ ID NO: 858787 - RNA, 19 nt, Artificial Sequence
  Description of Artificial Sequence: Synthetic oligonucleotide
  Antisense strand to SEQ ID NO: 858786
auucagggcgagcaagcga

SEQ ID NO: 858788 - RNA, 19 nt, Artificial Sequence
  Description of Artificial Sequence: Synthetic oligonucleotide
  Sense strand starting at position 2912 of SEQ ID NO: 588348
gcuugcucgcccugaaucu

SEQ ID NO: 858789 - RNA, 19 nt, Artificial Sequence
  Description of Artificial Sequence: Synthetic oligonucleotide
  Antisense strand to SEQ ID NO: 858788
agauucagggcgagcaagc

SEQ ID NO: 858790 - RNA, 19 nt, Artificial Sequence
  Description of Artificial Sequence: Synthetic oligonucleotide
  Sense strand starting at position 3016 of SEQ ID NO: 588348
ugacccagcuuguaacauu

SEQ ID NO: 858791 - RNA, 19 nt, Artificial Sequence
  Description of Artificial Sequence: Synthetic oligonucleotide
  Antisense strand to SEQ ID NO: 858790
aauguuacaagcuggguca

SEQ ID NO: 858792 - RNA, 19 nt, Artificial Sequence
  Description of Artificial Sequence: Synthetic oligonucleotide
  Sense strand starting at position 3039 of SEQ ID NO: 588348
gcuguuaucuaagcuuucu

SEQ ID NO: 858793 - RNA, 19 nt, Artificial Sequence
  Description of Artificial Sequence: Synthetic oligonucleotide
  Antisense strand to SEQ ID NO: 858792
agaaagcuuagauaacagc

SEQ ID NO: 858794 - RNA, 19 nt, Artificial Sequence
  Description of Artificial Sequence: Synthetic oligonucleotide
  Sense strand starting at position 3050 of SEQ ID NO: 588348
agcuuucuguuguccuuua

SEQ ID NO: 858795 - RNA, 19 nt, Artificial Sequence
  Description of Artificial Sequence: Synthetic oligonucleotide
  Antisense strand to SEQ ID NO: 858794
uaaaggacaacagaaagcu

SEQ ID NO: 858796 - RNA, 19 nt, Artificial Sequence
  Description of Artificial Sequence: Synthetic oligonucleotide
  Sense strand starting at position 3079 of SEQ ID NO: 588348
cagcgugacuggucucacu

SEQ ID NO: 858797 - RNA, 19 nt, Artificial Sequence
  Description of Artificial Sequence: Synthetic oligonucleotide
  Antisense strand to SEQ ID NO: 858796
agugagaccagucacgcug

SEQ ID NO: 858798 - RNA, 19 nt, Artificial Sequence
  Description of Artificial Sequence: Synthetic oligonucleotide
  Sense strand starting at position 3088 of SEQ ID NO: 588348
uggucucacugacuaguua

SEQ ID NO: 858799 - RNA, 19 nt, Artificial Sequence
  Description of Artificial Sequence: Synthetic oligonucleotide
  Antisense strand to SEQ ID NO: 858798
uaacuagucagugagacca

SEQ ID NO: 858800 - RNA, 19 nt, Artificial Sequence
  Description of Artificial Sequence: Synthetic oligonucleotide
  Sense strand starting at position 3313 of SEQ ID NO: 588348
gcgacaaaucuauggguaa

SEQ ID NO: 858801 - RNA, 19 nt, Artificial Sequence
  Description of Artificial Sequence: Synthetic oligonucleotide
  Antisense strand to SEQ ID NO: 858800
uuacccauagauuugucgc

SEQ ID NO: 858802 - RNA, 19 nt, Artificial Sequence
  Description of Artificial Sequence: Synthetic oligonucleotide
  Sense strand starting at position 3314 of SEQ ID NO: 588348
cgacaaaucuauggguaag

SEQ ID NO: 858803 - RNA, 19 nt, Artificial Sequence
  Description of Artificial Sequence: Synthetic oligonucleotide
  Antisense strand to SEQ ID NO: 858802
cuuacccauagauuugucg

SEQ ID NO: 858804 - RNA, 19 nt, Artificial Sequence
  Description of Artificial Sequence: Synthetic oligonucleotide
  Sense strand starting at position 3324 of SEQ ID NO: 588348
auggguaagaguuguaaca

SEQ ID NO: 858805 - RNA, 19 nt, Artificial Sequence
  Description of Artificial Sequence: Synthetic oligonucleotide
  Antisense strand to SEQ ID NO: 858804
uguuacaacucuuacccau

SEQ ID NO: 858806 - RNA, 19 nt, Artificial Sequence
  Description of Artificial Sequence: Synthetic oligonucleotide
  Sense strand starting at position 3380 of SEQ ID NO: 588348
cucagaaagucucgaacaa

SEQ ID NO: 858807 - RNA, 19 nt, Artificial Sequence
  Description of Artificial Sequence: Synthetic oligonucleotide
  Antisense strand to SEQ ID NO: 858806
uuguucgagacuuucugag

SEQ ID NO: 858808 - RNA, 19 nt, Artificial Sequence
  Description of Artificial Sequence: Synthetic oligonucleotide
  Sense strand starting at position 3419 of SEQ ID NO: 588348
ggaugcgugcccugaguca

SEQ ID NO: 858809 - RNA, 19 nt, Artificial Sequence
  Description of Artificial Sequence: Synthetic oligonucleotide
  Antisense strand to SEQ ID NO: 858808
ugacucagggcacgcaucc

SEQ ID NO: 858810 - RNA, 19 nt, Artificial Sequence
  Description of Artificial Sequence: Synthetic oligonucleotide
  Sense strand starting at position 3572 of SEQ ID NO: 588348
ccagaucucccagagucuu

SEQ ID NO: 858811 - RNA, 19 nt, Artificial Sequence
  Description of Artificial Sequence: Synthetic oligonucleotide
  Antisense strand to SEQ ID NO: 858810
aagacucugggagaucugg

SEQ ID NO: 858812 - RNA, 19 nt, Artificial Sequence
  Description of Artificial Sequence: Synthetic oligonucleotide
  Sense strand starting at position 3578 of SEQ ID NO: 588348
cucccagagucuuguaaga

SEQ ID NO: 858813 - RNA, 19 nt, Artificial Sequence
  Description of Artificial Sequence: Synthetic oligonucleotide
  Antisense strand to SEQ ID NO: 858812
ucuuacaagacucugggag

SEQ ID NO: 858814 - RNA, 19 nt, Artificial Sequence
  Description of Artificial Sequence: Synthetic oligonucleotide
  Sense strand starting at position 3580 of SEQ ID NO: 588348
cccagagucuuguaagacc

SEQ ID NO: 858815 - RNA, 19 nt, Artificial Sequence
  Description of Artificial Sequence: Synthetic oligonucleotide
  Antisense strand to SEQ ID NO: 858814
ggucuuacaagacucuggg

SEQ ID NO: 858816 - RNA, 19 nt, Artificial Sequence
  Description of Artificial Sequence: Synthetic oligonucleotide
  Sense strand starting at position 3583 of SEQ ID NO: 588348
agagucuuguaagaccgua

SEQ ID NO: 858817 - RNA, 19 nt, Artificial Sequence
  Description of Artificial Sequence: Synthetic oligonucleotide
  Antisense strand to SEQ ID NO: 858816
uacggucuuacaagacucu

SEQ ID NO: 858818 - RNA, 19 nt, Artificial Sequence
  Description of Artificial Sequence: Synthetic oligonucleotide
  Sense strand starting at position 3641 of SEQ ID NO: 588348
cuggucagauuugcuuuau

SEQ ID NO: 858819 - RNA, 19 nt, Artificial Sequence
  Description of Artificial Sequence: Synthetic oligonucleotide
  Antisense strand to SEQ ID NO: 858818
auaaagcaaaucugaccag

SEQ ID NO: 858820 - RNA, 19 nt, Artificial Sequence
  Description of Artificial Sequence: Synthetic oligonucleotide
  Sense strand starting at position 7 of SEQ ID NO: 588349
caaugagcuucuccauggu

SEQ ID NO: 858821 - RNA, 19 nt, Artificial Sequence
  Description of Artificial Sequence: Synthetic oligonucleotide
  Antisense strand to SEQ ID NO: 858820
accauggagaagcucauug

SEQ ID NO: 858822 - RNA, 19 nt, Artificial Sequence
  Description of Artificial Sequence: Synthetic oligonucleotide
  Sense strand starting at position 10 of SEQ ID NO: 588349
ugagcuucuccauggugaa

SEQ ID NO: 858823 - RNA, 19 nt, Artificial Sequence
  Description of Artificial Sequence: Synthetic oligonucleotide
  Antisense strand to SEQ ID NO: 858822
uucaccauggagaagcuca

SEQ ID NO: 858824 - RNA, 19 nt, Artificial Sequence
  Description of Artificial Sequence: Synthetic oligonucleotide
  Sense strand starting at position 11 of SEQ ID NO: 588349
gagcuucuccauggugaag

SEQ ID NO: 858825 - RNA, 19 nt, Artificial Sequence
  Description of Artificial Sequence: Synthetic oligonucleotide
  Antisense strand to SEQ ID NO: 858824
cuucaccauggagaagcuc

SEQ ID NO: 858826 - RNA, 19 nt, Artificial Sequence
  Description of Artificial Sequence: Synthetic oligonucleotide
  Sense strand starting at position 157 of SEQ ID NO: 588349
gcaugaagccauugcaaac

SEQ ID NO: 858827 - RNA, 19 nt, Artificial Sequence
  Description of Artificial Sequence: Synthetic oligonucleotide
  Antisense strand to SEQ ID NO: 858826
guuugcaauggcuucaugc

SEQ ID NO: 858828 - RNA, 19 nt, Artificial Sequence
  Description of Artificial Sequence: Synthetic oligonucleotide
  Sense strand starting at position 272 of SEQ ID NO: 588349
uccugacgucaccacuuau

SEQ ID NO: 858829 - RNA, 19 nt, Artificial Sequence
  Description of Artificial Sequence: Synthetic oligonucleotide
  Antisense strand to SEQ ID NO: 858828
auaaguggugacgucagga

SEQ ID NO: 858830 - RNA, 19 nt, Artificial Sequence
  Description of Artificial Sequence: Synthetic oligonucleotide
  Sense strand starting at position 638 of SEQ ID NO: 588349
ugaggcuuucuauggcuua

SEQ ID NO: 858831 - RNA, 19 nt, Artificial Sequence
  Description of Artificial Sequence: Synthetic oligonucleotide
  Antisense strand to SEQ ID NO: 858830
uaagccauagaaagccuca

SEQ ID NO: 858832 - RNA, 19 nt, Artificial Sequence
  Description of Artificial Sequence: Synthetic oligonucleotide
  Sense strand starting at position 1355 of SEQ ID NO: 588349
auuugaagcugggacuaau

SEQ ID NO: 858833 - RNA, 19 nt, Artificial Sequence
  Description of Artificial Sequence: Synthetic oligonucleotide
  Antisense strand to SEQ ID NO: 858832
auuagucccagcuucaaau

SEQ ID NO: 858834 - RNA, 19 nt, Artificial Sequence
  Description of Artificial Sequence: Synthetic oligonucleotide
  Sense strand starting at position 1536 of SEQ ID NO: 588349
caggccucccucugauagu

SEQ ID NO: 858835 - RNA, 19 nt, Artificial Sequence
  Description of Artificial Sequence: Synthetic oligonucleotide
  Antisense strand to SEQ ID NO: 858834
acuaucagagggaggccug

SEQ ID NO: 858836 - RNA, 19 nt, Artificial Sequence
  Description of Artificial Sequence: Synthetic oligonucleotide
  Sense strand starting at position 1549 of SEQ ID NO: 588349
gauagugguuuccugauuc

SEQ ID NO: 858837 - RNA, 19 nt, Artificial Sequence
  Description of Artificial Sequence: Synthetic oligonucleotide
  Antisense strand to SEQ ID NO: 858836
gaaucaggaaaccacuauc

SEQ ID NO: 858838 - RNA, 19 nt, Artificial Sequence
  Description of Artificial Sequence: Synthetic oligonucleotide
  Sense strand starting at position 1599 of SEQ ID NO: 588349
ucagguaaggccuguauuu

SEQ ID NO: 858839 - RNA, 19 nt, Artificial Sequence
  Description of Artificial Sequence: Synthetic oligonucleotide
  Antisense strand to SEQ ID NO: 858838
aaauacaggccuuaccuga

SEQ ID NO: 858840 - RNA, 19 nt, Artificial Sequence
  Description of Artificial Sequence: Synthetic oligonucleotide
  Sense strand starting at position 1705 of SEQ ID NO: 588349
guaccuuaaggauggaguu

SEQ ID NO: 858841 - RNA, 19 nt, Artificial Sequence
  Description of Artificial Sequence: Synthetic oligonucleotide
  Antisense strand to SEQ ID NO: 858840
aacuccauccuuaagguac

SEQ ID NO: 858842 - RNA, 19 nt, Artificial Sequence
  Description of Artificial Sequence: Synthetic oligonucleotide
  Sense strand starting at position 1733 of SEQ ID NO: 588349
aguguucuucgugucauau

SEQ ID NO: 858843 - RNA, 19 nt, Artificial Sequence
  Description of Artificial Sequence: Synthetic oligonucleotide
  Antisense strand to SEQ ID NO: 858842
auaugacacgaagaacacu

SEQ ID NO: 858844 - RNA, 19 nt, Artificial Sequence
  Description of Artificial Sequence: Synthetic oligonucleotide
  Sense strand starting at position 1734 of SEQ ID NO: 588349
guguucuucgugucauauc

SEQ ID NO: 858845 - RNA, 19 nt, Artificial Sequence
  Description of Artificial Sequence: Synthetic oligonucleotide
  Antisense strand to SEQ ID NO: 858844
gauaugacacgaagaacac

SEQ ID NO: 858846 - RNA, 19 nt, Artificial Sequence
  Description of Artificial Sequence: Synthetic oligonucleotide
  Sense strand starting at position 1744 of SEQ ID NO: 588349
ugucauaucccucgagcag

SEQ ID NO: 858847 - RNA, 19 nt, Artificial Sequence
  Description of Artificial Sequence: Synthetic oligonucleotide
  Antisense strand to SEQ ID NO: 858846
cugcucgagggauaugaca

SEQ ID NO: 858848 - RNA, 19 nt, Artificial Sequence
  Description of Artificial Sequence: Synthetic oligonucleotide
  Sense strand starting at position 2108 of SEQ ID NO: 588349
aggacauuguuguccguga

SEQ ID NO: 858849 - RNA, 19 nt, Artificial Sequence
  Description of Artificial Sequence: Synthetic oligonucleotide
  Antisense strand to SEQ ID NO: 858848
ucacggacaacaauguccu

SEQ ID NO: 858850 - RNA, 19 nt, Artificial Sequence
  Description of Artificial Sequence: Synthetic oligonucleotide
  Sense strand starting at position 2110 of SEQ ID NO: 588349
gacauuguuguccgugaca

SEQ ID NO: 858851 - RNA, 19 nt, Artificial Sequence
  Description of Artificial Sequence: Synthetic oligonucleotide
  Antisense strand to SEQ ID NO: 858850
ugucacggacaacaauguc

SEQ ID NO: 858852 - RNA, 19 nt, Artificial Sequence
  Description of Artificial Sequence: Synthetic oligonucleotide
  Sense strand starting at position 2112 of SEQ ID NO: 588349
cauuguuguccgugacaca

SEQ ID NO: 858853 - RNA, 19 nt, Artificial Sequence
  Description of Artificial Sequence: Synthetic oligonucleotide
  Antisense strand to SEQ ID NO: 858852
ugugucacggacaacaaug

SEQ ID NO: 858854 - RNA, 19 nt, Artificial Sequence
  Description of Artificial Sequence: Synthetic oligonucleotide
  Sense strand starting at position 2119 of SEQ ID NO: 588349
guccgugacacagaugcau

SEQ ID NO: 858855 - RNA, 19 nt, Artificial Sequence
  Description of Artificial Sequence: Synthetic oligonucleotide
  Antisense strand to SEQ ID NO: 858854
augcaucugugucacggac

SEQ ID NO: 858856 - RNA, 19 nt, Artificial Sequence
  Description of Artificial Sequence: Synthetic oligonucleotide
  Sense strand starting at position 2131 of SEQ ID NO: 588349
gaugcauuguucccuggga

SEQ ID NO: 858857 - RNA, 19 nt, Artificial Sequence
  Description of Artificial Sequence: Synthetic oligonucleotide
  Antisense strand to SEQ ID NO: 858856
ucccagggaacaaugcauc

SEQ ID NO: 858858 - RNA, 19 nt, Artificial Sequence
  Description of Artificial Sequence: Synthetic oligonucleotide
  Sense strand starting at position 2132 of SEQ ID NO: 588349
augcauuguucccugggaa

SEQ ID NO: 858859 - RNA, 19 nt, Artificial Sequence
  Description of Artificial Sequence: Synthetic oligonucleotide
  Antisense strand to SEQ ID NO: 858858
uucccagggaacaaugcau

SEQ ID NO: 858860 - RNA, 19 nt, Artificial Sequence
  Description of Artificial Sequence: Synthetic oligonucleotide
  Sense strand starting at position 2133 of SEQ ID NO: 588349
ugcauuguucccugggaaa

SEQ ID NO: 858861 - RNA, 19 nt, Artificial Sequence
  Description of Artificial Sequence: Synthetic oligonucleotide
  Antisense strand to SEQ ID NO: 858860
uuucccagggaacaaugca

SEQ ID NO: 858862 - RNA, 19 nt, Artificial Sequence
  Description of Artificial Sequence: Synthetic oligonucleotide
  Sense strand starting at position 2135 of SEQ ID NO: 588349
cauuguucccugggaaaca

SEQ ID NO: 858863 - RNA, 19 nt, Artificial Sequence
  Description of Artificial Sequence: Synthetic oligonucleotide
  Antisense strand to SEQ ID NO: 858862
uguuucccagggaacaaug

SEQ ID NO: 858864 - RNA, 19 nt, Artificial Sequence
  Description of Artificial Sequence: Synthetic oligonucleotide
  Sense strand starting at position 2334 of SEQ ID NO: 588349
ggcagaguucagggucuga

SEQ ID NO: 858865 - RNA, 19 nt, Artificial Sequence
  Description of Artificial Sequence: Synthetic oligonucleotide
  Antisense strand to SEQ ID NO: 858864
ucagacccugaacucugcc

SEQ ID NO: 858866 - RNA, 19 nt, Artificial Sequence
  Description of Artificial Sequence: Synthetic oligonucleotide
  Sense strand starting at position 2429 of SEQ ID NO: 588349
cuaagaaggcccuguggau

SEQ ID NO: 858867 - RNA, 19 nt, Artificial Sequence
  Description of Artificial Sequence: Synthetic oligonucleotide
  Antisense strand to SEQ ID NO: 858866
auccacagggccuucuuag

SEQ ID NO: 858868 - RNA, 19 nt, Artificial Sequence
  Description of Artificial Sequence: Synthetic oligonucleotide
  Sense strand starting at position 2589 of SEQ ID NO: 588349
agcucugcuccagauacaa

SEQ ID NO: 858869 - RNA, 19 nt, Artificial Sequence
  Description of Artificial Sequence: Synthetic oligonucleotide
  Antisense strand to SEQ ID NO: 858868
uuguaucuggagcagagcu

SEQ ID NO: 858870 - RNA, 19 nt, Artificial Sequence
  Description of Artificial Sequence: Synthetic oligonucleotide
  Sense strand starting at position 2618 of SEQ ID NO: 588349
agagauagauaaugaaaug

SEQ ID NO: 858871 - RNA, 19 nt, Artificial Sequence
  Description of Artificial Sequence: Synthetic oligonucleotide
  Antisense strand to SEQ ID NO: 858870
cauuucauuaucuaucucu

SEQ ID NO: 858872 - RNA, 19 nt, Artificial Sequence
  Description of Artificial Sequence: Synthetic oligonucleotide
  Sense strand starting at position 3193 of SEQ ID NO: 588349
gacugaaacuaggccugau

SEQ ID NO: 858873 - RNA, 19 nt, Artificial Sequence
  Description of Artificial Sequence: Synthetic oligonucleotide
  Antisense strand to SEQ ID NO: 858872
aucaggccuaguuucaguc

SEQ ID NO: 858874 - RNA, 19 nt, Artificial Sequence
  Description of Artificial Sequence: Synthetic oligonucleotide
  Sense strand starting at position 3253 of SEQ ID NO: 588349
cucuguauaaugggaguaa

SEQ ID NO: 858875 - RNA, 19 nt, Artificial Sequence
  Description of Artificial Sequence: Synthetic oligonucleotide
  Antisense strand to SEQ ID NO: 858874
uuacucccauuauacagag

SEQ ID NO: 858876 - RNA, 19 nt, Artificial Sequence
  Description of Artificial Sequence: Synthetic oligonucleotide
  Sense strand starting at position 3343 of SEQ ID NO: 588349
cugguaaauguuugccagu

SEQ ID NO: 858877 - RNA, 19 nt, Artificial Sequence
  Description of Artificial Sequence: Synthetic oligonucleotide
  Antisense strand to SEQ ID NO: 858876
acuggcaaacauuuaccag

SEQ ID NO: 858878 - RNA, 19 nt, Artificial Sequence
  Description of Artificial Sequence: Synthetic oligonucleotide
  Sense strand starting at position 3349 of SEQ ID NO: 588349
aauguuugccaguggaggu

SEQ ID NO: 858879 - RNA, 19 nt, Artificial Sequence
  Description of Artificial Sequence: Synthetic oligonucleotide
  Antisense strand to SEQ ID NO: 858878
accuccacuggcaaacauu

SEQ ID NO: 858880 - RNA, 19 nt, Artificial Sequence
  Description of Artificial Sequence: Synthetic oligonucleotide
  Sense strand starting at position 3418 of SEQ ID NO: 588349
uccucacccgugugaauca

SEQ ID NO: 858881 - RNA, 19 nt, Artificial Sequence
  Description of Artificial Sequence: Synthetic oligonucleotide
  Antisense strand to SEQ ID NO: 858880
ugauucacacgggugagga

SEQ ID NO: 858882 - RNA, 19 nt, Artificial Sequence
  Description of Artificial Sequence: Synthetic oligonucleotide
  Sense strand starting at position 3423 of SEQ ID NO: 588349
acccgugugaaucagagaa

SEQ ID NO: 858883 - RNA, 19 nt, Artificial Sequence
  Description of Artificial Sequence: Synthetic oligonucleotide
  Antisense strand to SEQ ID NO: 858882
uucucugauucacacgggu

SEQ ID NO: 858884 - RNA, 19 nt, Artificial Sequence
  Description of Artificial Sequence: Synthetic oligonucleotide
  Sense strand starting at position 3550 of SEQ ID NO: 588349
ggcugaguuccugagcucu

SEQ ID NO: 858885 - RNA, 19 nt, Artificial Sequence
  Description of Artificial Sequence: Synthetic oligonucleotide
  Antisense strand to SEQ ID NO: 858884
agagcucaggaacucagcc

SEQ ID NO: 858886 - RNA, 19 nt, Artificial Sequence
  Description of Artificial Sequence: Synthetic oligonucleotide
  Sense strand starting at position 3562 of SEQ ID NO: 588349
gagcucuggucagugggaa

SEQ ID NO: 858887 - RNA, 19 nt, Artificial Sequence
  Description of Artificial Sequence: Synthetic oligonucleotide
  Antisense strand to SEQ ID NO: 858886
uucccacugaccagagcuc

SEQ ID NO: 858888 - RNA, 19 nt, Artificial Sequence
  Description of Artificial Sequence: Synthetic oligonucleotide
  Sense strand starting at position 3811 of SEQ ID NO: 588349
gcugaacugucugugggua

SEQ ID NO: 858889 - RNA, 19 nt, Artificial Sequence
  Description of Artificial Sequence: Synthetic oligonucleotide
  Antisense strand to SEQ ID NO: 858888
uacccacagacaguucagc

SEQ ID NO: 858890 - RNA, 19 nt, Artificial Sequence
  Description of Artificial Sequence: Synthetic oligonucleotide
  Sense strand starting at position 3819 of SEQ ID NO: 588349
gucuguggguacagugaaa

SEQ ID NO: 858891 - RNA, 19 nt, Artificial Sequence
  Description of Artificial Sequence: Synthetic oligonucleotide
  Antisense strand to SEQ ID NO: 858890
uuucacuguacccacagac

SEQ ID NO: 858892 - RNA, 19 nt, Artificial Sequence
  Description of Artificial Sequence: Synthetic oligonucleotide
  Sense strand starting at position 3830 of SEQ ID NO: 588349
cagugaaacccugguaaca

SEQ ID NO: 858893 - RNA, 19 nt, Artificial Sequence
  Description of Artificial Sequence: Synthetic oligonucleotide
  Antisense strand to SEQ ID NO: 858892
uguuaccaggguuucacug

SEQ ID NO: 858894 - RNA, 19 nt, Artificial Sequence
  Description of Artificial Sequence: Synthetic oligonucleotide
  Sense strand starting at position 3928 of SEQ ID NO: 588349
cauggaaauuugugauaac

SEQ ID NO: 858895 - RNA, 19 nt, Artificial Sequence
  Description of Artificial Sequence: Synthetic oligonucleotide
  Antisense strand to SEQ ID NO: 858894
guuaucacaaauuuccaug

SEQ ID NO: 858896 - RNA, 19 nt, Artificial Sequence
  Description of Artificial Sequence: Synthetic oligonucleotide
  Sense strand starting at position 3929 of SEQ ID NO: 588349
auggaaauuugugauaaca

SEQ ID NO: 858897 - RNA, 19 nt, Artificial Sequence
  Description of Artificial Sequence: Synthetic oligonucleotide
  Antisense strand to SEQ ID NO: 858896
uguuaucacaaauuuccau

SEQ ID NO: 858898 - RNA, 19 nt, Artificial Sequence
  Description of Artificial Sequence: Synthetic oligonucleotide
  Sense strand starting at position 3931 of SEQ ID NO: 588349
ggaaauuugugauaacaca

SEQ ID NO: 858899 - RNA, 19 nt, Artificial Sequence
  Description of Artificial Sequence: Synthetic oligonucleotide
  Antisense strand to SEQ ID NO: 858898
uguguuaucacaaauuucc

SEQ ID NO: 858900 - RNA, 19 nt, Artificial Sequence
  Description of Artificial Sequence: Synthetic oligonucleotide
  Sense strand starting at position 95 of SEQ ID NO: 588350
ugggacuuccgcuaucauu

SEQ ID NO: 858901 - RNA, 19 nt, Artificial Sequence
  Description of Artificial Sequence: Synthetic oligonucleotide
  Antisense strand to SEQ ID NO: 858900
aaugauagcggaaguccca

SEQ ID NO: 858902 - RNA, 19 nt, Artificial Sequence
  Description of Artificial Sequence: Synthetic oligonucleotide
  Sense strand starting at position 310 of SEQ ID NO: 588350
acgugaaguccaggaucau

SEQ ID NO: 858903 - RNA, 19 nt, Artificial Sequence
  Description of Artificial Sequence: Synthetic oligonucleotide
  Antisense strand to SEQ ID NO: 858902
augauccuggacuucacgu

SEQ ID NO: 858904 - RNA, 19 nt, Artificial Sequence
  Description of Artificial Sequence: Synthetic oligonucleotide
  Sense strand starting at position 311 of SEQ ID NO: 588350
cgugaaguccaggaucaug

SEQ ID NO: 858905 - RNA, 19 nt, Artificial Sequence
  Description of Artificial Sequence: Synthetic oligonucleotide
  Antisense strand to SEQ ID NO: 858904
caugauccuggacuucacg

SEQ ID NO: 858906 - RNA, 19 nt, Artificial Sequence
  Description of Artificial Sequence: Synthetic oligonucleotide
  Sense strand starting at position 322 of SEQ ID NO: 588350
ggaucauggaugugcuuau

SEQ ID NO: 858907 - RNA, 19 nt, Artificial Sequence
  Description of Artificial Sequence: Synthetic oligonucleotide
  Antisense strand to SEQ ID NO: 858906
auaagcacauccaugaucc

SEQ ID NO: 858908 - RNA, 19 nt, Artificial Sequence
  Description of Artificial Sequence: Synthetic oligonucleotide
  Sense strand starting at position 391 of SEQ ID NO: 588350
ugcgaagcccucugccaaa

SEQ ID NO: 858909 - RNA, 19 nt, Artificial Sequence
  Description of Artificial Sequence: Synthetic oligonucleotide
  Antisense strand to SEQ ID NO: 858908
uuuggcagagggcuucgca

SEQ ID NO: 858910 - RNA, 19 nt, Artificial Sequence
  Description of Artificial Sequence: Synthetic oligonucleotide
  Sense strand starting at position 415 of SEQ ID NO: 588350
agaggaggccggugauaua

SEQ ID NO: 858911 - RNA, 19 nt, Artificial Sequence
  Description of Artificial Sequence: Synthetic oligonucleotide
  Antisense strand to SEQ ID NO: 858910
uauaucaccggccuccucu

SEQ ID NO: 858912 - RNA, 19 nt, Artificial Sequence
  Description of Artificial Sequence: Synthetic oligonucleotide
  Sense strand starting at position 428 of SEQ ID NO: 588350
gauauagagcucugauuac

SEQ ID NO: 858913 - RNA, 19 nt, Artificial Sequence
  Description of Artificial Sequence: Synthetic oligonucleotide
  Antisense strand to SEQ ID NO: 858912
guaaucagagcucuauauc

SEQ ID NO: 858914 - RNA, 19 nt, Artificial Sequence
  Description of Artificial Sequence: Synthetic oligonucleotide
  Sense strand starting at position 463 of SEQ ID NO: 588350
cgcugaaggucacugaaua

SEQ ID NO: 858915 - RNA, 19 nt, Artificial Sequence
  Description of Artificial Sequence: Synthetic oligonucleotide
  Antisense strand to SEQ ID NO: 858914
uauucagugaccuucagcg

SEQ ID NO: 858916 - RNA, 19 nt, Artificial Sequence
  Description of Artificial Sequence: Synthetic oligonucleotide
  Sense strand starting at position 464 of SEQ ID NO: 588350
gcugaaggucacugaauac

SEQ ID NO: 858917 - RNA, 19 nt, Artificial Sequence
  Description of Artificial Sequence: Synthetic oligonucleotide
  Antisense strand to SEQ ID NO: 858916
guauucagugaccuucagc

SEQ ID NO: 858918 - RNA, 19 nt, Artificial Sequence
  Description of Artificial Sequence: Synthetic oligonucleotide
  Sense strand starting at position 499 of SEQ ID NO: 588350
aaauaaauccugcgaguuc

SEQ ID NO: 858919 - RNA, 19 nt, Artificial Sequence
  Description of Artificial Sequence: Synthetic oligonucleotide
  Antisense strand to SEQ ID NO: 858918
gaacucgcaggauuuauuu

SEQ ID NO: 858920 - RNA, 19 nt, Artificial Sequence
  Description of Artificial Sequence: Synthetic oligonucleotide
  Sense strand starting at position 551 of SEQ ID NO: 588350
acuccuuucgcaugggauc

SEQ ID NO: 858921 - RNA, 19 nt, Artificial Sequence
  Description of Artificial Sequence: Synthetic oligonucleotide
  Antisense strand to SEQ ID NO: 858920
gaucccaugcgaaaggagu

SEQ ID NO: 858922 - RNA, 19 nt, Artificial Sequence
  Description of Artificial Sequence: Synthetic oligonucleotide
  Sense strand starting at position 553 of SEQ ID NO: 588350
uccuuucgcaugggaucua

SEQ ID NO: 858923 - RNA, 19 nt, Artificial Sequence
  Description of Artificial Sequence: Synthetic oligonucleotide
  Antisense strand to SEQ ID NO: 858922
uagaucccaugcgaaagga

SEQ ID NO: 858924 - RNA, 19 nt, Artificial Sequence
  Description of Artificial Sequence: Synthetic oligonucleotide
  Sense strand starting at position 609 of SEQ ID NO: 588350
cgugaagucacagaacuga

SEQ ID NO: 858925 - RNA, 19 nt, Artificial Sequence
  Description of Artificial Sequence: Synthetic oligonucleotide
  Antisense strand to SEQ ID NO: 858924
ucaguucugugacuucacg

SEQ ID NO: 858926 - RNA, 19 nt, Artificial Sequence
  Description of Artificial Sequence: Synthetic oligonucleotide
  Sense strand starting at position 648 of SEQ ID NO: 588350
gugcacgggucuuugaaau

SEQ ID NO: 858927 - RNA, 19 nt, Artificial Sequence
  Description of Artificial Sequence: Synthetic oligonucleotide
  Antisense strand to SEQ ID NO: 858926
auuucaaagacccgugcac

SEQ ID NO: 858928 - RNA, 19 nt, Artificial Sequence
  Description of Artificial Sequence: Synthetic oligonucleotide
  Sense strand starting at position 881 of SEQ ID NO: 588350
gccugcuuccaagaugaac

SEQ ID NO: 858929 - RNA, 19 nt, Artificial Sequence
  Description of Artificial Sequence: Synthetic oligonucleotide
  Antisense strand to SEQ ID NO: 858928
guucaucuuggaagcaggc

SEQ ID NO: 858930 - RNA, 19 nt, Artificial Sequence
  Description of Artificial Sequence: Synthetic oligonucleotide
  Sense strand starting at position 898 of SEQ ID NO: 588350
accuguugcugggaaagaa

SEQ ID NO: 858931 - RNA, 19 nt, Artificial Sequence
  Description of Artificial Sequence: Synthetic oligonucleotide
  Antisense strand to SEQ ID NO: 858930
uucuuucccagcaacaggu

SEQ ID NO: 858932 - RNA, 19 nt, Artificial Sequence
  Description of Artificial Sequence: Synthetic oligonucleotide
  Sense strand starting at position 2554 of SEQ ID NO: 588350
gcgccuggcuucuuggaaa

SEQ ID NO: 858933 - RNA, 19 nt, Artificial Sequence
  Description of Artificial Sequence: Synthetic oligonucleotide
  Antisense strand to SEQ ID NO: 858932
uuuccaagaagccaggcgc

SEQ ID NO: 858934 - RNA, 19 nt, Artificial Sequence
  Description of Artificial Sequence: Synthetic oligonucleotide
  Sense strand starting at position 2680 of SEQ ID NO: 588350
caccauaaugucugaaggu

SEQ ID NO: 858935 - RNA, 19 nt, Artificial Sequence
  Description of Artificial Sequence: Synthetic oligonucleotide
  Antisense strand to SEQ ID NO: 858934
accuucagacauuauggug

SEQ ID NO: 858936 - RNA, 19 nt, Artificial Sequence
  Description of Artificial Sequence: Synthetic oligonucleotide
  Sense strand starting at position 2681 of SEQ ID NO: 588350
accauaaugucugaaggua

SEQ ID NO: 858937 - RNA, 19 nt, Artificial Sequence
  Description of Artificial Sequence: Synthetic oligonucleotide
  Antisense strand to SEQ ID NO: 858936
uaccuucagacauuauggu

SEQ ID NO: 858938 - RNA, 19 nt, Artificial Sequence
  Description of Artificial Sequence: Synthetic oligonucleotide
  Sense strand starting at position 2753 of SEQ ID NO: 588350
gucuguugcagcgugggaa

SEQ ID NO: 858939 - RNA, 19 nt, Artificial Sequence
  Description of Artificial Sequence: Synthetic oligonucleotide
  Antisense strand to SEQ ID NO: 858938
uucccacgcugcaacagac

SEQ ID NO: 858940 - RNA, 19 nt, Artificial Sequence
  Description of Artificial Sequence: Synthetic oligonucleotide
  Sense strand starting at position 2754 of SEQ ID NO: 588350
ucuguugcagcgugggaaa

SEQ ID NO: 858941 - RNA, 19 nt, Artificial Sequence
  Description of Artificial Sequence: Synthetic oligonucleotide
  Antisense strand to SEQ ID NO: 858940
uuucccacgcugcaacaga

SEQ ID NO: 858942 - RNA, 19 nt, Artificial Sequence
  Description of Artificial Sequence: Synthetic oligonucleotide
  Sense strand starting at position 2776 of SEQ ID NO: 588350
ugcguuaccacugcgcaau

SEQ ID NO: 858943 - RNA, 19 nt, Artificial Sequence
  Description of Artificial Sequence: Synthetic oligonucleotide
  Antisense strand to SEQ ID NO: 858942
auugcgcagugguaacgca

SEQ ID NO: 858944 - RNA, 19 nt, Artificial Sequence
  Description of Artificial Sequence: Synthetic oligonucleotide
  Sense strand starting at position 2788 of SEQ ID NO: 588350
gcgcaauggcuagacugaa

SEQ ID NO: 858945 - RNA, 19 nt, Artificial Sequence
  Description of Artificial Sequence: Synthetic oligonucleotide
  Antisense strand to SEQ ID NO: 858944
uucagucuagccauugcgc

SEQ ID NO: 858946 - RNA, 19 nt, Artificial Sequence
  Description of Artificial Sequence: Synthetic oligonucleotide
  Sense strand starting at position 2851 of SEQ ID NO: 588350
ggauuugaaucuuguugcu

SEQ ID NO: 858947 - RNA, 19 nt, Artificial Sequence
  Description of Artificial Sequence: Synthetic oligonucleotide
  Antisense strand to SEQ ID NO: 858946
agcaacaagauucaaaucc

SEQ ID NO: 858948 - RNA, 19 nt, Artificial Sequence
  Description of Artificial Sequence: Synthetic oligonucleotide
  Sense strand starting at position 2856 of SEQ ID NO: 588350
ugaaucuuguugcuuuagu

SEQ ID NO: 858949 - RNA, 19 nt, Artificial Sequence
  Description of Artificial Sequence: Synthetic oligonucleotide
  Antisense strand to SEQ ID NO: 858948
acuaaagcaacaagauuca

SEQ ID NO: 858950 - RNA, 19 nt, Artificial Sequence
  Description of Artificial Sequence: Synthetic oligonucleotide
  Sense strand starting at position 2857 of SEQ ID NO: 588350
gaaucuuguugcuuuagua

SEQ ID NO: 858951 - RNA, 19 nt, Artificial Sequence
  Description of Artificial Sequence: Synthetic oligonucleotide
  Antisense strand to SEQ ID NO: 858950
uacuaaagcaacaagauuc

SEQ ID NO: 858952 - RNA, 19 nt, Artificial Sequence
  Description of Artificial Sequence: Synthetic oligonucleotide
  Sense strand starting at position 2870 of SEQ ID NO: 588350
uuaguagcaucuucuggaa

SEQ ID NO: 858953 - RNA, 19 nt, Artificial Sequence
  Description of Artificial Sequence: Synthetic oligonucleotide
  Antisense strand to SEQ ID NO: 858952
uuccagaagaugcuacuaa

SEQ ID NO: 858954 - RNA, 19 nt, Artificial Sequence
  Description of Artificial Sequence: Synthetic oligonucleotide
  Sense strand starting at position 2885 of SEQ ID NO: 588350
ggaaggaggucguuuacgu

SEQ ID NO: 858955 - RNA, 19 nt, Artificial Sequence
  Description of Artificial Sequence: Synthetic oligonucleotide
  Antisense strand to SEQ ID NO: 858954
acguaaacgaccuccuucc

SEQ ID NO: 858956 - RNA, 19 nt, Artificial Sequence
  Description of Artificial Sequence: Synthetic oligonucleotide
  Sense strand starting at position 2890 of SEQ ID NO: 588350
gaggucguuuacguaaauu

SEQ ID NO: 858957 - RNA, 19 nt, Artificial Sequence
  Description of Artificial Sequence: Synthetic oligonucleotide
  Antisense strand to SEQ ID NO: 858956
aauuuacguaaacgaccuc

SEQ ID NO: 858958 - RNA, 19 nt, Artificial Sequence
  Description of Artificial Sequence: Synthetic oligonucleotide
  Sense strand starting at position 2901 of SEQ ID NO: 588350
cguaaauucuguuccaaag

SEQ ID NO: 858959 - RNA, 19 nt, Artificial Sequence
  Description of Artificial Sequence: Synthetic oligonucleotide
  Antisense strand to SEQ ID NO: 858958
cuuuggaacagaauuuacg

SEQ ID NO: 858960 - RNA, 19 nt, Artificial Sequence
  Description of Artificial Sequence: Synthetic oligonucleotide
  Sense strand starting at position 2912 of SEQ ID NO: 588350
uuccaaagcucugucguaa

SEQ ID NO: 858961 - RNA, 19 nt, Artificial Sequence
  Description of Artificial Sequence: Synthetic oligonucleotide
  Antisense strand to SEQ ID NO: 858960
uuacgacagagcuuuggaa

SEQ ID NO: 858962 - RNA, 19 nt, Artificial Sequence
  Description of Artificial Sequence: Synthetic oligonucleotide
  Sense strand starting at position 2923 of SEQ ID NO: 588350
ugucguaacugcuucuaaa

SEQ ID NO: 858963 - RNA, 19 nt, Artificial Sequence
  Description of Artificial Sequence: Synthetic oligonucleotide
  Antisense strand to SEQ ID NO: 858962
uuuagaagcaguuacgaca

SEQ ID NO: 858964 - RNA, 19 nt, Artificial Sequence
  Description of Artificial Sequence: Synthetic oligonucleotide
  Sense strand starting at position 2940 of SEQ ID NO: 588350
aaaugagguugauacugua

SEQ ID NO: 858965 - RNA, 19 nt, Artificial Sequence
  Description of Artificial Sequence: Synthetic oligonucleotide
  Antisense strand to SEQ ID NO: 858964
uacaguaucaaccucauuu

SEQ ID NO: 858966 - RNA, 19 nt, Artificial Sequence
  Description of Artificial Sequence: Synthetic oligonucleotide
  Sense strand starting at position 2947 of SEQ ID NO: 588350
guugauacuguauguauau

SEQ ID NO: 858967 - RNA, 19 nt, Artificial Sequence
  Description of Artificial Sequence: Synthetic oligonucleotide
  Antisense strand to SEQ ID NO: 858966
auauacauacaguaucaac

SEQ ID NO: 858968 - RNA, 19 nt, Artificial Sequence
  Description of Artificial Sequence: Synthetic oligonucleotide
  Sense strand starting at position 2960 of SEQ ID NO: 588350
guauauuaggcuugcauaa

SEQ ID NO: 858969 - RNA, 19 nt, Artificial Sequence
  Description of Artificial Sequence: Synthetic oligonucleotide
  Antisense strand to SEQ ID NO: 858968
uuaugcaagccuaauauac

SEQ ID NO: 858970 - RNA, 19 nt, Artificial Sequence
  Description of Artificial Sequence: Synthetic oligonucleotide
  Sense strand starting at position 3269 of SEQ ID NO: 588350
ccaguaucauacguacaua

SEQ ID NO: 858971 - RNA, 19 nt, Artificial Sequence
  Description of Artificial Sequence: Synthetic oligonucleotide
  Antisense strand to SEQ ID NO: 858970
uauguacguaugauacugg

SEQ ID NO: 858972 - RNA, 19 nt, Artificial Sequence
  Description of Artificial Sequence: Synthetic oligonucleotide
  Sense strand starting at position 3272 of SEQ ID NO: 588350
guaucauacguacauaaau

SEQ ID NO: 858973 - RNA, 19 nt, Artificial Sequence
  Description of Artificial Sequence: Synthetic oligonucleotide
  Antisense strand to SEQ ID NO: 858972
auuuauguacguaugauac

SEQ ID NO: 858974 - RNA, 19 nt, Artificial Sequence
  Description of Artificial Sequence: Synthetic oligonucleotide
  Sense strand starting at position 3555 of SEQ ID NO: 588350
guggugugugcgccuguaa

SEQ ID NO: 858975 - RNA, 19 nt, Artificial Sequence
  Description of Artificial Sequence: Synthetic oligonucleotide
  Antisense strand to SEQ ID NO: 858974
uuacaggcgcacacaccac

SEQ ID NO: 858976 - RNA, 19 nt, Artificial Sequence
  Description of Artificial Sequence: Synthetic oligonucleotide
  Sense strand starting at position 3843 of SEQ ID NO: 588350
cauugcauuccguguauuu

SEQ ID NO: 858977 - RNA, 19 nt, Artificial Sequence
  Description of Artificial Sequence: Synthetic oligonucleotide
  Antisense strand to SEQ ID NO: 858976
aaauacacggaaugcaaug

SEQ ID NO: 858978 - RNA, 19 nt, Artificial Sequence
  Description of Artificial Sequence: Synthetic oligonucleotide
  Sense strand starting at position 3845 of SEQ ID NO: 588350
uugcauuccguguauuuac

SEQ ID NO: 858979 - RNA, 19 nt, Artificial Sequence
  Description of Artificial Sequence: Synthetic oligonucleotide
  Antisense strand to SEQ ID NO: 858978
guaaauacacggaaugcaa

SEQ ID NO: 858980 - RNA, 19 nt, Artificial Sequence
  Description of Artificial Sequence: Synthetic oligonucleotide
  Sense strand starting at position 1064 of SEQ ID NO: 588351
ccagaauucggaggcgaca

SEQ ID NO: 858981 - RNA, 19 nt, Artificial Sequence
  Description of Artificial Sequence: Synthetic oligonucleotide
  Antisense strand to SEQ ID NO: 858980
ugucgccuccgaauucugg

SEQ ID NO: 858982 - RNA, 19 nt, Artificial Sequence
  Description of Artificial Sequence: Synthetic oligonucleotide
  Sense strand starting at position 1380 of SEQ ID NO: 588351
guccguguuccucuuagua

SEQ ID NO: 858983 - RNA, 19 nt, Artificial Sequence
  Description of Artificial Sequence: Synthetic oligonucleotide
  Antisense strand to SEQ ID NO: 858982
uacuaagaggaacacggac

SEQ ID NO: 858984 - RNA, 19 nt, Artificial Sequence
  Description of Artificial Sequence: Synthetic oligonucleotide
  Sense strand starting at position 1406 of SEQ ID NO: 588351
uuuagagaaucuuucuaug

SEQ ID NO: 858985 - RNA, 19 nt, Artificial Sequence
  Description of Artificial Sequence: Synthetic oligonucleotide
  Antisense strand to SEQ ID NO: 858984
cauagaaagauucucuaaa

SEQ ID NO: 858986 - RNA, 19 nt, Artificial Sequence
  Description of Artificial Sequence: Synthetic oligonucleotide
  Sense strand starting at position 1411 of SEQ ID NO: 588351
agaaucuuucuauggcuuu

SEQ ID NO: 858987 - RNA, 19 nt, Artificial Sequence
  Description of Artificial Sequence: Synthetic oligonucleotide
  Antisense strand to SEQ ID NO: 858986
aaagccauagaaagauucu

SEQ ID NO: 858988 - RNA, 19 nt, Artificial Sequence
  Description of Artificial Sequence: Synthetic oligonucleotide
  Sense strand starting at position 1585 of SEQ ID NO: 588351
cgugaacucgcaggauuua

SEQ ID NO: 858989 - RNA, 19 nt, Artificial Sequence
  Description of Artificial Sequence: Synthetic oligonucleotide
  Antisense strand to SEQ ID NO: 858988
uaaauccugcgaguucacg

SEQ ID NO: 858990 - RNA, 19 nt, Artificial Sequence
  Description of Artificial Sequence: Synthetic oligonucleotide
  Sense strand starting at position 1917 of SEQ ID NO: 588351
agcugaaaguuugugaaau

SEQ ID NO: 858991 - RNA, 19 nt, Artificial Sequence
  Description of Artificial Sequence: Synthetic oligonucleotide
  Antisense strand to SEQ ID NO: 858990
auuucacaaacuuucagcu

SEQ ID NO: 858992 - RNA, 19 nt, Artificial Sequence
  Description of Artificial Sequence: Synthetic oligonucleotide
  Sense strand starting at position 2107 of SEQ ID NO: 588351
gcugccauuccucagggaa

SEQ ID NO: 858993 - RNA, 19 nt, Artificial Sequence
  Description of Artificial Sequence: Synthetic oligonucleotide
  Antisense strand to SEQ ID NO: 858992
uucccugaggaauggcagc

SEQ ID NO: 858994 - RNA, 19 nt, Artificial Sequence
  Description of Artificial Sequence: Synthetic oligonucleotide
  Sense strand starting at position 2110 of SEQ ID NO: 588351
gccauuccucagggaaguu

SEQ ID NO: 858995 - RNA, 19 nt, Artificial Sequence
  Description of Artificial Sequence: Synthetic oligonucleotide
  Antisense strand to SEQ ID NO: 858994
aacuucccugaggaauggc

SEQ ID NO: 858996 - RNA, 19 nt, Artificial Sequence
  Description of Artificial Sequence: Synthetic oligonucleotide
  Sense strand starting at position 2369 of SEQ ID NO: 588351
cugugaauauuacuuagga

SEQ ID NO: 858997 - RNA, 19 nt, Artificial Sequence
  Description of Artificial Sequence: Synthetic oligonucleotide
  Antisense strand to SEQ ID NO: 858996
uccuaaguaauauucacag

SEQ ID NO: 858998 - RNA, 19 nt, Artificial Sequence
  Description of Artificial Sequence: Synthetic oligonucleotide
  Sense strand starting at position 2370 of SEQ ID NO: 588351
ugugaauauuacuuaggau

SEQ ID NO: 858999 - RNA, 19 nt, Artificial Sequence
  Description of Artificial Sequence: Synthetic oligonucleotide
  Antisense strand to SEQ ID NO: 858998
auccuaaguaauauucaca

SEQ ID NO: 859000 - RNA, 19 nt, Artificial Sequence
  Description of Artificial Sequence: Synthetic oligonucleotide
  Sense strand starting at position 2385 of SEQ ID NO: 588351
ggauuagaaucaguaugua

SEQ ID NO: 859001 - RNA, 19 nt, Artificial Sequence
  Description of Artificial Sequence: Synthetic oligonucleotide
  Antisense strand to SEQ ID NO: 859000
uacauacugauucuaaucc

SEQ ID NO: 859002 - RNA, 19 nt, Artificial Sequence
  Description of Artificial Sequence: Synthetic oligonucleotide
  Sense strand starting at position 2402 of SEQ ID NO: 588351
uaugcauauggucacugua

SEQ ID NO: 859003 - RNA, 19 nt, Artificial Sequence
  Description of Artificial Sequence: Synthetic oligonucleotide
  Antisense strand to SEQ ID NO: 859002
uacagugaccauaugcaua

SEQ ID NO: 859004 - RNA, 19 nt, Artificial Sequence
  Description of Artificial Sequence: Synthetic oligonucleotide
  Sense strand starting at position 2410 of SEQ ID NO: 588351
uggucacuguaucuuuaaa

SEQ ID NO: 859005 - RNA, 19 nt, Artificial Sequence
  Description of Artificial Sequence: Synthetic oligonucleotide
  Antisense strand to SEQ ID NO: 859004
uuuaaagauacagugacca

SEQ ID NO: 859006 - RNA, 19 nt, Artificial Sequence
  Description of Artificial Sequence: Synthetic oligonucleotide
  Sense strand starting at position 2412 of SEQ ID NO: 588351
gucacuguaucuuuaaaga

SEQ ID NO: 859007 - RNA, 19 nt, Artificial Sequence
  Description of Artificial Sequence: Synthetic oligonucleotide
  Antisense strand to SEQ ID NO: 859006
ucuuuaaagauacagugac

SEQ ID NO: 859008 - RNA, 19 nt, Artificial Sequence
  Description of Artificial Sequence: Synthetic oligonucleotide
  Sense strand starting at position 2425 of SEQ ID NO: 588351
uaaagaacuguugaguucu

SEQ ID NO: 859009 - RNA, 19 nt, Artificial Sequence
  Description of Artificial Sequence: Synthetic oligonucleotide
  Antisense strand to SEQ ID NO: 859008
agaacucaacaguucuuua

SEQ ID NO: 859010 - RNA, 19 nt, Artificial Sequence
  Description of Artificial Sequence: Synthetic oligonucleotide
  Sense strand starting at position 2427 of SEQ ID NO: 588351
aagaacuguugaguucuuu

SEQ ID NO: 859011 - RNA, 19 nt, Artificial Sequence
  Description of Artificial Sequence: Synthetic oligonucleotide
  Antisense strand to SEQ ID NO: 859010
aaagaacucaacaguucuu

SEQ ID NO: 859012 - RNA, 19 nt, Artificial Sequence
  Description of Artificial Sequence: Synthetic oligonucleotide
  Sense strand starting at position 2496 of SEQ ID NO: 588351
cuaguaggugcucagaauu

SEQ ID NO: 859013 - RNA, 19 nt, Artificial Sequence
  Description of Artificial Sequence: Synthetic oligonucleotide
  Antisense strand to SEQ ID NO: 859012
aauucugagcaccuacuag

SEQ ID NO: 859014 - RNA, 19 nt, Artificial Sequence
  Description of Artificial Sequence: Synthetic oligonucleotide
  Sense strand starting at position 2553 of SEQ ID NO: 588351
uccauuuaagaucgucuuu

SEQ ID NO: 859015 - RNA, 19 nt, Artificial Sequence
  Description of Artificial Sequence: Synthetic oligonucleotide
  Antisense strand to SEQ ID NO: 859014
aaagacgaucuuaaaugga

SEQ ID NO: 859016 - RNA, 19 nt, Artificial Sequence
  Description of Artificial Sequence: Synthetic oligonucleotide
  Sense strand starting at position 2573 of SEQ ID NO: 588351
ucacuuagguuucuggaca

SEQ ID NO: 859017 - RNA, 19 nt, Artificial Sequence
  Description of Artificial Sequence: Synthetic oligonucleotide
  Antisense strand to SEQ ID NO: 859016
uguccagaaaccuaaguga

SEQ ID NO: 859018 - RNA, 19 nt, Artificial Sequence
  Description of Artificial Sequence: Synthetic oligonucleotide
  Sense strand starting at position 2580 of SEQ ID NO: 588351
gguuucuggacacgggaua

SEQ ID NO: 859019 - RNA, 19 nt, Artificial Sequence
  Description of Artificial Sequence: Synthetic oligonucleotide
  Antisense strand to SEQ ID NO: 859018
uaucccguguccagaaacc

SEQ ID NO: 859020 - RNA, 19 nt, Artificial Sequence
  Description of Artificial Sequence: Synthetic oligonucleotide
  Sense strand starting at position 2641 of SEQ ID NO: 588351
auuauugaccuagggucau

SEQ ID NO: 859021 - RNA, 19 nt, Artificial Sequence
  Description of Artificial Sequence: Synthetic oligonucleotide
  Antisense strand to SEQ ID NO: 859020
augacccuaggucaauaau

SEQ ID NO: 859022 - RNA, 19 nt, Artificial Sequence
  Description of Artificial Sequence: Synthetic oligonucleotide
  Sense strand starting at position 2657 of SEQ ID NO: 588351
cauauuauagugcgaauug

SEQ ID NO: 859023 - RNA, 19 nt, Artificial Sequence
  Description of Artificial Sequence: Synthetic oligonucleotide
  Antisense strand to SEQ ID NO: 859022
caauucgcacuauaauaug

SEQ ID NO: 859024 - RNA, 19 nt, Artificial Sequence
  Description of Artificial Sequence: Synthetic oligonucleotide
  Sense strand starting at position 2702 of SEQ ID NO: 588351
auuacuugguggucucuua

SEQ ID NO: 859025 - RNA, 19 nt, Artificial Sequence
  Description of Artificial Sequence: Synthetic oligonucleotide
  Antisense strand to SEQ ID NO: 859024
uaagagaccaccaaguaau

SEQ ID NO: 859026 - RNA, 19 nt, Artificial Sequence
  Description of Artificial Sequence: Synthetic oligonucleotide
  Sense strand starting at position 2755 of SEQ ID NO: 588351
agauuuagcuacuagaaau

SEQ ID NO: 859027 - RNA, 19 nt, Artificial Sequence
  Description of Artificial Sequence: Synthetic oligonucleotide
  Antisense strand to SEQ ID NO: 859026
auuucuaguagcuaaaucu

SEQ ID NO: 859028 - RNA, 19 nt, Artificial Sequence
  Description of Artificial Sequence: Synthetic oligonucleotide
  Sense strand starting at position 2788 of SEQ ID NO: 588351
gcaagaugucaggaaguuu

SEQ ID NO: 859029 - RNA, 19 nt, Artificial Sequence
  Description of Artificial Sequence: Synthetic oligonucleotide
  Antisense strand to SEQ ID NO: 859028
aaacuuccugacaucuugc

SEQ ID NO: 859030 - RNA, 19 nt, Artificial Sequence
  Description of Artificial Sequence: Synthetic oligonucleotide
  Sense strand starting at position 2797 of SEQ ID NO: 588351
caggaaguuuggguacagu

SEQ ID NO: 859031 - RNA, 19 nt, Artificial Sequence
  Description of Artificial Sequence: Synthetic oligonucleotide
  Antisense strand to SEQ ID NO: 859030
acuguacccaaacuuccug

SEQ ID NO: 859032 - RNA, 19 nt, Artificial Sequence
  Description of Artificial Sequence: Synthetic oligonucleotide
  Sense strand starting at position 2800 of SEQ ID NO: 588351
gaaguuuggguacagugau

SEQ ID NO: 859033 - RNA, 19 nt, Artificial Sequence
  Description of Artificial Sequence: Synthetic oligonucleotide
  Antisense strand to SEQ ID NO: 859032
aucacuguacccaaacuuc

SEQ ID NO: 859034 - RNA, 19 nt, Artificial Sequence
  Description of Artificial Sequence: Synthetic oligonucleotide
  Sense strand starting at position 2850 of SEQ ID NO: 588351
uugcuuuccucacugaaga

SEQ ID NO: 859035 - RNA, 19 nt, Artificial Sequence
  Description of Artificial Sequence: Synthetic oligonucleotide
  Antisense strand to SEQ ID NO: 859034
ucuucagugaggaaagcaa

SEQ ID NO: 859036 - RNA, 19 nt, Artificial Sequence
  Description of Artificial Sequence: Synthetic oligonucleotide
  Sense strand starting at position 2851 of SEQ ID NO: 588351
ugcuuuccucacugaagaa

SEQ ID NO: 859037 - RNA, 19 nt, Artificial Sequence
  Description of Artificial Sequence: Synthetic oligonucleotide
  Antisense strand to SEQ ID NO: 859036
uucuucagugaggaaagca

SEQ ID NO: 859038 - RNA, 19 nt, Artificial Sequence
  Description of Artificial Sequence: Synthetic oligonucleotide
  Sense strand starting at position 2942 of SEQ ID NO: 588351
cuaaacucagcuugagaag

SEQ ID NO: 859039 - RNA, 19 nt, Artificial Sequence
  Description of Artificial Sequence: Synthetic oligonucleotide
  Antisense strand to SEQ ID NO: 859038
cuucucaagcugaguuuag

SEQ ID NO: 859040 - RNA, 19 nt, Artificial Sequence
  Description of Artificial Sequence: Synthetic oligonucleotide
  Sense strand starting at position 3108 of SEQ ID NO: 588351
aggguaguacaauguuuau

SEQ ID NO: 859041 - RNA, 19 nt, Artificial Sequence
  Description of Artificial Sequence: Synthetic oligonucleotide
  Antisense strand to SEQ ID NO: 859040
auaaacauuguacuacccu

SEQ ID NO: 859042 - RNA, 19 nt, Artificial Sequence
  Description of Artificial Sequence: Synthetic oligonucleotide
  Sense strand starting at position 3166 of SEQ ID NO: 588351
gcauucucuguuuaaggga

SEQ ID NO: 859043 - RNA, 19 nt, Artificial Sequence
  Description of Artificial Sequence: Synthetic oligonucleotide
  Antisense strand to SEQ ID NO: 859042
ucccuuaaacagagaaugc

SEQ ID NO: 859044 - RNA, 19 nt, Artificial Sequence
  Description of Artificial Sequence: Synthetic oligonucleotide
  Sense strand starting at position 3325 of SEQ ID NO: 588351
gcaacuggauccuuacaca

SEQ ID NO: 859045 - RNA, 19 nt, Artificial Sequence
  Description of Artificial Sequence: Synthetic oligonucleotide
  Antisense strand to SEQ ID NO: 859044
uguguaaggauccaguugc

SEQ ID NO: 859046 - RNA, 19 nt, Artificial Sequence
  Description of Artificial Sequence: Synthetic oligonucleotide
  Sense strand starting at position 3386 of SEQ ID NO: 588351
aguggcacuuucuuauaaa

SEQ ID NO: 859047 - RNA, 19 nt, Artificial Sequence
  Description of Artificial Sequence: Synthetic oligonucleotide
  Antisense strand to SEQ ID NO: 859046
uuuauaagaaagugccacu

SEQ ID NO: 859048 - RNA, 19 nt, Artificial Sequence
  Description of Artificial Sequence: Synthetic oligonucleotide
  Sense strand starting at position 3571 of SEQ ID NO: 588351
acaguauagccauacuaug

SEQ ID NO: 859049 - RNA, 19 nt, Artificial Sequence
  Description of Artificial Sequence: Synthetic oligonucleotide
  Antisense strand to SEQ ID NO: 859048
cauaguauggcuauacugu

SEQ ID NO: 859050 - RNA, 19 nt, Artificial Sequence
  Description of Artificial Sequence: Synthetic oligonucleotide
  Sense strand starting at position 3576 of SEQ ID NO: 588351
auagccauacuauggaaua

SEQ ID NO: 859051 - RNA, 19 nt, Artificial Sequence
  Description of Artificial Sequence: Synthetic oligonucleotide
  Antisense strand to SEQ ID NO: 859050
uauuccauaguauggcuau

SEQ ID NO: 859052 - RNA, 19 nt, Artificial Sequence
  Description of Artificial Sequence: Synthetic oligonucleotide
  Sense strand starting at position 3613 of SEQ ID NO: 588351
gaaggaauugcugguguag

SEQ ID NO: 859053 - RNA, 19 nt, Artificial Sequence
  Description of Artificial Sequence: Synthetic oligonucleotide
  Antisense strand to SEQ ID NO: 859052
cuacaccagcaauuccuuc

SEQ ID NO: 859054 - RNA, 19 nt, Artificial Sequence
  Description of Artificial Sequence: Synthetic oligonucleotide
  Sense strand starting at position 3729 of SEQ ID NO: 588351
uucaguggugcugagagua

SEQ ID NO: 859055 - RNA, 19 nt, Artificial Sequence
  Description of Artificial Sequence: Synthetic oligonucleotide
  Antisense strand to SEQ ID NO: 859054
uacucucagcaccacugaa

SEQ ID NO: 859056 - RNA, 19 nt, Artificial Sequence
  Description of Artificial Sequence: Synthetic oligonucleotide
  Sense strand starting at position 3787 of SEQ ID NO: 588351
gagaucuuuguggagugau

SEQ ID NO: 859057 - RNA, 19 nt, Artificial Sequence
  Description of Artificial Sequence: Synthetic oligonucleotide
  Antisense strand to SEQ ID NO: 859056
aucacuccacaaagaucuc

SEQ ID NO: 859058 - RNA, 19 nt, Artificial Sequence
  Description of Artificial Sequence: Synthetic oligonucleotide
  Sense strand starting at position 3967 of SEQ ID NO: 588351
uugaguaaaugagacauuu

SEQ ID NO: 859059 - RNA, 19 nt, Artificial Sequence
  Description of Artificial Sequence: Synthetic oligonucleotide
  Antisense strand to SEQ ID NO: 859058
aaaugucucauuuacucaa

SEQ ID NO: 859060 - RNA, 19 nt, Artificial Sequence
  Description of Artificial Sequence: Synthetic oligonucleotide
  Sense strand starting at position 2057 of SEQ ID NO: 588352
cugcuuaaugcguaauaug

SEQ ID NO: 859061 - RNA, 19 nt, Artificial Sequence
  Description of Artificial Sequence: Synthetic oligonucleotide
  Antisense strand to SEQ ID NO: 859060
cauauuacgcauuaagcag

SEQ ID NO: 859062 - RNA, 19 nt, Artificial Sequence
  Description of Artificial Sequence: Synthetic oligonucleotide
  Sense strand starting at position 2124 of SEQ ID NO: 588352
cguauauuccuucggcaaa

SEQ ID NO: 859063 - RNA, 19 nt, Artificial Sequence
  Description of Artificial Sequence: Synthetic oligonucleotide
  Antisense strand to SEQ ID NO: 859062
uuugccgaaggaauauacg

SEQ ID NO: 859064 - RNA, 19 nt, Artificial Sequence
  Description of Artificial Sequence: Synthetic oligonucleotide
  Sense strand starting at position 2168 of SEQ ID NO: 588352
gacgcaugucaauaagauu

SEQ ID NO: 859065 - RNA, 19 nt, Artificial Sequence
  Description of Artificial Sequence: Synthetic oligonucleotide
  Antisense strand to SEQ ID NO: 859064
aaucuuauugacaugcguc

SEQ ID NO: 859066 - RNA, 19 nt, Artificial Sequence
  Description of Artificial Sequence: Synthetic oligonucleotide
  Sense strand starting at position 2186 of SEQ ID NO: 588352
ugucauauucuggauugca

SEQ ID NO: 859067 - RNA, 19 nt, Artificial Sequence
  Description of Artificial Sequence: Synthetic oligonucleotide
  Antisense strand to SEQ ID NO: 859066
ugcaauccagaauaugaca

SEQ ID NO: 859068 - RNA, 19 nt, Artificial Sequence
  Description of Artificial Sequence: Synthetic oligonucleotide
  Sense strand starting at position 2196 of SEQ ID NO: 588352
uggauugcauacucauaaa

SEQ ID NO: 859069 - RNA, 19 nt, Artificial Sequence
  Description of Artificial Sequence: Synthetic oligonucleotide
  Antisense strand to SEQ ID NO: 859068
uuuaugaguaugcaaucca

SEQ ID NO: 859070 - RNA, 19 nt, Artificial Sequence
  Description of Artificial Sequence: Synthetic oligonucleotide
  Sense strand starting at position 2287 of SEQ ID NO: 588352
gagggcuuccucgaggaag

SEQ ID NO: 859071 - RNA, 19 nt, Artificial Sequence
  Description of Artificial Sequence: Synthetic oligonucleotide
  Antisense strand to SEQ ID NO: 859070
cuuccucgaggaagcccuc

SEQ ID NO: 859072 - RNA, 19 nt, Artificial Sequence
  Description of Artificial Sequence: Synthetic oligonucleotide
  Sense strand starting at position 2289 of SEQ ID NO: 588352
gggcuuccucgaggaagga

SEQ ID NO: 859073 - RNA, 19 nt, Artificial Sequence
  Description of Artificial Sequence: Synthetic oligonucleotide
  Antisense strand to SEQ ID NO: 859072
uccuuccucgaggaagccc

SEQ ID NO: 859074 - RNA, 19 nt, Artificial Sequence
  Description of Artificial Sequence: Synthetic oligonucleotide
  Sense strand starting at position 2479 of SEQ ID NO: 588352
accacauucuggucuuuau

SEQ ID NO: 859075 - RNA, 19 nt, Artificial Sequence
  Description of Artificial Sequence: Synthetic oligonucleotide
  Antisense strand to SEQ ID NO: 859074
auaaagaccagaauguggu

SEQ ID NO: 859076 - RNA, 19 nt, Artificial Sequence
  Description of Artificial Sequence: Synthetic oligonucleotide
  Sense strand starting at position 2482 of SEQ ID NO: 588352
acauucuggucuuuaucuu

SEQ ID NO: 859077 - RNA, 19 nt, Artificial Sequence
  Description of Artificial Sequence: Synthetic oligonucleotide
  Antisense strand to SEQ ID NO: 859076
aagauaaagaccagaaugu

SEQ ID NO: 859078 - RNA, 19 nt, Artificial Sequence
  Description of Artificial Sequence: Synthetic oligonucleotide
  Sense strand starting at position 2564 of SEQ ID NO: 588352
gccugcagucuggagaaua

SEQ ID NO: 859079 - RNA, 19 nt, Artificial Sequence
  Description of Artificial Sequence: Synthetic oligonucleotide
  Antisense strand to SEQ ID NO: 859078
uauucuccagacugcaggc

SEQ ID NO: 859080 - RNA, 19 nt, Artificial Sequence
  Description of Artificial Sequence: Synthetic oligonucleotide
  Sense strand starting at position 2576 of SEQ ID NO: 588352
gagaauacauauugggaga

SEQ ID NO: 859081 - RNA, 19 nt, Artificial Sequence
  Description of Artificial Sequence: Synthetic oligonucleotide
  Antisense strand to SEQ ID NO: 859080
ucucccaauauguauucuc

SEQ ID NO: 859082 - RNA, 19 nt, Artificial Sequence
  Description of Artificial Sequence: Synthetic oligonucleotide
  Sense strand starting at position 2578 of SEQ ID NO: 588352
gaauacauauugggagauu

SEQ ID NO: 859083 - RNA, 19 nt, Artificial Sequence
  Description of Artificial Sequence: Synthetic oligonucleotide
  Antisense strand to SEQ ID NO: 859082
aaucucccaauauguauuc

SEQ ID NO: 859084 - RNA, 19 nt, Artificial Sequence
  Description of Artificial Sequence: Synthetic oligonucleotide
  Sense strand starting at position 2616 of SEQ ID NO: 588352
gccagagaggauggucauu

SEQ ID NO: 859085 - RNA, 19 nt, Artificial Sequence
  Description of Artificial Sequence: Synthetic oligonucleotide
  Antisense strand to SEQ ID NO: 859084
aaugaccauccucucuggc

SEQ ID NO: 859086 - RNA, 19 nt, Artificial Sequence
  Description of Artificial Sequence: Synthetic oligonucleotide
  Sense strand starting at position 2731 of SEQ ID NO: 588352
gcuauugauuuacagucau

SEQ ID NO: 859087 - RNA, 19 nt, Artificial Sequence
  Description of Artificial Sequence: Synthetic oligonucleotide
  Antisense strand to SEQ ID NO: 859086
augacuguaaaucaauagc

SEQ ID NO: 859088 - RNA, 19 nt, Artificial Sequence
  Description of Artificial Sequence: Synthetic oligonucleotide
  Sense strand starting at position 2760 of SEQ ID NO: 588352
caagcauaugugugaagua

SEQ ID NO: 859089 - RNA, 19 nt, Artificial Sequence
  Description of Artificial Sequence: Synthetic oligonucleotide
  Antisense strand to SEQ ID NO: 859088
uacuucacacauaugcuug

SEQ ID NO: 859090 - RNA, 19 nt, Artificial Sequence
  Description of Artificial Sequence: Synthetic oligonucleotide
  Sense strand starting at position 2765 of SEQ ID NO: 588352
auaugugugaaguaugaag

SEQ ID NO: 859091 - RNA, 19 nt, Artificial Sequence
  Description of Artificial Sequence: Synthetic oligonucleotide
  Antisense strand to SEQ ID NO: 859090
cuucauacuucacacauau

SEQ ID NO: 859092 - RNA, 19 nt, Artificial Sequence
  Description of Artificial Sequence: Synthetic oligonucleotide
  Sense strand starting at position 2767 of SEQ ID NO: 588352
augugugaaguaugaagga

SEQ ID NO: 859093 - RNA, 19 nt, Artificial Sequence
  Description of Artificial Sequence: Synthetic oligonucleotide
  Antisense strand to SEQ ID NO: 859092
uccuucauacuucacacau

SEQ ID NO: 859094 - RNA, 19 nt, Artificial Sequence
  Description of Artificial Sequence: Synthetic oligonucleotide
  Sense strand starting at position 2790 of SEQ ID NO: 588352
accaguagguccucacauu

SEQ ID NO: 859095 - RNA, 19 nt, Artificial Sequence
  Description of Artificial Sequence: Synthetic oligonucleotide
  Antisense strand to SEQ ID NO: 859094
aaugugaggaccuacuggu

SEQ ID NO: 859096 - RNA, 19 nt, Artificial Sequence
  Description of Artificial Sequence: Synthetic oligonucleotide
  Sense strand starting at position 2821 of SEQ ID NO: 588352
ccacaauucuuggcucaug

SEQ ID NO: 859097 - RNA, 19 nt, Artificial Sequence
  Description of Artificial Sequence: Synthetic oligonucleotide
  Antisense strand to SEQ ID NO: 859096
caugagccaagaauugugg

SEQ ID NO: 859098 - RNA, 19 nt, Artificial Sequence
  Description of Artificial Sequence: Synthetic oligonucleotide
  Sense strand starting at position 2831 of SEQ ID NO: 588352
uggcucauguaauuaauau

SEQ ID NO: 859099 - RNA, 19 nt, Artificial Sequence
  Description of Artificial Sequence: Synthetic oligonucleotide
  Antisense strand to SEQ ID NO: 859098
auauuaauuacaugagcca

SEQ ID NO: 859100 - RNA, 19 nt, Artificial Sequence
  Description of Artificial Sequence: Synthetic oligonucleotide
  Sense strand starting at position 2951 of SEQ ID NO: 588352
ggaaaugggcccuaguaug

SEQ ID NO: 859101 - RNA, 19 nt, Artificial Sequence
  Description of Artificial Sequence: Synthetic oligonucleotide
  Antisense strand to SEQ ID NO: 859100
cauacuagggcccauuucc

SEQ ID NO: 859102 - RNA, 19 nt, Artificial Sequence
  Description of Artificial Sequence: Synthetic oligonucleotide
  Sense strand starting at position 2997 of SEQ ID NO: 588352
uagagaaacgcaggcuauu

SEQ ID NO: 859103 - RNA, 19 nt, Artificial Sequence
  Description of Artificial Sequence: Synthetic oligonucleotide
  Antisense strand to SEQ ID NO: 859102
aauagccugcguuucucua

SEQ ID NO: 859104 - RNA, 19 nt, Artificial Sequence
  Description of Artificial Sequence: Synthetic oligonucleotide
  Sense strand starting at position 3023 of SEQ ID NO: 588352
agugguaagccuuaggaaa

SEQ ID NO: 859105 - RNA, 19 nt, Artificial Sequence
  Description of Artificial Sequence: Synthetic oligonucleotide
  Antisense strand to SEQ ID NO: 859104
uuuccuaaggcuuaccacu

SEQ ID NO: 859106 - RNA, 19 nt, Artificial Sequence
  Description of Artificial Sequence: Synthetic oligonucleotide
  Sense strand starting at position 3116 of SEQ ID NO: 588352
caguaagucacguggacau

SEQ ID NO: 859107 - RNA, 19 nt, Artificial Sequence
  Description of Artificial Sequence: Synthetic oligonucleotide
  Antisense strand to SEQ ID NO: 859106
auguccacgugacuuacug

SEQ ID NO: 859108 - RNA, 19 nt, Artificial Sequence
  Description of Artificial Sequence: Synthetic oligonucleotide
  Sense strand starting at position 3193 of SEQ ID NO: 588352
ugaguuugaugaguuagca

SEQ ID NO: 859109 - RNA, 19 nt, Artificial Sequence
  Description of Artificial Sequence: Synthetic oligonucleotide
  Antisense strand to SEQ ID NO: 859108
ugcuaacucaucaaacuca

SEQ ID NO: 859110 - RNA, 19 nt, Artificial Sequence
  Description of Artificial Sequence: Synthetic oligonucleotide
  Sense strand starting at position 3197 of SEQ ID NO: 588352
uuugaugaguuagcagaaa

SEQ ID NO: 859111 - RNA, 19 nt, Artificial Sequence
  Description of Artificial Sequence: Synthetic oligonucleotide
  Antisense strand to SEQ ID NO: 859110
uuucugcuaacucaucaaa

SEQ ID NO: 859112 - RNA, 19 nt, Artificial Sequence
  Description of Artificial Sequence: Synthetic oligonucleotide
  Sense strand starting at position 3241 of SEQ ID NO: 588352
gcauaagagcgggaguguu

SEQ ID NO: 859113 - RNA, 19 nt, Artificial Sequence
  Description of Artificial Sequence: Synthetic oligonucleotide
  Antisense strand to SEQ ID NO: 859112
aacacucccgcucuuaugc

SEQ ID NO: 859114 - RNA, 19 nt, Artificial Sequence
  Description of Artificial Sequence: Synthetic oligonucleotide
  Sense strand starting at position 3264 of SEQ ID NO: 588352
gaggguaagaguuggaucu

SEQ ID NO: 859115 - RNA, 19 nt, Artificial Sequence
  Description of Artificial Sequence: Synthetic oligonucleotide
  Antisense strand to SEQ ID NO: 859114
agauccaacucuuacccuc

SEQ ID NO: 859116 - RNA, 19 nt, Artificial Sequence
  Description of Artificial Sequence: Synthetic oligonucleotide
  Sense strand starting at position 3277 of SEQ ID NO: 588352
ggaucucauucugaauaug

SEQ ID NO: 859117 - RNA, 19 nt, Artificial Sequence
  Description of Artificial Sequence: Synthetic oligonucleotide
  Antisense strand to SEQ ID NO: 859116
cauauucagaaugagaucc

SEQ ID NO: 859118 - RNA, 19 nt, Artificial Sequence
  Description of Artificial Sequence: Synthetic oligonucleotide
  Sense strand starting at position 3327 of SEQ ID NO: 588352
gacugauauuaucugguuu

SEQ ID NO: 859119 - RNA, 19 nt, Artificial Sequence
  Description of Artificial Sequence: Synthetic oligonucleotide
  Antisense strand to SEQ ID NO: 859118
aaaccagauaauaucaguc

SEQ ID NO: 859120 - RNA, 19 nt, Artificial Sequence
  Description of Artificial Sequence: Synthetic oligonucleotide
  Sense strand starting at position 3331 of SEQ ID NO: 588352
gauauuaucugguuuaugu

SEQ ID NO: 859121 - RNA, 19 nt, Artificial Sequence
  Description of Artificial Sequence: Synthetic oligonucleotide
  Antisense strand to SEQ ID NO: 859120
acauaaaccagauaauauc

SEQ ID NO: 859122 - RNA, 19 nt, Artificial Sequence
  Description of Artificial Sequence: Synthetic oligonucleotide
  Sense strand starting at position 3358 of SEQ ID NO: 588352
ucacuuaggcucuguggaa

SEQ ID NO: 859123 - RNA, 19 nt, Artificial Sequence
  Description of Artificial Sequence: Synthetic oligonucleotide
  Antisense strand to SEQ ID NO: 859122
uuccacagagccuaaguga

SEQ ID NO: 859124 - RNA, 19 nt, Artificial Sequence
  Description of Artificial Sequence: Synthetic oligonucleotide
  Sense strand starting at position 3359 of SEQ ID NO: 588352
cacuuaggcucuguggaaa

SEQ ID NO: 859125 - RNA, 19 nt, Artificial Sequence
  Description of Artificial Sequence: Synthetic oligonucleotide
  Antisense strand to SEQ ID NO: 859124
uuuccacagagccuaagug

SEQ ID NO: 859126 - RNA, 19 nt, Artificial Sequence
  Description of Artificial Sequence: Synthetic oligonucleotide
  Sense strand starting at position 3499 of SEQ ID NO: 588352
aggauauguguugaguuag

SEQ ID NO: 859127 - RNA, 19 nt, Artificial Sequence
  Description of Artificial Sequence: Synthetic oligonucleotide
  Antisense strand to SEQ ID NO: 859126
cuaacucaacacauauccu

SEQ ID NO: 859128 - RNA, 19 nt, Artificial Sequence
  Description of Artificial Sequence: Synthetic oligonucleotide
  Sense strand starting at position 3596 of SEQ ID NO: 588352
uauuuaaacuggugagaug

SEQ ID NO: 859129 - RNA, 19 nt, Artificial Sequence
  Description of Artificial Sequence: Synthetic oligonucleotide
  Antisense strand to SEQ ID NO: 859128
caucucaccaguuuaaaua

SEQ ID NO: 859130 - RNA, 19 nt, Artificial Sequence
  Description of Artificial Sequence: Synthetic oligonucleotide
  Sense strand starting at position 3617 of SEQ ID NO: 588352
aguauuauuuacugagaga

SEQ ID NO: 859131 - RNA, 19 nt, Artificial Sequence
  Description of Artificial Sequence: Synthetic oligonucleotide
  Antisense strand to SEQ ID NO: 859130
ucucucaguaaauaauacu

SEQ ID NO: 859132 - RNA, 19 nt, Artificial Sequence
  Description of Artificial Sequence: Synthetic oligonucleotide
  Sense strand starting at position 3647 of SEQ ID NO: 588352
cauuuagaguuguagaaau

SEQ ID NO: 859133 - RNA, 19 nt, Artificial Sequence
  Description of Artificial Sequence: Synthetic oligonucleotide
  Antisense strand to SEQ ID NO: 859132
auuucuacaacucuaaaug

SEQ ID NO: 859134 - RNA, 19 nt, Artificial Sequence
  Description of Artificial Sequence: Synthetic oligonucleotide
  Sense strand starting at position 3657 of SEQ ID NO: 588352
uguagaaauuaagagaucu

SEQ ID NO: 859135 - RNA, 19 nt, Artificial Sequence
  Description of Artificial Sequence: Synthetic oligonucleotide
  Antisense strand to SEQ ID NO: 859134
agaucucuuaauuucuaca

SEQ ID NO: 859136 - RNA, 19 nt, Artificial Sequence
  Description of Artificial Sequence: Synthetic oligonucleotide
  Sense strand starting at position 3935 of SEQ ID NO: 588352
aagagagaauuucgcauga

SEQ ID NO: 859137 - RNA, 19 nt, Artificial Sequence
  Description of Artificial Sequence: Synthetic oligonucleotide
  Antisense strand to SEQ ID NO: 859136
ucaugcgaaauucucucuu

SEQ ID NO: 859138 - RNA, 19 nt, Artificial Sequence
  Description of Artificial Sequence: Synthetic oligonucleotide
  Sense strand starting at position 3937 of SEQ ID NO: 588352
gagagaauuucgcaugaau

SEQ ID NO: 859139 - RNA, 19 nt, Artificial Sequence
  Description of Artificial Sequence: Synthetic oligonucleotide
  Antisense strand to SEQ ID NO: 859138
auucaugcgaaauucucuc

SEQ ID NO: 859140 - RNA, 19 nt, Artificial Sequence
  Description of Artificial Sequence: Synthetic oligonucleotide
  Sense strand starting at position 682 of SEQ ID NO: 588353
augggcuucucugcuauau

SEQ ID NO: 859141 - RNA, 19 nt, Artificial Sequence
  Description of Artificial Sequence: Synthetic oligonucleotide
  Antisense strand to SEQ ID NO: 859140
auauagcagagaagcccau

SEQ ID NO: 859142 - RNA, 19 nt, Artificial Sequence
  Description of Artificial Sequence: Synthetic oligonucleotide
  Sense strand starting at position 961 of SEQ ID NO: 588353
cucacaaugucaggaauuu

SEQ ID NO: 859143 - RNA, 19 nt, Artificial Sequence
  Description of Artificial Sequence: Synthetic oligonucleotide
  Antisense strand to SEQ ID NO: 859142
aaauuccugacauugugag

SEQ ID NO: 859144 - RNA, 19 nt, Artificial Sequence
  Description of Artificial Sequence: Synthetic oligonucleotide
  Sense strand starting at position 1214 of SEQ ID NO: 588353
aguggccugugccugaaau

SEQ ID NO: 859145 - RNA, 19 nt, Artificial Sequence
  Description of Artificial Sequence: Synthetic oligonucleotide
  Antisense strand to SEQ ID NO: 859144
auuucaggcacaggccacu

SEQ ID NO: 859146 - RNA, 19 nt, Artificial Sequence
  Description of Artificial Sequence: Synthetic oligonucleotide
  Sense strand starting at position 1215 of SEQ ID NO: 588353
guggccugugccugaaauc

SEQ ID NO: 859147 - RNA, 19 nt, Artificial Sequence
  Description of Artificial Sequence: Synthetic oligonucleotide
  Antisense strand to SEQ ID NO: 859146
gauuucaggcacaggccac

SEQ ID NO: 859148 - RNA, 19 nt, Artificial Sequence
  Description of Artificial Sequence: Synthetic oligonucleotide
  Sense strand starting at position 1586 of SEQ ID NO: 588353
cggagguugcagugagagu

SEQ ID NO: 859149 - RNA, 19 nt, Artificial Sequence
  Description of Artificial Sequence: Synthetic oligonucleotide
  Antisense strand to SEQ ID NO: 859148
acucucacugcaaccuccg

SEQ ID NO: 859150 - RNA, 19 nt, Artificial Sequence
  Description of Artificial Sequence: Synthetic oligonucleotide
  Sense strand starting at position 1893 of SEQ ID NO: 588353
gggacuugugcacaagucu

SEQ ID NO: 859151 - RNA, 19 nt, Artificial Sequence
  Description of Artificial Sequence: Synthetic oligonucleotide
  Antisense strand to SEQ ID NO: 859150
agacuugugcacaaguccc

SEQ ID NO: 859152 - RNA, 19 nt, Artificial Sequence
  Description of Artificial Sequence: Synthetic oligonucleotide
  Sense strand starting at position 2000 of SEQ ID NO: 588353
gagagcuguuugcugcuga

SEQ ID NO: 859153 - RNA, 19 nt, Artificial Sequence
  Description of Artificial Sequence: Synthetic oligonucleotide
  Antisense strand to SEQ ID NO: 859152
ucagcagcaaacagcucuc

SEQ ID NO: 859154 - RNA, 19 nt, Artificial Sequence
  Description of Artificial Sequence: Synthetic oligonucleotide
  Sense strand starting at position 2307 of SEQ ID NO: 588353
ugauuucuguccuccaggu

SEQ ID NO: 859155 - RNA, 19 nt, Artificial Sequence
  Description of Artificial Sequence: Synthetic oligonucleotide
  Antisense strand to SEQ ID NO: 859154
accuggaggacagaaauca

SEQ ID NO: 859156 - RNA, 19 nt, Artificial Sequence
  Description of Artificial Sequence: Synthetic oligonucleotide
  Sense strand starting at position 2322 of SEQ ID NO: 588353
aggucuucucaguagaaug

SEQ ID NO: 859157 - RNA, 19 nt, Artificial Sequence
  Description of Artificial Sequence: Synthetic oligonucleotide
  Antisense strand to SEQ ID NO: 859156
cauucuacugagaagaccu

SEQ ID NO: 859158 - RNA, 19 nt, Artificial Sequence
  Description of Artificial Sequence: Synthetic oligonucleotide
  Sense strand starting at position 2327 of SEQ ID NO: 588353
uucucaguagaaugaggau

SEQ ID NO: 859159 - RNA, 19 nt, Artificial Sequence
  Description of Artificial Sequence: Synthetic oligonucleotide
  Antisense strand to SEQ ID NO: 859158
auccucauucuacugagaa

SEQ ID NO: 859160 - RNA, 19 nt, Artificial Sequence
  Description of Artificial Sequence: Synthetic oligonucleotide
  Sense strand starting at position 2330 of SEQ ID NO: 588353
ucaguagaaugaggauaau

SEQ ID NO: 859161 - RNA, 19 nt, Artificial Sequence
  Description of Artificial Sequence: Synthetic oligonucleotide
  Antisense strand to SEQ ID NO: 859160
auuauccucauucuacuga

SEQ ID NO: 859162 - RNA, 19 nt, Artificial Sequence
  Description of Artificial Sequence: Synthetic oligonucleotide
  Sense strand starting at position 2339 of SEQ ID NO: 588353
ugaggauaauccugaauuc

SEQ ID NO: 859163 - RNA, 19 nt, Artificial Sequence
  Description of Artificial Sequence: Synthetic oligonucleotide
  Antisense strand to SEQ ID NO: 859162
gaauucaggauuauccuca

SEQ ID NO: 859164 - RNA, 19 nt, Artificial Sequence
  Description of Artificial Sequence: Synthetic oligonucleotide
  Sense strand starting at position 2362 of SEQ ID NO: 588353
cauauuuccugaguacggu

SEQ ID NO: 859165 - RNA, 19 nt, Artificial Sequence
  Description of Artificial Sequence: Synthetic oligonucleotide
  Antisense strand to SEQ ID NO: 859164
accguacucaggaaauaug

SEQ ID NO: 859166 - RNA, 19 nt, Artificial Sequence
  Description of Artificial Sequence: Synthetic oligonucleotide
  Sense strand starting at position 2430 of SEQ ID NO: 588353
cacaguuuccugggcagga

SEQ ID NO: 859167 - RNA, 19 nt, Artificial Sequence
  Description of Artificial Sequence: Synthetic oligonucleotide
  Antisense strand to SEQ ID NO: 859166
uccugcccaggaaacugug

SEQ ID NO: 859168 - RNA, 19 nt, Artificial Sequence
  Description of Artificial Sequence: Synthetic oligonucleotide
  Sense strand starting at position 2533 of SEQ ID NO: 588353
caaagaccacuguguguua

SEQ ID NO: 859169 - RNA, 19 nt, Artificial Sequence
  Description of Artificial Sequence: Synthetic oligonucleotide
  Antisense strand to SEQ ID NO: 859168
uaacacacaguggucuuug

SEQ ID NO: 859170 - RNA, 19 nt, Artificial Sequence
  Description of Artificial Sequence: Synthetic oligonucleotide
  Sense strand starting at position 2610 of SEQ ID NO: 588353
cauggugccuccgugagaa

SEQ ID NO: 859171 - RNA, 19 nt, Artificial Sequence
  Description of Artificial Sequence: Synthetic oligonucleotide
  Antisense strand to SEQ ID NO: 859170
uucucacggaggcaccaug

SEQ ID NO: 859172 - RNA, 19 nt, Artificial Sequence
  Description of Artificial Sequence: Synthetic oligonucleotide
  Sense strand starting at position 2612 of SEQ ID NO: 588353
uggugccuccgugagaauu

SEQ ID NO: 859173 - RNA, 19 nt, Artificial Sequence
  Description of Artificial Sequence: Synthetic oligonucleotide
  Antisense strand to SEQ ID NO: 859172
aauucucacggaggcacca

SEQ ID NO: 859174 - RNA, 19 nt, Artificial Sequence
  Description of Artificial Sequence: Synthetic oligonucleotide
  Sense strand starting at position 2618 of SEQ ID NO: 588353
cuccgugagaauuagcaaa

SEQ ID NO: 859175 - RNA, 19 nt, Artificial Sequence
  Description of Artificial Sequence: Synthetic oligonucleotide
  Antisense strand to SEQ ID NO: 859174
uuugcuaauucucacggag

SEQ ID NO: 859176 - RNA, 19 nt, Artificial Sequence
  Description of Artificial Sequence: Synthetic oligonucleotide
  Sense strand starting at position 2620 of SEQ ID NO: 588353
ccgugagaauuagcaaagu

SEQ ID NO: 859177 - RNA, 19 nt, Artificial Sequence
  Description of Artificial Sequence: Synthetic oligonucleotide
  Antisense strand to SEQ ID NO: 859176
acuuugcuaauucucacgg

SEQ ID NO: 859178 - RNA, 19 nt, Artificial Sequence
  Description of Artificial Sequence: Synthetic oligonucleotide
  Sense strand starting at position 2789 of SEQ ID NO: 588353
uuggaaaugugucuacgga

SEQ ID NO: 859179 - RNA, 19 nt, Artificial Sequence
  Description of Artificial Sequence: Synthetic oligonucleotide
  Antisense strand to SEQ ID NO: 859178
uccguagacacauuuccaa

SEQ ID NO: 859180 - RNA, 19 nt, Artificial Sequence
  Description of Artificial Sequence: Synthetic oligonucleotide
  Sense strand starting at position 2790 of SEQ ID NO: 588353
uggaaaugugucuacggag

SEQ ID NO: 859181 - RNA, 19 nt, Artificial Sequence
  Description of Artificial Sequence: Synthetic oligonucleotide
  Antisense strand to SEQ ID NO: 859180
cuccguagacacauuucca

SEQ ID NO: 859182 - RNA, 19 nt, Artificial Sequence
  Description of Artificial Sequence: Synthetic oligonucleotide
  Sense strand starting at position 2795 of SEQ ID NO: 588353
augugucuacggagguguu

SEQ ID NO: 859183 - RNA, 19 nt, Artificial Sequence
  Description of Artificial Sequence: Synthetic oligonucleotide
  Antisense strand to SEQ ID NO: 859182
aacaccuccguagacacau

SEQ ID NO: 859184 - RNA, 19 nt, Artificial Sequence
  Description of Artificial Sequence: Synthetic oligonucleotide
  Sense strand starting at position 2878 of SEQ ID NO: 588353
gcauuuagugucugaaauc

SEQ ID NO: 859185 - RNA, 19 nt, Artificial Sequence
  Description of Artificial Sequence: Synthetic oligonucleotide
  Antisense strand to SEQ ID NO: 859184
gauuucagacacuaaaugc

SEQ ID NO: 859186 - RNA, 19 nt, Artificial Sequence
  Description of Artificial Sequence: Synthetic oligonucleotide
  Sense strand starting at position 2885 of SEQ ID NO: 588353
gugucugaaauccagggau

SEQ ID NO: 859187 - RNA, 19 nt, Artificial Sequence
  Description of Artificial Sequence: Synthetic oligonucleotide
  Antisense strand to SEQ ID NO: 859186
aucccuggauuucagacac

SEQ ID NO: 859188 - RNA, 19 nt, Artificial Sequence
  Description of Artificial Sequence: Synthetic oligonucleotide
  Sense strand starting at position 3032 of SEQ ID NO: 588353
uugugaaauucuucccagu

SEQ ID NO: 859189 - RNA, 19 nt, Artificial Sequence
  Description of Artificial Sequence: Synthetic oligonucleotide
  Antisense strand to SEQ ID NO: 859188
acugggaagaauuucacaa

SEQ ID NO: 859190 - RNA, 19 nt, Artificial Sequence
  Description of Artificial Sequence: Synthetic oligonucleotide
  Sense strand starting at position 3034 of SEQ ID NO: 588353
gugaaauucuucccagugu

SEQ ID NO: 859191 - RNA, 19 nt, Artificial Sequence
  Description of Artificial Sequence: Synthetic oligonucleotide
  Antisense strand to SEQ ID NO: 859190
acacugggaagaauuucac

SEQ ID NO: 859192 - RNA, 19 nt, Artificial Sequence
  Description of Artificial Sequence: Synthetic oligonucleotide
  Sense strand starting at position 3398 of SEQ ID NO: 588353
gaugcccugcucuggaaau

SEQ ID NO: 859193 - RNA, 19 nt, Artificial Sequence
  Description of Artificial Sequence: Synthetic oligonucleotide
  Antisense strand to SEQ ID NO: 859192
auuuccagagcagggcauc

SEQ ID NO: 859194 - RNA, 19 nt, Artificial Sequence
  Description of Artificial Sequence: Synthetic oligonucleotide
  Sense strand starting at position 3467 of SEQ ID NO: 588353
ggcaucuuugcauaacucu

SEQ ID NO: 859195 - RNA, 19 nt, Artificial Sequence
  Description of Artificial Sequence: Synthetic oligonucleotide
  Antisense strand to SEQ ID NO: 859194
agaguuaugcaaagaugcc

SEQ ID NO: 859196 - RNA, 19 nt, Artificial Sequence
  Description of Artificial Sequence: Synthetic oligonucleotide
  Sense strand starting at position 3473 of SEQ ID NO: 588353
uuugcauaacucugaagag

SEQ ID NO: 859197 - RNA, 19 nt, Artificial Sequence
  Description of Artificial Sequence: Synthetic oligonucleotide
  Antisense strand to SEQ ID NO: 859196
cucuucagaguuaugcaaa

SEQ ID NO: 859198 - RNA, 19 nt, Artificial Sequence
  Description of Artificial Sequence: Synthetic oligonucleotide
  Sense strand starting at position 3570 of SEQ ID NO: 588353
gguggaaguuccucaacuu

SEQ ID NO: 859199 - RNA, 19 nt, Artificial Sequence
  Description of Artificial Sequence: Synthetic oligonucleotide
  Antisense strand to SEQ ID NO: 859198
aaguugaggaacuuccacc

SEQ ID NO: 859200 - RNA, 19 nt, Artificial Sequence
  Description of Artificial Sequence: Synthetic oligonucleotide
  Sense strand starting at position 3571 of SEQ ID NO: 588353
guggaaguuccucaacuuc

SEQ ID NO: 859201 - RNA, 19 nt, Artificial Sequence
  Description of Artificial Sequence: Synthetic oligonucleotide
  Antisense strand to SEQ ID NO: 859200
gaaguugaggaacuuccac

SEQ ID NO: 859202 - RNA, 19 nt, Artificial Sequence
  Description of Artificial Sequence: Synthetic oligonucleotide
  Sense strand starting at position 3662 of SEQ ID NO: 588353
uuccacucuccugguuauu

SEQ ID NO: 859203 - RNA, 19 nt, Artificial Sequence
  Description of Artificial Sequence: Synthetic oligonucleotide
  Antisense strand to SEQ ID NO: 859202
aauaaccaggagaguggaa

SEQ ID NO: 859204 - RNA, 19 nt, Artificial Sequence
  Description of Artificial Sequence: Synthetic oligonucleotide
  Sense strand starting at position 3675 of SEQ ID NO: 588353
guuauuguaggcuggcaau

SEQ ID NO: 859205 - RNA, 19 nt, Artificial Sequence
  Description of Artificial Sequence: Synthetic oligonucleotide
  Antisense strand to SEQ ID NO: 859204
auugccagccuacaauaac

SEQ ID NO: 859206 - RNA, 19 nt, Artificial Sequence
  Description of Artificial Sequence: Synthetic oligonucleotide
  Sense strand starting at position 3740 of SEQ ID NO: 588353
acccucucucgugaugauu

SEQ ID NO: 859207 - RNA, 19 nt, Artificial Sequence
  Description of Artificial Sequence: Synthetic oligonucleotide
  Antisense strand to SEQ ID NO: 859206
aaucaucacgagagagggu

SEQ ID NO: 859208 - RNA, 19 nt, Artificial Sequence
  Description of Artificial Sequence: Synthetic oligonucleotide
  Sense strand starting at position 3748 of SEQ ID NO: 588353
ucgugaugauugucagcau

SEQ ID NO: 859209 - RNA, 19 nt, Artificial Sequence
  Description of Artificial Sequence: Synthetic oligonucleotide
  Antisense strand to SEQ ID NO: 859208
augcugacaaucaucacga

SEQ ID NO: 859210 - RNA, 19 nt, Artificial Sequence
  Description of Artificial Sequence: Synthetic oligonucleotide
  Sense strand starting at position 3751 of SEQ ID NO: 588353
ugaugauugucagcaucua

SEQ ID NO: 859211 - RNA, 19 nt, Artificial Sequence
  Description of Artificial Sequence: Synthetic oligonucleotide
  Antisense strand to SEQ ID NO: 859210
uagaugcugacaaucauca

SEQ ID NO: 859212 - RNA, 19 nt, Artificial Sequence
  Description of Artificial Sequence: Synthetic oligonucleotide
  Sense strand starting at position 3752 of SEQ ID NO: 588353
gaugauugucagcaucuag

SEQ ID NO: 859213 - RNA, 19 nt, Artificial Sequence
  Description of Artificial Sequence: Synthetic oligonucleotide
  Antisense strand to SEQ ID NO: 859212
cuagaugcugacaaucauc

SEQ ID NO: 859214 - RNA, 19 nt, Artificial Sequence
  Description of Artificial Sequence: Synthetic oligonucleotide
  Sense strand starting at position 3761 of SEQ ID NO: 588353
cagcaucuagugugaaaga

SEQ ID NO: 859215 - RNA, 19 nt, Artificial Sequence
  Description of Artificial Sequence: Synthetic oligonucleotide
  Antisense strand to SEQ ID NO: 859214
ucuuucacacuagaugcug

SEQ ID NO: 859216 - RNA, 19 nt, Artificial Sequence
  Description of Artificial Sequence: Synthetic oligonucleotide
  Sense strand starting at position 3931 of SEQ ID NO: 588353
acuggauucucauucugau

SEQ ID NO: 859217 - RNA, 19 nt, Artificial Sequence
  Description of Artificial Sequence: Synthetic oligonucleotide
  Antisense strand to SEQ ID NO: 859216
aucagaaugagaauccagu

SEQ ID NO: 859218 - RNA, 19 nt, Artificial Sequence
  Description of Artificial Sequence: Synthetic oligonucleotide
  Sense strand starting at position 3966 of SEQ ID NO: 588353
ggccaugauagagguuuga

SEQ ID NO: 859219 - RNA, 19 nt, Artificial Sequence
  Description of Artificial Sequence: Synthetic oligonucleotide
  Antisense strand to SEQ ID NO: 859218
ucaaaccucuaucauggcc

SEQ ID NO: 859220 - RNA, 19 nt, Artificial Sequence
  Description of Artificial Sequence: Synthetic oligonucleotide
  Sense strand starting at position 262 of SEQ ID NO: 588354
ggaggcuuuccaggacuua

SEQ ID NO: 859221 - RNA, 19 nt, Artificial Sequence
  Description of Artificial Sequence: Synthetic oligonucleotide
  Antisense strand to SEQ ID NO: 859220
uaaguccuggaaagccucc

SEQ ID NO: 859222 - RNA, 19 nt, Artificial Sequence
  Description of Artificial Sequence: Synthetic oligonucleotide
  Sense strand starting at position 533 of SEQ ID NO: 588354
agaacacgguggugaaauu

SEQ ID NO: 859223 - RNA, 19 nt, Artificial Sequence
  Description of Artificial Sequence: Synthetic oligonucleotide
  Antisense strand to SEQ ID NO: 859222
aauuucaccaccguguucu

SEQ ID NO: 859224 - RNA, 19 nt, Artificial Sequence
  Description of Artificial Sequence: Synthetic oligonucleotide
  Sense strand starting at position 714 of SEQ ID NO: 588354
acucauuaauaaggaagaa

SEQ ID NO: 859225 - RNA, 19 nt, Artificial Sequence
  Description of Artificial Sequence: Synthetic oligonucleotide
  Antisense strand to SEQ ID NO: 859224
uucuuccuuauuaaugagu

SEQ ID NO: 859226 - RNA, 19 nt, Artificial Sequence
  Description of Artificial Sequence: Synthetic oligonucleotide
  Sense strand starting at position 776 of SEQ ID NO: 588354
gacagaugucugggaagca

SEQ ID NO: 859227 - RNA, 19 nt, Artificial Sequence
  Description of Artificial Sequence: Synthetic oligonucleotide
  Antisense strand to SEQ ID NO: 859226
ugcuucccagacaucuguc

SEQ ID NO: 859228 - RNA, 19 nt, Artificial Sequence
  Description of Artificial Sequence: Synthetic oligonucleotide
  Sense strand starting at position 777 of SEQ ID NO: 588354
acagaugucugggaagcaa

SEQ ID NO: 859229 - RNA, 19 nt, Artificial Sequence
  Description of Artificial Sequence: Synthetic oligonucleotide
  Antisense strand to SEQ ID NO: 859228
uugcuucccagacaucugu

SEQ ID NO: 859230 - RNA, 19 nt, Artificial Sequence
  Description of Artificial Sequence: Synthetic oligonucleotide
  Sense strand starting at position 864 of SEQ ID NO: 588354
agccgagauccucauccua

SEQ ID NO: 859231 - RNA, 19 nt, Artificial Sequence
  Description of Artificial Sequence: Synthetic oligonucleotide
  Antisense strand to SEQ ID NO: 859230
uaggaugaggaucucggcu

SEQ ID NO: 859232 - RNA, 19 nt, Artificial Sequence
  Description of Artificial Sequence: Synthetic oligonucleotide
  Sense strand starting at position 866 of SEQ ID NO: 588354
ccgagauccucauccuauc

SEQ ID NO: 859233 - RNA, 19 nt, Artificial Sequence
  Description of Artificial Sequence: Synthetic oligonucleotide
  Antisense strand to SEQ ID NO: 859232
gauaggaugaggaucucgg

SEQ ID NO: 859234 - RNA, 19 nt, Artificial Sequence
  Description of Artificial Sequence: Synthetic oligonucleotide
  Sense strand starting at position 883 of SEQ ID NO: 588354
ucucacuguucuccagagu

SEQ ID NO: 859235 - RNA, 19 nt, Artificial Sequence
  Description of Artificial Sequence: Synthetic oligonucleotide
  Antisense strand to SEQ ID NO: 859234
acucuggagaacagugaga

SEQ ID NO: 859236 - RNA, 19 nt, Artificial Sequence
  Description of Artificial Sequence: Synthetic oligonucleotide
  Sense strand starting at position 961 of SEQ ID NO: 588354
gacagcugucccugggaga

SEQ ID NO: 859237 - RNA, 19 nt, Artificial Sequence
  Description of Artificial Sequence: Synthetic oligonucleotide
  Antisense strand to SEQ ID NO: 859236
ucucccagggacagcuguc

SEQ ID NO: 859238 - RNA, 19 nt, Artificial Sequence
  Description of Artificial Sequence: Synthetic oligonucleotide
  Sense strand starting at position 962 of SEQ ID NO: 588354
acagcugucccugggagaa

SEQ ID NO: 859239 - RNA, 19 nt, Artificial Sequence
  Description of Artificial Sequence: Synthetic oligonucleotide
  Antisense strand to SEQ ID NO: 859238
uucucccagggacagcugu

SEQ ID NO: 859240 - RNA, 19 nt, Artificial Sequence
  Description of Artificial Sequence: Synthetic oligonucleotide
  Sense strand starting at position 992 of SEQ ID NO: 588354
gcaguaauaggcugagagu

SEQ ID NO: 859241 - RNA, 19 nt, Artificial Sequence
  Description of Artificial Sequence: Synthetic oligonucleotide
  Antisense strand to SEQ ID NO: 859240
acucucagccuauuacugc

SEQ ID NO: 859242 - RNA, 19 nt, Artificial Sequence
  Description of Artificial Sequence: Synthetic oligonucleotide
  Sense strand starting at position 993 of SEQ ID NO: 588354
caguaauaggcugagagua

SEQ ID NO: 859243 - RNA, 19 nt, Artificial Sequence
  Description of Artificial Sequence: Synthetic oligonucleotide
  Antisense strand to SEQ ID NO: 859242
uacucucagccuauuacug

SEQ ID NO: 859244 - RNA, 19 nt, Artificial Sequence
  Description of Artificial Sequence: Synthetic oligonucleotide
  Sense strand starting at position 1495 of SEQ ID NO: 588354
aaagguggcgcucagaaga

SEQ ID NO: 859245 - RNA, 19 nt, Artificial Sequence
  Description of Artificial Sequence: Synthetic oligonucleotide
  Antisense strand to SEQ ID NO: 859244
ucuucugagcgccaccuuu

SEQ ID NO: 859246 - RNA, 19 nt, Artificial Sequence
  Description of Artificial Sequence: Synthetic oligonucleotide
  Sense strand starting at position 2744 of SEQ ID NO: 588354
gcaguagcacuuuacaguu

SEQ ID NO: 859247 - RNA, 19 nt, Artificial Sequence
  Description of Artificial Sequence: Synthetic oligonucleotide
  Antisense strand to SEQ ID NO: 859246
aacuguaaagugcuacugc

SEQ ID NO: 859248 - RNA, 19 nt, Artificial Sequence
  Description of Artificial Sequence: Synthetic oligonucleotide
  Sense strand starting at position 2894 of SEQ ID NO: 588354
cagguuaaccagugggauc

SEQ ID NO: 859249 - RNA, 19 nt, Artificial Sequence
  Description of Artificial Sequence: Synthetic oligonucleotide
  Antisense strand to SEQ ID NO: 859248
gaucccacugguuaaccug

SEQ ID NO: 859250 - RNA, 19 nt, Artificial Sequence
  Description of Artificial Sequence: Synthetic oligonucleotide
  Sense strand starting at position 2976 of SEQ ID NO: 588354
uccacuuucugcuuguuga

SEQ ID NO: 859251 - RNA, 19 nt, Artificial Sequence
  Description of Artificial Sequence: Synthetic oligonucleotide
  Antisense strand to SEQ ID NO: 859250
ucaacaagcagaaagugga

SEQ ID NO: 859252 - RNA, 19 nt, Artificial Sequence
  Description of Artificial Sequence: Synthetic oligonucleotide
  Sense strand starting at position 3082 of SEQ ID NO: 588354
aagugaugaugauaacagu

SEQ ID NO: 859253 - RNA, 19 nt, Artificial Sequence
  Description of Artificial Sequence: Synthetic oligonucleotide
  Antisense strand to SEQ ID NO: 859252
acuguuaucaucaucacuu

SEQ ID NO: 859254 - RNA, 19 nt, Artificial Sequence
  Description of Artificial Sequence: Synthetic oligonucleotide
  Sense strand starting at position 3085 of SEQ ID NO: 588354
ugaugaugauaacaguuaa

SEQ ID NO: 859255 - RNA, 19 nt, Artificial Sequence
  Description of Artificial Sequence: Synthetic oligonucleotide
  Antisense strand to SEQ ID NO: 859254
uuaacuguuaucaucauca

SEQ ID NO: 859256 - RNA, 19 nt, Artificial Sequence
  Description of Artificial Sequence: Synthetic oligonucleotide
  Sense strand starting at position 3097 of SEQ ID NO: 588354
caguuaaauuugcugagca

SEQ ID NO: 859257 - RNA, 19 nt, Artificial Sequence
  Description of Artificial Sequence: Synthetic oligonucleotide
  Antisense strand to SEQ ID NO: 859256
ugcucagcaaauuuaacug

SEQ ID NO: 859258 - RNA, 19 nt, Artificial Sequence
  Description of Artificial Sequence: Synthetic oligonucleotide
  Sense strand starting at position 3098 of SEQ ID NO: 588354
aguuaaauuugcugagcac

SEQ ID NO: 859259 - RNA, 19 nt, Artificial Sequence
  Description of Artificial Sequence: Synthetic oligonucleotide
  Antisense strand to SEQ ID NO: 859258
gugcucagcaaauuuaacu

SEQ ID NO: 859260 - RNA, 19 nt, Artificial Sequence
  Description of Artificial Sequence: Synthetic oligonucleotide
  Sense strand starting at position 3148 of SEQ ID NO: 588354
guagguuugaaauggauua

SEQ ID NO: 859261 - RNA, 19 nt, Artificial Sequence
  Description of Artificial Sequence: Synthetic oligonucleotide
  Antisense strand to SEQ ID NO: 859260
uaauccauuucaaaccuac

SEQ ID NO: 859262 - RNA, 19 nt, Artificial Sequence
  Description of Artificial Sequence: Synthetic oligonucleotide
  Sense strand starting at position 3376 of SEQ ID NO: 588354
gcgggaggguuaaaugaua

SEQ ID NO: 859263 - RNA, 19 nt, Artificial Sequence
  Description of Artificial Sequence: Synthetic oligonucleotide
  Antisense strand to SEQ ID NO: 859262
uaucauuuaacccucccgc

SEQ ID NO: 859264 - RNA, 19 nt, Artificial Sequence
  Description of Artificial Sequence: Synthetic oligonucleotide
  Sense strand starting at position 3384 of SEQ ID NO: 588354
guuaaaugauaucacaaag

SEQ ID NO: 859265 - RNA, 19 nt, Artificial Sequence
  Description of Artificial Sequence: Synthetic oligonucleotide
  Antisense strand to SEQ ID NO: 859264
cuuugugauaucauuuaac

SEQ ID NO: 859266 - RNA, 19 nt, Artificial Sequence
  Description of Artificial Sequence: Synthetic oligonucleotide
  Sense strand starting at position 3428 of SEQ ID NO: 588354
gguccaucaucucucaaug

SEQ ID NO: 859267 - RNA, 19 nt, Artificial Sequence
  Description of Artificial Sequence: Synthetic oligonucleotide
  Antisense strand to SEQ ID NO: 859266
cauugagagaugauggacc

SEQ ID NO: 859268 - RNA, 19 nt, Artificial Sequence
  Description of Artificial Sequence: Synthetic oligonucleotide
  Sense strand starting at position 3444 of SEQ ID NO: 588354
augaacagaacgugucauu

SEQ ID NO: 859269 - RNA, 19 nt, Artificial Sequence
  Description of Artificial Sequence: Synthetic oligonucleotide
  Antisense strand to SEQ ID NO: 859268
aaugacacguucuguucau

SEQ ID NO: 859270 - RNA, 19 nt, Artificial Sequence
  Description of Artificial Sequence: Synthetic oligonucleotide
  Sense strand starting at position 3447 of SEQ ID NO: 588354
aacagaacgugucauucua

SEQ ID NO: 859271 - RNA, 19 nt, Artificial Sequence
  Description of Artificial Sequence: Synthetic oligonucleotide
  Antisense strand to SEQ ID NO: 859270
uagaaugacacguucuguu

SEQ ID NO: 859272 - RNA, 19 nt, Artificial Sequence
  Description of Artificial Sequence: Synthetic oligonucleotide
  Sense strand starting at position 3449 of SEQ ID NO: 588354
cagaacgugucauucuauu

SEQ ID NO: 859273 - RNA, 19 nt, Artificial Sequence
  Description of Artificial Sequence: Synthetic oligonucleotide
  Antisense strand to SEQ ID NO: 859272
aauagaaugacacguucug

SEQ ID NO: 859274 - RNA, 19 nt, Artificial Sequence
  Description of Artificial Sequence: Synthetic oligonucleotide
  Sense strand starting at position 3664 of SEQ ID NO: 588354
gcauucaugcgucaaagag

SEQ ID NO: 859275 - RNA, 19 nt, Artificial Sequence
  Description of Artificial Sequence: Synthetic oligonucleotide
  Antisense strand to SEQ ID NO: 859274
cucuuugacgcaugaaugc

SEQ ID NO: 859276 - RNA, 19 nt, Artificial Sequence
  Description of Artificial Sequence: Synthetic oligonucleotide
  Sense strand starting at position 3668 of SEQ ID NO: 588354
ucaugcgucaaagagucau

SEQ ID NO: 859277 - RNA, 19 nt, Artificial Sequence
  Description of Artificial Sequence: Synthetic oligonucleotide
  Antisense strand to SEQ ID NO: 859276
augacucuuugacgcauga

SEQ ID NO: 859278 - RNA, 19 nt, Artificial Sequence
  Description of Artificial Sequence: Synthetic oligonucleotide
  Sense strand starting at position 3672 of SEQ ID NO: 588354
gcgucaaagagucaucauc

SEQ ID NO: 859279 - RNA, 19 nt, Artificial Sequence
  Description of Artificial Sequence: Synthetic oligonucleotide
  Antisense strand to SEQ ID NO: 859278
gaugaugacucuuugacgc

SEQ ID NO: 859280 - RNA, 19 nt, Artificial Sequence
  Description of Artificial Sequence: Synthetic oligonucleotide
  Sense strand starting at position 3674 of SEQ ID NO: 588354
gucaaagagucaucaucag

SEQ ID NO: 859281 - RNA, 19 nt, Artificial Sequence
  Description of Artificial Sequence: Synthetic oligonucleotide
  Antisense strand to SEQ ID NO: 859280
cugaugaugacucuuugac

SEQ ID NO: 859282 - RNA, 19 nt, Artificial Sequence
  Description of Artificial Sequence: Synthetic oligonucleotide
  Sense strand starting at position 3682 of SEQ ID NO: 588354
gucaucaucagguggaguu

SEQ ID NO: 859283 - RNA, 19 nt, Artificial Sequence
  Description of Artificial Sequence: Synthetic oligonucleotide
  Antisense strand to SEQ ID NO: 859282
aacuccaccugaugaugac

SEQ ID NO: 859284 - RNA, 19 nt, Artificial Sequence
  Description of Artificial Sequence: Synthetic oligonucleotide
  Sense strand starting at position 3702 of SEQ ID NO: 588354
aagucaugcugguuaggga

SEQ ID NO: 859285 - RNA, 19 nt, Artificial Sequence
  Description of Artificial Sequence: Synthetic oligonucleotide
  Antisense strand to SEQ ID NO: 859284
ucccuaaccagcaugacuu

SEQ ID NO: 859286 - RNA, 19 nt, Artificial Sequence
  Description of Artificial Sequence: Synthetic oligonucleotide
  Sense strand starting at position 3703 of SEQ ID NO: 588354
agucaugcugguuagggau

SEQ ID NO: 859287 - RNA, 19 nt, Artificial Sequence
  Description of Artificial Sequence: Synthetic oligonucleotide
  Antisense strand to SEQ ID NO: 859286
aucccuaaccagcaugacu

SEQ ID NO: 859288 - RNA, 19 nt, Artificial Sequence
  Description of Artificial Sequence: Synthetic oligonucleotide
  Sense strand starting at position 3710 of SEQ ID NO: 588354
cugguuagggaucacuagu

SEQ ID NO: 859289 - RNA, 19 nt, Artificial Sequence
  Description of Artificial Sequence: Synthetic oligonucleotide
  Antisense strand to SEQ ID NO: 859288
acuagugaucccuaaccag

SEQ ID NO: 859290 - RNA, 19 nt, Artificial Sequence
  Description of Artificial Sequence: Synthetic oligonucleotide
  Sense strand starting at position 3762 of SEQ ID NO: 588354
gagggaaagugacuugcua

SEQ ID NO: 859291 - RNA, 19 nt, Artificial Sequence
  Description of Artificial Sequence: Synthetic oligonucleotide
  Antisense strand to SEQ ID NO: 859290
uagcaagucacuuucccuc

SEQ ID NO: 859292 - RNA, 19 nt, Artificial Sequence
  Description of Artificial Sequence: Synthetic oligonucleotide
  Sense strand starting at position 3764 of SEQ ID NO: 588354
gggaaagugacuugcuaag

SEQ ID NO: 859293 - RNA, 19 nt, Artificial Sequence
  Description of Artificial Sequence: Synthetic oligonucleotide
  Antisense strand to SEQ ID NO: 859292
cuuagcaagucacuuuccc

SEQ ID NO: 859294 - RNA, 19 nt, Artificial Sequence
  Description of Artificial Sequence: Synthetic oligonucleotide
  Sense strand starting at position 3841 of SEQ ID NO: 588354
gucugauucucucugagca

SEQ ID NO: 859295 - RNA, 19 nt, Artificial Sequence
  Description of Artificial Sequence: Synthetic oligonucleotide
  Antisense strand to SEQ ID NO: 859294
ugcucagagagaaucagac

SEQ ID NO: 859296 - RNA, 19 nt, Artificial Sequence
  Description of Artificial Sequence: Synthetic oligonucleotide
  Sense strand starting at position 3842 of SEQ ID NO: 588354
ucugauucucucugagcaa

SEQ ID NO: 859297 - RNA, 19 nt, Artificial Sequence
  Description of Artificial Sequence: Synthetic oligonucleotide
  Antisense strand to SEQ ID NO: 859296
uugcucagagagaaucaga

SEQ ID NO: 859298 - RNA, 19 nt, Artificial Sequence
  Description of Artificial Sequence: Synthetic oligonucleotide
  Sense strand starting at position 3843 of SEQ ID NO: 588354
cugauucucucugagcaac

SEQ ID NO: 859299 - RNA, 19 nt, Artificial Sequence
  Description of Artificial Sequence: Synthetic oligonucleotide
  Antisense strand to SEQ ID NO: 859298
guugcucagagagaaucag

SEQ ID NO: 859300 - RNA, 19 nt, Artificial Sequence
  Description of Artificial Sequence: Synthetic oligonucleotide
  Sense strand starting at position 138 of SEQ ID NO: 588355
agggcaugguuuccaaauu

SEQ ID NO: 859301 - RNA, 19 nt, Artificial Sequence
  Description of Artificial Sequence: Synthetic oligonucleotide
  Antisense strand to SEQ ID NO: 859300
aauuuggaaaccaugcccu

SEQ ID NO: 859302 - RNA, 19 nt, Artificial Sequence
  Description of Artificial Sequence: Synthetic oligonucleotide
  Sense strand starting at position 344 of SEQ ID NO: 588355
cuccaagacucugaggaaa

SEQ ID NO: 859303 - RNA, 19 nt, Artificial Sequence
  Description of Artificial Sequence: Synthetic oligonucleotide
  Antisense strand to SEQ ID NO: 859302
uuuccucagagucuuggag

SEQ ID NO: 859304 - RNA, 19 nt, Artificial Sequence
  Description of Artificial Sequence: Synthetic oligonucleotide
  Sense strand starting at position 455 of SEQ ID NO: 588355
ucuggaaacuauuggaaca

SEQ ID NO: 859305 - RNA, 19 nt, Artificial Sequence
  Description of Artificial Sequence: Synthetic oligonucleotide
  Antisense strand to SEQ ID NO: 859304
uguuccaauaguuuccaga

SEQ ID NO: 859306 - RNA, 19 nt, Artificial Sequence
  Description of Artificial Sequence: Synthetic oligonucleotide
  Sense strand starting at position 498 of SEQ ID NO: 588355
augagaagaugugaaauca

SEQ ID NO: 859307 - RNA, 19 nt, Artificial Sequence
  Description of Artificial Sequence: Synthetic oligonucleotide
  Antisense strand to SEQ ID NO: 859306
ugauuucacaucuucucau

SEQ ID NO: 859308 - RNA, 19 nt, Artificial Sequence
  Description of Artificial Sequence: Synthetic oligonucleotide
  Sense strand starting at position 626 of SEQ ID NO: 588355
ugaauacauugagaggaga

SEQ ID NO: 859309 - RNA, 19 nt, Artificial Sequence
  Description of Artificial Sequence: Synthetic oligonucleotide
  Antisense strand to SEQ ID NO: 859308
ucuccucucaauguauuca

SEQ ID NO: 859310 - RNA, 19 nt, Artificial Sequence
  Description of Artificial Sequence: Synthetic oligonucleotide
  Sense strand starting at position 733 of SEQ ID NO: 588355
acacguuaacaguaggaau

SEQ ID NO: 859311 - RNA, 19 nt, Artificial Sequence
  Description of Artificial Sequence: Synthetic oligonucleotide
  Antisense strand to SEQ ID NO: 859310
auuccuacuguuaacgugu

SEQ ID NO: 859312 - RNA, 19 nt, Artificial Sequence
  Description of Artificial Sequence: Synthetic oligonucleotide
  Sense strand starting at position 735 of SEQ ID NO: 588355
acguuaacaguaggaauua

SEQ ID NO: 859313 - RNA, 19 nt, Artificial Sequence
  Description of Artificial Sequence: Synthetic oligonucleotide
  Antisense strand to SEQ ID NO: 859312
uaauuccuacuguuaacgu

SEQ ID NO: 859314 - RNA, 19 nt, Artificial Sequence
  Description of Artificial Sequence: Synthetic oligonucleotide
  Sense strand starting at position 1227 of SEQ ID NO: 588355
aucauauuaugcuuugaga

SEQ ID NO: 859315 - RNA, 19 nt, Artificial Sequence
  Description of Artificial Sequence: Synthetic oligonucleotide
  Antisense strand to SEQ ID NO: 859314
ucucaaagcauaauaugau

SEQ ID NO: 859316 - RNA, 19 nt, Artificial Sequence
  Description of Artificial Sequence: Synthetic oligonucleotide
  Sense strand starting at position 1229 of SEQ ID NO: 588355
cauauuaugcuuugagagg

SEQ ID NO: 859317 - RNA, 19 nt, Artificial Sequence
  Description of Artificial Sequence: Synthetic oligonucleotide
  Antisense strand to SEQ ID NO: 859316
ccucucaaagcauaauaug

SEQ ID NO: 859318 - RNA, 19 nt, Artificial Sequence
  Description of Artificial Sequence: Synthetic oligonucleotide
  Sense strand starting at position 1259 of SEQ ID NO: 588355
gccuauuguuaggcaaaua

SEQ ID NO: 859319 - RNA, 19 nt, Artificial Sequence
  Description of Artificial Sequence: Synthetic oligonucleotide
  Antisense strand to SEQ ID NO: 859318
uauuugccuaacaauaggc

SEQ ID NO: 859320 - RNA, 19 nt, Artificial Sequence
  Description of Artificial Sequence: Synthetic oligonucleotide
  Sense strand starting at position 1274 of SEQ ID NO: 588355
aauagaccgcagcaagauu

SEQ ID NO: 859321 - RNA, 19 nt, Artificial Sequence
  Description of Artificial Sequence: Synthetic oligonucleotide
  Antisense strand to SEQ ID NO: 859320
aaucuugcugcggucuauu

SEQ ID NO: 859322 - RNA, 19 nt, Artificial Sequence
  Description of Artificial Sequence: Synthetic oligonucleotide
  Sense strand starting at position 1319 of SEQ ID NO: 588355
uuuaguaucuguguaacuu

SEQ ID NO: 859323 - RNA, 19 nt, Artificial Sequence
  Description of Artificial Sequence: Synthetic oligonucleotide
  Antisense strand to SEQ ID NO: 859322
aaguuacacagauacuaaa

SEQ ID NO: 859324 - RNA, 19 nt, Artificial Sequence
  Description of Artificial Sequence: Synthetic oligonucleotide
  Sense strand starting at position 1320 of SEQ ID NO: 588355
uuaguaucuguguaacuug

SEQ ID NO: 859325 - RNA, 19 nt, Artificial Sequence
  Description of Artificial Sequence: Synthetic oligonucleotide
  Antisense strand to SEQ ID NO: 859324
caaguuacacagauacuaa

SEQ ID NO: 859326 - RNA, 19 nt, Artificial Sequence
  Description of Artificial Sequence: Synthetic oligonucleotide
  Sense strand starting at position 1327 of SEQ ID NO: 588355
cuguguaacuuggucaagu

SEQ ID NO: 859327 - RNA, 19 nt, Artificial Sequence
  Description of Artificial Sequence: Synthetic oligonucleotide
  Antisense strand to SEQ ID NO: 859326
acuugaccaaguuacacag

SEQ ID NO: 859328 - RNA, 19 nt, Artificial Sequence
  Description of Artificial Sequence: Synthetic oligonucleotide
  Sense strand starting at position 1328 of SEQ ID NO: 588355
uguguaacuuggucaagug

SEQ ID NO: 859329 - RNA, 19 nt, Artificial Sequence
  Description of Artificial Sequence: Synthetic oligonucleotide
  Antisense strand to SEQ ID NO: 859328
cacuugaccaaguuacaca

SEQ ID NO: 859330 - RNA, 19 nt, Artificial Sequence
  Description of Artificial Sequence: Synthetic oligonucleotide
  Sense strand starting at position 1329 of SEQ ID NO: 588355
guguaacuuggucaaguga

SEQ ID NO: 859331 - RNA, 19 nt, Artificial Sequence
  Description of Artificial Sequence: Synthetic oligonucleotide
  Antisense strand to SEQ ID NO: 859330
ucacuugaccaaguuacac

SEQ ID NO: 859332 - RNA, 19 nt, Artificial Sequence
  Description of Artificial Sequence: Synthetic oligonucleotide
  Sense strand starting at position 1419 of SEQ ID NO: 588355
ggaacuaaugccugggauu

SEQ ID NO: 859333 - RNA, 19 nt, Artificial Sequence
  Description of Artificial Sequence: Synthetic oligonucleotide
  Antisense strand to SEQ ID NO: 859332
aaucccaggcauuaguucc

SEQ ID NO: 859334 - RNA, 19 nt, Artificial Sequence
  Description of Artificial Sequence: Synthetic oligonucleotide
  Sense strand starting at position 1420 of SEQ ID NO: 588355
gaacuaaugccugggauuc

SEQ ID NO: 859335 - RNA, 19 nt, Artificial Sequence
  Description of Artificial Sequence: Synthetic oligonucleotide
  Antisense strand to SEQ ID NO: 859334
gaaucccaggcauuaguuc

SEQ ID NO: 859336 - RNA, 19 nt, Artificial Sequence
  Description of Artificial Sequence: Synthetic oligonucleotide
  Sense strand starting at position 1442 of SEQ ID NO: 588355
auuaucauuuccucgagcu

SEQ ID NO: 859337 - RNA, 19 nt, Artificial Sequence
  Description of Artificial Sequence: Synthetic oligonucleotide
  Antisense strand to SEQ ID NO: 859336
agcucgaggaaaugauaau

SEQ ID NO: 859338 - RNA, 19 nt, Artificial Sequence
  Description of Artificial Sequence: Synthetic oligonucleotide
  Sense strand starting at position 1443 of SEQ ID NO: 588355
uuaucauuuccucgagcuu

SEQ ID NO: 859339 - RNA, 19 nt, Artificial Sequence
  Description of Artificial Sequence: Synthetic oligonucleotide
  Antisense strand to SEQ ID NO: 859338
aagcucgaggaaaugauaa

SEQ ID NO: 859340 - RNA, 19 nt, Artificial Sequence
  Description of Artificial Sequence: Synthetic oligonucleotide
  Sense strand starting at position 1450 of SEQ ID NO: 588355
uuccucgagcuuuggaauu

SEQ ID NO: 859341 - RNA, 19 nt, Artificial Sequence
  Description of Artificial Sequence: Synthetic oligonucleotide
  Antisense strand to SEQ ID NO: 859340
aauuccaaagcucgaggaa

SEQ ID NO: 859342 - RNA, 19 nt, Artificial Sequence
  Description of Artificial Sequence: Synthetic oligonucleotide
  Sense strand starting at position 1479 of SEQ ID NO: 588355
auucuaaagucugagauua

SEQ ID NO: 859343 - RNA, 19 nt, Artificial Sequence
  Description of Artificial Sequence: Synthetic oligonucleotide
  Antisense strand to SEQ ID NO: 859342
uaaucucagacuuuagaau

SEQ ID NO: 859344 - RNA, 19 nt, Artificial Sequence
  Description of Artificial Sequence: Synthetic oligonucleotide
  Sense strand starting at position 1546 of SEQ ID NO: 588355
ggaugucuccuaggaggga

SEQ ID NO: 859345 - RNA, 19 nt, Artificial Sequence
  Description of Artificial Sequence: Synthetic oligonucleotide
  Antisense strand to SEQ ID NO: 859344
ucccuccuaggagacaucc

SEQ ID NO: 859346 - RNA, 19 nt, Artificial Sequence
  Description of Artificial Sequence: Synthetic oligonucleotide
  Sense strand starting at position 1555 of SEQ ID NO: 588355
cuaggagggacuugcuauu

SEQ ID NO: 859347 - RNA, 19 nt, Artificial Sequence
  Description of Artificial Sequence: Synthetic oligonucleotide
  Antisense strand to SEQ ID NO: 859346
aauagcaagucccuccuag

SEQ ID NO: 859348 - RNA, 19 nt, Artificial Sequence
  Description of Artificial Sequence: Synthetic oligonucleotide
  Sense strand starting at position 1892 of SEQ ID NO: 588355
gaccgaaguccucgagcuu

SEQ ID NO: 859349 - RNA, 19 nt, Artificial Sequence
  Description of Artificial Sequence: Synthetic oligonucleotide
  Antisense strand to SEQ ID NO: 859348
aagcucgaggacuucgguc

SEQ ID NO: 859350 - RNA, 19 nt, Artificial Sequence
  Description of Artificial Sequence: Synthetic oligonucleotide
  Sense strand starting at position 3691 of SEQ ID NO: 588355
acuugaaagugcuuaauau

SEQ ID NO: 859351 - RNA, 19 nt, Artificial Sequence
  Description of Artificial Sequence: Synthetic oligonucleotide
  Antisense strand to SEQ ID NO: 859350
auauuaagcacuuucaagu

SEQ ID NO: 859352 - RNA, 19 nt, Artificial Sequence
  Description of Artificial Sequence: Synthetic oligonucleotide
  Sense strand starting at position 3692 of SEQ ID NO: 588355
cuugaaagugcuuaauaug

SEQ ID NO: 859353 - RNA, 19 nt, Artificial Sequence
  Description of Artificial Sequence: Synthetic oligonucleotide
  Antisense strand to SEQ ID NO: 859352
cauauuaagcacuuucaag

SEQ ID NO: 859354 - RNA, 19 nt, Artificial Sequence
  Description of Artificial Sequence: Synthetic oligonucleotide
  Sense strand starting at position 3733 of SEQ ID NO: 588355
ccacaaguauugcuugacu

SEQ ID NO: 859355 - RNA, 19 nt, Artificial Sequence
  Description of Artificial Sequence: Synthetic oligonucleotide
  Antisense strand to SEQ ID NO: 859354
agucaagcaauacuugugg

SEQ ID NO: 859356 - RNA, 19 nt, Artificial Sequence
  Description of Artificial Sequence: Synthetic oligonucleotide
  Sense strand starting at position 3738 of SEQ ID NO: 588355
aguauugcuugacuggcaa

SEQ ID NO: 859357 - RNA, 19 nt, Artificial Sequence
  Description of Artificial Sequence: Synthetic oligonucleotide
  Antisense strand to SEQ ID NO: 859356
uugccagucaagcaauacu

SEQ ID NO: 859358 - RNA, 19 nt, Artificial Sequence
  Description of Artificial Sequence: Synthetic oligonucleotide
  Sense strand starting at position 3742 of SEQ ID NO: 588355
uugcuugacuggcaaauuu

SEQ ID NO: 859359 - RNA, 19 nt, Artificial Sequence
  Description of Artificial Sequence: Synthetic oligonucleotide
  Antisense strand to SEQ ID NO: 859358
aaauuugccagucaagcaa

SEQ ID NO: 859360 - RNA, 19 nt, Artificial Sequence
  Description of Artificial Sequence: Synthetic oligonucleotide
  Sense strand starting at position 3787 of SEQ ID NO: 588355
uuuagugauguuugguaac

SEQ ID NO: 859361 - RNA, 19 nt, Artificial Sequence
  Description of Artificial Sequence: Synthetic oligonucleotide
  Antisense strand to SEQ ID NO: 859360
guuaccaaacaucacuaaa

SEQ ID NO: 859362 - RNA, 19 nt, Artificial Sequence
  Description of Artificial Sequence: Synthetic oligonucleotide
  Sense strand starting at position 3789 of SEQ ID NO: 588355
uagugauguuugguaacag

SEQ ID NO: 859363 - RNA, 19 nt, Artificial Sequence
  Description of Artificial Sequence: Synthetic oligonucleotide
  Antisense strand to SEQ ID NO: 859362
cuguuaccaaacaucacua

SEQ ID NO: 859364 - RNA, 19 nt, Artificial Sequence
  Description of Artificial Sequence: Synthetic oligonucleotide
  Sense strand starting at position 3797 of SEQ ID NO: 588355
uuugguaacagcuguagaa

SEQ ID NO: 859365 - RNA, 19 nt, Artificial Sequence
  Description of Artificial Sequence: Synthetic oligonucleotide
  Antisense strand to SEQ ID NO: 859364
uucuacagcuguuaccaaa

SEQ ID NO: 859366 - RNA, 19 nt, Artificial Sequence
  Description of Artificial Sequence: Synthetic oligonucleotide
  Sense strand starting at position 3809 of SEQ ID NO: 588355
uguagaagcgcuuaugcua

SEQ ID NO: 859367 - RNA, 19 nt, Artificial Sequence
  Description of Artificial Sequence: Synthetic oligonucleotide
  Antisense strand to SEQ ID NO: 859366
uagcauaagcgcuucuaca

SEQ ID NO: 859368 - RNA, 19 nt, Artificial Sequence
  Description of Artificial Sequence: Synthetic oligonucleotide
  Sense strand starting at position 3818 of SEQ ID NO: 588355
gcuuaugcuauggacugaa

SEQ ID NO: 859369 - RNA, 19 nt, Artificial Sequence
  Description of Artificial Sequence: Synthetic oligonucleotide
  Antisense strand to SEQ ID NO: 859368
uucaguccauagcauaagc

SEQ ID NO: 859370 - RNA, 19 nt, Artificial Sequence
  Description of Artificial Sequence: Synthetic oligonucleotide
  Sense strand starting at position 3839 of SEQ ID NO: 588355
uagaccaccugaguuagua

SEQ ID NO: 859371 - RNA, 19 nt, Artificial Sequence
  Description of Artificial Sequence: Synthetic oligonucleotide
  Antisense strand to SEQ ID NO: 859370
uacuaacucagguggucua

SEQ ID NO: 859372 - RNA, 19 nt, Artificial Sequence
  Description of Artificial Sequence: Synthetic oligonucleotide
  Sense strand starting at position 3872 of SEQ ID NO: 588355
cuuacuagcucugugaaca

SEQ ID NO: 859373 - RNA, 19 nt, Artificial Sequence
  Description of Artificial Sequence: Synthetic oligonucleotide
  Antisense strand to SEQ ID NO: 859372
uguucacagagcuaguaag

SEQ ID NO: 859374 - RNA, 19 nt, Artificial Sequence
  Description of Artificial Sequence: Synthetic oligonucleotide
  Sense strand starting at position 3873 of SEQ ID NO: 588355
uuacuagcucugugaacau

SEQ ID NO: 859375 - RNA, 19 nt, Artificial Sequence
  Description of Artificial Sequence: Synthetic oligonucleotide
  Antisense strand to SEQ ID NO: 859374
auguucacagagcuaguaa

SEQ ID NO: 859376 - RNA, 19 nt, Artificial Sequence
  Description of Artificial Sequence: Synthetic oligonucleotide
  Sense strand starting at position 3882 of SEQ ID NO: 588355
cugugaacaugggcaaaua

SEQ ID NO: 859377 - RNA, 19 nt, Artificial Sequence
  Description of Artificial Sequence: Synthetic oligonucleotide
  Antisense strand to SEQ ID NO: 859376
uauuugcccauguucacag

SEQ ID NO: 859378 - RNA, 19 nt, Artificial Sequence
  Description of Artificial Sequence: Synthetic oligonucleotide
  Sense strand starting at position 3940 of SEQ ID NO: 588355
gggucagaauacuacuuua

SEQ ID NO: 859379 - RNA, 19 nt, Artificial Sequence
  Description of Artificial Sequence: Synthetic oligonucleotide
  Antisense strand to SEQ ID NO: 859378
uaaaguaguauucugaccc

SEQ ID NO: 859380 - RNA, 19 nt, Artificial Sequence
  Description of Artificial Sequence: Synthetic oligonucleotide
  Sense strand starting at position 75 of SEQ ID NO: 588356
aggcgaucaccugagauca

SEQ ID NO: 859381 - RNA, 19 nt, Artificial Sequence
  Description of Artificial Sequence: Synthetic oligonucleotide
  Antisense strand to SEQ ID NO: 859380
ugaucucaggugaucgccu

SEQ ID NO: 859382 - RNA, 19 nt, Artificial Sequence
  Description of Artificial Sequence: Synthetic oligonucleotide
  Sense strand starting at position 348 of SEQ ID NO: 588356
gguaacauguaguccuaga

SEQ ID NO: 859383 - RNA, 19 nt, Artificial Sequence
  Description of Artificial Sequence: Synthetic oligonucleotide
  Antisense strand to SEQ ID NO: 859382
ucuaggacuacauguuacc

SEQ ID NO: 859384 - RNA, 19 nt, Artificial Sequence
  Description of Artificial Sequence: Synthetic oligonucleotide
  Sense strand starting at position 516 of SEQ ID NO: 588356
gccugagcaacugauaguu

SEQ ID NO: 859385 - RNA, 19 nt, Artificial Sequence
  Description of Artificial Sequence: Synthetic oligonucleotide
  Antisense strand to SEQ ID NO: 859384
aacuaucaguugcucaggc

SEQ ID NO: 859386 - RNA, 19 nt, Artificial Sequence
  Description of Artificial Sequence: Synthetic oligonucleotide
  Sense strand starting at position 581 of SEQ ID NO: 588356
auuuauugaugccagagau

SEQ ID NO: 859387 - RNA, 19 nt, Artificial Sequence
  Description of Artificial Sequence: Synthetic oligonucleotide
  Antisense strand to SEQ ID NO: 859386
aucucuggcaucaauaaau

SEQ ID NO: 859388 - RNA, 19 nt, Artificial Sequence
  Description of Artificial Sequence: Synthetic oligonucleotide
  Sense strand starting at position 597 of SEQ ID NO: 588356
gauauagaagguugcugau

SEQ ID NO: 859389 - RNA, 19 nt, Artificial Sequence
  Description of Artificial Sequence: Synthetic oligonucleotide
  Antisense strand to SEQ ID NO: 859388
aucagcaaccuucuauauc

SEQ ID NO: 859390 - RNA, 19 nt, Artificial Sequence
  Description of Artificial Sequence: Synthetic oligonucleotide
  Sense strand starting at position 805 of SEQ ID NO: 588356
cgacuaugaccuggaguuu

SEQ ID NO: 859391 - RNA, 19 nt, Artificial Sequence
  Description of Artificial Sequence: Synthetic oligonucleotide
  Antisense strand to SEQ ID NO: 859390
aaacuccaggucauagucg

SEQ ID NO: 859392 - RNA, 19 nt, Artificial Sequence
  Description of Artificial Sequence: Synthetic oligonucleotide
  Sense strand starting at position 814 of SEQ ID NO: 588356
ccuggaguuuaguuaccaa

SEQ ID NO: 859393 - RNA, 19 nt, Artificial Sequence
  Description of Artificial Sequence: Synthetic oligonucleotide
  Antisense strand to SEQ ID NO: 859392
uugguaacuaaacuccagg

SEQ ID NO: 859394 - RNA, 19 nt, Artificial Sequence
  Description of Artificial Sequence: Synthetic oligonucleotide
  Sense strand starting at position 817 of SEQ ID NO: 588356
ggaguuuaguuaccaaucu

SEQ ID NO: 859395 - RNA, 19 nt, Artificial Sequence
  Description of Artificial Sequence: Synthetic oligonucleotide
  Antisense strand to SEQ ID NO: 859394
agauugguaacuaaacucc

SEQ ID NO: 859396 - RNA, 19 nt, Artificial Sequence
  Description of Artificial Sequence: Synthetic oligonucleotide
  Sense strand starting at position 1006 of SEQ ID NO: 588356
gugggacucugacuaaagu

SEQ ID NO: 859397 - RNA, 19 nt, Artificial Sequence
  Description of Artificial Sequence: Synthetic oligonucleotide
  Antisense strand to SEQ ID NO: 859396
acuuuagucagagucccac

SEQ ID NO: 859398 - RNA, 19 nt, Artificial Sequence
  Description of Artificial Sequence: Synthetic oligonucleotide
  Sense strand starting at position 1062 of SEQ ID NO: 588356
acccaaagaugguccuuaa

SEQ ID NO: 859399 - RNA, 19 nt, Artificial Sequence
  Description of Artificial Sequence: Synthetic oligonucleotide
  Antisense strand to SEQ ID NO: 859398
uuaaggaccaucuuugggu

SEQ ID NO: 859400 - RNA, 19 nt, Artificial Sequence
  Description of Artificial Sequence: Synthetic oligonucleotide
  Sense strand starting at position 1199 of SEQ ID NO: 588356
guaacaaucucucugaaug

SEQ ID NO: 859401 - RNA, 19 nt, Artificial Sequence
  Description of Artificial Sequence: Synthetic oligonucleotide
  Antisense strand to SEQ ID NO: 859400
cauucagagagauuguuac

SEQ ID NO: 859402 - RNA, 19 nt, Artificial Sequence
  Description of Artificial Sequence: Synthetic oligonucleotide
  Sense strand starting at position 1273 of SEQ ID NO: 588356
gagcaagacuggucccacu

SEQ ID NO: 859403 - RNA, 19 nt, Artificial Sequence
  Description of Artificial Sequence: Synthetic oligonucleotide
  Antisense strand to SEQ ID NO: 859402
agugggaccagucuugcuc

SEQ ID NO: 859404 - RNA, 19 nt, Artificial Sequence
  Description of Artificial Sequence: Synthetic oligonucleotide
  Sense strand starting at position 1423 of SEQ ID NO: 588356
ccacauucgccagaacuga

SEQ ID NO: 859405 - RNA, 19 nt, Artificial Sequence
  Description of Artificial Sequence: Synthetic oligonucleotide
  Antisense strand to SEQ ID NO: 859404
ucaguucuggcgaaugugg

SEQ ID NO: 859406 - RNA, 19 nt, Artificial Sequence
  Description of Artificial Sequence: Synthetic oligonucleotide
  Sense strand starting at position 1513 of SEQ ID NO: 588356
ccgugaugccgccugauga

SEQ ID NO: 859407 - RNA, 19 nt, Artificial Sequence
  Description of Artificial Sequence: Synthetic oligonucleotide
  Antisense strand to SEQ ID NO: 859406
ucaucaggcggcaucacgg

SEQ ID NO: 859408 - RNA, 19 nt, Artificial Sequence
  Description of Artificial Sequence: Synthetic oligonucleotide
  Sense strand starting at position 1764 of SEQ ID NO: 588356
uucuguuuacucgaaggaa

SEQ ID NO: 859409 - RNA, 19 nt, Artificial Sequence
  Description of Artificial Sequence: Synthetic oligonucleotide
  Antisense strand to SEQ ID NO: 859408
uuccuucgaguaaacagaa

SEQ ID NO: 859410 - RNA, 19 nt, Artificial Sequence
  Description of Artificial Sequence: Synthetic oligonucleotide
  Sense strand starting at position 2261 of SEQ ID NO: 588356
ggaauacagccuugacuuc

SEQ ID NO: 859411 - RNA, 19 nt, Artificial Sequence
  Description of Artificial Sequence: Synthetic oligonucleotide
  Antisense strand to SEQ ID NO: 859410
gaagucaaggcuguauucc

SEQ ID NO: 859412 - RNA, 19 nt, Artificial Sequence
  Description of Artificial Sequence: Synthetic oligonucleotide
  Sense strand starting at position 2307 of SEQ ID NO: 588356
cagaucuuccuguggaaac

SEQ ID NO: 859413 - RNA, 19 nt, Artificial Sequence
  Description of Artificial Sequence: Synthetic oligonucleotide
  Antisense strand to SEQ ID NO: 859412
guuuccacaggaagaucug

SEQ ID NO: 859414 - RNA, 19 nt, Artificial Sequence
  Description of Artificial Sequence: Synthetic oligonucleotide
  Sense strand starting at position 2383 of SEQ ID NO: 588356
uugagaacacagugguuua

SEQ ID NO: 859415 - RNA, 19 nt, Artificial Sequence
  Description of Artificial Sequence: Synthetic oligonucleotide
  Antisense strand to SEQ ID NO: 859414
uaaaccacuguguucucaa

SEQ ID NO: 859416 - RNA, 19 nt, Artificial Sequence
  Description of Artificial Sequence: Synthetic oligonucleotide
  Sense strand starting at position 2384 of SEQ ID NO: 588356
ugagaacacagugguuuaa

SEQ ID NO: 859417 - RNA, 19 nt, Artificial Sequence
  Description of Artificial Sequence: Synthetic oligonucleotide
  Antisense strand to SEQ ID NO: 859416
uuaaaccacuguguucuca

SEQ ID NO: 859418 - RNA, 19 nt, Artificial Sequence
  Description of Artificial Sequence: Synthetic oligonucleotide
  Sense strand starting at position 2386 of SEQ ID NO: 588356
agaacacagugguuuaaga

SEQ ID NO: 859419 - RNA, 19 nt, Artificial Sequence
  Description of Artificial Sequence: Synthetic oligonucleotide
  Antisense strand to SEQ ID NO: 859418
ucuuaaaccacuguguucu

SEQ ID NO: 859420 - RNA, 19 nt, Artificial Sequence
  Description of Artificial Sequence: Synthetic oligonucleotide
  Sense strand starting at position 2424 of SEQ ID NO: 588356
ucagguggguucucaauca

SEQ ID NO: 859421 - RNA, 19 nt, Artificial Sequence
  Description of Artificial Sequence: Synthetic oligonucleotide
  Antisense strand to SEQ ID NO: 859420
ugauugagaacccaccuga

SEQ ID NO: 859422 - RNA, 19 nt, Artificial Sequence
  Description of Artificial Sequence: Synthetic oligonucleotide
  Sense strand starting at position 2456 of SEQ ID NO: 588356
ugguaaugaugccuugaag

SEQ ID NO: 859423 - RNA, 19 nt, Artificial Sequence
  Description of Artificial Sequence: Synthetic oligonucleotide
  Antisense strand to SEQ ID NO: 859422
cuucaaggcaucauuacca

SEQ ID NO: 859424 - RNA, 19 nt, Artificial Sequence
  Description of Artificial Sequence: Synthetic oligonucleotide
  Sense strand starting at position 2700 of SEQ ID NO: 588356
uuaccugaucccgagagca

SEQ ID NO: 859425 - RNA, 19 nt, Artificial Sequence
  Description of Artificial Sequence: Synthetic oligonucleotide
  Antisense strand to SEQ ID NO: 859424
ugcucucgggaucagguaa

SEQ ID NO: 859426 - RNA, 19 nt, Artificial Sequence
  Description of Artificial Sequence: Synthetic oligonucleotide
  Sense strand starting at position 2702 of SEQ ID NO: 588356
accugaucccgagagcaca

SEQ ID NO: 859427 - RNA, 19 nt, Artificial Sequence
  Description of Artificial Sequence: Synthetic oligonucleotide
  Antisense strand to SEQ ID NO: 859426
ugugcucucgggaucaggu

SEQ ID NO: 859428 - RNA, 19 nt, Artificial Sequence
  Description of Artificial Sequence: Synthetic oligonucleotide
  Sense strand starting at position 2749 of SEQ ID NO: 588356
aaaccucuaguccgggaau

SEQ ID NO: 859429 - RNA, 19 nt, Artificial Sequence
  Description of Artificial Sequence: Synthetic oligonucleotide
  Antisense strand to SEQ ID NO: 859428
auucccggacuagagguuu

SEQ ID NO: 859430 - RNA, 19 nt, Artificial Sequence
  Description of Artificial Sequence: Synthetic oligonucleotide
  Sense strand starting at position 2752 of SEQ ID NO: 588356
ccucuaguccgggaaucua

SEQ ID NO: 859431 - RNA, 19 nt, Artificial Sequence
  Description of Artificial Sequence: Synthetic oligonucleotide
  Antisense strand to SEQ ID NO: 859430
uagauucccggacuagagg

SEQ ID NO: 859432 - RNA, 19 nt, Artificial Sequence
  Description of Artificial Sequence: Synthetic oligonucleotide
  Sense strand starting at position 2787 of SEQ ID NO: 588356
aggugauucuggucaugaa

SEQ ID NO: 859433 - RNA, 19 nt, Artificial Sequence
  Description of Artificial Sequence: Synthetic oligonucleotide
  Antisense strand to SEQ ID NO: 859432
uucaugaccagaaucaccu

SEQ ID NO: 859434 - RNA, 19 nt, Artificial Sequence
  Description of Artificial Sequence: Synthetic oligonucleotide
  Sense strand starting at position 2788 of SEQ ID NO: 588356
ggugauucuggucaugaag

SEQ ID NO: 859435 - RNA, 19 nt, Artificial Sequence
  Description of Artificial Sequence: Synthetic oligonucleotide
  Antisense strand to SEQ ID NO: 859434
cuucaugaccagaaucacc

SEQ ID NO: 859436 - RNA, 19 nt, Artificial Sequence
  Description of Artificial Sequence: Synthetic oligonucleotide
  Sense strand starting at position 2791 of SEQ ID NO: 588356
gauucuggucaugaagcaa

SEQ ID NO: 859437 - RNA, 19 nt, Artificial Sequence
  Description of Artificial Sequence: Synthetic oligonucleotide
  Antisense strand to SEQ ID NO: 859436
uugcuucaugaccagaauc

SEQ ID NO: 859438 - RNA, 19 nt, Artificial Sequence
  Description of Artificial Sequence: Synthetic oligonucleotide
  Sense strand starting at position 2948 of SEQ ID NO: 588356
gugaaugagucagucagag

SEQ ID NO: 859439 - RNA, 19 nt, Artificial Sequence
  Description of Artificial Sequence: Synthetic oligonucleotide
  Antisense strand to SEQ ID NO: 859438
cucugacugacucauucac

SEQ ID NO: 859440 - RNA, 19 nt, Artificial Sequence
  Description of Artificial Sequence: Synthetic oligonucleotide
  Sense strand starting at position 2966 of SEQ ID NO: 588356
ggcaucuuggacugcaaga

SEQ ID NO: 859441 - RNA, 19 nt, Artificial Sequence
  Description of Artificial Sequence: Synthetic oligonucleotide
  Antisense strand to SEQ ID NO: 859440
ucuugcaguccaagaugcc

SEQ ID NO: 859442 - RNA, 19 nt, Artificial Sequence
  Description of Artificial Sequence: Synthetic oligonucleotide
  Sense strand starting at position 3094 of SEQ ID NO: 588356
gacucuaucuggccauuga

SEQ ID NO: 859443 - RNA, 19 nt, Artificial Sequence
  Description of Artificial Sequence: Synthetic oligonucleotide
  Antisense strand to SEQ ID NO: 859442
ucaauggccagauagaguc

SEQ ID NO: 859444 - RNA, 19 nt, Artificial Sequence
  Description of Artificial Sequence: Synthetic oligonucleotide
  Sense strand starting at position 3204 of SEQ ID NO: 588356
agugucugugaauaaaguu

SEQ ID NO: 859445 - RNA, 19 nt, Artificial Sequence
  Description of Artificial Sequence: Synthetic oligonucleotide
  Antisense strand to SEQ ID NO: 859444
aacuuuauucacagacacu

SEQ ID NO: 859446 - RNA, 19 nt, Artificial Sequence
  Description of Artificial Sequence: Synthetic oligonucleotide
  Sense strand starting at position 3244 of SEQ ID NO: 588356
guguaaacauucccgauuu

SEQ ID NO: 859447 - RNA, 19 nt, Artificial Sequence
  Description of Artificial Sequence: Synthetic oligonucleotide
  Antisense strand to SEQ ID NO: 859446
aaaucgggaauguuuacac

SEQ ID NO: 859448 - RNA, 19 nt, Artificial Sequence
  Description of Artificial Sequence: Synthetic oligonucleotide
  Sense strand starting at position 3338 of SEQ ID NO: 588356
ggaagucagcaagguagau

SEQ ID NO: 859449 - RNA, 19 nt, Artificial Sequence
  Description of Artificial Sequence: Synthetic oligonucleotide
  Antisense strand to SEQ ID NO: 859448
aucuaccuugcugacuucc

SEQ ID NO: 859450 - RNA, 19 nt, Artificial Sequence
  Description of Artificial Sequence: Synthetic oligonucleotide
  Sense strand starting at position 3363 of SEQ ID NO: 588356
aggagcaaagcuuauugau

SEQ ID NO: 859451 - RNA, 19 nt, Artificial Sequence
  Description of Artificial Sequence: Synthetic oligonucleotide
  Antisense strand to SEQ ID NO: 859450
aucaauaagcuuugcuccu

SEQ ID NO: 859452 - RNA, 19 nt, Artificial Sequence
  Description of Artificial Sequence: Synthetic oligonucleotide
  Sense strand starting at position 3520 of SEQ ID NO: 588356
auccauugccauugacaga

SEQ ID NO: 859453 - RNA, 19 nt, Artificial Sequence
  Description of Artificial Sequence: Synthetic oligonucleotide
  Antisense strand to SEQ ID NO: 859452
ucugucaauggcaauggau

SEQ ID NO: 859454 - RNA, 19 nt, Artificial Sequence
  Description of Artificial Sequence: Synthetic oligonucleotide
  Sense strand starting at position 3543 of SEQ ID NO: 588356
aucacacaguccuuacaga

SEQ ID NO: 859455 - RNA, 19 nt, Artificial Sequence
  Description of Artificial Sequence: Synthetic oligonucleotide
  Antisense strand to SEQ ID NO: 859454
ucuguaaggacugugugau

SEQ ID NO: 859456 - RNA, 19 nt, Artificial Sequence
  Description of Artificial Sequence: Synthetic oligonucleotide
  Sense strand starting at position 3795 of SEQ ID NO: 588356
ccuaaagaucagugcuaga

SEQ ID NO: 859457 - RNA, 19 nt, Artificial Sequence
  Description of Artificial Sequence: Synthetic oligonucleotide
  Antisense strand to SEQ ID NO: 859456
ucuagcacugaucuuuagg

SEQ ID NO: 859458 - RNA, 19 nt, Artificial Sequence
  Description of Artificial Sequence: Synthetic oligonucleotide
  Sense strand starting at position 3800 of SEQ ID NO: 588356
agaucagugcuagacagua

SEQ ID NO: 859459 - RNA, 19 nt, Artificial Sequence
  Description of Artificial Sequence: Synthetic oligonucleotide
  Antisense strand to SEQ ID NO: 859458
uacugucuagcacugaucu

SEQ ID NO: 859460 - RNA, 19 nt, Artificial Sequence
  Description of Artificial Sequence: Synthetic oligonucleotide
  Sense strand starting at position 449 of SEQ ID NO: 588357
guuuaaagcucugcugcca

SEQ ID NO: 859461 - RNA, 19 nt, Artificial Sequence
  Description of Artificial Sequence: Synthetic oligonucleotide
  Antisense strand to SEQ ID NO: 859460
uggcagcagagcuuuaaac

SEQ ID NO: 859462 - RNA, 19 nt, Artificial Sequence
  Description of Artificial Sequence: Synthetic oligonucleotide
  Sense strand starting at position 1275 of SEQ ID NO: 588357
ugauaagacuugggaugaa

SEQ ID NO: 859463 - RNA, 19 nt, Artificial Sequence
  Description of Artificial Sequence: Synthetic oligonucleotide
  Antisense strand to SEQ ID NO: 859462
uucaucccaagucuuauca

SEQ ID NO: 859464 - RNA, 19 nt, Artificial Sequence
  Description of Artificial Sequence: Synthetic oligonucleotide
  Sense strand starting at position 2199 of SEQ ID NO: 588357
gcauacucacauugucuga

SEQ ID NO: 859465 - RNA, 19 nt, Artificial Sequence
  Description of Artificial Sequence: Synthetic oligonucleotide
  Antisense strand to SEQ ID NO: 859464
ucagacaaugugaguaugc

SEQ ID NO: 859466 - RNA, 19 nt, Artificial Sequence
  Description of Artificial Sequence: Synthetic oligonucleotide
  Sense strand starting at position 2203 of SEQ ID NO: 588357
acucacauugucugaugua

SEQ ID NO: 859467 - RNA, 19 nt, Artificial Sequence
  Description of Artificial Sequence: Synthetic oligonucleotide
  Antisense strand to SEQ ID NO: 859466
uacaucagacaaugugagu

SEQ ID NO: 859468 - RNA, 19 nt, Artificial Sequence
  Description of Artificial Sequence: Synthetic oligonucleotide
  Sense strand starting at position 2204 of SEQ ID NO: 588357
cucacauugucugauguag

SEQ ID NO: 859469 - RNA, 19 nt, Artificial Sequence
  Description of Artificial Sequence: Synthetic oligonucleotide
  Antisense strand to SEQ ID NO: 859468
cuacaucagacaaugugag

SEQ ID NO: 859470 - RNA, 19 nt, Artificial Sequence
  Description of Artificial Sequence: Synthetic oligonucleotide
  Sense strand starting at position 2212 of SEQ ID NO: 588357
gucugauguagcugaaugu

SEQ ID NO: 859471 - RNA, 19 nt, Artificial Sequence
  Description of Artificial Sequence: Synthetic oligonucleotide
  Antisense strand to SEQ ID NO: 859470
acauucagcuacaucagac

SEQ ID NO: 859472 - RNA, 19 nt, Artificial Sequence
  Description of Artificial Sequence: Synthetic oligonucleotide
  Sense strand starting at position 2663 of SEQ ID NO: 588357
cgagaacggcuguggauuu

SEQ ID NO: 859473 - RNA, 19 nt, Artificial Sequence
  Description of Artificial Sequence: Synthetic oligonucleotide
  Antisense strand to SEQ ID NO: 859472
aaauccacagccguucucg

SEQ ID NO: 859474 - RNA, 19 nt, Artificial Sequence
  Description of Artificial Sequence: Synthetic oligonucleotide
  Sense strand starting at position 127 of SEQ ID NO: 588358
cugaaagucucccuucuag

SEQ ID NO: 859475 - RNA, 19 nt, Artificial Sequence
  Description of Artificial Sequence: Synthetic oligonucleotide
  Antisense strand to SEQ ID NO: 859474
cuagaagggagacuuucag

SEQ ID NO: 859476 - RNA, 19 nt, Artificial Sequence
  Description of Artificial Sequence: Synthetic oligonucleotide
  Sense strand starting at position 305 of SEQ ID NO: 588358
ggagcagaauccuuggucu

SEQ ID NO: 859477 - RNA, 19 nt, Artificial Sequence
  Description of Artificial Sequence: Synthetic oligonucleotide
  Antisense strand to SEQ ID NO: 859476
agaccaaggauucugcucc

SEQ ID NO: 859478 - RNA, 19 nt, Artificial Sequence
  Description of Artificial Sequence: Synthetic oligonucleotide
  Sense strand starting at position 308 of SEQ ID NO: 588358
gcagaauccuuggucugca

SEQ ID NO: 859479 - RNA, 19 nt, Artificial Sequence
  Description of Artificial Sequence: Synthetic oligonucleotide
  Antisense strand to SEQ ID NO: 859478
ugcagaccaaggauucugc

SEQ ID NO: 859480 - RNA, 19 nt, Artificial Sequence
  Description of Artificial Sequence: Synthetic oligonucleotide
  Sense strand starting at position 309 of SEQ ID NO: 588358
cagaauccuuggucugcaa

SEQ ID NO: 859481 - RNA, 19 nt, Artificial Sequence
  Description of Artificial Sequence: Synthetic oligonucleotide
  Antisense strand to SEQ ID NO: 859480
uugcagaccaaggauucug

SEQ ID NO: 859482 - RNA, 19 nt, Artificial Sequence
  Description of Artificial Sequence: Synthetic oligonucleotide
  Sense strand starting at position 311 of SEQ ID NO: 588358
gaauccuuggucugcaauu

SEQ ID NO: 859483 - RNA, 19 nt, Artificial Sequence
  Description of Artificial Sequence: Synthetic oligonucleotide
  Antisense strand to SEQ ID NO: 859482
aauugcagaccaaggauuc

SEQ ID NO: 859484 - RNA, 19 nt, Artificial Sequence
  Description of Artificial Sequence: Synthetic oligonucleotide
  Sense strand starting at position 378 of SEQ ID NO: 588358
cuuccuugagcaggugaga

SEQ ID NO: 859485 - RNA, 19 nt, Artificial Sequence
  Description of Artificial Sequence: Synthetic oligonucleotide
  Antisense strand to SEQ ID NO: 859484
ucucaccugcucaaggaag

SEQ ID NO: 859486 - RNA, 19 nt, Artificial Sequence
  Description of Artificial Sequence: Synthetic oligonucleotide
  Sense strand starting at position 448 of SEQ ID NO: 588358
gguuguugggucugagaca

SEQ ID NO: 859487 - RNA, 19 nt, Artificial Sequence
  Description of Artificial Sequence: Synthetic oligonucleotide
  Antisense strand to SEQ ID NO: 859486
ugucucagacccaacaacc

SEQ ID NO: 859488 - RNA, 19 nt, Artificial Sequence
  Description of Artificial Sequence: Synthetic oligonucleotide
  Sense strand starting at position 1024 of SEQ ID NO: 588358
gggacuucuggcugaagga

SEQ ID NO: 859489 - RNA, 19 nt, Artificial Sequence
  Description of Artificial Sequence: Synthetic oligonucleotide
  Antisense strand to SEQ ID NO: 859488
uccuucagccagaaguccc

SEQ ID NO: 859490 - RNA, 19 nt, Artificial Sequence
  Description of Artificial Sequence: Synthetic oligonucleotide
  Sense strand starting at position 1323 of SEQ ID NO: 588358
cuguuuaaccagugcuaug

SEQ ID NO: 859491 - RNA, 19 nt, Artificial Sequence
  Description of Artificial Sequence: Synthetic oligonucleotide
  Antisense strand to SEQ ID NO: 859490
cauagcacugguuaaacag

SEQ ID NO: 859492 - RNA, 19 nt, Artificial Sequence
  Description of Artificial Sequence: Synthetic oligonucleotide
  Sense strand starting at position 1417 of SEQ ID NO: 588358
gugugacuguuaucuccau

SEQ ID NO: 859493 - RNA, 19 nt, Artificial Sequence
  Description of Artificial Sequence: Synthetic oligonucleotide
  Antisense strand to SEQ ID NO: 859492
auggagauaacagucacac

SEQ ID NO: 859494 - RNA, 19 nt, Artificial Sequence
  Description of Artificial Sequence: Synthetic oligonucleotide
  Sense strand starting at position 1547 of SEQ ID NO: 588358
cucaucucucagggagaca

SEQ ID NO: 859495 - RNA, 19 nt, Artificial Sequence
  Description of Artificial Sequence: Synthetic oligonucleotide
  Antisense strand to SEQ ID NO: 859494
ugucucccugagagaugag

SEQ ID NO: 859496 - RNA, 19 nt, Artificial Sequence
  Description of Artificial Sequence: Synthetic oligonucleotide
  Sense strand starting at position 1600 of SEQ ID NO: 588358
aaggauugcucacugugac

SEQ ID NO: 859497 - RNA, 19 nt, Artificial Sequence
  Description of Artificial Sequence: Synthetic oligonucleotide
  Antisense strand to SEQ ID NO: 859496
gucacagugagcaauccuu

SEQ ID NO: 859498 - RNA, 19 nt, Artificial Sequence
  Description of Artificial Sequence: Synthetic oligonucleotide
  Sense strand starting at position 1601 of SEQ ID NO: 588358
aggauugcucacugugaca

SEQ ID NO: 859499 - RNA, 19 nt, Artificial Sequence
  Description of Artificial Sequence: Synthetic oligonucleotide
  Antisense strand to SEQ ID NO: 859498
ugucacagugagcaauccu

SEQ ID NO: 859500 - RNA, 19 nt, Artificial Sequence
  Description of Artificial Sequence: Synthetic oligonucleotide
  Sense strand starting at position 1603 of SEQ ID NO: 588358
gauugcucacugugacacu

SEQ ID NO: 859501 - RNA, 19 nt, Artificial Sequence
  Description of Artificial Sequence: Synthetic oligonucleotide
  Antisense strand to SEQ ID NO: 859500
agugucacagugagcaauc

SEQ ID NO: 859502 - RNA, 19 nt, Artificial Sequence
  Description of Artificial Sequence: Synthetic oligonucleotide
  Sense strand starting at position 1663 of SEQ ID NO: 588358
cucugagccucuuuauaag

SEQ ID NO: 859503 - RNA, 19 nt, Artificial Sequence
  Description of Artificial Sequence: Synthetic oligonucleotide
  Antisense strand to SEQ ID NO: 859502
cuuauaaagaggcucagag

SEQ ID NO: 859504 - RNA, 19 nt, Artificial Sequence
  Description of Artificial Sequence: Synthetic oligonucleotide
  Sense strand starting at position 1673 of SEQ ID NO: 588358
cuuuauaagcucuggguga

SEQ ID NO: 859505 - RNA, 19 nt, Artificial Sequence
  Description of Artificial Sequence: Synthetic oligonucleotide
  Antisense strand to SEQ ID NO: 859504
ucacccagagcuuauaaag

SEQ ID NO: 859506 - RNA, 19 nt, Artificial Sequence
  Description of Artificial Sequence: Synthetic oligonucleotide
  Sense strand starting at position 1693 of SEQ ID NO: 588358
gggagucaggcgcaucuua

SEQ ID NO: 859507 - RNA, 19 nt, Artificial Sequence
  Description of Artificial Sequence: Synthetic oligonucleotide
  Antisense strand to SEQ ID NO: 859506
uaagaugcgccugacuccc

SEQ ID NO: 859508 - RNA, 19 nt, Artificial Sequence
  Description of Artificial Sequence: Synthetic oligonucleotide
  Sense strand starting at position 1909 of SEQ ID NO: 588358
agcgaugaugcagagcaaa

SEQ ID NO: 859509 - RNA, 19 nt, Artificial Sequence
  Description of Artificial Sequence: Synthetic oligonucleotide
  Antisense strand to SEQ ID NO: 859508
uuugcucugcaucaucgcu

SEQ ID NO: 859510 - RNA, 19 nt, Artificial Sequence
  Description of Artificial Sequence: Synthetic oligonucleotide
  Sense strand starting at position 1926 of SEQ ID NO: 588358
aaaucacagucgccaagau

SEQ ID NO: 859511 - RNA, 19 nt, Artificial Sequence
  Description of Artificial Sequence: Synthetic oligonucleotide
  Antisense strand to SEQ ID NO: 859510
aucuuggcgacugugauuu

SEQ ID NO: 859512 - RNA, 19 nt, Artificial Sequence
  Description of Artificial Sequence: Synthetic oligonucleotide
  Sense strand starting at position 2057 of SEQ ID NO: 588358
cgugcuauucuagagaacu

SEQ ID NO: 859513 - RNA, 19 nt, Artificial Sequence
  Description of Artificial Sequence: Synthetic oligonucleotide
  Antisense strand to SEQ ID NO: 859512
aguucucuagaauagcacg

SEQ ID NO: 859514 - RNA, 19 nt, Artificial Sequence
  Description of Artificial Sequence: Synthetic oligonucleotide
  Sense strand starting at position 2106 of SEQ ID NO: 588358
ccaggaugugccugugaga

SEQ ID NO: 859515 - RNA, 19 nt, Artificial Sequence
  Description of Artificial Sequence: Synthetic oligonucleotide
  Antisense strand to SEQ ID NO: 859514
ucucacaggcacauccugg

SEQ ID NO: 859516 - RNA, 19 nt, Artificial Sequence
  Description of Artificial Sequence: Synthetic oligonucleotide
  Sense strand starting at position 2228 of SEQ ID NO: 588358
guagaagguggaugcuaau

SEQ ID NO: 859517 - RNA, 19 nt, Artificial Sequence
  Description of Artificial Sequence: Synthetic oligonucleotide
  Antisense strand to SEQ ID NO: 859516
auuagcauccaccuucuac

SEQ ID NO: 859518 - RNA, 19 nt, Artificial Sequence
  Description of Artificial Sequence: Synthetic oligonucleotide
  Sense strand starting at position 2369 of SEQ ID NO: 588358
ugcagucaggccgaacaua

SEQ ID NO: 859519 - RNA, 19 nt, Artificial Sequence
  Description of Artificial Sequence: Synthetic oligonucleotide
  Antisense strand to SEQ ID NO: 859518
uauguucggccugacugca

SEQ ID NO: 859520 - RNA, 19 nt, Artificial Sequence
  Description of Artificial Sequence: Synthetic oligonucleotide
  Sense strand starting at position 2532 of SEQ ID NO: 588358
ugugguaaagcacacauaa

SEQ ID NO: 859521 - RNA, 19 nt, Artificial Sequence
  Description of Artificial Sequence: Synthetic oligonucleotide
  Antisense strand to SEQ ID NO: 859520
uuaugugugcuuuaccaca

SEQ ID NO: 859522 - RNA, 19 nt, Artificial Sequence
  Description of Artificial Sequence: Synthetic oligonucleotide
  Sense strand starting at position 2572 of SEQ ID NO: 588358
guacgugugcggcuuagua

SEQ ID NO: 859523 - RNA, 19 nt, Artificial Sequence
  Description of Artificial Sequence: Synthetic oligonucleotide
  Antisense strand to SEQ ID NO: 859522
uacuaagccgcacacguac

SEQ ID NO: 859524 - RNA, 19 nt, Artificial Sequence
  Description of Artificial Sequence: Synthetic oligonucleotide
  Sense strand starting at position 2582 of SEQ ID NO: 588358
ggcuuaguagcaugaauua

SEQ ID NO: 859525 - RNA, 19 nt, Artificial Sequence
  Description of Artificial Sequence: Synthetic oligonucleotide
  Antisense strand to SEQ ID NO: 859524
uaauucaugcuacuaagcc

SEQ ID NO: 859526 - RNA, 19 nt, Artificial Sequence
  Description of Artificial Sequence: Synthetic oligonucleotide
  Sense strand starting at position 2616 of SEQ ID NO: 588358
ggcaacuaaucuccagaau

SEQ ID NO: 859527 - RNA, 19 nt, Artificial Sequence
  Description of Artificial Sequence: Synthetic oligonucleotide
  Antisense strand to SEQ ID NO: 859526
auucuggagauuaguugcc

SEQ ID NO: 859528 - RNA, 19 nt, Artificial Sequence
  Description of Artificial Sequence: Synthetic oligonucleotide
  Sense strand starting at position 2723 of SEQ ID NO: 588358
cgucuuuguagcuaaguaa

SEQ ID NO: 859529 - RNA, 19 nt, Artificial Sequence
  Description of Artificial Sequence: Synthetic oligonucleotide
  Antisense strand to SEQ ID NO: 859528
uuacuuagcuacaaagacg

SEQ ID NO: 859530 - RNA, 19 nt, Artificial Sequence
  Description of Artificial Sequence: Synthetic oligonucleotide
  Sense strand starting at position 3307 of SEQ ID NO: 588358
acgguugguuaguucaaau

SEQ ID NO: 859531 - RNA, 19 nt, Artificial Sequence
  Description of Artificial Sequence: Synthetic oligonucleotide
  Antisense strand to SEQ ID NO: 859530
auuugaacuaaccaaccgu

SEQ ID NO: 859532 - RNA, 19 nt, Artificial Sequence
  Description of Artificial Sequence: Synthetic oligonucleotide
  Sense strand starting at position 3408 of SEQ ID NO: 588358
gagaaacuggguuguuuau

SEQ ID NO: 859533 - RNA, 19 nt, Artificial Sequence
  Description of Artificial Sequence: Synthetic oligonucleotide
  Antisense strand to SEQ ID NO: 859532
auaaacaacccaguuucuc

SEQ ID NO: 859534 - RNA, 19 nt, Artificial Sequence
  Description of Artificial Sequence: Synthetic oligonucleotide
  Sense strand starting at position 3414 of SEQ ID NO: 588358
cuggguuguuuaucugaca

SEQ ID NO: 859535 - RNA, 19 nt, Artificial Sequence
  Description of Artificial Sequence: Synthetic oligonucleotide
  Antisense strand to SEQ ID NO: 859534
ugucagauaaacaacccag

SEQ ID NO: 859536 - RNA, 19 nt, Artificial Sequence
  Description of Artificial Sequence: Synthetic oligonucleotide
  Sense strand starting at position 3466 of SEQ ID NO: 588358
cucgcauggcauugaacau

SEQ ID NO: 859537 - RNA, 19 nt, Artificial Sequence
  Description of Artificial Sequence: Synthetic oligonucleotide
  Antisense strand to SEQ ID NO: 859536
auguucaaugccaugcgag

SEQ ID NO: 859538 - RNA, 19 nt, Artificial Sequence
  Description of Artificial Sequence: Synthetic oligonucleotide
  Sense strand starting at position 3493 of SEQ ID NO: 588358
aucaguguuucuccucuaa

SEQ ID NO: 859539 - RNA, 19 nt, Artificial Sequence
  Description of Artificial Sequence: Synthetic oligonucleotide
  Antisense strand to SEQ ID NO: 859538
uuagaggagaaacacugau

SEQ ID NO: 859540 - RNA, 19 nt, Artificial Sequence
  Description of Artificial Sequence: Synthetic oligonucleotide
  Sense strand starting at position 3497 of SEQ ID NO: 588358
guguuucuccucuaaacug

SEQ ID NO: 859541 - RNA, 19 nt, Artificial Sequence
  Description of Artificial Sequence: Synthetic oligonucleotide
  Antisense strand to SEQ ID NO: 859540
caguuuagaggagaaacac

SEQ ID NO: 859542 - RNA, 19 nt, Artificial Sequence
  Description of Artificial Sequence: Synthetic oligonucleotide
  Sense strand starting at position 3609 of SEQ ID NO: 588358
guucuuccauugccagauu

SEQ ID NO: 859543 - RNA, 19 nt, Artificial Sequence
  Description of Artificial Sequence: Synthetic oligonucleotide
  Antisense strand to SEQ ID NO: 859542
aaucuggcaauggaagaac

SEQ ID NO: 859544 - RNA, 19 nt, Artificial Sequence
  Description of Artificial Sequence: Synthetic oligonucleotide
  Sense strand starting at position 3667 of SEQ ID NO: 588358
gugaccuggaucuguuacu

SEQ ID NO: 859545 - RNA, 19 nt, Artificial Sequence
  Description of Artificial Sequence: Synthetic oligonucleotide
  Antisense strand to SEQ ID NO: 859544
aguaacagauccaggucac

SEQ ID NO: 859546 - RNA, 19 nt, Artificial Sequence
  Description of Artificial Sequence: Synthetic oligonucleotide
  Sense strand starting at position 3702 of SEQ ID NO: 588358
aguagugacuuuccaaaug

SEQ ID NO: 859547 - RNA, 19 nt, Artificial Sequence
  Description of Artificial Sequence: Synthetic oligonucleotide
  Antisense strand to SEQ ID NO: 859546
cauuuggaaagucacuacu

SEQ ID NO: 859548 - RNA, 19 nt, Artificial Sequence
  Description of Artificial Sequence: Synthetic oligonucleotide
  Sense strand starting at position 3737 of SEQ ID NO: 588358
guuuaugagcuccaguucu

SEQ ID NO: 859549 - RNA, 19 nt, Artificial Sequence
  Description of Artificial Sequence: Synthetic oligonucleotide
  Antisense strand to SEQ ID NO: 859548
agaacuggagcucauaaac

SEQ ID NO: 859550 - RNA, 19 nt, Artificial Sequence
  Description of Artificial Sequence: Synthetic oligonucleotide
  Sense strand starting at position 3783 of SEQ ID NO: 588358
uuuaucaucugugugguua

SEQ ID NO: 859551 - RNA, 19 nt, Artificial Sequence
  Description of Artificial Sequence: Synthetic oligonucleotide
  Antisense strand to SEQ ID NO: 859550
uaaccacacagaugauaaa

SEQ ID NO: 859552 - RNA, 19 nt, Artificial Sequence
  Description of Artificial Sequence: Synthetic oligonucleotide
  Sense strand starting at position 3784 of SEQ ID NO: 588358
uuaucaucugugugguuac

SEQ ID NO: 859553 - RNA, 19 nt, Artificial Sequence
  Description of Artificial Sequence: Synthetic oligonucleotide
  Antisense strand to SEQ ID NO: 859552
guaaccacacagaugauaa

SEQ ID NO: 859554 - RNA, 19 nt, Artificial Sequence
  Description of Artificial Sequence: Synthetic oligonucleotide
  Sense strand starting at position 193 of SEQ ID NO: 588359
gcccucugcucaccuguaa

SEQ ID NO: 859555 - RNA, 19 nt, Artificial Sequence
  Description of Artificial Sequence: Synthetic oligonucleotide
  Antisense strand to SEQ ID NO: 859554
uuacaggugagcagagggc

SEQ ID NO: 859556 - RNA, 19 nt, Artificial Sequence
  Description of Artificial Sequence: Synthetic oligonucleotide
  Sense strand starting at position 239 of SEQ ID NO: 588359
agagcucucucagccugaa

SEQ ID NO: 859557 - RNA, 19 nt, Artificial Sequence
  Description of Artificial Sequence: Synthetic oligonucleotide
  Antisense strand to SEQ ID NO: 859556
uucaggcugagagagcucu

SEQ ID NO: 859558 - RNA, 19 nt, Artificial Sequence
  Description of Artificial Sequence: Synthetic oligonucleotide
  Sense strand starting at position 374 of SEQ ID NO: 588359
ggugcucugcccuggcaaa

SEQ ID NO: 859559 - RNA, 19 nt, Artificial Sequence
  Description of Artificial Sequence: Synthetic oligonucleotide
  Antisense strand to SEQ ID NO: 859558
uuugccagggcagagcacc

SEQ ID NO: 859560 - RNA, 19 nt, Artificial Sequence
  Description of Artificial Sequence: Synthetic oligonucleotide
  Sense strand starting at position 410 of SEQ ID NO: 588359
acgugugggccaggacaua

SEQ ID NO: 859561 - RNA, 19 nt, Artificial Sequence
  Description of Artificial Sequence: Synthetic oligonucleotide
  Antisense strand to SEQ ID NO: 859560
uauguccuggcccacacgu

SEQ ID NO: 859562 - RNA, 19 nt, Artificial Sequence
  Description of Artificial Sequence: Synthetic oligonucleotide
  Sense strand starting at position 631 of SEQ ID NO: 588359
cagggucuaugugaucuuu

SEQ ID NO: 859563 - RNA, 19 nt, Artificial Sequence
  Description of Artificial Sequence: Synthetic oligonucleotide
  Antisense strand to SEQ ID NO: 859562
aaagaucacauagacccug

SEQ ID NO: 859564 - RNA, 19 nt, Artificial Sequence
  Description of Artificial Sequence: Synthetic oligonucleotide
  Sense strand starting at position 641 of SEQ ID NO: 588359
gugaucuuucaaggaguga

SEQ ID NO: 859565 - RNA, 19 nt, Artificial Sequence
  Description of Artificial Sequence: Synthetic oligonucleotide
  Antisense strand to SEQ ID NO: 859564
ucacuccuugaaagaucac

SEQ ID NO: 859566 - RNA, 19 nt, Artificial Sequence
  Description of Artificial Sequence: Synthetic oligonucleotide
  Sense strand starting at position 658 of SEQ ID NO: 588359
gagaacuaccuucgucuua

SEQ ID NO: 859567 - RNA, 19 nt, Artificial Sequence
  Description of Artificial Sequence: Synthetic oligonucleotide
  Antisense strand to SEQ ID NO: 859566
uaagacgaagguaguucuc

SEQ ID NO: 859568 - RNA, 19 nt, Artificial Sequence
  Description of Artificial Sequence: Synthetic oligonucleotide
  Sense strand starting at position 659 of SEQ ID NO: 588359
agaacuaccuucgucuuaa

SEQ ID NO: 859569 - RNA, 19 nt, Artificial Sequence
  Description of Artificial Sequence: Synthetic oligonucleotide
  Antisense strand to SEQ ID NO: 859568
uuaagacgaagguaguucu

SEQ ID NO: 859570 - RNA, 19 nt, Artificial Sequence
  Description of Artificial Sequence: Synthetic oligonucleotide
  Sense strand starting at position 1180 of SEQ ID NO: 588359
uugcuugccuugucuuuaa

SEQ ID NO: 859571 - RNA, 19 nt, Artificial Sequence
  Description of Artificial Sequence: Synthetic oligonucleotide
  Antisense strand to SEQ ID NO: 859570
uuaaagacaaggcaagcaa

SEQ ID NO: 859572 - RNA, 19 nt, Artificial Sequence
  Description of Artificial Sequence: Synthetic oligonucleotide
  Sense strand starting at position 1183 of SEQ ID NO: 588359
cuugccuugucuuuaaagu

SEQ ID NO: 859573 - RNA, 19 nt, Artificial Sequence
  Description of Artificial Sequence: Synthetic oligonucleotide
  Antisense strand to SEQ ID NO: 859572
acuuuaaagacaaggcaag

SEQ ID NO: 859574 - RNA, 19 nt, Artificial Sequence
  Description of Artificial Sequence: Synthetic oligonucleotide
  Sense strand starting at position 1184 of SEQ ID NO: 588359
uugccuugucuuuaaagug

SEQ ID NO: 859575 - RNA, 19 nt, Artificial Sequence
  Description of Artificial Sequence: Synthetic oligonucleotide
  Antisense strand to SEQ ID NO: 859574
cacuuuaaagacaaggcaa

SEQ ID NO: 859576 - RNA, 19 nt, Artificial Sequence
  Description of Artificial Sequence: Synthetic oligonucleotide
  Sense strand starting at position 1589 of SEQ ID NO: 588359
ccaguuucugcucgacaga

SEQ ID NO: 859577 - RNA, 19 nt, Artificial Sequence
  Description of Artificial Sequence: Synthetic oligonucleotide
  Antisense strand to SEQ ID NO: 859576
ucugucgagcagaaacugg

SEQ ID NO: 859578 - RNA, 19 nt, Artificial Sequence
  Description of Artificial Sequence: Synthetic oligonucleotide
  Sense strand starting at position 1736 of SEQ ID NO: 588359
cgugguguggccuucaguu

SEQ ID NO: 859579 - RNA, 19 nt, Artificial Sequence
  Description of Artificial Sequence: Synthetic oligonucleotide
  Antisense strand to SEQ ID NO: 859578
aacugaaggccacaccacg

SEQ ID NO: 859580 - RNA, 19 nt, Artificial Sequence
  Description of Artificial Sequence: Synthetic oligonucleotide
  Sense strand starting at position 1860 of SEQ ID NO: 588359
gcucucacccagggacaua

SEQ ID NO: 859581 - RNA, 19 nt, Artificial Sequence
  Description of Artificial Sequence: Synthetic oligonucleotide
  Antisense strand to SEQ ID NO: 859580
uaugucccugggugagagc

SEQ ID NO: 859582 - RNA, 19 nt, Artificial Sequence
  Description of Artificial Sequence: Synthetic oligonucleotide
  Sense strand starting at position 1890 of SEQ ID NO: 588359
gcgugaagagaucguguuu

SEQ ID NO: 859583 - RNA, 19 nt, Artificial Sequence
  Description of Artificial Sequence: Synthetic oligonucleotide
  Antisense strand to SEQ ID NO: 859582
aaacacgaucucuucacgc

SEQ ID NO: 859584 - RNA, 19 nt, Artificial Sequence
  Description of Artificial Sequence: Synthetic oligonucleotide
  Sense strand starting at position 1895 of SEQ ID NO: 588359
aagagaucguguuucugag

SEQ ID NO: 859585 - RNA, 19 nt, Artificial Sequence
  Description of Artificial Sequence: Synthetic oligonucleotide
  Antisense strand to SEQ ID NO: 859584
cucagaaacacgaucucuu

SEQ ID NO: 859586 - RNA, 19 nt, Artificial Sequence
  Description of Artificial Sequence: Synthetic oligonucleotide
  Sense strand starting at position 1897 of SEQ ID NO: 588359
gagaucguguuucugagua

SEQ ID NO: 859587 - RNA, 19 nt, Artificial Sequence
  Description of Artificial Sequence: Synthetic oligonucleotide
  Antisense strand to SEQ ID NO: 859586
uacucagaaacacgaucuc

SEQ ID NO: 859588 - RNA, 19 nt, Artificial Sequence
  Description of Artificial Sequence: Synthetic oligonucleotide
  Sense strand starting at position 1901 of SEQ ID NO: 588359
ucguguuucugaguaguug

SEQ ID NO: 859589 - RNA, 19 nt, Artificial Sequence
  Description of Artificial Sequence: Synthetic oligonucleotide
  Antisense strand to SEQ ID NO: 859588
caacuacucagaaacacga

SEQ ID NO: 859590 - RNA, 19 nt, Artificial Sequence
  Description of Artificial Sequence: Synthetic oligonucleotide
  Sense strand starting at position 1902 of SEQ ID NO: 588359
cguguuucugaguaguugu

SEQ ID NO: 859591 - RNA, 19 nt, Artificial Sequence
  Description of Artificial Sequence: Synthetic oligonucleotide
  Antisense strand to SEQ ID NO: 859590
acaacuacucagaaacacg

SEQ ID NO: 859592 - RNA, 19 nt, Artificial Sequence
  Description of Artificial Sequence: Synthetic oligonucleotide
  Sense strand starting at position 1905 of SEQ ID NO: 588359
guuucugaguaguugucau

SEQ ID NO: 859593 - RNA, 19 nt, Artificial Sequence
  Description of Artificial Sequence: Synthetic oligonucleotide
  Antisense strand to SEQ ID NO: 859592
augacaacuacucagaaac

SEQ ID NO: 859594 - RNA, 19 nt, Artificial Sequence
  Description of Artificial Sequence: Synthetic oligonucleotide
  Sense strand starting at position 2073 of SEQ ID NO: 588359
ccacauugcacaggugaga

SEQ ID NO: 859595 - RNA, 19 nt, Artificial Sequence
  Description of Artificial Sequence: Synthetic oligonucleotide
  Antisense strand to SEQ ID NO: 859594
ucucaccugugcaaugugg

SEQ ID NO: 859596 - RNA, 19 nt, Artificial Sequence
  Description of Artificial Sequence: Synthetic oligonucleotide
  Sense strand starting at position 2806 of SEQ ID NO: 588359
ccuauaauugcggugcuuu

SEQ ID NO: 859597 - RNA, 19 nt, Artificial Sequence
  Description of Artificial Sequence: Synthetic oligonucleotide
  Antisense strand to SEQ ID NO: 859596
aaagcaccgcaauuauagg

SEQ ID NO: 859598 - RNA, 19 nt, Artificial Sequence
  Description of Artificial Sequence: Synthetic oligonucleotide
  Sense strand starting at position 2837 of SEQ ID NO: 588359
caggaugaggugugcagau

SEQ ID NO: 859599 - RNA, 19 nt, Artificial Sequence
  Description of Artificial Sequence: Synthetic oligonucleotide
  Antisense strand to SEQ ID NO: 859598
aucugcacaccucauccug

SEQ ID NO: 859600 - RNA, 19 nt, Artificial Sequence
  Description of Artificial Sequence: Synthetic oligonucleotide
  Sense strand starting at position 2939 of SEQ ID NO: 588359
uggugaaugugccugugau

SEQ ID NO: 859601 - RNA, 19 nt, Artificial Sequence
  Description of Artificial Sequence: Synthetic oligonucleotide
  Antisense strand to SEQ ID NO: 859600
aucacaggcacauucacca

SEQ ID NO: 859602 - RNA, 19 nt, Artificial Sequence
  Description of Artificial Sequence: Synthetic oligonucleotide
  Sense strand starting at position 2940 of SEQ ID NO: 588359
ggugaaugugccugugauc

SEQ ID NO: 859603 - RNA, 19 nt, Artificial Sequence
  Description of Artificial Sequence: Synthetic oligonucleotide
  Antisense strand to SEQ ID NO: 859602
gaucacaggcacauucacc

SEQ ID NO: 859604 - RNA, 19 nt, Artificial Sequence
  Description of Artificial Sequence: Synthetic oligonucleotide
  Sense strand starting at position 3131 of SEQ ID NO: 588359
caguaagugcuaugaacaa

SEQ ID NO: 859605 - RNA, 19 nt, Artificial Sequence
  Description of Artificial Sequence: Synthetic oligonucleotide
  Antisense strand to SEQ ID NO: 859604
uuguucauagcacuuacug

SEQ ID NO: 859606 - RNA, 19 nt, Artificial Sequence
  Description of Artificial Sequence: Synthetic oligonucleotide
  Sense strand starting at position 3142 of SEQ ID NO: 588359
augaacaaaucugguauca

SEQ ID NO: 859607 - RNA, 19 nt, Artificial Sequence
  Description of Artificial Sequence: Synthetic oligonucleotide
  Antisense strand to SEQ ID NO: 859606
ugauaccagauuuguucau

SEQ ID NO: 859608 - RNA, 19 nt, Artificial Sequence
  Description of Artificial Sequence: Synthetic oligonucleotide
  Sense strand starting at position 3144 of SEQ ID NO: 588359
gaacaaaucugguaucagc

SEQ ID NO: 859609 - RNA, 19 nt, Artificial Sequence
  Description of Artificial Sequence: Synthetic oligonucleotide
  Antisense strand to SEQ ID NO: 859608
gcugauaccagauuuguuc

SEQ ID NO: 859610 - RNA, 19 nt, Artificial Sequence
  Description of Artificial Sequence: Synthetic oligonucleotide
  Sense strand starting at position 3388 of SEQ ID NO: 588359
gaccgcaguccguaaauau

SEQ ID NO: 859611 - RNA, 19 nt, Artificial Sequence
  Description of Artificial Sequence: Synthetic oligonucleotide
  Antisense strand to SEQ ID NO: 859610
auauuuacggacugcgguc

SEQ ID NO: 859612 - RNA, 19 nt, Artificial Sequence
  Description of Artificial Sequence: Synthetic oligonucleotide
  Sense strand starting at position 3398 of SEQ ID NO: 588359
cguaaauauaagggcauaa

SEQ ID NO: 859613 - RNA, 19 nt, Artificial Sequence
  Description of Artificial Sequence: Synthetic oligonucleotide
  Antisense strand to SEQ ID NO: 859612
uuaugcccuuauauuuacg

SEQ ID NO: 859614 - RNA, 19 nt, Artificial Sequence
  Description of Artificial Sequence: Synthetic oligonucleotide
  Sense strand starting at position 3418 of SEQ ID NO: 588359
gcaggaccauaaucacaua

SEQ ID NO: 859615 - RNA, 19 nt, Artificial Sequence
  Description of Artificial Sequence: Synthetic oligonucleotide
  Antisense strand to SEQ ID NO: 859614
uaugugauuaugguccugc

SEQ ID NO: 859616 - RNA, 19 nt, Artificial Sequence
  Description of Artificial Sequence: Synthetic oligonucleotide
  Sense strand starting at position 3439 of SEQ ID NO: 588359
ugcugacuguguguugaga

SEQ ID NO: 859617 - RNA, 19 nt, Artificial Sequence
  Description of Artificial Sequence: Synthetic oligonucleotide
  Antisense strand to SEQ ID NO: 859616
ucucaacacacagucagca

SEQ ID NO: 859618 - RNA, 19 nt, Artificial Sequence
  Description of Artificial Sequence: Synthetic oligonucleotide
  Sense strand starting at position 3445 of SEQ ID NO: 588359
cuguguguugagagcaguu

SEQ ID NO: 859619 - RNA, 19 nt, Artificial Sequence
  Description of Artificial Sequence: Synthetic oligonucleotide
  Antisense strand to SEQ ID NO: 859618
aacugcucucaacacacag

SEQ ID NO: 859620 - RNA, 19 nt, Artificial Sequence
  Description of Artificial Sequence: Synthetic oligonucleotide
  Sense strand starting at position 3528 of SEQ ID NO: 588359
aaaccaaguugguauggau

SEQ ID NO: 859621 - RNA, 19 nt, Artificial Sequence
  Description of Artificial Sequence: Synthetic oligonucleotide
  Antisense strand to SEQ ID NO: 859620
auccauaccaacuugguuu

SEQ ID NO: 859622 - RNA, 19 nt, Artificial Sequence
  Description of Artificial Sequence: Synthetic oligonucleotide
  Sense strand starting at position 3541 of SEQ ID NO: 588359
auggaucacguccauacaa

SEQ ID NO: 859623 - RNA, 19 nt, Artificial Sequence
  Description of Artificial Sequence: Synthetic oligonucleotide
  Antisense strand to SEQ ID NO: 859622
uuguauggacgugauccau

SEQ ID NO: 859624 - RNA, 19 nt, Artificial Sequence
  Description of Artificial Sequence: Synthetic oligonucleotide
  Sense strand starting at position 3592 of SEQ ID NO: 588359
cuaagaagcugucuggcau

SEQ ID NO: 859625 - RNA, 19 nt, Artificial Sequence
  Description of Artificial Sequence: Synthetic oligonucleotide
  Antisense strand to SEQ ID NO: 859624
augccagacagcuucuuag

SEQ ID NO: 859626 - RNA, 19 nt, Artificial Sequence
  Description of Artificial Sequence: Synthetic oligonucleotide
  Sense strand starting at position 3593 of SEQ ID NO: 588359
uaagaagcugucuggcauu

SEQ ID NO: 859627 - RNA, 19 nt, Artificial Sequence
  Description of Artificial Sequence: Synthetic oligonucleotide
  Antisense strand to SEQ ID NO: 859626
aaugccagacagcuucuua

SEQ ID NO: 859628 - RNA, 19 nt, Artificial Sequence
  Description of Artificial Sequence: Synthetic oligonucleotide
  Sense strand starting at position 3635 of SEQ ID NO: 588359
accguuccuggcugguaau

SEQ ID NO: 859629 - RNA, 19 nt, Artificial Sequence
  Description of Artificial Sequence: Synthetic oligonucleotide
  Antisense strand to SEQ ID NO: 859628
auuaccagccaggaacggu

SEQ ID NO: 859630 - RNA, 19 nt, Artificial Sequence
  Description of Artificial Sequence: Synthetic oligonucleotide
  Sense strand starting at position 3691 of SEQ ID NO: 588359
agaauguugggugggugau

SEQ ID NO: 859631 - RNA, 19 nt, Artificial Sequence
  Description of Artificial Sequence: Synthetic oligonucleotide
  Antisense strand to SEQ ID NO: 859630
aucacccacccaacauucu

SEQ ID NO: 859632 - RNA, 19 nt, Artificial Sequence
  Description of Artificial Sequence: Synthetic oligonucleotide
  Sense strand starting at position 3853 of SEQ ID NO: 588359
ugcugacaucaggaagcuu

SEQ ID NO: 859633 - RNA, 19 nt, Artificial Sequence
  Description of Artificial Sequence: Synthetic oligonucleotide
  Antisense strand to SEQ ID NO: 859632
aagcuuccugaugucagca

SEQ ID NO: 859634 - RNA, 19 nt, Artificial Sequence
  Description of Artificial Sequence: Synthetic oligonucleotide
  Sense strand starting at position 144 of SEQ ID NO: 588360
cagagcaucaugggugaga

SEQ ID NO: 859635 - RNA, 19 nt, Artificial Sequence
  Description of Artificial Sequence: Synthetic oligonucleotide
  Antisense strand to SEQ ID NO: 859634
ucucacccaugaugcucug

SEQ ID NO: 859636 - RNA, 19 nt, Artificial Sequence
  Description of Artificial Sequence: Synthetic oligonucleotide
  Sense strand starting at position 145 of SEQ ID NO: 588360
agagcaucaugggugagau

SEQ ID NO: 859637 - RNA, 19 nt, Artificial Sequence
  Description of Artificial Sequence: Synthetic oligonucleotide
  Antisense strand to SEQ ID NO: 859636
aucucacccaugaugcucu

SEQ ID NO: 859638 - RNA, 19 nt, Artificial Sequence
  Description of Artificial Sequence: Synthetic oligonucleotide
  Sense strand starting at position 155 of SEQ ID NO: 588360
gggugagauggccaaaugu

SEQ ID NO: 859639 - RNA, 19 nt, Artificial Sequence
  Description of Artificial Sequence: Synthetic oligonucleotide
  Antisense strand to SEQ ID NO: 859638
acauuuggccaucucaccc

SEQ ID NO: 859640 - RNA, 19 nt, Artificial Sequence
  Description of Artificial Sequence: Synthetic oligonucleotide
  Sense strand starting at position 166 of SEQ ID NO: 588360
ccaaauguguggccaaacu

SEQ ID NO: 859641 - RNA, 19 nt, Artificial Sequence
  Description of Artificial Sequence: Synthetic oligonucleotide
  Antisense strand to SEQ ID NO: 859640
aguuuggccacacauuugg

SEQ ID NO: 859642 - RNA, 19 nt, Artificial Sequence
  Description of Artificial Sequence: Synthetic oligonucleotide
  Sense strand starting at position 525 of SEQ ID NO: 588360
ggguauguucugggaagug

SEQ ID NO: 859643 - RNA, 19 nt, Artificial Sequence
  Description of Artificial Sequence: Synthetic oligonucleotide
  Antisense strand to SEQ ID NO: 859642
cacuucccagaacauaccc

SEQ ID NO: 859644 - RNA, 19 nt, Artificial Sequence
  Description of Artificial Sequence: Synthetic oligonucleotide
  Sense strand starting at position 579 of SEQ ID NO: 588360
gagugcuucugcccaaauu

SEQ ID NO: 859645 - RNA, 19 nt, Artificial Sequence
  Description of Artificial Sequence: Synthetic oligonucleotide
  Antisense strand to SEQ ID NO: 859644
aauuugggcagaagcacuc

SEQ ID NO: 859646 - RNA, 19 nt, Artificial Sequence
  Description of Artificial Sequence: Synthetic oligonucleotide
  Sense strand starting at position 665 of SEQ ID NO: 588360
gccagugaagccugaggau

SEQ ID NO: 859647 - RNA, 19 nt, Artificial Sequence
  Description of Artificial Sequence: Synthetic oligonucleotide
  Antisense strand to SEQ ID NO: 859646
auccucaggcuucacuggc

SEQ ID NO: 859648 - RNA, 19 nt, Artificial Sequence
  Description of Artificial Sequence: Synthetic oligonucleotide
  Sense strand starting at position 774 of SEQ ID NO: 588360
cccugucauccauggagua

SEQ ID NO: 859649 - RNA, 19 nt, Artificial Sequence
  Description of Artificial Sequence: Synthetic oligonucleotide
  Antisense strand to SEQ ID NO: 859648
uacuccauggaugacaggg

SEQ ID NO: 859650 - RNA, 19 nt, Artificial Sequence
  Description of Artificial Sequence: Synthetic oligonucleotide
  Sense strand starting at position 791 of SEQ ID NO: 588360
uagggagaagccugugaga

SEQ ID NO: 859651 - RNA, 19 nt, Artificial Sequence
  Description of Artificial Sequence: Synthetic oligonucleotide
  Antisense strand to SEQ ID NO: 859650
ucucacaggcuucucccua

SEQ ID NO: 859652 - RNA, 19 nt, Artificial Sequence
  Description of Artificial Sequence: Synthetic oligonucleotide
  Sense strand starting at position 793 of SEQ ID NO: 588360
gggagaagccugugagaga

SEQ ID NO: 859653 - RNA, 19 nt, Artificial Sequence
  Description of Artificial Sequence: Synthetic oligonucleotide
  Antisense strand to SEQ ID NO: 859652
ucucucacaggcuucuccc

SEQ ID NO: 859654 - RNA, 19 nt, Artificial Sequence
  Description of Artificial Sequence: Synthetic oligonucleotide
  Sense strand starting at position 1144 of SEQ ID NO: 588360
guucuuggcaaagaugaac

SEQ ID NO: 859655 - RNA, 19 nt, Artificial Sequence
  Description of Artificial Sequence: Synthetic oligonucleotide
  Antisense strand to SEQ ID NO: 859654
guucaucuuugccaagaac

SEQ ID NO: 859656 - RNA, 19 nt, Artificial Sequence
  Description of Artificial Sequence: Synthetic oligonucleotide
  Sense strand starting at position 1198 of SEQ ID NO: 588360
aaggaagacucguuagugu

SEQ ID NO: 859657 - RNA, 19 nt, Artificial Sequence
  Description of Artificial Sequence: Synthetic oligonucleotide
  Antisense strand to SEQ ID NO: 859656
acacuaacgagucuuccuu

SEQ ID NO: 859658 - RNA, 19 nt, Artificial Sequence
  Description of Artificial Sequence: Synthetic oligonucleotide
  Sense strand starting at position 1205 of SEQ ID NO: 588360
acucguuaguguuuggaac

SEQ ID NO: 859659 - RNA, 19 nt, Artificial Sequence
  Description of Artificial Sequence: Synthetic oligonucleotide
  Antisense strand to SEQ ID NO: 859658
guuccaaacacuaacgagu

SEQ ID NO: 859660 - RNA, 19 nt, Artificial Sequence
  Description of Artificial Sequence: Synthetic oligonucleotide
  Sense strand starting at position 1206 of SEQ ID NO: 588360
cucguuaguguuuggaaca

SEQ ID NO: 859661 - RNA, 19 nt, Artificial Sequence
  Description of Artificial Sequence: Synthetic oligonucleotide
  Antisense strand to SEQ ID NO: 859660
uguuccaaacacuaacgag

SEQ ID NO: 859662 - RNA, 19 nt, Artificial Sequence
  Description of Artificial Sequence: Synthetic oligonucleotide
  Sense strand starting at position 1267 of SEQ ID NO: 588360
cuguguacccagggaucau

SEQ ID NO: 859663 - RNA, 19 nt, Artificial Sequence
  Description of Artificial Sequence: Synthetic oligonucleotide
  Antisense strand to SEQ ID NO: 859662
augaucccuggguacacag

SEQ ID NO: 859664 - RNA, 19 nt, Artificial Sequence
  Description of Artificial Sequence: Synthetic oligonucleotide
  Sense strand starting at position 1344 of SEQ ID NO: 588360
ggagaucuuggaggccgaa

SEQ ID NO: 859665 - RNA, 19 nt, Artificial Sequence
  Description of Artificial Sequence: Synthetic oligonucleotide
  Antisense strand to SEQ ID NO: 859664
uucggccuccaagaucucc

SEQ ID NO: 859666 - RNA, 19 nt, Artificial Sequence
  Description of Artificial Sequence: Synthetic oligonucleotide
  Sense strand starting at position 1560 of SEQ ID NO: 588360
cucugaagcccugaucuuu

SEQ ID NO: 859667 - RNA, 19 nt, Artificial Sequence
  Description of Artificial Sequence: Synthetic oligonucleotide
  Antisense strand to SEQ ID NO: 859666
aaagaucagggcuucagag

SEQ ID NO: 859668 - RNA, 19 nt, Artificial Sequence
  Description of Artificial Sequence: Synthetic oligonucleotide
  Sense strand starting at position 1580 of SEQ ID NO: 588360
uggacucagcaguguauau

SEQ ID NO: 859669 - RNA, 19 nt, Artificial Sequence
  Description of Artificial Sequence: Synthetic oligonucleotide
  Antisense strand to SEQ ID NO: 859668
auauacacugcugagucca

SEQ ID NO: 859670 - RNA, 19 nt, Artificial Sequence
  Description of Artificial Sequence: Synthetic oligonucleotide
  Sense strand starting at position 1582 of SEQ ID NO: 588360
gacucagcaguguauauau

SEQ ID NO: 859671 - RNA, 19 nt, Artificial Sequence
  Description of Artificial Sequence: Synthetic oligonucleotide
  Antisense strand to SEQ ID NO: 859670
auauauacacugcugaguc

SEQ ID NO: 859672 - RNA, 19 nt, Artificial Sequence
  Description of Artificial Sequence: Synthetic oligonucleotide
  Sense strand starting at position 1658 of SEQ ID NO: 588360
cccuguucccauggagaga

SEQ ID NO: 859673 - RNA, 19 nt, Artificial Sequence
  Description of Artificial Sequence: Synthetic oligonucleotide
  Antisense strand to SEQ ID NO: 859672
ucucuccaugggaacaggg

SEQ ID NO: 859674 - RNA, 19 nt, Artificial Sequence
  Description of Artificial Sequence: Synthetic oligonucleotide
  Sense strand starting at position 1848 of SEQ ID NO: 588360
gcgcuaagugggagucuua

SEQ ID NO: 859675 - RNA, 19 nt, Artificial Sequence
  Description of Artificial Sequence: Synthetic oligonucleotide
  Antisense strand to SEQ ID NO: 859674
uaagacucccacuuagcgc

SEQ ID NO: 859676 - RNA, 19 nt, Artificial Sequence
  Description of Artificial Sequence: Synthetic oligonucleotide
  Sense strand starting at position 1858 of SEQ ID NO: 588360
ggagucuuacccugggaua

SEQ ID NO: 859677 - RNA, 19 nt, Artificial Sequence
  Description of Artificial Sequence: Synthetic oligonucleotide
  Antisense strand to SEQ ID NO: 859676
uaucccaggguaagacucc

SEQ ID NO: 859678 - RNA, 19 nt, Artificial Sequence
  Description of Artificial Sequence: Synthetic oligonucleotide
  Sense strand starting at position 1859 of SEQ ID NO: 588360
gagucuuacccugggauau

SEQ ID NO: 859679 - RNA, 19 nt, Artificial Sequence
  Description of Artificial Sequence: Synthetic oligonucleotide
  Antisense strand to SEQ ID NO: 859678
auaucccaggguaagacuc

SEQ ID NO: 859680 - RNA, 19 nt, Artificial Sequence
  Description of Artificial Sequence: Synthetic oligonucleotide
  Sense strand starting at position 1860 of SEQ ID NO: 588360
agucuuacccugggauaua

SEQ ID NO: 859681 - RNA, 19 nt, Artificial Sequence
  Description of Artificial Sequence: Synthetic oligonucleotide
  Antisense strand to SEQ ID NO: 859680
uauaucccaggguaagacu

SEQ ID NO: 859682 - RNA, 19 nt, Artificial Sequence
  Description of Artificial Sequence: Synthetic oligonucleotide
  Sense strand starting at position 2111 of SEQ ID NO: 588360
ucugucuguccaggacaaa

SEQ ID NO: 859683 - RNA, 19 nt, Artificial Sequence
  Description of Artificial Sequence: Synthetic oligonucleotide
  Antisense strand to SEQ ID NO: 859682
uuuguccuggacagacaga

SEQ ID NO: 859684 - RNA, 19 nt, Artificial Sequence
  Description of Artificial Sequence: Synthetic oligonucleotide
  Sense strand starting at position 2281 of SEQ ID NO: 588360
gacacuguguuccucauga

SEQ ID NO: 859685 - RNA, 19 nt, Artificial Sequence
  Description of Artificial Sequence: Synthetic oligonucleotide
  Antisense strand to SEQ ID NO: 859684
ucaugaggaacacaguguc

SEQ ID NO: 859686 - RNA, 19 nt, Artificial Sequence
  Description of Artificial Sequence: Synthetic oligonucleotide
  Sense strand starting at position 2283 of SEQ ID NO: 588360
cacuguguuccucaugagu

SEQ ID NO: 859687 - RNA, 19 nt, Artificial Sequence
  Description of Artificial Sequence: Synthetic oligonucleotide
  Antisense strand to SEQ ID NO: 859686
acucaugaggaacacagug

SEQ ID NO: 859688 - RNA, 19 nt, Artificial Sequence
  Description of Artificial Sequence: Synthetic oligonucleotide
  Sense strand starting at position 2286 of SEQ ID NO: 588360
uguguuccucaugagucuu

SEQ ID NO: 859689 - RNA, 19 nt, Artificial Sequence
  Description of Artificial Sequence: Synthetic oligonucleotide
  Antisense strand to SEQ ID NO: 859688
aagacucaugaggaacaca

SEQ ID NO: 859690 - RNA, 19 nt, Artificial Sequence
  Description of Artificial Sequence: Synthetic oligonucleotide
  Sense strand starting at position 2450 of SEQ ID NO: 588360
aagaguggcuuacugaaua

SEQ ID NO: 859691 - RNA, 19 nt, Artificial Sequence
  Description of Artificial Sequence: Synthetic oligonucleotide
  Antisense strand to SEQ ID NO: 859690
uauucaguaagccacucuu

SEQ ID NO: 859692 - RNA, 19 nt, Artificial Sequence
  Description of Artificial Sequence: Synthetic oligonucleotide
  Sense strand starting at position 2588 of SEQ ID NO: 588360
acaggauaaaguuguugua

SEQ ID NO: 859693 - RNA, 19 nt, Artificial Sequence
  Description of Artificial Sequence: Synthetic oligonucleotide
  Antisense strand to SEQ ID NO: 859692
uacaacaacuuuauccugu

SEQ ID NO: 859694 - RNA, 19 nt, Artificial Sequence
  Description of Artificial Sequence: Synthetic oligonucleotide
  Sense strand starting at position 2668 of SEQ ID NO: 588360
aaauucggauucuaagaga

SEQ ID NO: 859695 - RNA, 19 nt, Artificial Sequence
  Description of Artificial Sequence: Synthetic oligonucleotide
  Antisense strand to SEQ ID NO: 859694
ucucuuagaauccgaauuu

SEQ ID NO: 859696 - RNA, 19 nt, Artificial Sequence
  Description of Artificial Sequence: Synthetic oligonucleotide
  Sense strand starting at position 2671 of SEQ ID NO: 588360
uucggauucuaagagaaga

SEQ ID NO: 859697 - RNA, 19 nt, Artificial Sequence
  Description of Artificial Sequence: Synthetic oligonucleotide
  Antisense strand to SEQ ID NO: 859696
ucuucucuuagaauccgaa

SEQ ID NO: 859698 - RNA, 19 nt, Artificial Sequence
  Description of Artificial Sequence: Synthetic oligonucleotide
  Sense strand starting at position 2818 of SEQ ID NO: 588360
ccgggaguuucaguccaaa

SEQ ID NO: 859699 - RNA, 19 nt, Artificial Sequence
  Description of Artificial Sequence: Synthetic oligonucleotide
  Antisense strand to SEQ ID NO: 859698
uuuggacugaaacucccgg

SEQ ID NO: 859700 - RNA, 19 nt, Artificial Sequence
  Description of Artificial Sequence: Synthetic oligonucleotide
  Sense strand starting at position 3079 of SEQ ID NO: 588360
gccuuagaaugugucauuu

SEQ ID NO: 859701 - RNA, 19 nt, Artificial Sequence
  Description of Artificial Sequence: Synthetic oligonucleotide
  Antisense strand to SEQ ID NO: 859700
aaaugacacauucuaaggc

SEQ ID NO: 859702 - RNA, 19 nt, Artificial Sequence
  Description of Artificial Sequence: Synthetic oligonucleotide
  Sense strand starting at position 3081 of SEQ ID NO: 588360
cuuagaaugugucauuuag

SEQ ID NO: 859703 - RNA, 19 nt, Artificial Sequence
  Description of Artificial Sequence: Synthetic oligonucleotide
  Antisense strand to SEQ ID NO: 859702
cuaaaugacacauucuaag

SEQ ID NO: 859704 - RNA, 19 nt, Artificial Sequence
  Description of Artificial Sequence: Synthetic oligonucleotide
  Sense strand starting at position 3181 of SEQ ID NO: 588360
gugugucaagcuuaacaac

SEQ ID NO: 859705 - RNA, 19 nt, Artificial Sequence
  Description of Artificial Sequence: Synthetic oligonucleotide
  Antisense strand to SEQ ID NO: 859704
guuguuaagcuugacacac

SEQ ID NO: 859706 - RNA, 19 nt, Artificial Sequence
  Description of Artificial Sequence: Synthetic oligonucleotide
  Sense strand starting at position 3382 of SEQ ID NO: 588360
uccagcauucuggauaaua

SEQ ID NO: 859707 - RNA, 19 nt, Artificial Sequence
  Description of Artificial Sequence: Synthetic oligonucleotide
  Antisense strand to SEQ ID NO: 859706
uauuauccagaaugcugga

SEQ ID NO: 859708 - RNA, 19 nt, Artificial Sequence
  Description of Artificial Sequence: Synthetic oligonucleotide
  Sense strand starting at position 3652 of SEQ ID NO: 588360
ggguccugaggguaaugua

SEQ ID NO: 859709 - RNA, 19 nt, Artificial Sequence
  Description of Artificial Sequence: Synthetic oligonucleotide
  Antisense strand to SEQ ID NO: 859708
uacauuacccucaggaccc

SEQ ID NO: 859710 - RNA, 19 nt, Artificial Sequence
  Description of Artificial Sequence: Synthetic oligonucleotide
  Sense strand starting at position 3665 of SEQ ID NO: 588360
aauguagagccauggaauu

SEQ ID NO: 859711 - RNA, 19 nt, Artificial Sequence
  Description of Artificial Sequence: Synthetic oligonucleotide
  Antisense strand to SEQ ID NO: 859710
aauuccauggcucuacauu

SEQ ID NO: 859712 - RNA, 19 nt, Artificial Sequence
  Description of Artificial Sequence: Synthetic oligonucleotide
  Sense strand starting at position 3751 of SEQ ID NO: 588360
agccaaaggcaucauaacu

SEQ ID NO: 859713 - RNA, 19 nt, Artificial Sequence
  Description of Artificial Sequence: Synthetic oligonucleotide
  Antisense strand to SEQ ID NO: 859712
aguuaugaugccuuuggcu

SEQ ID NO: 859714 - RNA, 19 nt, Artificial Sequence
  Description of Artificial Sequence: Synthetic oligonucleotide
  Sense strand starting at position 248 of SEQ ID NO: 588361
uuccuuuaaugaccaggua

SEQ ID NO: 859715 - RNA, 19 nt, Artificial Sequence
  Description of Artificial Sequence: Synthetic oligonucleotide
  Antisense strand to SEQ ID NO: 859714
uaccuggucauuaaaggaa

SEQ ID NO: 859716 - RNA, 19 nt, Artificial Sequence
  Description of Artificial Sequence: Synthetic oligonucleotide
  Sense strand starting at position 251 of SEQ ID NO: 588361
cuuuaaugaccagguacaa

SEQ ID NO: 859717 - RNA, 19 nt, Artificial Sequence
  Description of Artificial Sequence: Synthetic oligonucleotide
  Antisense strand to SEQ ID NO: 859716
uuguaccuggucauuaaag

SEQ ID NO: 859718 - RNA, 19 nt, Artificial Sequence
  Description of Artificial Sequence: Synthetic oligonucleotide
  Sense strand starting at position 339 of SEQ ID NO: 588361
cacauuuacgugugucuua

SEQ ID NO: 859719 - RNA, 19 nt, Artificial Sequence
  Description of Artificial Sequence: Synthetic oligonucleotide
  Antisense strand to SEQ ID NO: 859718
uaagacacacguaaaugug

SEQ ID NO: 859720 - RNA, 19 nt, Artificial Sequence
  Description of Artificial Sequence: Synthetic oligonucleotide
  Sense strand starting at position 340 of SEQ ID NO: 588361
acauuuacgugugucuuaa

SEQ ID NO: 859721 - RNA, 19 nt, Artificial Sequence
  Description of Artificial Sequence: Synthetic oligonucleotide
  Antisense strand to SEQ ID NO: 859720
uuaagacacacguaaaugu

SEQ ID NO: 859722 - RNA, 19 nt, Artificial Sequence
  Description of Artificial Sequence: Synthetic oligonucleotide
  Sense strand starting at position 351 of SEQ ID NO: 588361
ugucuuaaugcagaauaaa

SEQ ID NO: 859723 - RNA, 19 nt, Artificial Sequence
  Description of Artificial Sequence: Synthetic oligonucleotide
  Antisense strand to SEQ ID NO: 859722
uuuauucugcauuaagaca

SEQ ID NO: 859724 - RNA, 19 nt, Artificial Sequence
  Description of Artificial Sequence: Synthetic oligonucleotide
  Sense strand starting at position 425 of SEQ ID NO: 588361
ccaggcauucuugauacau

SEQ ID NO: 859725 - RNA, 19 nt, Artificial Sequence
  Description of Artificial Sequence: Synthetic oligonucleotide
  Antisense strand to SEQ ID NO: 859724
auguaucaagaaugccugg

SEQ ID NO: 859726 - RNA, 19 nt, Artificial Sequence
  Description of Artificial Sequence: Synthetic oligonucleotide
  Sense strand starting at position 434 of SEQ ID NO: 588361
cuugauacaucagugaaca

SEQ ID NO: 859727 - RNA, 19 nt, Artificial Sequence
  Description of Artificial Sequence: Synthetic oligonucleotide
  Antisense strand to SEQ ID NO: 859726
uguucacugauguaucaag

SEQ ID NO: 859728 - RNA, 19 nt, Artificial Sequence
  Description of Artificial Sequence: Synthetic oligonucleotide
  Sense strand starting at position 485 of SEQ ID NO: 588361
gacguugucagugcagcaa

SEQ ID NO: 859729 - RNA, 19 nt, Artificial Sequence
  Description of Artificial Sequence: Synthetic oligonucleotide
  Antisense strand to SEQ ID NO: 859728
uugcugcacugacaacguc

SEQ ID NO: 859730 - RNA, 19 nt, Artificial Sequence
  Description of Artificial Sequence: Synthetic oligonucleotide
  Sense strand starting at position 2000 of SEQ ID NO: 588361
cuggguuaccuuggaagca

SEQ ID NO: 859731 - RNA, 19 nt, Artificial Sequence
  Description of Artificial Sequence: Synthetic oligonucleotide
  Antisense strand to SEQ ID NO: 859730
ugcuuccaagguaacccag

SEQ ID NO: 859732 - RNA, 19 nt, Artificial Sequence
  Description of Artificial Sequence: Synthetic oligonucleotide
  Sense strand starting at position 2088 of SEQ ID NO: 588361
auugacuuaugagcuauau

SEQ ID NO: 859733 - RNA, 19 nt, Artificial Sequence
  Description of Artificial Sequence: Synthetic oligonucleotide
  Antisense strand to SEQ ID NO: 859732
auauagcucauaagucaau

SEQ ID NO: 859734 - RNA, 19 nt, Artificial Sequence
  Description of Artificial Sequence: Synthetic oligonucleotide
  Sense strand starting at position 2294 of SEQ ID NO: 588361
agaauucuaaugcguagaa

SEQ ID NO: 859735 - RNA, 19 nt, Artificial Sequence
  Description of Artificial Sequence: Synthetic oligonucleotide
  Antisense strand to SEQ ID NO: 859734
uucuacgcauuagaauucu

SEQ ID NO: 859736 - RNA, 19 nt, Artificial Sequence
  Description of Artificial Sequence: Synthetic oligonucleotide
  Sense strand starting at position 2295 of SEQ ID NO: 588361
gaauucuaaugcguagaaa

SEQ ID NO: 859737 - RNA, 19 nt, Artificial Sequence
  Description of Artificial Sequence: Synthetic oligonucleotide
  Antisense strand to SEQ ID NO: 859736
uuucuacgcauuagaauuc

SEQ ID NO: 859738 - RNA, 19 nt, Artificial Sequence
  Description of Artificial Sequence: Synthetic oligonucleotide
  Sense strand starting at position 2296 of SEQ ID NO: 588361
aauucuaaugcguagaaag

SEQ ID NO: 859739 - RNA, 19 nt, Artificial Sequence
  Description of Artificial Sequence: Synthetic oligonucleotide
  Antisense strand to SEQ ID NO: 859738
cuuucuacgcauuagaauu

SEQ ID NO: 859740 - RNA, 19 nt, Artificial Sequence
  Description of Artificial Sequence: Synthetic oligonucleotide
  Sense strand starting at position 2493 of SEQ ID NO: 588361
uggauuuauauuggucguu

SEQ ID NO: 859741 - RNA, 19 nt, Artificial Sequence
  Description of Artificial Sequence: Synthetic oligonucleotide
  Antisense strand to SEQ ID NO: 859740
aacgaccaauauaaaucca

SEQ ID NO: 859742 - RNA, 19 nt, Artificial Sequence
  Description of Artificial Sequence: Synthetic oligonucleotide
  Sense strand starting at position 2495 of SEQ ID NO: 588361
gauuuauauuggucguuac

SEQ ID NO: 859743 - RNA, 19 nt, Artificial Sequence
  Description of Artificial Sequence: Synthetic oligonucleotide
  Antisense strand to SEQ ID NO: 859742
guaacgaccaauauaaauc

SEQ ID NO: 859744 - RNA, 19 nt, Artificial Sequence
  Description of Artificial Sequence: Synthetic oligonucleotide
  Sense strand starting at position 2499 of SEQ ID NO: 588361
uauauuggucguuacacuu

SEQ ID NO: 859745 - RNA, 19 nt, Artificial Sequence
  Description of Artificial Sequence: Synthetic oligonucleotide
  Antisense strand to SEQ ID NO: 859744
aaguguaacgaccaauaua

SEQ ID NO: 859746 - RNA, 19 nt, Artificial Sequence
  Description of Artificial Sequence: Synthetic oligonucleotide
  Sense strand starting at position 3051 of SEQ ID NO: 588361
uaaauugcugcugauguua

SEQ ID NO: 859747 - RNA, 19 nt, Artificial Sequence
  Description of Artificial Sequence: Synthetic oligonucleotide
  Antisense strand to SEQ ID NO: 859746
uaacaucagcagcaauuua

SEQ ID NO: 859748 - RNA, 19 nt, Artificial Sequence
  Description of Artificial Sequence: Synthetic oligonucleotide
  Sense strand starting at position 3164 of SEQ ID NO: 588361
guaagucugacugagucuu

SEQ ID NO: 859749 - RNA, 19 nt, Artificial Sequence
  Description of Artificial Sequence: Synthetic oligonucleotide
  Antisense strand to SEQ ID NO: 859748
aagacucagucagacuuac

SEQ ID NO: 859750 - RNA, 19 nt, Artificial Sequence
  Description of Artificial Sequence: Synthetic oligonucleotide
  Sense strand starting at position 3166 of SEQ ID NO: 588361
aagucugacugagucuuaa

SEQ ID NO: 859751 - RNA, 19 nt, Artificial Sequence
  Description of Artificial Sequence: Synthetic oligonucleotide
  Antisense strand to SEQ ID NO: 859750
uuaagacucagucagacuu

SEQ ID NO: 859752 - RNA, 19 nt, Artificial Sequence
  Description of Artificial Sequence: Synthetic oligonucleotide
  Sense strand starting at position 3254 of SEQ ID NO: 588361
uguauuauuugugucuaag

SEQ ID NO: 859753 - RNA, 19 nt, Artificial Sequence
  Description of Artificial Sequence: Synthetic oligonucleotide
  Antisense strand to SEQ ID NO: 859752
cuuagacacaaauaauaca

SEQ ID NO: 859754 - RNA, 19 nt, Artificial Sequence
  Description of Artificial Sequence: Synthetic oligonucleotide
  Sense strand starting at position 3371 of SEQ ID NO: 588361
ucuugauguggguacuaau

SEQ ID NO: 859755 - RNA, 19 nt, Artificial Sequence
  Description of Artificial Sequence: Synthetic oligonucleotide
  Antisense strand to SEQ ID NO: 859754
auuaguacccacaucaaga

SEQ ID NO: 859756 - RNA, 19 nt, Artificial Sequence
  Description of Artificial Sequence: Synthetic oligonucleotide
  Sense strand starting at position 3385 of SEQ ID NO: 588361
cuaauuacaugaguaaggu

SEQ ID NO: 859757 - RNA, 19 nt, Artificial Sequence
  Description of Artificial Sequence: Synthetic oligonucleotide
  Antisense strand to SEQ ID NO: 859756
accuuacucauguaauuag

SEQ ID NO: 859758 - RNA, 19 nt, Artificial Sequence
  Description of Artificial Sequence: Synthetic oligonucleotide
  Sense strand starting at position 3422 of SEQ ID NO: 588361
uggaguuacaguuaugauu

SEQ ID NO: 859759 - RNA, 19 nt, Artificial Sequence
  Description of Artificial Sequence: Synthetic oligonucleotide
  Antisense strand to SEQ ID NO: 859758
aaucauaacuguaacucca

SEQ ID NO: 859760 - RNA, 19 nt, Artificial Sequence
  Description of Artificial Sequence: Synthetic oligonucleotide
  Sense strand starting at position 3430 of SEQ ID NO: 588361
caguuaugauuugugugca

SEQ ID NO: 859761 - RNA, 19 nt, Artificial Sequence
  Description of Artificial Sequence: Synthetic oligonucleotide
  Antisense strand to SEQ ID NO: 859760
ugcacacaaaucauaacug

SEQ ID NO: 859762 - RNA, 19 nt, Artificial Sequence
  Description of Artificial Sequence: Synthetic oligonucleotide
  Sense strand starting at position 3433 of SEQ ID NO: 588361
uuaugauuugugugcaucu

SEQ ID NO: 859763 - RNA, 19 nt, Artificial Sequence
  Description of Artificial Sequence: Synthetic oligonucleotide
  Antisense strand to SEQ ID NO: 859762
agaugcacacaaaucauaa

SEQ ID NO: 859764 - RNA, 19 nt, Artificial Sequence
  Description of Artificial Sequence: Synthetic oligonucleotide
  Sense strand starting at position 3556 of SEQ ID NO: 588361
aacugaaauccguggauga

SEQ ID NO: 859765 - RNA, 19 nt, Artificial Sequence
  Description of Artificial Sequence: Synthetic oligonucleotide
  Antisense strand to SEQ ID NO: 859764
ucauccacggauuucaguu

SEQ ID NO: 859766 - RNA, 19 nt, Artificial Sequence
  Description of Artificial Sequence: Synthetic oligonucleotide
  Sense strand starting at position 3557 of SEQ ID NO: 588361
acugaaauccguggaugau

SEQ ID NO: 859767 - RNA, 19 nt, Artificial Sequence
  Description of Artificial Sequence: Synthetic oligonucleotide
  Antisense strand to SEQ ID NO: 859766
aucauccacggauuucagu

SEQ ID NO: 859768 - RNA, 19 nt, Artificial Sequence
  Description of Artificial Sequence: Synthetic oligonucleotide
  Sense strand starting at position 3558 of SEQ ID NO: 588361
cugaaauccguggaugauu

SEQ ID NO: 859769 - RNA, 19 nt, Artificial Sequence
  Description of Artificial Sequence: Synthetic oligonucleotide
  Antisense strand to SEQ ID NO: 859768
aaucauccacggauuucag

SEQ ID NO: 859770 - RNA, 19 nt, Artificial Sequence
  Description of Artificial Sequence: Synthetic oligonucleotide
  Sense strand starting at position 3636 of SEQ ID NO: 588361
aauuaaggguuguuguaca

SEQ ID NO: 859771 - RNA, 19 nt, Artificial Sequence
  Description of Artificial Sequence: Synthetic oligonucleotide
  Antisense strand to SEQ ID NO: 859770
uguacaacaacccuuaauu

SEQ ID NO: 859772 - RNA, 19 nt, Artificial Sequence
  Description of Artificial Sequence: Synthetic oligonucleotide
  Sense strand starting at position 3641 of SEQ ID NO: 588361
aggguuguuguacagucau

SEQ ID NO: 859773 - RNA, 19 nt, Artificial Sequence
  Description of Artificial Sequence: Synthetic oligonucleotide
  Antisense strand to SEQ ID NO: 859772
augacuguacaacaacccu

SEQ ID NO: 859774 - RNA, 19 nt, Artificial Sequence
  Description of Artificial Sequence: Synthetic oligonucleotide
  Sense strand starting at position 3649 of SEQ ID NO: 588361
uguacagucauuuguuguu

SEQ ID NO: 859775 - RNA, 19 nt, Artificial Sequence
  Description of Artificial Sequence: Synthetic oligonucleotide
  Antisense strand to SEQ ID NO: 859774
aacaacaaaugacuguaca

SEQ ID NO: 859776 - RNA, 19 nt, Artificial Sequence
  Description of Artificial Sequence: Synthetic oligonucleotide
  Sense strand starting at position 3768 of SEQ ID NO: 588361
aguauuugggcuugguauu

SEQ ID NO: 859777 - RNA, 19 nt, Artificial Sequence
  Description of Artificial Sequence: Synthetic oligonucleotide
  Antisense strand to SEQ ID NO: 859776
aauaccaagcccaaauacu

SEQ ID NO: 859778 - RNA, 19 nt, Artificial Sequence
  Description of Artificial Sequence: Synthetic oligonucleotide
  Sense strand starting at position 3831 of SEQ ID NO: 588361
acauuaagucuuuaguuag

SEQ ID NO: 859779 - RNA, 19 nt, Artificial Sequence
  Description of Artificial Sequence: Synthetic oligonucleotide
  Antisense strand to SEQ ID NO: 859778
cuaacuaaagacuuaaugu

SEQ ID NO: 859780 - RNA, 19 nt, Artificial Sequence
  Description of Artificial Sequence: Synthetic oligonucleotide
  Sense strand starting at position 3852 of SEQ ID NO: 588361
cugaacaaccuguauguaa

SEQ ID NO: 859781 - RNA, 19 nt, Artificial Sequence
  Description of Artificial Sequence: Synthetic oligonucleotide
  Antisense strand to SEQ ID NO: 859780
uuacauacagguuguucag

SEQ ID NO: 859782 - RNA, 19 nt, Artificial Sequence
  Description of Artificial Sequence: Synthetic oligonucleotide
  Sense strand starting at position 3901 of SEQ ID NO: 588361
ugauuuccguuugucuuaa

SEQ ID NO: 859783 - RNA, 19 nt, Artificial Sequence
  Description of Artificial Sequence: Synthetic oligonucleotide
  Antisense strand to SEQ ID NO: 859782
uuaagacaaacggaaauca

SEQ ID NO: 859784 - RNA, 19 nt, Artificial Sequence
  Description of Artificial Sequence: Synthetic oligonucleotide
  Sense strand starting at position 3902 of SEQ ID NO: 588361
gauuuccguuugucuuaau

SEQ ID NO: 859785 - RNA, 19 nt, Artificial Sequence
  Description of Artificial Sequence: Synthetic oligonucleotide
  Antisense strand to SEQ ID NO: 859784
auuaagacaaacggaaauc

SEQ ID NO: 859786 - RNA, 19 nt, Artificial Sequence
  Description of Artificial Sequence: Synthetic oligonucleotide
  Sense strand starting at position 3903 of SEQ ID NO: 588361
auuuccguuugucuuaaua

SEQ ID NO: 859787 - RNA, 19 nt, Artificial Sequence
  Description of Artificial Sequence: Synthetic oligonucleotide
  Antisense strand to SEQ ID NO: 859786
uauuaagacaaacggaaau

SEQ ID NO: 859788 - RNA, 19 nt, Artificial Sequence
  Description of Artificial Sequence: Synthetic oligonucleotide
  Sense strand starting at position 3959 of SEQ ID NO: 588361
cuggcaauuucucaggaag

SEQ ID NO: 859789 - RNA, 19 nt, Artificial Sequence
  Description of Artificial Sequence: Synthetic oligonucleotide
  Antisense strand to SEQ ID NO: 859788
cuuccugagaaauugccag

SEQ ID NO: 859790 - RNA, 19 nt, Artificial Sequence
  Description of Artificial Sequence: Synthetic oligonucleotide
  Sense strand starting at position 3971 of SEQ ID NO: 588361
caggaagucaaguauagug

SEQ ID NO: 859791 - RNA, 19 nt, Artificial Sequence
  Description of Artificial Sequence: Synthetic oligonucleotide
  Antisense strand to SEQ ID NO: 859790
cacuauacuugacuuccug

SEQ ID NO: 859792 - RNA, 19 nt, Artificial Sequence
  Description of Artificial Sequence: Synthetic oligonucleotide
  Sense strand starting at position 3973 of SEQ ID NO: 588361
ggaagucaaguauaguguu

SEQ ID NO: 859793 - RNA, 19 nt, Artificial Sequence
  Description of Artificial Sequence: Synthetic oligonucleotide
  Antisense strand to SEQ ID NO: 859792
aacacuauacuugacuucc

SEQ ID NO: 859794 - RNA, 19 nt, Artificial Sequence
  Description of Artificial Sequence: Synthetic oligonucleotide
  Sense strand starting at position 136 of SEQ ID NO: 588362
cuuuguaaauaagcagaaa

SEQ ID NO: 859795 - RNA, 19 nt, Artificial Sequence
  Description of Artificial Sequence: Synthetic oligonucleotide
  Antisense strand to SEQ ID NO: 859794
uuucugcuuauuuacaaag

SEQ ID NO: 859796 - RNA, 19 nt, Artificial Sequence
  Description of Artificial Sequence: Synthetic oligonucleotide
  Sense strand starting at position 236 of SEQ ID NO: 588362
guguguauuucuucccuau

SEQ ID NO: 859797 - RNA, 19 nt, Artificial Sequence
  Description of Artificial Sequence: Synthetic oligonucleotide
  Antisense strand to SEQ ID NO: 859796
auagggaagaaauacacac

SEQ ID NO: 859798 - RNA, 19 nt, Artificial Sequence
  Description of Artificial Sequence: Synthetic oligonucleotide
  Sense strand starting at position 238 of SEQ ID NO: 588362
guguauuucuucccuaucu

SEQ ID NO: 859799 - RNA, 19 nt, Artificial Sequence
  Description of Artificial Sequence: Synthetic oligonucleotide
  Antisense strand to SEQ ID NO: 859798
agauagggaagaaauacac

SEQ ID NO: 859800 - RNA, 19 nt, Artificial Sequence
  Description of Artificial Sequence: Synthetic oligonucleotide
  Sense strand starting at position 248 of SEQ ID NO: 588362
ucccuaucugucuagcaca

SEQ ID NO: 859801 - RNA, 19 nt, Artificial Sequence
  Description of Artificial Sequence: Synthetic oligonucleotide
  Antisense strand to SEQ ID NO: 859800
ugugcuagacagauaggga

SEQ ID NO: 859802 - RNA, 19 nt, Artificial Sequence
  Description of Artificial Sequence: Synthetic oligonucleotide
  Sense strand starting at position 420 of SEQ ID NO: 588362
cguguauuccaggucuggu

SEQ ID NO: 859803 - RNA, 19 nt, Artificial Sequence
  Description of Artificial Sequence: Synthetic oligonucleotide
  Antisense strand to SEQ ID NO: 859802
accagaccuggaauacacg

SEQ ID NO: 859804 - RNA, 19 nt, Artificial Sequence
  Description of Artificial Sequence: Synthetic oligonucleotide
  Sense strand starting at position 522 of SEQ ID NO: 588362
ccacccauuugacagauga

SEQ ID NO: 859805 - RNA, 19 nt, Artificial Sequence
  Description of Artificial Sequence: Synthetic oligonucleotide
  Antisense strand to SEQ ID NO: 859804
ucaucugucaaaugggugg

SEQ ID NO: 859806 - RNA, 19 nt, Artificial Sequence
  Description of Artificial Sequence: Synthetic oligonucleotide
  Sense strand starting at position 571 of SEQ ID NO: 588362
aaaggugacucugcugaua

SEQ ID NO: 859807 - RNA, 19 nt, Artificial Sequence
  Description of Artificial Sequence: Synthetic oligonucleotide
  Antisense strand to SEQ ID NO: 859806
uaucagcagagucaccuuu

SEQ ID NO: 859808 - RNA, 19 nt, Artificial Sequence
  Description of Artificial Sequence: Synthetic oligonucleotide
  Sense strand starting at position 823 of SEQ ID NO: 588362
gucucuuuacgugaaagua

SEQ ID NO: 859809 - RNA, 19 nt, Artificial Sequence
  Description of Artificial Sequence: Synthetic oligonucleotide
  Antisense strand to SEQ ID NO: 859808
uacuuucacguaaagagac

SEQ ID NO: 859810 - RNA, 19 nt, Artificial Sequence
  Description of Artificial Sequence: Synthetic oligonucleotide
  Sense strand starting at position 838 of SEQ ID NO: 588362
aguagaaccuugccaaaga

SEQ ID NO: 859811 - RNA, 19 nt, Artificial Sequence
  Description of Artificial Sequence: Synthetic oligonucleotide
  Antisense strand to SEQ ID NO: 859810
ucuuuggcaagguucuacu

SEQ ID NO: 859812 - RNA, 19 nt, Artificial Sequence
  Description of Artificial Sequence: Synthetic oligonucleotide
  Sense strand starting at position 885 of SEQ ID NO: 588362
uuagaucagugacuuaaag

SEQ ID NO: 859813 - RNA, 19 nt, Artificial Sequence
  Description of Artificial Sequence: Synthetic oligonucleotide
  Antisense strand to SEQ ID NO: 859812
cuuuaagucacugaucuaa

SEQ ID NO: 859814 - RNA, 19 nt, Artificial Sequence
  Description of Artificial Sequence: Synthetic oligonucleotide
  Sense strand starting at position 1004 of SEQ ID NO: 588362
aaggaucaugcaugucauc

SEQ ID NO: 859815 - RNA, 19 nt, Artificial Sequence
  Description of Artificial Sequence: Synthetic oligonucleotide
  Antisense strand to SEQ ID NO: 859814
gaugacaugcaugauccuu

SEQ ID NO: 859816 - RNA, 19 nt, Artificial Sequence
  Description of Artificial Sequence: Synthetic oligonucleotide
  Sense strand starting at position 1010 of SEQ ID NO: 588362
caugcaugucaucaaaggu

SEQ ID NO: 859817 - RNA, 19 nt, Artificial Sequence
  Description of Artificial Sequence: Synthetic oligonucleotide
  Antisense strand to SEQ ID NO: 859816
accuuugaugacaugcaug

SEQ ID NO: 859818 - RNA, 19 nt, Artificial Sequence
  Description of Artificial Sequence: Synthetic oligonucleotide
  Sense strand starting at position 1470 of SEQ ID NO: 588362
aguggaaucuaguuaacau

SEQ ID NO: 859819 - RNA, 19 nt, Artificial Sequence
  Description of Artificial Sequence: Synthetic oligonucleotide
  Antisense strand to SEQ ID NO: 859818
auguuaacuagauuccacu

SEQ ID NO: 859820 - RNA, 19 nt, Artificial Sequence
  Description of Artificial Sequence: Synthetic oligonucleotide
  Sense strand starting at position 1532 of SEQ ID NO: 588362
aguggaaucuaguuaacac

SEQ ID NO: 859821 - RNA, 19 nt, Artificial Sequence
  Description of Artificial Sequence: Synthetic oligonucleotide
  Antisense strand to SEQ ID NO: 859820
guguuaacuagauuccacu

SEQ ID NO: 859822 - RNA, 19 nt, Artificial Sequence
  Description of Artificial Sequence: Synthetic oligonucleotide
  Sense strand starting at position 2074 of SEQ ID NO: 588362
guggguucaguugauauag

SEQ ID NO: 859823 - RNA, 19 nt, Artificial Sequence
  Description of Artificial Sequence: Synthetic oligonucleotide
  Antisense strand to SEQ ID NO: 859822
cuauaucaacugaacccac

SEQ ID NO: 859824 - RNA, 19 nt, Artificial Sequence
  Description of Artificial Sequence: Synthetic oligonucleotide
  Sense strand starting at position 2083 of SEQ ID NO: 588362
guugauauagcaggcuaaa

SEQ ID NO: 859825 - RNA, 19 nt, Artificial Sequence
  Description of Artificial Sequence: Synthetic oligonucleotide
  Antisense strand to SEQ ID NO: 859824
uuuagccugcuauaucaac

SEQ ID NO: 859826 - RNA, 19 nt, Artificial Sequence
  Description of Artificial Sequence: Synthetic oligonucleotide
  Sense strand starting at position 2102 of SEQ ID NO: 588362
gauccuaauggucaaagcu

SEQ ID NO: 859827 - RNA, 19 nt, Artificial Sequence
  Description of Artificial Sequence: Synthetic oligonucleotide
  Antisense strand to SEQ ID NO: 859826
agcuuugaccauuaggauc

SEQ ID NO: 859828 - RNA, 19 nt, Artificial Sequence
  Description of Artificial Sequence: Synthetic oligonucleotide
  Sense strand starting at position 2109 of SEQ ID NO: 588362
auggucaaagcuugaaaua

SEQ ID NO: 859829 - RNA, 19 nt, Artificial Sequence
  Description of Artificial Sequence: Synthetic oligonucleotide
  Antisense strand to SEQ ID NO: 859828
uauuucaagcuuugaccau

SEQ ID NO: 859830 - RNA, 19 nt, Artificial Sequence
  Description of Artificial Sequence: Synthetic oligonucleotide
  Sense strand starting at position 2110 of SEQ ID NO: 588362
uggucaaagcuugaaauau

SEQ ID NO: 859831 - RNA, 19 nt, Artificial Sequence
  Description of Artificial Sequence: Synthetic oligonucleotide
  Antisense strand to SEQ ID NO: 859830
auauuucaagcuuugacca

SEQ ID NO: 859832 - RNA, 19 nt, Artificial Sequence
  Description of Artificial Sequence: Synthetic oligonucleotide
  Sense strand starting at position 2128 of SEQ ID NO: 588362
ugaggauauucuucuacug

SEQ ID NO: 859833 - RNA, 19 nt, Artificial Sequence
  Description of Artificial Sequence: Synthetic oligonucleotide
  Antisense strand to SEQ ID NO: 859832
caguagaagaauauccuca

SEQ ID NO: 859834 - RNA, 19 nt, Artificial Sequence
  Description of Artificial Sequence: Synthetic oligonucleotide
  Sense strand starting at position 2156 of SEQ ID NO: 588362
guggguuugaaguaaccuu

SEQ ID NO: 859835 - RNA, 19 nt, Artificial Sequence
  Description of Artificial Sequence: Synthetic oligonucleotide
  Antisense strand to SEQ ID NO: 859834
aagguuacuucaaacccac

SEQ ID NO: 859836 - RNA, 19 nt, Artificial Sequence
  Description of Artificial Sequence: Synthetic oligonucleotide
  Sense strand starting at position 2406 of SEQ ID NO: 588362
gacugaaaguggguuaauc

SEQ ID NO: 859837 - RNA, 19 nt, Artificial Sequence
  Description of Artificial Sequence: Synthetic oligonucleotide
  Antisense strand to SEQ ID NO: 859836
gauuaacccacuuucaguc

SEQ ID NO: 859838 - RNA, 19 nt, Artificial Sequence
  Description of Artificial Sequence: Synthetic oligonucleotide
  Sense strand starting at position 2584 of SEQ ID NO: 588362
auggcaugugaauauaugu

SEQ ID NO: 859839 - RNA, 19 nt, Artificial Sequence
  Description of Artificial Sequence: Synthetic oligonucleotide
  Antisense strand to SEQ ID NO: 859838
acauauauucacaugccau

SEQ ID NO: 859840 - RNA, 19 nt, Artificial Sequence
  Description of Artificial Sequence: Synthetic oligonucleotide
  Sense strand starting at position 2589 of SEQ ID NO: 588362
augugaauauaugucaaag

SEQ ID NO: 859841 - RNA, 19 nt, Artificial Sequence
  Description of Artificial Sequence: Synthetic oligonucleotide
  Antisense strand to SEQ ID NO: 859840
cuuugacauauauucacau

SEQ ID NO: 859842 - RNA, 19 nt, Artificial Sequence
  Description of Artificial Sequence: Synthetic oligonucleotide
  Sense strand starting at position 2685 of SEQ ID NO: 588362
gucuuugaauuaguuacaa

SEQ ID NO: 859843 - RNA, 19 nt, Artificial Sequence
  Description of Artificial Sequence: Synthetic oligonucleotide
  Antisense strand to SEQ ID NO: 859842
uuguaacuaauucaaagac

SEQ ID NO: 859844 - RNA, 19 nt, Artificial Sequence
  Description of Artificial Sequence: Synthetic oligonucleotide
  Sense strand starting at position 2758 of SEQ ID NO: 588362
aguugugauaccuggaauu

SEQ ID NO: 859845 - RNA, 19 nt, Artificial Sequence
  Description of Artificial Sequence: Synthetic oligonucleotide
  Antisense strand to SEQ ID NO: 859844
aauuccagguaucacaacu

SEQ ID NO: 859846 - RNA, 19 nt, Artificial Sequence
  Description of Artificial Sequence: Synthetic oligonucleotide
  Sense strand starting at position 2809 of SEQ ID NO: 588362
gggagcagcguuagguaua

SEQ ID NO: 859847 - RNA, 19 nt, Artificial Sequence
  Description of Artificial Sequence: Synthetic oligonucleotide
  Antisense strand to SEQ ID NO: 859846
uauaccuaacgcugcuccc

SEQ ID NO: 859848 - RNA, 19 nt, Artificial Sequence
  Description of Artificial Sequence: Synthetic oligonucleotide
  Sense strand starting at position 2841 of SEQ ID NO: 588362
uugauagcuacugggugaa

SEQ ID NO: 859849 - RNA, 19 nt, Artificial Sequence
  Description of Artificial Sequence: Synthetic oligonucleotide
  Antisense strand to SEQ ID NO: 859848
uucacccaguagcuaucaa

SEQ ID NO: 859850 - RNA, 19 nt, Artificial Sequence
  Description of Artificial Sequence: Synthetic oligonucleotide
  Sense strand starting at position 2889 of SEQ ID NO: 588362
uuucuacauuuguugaguu

SEQ ID NO: 859851 - RNA, 19 nt, Artificial Sequence
  Description of Artificial Sequence: Synthetic oligonucleotide
  Antisense strand to SEQ ID NO: 859850
aacucaacaaauguagaaa

SEQ ID NO: 859852 - RNA, 19 nt, Artificial Sequence
  Description of Artificial Sequence: Synthetic oligonucleotide
  Sense strand starting at position 2942 of SEQ ID NO: 588362
gggaaugguucuucggacu

SEQ ID NO: 859853 - RNA, 19 nt, Artificial Sequence
  Description of Artificial Sequence: Synthetic oligonucleotide
  Antisense strand to SEQ ID NO: 859852
aguccgaagaaccauuccc

SEQ ID NO: 859854 - RNA, 19 nt, Artificial Sequence
  Description of Artificial Sequence: Synthetic oligonucleotide
  Sense strand starting at position 3135 of SEQ ID NO: 588362
ccuucugaaguuuaucaga

SEQ ID NO: 859855 - RNA, 19 nt, Artificial Sequence
  Description of Artificial Sequence: Synthetic oligonucleotide
  Antisense strand to SEQ ID NO: 859854
ucugauaaacuucagaagg

SEQ ID NO: 859856 - RNA, 19 nt, Artificial Sequence
  Description of Artificial Sequence: Synthetic oligonucleotide
  Sense strand starting at position 3137 of SEQ ID NO: 588362
uucugaaguuuaucagaag

SEQ ID NO: 859857 - RNA, 19 nt, Artificial Sequence
  Description of Artificial Sequence: Synthetic oligonucleotide
  Antisense strand to SEQ ID NO: 859856
cuucugauaaacuucagaa

SEQ ID NO: 859858 - RNA, 19 nt, Artificial Sequence
  Description of Artificial Sequence: Synthetic oligonucleotide
  Sense strand starting at position 3497 of SEQ ID NO: 588362
uauagaguugcauauagac

SEQ ID NO: 859859 - RNA, 19 nt, Artificial Sequence
  Description of Artificial Sequence: Synthetic oligonucleotide
  Antisense strand to SEQ ID NO: 859858
gucuauaugcaacucuaua

SEQ ID NO: 859860 - RNA, 19 nt, Artificial Sequence
  Description of Artificial Sequence: Synthetic oligonucleotide
  Sense strand starting at position 3561 of SEQ ID NO: 588362
gagaacuugucaguuccaa

SEQ ID NO: 859861 - RNA, 19 nt, Artificial Sequence
  Description of Artificial Sequence: Synthetic oligonucleotide
  Antisense strand to SEQ ID NO: 859860
uuggaacugacaaguucuc

SEQ ID NO: 859862 - RNA, 19 nt, Artificial Sequence
  Description of Artificial Sequence: Synthetic oligonucleotide
  Sense strand starting at position 3729 of SEQ ID NO: 588362
uggcuugaccgauaucuaa

SEQ ID NO: 859863 - RNA, 19 nt, Artificial Sequence
  Description of Artificial Sequence: Synthetic oligonucleotide
  Antisense strand to SEQ ID NO: 859862
uuagauaucggucaagcca

SEQ ID NO: 859864 - RNA, 19 nt, Artificial Sequence
  Description of Artificial Sequence: Synthetic oligonucleotide
  Sense strand starting at position 3750 of SEQ ID NO: 588362
gcauuuaccucugaaauga

SEQ ID NO: 859865 - RNA, 19 nt, Artificial Sequence
  Description of Artificial Sequence: Synthetic oligonucleotide
  Antisense strand to SEQ ID NO: 859864
ucauuucagagguaaaugc

SEQ ID NO: 859866 - RNA, 19 nt, Artificial Sequence
  Description of Artificial Sequence: Synthetic oligonucleotide
  Sense strand starting at position 3832 of SEQ ID NO: 588362
cuaaacuagcuauguuuga

SEQ ID NO: 859867 - RNA, 19 nt, Artificial Sequence
  Description of Artificial Sequence: Synthetic oligonucleotide
  Antisense strand to SEQ ID NO: 859866
ucaaacauagcuaguuuag

SEQ ID NO: 859868 - RNA, 19 nt, Artificial Sequence
  Description of Artificial Sequence: Synthetic oligonucleotide
  Sense strand starting at position 3836 of SEQ ID NO: 588362
acuagcuauguuugagaag

SEQ ID NO: 859869 - RNA, 19 nt, Artificial Sequence
  Description of Artificial Sequence: Synthetic oligonucleotide
  Antisense strand to SEQ ID NO: 859868
cuucucaaacauagcuagu

SEQ ID NO: 859870 - RNA, 19 nt, Artificial Sequence
  Description of Artificial Sequence: Synthetic oligonucleotide
  Sense strand starting at position 3955 of SEQ ID NO: 588362
gcuggacuuagucagacaa

SEQ ID NO: 859871 - RNA, 19 nt, Artificial Sequence
  Description of Artificial Sequence: Synthetic oligonucleotide
  Antisense strand to SEQ ID NO: 859870
uugucugacuaaguccagc

SEQ ID NO: 859872 - RNA, 19 nt, Artificial Sequence
  Description of Artificial Sequence: Synthetic oligonucleotide
  Sense strand starting at position 3973 of SEQ ID NO: 588362
aacagaauagguggcauaa

SEQ ID NO: 859873 - RNA, 19 nt, Artificial Sequence
  Description of Artificial Sequence: Synthetic oligonucleotide
  Antisense strand to SEQ ID NO: 859872
uuaugccaccuauucuguu

SEQ ID NO: 859874 - RNA, 19 nt, Artificial Sequence
  Description of Artificial Sequence: Synthetic oligonucleotide
  Sense strand starting at position 106 of SEQ ID NO: 588363
gcuuuauucccuugaaaga

SEQ ID NO: 859875 - RNA, 19 nt, Artificial Sequence
  Description of Artificial Sequence: Synthetic oligonucleotide
  Antisense strand to SEQ ID NO: 859874
ucuuucaagggaauaaagc

SEQ ID NO: 859876 - RNA, 19 nt, Artificial Sequence
  Description of Artificial Sequence: Synthetic oligonucleotide
  Sense strand starting at position 171 of SEQ ID NO: 588363
ucucuuaacuggguaacuu

SEQ ID NO: 859877 - RNA, 19 nt, Artificial Sequence
  Description of Artificial Sequence: Synthetic oligonucleotide
  Antisense strand to SEQ ID NO: 859876
aaguuacccaguuaagaga

SEQ ID NO: 859878 - RNA, 19 nt, Artificial Sequence
  Description of Artificial Sequence: Synthetic oligonucleotide
  Sense strand starting at position 172 of SEQ ID NO: 588363
cucuuaacuggguaacuua

SEQ ID NO: 859879 - RNA, 19 nt, Artificial Sequence
  Description of Artificial Sequence: Synthetic oligonucleotide
  Antisense strand to SEQ ID NO: 859878
uaaguuacccaguuaagag

SEQ ID NO: 859880 - RNA, 19 nt, Artificial Sequence
  Description of Artificial Sequence: Synthetic oligonucleotide
  Sense strand starting at position 179 of SEQ ID NO: 588363
cuggguaacuuaucucaug

SEQ ID NO: 859881 - RNA, 19 nt, Artificial Sequence
  Description of Artificial Sequence: Synthetic oligonucleotide
  Antisense strand to SEQ ID NO: 859880
caugagauaaguuacccag

SEQ ID NO: 859882 - RNA, 19 nt, Artificial Sequence
  Description of Artificial Sequence: Synthetic oligonucleotide
  Sense strand starting at position 559 of SEQ ID NO: 588363
gacaguguuauauggcaug

SEQ ID NO: 859883 - RNA, 19 nt, Artificial Sequence
  Description of Artificial Sequence: Synthetic oligonucleotide
  Antisense strand to SEQ ID NO: 859882
caugccauauaacacuguc

SEQ ID NO: 859884 - RNA, 19 nt, Artificial Sequence
  Description of Artificial Sequence: Synthetic oligonucleotide
  Sense strand starting at position 564 of SEQ ID NO: 588363
uguuauauggcaugggaua

SEQ ID NO: 859885 - RNA, 19 nt, Artificial Sequence
  Description of Artificial Sequence: Synthetic oligonucleotide
  Antisense strand to SEQ ID NO: 859884
uaucccaugccauauaaca

SEQ ID NO: 859886 - RNA, 19 nt, Artificial Sequence
  Description of Artificial Sequence: Synthetic oligonucleotide
  Sense strand starting at position 565 of SEQ ID NO: 588363
guuauauggcaugggauaa

SEQ ID NO: 859887 - RNA, 19 nt, Artificial Sequence
  Description of Artificial Sequence: Synthetic oligonucleotide
  Antisense strand to SEQ ID NO: 859886
uuaucccaugccauauaac

SEQ ID NO: 859888 - RNA, 19 nt, Artificial Sequence
  Description of Artificial Sequence: Synthetic oligonucleotide
  Sense strand starting at position 566 of SEQ ID NO: 588363
uuauauggcaugggauaau

SEQ ID NO: 859889 - RNA, 19 nt, Artificial Sequence
  Description of Artificial Sequence: Synthetic oligonucleotide
  Antisense strand to SEQ ID NO: 859888
auuaucccaugccauauaa

SEQ ID NO: 859890 - RNA, 19 nt, Artificial Sequence
  Description of Artificial Sequence: Synthetic oligonucleotide
  Sense strand starting at position 664 of SEQ ID NO: 588363
uacucuaaggcaugucuga

SEQ ID NO: 859891 - RNA, 19 nt, Artificial Sequence
  Description of Artificial Sequence: Synthetic oligonucleotide
  Antisense strand to SEQ ID NO: 859890
ucagacaugccuuagagua

SEQ ID NO: 859892 - RNA, 19 nt, Artificial Sequence
  Description of Artificial Sequence: Synthetic oligonucleotide
  Sense strand starting at position 685 of SEQ ID NO: 588363
acagcaucgcuguaacaca

SEQ ID NO: 859893 - RNA, 19 nt, Artificial Sequence
  Description of Artificial Sequence: Synthetic oligonucleotide
  Antisense strand to SEQ ID NO: 859892
uguguuacagcgaugcugu

SEQ ID NO: 859894 - RNA, 19 nt, Artificial Sequence
  Description of Artificial Sequence: Synthetic oligonucleotide
  Sense strand starting at position 738 of SEQ ID NO: 588363
ccacaaugugauugaggca

SEQ ID NO: 859895 - RNA, 19 nt, Artificial Sequence
  Description of Artificial Sequence: Synthetic oligonucleotide
  Antisense strand to SEQ ID NO: 859894
ugccucaaucacauugugg

SEQ ID NO: 859896 - RNA, 19 nt, Artificial Sequence
  Description of Artificial Sequence: Synthetic oligonucleotide
  Sense strand starting at position 743 of SEQ ID NO: 588363
augugauugaggcaggauu

SEQ ID NO: 859897 - RNA, 19 nt, Artificial Sequence
  Description of Artificial Sequence: Synthetic oligonucleotide
  Antisense strand to SEQ ID NO: 859896
aauccugccucaaucacau

SEQ ID NO: 859898 - RNA, 19 nt, Artificial Sequence
  Description of Artificial Sequence: Synthetic oligonucleotide
  Sense strand starting at position 805 of SEQ ID NO: 588363
ugacuuccacagggucaua

SEQ ID NO: 859899 - RNA, 19 nt, Artificial Sequence
  Description of Artificial Sequence: Synthetic oligonucleotide
  Antisense strand to SEQ ID NO: 859898
uaugacccuguggaaguca

SEQ ID NO: 859900 - RNA, 19 nt, Artificial Sequence
  Description of Artificial Sequence: Synthetic oligonucleotide
  Sense strand starting at position 884 of SEQ ID NO: 588363
ggcauugagguacaggauu

SEQ ID NO: 859901 - RNA, 19 nt, Artificial Sequence
  Description of Artificial Sequence: Synthetic oligonucleotide
  Antisense strand to SEQ ID NO: 859900
aauccuguaccucaaugcc

SEQ ID NO: 859902 - RNA, 19 nt, Artificial Sequence
  Description of Artificial Sequence: Synthetic oligonucleotide
  Sense strand starting at position 902 of SEQ ID NO: 588363
uuuggaacauucucaaguu

SEQ ID NO: 859903 - RNA, 19 nt, Artificial Sequence
  Description of Artificial Sequence: Synthetic oligonucleotide
  Antisense strand to SEQ ID NO: 859902
aacuugagaauguuccaaa

SEQ ID NO: 859904 - RNA, 19 nt, Artificial Sequence
  Description of Artificial Sequence: Synthetic oligonucleotide
  Sense strand starting at position 1051 of SEQ ID NO: 588363
aggagagauugggacuuua

SEQ ID NO: 859905 - RNA, 19 nt, Artificial Sequence
  Description of Artificial Sequence: Synthetic oligonucleotide
  Antisense strand to SEQ ID NO: 859904
uaaagucccaaucucuccu

SEQ ID NO: 859906 - RNA, 19 nt, Artificial Sequence
  Description of Artificial Sequence: Synthetic oligonucleotide
  Sense strand starting at position 1060 of SEQ ID NO: 588363
ugggacuuuaccuguugau

SEQ ID NO: 859907 - RNA, 19 nt, Artificial Sequence
  Description of Artificial Sequence: Synthetic oligonucleotide
  Antisense strand to SEQ ID NO: 859906
aucaacagguaaaguccca

SEQ ID NO: 859908 - RNA, 19 nt, Artificial Sequence
  Description of Artificial Sequence: Synthetic oligonucleotide
  Sense strand starting at position 1583 of SEQ ID NO: 588363
gggccugguaaggaauuau

SEQ ID NO: 859909 - RNA, 19 nt, Artificial Sequence
  Description of Artificial Sequence: Synthetic oligonucleotide
  Antisense strand to SEQ ID NO: 859908
auaauuccuuaccaggccc

SEQ ID NO: 859910 - RNA, 19 nt, Artificial Sequence
  Description of Artificial Sequence: Synthetic oligonucleotide
  Sense strand starting at position 1592 of SEQ ID NO: 588363
aaggaauuauagucucuga

SEQ ID NO: 859911 - RNA, 19 nt, Artificial Sequence
  Description of Artificial Sequence: Synthetic oligonucleotide
  Antisense strand to SEQ ID NO: 859910
ucagagacuauaauuccuu

SEQ ID NO: 859912 - RNA, 19 nt, Artificial Sequence
  Description of Artificial Sequence: Synthetic oligonucleotide
  Sense strand starting at position 1595 of SEQ ID NO: 588363
gaauuauagucucugagaa

SEQ ID NO: 859913 - RNA, 19 nt, Artificial Sequence
  Description of Artificial Sequence: Synthetic oligonucleotide
  Antisense strand to SEQ ID NO: 859912
uucucagagacuauaauuc

SEQ ID NO: 859914 - RNA, 19 nt, Artificial Sequence
  Description of Artificial Sequence: Synthetic oligonucleotide
  Sense strand starting at position 1596 of SEQ ID NO: 588363
aauuauagucucugagaag

SEQ ID NO: 859915 - RNA, 19 nt, Artificial Sequence
  Description of Artificial Sequence: Synthetic oligonucleotide
  Antisense strand to SEQ ID NO: 859914
cuucucagagacuauaauu

SEQ ID NO: 859916 - RNA, 19 nt, Artificial Sequence
  Description of Artificial Sequence: Synthetic oligonucleotide
  Sense strand starting at position 1631 of SEQ ID NO: 588363
gguaacugaaaguaugcua

SEQ ID NO: 859917 - RNA, 19 nt, Artificial Sequence
  Description of Artificial Sequence: Synthetic oligonucleotide
  Antisense strand to SEQ ID NO: 859916
uagcauacuuucaguuacc

SEQ ID NO: 859918 - RNA, 19 nt, Artificial Sequence
  Description of Artificial Sequence: Synthetic oligonucleotide
  Sense strand starting at position 1829 of SEQ ID NO: 588363
uggagccauagauguauaa

SEQ ID NO: 859919 - RNA, 19 nt, Artificial Sequence
  Description of Artificial Sequence: Synthetic oligonucleotide
  Antisense strand to SEQ ID NO: 859918
uuauacaucuauggcucca

SEQ ID NO: 859920 - RNA, 19 nt, Artificial Sequence
  Description of Artificial Sequence: Synthetic oligonucleotide
  Sense strand starting at position 1942 of SEQ ID NO: 588363
gguucuggugccuaaugaa

SEQ ID NO: 859921 - RNA, 19 nt, Artificial Sequence
  Description of Artificial Sequence: Synthetic oligonucleotide
  Antisense strand to SEQ ID NO: 859920
uucauuaggcaccagaacc

SEQ ID NO: 859922 - RNA, 19 nt, Artificial Sequence
  Description of Artificial Sequence: Synthetic oligonucleotide
  Sense strand starting at position 2310 of SEQ ID NO: 588363
uugguaauauaccugagaa

SEQ ID NO: 859923 - RNA, 19 nt, Artificial Sequence
  Description of Artificial Sequence: Synthetic oligonucleotide
  Antisense strand to SEQ ID NO: 859922
uucucagguauauuaccaa

SEQ ID NO: 859924 - RNA, 19 nt, Artificial Sequence
  Description of Artificial Sequence: Synthetic oligonucleotide
  Sense strand starting at position 2357 of SEQ ID NO: 588363
cugguuauggcuuggaaau

SEQ ID NO: 859925 - RNA, 19 nt, Artificial Sequence
  Description of Artificial Sequence: Synthetic oligonucleotide
  Antisense strand to SEQ ID NO: 859924
auuuccaagccauaaccag

SEQ ID NO: 859926 - RNA, 19 nt, Artificial Sequence
  Description of Artificial Sequence: Synthetic oligonucleotide
  Sense strand starting at position 2358 of SEQ ID NO: 588363
ugguuauggcuuggaaaug

SEQ ID NO: 859927 - RNA, 19 nt, Artificial Sequence
  Description of Artificial Sequence: Synthetic oligonucleotide
  Antisense strand to SEQ ID NO: 859926
cauuuccaagccauaacca

SEQ ID NO: 859928 - RNA, 19 nt, Artificial Sequence
  Description of Artificial Sequence: Synthetic oligonucleotide
  Sense strand starting at position 2373 of SEQ ID NO: 588363
aauggagaucuuugauguu

SEQ ID NO: 859929 - RNA, 19 nt, Artificial Sequence
  Description of Artificial Sequence: Synthetic oligonucleotide
  Antisense strand to SEQ ID NO: 859928
aacaucaaagaucuccauu

SEQ ID NO: 859930 - RNA, 19 nt, Artificial Sequence
  Description of Artificial Sequence: Synthetic oligonucleotide
  Sense strand starting at position 2512 of SEQ ID NO: 588363
auggguugggacuguaaau

SEQ ID NO: 859931 - RNA, 19 nt, Artificial Sequence
  Description of Artificial Sequence: Synthetic oligonucleotide
  Antisense strand to SEQ ID NO: 859930
auuuacagucccaacccau

SEQ ID NO: 859932 - RNA, 19 nt, Artificial Sequence
  Description of Artificial Sequence: Synthetic oligonucleotide
  Sense strand starting at position 2566 of SEQ ID NO: 588363
gaugaaugccugcagagau

SEQ ID NO: 859933 - RNA, 19 nt, Artificial Sequence
  Description of Artificial Sequence: Synthetic oligonucleotide
  Antisense strand to SEQ ID NO: 859932
aucucugcaggcauucauc

SEQ ID NO: 859934 - RNA, 19 nt, Artificial Sequence
  Description of Artificial Sequence: Synthetic oligonucleotide
  Sense strand starting at position 2839 of SEQ ID NO: 588363
gaauuuccuugagagaguu

SEQ ID NO: 859935 - RNA, 19 nt, Artificial Sequence
  Description of Artificial Sequence: Synthetic oligonucleotide
  Antisense strand to SEQ ID NO: 859934
aacucucucaaggaaauuc

SEQ ID NO: 859936 - RNA, 19 nt, Artificial Sequence
  Description of Artificial Sequence: Synthetic oligonucleotide
  Sense strand starting at position 2872 of SEQ ID NO: 588363
guggucucaggccaagaaa

SEQ ID NO: 859937 - RNA, 19 nt, Artificial Sequence
  Description of Artificial Sequence: Synthetic oligonucleotide
  Antisense strand to SEQ ID NO: 859936
uuucuuggccugagaccac

SEQ ID NO: 859938 - RNA, 19 nt, Artificial Sequence
  Description of Artificial Sequence: Synthetic oligonucleotide
  Sense strand starting at position 2886 of SEQ ID NO: 588363
agaaaccuuugggcugaaa

SEQ ID NO: 859939 - RNA, 19 nt, Artificial Sequence
  Description of Artificial Sequence: Synthetic oligonucleotide
  Antisense strand to SEQ ID NO: 859938
uuucagcccaaagguuucu

SEQ ID NO: 859940 - RNA, 19 nt, Artificial Sequence
  Description of Artificial Sequence: Synthetic oligonucleotide
  Sense strand starting at position 3212 of SEQ ID NO: 588363
gguagucgaaguuaaguuu

SEQ ID NO: 859941 - RNA, 19 nt, Artificial Sequence
  Description of Artificial Sequence: Synthetic oligonucleotide
  Antisense strand to SEQ ID NO: 859940
aaacuuaacuucgacuacc

SEQ ID NO: 859942 - RNA, 19 nt, Artificial Sequence
  Description of Artificial Sequence: Synthetic oligonucleotide
  Sense strand starting at position 3218 of SEQ ID NO: 588363
cgaaguuaaguuuaacagu

SEQ ID NO: 859943 - RNA, 19 nt, Artificial Sequence
  Description of Artificial Sequence: Synthetic oligonucleotide
  Antisense strand to SEQ ID NO: 859942
acuguuaaacuuaacuucg

SEQ ID NO: 859944 - RNA, 19 nt, Artificial Sequence
  Description of Artificial Sequence: Synthetic oligonucleotide
  Sense strand starting at position 3253 of SEQ ID NO: 588363
aggacucuuccugguggga

SEQ ID NO: 859945 - RNA, 19 nt, Artificial Sequence
  Description of Artificial Sequence: Synthetic oligonucleotide
  Antisense strand to SEQ ID NO: 859944
ucccaccaggaagaguccu

SEQ ID NO: 859946 - RNA, 19 nt, Artificial Sequence
  Description of Artificial Sequence: Synthetic oligonucleotide
  Sense strand starting at position 3256 of SEQ ID NO: 588363
acucuuccuggugggagaa

SEQ ID NO: 859947 - RNA, 19 nt, Artificial Sequence
  Description of Artificial Sequence: Synthetic oligonucleotide
  Antisense strand to SEQ ID NO: 859946
uucucccaccaggaagagu

SEQ ID NO: 859948 - RNA, 19 nt, Artificial Sequence
  Description of Artificial Sequence: Synthetic oligonucleotide
  Sense strand starting at position 3301 of SEQ ID NO: 588363
gggaaugggccauggaguu

SEQ ID NO: 859949 - RNA, 19 nt, Artificial Sequence
  Description of Artificial Sequence: Synthetic oligonucleotide
  Antisense strand to SEQ ID NO: 859948
aacuccauggcccauuccc

SEQ ID NO: 859950 - RNA, 19 nt, Artificial Sequence
  Description of Artificial Sequence: Synthetic oligonucleotide
  Sense strand starting at position 3343 of SEQ ID NO: 588363
guaucucuagcagaauaua

SEQ ID NO: 859951 - RNA, 19 nt, Artificial Sequence
  Description of Artificial Sequence: Synthetic oligonucleotide
  Antisense strand to SEQ ID NO: 859950
uauauucugcuagagauac

SEQ ID NO: 859952 - RNA, 19 nt, Artificial Sequence
  Description of Artificial Sequence: Synthetic oligonucleotide
  Sense strand starting at position 3514 of SEQ ID NO: 588363
ggcagaagaguguauagcu

SEQ ID NO: 859953 - RNA, 19 nt, Artificial Sequence
  Description of Artificial Sequence: Synthetic oligonucleotide
  Antisense strand to SEQ ID NO: 859952
agcuauacacucuucugcc

SEQ ID NO: 859954 - RNA, 19 nt, Artificial Sequence
  Description of Artificial Sequence: Synthetic oligonucleotide
  Sense strand starting at position 170 of SEQ ID NO: 588364
acugguauuuguuuaguca

SEQ ID NO: 859955 - RNA, 19 nt, Artificial Sequence
  Description of Artificial Sequence: Synthetic oligonucleotide
  Antisense strand to SEQ ID NO: 859954
ugacuaaacaaauaccagu

SEQ ID NO: 859956 - RNA, 19 nt, Artificial Sequence
  Description of Artificial Sequence: Synthetic oligonucleotide
  Sense strand starting at position 174 of SEQ ID NO: 588364
guauuuguuuagucaaacu

SEQ ID NO: 859957 - RNA, 19 nt, Artificial Sequence
  Description of Artificial Sequence: Synthetic oligonucleotide
  Antisense strand to SEQ ID NO: 859956
aguuugacuaaacaaauac

SEQ ID NO: 859958 - RNA, 19 nt, Artificial Sequence
  Description of Artificial Sequence: Synthetic oligonucleotide
  Sense strand starting at position 305 of SEQ ID NO: 588364
accagaggucuuuagguag

SEQ ID NO: 859959 - RNA, 19 nt, Artificial Sequence
  Description of Artificial Sequence: Synthetic oligonucleotide
  Antisense strand to SEQ ID NO: 859958
cuaccuaaagaccucuggu

SEQ ID NO: 859960 - RNA, 19 nt, Artificial Sequence
  Description of Artificial Sequence: Synthetic oligonucleotide
  Sense strand starting at position 308 of SEQ ID NO: 588364
agaggucuuuagguaggua

SEQ ID NO: 859961 - RNA, 19 nt, Artificial Sequence
  Description of Artificial Sequence: Synthetic oligonucleotide
  Antisense strand to SEQ ID NO: 859960
uaccuaccuaaagaccucu

SEQ ID NO: 859962 - RNA, 19 nt, Artificial Sequence
  Description of Artificial Sequence: Synthetic oligonucleotide
  Sense strand starting at position 361 of SEQ ID NO: 588364
cuguguauacgagauacca

SEQ ID NO: 859963 - RNA, 19 nt, Artificial Sequence
  Description of Artificial Sequence: Synthetic oligonucleotide
  Antisense strand to SEQ ID NO: 859962
ugguaucucguauacacag

SEQ ID NO: 859964 - RNA, 19 nt, Artificial Sequence
  Description of Artificial Sequence: Synthetic oligonucleotide
  Sense strand starting at position 363 of SEQ ID NO: 588364
guguauacgagauaccaua

SEQ ID NO: 859965 - RNA, 19 nt, Artificial Sequence
  Description of Artificial Sequence: Synthetic oligonucleotide
  Antisense strand to SEQ ID NO: 859964
uaugguaucucguauacac

SEQ ID NO: 859966 - RNA, 19 nt, Artificial Sequence
  Description of Artificial Sequence: Synthetic oligonucleotide
  Sense strand starting at position 480 of SEQ ID NO: 588364
uuggauguuugaguaauca

SEQ ID NO: 859967 - RNA, 19 nt, Artificial Sequence
  Description of Artificial Sequence: Synthetic oligonucleotide
  Antisense strand to SEQ ID NO: 859966
ugauuacucaaacauccaa

SEQ ID NO: 859968 - RNA, 19 nt, Artificial Sequence
  Description of Artificial Sequence: Synthetic oligonucleotide
  Sense strand starting at position 692 of SEQ ID NO: 588364
ccaauuugcuuaccgguua

SEQ ID NO: 859969 - RNA, 19 nt, Artificial Sequence
  Description of Artificial Sequence: Synthetic oligonucleotide
  Antisense strand to SEQ ID NO: 859968
uaaccgguaagcaaauugg

SEQ ID NO: 859970 - RNA, 19 nt, Artificial Sequence
  Description of Artificial Sequence: Synthetic oligonucleotide
  Sense strand starting at position 780 of SEQ ID NO: 588364
gguggcugaaaucaauauu

SEQ ID NO: 859971 - RNA, 19 nt, Artificial Sequence
  Description of Artificial Sequence: Synthetic oligonucleotide
  Antisense strand to SEQ ID NO: 859970
aauauugauuucagccacc

SEQ ID NO: 859972 - RNA, 19 nt, Artificial Sequence
  Description of Artificial Sequence: Synthetic oligonucleotide
  Sense strand starting at position 817 of SEQ ID NO: 588364
cuuucuuugggucauauag

SEQ ID NO: 859973 - RNA, 19 nt, Artificial Sequence
  Description of Artificial Sequence: Synthetic oligonucleotide
  Antisense strand to SEQ ID NO: 859972
cuauaugacccaaagaaag

SEQ ID NO: 859974 - RNA, 19 nt, Artificial Sequence
  Description of Artificial Sequence: Synthetic oligonucleotide
  Sense strand starting at position 824 of SEQ ID NO: 588364
ugggucauauaguugauaa

SEQ ID NO: 859975 - RNA, 19 nt, Artificial Sequence
  Description of Artificial Sequence: Synthetic oligonucleotide
  Antisense strand to SEQ ID NO: 859974
uuaucaacuauaugaccca

SEQ ID NO: 859976 - RNA, 19 nt, Artificial Sequence
  Description of Artificial Sequence: Synthetic oligonucleotide
  Sense strand starting at position 825 of SEQ ID NO: 588364
gggucauauaguugauaau

SEQ ID NO: 859977 - RNA, 19 nt, Artificial Sequence
  Description of Artificial Sequence: Synthetic oligonucleotide
  Antisense strand to SEQ ID NO: 859976
auuaucaacuauaugaccc

SEQ ID NO: 859978 - RNA, 19 nt, Artificial Sequence
  Description of Artificial Sequence: Synthetic oligonucleotide
  Sense strand starting at position 908 of SEQ ID NO: 588364
accuaaagguuuccuagaa

SEQ ID NO: 859979 - RNA, 19 nt, Artificial Sequence
  Description of Artificial Sequence: Synthetic oligonucleotide
  Antisense strand to SEQ ID NO: 859978
uucuaggaaaccuuuaggu

SEQ ID NO: 859980 - RNA, 19 nt, Artificial Sequence
  Description of Artificial Sequence: Synthetic oligonucleotide
  Sense strand starting at position 909 of SEQ ID NO: 588364
ccuaaagguuuccuagaaa

SEQ ID NO: 859981 - RNA, 19 nt, Artificial Sequence
  Description of Artificial Sequence: Synthetic oligonucleotide
  Antisense strand to SEQ ID NO: 859980
uuucuaggaaaccuuuagg

SEQ ID NO: 859982 - RNA, 19 nt, Artificial Sequence
  Description of Artificial Sequence: Synthetic oligonucleotide
  Sense strand starting at position 1144 of SEQ ID NO: 588364
cccucagucaugggugaac

SEQ ID NO: 859983 - RNA, 19 nt, Artificial Sequence
  Description of Artificial Sequence: Synthetic oligonucleotide
  Antisense strand to SEQ ID NO: 859982
guucacccaugacugaggg

SEQ ID NO: 859984 - RNA, 19 nt, Artificial Sequence
  Description of Artificial Sequence: Synthetic oligonucleotide
  Sense strand starting at position 1146 of SEQ ID NO: 588364
cucagucaugggugaacua

SEQ ID NO: 859985 - RNA, 19 nt, Artificial Sequence
  Description of Artificial Sequence: Synthetic oligonucleotide
  Antisense strand to SEQ ID NO: 859984
uaguucacccaugacugag

SEQ ID NO: 859986 - RNA, 19 nt, Artificial Sequence
  Description of Artificial Sequence: Synthetic oligonucleotide
  Sense strand starting at position 1561 of SEQ ID NO: 588364
cuccguuuagaguacucau

SEQ ID NO: 859987 - RNA, 19 nt, Artificial Sequence
  Description of Artificial Sequence: Synthetic oligonucleotide
  Antisense strand to SEQ ID NO: 859986
augaguacucuaaacggag

SEQ ID NO: 859988 - RNA, 19 nt, Artificial Sequence
  Description of Artificial Sequence: Synthetic oligonucleotide
  Sense strand starting at position 1750 of SEQ ID NO: 588364
ggcuuaugaucugucaaca

SEQ ID NO: 859989 - RNA, 19 nt, Artificial Sequence
  Description of Artificial Sequence: Synthetic oligonucleotide
  Antisense strand to SEQ ID NO: 859988
uguugacagaucauaagcc

SEQ ID NO: 859990 - RNA, 19 nt, Artificial Sequence
  Description of Artificial Sequence: Synthetic oligonucleotide
  Sense strand starting at position 1820 of SEQ ID NO: 588364
cgcacuuacccgguuugua

SEQ ID NO: 859991 - RNA, 19 nt, Artificial Sequence
  Description of Artificial Sequence: Synthetic oligonucleotide
  Antisense strand to SEQ ID NO: 859990
uacaaaccggguaagugcg

SEQ ID NO: 859992 - RNA, 19 nt, Artificial Sequence
  Description of Artificial Sequence: Synthetic oligonucleotide
  Sense strand starting at position 2372 of SEQ ID NO: 588364
ggccuagugccgucggaga

SEQ ID NO: 859993 - RNA, 19 nt, Artificial Sequence
  Description of Artificial Sequence: Synthetic oligonucleotide
  Antisense strand to SEQ ID NO: 859992
ucuccgacggcacuaggcc

SEQ ID NO: 859994 - RNA, 19 nt, Artificial Sequence
  Description of Artificial Sequence: Synthetic oligonucleotide
  Sense strand starting at position 2967 of SEQ ID NO: 588364
gaugaucuccguggagaca

SEQ ID NO: 859995 - RNA, 19 nt, Artificial Sequence
  Description of Artificial Sequence: Synthetic oligonucleotide
  Antisense strand to SEQ ID NO: 859994
ugucuccacggagaucauc

SEQ ID NO: 859996 - RNA, 19 nt, Artificial Sequence
  Description of Artificial Sequence: Synthetic oligonucleotide
  Sense strand starting at position 2979 of SEQ ID NO: 588364
ggagacaguggcugaguaa

SEQ ID NO: 859997 - RNA, 19 nt, Artificial Sequence
  Description of Artificial Sequence: Synthetic oligonucleotide
  Antisense strand to SEQ ID NO: 859996
uuacucagccacugucucc

SEQ ID NO: 859998 - RNA, 19 nt, Artificial Sequence
  Description of Artificial Sequence: Synthetic oligonucleotide
  Sense strand starting at position 2980 of SEQ ID NO: 588364
gagacaguggcugaguaau

SEQ ID NO: 859999 - RNA, 19 nt, Artificial Sequence
  Description of Artificial Sequence: Synthetic oligonucleotide
  Antisense strand to SEQ ID NO: 859998
auuacucagccacugucuc

SEQ ID NO: 860000 - RNA, 19 nt, Artificial Sequence
  Description of Artificial Sequence: Synthetic oligonucleotide
  Sense strand starting at position 3023 of SEQ ID NO: 588364
ugcucagucgguguuggau

SEQ ID NO: 860001 - RNA, 19 nt, Artificial Sequence
  Description of Artificial Sequence: Synthetic oligonucleotide
  Antisense strand to SEQ ID NO: 860000
auccaacaccgacugagca

SEQ ID NO: 860002 - RNA, 19 nt, Artificial Sequence
  Description of Artificial Sequence: Synthetic oligonucleotide
  Sense strand starting at position 3103 of SEQ ID NO: 588364
augaauagauccguaugaa

SEQ ID NO: 860003 - RNA, 19 nt, Artificial Sequence
  Description of Artificial Sequence: Synthetic oligonucleotide
  Antisense strand to SEQ ID NO: 860002
uucauacggaucuauucau

SEQ ID NO: 860004 - RNA, 19 nt, Artificial Sequence
  Description of Artificial Sequence: Synthetic oligonucleotide
  Sense strand starting at position 3106 of SEQ ID NO: 588364
aauagauccguaugaagag

SEQ ID NO: 860005 - RNA, 19 nt, Artificial Sequence
  Description of Artificial Sequence: Synthetic oligonucleotide
  Antisense strand to SEQ ID NO: 860004
cucuucauacggaucuauu

SEQ ID NO: 860006 - RNA, 19 nt, Artificial Sequence
  Description of Artificial Sequence: Synthetic oligonucleotide
  Sense strand starting at position 3113 of SEQ ID NO: 588364
ccguaugaagaguaagcaa

SEQ ID NO: 860007 - RNA, 19 nt, Artificial Sequence
  Description of Artificial Sequence: Synthetic oligonucleotide
  Antisense strand to SEQ ID NO: 860006
uugcuuacucuucauacgg

SEQ ID NO: 860008 - RNA, 19 nt, Artificial Sequence
  Description of Artificial Sequence: Synthetic oligonucleotide
  Sense strand starting at position 3277 of SEQ ID NO: 588364
auucuaucaggagguugaa

SEQ ID NO: 860009 - RNA, 19 nt, Artificial Sequence
  Description of Artificial Sequence: Synthetic oligonucleotide
  Antisense strand to SEQ ID NO: 860008
uucaaccuccugauagaau

SEQ ID NO: 860010 - RNA, 19 nt, Artificial Sequence
  Description of Artificial Sequence: Synthetic oligonucleotide
  Sense strand starting at position 3364 of SEQ ID NO: 588364
uggugaucuaccugguaua

SEQ ID NO: 860011 - RNA, 19 nt, Artificial Sequence
  Description of Artificial Sequence: Synthetic oligonucleotide
  Antisense strand to SEQ ID NO: 860010
uauaccagguagaucacca

SEQ ID NO: 860012 - RNA, 19 nt, Artificial Sequence
  Description of Artificial Sequence: Synthetic oligonucleotide
  Sense strand starting at position 3365 of SEQ ID NO: 588364
ggugaucuaccugguauau

SEQ ID NO: 860013 - RNA, 19 nt, Artificial Sequence
  Description of Artificial Sequence: Synthetic oligonucleotide
  Antisense strand to SEQ ID NO: 860012
auauaccagguagaucacc

SEQ ID NO: 860014 - RNA, 19 nt, Artificial Sequence
  Description of Artificial Sequence: Synthetic oligonucleotide
  Sense strand starting at position 3455 of SEQ ID NO: 588364
ucaggaaauuaagagagaa

SEQ ID NO: 860015 - RNA, 19 nt, Artificial Sequence
  Description of Artificial Sequence: Synthetic oligonucleotide
  Antisense strand to SEQ ID NO: 860014
uucucucuuaauuuccuga

SEQ ID NO: 860016 - RNA, 19 nt, Artificial Sequence
  Description of Artificial Sequence: Synthetic oligonucleotide
  Sense strand starting at position 3496 of SEQ ID NO: 588364
gagggaucuuuagcacauu

SEQ ID NO: 860017 - RNA, 19 nt, Artificial Sequence
  Description of Artificial Sequence: Synthetic oligonucleotide
  Antisense strand to SEQ ID NO: 860016
aaugugcuaaagaucccuc

SEQ ID NO: 860018 - RNA, 19 nt, Artificial Sequence
  Description of Artificial Sequence: Synthetic oligonucleotide
  Sense strand starting at position 3530 of SEQ ID NO: 588364
guuugaaucaguggaggca

SEQ ID NO: 860019 - RNA, 19 nt, Artificial Sequence
  Description of Artificial Sequence: Synthetic oligonucleotide
  Antisense strand to SEQ ID NO: 860018
ugccuccacugauucaaac

SEQ ID NO: 860020 - RNA, 19 nt, Artificial Sequence
  Description of Artificial Sequence: Synthetic oligonucleotide
  Sense strand starting at position 3557 of SEQ ID NO: 588364
ggagguugcagauguccaa

SEQ ID NO: 860021 - RNA, 19 nt, Artificial Sequence
  Description of Artificial Sequence: Synthetic oligonucleotide
  Antisense strand to SEQ ID NO: 860020
uuggacaucugcaaccucc

SEQ ID NO: 860022 - RNA, 19 nt, Artificial Sequence
  Description of Artificial Sequence: Synthetic oligonucleotide
  Sense strand starting at position 3560 of SEQ ID NO: 588364
gguugcagauguccaagaa

SEQ ID NO: 860023 - RNA, 19 nt, Artificial Sequence
  Description of Artificial Sequence: Synthetic oligonucleotide
  Antisense strand to SEQ ID NO: 860022
uucuuggacaucugcaacc

SEQ ID NO: 860024 - RNA, 19 nt, Artificial Sequence
  Description of Artificial Sequence: Synthetic oligonucleotide
  Sense strand starting at position 3604 of SEQ ID NO: 588364
uggcaauauggaggauauu

SEQ ID NO: 860025 - RNA, 19 nt, Artificial Sequence
  Description of Artificial Sequence: Synthetic oligonucleotide
  Antisense strand to SEQ ID NO: 860024
aauauccuccauauugcca

SEQ ID NO: 860026 - RNA, 19 nt, Artificial Sequence
  Description of Artificial Sequence: Synthetic oligonucleotide
  Sense strand starting at position 3624 of SEQ ID NO: 588364
cuuuccuagccuggaaaga

SEQ ID NO: 860027 - RNA, 19 nt, Artificial Sequence
  Description of Artificial Sequence: Synthetic oligonucleotide
  Antisense strand to SEQ ID NO: 860026
ucuuuccaggcuaggaaag

SEQ ID NO: 860028 - RNA, 19 nt, Artificial Sequence
  Description of Artificial Sequence: Synthetic oligonucleotide
  Sense strand starting at position 3651 of SEQ ID NO: 588364
gaagucuuccuccgagaag

SEQ ID NO: 860029 - RNA, 19 nt, Artificial Sequence
  Description of Artificial Sequence: Synthetic oligonucleotide
  Antisense strand to SEQ ID NO: 860028
cuucucggaggaagacuuc

SEQ ID NO: 860030 - RNA, 19 nt, Artificial Sequence
  Description of Artificial Sequence: Synthetic oligonucleotide
  Sense strand starting at position 3654 of SEQ ID NO: 588364
gucuuccuccgagaagaua

SEQ ID NO: 860031 - RNA, 19 nt, Artificial Sequence
  Description of Artificial Sequence: Synthetic oligonucleotide
  Antisense strand to SEQ ID NO: 860030
uaucuucucggaggaagac

SEQ ID NO: 860032 - RNA, 19 nt, Artificial Sequence
  Description of Artificial Sequence: Synthetic oligonucleotide
  Sense strand starting at position 3680 of SEQ ID NO: 588364
aaggcugaugggugugaaa

SEQ ID NO: 860033 - RNA, 19 nt, Artificial Sequence
  Description of Artificial Sequence: Synthetic oligonucleotide
  Antisense strand to SEQ ID NO: 860032
uuucacacccaucagccuu

SEQ ID NO: 860034 - RNA, 19 nt, Artificial Sequence
  Description of Artificial Sequence: Synthetic oligonucleotide
  Sense strand starting at position 197 of SEQ ID NO: 588365
agaggauagcuccaggcau

SEQ ID NO: 860035 - RNA, 19 nt, Artificial Sequence
  Description of Artificial Sequence: Synthetic oligonucleotide
  Antisense strand to SEQ ID NO: 860034
augccuggagcuauccucu

SEQ ID NO: 860036 - RNA, 19 nt, Artificial Sequence
  Description of Artificial Sequence: Synthetic oligonucleotide
  Sense strand starting at position 463 of SEQ ID NO: 588365
uuugucuguccucagcaga

SEQ ID NO: 860037 - RNA, 19 nt, Artificial Sequence
  Description of Artificial Sequence: Synthetic oligonucleotide
  Antisense strand to SEQ ID NO: 860036
ucugcugaggacagacaaa

SEQ ID NO: 860038 - RNA, 19 nt, Artificial Sequence
  Description of Artificial Sequence: Synthetic oligonucleotide
  Sense strand starting at position 681 of SEQ ID NO: 588365
ucaagagaacuagguccua

SEQ ID NO: 860039 - RNA, 19 nt, Artificial Sequence
  Description of Artificial Sequence: Synthetic oligonucleotide
  Antisense strand to SEQ ID NO: 860038
uaggaccuaguucucuuga

SEQ ID NO: 860040 - RNA, 19 nt, Artificial Sequence
  Description of Artificial Sequence: Synthetic oligonucleotide
  Sense strand starting at position 694 of SEQ ID NO: 588365
guccuagccuguucugaua

SEQ ID NO: 860041 - RNA, 19 nt, Artificial Sequence
  Description of Artificial Sequence: Synthetic oligonucleotide
  Antisense strand to SEQ ID NO: 860040
uaucagaacaggcuaggac

SEQ ID NO: 860042 - RNA, 19 nt, Artificial Sequence
  Description of Artificial Sequence: Synthetic oligonucleotide
  Sense strand starting at position 705 of SEQ ID NO: 588365
uucugauagugcuuccaag

SEQ ID NO: 860043 - RNA, 19 nt, Artificial Sequence
  Description of Artificial Sequence: Synthetic oligonucleotide
  Antisense strand to SEQ ID NO: 860042
cuuggaagcacuaucagaa

SEQ ID NO: 860044 - RNA, 19 nt, Artificial Sequence
  Description of Artificial Sequence: Synthetic oligonucleotide
  Sense strand starting at position 922 of SEQ ID NO: 588365
guggcaagugguuaaaugu

SEQ ID NO: 860045 - RNA, 19 nt, Artificial Sequence
  Description of Artificial Sequence: Synthetic oligonucleotide
  Antisense strand to SEQ ID NO: 860044
acauuuaaccacuugccac

SEQ ID NO: 860046 - RNA, 19 nt, Artificial Sequence
  Description of Artificial Sequence: Synthetic oligonucleotide
  Sense strand starting at position 932 of SEQ ID NO: 588365
guuaaauguggcuaccagu

SEQ ID NO: 860047 - RNA, 19 nt, Artificial Sequence
  Description of Artificial Sequence: Synthetic oligonucleotide
  Antisense strand to SEQ ID NO: 860046
acugguagccacauuuaac

SEQ ID NO: 860048 - RNA, 19 nt, Artificial Sequence
  Description of Artificial Sequence: Synthetic oligonucleotide
  Sense strand starting at position 958 of SEQ ID NO: 588365
ggaucuaugcgagagaccu

SEQ ID NO: 860049 - RNA, 19 nt, Artificial Sequence
  Description of Artificial Sequence: Synthetic oligonucleotide
  Antisense strand to SEQ ID NO: 860048
aggucucucgcauagaucc

SEQ ID NO: 860050 - RNA, 19 nt, Artificial Sequence
  Description of Artificial Sequence: Synthetic oligonucleotide
  Sense strand starting at position 966 of SEQ ID NO: 588365
gcgagagaccuggguggua

SEQ ID NO: 860051 - RNA, 19 nt, Artificial Sequence
  Description of Artificial Sequence: Synthetic oligonucleotide
  Antisense strand to SEQ ID NO: 860050
uaccacccaggucucucgc

SEQ ID NO: 860052 - RNA, 19 nt, Artificial Sequence
  Description of Artificial Sequence: Synthetic oligonucleotide
  Sense strand starting at position 1022 of SEQ ID NO: 588365
cagggucucuggucauuga

SEQ ID NO: 860053 - RNA, 19 nt, Artificial Sequence
  Description of Artificial Sequence: Synthetic oligonucleotide
  Antisense strand to SEQ ID NO: 860052
ucaaugaccagagacccug

SEQ ID NO: 860054 - RNA, 19 nt, Artificial Sequence
  Description of Artificial Sequence: Synthetic oligonucleotide
  Sense strand starting at position 1023 of SEQ ID NO: 588365
agggucucuggucauugau

SEQ ID NO: 860055 - RNA, 19 nt, Artificial Sequence
  Description of Artificial Sequence: Synthetic oligonucleotide
  Antisense strand to SEQ ID NO: 860054
aucaaugaccagagacccu

SEQ ID NO: 860056 - RNA, 19 nt, Artificial Sequence
  Description of Artificial Sequence: Synthetic oligonucleotide
  Sense strand starting at position 1025 of SEQ ID NO: 588365
ggucucuggucauugauaa

SEQ ID NO: 860057 - RNA, 19 nt, Artificial Sequence
  Description of Artificial Sequence: Synthetic oligonucleotide
  Antisense strand to SEQ ID NO: 860056
uuaucaaugaccagagacc

SEQ ID NO: 860058 - RNA, 19 nt, Artificial Sequence
  Description of Artificial Sequence: Synthetic oligonucleotide
  Sense strand starting at position 1026 of SEQ ID NO: 588365
gucucuggucauugauaac

SEQ ID NO: 860059 - RNA, 19 nt, Artificial Sequence
  Description of Artificial Sequence: Synthetic oligonucleotide
  Antisense strand to SEQ ID NO: 860058
guuaucaaugaccagagac

SEQ ID NO: 860060 - RNA, 19 nt, Artificial Sequence
  Description of Artificial Sequence: Synthetic oligonucleotide
  Sense strand starting at position 1029 of SEQ ID NO: 588365
ucuggucauugauaacaaa

SEQ ID NO: 860061 - RNA, 19 nt, Artificial Sequence
  Description of Artificial Sequence: Synthetic oligonucleotide
  Antisense strand to SEQ ID NO: 860060
uuuguuaucaaugaccaga

SEQ ID NO: 860062 - RNA, 19 nt, Artificial Sequence
  Description of Artificial Sequence: Synthetic oligonucleotide
  Sense strand starting at position 1335 of SEQ ID NO: 588365
gggucugacuccucucuga

SEQ ID NO: 860063 - RNA, 19 nt, Artificial Sequence
  Description of Artificial Sequence: Synthetic oligonucleotide
  Antisense strand to SEQ ID NO: 860062
ucagagaggagucagaccc

SEQ ID NO: 860064 - RNA, 19 nt, Artificial Sequence
  Description of Artificial Sequence: Synthetic oligonucleotide
  Sense strand starting at position 1457 of SEQ ID NO: 588365
acacaagugucuuccugua

SEQ ID NO: 860065 - RNA, 19 nt, Artificial Sequence
  Description of Artificial Sequence: Synthetic oligonucleotide
  Antisense strand to SEQ ID NO: 860064
uacaggaagacacuugugu

SEQ ID NO: 860066 - RNA, 19 nt, Artificial Sequence
  Description of Artificial Sequence: Synthetic oligonucleotide
  Sense strand starting at position 1459 of SEQ ID NO: 588365
acaagugucuuccuguagu

SEQ ID NO: 860067 - RNA, 19 nt, Artificial Sequence
  Description of Artificial Sequence: Synthetic oligonucleotide
  Antisense strand to SEQ ID NO: 860066
acuacaggaagacacuugu

SEQ ID NO: 860068 - RNA, 19 nt, Artificial Sequence
  Description of Artificial Sequence: Synthetic oligonucleotide
  Sense strand starting at position 1751 of SEQ ID NO: 588365
cauagaggccucuggagaa

SEQ ID NO: 860069 - RNA, 19 nt, Artificial Sequence
  Description of Artificial Sequence: Synthetic oligonucleotide
  Antisense strand to SEQ ID NO: 860068
uucuccagaggccucuaug

SEQ ID NO: 860070 - RNA, 19 nt, Artificial Sequence
  Description of Artificial Sequence: Synthetic oligonucleotide
  Sense strand starting at position 1841 of SEQ ID NO: 588365
gucuccagaucgucugcaa

SEQ ID NO: 860071 - RNA, 19 nt, Artificial Sequence
  Description of Artificial Sequence: Synthetic oligonucleotide
  Antisense strand to SEQ ID NO: 860070
uugcagacgaucuggagac

SEQ ID NO: 860072 - RNA, 19 nt, Artificial Sequence
  Description of Artificial Sequence: Synthetic oligonucleotide
  Sense strand starting at position 2093 of SEQ ID NO: 588365
ucguuuaauuucucgagcu

SEQ ID NO: 860073 - RNA, 19 nt, Artificial Sequence
  Description of Artificial Sequence: Synthetic oligonucleotide
  Antisense strand to SEQ ID NO: 860072
agcucgagaaauuaaacga

SEQ ID NO: 860074 - RNA, 19 nt, Artificial Sequence
  Description of Artificial Sequence: Synthetic oligonucleotide
  Sense strand starting at position 2487 of SEQ ID NO: 588365
ggcuucugugaugacaagu

SEQ ID NO: 860075 - RNA, 19 nt, Artificial Sequence
  Description of Artificial Sequence: Synthetic oligonucleotide
  Antisense strand to SEQ ID NO: 860074
acuugucaucacagaagcc

SEQ ID NO: 860076 - RNA, 19 nt, Artificial Sequence
  Description of Artificial Sequence: Synthetic oligonucleotide
  Sense strand starting at position 2876 of SEQ ID NO: 588365
ggagucagaucaguaccua

SEQ ID NO: 860077 - RNA, 19 nt, Artificial Sequence
  Description of Artificial Sequence: Synthetic oligonucleotide
  Antisense strand to SEQ ID NO: 860076
uagguacugaucugacucc

SEQ ID NO: 860078 - RNA, 19 nt, Artificial Sequence
  Description of Artificial Sequence: Synthetic oligonucleotide
  Sense strand starting at position 2900 of SEQ ID NO: 588365
gcaggucagcgagaucugu

SEQ ID NO: 860079 - RNA, 19 nt, Artificial Sequence
  Description of Artificial Sequence: Synthetic oligonucleotide
  Antisense strand to SEQ ID NO: 860078
acagaucucgcugaccugc

SEQ ID NO: 860080 - RNA, 19 nt, Artificial Sequence
  Description of Artificial Sequence: Synthetic oligonucleotide
  Sense strand starting at position 2904 of SEQ ID NO: 588365
gucagcgagaucugugaau

SEQ ID NO: 860081 - RNA, 19 nt, Artificial Sequence
  Description of Artificial Sequence: Synthetic oligonucleotide
  Antisense strand to SEQ ID NO: 860080
auucacagaucucgcugac

SEQ ID NO: 860082 - RNA, 19 nt, Artificial Sequence
  Description of Artificial Sequence: Synthetic oligonucleotide
  Sense strand starting at position 2924 of SEQ ID NO: 588365
uuacgagaugaguguugau

SEQ ID NO: 860083 - RNA, 19 nt, Artificial Sequence
  Description of Artificial Sequence: Synthetic oligonucleotide
  Antisense strand to SEQ ID NO: 860082
aucaacacucaucucguaa

SEQ ID NO: 860084 - RNA, 19 nt, Artificial Sequence
  Description of Artificial Sequence: Synthetic oligonucleotide
  Sense strand starting at position 2958 of SEQ ID NO: 588365
ccugcaauugcuggagaaa

SEQ ID NO: 860085 - RNA, 19 nt, Artificial Sequence
  Description of Artificial Sequence: Synthetic oligonucleotide
  Antisense strand to SEQ ID NO: 860084
uuucuccagcaauugcagg

SEQ ID NO: 860086 - RNA, 19 nt, Artificial Sequence
  Description of Artificial Sequence: Synthetic oligonucleotide
  Sense strand starting at position 2993 of SEQ ID NO: 588365
uguacaggugucuaaugaa

SEQ ID NO: 860087 - RNA, 19 nt, Artificial Sequence
  Description of Artificial Sequence: Synthetic oligonucleotide
  Antisense strand to SEQ ID NO: 860086
uucauuagacaccuguaca

SEQ ID NO: 860088 - RNA, 19 nt, Artificial Sequence
  Description of Artificial Sequence: Synthetic oligonucleotide
  Sense strand starting at position 3005 of SEQ ID NO: 588365
uaaugaacugcaugacagu

SEQ ID NO: 860089 - RNA, 19 nt, Artificial Sequence
  Description of Artificial Sequence: Synthetic oligonucleotide
  Antisense strand to SEQ ID NO: 860088
acugucaugcaguucauua

SEQ ID NO: 860090 - RNA, 19 nt, Artificial Sequence
  Description of Artificial Sequence: Synthetic oligonucleotide
  Sense strand starting at position 3025 of SEQ ID NO: 588365
acauauguucugcaguuua

SEQ ID NO: 860091 - RNA, 19 nt, Artificial Sequence
  Description of Artificial Sequence: Synthetic oligonucleotide
  Antisense strand to SEQ ID NO: 860090
uaaacugcagaacauaugu

SEQ ID NO: 860092 - RNA, 19 nt, Artificial Sequence
  Description of Artificial Sequence: Synthetic oligonucleotide
  Sense strand starting at position 3539 of SEQ ID NO: 588365
uucuuuaggcucugugacu

SEQ ID NO: 860093 - RNA, 19 nt, Artificial Sequence
  Description of Artificial Sequence: Synthetic oligonucleotide
  Antisense strand to SEQ ID NO: 860092
agucacagagccuaaagaa

SEQ ID NO: 860094 - RNA, 19 nt, Artificial Sequence
  Description of Artificial Sequence: Synthetic oligonucleotide
  Sense strand starting at position 3540 of SEQ ID NO: 588365
ucuuuaggcucugugacuu

SEQ ID NO: 860095 - RNA, 19 nt, Artificial Sequence
  Description of Artificial Sequence: Synthetic oligonucleotide
  Antisense strand to SEQ ID NO: 860094
aagucacagagccuaaaga

SEQ ID NO: 860096 - RNA, 19 nt, Artificial Sequence
  Description of Artificial Sequence: Synthetic oligonucleotide
  Sense strand starting at position 3548 of SEQ ID NO: 588365
cucugugacuuugucagua

SEQ ID NO: 860097 - RNA, 19 nt, Artificial Sequence
  Description of Artificial Sequence: Synthetic oligonucleotide
  Antisense strand to SEQ ID NO: 860096
uacugacaaagucacagag

SEQ ID NO: 860098 - RNA, 19 nt, Artificial Sequence
  Description of Artificial Sequence: Synthetic oligonucleotide
  Sense strand starting at position 3552 of SEQ ID NO: 588365
gugacuuugucaguaguua

SEQ ID NO: 860099 - RNA, 19 nt, Artificial Sequence
  Description of Artificial Sequence: Synthetic oligonucleotide
  Antisense strand to SEQ ID NO: 860098
uaacuacugacaaagucac

SEQ ID NO: 860100 - RNA, 19 nt, Artificial Sequence
  Description of Artificial Sequence: Synthetic oligonucleotide
  Sense strand starting at position 3553 of SEQ ID NO: 588365
ugacuuugucaguaguuaa

SEQ ID NO: 860101 - RNA, 19 nt, Artificial Sequence
  Description of Artificial Sequence: Synthetic oligonucleotide
  Antisense strand to SEQ ID NO: 860100
uuaacuacugacaaaguca

SEQ ID NO: 860102 - RNA, 19 nt, Artificial Sequence
  Description of Artificial Sequence: Synthetic oligonucleotide
  Sense strand starting at position 3556 of SEQ ID NO: 588365
cuuugucaguaguuaacuu

SEQ ID NO: 860103 - RNA, 19 nt, Artificial Sequence
  Description of Artificial Sequence: Synthetic oligonucleotide
  Antisense strand to SEQ ID NO: 860102
aaguuaacuacugacaaag

SEQ ID NO: 860104 - RNA, 19 nt, Artificial Sequence
  Description of Artificial Sequence: Synthetic oligonucleotide
  Sense strand starting at position 3560 of SEQ ID NO: 588365
gucaguaguuaacuuaaac

SEQ ID NO: 860105 - RNA, 19 nt, Artificial Sequence
  Description of Artificial Sequence: Synthetic oligonucleotide
  Antisense strand to SEQ ID NO: 860104
guuuaaguuaacuacugac

SEQ ID NO: 860106 - RNA, 19 nt, Artificial Sequence
  Description of Artificial Sequence: Synthetic oligonucleotide
  Sense strand starting at position 3579 of SEQ ID NO: 588365
ugguuuacucaacgucagu

SEQ ID NO: 860107 - RNA, 19 nt, Artificial Sequence
  Description of Artificial Sequence: Synthetic oligonucleotide
  Antisense strand to SEQ ID NO: 860106
acugacguugaguaaacca

SEQ ID NO: 860108 - RNA, 19 nt, Artificial Sequence
  Description of Artificial Sequence: Synthetic oligonucleotide
  Sense strand starting at position 3634 of SEQ ID NO: 588365
uuucucuggccauaaggaa

SEQ ID NO: 860109 - RNA, 19 nt, Artificial Sequence
  Description of Artificial Sequence: Synthetic oligonucleotide
  Antisense strand to SEQ ID NO: 860108
uuccuuauggccagagaaa

SEQ ID NO: 860110 - RNA, 19 nt, Artificial Sequence
  Description of Artificial Sequence: Synthetic oligonucleotide
  Sense strand starting at position 3660 of SEQ ID NO: 588365
uuuagacagugauacaaau

SEQ ID NO: 860111 - RNA, 19 nt, Artificial Sequence
  Description of Artificial Sequence: Synthetic oligonucleotide
  Antisense strand to SEQ ID NO: 860110
auuuguaucacugucuaaa

SEQ ID NO: 860112 - RNA, 19 nt, Artificial Sequence
  Description of Artificial Sequence: Synthetic oligonucleotide
  Sense strand starting at position 3808 of SEQ ID NO: 588365
gucucauaccuuugaguau

SEQ ID NO: 860113 - RNA, 19 nt, Artificial Sequence
  Description of Artificial Sequence: Synthetic oligonucleotide
  Antisense strand to SEQ ID NO: 860112
auacucaaagguaugagac

SEQ ID NO: 860114 - RNA, 19 nt, Artificial Sequence
  Description of Artificial Sequence: Synthetic oligonucleotide
  Sense strand starting at position 12 of SEQ ID NO: 588366
agggcaaucucguuugaca

SEQ ID NO: 860115 - RNA, 19 nt, Artificial Sequence
  Description of Artificial Sequence: Synthetic oligonucleotide
  Antisense strand to SEQ ID NO: 860114
ugucaaacgagauugcccu

SEQ ID NO: 860116 - RNA, 19 nt, Artificial Sequence
  Description of Artificial Sequence: Synthetic oligonucleotide
  Sense strand starting at position 14 of SEQ ID NO: 588366
ggcaaucucguuugacaag

SEQ ID NO: 860117 - RNA, 19 nt, Artificial Sequence
  Description of Artificial Sequence: Synthetic oligonucleotide
  Antisense strand to SEQ ID NO: 860116
cuugucaaacgagauugcc

SEQ ID NO: 860118 - RNA, 19 nt, Artificial Sequence
  Description of Artificial Sequence: Synthetic oligonucleotide
  Sense strand starting at position 109 of SEQ ID NO: 588366
auggacuucucuccaggau

SEQ ID NO: 860119 - RNA, 19 nt, Artificial Sequence
  Description of Artificial Sequence: Synthetic oligonucleotide
  Antisense strand to SEQ ID NO: 860118
auccuggagagaaguccau

SEQ ID NO: 860120 - RNA, 19 nt, Artificial Sequence
  Description of Artificial Sequence: Synthetic oligonucleotide
  Sense strand starting at position 148 of SEQ ID NO: 588366
caaugauggcaugaggcua

SEQ ID NO: 860121 - RNA, 19 nt, Artificial Sequence
  Description of Artificial Sequence: Synthetic oligonucleotide
  Antisense strand to SEQ ID NO: 860120
uagccucaugccaucauug

SEQ ID NO: 860122 - RNA, 19 nt, Artificial Sequence
  Description of Artificial Sequence: Synthetic oligonucleotide
  Sense strand starting at position 182 of SEQ ID NO: 588366
acaccucucuccgguuuaa

SEQ ID NO: 860123 - RNA, 19 nt, Artificial Sequence
  Description of Artificial Sequence: Synthetic oligonucleotide
  Antisense strand to SEQ ID NO: 860122
uuaaaccggagagaggugu

SEQ ID NO: 860124 - RNA, 19 nt, Artificial Sequence
  Description of Artificial Sequence: Synthetic oligonucleotide
  Sense strand starting at position 186 of SEQ ID NO: 588366
cucucuccgguuuaauauu

SEQ ID NO: 860125 - RNA, 19 nt, Artificial Sequence
  Description of Artificial Sequence: Synthetic oligonucleotide
  Antisense strand to SEQ ID NO: 860124
aauauuaaaccggagagag

SEQ ID NO: 860126 - RNA, 19 nt, Artificial Sequence
  Description of Artificial Sequence: Synthetic oligonucleotide
  Sense strand starting at position 194 of SEQ ID NO: 588366
gguuuaauauuguaugcuu

SEQ ID NO: 860127 - RNA, 19 nt, Artificial Sequence
  Description of Artificial Sequence: Synthetic oligonucleotide
  Antisense strand to SEQ ID NO: 860126
aagcauacaauauuaaacc

SEQ ID NO: 860128 - RNA, 19 nt, Artificial Sequence
  Description of Artificial Sequence: Synthetic oligonucleotide
  Sense strand starting at position 274 of SEQ ID NO: 588366
gccuuugucuccugcuaag

SEQ ID NO: 860129 - RNA, 19 nt, Artificial Sequence
  Description of Artificial Sequence: Synthetic oligonucleotide
  Antisense strand to SEQ ID NO: 860128
cuuagcaggagacaaaggc

SEQ ID NO: 860130 - RNA, 19 nt, Artificial Sequence
  Description of Artificial Sequence: Synthetic oligonucleotide
  Sense strand starting at position 285 of SEQ ID NO: 588366
cugcuaaguggccacuaau

SEQ ID NO: 860131 - RNA, 19 nt, Artificial Sequence
  Description of Artificial Sequence: Synthetic oligonucleotide
  Antisense strand to SEQ ID NO: 860130
auuaguggccacuuagcag

SEQ ID NO: 860132 - RNA, 19 nt, Artificial Sequence
  Description of Artificial Sequence: Synthetic oligonucleotide
  Sense strand starting at position 288 of SEQ ID NO: 588366
cuaaguggccacuaaugau

SEQ ID NO: 860133 - RNA, 19 nt, Artificial Sequence
  Description of Artificial Sequence: Synthetic oligonucleotide
  Antisense strand to SEQ ID NO: 860132
aucauuaguggccacuuag

SEQ ID NO: 860134 - RNA, 19 nt, Artificial Sequence
  Description of Artificial Sequence: Synthetic oligonucleotide
  Sense strand starting at position 376 of SEQ ID NO: 588366
ugcuguaauggguagguua

SEQ ID NO: 860135 - RNA, 19 nt, Artificial Sequence
  Description of Artificial Sequence: Synthetic oligonucleotide
  Antisense strand to SEQ ID NO: 860134
uaaccuacccauuacagca

SEQ ID NO: 860136 - RNA, 19 nt, Artificial Sequence
  Description of Artificial Sequence: Synthetic oligonucleotide
  Sense strand starting at position 378 of SEQ ID NO: 588366
cuguaauggguagguuacu

SEQ ID NO: 860137 - RNA, 19 nt, Artificial Sequence
  Description of Artificial Sequence: Synthetic oligonucleotide
  Antisense strand to SEQ ID NO: 860136
aguaaccuacccauuacag

SEQ ID NO: 860138 - RNA, 19 nt, Artificial Sequence
  Description of Artificial Sequence: Synthetic oligonucleotide
  Sense strand starting at position 387 of SEQ ID NO: 588366
guagguuacucgcccagga

SEQ ID NO: 860139 - RNA, 19 nt, Artificial Sequence
  Description of Artificial Sequence: Synthetic oligonucleotide
  Antisense strand to SEQ ID NO: 860138
uccugggcgaguaaccuac

SEQ ID NO: 860140 - RNA, 19 nt, Artificial Sequence
  Description of Artificial Sequence: Synthetic oligonucleotide
  Sense strand starting at position 433 of SEQ ID NO: 588366
ggguuauaggcccaagggu

SEQ ID NO: 860141 - RNA, 19 nt, Artificial Sequence
  Description of Artificial Sequence: Synthetic oligonucleotide
  Antisense strand to SEQ ID NO: 860140
acccuugggccuauaaccc

SEQ ID NO: 860142 - RNA, 19 nt, Artificial Sequence
  Description of Artificial Sequence: Synthetic oligonucleotide
  Sense strand starting at position 691 of SEQ ID NO: 588366
ccgguugccugacagacaa

SEQ ID NO: 860143 - RNA, 19 nt, Artificial Sequence
  Description of Artificial Sequence: Synthetic oligonucleotide
  Antisense strand to SEQ ID NO: 860142
uugucugucaggcaaccgg

SEQ ID NO: 860144 - RNA, 19 nt, Artificial Sequence
  Description of Artificial Sequence: Synthetic oligonucleotide
  Sense strand starting at position 1140 of SEQ ID NO: 588366
cagcguuccuguccguaua

SEQ ID NO: 860145 - RNA, 19 nt, Artificial Sequence
  Description of Artificial Sequence: Synthetic oligonucleotide
  Antisense strand to SEQ ID NO: 860144
uauacggacaggaacgcug

SEQ ID NO: 860146 - RNA, 19 nt, Artificial Sequence
  Description of Artificial Sequence: Synthetic oligonucleotide
  Sense strand starting at position 1141 of SEQ ID NO: 588366
agcguuccuguccguauau

SEQ ID NO: 860147 - RNA, 19 nt, Artificial Sequence
  Description of Artificial Sequence: Synthetic oligonucleotide
  Antisense strand to SEQ ID NO: 860146
auauacggacaggaacgcu

SEQ ID NO: 860148 - RNA, 19 nt, Artificial Sequence
  Description of Artificial Sequence: Synthetic oligonucleotide
  Sense strand starting at position 1454 of SEQ ID NO: 588366
agcauauucucccacgguu

SEQ ID NO: 860149 - RNA, 19 nt, Artificial Sequence
  Description of Artificial Sequence: Synthetic oligonucleotide
  Antisense strand to SEQ ID NO: 860148
aaccgugggagaauaugcu

SEQ ID NO: 860150 - RNA, 19 nt, Artificial Sequence
  Description of Artificial Sequence: Synthetic oligonucleotide
  Sense strand starting at position 2531 of SEQ ID NO: 588366
gccagugaccacuaaucau

SEQ ID NO: 860151 - RNA, 19 nt, Artificial Sequence
  Description of Artificial Sequence: Synthetic oligonucleotide
  Antisense strand to SEQ ID NO: 860150
augauuaguggucacuggc

SEQ ID NO: 860152 - RNA, 19 nt, Artificial Sequence
  Description of Artificial Sequence: Synthetic oligonucleotide
  Sense strand starting at position 2759 of SEQ ID NO: 588366
acucauucugaccagucua

SEQ ID NO: 860153 - RNA, 19 nt, Artificial Sequence
  Description of Artificial Sequence: Synthetic oligonucleotide
  Antisense strand to SEQ ID NO: 860152
uagacuggucagaaugagu

SEQ ID NO: 860154 - RNA, 19 nt, Artificial Sequence
  Description of Artificial Sequence: Synthetic oligonucleotide
  Sense strand starting at position 2831 of SEQ ID NO: 588366
acauucuugucccaaagga

SEQ ID NO: 860155 - RNA, 19 nt, Artificial Sequence
  Description of Artificial Sequence: Synthetic oligonucleotide
  Antisense strand to SEQ ID NO: 860154
uccuuugggacaagaaugu

SEQ ID NO: 860156 - RNA, 19 nt, Artificial Sequence
  Description of Artificial Sequence: Synthetic oligonucleotide
  Sense strand starting at position 3264 of SEQ ID NO: 588366
gggugugcaagagaacuaa

SEQ ID NO: 860157 - RNA, 19 nt, Artificial Sequence
  Description of Artificial Sequence: Synthetic oligonucleotide
  Antisense strand to SEQ ID NO: 860156
uuaguucucuugcacaccc

SEQ ID NO: 860158 - RNA, 19 nt, Artificial Sequence
  Description of Artificial Sequence: Synthetic oligonucleotide
  Sense strand starting at position 3335 of SEQ ID NO: 588366
ggagauuuaugaggagaga

SEQ ID NO: 860159 - RNA, 19 nt, Artificial Sequence
  Description of Artificial Sequence: Synthetic oligonucleotide
  Antisense strand to SEQ ID NO: 860158
ucucuccucauaaaucucc

SEQ ID NO: 860160 - RNA, 19 nt, Artificial Sequence
  Description of Artificial Sequence: Synthetic oligonucleotide
  Sense strand starting at position 3483 of SEQ ID NO: 588366
cugguccacuccuaugauu

SEQ ID NO: 860161 - RNA, 19 nt, Artificial Sequence
  Description of Artificial Sequence: Synthetic oligonucleotide
  Antisense strand to SEQ ID NO: 860160
aaucauaggaguggaccag

SEQ ID NO: 860162 - RNA, 19 nt, Artificial Sequence
  Description of Artificial Sequence: Synthetic oligonucleotide
  Sense strand starting at position 3506 of SEQ ID NO: 588366
cagcuaugugaacauuaug

SEQ ID NO: 860163 - RNA, 19 nt, Artificial Sequence
  Description of Artificial Sequence: Synthetic oligonucleotide
  Antisense strand to SEQ ID NO: 860162
cauaauguucacauagcug

SEQ ID NO: 860164 - RNA, 19 nt, Artificial Sequence
  Description of Artificial Sequence: Synthetic oligonucleotide
  Sense strand starting at position 3512 of SEQ ID NO: 588366
ugugaacauuaugcucuua

SEQ ID NO: 860165 - RNA, 19 nt, Artificial Sequence
  Description of Artificial Sequence: Synthetic oligonucleotide
  Antisense strand to SEQ ID NO: 860164
uaagagcauaauguucaca

SEQ ID NO: 860166 - RNA, 19 nt, Artificial Sequence
  Description of Artificial Sequence: Synthetic oligonucleotide
  Sense strand starting at position 3649 of SEQ ID NO: 588366
ccaguuucccaaggagucu

SEQ ID NO: 860167 - RNA, 19 nt, Artificial Sequence
  Description of Artificial Sequence: Synthetic oligonucleotide
  Antisense strand to SEQ ID NO: 860166
agacuccuugggaaacugg

SEQ ID NO: 860168 - RNA, 19 nt, Artificial Sequence
  Description of Artificial Sequence: Synthetic oligonucleotide
  Sense strand starting at position 3660 of SEQ ID NO: 588366
aggagucuucuguggugaa

SEQ ID NO: 860169 - RNA, 19 nt, Artificial Sequence
  Description of Artificial Sequence: Synthetic oligonucleotide
  Antisense strand to SEQ ID NO: 860168
uucaccacagaagacuccu

SEQ ID NO: 860170 - RNA, 19 nt, Artificial Sequence
  Description of Artificial Sequence: Synthetic oligonucleotide
  Sense strand starting at position 3661 of SEQ ID NO: 588366
ggagucuucuguggugaag

SEQ ID NO: 860171 - RNA, 19 nt, Artificial Sequence
  Description of Artificial Sequence: Synthetic oligonucleotide
  Antisense strand to SEQ ID NO: 860170
cuucaccacagaagacucc

SEQ ID NO: 860172 - RNA, 19 nt, Artificial Sequence
  Description of Artificial Sequence: Synthetic oligonucleotide
  Sense strand starting at position 3663 of SEQ ID NO: 588366
agucuucuguggugaagca

SEQ ID NO: 860173 - RNA, 19 nt, Artificial Sequence
  Description of Artificial Sequence: Synthetic oligonucleotide
  Antisense strand to SEQ ID NO: 860172
ugcuucaccacagaagacu

SEQ ID NO: 860174 - RNA, 19 nt, Artificial Sequence
  Description of Artificial Sequence: Synthetic oligonucleotide
  Sense strand starting at position 3664 of SEQ ID NO: 588366
gucuucuguggugaagcaa

SEQ ID NO: 860175 - RNA, 19 nt, Artificial Sequence
  Description of Artificial Sequence: Synthetic oligonucleotide
  Antisense strand to SEQ ID NO: 860174
uugcuucaccacagaagac

SEQ ID NO: 860176 - RNA, 19 nt, Artificial Sequence
  Description of Artificial Sequence: Synthetic oligonucleotide
  Sense strand starting at position 3739 of SEQ ID NO: 588366
uguaguuucuagcucugga

SEQ ID NO: 860177 - RNA, 19 nt, Artificial Sequence
  Description of Artificial Sequence: Synthetic oligonucleotide
  Antisense strand to SEQ ID NO: 860176
uccagagcuagaaacuaca

SEQ ID NO: 860178 - RNA, 19 nt, Artificial Sequence
  Description of Artificial Sequence: Synthetic oligonucleotide
  Sense strand starting at position 3742 of SEQ ID NO: 588366
aguuucuagcucuggaaag

SEQ ID NO: 860179 - RNA, 19 nt, Artificial Sequence
  Description of Artificial Sequence: Synthetic oligonucleotide
  Antisense strand to SEQ ID NO: 860178
cuuuccagagcuagaaacu

SEQ ID NO: 860180 - RNA, 19 nt, Artificial Sequence
  Description of Artificial Sequence: Synthetic oligonucleotide
  Sense strand starting at position 3795 of SEQ ID NO: 588366
acucaagucuagguacauu

SEQ ID NO: 860181 - RNA, 19 nt, Artificial Sequence
  Description of Artificial Sequence: Synthetic oligonucleotide
  Antisense strand to SEQ ID NO: 860180
aauguaccuagacuugagu

SEQ ID NO: 860182 - RNA, 19 nt, Artificial Sequence
  Description of Artificial Sequence: Synthetic oligonucleotide
  Sense strand starting at position 3920 of SEQ ID NO: 588366
agcagauggaccugacuuu

SEQ ID NO: 860183 - RNA, 19 nt, Artificial Sequence
  Description of Artificial Sequence: Synthetic oligonucleotide
  Antisense strand to SEQ ID NO: 860182
aaagucagguccaucugcu

SEQ ID NO: 860184 - RNA, 19 nt, Artificial Sequence
  Description of Artificial Sequence: Synthetic oligonucleotide
  Sense strand starting at position 3960 of SEQ ID NO: 588366
ggaagcugcuagucccaua

SEQ ID NO: 860185 - RNA, 19 nt, Artificial Sequence
  Description of Artificial Sequence: Synthetic oligonucleotide
  Antisense strand to SEQ ID NO: 860184
uaugggacuagcagcuucc

SEQ ID NO: 860186 - RNA, 19 nt, Artificial Sequence
  Description of Artificial Sequence: Synthetic oligonucleotide
  Sense strand starting at position 3963 of SEQ ID NO: 588366
agcugcuagucccauauga

SEQ ID NO: 860187 - RNA, 19 nt, Artificial Sequence
  Description of Artificial Sequence: Synthetic oligonucleotide
  Antisense strand to SEQ ID NO: 860186
ucauaugggacuagcagcu

SEQ ID NO: 860188 - RNA, 19 nt, Artificial Sequence
  Description of Artificial Sequence: Synthetic oligonucleotide
  Sense strand starting at position 3965 of SEQ ID NO: 588366
cugcuagucccauaugaac

SEQ ID NO: 860189 - RNA, 19 nt, Artificial Sequence
  Description of Artificial Sequence: Synthetic oligonucleotide
  Antisense strand to SEQ ID NO: 860188
guucauaugggacuagcag

SEQ ID NO: 860190 - RNA, 19 nt, Artificial Sequence
  Description of Artificial Sequence: Synthetic oligonucleotide
  Sense strand starting at position 359 of SEQ ID NO: 588367
cccugcuggucauuucuaa

SEQ ID NO: 860191 - RNA, 19 nt, Artificial Sequence
  Description of Artificial Sequence: Synthetic oligonucleotide
  Antisense strand to SEQ ID NO: 860190
uuagaaaugaccagcaggg

SEQ ID NO: 860192 - RNA, 19 nt, Artificial Sequence
  Description of Artificial Sequence: Synthetic oligonucleotide
  Sense strand starting at position 367 of SEQ ID NO: 588367
gucauuucuaacugagugu

SEQ ID NO: 860193 - RNA, 19 nt, Artificial Sequence
  Description of Artificial Sequence: Synthetic oligonucleotide
  Antisense strand to SEQ ID NO: 860192
acacucaguuagaaaugac

SEQ ID NO: 860194 - RNA, 19 nt, Artificial Sequence
  Description of Artificial Sequence: Synthetic oligonucleotide
  Sense strand starting at position 374 of SEQ ID NO: 588367
cuaacugaguguuuccaca

SEQ ID NO: 860195 - RNA, 19 nt, Artificial Sequence
  Description of Artificial Sequence: Synthetic oligonucleotide
  Antisense strand to SEQ ID NO: 860194
uguggaaacacucaguuag

SEQ ID NO: 860196 - RNA, 19 nt, Artificial Sequence
  Description of Artificial Sequence: Synthetic oligonucleotide
  Sense strand starting at position 376 of SEQ ID NO: 588367
aacugaguguuuccacaga

SEQ ID NO: 860197 - RNA, 19 nt, Artificial Sequence
  Description of Artificial Sequence: Synthetic oligonucleotide
  Antisense strand to SEQ ID NO: 860196
ucuguggaaacacucaguu

SEQ ID NO: 860198 - RNA, 19 nt, Artificial Sequence
  Description of Artificial Sequence: Synthetic oligonucleotide
  Sense strand starting at position 402 of SEQ ID NO: 588367
acugaacuuugggaauuau

SEQ ID NO: 860199 - RNA, 19 nt, Artificial Sequence
  Description of Artificial Sequence: Synthetic oligonucleotide
  Antisense strand to SEQ ID NO: 860198
auaauucccaaaguucagu

SEQ ID NO: 860200 - RNA, 19 nt, Artificial Sequence
  Description of Artificial Sequence: Synthetic oligonucleotide
  Sense strand starting at position 682 of SEQ ID NO: 588367
ugugcuaagcucuagauug

SEQ ID NO: 860201 - RNA, 19 nt, Artificial Sequence
  Description of Artificial Sequence: Synthetic oligonucleotide
  Antisense strand to SEQ ID NO: 860200
caaucuagagcuuagcaca

SEQ ID NO: 860202 - RNA, 19 nt, Artificial Sequence
  Description of Artificial Sequence: Synthetic oligonucleotide
  Sense strand starting at position 690 of SEQ ID NO: 588367
gcucuagauugaguugagu

SEQ ID NO: 860203 - RNA, 19 nt, Artificial Sequence
  Description of Artificial Sequence: Synthetic oligonucleotide
  Antisense strand to SEQ ID NO: 860202
acucaacucaaucuagagc

SEQ ID NO: 860204 - RNA, 19 nt, Artificial Sequence
  Description of Artificial Sequence: Synthetic oligonucleotide
  Sense strand starting at position 692 of SEQ ID NO: 588367
ucuagauugaguugagucu

SEQ ID NO: 860205 - RNA, 19 nt, Artificial Sequence
  Description of Artificial Sequence: Synthetic oligonucleotide
  Antisense strand to SEQ ID NO: 860204
agacucaacucaaucuaga

SEQ ID NO: 860206 - RNA, 19 nt, Artificial Sequence
  Description of Artificial Sequence: Synthetic oligonucleotide
  Sense strand starting at position 693 of SEQ ID NO: 588367
cuagauugaguugagucua

SEQ ID NO: 860207 - RNA, 19 nt, Artificial Sequence
  Description of Artificial Sequence: Synthetic oligonucleotide
  Antisense strand to SEQ ID NO: 860206
uagacucaacucaaucuag

SEQ ID NO: 860208 - RNA, 19 nt, Artificial Sequence
  Description of Artificial Sequence: Synthetic oligonucleotide
  Sense strand starting at position 699 of SEQ ID NO: 588367
ugaguugagucuaggagag

SEQ ID NO: 860209 - RNA, 19 nt, Artificial Sequence
  Description of Artificial Sequence: Synthetic oligonucleotide
  Antisense strand to SEQ ID NO: 860208
cucuccuagacucaacuca

SEQ ID NO: 860210 - RNA, 19 nt, Artificial Sequence
  Description of Artificial Sequence: Synthetic oligonucleotide
  Sense strand starting at position 976 of SEQ ID NO: 588367
gccugaggauuccugccuu

SEQ ID NO: 860211 - RNA, 19 nt, Artificial Sequence
  Description of Artificial Sequence: Synthetic oligonucleotide
  Antisense strand to SEQ ID NO: 860210
aaggcaggaauccucaggc

SEQ ID NO: 860212 - RNA, 19 nt, Artificial Sequence
  Description of Artificial Sequence: Synthetic oligonucleotide
  Sense strand starting at position 982 of SEQ ID NO: 588367
ggauuccugccuuaacuuu

SEQ ID NO: 860213 - RNA, 19 nt, Artificial Sequence
  Description of Artificial Sequence: Synthetic oligonucleotide
  Antisense strand to SEQ ID NO: 860212
aaaguuaaggcaggaaucc

SEQ ID NO: 860214 - RNA, 19 nt, Artificial Sequence
  Description of Artificial Sequence: Synthetic oligonucleotide
  Sense strand starting at position 1021 of SEQ ID NO: 588367
ccauguuccagagacgcua

SEQ ID NO: 860215 - RNA, 19 nt, Artificial Sequence
  Description of Artificial Sequence: Synthetic oligonucleotide
  Antisense strand to SEQ ID NO: 860214
uagcgucucuggaacaugg

SEQ ID NO: 860216 - RNA, 19 nt, Artificial Sequence
  Description of Artificial Sequence: Synthetic oligonucleotide
  Sense strand starting at position 1665 of SEQ ID NO: 588367
gacagaugucuuugaggga

SEQ ID NO: 860217 - RNA, 19 nt, Artificial Sequence
  Description of Artificial Sequence: Synthetic oligonucleotide
  Antisense strand to SEQ ID NO: 860216
ucccucaaagacaucuguc

SEQ ID NO: 860218 - RNA, 19 nt, Artificial Sequence
  Description of Artificial Sequence: Synthetic oligonucleotide
  Sense strand starting at position 1737 of SEQ ID NO: 588367
guuacaaguccuuagguca

SEQ ID NO: 860219 - RNA, 19 nt, Artificial Sequence
  Description of Artificial Sequence: Synthetic oligonucleotide
  Antisense strand to SEQ ID NO: 860218
ugaccuaaggacuuguaac

SEQ ID NO: 860220 - RNA, 19 nt, Artificial Sequence
  Description of Artificial Sequence: Synthetic oligonucleotide
  Sense strand starting at position 1740 of SEQ ID NO: 588367
acaaguccuuaggucaaga

SEQ ID NO: 860221 - RNA, 19 nt, Artificial Sequence
  Description of Artificial Sequence: Synthetic oligonucleotide
  Antisense strand to SEQ ID NO: 860220
ucuugaccuaaggacuugu

SEQ ID NO: 860222 - RNA, 19 nt, Artificial Sequence
  Description of Artificial Sequence: Synthetic oligonucleotide
  Sense strand starting at position 1750 of SEQ ID NO: 588367
aggucaagaccuugacuua

SEQ ID NO: 860223 - RNA, 19 nt, Artificial Sequence
  Description of Artificial Sequence: Synthetic oligonucleotide
  Antisense strand to SEQ ID NO: 860222
uaagucaaggucuugaccu

SEQ ID NO: 860224 - RNA, 19 nt, Artificial Sequence
  Description of Artificial Sequence: Synthetic oligonucleotide
  Sense strand starting at position 1782 of SEQ ID NO: 588367
agguguugauccucaggga

SEQ ID NO: 860225 - RNA, 19 nt, Artificial Sequence
  Description of Artificial Sequence: Synthetic oligonucleotide
  Antisense strand to SEQ ID NO: 860224
ucccugaggaucaacaccu

SEQ ID NO: 860226 - RNA, 19 nt, Artificial Sequence
  Description of Artificial Sequence: Synthetic oligonucleotide
  Sense strand starting at position 1786 of SEQ ID NO: 588367
guugauccucagggaggaa

SEQ ID NO: 860227 - RNA, 19 nt, Artificial Sequence
  Description of Artificial Sequence: Synthetic oligonucleotide
  Antisense strand to SEQ ID NO: 860226
uuccucccugaggaucaac

SEQ ID NO: 860228 - RNA, 19 nt, Artificial Sequence
  Description of Artificial Sequence: Synthetic oligonucleotide
  Sense strand starting at position 1849 of SEQ ID NO: 588367
ugaaaugccuugccugaaa

SEQ ID NO: 860229 - RNA, 19 nt, Artificial Sequence
  Description of Artificial Sequence: Synthetic oligonucleotide
  Antisense strand to SEQ ID NO: 860228
uuucaggcaaggcauuuca

SEQ ID NO: 860230 - RNA, 19 nt, Artificial Sequence
  Description of Artificial Sequence: Synthetic oligonucleotide
  Sense strand starting at position 1851 of SEQ ID NO: 588367
aaaugccuugccugaaagu

SEQ ID NO: 860231 - RNA, 19 nt, Artificial Sequence
  Description of Artificial Sequence: Synthetic oligonucleotide
  Antisense strand to SEQ ID NO: 860230
acuuucaggcaaggcauuu

SEQ ID NO: 860232 - RNA, 19 nt, Artificial Sequence
  Description of Artificial Sequence: Synthetic oligonucleotide
  Sense strand starting at position 1886 of SEQ ID NO: 588367
ggacuuggauaucugcaga

SEQ ID NO: 860233 - RNA, 19 nt, Artificial Sequence
  Description of Artificial Sequence: Synthetic oligonucleotide
  Antisense strand to SEQ ID NO: 860232
ucugcagauauccaagucc

SEQ ID NO: 860234 - RNA, 19 nt, Artificial Sequence
  Description of Artificial Sequence: Synthetic oligonucleotide
  Sense strand starting at position 1889 of SEQ ID NO: 588367
cuuggauaucugcagaacu

SEQ ID NO: 860235 - RNA, 19 nt, Artificial Sequence
  Description of Artificial Sequence: Synthetic oligonucleotide
  Antisense strand to SEQ ID NO: 860234
aguucugcagauauccaag

SEQ ID NO: 860236 - RNA, 19 nt, Artificial Sequence
  Description of Artificial Sequence: Synthetic oligonucleotide
  Sense strand starting at position 1891 of SEQ ID NO: 588367
uggauaucugcagaacuuc

SEQ ID NO: 860237 - RNA, 19 nt, Artificial Sequence
  Description of Artificial Sequence: Synthetic oligonucleotide
  Antisense strand to SEQ ID NO: 860236
gaaguucugcagauaucca

SEQ ID NO: 860238 - RNA, 19 nt, Artificial Sequence
  Description of Artificial Sequence: Synthetic oligonucleotide
  Sense strand starting at position 2173 of SEQ ID NO: 588367
gggaucucugugagcgagu

SEQ ID NO: 860239 - RNA, 19 nt, Artificial Sequence
  Description of Artificial Sequence: Synthetic oligonucleotide
  Antisense strand to SEQ ID NO: 860238
acucgcucacagagauccc

SEQ ID NO: 860240 - RNA, 19 nt, Artificial Sequence
  Description of Artificial Sequence: Synthetic oligonucleotide
  Sense strand starting at position 2187 of SEQ ID NO: 588367
cgaguguuuggguaggauc

SEQ ID NO: 860241 - RNA, 19 nt, Artificial Sequence
  Description of Artificial Sequence: Synthetic oligonucleotide
  Antisense strand to SEQ ID NO: 860240
gauccuacccaaacacucg

SEQ ID NO: 860242 - RNA, 19 nt, Artificial Sequence
  Description of Artificial Sequence: Synthetic oligonucleotide
  Sense strand starting at position 2198 of SEQ ID NO: 588367
guaggaucugcggagaucu

SEQ ID NO: 860243 - RNA, 19 nt, Artificial Sequence
  Description of Artificial Sequence: Synthetic oligonucleotide
  Antisense strand to SEQ ID NO: 860242
agaucuccgcagauccuac

SEQ ID NO: 860244 - RNA, 19 nt, Artificial Sequence
  Description of Artificial Sequence: Synthetic oligonucleotide
  Sense strand starting at position 3356 of SEQ ID NO: 588367
cagggauuggcagggucaa

SEQ ID NO: 860245 - RNA, 19 nt, Artificial Sequence
  Description of Artificial Sequence: Synthetic oligonucleotide
  Antisense strand to SEQ ID NO: 860244
uugacccugccaaucccug

SEQ ID NO: 860246 - RNA, 19 nt, Artificial Sequence
  Description of Artificial Sequence: Synthetic oligonucleotide
  Sense strand starting at position 3357 of SEQ ID NO: 588367
agggauuggcagggucaaa

SEQ ID NO: 860247 - RNA, 19 nt, Artificial Sequence
  Description of Artificial Sequence: Synthetic oligonucleotide
  Antisense strand to SEQ ID NO: 860246
uuugacccugccaaucccu

SEQ ID NO: 860248 - RNA, 19 nt, Artificial Sequence
  Description of Artificial Sequence: Synthetic oligonucleotide
  Sense strand starting at position 3379 of SEQ ID NO: 588367
gugguaauuaauuggguuu

SEQ ID NO: 860249 - RNA, 19 nt, Artificial Sequence
  Description of Artificial Sequence: Synthetic oligonucleotide
  Antisense strand to SEQ ID NO: 860248
aaacccaauuaauuaccac

SEQ ID NO: 860250 - RNA, 19 nt, Artificial Sequence
  Description of Artificial Sequence: Synthetic oligonucleotide
  Sense strand starting at position 3561 of SEQ ID NO: 588367
ccuaguguagugugggaau

SEQ ID NO: 860251 - RNA, 19 nt, Artificial Sequence
  Description of Artificial Sequence: Synthetic oligonucleotide
  Antisense strand to SEQ ID NO: 860250
auucccacacuacacuagg

SEQ ID NO: 860252 - RNA, 19 nt, Artificial Sequence
  Description of Artificial Sequence: Synthetic oligonucleotide
  Sense strand starting at position 3563 of SEQ ID NO: 588367
uaguguagugugggaauau

SEQ ID NO: 860253 - RNA, 19 nt, Artificial Sequence
  Description of Artificial Sequence: Synthetic oligonucleotide
  Antisense strand to SEQ ID NO: 860252
auauucccacacuacacua

SEQ ID NO: 860254 - RNA, 19 nt, Artificial Sequence
  Description of Artificial Sequence: Synthetic oligonucleotide
  Sense strand starting at position 3584 of SEQ ID NO: 588367
agcccaaaccuuugagaua

SEQ ID NO: 860255 - RNA, 19 nt, Artificial Sequence
  Description of Artificial Sequence: Synthetic oligonucleotide
  Antisense strand to SEQ ID NO: 860254
uaucucaaagguuugggcu

SEQ ID NO: 860256 - RNA, 19 nt, Artificial Sequence
  Description of Artificial Sequence: Synthetic oligonucleotide
  Sense strand starting at position 3595 of SEQ ID NO: 588367
uugagauauugggcaugca

SEQ ID NO: 860257 - RNA, 19 nt, Artificial Sequence
  Description of Artificial Sequence: Synthetic oligonucleotide
  Antisense strand to SEQ ID NO: 860256
ugcaugcccaauaucucaa

SEQ ID NO: 860258 - RNA, 19 nt, Artificial Sequence
  Description of Artificial Sequence: Synthetic oligonucleotide
  Sense strand starting at position 3596 of SEQ ID NO: 588367
ugagauauugggcaugcau

SEQ ID NO: 860259 - RNA, 19 nt, Artificial Sequence
  Description of Artificial Sequence: Synthetic oligonucleotide
  Antisense strand to SEQ ID NO: 860258
augcaugcccaauaucuca

SEQ ID NO: 860260 - RNA, 19 nt, Artificial Sequence
  Description of Artificial Sequence: Synthetic oligonucleotide
  Sense strand starting at position 3667 of SEQ ID NO: 588367
auggauuaguugccauuau

SEQ ID NO: 860261 - RNA, 19 nt, Artificial Sequence
  Description of Artificial Sequence: Synthetic oligonucleotide
  Antisense strand to SEQ ID NO: 860260
auaauggcaacuaauccau

SEQ ID NO: 860262 - RNA, 19 nt, Artificial Sequence
  Description of Artificial Sequence: Synthetic oligonucleotide
  Sense strand starting at position 3671 of SEQ ID NO: 588367
auuaguugccauuauaaug

SEQ ID NO: 860263 - RNA, 19 nt, Artificial Sequence
  Description of Artificial Sequence: Synthetic oligonucleotide
  Antisense strand to SEQ ID NO: 860262
cauuauaauggcaacuaau

SEQ ID NO: 860264 - RNA, 19 nt, Artificial Sequence
  Description of Artificial Sequence: Synthetic oligonucleotide
  Sense strand starting at position 3728 of SEQ ID NO: 588367
ugauuugccuaggaauaau

SEQ ID NO: 860265 - RNA, 19 nt, Artificial Sequence
  Description of Artificial Sequence: Synthetic oligonucleotide
  Antisense strand to SEQ ID NO: 860264
auuauuccuaggcaaauca

SEQ ID NO: 860266 - RNA, 19 nt, Artificial Sequence
  Description of Artificial Sequence: Synthetic oligonucleotide
  Sense strand starting at position 3769 of SEQ ID NO: 588367
cugaaacucggaggcuauu

SEQ ID NO: 860267 - RNA, 19 nt, Artificial Sequence
  Description of Artificial Sequence: Synthetic oligonucleotide
  Antisense strand to SEQ ID NO: 860266
aauagccuccgaguuucag

SEQ ID NO: 860268 - RNA, 19 nt, Artificial Sequence
  Description of Artificial Sequence: Synthetic oligonucleotide
  Sense strand starting at position 3840 of SEQ ID NO: 588367
agagcuugugaauggcagu

SEQ ID NO: 860269 - RNA, 19 nt, Artificial Sequence
  Description of Artificial Sequence: Synthetic oligonucleotide
  Antisense strand to SEQ ID NO: 860268
acugccauucacaagcucu

SEQ ID NO: 860270 - RNA, 19 nt, Artificial Sequence
  Description of Artificial Sequence: Synthetic oligonucleotide
  Sense strand starting at position 339 of SEQ ID NO: 588368
ccauuaaggccuggcauua

SEQ ID NO: 860271 - RNA, 19 nt, Artificial Sequence
  Description of Artificial Sequence: Synthetic oligonucleotide
  Antisense strand to SEQ ID NO: 860270
uaaugccaggccuuaaugg

SEQ ID NO: 860272 - RNA, 19 nt, Artificial Sequence
  Description of Artificial Sequence: Synthetic oligonucleotide
  Sense strand starting at position 1482 of SEQ ID NO: 588368
gcguuucugugcgucccaa

SEQ ID NO: 860273 - RNA, 19 nt, Artificial Sequence
  Description of Artificial Sequence: Synthetic oligonucleotide
  Antisense strand to SEQ ID NO: 860272
uugggacgcacagaaacgc

SEQ ID NO: 860274 - RNA, 19 nt, Artificial Sequence
  Description of Artificial Sequence: Synthetic oligonucleotide
  Sense strand starting at position 1486 of SEQ ID NO: 588368
uucugugcgucccaaguuu

SEQ ID NO: 860275 - RNA, 19 nt, Artificial Sequence
  Description of Artificial Sequence: Synthetic oligonucleotide
  Antisense strand to SEQ ID NO: 860274
aaacuugggacgcacagaa

SEQ ID NO: 860276 - RNA, 19 nt, Artificial Sequence
  Description of Artificial Sequence: Synthetic oligonucleotide
  Sense strand starting at position 1551 of SEQ ID NO: 588368
aaaggacuucggugugguu

SEQ ID NO: 860277 - RNA, 19 nt, Artificial Sequence
  Description of Artificial Sequence: Synthetic oligonucleotide
  Antisense strand to SEQ ID NO: 860276
aaccacaccgaaguccuuu

SEQ ID NO: 860278 - RNA, 19 nt, Artificial Sequence
  Description of Artificial Sequence: Synthetic oligonucleotide
  Sense strand starting at position 2592 of SEQ ID NO: 588368
uaggcagguuccgugugaa

SEQ ID NO: 860279 - RNA, 19 nt, Artificial Sequence
  Description of Artificial Sequence: Synthetic oligonucleotide
  Antisense strand to SEQ ID NO: 860278
uucacacggaaccugccua

SEQ ID NO: 860280 - RNA, 19 nt, Artificial Sequence
  Description of Artificial Sequence: Synthetic oligonucleotide
  Sense strand starting at position 2595 of SEQ ID NO: 588368
gcagguuccgugugaacag

SEQ ID NO: 860281 - RNA, 19 nt, Artificial Sequence
  Description of Artificial Sequence: Synthetic oligonucleotide
  Antisense strand to SEQ ID NO: 860280
cuguucacacggaaccugc

SEQ ID NO: 860282 - RNA, 19 nt, Artificial Sequence
  Description of Artificial Sequence: Synthetic oligonucleotide
  Sense strand starting at position 2596 of SEQ ID NO: 588368
cagguuccgugugaacaga

SEQ ID NO: 860283 - RNA, 19 nt, Artificial Sequence
  Description of Artificial Sequence: Synthetic oligonucleotide
  Antisense strand to SEQ ID NO: 860282
ucuguucacacggaaccug

SEQ ID NO: 860284 - RNA, 19 nt, Artificial Sequence
  Description of Artificial Sequence: Synthetic oligonucleotide
  Sense strand starting at position 2621 of SEQ ID NO: 588368
cauugcacuucgguaaaca

SEQ ID NO: 860285 - RNA, 19 nt, Artificial Sequence
  Description of Artificial Sequence: Synthetic oligonucleotide
  Antisense strand to SEQ ID NO: 860284
uguuuaccgaagugcaaug

SEQ ID NO: 860286 - RNA, 19 nt, Artificial Sequence
  Description of Artificial Sequence: Synthetic oligonucleotide
  Sense strand starting at position 2813 of SEQ ID NO: 588368
gcugugguucgcguguuua

SEQ ID NO: 860287 - RNA, 19 nt, Artificial Sequence
  Description of Artificial Sequence: Synthetic oligonucleotide
  Antisense strand to SEQ ID NO: 860286
uaaacacgcgaaccacagc

SEQ ID NO: 860288 - RNA, 19 nt, Artificial Sequence
  Description of Artificial Sequence: Synthetic oligonucleotide
  Sense strand starting at position 2815 of SEQ ID NO: 588368
ugugguucgcguguuuaac

SEQ ID NO: 860289 - RNA, 19 nt, Artificial Sequence
  Description of Artificial Sequence: Synthetic oligonucleotide
  Antisense strand to SEQ ID NO: 860288
guuaaacacgcgaaccaca

SEQ ID NO: 860290 - RNA, 19 nt, Artificial Sequence
  Description of Artificial Sequence: Synthetic oligonucleotide
  Sense strand starting at position 2816 of SEQ ID NO: 588368
gugguucgcguguuuaaca

SEQ ID NO: 860291 - RNA, 19 nt, Artificial Sequence
  Description of Artificial Sequence: Synthetic oligonucleotide
  Antisense strand to SEQ ID NO: 860290
uguuaaacacgcgaaccac

SEQ ID NO: 860292 - RNA, 19 nt, Artificial Sequence
  Description of Artificial Sequence: Synthetic oligonucleotide
  Sense strand starting at position 2837 of SEQ ID NO: 588368
cuuucugcguguucaguua

SEQ ID NO: 860293 - RNA, 19 nt, Artificial Sequence
  Description of Artificial Sequence: Synthetic oligonucleotide
  Antisense strand to SEQ ID NO: 860292
uaacugaacacgcagaaag

SEQ ID NO: 860294 - RNA, 19 nt, Artificial Sequence
  Description of Artificial Sequence: Synthetic oligonucleotide
  Sense strand starting at position 2858 of SEQ ID NO: 588368
accuguguaucuucuccaa

SEQ ID NO: 860295 - RNA, 19 nt, Artificial Sequence
  Description of Artificial Sequence: Synthetic oligonucleotide
  Antisense strand to SEQ ID NO: 860294
uuggagaagauacacaggu

SEQ ID NO: 860296 - RNA, 19 nt, Artificial Sequence
  Description of Artificial Sequence: Synthetic oligonucleotide
  Sense strand starting at position 2860 of SEQ ID NO: 588368
cuguguaucuucuccaaag

SEQ ID NO: 860297 - RNA, 19 nt, Artificial Sequence
  Description of Artificial Sequence: Synthetic oligonucleotide
  Antisense strand to SEQ ID NO: 860296
cuuuggagaagauacacag

SEQ ID NO: 860298 - RNA, 19 nt, Artificial Sequence
  Description of Artificial Sequence: Synthetic oligonucleotide
  Sense strand starting at position 2861 of SEQ ID NO: 588368
uguguaucuucuccaaagu

SEQ ID NO: 860299 - RNA, 19 nt, Artificial Sequence
  Description of Artificial Sequence: Synthetic oligonucleotide
  Antisense strand to SEQ ID NO: 860298
acuuuggagaagauacaca

SEQ ID NO: 860300 - RNA, 19 nt, Artificial Sequence
  Description of Artificial Sequence: Synthetic oligonucleotide
  Sense strand starting at position 2862 of SEQ ID NO: 588368
guguaucuucuccaaaguc

SEQ ID NO: 860301 - RNA, 19 nt, Artificial Sequence
  Description of Artificial Sequence: Synthetic oligonucleotide
  Antisense strand to SEQ ID NO: 860300
gacuuuggagaagauacac

SEQ ID NO: 860302 - RNA, 19 nt, Artificial Sequence
  Description of Artificial Sequence: Synthetic oligonucleotide
  Sense strand starting at position 2909 of SEQ ID NO: 588368
ucacguuguuucuuuauua

SEQ ID NO: 860303 - RNA, 19 nt, Artificial Sequence
  Description of Artificial Sequence: Synthetic oligonucleotide
  Antisense strand to SEQ ID NO: 860302
uaauaaagaaacaacguga

SEQ ID NO: 860304 - RNA, 19 nt, Artificial Sequence
  Description of Artificial Sequence: Synthetic oligonucleotide
  Sense strand starting at position 2980 of SEQ ID NO: 588368
gagacugggucucaguguu

SEQ ID NO: 860305 - RNA, 19 nt, Artificial Sequence
  Description of Artificial Sequence: Synthetic oligonucleotide
  Antisense strand to SEQ ID NO: 860304
aacacugagacccagucuc

SEQ ID NO: 860306 - RNA, 19 nt, Artificial Sequence
  Description of Artificial Sequence: Synthetic oligonucleotide
  Sense strand starting at position 3241 of SEQ ID NO: 588368
guccgagacuucuuuauau

SEQ ID NO: 860307 - RNA, 19 nt, Artificial Sequence
  Description of Artificial Sequence: Synthetic oligonucleotide
  Antisense strand to SEQ ID NO: 860306
auauaaagaagucucggac

SEQ ID NO: 860308 - RNA, 19 nt, Artificial Sequence
  Description of Artificial Sequence: Synthetic oligonucleotide
  Sense strand starting at position 3243 of SEQ ID NO: 588368
ccgagacuucuuuauaucu

SEQ ID NO: 860309 - RNA, 19 nt, Artificial Sequence
  Description of Artificial Sequence: Synthetic oligonucleotide
  Antisense strand to SEQ ID NO: 860308
agauauaaagaagucucgg

SEQ ID NO: 860310 - RNA, 19 nt, Artificial Sequence
  Description of Artificial Sequence: Synthetic oligonucleotide
  Sense strand starting at position 3263 of SEQ ID NO: 588368
cuggauaucugcccauuau

SEQ ID NO: 860311 - RNA, 19 nt, Artificial Sequence
  Description of Artificial Sequence: Synthetic oligonucleotide
  Antisense strand to SEQ ID NO: 860310
auaaugggcagauauccag

SEQ ID NO: 860312 - RNA, 19 nt, Artificial Sequence
  Description of Artificial Sequence: Synthetic oligonucleotide
  Sense strand starting at position 3264 of SEQ ID NO: 588368
uggauaucugcccauuauu

SEQ ID NO: 860313 - RNA, 19 nt, Artificial Sequence
  Description of Artificial Sequence: Synthetic oligonucleotide
  Antisense strand to SEQ ID NO: 860312
aauaaugggcagauaucca

SEQ ID NO: 860314 - RNA, 19 nt, Artificial Sequence
  Description of Artificial Sequence: Synthetic oligonucleotide
  Sense strand starting at position 3770 of SEQ ID NO: 588368
ggauucugggcgugaguga

SEQ ID NO: 860315 - RNA, 19 nt, Artificial Sequence
  Description of Artificial Sequence: Synthetic oligonucleotide
  Antisense strand to SEQ ID NO: 860314
ucacucacgcccagaaucc

SEQ ID NO: 860316 - RNA, 19 nt, Artificial Sequence
  Description of Artificial Sequence: Synthetic oligonucleotide
  Sense strand starting at position 3803 of SEQ ID NO: 588368
cccggaucgugcucugagu

SEQ ID NO: 860317 - RNA, 19 nt, Artificial Sequence
  Description of Artificial Sequence: Synthetic oligonucleotide
  Antisense strand to SEQ ID NO: 860316
acucagagcacgauccggg

SEQ ID NO: 860318 - RNA, 19 nt, Artificial Sequence
  Description of Artificial Sequence: Synthetic oligonucleotide
  Sense strand starting at position 3810 of SEQ ID NO: 588368
cgugcucugagugugucau

SEQ ID NO: 860319 - RNA, 19 nt, Artificial Sequence
  Description of Artificial Sequence: Synthetic oligonucleotide
  Antisense strand to SEQ ID NO: 860318
augacacacucagagcacg

SEQ ID NO: 860320 - RNA, 19 nt, Artificial Sequence
  Description of Artificial Sequence: Synthetic oligonucleotide
  Sense strand starting at position 3816 of SEQ ID NO: 588368
cugagugugucaucucuaa

SEQ ID NO: 860321 - RNA, 19 nt, Artificial Sequence
  Description of Artificial Sequence: Synthetic oligonucleotide
  Antisense strand to SEQ ID NO: 860320
uuagagaugacacacucag

SEQ ID NO: 860322 - RNA, 19 nt, Artificial Sequence
  Description of Artificial Sequence: Synthetic oligonucleotide
  Sense strand starting at position 3820 of SEQ ID NO: 588368
gugugucaucucuaagaaa

SEQ ID NO: 860323 - RNA, 19 nt, Artificial Sequence
  Description of Artificial Sequence: Synthetic oligonucleotide
  Antisense strand to SEQ ID NO: 860322
uuucuuagagaugacacac

SEQ ID NO: 860324 - RNA, 19 nt, Artificial Sequence
  Description of Artificial Sequence: Synthetic oligonucleotide
  Sense strand starting at position 3882 of SEQ ID NO: 588368
cuagaaguuguauaguauu

SEQ ID NO: 860325 - RNA, 19 nt, Artificial Sequence
  Description of Artificial Sequence: Synthetic oligonucleotide
  Antisense strand to SEQ ID NO: 860324
aauacuauacaacuucuag

SEQ ID NO: 860326 - RNA, 19 nt, Artificial Sequence
  Description of Artificial Sequence: Synthetic oligonucleotide
  Sense strand starting at position 3888 of SEQ ID NO: 588368
guuguauaguauucggcuu

SEQ ID NO: 860327 - RNA, 19 nt, Artificial Sequence
  Description of Artificial Sequence: Synthetic oligonucleotide
  Antisense strand to SEQ ID NO: 860326
aagccgaauacuauacaac

SEQ ID NO: 860328 - RNA, 19 nt, Artificial Sequence
  Description of Artificial Sequence: Synthetic oligonucleotide
  Sense strand starting at position 199 of SEQ ID NO: 588369
aaaggauuaugugaaguug

SEQ ID NO: 860329 - RNA, 19 nt, Artificial Sequence
  Description of Artificial Sequence: Synthetic oligonucleotide
  Antisense strand to SEQ ID NO: 860328
caacuucacauaauccuuu

SEQ ID NO: 860330 - RNA, 19 nt, Artificial Sequence
  Description of Artificial Sequence: Synthetic oligonucleotide
  Sense strand starting at position 247 of SEQ ID NO: 588369
ucugguuuccaaugaggaa

SEQ ID NO: 860331 - RNA, 19 nt, Artificial Sequence
  Description of Artificial Sequence: Synthetic oligonucleotide
  Antisense strand to SEQ ID NO: 860330
uuccucauuggaaaccaga

SEQ ID NO: 860332 - RNA, 19 nt, Artificial Sequence
  Description of Artificial Sequence: Synthetic oligonucleotide
  Sense strand starting at position 323 of SEQ ID NO: 588369
gagucagacuuugugcuca

SEQ ID NO: 860333 - RNA, 19 nt, Artificial Sequence
  Description of Artificial Sequence: Synthetic oligonucleotide
  Antisense strand to SEQ ID NO: 860332
ugagcacaaagucugacuc

SEQ ID NO: 860334 - RNA, 19 nt, Artificial Sequence
  Description of Artificial Sequence: Synthetic oligonucleotide
  Sense strand starting at position 325 of SEQ ID NO: 588369
gucagacuuugugcucagu

SEQ ID NO: 860335 - RNA, 19 nt, Artificial Sequence
  Description of Artificial Sequence: Synthetic oligonucleotide
  Antisense strand to SEQ ID NO: 860334
acugagcacaaagucugac

SEQ ID NO: 860336 - RNA, 19 nt, Artificial Sequence
  Description of Artificial Sequence: Synthetic oligonucleotide
  Sense strand starting at position 327 of SEQ ID NO: 588369
cagacuuugugcucaguac

SEQ ID NO: 860337 - RNA, 19 nt, Artificial Sequence
  Description of Artificial Sequence: Synthetic oligonucleotide
  Antisense strand to SEQ ID NO: 860336
guacugagcacaaagucug

SEQ ID NO: 860338 - RNA, 19 nt, Artificial Sequence
  Description of Artificial Sequence: Synthetic oligonucleotide
  Sense strand starting at position 328 of SEQ ID NO: 588369
agacuuugugcucaguaca

SEQ ID NO: 860339 - RNA, 19 nt, Artificial Sequence
  Description of Artificial Sequence: Synthetic oligonucleotide
  Antisense strand to SEQ ID NO: 860338
uguacugagcacaaagucu

SEQ ID NO: 860340 - RNA, 19 nt, Artificial Sequence
  Description of Artificial Sequence: Synthetic oligonucleotide
  Sense strand starting at position 331 of SEQ ID NO: 588369
cuuugugcucaguacaaug

SEQ ID NO: 860341 - RNA, 19 nt, Artificial Sequence
  Description of Artificial Sequence: Synthetic oligonucleotide
  Antisense strand to SEQ ID NO: 860340
cauuguacugagcacaaag

SEQ ID NO: 860342 - RNA, 19 nt, Artificial Sequence
  Description of Artificial Sequence: Synthetic oligonucleotide
  Sense strand starting at position 483 of SEQ ID NO: 588369
ggaaauaaguggcuugauc

SEQ ID NO: 860343 - RNA, 19 nt, Artificial Sequence
  Description of Artificial Sequence: Synthetic oligonucleotide
  Antisense strand to SEQ ID NO: 860342
gaucaagccacuuauuucc

SEQ ID NO: 860344 - RNA, 19 nt, Artificial Sequence
  Description of Artificial Sequence: Synthetic oligonucleotide
  Sense strand starting at position 485 of SEQ ID NO: 588369
aaauaaguggcuugaucac

SEQ ID NO: 860345 - RNA, 19 nt, Artificial Sequence
  Description of Artificial Sequence: Synthetic oligonucleotide
  Antisense strand to SEQ ID NO: 860344
gugaucaagccacuuauuu

SEQ ID NO: 860346 - RNA, 19 nt, Artificial Sequence
  Description of Artificial Sequence: Synthetic oligonucleotide
  Sense strand starting at position 695 of SEQ ID NO: 588369
gacugaggagccugucagu

SEQ ID NO: 860347 - RNA, 19 nt, Artificial Sequence
  Description of Artificial Sequence: Synthetic oligonucleotide
  Antisense strand to SEQ ID NO: 860346
acugacaggcuccucaguc

SEQ ID NO: 860348 - RNA, 19 nt, Artificial Sequence
  Description of Artificial Sequence: Synthetic oligonucleotide
  Sense strand starting at position 797 of SEQ ID NO: 588369
ccaggaggcugugaauuga

SEQ ID NO: 860349 - RNA, 19 nt, Artificial Sequence
  Description of Artificial Sequence: Synthetic oligonucleotide
  Antisense strand to SEQ ID NO: 860348
ucaauucacagccuccugg

SEQ ID NO: 860350 - RNA, 19 nt, Artificial Sequence
  Description of Artificial Sequence: Synthetic oligonucleotide
  Sense strand starting at position 801 of SEQ ID NO: 588369
gaggcugugaauugagcua

SEQ ID NO: 860351 - RNA, 19 nt, Artificial Sequence
  Description of Artificial Sequence: Synthetic oligonucleotide
  Antisense strand to SEQ ID NO: 860350
uagcucaauucacagccuc

SEQ ID NO: 860352 - RNA, 19 nt, Artificial Sequence
  Description of Artificial Sequence: Synthetic oligonucleotide
  Sense strand starting at position 806 of SEQ ID NO: 588369
ugugaauugagcuacguga

SEQ ID NO: 860353 - RNA, 19 nt, Artificial Sequence
  Description of Artificial Sequence: Synthetic oligonucleotide
  Antisense strand to SEQ ID NO: 860352
ucacguagcucaauucaca

SEQ ID NO: 860354 - RNA, 19 nt, Artificial Sequence
  Description of Artificial Sequence: Synthetic oligonucleotide
  Sense strand starting at position 831 of SEQ ID NO: 588369
guggucaggaccuagguua

SEQ ID NO: 860355 - RNA, 19 nt, Artificial Sequence
  Description of Artificial Sequence: Synthetic oligonucleotide
  Antisense strand to SEQ ID NO: 860354
uaaccuagguccugaccac

SEQ ID NO: 860356 - RNA, 19 nt, Artificial Sequence
  Description of Artificial Sequence: Synthetic oligonucleotide
  Sense strand starting at position 839 of SEQ ID NO: 588369
gaccuagguuaauacugua

SEQ ID NO: 860357 - RNA, 19 nt, Artificial Sequence
  Description of Artificial Sequence: Synthetic oligonucleotide
  Antisense strand to SEQ ID NO: 860356
uacaguauuaaccuagguc

SEQ ID NO: 860358 - RNA, 19 nt, Artificial Sequence
  Description of Artificial Sequence: Synthetic oligonucleotide
  Sense strand starting at position 844 of SEQ ID NO: 588369
agguuaauacuguaagcca

SEQ ID NO: 860359 - RNA, 19 nt, Artificial Sequence
  Description of Artificial Sequence: Synthetic oligonucleotide
  Antisense strand to SEQ ID NO: 860358
uggcuuacaguauuaaccu

SEQ ID NO: 860360 - RNA, 19 nt, Artificial Sequence
  Description of Artificial Sequence: Synthetic oligonucleotide
  Sense strand starting at position 958 of SEQ ID NO: 588369
gcucuuauuccaggccaga

SEQ ID NO: 860361 - RNA, 19 nt, Artificial Sequence
  Description of Artificial Sequence: Synthetic oligonucleotide
  Antisense strand to SEQ ID NO: 860360
ucuggccuggaauaagagc

SEQ ID NO: 860362 - RNA, 19 nt, Artificial Sequence
  Description of Artificial Sequence: Synthetic oligonucleotide
  Sense strand starting at position 1029 of SEQ ID NO: 588369
cgcaauggccaauguuuau

SEQ ID NO: 860363 - RNA, 19 nt, Artificial Sequence
  Description of Artificial Sequence: Synthetic oligonucleotide
  Antisense strand to SEQ ID NO: 860362
auaaacauuggccauugcg

SEQ ID NO: 860364 - RNA, 19 nt, Artificial Sequence
  Description of Artificial Sequence: Synthetic oligonucleotide
  Sense strand starting at position 1035 of SEQ ID NO: 588369
ggccaauguuuaucucaag

SEQ ID NO: 860365 - RNA, 19 nt, Artificial Sequence
  Description of Artificial Sequence: Synthetic oligonucleotide
  Antisense strand to SEQ ID NO: 860364
cuugagauaaacauuggcc

SEQ ID NO: 860366 - RNA, 19 nt, Artificial Sequence
  Description of Artificial Sequence: Synthetic oligonucleotide
  Sense strand starting at position 1229 of SEQ ID NO: 588369
aagcccacaugguguuaaa

SEQ ID NO: 860367 - RNA, 19 nt, Artificial Sequence
  Description of Artificial Sequence: Synthetic oligonucleotide
  Antisense strand to SEQ ID NO: 860366
uuuaacaccaugugggcuu

SEQ ID NO: 860368 - RNA, 19 nt, Artificial Sequence
  Description of Artificial Sequence: Synthetic oligonucleotide
  Sense strand starting at position 1232 of SEQ ID NO: 588369
cccacaugguguuaaagau

SEQ ID NO: 860369 - RNA, 19 nt, Artificial Sequence
  Description of Artificial Sequence: Synthetic oligonucleotide
  Antisense strand to SEQ ID NO: 860368
aucuuuaacaccauguggg

SEQ ID NO: 860370 - RNA, 19 nt, Artificial Sequence
  Description of Artificial Sequence: Synthetic oligonucleotide
  Sense strand starting at position 1847 of SEQ ID NO: 588369
cgcguuggaccucagcaau

SEQ ID NO: 860371 - RNA, 19 nt, Artificial Sequence
  Description of Artificial Sequence: Synthetic oligonucleotide
  Antisense strand to SEQ ID NO: 860370
auugcugagguccaacgcg

SEQ ID NO: 860372 - RNA, 19 nt, Artificial Sequence
  Description of Artificial Sequence: Synthetic oligonucleotide
  Sense strand starting at position 1850 of SEQ ID NO: 588369
guuggaccucagcaauauc

SEQ ID NO: 860373 - RNA, 19 nt, Artificial Sequence
  Description of Artificial Sequence: Synthetic oligonucleotide
  Antisense strand to SEQ ID NO: 860372
gauauugcugagguccaac

SEQ ID NO: 860374 - RNA, 19 nt, Artificial Sequence
  Description of Artificial Sequence: Synthetic oligonucleotide
  Sense strand starting at position 1936 of SEQ ID NO: 588369
cccggaauaucauugaaac

SEQ ID NO: 860375 - RNA, 19 nt, Artificial Sequence
  Description of Artificial Sequence: Synthetic oligonucleotide
  Antisense strand to SEQ ID NO: 860374
guuucaaugauauuccggg

SEQ ID NO: 860376 - RNA, 19 nt, Artificial Sequence
  Description of Artificial Sequence: Synthetic oligonucleotide
  Sense strand starting at position 1937 of SEQ ID NO: 588369
ccggaauaucauugaaacu

SEQ ID NO: 860377 - RNA, 19 nt, Artificial Sequence
  Description of Artificial Sequence: Synthetic oligonucleotide
  Antisense strand to SEQ ID NO: 860376
aguuucaaugauauuccgg

SEQ ID NO: 860378 - RNA, 19 nt, Artificial Sequence
  Description of Artificial Sequence: Synthetic oligonucleotide
  Sense strand starting at position 2456 of SEQ ID NO: 588369
gggucaugugaccaagcuu

SEQ ID NO: 860379 - RNA, 19 nt, Artificial Sequence
  Description of Artificial Sequence: Synthetic oligonucleotide
  Antisense strand to SEQ ID NO: 860378
aagcuuggucacaugaccc

SEQ ID NO: 860380 - RNA, 19 nt, Artificial Sequence
  Description of Artificial Sequence: Synthetic oligonucleotide
  Sense strand starting at position 2522 of SEQ ID NO: 588369
gcgcgaaaguggucucuuc

SEQ ID NO: 860381 - RNA, 19 nt, Artificial Sequence
  Description of Artificial Sequence: Synthetic oligonucleotide
  Antisense strand to SEQ ID NO: 860380
gaagagaccacuuucgcgc

SEQ ID NO: 860382 - RNA, 19 nt, Artificial Sequence
  Description of Artificial Sequence: Synthetic oligonucleotide
  Sense strand starting at position 2529 of SEQ ID NO: 588369
aguggucucuucucuucua

SEQ ID NO: 860383 - RNA, 19 nt, Artificial Sequence
  Description of Artificial Sequence: Synthetic oligonucleotide
  Antisense strand to SEQ ID NO: 860382
uagaagagaagagaccacu

SEQ ID NO: 860384 - RNA, 19 nt, Artificial Sequence
  Description of Artificial Sequence: Synthetic oligonucleotide
  Sense strand starting at position 2532 of SEQ ID NO: 588369
ggucucuucucuucuacua

SEQ ID NO: 860385 - RNA, 19 nt, Artificial Sequence
  Description of Artificial Sequence: Synthetic oligonucleotide
  Antisense strand to SEQ ID NO: 860384
uaguagaagagaagagacc

SEQ ID NO: 860386 - RNA, 19 nt, Artificial Sequence
  Description of Artificial Sequence: Synthetic oligonucleotide
  Sense strand starting at position 2766 of SEQ ID NO: 588369
cccgcagcaugcucuuaua

SEQ ID NO: 860387 - RNA, 19 nt, Artificial Sequence
  Description of Artificial Sequence: Synthetic oligonucleotide
  Antisense strand to SEQ ID NO: 860386
uauaagagcaugcugcggg

SEQ ID NO: 860388 - RNA, 19 nt, Artificial Sequence
  Description of Artificial Sequence: Synthetic oligonucleotide
  Sense strand starting at position 2768 of SEQ ID NO: 588369
cgcagcaugcucuuauacu

SEQ ID NO: 860389 - RNA, 19 nt, Artificial Sequence
  Description of Artificial Sequence: Synthetic oligonucleotide
  Antisense strand to SEQ ID NO: 860388
aguauaagagcaugcugcg

SEQ ID NO: 860390 - RNA, 19 nt, Artificial Sequence
  Description of Artificial Sequence: Synthetic oligonucleotide
  Sense strand starting at position 2769 of SEQ ID NO: 588369
gcagcaugcucuuauacug

SEQ ID NO: 860391 - RNA, 19 nt, Artificial Sequence
  Description of Artificial Sequence: Synthetic oligonucleotide
  Antisense strand to SEQ ID NO: 860390
caguauaagagcaugcugc

SEQ ID NO: 860392 - RNA, 19 nt, Artificial Sequence
  Description of Artificial Sequence: Synthetic oligonucleotide
  Sense strand starting at position 2845 of SEQ ID NO: 588369
gacagugucucucugagag

SEQ ID NO: 860393 - RNA, 19 nt, Artificial Sequence
  Description of Artificial Sequence: Synthetic oligonucleotide
  Antisense strand to SEQ ID NO: 860392
cucucagagagacacuguc

SEQ ID NO: 860394 - RNA, 19 nt, Artificial Sequence
  Description of Artificial Sequence: Synthetic oligonucleotide
  Sense strand starting at position 2890 of SEQ ID NO: 588369
gccaccuaucugggucuua

SEQ ID NO: 860395 - RNA, 19 nt, Artificial Sequence
  Description of Artificial Sequence: Synthetic oligonucleotide
  Antisense strand to SEQ ID NO: 860394
uaagacccagauagguggc

SEQ ID NO: 860396 - RNA, 19 nt, Artificial Sequence
  Description of Artificial Sequence: Synthetic oligonucleotide
  Sense strand starting at position 2895 of SEQ ID NO: 588369
cuaucugggucuuacacua

SEQ ID NO: 860397 - RNA, 19 nt, Artificial Sequence
  Description of Artificial Sequence: Synthetic oligonucleotide
  Antisense strand to SEQ ID NO: 860396
uaguguaagacccagauag

SEQ ID NO: 860398 - RNA, 19 nt, Artificial Sequence
  Description of Artificial Sequence: Synthetic oligonucleotide
  Sense strand starting at position 3340 of SEQ ID NO: 588369
gggcuuuggugaggaugga

SEQ ID NO: 860399 - RNA, 19 nt, Artificial Sequence
  Description of Artificial Sequence: Synthetic oligonucleotide
  Antisense strand to SEQ ID NO: 860398
uccauccucaccaaagccc

SEQ ID NO: 860400 - RNA, 19 nt, Artificial Sequence
  Description of Artificial Sequence: Synthetic oligonucleotide
  Sense strand starting at position 3421 of SEQ ID NO: 588369
uuguaaucgucggccggua

SEQ ID NO: 860401 - RNA, 19 nt, Artificial Sequence
  Description of Artificial Sequence: Synthetic oligonucleotide
  Antisense strand to SEQ ID NO: 860400
uaccggccgacgauuacaa

SEQ ID NO: 860402 - RNA, 19 nt, Artificial Sequence
  Description of Artificial Sequence: Synthetic oligonucleotide
  Sense strand starting at position 3648 of SEQ ID NO: 588369
gauugcaguuaaccaagau

SEQ ID NO: 860403 - RNA, 19 nt, Artificial Sequence
  Description of Artificial Sequence: Synthetic oligonucleotide
  Antisense strand to SEQ ID NO: 860402
aucuugguuaacugcaauc

SEQ ID NO: 860404 - RNA, 19 nt, Artificial Sequence
  Description of Artificial Sequence: Synthetic oligonucleotide
  Sense strand starting at position 35 of SEQ ID NO: 588370
cauguaccucuuugggaca

SEQ ID NO: 860405 - RNA, 19 nt, Artificial Sequence
  Description of Artificial Sequence: Synthetic oligonucleotide
  Antisense strand to SEQ ID NO: 860404
ugucccaaagagguacaug

SEQ ID NO: 860406 - RNA, 19 nt, Artificial Sequence
  Description of Artificial Sequence: Synthetic oligonucleotide
  Sense strand starting at position 72 of SEQ ID NO: 588370
acuuaaggguuacugugau

SEQ ID NO: 860407 - RNA, 19 nt, Artificial Sequence
  Description of Artificial Sequence: Synthetic oligonucleotide
  Antisense strand to SEQ ID NO: 860406
aucacaguaacccuuaagu

SEQ ID NO: 860408 - RNA, 19 nt, Artificial Sequence
  Description of Artificial Sequence: Synthetic oligonucleotide
  Sense strand starting at position 78 of SEQ ID NO: 588370
ggguuacugugauccucau

SEQ ID NO: 860409 - RNA, 19 nt, Artificial Sequence
  Description of Artificial Sequence: Synthetic oligonucleotide
  Antisense strand to SEQ ID NO: 860408
augaggaucacaguaaccc

SEQ ID NO: 860410 - RNA, 19 nt, Artificial Sequence
  Description of Artificial Sequence: Synthetic oligonucleotide
  Sense strand starting at position 113 of SEQ ID NO: 588370
uggagucauuaaguagaga

SEQ ID NO: 860411 - RNA, 19 nt, Artificial Sequence
  Description of Artificial Sequence: Synthetic oligonucleotide
  Antisense strand to SEQ ID NO: 860410
ucucuacuuaaugacucca

SEQ ID NO: 860412 - RNA, 19 nt, Artificial Sequence
  Description of Artificial Sequence: Synthetic oligonucleotide
  Sense strand starting at position 176 of SEQ ID NO: 588370
acagguggcccaugagauu

SEQ ID NO: 860413 - RNA, 19 nt, Artificial Sequence
  Description of Artificial Sequence: Synthetic oligonucleotide
  Antisense strand to SEQ ID NO: 860412
aaucucaugggccaccugu

SEQ ID NO: 860414 - RNA, 19 nt, Artificial Sequence
  Description of Artificial Sequence: Synthetic oligonucleotide
  Sense strand starting at position 193 of SEQ ID NO: 588370
uucuuaaaucugugauaag

SEQ ID NO: 860415 - RNA, 19 nt, Artificial Sequence
  Description of Artificial Sequence: Synthetic oligonucleotide
  Antisense strand to SEQ ID NO: 860414
cuuaucacagauuuaagaa

SEQ ID NO: 860416 - RNA, 19 nt, Artificial Sequence
  Description of Artificial Sequence: Synthetic oligonucleotide
  Sense strand starting at position 426 of SEQ ID NO: 588370
gguccuuacgcucagaaac

SEQ ID NO: 860417 - RNA, 19 nt, Artificial Sequence
  Description of Artificial Sequence: Synthetic oligonucleotide
  Antisense strand to SEQ ID NO: 860416
guuucugagcguaaggacc

SEQ ID NO: 860418 - RNA, 19 nt, Artificial Sequence
  Description of Artificial Sequence: Synthetic oligonucleotide
  Sense strand starting at position 699 of SEQ ID NO: 588370
acuggacuugucugcauaa

SEQ ID NO: 860419 - RNA, 19 nt, Artificial Sequence
  Description of Artificial Sequence: Synthetic oligonucleotide
  Antisense strand to SEQ ID NO: 860418
uuaugcagacaaguccagu

SEQ ID NO: 860420 - RNA, 19 nt, Artificial Sequence
  Description of Artificial Sequence: Synthetic oligonucleotide
  Sense strand starting at position 700 of SEQ ID NO: 588370
cuggacuugucugcauaaa

SEQ ID NO: 860421 - RNA, 19 nt, Artificial Sequence
  Description of Artificial Sequence: Synthetic oligonucleotide
  Antisense strand to SEQ ID NO: 860420
uuuaugcagacaaguccag

SEQ ID NO: 860422 - RNA, 19 nt, Artificial Sequence
  Description of Artificial Sequence: Synthetic oligonucleotide
  Sense strand starting at position 701 of SEQ ID NO: 588370
uggacuugucugcauaaag

SEQ ID NO: 860423 - RNA, 19 nt, Artificial Sequence
  Description of Artificial Sequence: Synthetic oligonucleotide
  Antisense strand to SEQ ID NO: 860422
cuuuaugcagacaagucca

SEQ ID NO: 860424 - RNA, 19 nt, Artificial Sequence
  Description of Artificial Sequence: Synthetic oligonucleotide
  Sense strand starting at position 721 of SEQ ID NO: 588370
ggucuucugccuuggagac

SEQ ID NO: 860425 - RNA, 19 nt, Artificial Sequence
  Description of Artificial Sequence: Synthetic oligonucleotide
  Antisense strand to SEQ ID NO: 860424
gucuccaaggcagaagacc

SEQ ID NO: 860426 - RNA, 19 nt, Artificial Sequence
  Description of Artificial Sequence: Synthetic oligonucleotide
  Sense strand starting at position 722 of SEQ ID NO: 588370
gucuucugccuuggagaca

SEQ ID NO: 860427 - RNA, 19 nt, Artificial Sequence
  Description of Artificial Sequence: Synthetic oligonucleotide
  Antisense strand to SEQ ID NO: 860426
ugucuccaaggcagaagac

SEQ ID NO: 860428 - RNA, 19 nt, Artificial Sequence
  Description of Artificial Sequence: Synthetic oligonucleotide
  Sense strand starting at position 744 of SEQ ID NO: 588370
agcgauacacugugaagaa

SEQ ID NO: 860429 - RNA, 19 nt, Artificial Sequence
  Description of Artificial Sequence: Synthetic oligonucleotide
  Antisense strand to SEQ ID NO: 860428
uucuucacaguguaucgcu

SEQ ID NO: 860430 - RNA, 19 nt, Artificial Sequence
  Description of Artificial Sequence: Synthetic oligonucleotide
  Sense strand starting at position 833 of SEQ ID NO: 588370
ccuggcauacacugguaaa

SEQ ID NO: 860431 - RNA, 19 nt, Artificial Sequence
  Description of Artificial Sequence: Synthetic oligonucleotide
  Antisense strand to SEQ ID NO: 860430
uuuaccaguguaugccagg

SEQ ID NO: 860432 - RNA, 19 nt, Artificial Sequence
  Description of Artificial Sequence: Synthetic oligonucleotide
  Sense strand starting at position 1036 of SEQ ID NO: 588370
aggaaacacugggaguaau

SEQ ID NO: 860433 - RNA, 19 nt, Artificial Sequence
  Description of Artificial Sequence: Synthetic oligonucleotide
  Antisense strand to SEQ ID NO: 860432
auuacucccaguguuuccu

SEQ ID NO: 860434 - RNA, 19 nt, Artificial Sequence
  Description of Artificial Sequence: Synthetic oligonucleotide
  Sense strand starting at position 1047 of SEQ ID NO: 588370
ggaguaaugucucucugcu

SEQ ID NO: 860435 - RNA, 19 nt, Artificial Sequence
  Description of Artificial Sequence: Synthetic oligonucleotide
  Antisense strand to SEQ ID NO: 860434
agcagagagacauuacucc

SEQ ID NO: 860436 - RNA, 19 nt, Artificial Sequence
  Description of Artificial Sequence: Synthetic oligonucleotide
  Sense strand starting at position 1360 of SEQ ID NO: 588370
uguagaacuccauguggcu

SEQ ID NO: 860437 - RNA, 19 nt, Artificial Sequence
  Description of Artificial Sequence: Synthetic oligonucleotide
  Antisense strand to SEQ ID NO: 860436
agccacauggaguucuaca

SEQ ID NO: 860438 - RNA, 19 nt, Artificial Sequence
  Description of Artificial Sequence: Synthetic oligonucleotide
  Sense strand starting at position 1487 of SEQ ID NO: 588370
ggaggacucaucgaugcua

SEQ ID NO: 860439 - RNA, 19 nt, Artificial Sequence
  Description of Artificial Sequence: Synthetic oligonucleotide
  Antisense strand to SEQ ID NO: 860438
uagcaucgaugaguccucc

SEQ ID NO: 860440 - RNA, 19 nt, Artificial Sequence
  Description of Artificial Sequence: Synthetic oligonucleotide
  Sense strand starting at position 1489 of SEQ ID NO: 588370
aggacucaucgaugcuagu

SEQ ID NO: 860441 - RNA, 19 nt, Artificial Sequence
  Description of Artificial Sequence: Synthetic oligonucleotide
  Antisense strand to SEQ ID NO: 860440
acuagcaucgaugaguccu

SEQ ID NO: 860442 - RNA, 19 nt, Artificial Sequence
  Description of Artificial Sequence: Synthetic oligonucleotide
  Sense strand starting at position 1547 of SEQ ID NO: 588370
gaucccuucccggaagacu

SEQ ID NO: 860443 - RNA, 19 nt, Artificial Sequence
  Description of Artificial Sequence: Synthetic oligonucleotide
  Antisense strand to SEQ ID NO: 860442
agucuuccgggaagggauc

SEQ ID NO: 860444 - RNA, 19 nt, Artificial Sequence
  Description of Artificial Sequence: Synthetic oligonucleotide
  Sense strand starting at position 1555 of SEQ ID NO: 588370
cccggaagacucuggcuuu

SEQ ID NO: 860445 - RNA, 19 nt, Artificial Sequence
  Description of Artificial Sequence: Synthetic oligonucleotide
  Antisense strand to SEQ ID NO: 860444
aaagccagagucuuccggg

SEQ ID NO: 860446 - RNA, 19 nt, Artificial Sequence
  Description of Artificial Sequence: Synthetic oligonucleotide
  Sense strand starting at position 1613 of SEQ ID NO: 588370
cgcucugaucuccagggaa

SEQ ID NO: 860447 - RNA, 19 nt, Artificial Sequence
  Description of Artificial Sequence: Synthetic oligonucleotide
  Antisense strand to SEQ ID NO: 860446
uucccuggagaucagagcg

SEQ ID NO: 860448 - RNA, 19 nt, Artificial Sequence
  Description of Artificial Sequence: Synthetic oligonucleotide
  Sense strand starting at position 1725 of SEQ ID NO: 588370
ccgauauccauaggauaga

SEQ ID NO: 860449 - RNA, 19 nt, Artificial Sequence
  Description of Artificial Sequence: Synthetic oligonucleotide
  Antisense strand to SEQ ID NO: 860448
ucuauccuauggauaucgg

SEQ ID NO: 860450 - RNA, 19 nt, Artificial Sequence
  Description of Artificial Sequence: Synthetic oligonucleotide
  Sense strand starting at position 1726 of SEQ ID NO: 588370
cgauauccauaggauagaa

SEQ ID NO: 860451 - RNA, 19 nt, Artificial Sequence
  Description of Artificial Sequence: Synthetic oligonucleotide
  Antisense strand to SEQ ID NO: 860450
uucuauccuauggauaucg

SEQ ID NO: 860452 - RNA, 19 nt, Artificial Sequence
  Description of Artificial Sequence: Synthetic oligonucleotide
  Sense strand starting at position 1864 of SEQ ID NO: 588370
caccgauauucuuuggguu

SEQ ID NO: 860453 - RNA, 19 nt, Artificial Sequence
  Description of Artificial Sequence: Synthetic oligonucleotide
  Antisense strand to SEQ ID NO: 860452
aacccaaagaauaucggug

SEQ ID NO: 860454 - RNA, 19 nt, Artificial Sequence
  Description of Artificial Sequence: Synthetic oligonucleotide
  Sense strand starting at position 1865 of SEQ ID NO: 588370
accgauauucuuuggguua

SEQ ID NO: 860455 - RNA, 19 nt, Artificial Sequence
  Description of Artificial Sequence: Synthetic oligonucleotide
  Antisense strand to SEQ ID NO: 860454
uaacccaaagaauaucggu

SEQ ID NO: 860456 - RNA, 19 nt, Artificial Sequence
  Description of Artificial Sequence: Synthetic oligonucleotide
  Sense strand starting at position 1903 of SEQ ID NO: 588370
ugaauaauuaugcgguucu

SEQ ID NO: 860457 - RNA, 19 nt, Artificial Sequence
  Description of Artificial Sequence: Synthetic oligonucleotide
  Antisense strand to SEQ ID NO: 860456
agaaccgcauaauuauuca

SEQ ID NO: 860458 - RNA, 19 nt, Artificial Sequence
  Description of Artificial Sequence: Synthetic oligonucleotide
  Sense strand starting at position 1964 of SEQ ID NO: 588370
cgcagacucucccugaagu

SEQ ID NO: 860459 - RNA, 19 nt, Artificial Sequence
  Description of Artificial Sequence: Synthetic oligonucleotide
  Antisense strand to SEQ ID NO: 860458
acuucagggagagucugcg

SEQ ID NO: 860460 - RNA, 19 nt, Artificial Sequence
  Description of Artificial Sequence: Synthetic oligonucleotide
  Sense strand starting at position 1974 of SEQ ID NO: 588370
cccugaagucuucggagga

SEQ ID NO: 860461 - RNA, 19 nt, Artificial Sequence
  Description of Artificial Sequence: Synthetic oligonucleotide
  Antisense strand to SEQ ID NO: 860460
uccuccgaagacuucaggg

SEQ ID NO: 860462 - RNA, 19 nt, Artificial Sequence
  Description of Artificial Sequence: Synthetic oligonucleotide
  Sense strand starting at position 1978 of SEQ ID NO: 588370
gaagucuucggaggaagca

SEQ ID NO: 860463 - RNA, 19 nt, Artificial Sequence
  Description of Artificial Sequence: Synthetic oligonucleotide
  Antisense strand to SEQ ID NO: 860462
ugcuuccuccgaagacuuc

SEQ ID NO: 860464 - RNA, 19 nt, Artificial Sequence
  Description of Artificial Sequence: Synthetic oligonucleotide
  Sense strand starting at position 2138 of SEQ ID NO: 588370
ggucgaaucaauugcagag

SEQ ID NO: 860465 - RNA, 19 nt, Artificial Sequence
  Description of Artificial Sequence: Synthetic oligonucleotide
  Antisense strand to SEQ ID NO: 860464
cucugcaauugauucgacc

SEQ ID NO: 860466 - RNA, 19 nt, Artificial Sequence
  Description of Artificial Sequence: Synthetic oligonucleotide
  Sense strand starting at position 2142 of SEQ ID NO: 588370
gaaucaauugcagagcagu

SEQ ID NO: 860467 - RNA, 19 nt, Artificial Sequence
  Description of Artificial Sequence: Synthetic oligonucleotide
  Antisense strand to SEQ ID NO: 860466
acugcucugcaauugauuc

SEQ ID NO: 860468 - RNA, 19 nt, Artificial Sequence
  Description of Artificial Sequence: Synthetic oligonucleotide
  Sense strand starting at position 3386 of SEQ ID NO: 588370
cgggucaaacuuugcagaa

SEQ ID NO: 860469 - RNA, 19 nt, Artificial Sequence
  Description of Artificial Sequence: Synthetic oligonucleotide
  Antisense strand to SEQ ID NO: 860468
uucugcaaaguuugacccg

SEQ ID NO: 860470 - RNA, 19 nt, Artificial Sequence
  Description of Artificial Sequence: Synthetic oligonucleotide
  Sense strand starting at position 3387 of SEQ ID NO: 588370
gggucaaacuuugcagaaa

SEQ ID NO: 860471 - RNA, 19 nt, Artificial Sequence
  Description of Artificial Sequence: Synthetic oligonucleotide
  Antisense strand to SEQ ID NO: 860470
uuucugcaaaguuugaccc

SEQ ID NO: 860472 - RNA, 19 nt, Artificial Sequence
  Description of Artificial Sequence: Synthetic oligonucleotide
  Sense strand starting at position 3666 of SEQ ID NO: 588370
agcugagccucuccuugaa

SEQ ID NO: 860473 - RNA, 19 nt, Artificial Sequence
  Description of Artificial Sequence: Synthetic oligonucleotide
  Antisense strand to SEQ ID NO: 860472
uucaaggagaggcucagcu

SEQ ID NO: 860474 - RNA, 19 nt, Artificial Sequence
  Description of Artificial Sequence: Synthetic oligonucleotide
  Sense strand starting at position 3669 of SEQ ID NO: 588370
ugagccucuccuugaacaa

SEQ ID NO: 860475 - RNA, 19 nt, Artificial Sequence
  Description of Artificial Sequence: Synthetic oligonucleotide
  Antisense strand to SEQ ID NO: 860474
uuguucaaggagaggcuca

SEQ ID NO: 860476 - RNA, 19 nt, Artificial Sequence
  Description of Artificial Sequence: Synthetic oligonucleotide
  Sense strand starting at position 3712 of SEQ ID NO: 588370
ccgggaauucuggguagug

SEQ ID NO: 860477 - RNA, 19 nt, Artificial Sequence
  Description of Artificial Sequence: Synthetic oligonucleotide
  Antisense strand to SEQ ID NO: 860476
cacuacccagaauucccgg

SEQ ID NO: 860478 - RNA, 19 nt, Artificial Sequence
  Description of Artificial Sequence: Synthetic oligonucleotide
  Sense strand starting at position 3713 of SEQ ID NO: 588370
cgggaauucuggguagugu

SEQ ID NO: 860479 - RNA, 19 nt, Artificial Sequence
  Description of Artificial Sequence: Synthetic oligonucleotide
  Antisense strand to SEQ ID NO: 860478
acacuacccagaauucccg

SEQ ID NO: 860480 - RNA, 19 nt, Artificial Sequence
  Description of Artificial Sequence: Synthetic oligonucleotide
  Sense strand starting at position 3714 of SEQ ID NO: 588370
gggaauucuggguagugua

SEQ ID NO: 860481 - RNA, 19 nt, Artificial Sequence
  Description of Artificial Sequence: Synthetic oligonucleotide
  Antisense strand to SEQ ID NO: 860480
uacacuacccagaauuccc

SEQ ID NO: 860482 - RNA, 19 nt, Artificial Sequence
  Description of Artificial Sequence: Synthetic oligonucleotide
  Sense strand starting at position 3776 of SEQ ID NO: 588370
cuuugaacucuauggacca

SEQ ID NO: 860483 - RNA, 19 nt, Artificial Sequence
  Description of Artificial Sequence: Synthetic oligonucleotide
  Antisense strand to SEQ ID NO: 860482
ugguccauagaguucaaag

SEQ ID NO: 860484 - RNA, 19 nt, Artificial Sequence
  Description of Artificial Sequence: Synthetic oligonucleotide
  Sense strand starting at position 121 of SEQ ID NO: 588371
uguagcugguucucauaaa

SEQ ID NO: 860485 - RNA, 19 nt, Artificial Sequence
  Description of Artificial Sequence: Synthetic oligonucleotide
  Antisense strand to SEQ ID NO: 860484
uuuaugagaaccagcuaca

SEQ ID NO: 860486 - RNA, 19 nt, Artificial Sequence
  Description of Artificial Sequence: Synthetic oligonucleotide
  Sense strand starting at position 150 of SEQ ID NO: 588371
guauaauuguuauuggaac

SEQ ID NO: 860487 - RNA, 19 nt, Artificial Sequence
  Description of Artificial Sequence: Synthetic oligonucleotide
  Antisense strand to SEQ ID NO: 860486
guuccaauaacaauuauac

SEQ ID NO: 860488 - RNA, 19 nt, Artificial Sequence
  Description of Artificial Sequence: Synthetic oligonucleotide
  Sense strand starting at position 337 of SEQ ID NO: 588371
uucugaugccuugguaaac

SEQ ID NO: 860489 - RNA, 19 nt, Artificial Sequence
  Description of Artificial Sequence: Synthetic oligonucleotide
  Antisense strand to SEQ ID NO: 860488
guuuaccaaggcaucagaa

SEQ ID NO: 860490 - RNA, 19 nt, Artificial Sequence
  Description of Artificial Sequence: Synthetic oligonucleotide
  Sense strand starting at position 426 of SEQ ID NO: 588371
guauaauuaguccaguucu

SEQ ID NO: 860491 - RNA, 19 nt, Artificial Sequence
  Description of Artificial Sequence: Synthetic oligonucleotide
  Antisense strand to SEQ ID NO: 860490
agaacuggacuaauuauac

SEQ ID NO: 860492 - RNA, 19 nt, Artificial Sequence
  Description of Artificial Sequence: Synthetic oligonucleotide
  Sense strand starting at position 432 of SEQ ID NO: 588371
uuaguccaguucucaagaa

SEQ ID NO: 860493 - RNA, 19 nt, Artificial Sequence
  Description of Artificial Sequence: Synthetic oligonucleotide
  Antisense strand to SEQ ID NO: 860492
uucuugagaacuggacuaa

SEQ ID NO: 860494 - RNA, 19 nt, Artificial Sequence
  Description of Artificial Sequence: Synthetic oligonucleotide
  Sense strand starting at position 447 of SEQ ID NO: 588371
agaagcaggcucuauuacu

SEQ ID NO: 860495 - RNA, 19 nt, Artificial Sequence
  Description of Artificial Sequence: Synthetic oligonucleotide
  Antisense strand to SEQ ID NO: 860494
aguaauagagccugcuucu

SEQ ID NO: 860496 - RNA, 19 nt, Artificial Sequence
  Description of Artificial Sequence: Synthetic oligonucleotide
  Sense strand starting at position 454 of SEQ ID NO: 588371
ggcucuauuacugggagua

SEQ ID NO: 860497 - RNA, 19 nt, Artificial Sequence
  Description of Artificial Sequence: Synthetic oligonucleotide
  Antisense strand to SEQ ID NO: 860496
uacucccaguaauagagcc

SEQ ID NO: 860498 - RNA, 19 nt, Artificial Sequence
  Description of Artificial Sequence: Synthetic oligonucleotide
  Sense strand starting at position 455 of SEQ ID NO: 588371
gcucuauuacugggaguag

SEQ ID NO: 860499 - RNA, 19 nt, Artificial Sequence
  Description of Artificial Sequence: Synthetic oligonucleotide
  Antisense strand to SEQ ID NO: 860498
cuacucccaguaauagagc

SEQ ID NO: 860500 - RNA, 19 nt, Artificial Sequence
  Description of Artificial Sequence: Synthetic oligonucleotide
  Sense strand starting at position 467 of SEQ ID NO: 588371
ggaguaguggguuggugaa

SEQ ID NO: 860501 - RNA, 19 nt, Artificial Sequence
  Description of Artificial Sequence: Synthetic oligonucleotide
  Antisense strand to SEQ ID NO: 860500
uucaccaacccacuacucc

SEQ ID NO: 860502 - RNA, 19 nt, Artificial Sequence
  Description of Artificial Sequence: Synthetic oligonucleotide
  Sense strand starting at position 524 of SEQ ID NO: 588371
cgaugcagccuuucuugua

SEQ ID NO: 860503 - RNA, 19 nt, Artificial Sequence
  Description of Artificial Sequence: Synthetic oligonucleotide
  Antisense strand to SEQ ID NO: 860502
uacaagaaaggcugcaucg

SEQ ID NO: 860504 - RNA, 19 nt, Artificial Sequence
  Description of Artificial Sequence: Synthetic oligonucleotide
  Sense strand starting at position 531 of SEQ ID NO: 588371
gccuuucuuguauaugaau

SEQ ID NO: 860505 - RNA, 19 nt, Artificial Sequence
  Description of Artificial Sequence: Synthetic oligonucleotide
  Antisense strand to SEQ ID NO: 860504
auucauauacaagaaaggc

SEQ ID NO: 860506 - RNA, 19 nt, Artificial Sequence
  Description of Artificial Sequence: Synthetic oligonucleotide
  Sense strand starting at position 549 of SEQ ID NO: 588371
uaauguauaugagugcuua

SEQ ID NO: 860507 - RNA, 19 nt, Artificial Sequence
  Description of Artificial Sequence: Synthetic oligonucleotide
  Antisense strand to SEQ ID NO: 860506
uaagcacucauauacauua

SEQ ID NO: 860508 - RNA, 19 nt, Artificial Sequence
  Description of Artificial Sequence: Synthetic oligonucleotide
  Sense strand starting at position 553 of SEQ ID NO: 588371
guauaugagugcuuauuuc

SEQ ID NO: 860509 - RNA, 19 nt, Artificial Sequence
  Description of Artificial Sequence: Synthetic oligonucleotide
  Antisense strand to SEQ ID NO: 860508
gaaauaagcacucauauac

SEQ ID NO: 860510 - RNA, 19 nt, Artificial Sequence
  Description of Artificial Sequence: Synthetic oligonucleotide
  Sense strand starting at position 562 of SEQ ID NO: 588371
ugcuuauuuccaggugacu

SEQ ID NO: 860511 - RNA, 19 nt, Artificial Sequence
  Description of Artificial Sequence: Synthetic oligonucleotide
  Antisense strand to SEQ ID NO: 860510
agucaccuggaaauaagca

SEQ ID NO: 860512 - RNA, 19 nt, Artificial Sequence
  Description of Artificial Sequence: Synthetic oligonucleotide
  Sense strand starting at position 648 of SEQ ID NO: 588371
uccaucuaagcuuagguaa

SEQ ID NO: 860513 - RNA, 19 nt, Artificial Sequence
  Description of Artificial Sequence: Synthetic oligonucleotide
  Antisense strand to SEQ ID NO: 860512
uuaccuaagcuuagaugga

SEQ ID NO: 860514 - RNA, 19 nt, Artificial Sequence
  Description of Artificial Sequence: Synthetic oligonucleotide
  Sense strand starting at position 662 of SEQ ID NO: 588371
gguaaugaaugaucucaac

SEQ ID NO: 860515 - RNA, 19 nt, Artificial Sequence
  Description of Artificial Sequence: Synthetic oligonucleotide
  Antisense strand to SEQ ID NO: 860514
guugagaucauucauuacc

SEQ ID NO: 860516 - RNA, 19 nt, Artificial Sequence
  Description of Artificial Sequence: Synthetic oligonucleotide
  Sense strand starting at position 746 of SEQ ID NO: 588371
agggcauaucacugacagu

SEQ ID NO: 860517 - RNA, 19 nt, Artificial Sequence
  Description of Artificial Sequence: Synthetic oligonucleotide
  Antisense strand to SEQ ID NO: 860516
acugucagugauaugcccu

SEQ ID NO: 860518 - RNA, 19 nt, Artificial Sequence
  Description of Artificial Sequence: Synthetic oligonucleotide
  Sense strand starting at position 773 of SEQ ID NO: 588371
gccacaaagagcugaaguu

SEQ ID NO: 860519 - RNA, 19 nt, Artificial Sequence
  Description of Artificial Sequence: Synthetic oligonucleotide
  Antisense strand to SEQ ID NO: 860518
aacuucagcucuuuguggc

SEQ ID NO: 860520 - RNA, 19 nt, Artificial Sequence
  Description of Artificial Sequence: Synthetic oligonucleotide
  Sense strand starting at position 805 of SEQ ID NO: 588371
gugcucugcucauuugaua

SEQ ID NO: 860521 - RNA, 19 nt, Artificial Sequence
  Description of Artificial Sequence: Synthetic oligonucleotide
  Antisense strand to SEQ ID NO: 860520
uaucaaaugagcagagcac

SEQ ID NO: 860522 - RNA, 19 nt, Artificial Sequence
  Description of Artificial Sequence: Synthetic oligonucleotide
  Sense strand starting at position 832 of SEQ ID NO: 588371
gucaaaucacaucacaguu

SEQ ID NO: 860523 - RNA, 19 nt, Artificial Sequence
  Description of Artificial Sequence: Synthetic oligonucleotide
  Antisense strand to SEQ ID NO: 860522
aacugugaugugauuugac

SEQ ID NO: 860524 - RNA, 19 nt, Artificial Sequence
  Description of Artificial Sequence: Synthetic oligonucleotide
  Sense strand starting at position 885 of SEQ ID NO: 588371
aucagaugcccgggaguuu

SEQ ID NO: 860525 - RNA, 19 nt, Artificial Sequence
  Description of Artificial Sequence: Synthetic oligonucleotide
  Antisense strand to SEQ ID NO: 860524
aaacucccgggcaucugau

SEQ ID NO: 860526 - RNA, 19 nt, Artificial Sequence
  Description of Artificial Sequence: Synthetic oligonucleotide
  Sense strand starting at position 963 of SEQ ID NO: 588371
uuggucucuucccuuaaga

SEQ ID NO: 860527 - RNA, 19 nt, Artificial Sequence
  Description of Artificial Sequence: Synthetic oligonucleotide
  Antisense strand to SEQ ID NO: 860526
ucuuaagggaagagaccaa

SEQ ID NO: 860528 - RNA, 19 nt, Artificial Sequence
  Description of Artificial Sequence: Synthetic oligonucleotide
  Sense strand starting at position 965 of SEQ ID NO: 588371
ggucucuucccuuaagauu

SEQ ID NO: 860529 - RNA, 19 nt, Artificial Sequence
  Description of Artificial Sequence: Synthetic oligonucleotide
  Antisense strand to SEQ ID NO: 860528
aaucuuaagggaagagacc

SEQ ID NO: 860530 - RNA, 19 nt, Artificial Sequence
  Description of Artificial Sequence: Synthetic oligonucleotide
  Sense strand starting at position 1035 of SEQ ID NO: 588371
gugcgcuggacacauaaga

SEQ ID NO: 860531 - RNA, 19 nt, Artificial Sequence
  Description of Artificial Sequence: Synthetic oligonucleotide
  Antisense strand to SEQ ID NO: 860530
ucuuauguguccagcgcac

SEQ ID NO: 860532 - RNA, 19 nt, Artificial Sequence
  Description of Artificial Sequence: Synthetic oligonucleotide
  Sense strand starting at position 1206 of SEQ ID NO: 588371
gccucccuccgggaauaaa

SEQ ID NO: 860533 - RNA, 19 nt, Artificial Sequence
  Description of Artificial Sequence: Synthetic oligonucleotide
  Antisense strand to SEQ ID NO: 860532
uuuauucccggagggaggc

SEQ ID NO: 860534 - RNA, 19 nt, Artificial Sequence
  Description of Artificial Sequence: Synthetic oligonucleotide
  Sense strand starting at position 1424 of SEQ ID NO: 588371
gcuccucuccuuugaagaa

SEQ ID NO: 860535 - RNA, 19 nt, Artificial Sequence
  Description of Artificial Sequence: Synthetic oligonucleotide
  Antisense strand to SEQ ID NO: 860534
uucuucaaaggagaggagc

SEQ ID NO: 860536 - RNA, 19 nt, Artificial Sequence
  Description of Artificial Sequence: Synthetic oligonucleotide
  Sense strand starting at position 1879 of SEQ ID NO: 588371
cgggaucuguggcuugaaa

SEQ ID NO: 860537 - RNA, 19 nt, Artificial Sequence
  Description of Artificial Sequence: Synthetic oligonucleotide
  Antisense strand to SEQ ID NO: 860536
uuucaagccacagaucccg

SEQ ID NO: 860538 - RNA, 19 nt, Artificial Sequence
  Description of Artificial Sequence: Synthetic oligonucleotide
  Sense strand starting at position 1899 of SEQ ID NO: 588371
uuuggcuuugccucguauu

SEQ ID NO: 860539 - RNA, 19 nt, Artificial Sequence
  Description of Artificial Sequence: Synthetic oligonucleotide
  Antisense strand to SEQ ID NO: 860538
aauacgaggcaaagccaaa

SEQ ID NO: 860540 - RNA, 19 nt, Artificial Sequence
  Description of Artificial Sequence: Synthetic oligonucleotide
  Sense strand starting at position 2393 of SEQ ID NO: 588371
accguacauuaguuccaua

SEQ ID NO: 860541 - RNA, 19 nt, Artificial Sequence
  Description of Artificial Sequence: Synthetic oligonucleotide
  Antisense strand to SEQ ID NO: 860540
uauggaacuaauguacggu

SEQ ID NO: 860542 - RNA, 19 nt, Artificial Sequence
  Description of Artificial Sequence: Synthetic oligonucleotide
  Sense strand starting at position 2398 of SEQ ID NO: 588371
acauuaguuccauacagug

SEQ ID NO: 860543 - RNA, 19 nt, Artificial Sequence
  Description of Artificial Sequence: Synthetic oligonucleotide
  Antisense strand to SEQ ID NO: 860542
cacuguauggaacuaaugu

SEQ ID NO: 860544 - RNA, 19 nt, Artificial Sequence
  Description of Artificial Sequence: Synthetic oligonucleotide
  Sense strand starting at position 3094 of SEQ ID NO: 588371
uguguacucccggcuacuu

SEQ ID NO: 860545 - RNA, 19 nt, Artificial Sequence
  Description of Artificial Sequence: Synthetic oligonucleotide
  Antisense strand to SEQ ID NO: 860544
aaguagccgggaguacaca

SEQ ID NO: 860546 - RNA, 19 nt, Artificial Sequence
  Description of Artificial Sequence: Synthetic oligonucleotide
  Sense strand starting at position 3341 of SEQ ID NO: 588371
gagacuaauuugcagaggu

SEQ ID NO: 860547 - RNA, 19 nt, Artificial Sequence
  Description of Artificial Sequence: Synthetic oligonucleotide
  Antisense strand to SEQ ID NO: 860546
accucugcaaauuagucuc

SEQ ID NO: 860548 - RNA, 19 nt, Artificial Sequence
  Description of Artificial Sequence: Synthetic oligonucleotide
  Sense strand starting at position 3403 of SEQ ID NO: 588371
gcaacaaucuguuuaagaa

SEQ ID NO: 860549 - RNA, 19 nt, Artificial Sequence
  Description of Artificial Sequence: Synthetic oligonucleotide
  Antisense strand to SEQ ID NO: 860548
uucuuaaacagauuguugc

SEQ ID NO: 860550 - RNA, 19 nt, Artificial Sequence
  Description of Artificial Sequence: Synthetic oligonucleotide
  Sense strand starting at position 3468 of SEQ ID NO: 588371
cuggcagaaucugcaacua

SEQ ID NO: 860551 - RNA, 19 nt, Artificial Sequence
  Description of Artificial Sequence: Synthetic oligonucleotide
  Antisense strand to SEQ ID NO: 860550
uaguugcagauucugccag

SEQ ID NO: 860552 - RNA, 19 nt, Artificial Sequence
  Description of Artificial Sequence: Synthetic oligonucleotide
  Sense strand starting at position 3490 of SEQ ID NO: 588371
uaaggaauucgguguuuac

SEQ ID NO: 860553 - RNA, 19 nt, Artificial Sequence
  Description of Artificial Sequence: Synthetic oligonucleotide
  Antisense strand to SEQ ID NO: 860552
guaaacaccgaauuccuua

SEQ ID NO: 860554 - RNA, 19 nt, Artificial Sequence
  Description of Artificial Sequence: Synthetic oligonucleotide
  Sense strand starting at position 3493 of SEQ ID NO: 588371
ggaauucgguguuuacauc

SEQ ID NO: 860555 - RNA, 19 nt, Artificial Sequence
  Description of Artificial Sequence: Synthetic oligonucleotide
  Antisense strand to SEQ ID NO: 860554
gauguaaacaccgaauucc

SEQ ID NO: 860556 - RNA, 19 nt, Artificial Sequence
  Description of Artificial Sequence: Synthetic oligonucleotide
  Sense strand starting at position 3787 of SEQ ID NO: 588371
cgcuuaugagaacaugcaa

SEQ ID NO: 860557 - RNA, 19 nt, Artificial Sequence
  Description of Artificial Sequence: Synthetic oligonucleotide
  Antisense strand to SEQ ID NO: 860556
uugcauguucucauaagcg

SEQ ID NO: 860558 - RNA, 19 nt, Artificial Sequence
  Description of Artificial Sequence: Synthetic oligonucleotide
  Sense strand starting at position 3877 of SEQ ID NO: 588371
ggacaugauuucguucugu

SEQ ID NO: 860559 - RNA, 19 nt, Artificial Sequence
  Description of Artificial Sequence: Synthetic oligonucleotide
  Antisense strand to SEQ ID NO: 860558
acagaacgaaaucaugucc

SEQ ID NO: 860560 - RNA, 19 nt, Artificial Sequence
  Description of Artificial Sequence: Synthetic oligonucleotide
  Sense strand starting at position 3923 of SEQ ID NO: 588371
ugaugugugcauaguguga

SEQ ID NO: 860561 - RNA, 19 nt, Artificial Sequence
  Description of Artificial Sequence: Synthetic oligonucleotide
  Antisense strand to SEQ ID NO: 860560
ucacacuaugcacacauca

SEQ ID NO: 860562 - RNA, 19 nt, Artificial Sequence
  Description of Artificial Sequence: Synthetic oligonucleotide
  Sense strand starting at position 3958 of SEQ ID NO: 588371
gcaaguccuggguagggaa

SEQ ID NO: 860563 - RNA, 19 nt, Artificial Sequence
  Description of Artificial Sequence: Synthetic oligonucleotide
  Antisense strand to SEQ ID NO: 860562
uucccuacccaggacuugc

SEQ ID NO: 860564 - RNA, 19 nt, Artificial Sequence
  Description of Artificial Sequence: Synthetic oligonucleotide
  Sense strand starting at position 130 of SEQ ID NO: 588372
ccggcuaauuucuuaacuu

SEQ ID NO: 860565 - RNA, 19 nt, Artificial Sequence
  Description of Artificial Sequence: Synthetic oligonucleotide
  Antisense strand to SEQ ID NO: 860564
aaguuaagaaauuagccgg

SEQ ID NO: 860566 - RNA, 19 nt, Artificial Sequence
  Description of Artificial Sequence: Synthetic oligonucleotide
  Sense strand starting at position 263 of SEQ ID NO: 588372
cucugccuguuaucugaau

SEQ ID NO: 860567 - RNA, 19 nt, Artificial Sequence
  Description of Artificial Sequence: Synthetic oligonucleotide
  Antisense strand to SEQ ID NO: 860566
auucagauaacaggcagag

SEQ ID NO: 860568 - RNA, 19 nt, Artificial Sequence
  Description of Artificial Sequence: Synthetic oligonucleotide
  Sense strand starting at position 264 of SEQ ID NO: 588372
ucugccuguuaucugaauu

SEQ ID NO: 860569 - RNA, 19 nt, Artificial Sequence
  Description of Artificial Sequence: Synthetic oligonucleotide
  Antisense strand to SEQ ID NO: 860568
aauucagauaacaggcaga

SEQ ID NO: 860570 - RNA, 19 nt, Artificial Sequence
  Description of Artificial Sequence: Synthetic oligonucleotide
  Sense strand starting at position 338 of SEQ ID NO: 588372
gcuucuccuguauguauuu

SEQ ID NO: 860571 - RNA, 19 nt, Artificial Sequence
  Description of Artificial Sequence: Synthetic oligonucleotide
  Antisense strand to SEQ ID NO: 860570
aaauacauacaggagaagc

SEQ ID NO: 860572 - RNA, 19 nt, Artificial Sequence
  Description of Artificial Sequence: Synthetic oligonucleotide
  Sense strand starting at position 576 of SEQ ID NO: 588372
uguagcugguucucauaaa

SEQ ID NO: 860573 - RNA, 19 nt, Artificial Sequence
  Description of Artificial Sequence: Synthetic oligonucleotide
  Antisense strand to SEQ ID NO: 860572
uuuaugagaaccagcuaca

SEQ ID NO: 860574 - RNA, 19 nt, Artificial Sequence
  Description of Artificial Sequence: Synthetic oligonucleotide
  Sense strand starting at position 605 of SEQ ID NO: 588372
guauaauuguuauuggaac

SEQ ID NO: 860575 - RNA, 19 nt, Artificial Sequence
  Description of Artificial Sequence: Synthetic oligonucleotide
  Antisense strand to SEQ ID NO: 860574
guuccaauaacaauuauac

SEQ ID NO: 860576 - RNA, 19 nt, Artificial Sequence
  Description of Artificial Sequence: Synthetic oligonucleotide
  Sense strand starting at position 792 of SEQ ID NO: 588372
uucugaugccuugguaaac

SEQ ID NO: 860577 - RNA, 19 nt, Artificial Sequence
  Description of Artificial Sequence: Synthetic oligonucleotide
  Antisense strand to SEQ ID NO: 860576
guuuaccaaggcaucagaa

SEQ ID NO: 860578 - RNA, 19 nt, Artificial Sequence
  Description of Artificial Sequence: Synthetic oligonucleotide
  Sense strand starting at position 881 of SEQ ID NO: 588372
guauaauuaguccaguucu

SEQ ID NO: 860579 - RNA, 19 nt, Artificial Sequence
  Description of Artificial Sequence: Synthetic oligonucleotide
  Antisense strand to SEQ ID NO: 860578
agaacuggacuaauuauac

SEQ ID NO: 860580 - RNA, 19 nt, Artificial Sequence
  Description of Artificial Sequence: Synthetic oligonucleotide
  Sense strand starting at position 887 of SEQ ID NO: 588372
uuaguccaguucucaagaa

SEQ ID NO: 860581 - RNA, 19 nt, Artificial Sequence
  Description of Artificial Sequence: Synthetic oligonucleotide
  Antisense strand to SEQ ID NO: 860580
uucuugagaacuggacuaa

SEQ ID NO: 860582 - RNA, 19 nt, Artificial Sequence
  Description of Artificial Sequence: Synthetic oligonucleotide
  Sense strand starting at position 902 of SEQ ID NO: 588372
agaagcaggcucuauuacu

SEQ ID NO: 860583 - RNA, 19 nt, Artificial Sequence
  Description of Artificial Sequence: Synthetic oligonucleotide
  Antisense strand to SEQ ID NO: 860582
aguaauagagccugcuucu

SEQ ID NO: 860584 - RNA, 19 nt, Artificial Sequence
  Description of Artificial Sequence: Synthetic oligonucleotide
  Sense strand starting at position 909 of SEQ ID NO: 588372
ggcucuauuacugggagua

SEQ ID NO: 860585 - RNA, 19 nt, Artificial Sequence
  Description of Artificial Sequence: Synthetic oligonucleotide
  Antisense strand to SEQ ID NO: 860584
uacucccaguaauagagcc

SEQ ID NO: 860586 - RNA, 19 nt, Artificial Sequence
  Description of Artificial Sequence: Synthetic oligonucleotide
  Sense strand starting at position 910 of SEQ ID NO: 588372
gcucuauuacugggaguag

SEQ ID NO: 860587 - RNA, 19 nt, Artificial Sequence
  Description of Artificial Sequence: Synthetic oligonucleotide
  Antisense strand to SEQ ID NO: 860586
cuacucccaguaauagagc

SEQ ID NO: 860588 - RNA, 19 nt, Artificial Sequence
  Description of Artificial Sequence: Synthetic oligonucleotide
  Sense strand starting at position 922 of SEQ ID NO: 588372
ggaguaguggguuggugaa

SEQ ID NO: 860589 - RNA, 19 nt, Artificial Sequence
  Description of Artificial Sequence: Synthetic oligonucleotide
  Antisense strand to SEQ ID NO: 860588
uucaccaacccacuacucc

SEQ ID NO: 860590 - RNA, 19 nt, Artificial Sequence
  Description of Artificial Sequence: Synthetic oligonucleotide
  Sense strand starting at position 979 of SEQ ID NO: 588372
cgaugcagccuuucuugua

SEQ ID NO: 860591 - RNA, 19 nt, Artificial Sequence
  Description of Artificial Sequence: Synthetic oligonucleotide
  Antisense strand to SEQ ID NO: 860590
uacaagaaaggcugcaucg

SEQ ID NO: 860592 - RNA, 19 nt, Artificial Sequence
  Description of Artificial Sequence: Synthetic oligonucleotide
  Sense strand starting at position 986 of SEQ ID NO: 588372
gccuuucuuguauaugaau

SEQ ID NO: 860593 - RNA, 19 nt, Artificial Sequence
  Description of Artificial Sequence: Synthetic oligonucleotide
  Antisense strand to SEQ ID NO: 860592
auucauauacaagaaaggc

SEQ ID NO: 860594 - RNA, 19 nt, Artificial Sequence
  Description of Artificial Sequence: Synthetic oligonucleotide
  Sense strand starting at position 1004 of SEQ ID NO: 588372
uaauguauaugagugcuua

SEQ ID NO: 860595 - RNA, 19 nt, Artificial Sequence
  Description of Artificial Sequence: Synthetic oligonucleotide
  Antisense strand to SEQ ID NO: 860594
uaagcacucauauacauua

SEQ ID NO: 860596 - RNA, 19 nt, Artificial Sequence
  Description of Artificial Sequence: Synthetic oligonucleotide
  Sense strand starting at position 1008 of SEQ ID NO: 588372
guauaugagugcuuauuuc

SEQ ID NO: 860597 - RNA, 19 nt, Artificial Sequence
  Description of Artificial Sequence: Synthetic oligonucleotide
  Antisense strand to SEQ ID NO: 860596
gaaauaagcacucauauac

SEQ ID NO: 860598 - RNA, 19 nt, Artificial Sequence
  Description of Artificial Sequence: Synthetic oligonucleotide
  Sense strand starting at position 1017 of SEQ ID NO: 588372
ugcuuauuuccaggugacu

SEQ ID NO: 860599 - RNA, 19 nt, Artificial Sequence
  Description of Artificial Sequence: Synthetic oligonucleotide
  Antisense strand to SEQ ID NO: 860598
agucaccuggaaauaagca

SEQ ID NO: 860600 - RNA, 19 nt, Artificial Sequence
  Description of Artificial Sequence: Synthetic oligonucleotide
  Sense strand starting at position 1103 of SEQ ID NO: 588372
uccaucuaagcuuagguaa

SEQ ID NO: 860601 - RNA, 19 nt, Artificial Sequence
  Description of Artificial Sequence: Synthetic oligonucleotide
  Antisense strand to SEQ ID NO: 860600
uuaccuaagcuuagaugga

SEQ ID NO: 860602 - RNA, 19 nt, Artificial Sequence
  Description of Artificial Sequence: Synthetic oligonucleotide
  Sense strand starting at position 1117 of SEQ ID NO: 588372
gguaaugaaugaucucaac

SEQ ID NO: 860603 - RNA, 19 nt, Artificial Sequence
  Description of Artificial Sequence: Synthetic oligonucleotide
  Antisense strand to SEQ ID NO: 860602
guugagaucauucauuacc

SEQ ID NO: 860604 - RNA, 19 nt, Artificial Sequence
  Description of Artificial Sequence: Synthetic oligonucleotide
  Sense strand starting at position 1201 of SEQ ID NO: 588372
agggcauaucacugacagu

SEQ ID NO: 860605 - RNA, 19 nt, Artificial Sequence
  Description of Artificial Sequence: Synthetic oligonucleotide
  Antisense strand to SEQ ID NO: 860604
acugucagugauaugcccu

SEQ ID NO: 860606 - RNA, 19 nt, Artificial Sequence
  Description of Artificial Sequence: Synthetic oligonucleotide
  Sense strand starting at position 1228 of SEQ ID NO: 588372
gccacaaagagcugaaguu

SEQ ID NO: 860607 - RNA, 19 nt, Artificial Sequence
  Description of Artificial Sequence: Synthetic oligonucleotide
  Antisense strand to SEQ ID NO: 860606
aacuucagcucuuuguggc

SEQ ID NO: 860608 - RNA, 19 nt, Artificial Sequence
  Description of Artificial Sequence: Synthetic oligonucleotide
  Sense strand starting at position 1260 of SEQ ID NO: 588372
gugcucugcucauuugaua

SEQ ID NO: 860609 - RNA, 19 nt, Artificial Sequence
  Description of Artificial Sequence: Synthetic oligonucleotide
  Antisense strand to SEQ ID NO: 860608
uaucaaaugagcagagcac

SEQ ID NO: 860610 - RNA, 19 nt, Artificial Sequence
  Description of Artificial Sequence: Synthetic oligonucleotide
  Sense strand starting at position 1287 of SEQ ID NO: 588372
gucaaaucacaucacaguu

SEQ ID NO: 860611 - RNA, 19 nt, Artificial Sequence
  Description of Artificial Sequence: Synthetic oligonucleotide
  Antisense strand to SEQ ID NO: 860610
aacugugaugugauuugac

SEQ ID NO: 860612 - RNA, 19 nt, Artificial Sequence
  Description of Artificial Sequence: Synthetic oligonucleotide
  Sense strand starting at position 1340 of SEQ ID NO: 588372
aucagaugcccgggaguuu

SEQ ID NO: 860613 - RNA, 19 nt, Artificial Sequence
  Description of Artificial Sequence: Synthetic oligonucleotide
  Antisense strand to SEQ ID NO: 860612
aaacucccgggcaucugau

SEQ ID NO: 860614 - RNA, 19 nt, Artificial Sequence
  Description of Artificial Sequence: Synthetic oligonucleotide
  Sense strand starting at position 1418 of SEQ ID NO: 588372
uuggucucuucccuuaaga

SEQ ID NO: 860615 - RNA, 19 nt, Artificial Sequence
  Description of Artificial Sequence: Synthetic oligonucleotide
  Antisense strand to SEQ ID NO: 860614
ucuuaagggaagagaccaa

SEQ ID NO: 860616 - RNA, 19 nt, Artificial Sequence
  Description of Artificial Sequence: Synthetic oligonucleotide
  Sense strand starting at position 1420 of SEQ ID NO: 588372
ggucucuucccuuaagauu

SEQ ID NO: 860617 - RNA, 19 nt, Artificial Sequence
  Description of Artificial Sequence: Synthetic oligonucleotide
  Antisense strand to SEQ ID NO: 860616
aaucuuaagggaagagacc

SEQ ID NO: 860618 - RNA, 19 nt, Artificial Sequence
  Description of Artificial Sequence: Synthetic oligonucleotide
  Sense strand starting at position 1490 of SEQ ID NO: 588372
gugcgcuggacacauaaga

SEQ ID NO: 860619 - RNA, 19 nt, Artificial Sequence
  Description of Artificial Sequence: Synthetic oligonucleotide
  Antisense strand to SEQ ID NO: 860618
ucuuauguguccagcgcac

SEQ ID NO: 860620 - RNA, 19 nt, Artificial Sequence
  Description of Artificial Sequence: Synthetic oligonucleotide
  Sense strand starting at position 1661 of SEQ ID NO: 588372
gccucccuccgggaauaaa

SEQ ID NO: 860621 - RNA, 19 nt, Artificial Sequence
  Description of Artificial Sequence: Synthetic oligonucleotide
  Antisense strand to SEQ ID NO: 860620
uuuauucccggagggaggc

SEQ ID NO: 860622 - RNA, 19 nt, Artificial Sequence
  Description of Artificial Sequence: Synthetic oligonucleotide
  Sense strand starting at position 1879 of SEQ ID NO: 588372
gcuccucuccuuugaagaa

SEQ ID NO: 860623 - RNA, 19 nt, Artificial Sequence
  Description of Artificial Sequence: Synthetic oligonucleotide
  Antisense strand to SEQ ID NO: 860622
uucuucaaaggagaggagc

SEQ ID NO: 860624 - RNA, 19 nt, Artificial Sequence
  Description of Artificial Sequence: Synthetic oligonucleotide
  Sense strand starting at position 2334 of SEQ ID NO: 588372
cgggaucuguggcuugaaa

SEQ ID NO: 860625 - RNA, 19 nt, Artificial Sequence
  Description of Artificial Sequence: Synthetic oligonucleotide
  Antisense strand to SEQ ID NO: 860624
uuucaagccacagaucccg

SEQ ID NO: 860626 - RNA, 19 nt, Artificial Sequence
  Description of Artificial Sequence: Synthetic oligonucleotide
  Sense strand starting at position 2354 of SEQ ID NO: 588372
uuuggcuuugccucguauu

SEQ ID NO: 860627 - RNA, 19 nt, Artificial Sequence
  Description of Artificial Sequence: Synthetic oligonucleotide
  Antisense strand to SEQ ID NO: 860626
aauacgaggcaaagccaaa

SEQ ID NO: 860628 - RNA, 19 nt, Artificial Sequence
  Description of Artificial Sequence: Synthetic oligonucleotide
  Sense strand starting at position 2848 of SEQ ID NO: 588372
accguacauuaguuccaua

SEQ ID NO: 860629 - RNA, 19 nt, Artificial Sequence
  Description of Artificial Sequence: Synthetic oligonucleotide
  Antisense strand to SEQ ID NO: 860628
uauggaacuaauguacggu

SEQ ID NO: 860630 - RNA, 19 nt, Artificial Sequence
  Description of Artificial Sequence: Synthetic oligonucleotide
  Sense strand starting at position 2853 of SEQ ID NO: 588372
acauuaguuccauacagug

SEQ ID NO: 860631 - RNA, 19 nt, Artificial Sequence
  Description of Artificial Sequence: Synthetic oligonucleotide
  Antisense strand to SEQ ID NO: 860630
cacuguauggaacuaaugu

SEQ ID NO: 860632 - RNA, 19 nt, Artificial Sequence
  Description of Artificial Sequence: Synthetic oligonucleotide
  Sense strand starting at position 3549 of SEQ ID NO: 588372
uguguacucccggcuacuu

SEQ ID NO: 860633 - RNA, 19 nt, Artificial Sequence
  Description of Artificial Sequence: Synthetic oligonucleotide
  Antisense strand to SEQ ID NO: 860632
aaguagccgggaguacaca

SEQ ID NO: 860634 - RNA, 19 nt, Artificial Sequence
  Description of Artificial Sequence: Synthetic oligonucleotide
  Sense strand starting at position 3796 of SEQ ID NO: 588372
gagacuaauuugcagaggu

SEQ ID NO: 860635 - RNA, 19 nt, Artificial Sequence
  Description of Artificial Sequence: Synthetic oligonucleotide
  Antisense strand to SEQ ID NO: 860634
accucugcaaauuagucuc

SEQ ID NO: 860636 - RNA, 19 nt, Artificial Sequence
  Description of Artificial Sequence: Synthetic oligonucleotide
  Sense strand starting at position 3858 of SEQ ID NO: 588372
gcaacaaucuguuuaagaa

SEQ ID NO: 860637 - RNA, 19 nt, Artificial Sequence
  Description of Artificial Sequence: Synthetic oligonucleotide
  Antisense strand to SEQ ID NO: 860636
uucuuaaacagauuguugc

SEQ ID NO: 860638 - RNA, 19 nt, Artificial Sequence
  Description of Artificial Sequence: Synthetic oligonucleotide
  Sense strand starting at position 3923 of SEQ ID NO: 588372
cuggcagaaucugcaacua

SEQ ID NO: 860639 - RNA, 19 nt, Artificial Sequence
  Description of Artificial Sequence: Synthetic oligonucleotide
  Antisense strand to SEQ ID NO: 860638
uaguugcagauucugccag

SEQ ID NO: 860640 - RNA, 19 nt, Artificial Sequence
  Description of Artificial Sequence: Synthetic oligonucleotide
  Sense strand starting at position 3945 of SEQ ID NO: 588372
uaaggaauucgguguuuac

SEQ ID NO: 860641 - RNA, 19 nt, Artificial Sequence
  Description of Artificial Sequence: Synthetic oligonucleotide
  Antisense strand to SEQ ID NO: 860640
guaaacaccgaauuccuua

SEQ ID NO: 860642 - RNA, 19 nt, Artificial Sequence
  Description of Artificial Sequence: Synthetic oligonucleotide
  Sense strand starting at position 3948 of SEQ ID NO: 588372
ggaauucgguguuuacauc

SEQ ID NO: 860643 - RNA, 19 nt, Artificial Sequence
  Description of Artificial Sequence: Synthetic oligonucleotide
  Antisense strand to SEQ ID NO: 860642
gauguaaacaccgaauucc

SEQ ID NO: 860644 - RNA, 19 nt, Artificial Sequence
  Description of Artificial Sequence: Synthetic oligonucleotide
  Sense strand starting at position 137 of SEQ ID NO: 588373
cagggucucuaguaacaag

SEQ ID NO: 860645 - RNA, 19 nt, Artificial Sequence
  Description of Artificial Sequence: Synthetic oligonucleotide
  Antisense strand to SEQ ID NO: 860644
cuuguuacuagagacccug

SEQ ID NO: 860646 - RNA, 19 nt, Artificial Sequence
  Description of Artificial Sequence: Synthetic oligonucleotide
  Sense strand starting at position 498 of SEQ ID NO: 588373
gacagauguuguuuauccu

SEQ ID NO: 860647 - RNA, 19 nt, Artificial Sequence
  Description of Artificial Sequence: Synthetic oligonucleotide
  Antisense strand to SEQ ID NO: 860646
aggauaaacaacaucuguc

SEQ ID NO: 860648 - RNA, 19 nt, Artificial Sequence
  Description of Artificial Sequence: Synthetic oligonucleotide
  Sense strand starting at position 606 of SEQ ID NO: 588373
uggauauccugggccugau

SEQ ID NO: 860649 - RNA, 19 nt, Artificial Sequence
  Description of Artificial Sequence: Synthetic oligonucleotide
  Antisense strand to SEQ ID NO: 860648
aucaggcccaggauaucca

SEQ ID NO: 860650 - RNA, 19 nt, Artificial Sequence
  Description of Artificial Sequence: Synthetic oligonucleotide
  Sense strand starting at position 618 of SEQ ID NO: 588373
gccugauccucugugaaac

SEQ ID NO: 860651 - RNA, 19 nt, Artificial Sequence
  Description of Artificial Sequence: Synthetic oligonucleotide
  Antisense strand to SEQ ID NO: 860650
guuucacagaggaucaggc

SEQ ID NO: 860652 - RNA, 19 nt, Artificial Sequence
  Description of Artificial Sequence: Synthetic oligonucleotide
  Sense strand starting at position 730 of SEQ ID NO: 588373
caauguuggucuuacagac

SEQ ID NO: 860653 - RNA, 19 nt, Artificial Sequence
  Description of Artificial Sequence: Synthetic oligonucleotide
  Antisense strand to SEQ ID NO: 860652
gucuguaagaccaacauug

SEQ ID NO: 860654 - RNA, 19 nt, Artificial Sequence
  Description of Artificial Sequence: Synthetic oligonucleotide
  Sense strand starting at position 842 of SEQ ID NO: 588373
ccaauuagcuaaggauuua

SEQ ID NO: 860655 - RNA, 19 nt, Artificial Sequence
  Description of Artificial Sequence: Synthetic oligonucleotide
  Antisense strand to SEQ ID NO: 860654
uaaauccuuagcuaauugg

SEQ ID NO: 860656 - RNA, 19 nt, Artificial Sequence
  Description of Artificial Sequence: Synthetic oligonucleotide
  Sense strand starting at position 949 of SEQ ID NO: 588373
ccacucugugaguguguaa

SEQ ID NO: 860657 - RNA, 19 nt, Artificial Sequence
  Description of Artificial Sequence: Synthetic oligonucleotide
  Antisense strand to SEQ ID NO: 860656
uuacacacucacagagugg

SEQ ID NO: 860658 - RNA, 19 nt, Artificial Sequence
  Description of Artificial Sequence: Synthetic oligonucleotide
  Sense strand starting at position 987 of SEQ ID NO: 588373
guacaaagaugauuccacu

SEQ ID NO: 860659 - RNA, 19 nt, Artificial Sequence
  Description of Artificial Sequence: Synthetic oligonucleotide
  Antisense strand to SEQ ID NO: 860658
aguggaaucaucuuuguac

SEQ ID NO: 860660 - RNA, 19 nt, Artificial Sequence
  Description of Artificial Sequence: Synthetic oligonucleotide
  Sense strand starting at position 1075 of SEQ ID NO: 588373
gcggauguuucucuggcua

SEQ ID NO: 860661 - RNA, 19 nt, Artificial Sequence
  Description of Artificial Sequence: Synthetic oligonucleotide
  Antisense strand to SEQ ID NO: 860660
uagccagagaaacauccgc

SEQ ID NO: 860662 - RNA, 19 nt, Artificial Sequence
  Description of Artificial Sequence: Synthetic oligonucleotide
  Sense strand starting at position 1080 of SEQ ID NO: 588373
uguuucucuggcuauggaa

SEQ ID NO: 860663 - RNA, 19 nt, Artificial Sequence
  Description of Artificial Sequence: Synthetic oligonucleotide
  Antisense strand to SEQ ID NO: 860662
uuccauagccagagaaaca

SEQ ID NO: 860664 - RNA, 19 nt, Artificial Sequence
  Description of Artificial Sequence: Synthetic oligonucleotide
  Sense strand starting at position 1082 of SEQ ID NO: 588373
uuucucuggcuauggaaga

SEQ ID NO: 860665 - RNA, 19 nt, Artificial Sequence
  Description of Artificial Sequence: Synthetic oligonucleotide
  Antisense strand to SEQ ID NO: 860664
ucuuccauagccagagaaa

SEQ ID NO: 860666 - RNA, 19 nt, Artificial Sequence
  Description of Artificial Sequence: Synthetic oligonucleotide
  Sense strand starting at position 1186 of SEQ ID NO: 588373
acugcugucgccucagagu

SEQ ID NO: 860667 - RNA, 19 nt, Artificial Sequence
  Description of Artificial Sequence: Synthetic oligonucleotide
  Antisense strand to SEQ ID NO: 860666
acucugaggcgacagcagu

SEQ ID NO: 860668 - RNA, 19 nt, Artificial Sequence
  Description of Artificial Sequence: Synthetic oligonucleotide
  Sense strand starting at position 1244 of SEQ ID NO: 588373
guugucacugaggaucaau

SEQ ID NO: 860669 - RNA, 19 nt, Artificial Sequence
  Description of Artificial Sequence: Synthetic oligonucleotide
  Antisense strand to SEQ ID NO: 860668
auugauccucagugacaac

SEQ ID NO: 860670 - RNA, 19 nt, Artificial Sequence
  Description of Artificial Sequence: Synthetic oligonucleotide
  Sense strand starting at position 1293 of SEQ ID NO: 588373
ggaugcauucuccagucau

SEQ ID NO: 860671 - RNA, 19 nt, Artificial Sequence
  Description of Artificial Sequence: Synthetic oligonucleotide
  Antisense strand to SEQ ID NO: 860670
augacuggagaaugcaucc

SEQ ID NO: 860672 - RNA, 19 nt, Artificial Sequence
  Description of Artificial Sequence: Synthetic oligonucleotide
  Sense strand starting at position 1304 of SEQ ID NO: 588373
ccagucauuucuggcucuu

SEQ ID NO: 860673 - RNA, 19 nt, Artificial Sequence
  Description of Artificial Sequence: Synthetic oligonucleotide
  Antisense strand to SEQ ID NO: 860672
aagagccagaaaugacugg

SEQ ID NO: 860674 - RNA, 19 nt, Artificial Sequence
  Description of Artificial Sequence: Synthetic oligonucleotide
  Sense strand starting at position 1353 of SEQ ID NO: 588373
ggguaaauccacugcaaac

SEQ ID NO: 860675 - RNA, 19 nt, Artificial Sequence
  Description of Artificial Sequence: Synthetic oligonucleotide
  Antisense strand to SEQ ID NO: 860674
guuugcaguggauuuaccc

SEQ ID NO: 860676 - RNA, 19 nt, Artificial Sequence
  Description of Artificial Sequence: Synthetic oligonucleotide
  Sense strand starting at position 1420 of SEQ ID NO: 588373
guuaccuuggccugucgaa

SEQ ID NO: 860677 - RNA, 19 nt, Artificial Sequence
  Description of Artificial Sequence: Synthetic oligonucleotide
  Antisense strand to SEQ ID NO: 860676
uucgacaggccaagguaac

SEQ ID NO: 860678 - RNA, 19 nt, Artificial Sequence
  Description of Artificial Sequence: Synthetic oligonucleotide
  Sense strand starting at position 1436 of SEQ ID NO: 588373
gaacgagccggucauucuu

SEQ ID NO: 860679 - RNA, 19 nt, Artificial Sequence
  Description of Artificial Sequence: Synthetic oligonucleotide
  Antisense strand to SEQ ID NO: 860678
aagaaugaccggcucguuc

SEQ ID NO: 860680 - RNA, 19 nt, Artificial Sequence
  Description of Artificial Sequence: Synthetic oligonucleotide
  Sense strand starting at position 1752 of SEQ ID NO: 588373
ugcgguugguccucuugaa

SEQ ID NO: 860681 - RNA, 19 nt, Artificial Sequence
  Description of Artificial Sequence: Synthetic oligonucleotide
  Antisense strand to SEQ ID NO: 860680
uucaagaggaccaaccgca

SEQ ID NO: 860682 - RNA, 19 nt, Artificial Sequence
  Description of Artificial Sequence: Synthetic oligonucleotide
  Sense strand starting at position 1756 of SEQ ID NO: 588373
guugguccucuugaagagu

SEQ ID NO: 860683 - RNA, 19 nt, Artificial Sequence
  Description of Artificial Sequence: Synthetic oligonucleotide
  Antisense strand to SEQ ID NO: 860682
acucuucaagaggaccaac

SEQ ID NO: 860684 - RNA, 19 nt, Artificial Sequence
  Description of Artificial Sequence: Synthetic oligonucleotide
  Sense strand starting at position 1773 of SEQ ID NO: 588373
guuaguucccgcgggaaac

SEQ ID NO: 860685 - RNA, 19 nt, Artificial Sequence
  Description of Artificial Sequence: Synthetic oligonucleotide
  Antisense strand to SEQ ID NO: 860684
guuucccgcgggaacuaac

SEQ ID NO: 860686 - RNA, 19 nt, Artificial Sequence
  Description of Artificial Sequence: Synthetic oligonucleotide
  Sense strand starting at position 1774 of SEQ ID NO: 588373
uuaguucccgcgggaaacu

SEQ ID NO: 860687 - RNA, 19 nt, Artificial Sequence
  Description of Artificial Sequence: Synthetic oligonucleotide
  Antisense strand to SEQ ID NO: 860686
aguuucccgcgggaacuaa

SEQ ID NO: 860688 - RNA, 19 nt, Artificial Sequence
  Description of Artificial Sequence: Synthetic oligonucleotide
  Sense strand starting at position 2034 of SEQ ID NO: 588373
gugcaugcugggagucgua

SEQ ID NO: 860689 - RNA, 19 nt, Artificial Sequence
  Description of Artificial Sequence: Synthetic oligonucleotide
  Antisense strand to SEQ ID NO: 860688
uacgacucccagcaugcac

SEQ ID NO: 860690 - RNA, 19 nt, Artificial Sequence
  Description of Artificial Sequence: Synthetic oligonucleotide
  Sense strand starting at position 2084 of SEQ ID NO: 588373
ggcggaugguguuuccaga

SEQ ID NO: 860691 - RNA, 19 nt, Artificial Sequence
  Description of Artificial Sequence: Synthetic oligonucleotide
  Antisense strand to SEQ ID NO: 860690
ucuggaaacaccauccgcc

SEQ ID NO: 860692 - RNA, 19 nt, Artificial Sequence
  Description of Artificial Sequence: Synthetic oligonucleotide
  Sense strand starting at position 2128 of SEQ ID NO: 588373
uccguaaucguccauccuu

SEQ ID NO: 860693 - RNA, 19 nt, Artificial Sequence
  Description of Artificial Sequence: Synthetic oligonucleotide
  Antisense strand to SEQ ID NO: 860692
aaggauggacgauuacgga

SEQ ID NO: 860694 - RNA, 19 nt, Artificial Sequence
  Description of Artificial Sequence: Synthetic oligonucleotide
  Sense strand starting at position 2186 of SEQ ID NO: 588373
cggcuuucuaccgcgugua

SEQ ID NO: 860695 - RNA, 19 nt, Artificial Sequence
  Description of Artificial Sequence: Synthetic oligonucleotide
  Antisense strand to SEQ ID NO: 860694
uacacgcgguagaaagccg

SEQ ID NO: 860696 - RNA, 19 nt, Artificial Sequence
  Description of Artificial Sequence: Synthetic oligonucleotide
  Sense strand starting at position 2658 of SEQ ID NO: 588373
gcuuuaugaccuuggguuu

SEQ ID NO: 860697 - RNA, 19 nt, Artificial Sequence
  Description of Artificial Sequence: Synthetic oligonucleotide
  Antisense strand to SEQ ID NO: 860696
aaacccaaggucauaaagc

SEQ ID NO: 860698 - RNA, 19 nt, Artificial Sequence
  Description of Artificial Sequence: Synthetic oligonucleotide
  Sense strand starting at position 2675 of SEQ ID NO: 588373
uuggcaacaaguuguuaga

SEQ ID NO: 860699 - RNA, 19 nt, Artificial Sequence
  Description of Artificial Sequence: Synthetic oligonucleotide
  Antisense strand to SEQ ID NO: 860698
ucuaacaacuuguugccaa

SEQ ID NO: 860700 - RNA, 19 nt, Artificial Sequence
  Description of Artificial Sequence: Synthetic oligonucleotide
  Sense strand starting at position 2677 of SEQ ID NO: 588373
ggcaacaaguuguuagaca

SEQ ID NO: 860701 - RNA, 19 nt, Artificial Sequence
  Description of Artificial Sequence: Synthetic oligonucleotide
  Antisense strand to SEQ ID NO: 860700
ugucuaacaacuuguugcc

SEQ ID NO: 860702 - RNA, 19 nt, Artificial Sequence
  Description of Artificial Sequence: Synthetic oligonucleotide
  Sense strand starting at position 2765 of SEQ ID NO: 588373
agacaucauuaagaaguca

SEQ ID NO: 860703 - RNA, 19 nt, Artificial Sequence
  Description of Artificial Sequence: Synthetic oligonucleotide
  Antisense strand to SEQ ID NO: 860702
ugacuucuuaaugaugucu

SEQ ID NO: 860704 - RNA, 19 nt, Artificial Sequence
  Description of Artificial Sequence: Synthetic oligonucleotide
  Sense strand starting at position 3163 of SEQ ID NO: 588373
gcuggaggauucccugaag

SEQ ID NO: 860705 - RNA, 19 nt, Artificial Sequence
  Description of Artificial Sequence: Synthetic oligonucleotide
  Antisense strand to SEQ ID NO: 860704
cuucagggaauccuccagc

SEQ ID NO: 860706 - RNA, 19 nt, Artificial Sequence
  Description of Artificial Sequence: Synthetic oligonucleotide
  Sense strand starting at position 3436 of SEQ ID NO: 588373
gggagaaacuacuugcuaa

SEQ ID NO: 860707 - RNA, 19 nt, Artificial Sequence
  Description of Artificial Sequence: Synthetic oligonucleotide
  Antisense strand to SEQ ID NO: 860706
uuagcaaguaguuucuccc

SEQ ID NO: 860708 - RNA, 19 nt, Artificial Sequence
  Description of Artificial Sequence: Synthetic oligonucleotide
  Sense strand starting at position 3455 of SEQ ID NO: 588373
uuauauaccucauaaggga

SEQ ID NO: 860709 - RNA, 19 nt, Artificial Sequence
  Description of Artificial Sequence: Synthetic oligonucleotide
  Antisense strand to SEQ ID NO: 860708
ucccuuaugagguauauaa

SEQ ID NO: 860710 - RNA, 19 nt, Artificial Sequence
  Description of Artificial Sequence: Synthetic oligonucleotide
  Sense strand starting at position 3598 of SEQ ID NO: 588373
auuugagccucagaaguuu

SEQ ID NO: 860711 - RNA, 19 nt, Artificial Sequence
  Description of Artificial Sequence: Synthetic oligonucleotide
  Antisense strand to SEQ ID NO: 860710
aaacuucugaggcucaaau

SEQ ID NO: 860712 - RNA, 19 nt, Artificial Sequence
  Description of Artificial Sequence: Synthetic oligonucleotide
  Sense strand starting at position 3701 of SEQ ID NO: 588373
gucccaucuacucgggaaa

SEQ ID NO: 860713 - RNA, 19 nt, Artificial Sequence
  Description of Artificial Sequence: Synthetic oligonucleotide
  Antisense strand to SEQ ID NO: 860712
uuucccgaguagaugggac

SEQ ID NO: 860714 - RNA, 19 nt, Artificial Sequence
  Description of Artificial Sequence: Synthetic oligonucleotide
  Sense strand starting at position 3704 of SEQ ID NO: 588373
ccaucuacucgggaaacuu

SEQ ID NO: 860715 - RNA, 19 nt, Artificial Sequence
  Description of Artificial Sequence: Synthetic oligonucleotide
  Antisense strand to SEQ ID NO: 860714
aaguuucccgaguagaugg

SEQ ID NO: 860716 - RNA, 19 nt, Artificial Sequence
  Description of Artificial Sequence: Synthetic oligonucleotide
  Sense strand starting at position 3888 of SEQ ID NO: 588373
aucuacuaauggcuaagaa

SEQ ID NO: 860717 - RNA, 19 nt, Artificial Sequence
  Description of Artificial Sequence: Synthetic oligonucleotide
  Antisense strand to SEQ ID NO: 860716
uucuuagccauuaguagau

SEQ ID NO: 860718 - RNA, 19 nt, Artificial Sequence
  Description of Artificial Sequence: Synthetic oligonucleotide
  Sense strand starting at position 3923 of SEQ ID NO: 588373
ucggcauuauuagcuauua

SEQ ID NO: 860719 - RNA, 19 nt, Artificial Sequence
  Description of Artificial Sequence: Synthetic oligonucleotide
  Antisense strand to SEQ ID NO: 860718
uaauagcuaauaaugccga

SEQ ID NO: 860720 - RNA, 19 nt, Artificial Sequence
  Description of Artificial Sequence: Synthetic oligonucleotide
  Sense strand starting at position 3973 of SEQ ID NO: 588373
gggccauguuaugccugua

SEQ ID NO: 860721 - RNA, 19 nt, Artificial Sequence
  Description of Artificial Sequence: Synthetic oligonucleotide
  Antisense strand to SEQ ID NO: 860720
uacaggcauaacauggccc

SEQ ID NO: 860722 - RNA, 19 nt, Artificial Sequence
  Description of Artificial Sequence: Synthetic oligonucleotide
  Sense strand starting at position 3976 of SEQ ID NO: 588373
ccauguuaugccuguaauc

SEQ ID NO: 860723 - RNA, 19 nt, Artificial Sequence
  Description of Artificial Sequence: Synthetic oligonucleotide
  Antisense strand to SEQ ID NO: 860722
gauuacaggcauaacaugg

SEQ ID NO: 860724 - RNA, 19 nt, Artificial Sequence
  Description of Artificial Sequence: Synthetic oligonucleotide
  Sense strand starting at position 46 of SEQ ID NO: 588374
agcccaucaugugucauuu

SEQ ID NO: 860725 - RNA, 19 nt, Artificial Sequence
  Description of Artificial Sequence: Synthetic oligonucleotide
  Antisense strand to SEQ ID NO: 860724
aaaugacacaugaugggcu

SEQ ID NO: 860726 - RNA, 19 nt, Artificial Sequence
  Description of Artificial Sequence: Synthetic oligonucleotide
  Sense strand starting at position 93 of SEQ ID NO: 588374
uaguaaaguguauggacaa

SEQ ID NO: 860727 - RNA, 19 nt, Artificial Sequence
  Description of Artificial Sequence: Synthetic oligonucleotide
  Antisense strand to SEQ ID NO: 860726
uuguccauacacuuuacua

SEQ ID NO: 860728 - RNA, 19 nt, Artificial Sequence
  Description of Artificial Sequence: Synthetic oligonucleotide
  Sense strand starting at position 144 of SEQ ID NO: 588374
guggaucaguuagcuagaa

SEQ ID NO: 860729 - RNA, 19 nt, Artificial Sequence
  Description of Artificial Sequence: Synthetic oligonucleotide
  Antisense strand to SEQ ID NO: 860728
uucuagcuaacugauccac

SEQ ID NO: 860730 - RNA, 19 nt, Artificial Sequence
  Description of Artificial Sequence: Synthetic oligonucleotide
  Sense strand starting at position 145 of SEQ ID NO: 588374
uggaucaguuagcuagaaa

SEQ ID NO: 860731 - RNA, 19 nt, Artificial Sequence
  Description of Artificial Sequence: Synthetic oligonucleotide
  Antisense strand to SEQ ID NO: 860730
uuucuagcuaacugaucca

SEQ ID NO: 860732 - RNA, 19 nt, Artificial Sequence
  Description of Artificial Sequence: Synthetic oligonucleotide
  Sense strand starting at position 503 of SEQ ID NO: 588374
aaaggauguugugugacuu

SEQ ID NO: 860733 - RNA, 19 nt, Artificial Sequence
  Description of Artificial Sequence: Synthetic oligonucleotide
  Antisense strand to SEQ ID NO: 860732
aagucacacaacauccuuu

SEQ ID NO: 860734 - RNA, 19 nt, Artificial Sequence
  Description of Artificial Sequence: Synthetic oligonucleotide
  Sense strand starting at position 504 of SEQ ID NO: 588374
aaggauguugugugacuua

SEQ ID NO: 860735 - RNA, 19 nt, Artificial Sequence
  Description of Artificial Sequence: Synthetic oligonucleotide
  Antisense strand to SEQ ID NO: 860734
uaagucacacaacauccuu

SEQ ID NO: 860736 - RNA, 19 nt, Artificial Sequence
  Description of Artificial Sequence: Synthetic oligonucleotide
  Sense strand starting at position 507 of SEQ ID NO: 588374
gauguugugugacuuacaa

SEQ ID NO: 860737 - RNA, 19 nt, Artificial Sequence
  Description of Artificial Sequence: Synthetic oligonucleotide
  Antisense strand to SEQ ID NO: 860736
uuguaagucacacaacauc

SEQ ID NO: 860738 - RNA, 19 nt, Artificial Sequence
  Description of Artificial Sequence: Synthetic oligonucleotide
  Sense strand starting at position 631 of SEQ ID NO: 588374
aggagaacuucuuagaaau

SEQ ID NO: 860739 - RNA, 19 nt, Artificial Sequence
  Description of Artificial Sequence: Synthetic oligonucleotide
  Antisense strand to SEQ ID NO: 860738
auuucuaagaaguucuccu

SEQ ID NO: 860740 - RNA, 19 nt, Artificial Sequence
  Description of Artificial Sequence: Synthetic oligonucleotide
  Sense strand starting at position 661 of SEQ ID NO: 588374
ggaccugucccagagcuau

SEQ ID NO: 860741 - RNA, 19 nt, Artificial Sequence
  Description of Artificial Sequence: Synthetic oligonucleotide
  Antisense strand to SEQ ID NO: 860740
auagcucugggacaggucc

SEQ ID NO: 860742 - RNA, 19 nt, Artificial Sequence
  Description of Artificial Sequence: Synthetic oligonucleotide
  Sense strand starting at position 1240 of SEQ ID NO: 588374
gauggaaucagguguacac

SEQ ID NO: 860743 - RNA, 19 nt, Artificial Sequence
  Description of Artificial Sequence: Synthetic oligonucleotide
  Antisense strand to SEQ ID NO: 860742
guguacaccugauuccauc

SEQ ID NO: 860744 - RNA, 19 nt, Artificial Sequence
  Description of Artificial Sequence: Synthetic oligonucleotide
  Sense strand starting at position 1365 of SEQ ID NO: 588374
gagagaggcgcucagacau

SEQ ID NO: 860745 - RNA, 19 nt, Artificial Sequence
  Description of Artificial Sequence: Synthetic oligonucleotide
  Antisense strand to SEQ ID NO: 860744
augucugagcgccucucuc

SEQ ID NO: 860746 - RNA, 19 nt, Artificial Sequence
  Description of Artificial Sequence: Synthetic oligonucleotide
  Sense strand starting at position 1891 of SEQ ID NO: 588374
gggugaaucgcggaaaccu

SEQ ID NO: 860747 - RNA, 19 nt, Artificial Sequence
  Description of Artificial Sequence: Synthetic oligonucleotide
  Antisense strand to SEQ ID NO: 860746
agguuuccgcgauucaccc

SEQ ID NO: 860748 - RNA, 19 nt, Artificial Sequence
  Description of Artificial Sequence: Synthetic oligonucleotide
  Sense strand starting at position 2155 of SEQ ID NO: 588374
gagagaaagcuaugacugu

SEQ ID NO: 860749 - RNA, 19 nt, Artificial Sequence
  Description of Artificial Sequence: Synthetic oligonucleotide
  Antisense strand to SEQ ID NO: 860748
acagucauagcuuucucuc

SEQ ID NO: 860750 - RNA, 19 nt, Artificial Sequence
  Description of Artificial Sequence: Synthetic oligonucleotide
  Sense strand starting at position 2434 of SEQ ID NO: 588374
ccaggccucuucucaagau

SEQ ID NO: 860751 - RNA, 19 nt, Artificial Sequence
  Description of Artificial Sequence: Synthetic oligonucleotide
  Antisense strand to SEQ ID NO: 860750
aucuugagaagaggccugg

SEQ ID NO: 860752 - RNA, 19 nt, Artificial Sequence
  Description of Artificial Sequence: Synthetic oligonucleotide
  Sense strand starting at position 2454 of SEQ ID NO: 588374
ccuagaauucgagagcuau

SEQ ID NO: 860753 - RNA, 19 nt, Artificial Sequence
  Description of Artificial Sequence: Synthetic oligonucleotide
  Antisense strand to SEQ ID NO: 860752
auagcucucgaauucuagg

SEQ ID NO: 860754 - RNA, 19 nt, Artificial Sequence
  Description of Artificial Sequence: Synthetic oligonucleotide
  Sense strand starting at position 2462 of SEQ ID NO: 588374
ucgagagcuauugaguauu

SEQ ID NO: 860755 - RNA, 19 nt, Artificial Sequence
  Description of Artificial Sequence: Synthetic oligonucleotide
  Antisense strand to SEQ ID NO: 860754
aauacucaauagcucucga

SEQ ID NO: 860756 - RNA, 19 nt, Artificial Sequence
  Description of Artificial Sequence: Synthetic oligonucleotide
  Sense strand starting at position 2505 of SEQ ID NO: 588374
cccggaaguuucccggaaa

SEQ ID NO: 860757 - RNA, 19 nt, Artificial Sequence
  Description of Artificial Sequence: Synthetic oligonucleotide
  Antisense strand to SEQ ID NO: 860756
uuuccgggaaacuuccggg

SEQ ID NO: 860758 - RNA, 19 nt, Artificial Sequence
  Description of Artificial Sequence: Synthetic oligonucleotide
  Sense strand starting at position 2533 of SEQ ID NO: 588374
gacacagaguccucggcua

SEQ ID NO: 860759 - RNA, 19 nt, Artificial Sequence
  Description of Artificial Sequence: Synthetic oligonucleotide
  Antisense strand to SEQ ID NO: 860758
uagccgaggacucuguguc

SEQ ID NO: 860760 - RNA, 19 nt, Artificial Sequence
  Description of Artificial Sequence: Synthetic oligonucleotide
  Sense strand starting at position 2954 of SEQ ID NO: 588374
cgguuuccucaccgggaga

SEQ ID NO: 860761 - RNA, 19 nt, Artificial Sequence
  Description of Artificial Sequence: Synthetic oligonucleotide
  Antisense strand to SEQ ID NO: 860760
ucucccggugaggaaaccg

SEQ ID NO: 860762 - RNA, 19 nt, Artificial Sequence
  Description of Artificial Sequence: Synthetic oligonucleotide
  Sense strand starting at position 3118 of SEQ ID NO: 588374
ccaagugagguuugacuuu

SEQ ID NO: 860763 - RNA, 19 nt, Artificial Sequence
  Description of Artificial Sequence: Synthetic oligonucleotide
  Antisense strand to SEQ ID NO: 860762
aaagucaaaccucacuugg

SEQ ID NO: 860764 - RNA, 19 nt, Artificial Sequence
  Description of Artificial Sequence: Synthetic oligonucleotide
  Sense strand starting at position 3124 of SEQ ID NO: 588374
gagguuugacuuugacuag

SEQ ID NO: 860765 - RNA, 19 nt, Artificial Sequence
  Description of Artificial Sequence: Synthetic oligonucleotide
  Antisense strand to SEQ ID NO: 860764
cuagucaaagucaaaccuc

SEQ ID NO: 860766 - RNA, 19 nt, Artificial Sequence
  Description of Artificial Sequence: Synthetic oligonucleotide
  Sense strand starting at position 3169 of SEQ ID NO: 588374
agaagagaggcauggucua

SEQ ID NO: 860767 - RNA, 19 nt, Artificial Sequence
  Description of Artificial Sequence: Synthetic oligonucleotide
  Antisense strand to SEQ ID NO: 860766
uagaccaugccucucuucu

SEQ ID NO: 860768 - RNA, 19 nt, Artificial Sequence
  Description of Artificial Sequence: Synthetic oligonucleotide
  Sense strand starting at position 3233 of SEQ ID NO: 588374
gacagugcccuccagguua

SEQ ID NO: 860769 - RNA, 19 nt, Artificial Sequence
  Description of Artificial Sequence: Synthetic oligonucleotide
  Antisense strand to SEQ ID NO: 860768
uaaccuggagggcacuguc

SEQ ID NO: 860770 - RNA, 19 nt, Artificial Sequence
  Description of Artificial Sequence: Synthetic oligonucleotide
  Sense strand starting at position 3258 of SEQ ID NO: 588374
gauagugagccagguguua

SEQ ID NO: 860771 - RNA, 19 nt, Artificial Sequence
  Description of Artificial Sequence: Synthetic oligonucleotide
  Antisense strand to SEQ ID NO: 860770
uaacaccuggcucacuauc

SEQ ID NO: 860772 - RNA, 19 nt, Artificial Sequence
  Description of Artificial Sequence: Synthetic oligonucleotide
  Sense strand starting at position 3322 of SEQ ID NO: 588374
augggauucguugacagau

SEQ ID NO: 860773 - RNA, 19 nt, Artificial Sequence
  Description of Artificial Sequence: Synthetic oligonucleotide
  Antisense strand to SEQ ID NO: 860772
aucugucaacgaaucccau

SEQ ID NO: 860774 - RNA, 19 nt, Artificial Sequence
  Description of Artificial Sequence: Synthetic oligonucleotide
  Sense strand starting at position 3328 of SEQ ID NO: 588374
uucguugacagaugagaua

SEQ ID NO: 860775 - RNA, 19 nt, Artificial Sequence
  Description of Artificial Sequence: Synthetic oligonucleotide
  Antisense strand to SEQ ID NO: 860774
uaucucaucugucaacgaa

SEQ ID NO: 860776 - RNA, 19 nt, Artificial Sequence
  Description of Artificial Sequence: Synthetic oligonucleotide
  Sense strand starting at position 3357 of SEQ ID NO: 588374
aggagucucggaugauucu

SEQ ID NO: 860777 - RNA, 19 nt, Artificial Sequence
  Description of Artificial Sequence: Synthetic oligonucleotide
  Antisense strand to SEQ ID NO: 860776
agaaucauccgagacuccu

SEQ ID NO: 860778 - RNA, 19 nt, Artificial Sequence
  Description of Artificial Sequence: Synthetic oligonucleotide
  Sense strand starting at position 3358 of SEQ ID NO: 588374
ggagucucggaugauucua

SEQ ID NO: 860779 - RNA, 19 nt, Artificial Sequence
  Description of Artificial Sequence: Synthetic oligonucleotide
  Antisense strand to SEQ ID NO: 860778
uagaaucauccgagacucc

SEQ ID NO: 860780 - RNA, 19 nt, Artificial Sequence
  Description of Artificial Sequence: Synthetic oligonucleotide
  Sense strand starting at position 3377 of SEQ ID NO: 588374
agguuugaggccugagaaa

SEQ ID NO: 860781 - RNA, 19 nt, Artificial Sequence
  Description of Artificial Sequence: Synthetic oligonucleotide
  Antisense strand to SEQ ID NO: 860780
uuucucaggccucaaaccu

SEQ ID NO: 860782 - RNA, 19 nt, Artificial Sequence
  Description of Artificial Sequence: Synthetic oligonucleotide
  Sense strand starting at position 3408 of SEQ ID NO: 588374
aguuguccucgacugcgau

SEQ ID NO: 860783 - RNA, 19 nt, Artificial Sequence
  Description of Artificial Sequence: Synthetic oligonucleotide
  Antisense strand to SEQ ID NO: 860782
aucgcagucgaggacaacu

SEQ ID NO: 860784 - RNA, 19 nt, Artificial Sequence
  Description of Artificial Sequence: Synthetic oligonucleotide
  Sense strand starting at position 3466 of SEQ ID NO: 588374
acaauuaggagcuaagugu

SEQ ID NO: 860785 - RNA, 19 nt, Artificial Sequence
  Description of Artificial Sequence: Synthetic oligonucleotide
  Antisense strand to SEQ ID NO: 860784
acacuuagcuccuaauugu

SEQ ID NO: 860786 - RNA, 19 nt, Artificial Sequence
  Description of Artificial Sequence: Synthetic oligonucleotide
  Sense strand starting at position 3485 of SEQ ID NO: 588374
gggaccugcuaaguuugaa

SEQ ID NO: 860787 - RNA, 19 nt, Artificial Sequence
  Description of Artificial Sequence: Synthetic oligonucleotide
  Antisense strand to SEQ ID NO: 860786
uucaaacuuagcagguccc

SEQ ID NO: 860788 - RNA, 19 nt, Artificial Sequence
  Description of Artificial Sequence: Synthetic oligonucleotide
  Sense strand starting at position 3563 of SEQ ID NO: 588374
aggagagauccaugcugca

SEQ ID NO: 860789 - RNA, 19 nt, Artificial Sequence
  Description of Artificial Sequence: Synthetic oligonucleotide
  Antisense strand to SEQ ID NO: 860788
ugcagcauggaucucuccu

SEQ ID NO: 860790 - RNA, 19 nt, Artificial Sequence
  Description of Artificial Sequence: Synthetic oligonucleotide
  Sense strand starting at position 3570 of SEQ ID NO: 588374
auccaugcugcagguauaa

SEQ ID NO: 860791 - RNA, 19 nt, Artificial Sequence
  Description of Artificial Sequence: Synthetic oligonucleotide
  Antisense strand to SEQ ID NO: 860790
uuauaccugcagcauggau

SEQ ID NO: 860792 - RNA, 19 nt, Artificial Sequence
  Description of Artificial Sequence: Synthetic oligonucleotide
  Sense strand starting at position 3735 of SEQ ID NO: 588374
cuggauucaccguggagac

SEQ ID NO: 860793 - RNA, 19 nt, Artificial Sequence
  Description of Artificial Sequence: Synthetic oligonucleotide
  Antisense strand to SEQ ID NO: 860792
gucuccacggugaauccag

SEQ ID NO: 860794 - RNA, 19 nt, Artificial Sequence
  Description of Artificial Sequence: Synthetic oligonucleotide
  Sense strand starting at position 3864 of SEQ ID NO: 588374
ggacuuagaugccuggcaa

SEQ ID NO: 860795 - RNA, 19 nt, Artificial Sequence
  Description of Artificial Sequence: Synthetic oligonucleotide
  Antisense strand to SEQ ID NO: 860794
uugccaggcaucuaagucc

SEQ ID NO: 860796 - RNA, 19 nt, Artificial Sequence
  Description of Artificial Sequence: Synthetic oligonucleotide
  Sense strand starting at position 3865 of SEQ ID NO: 588374
gacuuagaugccuggcaaa

SEQ ID NO: 860797 - RNA, 19 nt, Artificial Sequence
  Description of Artificial Sequence: Synthetic oligonucleotide
  Antisense strand to SEQ ID NO: 860796
uuugccaggcaucuaaguc

SEQ ID NO: 860798 - RNA, 19 nt, Artificial Sequence
  Description of Artificial Sequence: Synthetic oligonucleotide
  Sense strand starting at position 3884 of SEQ ID NO: 588374
gagaguugauccuuuaagg

SEQ ID NO: 860799 - RNA, 19 nt, Artificial Sequence
  Description of Artificial Sequence: Synthetic oligonucleotide
  Antisense strand to SEQ ID NO: 860798
ccuuaaaggaucaacucuc

SEQ ID NO: 860800 - RNA, 19 nt, Artificial Sequence
  Description of Artificial Sequence: Synthetic oligonucleotide
  Sense strand starting at position 3895 of SEQ ID NO: 588374
cuuuaagggucuuauuuaa

SEQ ID NO: 860801 - RNA, 19 nt, Artificial Sequence
  Description of Artificial Sequence: Synthetic oligonucleotide
  Antisense strand to SEQ ID NO: 860800
uuaaauaagacccuuaaag

SEQ ID NO: 860802 - RNA, 19 nt, Artificial Sequence
  Description of Artificial Sequence: Synthetic oligonucleotide
  Sense strand starting at position 3914 of SEQ ID NO: 588374
cucuuuguuccucaggcaa

SEQ ID NO: 860803 - RNA, 19 nt, Artificial Sequence
  Description of Artificial Sequence: Synthetic oligonucleotide
  Antisense strand to SEQ ID NO: 860802
uugccugaggaacaaagag

SEQ ID NO: 860804 - RNA, 19 nt, Artificial Sequence
  Description of Artificial Sequence: Synthetic oligonucleotide
  Sense strand starting at position 23 of SEQ ID NO: 588375
aggagaacuucuuagaaau

SEQ ID NO: 860805 - RNA, 19 nt, Artificial Sequence
  Description of Artificial Sequence: Synthetic oligonucleotide
  Antisense strand to SEQ ID NO: 860804
auuucuaagaaguucuccu

SEQ ID NO: 860806 - RNA, 19 nt, Artificial Sequence
  Description of Artificial Sequence: Synthetic oligonucleotide
  Sense strand starting at position 53 of SEQ ID NO: 588375
ggaccugucccagagcuau

SEQ ID NO: 860807 - RNA, 19 nt, Artificial Sequence
  Description of Artificial Sequence: Synthetic oligonucleotide
  Antisense strand to SEQ ID NO: 860806
auagcucugggacaggucc

SEQ ID NO: 860808 - RNA, 19 nt, Artificial Sequence
  Description of Artificial Sequence: Synthetic oligonucleotide
  Sense strand starting at position 632 of SEQ ID NO: 588375
gauggaaucagguguacac

SEQ ID NO: 860809 - RNA, 19 nt, Artificial Sequence
  Description of Artificial Sequence: Synthetic oligonucleotide
  Antisense strand to SEQ ID NO: 860808
guguacaccugauuccauc

SEQ ID NO: 860810 - RNA, 19 nt, Artificial Sequence
  Description of Artificial Sequence: Synthetic oligonucleotide
  Sense strand starting at position 757 of SEQ ID NO: 588375
gagagaggcgcucagacau

SEQ ID NO: 860811 - RNA, 19 nt, Artificial Sequence
  Description of Artificial Sequence: Synthetic oligonucleotide
  Antisense strand to SEQ ID NO: 860810
augucugagcgccucucuc

SEQ ID NO: 860812 - RNA, 19 nt, Artificial Sequence
  Description of Artificial Sequence: Synthetic oligonucleotide
  Sense strand starting at position 1283 of SEQ ID NO: 588375
gggugaaucgcggaaaccu

SEQ ID NO: 860813 - RNA, 19 nt, Artificial Sequence
  Description of Artificial Sequence: Synthetic oligonucleotide
  Antisense strand to SEQ ID NO: 860812
agguuuccgcgauucaccc

SEQ ID NO: 860814 - RNA, 19 nt, Artificial Sequence
  Description of Artificial Sequence: Synthetic oligonucleotide
  Sense strand starting at position 1547 of SEQ ID NO: 588375
gagagaaagcuaugacugu

SEQ ID NO: 860815 - RNA, 19 nt, Artificial Sequence
  Description of Artificial Sequence: Synthetic oligonucleotide
  Antisense strand to SEQ ID NO: 860814
acagucauagcuuucucuc

SEQ ID NO: 860816 - RNA, 19 nt, Artificial Sequence
  Description of Artificial Sequence: Synthetic oligonucleotide
  Sense strand starting at position 1826 of SEQ ID NO: 588375
ccaggccucuucucaagau

SEQ ID NO: 860817 - RNA, 19 nt, Artificial Sequence
  Description of Artificial Sequence: Synthetic oligonucleotide
  Antisense strand to SEQ ID NO: 860816
aucuugagaagaggccugg

SEQ ID NO: 860818 - RNA, 19 nt, Artificial Sequence
  Description of Artificial Sequence: Synthetic oligonucleotide
  Sense strand starting at position 1846 of SEQ ID NO: 588375
ccuagaauucgagagcuau

SEQ ID NO: 860819 - RNA, 19 nt, Artificial Sequence
  Description of Artificial Sequence: Synthetic oligonucleotide
  Antisense strand to SEQ ID NO: 860818
auagcucucgaauucuagg

SEQ ID NO: 860820 - RNA, 19 nt, Artificial Sequence
  Description of Artificial Sequence: Synthetic oligonucleotide
  Sense strand starting at position 1854 of SEQ ID NO: 588375
ucgagagcuauugaguauu

SEQ ID NO: 860821 - RNA, 19 nt, Artificial Sequence
  Description of Artificial Sequence: Synthetic oligonucleotide
  Antisense strand to SEQ ID NO: 860820
aauacucaauagcucucga

SEQ ID NO: 860822 - RNA, 19 nt, Artificial Sequence
  Description of Artificial Sequence: Synthetic oligonucleotide
  Sense strand starting at position 1885 of SEQ ID NO: 588375
augugagucucgcccggaa

SEQ ID NO: 860823 - RNA, 19 nt, Artificial Sequence
  Description of Artificial Sequence: Synthetic oligonucleotide
  Antisense strand to SEQ ID NO: 860822
uuccgggcgagacucacau

SEQ ID NO: 860824 - RNA, 19 nt, Artificial Sequence
  Description of Artificial Sequence: Synthetic oligonucleotide
  Sense strand starting at position 1889 of SEQ ID NO: 588375
gagucucgcccggaaguuu

SEQ ID NO: 860825 - RNA, 19 nt, Artificial Sequence
  Description of Artificial Sequence: Synthetic oligonucleotide
  Antisense strand to SEQ ID NO: 860824
aaacuuccgggcgagacuc

SEQ ID NO: 860826 - RNA, 19 nt, Artificial Sequence
  Description of Artificial Sequence: Synthetic oligonucleotide
  Sense strand starting at position 1897 of SEQ ID NO: 588375
cccggaaguuucccggaaa

SEQ ID NO: 860827 - RNA, 19 nt, Artificial Sequence
  Description of Artificial Sequence: Synthetic oligonucleotide
  Antisense strand to SEQ ID NO: 860826
uuuccgggaaacuuccggg

SEQ ID NO: 860828 - RNA, 19 nt, Artificial Sequence
  Description of Artificial Sequence: Synthetic oligonucleotide
  Sense strand starting at position 1925 of SEQ ID NO: 588375
gacacagaguccucggcua

SEQ ID NO: 860829 - RNA, 19 nt, Artificial Sequence
  Description of Artificial Sequence: Synthetic oligonucleotide
  Antisense strand to SEQ ID NO: 860828
uagccgaggacucuguguc

SEQ ID NO: 860830 - RNA, 19 nt, Artificial Sequence
  Description of Artificial Sequence: Synthetic oligonucleotide
  Sense strand starting at position 2002 of SEQ ID NO: 588375
cugcaauugaugugcugau

SEQ ID NO: 860831 - RNA, 19 nt, Artificial Sequence
  Description of Artificial Sequence: Synthetic oligonucleotide
  Antisense strand to SEQ ID NO: 860830
aucagcacaucaauugcag

SEQ ID NO: 860832 - RNA, 19 nt, Artificial Sequence
  Description of Artificial Sequence: Synthetic oligonucleotide
  Sense strand starting at position 2003 of SEQ ID NO: 588375
ugcaauugaugugcugauu

SEQ ID NO: 860833 - RNA, 19 nt, Artificial Sequence
  Description of Artificial Sequence: Synthetic oligonucleotide
  Antisense strand to SEQ ID NO: 860832
aaucagcacaucaauugca

SEQ ID NO: 860834 - RNA, 19 nt, Artificial Sequence
  Description of Artificial Sequence: Synthetic oligonucleotide
  Sense strand starting at position 2346 of SEQ ID NO: 588375
cgguuuccucaccgggaga

SEQ ID NO: 860835 - RNA, 19 nt, Artificial Sequence
  Description of Artificial Sequence: Synthetic oligonucleotide
  Antisense strand to SEQ ID NO: 860834
ucucccggugaggaaaccg

SEQ ID NO: 860836 - RNA, 19 nt, Artificial Sequence
  Description of Artificial Sequence: Synthetic oligonucleotide
  Sense strand starting at position 2510 of SEQ ID NO: 588375
ccaagugagguuugacuuu

SEQ ID NO: 860837 - RNA, 19 nt, Artificial Sequence
  Description of Artificial Sequence: Synthetic oligonucleotide
  Antisense strand to SEQ ID NO: 860836
aaagucaaaccucacuugg

SEQ ID NO: 860838 - RNA, 19 nt, Artificial Sequence
  Description of Artificial Sequence: Synthetic oligonucleotide
  Sense strand starting at position 2516 of SEQ ID NO: 588375
gagguuugacuuugacuag

SEQ ID NO: 860839 - RNA, 19 nt, Artificial Sequence
  Description of Artificial Sequence: Synthetic oligonucleotide
  Antisense strand to SEQ ID NO: 860838
cuagucaaagucaaaccuc

SEQ ID NO: 860840 - RNA, 19 nt, Artificial Sequence
  Description of Artificial Sequence: Synthetic oligonucleotide
  Sense strand starting at position 2561 of SEQ ID NO: 588375
agaagagaggcauggucua

SEQ ID NO: 860841 - RNA, 19 nt, Artificial Sequence
  Description of Artificial Sequence: Synthetic oligonucleotide
  Antisense strand to SEQ ID NO: 860840
uagaccaugccucucuucu

SEQ ID NO: 860842 - RNA, 19 nt, Artificial Sequence
  Description of Artificial Sequence: Synthetic oligonucleotide
  Sense strand starting at position 2606 of SEQ ID NO: 588375
gugugaagaucagacugaa

SEQ ID NO: 860843 - RNA, 19 nt, Artificial Sequence
  Description of Artificial Sequence: Synthetic oligonucleotide
  Antisense strand to SEQ ID NO: 860842
uucagucugaucuucacac

SEQ ID NO: 860844 - RNA, 19 nt, Artificial Sequence
  Description of Artificial Sequence: Synthetic oligonucleotide
  Sense strand starting at position 2625 of SEQ ID NO: 588375
gacagugcccuccagguua

SEQ ID NO: 860845 - RNA, 19 nt, Artificial Sequence
  Description of Artificial Sequence: Synthetic oligonucleotide
  Antisense strand to SEQ ID NO: 860844
uaaccuggagggcacuguc

SEQ ID NO: 860846 - RNA, 19 nt, Artificial Sequence
  Description of Artificial Sequence: Synthetic oligonucleotide
  Sense strand starting at position 2650 of SEQ ID NO: 588375
gauagugagccagguguua

SEQ ID NO: 860847 - RNA, 19 nt, Artificial Sequence
  Description of Artificial Sequence: Synthetic oligonucleotide
  Antisense strand to SEQ ID NO: 860846
uaacaccuggcucacuauc

SEQ ID NO: 860848 - RNA, 19 nt, Artificial Sequence
  Description of Artificial Sequence: Synthetic oligonucleotide
  Sense strand starting at position 2714 of SEQ ID NO: 588375
augggauucguugacagau

SEQ ID NO: 860849 - RNA, 19 nt, Artificial Sequence
  Description of Artificial Sequence: Synthetic oligonucleotide
  Antisense strand to SEQ ID NO: 860848
aucugucaacgaaucccau

SEQ ID NO: 860850 - RNA, 19 nt, Artificial Sequence
  Description of Artificial Sequence: Synthetic oligonucleotide
  Sense strand starting at position 2720 of SEQ ID NO: 588375
uucguugacagaugagaua

SEQ ID NO: 860851 - RNA, 19 nt, Artificial Sequence
  Description of Artificial Sequence: Synthetic oligonucleotide
  Antisense strand to SEQ ID NO: 860850
uaucucaucugucaacgaa

SEQ ID NO: 860852 - RNA, 19 nt, Artificial Sequence
  Description of Artificial Sequence: Synthetic oligonucleotide
  Sense strand starting at position 2749 of SEQ ID NO: 588375
aggagucucggaugauucu

SEQ ID NO: 860853 - RNA, 19 nt, Artificial Sequence
  Description of Artificial Sequence: Synthetic oligonucleotide
  Antisense strand to SEQ ID NO: 860852
agaaucauccgagacuccu

SEQ ID NO: 860854 - RNA, 19 nt, Artificial Sequence
  Description of Artificial Sequence: Synthetic oligonucleotide
  Sense strand starting at position 2750 of SEQ ID NO: 588375
ggagucucggaugauucua

SEQ ID NO: 860855 - RNA, 19 nt, Artificial Sequence
  Description of Artificial Sequence: Synthetic oligonucleotide
  Antisense strand to SEQ ID NO: 860854
uagaaucauccgagacucc

SEQ ID NO: 860856 - RNA, 19 nt, Artificial Sequence
  Description of Artificial Sequence: Synthetic oligonucleotide
  Sense strand starting at position 2769 of SEQ ID NO: 588375
agguuugaggccugagaaa

SEQ ID NO: 860857 - RNA, 19 nt, Artificial Sequence
  Description of Artificial Sequence: Synthetic oligonucleotide
  Antisense strand to SEQ ID NO: 860856
uuucucaggccucaaaccu

SEQ ID NO: 860858 - RNA, 19 nt, Artificial Sequence
  Description of Artificial Sequence: Synthetic oligonucleotide
  Sense strand starting at position 2800 of SEQ ID NO: 588375
aguuguccucgacugcgau

SEQ ID NO: 860859 - RNA, 19 nt, Artificial Sequence
  Description of Artificial Sequence: Synthetic oligonucleotide
  Antisense strand to SEQ ID NO: 860858
aucgcagucgaggacaacu

SEQ ID NO: 860860 - RNA, 19 nt, Artificial Sequence
  Description of Artificial Sequence: Synthetic oligonucleotide
  Sense strand starting at position 2858 of SEQ ID NO: 588375
acaauuaggagcuaagugu

SEQ ID NO: 860861 - RNA, 19 nt, Artificial Sequence
  Description of Artificial Sequence: Synthetic oligonucleotide
  Antisense strand to SEQ ID NO: 860860
acacuuagcuccuaauugu

SEQ ID NO: 860862 - RNA, 19 nt, Artificial Sequence
  Description of Artificial Sequence: Synthetic oligonucleotide
  Sense strand starting at position 2877 of SEQ ID NO: 588375
gggaccugcuaaguuugaa

SEQ ID NO: 860863 - RNA, 19 nt, Artificial Sequence
  Description of Artificial Sequence: Synthetic oligonucleotide
  Antisense strand to SEQ ID NO: 860862
uucaaacuuagcagguccc

SEQ ID NO: 860864 - RNA, 19 nt, Artificial Sequence
  Description of Artificial Sequence: Synthetic oligonucleotide
  Sense strand starting at position 2955 of SEQ ID NO: 588375
aggagagauccaugcugca

SEQ ID NO: 860865 - RNA, 19 nt, Artificial Sequence
  Description of Artificial Sequence: Synthetic oligonucleotide
  Antisense strand to SEQ ID NO: 860864
ugcagcauggaucucuccu

SEQ ID NO: 860866 - RNA, 19 nt, Artificial Sequence
  Description of Artificial Sequence: Synthetic oligonucleotide
  Sense strand starting at position 2962 of SEQ ID NO: 588375
auccaugcugcagguauaa

SEQ ID NO: 860867 - RNA, 19 nt, Artificial Sequence
  Description of Artificial Sequence: Synthetic oligonucleotide
  Antisense strand to SEQ ID NO: 860866
uuauaccugcagcauggau

SEQ ID NO: 860868 - RNA, 19 nt, Artificial Sequence
  Description of Artificial Sequence: Synthetic oligonucleotide
  Sense strand starting at position 3127 of SEQ ID NO: 588375
cuggauucaccguggagac

SEQ ID NO: 860869 - RNA, 19 nt, Artificial Sequence
  Description of Artificial Sequence: Synthetic oligonucleotide
  Antisense strand to SEQ ID NO: 860868
gucuccacggugaauccag

SEQ ID NO: 860870 - RNA, 19 nt, Artificial Sequence
  Description of Artificial Sequence: Synthetic oligonucleotide
  Sense strand starting at position 3227 of SEQ ID NO: 588375
cagcgacugucuccucaaa

SEQ ID NO: 860871 - RNA, 19 nt, Artificial Sequence
  Description of Artificial Sequence: Synthetic oligonucleotide
  Antisense strand to SEQ ID NO: 860870
uuugaggagacagucgcug

SEQ ID NO: 860872 - RNA, 19 nt, Artificial Sequence
  Description of Artificial Sequence: Synthetic oligonucleotide
  Sense strand starting at position 3256 of SEQ ID NO: 588375
ggacuuagaugccuggcaa

SEQ ID NO: 860873 - RNA, 19 nt, Artificial Sequence
  Description of Artificial Sequence: Synthetic oligonucleotide
  Antisense strand to SEQ ID NO: 860872
uugccaggcaucuaagucc

SEQ ID NO: 860874 - RNA, 19 nt, Artificial Sequence
  Description of Artificial Sequence: Synthetic oligonucleotide
  Sense strand starting at position 3257 of SEQ ID NO: 588375
gacuuagaugccuggcaaa

SEQ ID NO: 860875 - RNA, 19 nt, Artificial Sequence
  Description of Artificial Sequence: Synthetic oligonucleotide
  Antisense strand to SEQ ID NO: 860874
uuugccaggcaucuaaguc

SEQ ID NO: 860876 - RNA, 19 nt, Artificial Sequence
  Description of Artificial Sequence: Synthetic oligonucleotide
  Sense strand starting at position 3276 of SEQ ID NO: 588375
gagaguugauccuuuaagg

SEQ ID NO: 860877 - RNA, 19 nt, Artificial Sequence
  Description of Artificial Sequence: Synthetic oligonucleotide
  Antisense strand to SEQ ID NO: 860876
ccuuaaaggaucaacucuc

SEQ ID NO: 860878 - RNA, 19 nt, Artificial Sequence
  Description of Artificial Sequence: Synthetic oligonucleotide
  Sense strand starting at position 3287 of SEQ ID NO: 588375
cuuuaagggucuuauuuaa

SEQ ID NO: 860879 - RNA, 19 nt, Artificial Sequence
  Description of Artificial Sequence: Synthetic oligonucleotide
  Antisense strand to SEQ ID NO: 860878
uuaaauaagacccuuaaag

SEQ ID NO: 860880 - RNA, 19 nt, Artificial Sequence
  Description of Artificial Sequence: Synthetic oligonucleotide
  Sense strand starting at position 3305 of SEQ ID NO: 588375
acucuuuguuccucaggca

SEQ ID NO: 860881 - RNA, 19 nt, Artificial Sequence
  Description of Artificial Sequence: Synthetic oligonucleotide
  Antisense strand to SEQ ID NO: 860880
ugccugaggaacaaagagu

SEQ ID NO: 860882 - RNA, 19 nt, Artificial Sequence
  Description of Artificial Sequence: Synthetic oligonucleotide
  Sense strand starting at position 3306 of SEQ ID NO: 588375
cucuuuguuccucaggcaa

SEQ ID NO: 860883 - RNA, 19 nt, Artificial Sequence
  Description of Artificial Sequence: Synthetic oligonucleotide
  Antisense strand to SEQ ID NO: 860882
uugccugaggaacaaagag

SEQ ID NO: 860884 - RNA, 19 nt, Artificial Sequence
  Description of Artificial Sequence: Synthetic oligonucleotide
  Sense strand starting at position 10 of SEQ ID NO: 588376
ccauuaucacacgguagga

SEQ ID NO: 860885 - RNA, 19 nt, Artificial Sequence
  Description of Artificial Sequence: Synthetic oligonucleotide
  Antisense strand to SEQ ID NO: 860884
uccuaccgugugauaaugg

SEQ ID NO: 860886 - RNA, 19 nt, Artificial Sequence
  Description of Artificial Sequence: Synthetic oligonucleotide
  Sense strand starting at position 92 of SEQ ID NO: 588376
ccgccauaaagucagaguu

SEQ ID NO: 860887 - RNA, 19 nt, Artificial Sequence
  Description of Artificial Sequence: Synthetic oligonucleotide
  Antisense strand to SEQ ID NO: 860886
aacucugacuuuauggcgg

SEQ ID NO: 860888 - RNA, 19 nt, Artificial Sequence
  Description of Artificial Sequence: Synthetic oligonucleotide
  Sense strand starting at position 181 of SEQ ID NO: 588376
cccaauuuauguggaugaa

SEQ ID NO: 860889 - RNA, 19 nt, Artificial Sequence
  Description of Artificial Sequence: Synthetic oligonucleotide
  Antisense strand to SEQ ID NO: 860888
uucauccacauaaauuggg

SEQ ID NO: 860890 - RNA, 19 nt, Artificial Sequence
  Description of Artificial Sequence: Synthetic oligonucleotide
  Sense strand starting at position 256 of SEQ ID NO: 588376
gaggcaaagucccugucua

SEQ ID NO: 860891 - RNA, 19 nt, Artificial Sequence
  Description of Artificial Sequence: Synthetic oligonucleotide
  Antisense strand to SEQ ID NO: 860890
uagacagggacuuugccuc

SEQ ID NO: 860892 - RNA, 19 nt, Artificial Sequence
  Description of Artificial Sequence: Synthetic oligonucleotide
  Sense strand starting at position 366 of SEQ ID NO: 588376
guuauugccaaaugaggua

SEQ ID NO: 860893 - RNA, 19 nt, Artificial Sequence
  Description of Artificial Sequence: Synthetic oligonucleotide
  Antisense strand to SEQ ID NO: 860892
uaccucauuuggcaauaac

SEQ ID NO: 860894 - RNA, 19 nt, Artificial Sequence
  Description of Artificial Sequence: Synthetic oligonucleotide
  Sense strand starting at position 423 of SEQ ID NO: 588376
aggauaaugcaccguuaac

SEQ ID NO: 860895 - RNA, 19 nt, Artificial Sequence
  Description of Artificial Sequence: Synthetic oligonucleotide
  Antisense strand to SEQ ID NO: 860894
guuaacggugcauuauccu

SEQ ID NO: 860896 - RNA, 19 nt, Artificial Sequence
  Description of Artificial Sequence: Synthetic oligonucleotide
  Sense strand starting at position 475 of SEQ ID NO: 588376
aaauacagucuguggugau

SEQ ID NO: 860897 - RNA, 19 nt, Artificial Sequence
  Description of Artificial Sequence: Synthetic oligonucleotide
  Antisense strand to SEQ ID NO: 860896
aucaccacagacuguauuu

SEQ ID NO: 860898 - RNA, 19 nt, Artificial Sequence
  Description of Artificial Sequence: Synthetic oligonucleotide
  Sense strand starting at position 479 of SEQ ID NO: 588376
acagucuguggugaucaaa

SEQ ID NO: 860899 - RNA, 19 nt, Artificial Sequence
  Description of Artificial Sequence: Synthetic oligonucleotide
  Antisense strand to SEQ ID NO: 860898
uuugaucaccacagacugu

SEQ ID NO: 860900 - RNA, 19 nt, Artificial Sequence
  Description of Artificial Sequence: Synthetic oligonucleotide
  Sense strand starting at position 482 of SEQ ID NO: 588376
gucuguggugaucaaauga

SEQ ID NO: 860901 - RNA, 19 nt, Artificial Sequence
  Description of Artificial Sequence: Synthetic oligonucleotide
  Antisense strand to SEQ ID NO: 860900
ucauuugaucaccacagac

SEQ ID NO: 860902 - RNA, 19 nt, Artificial Sequence
  Description of Artificial Sequence: Synthetic oligonucleotide
  Sense strand starting at position 545 of SEQ ID NO: 588376
gcacuuaauugcucagagu

SEQ ID NO: 860903 - RNA, 19 nt, Artificial Sequence
  Description of Artificial Sequence: Synthetic oligonucleotide
  Antisense strand to SEQ ID NO: 860902
acucugagcaauuaagugc

SEQ ID NO: 860904 - RNA, 19 nt, Artificial Sequence
  Description of Artificial Sequence: Synthetic oligonucleotide
  Sense strand starting at position 581 of SEQ ID NO: 588376
ggacuuuguuagcuccuca

SEQ ID NO: 860905 - RNA, 19 nt, Artificial Sequence
  Description of Artificial Sequence: Synthetic oligonucleotide
  Antisense strand to SEQ ID NO: 860904
ugaggagcuaacaaagucc

SEQ ID NO: 860906 - RNA, 19 nt, Artificial Sequence
  Description of Artificial Sequence: Synthetic oligonucleotide
  Sense strand starting at position 1045 of SEQ ID NO: 588376
gaccaucagcaguguaaug

SEQ ID NO: 860907 - RNA, 19 nt, Artificial Sequence
  Description of Artificial Sequence: Synthetic oligonucleotide
  Antisense strand to SEQ ID NO: 860906
cauuacacugcugaugguc

SEQ ID NO: 860908 - RNA, 19 nt, Artificial Sequence
  Description of Artificial Sequence: Synthetic oligonucleotide
  Sense strand starting at position 1073 of SEQ ID NO: 588376
ccucaucuaugcucggaua

SEQ ID NO: 860909 - RNA, 19 nt, Artificial Sequence
  Description of Artificial Sequence: Synthetic oligonucleotide
  Antisense strand to SEQ ID NO: 860908
uauccgagcauagaugagg

SEQ ID NO: 860910 - RNA, 19 nt, Artificial Sequence
  Description of Artificial Sequence: Synthetic oligonucleotide
  Sense strand starting at position 1074 of SEQ ID NO: 588376
cucaucuaugcucggauaa

SEQ ID NO: 860911 - RNA, 19 nt, Artificial Sequence
  Description of Artificial Sequence: Synthetic oligonucleotide
  Antisense strand to SEQ ID NO: 860910
uuauccgagcauagaugag

SEQ ID NO: 860912 - RNA, 19 nt, Artificial Sequence
  Description of Artificial Sequence: Synthetic oligonucleotide
  Sense strand starting at position 1075 of SEQ ID NO: 588376
ucaucuaugcucggauaaa

SEQ ID NO: 860913 - RNA, 19 nt, Artificial Sequence
  Description of Artificial Sequence: Synthetic oligonucleotide
  Antisense strand to SEQ ID NO: 860912
uuuauccgagcauagauga

SEQ ID NO: 860914 - RNA, 19 nt, Artificial Sequence
  Description of Artificial Sequence: Synthetic oligonucleotide
  Sense strand starting at position 1187 of SEQ ID NO: 588376
aagaaagagucacagagaa

SEQ ID NO: 860915 - RNA, 19 nt, Artificial Sequence
  Description of Artificial Sequence: Synthetic oligonucleotide
  Antisense strand to SEQ ID NO: 860914
uucucugugacucuuucuu

SEQ ID NO: 860916 - RNA, 19 nt, Artificial Sequence
  Description of Artificial Sequence: Synthetic oligonucleotide
  Sense strand starting at position 1282 of SEQ ID NO: 588376
uccuaugucguacauaauu

SEQ ID NO: 860917 - RNA, 19 nt, Artificial Sequence
  Description of Artificial Sequence: Synthetic oligonucleotide
  Antisense strand to SEQ ID NO: 860916
aauuauguacgacauagga

SEQ ID NO: 860918 - RNA, 19 nt, Artificial Sequence
  Description of Artificial Sequence: Synthetic oligonucleotide
  Sense strand starting at position 1344 of SEQ ID NO: 588376
ucaugucugcaagaggcau

SEQ ID NO: 860919 - RNA, 19 nt, Artificial Sequence
  Description of Artificial Sequence: Synthetic oligonucleotide
  Antisense strand to SEQ ID NO: 860918
augccucuugcagacauga

SEQ ID NO: 860920 - RNA, 19 nt, Artificial Sequence
  Description of Artificial Sequence: Synthetic oligonucleotide
  Sense strand starting at position 1878 of SEQ ID NO: 588376
gggcuucuguccgucauuu

SEQ ID NO: 860921 - RNA, 19 nt, Artificial Sequence
  Description of Artificial Sequence: Synthetic oligonucleotide
  Antisense strand to SEQ ID NO: 860920
aaaugacggacagaagccc

SEQ ID NO: 860922 - RNA, 19 nt, Artificial Sequence
  Description of Artificial Sequence: Synthetic oligonucleotide
  Sense strand starting at position 2338 of SEQ ID NO: 588376
gcagguuccuuaucuggga

SEQ ID NO: 860923 - RNA, 19 nt, Artificial Sequence
  Description of Artificial Sequence: Synthetic oligonucleotide
  Antisense strand to SEQ ID NO: 860922
ucccagauaaggaaccugc

SEQ ID NO: 860924 - RNA, 19 nt, Artificial Sequence
  Description of Artificial Sequence: Synthetic oligonucleotide
  Sense strand starting at position 2342 of SEQ ID NO: 588376
guuccuuaucugggacgua

SEQ ID NO: 860925 - RNA, 19 nt, Artificial Sequence
  Description of Artificial Sequence: Synthetic oligonucleotide
  Antisense strand to SEQ ID NO: 860924
uacgucccagauaaggaac

SEQ ID NO: 860926 - RNA, 19 nt, Artificial Sequence
  Description of Artificial Sequence: Synthetic oligonucleotide
  Sense strand starting at position 2387 of SEQ ID NO: 588376
ccagaauuccuuuagccag

SEQ ID NO: 860927 - RNA, 19 nt, Artificial Sequence
  Description of Artificial Sequence: Synthetic oligonucleotide
  Antisense strand to SEQ ID NO: 860926
cuggcuaaaggaauucugg

SEQ ID NO: 860928 - RNA, 19 nt, Artificial Sequence
  Description of Artificial Sequence: Synthetic oligonucleotide
  Sense strand starting at position 2411 of SEQ ID NO: 588376
ggaauaaguuaggaaagaa

SEQ ID NO: 860929 - RNA, 19 nt, Artificial Sequence
  Description of Artificial Sequence: Synthetic oligonucleotide
  Antisense strand to SEQ ID NO: 860928
uucuuuccuaacuuauucc

SEQ ID NO: 860930 - RNA, 19 nt, Artificial Sequence
  Description of Artificial Sequence: Synthetic oligonucleotide
  Sense strand starting at position 2451 of SEQ ID NO: 588376
auguaugaccaguggauau

SEQ ID NO: 860931 - RNA, 19 nt, Artificial Sequence
  Description of Artificial Sequence: Synthetic oligonucleotide
  Antisense strand to SEQ ID NO: 860930
auauccacuggucauacau

SEQ ID NO: 860932 - RNA, 19 nt, Artificial Sequence
  Description of Artificial Sequence: Synthetic oligonucleotide
  Sense strand starting at position 2540 of SEQ ID NO: 588376
uugucaauaucucuggaug

SEQ ID NO: 860933 - RNA, 19 nt, Artificial Sequence
  Description of Artificial Sequence: Synthetic oligonucleotide
  Antisense strand to SEQ ID NO: 860932
cauccagagauauugacaa

SEQ ID NO: 860934 - RNA, 19 nt, Artificial Sequence
  Description of Artificial Sequence: Synthetic oligonucleotide
  Sense strand starting at position 2541 of SEQ ID NO: 588376
ugucaauaucucuggaugu

SEQ ID NO: 860935 - RNA, 19 nt, Artificial Sequence
  Description of Artificial Sequence: Synthetic oligonucleotide
  Antisense strand to SEQ ID NO: 860934
acauccagagauauugaca

SEQ ID NO: 860936 - RNA, 19 nt, Artificial Sequence
  Description of Artificial Sequence: Synthetic oligonucleotide
  Sense strand starting at position 2792 of SEQ ID NO: 588376
guugcaugauuugagaaag

SEQ ID NO: 860937 - RNA, 19 nt, Artificial Sequence
  Description of Artificial Sequence: Synthetic oligonucleotide
  Antisense strand to SEQ ID NO: 860936
cuuucucaaaucaugcaac

SEQ ID NO: 860938 - RNA, 19 nt, Artificial Sequence
  Description of Artificial Sequence: Synthetic oligonucleotide
  Sense strand starting at position 2831 of SEQ ID NO: 588376
ucaguugucucacucuuaa

SEQ ID NO: 860939 - RNA, 19 nt, Artificial Sequence
  Description of Artificial Sequence: Synthetic oligonucleotide
  Antisense strand to SEQ ID NO: 860938
uuaagagugagacaacuga

SEQ ID NO: 860940 - RNA, 19 nt, Artificial Sequence
  Description of Artificial Sequence: Synthetic oligonucleotide
  Sense strand starting at position 2851 of SEQ ID NO: 588376
ugagcauaaccgugaagca

SEQ ID NO: 860941 - RNA, 19 nt, Artificial Sequence
  Description of Artificial Sequence: Synthetic oligonucleotide
  Antisense strand to SEQ ID NO: 860940
ugcuucacgguuaugcuca

SEQ ID NO: 860942 - RNA, 19 nt, Artificial Sequence
  Description of Artificial Sequence: Synthetic oligonucleotide
  Sense strand starting at position 2852 of SEQ ID NO: 588376
gagcauaaccgugaagcau

SEQ ID NO: 860943 - RNA, 19 nt, Artificial Sequence
  Description of Artificial Sequence: Synthetic oligonucleotide
  Antisense strand to SEQ ID NO: 860942
augcuucacgguuaugcuc

SEQ ID NO: 860944 - RNA, 19 nt, Artificial Sequence
  Description of Artificial Sequence: Synthetic oligonucleotide
  Sense strand starting at position 2918 of SEQ ID NO: 588376
cucaguacuuuguuaccua

SEQ ID NO: 860945 - RNA, 19 nt, Artificial Sequence
  Description of Artificial Sequence: Synthetic oligonucleotide
  Antisense strand to SEQ ID NO: 860944
uagguaacaaaguacugag

SEQ ID NO: 860946 - RNA, 19 nt, Artificial Sequence
  Description of Artificial Sequence: Synthetic oligonucleotide
  Sense strand starting at position 2921 of SEQ ID NO: 588376
aguacuuuguuaccuauua

SEQ ID NO: 860947 - RNA, 19 nt, Artificial Sequence
  Description of Artificial Sequence: Synthetic oligonucleotide
  Antisense strand to SEQ ID NO: 860946
uaauagguaacaaaguacu

SEQ ID NO: 860948 - RNA, 19 nt, Artificial Sequence
  Description of Artificial Sequence: Synthetic oligonucleotide
  Sense strand starting at position 3338 of SEQ ID NO: 588376
gcacauuucucugaagguc

SEQ ID NO: 860949 - RNA, 19 nt, Artificial Sequence
  Description of Artificial Sequence: Synthetic oligonucleotide
  Antisense strand to SEQ ID NO: 860948
gaccuucagagaaaugugc

SEQ ID NO: 860950 - RNA, 19 nt, Artificial Sequence
  Description of Artificial Sequence: Synthetic oligonucleotide
  Sense strand starting at position 3363 of SEQ ID NO: 588376
ccugacaguuaugucgauu

SEQ ID NO: 860951 - RNA, 19 nt, Artificial Sequence
  Description of Artificial Sequence: Synthetic oligonucleotide
  Antisense strand to SEQ ID NO: 860950
aaucgacauaacugucagg

SEQ ID NO: 860952 - RNA, 19 nt, Artificial Sequence
  Description of Artificial Sequence: Synthetic oligonucleotide
  Sense strand starting at position 3366 of SEQ ID NO: 588376
gacaguuaugucgauuaga

SEQ ID NO: 860953 - RNA, 19 nt, Artificial Sequence
  Description of Artificial Sequence: Synthetic oligonucleotide
  Antisense strand to SEQ ID NO: 860952
ucuaaucgacauaacuguc

SEQ ID NO: 860954 - RNA, 19 nt, Artificial Sequence
  Description of Artificial Sequence: Synthetic oligonucleotide
  Sense strand starting at position 3369 of SEQ ID NO: 588376
aguuaugucgauuagaaug

SEQ ID NO: 860955 - RNA, 19 nt, Artificial Sequence
  Description of Artificial Sequence: Synthetic oligonucleotide
  Antisense strand to SEQ ID NO: 860954
cauucuaaucgacauaacu

SEQ ID NO: 860956 - RNA, 19 nt, Artificial Sequence
  Description of Artificial Sequence: Synthetic oligonucleotide
  Sense strand starting at position 3681 of SEQ ID NO: 588376
agaacaguuucccuggaac

SEQ ID NO: 860957 - RNA, 19 nt, Artificial Sequence
  Description of Artificial Sequence: Synthetic oligonucleotide
  Antisense strand to SEQ ID NO: 860956
guuccagggaaacuguucu

SEQ ID NO: 860958 - RNA, 19 nt, Artificial Sequence
  Description of Artificial Sequence: Synthetic oligonucleotide
  Sense strand starting at position 3819 of SEQ ID NO: 588376
gcaaccaaaugguugagau

SEQ ID NO: 860959 - RNA, 19 nt, Artificial Sequence
  Description of Artificial Sequence: Synthetic oligonucleotide
  Antisense strand to SEQ ID NO: 860958
aucucaaccauuugguugc

SEQ ID NO: 860960 - RNA, 19 nt, Artificial Sequence
  Description of Artificial Sequence: Synthetic oligonucleotide
  Sense strand starting at position 3899 of SEQ ID NO: 588376
ucuuaauaugcagguuuaa

SEQ ID NO: 860961 - RNA, 19 nt, Artificial Sequence
  Description of Artificial Sequence: Synthetic oligonucleotide
  Antisense strand to SEQ ID NO: 860960
uuaaaccugcauauuaaga

SEQ ID NO: 860962 - RNA, 19 nt, Artificial Sequence
  Description of Artificial Sequence: Synthetic oligonucleotide
  Sense strand starting at position 3969 of SEQ ID NO: 588376
caaauauuaugggaagaug

SEQ ID NO: 860963 - RNA, 19 nt, Artificial Sequence
  Description of Artificial Sequence: Synthetic oligonucleotide
  Antisense strand to SEQ ID NO: 860962
caucuucccauaauauuug

SEQ ID NO: 860964 - RNA, 19 nt, Artificial Sequence
  Description of Artificial Sequence: Synthetic oligonucleotide
  Sense strand starting at position 106 of SEQ ID NO: 588377
uggugacugcuugagcauu

SEQ ID NO: 860965 - RNA, 19 nt, Artificial Sequence
  Description of Artificial Sequence: Synthetic oligonucleotide
  Antisense strand to SEQ ID NO: 860964
aaugcucaagcagucacca

SEQ ID NO: 860966 - RNA, 19 nt, Artificial Sequence
  Description of Artificial Sequence: Synthetic oligonucleotide
  Sense strand starting at position 108 of SEQ ID NO: 588377
gugacugcuugagcauuua

SEQ ID NO: 860967 - RNA, 19 nt, Artificial Sequence
  Description of Artificial Sequence: Synthetic oligonucleotide
  Antisense strand to SEQ ID NO: 860966
uaaaugcucaagcagucac

SEQ ID NO: 860968 - RNA, 19 nt, Artificial Sequence
  Description of Artificial Sequence: Synthetic oligonucleotide
  Sense strand starting at position 270 of SEQ ID NO: 588377
ccaagugcuccagggcaga

SEQ ID NO: 860969 - RNA, 19 nt, Artificial Sequence
  Description of Artificial Sequence: Synthetic oligonucleotide
  Antisense strand to SEQ ID NO: 860968
ucugcccuggagcacuugg

SEQ ID NO: 860970 - RNA, 19 nt, Artificial Sequence
  Description of Artificial Sequence: Synthetic oligonucleotide
  Sense strand starting at position 605 of SEQ ID NO: 588377
gcucuauguccagauccua

SEQ ID NO: 860971 - RNA, 19 nt, Artificial Sequence
  Description of Artificial Sequence: Synthetic oligonucleotide
  Antisense strand to SEQ ID NO: 860970
uaggaucuggacauagagc

SEQ ID NO: 860972 - RNA, 19 nt, Artificial Sequence
  Description of Artificial Sequence: Synthetic oligonucleotide
  Sense strand starting at position 666 of SEQ ID NO: 588377
auaaaugcggaaugagauu

SEQ ID NO: 860973 - RNA, 19 nt, Artificial Sequence
  Description of Artificial Sequence: Synthetic oligonucleotide
  Antisense strand to SEQ ID NO: 860972
aaucucauuccgcauuuau

SEQ ID NO: 860974 - RNA, 19 nt, Artificial Sequence
  Description of Artificial Sequence: Synthetic oligonucleotide
  Sense strand starting at position 824 of SEQ ID NO: 588377
uggauuagaugguuuccca

SEQ ID NO: 860975 - RNA, 19 nt, Artificial Sequence
  Description of Artificial Sequence: Synthetic oligonucleotide
  Antisense strand to SEQ ID NO: 860974
ugggaaaccaucuaaucca

SEQ ID NO: 860976 - RNA, 19 nt, Artificial Sequence
  Description of Artificial Sequence: Synthetic oligonucleotide
  Sense strand starting at position 929 of SEQ ID NO: 588377
gagggaaucugauaccaau

SEQ ID NO: 860977 - RNA, 19 nt, Artificial Sequence
  Description of Artificial Sequence: Synthetic oligonucleotide
  Antisense strand to SEQ ID NO: 860976
auugguaucagauucccuc

SEQ ID NO: 860978 - RNA, 19 nt, Artificial Sequence
  Description of Artificial Sequence: Synthetic oligonucleotide
  Sense strand starting at position 956 of SEQ ID NO: 588377
guaaauugauguucccauc

SEQ ID NO: 860979 - RNA, 19 nt, Artificial Sequence
  Description of Artificial Sequence: Synthetic oligonucleotide
  Antisense strand to SEQ ID NO: 860978
gaugggaacaucaauuuac

SEQ ID NO: 860980 - RNA, 19 nt, Artificial Sequence
  Description of Artificial Sequence: Synthetic oligonucleotide
  Sense strand starting at position 1147 of SEQ ID NO: 588377
ggcaaucucuagcuuacua

SEQ ID NO: 860981 - RNA, 19 nt, Artificial Sequence
  Description of Artificial Sequence: Synthetic oligonucleotide
  Antisense strand to SEQ ID NO: 860980
uaguaagcuagagauugcc

SEQ ID NO: 860982 - RNA, 19 nt, Artificial Sequence
  Description of Artificial Sequence: Synthetic oligonucleotide
  Sense strand starting at position 1208 of SEQ ID NO: 588377
ccagacacugugugcuaaa

SEQ ID NO: 860983 - RNA, 19 nt, Artificial Sequence
  Description of Artificial Sequence: Synthetic oligonucleotide
  Antisense strand to SEQ ID NO: 860982
uuuagcacacagugucugg

SEQ ID NO: 860984 - RNA, 19 nt, Artificial Sequence
  Description of Artificial Sequence: Synthetic oligonucleotide
  Sense strand starting at position 1288 of SEQ ID NO: 588377
aaucaaucuggcugaaggu

SEQ ID NO: 860985 - RNA, 19 nt, Artificial Sequence
  Description of Artificial Sequence: Synthetic oligonucleotide
  Antisense strand to SEQ ID NO: 860984
accuucagccagauugauu

SEQ ID NO: 860986 - RNA, 19 nt, Artificial Sequence
  Description of Artificial Sequence: Synthetic oligonucleotide
  Sense strand starting at position 1324 of SEQ ID NO: 588377
gcagaacugugaucugaac

SEQ ID NO: 860987 - RNA, 19 nt, Artificial Sequence
  Description of Artificial Sequence: Synthetic oligonucleotide
  Antisense strand to SEQ ID NO: 860986
guucagaucacaguucugc

SEQ ID NO: 860988 - RNA, 19 nt, Artificial Sequence
  Description of Artificial Sequence: Synthetic oligonucleotide
  Sense strand starting at position 1347 of SEQ ID NO: 588377
gcuaacugacuccagaguu

SEQ ID NO: 860989 - RNA, 19 nt, Artificial Sequence
  Description of Artificial Sequence: Synthetic oligonucleotide
  Antisense strand to SEQ ID NO: 860988
aacucuggagucaguuagc

SEQ ID NO: 860990 - RNA, 19 nt, Artificial Sequence
  Description of Artificial Sequence: Synthetic oligonucleotide
  Sense strand starting at position 1362 of SEQ ID NO: 588377
aguucuggcuccucaaaug

SEQ ID NO: 860991 - RNA, 19 nt, Artificial Sequence
  Description of Artificial Sequence: Synthetic oligonucleotide
  Antisense strand to SEQ ID NO: 860990
cauuugaggagccagaacu

SEQ ID NO: 860992 - RNA, 19 nt, Artificial Sequence
  Description of Artificial Sequence: Synthetic oligonucleotide
  Sense strand starting at position 1463 of SEQ ID NO: 588377
gucugagaggcuugagauu

SEQ ID NO: 860993 - RNA, 19 nt, Artificial Sequence
  Description of Artificial Sequence: Synthetic oligonucleotide
  Antisense strand to SEQ ID NO: 860992
aaucucaagccucucagac

SEQ ID NO: 860994 - RNA, 19 nt, Artificial Sequence
  Description of Artificial Sequence: Synthetic oligonucleotide
  Sense strand starting at position 1601 of SEQ ID NO: 588377
ucccaagagucagcuucuu

SEQ ID NO: 860995 - RNA, 19 nt, Artificial Sequence
  Description of Artificial Sequence: Synthetic oligonucleotide
  Antisense strand to SEQ ID NO: 860994
aagaagcugacucuuggga

SEQ ID NO: 860996 - RNA, 19 nt, Artificial Sequence
  Description of Artificial Sequence: Synthetic oligonucleotide
  Sense strand starting at position 2379 of SEQ ID NO: 588377
aggccaauacaguguaaau

SEQ ID NO: 860997 - RNA, 19 nt, Artificial Sequence
  Description of Artificial Sequence: Synthetic oligonucleotide
  Antisense strand to SEQ ID NO: 860996
auuuacacuguauuggccu

SEQ ID NO: 860998 - RNA, 19 nt, Artificial Sequence
  Description of Artificial Sequence: Synthetic oligonucleotide
  Sense strand starting at position 2381 of SEQ ID NO: 588377
gccaauacaguguaaauaa

SEQ ID NO: 860999 - RNA, 19 nt, Artificial Sequence
  Description of Artificial Sequence: Synthetic oligonucleotide
  Antisense strand to SEQ ID NO: 860998
uuauuuacacuguauuggc

SEQ ID NO: 861000 - RNA, 19 nt, Artificial Sequence
  Description of Artificial Sequence: Synthetic oligonucleotide
  Sense strand starting at position 2407 of SEQ ID NO: 588377
gcgagcaccaguuaucuaa

SEQ ID NO: 861001 - RNA, 19 nt, Artificial Sequence
  Description of Artificial Sequence: Synthetic oligonucleotide
  Antisense strand to SEQ ID NO: 861000
uuagauaacuggugcucgc

SEQ ID NO: 861002 - RNA, 19 nt, Artificial Sequence
  Description of Artificial Sequence: Synthetic oligonucleotide
  Sense strand starting at position 2559 of SEQ ID NO: 588377
guauguauggcgcuuagca

SEQ ID NO: 861003 - RNA, 19 nt, Artificial Sequence
  Description of Artificial Sequence: Synthetic oligonucleotide
  Antisense strand to SEQ ID NO: 861002
ugcuaagcgccauacauac

SEQ ID NO: 861004 - RNA, 19 nt, Artificial Sequence
  Description of Artificial Sequence: Synthetic oligonucleotide
  Sense strand starting at position 2560 of SEQ ID NO: 588377
uauguauggcgcuuagcau

SEQ ID NO: 861005 - RNA, 19 nt, Artificial Sequence
  Description of Artificial Sequence: Synthetic oligonucleotide
  Antisense strand to SEQ ID NO: 861004
augcuaagcgccauacaua

SEQ ID NO: 861006 - RNA, 19 nt, Artificial Sequence
  Description of Artificial Sequence: Synthetic oligonucleotide
  Sense strand starting at position 2592 of SEQ ID NO: 588377
aaguaaaugcuguauguuu

SEQ ID NO: 861007 - RNA, 19 nt, Artificial Sequence
  Description of Artificial Sequence: Synthetic oligonucleotide
  Antisense strand to SEQ ID NO: 861006
aaacauacagcauuuacuu

SEQ ID NO: 861008 - RNA, 19 nt, Artificial Sequence
  Description of Artificial Sequence: Synthetic oligonucleotide
  Sense strand starting at position 2627 of SEQ ID NO: 588377
uuacuauuaugggcacaaa

SEQ ID NO: 861009 - RNA, 19 nt, Artificial Sequence
  Description of Artificial Sequence: Synthetic oligonucleotide
  Antisense strand to SEQ ID NO: 861008
uuugugcccauaauaguaa

SEQ ID NO: 861010 - RNA, 19 nt, Artificial Sequence
  Description of Artificial Sequence: Synthetic oligonucleotide
  Sense strand starting at position 2675 of SEQ ID NO: 588377
uccugaaguuaauucugua

SEQ ID NO: 861011 - RNA, 19 nt, Artificial Sequence
  Description of Artificial Sequence: Synthetic oligonucleotide
  Antisense strand to SEQ ID NO: 861010
uacagaauuaacuucagga

SEQ ID NO: 861012 - RNA, 19 nt, Artificial Sequence
  Description of Artificial Sequence: Synthetic oligonucleotide
  Sense strand starting at position 2680 of SEQ ID NO: 588377
aaguuaauucuguagugga

SEQ ID NO: 861013 - RNA, 19 nt, Artificial Sequence
  Description of Artificial Sequence: Synthetic oligonucleotide
  Antisense strand to SEQ ID NO: 861012
uccacuacagaauuaacuu

SEQ ID NO: 861014 - RNA, 19 nt, Artificial Sequence
  Description of Artificial Sequence: Synthetic oligonucleotide
  Sense strand starting at position 2687 of SEQ ID NO: 588377
uucuguaguggagaaggua

SEQ ID NO: 861015 - RNA, 19 nt, Artificial Sequence
  Description of Artificial Sequence: Synthetic oligonucleotide
  Antisense strand to SEQ ID NO: 861014
uaccuucuccacuacagaa

SEQ ID NO: 861016 - RNA, 19 nt, Artificial Sequence
  Description of Artificial Sequence: Synthetic oligonucleotide
  Sense strand starting at position 2759 of SEQ ID NO: 588377
cacggaaggagcuguaauu

SEQ ID NO: 861017 - RNA, 19 nt, Artificial Sequence
  Description of Artificial Sequence: Synthetic oligonucleotide
  Antisense strand to SEQ ID NO: 861016
aauuacagcuccuuccgug

SEQ ID NO: 861018 - RNA, 19 nt, Artificial Sequence
  Description of Artificial Sequence: Synthetic oligonucleotide
  Sense strand starting at position 2856 of SEQ ID NO: 588377
ucaggaguucgagguuaac

SEQ ID NO: 861019 - RNA, 19 nt, Artificial Sequence
  Description of Artificial Sequence: Synthetic oligonucleotide
  Antisense strand to SEQ ID NO: 861018
guuaaccucgaacuccuga

SEQ ID NO: 861020 - RNA, 19 nt, Artificial Sequence
  Description of Artificial Sequence: Synthetic oligonucleotide
  Sense strand starting at position 2859 of SEQ ID NO: 588377
ggaguucgagguuaacagu

SEQ ID NO: 861021 - RNA, 19 nt, Artificial Sequence
  Description of Artificial Sequence: Synthetic oligonucleotide
  Antisense strand to SEQ ID NO: 861020
acuguuaaccucgaacucc

SEQ ID NO: 861022 - RNA, 19 nt, Artificial Sequence
  Description of Artificial Sequence: Synthetic oligonucleotide
  Sense strand starting at position 2998 of SEQ ID NO: 588377
gauaaagaguuagccaaau

SEQ ID NO: 861023 - RNA, 19 nt, Artificial Sequence
  Description of Artificial Sequence: Synthetic oligonucleotide
  Antisense strand to SEQ ID NO: 861022
auuuggcuaacucuuuauc

SEQ ID NO: 861024 - RNA, 19 nt, Artificial Sequence
  Description of Artificial Sequence: Synthetic oligonucleotide
  Sense strand starting at position 3027 of SEQ ID NO: 588377
caggguaagcccugugaaa

SEQ ID NO: 861025 - RNA, 19 nt, Artificial Sequence
  Description of Artificial Sequence: Synthetic oligonucleotide
  Antisense strand to SEQ ID NO: 861024
uuucacagggcuuacccug

SEQ ID NO: 861026 - RNA, 19 nt, Artificial Sequence
  Description of Artificial Sequence: Synthetic oligonucleotide
  Sense strand starting at position 3079 of SEQ ID NO: 588377
aaagaucgcucuuugugga

SEQ ID NO: 861027 - RNA, 19 nt, Artificial Sequence
  Description of Artificial Sequence: Synthetic oligonucleotide
  Antisense strand to SEQ ID NO: 861026
uccacaaagagcgaucuuu

SEQ ID NO: 861028 - RNA, 19 nt, Artificial Sequence
  Description of Artificial Sequence: Synthetic oligonucleotide
  Sense strand starting at position 3080 of SEQ ID NO: 588377
aagaucgcucuuuguggaa

SEQ ID NO: 861029 - RNA, 19 nt, Artificial Sequence
  Description of Artificial Sequence: Synthetic oligonucleotide
  Antisense strand to SEQ ID NO: 861028
uuccacaaagagcgaucuu

SEQ ID NO: 861030 - RNA, 19 nt, Artificial Sequence
  Description of Artificial Sequence: Synthetic oligonucleotide
  Sense strand starting at position 3190 of SEQ ID NO: 588377
cuuaauaggccaugauaag

SEQ ID NO: 861031 - RNA, 19 nt, Artificial Sequence
  Description of Artificial Sequence: Synthetic oligonucleotide
  Antisense strand to SEQ ID NO: 861030
cuuaucauggccuauuaag

SEQ ID NO: 861032 - RNA, 19 nt, Artificial Sequence
  Description of Artificial Sequence: Synthetic oligonucleotide
  Sense strand starting at position 3278 of SEQ ID NO: 588377
gucagcuacuaugugaaga

SEQ ID NO: 861033 - RNA, 19 nt, Artificial Sequence
  Description of Artificial Sequence: Synthetic oligonucleotide
  Antisense strand to SEQ ID NO: 861032
ucuucacauaguagcugac

SEQ ID NO: 861034 - RNA, 19 nt, Artificial Sequence
  Description of Artificial Sequence: Synthetic oligonucleotide
  Sense strand starting at position 3322 of SEQ ID NO: 588377
uugguagcuuaaccuauua

SEQ ID NO: 861035 - RNA, 19 nt, Artificial Sequence
  Description of Artificial Sequence: Synthetic oligonucleotide
  Antisense strand to SEQ ID NO: 861034
uaauagguuaagcuaccaa

SEQ ID NO: 861036 - RNA, 19 nt, Artificial Sequence
  Description of Artificial Sequence: Synthetic oligonucleotide
  Sense strand starting at position 3539 of SEQ ID NO: 588377
uuauacagccaguauagaa

SEQ ID NO: 861037 - RNA, 19 nt, Artificial Sequence
  Description of Artificial Sequence: Synthetic oligonucleotide
  Antisense strand to SEQ ID NO: 861036
uucuauacuggcuguauaa

SEQ ID NO: 861038 - RNA, 19 nt, Artificial Sequence
  Description of Artificial Sequence: Synthetic oligonucleotide
  Sense strand starting at position 3612 of SEQ ID NO: 588377
agucccacugcuggauauu

SEQ ID NO: 861039 - RNA, 19 nt, Artificial Sequence
  Description of Artificial Sequence: Synthetic oligonucleotide
  Antisense strand to SEQ ID NO: 861038
aauauccagcagugggacu

SEQ ID NO: 861040 - RNA, 19 nt, Artificial Sequence
  Description of Artificial Sequence: Synthetic oligonucleotide
  Sense strand starting at position 3641 of SEQ ID NO: 588377
uggaaaucaguaugucaaa

SEQ ID NO: 861041 - RNA, 19 nt, Artificial Sequence
  Description of Artificial Sequence: Synthetic oligonucleotide
  Antisense strand to SEQ ID NO: 861040
uuugacauacugauuucca

SEQ ID NO: 861042 - RNA, 19 nt, Artificial Sequence
  Description of Artificial Sequence: Synthetic oligonucleotide
  Sense strand starting at position 3915 of SEQ ID NO: 588377
gcaguuggcaaguagaaug

SEQ ID NO: 861043 - RNA, 19 nt, Artificial Sequence
  Description of Artificial Sequence: Synthetic oligonucleotide
  Antisense strand to SEQ ID NO: 861042
cauucuacuugccaacugc

SEQ ID NO: 861044 - RNA, 19 nt, Artificial Sequence
  Description of Artificial Sequence: Synthetic oligonucleotide
  Sense strand starting at position 30 of SEQ ID NO: 588378
gggugaaacucagaaauau

SEQ ID NO: 861045 - RNA, 19 nt, Artificial Sequence
  Description of Artificial Sequence: Synthetic oligonucleotide
  Antisense strand to SEQ ID NO: 861044
auauuucugaguuucaccc

SEQ ID NO: 861046 - RNA, 19 nt, Artificial Sequence
  Description of Artificial Sequence: Synthetic oligonucleotide
  Sense strand starting at position 53 of SEQ ID NO: 588378
gggacaugcuuagcacagu

SEQ ID NO: 861047 - RNA, 19 nt, Artificial Sequence
  Description of Artificial Sequence: Synthetic oligonucleotide
  Antisense strand to SEQ ID NO: 861046
acugugcuaagcauguccc

SEQ ID NO: 861048 - RNA, 19 nt, Artificial Sequence
  Description of Artificial Sequence: Synthetic oligonucleotide
  Sense strand starting at position 143 of SEQ ID NO: 588378
agauuucugugacacuaag

SEQ ID NO: 861049 - RNA, 19 nt, Artificial Sequence
  Description of Artificial Sequence: Synthetic oligonucleotide
  Antisense strand to SEQ ID NO: 861048
cuuagugucacagaaaucu

SEQ ID NO: 861050 - RNA, 19 nt, Artificial Sequence
  Description of Artificial Sequence: Synthetic oligonucleotide
  Sense strand starting at position 294 of SEQ ID NO: 588378
cuguuuauuggaggcucua

SEQ ID NO: 861051 - RNA, 19 nt, Artificial Sequence
  Description of Artificial Sequence: Synthetic oligonucleotide
  Antisense strand to SEQ ID NO: 861050
uagagccuccaauaaacag

SEQ ID NO: 861052 - RNA, 19 nt, Artificial Sequence
  Description of Artificial Sequence: Synthetic oligonucleotide
  Sense strand starting at position 511 of SEQ ID NO: 588378
cuauguuaccuaggcaacu

SEQ ID NO: 861053 - RNA, 19 nt, Artificial Sequence
  Description of Artificial Sequence: Synthetic oligonucleotide
  Antisense strand to SEQ ID NO: 861052
aguugccuagguaacauag

SEQ ID NO: 861054 - RNA, 19 nt, Artificial Sequence
  Description of Artificial Sequence: Synthetic oligonucleotide
  Sense strand starting at position 749 of SEQ ID NO: 588378
guauuagagacaggaccuu

SEQ ID NO: 861055 - RNA, 19 nt, Artificial Sequence
  Description of Artificial Sequence: Synthetic oligonucleotide
  Antisense strand to SEQ ID NO: 861054
aagguccugucucuaauac

SEQ ID NO: 861056 - RNA, 19 nt, Artificial Sequence
  Description of Artificial Sequence: Synthetic oligonucleotide
  Sense strand starting at position 815 of SEQ ID NO: 588378
uggccuagucaagagugaa

SEQ ID NO: 861057 - RNA, 19 nt, Artificial Sequence
  Description of Artificial Sequence: Synthetic oligonucleotide
  Antisense strand to SEQ ID NO: 861056
uucacucuugacuaggcca

SEQ ID NO: 861058 - RNA, 19 nt, Artificial Sequence
  Description of Artificial Sequence: Synthetic oligonucleotide
  Sense strand starting at position 840 of SEQ ID NO: 588378
auaauuguuagugguagag

SEQ ID NO: 861059 - RNA, 19 nt, Artificial Sequence
  Description of Artificial Sequence: Synthetic oligonucleotide
  Antisense strand to SEQ ID NO: 861058
cucuaccacuaacaauuau

SEQ ID NO: 861060 - RNA, 19 nt, Artificial Sequence
  Description of Artificial Sequence: Synthetic oligonucleotide
  Sense strand starting at position 844 of SEQ ID NO: 588378
uuguuagugguagagggaa

SEQ ID NO: 861061 - RNA, 19 nt, Artificial Sequence
  Description of Artificial Sequence: Synthetic oligonucleotide
  Antisense strand to SEQ ID NO: 861060
uucccucuaccacuaacaa

SEQ ID NO: 861062 - RNA, 19 nt, Artificial Sequence
  Description of Artificial Sequence: Synthetic oligonucleotide
  Sense strand starting at position 1256 of SEQ ID NO: 588378
gagcauuaccuacaagggu

SEQ ID NO: 861063 - RNA, 19 nt, Artificial Sequence
  Description of Artificial Sequence: Synthetic oligonucleotide
  Antisense strand to SEQ ID NO: 861062
acccuuguagguaaugcuc

SEQ ID NO: 861064 - RNA, 19 nt, Artificial Sequence
  Description of Artificial Sequence: Synthetic oligonucleotide
  Sense strand starting at position 1332 of SEQ ID NO: 588378
gcuguaagccuacaguaaa

SEQ ID NO: 861065 - RNA, 19 nt, Artificial Sequence
  Description of Artificial Sequence: Synthetic oligonucleotide
  Antisense strand to SEQ ID NO: 861064
uuuacuguaggcuuacagc

SEQ ID NO: 861066 - RNA, 19 nt, Artificial Sequence
  Description of Artificial Sequence: Synthetic oligonucleotide
  Sense strand starting at position 1352 of SEQ ID NO: 588378
gucaguuaccauuauuacu

SEQ ID NO: 861067 - RNA, 19 nt, Artificial Sequence
  Description of Artificial Sequence: Synthetic oligonucleotide
  Antisense strand to SEQ ID NO: 861066
aguaauaaugguaacugac

SEQ ID NO: 861068 - RNA, 19 nt, Artificial Sequence
  Description of Artificial Sequence: Synthetic oligonucleotide
  Sense strand starting at position 1444 of SEQ ID NO: 588378
acaauuauggcgcaguaua

SEQ ID NO: 861069 - RNA, 19 nt, Artificial Sequence
  Description of Artificial Sequence: Synthetic oligonucleotide
  Antisense strand to SEQ ID NO: 861068
uauacugcgccauaauugu

SEQ ID NO: 861070 - RNA, 19 nt, Artificial Sequence
  Description of Artificial Sequence: Synthetic oligonucleotide
  Sense strand starting at position 1454 of SEQ ID NO: 588378
cgcaguauagcgcuuugua

SEQ ID NO: 861071 - RNA, 19 nt, Artificial Sequence
  Description of Artificial Sequence: Synthetic oligonucleotide
  Antisense strand to SEQ ID NO: 861070
uacaaagcgcuauacugcg

SEQ ID NO: 861072 - RNA, 19 nt, Artificial Sequence
  Description of Artificial Sequence: Synthetic oligonucleotide
  Sense strand starting at position 1455 of SEQ ID NO: 588378
gcaguauagcgcuuuguac

SEQ ID NO: 861073 - RNA, 19 nt, Artificial Sequence
  Description of Artificial Sequence: Synthetic oligonucleotide
  Antisense strand to SEQ ID NO: 861072
guacaaagcgcuauacugc

SEQ ID NO: 861074 - RNA, 19 nt, Artificial Sequence
  Description of Artificial Sequence: Synthetic oligonucleotide
  Sense strand starting at position 1456 of SEQ ID NO: 588378
caguauagcgcuuuguacu

SEQ ID NO: 861075 - RNA, 19 nt, Artificial Sequence
  Description of Artificial Sequence: Synthetic oligonucleotide
  Antisense strand to SEQ ID NO: 861074
aguacaaagcgcuauacug

SEQ ID NO: 861076 - RNA, 19 nt, Artificial Sequence
  Description of Artificial Sequence: Synthetic oligonucleotide
  Sense strand starting at position 1514 of SEQ ID NO: 588378
uuugguagcccugggacau

SEQ ID NO: 861077 - RNA, 19 nt, Artificial Sequence
  Description of Artificial Sequence: Synthetic oligonucleotide
  Antisense strand to SEQ ID NO: 861076
augucccagggcuaccaaa

SEQ ID NO: 861078 - RNA, 19 nt, Artificial Sequence
  Description of Artificial Sequence: Synthetic oligonucleotide
  Sense strand starting at position 1524 of SEQ ID NO: 588378
cugggacaucacuguuaac

SEQ ID NO: 861079 - RNA, 19 nt, Artificial Sequence
  Description of Artificial Sequence: Synthetic oligonucleotide
  Antisense strand to SEQ ID NO: 861078
guuaacagugaugucccag

SEQ ID NO: 861080 - RNA, 19 nt, Artificial Sequence
  Description of Artificial Sequence: Synthetic oligonucleotide
  Sense strand starting at position 1534 of SEQ ID NO: 588378
acuguuaacucauuucgca

SEQ ID NO: 861081 - RNA, 19 nt, Artificial Sequence
  Description of Artificial Sequence: Synthetic oligonucleotide
  Antisense strand to SEQ ID NO: 861080
ugcgaaaugaguuaacagu

SEQ ID NO: 861082 - RNA, 19 nt, Artificial Sequence
  Description of Artificial Sequence: Synthetic oligonucleotide
  Sense strand starting at position 1538 of SEQ ID NO: 588378
uuaacucauuucgcagcua

SEQ ID NO: 861083 - RNA, 19 nt, Artificial Sequence
  Description of Artificial Sequence: Synthetic oligonucleotide
  Antisense strand to SEQ ID NO: 861082
uagcugcgaaaugaguuaa

SEQ ID NO: 861084 - RNA, 19 nt, Artificial Sequence
  Description of Artificial Sequence: Synthetic oligonucleotide
  Sense strand starting at position 2484 of SEQ ID NO: 588378
gagacagucaagugaugua

SEQ ID NO: 861085 - RNA, 19 nt, Artificial Sequence
  Description of Artificial Sequence: Synthetic oligonucleotide
  Antisense strand to SEQ ID NO: 861084
uacaucacuugacugucuc

SEQ ID NO: 861086 - RNA, 19 nt, Artificial Sequence
  Description of Artificial Sequence: Synthetic oligonucleotide
  Sense strand starting at position 2496 of SEQ ID NO: 588378
ugauguagauuugaaugaa

SEQ ID NO: 861087 - RNA, 19 nt, Artificial Sequence
  Description of Artificial Sequence: Synthetic oligonucleotide
  Antisense strand to SEQ ID NO: 861086
uucauucaaaucuacauca

SEQ ID NO: 861088 - RNA, 19 nt, Artificial Sequence
  Description of Artificial Sequence: Synthetic oligonucleotide
  Sense strand starting at position 2601 of SEQ ID NO: 588378
auccgaaggcucugaggau

SEQ ID NO: 861089 - RNA, 19 nt, Artificial Sequence
  Description of Artificial Sequence: Synthetic oligonucleotide
  Antisense strand to SEQ ID NO: 861088
auccucagagccuucggau

SEQ ID NO: 861090 - RNA, 19 nt, Artificial Sequence
  Description of Artificial Sequence: Synthetic oligonucleotide
  Sense strand starting at position 2608 of SEQ ID NO: 588378
ggcucugaggauugaagga

SEQ ID NO: 861091 - RNA, 19 nt, Artificial Sequence
  Description of Artificial Sequence: Synthetic oligonucleotide
  Antisense strand to SEQ ID NO: 861090
uccuucaauccucagagcc

SEQ ID NO: 861092 - RNA, 19 nt, Artificial Sequence
  Description of Artificial Sequence: Synthetic oligonucleotide
  Sense strand starting at position 2624 of SEQ ID NO: 588378
ggaaaugaagcaugcaaac

SEQ ID NO: 861093 - RNA, 19 nt, Artificial Sequence
  Description of Artificial Sequence: Synthetic oligonucleotide
  Antisense strand to SEQ ID NO: 861092
guuugcaugcuucauuucc

SEQ ID NO: 861094 - RNA, 19 nt, Artificial Sequence
  Description of Artificial Sequence: Synthetic oligonucleotide
  Sense strand starting at position 2823 of SEQ ID NO: 588378
auaguaaauggcugucaua

SEQ ID NO: 861095 - RNA, 19 nt, Artificial Sequence
  Description of Artificial Sequence: Synthetic oligonucleotide
  Antisense strand to SEQ ID NO: 861094
uaugacagccauuuacuau

SEQ ID NO: 861096 - RNA, 19 nt, Artificial Sequence
  Description of Artificial Sequence: Synthetic oligonucleotide
  Sense strand starting at position 2959 of SEQ ID NO: 588378
ucgacuucuccaggcucaa

SEQ ID NO: 861097 - RNA, 19 nt, Artificial Sequence
  Description of Artificial Sequence: Synthetic oligonucleotide
  Antisense strand to SEQ ID NO: 861096
uugagccuggagaagucga

SEQ ID NO: 861098 - RNA, 19 nt, Artificial Sequence
  Description of Artificial Sequence: Synthetic oligonucleotide
  Sense strand starting at position 3214 of SEQ ID NO: 588378
acaaguuauccuuguuucu

SEQ ID NO: 861099 - RNA, 19 nt, Artificial Sequence
  Description of Artificial Sequence: Synthetic oligonucleotide
  Antisense strand to SEQ ID NO: 861098
agaaacaaggauaacuugu

SEQ ID NO: 861100 - RNA, 19 nt, Artificial Sequence
  Description of Artificial Sequence: Synthetic oligonucleotide
  Sense strand starting at position 3224 of SEQ ID NO: 588378
cuuguuucucuguaagggu

SEQ ID NO: 861101 - RNA, 19 nt, Artificial Sequence
  Description of Artificial Sequence: Synthetic oligonucleotide
  Antisense strand to SEQ ID NO: 861100
acccuuacagagaaacaag

SEQ ID NO: 861102 - RNA, 19 nt, Artificial Sequence
  Description of Artificial Sequence: Synthetic oligonucleotide
  Sense strand starting at position 3335 of SEQ ID NO: 588378
ggugcuguccaauaaggca

SEQ ID NO: 861103 - RNA, 19 nt, Artificial Sequence
  Description of Artificial Sequence: Synthetic oligonucleotide
  Antisense strand to SEQ ID NO: 861102
ugccuuauuggacagcacc

SEQ ID NO: 861104 - RNA, 19 nt, Artificial Sequence
  Description of Artificial Sequence: Synthetic oligonucleotide
  Sense strand starting at position 3361 of SEQ ID NO: 588378
gucucuuguggcuacugaa

SEQ ID NO: 861105 - RNA, 19 nt, Artificial Sequence
  Description of Artificial Sequence: Synthetic oligonucleotide
  Antisense strand to SEQ ID NO: 861104
uucaguagccacaagagac

SEQ ID NO: 861106 - RNA, 19 nt, Artificial Sequence
  Description of Artificial Sequence: Synthetic oligonucleotide
  Sense strand starting at position 3571 of SEQ ID NO: 588378
cuugaaacaugggaaauaa

SEQ ID NO: 861107 - RNA, 19 nt, Artificial Sequence
  Description of Artificial Sequence: Synthetic oligonucleotide
  Antisense strand to SEQ ID NO: 861106
uuauuucccauguuucaag

SEQ ID NO: 861108 - RNA, 19 nt, Artificial Sequence
  Description of Artificial Sequence: Synthetic oligonucleotide
  Sense strand starting at position 3683 of SEQ ID NO: 588378
cuagacuucuaagucagaa

SEQ ID NO: 861109 - RNA, 19 nt, Artificial Sequence
  Description of Artificial Sequence: Synthetic oligonucleotide
  Antisense strand to SEQ ID NO: 861108
uucugacuuagaagucuag

SEQ ID NO: 861110 - RNA, 19 nt, Artificial Sequence
  Description of Artificial Sequence: Synthetic oligonucleotide
  Sense strand starting at position 3693 of SEQ ID NO: 588378
aagucagaacgugacugau

SEQ ID NO: 861111 - RNA, 19 nt, Artificial Sequence
  Description of Artificial Sequence: Synthetic oligonucleotide
  Antisense strand to SEQ ID NO: 861110
aucagucacguucugacuu

SEQ ID NO: 861112 - RNA, 19 nt, Artificial Sequence
  Description of Artificial Sequence: Synthetic oligonucleotide
  Sense strand starting at position 3695 of SEQ ID NO: 588378
gucagaacgugacugauca

SEQ ID NO: 861113 - RNA, 19 nt, Artificial Sequence
  Description of Artificial Sequence: Synthetic oligonucleotide
  Antisense strand to SEQ ID NO: 861112
ugaucagucacguucugac

SEQ ID NO: 861114 - RNA, 19 nt, Artificial Sequence
  Description of Artificial Sequence: Synthetic oligonucleotide
  Sense strand starting at position 3776 of SEQ ID NO: 588378
gcaguaccaggguaaucaa

SEQ ID NO: 861115 - RNA, 19 nt, Artificial Sequence
  Description of Artificial Sequence: Synthetic oligonucleotide
  Antisense strand to SEQ ID NO: 861114
uugauuacccugguacugc

SEQ ID NO: 861116 - RNA, 19 nt, Artificial Sequence
  Description of Artificial Sequence: Synthetic oligonucleotide
  Sense strand starting at position 3779 of SEQ ID NO: 588378
guaccaggguaaucaagaa

SEQ ID NO: 861117 - RNA, 19 nt, Artificial Sequence
  Description of Artificial Sequence: Synthetic oligonucleotide
  Antisense strand to SEQ ID NO: 861116
uucuugauuacccugguac

SEQ ID NO: 861118 - RNA, 19 nt, Artificial Sequence
  Description of Artificial Sequence: Synthetic oligonucleotide
  Sense strand starting at position 3807 of SEQ ID NO: 588378
cccauaucucuuuggagca

SEQ ID NO: 861119 - RNA, 19 nt, Artificial Sequence
  Description of Artificial Sequence: Synthetic oligonucleotide
  Antisense strand to SEQ ID NO: 861118
ugcuccaaagagauauggg

SEQ ID NO: 861120 - RNA, 19 nt, Artificial Sequence
  Description of Artificial Sequence: Synthetic oligonucleotide
  Sense strand starting at position 3812 of SEQ ID NO: 588378
aucucuuuggagcaaacau

SEQ ID NO: 861121 - RNA, 19 nt, Artificial Sequence
  Description of Artificial Sequence: Synthetic oligonucleotide
  Antisense strand to SEQ ID NO: 861120
auguuugcuccaaagagau

SEQ ID NO: 861122 - RNA, 19 nt, Artificial Sequence
  Description of Artificial Sequence: Synthetic oligonucleotide
  Sense strand starting at position 3838 of SEQ ID NO: 588378
cccaguacaguuugaugaa

SEQ ID NO: 861123 - RNA, 19 nt, Artificial Sequence
  Description of Artificial Sequence: Synthetic oligonucleotide
  Antisense strand to SEQ ID NO: 861122
uucaucaaacuguacuggg

SEQ ID NO: 861124 - RNA, 19 nt, Artificial Sequence
  Description of Artificial Sequence: Synthetic oligonucleotide
  Sense strand starting at position 27 of SEQ ID NO: 588379
cagcaaucucgccggauga

SEQ ID NO: 861125 - RNA, 19 nt, Artificial Sequence
  Description of Artificial Sequence: Synthetic oligonucleotide
  Antisense strand to SEQ ID NO: 861124
ucauccggcgagauugcug

SEQ ID NO: 861126 - RNA, 19 nt, Artificial Sequence
  Description of Artificial Sequence: Synthetic oligonucleotide
  Sense strand starting at position 81 of SEQ ID NO: 588379
gcaguagcgagucguccuu

SEQ ID NO: 861127 - RNA, 19 nt, Artificial Sequence
  Description of Artificial Sequence: Synthetic oligonucleotide
  Antisense strand to SEQ ID NO: 861126
aaggacgacucgcuacugc

SEQ ID NO: 861128 - RNA, 19 nt, Artificial Sequence
  Description of Artificial Sequence: Synthetic oligonucleotide
  Sense strand starting at position 84 of SEQ ID NO: 588379
guagcgagucguccuuguu

SEQ ID NO: 861129 - RNA, 19 nt, Artificial Sequence
  Description of Artificial Sequence: Synthetic oligonucleotide
  Antisense strand to SEQ ID NO: 861128
aacaaggacgacucgcuac

SEQ ID NO: 861130 - RNA, 19 nt, Artificial Sequence
  Description of Artificial Sequence: Synthetic oligonucleotide
  Sense strand starting at position 87 of SEQ ID NO: 588379
gcgagucguccuuguugaa

SEQ ID NO: 861131 - RNA, 19 nt, Artificial Sequence
  Description of Artificial Sequence: Synthetic oligonucleotide
  Antisense strand to SEQ ID NO: 861130
uucaacaaggacgacucgc

SEQ ID NO: 861132 - RNA, 19 nt, Artificial Sequence
  Description of Artificial Sequence: Synthetic oligonucleotide
  Sense strand starting at position 96 of SEQ ID NO: 588379
ccuuguugaacugggagaa

SEQ ID NO: 861133 - RNA, 19 nt, Artificial Sequence
  Description of Artificial Sequence: Synthetic oligonucleotide
  Antisense strand to SEQ ID NO: 861132
uucucccaguucaacaagg

SEQ ID NO: 861134 - RNA, 19 nt, Artificial Sequence
  Description of Artificial Sequence: Synthetic oligonucleotide
  Sense strand starting at position 108 of SEQ ID NO: 588379
gggagaacuggguguagcu

SEQ ID NO: 861135 - RNA, 19 nt, Artificial Sequence
  Description of Artificial Sequence: Synthetic oligonucleotide
  Antisense strand to SEQ ID NO: 861134
agcuacacccaguucuccc

SEQ ID NO: 861136 - RNA, 19 nt, Artificial Sequence
  Description of Artificial Sequence: Synthetic oligonucleotide
  Sense strand starting at position 117 of SEQ ID NO: 588379
ggguguagcuccaguugua

SEQ ID NO: 861137 - RNA, 19 nt, Artificial Sequence
  Description of Artificial Sequence: Synthetic oligonucleotide
  Antisense strand to SEQ ID NO: 861136
uacaacuggagcuacaccc

SEQ ID NO: 861138 - RNA, 19 nt, Artificial Sequence
  Description of Artificial Sequence: Synthetic oligonucleotide
  Sense strand starting at position 162 of SEQ ID NO: 588379
gcgagauggucaggucguu

SEQ ID NO: 861139 - RNA, 19 nt, Artificial Sequence
  Description of Artificial Sequence: Synthetic oligonucleotide
  Antisense strand to SEQ ID NO: 861138
aacgaccugaccaucucgc

SEQ ID NO: 861140 - RNA, 19 nt, Artificial Sequence
  Description of Artificial Sequence: Synthetic oligonucleotide
  Sense strand starting at position 175 of SEQ ID NO: 588379
gucguugcuccagaucugu

SEQ ID NO: 861141 - RNA, 19 nt, Artificial Sequence
  Description of Artificial Sequence: Synthetic oligonucleotide
  Antisense strand to SEQ ID NO: 861140
acagaucuggagcaacgac

SEQ ID NO: 861142 - RNA, 19 nt, Artificial Sequence
  Description of Artificial Sequence: Synthetic oligonucleotide
  Sense strand starting at position 208 of SEQ ID NO: 588379
uguagugaucgccuggcca

SEQ ID NO: 861143 - RNA, 19 nt, Artificial Sequence
  Description of Artificial Sequence: Synthetic oligonucleotide
  Antisense strand to SEQ ID NO: 861142
uggccaggcgaucacuaca

SEQ ID NO: 861144 - RNA, 19 nt, Artificial Sequence
  Description of Artificial Sequence: Synthetic oligonucleotide
  Sense strand starting at position 723 of SEQ ID NO: 588379
gcuggaacuccucguacca

SEQ ID NO: 861145 - RNA, 19 nt, Artificial Sequence
  Description of Artificial Sequence: Synthetic oligonucleotide
  Antisense strand to SEQ ID NO: 861144
ugguacgaggaguuccagc

SEQ ID NO: 861146 - RNA, 19 nt, Artificial Sequence
  Description of Artificial Sequence: Synthetic oligonucleotide
  Sense strand starting at position 853 of SEQ ID NO: 588379
ccuggaacccacuagucau

SEQ ID NO: 861147 - RNA, 19 nt, Artificial Sequence
  Description of Artificial Sequence: Synthetic oligonucleotide
  Antisense strand to SEQ ID NO: 861146
augacuaguggguuccagg

SEQ ID NO: 861148 - RNA, 19 nt, Artificial Sequence
  Description of Artificial Sequence: Synthetic oligonucleotide
  Sense strand starting at position 859 of SEQ ID NO: 588379
acccacuagucauggcaua

SEQ ID NO: 861149 - RNA, 19 nt, Artificial Sequence
  Description of Artificial Sequence: Synthetic oligonucleotide
  Antisense strand to SEQ ID NO: 861148
uaugccaugacuagugggu

SEQ ID NO: 861150 - RNA, 19 nt, Artificial Sequence
  Description of Artificial Sequence: Synthetic oligonucleotide
  Sense strand starting at position 1164 of SEQ ID NO: 588379
ccugguaguagcgguagaa

SEQ ID NO: 861151 - RNA, 19 nt, Artificial Sequence
  Description of Artificial Sequence: Synthetic oligonucleotide
  Antisense strand to SEQ ID NO: 861150
uucuaccgcuacuaccagg

SEQ ID NO: 861152 - RNA, 19 nt, Artificial Sequence
  Description of Artificial Sequence: Synthetic oligonucleotide
  Sense strand starting at position 1320 of SEQ ID NO: 588379
ccucguccaucgugacauu

SEQ ID NO: 861153 - RNA, 19 nt, Artificial Sequence
  Description of Artificial Sequence: Synthetic oligonucleotide
  Antisense strand to SEQ ID NO: 861152
aaugucacgauggacgagg

SEQ ID NO: 861154 - RNA, 19 nt, Artificial Sequence
  Description of Artificial Sequence: Synthetic oligonucleotide
  Sense strand starting at position 1649 of SEQ ID NO: 588379
gggcuuccgccgagaggaa

SEQ ID NO: 861155 - RNA, 19 nt, Artificial Sequence
  Description of Artificial Sequence: Synthetic oligonucleotide
  Antisense strand to SEQ ID NO: 861154
uuccucucggcggaagccc

SEQ ID NO: 861156 - RNA, 19 nt, Artificial Sequence
  Description of Artificial Sequence: Synthetic oligonucleotide
  Sense strand starting at position 2230 of SEQ ID NO: 588379
ugacguuggccauggagau

SEQ ID NO: 861157 - RNA, 19 nt, Artificial Sequence
  Description of Artificial Sequence: Synthetic oligonucleotide
  Antisense strand to SEQ ID NO: 861156
aucuccauggccaacguca

SEQ ID NO: 861158 - RNA, 19 nt, Artificial Sequence
  Description of Artificial Sequence: Synthetic oligonucleotide
  Sense strand starting at position 2231 of SEQ ID NO: 588379
gacguuggccauggagaua

SEQ ID NO: 861159 - RNA, 19 nt, Artificial Sequence
  Description of Artificial Sequence: Synthetic oligonucleotide
  Antisense strand to SEQ ID NO: 861158
uaucuccauggccaacguc

SEQ ID NO: 861160 - RNA, 19 nt, Artificial Sequence
  Description of Artificial Sequence: Synthetic oligonucleotide
  Sense strand starting at position 2258 of SEQ ID NO: 588379
gggugaugguuuaaggaag

SEQ ID NO: 861161 - RNA, 19 nt, Artificial Sequence
  Description of Artificial Sequence: Synthetic oligonucleotide
  Antisense strand to SEQ ID NO: 861160
cuuccuuaaaccaucaccc

SEQ ID NO: 861162 - RNA, 19 nt, Artificial Sequence
  Description of Artificial Sequence: Synthetic oligonucleotide
  Sense strand starting at position 2259 of SEQ ID NO: 588379
ggugaugguuuaaggaaga

SEQ ID NO: 861163 - RNA, 19 nt, Artificial Sequence
  Description of Artificial Sequence: Synthetic oligonucleotide
  Antisense strand to SEQ ID NO: 861162
ucuuccuuaaaccaucacc

SEQ ID NO: 861164 - RNA, 19 nt, Artificial Sequence
  Description of Artificial Sequence: Synthetic oligonucleotide
  Sense strand starting at position 2269 of SEQ ID NO: 588379
uaaggaagauaacguguaa

SEQ ID NO: 861165 - RNA, 19 nt, Artificial Sequence
  Description of Artificial Sequence: Synthetic oligonucleotide
  Antisense strand to SEQ ID NO: 861164
uuacacguuaucuuccuua

SEQ ID NO: 861166 - RNA, 19 nt, Artificial Sequence
  Description of Artificial Sequence: Synthetic oligonucleotide
  Sense strand starting at position 2293 of SEQ ID NO: 588379
uaaggacugucgguggaaa

SEQ ID NO: 861167 - RNA, 19 nt, Artificial Sequence
  Description of Artificial Sequence: Synthetic oligonucleotide
  Antisense strand to SEQ ID NO: 861166
uuuccaccgacaguccuua

SEQ ID NO: 861168 - RNA, 19 nt, Artificial Sequence
  Description of Artificial Sequence: Synthetic oligonucleotide
  Sense strand starting at position 2294 of SEQ ID NO: 588379
aaggacugucgguggaaau

SEQ ID NO: 861169 - RNA, 19 nt, Artificial Sequence
  Description of Artificial Sequence: Synthetic oligonucleotide
  Antisense strand to SEQ ID NO: 861168
auuuccaccgacaguccuu

SEQ ID NO: 861170 - RNA, 19 nt, Artificial Sequence
  Description of Artificial Sequence: Synthetic oligonucleotide
  Sense strand starting at position 2295 of SEQ ID NO: 588379
aggacugucgguggaaauc

SEQ ID NO: 861171 - RNA, 19 nt, Artificial Sequence
  Description of Artificial Sequence: Synthetic oligonucleotide
  Antisense strand to SEQ ID NO: 861170
gauuuccaccgacaguccu

SEQ ID NO: 861172 - RNA, 19 nt, Artificial Sequence
  Description of Artificial Sequence: Synthetic oligonucleotide
  Sense strand starting at position 2854 of SEQ ID NO: 588379
cgaguucucccauggucug

SEQ ID NO: 861173 - RNA, 19 nt, Artificial Sequence
  Description of Artificial Sequence: Synthetic oligonucleotide
  Antisense strand to SEQ ID NO: 861172
cagaccaugggagaacucg

SEQ ID NO: 861174 - RNA, 19 nt, Artificial Sequence
  Description of Artificial Sequence: Synthetic oligonucleotide
  Sense strand starting at position 3290 of SEQ ID NO: 588379
cacuguggcucucugacau

SEQ ID NO: 861175 - RNA, 19 nt, Artificial Sequence
  Description of Artificial Sequence: Synthetic oligonucleotide
  Antisense strand to SEQ ID NO: 861174
augucagagagccacagug

SEQ ID NO: 861176 - RNA, 19 nt, Artificial Sequence
  Description of Artificial Sequence: Synthetic oligonucleotide
  Sense strand starting at position 163 of SEQ ID NO: 588380
guccaaaugugagcucaug

SEQ ID NO: 861177 - RNA, 19 nt, Artificial Sequence
  Description of Artificial Sequence: Synthetic oligonucleotide
  Antisense strand to SEQ ID NO: 861176
caugagcucacauuuggac

SEQ ID NO: 861178 - RNA, 19 nt, Artificial Sequence
  Description of Artificial Sequence: Synthetic oligonucleotide
  Sense strand starting at position 274 of SEQ ID NO: 588380
gcucuugaucuaggaacca

SEQ ID NO: 861179 - RNA, 19 nt, Artificial Sequence
  Description of Artificial Sequence: Synthetic oligonucleotide
  Antisense strand to SEQ ID NO: 861178
ugguuccuagaucaagagc

SEQ ID NO: 861180 - RNA, 19 nt, Artificial Sequence
  Description of Artificial Sequence: Synthetic oligonucleotide
  Sense strand starting at position 690 of SEQ ID NO: 588380
guguguccugcagcaagua

SEQ ID NO: 861181 - RNA, 19 nt, Artificial Sequence
  Description of Artificial Sequence: Synthetic oligonucleotide
  Antisense strand to SEQ ID NO: 861180
uacuugcugcaggacacac

SEQ ID NO: 861182 - RNA, 19 nt, Artificial Sequence
  Description of Artificial Sequence: Synthetic oligonucleotide
  Sense strand starting at position 777 of SEQ ID NO: 588380
uugguuaaagaaugugcau

SEQ ID NO: 861183 - RNA, 19 nt, Artificial Sequence
  Description of Artificial Sequence: Synthetic oligonucleotide
  Antisense strand to SEQ ID NO: 861182
augcacauucuuuaaccaa

SEQ ID NO: 861184 - RNA, 19 nt, Artificial Sequence
  Description of Artificial Sequence: Synthetic oligonucleotide
  Sense strand starting at position 932 of SEQ ID NO: 588380
uugggaaugugguuguaga

SEQ ID NO: 861185 - RNA, 19 nt, Artificial Sequence
  Description of Artificial Sequence: Synthetic oligonucleotide
  Antisense strand to SEQ ID NO: 861184
ucuacaaccacauucccaa

SEQ ID NO: 861186 - RNA, 19 nt, Artificial Sequence
  Description of Artificial Sequence: Synthetic oligonucleotide
  Sense strand starting at position 933 of SEQ ID NO: 588380
ugggaaugugguuguagaa

SEQ ID NO: 861187 - RNA, 19 nt, Artificial Sequence
  Description of Artificial Sequence: Synthetic oligonucleotide
  Antisense strand to SEQ ID NO: 861186
uucuacaaccacauuccca

SEQ ID NO: 861188 - RNA, 19 nt, Artificial Sequence
  Description of Artificial Sequence: Synthetic oligonucleotide
  Sense strand starting at position 946 of SEQ ID NO: 588380
guagaauuacugggcugga

SEQ ID NO: 861189 - RNA, 19 nt, Artificial Sequence
  Description of Artificial Sequence: Synthetic oligonucleotide
  Antisense strand to SEQ ID NO: 861188
uccagcccaguaauucuac

SEQ ID NO: 861190 - RNA, 19 nt, Artificial Sequence
  Description of Artificial Sequence: Synthetic oligonucleotide
  Sense strand starting at position 947 of SEQ ID NO: 588380
uagaauuacugggcuggaa

SEQ ID NO: 861191 - RNA, 19 nt, Artificial Sequence
  Description of Artificial Sequence: Synthetic oligonucleotide
  Antisense strand to SEQ ID NO: 861190
uuccagcccaguaauucua

SEQ ID NO: 861192 - RNA, 19 nt, Artificial Sequence
  Description of Artificial Sequence: Synthetic oligonucleotide
  Sense strand starting at position 1050 of SEQ ID NO: 588380
guuguuuacuucuuugaaa

SEQ ID NO: 861193 - RNA, 19 nt, Artificial Sequence
  Description of Artificial Sequence: Synthetic oligonucleotide
  Antisense strand to SEQ ID NO: 861192
uuucaaagaaguaaacaac

SEQ ID NO: 861194 - RNA, 19 nt, Artificial Sequence
  Description of Artificial Sequence: Synthetic oligonucleotide
  Sense strand starting at position 1145 of SEQ ID NO: 588380
gugcucucaccggagacau

SEQ ID NO: 861195 - RNA, 19 nt, Artificial Sequence
  Description of Artificial Sequence: Synthetic oligonucleotide
  Antisense strand to SEQ ID NO: 861194
augucuccggugagagcac

SEQ ID NO: 861196 - RNA, 19 nt, Artificial Sequence
  Description of Artificial Sequence: Synthetic oligonucleotide
  Sense strand starting at position 1157 of SEQ ID NO: 588380
gagacauggcacugccauu

SEQ ID NO: 861197 - RNA, 19 nt, Artificial Sequence
  Description of Artificial Sequence: Synthetic oligonucleotide
  Antisense strand to SEQ ID NO: 861196
aauggcagugccaugucuc

SEQ ID NO: 861198 - RNA, 19 nt, Artificial Sequence
  Description of Artificial Sequence: Synthetic oligonucleotide
  Sense strand starting at position 1181 of SEQ ID NO: 588380
gguauuuccuuucuguguu

SEQ ID NO: 861199 - RNA, 19 nt, Artificial Sequence
  Description of Artificial Sequence: Synthetic oligonucleotide
  Antisense strand to SEQ ID NO: 861198
aacacagaaaggaaauacc

SEQ ID NO: 861200 - RNA, 19 nt, Artificial Sequence
  Description of Artificial Sequence: Synthetic oligonucleotide
  Sense strand starting at position 1215 of SEQ ID NO: 588380
acuagagcaggcuguaauu

SEQ ID NO: 861201 - RNA, 19 nt, Artificial Sequence
  Description of Artificial Sequence: Synthetic oligonucleotide
  Antisense strand to SEQ ID NO: 861200
aauuacagccugcucuagu

SEQ ID NO: 861202 - RNA, 19 nt, Artificial Sequence
  Description of Artificial Sequence: Synthetic oligonucleotide
  Sense strand starting at position 1457 of SEQ ID NO: 588380
accguauuagagggucuua

SEQ ID NO: 861203 - RNA, 19 nt, Artificial Sequence
  Description of Artificial Sequence: Synthetic oligonucleotide
  Antisense strand to SEQ ID NO: 861202
uaagacccucuaauacggu

SEQ ID NO: 861204 - RNA, 19 nt, Artificial Sequence
  Description of Artificial Sequence: Synthetic oligonucleotide
  Sense strand starting at position 1486 of SEQ ID NO: 588380
cugguaagcccguaagaag

SEQ ID NO: 861205 - RNA, 19 nt, Artificial Sequence
  Description of Artificial Sequence: Synthetic oligonucleotide
  Antisense strand to SEQ ID NO: 861204
cuucuuacgggcuuaccag

SEQ ID NO: 861206 - RNA, 19 nt, Artificial Sequence
  Description of Artificial Sequence: Synthetic oligonucleotide
  Sense strand starting at position 1524 of SEQ ID NO: 588380
cuuccuucucagugacaga

SEQ ID NO: 861207 - RNA, 19 nt, Artificial Sequence
  Description of Artificial Sequence: Synthetic oligonucleotide
  Antisense strand to SEQ ID NO: 861206
ucugucacugagaaggaag

SEQ ID NO: 861208 - RNA, 19 nt, Artificial Sequence
  Description of Artificial Sequence: Synthetic oligonucleotide
  Sense strand starting at position 1666 of SEQ ID NO: 588380
auguccuugccugaggaua

SEQ ID NO: 861209 - RNA, 19 nt, Artificial Sequence
  Description of Artificial Sequence: Synthetic oligonucleotide
  Antisense strand to SEQ ID NO: 861208
uauccucaggcaaggacau

SEQ ID NO: 861210 - RNA, 19 nt, Artificial Sequence
  Description of Artificial Sequence: Synthetic oligonucleotide
  Sense strand starting at position 1708 of SEQ ID NO: 588380
acaggaagaugugcauaaa

SEQ ID NO: 861211 - RNA, 19 nt, Artificial Sequence
  Description of Artificial Sequence: Synthetic oligonucleotide
  Antisense strand to SEQ ID NO: 861210
uuuaugcacaucuuccugu

SEQ ID NO: 861212 - RNA, 19 nt, Artificial Sequence
  Description of Artificial Sequence: Synthetic oligonucleotide
  Sense strand starting at position 1838 of SEQ ID NO: 588380
agguucuugauaugcagga

SEQ ID NO: 861213 - RNA, 19 nt, Artificial Sequence
  Description of Artificial Sequence: Synthetic oligonucleotide
  Antisense strand to SEQ ID NO: 861212
uccugcauaucaagaaccu

SEQ ID NO: 861214 - RNA, 19 nt, Artificial Sequence
  Description of Artificial Sequence: Synthetic oligonucleotide
  Sense strand starting at position 1839 of SEQ ID NO: 588380
gguucuugauaugcaggaa

SEQ ID NO: 861215 - RNA, 19 nt, Artificial Sequence
  Description of Artificial Sequence: Synthetic oligonucleotide
  Antisense strand to SEQ ID NO: 861214
uuccugcauaucaagaacc

SEQ ID NO: 861216 - RNA, 19 nt, Artificial Sequence
  Description of Artificial Sequence: Synthetic oligonucleotide
  Sense strand starting at position 1842 of SEQ ID NO: 588380
ucuugauaugcaggaacaa

SEQ ID NO: 861217 - RNA, 19 nt, Artificial Sequence
  Description of Artificial Sequence: Synthetic oligonucleotide
  Antisense strand to SEQ ID NO: 861216
uuguuccugcauaucaaga

SEQ ID NO: 861218 - RNA, 19 nt, Artificial Sequence
  Description of Artificial Sequence: Synthetic oligonucleotide
  Sense strand starting at position 2046 of SEQ ID NO: 588380
gagguaugaggucaucuca

SEQ ID NO: 861219 - RNA, 19 nt, Artificial Sequence
  Description of Artificial Sequence: Synthetic oligonucleotide
  Antisense strand to SEQ ID NO: 861218
ugagaugaccucauaccuc

SEQ ID NO: 861220 - RNA, 19 nt, Artificial Sequence
  Description of Artificial Sequence: Synthetic oligonucleotide
  Sense strand starting at position 2055 of SEQ ID NO: 588380
ggucaucucaaaggauguu

SEQ ID NO: 861221 - RNA, 19 nt, Artificial Sequence
  Description of Artificial Sequence: Synthetic oligonucleotide
  Antisense strand to SEQ ID NO: 861220
aacauccuuugagaugacc

SEQ ID NO: 861222 - RNA, 19 nt, Artificial Sequence
  Description of Artificial Sequence: Synthetic oligonucleotide
  Sense strand starting at position 2161 of SEQ ID NO: 588380
ugagacuccucugcuggaa

SEQ ID NO: 861223 - RNA, 19 nt, Artificial Sequence
  Description of Artificial Sequence: Synthetic oligonucleotide
  Antisense strand to SEQ ID NO: 861222
uuccagcagaggagucuca

SEQ ID NO: 861224 - RNA, 19 nt, Artificial Sequence
  Description of Artificial Sequence: Synthetic oligonucleotide
  Sense strand starting at position 2259 of SEQ ID NO: 588380
cucggaaaccuugaccuua

SEQ ID NO: 861225 - RNA, 19 nt, Artificial Sequence
  Description of Artificial Sequence: Synthetic oligonucleotide
  Antisense strand to SEQ ID NO: 861224
uaaggucaagguuuccgag

SEQ ID NO: 861226 - RNA, 19 nt, Artificial Sequence
  Description of Artificial Sequence: Synthetic oligonucleotide
  Sense strand starting at position 2361 of SEQ ID NO: 588380
ggcacuuaucauggaugga

SEQ ID NO: 861227 - RNA, 19 nt, Artificial Sequence
  Description of Artificial Sequence: Synthetic oligonucleotide
  Antisense strand to SEQ ID NO: 861226
uccauccaugauaagugcc

SEQ ID NO: 861228 - RNA, 19 nt, Artificial Sequence
  Description of Artificial Sequence: Synthetic oligonucleotide
  Sense strand starting at position 2472 of SEQ ID NO: 588380
aaaguuacagcuggagaaa

SEQ ID NO: 861229 - RNA, 19 nt, Artificial Sequence
  Description of Artificial Sequence: Synthetic oligonucleotide
  Antisense strand to SEQ ID NO: 861228
uuucuccagcuguaacuuu

SEQ ID NO: 861230 - RNA, 19 nt, Artificial Sequence
  Description of Artificial Sequence: Synthetic oligonucleotide
  Sense strand starting at position 2524 of SEQ ID NO: 588380
ggacucaauucugucuaac

SEQ ID NO: 861231 - RNA, 19 nt, Artificial Sequence
  Description of Artificial Sequence: Synthetic oligonucleotide
  Antisense strand to SEQ ID NO: 861230
guuagacagaauugagucc

SEQ ID NO: 861232 - RNA, 19 nt, Artificial Sequence
  Description of Artificial Sequence: Synthetic oligonucleotide
  Sense strand starting at position 2544 of SEQ ID NO: 588380
ccuuguagaucacugggau

SEQ ID NO: 861233 - RNA, 19 nt, Artificial Sequence
  Description of Artificial Sequence: Synthetic oligonucleotide
  Antisense strand to SEQ ID NO: 861232
aucccagugaucuacaagg

SEQ ID NO: 861234 - RNA, 19 nt, Artificial Sequence
  Description of Artificial Sequence: Synthetic oligonucleotide
  Sense strand starting at position 2545 of SEQ ID NO: 588380
cuuguagaucacugggauu

SEQ ID NO: 861235 - RNA, 19 nt, Artificial Sequence
  Description of Artificial Sequence: Synthetic oligonucleotide
  Antisense strand to SEQ ID NO: 861234
aaucccagugaucuacaag

SEQ ID NO: 861236 - RNA, 19 nt, Artificial Sequence
  Description of Artificial Sequence: Synthetic oligonucleotide
  Sense strand starting at position 2629 of SEQ ID NO: 588380
ccgcaucucgugcugugaa

SEQ ID NO: 861237 - RNA, 19 nt, Artificial Sequence
  Description of Artificial Sequence: Synthetic oligonucleotide
  Antisense strand to SEQ ID NO: 861236
uucacagcacgagaugcgg

SEQ ID NO: 861238 - RNA, 19 nt, Artificial Sequence
  Description of Artificial Sequence: Synthetic oligonucleotide
  Sense strand starting at position 2702 of SEQ ID NO: 588380
uagaaauagucacuaacga

SEQ ID NO: 861239 - RNA, 19 nt, Artificial Sequence
  Description of Artificial Sequence: Synthetic oligonucleotide
  Antisense strand to SEQ ID NO: 861238
ucguuagugacuauuucua

SEQ ID NO: 861240 - RNA, 19 nt, Artificial Sequence
  Description of Artificial Sequence: Synthetic oligonucleotide
  Sense strand starting at position 3028 of SEQ ID NO: 588380
gggagaggucuggguguca

SEQ ID NO: 861241 - RNA, 19 nt, Artificial Sequence
  Description of Artificial Sequence: Synthetic oligonucleotide
  Antisense strand to SEQ ID NO: 861240
ugacacccagaccucuccc

SEQ ID NO: 861242 - RNA, 19 nt, Artificial Sequence
  Description of Artificial Sequence: Synthetic oligonucleotide
  Sense strand starting at position 3194 of SEQ ID NO: 588380
uugcaacaucaauagguuu

SEQ ID NO: 861243 - RNA, 19 nt, Artificial Sequence
  Description of Artificial Sequence: Synthetic oligonucleotide
  Antisense strand to SEQ ID NO: 861242
aaaccuauugauguugcaa

SEQ ID NO: 861244 - RNA, 19 nt, Artificial Sequence
  Description of Artificial Sequence: Synthetic oligonucleotide
  Sense strand starting at position 3253 of SEQ ID NO: 588380
caauguucccaagaguaug

SEQ ID NO: 861245 - RNA, 19 nt, Artificial Sequence
  Description of Artificial Sequence: Synthetic oligonucleotide
  Antisense strand to SEQ ID NO: 861244
cauacucuugggaacauug

SEQ ID NO: 861246 - RNA, 19 nt, Artificial Sequence
  Description of Artificial Sequence: Synthetic oligonucleotide
  Sense strand starting at position 3444 of SEQ ID NO: 588380
aggauuacuuugccaagcu

SEQ ID NO: 861247 - RNA, 19 nt, Artificial Sequence
  Description of Artificial Sequence: Synthetic oligonucleotide
  Antisense strand to SEQ ID NO: 861246
agcuuggcaaaguaauccu

SEQ ID NO: 861248 - RNA, 19 nt, Artificial Sequence
  Description of Artificial Sequence: Synthetic oligonucleotide
  Sense strand starting at position 3549 of SEQ ID NO: 588380
gugagaaguugggcaguga

SEQ ID NO: 861249 - RNA, 19 nt, Artificial Sequence
  Description of Artificial Sequence: Synthetic oligonucleotide
  Antisense strand to SEQ ID NO: 861248
ucacugcccaacuucucac

SEQ ID NO: 861250 - RNA, 19 nt, Artificial Sequence
  Description of Artificial Sequence: Synthetic oligonucleotide
  Sense strand starting at position 3550 of SEQ ID NO: 588380
ugagaaguugggcagugau

SEQ ID NO: 861251 - RNA, 19 nt, Artificial Sequence
  Description of Artificial Sequence: Synthetic oligonucleotide
  Antisense strand to SEQ ID NO: 861250
aucacugcccaacuucuca

SEQ ID NO: 861252 - RNA, 19 nt, Artificial Sequence
  Description of Artificial Sequence: Synthetic oligonucleotide
  Sense strand starting at position 3777 of SEQ ID NO: 588380
aggcuccuugcugaaagaa

SEQ ID NO: 861253 - RNA, 19 nt, Artificial Sequence
  Description of Artificial Sequence: Synthetic oligonucleotide
  Antisense strand to SEQ ID NO: 861252
uucuuucagcaaggagccu

SEQ ID NO: 861254 - RNA, 19 nt, Artificial Sequence
  Description of Artificial Sequence: Synthetic oligonucleotide
  Sense strand starting at position 3834 of SEQ ID NO: 588380
gucauuauuucugcaaagu

SEQ ID NO: 861255 - RNA, 19 nt, Artificial Sequence
  Description of Artificial Sequence: Synthetic oligonucleotide
  Antisense strand to SEQ ID NO: 861254
acuuugcagaaauaaugac

SEQ ID NO: 861256 - RNA, 19 nt, Artificial Sequence
  Description of Artificial Sequence: Synthetic oligonucleotide
  Sense strand starting at position 336 of SEQ ID NO: 588381
uccacugagccauagauau

SEQ ID NO: 861257 - RNA, 19 nt, Artificial Sequence
  Description of Artificial Sequence: Synthetic oligonucleotide
  Antisense strand to SEQ ID NO: 861256
auaucuauggcucagugga

SEQ ID NO: 861258 - RNA, 19 nt, Artificial Sequence
  Description of Artificial Sequence: Synthetic oligonucleotide
  Sense strand starting at position 726 of SEQ ID NO: 588381
aucaauaucgggugagaag

SEQ ID NO: 861259 - RNA, 19 nt, Artificial Sequence
  Description of Artificial Sequence: Synthetic oligonucleotide
  Antisense strand to SEQ ID NO: 861258
cuucucacccgauauugau

SEQ ID NO: 861260 - RNA, 19 nt, Artificial Sequence
  Description of Artificial Sequence: Synthetic oligonucleotide
  Sense strand starting at position 932 of SEQ ID NO: 588381
ucaagugaguguguuacaa

SEQ ID NO: 861261 - RNA, 19 nt, Artificial Sequence
  Description of Artificial Sequence: Synthetic oligonucleotide
  Antisense strand to SEQ ID NO: 861260
uuguaacacacucacuuga

SEQ ID NO: 861262 - RNA, 19 nt, Artificial Sequence
  Description of Artificial Sequence: Synthetic oligonucleotide
  Sense strand starting at position 958 of SEQ ID NO: 588381
acgugcuauuauuugauca

SEQ ID NO: 861263 - RNA, 19 nt, Artificial Sequence
  Description of Artificial Sequence: Synthetic oligonucleotide
  Antisense strand to SEQ ID NO: 861262
ugaucaaauaauagcacgu

SEQ ID NO: 861264 - RNA, 19 nt, Artificial Sequence
  Description of Artificial Sequence: Synthetic oligonucleotide
  Sense strand starting at position 989 of SEQ ID NO: 588381
agaaguauuuaaggaagaa

SEQ ID NO: 861265 - RNA, 19 nt, Artificial Sequence
  Description of Artificial Sequence: Synthetic oligonucleotide
  Antisense strand to SEQ ID NO: 861264
uucuuccuuaaauacuucu

SEQ ID NO: 861266 - RNA, 19 nt, Artificial Sequence
  Description of Artificial Sequence: Synthetic oligonucleotide
  Sense strand starting at position 1102 of SEQ ID NO: 588381
acggauugcuccuugaaug

SEQ ID NO: 861267 - RNA, 19 nt, Artificial Sequence
  Description of Artificial Sequence: Synthetic oligonucleotide
  Antisense strand to SEQ ID NO: 861266
cauucaaggagcaauccgu

SEQ ID NO: 861268 - RNA, 19 nt, Artificial Sequence
  Description of Artificial Sequence: Synthetic oligonucleotide
  Sense strand starting at position 1180 of SEQ ID NO: 588381
acacgaaucucugcaagca

SEQ ID NO: 861269 - RNA, 19 nt, Artificial Sequence
  Description of Artificial Sequence: Synthetic oligonucleotide
  Antisense strand to SEQ ID NO: 861268
ugcuugcagagauucgugu

SEQ ID NO: 861270 - RNA, 19 nt, Artificial Sequence
  Description of Artificial Sequence: Synthetic oligonucleotide
  Sense strand starting at position 1478 of SEQ ID NO: 588381
cugucuuuccgggugcuua

SEQ ID NO: 861271 - RNA, 19 nt, Artificial Sequence
  Description of Artificial Sequence: Synthetic oligonucleotide
  Antisense strand to SEQ ID NO: 861270
uaagcacccggaaagacag

SEQ ID NO: 861272 - RNA, 19 nt, Artificial Sequence
  Description of Artificial Sequence: Synthetic oligonucleotide
  Sense strand starting at position 1538 of SEQ ID NO: 588381
cagaauaucugacuggugu

SEQ ID NO: 861273 - RNA, 19 nt, Artificial Sequence
  Description of Artificial Sequence: Synthetic oligonucleotide
  Antisense strand to SEQ ID NO: 861272
acaccagucagauauucug

SEQ ID NO: 861274 - RNA, 19 nt, Artificial Sequence
  Description of Artificial Sequence: Synthetic oligonucleotide
  Sense strand starting at position 1539 of SEQ ID NO: 588381
agaauaucugacugguguc

SEQ ID NO: 861275 - RNA, 19 nt, Artificial Sequence
  Description of Artificial Sequence: Synthetic oligonucleotide
  Antisense strand to SEQ ID NO: 861274
gacaccagucagauauucu

SEQ ID NO: 861276 - RNA, 19 nt, Artificial Sequence
  Description of Artificial Sequence: Synthetic oligonucleotide
  Sense strand starting at position 1659 of SEQ ID NO: 588381
cucgguuuccauuauggga

SEQ ID NO: 861277 - RNA, 19 nt, Artificial Sequence
  Description of Artificial Sequence: Synthetic oligonucleotide
  Antisense strand to SEQ ID NO: 861276
ucccauaauggaaaccgag

SEQ ID NO: 861278 - RNA, 19 nt, Artificial Sequence
  Description of Artificial Sequence: Synthetic oligonucleotide
  Sense strand starting at position 1690 of SEQ ID NO: 588381
gaagcuccgucucugagau

SEQ ID NO: 861279 - RNA, 19 nt, Artificial Sequence
  Description of Artificial Sequence: Synthetic oligonucleotide
  Antisense strand to SEQ ID NO: 861278
aucucagagacggagcuuc

SEQ ID NO: 861280 - RNA, 19 nt, Artificial Sequence
  Description of Artificial Sequence: Synthetic oligonucleotide
  Sense strand starting at position 1854 of SEQ ID NO: 588381
cgagaaguuuccaggagga

SEQ ID NO: 861281 - RNA, 19 nt, Artificial Sequence
  Description of Artificial Sequence: Synthetic oligonucleotide
  Antisense strand to SEQ ID NO: 861280
uccuccuggaaacuucucg

SEQ ID NO: 861282 - RNA, 19 nt, Artificial Sequence
  Description of Artificial Sequence: Synthetic oligonucleotide
  Sense strand starting at position 2206 of SEQ ID NO: 588381
ggucuccuuccagggaaca

SEQ ID NO: 861283 - RNA, 19 nt, Artificial Sequence
  Description of Artificial Sequence: Synthetic oligonucleotide
  Antisense strand to SEQ ID NO: 861282
uguucccuggaaggagacc

SEQ ID NO: 861284 - RNA, 19 nt, Artificial Sequence
  Description of Artificial Sequence: Synthetic oligonucleotide
  Sense strand starting at position 2322 of SEQ ID NO: 588381
caaggaaggguuugcuaaa

SEQ ID NO: 861285 - RNA, 19 nt, Artificial Sequence
  Description of Artificial Sequence: Synthetic oligonucleotide
  Antisense strand to SEQ ID NO: 861284
uuuagcaaacccuuccuug

SEQ ID NO: 861286 - RNA, 19 nt, Artificial Sequence
  Description of Artificial Sequence: Synthetic oligonucleotide
  Sense strand starting at position 2660 of SEQ ID NO: 588381
gggagaccuugagugugaa

SEQ ID NO: 861287 - RNA, 19 nt, Artificial Sequence
  Description of Artificial Sequence: Synthetic oligonucleotide
  Antisense strand to SEQ ID NO: 861286
uucacacucaaggucuccc

SEQ ID NO: 861288 - RNA, 19 nt, Artificial Sequence
  Description of Artificial Sequence: Synthetic oligonucleotide
  Sense strand starting at position 2661 of SEQ ID NO: 588381
ggagaccuugagugugaau

SEQ ID NO: 861289 - RNA, 19 nt, Artificial Sequence
  Description of Artificial Sequence: Synthetic oligonucleotide
  Antisense strand to SEQ ID NO: 861288
auucacacucaaggucucc

SEQ ID NO: 861290 - RNA, 19 nt, Artificial Sequence
  Description of Artificial Sequence: Synthetic oligonucleotide
  Sense strand starting at position 2702 of SEQ ID NO: 588381
ggaugagaguaggugaauu

SEQ ID NO: 861291 - RNA, 19 nt, Artificial Sequence
  Description of Artificial Sequence: Synthetic oligonucleotide
  Antisense strand to SEQ ID NO: 861290
aauucaccuacucucaucc

SEQ ID NO: 861292 - RNA, 19 nt, Artificial Sequence
  Description of Artificial Sequence: Synthetic oligonucleotide
  Sense strand starting at position 2774 of SEQ ID NO: 588381
guaggauggcuguggacuu

SEQ ID NO: 861293 - RNA, 19 nt, Artificial Sequence
  Description of Artificial Sequence: Synthetic oligonucleotide
  Antisense strand to SEQ ID NO: 861292
aaguccacagccauccuac

SEQ ID NO: 861294 - RNA, 19 nt, Artificial Sequence
  Description of Artificial Sequence: Synthetic oligonucleotide
  Sense strand starting at position 2852 of SEQ ID NO: 588381
uggacugagccagguuaga

SEQ ID NO: 861295 - RNA, 19 nt, Artificial Sequence
  Description of Artificial Sequence: Synthetic oligonucleotide
  Antisense strand to SEQ ID NO: 861294
ucuaaccuggcucagucca

SEQ ID NO: 861296 - RNA, 19 nt, Artificial Sequence
  Description of Artificial Sequence: Synthetic oligonucleotide
  Sense strand starting at position 2998 of SEQ ID NO: 588381
ccuucuuccuuggcaagau

SEQ ID NO: 861297 - RNA, 19 nt, Artificial Sequence
  Description of Artificial Sequence: Synthetic oligonucleotide
  Antisense strand to SEQ ID NO: 861296
aucuugccaaggaagaagg

SEQ ID NO: 861298 - RNA, 19 nt, Artificial Sequence
  Description of Artificial Sequence: Synthetic oligonucleotide
  Sense strand starting at position 3002 of SEQ ID NO: 588381
cuuccuuggcaagaucagu

SEQ ID NO: 861299 - RNA, 19 nt, Artificial Sequence
  Description of Artificial Sequence: Synthetic oligonucleotide
  Antisense strand to SEQ ID NO: 861298
acugaucuugccaaggaag

SEQ ID NO: 861300 - RNA, 19 nt, Artificial Sequence
  Description of Artificial Sequence: Synthetic oligonucleotide
  Sense strand starting at position 3102 of SEQ ID NO: 588381
ggagaugugugguccugag

SEQ ID NO: 861301 - RNA, 19 nt, Artificial Sequence
  Description of Artificial Sequence: Synthetic oligonucleotide
  Antisense strand to SEQ ID NO: 861300
cucaggaccacacaucucc

SEQ ID NO: 861302 - RNA, 19 nt, Artificial Sequence
  Description of Artificial Sequence: Synthetic oligonucleotide
  Sense strand starting at position 3106 of SEQ ID NO: 588381
augugugguccugagacua

SEQ ID NO: 861303 - RNA, 19 nt, Artificial Sequence
  Description of Artificial Sequence: Synthetic oligonucleotide
  Antisense strand to SEQ ID NO: 861302
uagucucaggaccacacau

SEQ ID NO: 861304 - RNA, 19 nt, Artificial Sequence
  Description of Artificial Sequence: Synthetic oligonucleotide
  Sense strand starting at position 3116 of SEQ ID NO: 588381
cugagacuaugacuaguua

SEQ ID NO: 861305 - RNA, 19 nt, Artificial Sequence
  Description of Artificial Sequence: Synthetic oligonucleotide
  Antisense strand to SEQ ID NO: 861304
uaacuagucauagucucag

SEQ ID NO: 861306 - RNA, 19 nt, Artificial Sequence
  Description of Artificial Sequence: Synthetic oligonucleotide
  Sense strand starting at position 3120 of SEQ ID NO: 588381
gacuaugacuaguuaagac

SEQ ID NO: 861307 - RNA, 19 nt, Artificial Sequence
  Description of Artificial Sequence: Synthetic oligonucleotide
  Antisense strand to SEQ ID NO: 861306
gucuuaacuagucauaguc

SEQ ID NO: 861308 - RNA, 19 nt, Artificial Sequence
  Description of Artificial Sequence: Synthetic oligonucleotide
  Sense strand starting at position 3144 of SEQ ID NO: 588381
ucggguuccgugguguuua

SEQ ID NO: 861309 - RNA, 19 nt, Artificial Sequence
  Description of Artificial Sequence: Synthetic oligonucleotide
  Antisense strand to SEQ ID NO: 861308
uaaacaccacggaacccga

SEQ ID NO: 861310 - RNA, 19 nt, Artificial Sequence
  Description of Artificial Sequence: Synthetic oligonucleotide
  Sense strand starting at position 3292 of SEQ ID NO: 588381
ccucaaaguccugaaguca

SEQ ID NO: 861311 - RNA, 19 nt, Artificial Sequence
  Description of Artificial Sequence: Synthetic oligonucleotide
  Antisense strand to SEQ ID NO: 861310
ugacuucaggacuuugagg

SEQ ID NO: 861312 - RNA, 19 nt, Artificial Sequence
  Description of Artificial Sequence: Synthetic oligonucleotide
  Sense strand starting at position 3449 of SEQ ID NO: 588381
uuaagucuagaaggcuuua

SEQ ID NO: 861313 - RNA, 19 nt, Artificial Sequence
  Description of Artificial Sequence: Synthetic oligonucleotide
  Antisense strand to SEQ ID NO: 861312
uaaagccuucuagacuuaa

SEQ ID NO: 861314 - RNA, 19 nt, Artificial Sequence
  Description of Artificial Sequence: Synthetic oligonucleotide
  Sense strand starting at position 3547 of SEQ ID NO: 588381
aagagaaucuggccuauug

SEQ ID NO: 861315 - RNA, 19 nt, Artificial Sequence
  Description of Artificial Sequence: Synthetic oligonucleotide
  Antisense strand to SEQ ID NO: 861314
caauaggccagauucucuu

SEQ ID NO: 861316 - RNA, 19 nt, Artificial Sequence
  Description of Artificial Sequence: Synthetic oligonucleotide
  Sense strand starting at position 3596 of SEQ ID NO: 588381
uggccaauugaguaauuga

SEQ ID NO: 861317 - RNA, 19 nt, Artificial Sequence
  Description of Artificial Sequence: Synthetic oligonucleotide
  Antisense strand to SEQ ID NO: 861316
ucaauuacucaauuggcca

SEQ ID NO: 861318 - RNA, 19 nt, Artificial Sequence
  Description of Artificial Sequence: Synthetic oligonucleotide
  Sense strand starting at position 3622 of SEQ ID NO: 588381
gagugcauuuaugcggaaa

SEQ ID NO: 861319 - RNA, 19 nt, Artificial Sequence
  Description of Artificial Sequence: Synthetic oligonucleotide
  Antisense strand to SEQ ID NO: 861318
uuuccgcauaaaugcacuc

SEQ ID NO: 861320 - RNA, 19 nt, Artificial Sequence
  Description of Artificial Sequence: Synthetic oligonucleotide
  Sense strand starting at position 3677 of SEQ ID NO: 588381
uuggaacucugaguuuauc

SEQ ID NO: 861321 - RNA, 19 nt, Artificial Sequence
  Description of Artificial Sequence: Synthetic oligonucleotide
  Antisense strand to SEQ ID NO: 861320
gauaaacucagaguuccaa

SEQ ID NO: 861322 - RNA, 19 nt, Artificial Sequence
  Description of Artificial Sequence: Synthetic oligonucleotide
  Sense strand starting at position 3752 of SEQ ID NO: 588381
aaaguuagacaagguacua

SEQ ID NO: 861323 - RNA, 19 nt, Artificial Sequence
  Description of Artificial Sequence: Synthetic oligonucleotide
  Antisense strand to SEQ ID NO: 861322
uaguaccuugucuaacuuu

SEQ ID NO: 861324 - RNA, 19 nt, Artificial Sequence
  Description of Artificial Sequence: Synthetic oligonucleotide
  Sense strand starting at position 3773 of SEQ ID NO: 588381
ggauaaaugugguucuauu

SEQ ID NO: 861325 - RNA, 19 nt, Artificial Sequence
  Description of Artificial Sequence: Synthetic oligonucleotide
  Antisense strand to SEQ ID NO: 861324
aauagaaccacauuuaucc

SEQ ID NO: 861326 - RNA, 19 nt, Artificial Sequence
  Description of Artificial Sequence: Synthetic oligonucleotide
  Sense strand starting at position 3796 of SEQ ID NO: 588381
guauaaaugcaguaacaau

SEQ ID NO: 861327 - RNA, 19 nt, Artificial Sequence
  Description of Artificial Sequence: Synthetic oligonucleotide
  Antisense strand to SEQ ID NO: 861326
auuguuacugcauuuauac

SEQ ID NO: 861328 - RNA, 19 nt, Artificial Sequence
  Description of Artificial Sequence: Synthetic oligonucleotide
  Sense strand starting at position 3824 of SEQ ID NO: 588381
uguuuaguuggcuaaguua

SEQ ID NO: 861329 - RNA, 19 nt, Artificial Sequence
  Description of Artificial Sequence: Synthetic oligonucleotide
  Antisense strand to SEQ ID NO: 861328
uaacuuagccaacuaaaca

SEQ ID NO: 861330 - RNA, 19 nt, Artificial Sequence
  Description of Artificial Sequence: Synthetic oligonucleotide
  Sense strand starting at position 3870 of SEQ ID NO: 588381
cuccuuauaggugguuauu

SEQ ID NO: 861331 - RNA, 19 nt, Artificial Sequence
  Description of Artificial Sequence: Synthetic oligonucleotide
  Antisense strand to SEQ ID NO: 861330
aauaaccaccuauaaggag

SEQ ID NO: 861332 - RNA, 19 nt, Artificial Sequence
  Description of Artificial Sequence: Synthetic oligonucleotide
  Sense strand starting at position 3872 of SEQ ID NO: 588381
ccuuauaggugguuauuaa

SEQ ID NO: 861333 - RNA, 19 nt, Artificial Sequence
  Description of Artificial Sequence: Synthetic oligonucleotide
  Antisense strand to SEQ ID NO: 861332
uuaauaaccaccuauaagg

SEQ ID NO: 861334 - RNA, 19 nt, Artificial Sequence
  Description of Artificial Sequence: Synthetic oligonucleotide
  Sense strand starting at position 3873 of SEQ ID NO: 588381
cuuauaggugguuauuaaa

SEQ ID NO: 861335 - RNA, 19 nt, Artificial Sequence
  Description of Artificial Sequence: Synthetic oligonucleotide
  Antisense strand to SEQ ID NO: 861334
uuuaauaaccaccuauaag

SEQ ID NO: 861336 - RNA, 19 nt, Artificial Sequence
  Description of Artificial Sequence: Synthetic oligonucleotide
  Sense strand starting at position 226 of SEQ ID NO: 588382
ccacgaugggcuugaagaa

SEQ ID NO: 861337 - RNA, 19 nt, Artificial Sequence
  Description of Artificial Sequence: Synthetic oligonucleotide
  Antisense strand to SEQ ID NO: 861336
uucuucaagcccaucgugg

SEQ ID NO: 861338 - RNA, 19 nt, Artificial Sequence
  Description of Artificial Sequence: Synthetic oligonucleotide
  Sense strand starting at position 358 of SEQ ID NO: 588382
aguccugagguuugaggau

SEQ ID NO: 861339 - RNA, 19 nt, Artificial Sequence
  Description of Artificial Sequence: Synthetic oligonucleotide
  Antisense strand to SEQ ID NO: 861338
auccucaaaccucaggacu

SEQ ID NO: 861340 - RNA, 19 nt, Artificial Sequence
  Description of Artificial Sequence: Synthetic oligonucleotide
  Sense strand starting at position 380 of SEQ ID NO: 588382
gagggauacuugggacaca

SEQ ID NO: 861341 - RNA, 19 nt, Artificial Sequence
  Description of Artificial Sequence: Synthetic oligonucleotide
  Antisense strand to SEQ ID NO: 861340
ugugucccaaguaucccuc

SEQ ID NO: 861342 - RNA, 19 nt, Artificial Sequence
  Description of Artificial Sequence: Synthetic oligonucleotide
  Sense strand starting at position 427 of SEQ ID NO: 588382
ugcuaacucucagugaaug

SEQ ID NO: 861343 - RNA, 19 nt, Artificial Sequence
  Description of Artificial Sequence: Synthetic oligonucleotide
  Antisense strand to SEQ ID NO: 861342
cauucacugagaguuagca

SEQ ID NO: 861344 - RNA, 19 nt, Artificial Sequence
  Description of Artificial Sequence: Synthetic oligonucleotide
  Sense strand starting at position 428 of SEQ ID NO: 588382
gcuaacucucagugaauga

SEQ ID NO: 861345 - RNA, 19 nt, Artificial Sequence
  Description of Artificial Sequence: Synthetic oligonucleotide
  Antisense strand to SEQ ID NO: 861344
ucauucacugagaguuagc

SEQ ID NO: 861346 - RNA, 19 nt, Artificial Sequence
  Description of Artificial Sequence: Synthetic oligonucleotide
  Sense strand starting at position 577 of SEQ ID NO: 588382
uucccugcuguugagaaau

SEQ ID NO: 861347 - RNA, 19 nt, Artificial Sequence
  Description of Artificial Sequence: Synthetic oligonucleotide
  Antisense strand to SEQ ID NO: 861346
auuucucaacagcagggaa

SEQ ID NO: 861348 - RNA, 19 nt, Artificial Sequence
  Description of Artificial Sequence: Synthetic oligonucleotide
  Sense strand starting at position 583 of SEQ ID NO: 588382
gcuguugagaaauguuuaa

SEQ ID NO: 861349 - RNA, 19 nt, Artificial Sequence
  Description of Artificial Sequence: Synthetic oligonucleotide
  Antisense strand to SEQ ID NO: 861348
uuaaacauuucucaacagc

SEQ ID NO: 861350 - RNA, 19 nt, Artificial Sequence
  Description of Artificial Sequence: Synthetic oligonucleotide
  Sense strand starting at position 722 of SEQ ID NO: 588382
gcacucauuguuuacacuu

SEQ ID NO: 861351 - RNA, 19 nt, Artificial Sequence
  Description of Artificial Sequence: Synthetic oligonucleotide
  Antisense strand to SEQ ID NO: 861350
aaguguaaacaaugagugc

SEQ ID NO: 861352 - RNA, 19 nt, Artificial Sequence
  Description of Artificial Sequence: Synthetic oligonucleotide
  Sense strand starting at position 753 of SEQ ID NO: 588382
aggcaaugauaccuguauu

SEQ ID NO: 861353 - RNA, 19 nt, Artificial Sequence
  Description of Artificial Sequence: Synthetic oligonucleotide
  Antisense strand to SEQ ID NO: 861352
aauacagguaucauugccu

SEQ ID NO: 861354 - RNA, 19 nt, Artificial Sequence
  Description of Artificial Sequence: Synthetic oligonucleotide
  Sense strand starting at position 763 of SEQ ID NO: 588382
accuguauuucccagccau

SEQ ID NO: 861355 - RNA, 19 nt, Artificial Sequence
  Description of Artificial Sequence: Synthetic oligonucleotide
  Antisense strand to SEQ ID NO: 861354
auggcugggaaauacaggu

SEQ ID NO: 861356 - RNA, 19 nt, Artificial Sequence
  Description of Artificial Sequence: Synthetic oligonucleotide
  Sense strand starting at position 930 of SEQ ID NO: 588382
gcccaugucuauccgaaga

SEQ ID NO: 861357 - RNA, 19 nt, Artificial Sequence
  Description of Artificial Sequence: Synthetic oligonucleotide
  Antisense strand to SEQ ID NO: 861356
ucuucggauagacaugggc

SEQ ID NO: 861358 - RNA, 19 nt, Artificial Sequence
  Description of Artificial Sequence: Synthetic oligonucleotide
  Sense strand starting at position 943 of SEQ ID NO: 588382
cgaagaacuggaggucuua

SEQ ID NO: 861359 - RNA, 19 nt, Artificial Sequence
  Description of Artificial Sequence: Synthetic oligonucleotide
  Antisense strand to SEQ ID NO: 861358
uaagaccuccaguucuucg

SEQ ID NO: 861360 - RNA, 19 nt, Artificial Sequence
  Description of Artificial Sequence: Synthetic oligonucleotide
  Sense strand starting at position 1022 of SEQ ID NO: 588382
ucucccuuaugagaaguga

SEQ ID NO: 861361 - RNA, 19 nt, Artificial Sequence
  Description of Artificial Sequence: Synthetic oligonucleotide
  Antisense strand to SEQ ID NO: 861360
ucacuucucauaagggaga

SEQ ID NO: 861362 - RNA, 19 nt, Artificial Sequence
  Description of Artificial Sequence: Synthetic oligonucleotide
  Sense strand starting at position 1139 of SEQ ID NO: 588382
ggcaaugauauguguucuu

SEQ ID NO: 861363 - RNA, 19 nt, Artificial Sequence
  Description of Artificial Sequence: Synthetic oligonucleotide
  Antisense strand to SEQ ID NO: 861362
aagaacacauaucauugcc

SEQ ID NO: 861364 - RNA, 19 nt, Artificial Sequence
  Description of Artificial Sequence: Synthetic oligonucleotide
  Sense strand starting at position 1293 of SEQ ID NO: 588382
ggagaauccuguucccgag

SEQ ID NO: 861365 - RNA, 19 nt, Artificial Sequence
  Description of Artificial Sequence: Synthetic oligonucleotide
  Antisense strand to SEQ ID NO: 861364
cucgggaacaggauucucc

SEQ ID NO: 861366 - RNA, 19 nt, Artificial Sequence
  Description of Artificial Sequence: Synthetic oligonucleotide
  Sense strand starting at position 2076 of SEQ ID NO: 588382
agccauuaccucugccaga

SEQ ID NO: 861367 - RNA, 19 nt, Artificial Sequence
  Description of Artificial Sequence: Synthetic oligonucleotide
  Antisense strand to SEQ ID NO: 861366
ucuggcagagguaauggcu

SEQ ID NO: 861368 - RNA, 19 nt, Artificial Sequence
  Description of Artificial Sequence: Synthetic oligonucleotide
  Sense strand starting at position 2206 of SEQ ID NO: 588382
auaggcacuugcuuaaaga

SEQ ID NO: 861369 - RNA, 19 nt, Artificial Sequence
  Description of Artificial Sequence: Synthetic oligonucleotide
  Antisense strand to SEQ ID NO: 861368
ucuuuaagcaagugccuau

SEQ ID NO: 861370 - RNA, 19 nt, Artificial Sequence
  Description of Artificial Sequence: Synthetic oligonucleotide
  Sense strand starting at position 2215 of SEQ ID NO: 588382
ugcuuaaagagguguuggu

SEQ ID NO: 861371 - RNA, 19 nt, Artificial Sequence
  Description of Artificial Sequence: Synthetic oligonucleotide
  Antisense strand to SEQ ID NO: 861370
accaacaccucuuuaagca

SEQ ID NO: 861372 - RNA, 19 nt, Artificial Sequence
  Description of Artificial Sequence: Synthetic oligonucleotide
  Sense strand starting at position 2345 of SEQ ID NO: 588382
gugugguaggcuguguaua

SEQ ID NO: 861373 - RNA, 19 nt, Artificial Sequence
  Description of Artificial Sequence: Synthetic oligonucleotide
  Antisense strand to SEQ ID NO: 861372
uauacacagccuaccacac

SEQ ID NO: 861374 - RNA, 19 nt, Artificial Sequence
  Description of Artificial Sequence: Synthetic oligonucleotide
  Sense strand starting at position 2355 of SEQ ID NO: 588382
cuguguauaguguaucuga

SEQ ID NO: 861375 - RNA, 19 nt, Artificial Sequence
  Description of Artificial Sequence: Synthetic oligonucleotide
  Antisense strand to SEQ ID NO: 861374
ucagauacacuauacacag

SEQ ID NO: 861376 - RNA, 19 nt, Artificial Sequence
  Description of Artificial Sequence: Synthetic oligonucleotide
  Sense strand starting at position 2358 of SEQ ID NO: 588382
uguauaguguaucugaugu

SEQ ID NO: 861377 - RNA, 19 nt, Artificial Sequence
  Description of Artificial Sequence: Synthetic oligonucleotide
  Antisense strand to SEQ ID NO: 861376
acaucagauacacuauaca

SEQ ID NO: 861378 - RNA, 19 nt, Artificial Sequence
  Description of Artificial Sequence: Synthetic oligonucleotide
  Sense strand starting at position 2384 of SEQ ID NO: 588382
guguaaugcgcuuuguggu

SEQ ID NO: 861379 - RNA, 19 nt, Artificial Sequence
  Description of Artificial Sequence: Synthetic oligonucleotide
  Antisense strand to SEQ ID NO: 861378
accacaaagcgcauuacac

SEQ ID NO: 861380 - RNA, 19 nt, Artificial Sequence
  Description of Artificial Sequence: Synthetic oligonucleotide
  Sense strand starting at position 2420 of SEQ ID NO: 588382
auguguuguaugugggaug

SEQ ID NO: 861381 - RNA, 19 nt, Artificial Sequence
  Description of Artificial Sequence: Synthetic oligonucleotide
  Antisense strand to SEQ ID NO: 861380
caucccacauacaacacau

SEQ ID NO: 861382 - RNA, 19 nt, Artificial Sequence
  Description of Artificial Sequence: Synthetic oligonucleotide
  Sense strand starting at position 2432 of SEQ ID NO: 588382
ugggaugugauguguguau

SEQ ID NO: 861383 - RNA, 19 nt, Artificial Sequence
  Description of Artificial Sequence: Synthetic oligonucleotide
  Antisense strand to SEQ ID NO: 861382
auacacacaucacauccca

SEQ ID NO: 861384 - RNA, 19 nt, Artificial Sequence
  Description of Artificial Sequence: Synthetic oligonucleotide
  Sense strand starting at position 2436 of SEQ ID NO: 588382
augugauguguguauggua

SEQ ID NO: 861385 - RNA, 19 nt, Artificial Sequence
  Description of Artificial Sequence: Synthetic oligonucleotide
  Antisense strand to SEQ ID NO: 861384
uaccauacacacaucacau

SEQ ID NO: 861386 - RNA, 19 nt, Artificial Sequence
  Description of Artificial Sequence: Synthetic oligonucleotide
  Sense strand starting at position 2437 of SEQ ID NO: 588382
ugugauguguguaugguau

SEQ ID NO: 861387 - RNA, 19 nt, Artificial Sequence
  Description of Artificial Sequence: Synthetic oligonucleotide
  Antisense strand to SEQ ID NO: 861386
auaccauacacacaucaca

SEQ ID NO: 861388 - RNA, 19 nt, Artificial Sequence
  Description of Artificial Sequence: Synthetic oligonucleotide
  Sense strand starting at position 2480 of SEQ ID NO: 588382
guauguguuguguuguaua

SEQ ID NO: 861389 - RNA, 19 nt, Artificial Sequence
  Description of Artificial Sequence: Synthetic oligonucleotide
  Antisense strand to SEQ ID NO: 861388
uauacaacacaacacauac

SEQ ID NO: 861390 - RNA, 19 nt, Artificial Sequence
  Description of Artificial Sequence: Synthetic oligonucleotide
  Sense strand starting at position 2487 of SEQ ID NO: 588382
uuguguuguauauguggua

SEQ ID NO: 861391 - RNA, 19 nt, Artificial Sequence
  Description of Artificial Sequence: Synthetic oligonucleotide
  Antisense strand to SEQ ID NO: 861390
uaccacauauacaacacaa

SEQ ID NO: 861392 - RNA, 19 nt, Artificial Sequence
  Description of Artificial Sequence: Synthetic oligonucleotide
  Sense strand starting at position 2488 of SEQ ID NO: 588382
uguguuguauaugugguau

SEQ ID NO: 861393 - RNA, 19 nt, Artificial Sequence
  Description of Artificial Sequence: Synthetic oligonucleotide
  Antisense strand to SEQ ID NO: 861392
auaccacauauacaacaca

SEQ ID NO: 861394 - RNA, 19 nt, Artificial Sequence
  Description of Artificial Sequence: Synthetic oligonucleotide
  Sense strand starting at position 2591 of SEQ ID NO: 588382
gcauguuguguugugguau

SEQ ID NO: 861395 - RNA, 19 nt, Artificial Sequence
  Description of Artificial Sequence: Synthetic oligonucleotide
  Antisense strand to SEQ ID NO: 861394
auaccacaacacaacaugc

SEQ ID NO: 861396 - RNA, 19 nt, Artificial Sequence
  Description of Artificial Sequence: Synthetic oligonucleotide
  Sense strand starting at position 2594 of SEQ ID NO: 588382
uguuguguugugguaugua

SEQ ID NO: 861397 - RNA, 19 nt, Artificial Sequence
  Description of Artificial Sequence: Synthetic oligonucleotide
  Antisense strand to SEQ ID NO: 861396
uacauaccacaacacaaca

SEQ ID NO: 861398 - RNA, 19 nt, Artificial Sequence
  Description of Artificial Sequence: Synthetic oligonucleotide
  Sense strand starting at position 2603 of SEQ ID NO: 588382
gugguauguauugggacua

SEQ ID NO: 861399 - RNA, 19 nt, Artificial Sequence
  Description of Artificial Sequence: Synthetic oligonucleotide
  Antisense strand to SEQ ID NO: 861398
uagucccaauacauaccac

SEQ ID NO: 861400 - RNA, 19 nt, Artificial Sequence
  Description of Artificial Sequence: Synthetic oligonucleotide
  Sense strand starting at position 3091 of SEQ ID NO: 588382
ucagcaguauguguaugau

SEQ ID NO: 861401 - RNA, 19 nt, Artificial Sequence
  Description of Artificial Sequence: Synthetic oligonucleotide
  Antisense strand to SEQ ID NO: 861400
aucauacacauacugcuga

SEQ ID NO: 861402 - RNA, 19 nt, Artificial Sequence
  Description of Artificial Sequence: Synthetic oligonucleotide
  Sense strand starting at position 3094 of SEQ ID NO: 588382
gcaguauguguaugauguu

SEQ ID NO: 861403 - RNA, 19 nt, Artificial Sequence
  Description of Artificial Sequence: Synthetic oligonucleotide
  Antisense strand to SEQ ID NO: 861402
aacaucauacacauacugc

SEQ ID NO: 861404 - RNA, 19 nt, Artificial Sequence
  Description of Artificial Sequence: Synthetic oligonucleotide
  Sense strand starting at position 3319 of SEQ ID NO: 588382
uuguuacccucagcuguaa

SEQ ID NO: 861405 - RNA, 19 nt, Artificial Sequence
  Description of Artificial Sequence: Synthetic oligonucleotide
  Antisense strand to SEQ ID NO: 861404
uuacagcugaggguaacaa

SEQ ID NO: 861406 - RNA, 19 nt, Artificial Sequence
  Description of Artificial Sequence: Synthetic oligonucleotide
  Sense strand starting at position 3368 of SEQ ID NO: 588382
ucagcauugccagagaauu

SEQ ID NO: 861407 - RNA, 19 nt, Artificial Sequence
  Description of Artificial Sequence: Synthetic oligonucleotide
  Antisense strand to SEQ ID NO: 861406
aauucucuggcaaugcuga

SEQ ID NO: 861408 - RNA, 19 nt, Artificial Sequence
  Description of Artificial Sequence: Synthetic oligonucleotide
  Sense strand starting at position 3376 of SEQ ID NO: 588382
gccagagaauuccauggga

SEQ ID NO: 861409 - RNA, 19 nt, Artificial Sequence
  Description of Artificial Sequence: Synthetic oligonucleotide
  Antisense strand to SEQ ID NO: 861408
ucccauggaauucucuggc

SEQ ID NO: 861410 - RNA, 19 nt, Artificial Sequence
  Description of Artificial Sequence: Synthetic oligonucleotide
  Sense strand starting at position 3381 of SEQ ID NO: 588382
agaauuccaugggacacaa

SEQ ID NO: 861411 - RNA, 19 nt, Artificial Sequence
  Description of Artificial Sequence: Synthetic oligonucleotide
  Antisense strand to SEQ ID NO: 861410
uugugucccauggaauucu

SEQ ID NO: 861412 - RNA, 19 nt, Artificial Sequence
  Description of Artificial Sequence: Synthetic oligonucleotide
  Sense strand starting at position 3578 of SEQ ID NO: 588382
cuccuauggccaugggauu

SEQ ID NO: 861413 - RNA, 19 nt, Artificial Sequence
  Description of Artificial Sequence: Synthetic oligonucleotide
  Antisense strand to SEQ ID NO: 861412
aaucccauggccauaggag

SEQ ID NO: 861414 - RNA, 19 nt, Artificial Sequence
  Description of Artificial Sequence: Synthetic oligonucleotide
  Sense strand starting at position 3689 of SEQ ID NO: 588382
gguggaaaucagcaaucga

SEQ ID NO: 861415 - RNA, 19 nt, Artificial Sequence
  Description of Artificial Sequence: Synthetic oligonucleotide
  Antisense strand to SEQ ID NO: 861414
ucgauugcugauuuccacc

SEQ ID NO: 861416 - RNA, 19 nt, Artificial Sequence
  Description of Artificial Sequence: Synthetic oligonucleotide
  Sense strand starting at position 36 of SEQ ID NO: 588383
gucucauccuugucuaggu

SEQ ID NO: 861417 - RNA, 19 nt, Artificial Sequence
  Description of Artificial Sequence: Synthetic oligonucleotide
  Antisense strand to SEQ ID NO: 861416
accuagacaaggaugagac

SEQ ID NO: 861418 - RNA, 19 nt, Artificial Sequence
  Description of Artificial Sequence: Synthetic oligonucleotide
  Sense strand starting at position 269 of SEQ ID NO: 588383
uggugaggcuucucaggaa

SEQ ID NO: 861419 - RNA, 19 nt, Artificial Sequence
  Description of Artificial Sequence: Synthetic oligonucleotide
  Antisense strand to SEQ ID NO: 861418
uuccugagaagccucacca

SEQ ID NO: 861420 - RNA, 19 nt, Artificial Sequence
  Description of Artificial Sequence: Synthetic oligonucleotide
  Sense strand starting at position 534 of SEQ ID NO: 588383
cugagcaaguugugaagau

SEQ ID NO: 861421 - RNA, 19 nt, Artificial Sequence
  Description of Artificial Sequence: Synthetic oligonucleotide
  Antisense strand to SEQ ID NO: 861420
aucuucacaacuugcucag

SEQ ID NO: 861422 - RNA, 19 nt, Artificial Sequence
  Description of Artificial Sequence: Synthetic oligonucleotide
  Sense strand starting at position 535 of SEQ ID NO: 588383
ugagcaaguugugaagauu

SEQ ID NO: 861423 - RNA, 19 nt, Artificial Sequence
  Description of Artificial Sequence: Synthetic oligonucleotide
  Antisense strand to SEQ ID NO: 861422
aaucuucacaacuugcuca

SEQ ID NO: 861424 - RNA, 19 nt, Artificial Sequence
  Description of Artificial Sequence: Synthetic oligonucleotide
  Sense strand starting at position 738 of SEQ ID NO: 588383
cgacucagucaccacuuua

SEQ ID NO: 861425 - RNA, 19 nt, Artificial Sequence
  Description of Artificial Sequence: Synthetic oligonucleotide
  Antisense strand to SEQ ID NO: 861424
uaaaguggugacugagucg

SEQ ID NO: 861426 - RNA, 19 nt, Artificial Sequence
  Description of Artificial Sequence: Synthetic oligonucleotide
  Sense strand starting at position 773 of SEQ ID NO: 588383
ugcugugugacccgaacau

SEQ ID NO: 861427 - RNA, 19 nt, Artificial Sequence
  Description of Artificial Sequence: Synthetic oligonucleotide
  Antisense strand to SEQ ID NO: 861426
auguucgggucacacagca

SEQ ID NO: 861428 - RNA, 19 nt, Artificial Sequence
  Description of Artificial Sequence: Synthetic oligonucleotide
  Sense strand starting at position 1001 of SEQ ID NO: 588383
cgcaucugcuaauaucuaa

SEQ ID NO: 861429 - RNA, 19 nt, Artificial Sequence
  Description of Artificial Sequence: Synthetic oligonucleotide
  Antisense strand to SEQ ID NO: 861428
uuagauauuagcagaugcg

SEQ ID NO: 861430 - RNA, 19 nt, Artificial Sequence
  Description of Artificial Sequence: Synthetic oligonucleotide
  Sense strand starting at position 1476 of SEQ ID NO: 588383
gccacuuccugccuugaaa

SEQ ID NO: 861431 - RNA, 19 nt, Artificial Sequence
  Description of Artificial Sequence: Synthetic oligonucleotide
  Antisense strand to SEQ ID NO: 861430
uuucaaggcaggaaguggc

SEQ ID NO: 861432 - RNA, 19 nt, Artificial Sequence
  Description of Artificial Sequence: Synthetic oligonucleotide
  Sense strand starting at position 2072 of SEQ ID NO: 588383
cccucuugguugggaacaa

SEQ ID NO: 861433 - RNA, 19 nt, Artificial Sequence
  Description of Artificial Sequence: Synthetic oligonucleotide
  Antisense strand to SEQ ID NO: 861432
uuguucccaaccaagaggg

SEQ ID NO: 861434 - RNA, 19 nt, Artificial Sequence
  Description of Artificial Sequence: Synthetic oligonucleotide
  Sense strand starting at position 2073 of SEQ ID NO: 588383
ccucuugguugggaacaau

SEQ ID NO: 861435 - RNA, 19 nt, Artificial Sequence
  Description of Artificial Sequence: Synthetic oligonucleotide
  Antisense strand to SEQ ID NO: 861434
auuguucccaaccaagagg

SEQ ID NO: 861436 - RNA, 19 nt, Artificial Sequence
  Description of Artificial Sequence: Synthetic oligonucleotide
  Sense strand starting at position 2142 of SEQ ID NO: 588383
caagaugcuuccugggaga

SEQ ID NO: 861437 - RNA, 19 nt, Artificial Sequence
  Description of Artificial Sequence: Synthetic oligonucleotide
  Antisense strand to SEQ ID NO: 861436
ucucccaggaagcaucuug

SEQ ID NO: 861438 - RNA, 19 nt, Artificial Sequence
  Description of Artificial Sequence: Synthetic oligonucleotide
  Sense strand starting at position 2287 of SEQ ID NO: 588383
gagugcaaagucugacuca

SEQ ID NO: 861439 - RNA, 19 nt, Artificial Sequence
  Description of Artificial Sequence: Synthetic oligonucleotide
  Antisense strand to SEQ ID NO: 861438
ugagucagacuuugcacuc

SEQ ID NO: 861440 - RNA, 19 nt, Artificial Sequence
  Description of Artificial Sequence: Synthetic oligonucleotide
  Sense strand starting at position 2288 of SEQ ID NO: 588383
agugcaaagucugacucaa

SEQ ID NO: 861441 - RNA, 19 nt, Artificial Sequence
  Description of Artificial Sequence: Synthetic oligonucleotide
  Antisense strand to SEQ ID NO: 861440
uugagucagacuuugcacu

SEQ ID NO: 861442 - RNA, 19 nt, Artificial Sequence
  Description of Artificial Sequence: Synthetic oligonucleotide
  Sense strand starting at position 2290 of SEQ ID NO: 588383
ugcaaagucugacucaauu

SEQ ID NO: 861443 - RNA, 19 nt, Artificial Sequence
  Description of Artificial Sequence: Synthetic oligonucleotide
  Antisense strand to SEQ ID NO: 861442
aauugagucagacuuugca

SEQ ID NO: 861444 - RNA, 19 nt, Artificial Sequence
  Description of Artificial Sequence: Synthetic oligonucleotide
  Sense strand starting at position 2318 of SEQ ID NO: 588383
cuuguuaauccaggcuuau

SEQ ID NO: 861445 - RNA, 19 nt, Artificial Sequence
  Description of Artificial Sequence: Synthetic oligonucleotide
  Antisense strand to SEQ ID NO: 861444
auaagccuggauuaacaag

SEQ ID NO: 861446 - RNA, 19 nt, Artificial Sequence
  Description of Artificial Sequence: Synthetic oligonucleotide
  Sense strand starting at position 2503 of SEQ ID NO: 588383
ggcauugugacgcaugcuu

SEQ ID NO: 861447 - RNA, 19 nt, Artificial Sequence
  Description of Artificial Sequence: Synthetic oligonucleotide
  Antisense strand to SEQ ID NO: 861446
aagcaugcgucacaaugcc

SEQ ID NO: 861448 - RNA, 19 nt, Artificial Sequence
  Description of Artificial Sequence: Synthetic oligonucleotide
  Sense strand starting at position 2507 of SEQ ID NO: 588383
uugugacgcaugcuuguaa

SEQ ID NO: 861449 - RNA, 19 nt, Artificial Sequence
  Description of Artificial Sequence: Synthetic oligonucleotide
  Antisense strand to SEQ ID NO: 861448
uuacaagcaugcgucacaa

SEQ ID NO: 861450 - RNA, 19 nt, Artificial Sequence
  Description of Artificial Sequence: Synthetic oligonucleotide
  Sense strand starting at position 2508 of SEQ ID NO: 588383
ugugacgcaugcuuguaau

SEQ ID NO: 861451 - RNA, 19 nt, Artificial Sequence
  Description of Artificial Sequence: Synthetic oligonucleotide
  Antisense strand to SEQ ID NO: 861450
auuacaagcaugcgucaca

SEQ ID NO: 861452 - RNA, 19 nt, Artificial Sequence
  Description of Artificial Sequence: Synthetic oligonucleotide
  Sense strand starting at position 2676 of SEQ ID NO: 588383
gcaauuucucugggccuca

SEQ ID NO: 861453 - RNA, 19 nt, Artificial Sequence
  Description of Artificial Sequence: Synthetic oligonucleotide
  Antisense strand to SEQ ID NO: 861452
ugaggcccagagaaauugc

SEQ ID NO: 861454 - RNA, 19 nt, Artificial Sequence
  Description of Artificial Sequence: Synthetic oligonucleotide
  Sense strand starting at position 2725 of SEQ ID NO: 588383
cccugugaaugguuacuca

SEQ ID NO: 861455 - RNA, 19 nt, Artificial Sequence
  Description of Artificial Sequence: Synthetic oligonucleotide
  Antisense strand to SEQ ID NO: 861454
ugaguaaccauucacaggg

SEQ ID NO: 861456 - RNA, 19 nt, Artificial Sequence
  Description of Artificial Sequence: Synthetic oligonucleotide
  Sense strand starting at position 2728 of SEQ ID NO: 588383
ugugaaugguuacucauug

SEQ ID NO: 861457 - RNA, 19 nt, Artificial Sequence
  Description of Artificial Sequence: Synthetic oligonucleotide
  Antisense strand to SEQ ID NO: 861456
caaugaguaaccauucaca

SEQ ID NO: 861458 - RNA, 19 nt, Artificial Sequence
  Description of Artificial Sequence: Synthetic oligonucleotide
  Sense strand starting at position 2760 of SEQ ID NO: 588383
cccugugaaguaugguuau

SEQ ID NO: 861459 - RNA, 19 nt, Artificial Sequence
  Description of Artificial Sequence: Synthetic oligonucleotide
  Antisense strand to SEQ ID NO: 861458
auaaccauacuucacaggg

SEQ ID NO: 861460 - RNA, 19 nt, Artificial Sequence
  Description of Artificial Sequence: Synthetic oligonucleotide
  Sense strand starting at position 2858 of SEQ ID NO: 588383
uguggaguuugucccuaag

SEQ ID NO: 861461 - RNA, 19 nt, Artificial Sequence
  Description of Artificial Sequence: Synthetic oligonucleotide
  Antisense strand to SEQ ID NO: 861460
cuuagggacaaacuccaca

SEQ ID NO: 861462 - RNA, 19 nt, Artificial Sequence
  Description of Artificial Sequence: Synthetic oligonucleotide
  Sense strand starting at position 2860 of SEQ ID NO: 588383
uggaguuugucccuaaguu

SEQ ID NO: 861463 - RNA, 19 nt, Artificial Sequence
  Description of Artificial Sequence: Synthetic oligonucleotide
  Antisense strand to SEQ ID NO: 861462
aacuuagggacaaacucca

SEQ ID NO: 861464 - RNA, 19 nt, Artificial Sequence
  Description of Artificial Sequence: Synthetic oligonucleotide
  Sense strand starting at position 2861 of SEQ ID NO: 588383
ggaguuugucccuaaguuc

SEQ ID NO: 861465 - RNA, 19 nt, Artificial Sequence
  Description of Artificial Sequence: Synthetic oligonucleotide
  Antisense strand to SEQ ID NO: 861464
gaacuuagggacaaacucc

SEQ ID NO: 861466 - RNA, 19 nt, Artificial Sequence
  Description of Artificial Sequence: Synthetic oligonucleotide
  Sense strand starting at position 2974 of SEQ ID NO: 588383
agccauauugcugaacuua

SEQ ID NO: 861467 - RNA, 19 nt, Artificial Sequence
  Description of Artificial Sequence: Synthetic oligonucleotide
  Antisense strand to SEQ ID NO: 861466
uaaguucagcaauauggcu

SEQ ID NO: 861468 - RNA, 19 nt, Artificial Sequence
  Description of Artificial Sequence: Synthetic oligonucleotide
  Sense strand starting at position 3064 of SEQ ID NO: 588383
gcgcaaagucagcucacuu

SEQ ID NO: 861469 - RNA, 19 nt, Artificial Sequence
  Description of Artificial Sequence: Synthetic oligonucleotide
  Antisense strand to SEQ ID NO: 861468
aagugagcugacuuugcgc

SEQ ID NO: 861470 - RNA, 19 nt, Artificial Sequence
  Description of Artificial Sequence: Synthetic oligonucleotide
  Sense strand starting at position 3306 of SEQ ID NO: 588383
ugaugaacuucuugaagac

SEQ ID NO: 861471 - RNA, 19 nt, Artificial Sequence
  Description of Artificial Sequence: Synthetic oligonucleotide
  Antisense strand to SEQ ID NO: 861470
gucuucaagaaguucauca

SEQ ID NO: 861472 - RNA, 19 nt, Artificial Sequence
  Description of Artificial Sequence: Synthetic oligonucleotide
  Sense strand starting at position 3358 of SEQ ID NO: 588383
ggaugcaugugguggaguu

SEQ ID NO: 861473 - RNA, 19 nt, Artificial Sequence
  Description of Artificial Sequence: Synthetic oligonucleotide
  Antisense strand to SEQ ID NO: 861472
aacuccaccacaugcaucc

SEQ ID NO: 861474 - RNA, 19 nt, Artificial Sequence
  Description of Artificial Sequence: Synthetic oligonucleotide
  Sense strand starting at position 3359 of SEQ ID NO: 588383
gaugcaugugguggaguuu

SEQ ID NO: 861475 - RNA, 19 nt, Artificial Sequence
  Description of Artificial Sequence: Synthetic oligonucleotide
  Antisense strand to SEQ ID NO: 861474
aaacuccaccacaugcauc

SEQ ID NO: 861476 - RNA, 19 nt, Artificial Sequence
  Description of Artificial Sequence: Synthetic oligonucleotide
  Sense strand starting at position 3385 of SEQ ID NO: 588383
aaaugagggcuuugccuau

SEQ ID NO: 861477 - RNA, 19 nt, Artificial Sequence
  Description of Artificial Sequence: Synthetic oligonucleotide
  Antisense strand to SEQ ID NO: 861476
auaggcaaagcccucauuu

SEQ ID NO: 861478 - RNA, 19 nt, Artificial Sequence
  Description of Artificial Sequence: Synthetic oligonucleotide
  Sense strand starting at position 3389 of SEQ ID NO: 588383
gagggcuuugccuauggua

SEQ ID NO: 861479 - RNA, 19 nt, Artificial Sequence
  Description of Artificial Sequence: Synthetic oligonucleotide
  Antisense strand to SEQ ID NO: 861478
uaccauaggcaaagcccuc

SEQ ID NO: 861480 - RNA, 19 nt, Artificial Sequence
  Description of Artificial Sequence: Synthetic oligonucleotide
  Sense strand starting at position 3682 of SEQ ID NO: 588383
cuaagagggucaugauaaa

SEQ ID NO: 861481 - RNA, 19 nt, Artificial Sequence
  Description of Artificial Sequence: Synthetic oligonucleotide
  Antisense strand to SEQ ID NO: 861480
uuuaucaugacccucuuag

SEQ ID NO: 861482 - RNA, 19 nt, Artificial Sequence
  Description of Artificial Sequence: Synthetic oligonucleotide
  Sense strand starting at position 3693 of SEQ ID NO: 588383
augauaaauucuggcagca

SEQ ID NO: 861483 - RNA, 19 nt, Artificial Sequence
  Description of Artificial Sequence: Synthetic oligonucleotide
  Antisense strand to SEQ ID NO: 861482
ugcugccagaauuuaucau

SEQ ID NO: 861484 - RNA, 19 nt, Artificial Sequence
  Description of Artificial Sequence: Synthetic oligonucleotide
  Sense strand starting at position 3749 of SEQ ID NO: 588383
gguugugguagguaaggaa

SEQ ID NO: 861485 - RNA, 19 nt, Artificial Sequence
  Description of Artificial Sequence: Synthetic oligonucleotide
  Antisense strand to SEQ ID NO: 861484
uuccuuaccuaccacaacc

SEQ ID NO: 861486 - RNA, 19 nt, Artificial Sequence
  Description of Artificial Sequence: Synthetic oligonucleotide
  Sense strand starting at position 3786 of SEQ ID NO: 588383
ggguuuguggcuugaaagu

SEQ ID NO: 861487 - RNA, 19 nt, Artificial Sequence
  Description of Artificial Sequence: Synthetic oligonucleotide
  Antisense strand to SEQ ID NO: 861486
acuuucaagccacaaaccc

SEQ ID NO: 861488 - RNA, 19 nt, Artificial Sequence
  Description of Artificial Sequence: Synthetic oligonucleotide
  Sense strand starting at position 3792 of SEQ ID NO: 588383
guggcuugaaaguagaacu

SEQ ID NO: 861489 - RNA, 19 nt, Artificial Sequence
  Description of Artificial Sequence: Synthetic oligonucleotide
  Antisense strand to SEQ ID NO: 861488
aguucuacuuucaagccac

SEQ ID NO: 861490 - RNA, 19 nt, Artificial Sequence
  Description of Artificial Sequence: Synthetic oligonucleotide
  Sense strand starting at position 3922 of SEQ ID NO: 588383
uggcccagugaucaucaaa

SEQ ID NO: 861491 - RNA, 19 nt, Artificial Sequence
  Description of Artificial Sequence: Synthetic oligonucleotide
  Antisense strand to SEQ ID NO: 861490
uuugaugaucacugggcca

SEQ ID NO: 861492 - RNA, 19 nt, Artificial Sequence
  Description of Artificial Sequence: Synthetic oligonucleotide
  Sense strand starting at position 3952 of SEQ ID NO: 588383
ugccucucccacugugaau

SEQ ID NO: 861493 - RNA, 19 nt, Artificial Sequence
  Description of Artificial Sequence: Synthetic oligonucleotide
  Antisense strand to SEQ ID NO: 861492
auucacagugggagaggca

SEQ ID NO: 861494 - RNA, 19 nt, Artificial Sequence
  Description of Artificial Sequence: Synthetic oligonucleotide
  Sense strand starting at position 374 of SEQ ID NO: 588384
gugugaaugcccuggucag

SEQ ID NO: 861495 - RNA, 19 nt, Artificial Sequence
  Description of Artificial Sequence: Synthetic oligonucleotide
  Antisense strand to SEQ ID NO: 861494
cugaccagggcauucacac

SEQ ID NO: 861496 - RNA, 19 nt, Artificial Sequence
  Description of Artificial Sequence: Synthetic oligonucleotide
  Sense strand starting at position 458 of SEQ ID NO: 588384
auuguuuguuccgcauaaa

SEQ ID NO: 861497 - RNA, 19 nt, Artificial Sequence
  Description of Artificial Sequence: Synthetic oligonucleotide
  Antisense strand to SEQ ID NO: 861496
uuuaugcggaacaaacaau

SEQ ID NO: 861498 - RNA, 19 nt, Artificial Sequence
  Description of Artificial Sequence: Synthetic oligonucleotide
  Sense strand starting at position 494 of SEQ ID NO: 588384
ugugaagcuaucugcuguu

SEQ ID NO: 861499 - RNA, 19 nt, Artificial Sequence
  Description of Artificial Sequence: Synthetic oligonucleotide
  Antisense strand to SEQ ID NO: 861498
aacagcagauagcuucaca

SEQ ID NO: 861500 - RNA, 19 nt, Artificial Sequence
  Description of Artificial Sequence: Synthetic oligonucleotide
  Sense strand starting at position 532 of SEQ ID NO: 588384
gcucaagguagugaccaua

SEQ ID NO: 861501 - RNA, 19 nt, Artificial Sequence
  Description of Artificial Sequence: Synthetic oligonucleotide
  Antisense strand to SEQ ID NO: 861500
uauggucacuaccuugagc

SEQ ID NO: 861502 - RNA, 19 nt, Artificial Sequence
  Description of Artificial Sequence: Synthetic oligonucleotide
  Sense strand starting at position 607 of SEQ ID NO: 588384
cucugauacucccaggaca

SEQ ID NO: 861503 - RNA, 19 nt, Artificial Sequence
  Description of Artificial Sequence: Synthetic oligonucleotide
  Antisense strand to SEQ ID NO: 861502
uguccugggaguaucagag

SEQ ID NO: 861504 - RNA, 19 nt, Artificial Sequence
  Description of Artificial Sequence: Synthetic oligonucleotide
  Sense strand starting at position 609 of SEQ ID NO: 588384
cugauacucccaggacaug

SEQ ID NO: 861505 - RNA, 19 nt, Artificial Sequence
  Description of Artificial Sequence: Synthetic oligonucleotide
  Antisense strand to SEQ ID NO: 861504
cauguccugggaguaucag

SEQ ID NO: 861506 - RNA, 19 nt, Artificial Sequence
  Description of Artificial Sequence: Synthetic oligonucleotide
  Sense strand starting at position 752 of SEQ ID NO: 588384
gugcgucuugccagaggau

SEQ ID NO: 861507 - RNA, 19 nt, Artificial Sequence
  Description of Artificial Sequence: Synthetic oligonucleotide
  Antisense strand to SEQ ID NO: 861506
auccucuggcaagacgcac

SEQ ID NO: 861508 - RNA, 19 nt, Artificial Sequence
  Description of Artificial Sequence: Synthetic oligonucleotide
  Sense strand starting at position 754 of SEQ ID NO: 588384
gcgucuugccagaggaugu

SEQ ID NO: 861509 - RNA, 19 nt, Artificial Sequence
  Description of Artificial Sequence: Synthetic oligonucleotide
  Antisense strand to SEQ ID NO: 861508
acauccucuggcaagacgc

SEQ ID NO: 861510 - RNA, 19 nt, Artificial Sequence
  Description of Artificial Sequence: Synthetic oligonucleotide
  Sense strand starting at position 867 of SEQ ID NO: 588384
ugucaauuauaagugcaca

SEQ ID NO: 861511 - RNA, 19 nt, Artificial Sequence
  Description of Artificial Sequence: Synthetic oligonucleotide
  Antisense strand to SEQ ID NO: 861510
ugugcacuuauaauugaca

SEQ ID NO: 861512 - RNA, 19 nt, Artificial Sequence
  Description of Artificial Sequence: Synthetic oligonucleotide
  Sense strand starting at position 937 of SEQ ID NO: 588384
gggagacugucaucccuca

SEQ ID NO: 861513 - RNA, 19 nt, Artificial Sequence
  Description of Artificial Sequence: Synthetic oligonucleotide
  Antisense strand to SEQ ID NO: 861512
ugagggaugacagucuccc

SEQ ID NO: 861514 - RNA, 19 nt, Artificial Sequence
  Description of Artificial Sequence: Synthetic oligonucleotide
  Sense strand starting at position 1005 of SEQ ID NO: 588384
gcaaguggcggucacuuau

SEQ ID NO: 861515 - RNA, 19 nt, Artificial Sequence
  Description of Artificial Sequence: Synthetic oligonucleotide
  Antisense strand to SEQ ID NO: 861514
auaagugaccgccacuugc

SEQ ID NO: 861516 - RNA, 19 nt, Artificial Sequence
  Description of Artificial Sequence: Synthetic oligonucleotide
  Sense strand starting at position 1339 of SEQ ID NO: 588384
uggccaucugcacagucau

SEQ ID NO: 861517 - RNA, 19 nt, Artificial Sequence
  Description of Artificial Sequence: Synthetic oligonucleotide
  Antisense strand to SEQ ID NO: 861516
augacugugcagauggcca

SEQ ID NO: 861518 - RNA, 19 nt, Artificial Sequence
  Description of Artificial Sequence: Synthetic oligonucleotide
  Sense strand starting at position 2068 of SEQ ID NO: 588384
gggcaauauuaagauuucu

SEQ ID NO: 861519 - RNA, 19 nt, Artificial Sequence
  Description of Artificial Sequence: Synthetic oligonucleotide
  Antisense strand to SEQ ID NO: 861518
agaaaucuuaauauugccc

SEQ ID NO: 861520 - RNA, 19 nt, Artificial Sequence
  Description of Artificial Sequence: Synthetic oligonucleotide
  Sense strand starting at position 2221 of SEQ ID NO: 588384
aaagguagcugucuggcaa

SEQ ID NO: 861521 - RNA, 19 nt, Artificial Sequence
  Description of Artificial Sequence: Synthetic oligonucleotide
  Antisense strand to SEQ ID NO: 861520
uugccagacagcuaccuuu

SEQ ID NO: 861522 - RNA, 19 nt, Artificial Sequence
  Description of Artificial Sequence: Synthetic oligonucleotide
  Sense strand starting at position 2273 of SEQ ID NO: 588384
uuaugcuucuggucaggau

SEQ ID NO: 861523 - RNA, 19 nt, Artificial Sequence
  Description of Artificial Sequence: Synthetic oligonucleotide
  Antisense strand to SEQ ID NO: 861522
auccugaccagaagcauaa

SEQ ID NO: 861524 - RNA, 19 nt, Artificial Sequence
  Description of Artificial Sequence: Synthetic oligonucleotide
  Sense strand starting at position 2356 of SEQ ID NO: 588384
acaaguuugcaaggcucua

SEQ ID NO: 861525 - RNA, 19 nt, Artificial Sequence
  Description of Artificial Sequence: Synthetic oligonucleotide
  Antisense strand to SEQ ID NO: 861524
uagagccuugcaaacuugu

SEQ ID NO: 861526 - RNA, 19 nt, Artificial Sequence
  Description of Artificial Sequence: Synthetic oligonucleotide
  Sense strand starting at position 2390 of SEQ ID NO: 588384
cacuguggucccugagaga

SEQ ID NO: 861527 - RNA, 19 nt, Artificial Sequence
  Description of Artificial Sequence: Synthetic oligonucleotide
  Antisense strand to SEQ ID NO: 861526
ucucucagggaccacagug

SEQ ID NO: 861528 - RNA, 19 nt, Artificial Sequence
  Description of Artificial Sequence: Synthetic oligonucleotide
  Sense strand starting at position 2507 of SEQ ID NO: 588384
uggacucucuaaguugaga

SEQ ID NO: 861529 - RNA, 19 nt, Artificial Sequence
  Description of Artificial Sequence: Synthetic oligonucleotide
  Antisense strand to SEQ ID NO: 861528
ucucaacuuagagagucca

SEQ ID NO: 861530 - RNA, 19 nt, Artificial Sequence
  Description of Artificial Sequence: Synthetic oligonucleotide
  Sense strand starting at position 2512 of SEQ ID NO: 588384
ucucuaaguugagaagaca

SEQ ID NO: 861531 - RNA, 19 nt, Artificial Sequence
  Description of Artificial Sequence: Synthetic oligonucleotide
  Antisense strand to SEQ ID NO: 861530
ugucuucucaacuuagaga

SEQ ID NO: 861532 - RNA, 19 nt, Artificial Sequence
  Description of Artificial Sequence: Synthetic oligonucleotide
  Sense strand starting at position 2779 of SEQ ID NO: 588384
gggcauugcguugaauacu

SEQ ID NO: 861533 - RNA, 19 nt, Artificial Sequence
  Description of Artificial Sequence: Synthetic oligonucleotide
  Antisense strand to SEQ ID NO: 861532
aguauucaacgcaaugccc

SEQ ID NO: 861534 - RNA, 19 nt, Artificial Sequence
  Description of Artificial Sequence: Synthetic oligonucleotide
  Sense strand starting at position 2790 of SEQ ID NO: 588384
ugaauacucagagggucuu

SEQ ID NO: 861535 - RNA, 19 nt, Artificial Sequence
  Description of Artificial Sequence: Synthetic oligonucleotide
  Antisense strand to SEQ ID NO: 861534
aagacccucugaguauuca

SEQ ID NO: 861536 - RNA, 19 nt, Artificial Sequence
  Description of Artificial Sequence: Synthetic oligonucleotide
  Sense strand starting at position 2824 of SEQ ID NO: 588384
gauaauuagcccugcagug

SEQ ID NO: 861537 - RNA, 19 nt, Artificial Sequence
  Description of Artificial Sequence: Synthetic oligonucleotide
  Antisense strand to SEQ ID NO: 861536
cacugcagggcuaauuauc

SEQ ID NO: 861538 - RNA, 19 nt, Artificial Sequence
  Description of Artificial Sequence: Synthetic oligonucleotide
  Sense strand starting at position 2826 of SEQ ID NO: 588384
uaauuagcccugcagugau

SEQ ID NO: 861539 - RNA, 19 nt, Artificial Sequence
  Description of Artificial Sequence: Synthetic oligonucleotide
  Antisense strand to SEQ ID NO: 861538
aucacugcagggcuaauua

SEQ ID NO: 861540 - RNA, 19 nt, Artificial Sequence
  Description of Artificial Sequence: Synthetic oligonucleotide
  Sense strand starting at position 2894 of SEQ ID NO: 588384
aguccauauguuuacccaa

SEQ ID NO: 861541 - RNA, 19 nt, Artificial Sequence
  Description of Artificial Sequence: Synthetic oligonucleotide
  Antisense strand to SEQ ID NO: 861540
uuggguaaacauauggacu

SEQ ID NO: 861542 - RNA, 19 nt, Artificial Sequence
  Description of Artificial Sequence: Synthetic oligonucleotide
  Sense strand starting at position 3437 of SEQ ID NO: 588384
uacuaucaugucuguguca

SEQ ID NO: 861543 - RNA, 19 nt, Artificial Sequence
  Description of Artificial Sequence: Synthetic oligonucleotide
  Antisense strand to SEQ ID NO: 861542
ugacacagacaugauagua

SEQ ID NO: 861544 - RNA, 19 nt, Artificial Sequence
  Description of Artificial Sequence: Synthetic oligonucleotide
  Sense strand starting at position 3438 of SEQ ID NO: 588384
acuaucaugucugugucau

SEQ ID NO: 861545 - RNA, 19 nt, Artificial Sequence
  Description of Artificial Sequence: Synthetic oligonucleotide
  Antisense strand to SEQ ID NO: 861544
augacacagacaugauagu

SEQ ID NO: 861546 - RNA, 19 nt, Artificial Sequence
  Description of Artificial Sequence: Synthetic oligonucleotide
  Sense strand starting at position 3439 of SEQ ID NO: 588384
cuaucaugucugugucauc

SEQ ID NO: 861547 - RNA, 19 nt, Artificial Sequence
  Description of Artificial Sequence: Synthetic oligonucleotide
  Antisense strand to SEQ ID NO: 861546
gaugacacagacaugauag

SEQ ID NO: 861548 - RNA, 19 nt, Artificial Sequence
  Description of Artificial Sequence: Synthetic oligonucleotide
  Sense strand starting at position 3444 of SEQ ID NO: 588384
augucugugucauccuaug

SEQ ID NO: 861549 - RNA, 19 nt, Artificial Sequence
  Description of Artificial Sequence: Synthetic oligonucleotide
  Antisense strand to SEQ ID NO: 861548
cauaggaugacacagacau

SEQ ID NO: 861550 - RNA, 19 nt, Artificial Sequence
  Description of Artificial Sequence: Synthetic oligonucleotide
  Sense strand starting at position 3449 of SEQ ID NO: 588384
ugugucauccuauguucua

SEQ ID NO: 861551 - RNA, 19 nt, Artificial Sequence
  Description of Artificial Sequence: Synthetic oligonucleotide
  Antisense strand to SEQ ID NO: 861550
uagaacauaggaugacaca

SEQ ID NO: 861552 - RNA, 19 nt, Artificial Sequence
  Description of Artificial Sequence: Synthetic oligonucleotide
  Sense strand starting at position 3450 of SEQ ID NO: 588384
gugucauccuauguucuaa

SEQ ID NO: 861553 - RNA, 19 nt, Artificial Sequence
  Description of Artificial Sequence: Synthetic oligonucleotide
  Antisense strand to SEQ ID NO: 861552
uuagaacauaggaugacac

SEQ ID NO: 861554 - RNA, 19 nt, Artificial Sequence
  Description of Artificial Sequence: Synthetic oligonucleotide
  Sense strand starting at position 3472 of SEQ ID NO: 588384
ccaguagagacguggagaa

SEQ ID NO: 861555 - RNA, 19 nt, Artificial Sequence
  Description of Artificial Sequence: Synthetic oligonucleotide
  Antisense strand to SEQ ID NO: 861554
uucuccacgucucuacugg

SEQ ID NO: 861556 - RNA, 19 nt, Artificial Sequence
  Description of Artificial Sequence: Synthetic oligonucleotide
  Sense strand starting at position 3571 of SEQ ID NO: 588384
ccaauuagacauugcagaa

SEQ ID NO: 861557 - RNA, 19 nt, Artificial Sequence
  Description of Artificial Sequence: Synthetic oligonucleotide
  Antisense strand to SEQ ID NO: 861556
uucugcaaugucuaauugg

SEQ ID NO: 861558 - RNA, 19 nt, Artificial Sequence
  Description of Artificial Sequence: Synthetic oligonucleotide
  Sense strand starting at position 3595 of SEQ ID NO: 588384
acuagugaauuugaagaga

SEQ ID NO: 861559 - RNA, 19 nt, Artificial Sequence
  Description of Artificial Sequence: Synthetic oligonucleotide
  Antisense strand to SEQ ID NO: 861558
ucucuucaaauucacuagu

SEQ ID NO: 861560 - RNA, 19 nt, Artificial Sequence
  Description of Artificial Sequence: Synthetic oligonucleotide
  Sense strand starting at position 3698 of SEQ ID NO: 588384
guguaauacaugugugauc

SEQ ID NO: 861561 - RNA, 19 nt, Artificial Sequence
  Description of Artificial Sequence: Synthetic oligonucleotide
  Antisense strand to SEQ ID NO: 861560
gaucacacauguauuacac

SEQ ID NO: 861562 - RNA, 19 nt, Artificial Sequence
  Description of Artificial Sequence: Synthetic oligonucleotide
  Sense strand starting at position 3699 of SEQ ID NO: 588384
uguaauacaugugugauca

SEQ ID NO: 861563 - RNA, 19 nt, Artificial Sequence
  Description of Artificial Sequence: Synthetic oligonucleotide
  Antisense strand to SEQ ID NO: 861562
ugaucacacauguauuaca

SEQ ID NO: 861564 - RNA, 19 nt, Artificial Sequence
  Description of Artificial Sequence: Synthetic oligonucleotide
  Sense strand starting at position 3700 of SEQ ID NO: 588384
guaauacaugugugaucag

SEQ ID NO: 861565 - RNA, 19 nt, Artificial Sequence
  Description of Artificial Sequence: Synthetic oligonucleotide
  Antisense strand to SEQ ID NO: 861564
cugaucacacauguauuac

SEQ ID NO: 861566 - RNA, 19 nt, Artificial Sequence
  Description of Artificial Sequence: Synthetic oligonucleotide
  Sense strand starting at position 3701 of SEQ ID NO: 588384
uaauacaugugugaucaga

SEQ ID NO: 861567 - RNA, 19 nt, Artificial Sequence
  Description of Artificial Sequence: Synthetic oligonucleotide
  Antisense strand to SEQ ID NO: 861566
ucugaucacacauguauua

SEQ ID NO: 861568 - RNA, 19 nt, Artificial Sequence
  Description of Artificial Sequence: Synthetic oligonucleotide
  Sense strand starting at position 3703 of SEQ ID NO: 588384
auacaugugugaucagagu

SEQ ID NO: 861569 - RNA, 19 nt, Artificial Sequence
  Description of Artificial Sequence: Synthetic oligonucleotide
  Antisense strand to SEQ ID NO: 861568
acucugaucacacauguau

SEQ ID NO: 861570 - RNA, 19 nt, Artificial Sequence
  Description of Artificial Sequence: Synthetic oligonucleotide
  Sense strand starting at position 3753 of SEQ ID NO: 588384
aggaaauaaugacaaguuu

SEQ ID NO: 861571 - RNA, 19 nt, Artificial Sequence
  Description of Artificial Sequence: Synthetic oligonucleotide
  Antisense strand to SEQ ID NO: 861570
aaacuugucauuauuuccu

SEQ ID NO: 861572 - RNA, 19 nt, Artificial Sequence
  Description of Artificial Sequence: Synthetic oligonucleotide
  Sense strand starting at position 3830 of SEQ ID NO: 588384
acaagaaauccuuguaguu

SEQ ID NO: 861573 - RNA, 19 nt, Artificial Sequence
  Description of Artificial Sequence: Synthetic oligonucleotide
  Antisense strand to SEQ ID NO: 861572
aacuacaaggauuucuugu

SEQ ID NO: 861574 - RNA, 19 nt, Artificial Sequence
  Description of Artificial Sequence: Synthetic oligonucleotide
  Sense strand starting at position 89 of SEQ ID NO: 588385
ucuagaaguuaagacaguu

SEQ ID NO: 861575 - RNA, 19 nt, Artificial Sequence
  Description of Artificial Sequence: Synthetic oligonucleotide
  Antisense strand to SEQ ID NO: 861574
aacugucuuaacuucuaga

SEQ ID NO: 861576 - RNA, 19 nt, Artificial Sequence
  Description of Artificial Sequence: Synthetic oligonucleotide
  Sense strand starting at position 97 of SEQ ID NO: 588385
uuaagacaguucuugcuaa

SEQ ID NO: 861577 - RNA, 19 nt, Artificial Sequence
  Description of Artificial Sequence: Synthetic oligonucleotide
  Antisense strand to SEQ ID NO: 861576
uuagcaagaacugucuuaa

SEQ ID NO: 861578 - RNA, 19 nt, Artificial Sequence
  Description of Artificial Sequence: Synthetic oligonucleotide
  Sense strand starting at position 98 of SEQ ID NO: 588385
uaagacaguucuugcuaag

SEQ ID NO: 861579 - RNA, 19 nt, Artificial Sequence
  Description of Artificial Sequence: Synthetic oligonucleotide
  Antisense strand to SEQ ID NO: 861578
cuuagcaagaacugucuua

SEQ ID NO: 861580 - RNA, 19 nt, Artificial Sequence
  Description of Artificial Sequence: Synthetic oligonucleotide
  Sense strand starting at position 216 of SEQ ID NO: 588385
gugggauaggugugugguu

SEQ ID NO: 861581 - RNA, 19 nt, Artificial Sequence
  Description of Artificial Sequence: Synthetic oligonucleotide
  Antisense strand to SEQ ID NO: 861580
aaccacacaccuaucccac

SEQ ID NO: 861582 - RNA, 19 nt, Artificial Sequence
  Description of Artificial Sequence: Synthetic oligonucleotide
  Sense strand starting at position 217 of SEQ ID NO: 588385
ugggauaggugugugguua

SEQ ID NO: 861583 - RNA, 19 nt, Artificial Sequence
  Description of Artificial Sequence: Synthetic oligonucleotide
  Antisense strand to SEQ ID NO: 861582
uaaccacacaccuauccca

SEQ ID NO: 861584 - RNA, 19 nt, Artificial Sequence
  Description of Artificial Sequence: Synthetic oligonucleotide
  Sense strand starting at position 339 of SEQ ID NO: 588385
ccagccuguuuggagaagu

SEQ ID NO: 861585 - RNA, 19 nt, Artificial Sequence
  Description of Artificial Sequence: Synthetic oligonucleotide
  Antisense strand to SEQ ID NO: 861584
acuucuccaaacaggcugg

SEQ ID NO: 861586 - RNA, 19 nt, Artificial Sequence
  Description of Artificial Sequence: Synthetic oligonucleotide
  Sense strand starting at position 357 of SEQ ID NO: 588385
ugagguagugccgaugaau

SEQ ID NO: 861587 - RNA, 19 nt, Artificial Sequence
  Description of Artificial Sequence: Synthetic oligonucleotide
  Antisense strand to SEQ ID NO: 861586
auucaucggcacuaccuca

SEQ ID NO: 861588 - RNA, 19 nt, Artificial Sequence
  Description of Artificial Sequence: Synthetic oligonucleotide
  Sense strand starting at position 536 of SEQ ID NO: 588385
augacaucugucuggaaga

SEQ ID NO: 861589 - RNA, 19 nt, Artificial Sequence
  Description of Artificial Sequence: Synthetic oligonucleotide
  Antisense strand to SEQ ID NO: 861588
ucuuccagacagaugucau

SEQ ID NO: 861590 - RNA, 19 nt, Artificial Sequence
  Description of Artificial Sequence: Synthetic oligonucleotide
  Sense strand starting at position 537 of SEQ ID NO: 588385
ugacaucugucuggaagaa

SEQ ID NO: 861591 - RNA, 19 nt, Artificial Sequence
  Description of Artificial Sequence: Synthetic oligonucleotide
  Antisense strand to SEQ ID NO: 861590
uucuuccagacagauguca

SEQ ID NO: 861592 - RNA, 19 nt, Artificial Sequence
  Description of Artificial Sequence: Synthetic oligonucleotide
  Sense strand starting at position 844 of SEQ ID NO: 588385
ggguucaaaucccgacaga

SEQ ID NO: 861593 - RNA, 19 nt, Artificial Sequence
  Description of Artificial Sequence: Synthetic oligonucleotide
  Antisense strand to SEQ ID NO: 861592
ucugucgggauuugaaccc

SEQ ID NO: 861594 - RNA, 19 nt, Artificial Sequence
  Description of Artificial Sequence: Synthetic oligonucleotide
  Sense strand starting at position 900 of SEQ ID NO: 588385
cccugcuuuccuugucuua

SEQ ID NO: 861595 - RNA, 19 nt, Artificial Sequence
  Description of Artificial Sequence: Synthetic oligonucleotide
  Antisense strand to SEQ ID NO: 861594
uaagacaaggaaagcaggg

SEQ ID NO: 861596 - RNA, 19 nt, Artificial Sequence
  Description of Artificial Sequence: Synthetic oligonucleotide
  Sense strand starting at position 944 of SEQ ID NO: 588385
guuccugcaggagaugaau

SEQ ID NO: 861597 - RNA, 19 nt, Artificial Sequence
  Description of Artificial Sequence: Synthetic oligonucleotide
  Antisense strand to SEQ ID NO: 861596
auucaucuccugcaggaac

SEQ ID NO: 861598 - RNA, 19 nt, Artificial Sequence
  Description of Artificial Sequence: Synthetic oligonucleotide
  Sense strand starting at position 1071 of SEQ ID NO: 588385
aguggagauucugugggua

SEQ ID NO: 861599 - RNA, 19 nt, Artificial Sequence
  Description of Artificial Sequence: Synthetic oligonucleotide
  Antisense strand to SEQ ID NO: 861598
uacccacagaaucuccacu

SEQ ID NO: 861600 - RNA, 19 nt, Artificial Sequence
  Description of Artificial Sequence: Synthetic oligonucleotide
  Sense strand starting at position 1074 of SEQ ID NO: 588385
ggagauucuguggguaguu

SEQ ID NO: 861601 - RNA, 19 nt, Artificial Sequence
  Description of Artificial Sequence: Synthetic oligonucleotide
  Antisense strand to SEQ ID NO: 861600
aacuacccacagaaucucc

SEQ ID NO: 861602 - RNA, 19 nt, Artificial Sequence
  Description of Artificial Sequence: Synthetic oligonucleotide
  Sense strand starting at position 1075 of SEQ ID NO: 588385
gagauucuguggguaguua

SEQ ID NO: 861603 - RNA, 19 nt, Artificial Sequence
  Description of Artificial Sequence: Synthetic oligonucleotide
  Antisense strand to SEQ ID NO: 861602
uaacuacccacagaaucuc

SEQ ID NO: 861604 - RNA, 19 nt, Artificial Sequence
  Description of Artificial Sequence: Synthetic oligonucleotide
  Sense strand starting at position 1076 of SEQ ID NO: 588385
agauucuguggguaguuaa

SEQ ID NO: 861605 - RNA, 19 nt, Artificial Sequence
  Description of Artificial Sequence: Synthetic oligonucleotide
  Antisense strand to SEQ ID NO: 861604
uuaacuacccacagaaucu

SEQ ID NO: 861606 - RNA, 19 nt, Artificial Sequence
  Description of Artificial Sequence: Synthetic oligonucleotide
  Sense strand starting at position 1079 of SEQ ID NO: 588385
uucuguggguaguuaagau

SEQ ID NO: 861607 - RNA, 19 nt, Artificial Sequence
  Description of Artificial Sequence: Synthetic oligonucleotide
  Antisense strand to SEQ ID NO: 861606
aucuuaacuacccacagaa

SEQ ID NO: 861608 - RNA, 19 nt, Artificial Sequence
  Description of Artificial Sequence: Synthetic oligonucleotide
  Sense strand starting at position 1089 of SEQ ID NO: 588385
aguuaagaugcccauugua

SEQ ID NO: 861609 - RNA, 19 nt, Artificial Sequence
  Description of Artificial Sequence: Synthetic oligonucleotide
  Antisense strand to SEQ ID NO: 861608
uacaaugggcaucuuaacu

SEQ ID NO: 861610 - RNA, 19 nt, Artificial Sequence
  Description of Artificial Sequence: Synthetic oligonucleotide
  Sense strand starting at position 1137 of SEQ ID NO: 588385
ggcugauuugucuguggac

SEQ ID NO: 861611 - RNA, 19 nt, Artificial Sequence
  Description of Artificial Sequence: Synthetic oligonucleotide
  Antisense strand to SEQ ID NO: 861610
guccacagacaaaucagcc

SEQ ID NO: 861612 - RNA, 19 nt, Artificial Sequence
  Description of Artificial Sequence: Synthetic oligonucleotide
  Sense strand starting at position 1138 of SEQ ID NO: 588385
gcugauuugucuguggaca

SEQ ID NO: 861613 - RNA, 19 nt, Artificial Sequence
  Description of Artificial Sequence: Synthetic oligonucleotide
  Antisense strand to SEQ ID NO: 861612
uguccacagacaaaucagc

SEQ ID NO: 861614 - RNA, 19 nt, Artificial Sequence
  Description of Artificial Sequence: Synthetic oligonucleotide
  Sense strand starting at position 1140 of SEQ ID NO: 588385
ugauuugucuguggacaca

SEQ ID NO: 861615 - RNA, 19 nt, Artificial Sequence
  Description of Artificial Sequence: Synthetic oligonucleotide
  Antisense strand to SEQ ID NO: 861614
uguguccacagacaaauca

SEQ ID NO: 861616 - RNA, 19 nt, Artificial Sequence
  Description of Artificial Sequence: Synthetic oligonucleotide
  Sense strand starting at position 1956 of SEQ ID NO: 588385
cgcggacuuggauacuaaa

SEQ ID NO: 861617 - RNA, 19 nt, Artificial Sequence
  Description of Artificial Sequence: Synthetic oligonucleotide
  Antisense strand to SEQ ID NO: 861616
uuuaguauccaaguccgcg

SEQ ID NO: 861618 - RNA, 19 nt, Artificial Sequence
  Description of Artificial Sequence: Synthetic oligonucleotide
  Sense strand starting at position 2547 of SEQ ID NO: 588385
ggcgcuguggucgcgagua

SEQ ID NO: 861619 - RNA, 19 nt, Artificial Sequence
  Description of Artificial Sequence: Synthetic oligonucleotide
  Antisense strand to SEQ ID NO: 861618
uacucgcgaccacagcgcc

SEQ ID NO: 861620 - RNA, 19 nt, Artificial Sequence
  Description of Artificial Sequence: Synthetic oligonucleotide
  Sense strand starting at position 2740 of SEQ ID NO: 588385
agcggccuucggagguaau

SEQ ID NO: 861621 - RNA, 19 nt, Artificial Sequence
  Description of Artificial Sequence: Synthetic oligonucleotide
  Antisense strand to SEQ ID NO: 861620
auuaccuccgaaggccgcu

SEQ ID NO: 861622 - RNA, 19 nt, Artificial Sequence
  Description of Artificial Sequence: Synthetic oligonucleotide
  Sense strand starting at position 2741 of SEQ ID NO: 588385
gcggccuucggagguaauu

SEQ ID NO: 861623 - RNA, 19 nt, Artificial Sequence
  Description of Artificial Sequence: Synthetic oligonucleotide
  Antisense strand to SEQ ID NO: 861622
aauuaccuccgaaggccgc

SEQ ID NO: 861624 - RNA, 19 nt, Artificial Sequence
  Description of Artificial Sequence: Synthetic oligonucleotide
  Sense strand starting at position 2743 of SEQ ID NO: 588385
ggccuucggagguaauuga

SEQ ID NO: 861625 - RNA, 19 nt, Artificial Sequence
  Description of Artificial Sequence: Synthetic oligonucleotide
  Antisense strand to SEQ ID NO: 861624
ucaauuaccuccgaaggcc

SEQ ID NO: 861626 - RNA, 19 nt, Artificial Sequence
  Description of Artificial Sequence: Synthetic oligonucleotide
  Sense strand starting at position 2747 of SEQ ID NO: 588385
uucggagguaauugacaaa

SEQ ID NO: 861627 - RNA, 19 nt, Artificial Sequence
  Description of Artificial Sequence: Synthetic oligonucleotide
  Antisense strand to SEQ ID NO: 861626
uuugucaauuaccuccgaa

SEQ ID NO: 861628 - RNA, 19 nt, Artificial Sequence
  Description of Artificial Sequence: Synthetic oligonucleotide
  Sense strand starting at position 2750 of SEQ ID NO: 588385
ggagguaauugacaaaguc

SEQ ID NO: 861629 - RNA, 19 nt, Artificial Sequence
  Description of Artificial Sequence: Synthetic oligonucleotide
  Antisense strand to SEQ ID NO: 861628
gacuuugucaauuaccucc

SEQ ID NO: 861630 - RNA, 19 nt, Artificial Sequence
  Description of Artificial Sequence: Synthetic oligonucleotide
  Sense strand starting at position 2768 of SEQ ID NO: 588385
ccuuaaucugcgcggcgaa

SEQ ID NO: 861631 - RNA, 19 nt, Artificial Sequence
  Description of Artificial Sequence: Synthetic oligonucleotide
  Antisense strand to SEQ ID NO: 861630
uucgccgcgcagauuaagg

SEQ ID NO: 861632 - RNA, 19 nt, Artificial Sequence
  Description of Artificial Sequence: Synthetic oligonucleotide
  Sense strand starting at position 2791 of SEQ ID NO: 588385
cugcuauuguggcuucuga

SEQ ID NO: 861633 - RNA, 19 nt, Artificial Sequence
  Description of Artificial Sequence: Synthetic oligonucleotide
  Antisense strand to SEQ ID NO: 861632
ucagaagccacaauagcag

SEQ ID NO: 861634 - RNA, 19 nt, Artificial Sequence
  Description of Artificial Sequence: Synthetic oligonucleotide
  Sense strand starting at position 3410 of SEQ ID NO: 588385
cggccuuuccuaugaauua

SEQ ID NO: 861635 - RNA, 19 nt, Artificial Sequence
  Description of Artificial Sequence: Synthetic oligonucleotide
  Antisense strand to SEQ ID NO: 861634
uaauucauaggaaaggccg

SEQ ID NO: 861636 - RNA, 19 nt, Artificial Sequence
  Description of Artificial Sequence: Synthetic oligonucleotide
  Sense strand starting at position 3411 of SEQ ID NO: 588385
ggccuuuccuaugaauuaa

SEQ ID NO: 861637 - RNA, 19 nt, Artificial Sequence
  Description of Artificial Sequence: Synthetic oligonucleotide
  Antisense strand to SEQ ID NO: 861636
uuaauucauaggaaaggcc

SEQ ID NO: 861638 - RNA, 19 nt, Artificial Sequence
  Description of Artificial Sequence: Synthetic oligonucleotide
  Sense strand starting at position 3676 of SEQ ID NO: 588385
agccucaguuuccucguaa

SEQ ID NO: 861639 - RNA, 19 nt, Artificial Sequence
  Description of Artificial Sequence: Synthetic oligonucleotide
  Antisense strand to SEQ ID NO: 861638
uuacgaggaaacugaggcu

SEQ ID NO: 861640 - RNA, 19 nt, Artificial Sequence
  Description of Artificial Sequence: Synthetic oligonucleotide
  Sense strand starting at position 3677 of SEQ ID NO: 588385
gccucaguuuccucguaaa

SEQ ID NO: 861641 - RNA, 19 nt, Artificial Sequence
  Description of Artificial Sequence: Synthetic oligonucleotide
  Antisense strand to SEQ ID NO: 861640
uuuacgaggaaacugaggc

SEQ ID NO: 861642 - RNA, 19 nt, Artificial Sequence
  Description of Artificial Sequence: Synthetic oligonucleotide
  Sense strand starting at position 3812 of SEQ ID NO: 588385
auguaaacuccagacgcau

SEQ ID NO: 861643 - RNA, 19 nt, Artificial Sequence
  Description of Artificial Sequence: Synthetic oligonucleotide
  Antisense strand to SEQ ID NO: 861642
augcgucuggaguuuacau

SEQ ID NO: 861644 - RNA, 19 nt, Artificial Sequence
  Description of Artificial Sequence: Synthetic oligonucleotide
  Sense strand starting at position 3823 of SEQ ID NO: 588385
agacgcauuugugcacaga

SEQ ID NO: 861645 - RNA, 19 nt, Artificial Sequence
  Description of Artificial Sequence: Synthetic oligonucleotide
  Antisense strand to SEQ ID NO: 861644
ucugugcacaaaugcgucu

SEQ ID NO: 861646 - RNA, 19 nt, Artificial Sequence
  Description of Artificial Sequence: Synthetic oligonucleotide
  Sense strand starting at position 3930 of SEQ ID NO: 588385
uggagaugugcucagagua

SEQ ID NO: 861647 - RNA, 19 nt, Artificial Sequence
  Description of Artificial Sequence: Synthetic oligonucleotide
  Antisense strand to SEQ ID NO: 861646
uacucugagcacaucucca

SEQ ID NO: 861648 - RNA, 19 nt, Artificial Sequence
  Description of Artificial Sequence: Synthetic oligonucleotide
  Sense strand starting at position 3942 of SEQ ID NO: 588385
cagaguagucagggaggca

SEQ ID NO: 861649 - RNA, 19 nt, Artificial Sequence
  Description of Artificial Sequence: Synthetic oligonucleotide
  Antisense strand to SEQ ID NO: 861648
ugccucccugacuacucug

SEQ ID NO: 861650 - RNA, 19 nt, Artificial Sequence
  Description of Artificial Sequence: Synthetic oligonucleotide
  Sense strand starting at position 3943 of SEQ ID NO: 588385
agaguagucagggaggcau

SEQ ID NO: 861651 - RNA, 19 nt, Artificial Sequence
  Description of Artificial Sequence: Synthetic oligonucleotide
  Antisense strand to SEQ ID NO: 861650
augccucccugacuacucu

SEQ ID NO: 861652 - RNA, 19 nt, Artificial Sequence
  Description of Artificial Sequence: Synthetic oligonucleotide
  Sense strand starting at position 3954 of SEQ ID NO: 588385
ggaggcauccugggaugga

SEQ ID NO: 861653 - RNA, 19 nt, Artificial Sequence
  Description of Artificial Sequence: Synthetic oligonucleotide
  Antisense strand to SEQ ID NO: 861652
uccaucccaggaugccucc

SEQ ID NO: 861654 - RNA, 19 nt, Artificial Sequence
  Description of Artificial Sequence: Synthetic oligonucleotide
  Sense strand starting at position 68 of SEQ ID NO: 588386
ggcagcauuugagcuugau

SEQ ID NO: 861655 - RNA, 19 nt, Artificial Sequence
  Description of Artificial Sequence: Synthetic oligonucleotide
  Antisense strand to SEQ ID NO: 861654
aucaagcucaaaugcugcc

SEQ ID NO: 861656 - RNA, 19 nt, Artificial Sequence
  Description of Artificial Sequence: Synthetic oligonucleotide
  Sense strand starting at position 99 of SEQ ID NO: 588386
uagggugucccugagugaa

SEQ ID NO: 861657 - RNA, 19 nt, Artificial Sequence
  Description of Artificial Sequence: Synthetic oligonucleotide
  Antisense strand to SEQ ID NO: 861656
uucacucagggacacccua

SEQ ID NO: 861658 - RNA, 19 nt, Artificial Sequence
  Description of Artificial Sequence: Synthetic oligonucleotide
  Sense strand starting at position 305 of SEQ ID NO: 588386
ucuagaaguuaagacaguu

SEQ ID NO: 861659 - RNA, 19 nt, Artificial Sequence
  Description of Artificial Sequence: Synthetic oligonucleotide
  Antisense strand to SEQ ID NO: 861658
aacugucuuaacuucuaga

SEQ ID NO: 861660 - RNA, 19 nt, Artificial Sequence
  Description of Artificial Sequence: Synthetic oligonucleotide
  Sense strand starting at position 313 of SEQ ID NO: 588386
uuaagacaguucuugcuaa

SEQ ID NO: 861661 - RNA, 19 nt, Artificial Sequence
  Description of Artificial Sequence: Synthetic oligonucleotide
  Antisense strand to SEQ ID NO: 861660
uuagcaagaacugucuuaa

SEQ ID NO: 861662 - RNA, 19 nt, Artificial Sequence
  Description of Artificial Sequence: Synthetic oligonucleotide
  Sense strand starting at position 314 of SEQ ID NO: 588386
uaagacaguucuugcuaag

SEQ ID NO: 861663 - RNA, 19 nt, Artificial Sequence
  Description of Artificial Sequence: Synthetic oligonucleotide
  Antisense strand to SEQ ID NO: 861662
cuuagcaagaacugucuua

SEQ ID NO: 861664 - RNA, 19 nt, Artificial Sequence
  Description of Artificial Sequence: Synthetic oligonucleotide
  Sense strand starting at position 432 of SEQ ID NO: 588386
gugggauaggugugugguu

SEQ ID NO: 861665 - RNA, 19 nt, Artificial Sequence
  Description of Artificial Sequence: Synthetic oligonucleotide
  Antisense strand to SEQ ID NO: 861664
aaccacacaccuaucccac

SEQ ID NO: 861666 - RNA, 19 nt, Artificial Sequence
  Description of Artificial Sequence: Synthetic oligonucleotide
  Sense strand starting at position 433 of SEQ ID NO: 588386
ugggauaggugugugguua

SEQ ID NO: 861667 - RNA, 19 nt, Artificial Sequence
  Description of Artificial Sequence: Synthetic oligonucleotide
  Antisense strand to SEQ ID NO: 861666
uaaccacacaccuauccca

SEQ ID NO: 861668 - RNA, 19 nt, Artificial Sequence
  Description of Artificial Sequence: Synthetic oligonucleotide
  Sense strand starting at position 435 of SEQ ID NO: 588386
ggauaggugugugguuaga

SEQ ID NO: 861669 - RNA, 19 nt, Artificial Sequence
  Description of Artificial Sequence: Synthetic oligonucleotide
  Antisense strand to SEQ ID NO: 861668
ucuaaccacacaccuaucc

SEQ ID NO: 861670 - RNA, 19 nt, Artificial Sequence
  Description of Artificial Sequence: Synthetic oligonucleotide
  Sense strand starting at position 555 of SEQ ID NO: 588386
ccagccuguuuggagaagu

SEQ ID NO: 861671 - RNA, 19 nt, Artificial Sequence
  Description of Artificial Sequence: Synthetic oligonucleotide
  Antisense strand to SEQ ID NO: 861670
acuucuccaaacaggcugg

SEQ ID NO: 861672 - RNA, 19 nt, Artificial Sequence
  Description of Artificial Sequence: Synthetic oligonucleotide
  Sense strand starting at position 572 of SEQ ID NO: 588386
gugagguagugccgaugaa

SEQ ID NO: 861673 - RNA, 19 nt, Artificial Sequence
  Description of Artificial Sequence: Synthetic oligonucleotide
  Antisense strand to SEQ ID NO: 861672
uucaucggcacuaccucac

SEQ ID NO: 861674 - RNA, 19 nt, Artificial Sequence
  Description of Artificial Sequence: Synthetic oligonucleotide
  Sense strand starting at position 573 of SEQ ID NO: 588386
ugagguagugccgaugaau

SEQ ID NO: 861675 - RNA, 19 nt, Artificial Sequence
  Description of Artificial Sequence: Synthetic oligonucleotide
  Antisense strand to SEQ ID NO: 861674
auucaucggcacuaccuca

SEQ ID NO: 861676 - RNA, 19 nt, Artificial Sequence
  Description of Artificial Sequence: Synthetic oligonucleotide
  Sense strand starting at position 752 of SEQ ID NO: 588386
augacaucugucuggaaga

SEQ ID NO: 861677 - RNA, 19 nt, Artificial Sequence
  Description of Artificial Sequence: Synthetic oligonucleotide
  Antisense strand to SEQ ID NO: 861676
ucuuccagacagaugucau

SEQ ID NO: 861678 - RNA, 19 nt, Artificial Sequence
  Description of Artificial Sequence: Synthetic oligonucleotide
  Sense strand starting at position 753 of SEQ ID NO: 588386
ugacaucugucuggaagaa

SEQ ID NO: 861679 - RNA, 19 nt, Artificial Sequence
  Description of Artificial Sequence: Synthetic oligonucleotide
  Antisense strand to SEQ ID NO: 861678
uucuuccagacagauguca

SEQ ID NO: 861680 - RNA, 19 nt, Artificial Sequence
  Description of Artificial Sequence: Synthetic oligonucleotide
  Sense strand starting at position 1060 of SEQ ID NO: 588386
ggguucaaaucccgacaga

SEQ ID NO: 861681 - RNA, 19 nt, Artificial Sequence
  Description of Artificial Sequence: Synthetic oligonucleotide
  Antisense strand to SEQ ID NO: 861680
ucugucgggauuugaaccc

SEQ ID NO: 861682 - RNA, 19 nt, Artificial Sequence
  Description of Artificial Sequence: Synthetic oligonucleotide
  Sense strand starting at position 1116 of SEQ ID NO: 588386
cccugcuuuccuugucuua

SEQ ID NO: 861683 - RNA, 19 nt, Artificial Sequence
  Description of Artificial Sequence: Synthetic oligonucleotide
  Antisense strand to SEQ ID NO: 861682
uaagacaaggaaagcaggg

SEQ ID NO: 861684 - RNA, 19 nt, Artificial Sequence
  Description of Artificial Sequence: Synthetic oligonucleotide
  Sense strand starting at position 1160 of SEQ ID NO: 588386
guuccugcaggagaugaau

SEQ ID NO: 861685 - RNA, 19 nt, Artificial Sequence
  Description of Artificial Sequence: Synthetic oligonucleotide
  Antisense strand to SEQ ID NO: 861684
auucaucuccugcaggaac

SEQ ID NO: 861686 - RNA, 19 nt, Artificial Sequence
  Description of Artificial Sequence: Synthetic oligonucleotide
  Sense strand starting at position 1287 of SEQ ID NO: 588386
aguggagauucugugggua

SEQ ID NO: 861687 - RNA, 19 nt, Artificial Sequence
  Description of Artificial Sequence: Synthetic oligonucleotide
  Antisense strand to SEQ ID NO: 861686
uacccacagaaucuccacu

SEQ ID NO: 861688 - RNA, 19 nt, Artificial Sequence
  Description of Artificial Sequence: Synthetic oligonucleotide
  Sense strand starting at position 1289 of SEQ ID NO: 588386
uggagauucuguggguagu

SEQ ID NO: 861689 - RNA, 19 nt, Artificial Sequence
  Description of Artificial Sequence: Synthetic oligonucleotide
  Antisense strand to SEQ ID NO: 861688
acuacccacagaaucucca

SEQ ID NO: 861690 - RNA, 19 nt, Artificial Sequence
  Description of Artificial Sequence: Synthetic oligonucleotide
  Sense strand starting at position 1290 of SEQ ID NO: 588386
ggagauucuguggguaguu

SEQ ID NO: 861691 - RNA, 19 nt, Artificial Sequence
  Description of Artificial Sequence: Synthetic oligonucleotide
  Antisense strand to SEQ ID NO: 861690
aacuacccacagaaucucc

SEQ ID NO: 861692 - RNA, 19 nt, Artificial Sequence
  Description of Artificial Sequence: Synthetic oligonucleotide
  Sense strand starting at position 1291 of SEQ ID NO: 588386
gagauucuguggguaguua

SEQ ID NO: 861693 - RNA, 19 nt, Artificial Sequence
  Description of Artificial Sequence: Synthetic oligonucleotide
  Antisense strand to SEQ ID NO: 861692
uaacuacccacagaaucuc

SEQ ID NO: 861694 - RNA, 19 nt, Artificial Sequence
  Description of Artificial Sequence: Synthetic oligonucleotide
  Sense strand starting at position 1292 of SEQ ID NO: 588386
agauucuguggguaguuaa

SEQ ID NO: 861695 - RNA, 19 nt, Artificial Sequence
  Description of Artificial Sequence: Synthetic oligonucleotide
  Antisense strand to SEQ ID NO: 861694
uuaacuacccacagaaucu

SEQ ID NO: 861696 - RNA, 19 nt, Artificial Sequence
  Description of Artificial Sequence: Synthetic oligonucleotide
  Sense strand starting at position 1295 of SEQ ID NO: 588386
uucuguggguaguuaagau

SEQ ID NO: 861697 - RNA, 19 nt, Artificial Sequence
  Description of Artificial Sequence: Synthetic oligonucleotide
  Antisense strand to SEQ ID NO: 861696
aucuuaacuacccacagaa

SEQ ID NO: 861698 - RNA, 19 nt, Artificial Sequence
  Description of Artificial Sequence: Synthetic oligonucleotide
  Sense strand starting at position 1305 of SEQ ID NO: 588386
aguuaagaugcccauugua

SEQ ID NO: 861699 - RNA, 19 nt, Artificial Sequence
  Description of Artificial Sequence: Synthetic oligonucleotide
  Antisense strand to SEQ ID NO: 861698
uacaaugggcaucuuaacu

SEQ ID NO: 861700 - RNA, 19 nt, Artificial Sequence
  Description of Artificial Sequence: Synthetic oligonucleotide
  Sense strand starting at position 1353 of SEQ ID NO: 588386
ggcugauuugucuguggac

SEQ ID NO: 861701 - RNA, 19 nt, Artificial Sequence
  Description of Artificial Sequence: Synthetic oligonucleotide
  Antisense strand to SEQ ID NO: 861700
guccacagacaaaucagcc

SEQ ID NO: 861702 - RNA, 19 nt, Artificial Sequence
  Description of Artificial Sequence: Synthetic oligonucleotide
  Sense strand starting at position 1354 of SEQ ID NO: 588386
gcugauuugucuguggaca

SEQ ID NO: 861703 - RNA, 19 nt, Artificial Sequence
  Description of Artificial Sequence: Synthetic oligonucleotide
  Antisense strand to SEQ ID NO: 861702
uguccacagacaaaucagc

SEQ ID NO: 861704 - RNA, 19 nt, Artificial Sequence
  Description of Artificial Sequence: Synthetic oligonucleotide
  Sense strand starting at position 1356 of SEQ ID NO: 588386
ugauuugucuguggacaca

SEQ ID NO: 861705 - RNA, 19 nt, Artificial Sequence
  Description of Artificial Sequence: Synthetic oligonucleotide
  Antisense strand to SEQ ID NO: 861704
uguguccacagacaaauca

SEQ ID NO: 861706 - RNA, 19 nt, Artificial Sequence
  Description of Artificial Sequence: Synthetic oligonucleotide
  Sense strand starting at position 2172 of SEQ ID NO: 588386
cgcggacuuggauacuaaa

SEQ ID NO: 861707 - RNA, 19 nt, Artificial Sequence
  Description of Artificial Sequence: Synthetic oligonucleotide
  Antisense strand to SEQ ID NO: 861706
uuuaguauccaaguccgcg

SEQ ID NO: 861708 - RNA, 19 nt, Artificial Sequence
  Description of Artificial Sequence: Synthetic oligonucleotide
  Sense strand starting at position 2763 of SEQ ID NO: 588386
ggcgcuguggucgcgagua

SEQ ID NO: 861709 - RNA, 19 nt, Artificial Sequence
  Description of Artificial Sequence: Synthetic oligonucleotide
  Antisense strand to SEQ ID NO: 861708
uacucgcgaccacagcgcc

SEQ ID NO: 861710 - RNA, 19 nt, Artificial Sequence
  Description of Artificial Sequence: Synthetic oligonucleotide
  Sense strand starting at position 2956 of SEQ ID NO: 588386
agcggccuucggagguaau

SEQ ID NO: 861711 - RNA, 19 nt, Artificial Sequence
  Description of Artificial Sequence: Synthetic oligonucleotide
  Antisense strand to SEQ ID NO: 861710
auuaccuccgaaggccgcu

SEQ ID NO: 861712 - RNA, 19 nt, Artificial Sequence
  Description of Artificial Sequence: Synthetic oligonucleotide
  Sense strand starting at position 2957 of SEQ ID NO: 588386
gcggccuucggagguaauu

SEQ ID NO: 861713 - RNA, 19 nt, Artificial Sequence
  Description of Artificial Sequence: Synthetic oligonucleotide
  Antisense strand to SEQ ID NO: 861712
aauuaccuccgaaggccgc

SEQ ID NO: 861714 - RNA, 19 nt, Artificial Sequence
  Description of Artificial Sequence: Synthetic oligonucleotide
  Sense strand starting at position 2959 of SEQ ID NO: 588386
ggccuucggagguaauuga

SEQ ID NO: 861715 - RNA, 19 nt, Artificial Sequence
  Description of Artificial Sequence: Synthetic oligonucleotide
  Antisense strand to SEQ ID NO: 861714
ucaauuaccuccgaaggcc

SEQ ID NO: 861716 - RNA, 19 nt, Artificial Sequence
  Description of Artificial Sequence: Synthetic oligonucleotide
  Sense strand starting at position 2963 of SEQ ID NO: 588386
uucggagguaauugacaaa

SEQ ID NO: 861717 - RNA, 19 nt, Artificial Sequence
  Description of Artificial Sequence: Synthetic oligonucleotide
  Antisense strand to SEQ ID NO: 861716
uuugucaauuaccuccgaa

SEQ ID NO: 861718 - RNA, 19 nt, Artificial Sequence
  Description of Artificial Sequence: Synthetic oligonucleotide
  Sense strand starting at position 2966 of SEQ ID NO: 588386
ggagguaauugacaaaguc

SEQ ID NO: 861719 - RNA, 19 nt, Artificial Sequence
  Description of Artificial Sequence: Synthetic oligonucleotide
  Antisense strand to SEQ ID NO: 861718
gacuuugucaauuaccucc

SEQ ID NO: 861720 - RNA, 19 nt, Artificial Sequence
  Description of Artificial Sequence: Synthetic oligonucleotide
  Sense strand starting at position 2984 of SEQ ID NO: 588386
ccuuaaucugcgcggcgaa

SEQ ID NO: 861721 - RNA, 19 nt, Artificial Sequence
  Description of Artificial Sequence: Synthetic oligonucleotide
  Antisense strand to SEQ ID NO: 861720
uucgccgcgcagauuaagg

SEQ ID NO: 861722 - RNA, 19 nt, Artificial Sequence
  Description of Artificial Sequence: Synthetic oligonucleotide
  Sense strand starting at position 3007 of SEQ ID NO: 588386
cugcuauuguggcuucuga

SEQ ID NO: 861723 - RNA, 19 nt, Artificial Sequence
  Description of Artificial Sequence: Synthetic oligonucleotide
  Antisense strand to SEQ ID NO: 861722
ucagaagccacaauagcag

SEQ ID NO: 861724 - RNA, 19 nt, Artificial Sequence
  Description of Artificial Sequence: Synthetic oligonucleotide
  Sense strand starting at position 3624 of SEQ ID NO: 588386
cucggccuuuccuaugaau

SEQ ID NO: 861725 - RNA, 19 nt, Artificial Sequence
  Description of Artificial Sequence: Synthetic oligonucleotide
  Antisense strand to SEQ ID NO: 861724
auucauaggaaaggccgag

SEQ ID NO: 861726 - RNA, 19 nt, Artificial Sequence
  Description of Artificial Sequence: Synthetic oligonucleotide
  Sense strand starting at position 3626 of SEQ ID NO: 588386
cggccuuuccuaugaauua

SEQ ID NO: 861727 - RNA, 19 nt, Artificial Sequence
  Description of Artificial Sequence: Synthetic oligonucleotide
  Antisense strand to SEQ ID NO: 861726
uaauucauaggaaaggccg

SEQ ID NO: 861728 - RNA, 19 nt, Artificial Sequence
  Description of Artificial Sequence: Synthetic oligonucleotide
  Sense strand starting at position 3627 of SEQ ID NO: 588386
ggccuuuccuaugaauuaa

SEQ ID NO: 861729 - RNA, 19 nt, Artificial Sequence
  Description of Artificial Sequence: Synthetic oligonucleotide
  Antisense strand to SEQ ID NO: 861728
uuaauucauaggaaaggcc

SEQ ID NO: 861730 - RNA, 19 nt, Artificial Sequence
  Description of Artificial Sequence: Synthetic oligonucleotide
  Sense strand starting at position 3892 of SEQ ID NO: 588386
agccucaguuuccucguaa

SEQ ID NO: 861731 - RNA, 19 nt, Artificial Sequence
  Description of Artificial Sequence: Synthetic oligonucleotide
  Antisense strand to SEQ ID NO: 861730
uuacgaggaaacugaggcu

SEQ ID NO: 861732 - RNA, 19 nt, Artificial Sequence
  Description of Artificial Sequence: Synthetic oligonucleotide
  Sense strand starting at position 3893 of SEQ ID NO: 588386
gccucaguuuccucguaaa

SEQ ID NO: 861733 - RNA, 19 nt, Artificial Sequence
  Description of Artificial Sequence: Synthetic oligonucleotide
  Antisense strand to SEQ ID NO: 861732
uuuacgaggaaacugaggc

SEQ ID NO: 861734 - RNA, 19 nt, Artificial Sequence
  Description of Artificial Sequence: Synthetic oligonucleotide
  Sense strand starting at position 28 of SEQ ID NO: 588387
uguucuacuuccuuagaga

SEQ ID NO: 861735 - RNA, 19 nt, Artificial Sequence
  Description of Artificial Sequence: Synthetic oligonucleotide
  Antisense strand to SEQ ID NO: 861734
ucucuaaggaaguagaaca

SEQ ID NO: 861736 - RNA, 19 nt, Artificial Sequence
  Description of Artificial Sequence: Synthetic oligonucleotide
  Sense strand starting at position 29 of SEQ ID NO: 588387
guucuacuuccuuagagaa

SEQ ID NO: 861737 - RNA, 19 nt, Artificial Sequence
  Description of Artificial Sequence: Synthetic oligonucleotide
  Antisense strand to SEQ ID NO: 861736
uucucuaaggaaguagaac

SEQ ID NO: 861738 - RNA, 19 nt, Artificial Sequence
  Description of Artificial Sequence: Synthetic oligonucleotide
  Sense strand starting at position 214 of SEQ ID NO: 588387
acagucacaugccuagaau

SEQ ID NO: 861739 - RNA, 19 nt, Artificial Sequence
  Description of Artificial Sequence: Synthetic oligonucleotide
  Antisense strand to SEQ ID NO: 861738
auucuaggcaugugacugu

SEQ ID NO: 861740 - RNA, 19 nt, Artificial Sequence
  Description of Artificial Sequence: Synthetic oligonucleotide
  Sense strand starting at position 238 of SEQ ID NO: 588387
ugucucagauccuugagaa

SEQ ID NO: 861741 - RNA, 19 nt, Artificial Sequence
  Description of Artificial Sequence: Synthetic oligonucleotide
  Antisense strand to SEQ ID NO: 861740
uucucaaggaucugagaca

SEQ ID NO: 861742 - RNA, 19 nt, Artificial Sequence
  Description of Artificial Sequence: Synthetic oligonucleotide
  Sense strand starting at position 239 of SEQ ID NO: 588387
gucucagauccuugagaag

SEQ ID NO: 861743 - RNA, 19 nt, Artificial Sequence
  Description of Artificial Sequence: Synthetic oligonucleotide
  Antisense strand to SEQ ID NO: 861742
cuucucaaggaucugagac

SEQ ID NO: 861744 - RNA, 19 nt, Artificial Sequence
  Description of Artificial Sequence: Synthetic oligonucleotide
  Sense strand starting at position 251 of SEQ ID NO: 588387
ugagaagccugcucaggaa

SEQ ID NO: 861745 - RNA, 19 nt, Artificial Sequence
  Description of Artificial Sequence: Synthetic oligonucleotide
  Antisense strand to SEQ ID NO: 861744
uuccugagcaggcuucuca

SEQ ID NO: 861746 - RNA, 19 nt, Artificial Sequence
  Description of Artificial Sequence: Synthetic oligonucleotide
  Sense strand starting at position 295 of SEQ ID NO: 588387
uuuaucucuggccaggaau

SEQ ID NO: 861747 - RNA, 19 nt, Artificial Sequence
  Description of Artificial Sequence: Synthetic oligonucleotide
  Antisense strand to SEQ ID NO: 861746
auuccuggccagagauaaa

SEQ ID NO: 861748 - RNA, 19 nt, Artificial Sequence
  Description of Artificial Sequence: Synthetic oligonucleotide
  Sense strand starting at position 429 of SEQ ID NO: 588387
cauagugaagaaugcgaau

SEQ ID NO: 861749 - RNA, 19 nt, Artificial Sequence
  Description of Artificial Sequence: Synthetic oligonucleotide
  Antisense strand to SEQ ID NO: 861748
auucgcauucuucacuaug

SEQ ID NO: 861750 - RNA, 19 nt, Artificial Sequence
  Description of Artificial Sequence: Synthetic oligonucleotide
  Sense strand starting at position 534 of SEQ ID NO: 588387
gugaaugcaggccaucuaa

SEQ ID NO: 861751 - RNA, 19 nt, Artificial Sequence
  Description of Artificial Sequence: Synthetic oligonucleotide
  Antisense strand to SEQ ID NO: 861750
uuagauggccugcauucac

SEQ ID NO: 861752 - RNA, 19 nt, Artificial Sequence
  Description of Artificial Sequence: Synthetic oligonucleotide
  Sense strand starting at position 606 of SEQ ID NO: 588387
guaauauagagcuagucag

SEQ ID NO: 861753 - RNA, 19 nt, Artificial Sequence
  Description of Artificial Sequence: Synthetic oligonucleotide
  Antisense strand to SEQ ID NO: 861752
cugacuagcucuauauuac

SEQ ID NO: 861754 - RNA, 19 nt, Artificial Sequence
  Description of Artificial Sequence: Synthetic oligonucleotide
  Sense strand starting at position 746 of SEQ ID NO: 588387
gaguauuugugguugcaau

SEQ ID NO: 861755 - RNA, 19 nt, Artificial Sequence
  Description of Artificial Sequence: Synthetic oligonucleotide
  Antisense strand to SEQ ID NO: 861754
auugcaaccacaaauacuc

SEQ ID NO: 861756 - RNA, 19 nt, Artificial Sequence
  Description of Artificial Sequence: Synthetic oligonucleotide
  Sense strand starting at position 747 of SEQ ID NO: 588387
aguauuugugguugcaaua

SEQ ID NO: 861757 - RNA, 19 nt, Artificial Sequence
  Description of Artificial Sequence: Synthetic oligonucleotide
  Antisense strand to SEQ ID NO: 861756
uauugcaaccacaaauacu

SEQ ID NO: 861758 - RNA, 19 nt, Artificial Sequence
  Description of Artificial Sequence: Synthetic oligonucleotide
  Sense strand starting at position 808 of SEQ ID NO: 588387
ggcacagcaguuuaaucau

SEQ ID NO: 861759 - RNA, 19 nt, Artificial Sequence
  Description of Artificial Sequence: Synthetic oligonucleotide
  Antisense strand to SEQ ID NO: 861758
augauuaaacugcugugcc

SEQ ID NO: 861760 - RNA, 19 nt, Artificial Sequence
  Description of Artificial Sequence: Synthetic oligonucleotide
  Sense strand starting at position 1017 of SEQ ID NO: 588387
aggcuaaacugacuacuaa

SEQ ID NO: 861761 - RNA, 19 nt, Artificial Sequence
  Description of Artificial Sequence: Synthetic oligonucleotide
  Antisense strand to SEQ ID NO: 861760
uuaguagucaguuuagccu

SEQ ID NO: 861762 - RNA, 19 nt, Artificial Sequence
  Description of Artificial Sequence: Synthetic oligonucleotide
  Sense strand starting at position 1145 of SEQ ID NO: 588387
agcuuuaagcuuuacaaag

SEQ ID NO: 861763 - RNA, 19 nt, Artificial Sequence
  Description of Artificial Sequence: Synthetic oligonucleotide
  Antisense strand to SEQ ID NO: 861762
cuuuguaaagcuuaaagcu

SEQ ID NO: 861764 - RNA, 19 nt, Artificial Sequence
  Description of Artificial Sequence: Synthetic oligonucleotide
  Sense strand starting at position 1415 of SEQ ID NO: 588387
ggccuugaagaaugcuaga

SEQ ID NO: 861765 - RNA, 19 nt, Artificial Sequence
  Description of Artificial Sequence: Synthetic oligonucleotide
  Antisense strand to SEQ ID NO: 861764
ucuagcauucuucaaggcc

SEQ ID NO: 861766 - RNA, 19 nt, Artificial Sequence
  Description of Artificial Sequence: Synthetic oligonucleotide
  Sense strand starting at position 1461 of SEQ ID NO: 588387
gugucuucgccuucuccau

SEQ ID NO: 861767 - RNA, 19 nt, Artificial Sequence
  Description of Artificial Sequence: Synthetic oligonucleotide
  Antisense strand to SEQ ID NO: 861766
auggagaaggcgaagacac

SEQ ID NO: 861768 - RNA, 19 nt, Artificial Sequence
  Description of Artificial Sequence: Synthetic oligonucleotide
  Sense strand starting at position 1533 of SEQ ID NO: 588387
caggaagucucaucagcaa

SEQ ID NO: 861769 - RNA, 19 nt, Artificial Sequence
  Description of Artificial Sequence: Synthetic oligonucleotide
  Antisense strand to SEQ ID NO: 861768
uugcugaugagacuuccug

SEQ ID NO: 861770 - RNA, 19 nt, Artificial Sequence
  Description of Artificial Sequence: Synthetic oligonucleotide
  Sense strand starting at position 1573 of SEQ ID NO: 588387
aauugugacccagaaugca

SEQ ID NO: 861771 - RNA, 19 nt, Artificial Sequence
  Description of Artificial Sequence: Synthetic oligonucleotide
  Antisense strand to SEQ ID NO: 861770
ugcauucugggucacaauu

SEQ ID NO: 861772 - RNA, 19 nt, Artificial Sequence
  Description of Artificial Sequence: Synthetic oligonucleotide
  Sense strand starting at position 1608 of SEQ ID NO: 588387
cuaucuucccgccaagaga

SEQ ID NO: 861773 - RNA, 19 nt, Artificial Sequence
  Description of Artificial Sequence: Synthetic oligonucleotide
  Antisense strand to SEQ ID NO: 861772
ucucuuggcgggaagauag

SEQ ID NO: 861774 - RNA, 19 nt, Artificial Sequence
  Description of Artificial Sequence: Synthetic oligonucleotide
  Sense strand starting at position 1684 of SEQ ID NO: 588387
gauucugagagguguagag

SEQ ID NO: 861775 - RNA, 19 nt, Artificial Sequence
  Description of Artificial Sequence: Synthetic oligonucleotide
  Antisense strand to SEQ ID NO: 861774
cucuacaccucucagaauc

SEQ ID NO: 861776 - RNA, 19 nt, Artificial Sequence
  Description of Artificial Sequence: Synthetic oligonucleotide
  Sense strand starting at position 2008 of SEQ ID NO: 588387
ggucucuggaccgaaagua

SEQ ID NO: 861777 - RNA, 19 nt, Artificial Sequence
  Description of Artificial Sequence: Synthetic oligonucleotide
  Antisense strand to SEQ ID NO: 861776
uacuuucgguccagagacc

SEQ ID NO: 861778 - RNA, 19 nt, Artificial Sequence
  Description of Artificial Sequence: Synthetic oligonucleotide
  Sense strand starting at position 2025 of SEQ ID NO: 588387
uagacugggcucuggagaa

SEQ ID NO: 861779 - RNA, 19 nt, Artificial Sequence
  Description of Artificial Sequence: Synthetic oligonucleotide
  Antisense strand to SEQ ID NO: 861778
uucuccagagcccagucua

SEQ ID NO: 861780 - RNA, 19 nt, Artificial Sequence
  Description of Artificial Sequence: Synthetic oligonucleotide
  Sense strand starting at position 2569 of SEQ ID NO: 588387
ccugcugguccagaagauu

SEQ ID NO: 861781 - RNA, 19 nt, Artificial Sequence
  Description of Artificial Sequence: Synthetic oligonucleotide
  Antisense strand to SEQ ID NO: 861780
aaucuucuggaccagcagg

SEQ ID NO: 861782 - RNA, 19 nt, Artificial Sequence
  Description of Artificial Sequence: Synthetic oligonucleotide
  Sense strand starting at position 2750 of SEQ ID NO: 588387
ugagcuagugggugaacaa

SEQ ID NO: 861783 - RNA, 19 nt, Artificial Sequence
  Description of Artificial Sequence: Synthetic oligonucleotide
  Antisense strand to SEQ ID NO: 861782
uuguucacccacuagcuca

SEQ ID NO: 861784 - RNA, 19 nt, Artificial Sequence
  Description of Artificial Sequence: Synthetic oligonucleotide
  Sense strand starting at position 2800 of SEQ ID NO: 588387
cuuacagagugacuauuga

SEQ ID NO: 861785 - RNA, 19 nt, Artificial Sequence
  Description of Artificial Sequence: Synthetic oligonucleotide
  Antisense strand to SEQ ID NO: 861784
ucaauagucacucuguaag

SEQ ID NO: 861786 - RNA, 19 nt, Artificial Sequence
  Description of Artificial Sequence: Synthetic oligonucleotide
  Sense strand starting at position 2826 of SEQ ID NO: 588387
uagcauacaccucgaggaa

SEQ ID NO: 861787 - RNA, 19 nt, Artificial Sequence
  Description of Artificial Sequence: Synthetic oligonucleotide
  Antisense strand to SEQ ID NO: 861786
uuccucgagguguaugcua

SEQ ID NO: 861788 - RNA, 19 nt, Artificial Sequence
  Description of Artificial Sequence: Synthetic oligonucleotide
  Sense strand starting at position 2829 of SEQ ID NO: 588387
cauacaccucgaggaaagu

SEQ ID NO: 861789 - RNA, 19 nt, Artificial Sequence
  Description of Artificial Sequence: Synthetic oligonucleotide
  Antisense strand to SEQ ID NO: 861788
acuuuccucgagguguaug

SEQ ID NO: 861790 - RNA, 19 nt, Artificial Sequence
  Description of Artificial Sequence: Synthetic oligonucleotide
  Sense strand starting at position 2857 of SEQ ID NO: 588387
agaguccaccuguauucua

SEQ ID NO: 861791 - RNA, 19 nt, Artificial Sequence
  Description of Artificial Sequence: Synthetic oligonucleotide
  Antisense strand to SEQ ID NO: 861790
uagaauacagguggacucu

SEQ ID NO: 861792 - RNA, 19 nt, Artificial Sequence
  Description of Artificial Sequence: Synthetic oligonucleotide
  Sense strand starting at position 3069 of SEQ ID NO: 588387
guauuucuuugguuaaccu

SEQ ID NO: 861793 - RNA, 19 nt, Artificial Sequence
  Description of Artificial Sequence: Synthetic oligonucleotide
  Antisense strand to SEQ ID NO: 861792
agguuaaccaaagaaauac

SEQ ID NO: 861794 - RNA, 19 nt, Artificial Sequence
  Description of Artificial Sequence: Synthetic oligonucleotide
  Sense strand starting at position 3088 of SEQ ID NO: 588387
gguaucauucucgaaacaa

SEQ ID NO: 861795 - RNA, 19 nt, Artificial Sequence
  Description of Artificial Sequence: Synthetic oligonucleotide
  Antisense strand to SEQ ID NO: 861794
uuguuucgagaaugauacc

SEQ ID NO: 861796 - RNA, 19 nt, Artificial Sequence
  Description of Artificial Sequence: Synthetic oligonucleotide
  Sense strand starting at position 3114 of SEQ ID NO: 588387
guaguccuggcuuagacaa

SEQ ID NO: 861797 - RNA, 19 nt, Artificial Sequence
  Description of Artificial Sequence: Synthetic oligonucleotide
  Antisense strand to SEQ ID NO: 861796
uugucuaagccaggacuac

SEQ ID NO: 861798 - RNA, 19 nt, Artificial Sequence
  Description of Artificial Sequence: Synthetic oligonucleotide
  Sense strand starting at position 3243 of SEQ ID NO: 588387
ucaaucugucaguaugaaa

SEQ ID NO: 861799 - RNA, 19 nt, Artificial Sequence
  Description of Artificial Sequence: Synthetic oligonucleotide
  Antisense strand to SEQ ID NO: 861798
uuucauacugacagauuga

SEQ ID NO: 861800 - RNA, 19 nt, Artificial Sequence
  Description of Artificial Sequence: Synthetic oligonucleotide
  Sense strand starting at position 3417 of SEQ ID NO: 588387
guugcaguagcucuguuua

SEQ ID NO: 861801 - RNA, 19 nt, Artificial Sequence
  Description of Artificial Sequence: Synthetic oligonucleotide
  Antisense strand to SEQ ID NO: 861800
uaaacagagcuacugcaac

SEQ ID NO: 861802 - RNA, 19 nt, Artificial Sequence
  Description of Artificial Sequence: Synthetic oligonucleotide
  Sense strand starting at position 3420 of SEQ ID NO: 588387
gcaguagcucuguuuagug

SEQ ID NO: 861803 - RNA, 19 nt, Artificial Sequence
  Description of Artificial Sequence: Synthetic oligonucleotide
  Antisense strand to SEQ ID NO: 861802
cacuaaacagagcuacugc

SEQ ID NO: 861804 - RNA, 19 nt, Artificial Sequence
  Description of Artificial Sequence: Synthetic oligonucleotide
  Sense strand starting at position 3481 of SEQ ID NO: 588387
gauuaaguaccauggcacu

SEQ ID NO: 861805 - RNA, 19 nt, Artificial Sequence
  Description of Artificial Sequence: Synthetic oligonucleotide
  Antisense strand to SEQ ID NO: 861804
agugccaugguacuuaauc

SEQ ID NO: 861806 - RNA, 19 nt, Artificial Sequence
  Description of Artificial Sequence: Synthetic oligonucleotide
  Sense strand starting at position 3662 of SEQ ID NO: 588387
uuucuagguguuuaugaca

SEQ ID NO: 861807 - RNA, 19 nt, Artificial Sequence
  Description of Artificial Sequence: Synthetic oligonucleotide
  Antisense strand to SEQ ID NO: 861806
ugucauaaacaccuagaaa

SEQ ID NO: 861808 - RNA, 19 nt, Artificial Sequence
  Description of Artificial Sequence: Synthetic oligonucleotide
  Sense strand starting at position 3767 of SEQ ID NO: 588387
uauccuggauguuuaagua

SEQ ID NO: 861809 - RNA, 19 nt, Artificial Sequence
  Description of Artificial Sequence: Synthetic oligonucleotide
  Antisense strand to SEQ ID NO: 861808
uacuuaaacauccaggaua

SEQ ID NO: 861810 - RNA, 19 nt, Artificial Sequence
  Description of Artificial Sequence: Synthetic oligonucleotide
  Sense strand starting at position 3789 of SEQ ID NO: 588387
uuuguagguacucaggaau

SEQ ID NO: 861811 - RNA, 19 nt, Artificial Sequence
  Description of Artificial Sequence: Synthetic oligonucleotide
  Antisense strand to SEQ ID NO: 861810
auuccugaguaccuacaaa

SEQ ID NO: 861812 - RNA, 19 nt, Artificial Sequence
  Description of Artificial Sequence: Synthetic oligonucleotide
  Sense strand starting at position 3858 of SEQ ID NO: 588387
gcagauuaucacuguagaa

SEQ ID NO: 861813 - RNA, 19 nt, Artificial Sequence
  Description of Artificial Sequence: Synthetic oligonucleotide
  Antisense strand to SEQ ID NO: 861812
uucuacagugauaaucugc

SEQ ID NO: 861814 - RNA, 19 nt, Artificial Sequence
  Description of Artificial Sequence: Synthetic oligonucleotide
  Sense strand starting at position 7 of SEQ ID NO: 588388
uaccacuucuggguagaca

SEQ ID NO: 861815 - RNA, 19 nt, Artificial Sequence
  Description of Artificial Sequence: Synthetic oligonucleotide
  Antisense strand to SEQ ID NO: 861814
ugucuacccagaaguggua

SEQ ID NO: 861816 - RNA, 19 nt, Artificial Sequence
  Description of Artificial Sequence: Synthetic oligonucleotide
  Sense strand starting at position 23 of SEQ ID NO: 588388
acaauuaggcaguggagau

SEQ ID NO: 861817 - RNA, 19 nt, Artificial Sequence
  Description of Artificial Sequence: Synthetic oligonucleotide
  Antisense strand to SEQ ID NO: 861816
aucuccacugccuaauugu

SEQ ID NO: 861818 - RNA, 19 nt, Artificial Sequence
  Description of Artificial Sequence: Synthetic oligonucleotide
  Sense strand starting at position 81 of SEQ ID NO: 588388
agaaguaggugcuuauuau

SEQ ID NO: 861819 - RNA, 19 nt, Artificial Sequence
  Description of Artificial Sequence: Synthetic oligonucleotide
  Antisense strand to SEQ ID NO: 861818
auaauaagcaccuacuucu

SEQ ID NO: 861820 - RNA, 19 nt, Artificial Sequence
  Description of Artificial Sequence: Synthetic oligonucleotide
  Sense strand starting at position 82 of SEQ ID NO: 588388
gaaguaggugcuuauuauu

SEQ ID NO: 861821 - RNA, 19 nt, Artificial Sequence
  Description of Artificial Sequence: Synthetic oligonucleotide
  Antisense strand to SEQ ID NO: 861820
aauaauaagcaccuacuuc

SEQ ID NO: 861822 - RNA, 19 nt, Artificial Sequence
  Description of Artificial Sequence: Synthetic oligonucleotide
  Sense strand starting at position 90 of SEQ ID NO: 588388
ugcuuauuauuugcuguaa

SEQ ID NO: 861823 - RNA, 19 nt, Artificial Sequence
  Description of Artificial Sequence: Synthetic oligonucleotide
  Antisense strand to SEQ ID NO: 861822
uuacagcaaauaauaagca

SEQ ID NO: 861824 - RNA, 19 nt, Artificial Sequence
  Description of Artificial Sequence: Synthetic oligonucleotide
  Sense strand starting at position 91 of SEQ ID NO: 588388
gcuuauuauuugcuguaaa

SEQ ID NO: 861825 - RNA, 19 nt, Artificial Sequence
  Description of Artificial Sequence: Synthetic oligonucleotide
  Antisense strand to SEQ ID NO: 861824
uuuacagcaaauaauaagc

SEQ ID NO: 861826 - RNA, 19 nt, Artificial Sequence
  Description of Artificial Sequence: Synthetic oligonucleotide
  Sense strand starting at position 252 of SEQ ID NO: 588388
ggguauggccuauaguuac

SEQ ID NO: 861827 - RNA, 19 nt, Artificial Sequence
  Description of Artificial Sequence: Synthetic oligonucleotide
  Antisense strand to SEQ ID NO: 861826
guaacuauaggccauaccc

SEQ ID NO: 861828 - RNA, 19 nt, Artificial Sequence
  Description of Artificial Sequence: Synthetic oligonucleotide
  Sense strand starting at position 839 of SEQ ID NO: 588388
gagagaucagcuggcccaa

SEQ ID NO: 861829 - RNA, 19 nt, Artificial Sequence
  Description of Artificial Sequence: Synthetic oligonucleotide
  Antisense strand to SEQ ID NO: 861828
uugggccagcugaucucuc

SEQ ID NO: 861830 - RNA, 19 nt, Artificial Sequence
  Description of Artificial Sequence: Synthetic oligonucleotide
  Sense strand starting at position 898 of SEQ ID NO: 588388
cagccaagaggcuaguuau

SEQ ID NO: 861831 - RNA, 19 nt, Artificial Sequence
  Description of Artificial Sequence: Synthetic oligonucleotide
  Antisense strand to SEQ ID NO: 861830
auaacuagccucuuggcug

SEQ ID NO: 861832 - RNA, 19 nt, Artificial Sequence
  Description of Artificial Sequence: Synthetic oligonucleotide
  Sense strand starting at position 1024 of SEQ ID NO: 588388
uuuagaaacgcagguuaaa

SEQ ID NO: 861833 - RNA, 19 nt, Artificial Sequence
  Description of Artificial Sequence: Synthetic oligonucleotide
  Antisense strand to SEQ ID NO: 861832
uuuaaccugcguuucuaaa

SEQ ID NO: 861834 - RNA, 19 nt, Artificial Sequence
  Description of Artificial Sequence: Synthetic oligonucleotide
  Sense strand starting at position 1078 of SEQ ID NO: 588388
cguauuguucuuucggcau

SEQ ID NO: 861835 - RNA, 19 nt, Artificial Sequence
  Description of Artificial Sequence: Synthetic oligonucleotide
  Antisense strand to SEQ ID NO: 861834
augccgaaagaacaauacg

SEQ ID NO: 861836 - RNA, 19 nt, Artificial Sequence
  Description of Artificial Sequence: Synthetic oligonucleotide
  Sense strand starting at position 1460 of SEQ ID NO: 588388
ucugauauaucaucuaggu

SEQ ID NO: 861837 - RNA, 19 nt, Artificial Sequence
  Description of Artificial Sequence: Synthetic oligonucleotide
  Antisense strand to SEQ ID NO: 861836
accuagaugauauaucaga

SEQ ID NO: 861838 - RNA, 19 nt, Artificial Sequence
  Description of Artificial Sequence: Synthetic oligonucleotide
  Sense strand starting at position 1516 of SEQ ID NO: 588388
ccaagagaaauguggcuua

SEQ ID NO: 861839 - RNA, 19 nt, Artificial Sequence
  Description of Artificial Sequence: Synthetic oligonucleotide
  Antisense strand to SEQ ID NO: 861838
uaagccacauuucucuugg

SEQ ID NO: 861840 - RNA, 19 nt, Artificial Sequence
  Description of Artificial Sequence: Synthetic oligonucleotide
  Sense strand starting at position 1519 of SEQ ID NO: 588388
agagaaauguggcuuaccu

SEQ ID NO: 861841 - RNA, 19 nt, Artificial Sequence
  Description of Artificial Sequence: Synthetic oligonucleotide
  Antisense strand to SEQ ID NO: 861840
agguaagccacauuucucu

SEQ ID NO: 861842 - RNA, 19 nt, Artificial Sequence
  Description of Artificial Sequence: Synthetic oligonucleotide
  Sense strand starting at position 1521 of SEQ ID NO: 588388
agaaauguggcuuaccuca

SEQ ID NO: 861843 - RNA, 19 nt, Artificial Sequence
  Description of Artificial Sequence: Synthetic oligonucleotide
  Antisense strand to SEQ ID NO: 861842
ugagguaagccacauuucu

SEQ ID NO: 861844 - RNA, 19 nt, Artificial Sequence
  Description of Artificial Sequence: Synthetic oligonucleotide
  Sense strand starting at position 1693 of SEQ ID NO: 588388
ucaucugucccaggauuaa

SEQ ID NO: 861845 - RNA, 19 nt, Artificial Sequence
  Description of Artificial Sequence: Synthetic oligonucleotide
  Antisense strand to SEQ ID NO: 861844
uuaauccugggacagauga

SEQ ID NO: 861846 - RNA, 19 nt, Artificial Sequence
  Description of Artificial Sequence: Synthetic oligonucleotide
  Sense strand starting at position 2247 of SEQ ID NO: 588388
cugagaguuuaaguucuga

SEQ ID NO: 861847 - RNA, 19 nt, Artificial Sequence
  Description of Artificial Sequence: Synthetic oligonucleotide
  Antisense strand to SEQ ID NO: 861846
ucagaacuuaaacucucag

SEQ ID NO: 861848 - RNA, 19 nt, Artificial Sequence
  Description of Artificial Sequence: Synthetic oligonucleotide
  Sense strand starting at position 2366 of SEQ ID NO: 588388
gugugcuuugcuagaggga

SEQ ID NO: 861849 - RNA, 19 nt, Artificial Sequence
  Description of Artificial Sequence: Synthetic oligonucleotide
  Antisense strand to SEQ ID NO: 861848
ucccucuagcaaagcacac

SEQ ID NO: 861850 - RNA, 19 nt, Artificial Sequence
  Description of Artificial Sequence: Synthetic oligonucleotide
  Sense strand starting at position 2367 of SEQ ID NO: 588388
ugugcuuugcuagagggau

SEQ ID NO: 861851 - RNA, 19 nt, Artificial Sequence
  Description of Artificial Sequence: Synthetic oligonucleotide
  Antisense strand to SEQ ID NO: 861850
aucccucuagcaaagcaca

SEQ ID NO: 861852 - RNA, 19 nt, Artificial Sequence
  Description of Artificial Sequence: Synthetic oligonucleotide
  Sense strand starting at position 2388 of SEQ ID NO: 588388
agcauaacucccugaaguu

SEQ ID NO: 861853 - RNA, 19 nt, Artificial Sequence
  Description of Artificial Sequence: Synthetic oligonucleotide
  Antisense strand to SEQ ID NO: 861852
aacuucagggaguuaugcu

SEQ ID NO: 861854 - RNA, 19 nt, Artificial Sequence
  Description of Artificial Sequence: Synthetic oligonucleotide
  Sense strand starting at position 2389 of SEQ ID NO: 588388
gcauaacucccugaaguuu

SEQ ID NO: 861855 - RNA, 19 nt, Artificial Sequence
  Description of Artificial Sequence: Synthetic oligonucleotide
  Antisense strand to SEQ ID NO: 861854
aaacuucagggaguuaugc

SEQ ID NO: 861856 - RNA, 19 nt, Artificial Sequence
  Description of Artificial Sequence: Synthetic oligonucleotide
  Sense strand starting at position 2397 of SEQ ID NO: 588388
cccugaaguuugguuugga

SEQ ID NO: 861857 - RNA, 19 nt, Artificial Sequence
  Description of Artificial Sequence: Synthetic oligonucleotide
  Antisense strand to SEQ ID NO: 861856
uccaaaccaaacuucaggg

SEQ ID NO: 861858 - RNA, 19 nt, Artificial Sequence
  Description of Artificial Sequence: Synthetic oligonucleotide
  Sense strand starting at position 2398 of SEQ ID NO: 588388
ccugaaguuugguuuggau

SEQ ID NO: 861859 - RNA, 19 nt, Artificial Sequence
  Description of Artificial Sequence: Synthetic oligonucleotide
  Antisense strand to SEQ ID NO: 861858
auccaaaccaaacuucagg

SEQ ID NO: 861860 - RNA, 19 nt, Artificial Sequence
  Description of Artificial Sequence: Synthetic oligonucleotide
  Sense strand starting at position 2400 of SEQ ID NO: 588388
ugaaguuugguuuggauac

SEQ ID NO: 861861 - RNA, 19 nt, Artificial Sequence
  Description of Artificial Sequence: Synthetic oligonucleotide
  Antisense strand to SEQ ID NO: 861860
guauccaaaccaaacuuca

SEQ ID NO: 861862 - RNA, 19 nt, Artificial Sequence
  Description of Artificial Sequence: Synthetic oligonucleotide
  Sense strand starting at position 2526 of SEQ ID NO: 588388
caguuuaaggcuggauaca

SEQ ID NO: 861863 - RNA, 19 nt, Artificial Sequence
  Description of Artificial Sequence: Synthetic oligonucleotide
  Antisense strand to SEQ ID NO: 861862
uguauccagccuuaaacug

SEQ ID NO: 861864 - RNA, 19 nt, Artificial Sequence
  Description of Artificial Sequence: Synthetic oligonucleotide
  Sense strand starting at position 2727 of SEQ ID NO: 588388
guuguuaaggcucagauau

SEQ ID NO: 861865 - RNA, 19 nt, Artificial Sequence
  Description of Artificial Sequence: Synthetic oligonucleotide
  Antisense strand to SEQ ID NO: 861864
auaucugagccuuaacaac

SEQ ID NO: 861866 - RNA, 19 nt, Artificial Sequence
  Description of Artificial Sequence: Synthetic oligonucleotide
  Sense strand starting at position 3018 of SEQ ID NO: 588388
guagguacucaguagguua

SEQ ID NO: 861867 - RNA, 19 nt, Artificial Sequence
  Description of Artificial Sequence: Synthetic oligonucleotide
  Antisense strand to SEQ ID NO: 861866
uaaccuacugaguaccuac

SEQ ID NO: 861868 - RNA, 19 nt, Artificial Sequence
  Description of Artificial Sequence: Synthetic oligonucleotide
  Sense strand starting at position 3020 of SEQ ID NO: 588388
agguacucaguagguuaau

SEQ ID NO: 861869 - RNA, 19 nt, Artificial Sequence
  Description of Artificial Sequence: Synthetic oligonucleotide
  Antisense strand to SEQ ID NO: 861868
auuaaccuacugaguaccu

SEQ ID NO: 861870 - RNA, 19 nt, Artificial Sequence
  Description of Artificial Sequence: Synthetic oligonucleotide
  Sense strand starting at position 3021 of SEQ ID NO: 588388
gguacucaguagguuaaua

SEQ ID NO: 861871 - RNA, 19 nt, Artificial Sequence
  Description of Artificial Sequence: Synthetic oligonucleotide
  Antisense strand to SEQ ID NO: 861870
uauuaaccuacugaguacc

SEQ ID NO: 861872 - RNA, 19 nt, Artificial Sequence
  Description of Artificial Sequence: Synthetic oligonucleotide
  Sense strand starting at position 3066 of SEQ ID NO: 588388
ggaaguaaguuaucaaagc

SEQ ID NO: 861873 - RNA, 19 nt, Artificial Sequence
  Description of Artificial Sequence: Synthetic oligonucleotide
  Antisense strand to SEQ ID NO: 861872
gcuuugauaacuuacuucc

SEQ ID NO: 861874 - RNA, 19 nt, Artificial Sequence
  Description of Artificial Sequence: Synthetic oligonucleotide
  Sense strand starting at position 3113 of SEQ ID NO: 588388
cgugaugggacaugggaaa

SEQ ID NO: 861875 - RNA, 19 nt, Artificial Sequence
  Description of Artificial Sequence: Synthetic oligonucleotide
  Antisense strand to SEQ ID NO: 861874
uuucccaugucccaucacg

SEQ ID NO: 861876 - RNA, 19 nt, Artificial Sequence
  Description of Artificial Sequence: Synthetic oligonucleotide
  Sense strand starting at position 3147 of SEQ ID NO: 588388
acuugcuauugauugaaac

SEQ ID NO: 861877 - RNA, 19 nt, Artificial Sequence
  Description of Artificial Sequence: Synthetic oligonucleotide
  Antisense strand to SEQ ID NO: 861876
guuucaaucaauagcaagu

SEQ ID NO: 861878 - RNA, 19 nt, Artificial Sequence
  Description of Artificial Sequence: Synthetic oligonucleotide
  Sense strand starting at position 3148 of SEQ ID NO: 588388
cuugcuauugauugaaaca

SEQ ID NO: 861879 - RNA, 19 nt, Artificial Sequence
  Description of Artificial Sequence: Synthetic oligonucleotide
  Antisense strand to SEQ ID NO: 861878
uguuucaaucaauagcaag

SEQ ID NO: 861880 - RNA, 19 nt, Artificial Sequence
  Description of Artificial Sequence: Synthetic oligonucleotide
  Sense strand starting at position 3218 of SEQ ID NO: 588388
ucagucgugauugaagauu

SEQ ID NO: 861881 - RNA, 19 nt, Artificial Sequence
  Description of Artificial Sequence: Synthetic oligonucleotide
  Antisense strand to SEQ ID NO: 861880
aaucuucaaucacgacuga

SEQ ID NO: 861882 - RNA, 19 nt, Artificial Sequence
  Description of Artificial Sequence: Synthetic oligonucleotide
  Sense strand starting at position 3226 of SEQ ID NO: 588388
gauugaagauugccaaguu

SEQ ID NO: 861883 - RNA, 19 nt, Artificial Sequence
  Description of Artificial Sequence: Synthetic oligonucleotide
  Antisense strand to SEQ ID NO: 861882
aacuuggcaaucuucaauc

SEQ ID NO: 861884 - RNA, 19 nt, Artificial Sequence
  Description of Artificial Sequence: Synthetic oligonucleotide
  Sense strand starting at position 3233 of SEQ ID NO: 588388
gauugccaaguugaagauu

SEQ ID NO: 861885 - RNA, 19 nt, Artificial Sequence
  Description of Artificial Sequence: Synthetic oligonucleotide
  Antisense strand to SEQ ID NO: 861884
aaucuucaacuuggcaauc

SEQ ID NO: 861886 - RNA, 19 nt, Artificial Sequence
  Description of Artificial Sequence: Synthetic oligonucleotide
  Sense strand starting at position 3571 of SEQ ID NO: 588388
ugugaaggauucuugccua

SEQ ID NO: 861887 - RNA, 19 nt, Artificial Sequence
  Description of Artificial Sequence: Synthetic oligonucleotide
  Antisense strand to SEQ ID NO: 861886
uaggcaagaauccuucaca

SEQ ID NO: 861888 - RNA, 19 nt, Artificial Sequence
  Description of Artificial Sequence: Synthetic oligonucleotide
  Sense strand starting at position 3838 of SEQ ID NO: 588388
uuuaguauggacugaucca

SEQ ID NO: 861889 - RNA, 19 nt, Artificial Sequence
  Description of Artificial Sequence: Synthetic oligonucleotide
  Antisense strand to SEQ ID NO: 861888
uggaucaguccauacuaaa

SEQ ID NO: 861890 - RNA, 19 nt, Artificial Sequence
  Description of Artificial Sequence: Synthetic oligonucleotide
  Sense strand starting at position 3866 of SEQ ID NO: 588388
aguacagaauuacuguuaa

SEQ ID NO: 861891 - RNA, 19 nt, Artificial Sequence
  Description of Artificial Sequence: Synthetic oligonucleotide
  Antisense strand to SEQ ID NO: 861890
uuaacaguaauucuguacu

SEQ ID NO: 861892 - RNA, 19 nt, Artificial Sequence
  Description of Artificial Sequence: Synthetic oligonucleotide
  Sense strand starting at position 3924 of SEQ ID NO: 588388
agccaucauggaugcauau

SEQ ID NO: 861893 - RNA, 19 nt, Artificial Sequence
  Description of Artificial Sequence: Synthetic oligonucleotide
  Antisense strand to SEQ ID NO: 861892
auaugcauccaugauggcu

SEQ ID NO: 861894 - RNA, 19 nt, Artificial Sequence
  Description of Artificial Sequence: Synthetic oligonucleotide
  Sense strand starting at position 8 of SEQ ID NO: 588391
cuuagcuguuucccaaaga

SEQ ID NO: 861895 - RNA, 19 nt, Artificial Sequence
  Description of Artificial Sequence: Synthetic oligonucleotide
  Antisense strand to SEQ ID NO: 861894
ucuuugggaaacagcuaag

SEQ ID NO: 861896 - RNA, 19 nt, Artificial Sequence
  Description of Artificial Sequence: Synthetic oligonucleotide
  Sense strand starting at position 94 of SEQ ID NO: 588391
ccguuuccuugcccauuua

SEQ ID NO: 861897 - RNA, 19 nt, Artificial Sequence
  Description of Artificial Sequence: Synthetic oligonucleotide
  Antisense strand to SEQ ID NO: 861896
uaaaugggcaaggaaacgg

SEQ ID NO: 861898 - RNA, 19 nt, Artificial Sequence
  Description of Artificial Sequence: Synthetic oligonucleotide
  Sense strand starting at position 198 of SEQ ID NO: 588391
cuugaauguucacgagagg

SEQ ID NO: 861899 - RNA, 19 nt, Artificial Sequence
  Description of Artificial Sequence: Synthetic oligonucleotide
  Antisense strand to SEQ ID NO: 861898
ccucucgugaacauucaag

SEQ ID NO: 861900 - RNA, 19 nt, Artificial Sequence
  Description of Artificial Sequence: Synthetic oligonucleotide
  Sense strand starting at position 201 of SEQ ID NO: 588391
gaauguucacgagaggcga

SEQ ID NO: 861901 - RNA, 19 nt, Artificial Sequence
  Description of Artificial Sequence: Synthetic oligonucleotide
  Antisense strand to SEQ ID NO: 861900
ucgccucucgugaacauuc

SEQ ID NO: 861902 - RNA, 19 nt, Artificial Sequence
  Description of Artificial Sequence: Synthetic oligonucleotide
  Sense strand starting at position 257 of SEQ ID NO: 588391
cugagauccguuucagcgu

SEQ ID NO: 861903 - RNA, 19 nt, Artificial Sequence
  Description of Artificial Sequence: Synthetic oligonucleotide
  Antisense strand to SEQ ID NO: 861902
acgcugaaacggaucucag

SEQ ID NO: 861904 - RNA, 19 nt, Artificial Sequence
  Description of Artificial Sequence: Synthetic oligonucleotide
  Sense strand starting at position 272 of SEQ ID NO: 588391
gcgucacucucuguuggau

SEQ ID NO: 861905 - RNA, 19 nt, Artificial Sequence
  Description of Artificial Sequence: Synthetic oligonucleotide
  Antisense strand to SEQ ID NO: 861904
auccaacagagagugacgc

SEQ ID NO: 861906 - RNA, 19 nt, Artificial Sequence
  Description of Artificial Sequence: Synthetic oligonucleotide
  Sense strand starting at position 284 of SEQ ID NO: 588391
guuggauucuucgcgggag

SEQ ID NO: 861907 - RNA, 19 nt, Artificial Sequence
  Description of Artificial Sequence: Synthetic oligonucleotide
  Antisense strand to SEQ ID NO: 861906
cucccgcgaagaauccaac

SEQ ID NO: 861908 - RNA, 19 nt, Artificial Sequence
  Description of Artificial Sequence: Synthetic oligonucleotide
  Sense strand starting at position 286 of SEQ ID NO: 588391
uggauucuucgcgggaggu

SEQ ID NO: 861909 - RNA, 19 nt, Artificial Sequence
  Description of Artificial Sequence: Synthetic oligonucleotide
  Antisense strand to SEQ ID NO: 861908
accucccgcgaagaaucca

SEQ ID NO: 861910 - RNA, 19 nt, Artificial Sequence
  Description of Artificial Sequence: Synthetic oligonucleotide
  Sense strand starting at position 287 of SEQ ID NO: 588391
ggauucuucgcgggagguu

SEQ ID NO: 861911 - RNA, 19 nt, Artificial Sequence
  Description of Artificial Sequence: Synthetic oligonucleotide
  Antisense strand to SEQ ID NO: 861910
aaccucccgcgaagaaucc

SEQ ID NO: 861912 - RNA, 19 nt, Artificial Sequence
  Description of Artificial Sequence: Synthetic oligonucleotide
  Sense strand starting at position 288 of SEQ ID NO: 588391
gauucuucgcgggagguuu

SEQ ID NO: 861913 - RNA, 19 nt, Artificial Sequence
  Description of Artificial Sequence: Synthetic oligonucleotide
  Antisense strand to SEQ ID NO: 861912
aaaccucccgcgaagaauc

SEQ ID NO: 861914 - RNA, 19 nt, Artificial Sequence
  Description of Artificial Sequence: Synthetic oligonucleotide
  Sense strand starting at position 289 of SEQ ID NO: 588391
auucuucgcgggagguuua

SEQ ID NO: 861915 - RNA, 19 nt, Artificial Sequence
  Description of Artificial Sequence: Synthetic oligonucleotide
  Antisense strand to SEQ ID NO: 861914
uaaaccucccgcgaagaau

SEQ ID NO: 861916 - RNA, 19 nt, Artificial Sequence
  Description of Artificial Sequence: Synthetic oligonucleotide
  Sense strand starting at position 302 of SEQ ID NO: 588391
gguuuagcucugccagcuu

SEQ ID NO: 861917 - RNA, 19 nt, Artificial Sequence
  Description of Artificial Sequence: Synthetic oligonucleotide
  Antisense strand to SEQ ID NO: 861916
aagcuggcagagcuaaacc

SEQ ID NO: 861918 - RNA, 19 nt, Artificial Sequence
  Description of Artificial Sequence: Synthetic oligonucleotide
  Sense strand starting at position 331 of SEQ ID NO: 588391
gaauaagggucagaaucga

SEQ ID NO: 861919 - RNA, 19 nt, Artificial Sequence
  Description of Artificial Sequence: Synthetic oligonucleotide
  Antisense strand to SEQ ID NO: 861918
ucgauucugacccuuauuc

SEQ ID NO: 861920 - RNA, 19 nt, Artificial Sequence
  Description of Artificial Sequence: Synthetic oligonucleotide
  Sense strand starting at position 342 of SEQ ID NO: 588391
agaaucgacuuccaauuua

SEQ ID NO: 861921 - RNA, 19 nt, Artificial Sequence
  Description of Artificial Sequence: Synthetic oligonucleotide
  Antisense strand to SEQ ID NO: 861920
uaaauuggaagucgauucu

SEQ ID NO: 861922 - RNA, 19 nt, Artificial Sequence
  Description of Artificial Sequence: Synthetic oligonucleotide
  Sense strand starting at position 467 of SEQ ID NO: 588391
cugauuguacaacauagua

SEQ ID NO: 861923 - RNA, 19 nt, Artificial Sequence
  Description of Artificial Sequence: Synthetic oligonucleotide
  Antisense strand to SEQ ID NO: 861922
uacuauguuguacaaucag

SEQ ID NO: 861924 - RNA, 19 nt, Artificial Sequence
  Description of Artificial Sequence: Synthetic oligonucleotide
  Sense strand starting at position 2466 of SEQ ID NO: 588391
cccuuuaaaucugaguuug

SEQ ID NO: 861925 - RNA, 19 nt, Artificial Sequence
  Description of Artificial Sequence: Synthetic oligonucleotide
  Antisense strand to SEQ ID NO: 861924
caaacucagauuuaaaggg

SEQ ID NO: 861926 - RNA, 19 nt, Artificial Sequence
  Description of Artificial Sequence: Synthetic oligonucleotide
  Sense strand starting at position 2611 of SEQ ID NO: 588391
gagagaagauuggcuucua

SEQ ID NO: 861927 - RNA, 19 nt, Artificial Sequence
  Description of Artificial Sequence: Synthetic oligonucleotide
  Antisense strand to SEQ ID NO: 861926
uagaagccaaucuucucuc

SEQ ID NO: 861928 - RNA, 19 nt, Artificial Sequence
  Description of Artificial Sequence: Synthetic oligonucleotide
  Sense strand starting at position 2712 of SEQ ID NO: 588391
aaacuuuggugguuucuga

SEQ ID NO: 861929 - RNA, 19 nt, Artificial Sequence
  Description of Artificial Sequence: Synthetic oligonucleotide
  Antisense strand to SEQ ID NO: 861928
ucagaaaccaccaaaguuu

SEQ ID NO: 861930 - RNA, 19 nt, Artificial Sequence
  Description of Artificial Sequence: Synthetic oligonucleotide
  Sense strand starting at position 2719 of SEQ ID NO: 588391
ggugguuucugaagcggca

SEQ ID NO: 861931 - RNA, 19 nt, Artificial Sequence
  Description of Artificial Sequence: Synthetic oligonucleotide
  Antisense strand to SEQ ID NO: 861930
ugccgcuucagaaaccacc

SEQ ID NO: 861932 - RNA, 19 nt, Artificial Sequence
  Description of Artificial Sequence: Synthetic oligonucleotide
  Sense strand starting at position 2744 of SEQ ID NO: 588391
gcagguucugcugaggagu

SEQ ID NO: 861933 - RNA, 19 nt, Artificial Sequence
  Description of Artificial Sequence: Synthetic oligonucleotide
  Antisense strand to SEQ ID NO: 861932
acuccucagcagaaccugc

SEQ ID NO: 861934 - RNA, 19 nt, Artificial Sequence
  Description of Artificial Sequence: Synthetic oligonucleotide
  Sense strand starting at position 2798 of SEQ ID NO: 588391
ggagagggcgucugcgaau

SEQ ID NO: 861935 - RNA, 19 nt, Artificial Sequence
  Description of Artificial Sequence: Synthetic oligonucleotide
  Antisense strand to SEQ ID NO: 861934
auucgcagacgcccucucc

SEQ ID NO: 861936 - RNA, 19 nt, Artificial Sequence
  Description of Artificial Sequence: Synthetic oligonucleotide
  Sense strand starting at position 2809 of SEQ ID NO: 588391
cugcgaaugcugggugagu

SEQ ID NO: 861937 - RNA, 19 nt, Artificial Sequence
  Description of Artificial Sequence: Synthetic oligonucleotide
  Antisense strand to SEQ ID NO: 861936
acucacccagcauucgcag

SEQ ID NO: 861938 - RNA, 19 nt, Artificial Sequence
  Description of Artificial Sequence: Synthetic oligonucleotide
  Sense strand starting at position 2878 of SEQ ID NO: 588391
gggcuugucuugaggagga

SEQ ID NO: 861939 - RNA, 19 nt, Artificial Sequence
  Description of Artificial Sequence: Synthetic oligonucleotide
  Antisense strand to SEQ ID NO: 861938
uccuccucaagacaagccc

SEQ ID NO: 861940 - RNA, 19 nt, Artificial Sequence
  Description of Artificial Sequence: Synthetic oligonucleotide
  Sense strand starting at position 2880 of SEQ ID NO: 588391
gcuugucuugaggaggaga

SEQ ID NO: 861941 - RNA, 19 nt, Artificial Sequence
  Description of Artificial Sequence: Synthetic oligonucleotide
  Antisense strand to SEQ ID NO: 861940
ucuccuccucaagacaagc

SEQ ID NO: 861942 - RNA, 19 nt, Artificial Sequence
  Description of Artificial Sequence: Synthetic oligonucleotide
  Sense strand starting at position 2977 of SEQ ID NO: 588391
gcgcuucgagacuaucaca

SEQ ID NO: 861943 - RNA, 19 nt, Artificial Sequence
  Description of Artificial Sequence: Synthetic oligonucleotide
  Antisense strand to SEQ ID NO: 861942
ugugauagucucgaagcgc

SEQ ID NO: 861944 - RNA, 19 nt, Artificial Sequence
  Description of Artificial Sequence: Synthetic oligonucleotide
  Sense strand starting at position 2980 of SEQ ID NO: 588391
cuucgagacuaucacauga

SEQ ID NO: 861945 - RNA, 19 nt, Artificial Sequence
  Description of Artificial Sequence: Synthetic oligonucleotide
  Antisense strand to SEQ ID NO: 861944
ucaugugauagucucgaag

SEQ ID NO: 861946 - RNA, 19 nt, Artificial Sequence
  Description of Artificial Sequence: Synthetic oligonucleotide
  Sense strand starting at position 3028 of SEQ ID NO: 588391
cgcgucuguagcugaagaa

SEQ ID NO: 861947 - RNA, 19 nt, Artificial Sequence
  Description of Artificial Sequence: Synthetic oligonucleotide
  Antisense strand to SEQ ID NO: 861946
uucuucagcuacagacgcg

SEQ ID NO: 861948 - RNA, 19 nt, Artificial Sequence
  Description of Artificial Sequence: Synthetic oligonucleotide
  Sense strand starting at position 3395 of SEQ ID NO: 588391
gggucaaguucagaguauc

SEQ ID NO: 861949 - RNA, 19 nt, Artificial Sequence
  Description of Artificial Sequence: Synthetic oligonucleotide
  Antisense strand to SEQ ID NO: 861948
gauacucugaacuugaccc

SEQ ID NO: 861950 - RNA, 19 nt, Artificial Sequence
  Description of Artificial Sequence: Synthetic oligonucleotide
  Sense strand starting at position 3406 of SEQ ID NO: 588391
agaguaucguguccucaag

SEQ ID NO: 861951 - RNA, 19 nt, Artificial Sequence
  Description of Artificial Sequence: Synthetic oligonucleotide
  Antisense strand to SEQ ID NO: 861950
cuugaggacacgauacucu

SEQ ID NO: 861952 - RNA, 19 nt, Artificial Sequence
  Description of Artificial Sequence: Synthetic oligonucleotide
  Sense strand starting at position 3423 of SEQ ID NO: 588391
aggccucuucucugcaaga

SEQ ID NO: 861953 - RNA, 19 nt, Artificial Sequence
  Description of Artificial Sequence: Synthetic oligonucleotide
  Antisense strand to SEQ ID NO: 861952
ucuugcagagaagaggccu

SEQ ID NO: 861954 - RNA, 19 nt, Artificial Sequence
  Description of Artificial Sequence: Synthetic oligonucleotide
  Sense strand starting at position 3424 of SEQ ID NO: 588391
ggccucuucucugcaagaa

SEQ ID NO: 861955 - RNA, 19 nt, Artificial Sequence
  Description of Artificial Sequence: Synthetic oligonucleotide
  Antisense strand to SEQ ID NO: 861954
uucuugcagagaagaggcc

SEQ ID NO: 861956 - RNA, 19 nt, Artificial Sequence
  Description of Artificial Sequence: Synthetic oligonucleotide
  Sense strand starting at position 3425 of SEQ ID NO: 588391
gccucuucucugcaagaaa

SEQ ID NO: 861957 - RNA, 19 nt, Artificial Sequence
  Description of Artificial Sequence: Synthetic oligonucleotide
  Antisense strand to SEQ ID NO: 861956
uuucuugcagagaagaggc

SEQ ID NO: 861958 - RNA, 19 nt, Artificial Sequence
  Description of Artificial Sequence: Synthetic oligonucleotide
  Sense strand starting at position 3447 of SEQ ID NO: 588391
cgaugauuagagggcugga

SEQ ID NO: 861959 - RNA, 19 nt, Artificial Sequence
  Description of Artificial Sequence: Synthetic oligonucleotide
  Antisense strand to SEQ ID NO: 861958
uccagcccucuaaucaucg

SEQ ID NO: 861960 - RNA, 19 nt, Artificial Sequence
  Description of Artificial Sequence: Synthetic oligonucleotide
  Sense strand starting at position 3692 of SEQ ID NO: 588391
gagcgagugaguuggacaa

SEQ ID NO: 861961 - RNA, 19 nt, Artificial Sequence
  Description of Artificial Sequence: Synthetic oligonucleotide
  Antisense strand to SEQ ID NO: 861960
uuguccaacucacucgcuc

SEQ ID NO: 861962 - RNA, 19 nt, Artificial Sequence
  Description of Artificial Sequence: Synthetic oligonucleotide
  Sense strand starting at position 3694 of SEQ ID NO: 588391
gcgagugaguuggacaaga

SEQ ID NO: 861963 - RNA, 19 nt, Artificial Sequence
  Description of Artificial Sequence: Synthetic oligonucleotide
  Antisense strand to SEQ ID NO: 861962
ucuuguccaacucacucgc

SEQ ID NO: 861964 - RNA, 19 nt, Artificial Sequence
  Description of Artificial Sequence: Synthetic oligonucleotide
  Sense strand starting at position 3710 of SEQ ID NO: 588391
agaugagguuucucuggga

SEQ ID NO: 861965 - RNA, 19 nt, Artificial Sequence
  Description of Artificial Sequence: Synthetic oligonucleotide
  Antisense strand to SEQ ID NO: 861964
ucccagagaaaccucaucu

SEQ ID NO: 861966 - RNA, 19 nt, Artificial Sequence
  Description of Artificial Sequence: Synthetic oligonucleotide
  Sense strand starting at position 3723 of SEQ ID NO: 588391
cugggauggcgaugucuga

SEQ ID NO: 861967 - RNA, 19 nt, Artificial Sequence
  Description of Artificial Sequence: Synthetic oligonucleotide
  Antisense strand to SEQ ID NO: 861966
ucagacaucgccaucccag

SEQ ID NO: 861968 - RNA, 19 nt, Artificial Sequence
  Description of Artificial Sequence: Synthetic oligonucleotide
  Sense strand starting at position 3800 of SEQ ID NO: 588391
aggaaaucuuugcuauucu

SEQ ID NO: 861969 - RNA, 19 nt, Artificial Sequence
  Description of Artificial Sequence: Synthetic oligonucleotide
  Antisense strand to SEQ ID NO: 861968
agaauagcaaagauuuccu

SEQ ID NO: 861970 - RNA, 19 nt, Artificial Sequence
  Description of Artificial Sequence: Synthetic oligonucleotide
  Sense strand starting at position 3801 of SEQ ID NO: 588391
ggaaaucuuugcuauucuu

SEQ ID NO: 861971 - RNA, 19 nt, Artificial Sequence
  Description of Artificial Sequence: Synthetic oligonucleotide
  Antisense strand to SEQ ID NO: 861970
aagaauagcaaagauuucc

SEQ ID NO: 861972 - RNA, 19 nt, Artificial Sequence
  Description of Artificial Sequence: Synthetic oligonucleotide
  Sense strand starting at position 3906 of SEQ ID NO: 588391
uggugugaucugcgaggga

SEQ ID NO: 861973 - RNA, 19 nt, Artificial Sequence
  Description of Artificial Sequence: Synthetic oligonucleotide
  Antisense strand to SEQ ID NO: 861972
ucccucgcagaucacacca

SEQ ID NO: 861974 - RNA, 19 nt, Artificial Sequence
  Description of Artificial Sequence: Synthetic oligonucleotide
  Sense strand starting at position 273 of SEQ ID NO: 588392
ggaacagaaguucguguuu

SEQ ID NO: 861975 - RNA, 19 nt, Artificial Sequence
  Description of Artificial Sequence: Synthetic oligonucleotide
  Antisense strand to SEQ ID NO: 861974
aaacacgaacuucuguucc

SEQ ID NO: 861976 - RNA, 19 nt, Artificial Sequence
  Description of Artificial Sequence: Synthetic oligonucleotide
  Sense strand starting at position 722 of SEQ ID NO: 588392
gcaugauacucucaaugcu

SEQ ID NO: 861977 - RNA, 19 nt, Artificial Sequence
  Description of Artificial Sequence: Synthetic oligonucleotide
  Antisense strand to SEQ ID NO: 861976
agcauugagaguaucaugc

SEQ ID NO: 861978 - RNA, 19 nt, Artificial Sequence
  Description of Artificial Sequence: Synthetic oligonucleotide
  Sense strand starting at position 725 of SEQ ID NO: 588392
ugauacucucaaugcugaa

SEQ ID NO: 861979 - RNA, 19 nt, Artificial Sequence
  Description of Artificial Sequence: Synthetic oligonucleotide
  Antisense strand to SEQ ID NO: 861978
uucagcauugagaguauca

SEQ ID NO: 861980 - RNA, 19 nt, Artificial Sequence
  Description of Artificial Sequence: Synthetic oligonucleotide
  Sense strand starting at position 1288 of SEQ ID NO: 588392
ggaagcggucacuaaugaa

SEQ ID NO: 861981 - RNA, 19 nt, Artificial Sequence
  Description of Artificial Sequence: Synthetic oligonucleotide
  Antisense strand to SEQ ID NO: 861980
uucauuagugaccgcuucc

SEQ ID NO: 861982 - RNA, 19 nt, Artificial Sequence
  Description of Artificial Sequence: Synthetic oligonucleotide
  Sense strand starting at position 1441 of SEQ ID NO: 588392
cccugaacucggugccaaa

SEQ ID NO: 861983 - RNA, 19 nt, Artificial Sequence
  Description of Artificial Sequence: Synthetic oligonucleotide
  Antisense strand to SEQ ID NO: 861982
uuuggcaccgaguucaggg

SEQ ID NO: 861984 - RNA, 19 nt, Artificial Sequence
  Description of Artificial Sequence: Synthetic oligonucleotide
  Sense strand starting at position 1768 of SEQ ID NO: 588392
cuggaagcccgggaugaau

SEQ ID NO: 861985 - RNA, 19 nt, Artificial Sequence
  Description of Artificial Sequence: Synthetic oligonucleotide
  Antisense strand to SEQ ID NO: 861984
auucaucccgggcuuccag

SEQ ID NO: 861986 - RNA, 19 nt, Artificial Sequence
  Description of Artificial Sequence: Synthetic oligonucleotide
  Sense strand starting at position 1777 of SEQ ID NO: 588392
cgggaugaauguugcaaga

SEQ ID NO: 861987 - RNA, 19 nt, Artificial Sequence
  Description of Artificial Sequence: Synthetic oligonucleotide
  Antisense strand to SEQ ID NO: 861986
ucuugcaacauucaucccg

SEQ ID NO: 861988 - RNA, 19 nt, Artificial Sequence
  Description of Artificial Sequence: Synthetic oligonucleotide
  Sense strand starting at position 1840 of SEQ ID NO: 588392
uguuucuacgccuuugcaa

SEQ ID NO: 861989 - RNA, 19 nt, Artificial Sequence
  Description of Artificial Sequence: Synthetic oligonucleotide
  Antisense strand to SEQ ID NO: 861988
uugcaaaggcguagaaaca

SEQ ID NO: 861990 - RNA, 19 nt, Artificial Sequence
  Description of Artificial Sequence: Synthetic oligonucleotide
  Sense strand starting at position 1916 of SEQ ID NO: 588392
guggacgccucccuuuaua

SEQ ID NO: 861991 - RNA, 19 nt, Artificial Sequence
  Description of Artificial Sequence: Synthetic oligonucleotide
  Antisense strand to SEQ ID NO: 861990
uauaaagggaggcguccac

SEQ ID NO: 861992 - RNA, 19 nt, Artificial Sequence
  Description of Artificial Sequence: Synthetic oligonucleotide
  Sense strand starting at position 2268 of SEQ ID NO: 588392
aggaauguguaaccgugaa

SEQ ID NO: 861993 - RNA, 19 nt, Artificial Sequence
  Description of Artificial Sequence: Synthetic oligonucleotide
  Antisense strand to SEQ ID NO: 861992
uucacgguuacacauuccu

SEQ ID NO: 861994 - RNA, 19 nt, Artificial Sequence
  Description of Artificial Sequence: Synthetic oligonucleotide
  Sense strand starting at position 2272 of SEQ ID NO: 588392
auguguaaccgugaaagua

SEQ ID NO: 861995 - RNA, 19 nt, Artificial Sequence
  Description of Artificial Sequence: Synthetic oligonucleotide
  Antisense strand to SEQ ID NO: 861994
uacuuucacgguuacacau

SEQ ID NO: 861996 - RNA, 19 nt, Artificial Sequence
  Description of Artificial Sequence: Synthetic oligonucleotide
  Sense strand starting at position 3852 of SEQ ID NO: 588392
ggcuuucuugcugaucuuu

SEQ ID NO: 861997 - RNA, 19 nt, Artificial Sequence
  Description of Artificial Sequence: Synthetic oligonucleotide
  Antisense strand to SEQ ID NO: 861996
aaagaucagcaagaaagcc

SEQ ID NO: 861998 - RNA, 19 nt, Artificial Sequence
  Description of Artificial Sequence: Synthetic oligonucleotide
  Sense strand starting at position 3701 of SEQ ID NO: 588393
cgcuccacauccuuagaaa

SEQ ID NO: 861999 - RNA, 19 nt, Artificial Sequence
  Description of Artificial Sequence: Synthetic oligonucleotide
  Antisense strand to SEQ ID NO: 861998
uuucuaaggauguggagcg

SEQ ID NO: 862000 - RNA, 19 nt, Artificial Sequence
  Description of Artificial Sequence: Synthetic oligonucleotide
  Sense strand starting at position 2977 of SEQ ID NO: 588394
acacuauagugaugacuga

SEQ ID NO: 862001 - RNA, 19 nt, Artificial Sequence
  Description of Artificial Sequence: Synthetic oligonucleotide
  Antisense strand to SEQ ID NO: 862000
ucagucaucacuauagugu

SEQ ID NO: 862002 - RNA, 19 nt, Artificial Sequence
  Description of Artificial Sequence: Synthetic oligonucleotide
  Sense strand starting at position 2981 of SEQ ID NO: 588394
uauagugaugacugauauu

SEQ ID NO: 862003 - RNA, 19 nt, Artificial Sequence
  Description of Artificial Sequence: Synthetic oligonucleotide
  Antisense strand to SEQ ID NO: 862002
aauaucagucaucacuaua

SEQ ID NO: 862004 - RNA, 19 nt, Artificial Sequence
  Description of Artificial Sequence: Synthetic oligonucleotide
  Sense strand starting at position 3478 of SEQ ID NO: 588394
cagcuaauuugguugguua

SEQ ID NO: 862005 - RNA, 19 nt, Artificial Sequence
  Description of Artificial Sequence: Synthetic oligonucleotide
  Antisense strand to SEQ ID NO: 862004
uaaccaaccaaauuagcug

SEQ ID NO: 862006 - RNA, 19 nt, Artificial Sequence
  Description of Artificial Sequence: Synthetic oligonucleotide
  Sense strand starting at position 3479 of SEQ ID NO: 588394
agcuaauuugguugguuau

SEQ ID NO: 862007 - RNA, 19 nt, Artificial Sequence
  Description of Artificial Sequence: Synthetic oligonucleotide
  Antisense strand to SEQ ID NO: 862006
auaaccaaccaaauuagcu

SEQ ID NO: 862008 - RNA, 19 nt, Artificial Sequence
  Description of Artificial Sequence: Synthetic oligonucleotide
  Sense strand starting at position 3480 of SEQ ID NO: 588394
gcuaauuugguugguuauu

SEQ ID NO: 862009 - RNA, 19 nt, Artificial Sequence
  Description of Artificial Sequence: Synthetic oligonucleotide
  Antisense strand to SEQ ID NO: 862008
aauaaccaaccaaauuagc

SEQ ID NO: 862010 - RNA, 19 nt, Artificial Sequence
  Description of Artificial Sequence: Synthetic oligonucleotide
  Sense strand starting at position 3494 of SEQ ID NO: 588394
uuauuuaucugggacggag

SEQ ID NO: 862011 - RNA, 19 nt, Artificial Sequence
  Description of Artificial Sequence: Synthetic oligonucleotide
  Antisense strand to SEQ ID NO: 862010
cuccgucccagauaaauaa

SEQ ID NO: 862012 - RNA, 19 nt, Artificial Sequence
  Description of Artificial Sequence: Synthetic oligonucleotide
  Sense strand starting at position 1002 of SEQ ID NO: 588395
uggagugacugcucuagga

SEQ ID NO: 862013 - RNA, 19 nt, Artificial Sequence
  Description of Artificial Sequence: Synthetic oligonucleotide
  Antisense strand to SEQ ID NO: 862012
uccuagagcagucacucca

SEQ ID NO: 862014 - RNA, 19 nt, Artificial Sequence
  Description of Artificial Sequence: Synthetic oligonucleotide
  Sense strand starting at position 1004 of SEQ ID NO: 588395
gagugacugcucuaggaac

SEQ ID NO: 862015 - RNA, 19 nt, Artificial Sequence
  Description of Artificial Sequence: Synthetic oligonucleotide
  Antisense strand to SEQ ID NO: 862014
guuccuagagcagucacuc

SEQ ID NO: 862016 - RNA, 19 nt, Artificial Sequence
  Description of Artificial Sequence: Synthetic oligonucleotide
  Sense strand starting at position 1428 of SEQ ID NO: 588395
gccacuuacuccuaacgua

SEQ ID NO: 862017 - RNA, 19 nt, Artificial Sequence
  Description of Artificial Sequence: Synthetic oligonucleotide
  Antisense strand to SEQ ID NO: 862016
uacguuaggaguaaguggc

SEQ ID NO: 862018 - RNA, 19 nt, Artificial Sequence
  Description of Artificial Sequence: Synthetic oligonucleotide
  Sense strand starting at position 1471 of SEQ ID NO: 588395
caaacacuguccggagaaa

SEQ ID NO: 862019 - RNA, 19 nt, Artificial Sequence
  Description of Artificial Sequence: Synthetic oligonucleotide
  Antisense strand to SEQ ID NO: 862018
uuucuccggacaguguuug

SEQ ID NO: 862020 - RNA, 19 nt, Artificial Sequence
  Description of Artificial Sequence: Synthetic oligonucleotide
  Sense strand starting at position 2644 of SEQ ID NO: 588395
cagcuaauuugguugguua

SEQ ID NO: 862021 - RNA, 19 nt, Artificial Sequence
  Description of Artificial Sequence: Synthetic oligonucleotide
  Antisense strand to SEQ ID NO: 862020
uaaccaaccaaauuagcug

SEQ ID NO: 862022 - RNA, 19 nt, Artificial Sequence
  Description of Artificial Sequence: Synthetic oligonucleotide
  Sense strand starting at position 2645 of SEQ ID NO: 588395
agcuaauuugguugguuau

SEQ ID NO: 862023 - RNA, 19 nt, Artificial Sequence
  Description of Artificial Sequence: Synthetic oligonucleotide
  Antisense strand to SEQ ID NO: 862022
auaaccaaccaaauuagcu

SEQ ID NO: 862024 - RNA, 19 nt, Artificial Sequence
  Description of Artificial Sequence: Synthetic oligonucleotide
  Sense strand starting at position 2646 of SEQ ID NO: 588395
gcuaauuugguugguuauu

SEQ ID NO: 862025 - RNA, 19 nt, Artificial Sequence
  Description of Artificial Sequence: Synthetic oligonucleotide
  Antisense strand to SEQ ID NO: 862024
aauaaccaaccaaauuagc

SEQ ID NO: 862026 - RNA, 19 nt, Artificial Sequence
  Description of Artificial Sequence: Synthetic oligonucleotide
  Sense strand starting at position 2664 of SEQ ID NO: 588395
uuauuuaucugggacggag

SEQ ID NO: 862027 - RNA, 19 nt, Artificial Sequence
  Description of Artificial Sequence: Synthetic oligonucleotide
  Antisense strand to SEQ ID NO: 862026
cuccgucccagauaaauaa

SEQ ID NO: 862028 - RNA, 19 nt, Artificial Sequence
  Description of Artificial Sequence: Synthetic oligonucleotide
  Sense strand starting at position 3543 of SEQ ID NO: 588395
uagggcuccucaguuuaua

SEQ ID NO: 862029 - RNA, 19 nt, Artificial Sequence
  Description of Artificial Sequence: Synthetic oligonucleotide
  Antisense strand to SEQ ID NO: 862028
uauaaacugaggagcccua

SEQ ID NO: 862030 - RNA, 19 nt, Artificial Sequence
  Description of Artificial Sequence: Synthetic oligonucleotide
  Sense strand starting at position 2036 of SEQ ID NO: 588396
uugguagagucugcccuua

SEQ ID NO: 862031 - RNA, 19 nt, Artificial Sequence
  Description of Artificial Sequence: Synthetic oligonucleotide
  Antisense strand to SEQ ID NO: 862030
uaagggcagacucuaccaa

SEQ ID NO: 862032 - RNA, 19 nt, Artificial Sequence
  Description of Artificial Sequence: Synthetic oligonucleotide
  Sense strand starting at position 2188 of SEQ ID NO: 588396
gcucaaaugucccagcacu

SEQ ID NO: 862033 - RNA, 19 nt, Artificial Sequence
  Description of Artificial Sequence: Synthetic oligonucleotide
  Antisense strand to SEQ ID NO: 862032
agugcugggacauuugagc

SEQ ID NO: 862034 - RNA, 19 nt, Artificial Sequence
  Description of Artificial Sequence: Synthetic oligonucleotide
  Sense strand starting at position 2212 of SEQ ID NO: 588396
guguaaguuuacucaggga

SEQ ID NO: 862035 - RNA, 19 nt, Artificial Sequence
  Description of Artificial Sequence: Synthetic oligonucleotide
  Antisense strand to SEQ ID NO: 862034
ucccugaguaaacuuacac

SEQ ID NO: 862036 - RNA, 19 nt, Artificial Sequence
  Description of Artificial Sequence: Synthetic oligonucleotide
  Sense strand starting at position 2215 of SEQ ID NO: 588396
uaaguuuacucagggaagg

SEQ ID NO: 862037 - RNA, 19 nt, Artificial Sequence
  Description of Artificial Sequence: Synthetic oligonucleotide
  Antisense strand to SEQ ID NO: 862036
ccuucccugaguaaacuua

SEQ ID NO: 862038 - RNA, 19 nt, Artificial Sequence
  Description of Artificial Sequence: Synthetic oligonucleotide
  Sense strand starting at position 2328 of SEQ ID NO: 588397
cuuggacucgcaggugaaa

SEQ ID NO: 862039 - RNA, 19 nt, Artificial Sequence
  Description of Artificial Sequence: Synthetic oligonucleotide
  Antisense strand to SEQ ID NO: 862038
uuucaccugcgaguccaag

SEQ ID NO: 862040 - RNA, 19 nt, Artificial Sequence
  Description of Artificial Sequence: Synthetic oligonucleotide
  Sense strand starting at position 2379 of SEQ ID NO: 588397
gggugagaauuggccgaga

SEQ ID NO: 862041 - RNA, 19 nt, Artificial Sequence
  Description of Artificial Sequence: Synthetic oligonucleotide
  Antisense strand to SEQ ID NO: 862040
ucucggccaauucucaccc

SEQ ID NO: 862042 - RNA, 19 nt, Artificial Sequence
  Description of Artificial Sequence: Synthetic oligonucleotide
  Sense strand starting at position 2426 of SEQ ID NO: 588397
gggagaaguuccaggagac

SEQ ID NO: 862043 - RNA, 19 nt, Artificial Sequence
  Description of Artificial Sequence: Synthetic oligonucleotide
  Antisense strand to SEQ ID NO: 862042
gucuccuggaacuucuccc

SEQ ID NO: 862044 - RNA, 19 nt, Artificial Sequence
  Description of Artificial Sequence: Synthetic oligonucleotide
  Sense strand starting at position 2520 of SEQ ID NO: 588397
ccaucuuucgaaugaguau

SEQ ID NO: 862045 - RNA, 19 nt, Artificial Sequence
  Description of Artificial Sequence: Synthetic oligonucleotide
  Antisense strand to SEQ ID NO: 862044
auacucauucgaaagaugg

SEQ ID NO: 862046 - RNA, 19 nt, Artificial Sequence
  Description of Artificial Sequence: Synthetic oligonucleotide
  Sense strand starting at position 2532 of SEQ ID NO: 588397
ugaguauuccuaggcccga

SEQ ID NO: 862047 - RNA, 19 nt, Artificial Sequence
  Description of Artificial Sequence: Synthetic oligonucleotide
  Antisense strand to SEQ ID NO: 862046
ucgggccuaggaauacuca

SEQ ID NO: 862048 - RNA, 19 nt, Artificial Sequence
  Description of Artificial Sequence: Synthetic oligonucleotide
  Sense strand starting at position 2533 of SEQ ID NO: 588397
gaguauuccuaggcccgaa

SEQ ID NO: 862049 - RNA, 19 nt, Artificial Sequence
  Description of Artificial Sequence: Synthetic oligonucleotide
  Antisense strand to SEQ ID NO: 862048
uucgggccuaggaauacuc

SEQ ID NO: 862050 - RNA, 19 nt, Artificial Sequence
  Description of Artificial Sequence: Synthetic oligonucleotide
  Sense strand starting at position 2633 of SEQ ID NO: 588397
uucccaacugugugguaga

SEQ ID NO: 862051 - RNA, 19 nt, Artificial Sequence
  Description of Artificial Sequence: Synthetic oligonucleotide
  Antisense strand to SEQ ID NO: 862050
ucuaccacacaguugggaa

SEQ ID NO: 862052 - RNA, 19 nt, Artificial Sequence
  Description of Artificial Sequence: Synthetic oligonucleotide
  Sense strand starting at position 2698 of SEQ ID NO: 588397
gggucuggaucucucaaga

SEQ ID NO: 862053 - RNA, 19 nt, Artificial Sequence
  Description of Artificial Sequence: Synthetic oligonucleotide
  Antisense strand to SEQ ID NO: 862052
ucuugagagauccagaccc

SEQ ID NO: 862054 - RNA, 19 nt, Artificial Sequence
  Description of Artificial Sequence: Synthetic oligonucleotide
  Sense strand starting at position 2714 of SEQ ID NO: 588397
agaguccuugcgugguaga

SEQ ID NO: 862055 - RNA, 19 nt, Artificial Sequence
  Description of Artificial Sequence: Synthetic oligonucleotide
  Antisense strand to SEQ ID NO: 862054
ucuaccacgcaaggacucu

SEQ ID NO: 862056 - RNA, 19 nt, Artificial Sequence
  Description of Artificial Sequence: Synthetic oligonucleotide
  Sense strand starting at position 2715 of SEQ ID NO: 588397
gaguccuugcgugguagau

SEQ ID NO: 862057 - RNA, 19 nt, Artificial Sequence
  Description of Artificial Sequence: Synthetic oligonucleotide
  Antisense strand to SEQ ID NO: 862056
aucuaccacgcaaggacuc

SEQ ID NO: 862058 - RNA, 19 nt, Artificial Sequence
  Description of Artificial Sequence: Synthetic oligonucleotide
  Sense strand starting at position 2717 of SEQ ID NO: 588397
guccuugcgugguagauau

SEQ ID NO: 862059 - RNA, 19 nt, Artificial Sequence
  Description of Artificial Sequence: Synthetic oligonucleotide
  Antisense strand to SEQ ID NO: 862058
auaucuaccacgcaaggac

SEQ ID NO: 862060 - RNA, 19 nt, Artificial Sequence
  Description of Artificial Sequence: Synthetic oligonucleotide
  Sense strand starting at position 2719 of SEQ ID NO: 588397
ccuugcgugguagauauuu

SEQ ID NO: 862061 - RNA, 19 nt, Artificial Sequence
  Description of Artificial Sequence: Synthetic oligonucleotide
  Antisense strand to SEQ ID NO: 862060
aaauaucuaccacgcaagg

SEQ ID NO: 862062 - RNA, 19 nt, Artificial Sequence
  Description of Artificial Sequence: Synthetic oligonucleotide
  Sense strand starting at position 2727 of SEQ ID NO: 588397
gguagauauuuagggauag

SEQ ID NO: 862063 - RNA, 19 nt, Artificial Sequence
  Description of Artificial Sequence: Synthetic oligonucleotide
  Antisense strand to SEQ ID NO: 862062
cuaucccuaaauaucuacc

SEQ ID NO: 862064 - RNA, 19 nt, Artificial Sequence
  Description of Artificial Sequence: Synthetic oligonucleotide
  Sense strand starting at position 2762 of SEQ ID NO: 588397
aaucauccgucuuugagag

SEQ ID NO: 862065 - RNA, 19 nt, Artificial Sequence
  Description of Artificial Sequence: Synthetic oligonucleotide
  Antisense strand to SEQ ID NO: 862064
cucucaaagacggaugauu

SEQ ID NO: 862066 - RNA, 19 nt, Artificial Sequence
  Description of Artificial Sequence: Synthetic oligonucleotide
  Sense strand starting at position 2792 of SEQ ID NO: 588397
gucucuauuugauggauag

SEQ ID NO: 862067 - RNA, 19 nt, Artificial Sequence
  Description of Artificial Sequence: Synthetic oligonucleotide
  Antisense strand to SEQ ID NO: 862066
cuauccaucaaauagagac

SEQ ID NO: 862068 - RNA, 19 nt, Artificial Sequence
  Description of Artificial Sequence: Synthetic oligonucleotide
  Sense strand starting at position 2806 of SEQ ID NO: 588397
gauaguggugcacggauua

SEQ ID NO: 862069 - RNA, 19 nt, Artificial Sequence
  Description of Artificial Sequence: Synthetic oligonucleotide
  Antisense strand to SEQ ID NO: 862068
uaauccgugcaccacuauc

SEQ ID NO: 862070 - RNA, 19 nt, Artificial Sequence
  Description of Artificial Sequence: Synthetic oligonucleotide
  Sense strand starting at position 3179 of SEQ ID NO: 588397
aguguucuacucuguuaaa

SEQ ID NO: 862071 - RNA, 19 nt, Artificial Sequence
  Description of Artificial Sequence: Synthetic oligonucleotide
  Antisense strand to SEQ ID NO: 862070
uuuaacagaguagaacacu

SEQ ID NO: 862072 - RNA, 19 nt, Artificial Sequence
  Description of Artificial Sequence: Synthetic oligonucleotide
  Sense strand starting at position 3180 of SEQ ID NO: 588397
guguucuacucuguuaaau

SEQ ID NO: 862073 - RNA, 19 nt, Artificial Sequence
  Description of Artificial Sequence: Synthetic oligonucleotide
  Antisense strand to SEQ ID NO: 862072
auuuaacagaguagaacac

SEQ ID NO: 862074 - RNA, 19 nt, Artificial Sequence
  Description of Artificial Sequence: Synthetic oligonucleotide
  Sense strand starting at position 3182 of SEQ ID NO: 588397
guucuacucuguuaaauag

SEQ ID NO: 862075 - RNA, 19 nt, Artificial Sequence
  Description of Artificial Sequence: Synthetic oligonucleotide
  Antisense strand to SEQ ID NO: 862074
cuauuuaacagaguagaac

SEQ ID NO: 862076 - RNA, 19 nt, Artificial Sequence
  Description of Artificial Sequence: Synthetic oligonucleotide
  Sense strand starting at position 3232 of SEQ ID NO: 588397
cccugcuacguauaggauu

SEQ ID NO: 862077 - RNA, 19 nt, Artificial Sequence
  Description of Artificial Sequence: Synthetic oligonucleotide
  Antisense strand to SEQ ID NO: 862076
aauccuauacguagcaggg

SEQ ID NO: 862078 - RNA, 19 nt, Artificial Sequence
  Description of Artificial Sequence: Synthetic oligonucleotide
  Sense strand starting at position 3385 of SEQ ID NO: 588397
gagaguucuggccaguaac

SEQ ID NO: 862079 - RNA, 19 nt, Artificial Sequence
  Description of Artificial Sequence: Synthetic oligonucleotide
  Antisense strand to SEQ ID NO: 862078
guuacuggccagaacucuc

SEQ ID NO: 862080 - RNA, 19 nt, Artificial Sequence
  Description of Artificial Sequence: Synthetic oligonucleotide
  Sense strand starting at position 3483 of SEQ ID NO: 588397
ggcagcugccuucggaaga

SEQ ID NO: 862081 - RNA, 19 nt, Artificial Sequence
  Description of Artificial Sequence: Synthetic oligonucleotide
  Antisense strand to SEQ ID NO: 862080
ucuuccgaaggcagcugcc

SEQ ID NO: 862082 - RNA, 19 nt, Artificial Sequence
  Description of Artificial Sequence: Synthetic oligonucleotide
  Sense strand starting at position 3550 of SEQ ID NO: 588397
gcucaaagcguuugcuuga

SEQ ID NO: 862083 - RNA, 19 nt, Artificial Sequence
  Description of Artificial Sequence: Synthetic oligonucleotide
  Antisense strand to SEQ ID NO: 862082
ucaagcaaacgcuuugagc

SEQ ID NO: 862084 - RNA, 19 nt, Artificial Sequence
  Description of Artificial Sequence: Synthetic oligonucleotide
  Sense strand starting at position 3553 of SEQ ID NO: 588397
caaagcguuugcuugacaa

SEQ ID NO: 862085 - RNA, 19 nt, Artificial Sequence
  Description of Artificial Sequence: Synthetic oligonucleotide
  Antisense strand to SEQ ID NO: 862084
uugucaagcaaacgcuuug

SEQ ID NO: 862086 - RNA, 19 nt, Artificial Sequence
  Description of Artificial Sequence: Synthetic oligonucleotide
  Sense strand starting at position 3557 of SEQ ID NO: 588397
gcguuugcuugacaaccuu

SEQ ID NO: 862087 - RNA, 19 nt, Artificial Sequence
  Description of Artificial Sequence: Synthetic oligonucleotide
  Antisense strand to SEQ ID NO: 862086
aagguugucaagcaaacgc

SEQ ID NO: 862088 - RNA, 19 nt, Artificial Sequence
  Description of Artificial Sequence: Synthetic oligonucleotide
  Sense strand starting at position 3583 of SEQ ID NO: 588397
agaggguuggucgaacgaa

SEQ ID NO: 862089 - RNA, 19 nt, Artificial Sequence
  Description of Artificial Sequence: Synthetic oligonucleotide
  Antisense strand to SEQ ID NO: 862088
uucguucgaccaacccucu

SEQ ID NO: 862090 - RNA, 19 nt, Artificial Sequence
  Description of Artificial Sequence: Synthetic oligonucleotide
  Sense strand starting at position 3584 of SEQ ID NO: 588397
gaggguuggucgaacgaag

SEQ ID NO: 862091 - RNA, 19 nt, Artificial Sequence
  Description of Artificial Sequence: Synthetic oligonucleotide
  Antisense strand to SEQ ID NO: 862090
cuucguucgaccaacccuc

SEQ ID NO: 862092 - RNA, 19 nt, Artificial Sequence
  Description of Artificial Sequence: Synthetic oligonucleotide
  Sense strand starting at position 3609 of SEQ ID NO: 588397
gggcuuuacacucgcuaaa

SEQ ID NO: 862093 - RNA, 19 nt, Artificial Sequence
  Description of Artificial Sequence: Synthetic oligonucleotide
  Antisense strand to SEQ ID NO: 862092
uuuagcgaguguaaagccc

SEQ ID NO: 862094 - RNA, 19 nt, Artificial Sequence
  Description of Artificial Sequence: Synthetic oligonucleotide
  Sense strand starting at position 3611 of SEQ ID NO: 588397
gcuuuacacucgcuaaaca

SEQ ID NO: 862095 - RNA, 19 nt, Artificial Sequence
  Description of Artificial Sequence: Synthetic oligonucleotide
  Antisense strand to SEQ ID NO: 862094
uguuuagcgaguguaaagc

SEQ ID NO: 862096 - RNA, 19 nt, Artificial Sequence
  Description of Artificial Sequence: Synthetic oligonucleotide
  Sense strand starting at position 3639 of SEQ ID NO: 588397
guuuccuucuucccaagua

SEQ ID NO: 862097 - RNA, 19 nt, Artificial Sequence
  Description of Artificial Sequence: Synthetic oligonucleotide
  Antisense strand to SEQ ID NO: 862096
uacuugggaagaaggaaac

SEQ ID NO: 862098 - RNA, 19 nt, Artificial Sequence
  Description of Artificial Sequence: Synthetic oligonucleotide
  Sense strand starting at position 3774 of SEQ ID NO: 588397
cguggcucucaguaacuuu

SEQ ID NO: 862099 - RNA, 19 nt, Artificial Sequence
  Description of Artificial Sequence: Synthetic oligonucleotide
  Antisense strand to SEQ ID NO: 862098
aaaguuacugagagccacg

SEQ ID NO: 862100 - RNA, 19 nt, Artificial Sequence
  Description of Artificial Sequence: Synthetic oligonucleotide
  Sense strand starting at position 3842 of SEQ ID NO: 588397
guccuaacgugauuccaua

SEQ ID NO: 862101 - RNA, 19 nt, Artificial Sequence
  Description of Artificial Sequence: Synthetic oligonucleotide
  Antisense strand to SEQ ID NO: 862100
uauggaaucacguuaggac

SEQ ID NO: 862102 - RNA, 19 nt, Artificial Sequence
  Description of Artificial Sequence: Synthetic oligonucleotide
  Sense strand starting at position 3920 of SEQ ID NO: 588397
ggagucuaacuuugacuau

SEQ ID NO: 862103 - RNA, 19 nt, Artificial Sequence
  Description of Artificial Sequence: Synthetic oligonucleotide
  Antisense strand to SEQ ID NO: 862102
auagucaaaguuagacucc

SEQ ID NO: 862104 - RNA, 19 nt, Artificial Sequence
  Description of Artificial Sequence: Synthetic oligonucleotide
  Sense strand starting at position 3921 of SEQ ID NO: 588397
gagucuaacuuugacuaug

SEQ ID NO: 862105 - RNA, 19 nt, Artificial Sequence
  Description of Artificial Sequence: Synthetic oligonucleotide
  Antisense strand to SEQ ID NO: 862104
cauagucaaaguuagacuc

SEQ ID NO: 862106 - RNA, 19 nt, Artificial Sequence
  Description of Artificial Sequence: Synthetic oligonucleotide
  Sense strand starting at position 3956 of SEQ ID NO: 588397
uuaagcuucuagucaaagu

SEQ ID NO: 862107 - RNA, 19 nt, Artificial Sequence
  Description of Artificial Sequence: Synthetic oligonucleotide
  Antisense strand to SEQ ID NO: 862106
acuuugacuagaagcuuaa

SEQ ID NO: 862108 - RNA, 19 nt, Artificial Sequence
  Description of Artificial Sequence: Synthetic oligonucleotide
  Sense strand starting at position 315 of SEQ ID NO: 588398
ccaauaugguaagugcuaa

SEQ ID NO: 862109 - RNA, 19 nt, Artificial Sequence
  Description of Artificial Sequence: Synthetic oligonucleotide
  Antisense strand to SEQ ID NO: 862108
uuagcacuuaccauauugg

SEQ ID NO: 862110 - RNA, 19 nt, Artificial Sequence
  Description of Artificial Sequence: Synthetic oligonucleotide
  Sense strand starting at position 323 of SEQ ID NO: 588398
guaagugcuaacugaaugu

SEQ ID NO: 862111 - RNA, 19 nt, Artificial Sequence
  Description of Artificial Sequence: Synthetic oligonucleotide
  Antisense strand to SEQ ID NO: 862110
acauucaguuagcacuuac

SEQ ID NO: 862112 - RNA, 19 nt, Artificial Sequence
  Description of Artificial Sequence: Synthetic oligonucleotide
  Sense strand starting at position 327 of SEQ ID NO: 588398
gugcuaacugaauguuuau

SEQ ID NO: 862113 - RNA, 19 nt, Artificial Sequence
  Description of Artificial Sequence: Synthetic oligonucleotide
  Antisense strand to SEQ ID NO: 862112
auaaacauucaguuagcac

SEQ ID NO: 862114 - RNA, 19 nt, Artificial Sequence
  Description of Artificial Sequence: Synthetic oligonucleotide
  Sense strand starting at position 330 of SEQ ID NO: 588398
cuaacugaauguuuauuga

SEQ ID NO: 862115 - RNA, 19 nt, Artificial Sequence
  Description of Artificial Sequence: Synthetic oligonucleotide
  Antisense strand to SEQ ID NO: 862114
ucaauaaacauucaguuag

SEQ ID NO: 862116 - RNA, 19 nt, Artificial Sequence
  Description of Artificial Sequence: Synthetic oligonucleotide
  Sense strand starting at position 333 of SEQ ID NO: 588398
acugaauguuuauugaaug

SEQ ID NO: 862117 - RNA, 19 nt, Artificial Sequence
  Description of Artificial Sequence: Synthetic oligonucleotide
  Antisense strand to SEQ ID NO: 862116
cauucaauaaacauucagu

SEQ ID NO: 862118 - RNA, 19 nt, Artificial Sequence
  Description of Artificial Sequence: Synthetic oligonucleotide
  Sense strand starting at position 334 of SEQ ID NO: 588398
cugaauguuuauugaauga

SEQ ID NO: 862119 - RNA, 19 nt, Artificial Sequence
  Description of Artificial Sequence: Synthetic oligonucleotide
  Antisense strand to SEQ ID NO: 862118
ucauucaauaaacauucag

SEQ ID NO: 862120 - RNA, 19 nt, Artificial Sequence
  Description of Artificial Sequence: Synthetic oligonucleotide
  Sense strand starting at position 1054 of SEQ ID NO: 588398
cagagaguauggcaucuuu

SEQ ID NO: 862121 - RNA, 19 nt, Artificial Sequence
  Description of Artificial Sequence: Synthetic oligonucleotide
  Antisense strand to SEQ ID NO: 862120
aaagaugccauacucucug

SEQ ID NO: 862122 - RNA, 19 nt, Artificial Sequence
  Description of Artificial Sequence: Synthetic oligonucleotide
  Sense strand starting at position 1225 of SEQ ID NO: 588398
gguccauugcuauauugcu

SEQ ID NO: 862123 - RNA, 19 nt, Artificial Sequence
  Description of Artificial Sequence: Synthetic oligonucleotide
  Antisense strand to SEQ ID NO: 862122
agcaauauagcaauggacc

SEQ ID NO: 862124 - RNA, 19 nt, Artificial Sequence
  Description of Artificial Sequence: Synthetic oligonucleotide
  Sense strand starting at position 1281 of SEQ ID NO: 588398
guauucgaauucuggaguu

SEQ ID NO: 862125 - RNA, 19 nt, Artificial Sequence
  Description of Artificial Sequence: Synthetic oligonucleotide
  Antisense strand to SEQ ID NO: 862124
aacuccagaauucgaauac

SEQ ID NO: 862126 - RNA, 19 nt, Artificial Sequence
  Description of Artificial Sequence: Synthetic oligonucleotide
  Sense strand starting at position 1751 of SEQ ID NO: 588398
gccugaauuccugagucuc

SEQ ID NO: 862127 - RNA, 19 nt, Artificial Sequence
  Description of Artificial Sequence: Synthetic oligonucleotide
  Antisense strand to SEQ ID NO: 862126
gagacucaggaauucaggc

SEQ ID NO: 862128 - RNA, 19 nt, Artificial Sequence
  Description of Artificial Sequence: Synthetic oligonucleotide
  Sense strand starting at position 1753 of SEQ ID NO: 588398
cugaauuccugagucucuu

SEQ ID NO: 862129 - RNA, 19 nt, Artificial Sequence
  Description of Artificial Sequence: Synthetic oligonucleotide
  Antisense strand to SEQ ID NO: 862128
aagagacucaggaauucag

SEQ ID NO: 862130 - RNA, 19 nt, Artificial Sequence
  Description of Artificial Sequence: Synthetic oligonucleotide
  Sense strand starting at position 2484 of SEQ ID NO: 588398
ggaccagguuuaugagugu

SEQ ID NO: 862131 - RNA, 19 nt, Artificial Sequence
  Description of Artificial Sequence: Synthetic oligonucleotide
  Antisense strand to SEQ ID NO: 862130
acacucauaaaccuggucc

SEQ ID NO: 862132 - RNA, 19 nt, Artificial Sequence
  Description of Artificial Sequence: Synthetic oligonucleotide
  Sense strand starting at position 2536 of SEQ ID NO: 588398
gcacuccuuucgucaccaa

SEQ ID NO: 862133 - RNA, 19 nt, Artificial Sequence
  Description of Artificial Sequence: Synthetic oligonucleotide
  Antisense strand to SEQ ID NO: 862132
uuggugacgaaaggagugc

SEQ ID NO: 862134 - RNA, 19 nt, Artificial Sequence
  Description of Artificial Sequence: Synthetic oligonucleotide
  Sense strand starting at position 2675 of SEQ ID NO: 588398
agcugcugccguuuagaga

SEQ ID NO: 862135 - RNA, 19 nt, Artificial Sequence
  Description of Artificial Sequence: Synthetic oligonucleotide
  Antisense strand to SEQ ID NO: 862134
ucucuaaacggcagcagcu

SEQ ID NO: 862136 - RNA, 19 nt, Artificial Sequence
  Description of Artificial Sequence: Synthetic oligonucleotide
  Sense strand starting at position 2676 of SEQ ID NO: 588398
gcugcugccguuuagagaa

SEQ ID NO: 862137 - RNA, 19 nt, Artificial Sequence
  Description of Artificial Sequence: Synthetic oligonucleotide
  Antisense strand to SEQ ID NO: 862136
uucucuaaacggcagcagc

SEQ ID NO: 862138 - RNA, 19 nt, Artificial Sequence
  Description of Artificial Sequence: Synthetic oligonucleotide
  Sense strand starting at position 2752 of SEQ ID NO: 588398
accuauuugucguccugga

SEQ ID NO: 862139 - RNA, 19 nt, Artificial Sequence
  Description of Artificial Sequence: Synthetic oligonucleotide
  Antisense strand to SEQ ID NO: 862138
uccaggacgacaaauaggu

SEQ ID NO: 862140 - RNA, 19 nt, Artificial Sequence
  Description of Artificial Sequence: Synthetic oligonucleotide
  Sense strand starting at position 2756 of SEQ ID NO: 588398
auuugucguccuggaguuu

SEQ ID NO: 862141 - RNA, 19 nt, Artificial Sequence
  Description of Artificial Sequence: Synthetic oligonucleotide
  Antisense strand to SEQ ID NO: 862140
aaacuccaggacgacaaau

SEQ ID NO: 862142 - RNA, 19 nt, Artificial Sequence
  Description of Artificial Sequence: Synthetic oligonucleotide
  Sense strand starting at position 2808 of SEQ ID NO: 588398
cccaacugcuagcaugaaa

SEQ ID NO: 862143 - RNA, 19 nt, Artificial Sequence
  Description of Artificial Sequence: Synthetic oligonucleotide
  Antisense strand to SEQ ID NO: 862142
uuucaugcuagcaguuggg

SEQ ID NO: 862144 - RNA, 19 nt, Artificial Sequence
  Description of Artificial Sequence: Synthetic oligonucleotide
  Sense strand starting at position 2826 of SEQ ID NO: 588398
aaaguugcauggugaaauc

SEQ ID NO: 862145 - RNA, 19 nt, Artificial Sequence
  Description of Artificial Sequence: Synthetic oligonucleotide
  Antisense strand to SEQ ID NO: 862144
gauuucaccaugcaacuuu

SEQ ID NO: 862146 - RNA, 19 nt, Artificial Sequence
  Description of Artificial Sequence: Synthetic oligonucleotide
  Sense strand starting at position 3038 of SEQ ID NO: 588398
uugggaagagucugucauu

SEQ ID NO: 862147 - RNA, 19 nt, Artificial Sequence
  Description of Artificial Sequence: Synthetic oligonucleotide
  Antisense strand to SEQ ID NO: 862146
aaugacagacucuucccaa

SEQ ID NO: 862148 - RNA, 19 nt, Artificial Sequence
  Description of Artificial Sequence: Synthetic oligonucleotide
  Sense strand starting at position 3039 of SEQ ID NO: 588398
ugggaagagucugucauug

SEQ ID NO: 862149 - RNA, 19 nt, Artificial Sequence
  Description of Artificial Sequence: Synthetic oligonucleotide
  Antisense strand to SEQ ID NO: 862148
caaugacagacucuuccca

SEQ ID NO: 862150 - RNA, 19 nt, Artificial Sequence
  Description of Artificial Sequence: Synthetic oligonucleotide
  Sense strand starting at position 3119 of SEQ ID NO: 588398
agaaguucuuucuugguuu

SEQ ID NO: 862151 - RNA, 19 nt, Artificial Sequence
  Description of Artificial Sequence: Synthetic oligonucleotide
  Antisense strand to SEQ ID NO: 862150
aaaccaagaaagaacuucu

SEQ ID NO: 862152 - RNA, 19 nt, Artificial Sequence
  Description of Artificial Sequence: Synthetic oligonucleotide
  Sense strand starting at position 3175 of SEQ ID NO: 588398
gcauguauauaguuuaaug

SEQ ID NO: 862153 - RNA, 19 nt, Artificial Sequence
  Description of Artificial Sequence: Synthetic oligonucleotide
  Antisense strand to SEQ ID NO: 862152
cauuaaacuauauacaugc

SEQ ID NO: 862154 - RNA, 19 nt, Artificial Sequence
  Description of Artificial Sequence: Synthetic oligonucleotide
  Sense strand starting at position 3183 of SEQ ID NO: 588398
auaguuuaaugacugcaua

SEQ ID NO: 862155 - RNA, 19 nt, Artificial Sequence
  Description of Artificial Sequence: Synthetic oligonucleotide
  Antisense strand to SEQ ID NO: 862154
uaugcagucauuaaacuau

SEQ ID NO: 862156 - RNA, 19 nt, Artificial Sequence
  Description of Artificial Sequence: Synthetic oligonucleotide
  Sense strand starting at position 3739 of SEQ ID NO: 588398
caauccuguugacgacuaa

SEQ ID NO: 862157 - RNA, 19 nt, Artificial Sequence
  Description of Artificial Sequence: Synthetic oligonucleotide
  Antisense strand to SEQ ID NO: 862156
uuagucgucaacaggauug

SEQ ID NO: 862158 - RNA, 19 nt, Artificial Sequence
  Description of Artificial Sequence: Synthetic oligonucleotide
  Sense strand starting at position 3743 of SEQ ID NO: 588398
ccuguugacgacuaaguau

SEQ ID NO: 862159 - RNA, 19 nt, Artificial Sequence
  Description of Artificial Sequence: Synthetic oligonucleotide
  Antisense strand to SEQ ID NO: 862158
auacuuagucgucaacagg

SEQ ID NO: 862160 - RNA, 19 nt, Artificial Sequence
  Description of Artificial Sequence: Synthetic oligonucleotide
  Sense strand starting at position 3752 of SEQ ID NO: 588398
gacuaaguaugugucccau

SEQ ID NO: 862161 - RNA, 19 nt, Artificial Sequence
  Description of Artificial Sequence: Synthetic oligonucleotide
  Antisense strand to SEQ ID NO: 862160
augggacacauacuuaguc

SEQ ID NO: 862162 - RNA, 19 nt, Artificial Sequence
  Description of Artificial Sequence: Synthetic oligonucleotide
  Sense strand starting at position 3754 of SEQ ID NO: 588398
cuaaguaugugucccauag

SEQ ID NO: 862163 - RNA, 19 nt, Artificial Sequence
  Description of Artificial Sequence: Synthetic oligonucleotide
  Antisense strand to SEQ ID NO: 862162
cuaugggacacauacuuag

SEQ ID NO: 862164 - RNA, 19 nt, Artificial Sequence
  Description of Artificial Sequence: Synthetic oligonucleotide
  Sense strand starting at position 3756 of SEQ ID NO: 588398
aaguaugugucccauaguu

SEQ ID NO: 862165 - RNA, 19 nt, Artificial Sequence
  Description of Artificial Sequence: Synthetic oligonucleotide
  Antisense strand to SEQ ID NO: 862164
aacuaugggacacauacuu

SEQ ID NO: 862166 - RNA, 19 nt, Artificial Sequence
  Description of Artificial Sequence: Synthetic oligonucleotide
  Sense strand starting at position 3808 of SEQ ID NO: 588398
ucuauagggucuugccaau

SEQ ID NO: 862167 - RNA, 19 nt, Artificial Sequence
  Description of Artificial Sequence: Synthetic oligonucleotide
  Antisense strand to SEQ ID NO: 862166
auuggcaagacccuauaga

SEQ ID NO: 862168 - RNA, 19 nt, Artificial Sequence
  Description of Artificial Sequence: Synthetic oligonucleotide
  Sense strand starting at position 3820 of SEQ ID NO: 588398
ugccaaugcaggugacaau

SEQ ID NO: 862169 - RNA, 19 nt, Artificial Sequence
  Description of Artificial Sequence: Synthetic oligonucleotide
  Antisense strand to SEQ ID NO: 862168
auugucaccugcauuggca

SEQ ID NO: 862170 - RNA, 19 nt, Artificial Sequence
  Description of Artificial Sequence: Synthetic oligonucleotide
  Sense strand starting at position 3823 of SEQ ID NO: 588398
caaugcaggugacaauauu

SEQ ID NO: 862171 - RNA, 19 nt, Artificial Sequence
  Description of Artificial Sequence: Synthetic oligonucleotide
  Antisense strand to SEQ ID NO: 862170
aauauugucaccugcauug

SEQ ID NO: 862172 - RNA, 19 nt, Artificial Sequence
  Description of Artificial Sequence: Synthetic oligonucleotide
  Sense strand starting at position 3877 of SEQ ID NO: 588398
gagacagggucccaaucua

SEQ ID NO: 862173 - RNA, 19 nt, Artificial Sequence
  Description of Artificial Sequence: Synthetic oligonucleotide
  Antisense strand to SEQ ID NO: 862172
uagauugggacccugucuc

SEQ ID NO: 862174 - RNA, 19 nt, Artificial Sequence
  Description of Artificial Sequence: Synthetic oligonucleotide
  Sense strand starting at position 4 of SEQ ID NO: 588399
gugcuaacugaauguuuau

SEQ ID NO: 862175 - RNA, 19 nt, Artificial Sequence
  Description of Artificial Sequence: Synthetic oligonucleotide
  Antisense strand to SEQ ID NO: 862174
auaaacauucaguuagcac

SEQ ID NO: 862176 - RNA, 19 nt, Artificial Sequence
  Description of Artificial Sequence: Synthetic oligonucleotide
  Sense strand starting at position 7 of SEQ ID NO: 588399
cuaacugaauguuuauuga

SEQ ID NO: 862177 - RNA, 19 nt, Artificial Sequence
  Description of Artificial Sequence: Synthetic oligonucleotide
  Antisense strand to SEQ ID NO: 862176
ucaauaaacauucaguuag

SEQ ID NO: 862178 - RNA, 19 nt, Artificial Sequence
  Description of Artificial Sequence: Synthetic oligonucleotide
  Sense strand starting at position 10 of SEQ ID NO: 588399
acugaauguuuauugaaug

SEQ ID NO: 862179 - RNA, 19 nt, Artificial Sequence
  Description of Artificial Sequence: Synthetic oligonucleotide
  Antisense strand to SEQ ID NO: 862178
cauucaauaaacauucagu

SEQ ID NO: 862180 - RNA, 19 nt, Artificial Sequence
  Description of Artificial Sequence: Synthetic oligonucleotide
  Sense strand starting at position 11 of SEQ ID NO: 588399
cugaauguuuauugaauga

SEQ ID NO: 862181 - RNA, 19 nt, Artificial Sequence
  Description of Artificial Sequence: Synthetic oligonucleotide
  Antisense strand to SEQ ID NO: 862180
ucauucaauaaacauucag

SEQ ID NO: 862182 - RNA, 19 nt, Artificial Sequence
  Description of Artificial Sequence: Synthetic oligonucleotide
  Sense strand starting at position 731 of SEQ ID NO: 588399
cagagaguauggcaucuuu

SEQ ID NO: 862183 - RNA, 19 nt, Artificial Sequence
  Description of Artificial Sequence: Synthetic oligonucleotide
  Antisense strand to SEQ ID NO: 862182
aaagaugccauacucucug

SEQ ID NO: 862184 - RNA, 19 nt, Artificial Sequence
  Description of Artificial Sequence: Synthetic oligonucleotide
  Sense strand starting at position 902 of SEQ ID NO: 588399
gguccauugcuauauugcu

SEQ ID NO: 862185 - RNA, 19 nt, Artificial Sequence
  Description of Artificial Sequence: Synthetic oligonucleotide
  Antisense strand to SEQ ID NO: 862184
agcaauauagcaauggacc

SEQ ID NO: 862186 - RNA, 19 nt, Artificial Sequence
  Description of Artificial Sequence: Synthetic oligonucleotide
  Sense strand starting at position 958 of SEQ ID NO: 588399
guauucgaauucuggaguu

SEQ ID NO: 862187 - RNA, 19 nt, Artificial Sequence
  Description of Artificial Sequence: Synthetic oligonucleotide
  Antisense strand to SEQ ID NO: 862186
aacuccagaauucgaauac

SEQ ID NO: 862188 - RNA, 19 nt, Artificial Sequence
  Description of Artificial Sequence: Synthetic oligonucleotide
  Sense strand starting at position 1428 of SEQ ID NO: 588399
gccugaauuccugagucuc

SEQ ID NO: 862189 - RNA, 19 nt, Artificial Sequence
  Description of Artificial Sequence: Synthetic oligonucleotide
  Antisense strand to SEQ ID NO: 862188
gagacucaggaauucaggc

SEQ ID NO: 862190 - RNA, 19 nt, Artificial Sequence
  Description of Artificial Sequence: Synthetic oligonucleotide
  Sense strand starting at position 1430 of SEQ ID NO: 588399
cugaauuccugagucucuu

SEQ ID NO: 862191 - RNA, 19 nt, Artificial Sequence
  Description of Artificial Sequence: Synthetic oligonucleotide
  Antisense strand to SEQ ID NO: 862190
aagagacucaggaauucag

SEQ ID NO: 862192 - RNA, 19 nt, Artificial Sequence
  Description of Artificial Sequence: Synthetic oligonucleotide
  Sense strand starting at position 2161 of SEQ ID NO: 588399
ggaccagguuuaugagugu

SEQ ID NO: 862193 - RNA, 19 nt, Artificial Sequence
  Description of Artificial Sequence: Synthetic oligonucleotide
  Antisense strand to SEQ ID NO: 862192
acacucauaaaccuggucc

SEQ ID NO: 862194 - RNA, 19 nt, Artificial Sequence
  Description of Artificial Sequence: Synthetic oligonucleotide
  Sense strand starting at position 2213 of SEQ ID NO: 588399
gcacuccuuucgucaccaa

SEQ ID NO: 862195 - RNA, 19 nt, Artificial Sequence
  Description of Artificial Sequence: Synthetic oligonucleotide
  Antisense strand to SEQ ID NO: 862194
uuggugacgaaaggagugc

SEQ ID NO: 862196 - RNA, 19 nt, Artificial Sequence
  Description of Artificial Sequence: Synthetic oligonucleotide
  Sense strand starting at position 2352 of SEQ ID NO: 588399
agcugcugccguuuagaga

SEQ ID NO: 862197 - RNA, 19 nt, Artificial Sequence
  Description of Artificial Sequence: Synthetic oligonucleotide
  Antisense strand to SEQ ID NO: 862196
ucucuaaacggcagcagcu

SEQ ID NO: 862198 - RNA, 19 nt, Artificial Sequence
  Description of Artificial Sequence: Synthetic oligonucleotide
  Sense strand starting at position 2353 of SEQ ID NO: 588399
gcugcugccguuuagagaa

SEQ ID NO: 862199 - RNA, 19 nt, Artificial Sequence
  Description of Artificial Sequence: Synthetic oligonucleotide
  Antisense strand to SEQ ID NO: 862198
uucucuaaacggcagcagc

SEQ ID NO: 862200 - RNA, 19 nt, Artificial Sequence
  Description of Artificial Sequence: Synthetic oligonucleotide
  Sense strand starting at position 2429 of SEQ ID NO: 588399
accuauuugucguccugga

SEQ ID NO: 862201 - RNA, 19 nt, Artificial Sequence
  Description of Artificial Sequence: Synthetic oligonucleotide
  Antisense strand to SEQ ID NO: 862200
uccaggacgacaaauaggu

SEQ ID NO: 862202 - RNA, 19 nt, Artificial Sequence
  Description of Artificial Sequence: Synthetic oligonucleotide
  Sense strand starting at position 2433 of SEQ ID NO: 588399
auuugucguccuggaguuu

SEQ ID NO: 862203 - RNA, 19 nt, Artificial Sequence
  Description of Artificial Sequence: Synthetic oligonucleotide
  Antisense strand to SEQ ID NO: 862202
aaacuccaggacgacaaau

SEQ ID NO: 862204 - RNA, 19 nt, Artificial Sequence
  Description of Artificial Sequence: Synthetic oligonucleotide
  Sense strand starting at position 2485 of SEQ ID NO: 588399
cccaacugcuagcaugaaa

SEQ ID NO: 862205 - RNA, 19 nt, Artificial Sequence
  Description of Artificial Sequence: Synthetic oligonucleotide
  Antisense strand to SEQ ID NO: 862204
uuucaugcuagcaguuggg

SEQ ID NO: 862206 - RNA, 19 nt, Artificial Sequence
  Description of Artificial Sequence: Synthetic oligonucleotide
  Sense strand starting at position 2503 of SEQ ID NO: 588399
aaaguugcauggugaaauc

SEQ ID NO: 862207 - RNA, 19 nt, Artificial Sequence
  Description of Artificial Sequence: Synthetic oligonucleotide
  Antisense strand to SEQ ID NO: 862206
gauuucaccaugcaacuuu

SEQ ID NO: 862208 - RNA, 19 nt, Artificial Sequence
  Description of Artificial Sequence: Synthetic oligonucleotide
  Sense strand starting at position 2715 of SEQ ID NO: 588399
uugggaagagucugucauu

SEQ ID NO: 862209 - RNA, 19 nt, Artificial Sequence
  Description of Artificial Sequence: Synthetic oligonucleotide
  Antisense strand to SEQ ID NO: 862208
aaugacagacucuucccaa

SEQ ID NO: 862210 - RNA, 19 nt, Artificial Sequence
  Description of Artificial Sequence: Synthetic oligonucleotide
  Sense strand starting at position 2716 of SEQ ID NO: 588399
ugggaagagucugucauug

SEQ ID NO: 862211 - RNA, 19 nt, Artificial Sequence
  Description of Artificial Sequence: Synthetic oligonucleotide
  Antisense strand to SEQ ID NO: 862210
caaugacagacucuuccca

SEQ ID NO: 862212 - RNA, 19 nt, Artificial Sequence
  Description of Artificial Sequence: Synthetic oligonucleotide
  Sense strand starting at position 2796 of SEQ ID NO: 588399
agaaguucuuucuugguuu

SEQ ID NO: 862213 - RNA, 19 nt, Artificial Sequence
  Description of Artificial Sequence: Synthetic oligonucleotide
  Antisense strand to SEQ ID NO: 862212
aaaccaagaaagaacuucu

SEQ ID NO: 862214 - RNA, 19 nt, Artificial Sequence
  Description of Artificial Sequence: Synthetic oligonucleotide
  Sense strand starting at position 2852 of SEQ ID NO: 588399
gcauguauauaguuuaaug

SEQ ID NO: 862215 - RNA, 19 nt, Artificial Sequence
  Description of Artificial Sequence: Synthetic oligonucleotide
  Antisense strand to SEQ ID NO: 862214
cauuaaacuauauacaugc

SEQ ID NO: 862216 - RNA, 19 nt, Artificial Sequence
  Description of Artificial Sequence: Synthetic oligonucleotide
  Sense strand starting at position 2860 of SEQ ID NO: 588399
auaguuuaaugacugcaua

SEQ ID NO: 862217 - RNA, 19 nt, Artificial Sequence
  Description of Artificial Sequence: Synthetic oligonucleotide
  Antisense strand to SEQ ID NO: 862216
uaugcagucauuaaacuau

SEQ ID NO: 862218 - RNA, 19 nt, Artificial Sequence
  Description of Artificial Sequence: Synthetic oligonucleotide
  Sense strand starting at position 3416 of SEQ ID NO: 588399
caauccuguugacgacuaa

SEQ ID NO: 862219 - RNA, 19 nt, Artificial Sequence
  Description of Artificial Sequence: Synthetic oligonucleotide
  Antisense strand to SEQ ID NO: 862218
uuagucgucaacaggauug

SEQ ID NO: 862220 - RNA, 19 nt, Artificial Sequence
  Description of Artificial Sequence: Synthetic oligonucleotide
  Sense strand starting at position 3420 of SEQ ID NO: 588399
ccuguugacgacuaaguau

SEQ ID NO: 862221 - RNA, 19 nt, Artificial Sequence
  Description of Artificial Sequence: Synthetic oligonucleotide
  Antisense strand to SEQ ID NO: 862220
auacuuagucgucaacagg

SEQ ID NO: 862222 - RNA, 19 nt, Artificial Sequence
  Description of Artificial Sequence: Synthetic oligonucleotide
  Sense strand starting at position 3429 of SEQ ID NO: 588399
gacuaaguaugugucccau

SEQ ID NO: 862223 - RNA, 19 nt, Artificial Sequence
  Description of Artificial Sequence: Synthetic oligonucleotide
  Antisense strand to SEQ ID NO: 862222
augggacacauacuuaguc

SEQ ID NO: 862224 - RNA, 19 nt, Artificial Sequence
  Description of Artificial Sequence: Synthetic oligonucleotide
  Sense strand starting at position 3431 of SEQ ID NO: 588399
cuaaguaugugucccauag

SEQ ID NO: 862225 - RNA, 19 nt, Artificial Sequence
  Description of Artificial Sequence: Synthetic oligonucleotide
  Antisense strand to SEQ ID NO: 862224
cuaugggacacauacuuag

SEQ ID NO: 862226 - RNA, 19 nt, Artificial Sequence
  Description of Artificial Sequence: Synthetic oligonucleotide
  Sense strand starting at position 3433 of SEQ ID NO: 588399
aaguaugugucccauaguu

SEQ ID NO: 862227 - RNA, 19 nt, Artificial Sequence
  Description of Artificial Sequence: Synthetic oligonucleotide
  Antisense strand to SEQ ID NO: 862226
aacuaugggacacauacuu

SEQ ID NO: 862228 - RNA, 19 nt, Artificial Sequence
  Description of Artificial Sequence: Synthetic oligonucleotide
  Sense strand starting at position 3485 of SEQ ID NO: 588399
ucuauagggucuugccaau

SEQ ID NO: 862229 - RNA, 19 nt, Artificial Sequence
  Description of Artificial Sequence: Synthetic oligonucleotide
  Antisense strand to SEQ ID NO: 862228
auuggcaagacccuauaga

SEQ ID NO: 862230 - RNA, 19 nt, Artificial Sequence
  Description of Artificial Sequence: Synthetic oligonucleotide
  Sense strand starting at position 3497 of SEQ ID NO: 588399
ugccaaugcaggugacaau

SEQ ID NO: 862231 - RNA, 19 nt, Artificial Sequence
  Description of Artificial Sequence: Synthetic oligonucleotide
  Antisense strand to SEQ ID NO: 862230
auugucaccugcauuggca

SEQ ID NO: 862232 - RNA, 19 nt, Artificial Sequence
  Description of Artificial Sequence: Synthetic oligonucleotide
  Sense strand starting at position 3500 of SEQ ID NO: 588399
caaugcaggugacaauauu

SEQ ID NO: 862233 - RNA, 19 nt, Artificial Sequence
  Description of Artificial Sequence: Synthetic oligonucleotide
  Antisense strand to SEQ ID NO: 862232
aauauugucaccugcauug

SEQ ID NO: 862234 - RNA, 19 nt, Artificial Sequence
  Description of Artificial Sequence: Synthetic oligonucleotide
  Sense strand starting at position 3554 of SEQ ID NO: 588399
gagacagggucccaaucua

SEQ ID NO: 862235 - RNA, 19 nt, Artificial Sequence
  Description of Artificial Sequence: Synthetic oligonucleotide
  Antisense strand to SEQ ID NO: 862234
uagauugggacccugucuc

SEQ ID NO: 862236 - RNA, 19 nt, Artificial Sequence
  Description of Artificial Sequence: Synthetic oligonucleotide
  Sense strand starting at position 29 of SEQ ID NO: 588400
aaugcuuucguagaaugua

SEQ ID NO: 862237 - RNA, 19 nt, Artificial Sequence
  Description of Artificial Sequence: Synthetic oligonucleotide
  Antisense strand to SEQ ID NO: 862236
uacauucuacgaaagcauu

SEQ ID NO: 862238 - RNA, 19 nt, Artificial Sequence
  Description of Artificial Sequence: Synthetic oligonucleotide
  Sense strand starting at position 157 of SEQ ID NO: 588400
uuacaaaucuggcagauuu

SEQ ID NO: 862239 - RNA, 19 nt, Artificial Sequence
  Description of Artificial Sequence: Synthetic oligonucleotide
  Antisense strand to SEQ ID NO: 862238
aaaucugccagauuuguaa

SEQ ID NO: 862240 - RNA, 19 nt, Artificial Sequence
  Description of Artificial Sequence: Synthetic oligonucleotide
  Sense strand starting at position 184 of SEQ ID NO: 588400
aucccuuuauucuuuguga

SEQ ID NO: 862241 - RNA, 19 nt, Artificial Sequence
  Description of Artificial Sequence: Synthetic oligonucleotide
  Antisense strand to SEQ ID NO: 862240
ucacaaagaauaaagggau

SEQ ID NO: 862242 - RNA, 19 nt, Artificial Sequence
  Description of Artificial Sequence: Synthetic oligonucleotide
  Sense strand starting at position 221 of SEQ ID NO: 588400
ggguuugagcauugauccu

SEQ ID NO: 862243 - RNA, 19 nt, Artificial Sequence
  Description of Artificial Sequence: Synthetic oligonucleotide
  Antisense strand to SEQ ID NO: 862242
aggaucaaugcucaaaccc

SEQ ID NO: 862244 - RNA, 19 nt, Artificial Sequence
  Description of Artificial Sequence: Synthetic oligonucleotide
  Sense strand starting at position 345 of SEQ ID NO: 588400
aagagaugaguuuggcuga

SEQ ID NO: 862245 - RNA, 19 nt, Artificial Sequence
  Description of Artificial Sequence: Synthetic oligonucleotide
  Antisense strand to SEQ ID NO: 862244
ucagccaaacucaucucuu

SEQ ID NO: 862246 - RNA, 19 nt, Artificial Sequence
  Description of Artificial Sequence: Synthetic oligonucleotide
  Sense strand starting at position 348 of SEQ ID NO: 588400
agaugaguuuggcugagua

SEQ ID NO: 862247 - RNA, 19 nt, Artificial Sequence
  Description of Artificial Sequence: Synthetic oligonucleotide
  Antisense strand to SEQ ID NO: 862246
uacucagccaaacucaucu

SEQ ID NO: 862248 - RNA, 19 nt, Artificial Sequence
  Description of Artificial Sequence: Synthetic oligonucleotide
  Sense strand starting at position 350 of SEQ ID NO: 588400
augaguuuggcugaguacu

SEQ ID NO: 862249 - RNA, 19 nt, Artificial Sequence
  Description of Artificial Sequence: Synthetic oligonucleotide
  Antisense strand to SEQ ID NO: 862248
aguacucagccaaacucau

SEQ ID NO: 862250 - RNA, 19 nt, Artificial Sequence
  Description of Artificial Sequence: Synthetic oligonucleotide
  Sense strand starting at position 352 of SEQ ID NO: 588400
gaguuuggcugaguacuga

SEQ ID NO: 862251 - RNA, 19 nt, Artificial Sequence
  Description of Artificial Sequence: Synthetic oligonucleotide
  Antisense strand to SEQ ID NO: 862250
ucaguacucagccaaacuc

SEQ ID NO: 862252 - RNA, 19 nt, Artificial Sequence
  Description of Artificial Sequence: Synthetic oligonucleotide
  Sense strand starting at position 376 of SEQ ID NO: 588400
cuuugaaggcuaugcugaa

SEQ ID NO: 862253 - RNA, 19 nt, Artificial Sequence
  Description of Artificial Sequence: Synthetic oligonucleotide
  Antisense strand to SEQ ID NO: 862252
uucagcauagccuucaaag

SEQ ID NO: 862254 - RNA, 19 nt, Artificial Sequence
  Description of Artificial Sequence: Synthetic oligonucleotide
  Sense strand starting at position 1474 of SEQ ID NO: 588400
augcuuuauuucucaggca

SEQ ID NO: 862255 - RNA, 19 nt, Artificial Sequence
  Description of Artificial Sequence: Synthetic oligonucleotide
  Antisense strand to SEQ ID NO: 862254
ugccugagaaauaaagcau

SEQ ID NO: 862256 - RNA, 19 nt, Artificial Sequence
  Description of Artificial Sequence: Synthetic oligonucleotide
  Sense strand starting at position 1697 of SEQ ID NO: 588400
cucucuguuccuuaccaga

SEQ ID NO: 862257 - RNA, 19 nt, Artificial Sequence
  Description of Artificial Sequence: Synthetic oligonucleotide
  Antisense strand to SEQ ID NO: 862256
ucugguaaggaacagagag

SEQ ID NO: 862258 - RNA, 19 nt, Artificial Sequence
  Description of Artificial Sequence: Synthetic oligonucleotide
  Sense strand starting at position 1699 of SEQ ID NO: 588400
cucuguuccuuaccagauc

SEQ ID NO: 862259 - RNA, 19 nt, Artificial Sequence
  Description of Artificial Sequence: Synthetic oligonucleotide
  Antisense strand to SEQ ID NO: 862258
gaucugguaaggaacagag

SEQ ID NO: 862260 - RNA, 19 nt, Artificial Sequence
  Description of Artificial Sequence: Synthetic oligonucleotide
  Sense strand starting at position 1708 of SEQ ID NO: 588400
uuaccagaucccuguauca

SEQ ID NO: 862261 - RNA, 19 nt, Artificial Sequence
  Description of Artificial Sequence: Synthetic oligonucleotide
  Antisense strand to SEQ ID NO: 862260
ugauacagggaucugguaa

SEQ ID NO: 862262 - RNA, 19 nt, Artificial Sequence
  Description of Artificial Sequence: Synthetic oligonucleotide
  Sense strand starting at position 1733 of SEQ ID NO: 588400
cucuguggagaguguuaaa

SEQ ID NO: 862263 - RNA, 19 nt, Artificial Sequence
  Description of Artificial Sequence: Synthetic oligonucleotide
  Antisense strand to SEQ ID NO: 862262
uuuaacacucuccacagag

SEQ ID NO: 862264 - RNA, 19 nt, Artificial Sequence
  Description of Artificial Sequence: Synthetic oligonucleotide
  Sense strand starting at position 1781 of SEQ ID NO: 588400
agccaaaggacguguauuu

SEQ ID NO: 862265 - RNA, 19 nt, Artificial Sequence
  Description of Artificial Sequence: Synthetic oligonucleotide
  Antisense strand to SEQ ID NO: 862264
aaauacacguccuuuggcu

SEQ ID NO: 862266 - RNA, 19 nt, Artificial Sequence
  Description of Artificial Sequence: Synthetic oligonucleotide
  Sense strand starting at position 1809 of SEQ ID NO: 588400
gcauuaauuguagagcuau

SEQ ID NO: 862267 - RNA, 19 nt, Artificial Sequence
  Description of Artificial Sequence: Synthetic oligonucleotide
  Antisense strand to SEQ ID NO: 862266
auagcucuacaauuaaugc

SEQ ID NO: 862268 - RNA, 19 nt, Artificial Sequence
  Description of Artificial Sequence: Synthetic oligonucleotide
  Sense strand starting at position 1815 of SEQ ID NO: 588400
auuguagagcuauagacau

SEQ ID NO: 862269 - RNA, 19 nt, Artificial Sequence
  Description of Artificial Sequence: Synthetic oligonucleotide
  Antisense strand to SEQ ID NO: 862268
augucuauagcucuacaau

SEQ ID NO: 862270 - RNA, 19 nt, Artificial Sequence
  Description of Artificial Sequence: Synthetic oligonucleotide
  Sense strand starting at position 1826 of SEQ ID NO: 588400
auagacauugugcacuauu

SEQ ID NO: 862271 - RNA, 19 nt, Artificial Sequence
  Description of Artificial Sequence: Synthetic oligonucleotide
  Antisense strand to SEQ ID NO: 862270
aauagugcacaaugucuau

SEQ ID NO: 862272 - RNA, 19 nt, Artificial Sequence
  Description of Artificial Sequence: Synthetic oligonucleotide
  Sense strand starting at position 1852 of SEQ ID NO: 588400
ugucaaauaucagcagaga

SEQ ID NO: 862273 - RNA, 19 nt, Artificial Sequence
  Description of Artificial Sequence: Synthetic oligonucleotide
  Antisense strand to SEQ ID NO: 862272
ucucugcugauauuugaca

SEQ ID NO: 862274 - RNA, 19 nt, Artificial Sequence
  Description of Artificial Sequence: Synthetic oligonucleotide
  Sense strand starting at position 1958 of SEQ ID NO: 588400
ggccaucuugaauaucuaa

SEQ ID NO: 862275 - RNA, 19 nt, Artificial Sequence
  Description of Artificial Sequence: Synthetic oligonucleotide
  Antisense strand to SEQ ID NO: 862274
uuagauauucaagauggcc

SEQ ID NO: 862276 - RNA, 19 nt, Artificial Sequence
  Description of Artificial Sequence: Synthetic oligonucleotide
  Sense strand starting at position 2218 of SEQ ID NO: 588400
acagaagaguaagaaauau

SEQ ID NO: 862277 - RNA, 19 nt, Artificial Sequence
  Description of Artificial Sequence: Synthetic oligonucleotide
  Antisense strand to SEQ ID NO: 862276
auauuucuuacucuucugu

SEQ ID NO: 862278 - RNA, 19 nt, Artificial Sequence
  Description of Artificial Sequence: Synthetic oligonucleotide
  Sense strand starting at position 2518 of SEQ ID NO: 588400
aucagauggucuuccaaau

SEQ ID NO: 862279 - RNA, 19 nt, Artificial Sequence
  Description of Artificial Sequence: Synthetic oligonucleotide
  Antisense strand to SEQ ID NO: 862278
auuuggaagaccaucugau

SEQ ID NO: 862280 - RNA, 19 nt, Artificial Sequence
  Description of Artificial Sequence: Synthetic oligonucleotide
  Sense strand starting at position 2581 of SEQ ID NO: 588400
ccauaaagccauugcuaug

SEQ ID NO: 862281 - RNA, 19 nt, Artificial Sequence
  Description of Artificial Sequence: Synthetic oligonucleotide
  Antisense strand to SEQ ID NO: 862280
cauagcaauggcuuuaugg

SEQ ID NO: 862282 - RNA, 19 nt, Artificial Sequence
  Description of Artificial Sequence: Synthetic oligonucleotide
  Sense strand starting at position 2731 of SEQ ID NO: 588400
gggaauaacucucagauuu

SEQ ID NO: 862283 - RNA, 19 nt, Artificial Sequence
  Description of Artificial Sequence: Synthetic oligonucleotide
  Antisense strand to SEQ ID NO: 862282
aaaucugagaguuauuccc

SEQ ID NO: 862284 - RNA, 19 nt, Artificial Sequence
  Description of Artificial Sequence: Synthetic oligonucleotide
  Sense strand starting at position 2815 of SEQ ID NO: 588400
uggcaauagaguuggcuga

SEQ ID NO: 862285 - RNA, 19 nt, Artificial Sequence
  Description of Artificial Sequence: Synthetic oligonucleotide
  Antisense strand to SEQ ID NO: 862284
ucagccaacucuauugcca

SEQ ID NO: 862286 - RNA, 19 nt, Artificial Sequence
  Description of Artificial Sequence: Synthetic oligonucleotide
  Sense strand starting at position 2816 of SEQ ID NO: 588400
ggcaauagaguuggcugaa

SEQ ID NO: 862287 - RNA, 19 nt, Artificial Sequence
  Description of Artificial Sequence: Synthetic oligonucleotide
  Antisense strand to SEQ ID NO: 862286
uucagccaacucuauugcc

SEQ ID NO: 862288 - RNA, 19 nt, Artificial Sequence
  Description of Artificial Sequence: Synthetic oligonucleotide
  Sense strand starting at position 2817 of SEQ ID NO: 588400
gcaauagaguuggcugaag

SEQ ID NO: 862289 - RNA, 19 nt, Artificial Sequence
  Description of Artificial Sequence: Synthetic oligonucleotide
  Antisense strand to SEQ ID NO: 862288
cuucagccaacucuauugc

SEQ ID NO: 862290 - RNA, 19 nt, Artificial Sequence
  Description of Artificial Sequence: Synthetic oligonucleotide
  Sense strand starting at position 2819 of SEQ ID NO: 588400
aauagaguuggcugaagaa

SEQ ID NO: 862291 - RNA, 19 nt, Artificial Sequence
  Description of Artificial Sequence: Synthetic oligonucleotide
  Antisense strand to SEQ ID NO: 862290
uucuucagccaacucuauu

SEQ ID NO: 862292 - RNA, 19 nt, Artificial Sequence
  Description of Artificial Sequence: Synthetic oligonucleotide
  Sense strand starting at position 2841 of SEQ ID NO: 588400
gccaucugucauggcauuu

SEQ ID NO: 862293 - RNA, 19 nt, Artificial Sequence
  Description of Artificial Sequence: Synthetic oligonucleotide
  Antisense strand to SEQ ID NO: 862292
aaaugccaugacagauggc

SEQ ID NO: 862294 - RNA, 19 nt, Artificial Sequence
  Description of Artificial Sequence: Synthetic oligonucleotide
  Sense strand starting at position 2941 of SEQ ID NO: 588400
aggacauuagcauguucuu

SEQ ID NO: 862295 - RNA, 19 nt, Artificial Sequence
  Description of Artificial Sequence: Synthetic oligonucleotide
  Antisense strand to SEQ ID NO: 862294
aagaacaugcuaauguccu

SEQ ID NO: 862296 - RNA, 19 nt, Artificial Sequence
  Description of Artificial Sequence: Synthetic oligonucleotide
  Sense strand starting at position 3009 of SEQ ID NO: 588400
ucaucuguccuagaacaug

SEQ ID NO: 862297 - RNA, 19 nt, Artificial Sequence
  Description of Artificial Sequence: Synthetic oligonucleotide
  Antisense strand to SEQ ID NO: 862296
cauguucuaggacagauga

SEQ ID NO: 862298 - RNA, 19 nt, Artificial Sequence
  Description of Artificial Sequence: Synthetic oligonucleotide
  Sense strand starting at position 3258 of SEQ ID NO: 588400
ugauuagauugguugcaua

SEQ ID NO: 862299 - RNA, 19 nt, Artificial Sequence
  Description of Artificial Sequence: Synthetic oligonucleotide
  Antisense strand to SEQ ID NO: 862298
uaugcaaccaaucuaauca

SEQ ID NO: 862300 - RNA, 19 nt, Artificial Sequence
  Description of Artificial Sequence: Synthetic oligonucleotide
  Sense strand starting at position 3368 of SEQ ID NO: 588400
ccgugauuggguuagugaa

SEQ ID NO: 862301 - RNA, 19 nt, Artificial Sequence
  Description of Artificial Sequence: Synthetic oligonucleotide
  Antisense strand to SEQ ID NO: 862300
uucacuaacccaaucacgg

SEQ ID NO: 862302 - RNA, 19 nt, Artificial Sequence
  Description of Artificial Sequence: Synthetic oligonucleotide
  Sense strand starting at position 3370 of SEQ ID NO: 588400
gugauuggguuagugaaau

SEQ ID NO: 862303 - RNA, 19 nt, Artificial Sequence
  Description of Artificial Sequence: Synthetic oligonucleotide
  Antisense strand to SEQ ID NO: 862302
auuucacuaacccaaucac

SEQ ID NO: 862304 - RNA, 19 nt, Artificial Sequence
  Description of Artificial Sequence: Synthetic oligonucleotide
  Sense strand starting at position 3376 of SEQ ID NO: 588400
ggguuagugaaaugacaag

SEQ ID NO: 862305 - RNA, 19 nt, Artificial Sequence
  Description of Artificial Sequence: Synthetic oligonucleotide
  Antisense strand to SEQ ID NO: 862304
cuugucauuucacuaaccc

SEQ ID NO: 862306 - RNA, 19 nt, Artificial Sequence
  Description of Artificial Sequence: Synthetic oligonucleotide
  Sense strand starting at position 3520 of SEQ ID NO: 588400
uugguacaacgagguauaa

SEQ ID NO: 862307 - RNA, 19 nt, Artificial Sequence
  Description of Artificial Sequence: Synthetic oligonucleotide
  Antisense strand to SEQ ID NO: 862306
uuauaccucguuguaccaa

SEQ ID NO: 862308 - RNA, 19 nt, Artificial Sequence
  Description of Artificial Sequence: Synthetic oligonucleotide
  Sense strand starting at position 3522 of SEQ ID NO: 588400
gguacaacgagguauaaug

SEQ ID NO: 862309 - RNA, 19 nt, Artificial Sequence
  Description of Artificial Sequence: Synthetic oligonucleotide
  Antisense strand to SEQ ID NO: 862308
cauuauaccucguuguacc

SEQ ID NO: 862310 - RNA, 19 nt, Artificial Sequence
  Description of Artificial Sequence: Synthetic oligonucleotide
  Sense strand starting at position 3587 of SEQ ID NO: 588400
gugauacucaguuauguca

SEQ ID NO: 862311 - RNA, 19 nt, Artificial Sequence
  Description of Artificial Sequence: Synthetic oligonucleotide
  Antisense strand to SEQ ID NO: 862310
ugacauaacugaguaucac

SEQ ID NO: 862312 - RNA, 19 nt, Artificial Sequence
  Description of Artificial Sequence: Synthetic oligonucleotide
  Sense strand starting at position 3780 of SEQ ID NO: 588400
guguaaauaagggauugca

SEQ ID NO: 862313 - RNA, 19 nt, Artificial Sequence
  Description of Artificial Sequence: Synthetic oligonucleotide
  Antisense strand to SEQ ID NO: 862312
ugcaaucccuuauuuacac

SEQ ID NO: 862314 - RNA, 19 nt, Artificial Sequence
  Description of Artificial Sequence: Synthetic oligonucleotide
  Sense strand starting at position 3852 of SEQ ID NO: 588400
uccuaaucuugaguaauug

SEQ ID NO: 862315 - RNA, 19 nt, Artificial Sequence
  Description of Artificial Sequence: Synthetic oligonucleotide
  Antisense strand to SEQ ID NO: 862314
caauuacucaagauuagga

SEQ ID NO: 862316 - RNA, 19 nt, Artificial Sequence
  Description of Artificial Sequence: Synthetic oligonucleotide
  Sense strand starting at position 87 of SEQ ID NO: 588401
gguuaaucucuccaguaag

SEQ ID NO: 862317 - RNA, 19 nt, Artificial Sequence
  Description of Artificial Sequence: Synthetic oligonucleotide
  Antisense strand to SEQ ID NO: 862316
cuuacuggagagauuaacc

SEQ ID NO: 862318 - RNA, 19 nt, Artificial Sequence
  Description of Artificial Sequence: Synthetic oligonucleotide
  Sense strand starting at position 174 of SEQ ID NO: 588401
caacaagacugggugcaau

SEQ ID NO: 862319 - RNA, 19 nt, Artificial Sequence
  Description of Artificial Sequence: Synthetic oligonucleotide
  Antisense strand to SEQ ID NO: 862318
auugcacccagucuuguug

SEQ ID NO: 862320 - RNA, 19 nt, Artificial Sequence
  Description of Artificial Sequence: Synthetic oligonucleotide
  Sense strand starting at position 479 of SEQ ID NO: 588401
aagcaaagguauccagaca

SEQ ID NO: 862321 - RNA, 19 nt, Artificial Sequence
  Description of Artificial Sequence: Synthetic oligonucleotide
  Antisense strand to SEQ ID NO: 862320
ugucuggauaccuuugcuu

SEQ ID NO: 862322 - RNA, 19 nt, Artificial Sequence
  Description of Artificial Sequence: Synthetic oligonucleotide
  Sense strand starting at position 519 of SEQ ID NO: 588401
auguuuguaccaugaggau

SEQ ID NO: 862323 - RNA, 19 nt, Artificial Sequence
  Description of Artificial Sequence: Synthetic oligonucleotide
  Antisense strand to SEQ ID NO: 862322
auccucaugguacaaacau

SEQ ID NO: 862324 - RNA, 19 nt, Artificial Sequence
  Description of Artificial Sequence: Synthetic oligonucleotide
  Sense strand starting at position 531 of SEQ ID NO: 588401
ugaggauauuaucuguucu

SEQ ID NO: 862325 - RNA, 19 nt, Artificial Sequence
  Description of Artificial Sequence: Synthetic oligonucleotide
  Antisense strand to SEQ ID NO: 862324
agaacagauaauauccuca

SEQ ID NO: 862326 - RNA, 19 nt, Artificial Sequence
  Description of Artificial Sequence: Synthetic oligonucleotide
  Sense strand starting at position 581 of SEQ ID NO: 588401
ucauuuagcugagaagaaa

SEQ ID NO: 862327 - RNA, 19 nt, Artificial Sequence
  Description of Artificial Sequence: Synthetic oligonucleotide
  Antisense strand to SEQ ID NO: 862326
uuucuucucagcuaaauga

SEQ ID NO: 862328 - RNA, 19 nt, Artificial Sequence
  Description of Artificial Sequence: Synthetic oligonucleotide
  Sense strand starting at position 675 of SEQ ID NO: 588401
ugagaagaguuagaaauuu

SEQ ID NO: 862329 - RNA, 19 nt, Artificial Sequence
  Description of Artificial Sequence: Synthetic oligonucleotide
  Antisense strand to SEQ ID NO: 862328
aaauuucuaacucuucuca

SEQ ID NO: 862330 - RNA, 19 nt, Artificial Sequence
  Description of Artificial Sequence: Synthetic oligonucleotide
  Sense strand starting at position 684 of SEQ ID NO: 588401
uuagaaauuugugucacgu

SEQ ID NO: 862331 - RNA, 19 nt, Artificial Sequence
  Description of Artificial Sequence: Synthetic oligonucleotide
  Antisense strand to SEQ ID NO: 862330
acgugacacaaauuucuaa

SEQ ID NO: 862332 - RNA, 19 nt, Artificial Sequence
  Description of Artificial Sequence: Synthetic oligonucleotide
  Sense strand starting at position 721 of SEQ ID NO: 588401
uuuggcauuugguuuguua

SEQ ID NO: 862333 - RNA, 19 nt, Artificial Sequence
  Description of Artificial Sequence: Synthetic oligonucleotide
  Antisense strand to SEQ ID NO: 862332
uaacaaaccaaaugccaaa

SEQ ID NO: 862334 - RNA, 19 nt, Artificial Sequence
  Description of Artificial Sequence: Synthetic oligonucleotide
  Sense strand starting at position 723 of SEQ ID NO: 588401
uggcauuugguuuguuaac

SEQ ID NO: 862335 - RNA, 19 nt, Artificial Sequence
  Description of Artificial Sequence: Synthetic oligonucleotide
  Antisense strand to SEQ ID NO: 862334
guuaacaaaccaaaugcca

SEQ ID NO: 862336 - RNA, 19 nt, Artificial Sequence
  Description of Artificial Sequence: Synthetic oligonucleotide
  Sense strand starting at position 724 of SEQ ID NO: 588401
ggcauuugguuuguuaaca

SEQ ID NO: 862337 - RNA, 19 nt, Artificial Sequence
  Description of Artificial Sequence: Synthetic oligonucleotide
  Antisense strand to SEQ ID NO: 862336
uguuaacaaaccaaaugcc

SEQ ID NO: 862338 - RNA, 19 nt, Artificial Sequence
  Description of Artificial Sequence: Synthetic oligonucleotide
  Sense strand starting at position 725 of SEQ ID NO: 588401
gcauuugguuuguuaacac

SEQ ID NO: 862339 - RNA, 19 nt, Artificial Sequence
  Description of Artificial Sequence: Synthetic oligonucleotide
  Antisense strand to SEQ ID NO: 862338
guguuaacaaaccaaaugc

SEQ ID NO: 862340 - RNA, 19 nt, Artificial Sequence
  Description of Artificial Sequence: Synthetic oligonucleotide
  Sense strand starting at position 817 of SEQ ID NO: 588401
guuacuuggcauuaaugau

SEQ ID NO: 862341 - RNA, 19 nt, Artificial Sequence
  Description of Artificial Sequence: Synthetic oligonucleotide
  Antisense strand to SEQ ID NO: 862340
aucauuaaugccaaguaac

SEQ ID NO: 862342 - RNA, 19 nt, Artificial Sequence
  Description of Artificial Sequence: Synthetic oligonucleotide
  Sense strand starting at position 949 of SEQ ID NO: 588401
guuagaaacccuuggaacu

SEQ ID NO: 862343 - RNA, 19 nt, Artificial Sequence
  Description of Artificial Sequence: Synthetic oligonucleotide
  Antisense strand to SEQ ID NO: 862342
aguuccaaggguuucuaac

SEQ ID NO: 862344 - RNA, 19 nt, Artificial Sequence
  Description of Artificial Sequence: Synthetic oligonucleotide
  Sense strand starting at position 1233 of SEQ ID NO: 588401
caggacucccugugagaag

SEQ ID NO: 862345 - RNA, 19 nt, Artificial Sequence
  Description of Artificial Sequence: Synthetic oligonucleotide
  Antisense strand to SEQ ID NO: 862344
cuucucacagggaguccug

SEQ ID NO: 862346 - RNA, 19 nt, Artificial Sequence
  Description of Artificial Sequence: Synthetic oligonucleotide
  Sense strand starting at position 1256 of SEQ ID NO: 588401
ugauaaagaugccuucuac

SEQ ID NO: 862347 - RNA, 19 nt, Artificial Sequence
  Description of Artificial Sequence: Synthetic oligonucleotide
  Antisense strand to SEQ ID NO: 862346
guagaaggcaucuuuauca

SEQ ID NO: 862348 - RNA, 19 nt, Artificial Sequence
  Description of Artificial Sequence: Synthetic oligonucleotide
  Sense strand starting at position 1856 of SEQ ID NO: 588401
agaugagaagcccagcauu

SEQ ID NO: 862349 - RNA, 19 nt, Artificial Sequence
  Description of Artificial Sequence: Synthetic oligonucleotide
  Antisense strand to SEQ ID NO: 862348
aaugcugggcuucucaucu

SEQ ID NO: 862350 - RNA, 19 nt, Artificial Sequence
  Description of Artificial Sequence: Synthetic oligonucleotide
  Sense strand starting at position 2080 of SEQ ID NO: 588401
auauaucacuggccaagaa

SEQ ID NO: 862351 - RNA, 19 nt, Artificial Sequence
  Description of Artificial Sequence: Synthetic oligonucleotide
  Antisense strand to SEQ ID NO: 862350
uucuuggccagugauauau

SEQ ID NO: 862352 - RNA, 19 nt, Artificial Sequence
  Description of Artificial Sequence: Synthetic oligonucleotide
  Sense strand starting at position 2099 of SEQ ID NO: 588401
cuguccucucaacagagau

SEQ ID NO: 862353 - RNA, 19 nt, Artificial Sequence
  Description of Artificial Sequence: Synthetic oligonucleotide
  Antisense strand to SEQ ID NO: 862352
aucucuguugagaggacag

SEQ ID NO: 862354 - RNA, 19 nt, Artificial Sequence
  Description of Artificial Sequence: Synthetic oligonucleotide
  Sense strand starting at position 2600 of SEQ ID NO: 588401
uacucaaagucaucggaga

SEQ ID NO: 862355 - RNA, 19 nt, Artificial Sequence
  Description of Artificial Sequence: Synthetic oligonucleotide
  Antisense strand to SEQ ID NO: 862354
ucuccgaugacuuugagua

SEQ ID NO: 862356 - RNA, 19 nt, Artificial Sequence
  Description of Artificial Sequence: Synthetic oligonucleotide
  Sense strand starting at position 2601 of SEQ ID NO: 588401
acucaaagucaucggagau

SEQ ID NO: 862357 - RNA, 19 nt, Artificial Sequence
  Description of Artificial Sequence: Synthetic oligonucleotide
  Antisense strand to SEQ ID NO: 862356
aucuccgaugacuuugagu

SEQ ID NO: 862358 - RNA, 19 nt, Artificial Sequence
  Description of Artificial Sequence: Synthetic oligonucleotide
  Sense strand starting at position 2602 of SEQ ID NO: 588401
cucaaagucaucggagauu

SEQ ID NO: 862359 - RNA, 19 nt, Artificial Sequence
  Description of Artificial Sequence: Synthetic oligonucleotide
  Antisense strand to SEQ ID NO: 862358
aaucuccgaugacuuugag

SEQ ID NO: 862360 - RNA, 19 nt, Artificial Sequence
  Description of Artificial Sequence: Synthetic oligonucleotide
  Sense strand starting at position 2662 of SEQ ID NO: 588401
agaauaaguaggugaaagu

SEQ ID NO: 862361 - RNA, 19 nt, Artificial Sequence
  Description of Artificial Sequence: Synthetic oligonucleotide
  Antisense strand to SEQ ID NO: 862360
acuuucaccuacuuauucu

SEQ ID NO: 862362 - RNA, 19 nt, Artificial Sequence
  Description of Artificial Sequence: Synthetic oligonucleotide
  Sense strand starting at position 2678 of SEQ ID NO: 588401
aguuaagaaucacuaagcu

SEQ ID NO: 862363 - RNA, 19 nt, Artificial Sequence
  Description of Artificial Sequence: Synthetic oligonucleotide
  Antisense strand to SEQ ID NO: 862362
agcuuagugauucuuaacu

SEQ ID NO: 862364 - RNA, 19 nt, Artificial Sequence
  Description of Artificial Sequence: Synthetic oligonucleotide
  Sense strand starting at position 2693 of SEQ ID NO: 588401
agcucuuuauaagugaaca

SEQ ID NO: 862365 - RNA, 19 nt, Artificial Sequence
  Description of Artificial Sequence: Synthetic oligonucleotide
  Antisense strand to SEQ ID NO: 862364
uguucacuuauaaagagcu

SEQ ID NO: 862366 - RNA, 19 nt, Artificial Sequence
  Description of Artificial Sequence: Synthetic oligonucleotide
  Sense strand starting at position 2760 of SEQ ID NO: 588401
gugugagucauauauuaau

SEQ ID NO: 862367 - RNA, 19 nt, Artificial Sequence
  Description of Artificial Sequence: Synthetic oligonucleotide
  Antisense strand to SEQ ID NO: 862366
auuaauauaugacucacac

SEQ ID NO: 862368 - RNA, 19 nt, Artificial Sequence
  Description of Artificial Sequence: Synthetic oligonucleotide
  Sense strand starting at position 2871 of SEQ ID NO: 588401
ccagguugugaauaucuua

SEQ ID NO: 862369 - RNA, 19 nt, Artificial Sequence
  Description of Artificial Sequence: Synthetic oligonucleotide
  Antisense strand to SEQ ID NO: 862368
uaagauauucacaaccugg

SEQ ID NO: 862370 - RNA, 19 nt, Artificial Sequence
  Description of Artificial Sequence: Synthetic oligonucleotide
  Sense strand starting at position 3013 of SEQ ID NO: 588401
guuuauagauuagucuaga

SEQ ID NO: 862371 - RNA, 19 nt, Artificial Sequence
  Description of Artificial Sequence: Synthetic oligonucleotide
  Antisense strand to SEQ ID NO: 862370
ucuagacuaaucuauaaac

SEQ ID NO: 862372 - RNA, 19 nt, Artificial Sequence
  Description of Artificial Sequence: Synthetic oligonucleotide
  Sense strand starting at position 3101 of SEQ ID NO: 588401
agguuuacagauuagucua

SEQ ID NO: 862373 - RNA, 19 nt, Artificial Sequence
  Description of Artificial Sequence: Synthetic oligonucleotide
  Antisense strand to SEQ ID NO: 862372
uagacuaaucuguaaaccu

SEQ ID NO: 862374 - RNA, 19 nt, Artificial Sequence
  Description of Artificial Sequence: Synthetic oligonucleotide
  Sense strand starting at position 3103 of SEQ ID NO: 588401
guuuacagauuagucuaga

SEQ ID NO: 862375 - RNA, 19 nt, Artificial Sequence
  Description of Artificial Sequence: Synthetic oligonucleotide
  Antisense strand to SEQ ID NO: 862374
ucuagacuaaucuguaaac

SEQ ID NO: 862376 - RNA, 19 nt, Artificial Sequence
  Description of Artificial Sequence: Synthetic oligonucleotide
  Sense strand starting at position 3104 of SEQ ID NO: 588401
uuuacagauuagucuagaa

SEQ ID NO: 862377 - RNA, 19 nt, Artificial Sequence
  Description of Artificial Sequence: Synthetic oligonucleotide
  Antisense strand to SEQ ID NO: 862376
uucuagacuaaucuguaaa

SEQ ID NO: 862378 - RNA, 19 nt, Artificial Sequence
  Description of Artificial Sequence: Synthetic oligonucleotide
  Sense strand starting at position 3270 of SEQ ID NO: 588401
ccuaacugugcugaacaua

SEQ ID NO: 862379 - RNA, 19 nt, Artificial Sequence
  Description of Artificial Sequence: Synthetic oligonucleotide
  Antisense strand to SEQ ID NO: 862378
uauguucagcacaguuagg

SEQ ID NO: 862380 - RNA, 19 nt, Artificial Sequence
  Description of Artificial Sequence: Synthetic oligonucleotide
  Sense strand starting at position 3278 of SEQ ID NO: 588401
ugcugaacauauucugaaa

SEQ ID NO: 862381 - RNA, 19 nt, Artificial Sequence
  Description of Artificial Sequence: Synthetic oligonucleotide
  Antisense strand to SEQ ID NO: 862380
uuucagaauauguucagca

SEQ ID NO: 862382 - RNA, 19 nt, Artificial Sequence
  Description of Artificial Sequence: Synthetic oligonucleotide
  Sense strand starting at position 3300 of SEQ ID NO: 588401
gcaguuaagaguuagauca

SEQ ID NO: 862383 - RNA, 19 nt, Artificial Sequence
  Description of Artificial Sequence: Synthetic oligonucleotide
  Antisense strand to SEQ ID NO: 862382
ugaucuaacucuuaacugc

SEQ ID NO: 862384 - RNA, 19 nt, Artificial Sequence
  Description of Artificial Sequence: Synthetic oligonucleotide
  Sense strand starting at position 3338 of SEQ ID NO: 588401
ugaaguaccuguuuauaca

SEQ ID NO: 862385 - RNA, 19 nt, Artificial Sequence
  Description of Artificial Sequence: Synthetic oligonucleotide
  Antisense strand to SEQ ID NO: 862384
uguauaaacagguacuuca

SEQ ID NO: 862386 - RNA, 19 nt, Artificial Sequence
  Description of Artificial Sequence: Synthetic oligonucleotide
  Sense strand starting at position 3581 of SEQ ID NO: 588401
ccuaguuggagugauaaug

SEQ ID NO: 862387 - RNA, 19 nt, Artificial Sequence
  Description of Artificial Sequence: Synthetic oligonucleotide
  Antisense strand to SEQ ID NO: 862386
cauuaucacuccaacuagg

SEQ ID NO: 862388 - RNA, 19 nt, Artificial Sequence
  Description of Artificial Sequence: Synthetic oligonucleotide
  Sense strand starting at position 3664 of SEQ ID NO: 588401
guugaauugcuguagaaug

SEQ ID NO: 862389 - RNA, 19 nt, Artificial Sequence
  Description of Artificial Sequence: Synthetic oligonucleotide
  Antisense strand to SEQ ID NO: 862388
cauucuacagcaauucaac

SEQ ID NO: 862390 - RNA, 19 nt, Artificial Sequence
  Description of Artificial Sequence: Synthetic oligonucleotide
  Sense strand starting at position 3666 of SEQ ID NO: 588401
ugaauugcuguagaaugua

SEQ ID NO: 862391 - RNA, 19 nt, Artificial Sequence
  Description of Artificial Sequence: Synthetic oligonucleotide
  Antisense strand to SEQ ID NO: 862390
uacauucuacagcaauuca

SEQ ID NO: 862392 - RNA, 19 nt, Artificial Sequence
  Description of Artificial Sequence: Synthetic oligonucleotide
  Sense strand starting at position 3738 of SEQ ID NO: 588401
uaggaaugugccuauuaaa

SEQ ID NO: 862393 - RNA, 19 nt, Artificial Sequence
  Description of Artificial Sequence: Synthetic oligonucleotide
  Antisense strand to SEQ ID NO: 862392
uuuaauaggcacauuccua

SEQ ID NO: 862394 - RNA, 19 nt, Artificial Sequence
  Description of Artificial Sequence: Synthetic oligonucleotide
  Sense strand starting at position 3781 of SEQ ID NO: 588401
guguuaucuauugcaacgu

SEQ ID NO: 862395 - RNA, 19 nt, Artificial Sequence
  Description of Artificial Sequence: Synthetic oligonucleotide
  Antisense strand to SEQ ID NO: 862394
acguugcaauagauaacac

SEQ ID NO: 862396 - RNA, 19 nt, Artificial Sequence
  Description of Artificial Sequence: Synthetic oligonucleotide
  Sense strand starting at position 201 of SEQ ID NO: 588402
cuuagcucagaaugaaauu

SEQ ID NO: 862397 - RNA, 19 nt, Artificial Sequence
  Description of Artificial Sequence: Synthetic oligonucleotide
  Antisense strand to SEQ ID NO: 862396
aauuucauucugagcuaag

SEQ ID NO: 862398 - RNA, 19 nt, Artificial Sequence
  Description of Artificial Sequence: Synthetic oligonucleotide
  Sense strand starting at position 247 of SEQ ID NO: 588402
gccuacuuuccugggagau

SEQ ID NO: 862399 - RNA, 19 nt, Artificial Sequence
  Description of Artificial Sequence: Synthetic oligonucleotide
  Antisense strand to SEQ ID NO: 862398
aucucccaggaaaguaggc

SEQ ID NO: 862400 - RNA, 19 nt, Artificial Sequence
  Description of Artificial Sequence: Synthetic oligonucleotide
  Sense strand starting at position 248 of SEQ ID NO: 588402
ccuacuuuccugggagauc

SEQ ID NO: 862401 - RNA, 19 nt, Artificial Sequence
  Description of Artificial Sequence: Synthetic oligonucleotide
  Antisense strand to SEQ ID NO: 862400
gaucucccaggaaaguagg

SEQ ID NO: 862402 - RNA, 19 nt, Artificial Sequence
  Description of Artificial Sequence: Synthetic oligonucleotide
  Sense strand starting at position 427 of SEQ ID NO: 588402
ugauuccuacucugggaga

SEQ ID NO: 862403 - RNA, 19 nt, Artificial Sequence
  Description of Artificial Sequence: Synthetic oligonucleotide
  Antisense strand to SEQ ID NO: 862402
ucucccagaguaggaauca

SEQ ID NO: 862404 - RNA, 19 nt, Artificial Sequence
  Description of Artificial Sequence: Synthetic oligonucleotide
  Sense strand starting at position 477 of SEQ ID NO: 588402
uggugugcccuguauuaca

SEQ ID NO: 862405 - RNA, 19 nt, Artificial Sequence
  Description of Artificial Sequence: Synthetic oligonucleotide
  Antisense strand to SEQ ID NO: 862404
uguaauacagggcacacca

SEQ ID NO: 862406 - RNA, 19 nt, Artificial Sequence
  Description of Artificial Sequence: Synthetic oligonucleotide
  Sense strand starting at position 875 of SEQ ID NO: 588402
gacagugaauguccaccaa

SEQ ID NO: 862407 - RNA, 19 nt, Artificial Sequence
  Description of Artificial Sequence: Synthetic oligonucleotide
  Antisense strand to SEQ ID NO: 862406
uugguggacauucacuguc

SEQ ID NO: 862408 - RNA, 19 nt, Artificial Sequence
  Description of Artificial Sequence: Synthetic oligonucleotide
  Sense strand starting at position 879 of SEQ ID NO: 588402
gugaauguccaccaagauu

SEQ ID NO: 862409 - RNA, 19 nt, Artificial Sequence
  Description of Artificial Sequence: Synthetic oligonucleotide
  Antisense strand to SEQ ID NO: 862408
aaucuugguggacauucac

SEQ ID NO: 862410 - RNA, 19 nt, Artificial Sequence
  Description of Artificial Sequence: Synthetic oligonucleotide
  Sense strand starting at position 1238 of SEQ ID NO: 588402
gccuucuccacguggaaga

SEQ ID NO: 862411 - RNA, 19 nt, Artificial Sequence
  Description of Artificial Sequence: Synthetic oligonucleotide
  Antisense strand to SEQ ID NO: 862410
ucuuccacguggagaaggc

SEQ ID NO: 862412 - RNA, 19 nt, Artificial Sequence
  Description of Artificial Sequence: Synthetic oligonucleotide
  Sense strand starting at position 1510 of SEQ ID NO: 588402
gccugaggaaucgaaaucu

SEQ ID NO: 862413 - RNA, 19 nt, Artificial Sequence
  Description of Artificial Sequence: Synthetic oligonucleotide
  Antisense strand to SEQ ID NO: 862412
agauuucgauuccucaggc

SEQ ID NO: 862414 - RNA, 19 nt, Artificial Sequence
  Description of Artificial Sequence: Synthetic oligonucleotide
  Sense strand starting at position 1516 of SEQ ID NO: 588402
ggaaucgaaaucuggcuuu

SEQ ID NO: 862415 - RNA, 19 nt, Artificial Sequence
  Description of Artificial Sequence: Synthetic oligonucleotide
  Antisense strand to SEQ ID NO: 862414
aaagccagauuucgauucc

SEQ ID NO: 862416 - RNA, 19 nt, Artificial Sequence
  Description of Artificial Sequence: Synthetic oligonucleotide
  Sense strand starting at position 1519 of SEQ ID NO: 588402
aucgaaaucuggcuuucua

SEQ ID NO: 862417 - RNA, 19 nt, Artificial Sequence
  Description of Artificial Sequence: Synthetic oligonucleotide
  Antisense strand to SEQ ID NO: 862416
uagaaagccagauuucgau

SEQ ID NO: 862418 - RNA, 19 nt, Artificial Sequence
  Description of Artificial Sequence: Synthetic oligonucleotide
  Sense strand starting at position 2416 of SEQ ID NO: 588402
gggauuccgccucgggaaa

SEQ ID NO: 862419 - RNA, 19 nt, Artificial Sequence
  Description of Artificial Sequence: Synthetic oligonucleotide
  Antisense strand to SEQ ID NO: 862418
uuucccgaggcggaauccc

SEQ ID NO: 862420 - RNA, 19 nt, Artificial Sequence
  Description of Artificial Sequence: Synthetic oligonucleotide
  Sense strand starting at position 2482 of SEQ ID NO: 588402
acggcuacaccaggaauau

SEQ ID NO: 862421 - RNA, 19 nt, Artificial Sequence
  Description of Artificial Sequence: Synthetic oligonucleotide
  Antisense strand to SEQ ID NO: 862420
auauuccugguguagccgu

SEQ ID NO: 862422 - RNA, 19 nt, Artificial Sequence
  Description of Artificial Sequence: Synthetic oligonucleotide
  Sense strand starting at position 2491 of SEQ ID NO: 588402
ccaggaauaucgcuaauag

SEQ ID NO: 862423 - RNA, 19 nt, Artificial Sequence
  Description of Artificial Sequence: Synthetic oligonucleotide
  Antisense strand to SEQ ID NO: 862422
cuauuagcgauauuccugg

SEQ ID NO: 862424 - RNA, 19 nt, Artificial Sequence
  Description of Artificial Sequence: Synthetic oligonucleotide
  Sense strand starting at position 2492 of SEQ ID NO: 588402
caggaauaucgcuaauagu

SEQ ID NO: 862425 - RNA, 19 nt, Artificial Sequence
  Description of Artificial Sequence: Synthetic oligonucleotide
  Antisense strand to SEQ ID NO: 862424
acuauuagcgauauuccug

SEQ ID NO: 862426 - RNA, 19 nt, Artificial Sequence
  Description of Artificial Sequence: Synthetic oligonucleotide
  Sense strand starting at position 2518 of SEQ ID NO: 588402
ucugguacucauggagauu

SEQ ID NO: 862427 - RNA, 19 nt, Artificial Sequence
  Description of Artificial Sequence: Synthetic oligonucleotide
  Antisense strand to SEQ ID NO: 862426
aaucuccaugaguaccaga

SEQ ID NO: 862428 - RNA, 19 nt, Artificial Sequence
  Description of Artificial Sequence: Synthetic oligonucleotide
  Sense strand starting at position 2521 of SEQ ID NO: 588402
gguacucauggagauuguu

SEQ ID NO: 862429 - RNA, 19 nt, Artificial Sequence
  Description of Artificial Sequence: Synthetic oligonucleotide
  Antisense strand to SEQ ID NO: 862428
aacaaucuccaugaguacc

SEQ ID NO: 862430 - RNA, 19 nt, Artificial Sequence
  Description of Artificial Sequence: Synthetic oligonucleotide
  Sense strand starting at position 2524 of SEQ ID NO: 588402
acucauggagauuguuuaa

SEQ ID NO: 862431 - RNA, 19 nt, Artificial Sequence
  Description of Artificial Sequence: Synthetic oligonucleotide
  Antisense strand to SEQ ID NO: 862430
uuaaacaaucuccaugagu

SEQ ID NO: 862432 - RNA, 19 nt, Artificial Sequence
  Description of Artificial Sequence: Synthetic oligonucleotide
  Sense strand starting at position 2592 of SEQ ID NO: 588402
aagagccuuccaugugcaa

SEQ ID NO: 862433 - RNA, 19 nt, Artificial Sequence
  Description of Artificial Sequence: Synthetic oligonucleotide
  Antisense strand to SEQ ID NO: 862432
uugcacauggaaggcucuu

SEQ ID NO: 862434 - RNA, 19 nt, Artificial Sequence
  Description of Artificial Sequence: Synthetic oligonucleotide
  Sense strand starting at position 2627 of SEQ ID NO: 588402
cccaacaucuuagugugau

SEQ ID NO: 862435 - RNA, 19 nt, Artificial Sequence
  Description of Artificial Sequence: Synthetic oligonucleotide
  Antisense strand to SEQ ID NO: 862434
aucacacuaagauguuggg

SEQ ID NO: 862436 - RNA, 19 nt, Artificial Sequence
  Description of Artificial Sequence: Synthetic oligonucleotide
  Sense strand starting at position 2633 of SEQ ID NO: 588402
aucuuagugugaucuuuga

SEQ ID NO: 862437 - RNA, 19 nt, Artificial Sequence
  Description of Artificial Sequence: Synthetic oligonucleotide
  Antisense strand to SEQ ID NO: 862436
ucaaagaucacacuaagau

SEQ ID NO: 862438 - RNA, 19 nt, Artificial Sequence
  Description of Artificial Sequence: Synthetic oligonucleotide
  Sense strand starting at position 2637 of SEQ ID NO: 588402
uagugugaucuuugauagc

SEQ ID NO: 862439 - RNA, 19 nt, Artificial Sequence
  Description of Artificial Sequence: Synthetic oligonucleotide
  Antisense strand to SEQ ID NO: 862438
gcuaucaaagaucacacua

SEQ ID NO: 862440 - RNA, 19 nt, Artificial Sequence
  Description of Artificial Sequence: Synthetic oligonucleotide
  Sense strand starting at position 2726 of SEQ ID NO: 588402
ccgguugcucaggaauuaa

SEQ ID NO: 862441 - RNA, 19 nt, Artificial Sequence
  Description of Artificial Sequence: Synthetic oligonucleotide
  Antisense strand to SEQ ID NO: 862440
uuaauuccugagcaaccgg

SEQ ID NO: 862442 - RNA, 19 nt, Artificial Sequence
  Description of Artificial Sequence: Synthetic oligonucleotide
  Sense strand starting at position 2783 of SEQ ID NO: 588402
uaguccaaucucuggguau

SEQ ID NO: 862443 - RNA, 19 nt, Artificial Sequence
  Description of Artificial Sequence: Synthetic oligonucleotide
  Antisense strand to SEQ ID NO: 862442
auacccagagauuggacua

SEQ ID NO: 862444 - RNA, 19 nt, Artificial Sequence
  Description of Artificial Sequence: Synthetic oligonucleotide
  Sense strand starting at position 2785 of SEQ ID NO: 588402
guccaaucucuggguauug

SEQ ID NO: 862445 - RNA, 19 nt, Artificial Sequence
  Description of Artificial Sequence: Synthetic oligonucleotide
  Antisense strand to SEQ ID NO: 862444
caauacccagagauuggac

SEQ ID NO: 862446 - RNA, 19 nt, Artificial Sequence
  Description of Artificial Sequence: Synthetic oligonucleotide
  Sense strand starting at position 2786 of SEQ ID NO: 588402
uccaaucucuggguauuga

SEQ ID NO: 862447 - RNA, 19 nt, Artificial Sequence
  Description of Artificial Sequence: Synthetic oligonucleotide
  Antisense strand to SEQ ID NO: 862446
ucaauacccagagauugga

SEQ ID NO: 862448 - RNA, 19 nt, Artificial Sequence
  Description of Artificial Sequence: Synthetic oligonucleotide
  Sense strand starting at position 2943 of SEQ ID NO: 588402
ggguauggagcuugaaugu

SEQ ID NO: 862449 - RNA, 19 nt, Artificial Sequence
  Description of Artificial Sequence: Synthetic oligonucleotide
  Antisense strand to SEQ ID NO: 862448
acauucaagcuccauaccc

SEQ ID NO: 862450 - RNA, 19 nt, Artificial Sequence
  Description of Artificial Sequence: Synthetic oligonucleotide
  Sense strand starting at position 2953 of SEQ ID NO: 588402
cuugaaugugagcacuaga

SEQ ID NO: 862451 - RNA, 19 nt, Artificial Sequence
  Description of Artificial Sequence: Synthetic oligonucleotide
  Antisense strand to SEQ ID NO: 862450
ucuagugcucacauucaag

SEQ ID NO: 862452 - RNA, 19 nt, Artificial Sequence
  Description of Artificial Sequence: Synthetic oligonucleotide
  Sense strand starting at position 3045 of SEQ ID NO: 588402
aggaacauuuguuagaaga

SEQ ID NO: 862453 - RNA, 19 nt, Artificial Sequence
  Description of Artificial Sequence: Synthetic oligonucleotide
  Antisense strand to SEQ ID NO: 862452
ucuucuaacaaauguuccu

SEQ ID NO: 862454 - RNA, 19 nt, Artificial Sequence
  Description of Artificial Sequence: Synthetic oligonucleotide
  Sense strand starting at position 3047 of SEQ ID NO: 588402
gaacauuuguuagaagagg

SEQ ID NO: 862455 - RNA, 19 nt, Artificial Sequence
  Description of Artificial Sequence: Synthetic oligonucleotide
  Antisense strand to SEQ ID NO: 862454
ccucuucuaacaaauguuc

SEQ ID NO: 862456 - RNA, 19 nt, Artificial Sequence
  Description of Artificial Sequence: Synthetic oligonucleotide
  Sense strand starting at position 3196 of SEQ ID NO: 588402
ggccauauauucucuagga

SEQ ID NO: 862457 - RNA, 19 nt, Artificial Sequence
  Description of Artificial Sequence: Synthetic oligonucleotide
  Antisense strand to SEQ ID NO: 862456
uccuagagaauauauggcc

SEQ ID NO: 862458 - RNA, 19 nt, Artificial Sequence
  Description of Artificial Sequence: Synthetic oligonucleotide
  Sense strand starting at position 3197 of SEQ ID NO: 588402
gccauauauucucuaggac

SEQ ID NO: 862459 - RNA, 19 nt, Artificial Sequence
  Description of Artificial Sequence: Synthetic oligonucleotide
  Antisense strand to SEQ ID NO: 862458
guccuagagaauauauggc

SEQ ID NO: 862460 - RNA, 19 nt, Artificial Sequence
  Description of Artificial Sequence: Synthetic oligonucleotide
  Sense strand starting at position 3242 of SEQ ID NO: 588402
gggaguccgcauugcauuu

SEQ ID NO: 862461 - RNA, 19 nt, Artificial Sequence
  Description of Artificial Sequence: Synthetic oligonucleotide
  Antisense strand to SEQ ID NO: 862460
aaaugcaaugcggacuccc

SEQ ID NO: 862462 - RNA, 19 nt, Artificial Sequence
  Description of Artificial Sequence: Synthetic oligonucleotide
  Sense strand starting at position 3340 of SEQ ID NO: 588402
guaucugcuccuggaaauu

SEQ ID NO: 862463 - RNA, 19 nt, Artificial Sequence
  Description of Artificial Sequence: Synthetic oligonucleotide
  Antisense strand to SEQ ID NO: 862462
aauuuccaggagcagauac

SEQ ID NO: 862464 - RNA, 19 nt, Artificial Sequence
  Description of Artificial Sequence: Synthetic oligonucleotide
  Sense strand starting at position 3366 of SEQ ID NO: 588402
gcaacaauuugucaagaua

SEQ ID NO: 862465 - RNA, 19 nt, Artificial Sequence
  Description of Artificial Sequence: Synthetic oligonucleotide
  Antisense strand to SEQ ID NO: 862464
uaucuugacaaauuguugc

SEQ ID NO: 862466 - RNA, 19 nt, Artificial Sequence
  Description of Artificial Sequence: Synthetic oligonucleotide
  Sense strand starting at position 3418 of SEQ ID NO: 588402
agcugacuauugcuuauga

SEQ ID NO: 862467 - RNA, 19 nt, Artificial Sequence
  Description of Artificial Sequence: Synthetic oligonucleotide
  Antisense strand to SEQ ID NO: 862466
ucauaagcaauagucagcu

SEQ ID NO: 862468 - RNA, 19 nt, Artificial Sequence
  Description of Artificial Sequence: Synthetic oligonucleotide
  Sense strand starting at position 3419 of SEQ ID NO: 588402
gcugacuauugcuuaugaa

SEQ ID NO: 862469 - RNA, 19 nt, Artificial Sequence
  Description of Artificial Sequence: Synthetic oligonucleotide
  Antisense strand to SEQ ID NO: 862468
uucauaagcaauagucagc

SEQ ID NO: 862470 - RNA, 19 nt, Artificial Sequence
  Description of Artificial Sequence: Synthetic oligonucleotide
  Sense strand starting at position 3420 of SEQ ID NO: 588402
cugacuauugcuuaugaau

SEQ ID NO: 862471 - RNA, 19 nt, Artificial Sequence
  Description of Artificial Sequence: Synthetic oligonucleotide
  Antisense strand to SEQ ID NO: 862470
auucauaagcaauagucag

SEQ ID NO: 862472 - RNA, 19 nt, Artificial Sequence
  Description of Artificial Sequence: Synthetic oligonucleotide
  Sense strand starting at position 3505 of SEQ ID NO: 588402
uccugauggagaggucagu

SEQ ID NO: 862473 - RNA, 19 nt, Artificial Sequence
  Description of Artificial Sequence: Synthetic oligonucleotide
  Antisense strand to SEQ ID NO: 862472
acugaccucuccaucagga

SEQ ID NO: 862474 - RNA, 19 nt, Artificial Sequence
  Description of Artificial Sequence: Synthetic oligonucleotide
  Sense strand starting at position 3515 of SEQ ID NO: 588402
gaggucaguauugagggua

SEQ ID NO: 862475 - RNA, 19 nt, Artificial Sequence
  Description of Artificial Sequence: Synthetic oligonucleotide
  Antisense strand to SEQ ID NO: 862474
uacccucaauacugaccuc

SEQ ID NO: 862476 - RNA, 19 nt, Artificial Sequence
  Description of Artificial Sequence: Synthetic oligonucleotide
  Sense strand starting at position 10 of SEQ ID NO: 588403
gcuuuaaagucaguagaua

SEQ ID NO: 862477 - RNA, 19 nt, Artificial Sequence
  Description of Artificial Sequence: Synthetic oligonucleotide
  Antisense strand to SEQ ID NO: 862476
uaucuacugacuuuaaagc

SEQ ID NO: 862478 - RNA, 19 nt, Artificial Sequence
  Description of Artificial Sequence: Synthetic oligonucleotide
  Sense strand starting at position 120 of SEQ ID NO: 588403
agucuuaaucaugagcuuu

SEQ ID NO: 862479 - RNA, 19 nt, Artificial Sequence
  Description of Artificial Sequence: Synthetic oligonucleotide
  Antisense strand to SEQ ID NO: 862478
aaagcucaugauuaagacu

SEQ ID NO: 862480 - RNA, 19 nt, Artificial Sequence
  Description of Artificial Sequence: Synthetic oligonucleotide
  Sense strand starting at position 200 of SEQ ID NO: 588403
ggacccaucuacuuagacu

SEQ ID NO: 862481 - RNA, 19 nt, Artificial Sequence
  Description of Artificial Sequence: Synthetic oligonucleotide
  Antisense strand to SEQ ID NO: 862480
agucuaaguagaugggucc

SEQ ID NO: 862482 - RNA, 19 nt, Artificial Sequence
  Description of Artificial Sequence: Synthetic oligonucleotide
  Sense strand starting at position 209 of SEQ ID NO: 588403
uacuuagacuguucuggga

SEQ ID NO: 862483 - RNA, 19 nt, Artificial Sequence
  Description of Artificial Sequence: Synthetic oligonucleotide
  Antisense strand to SEQ ID NO: 862482
ucccagaacagucuaagua

SEQ ID NO: 862484 - RNA, 19 nt, Artificial Sequence
  Description of Artificial Sequence: Synthetic oligonucleotide
  Sense strand starting at position 213 of SEQ ID NO: 588403
uagacuguucugggacuuu

SEQ ID NO: 862485 - RNA, 19 nt, Artificial Sequence
  Description of Artificial Sequence: Synthetic oligonucleotide
  Antisense strand to SEQ ID NO: 862484
aaagucccagaacagucua

SEQ ID NO: 862486 - RNA, 19 nt, Artificial Sequence
  Description of Artificial Sequence: Synthetic oligonucleotide
  Sense strand starting at position 254 of SEQ ID NO: 588403
ggaauuuccucaucuccgu

SEQ ID NO: 862487 - RNA, 19 nt, Artificial Sequence
  Description of Artificial Sequence: Synthetic oligonucleotide
  Antisense strand to SEQ ID NO: 862486
acggagaugaggaaauucc

SEQ ID NO: 862488 - RNA, 19 nt, Artificial Sequence
  Description of Artificial Sequence: Synthetic oligonucleotide
  Sense strand starting at position 402 of SEQ ID NO: 588403
cuaucaggacucuggaauu

SEQ ID NO: 862489 - RNA, 19 nt, Artificial Sequence
  Description of Artificial Sequence: Synthetic oligonucleotide
  Antisense strand to SEQ ID NO: 862488
aauuccagaguccugauag

SEQ ID NO: 862490 - RNA, 19 nt, Artificial Sequence
  Description of Artificial Sequence: Synthetic oligonucleotide
  Sense strand starting at position 475 of SEQ ID NO: 588403
cagaacuccugucuaggaa

SEQ ID NO: 862491 - RNA, 19 nt, Artificial Sequence
  Description of Artificial Sequence: Synthetic oligonucleotide
  Antisense strand to SEQ ID NO: 862490
uuccuagacaggaguucug

SEQ ID NO: 862492 - RNA, 19 nt, Artificial Sequence
  Description of Artificial Sequence: Synthetic oligonucleotide
  Sense strand starting at position 751 of SEQ ID NO: 588403
aaaggaaucucaguauguu

SEQ ID NO: 862493 - RNA, 19 nt, Artificial Sequence
  Description of Artificial Sequence: Synthetic oligonucleotide
  Antisense strand to SEQ ID NO: 862492
aacauacugagauuccuuu

SEQ ID NO: 862494 - RNA, 19 nt, Artificial Sequence
  Description of Artificial Sequence: Synthetic oligonucleotide
  Sense strand starting at position 752 of SEQ ID NO: 588403
aaggaaucucaguauguuc

SEQ ID NO: 862495 - RNA, 19 nt, Artificial Sequence
  Description of Artificial Sequence: Synthetic oligonucleotide
  Antisense strand to SEQ ID NO: 862494
gaacauacugagauuccuu

SEQ ID NO: 862496 - RNA, 19 nt, Artificial Sequence
  Description of Artificial Sequence: Synthetic oligonucleotide
  Sense strand starting at position 852 of SEQ ID NO: 588403
gagccaaccuuucuaggua

SEQ ID NO: 862497 - RNA, 19 nt, Artificial Sequence
  Description of Artificial Sequence: Synthetic oligonucleotide
  Antisense strand to SEQ ID NO: 862496
uaccuagaaagguuggcuc

SEQ ID NO: 862498 - RNA, 19 nt, Artificial Sequence
  Description of Artificial Sequence: Synthetic oligonucleotide
  Sense strand starting at position 977 of SEQ ID NO: 588403
guugaacuuuaacugugau

SEQ ID NO: 862499 - RNA, 19 nt, Artificial Sequence
  Description of Artificial Sequence: Synthetic oligonucleotide
  Antisense strand to SEQ ID NO: 862498
aucacaguuaaaguucaac

SEQ ID NO: 862500 - RNA, 19 nt, Artificial Sequence
  Description of Artificial Sequence: Synthetic oligonucleotide
  Sense strand starting at position 999 of SEQ ID NO: 588403
cugugagcaguuuagaauu

SEQ ID NO: 862501 - RNA, 19 nt, Artificial Sequence
  Description of Artificial Sequence: Synthetic oligonucleotide
  Antisense strand to SEQ ID NO: 862500
aauucuaaacugcucacag

SEQ ID NO: 862502 - RNA, 19 nt, Artificial Sequence
  Description of Artificial Sequence: Synthetic oligonucleotide
  Sense strand starting at position 1018 of SEQ ID NO: 588403
cggcaauuccaacaucuuu

SEQ ID NO: 862503 - RNA, 19 nt, Artificial Sequence
  Description of Artificial Sequence: Synthetic oligonucleotide
  Antisense strand to SEQ ID NO: 862502
aaagauguuggaauugccg

SEQ ID NO: 862504 - RNA, 19 nt, Artificial Sequence
  Description of Artificial Sequence: Synthetic oligonucleotide
  Sense strand starting at position 1068 of SEQ ID NO: 588403
gugggagguuaacuacaaa

SEQ ID NO: 862505 - RNA, 19 nt, Artificial Sequence
  Description of Artificial Sequence: Synthetic oligonucleotide
  Antisense strand to SEQ ID NO: 862504
uuuguaguuaaccucccac

SEQ ID NO: 862506 - RNA, 19 nt, Artificial Sequence
  Description of Artificial Sequence: Synthetic oligonucleotide
  Sense strand starting at position 1100 of SEQ ID NO: 588403
cgguaaguaaggcaaagau

SEQ ID NO: 862507 - RNA, 19 nt, Artificial Sequence
  Description of Artificial Sequence: Synthetic oligonucleotide
  Antisense strand to SEQ ID NO: 862506
aucuuugccuuacuuaccg

SEQ ID NO: 862508 - RNA, 19 nt, Artificial Sequence
  Description of Artificial Sequence: Synthetic oligonucleotide
  Sense strand starting at position 1110 of SEQ ID NO: 588403
ggcaaagauggugaauguu

SEQ ID NO: 862509 - RNA, 19 nt, Artificial Sequence
  Description of Artificial Sequence: Synthetic oligonucleotide
  Antisense strand to SEQ ID NO: 862508
aacauucaccaucuuugcc

SEQ ID NO: 862510 - RNA, 19 nt, Artificial Sequence
  Description of Artificial Sequence: Synthetic oligonucleotide
  Sense strand starting at position 1280 of SEQ ID NO: 588403
cagaccuaggucugacaga

SEQ ID NO: 862511 - RNA, 19 nt, Artificial Sequence
  Description of Artificial Sequence: Synthetic oligonucleotide
  Antisense strand to SEQ ID NO: 862510
ucugucagaccuaggucug

SEQ ID NO: 862512 - RNA, 19 nt, Artificial Sequence
  Description of Artificial Sequence: Synthetic oligonucleotide
  Sense strand starting at position 1560 of SEQ ID NO: 588403
cugugcuuuggucaggaaa

SEQ ID NO: 862513 - RNA, 19 nt, Artificial Sequence
  Description of Artificial Sequence: Synthetic oligonucleotide
  Antisense strand to SEQ ID NO: 862512
uuuccugaccaaagcacag

SEQ ID NO: 862514 - RNA, 19 nt, Artificial Sequence
  Description of Artificial Sequence: Synthetic oligonucleotide
  Sense strand starting at position 1563 of SEQ ID NO: 588403
ugcuuuggucaggaaagga

SEQ ID NO: 862515 - RNA, 19 nt, Artificial Sequence
  Description of Artificial Sequence: Synthetic oligonucleotide
  Antisense strand to SEQ ID NO: 862514
uccuuuccugaccaaagca

SEQ ID NO: 862516 - RNA, 19 nt, Artificial Sequence
  Description of Artificial Sequence: Synthetic oligonucleotide
  Sense strand starting at position 1617 of SEQ ID NO: 588403
gagaaauguuccucuaagg

SEQ ID NO: 862517 - RNA, 19 nt, Artificial Sequence
  Description of Artificial Sequence: Synthetic oligonucleotide
  Antisense strand to SEQ ID NO: 862516
ccuuagaggaacauuucuc

SEQ ID NO: 862518 - RNA, 19 nt, Artificial Sequence
  Description of Artificial Sequence: Synthetic oligonucleotide
  Sense strand starting at position 1661 of SEQ ID NO: 588403
ugguuugguuucuugaaag

SEQ ID NO: 862519 - RNA, 19 nt, Artificial Sequence
  Description of Artificial Sequence: Synthetic oligonucleotide
  Antisense strand to SEQ ID NO: 862518
cuuucaagaaaccaaacca

SEQ ID NO: 862520 - RNA, 19 nt, Artificial Sequence
  Description of Artificial Sequence: Synthetic oligonucleotide
  Sense strand starting at position 1678 of SEQ ID NO: 588403
aggccauuaaguggaacua

SEQ ID NO: 862521 - RNA, 19 nt, Artificial Sequence
  Description of Artificial Sequence: Synthetic oligonucleotide
  Antisense strand to SEQ ID NO: 862520
uaguuccacuuaauggccu

SEQ ID NO: 862522 - RNA, 19 nt, Artificial Sequence
  Description of Artificial Sequence: Synthetic oligonucleotide
  Sense strand starting at position 1990 of SEQ ID NO: 588403
gcucuagggcuccaaucua

SEQ ID NO: 862523 - RNA, 19 nt, Artificial Sequence
  Description of Artificial Sequence: Synthetic oligonucleotide
  Antisense strand to SEQ ID NO: 862522
uagauuggagcccuagagc

SEQ ID NO: 862524 - RNA, 19 nt, Artificial Sequence
  Description of Artificial Sequence: Synthetic oligonucleotide
  Sense strand starting at position 2010 of SEQ ID NO: 588403
gcucgcugcaguuugaaua

SEQ ID NO: 862525 - RNA, 19 nt, Artificial Sequence
  Description of Artificial Sequence: Synthetic oligonucleotide
  Antisense strand to SEQ ID NO: 862524
uauucaaacugcagcgagc

SEQ ID NO: 862526 - RNA, 19 nt, Artificial Sequence
  Description of Artificial Sequence: Synthetic oligonucleotide
  Sense strand starting at position 2090 of SEQ ID NO: 588403
caguaaauagguugauggu

SEQ ID NO: 862527 - RNA, 19 nt, Artificial Sequence
  Description of Artificial Sequence: Synthetic oligonucleotide
  Antisense strand to SEQ ID NO: 862526
accaucaaccuauuuacug

SEQ ID NO: 862528 - RNA, 19 nt, Artificial Sequence
  Description of Artificial Sequence: Synthetic oligonucleotide
  Sense strand starting at position 2237 of SEQ ID NO: 588403
cccagcuauccuuaggaaa

SEQ ID NO: 862529 - RNA, 19 nt, Artificial Sequence
  Description of Artificial Sequence: Synthetic oligonucleotide
  Antisense strand to SEQ ID NO: 862528
uuuccuaaggauagcuggg

SEQ ID NO: 862530 - RNA, 19 nt, Artificial Sequence
  Description of Artificial Sequence: Synthetic oligonucleotide
  Sense strand starting at position 2748 of SEQ ID NO: 588403
gucaauugagucggacaga

SEQ ID NO: 862531 - RNA, 19 nt, Artificial Sequence
  Description of Artificial Sequence: Synthetic oligonucleotide
  Antisense strand to SEQ ID NO: 862530
ucuguccgacucaauugac

SEQ ID NO: 862532 - RNA, 19 nt, Artificial Sequence
  Description of Artificial Sequence: Synthetic oligonucleotide
  Sense strand starting at position 2813 of SEQ ID NO: 588403
ggaauuaauuaggcuuaug

SEQ ID NO: 862533 - RNA, 19 nt, Artificial Sequence
  Description of Artificial Sequence: Synthetic oligonucleotide
  Antisense strand to SEQ ID NO: 862532
cauaagccuaauuaauucc

SEQ ID NO: 862534 - RNA, 19 nt, Artificial Sequence
  Description of Artificial Sequence: Synthetic oligonucleotide
  Sense strand starting at position 2823 of SEQ ID NO: 588403
aggcuuauggcccagacaa

SEQ ID NO: 862535 - RNA, 19 nt, Artificial Sequence
  Description of Artificial Sequence: Synthetic oligonucleotide
  Antisense strand to SEQ ID NO: 862534
uugucugggccauaagccu

SEQ ID NO: 862536 - RNA, 19 nt, Artificial Sequence
  Description of Artificial Sequence: Synthetic oligonucleotide
  Sense strand starting at position 2825 of SEQ ID NO: 588403
gcuuauggcccagacaagu

SEQ ID NO: 862537 - RNA, 19 nt, Artificial Sequence
  Description of Artificial Sequence: Synthetic oligonucleotide
  Antisense strand to SEQ ID NO: 862536
acuugucugggccauaagc

SEQ ID NO: 862538 - RNA, 19 nt, Artificial Sequence
  Description of Artificial Sequence: Synthetic oligonucleotide
  Sense strand starting at position 2899 of SEQ ID NO: 588403
gucccagauuccucagaau

SEQ ID NO: 862539 - RNA, 19 nt, Artificial Sequence
  Description of Artificial Sequence: Synthetic oligonucleotide
  Antisense strand to SEQ ID NO: 862538
auucugaggaaucugggac

SEQ ID NO: 862540 - RNA, 19 nt, Artificial Sequence
  Description of Artificial Sequence: Synthetic oligonucleotide
  Sense strand starting at position 2948 of SEQ ID NO: 588403
ucccaauagcaggauuagu

SEQ ID NO: 862541 - RNA, 19 nt, Artificial Sequence
  Description of Artificial Sequence: Synthetic oligonucleotide
  Antisense strand to SEQ ID NO: 862540
acuaauccugcuauuggga

SEQ ID NO: 862542 - RNA, 19 nt, Artificial Sequence
  Description of Artificial Sequence: Synthetic oligonucleotide
  Sense strand starting at position 3149 of SEQ ID NO: 588403
gccagcuagccauauaaug

SEQ ID NO: 862543 - RNA, 19 nt, Artificial Sequence
  Description of Artificial Sequence: Synthetic oligonucleotide
  Antisense strand to SEQ ID NO: 862542
cauuauauggcuagcuggc

SEQ ID NO: 862544 - RNA, 19 nt, Artificial Sequence
  Description of Artificial Sequence: Synthetic oligonucleotide
  Sense strand starting at position 3559 of SEQ ID NO: 588403
agagcucaacuaugccaaa

SEQ ID NO: 862545 - RNA, 19 nt, Artificial Sequence
  Description of Artificial Sequence: Synthetic oligonucleotide
  Antisense strand to SEQ ID NO: 862544
uuuggcauaguugagcucu

SEQ ID NO: 862546 - RNA, 19 nt, Artificial Sequence
  Description of Artificial Sequence: Synthetic oligonucleotide
  Sense strand starting at position 3632 of SEQ ID NO: 588403
agaugcuucguagacaauc

SEQ ID NO: 862547 - RNA, 19 nt, Artificial Sequence
  Description of Artificial Sequence: Synthetic oligonucleotide
  Antisense strand to SEQ ID NO: 862546
gauugucuacgaagcaucu

SEQ ID NO: 862548 - RNA, 19 nt, Artificial Sequence
  Description of Artificial Sequence: Synthetic oligonucleotide
  Sense strand starting at position 3640 of SEQ ID NO: 588403
cguagacaaucauuagaug

SEQ ID NO: 862549 - RNA, 19 nt, Artificial Sequence
  Description of Artificial Sequence: Synthetic oligonucleotide
  Antisense strand to SEQ ID NO: 862548
caucuaaugauugucuacg

SEQ ID NO: 862550 - RNA, 19 nt, Artificial Sequence
  Description of Artificial Sequence: Synthetic oligonucleotide
  Sense strand starting at position 3757 of SEQ ID NO: 588403
agggaagugccuggugaga

SEQ ID NO: 862551 - RNA, 19 nt, Artificial Sequence
  Description of Artificial Sequence: Synthetic oligonucleotide
  Antisense strand to SEQ ID NO: 862550
ucucaccaggcacuucccu

SEQ ID NO: 862552 - RNA, 19 nt, Artificial Sequence
  Description of Artificial Sequence: Synthetic oligonucleotide
  Sense strand starting at position 3821 of SEQ ID NO: 588403
ggagaaacuuaagaccaaa

SEQ ID NO: 862553 - RNA, 19 nt, Artificial Sequence
  Description of Artificial Sequence: Synthetic oligonucleotide
  Antisense strand to SEQ ID NO: 862552
uuuggucuuaaguuucucc

SEQ ID NO: 862554 - RNA, 19 nt, Artificial Sequence
  Description of Artificial Sequence: Synthetic oligonucleotide
  Sense strand starting at position 3972 of SEQ ID NO: 588403
gagggaaaugccugaauuc

SEQ ID NO: 862555 - RNA, 19 nt, Artificial Sequence
  Description of Artificial Sequence: Synthetic oligonucleotide
  Antisense strand to SEQ ID NO: 862554
gaauucaggcauuucccuc

SEQ ID NO: 862556 - RNA, 19 nt, Artificial Sequence
  Description of Artificial Sequence: Synthetic oligonucleotide
  Sense strand starting at position 28 of SEQ ID NO: 588404
ggacuaacggaauggguau

SEQ ID NO: 862557 - RNA, 19 nt, Artificial Sequence
  Description of Artificial Sequence: Synthetic oligonucleotide
  Antisense strand to SEQ ID NO: 862556
auacccauuccguuagucc

SEQ ID NO: 862558 - RNA, 19 nt, Artificial Sequence
  Description of Artificial Sequence: Synthetic oligonucleotide
  Sense strand starting at position 67 of SEQ ID NO: 588404
uuugauuaaagcuguggaa

SEQ ID NO: 862559 - RNA, 19 nt, Artificial Sequence
  Description of Artificial Sequence: Synthetic oligonucleotide
  Antisense strand to SEQ ID NO: 862558
uuccacagcuuuaaucaaa

SEQ ID NO: 862560 - RNA, 19 nt, Artificial Sequence
  Description of Artificial Sequence: Synthetic oligonucleotide
  Sense strand starting at position 625 of SEQ ID NO: 588404
cugccauguguuuagaaca

SEQ ID NO: 862561 - RNA, 19 nt, Artificial Sequence
  Description of Artificial Sequence: Synthetic oligonucleotide
  Antisense strand to SEQ ID NO: 862560
uguucuaaacacauggcag

SEQ ID NO: 862562 - RNA, 19 nt, Artificial Sequence
  Description of Artificial Sequence: Synthetic oligonucleotide
  Sense strand starting at position 630 of SEQ ID NO: 588404
auguguuuagaacaggagu

SEQ ID NO: 862563 - RNA, 19 nt, Artificial Sequence
  Description of Artificial Sequence: Synthetic oligonucleotide
  Antisense strand to SEQ ID NO: 862562
acuccuguucuaaacacau

SEQ ID NO: 862564 - RNA, 19 nt, Artificial Sequence
  Description of Artificial Sequence: Synthetic oligonucleotide
  Sense strand starting at position 632 of SEQ ID NO: 588404
guguuuagaacaggaguca

SEQ ID NO: 862565 - RNA, 19 nt, Artificial Sequence
  Description of Artificial Sequence: Synthetic oligonucleotide
  Antisense strand to SEQ ID NO: 862564
ugacuccuguucuaaacac

SEQ ID NO: 862566 - RNA, 19 nt, Artificial Sequence
  Description of Artificial Sequence: Synthetic oligonucleotide
  Sense strand starting at position 711 of SEQ ID NO: 588404
ugaaucauggcccacucau

SEQ ID NO: 862567 - RNA, 19 nt, Artificial Sequence
  Description of Artificial Sequence: Synthetic oligonucleotide
  Antisense strand to SEQ ID NO: 862566
augagugggccaugauuca

SEQ ID NO: 862568 - RNA, 19 nt, Artificial Sequence
  Description of Artificial Sequence: Synthetic oligonucleotide
  Sense strand starting at position 857 of SEQ ID NO: 588404
ggguuauguaagugacaca

SEQ ID NO: 862569 - RNA, 19 nt, Artificial Sequence
  Description of Artificial Sequence: Synthetic oligonucleotide
  Antisense strand to SEQ ID NO: 862568
ugugucacuuacauaaccc

SEQ ID NO: 862570 - RNA, 19 nt, Artificial Sequence
  Description of Artificial Sequence: Synthetic oligonucleotide
  Sense strand starting at position 858 of SEQ ID NO: 588404
gguuauguaagugacacau

SEQ ID NO: 862571 - RNA, 19 nt, Artificial Sequence
  Description of Artificial Sequence: Synthetic oligonucleotide
  Antisense strand to SEQ ID NO: 862570
augugucacuuacauaacc

SEQ ID NO: 862572 - RNA, 19 nt, Artificial Sequence
  Description of Artificial Sequence: Synthetic oligonucleotide
  Sense strand starting at position 911 of SEQ ID NO: 588404
cccaaagaugccuguauaa

SEQ ID NO: 862573 - RNA, 19 nt, Artificial Sequence
  Description of Artificial Sequence: Synthetic oligonucleotide
  Antisense strand to SEQ ID NO: 862572
uuauacaggcaucuuuggg

SEQ ID NO: 862574 - RNA, 19 nt, Artificial Sequence
  Description of Artificial Sequence: Synthetic oligonucleotide
  Sense strand starting at position 944 of SEQ ID NO: 588404
gcaacucuauuagcuagaa

SEQ ID NO: 862575 - RNA, 19 nt, Artificial Sequence
  Description of Artificial Sequence: Synthetic oligonucleotide
  Antisense strand to SEQ ID NO: 862574
uucuagcuaauagaguugc

SEQ ID NO: 862576 - RNA, 19 nt, Artificial Sequence
  Description of Artificial Sequence: Synthetic oligonucleotide
  Sense strand starting at position 948 of SEQ ID NO: 588404
cucuauuagcuagaaugac

SEQ ID NO: 862577 - RNA, 19 nt, Artificial Sequence
  Description of Artificial Sequence: Synthetic oligonucleotide
  Antisense strand to SEQ ID NO: 862576
gucauucuagcuaauagag

SEQ ID NO: 862578 - RNA, 19 nt, Artificial Sequence
  Description of Artificial Sequence: Synthetic oligonucleotide
  Sense strand starting at position 1041 of SEQ ID NO: 588404
gggaaugcgaaaugcuaca

SEQ ID NO: 862579 - RNA, 19 nt, Artificial Sequence
  Description of Artificial Sequence: Synthetic oligonucleotide
  Antisense strand to SEQ ID NO: 862578
uguagcauuucgcauuccc

SEQ ID NO: 862580 - RNA, 19 nt, Artificial Sequence
  Description of Artificial Sequence: Synthetic oligonucleotide
  Sense strand starting at position 1132 of SEQ ID NO: 588404
gguguuugguauuuaccca

SEQ ID NO: 862581 - RNA, 19 nt, Artificial Sequence
  Description of Artificial Sequence: Synthetic oligonucleotide
  Antisense strand to SEQ ID NO: 862580
uggguaaauaccaaacacc

SEQ ID NO: 862582 - RNA, 19 nt, Artificial Sequence
  Description of Artificial Sequence: Synthetic oligonucleotide
  Sense strand starting at position 1418 of SEQ ID NO: 588404
ugacauucuggguaaggca

SEQ ID NO: 862583 - RNA, 19 nt, Artificial Sequence
  Description of Artificial Sequence: Synthetic oligonucleotide
  Antisense strand to SEQ ID NO: 862582
ugccuuacccagaauguca

SEQ ID NO: 862584 - RNA, 19 nt, Artificial Sequence
  Description of Artificial Sequence: Synthetic oligonucleotide
  Sense strand starting at position 1542 of SEQ ID NO: 588404
uugguauugcaauggaaug

SEQ ID NO: 862585 - RNA, 19 nt, Artificial Sequence
  Description of Artificial Sequence: Synthetic oligonucleotide
  Antisense strand to SEQ ID NO: 862584
cauuccauugcaauaccaa

SEQ ID NO: 862586 - RNA, 19 nt, Artificial Sequence
  Description of Artificial Sequence: Synthetic oligonucleotide
  Sense strand starting at position 1543 of SEQ ID NO: 588404
ugguauugcaauggaauga

SEQ ID NO: 862587 - RNA, 19 nt, Artificial Sequence
  Description of Artificial Sequence: Synthetic oligonucleotide
  Antisense strand to SEQ ID NO: 862586
ucauuccauugcaauacca

SEQ ID NO: 862588 - RNA, 19 nt, Artificial Sequence
  Description of Artificial Sequence: Synthetic oligonucleotide
  Sense strand starting at position 1547 of SEQ ID NO: 588404
auugcaauggaaugauacu

SEQ ID NO: 862589 - RNA, 19 nt, Artificial Sequence
  Description of Artificial Sequence: Synthetic oligonucleotide
  Antisense strand to SEQ ID NO: 862588
aguaucauuccauugcaau

SEQ ID NO: 862590 - RNA, 19 nt, Artificial Sequence
  Description of Artificial Sequence: Synthetic oligonucleotide
  Sense strand starting at position 1620 of SEQ ID NO: 588404
aucaacuaugagugauuau

SEQ ID NO: 862591 - RNA, 19 nt, Artificial Sequence
  Description of Artificial Sequence: Synthetic oligonucleotide
  Antisense strand to SEQ ID NO: 862590
auaaucacucauaguugau

SEQ ID NO: 862592 - RNA, 19 nt, Artificial Sequence
  Description of Artificial Sequence: Synthetic oligonucleotide
  Sense strand starting at position 1686 of SEQ ID NO: 588404
gaaggauauugauaaugag

SEQ ID NO: 862593 - RNA, 19 nt, Artificial Sequence
  Description of Artificial Sequence: Synthetic oligonucleotide
  Antisense strand to SEQ ID NO: 862592
cucauuaucaauauccuuc

SEQ ID NO: 862594 - RNA, 19 nt, Artificial Sequence
  Description of Artificial Sequence: Synthetic oligonucleotide
  Sense strand starting at position 1735 of SEQ ID NO: 588404
agaggaaaucucugugccu

SEQ ID NO: 862595 - RNA, 19 nt, Artificial Sequence
  Description of Artificial Sequence: Synthetic oligonucleotide
  Antisense strand to SEQ ID NO: 862594
aggcacagagauuuccucu

SEQ ID NO: 862596 - RNA, 19 nt, Artificial Sequence
  Description of Artificial Sequence: Synthetic oligonucleotide
  Sense strand starting at position 1825 of SEQ ID NO: 588404
ucuauuagucaaugaguug

SEQ ID NO: 862597 - RNA, 19 nt, Artificial Sequence
  Description of Artificial Sequence: Synthetic oligonucleotide
  Antisense strand to SEQ ID NO: 862596
caacucauugacuaauaga

SEQ ID NO: 862598 - RNA, 19 nt, Artificial Sequence
  Description of Artificial Sequence: Synthetic oligonucleotide
  Sense strand starting at position 1826 of SEQ ID NO: 588404
cuauuagucaaugaguugu

SEQ ID NO: 862599 - RNA, 19 nt, Artificial Sequence
  Description of Artificial Sequence: Synthetic oligonucleotide
  Antisense strand to SEQ ID NO: 862598
acaacucauugacuaauag

SEQ ID NO: 862600 - RNA, 19 nt, Artificial Sequence
  Description of Artificial Sequence: Synthetic oligonucleotide
  Sense strand starting at position 1828 of SEQ ID NO: 588404
auuagucaaugaguuguga

SEQ ID NO: 862601 - RNA, 19 nt, Artificial Sequence
  Description of Artificial Sequence: Synthetic oligonucleotide
  Antisense strand to SEQ ID NO: 862600
ucacaacucauugacuaau

SEQ ID NO: 862602 - RNA, 19 nt, Artificial Sequence
  Description of Artificial Sequence: Synthetic oligonucleotide
  Sense strand starting at position 1917 of SEQ ID NO: 588404
ccuugauccuggguaagau

SEQ ID NO: 862603 - RNA, 19 nt, Artificial Sequence
  Description of Artificial Sequence: Synthetic oligonucleotide
  Antisense strand to SEQ ID NO: 862602
aucuuacccaggaucaagg

SEQ ID NO: 862604 - RNA, 19 nt, Artificial Sequence
  Description of Artificial Sequence: Synthetic oligonucleotide
  Sense strand starting at position 1956 of SEQ ID NO: 588404
gagaguuguaagcagaagu

SEQ ID NO: 862605 - RNA, 19 nt, Artificial Sequence
  Description of Artificial Sequence: Synthetic oligonucleotide
  Antisense strand to SEQ ID NO: 862604
acuucugcuuacaacucuc

SEQ ID NO: 862606 - RNA, 19 nt, Artificial Sequence
  Description of Artificial Sequence: Synthetic oligonucleotide
  Sense strand starting at position 1990 of SEQ ID NO: 588404
cgaaaugaagcaugaccuu

SEQ ID NO: 862607 - RNA, 19 nt, Artificial Sequence
  Description of Artificial Sequence: Synthetic oligonucleotide
  Antisense strand to SEQ ID NO: 862606
aaggucaugcuucauuucg

SEQ ID NO: 862608 - RNA, 19 nt, Artificial Sequence
  Description of Artificial Sequence: Synthetic oligonucleotide
  Sense strand starting at position 2053 of SEQ ID NO: 588404
uucugacuucccugaguga

SEQ ID NO: 862609 - RNA, 19 nt, Artificial Sequence
  Description of Artificial Sequence: Synthetic oligonucleotide
  Antisense strand to SEQ ID NO: 862608
ucacucagggaagucagaa

SEQ ID NO: 862610 - RNA, 19 nt, Artificial Sequence
  Description of Artificial Sequence: Synthetic oligonucleotide
  Sense strand starting at position 2056 of SEQ ID NO: 588404
ugacuucccugagugacaa

SEQ ID NO: 862611 - RNA, 19 nt, Artificial Sequence
  Description of Artificial Sequence: Synthetic oligonucleotide
  Antisense strand to SEQ ID NO: 862610
uugucacucagggaaguca

SEQ ID NO: 862612 - RNA, 19 nt, Artificial Sequence
  Description of Artificial Sequence: Synthetic oligonucleotide
  Sense strand starting at position 2057 of SEQ ID NO: 588404
gacuucccugagugacaau

SEQ ID NO: 862613 - RNA, 19 nt, Artificial Sequence
  Description of Artificial Sequence: Synthetic oligonucleotide
  Antisense strand to SEQ ID NO: 862612
auugucacucagggaaguc

SEQ ID NO: 862614 - RNA, 19 nt, Artificial Sequence
  Description of Artificial Sequence: Synthetic oligonucleotide
  Sense strand starting at position 2632 of SEQ ID NO: 588404
cugggagaagguugugaaa

SEQ ID NO: 862615 - RNA, 19 nt, Artificial Sequence
  Description of Artificial Sequence: Synthetic oligonucleotide
  Antisense strand to SEQ ID NO: 862614
uuucacaaccuucucccag

SEQ ID NO: 862616 - RNA, 19 nt, Artificial Sequence
  Description of Artificial Sequence: Synthetic oligonucleotide
  Sense strand starting at position 2937 of SEQ ID NO: 588404
acaggucuucuccauccau

SEQ ID NO: 862617 - RNA, 19 nt, Artificial Sequence
  Description of Artificial Sequence: Synthetic oligonucleotide
  Antisense strand to SEQ ID NO: 862616
auggauggagaagaccugu

SEQ ID NO: 862618 - RNA, 19 nt, Artificial Sequence
  Description of Artificial Sequence: Synthetic oligonucleotide
  Sense strand starting at position 3033 of SEQ ID NO: 588404
ucuugaccuguguaugaag

SEQ ID NO: 862619 - RNA, 19 nt, Artificial Sequence
  Description of Artificial Sequence: Synthetic oligonucleotide
  Antisense strand to SEQ ID NO: 862618
cuucauacacaggucaaga

SEQ ID NO: 862620 - RNA, 19 nt, Artificial Sequence
  Description of Artificial Sequence: Synthetic oligonucleotide
  Sense strand starting at position 3273 of SEQ ID NO: 588404
gugauaugauuccugacag

SEQ ID NO: 862621 - RNA, 19 nt, Artificial Sequence
  Description of Artificial Sequence: Synthetic oligonucleotide
  Antisense strand to SEQ ID NO: 862620
cugucaggaaucauaucac

SEQ ID NO: 862622 - RNA, 19 nt, Artificial Sequence
  Description of Artificial Sequence: Synthetic oligonucleotide
  Sense strand starting at position 3360 of SEQ ID NO: 588404
ccacaugugccauagaaug

SEQ ID NO: 862623 - RNA, 19 nt, Artificial Sequence
  Description of Artificial Sequence: Synthetic oligonucleotide
  Antisense strand to SEQ ID NO: 862622
cauucuauggcacaugugg

SEQ ID NO: 862624 - RNA, 19 nt, Artificial Sequence
  Description of Artificial Sequence: Synthetic oligonucleotide
  Sense strand starting at position 3378 of SEQ ID NO: 588404
ggcagcuuugaucaaacca

SEQ ID NO: 862625 - RNA, 19 nt, Artificial Sequence
  Description of Artificial Sequence: Synthetic oligonucleotide
  Antisense strand to SEQ ID NO: 862624
ugguuugaucaaagcugcc

SEQ ID NO: 862626 - RNA, 19 nt, Artificial Sequence
  Description of Artificial Sequence: Synthetic oligonucleotide
  Sense strand starting at position 3407 of SEQ ID NO: 588404
uuccaagauuuauaaagug

SEQ ID NO: 862627 - RNA, 19 nt, Artificial Sequence
  Description of Artificial Sequence: Synthetic oligonucleotide
  Antisense strand to SEQ ID NO: 862626
cacuuuauaaaucuuggaa

SEQ ID NO: 862628 - RNA, 19 nt, Artificial Sequence
  Description of Artificial Sequence: Synthetic oligonucleotide
  Sense strand starting at position 3545 of SEQ ID NO: 588404
uuggaaucuucugugauuc

SEQ ID NO: 862629 - RNA, 19 nt, Artificial Sequence
  Description of Artificial Sequence: Synthetic oligonucleotide
  Antisense strand to SEQ ID NO: 862628
gaaucacagaagauuccaa

SEQ ID NO: 862630 - RNA, 19 nt, Artificial Sequence
  Description of Artificial Sequence: Synthetic oligonucleotide
  Sense strand starting at position 3741 of SEQ ID NO: 588404
cauggugaucaccgugaaa

SEQ ID NO: 862631 - RNA, 19 nt, Artificial Sequence
  Description of Artificial Sequence: Synthetic oligonucleotide
  Antisense strand to SEQ ID NO: 862630
uuucacggugaucaccaug

SEQ ID NO: 862632 - RNA, 19 nt, Artificial Sequence
  Description of Artificial Sequence: Synthetic oligonucleotide
  Sense strand starting at position 3743 of SEQ ID NO: 588404
uggugaucaccgugaaaca

SEQ ID NO: 862633 - RNA, 19 nt, Artificial Sequence
  Description of Artificial Sequence: Synthetic oligonucleotide
  Antisense strand to SEQ ID NO: 862632
uguuucacggugaucacca

SEQ ID NO: 862634 - RNA, 19 nt, Artificial Sequence
  Description of Artificial Sequence: Synthetic oligonucleotide
  Sense strand starting at position 3744 of SEQ ID NO: 588404
ggugaucaccgugaaacac

SEQ ID NO: 862635 - RNA, 19 nt, Artificial Sequence
  Description of Artificial Sequence: Synthetic oligonucleotide
  Antisense strand to SEQ ID NO: 862634
guguuucacggugaucacc

SEQ ID NO: 862636 - RNA, 19 nt, Artificial Sequence
  Description of Artificial Sequence: Synthetic oligonucleotide
  Sense strand starting at position 304 of SEQ ID NO: 588405
auaggcaguucugcaaaga

SEQ ID NO: 862637 - RNA, 19 nt, Artificial Sequence
  Description of Artificial Sequence: Synthetic oligonucleotide
  Antisense strand to SEQ ID NO: 862636
ucuuugcagaacugccuau

SEQ ID NO: 862638 - RNA, 19 nt, Artificial Sequence
  Description of Artificial Sequence: Synthetic oligonucleotide
  Sense strand starting at position 305 of SEQ ID NO: 588405
uaggcaguucugcaaagaa

SEQ ID NO: 862639 - RNA, 19 nt, Artificial Sequence
  Description of Artificial Sequence: Synthetic oligonucleotide
  Antisense strand to SEQ ID NO: 862638
uucuuugcagaacugccua

SEQ ID NO: 862640 - RNA, 19 nt, Artificial Sequence
  Description of Artificial Sequence: Synthetic oligonucleotide
  Sense strand starting at position 444 of SEQ ID NO: 588405
uggccauaucagggugagu

SEQ ID NO: 862641 - RNA, 19 nt, Artificial Sequence
  Description of Artificial Sequence: Synthetic oligonucleotide
  Antisense strand to SEQ ID NO: 862640
acucacccugauauggcca

SEQ ID NO: 862642 - RNA, 19 nt, Artificial Sequence
  Description of Artificial Sequence: Synthetic oligonucleotide
  Sense strand starting at position 446 of SEQ ID NO: 588405
gccauaucagggugaguga

SEQ ID NO: 862643 - RNA, 19 nt, Artificial Sequence
  Description of Artificial Sequence: Synthetic oligonucleotide
  Antisense strand to SEQ ID NO: 862642
ucacucacccugauauggc

SEQ ID NO: 862644 - RNA, 19 nt, Artificial Sequence
  Description of Artificial Sequence: Synthetic oligonucleotide
  Sense strand starting at position 447 of SEQ ID NO: 588405
ccauaucagggugagugau

SEQ ID NO: 862645 - RNA, 19 nt, Artificial Sequence
  Description of Artificial Sequence: Synthetic oligonucleotide
  Antisense strand to SEQ ID NO: 862644
aucacucacccugauaugg

SEQ ID NO: 862646 - RNA, 19 nt, Artificial Sequence
  Description of Artificial Sequence: Synthetic oligonucleotide
  Sense strand starting at position 449 of SEQ ID NO: 588405
auaucagggugagugauua

SEQ ID NO: 862647 - RNA, 19 nt, Artificial Sequence
  Description of Artificial Sequence: Synthetic oligonucleotide
  Antisense strand to SEQ ID NO: 862646
uaaucacucacccugauau

SEQ ID NO: 862648 - RNA, 19 nt, Artificial Sequence
  Description of Artificial Sequence: Synthetic oligonucleotide
  Sense strand starting at position 487 of SEQ ID NO: 588405
ucauacucaccuuguuaga

SEQ ID NO: 862649 - RNA, 19 nt, Artificial Sequence
  Description of Artificial Sequence: Synthetic oligonucleotide
  Antisense strand to SEQ ID NO: 862648
ucuaacaaggugaguauga

SEQ ID NO: 862650 - RNA, 19 nt, Artificial Sequence
  Description of Artificial Sequence: Synthetic oligonucleotide
  Sense strand starting at position 600 of SEQ ID NO: 588405
gagaaaugccucuguauac

SEQ ID NO: 862651 - RNA, 19 nt, Artificial Sequence
  Description of Artificial Sequence: Synthetic oligonucleotide
  Antisense strand to SEQ ID NO: 862650
guauacagaggcauuucuc

SEQ ID NO: 862652 - RNA, 19 nt, Artificial Sequence
  Description of Artificial Sequence: Synthetic oligonucleotide
  Sense strand starting at position 1028 of SEQ ID NO: 588405
cacacaugugcaugagaua

SEQ ID NO: 862653 - RNA, 19 nt, Artificial Sequence
  Description of Artificial Sequence: Synthetic oligonucleotide
  Antisense strand to SEQ ID NO: 862652
uaucucaugcacaugugug

SEQ ID NO: 862654 - RNA, 19 nt, Artificial Sequence
  Description of Artificial Sequence: Synthetic oligonucleotide
  Sense strand starting at position 1029 of SEQ ID NO: 588405
acacaugugcaugagauau

SEQ ID NO: 862655 - RNA, 19 nt, Artificial Sequence
  Description of Artificial Sequence: Synthetic oligonucleotide
  Antisense strand to SEQ ID NO: 862654
auaucucaugcacaugugu

SEQ ID NO: 862656 - RNA, 19 nt, Artificial Sequence
  Description of Artificial Sequence: Synthetic oligonucleotide
  Sense strand starting at position 1035 of SEQ ID NO: 588405
gugcaugagauauagccaa

SEQ ID NO: 862657 - RNA, 19 nt, Artificial Sequence
  Description of Artificial Sequence: Synthetic oligonucleotide
  Antisense strand to SEQ ID NO: 862656
uuggcuauaucucaugcac

SEQ ID NO: 862658 - RNA, 19 nt, Artificial Sequence
  Description of Artificial Sequence: Synthetic oligonucleotide
  Sense strand starting at position 1230 of SEQ ID NO: 588405
ggcagaaggucaguuccaa

SEQ ID NO: 862659 - RNA, 19 nt, Artificial Sequence
  Description of Artificial Sequence: Synthetic oligonucleotide
  Antisense strand to SEQ ID NO: 862658
uuggaacugaccuucugcc

SEQ ID NO: 862660 - RNA, 19 nt, Artificial Sequence
  Description of Artificial Sequence: Synthetic oligonucleotide
  Sense strand starting at position 1271 of SEQ ID NO: 588405
aaagcucugccuugaggau

SEQ ID NO: 862661 - RNA, 19 nt, Artificial Sequence
  Description of Artificial Sequence: Synthetic oligonucleotide
  Antisense strand to SEQ ID NO: 862660
auccucaaggcagagcuuu

SEQ ID NO: 862662 - RNA, 19 nt, Artificial Sequence
  Description of Artificial Sequence: Synthetic oligonucleotide
  Sense strand starting at position 1272 of SEQ ID NO: 588405
aagcucugccuugaggaua

SEQ ID NO: 862663 - RNA, 19 nt, Artificial Sequence
  Description of Artificial Sequence: Synthetic oligonucleotide
  Antisense strand to SEQ ID NO: 862662
uauccucaaggcagagcuu

SEQ ID NO: 862664 - RNA, 19 nt, Artificial Sequence
  Description of Artificial Sequence: Synthetic oligonucleotide
  Sense strand starting at position 1477 of SEQ ID NO: 588405
ggguguaauuuguauuuau

SEQ ID NO: 862665 - RNA, 19 nt, Artificial Sequence
  Description of Artificial Sequence: Synthetic oligonucleotide
  Antisense strand to SEQ ID NO: 862664
auaaauacaaauuacaccc

SEQ ID NO: 862666 - RNA, 19 nt, Artificial Sequence
  Description of Artificial Sequence: Synthetic oligonucleotide
  Sense strand starting at position 1812 of SEQ ID NO: 588405
ggcuucgucgagucuggau

SEQ ID NO: 862667 - RNA, 19 nt, Artificial Sequence
  Description of Artificial Sequence: Synthetic oligonucleotide
  Antisense strand to SEQ ID NO: 862666
auccagacucgacgaagcc

SEQ ID NO: 862668 - RNA, 19 nt, Artificial Sequence
  Description of Artificial Sequence: Synthetic oligonucleotide
  Sense strand starting at position 1817 of SEQ ID NO: 588405
cgucgagucuggaucuuga

SEQ ID NO: 862669 - RNA, 19 nt, Artificial Sequence
  Description of Artificial Sequence: Synthetic oligonucleotide
  Antisense strand to SEQ ID NO: 862668
ucaagauccagacucgacg

SEQ ID NO: 862670 - RNA, 19 nt, Artificial Sequence
  Description of Artificial Sequence: Synthetic oligonucleotide
  Sense strand starting at position 1825 of SEQ ID NO: 588405
cuggaucuugaccaagcau

SEQ ID NO: 862671 - RNA, 19 nt, Artificial Sequence
  Description of Artificial Sequence: Synthetic oligonucleotide
  Antisense strand to SEQ ID NO: 862670
augcuuggucaagauccag

SEQ ID NO: 862672 - RNA, 19 nt, Artificial Sequence
  Description of Artificial Sequence: Synthetic oligonucleotide
  Sense strand starting at position 2076 of SEQ ID NO: 588405
augaaagauuaugcaucau

SEQ ID NO: 862673 - RNA, 19 nt, Artificial Sequence
  Description of Artificial Sequence: Synthetic oligonucleotide
  Antisense strand to SEQ ID NO: 862672
augaugcauaaucuuucau

SEQ ID NO: 862674 - RNA, 19 nt, Artificial Sequence
  Description of Artificial Sequence: Synthetic oligonucleotide
  Sense strand starting at position 2278 of SEQ ID NO: 588405
aguacuguccaguaagauu

SEQ ID NO: 862675 - RNA, 19 nt, Artificial Sequence
  Description of Artificial Sequence: Synthetic oligonucleotide
  Antisense strand to SEQ ID NO: 862674
aaucuuacuggacaguacu

SEQ ID NO: 862676 - RNA, 19 nt, Artificial Sequence
  Description of Artificial Sequence: Synthetic oligonucleotide
  Sense strand starting at position 2486 of SEQ ID NO: 588405
ggacgaagccuuuggaauu

SEQ ID NO: 862677 - RNA, 19 nt, Artificial Sequence
  Description of Artificial Sequence: Synthetic oligonucleotide
  Antisense strand to SEQ ID NO: 862676
aauuccaaaggcuucgucc

SEQ ID NO: 862678 - RNA, 19 nt, Artificial Sequence
  Description of Artificial Sequence: Synthetic oligonucleotide
  Sense strand starting at position 2732 of SEQ ID NO: 588405
gaaguuaguaaguggcaaa

SEQ ID NO: 862679 - RNA, 19 nt, Artificial Sequence
  Description of Artificial Sequence: Synthetic oligonucleotide
  Antisense strand to SEQ ID NO: 862678
uuugccacuuacuaacuuc

SEQ ID NO: 862680 - RNA, 19 nt, Artificial Sequence
  Description of Artificial Sequence: Synthetic oligonucleotide
  Sense strand starting at position 2776 of SEQ ID NO: 588405
auuaauaucggcugacuaa

SEQ ID NO: 862681 - RNA, 19 nt, Artificial Sequence
  Description of Artificial Sequence: Synthetic oligonucleotide
  Antisense strand to SEQ ID NO: 862680
uuagucagccgauauuaau

SEQ ID NO: 862682 - RNA, 19 nt, Artificial Sequence
  Description of Artificial Sequence: Synthetic oligonucleotide
  Sense strand starting at position 2777 of SEQ ID NO: 588405
uuaauaucggcugacuaaa

SEQ ID NO: 862683 - RNA, 19 nt, Artificial Sequence
  Description of Artificial Sequence: Synthetic oligonucleotide
  Antisense strand to SEQ ID NO: 862682
uuuagucagccgauauuaa

SEQ ID NO: 862684 - RNA, 19 nt, Artificial Sequence
  Description of Artificial Sequence: Synthetic oligonucleotide
  Sense strand starting at position 2788 of SEQ ID NO: 588405
ugacuaaaguuaguguucu

SEQ ID NO: 862685 - RNA, 19 nt, Artificial Sequence
  Description of Artificial Sequence: Synthetic oligonucleotide
  Antisense strand to SEQ ID NO: 862684
agaacacuaacuuuaguca

SEQ ID NO: 862686 - RNA, 19 nt, Artificial Sequence
  Description of Artificial Sequence: Synthetic oligonucleotide
  Sense strand starting at position 2983 of SEQ ID NO: 588405
auugaaauuccauguuguu

SEQ ID NO: 862687 - RNA, 19 nt, Artificial Sequence
  Description of Artificial Sequence: Synthetic oligonucleotide
  Antisense strand to SEQ ID NO: 862686
aacaacauggaauuucaau

SEQ ID NO: 862688 - RNA, 19 nt, Artificial Sequence
  Description of Artificial Sequence: Synthetic oligonucleotide
  Sense strand starting at position 2996 of SEQ ID NO: 588405
guuguuaugcaucaauaua

SEQ ID NO: 862689 - RNA, 19 nt, Artificial Sequence
  Description of Artificial Sequence: Synthetic oligonucleotide
  Antisense strand to SEQ ID NO: 862688
uauauugaugcauaacaac

SEQ ID NO: 862690 - RNA, 19 nt, Artificial Sequence
  Description of Artificial Sequence: Synthetic oligonucleotide
  Sense strand starting at position 3071 of SEQ ID NO: 588405
ugugguauucuuugaacca

SEQ ID NO: 862691 - RNA, 19 nt, Artificial Sequence
  Description of Artificial Sequence: Synthetic oligonucleotide
  Antisense strand to SEQ ID NO: 862690
ugguucaaagaauaccaca

SEQ ID NO: 862692 - RNA, 19 nt, Artificial Sequence
  Description of Artificial Sequence: Synthetic oligonucleotide
  Sense strand starting at position 3230 of SEQ ID NO: 588405
ugguuaaauacaugugaug

SEQ ID NO: 862693 - RNA, 19 nt, Artificial Sequence
  Description of Artificial Sequence: Synthetic oligonucleotide
  Antisense strand to SEQ ID NO: 862692
caucacauguauuuaacca

SEQ ID NO: 862694 - RNA, 19 nt, Artificial Sequence
  Description of Artificial Sequence: Synthetic oligonucleotide
  Sense strand starting at position 3280 of SEQ ID NO: 588405
agaagaauuuaaugaugug

SEQ ID NO: 862695 - RNA, 19 nt, Artificial Sequence
  Description of Artificial Sequence: Synthetic oligonucleotide
  Antisense strand to SEQ ID NO: 862694
cacaucauuaaauucuucu

SEQ ID NO: 862696 - RNA, 19 nt, Artificial Sequence
  Description of Artificial Sequence: Synthetic oligonucleotide
  Sense strand starting at position 3283 of SEQ ID NO: 588405
agaauuuaaugaugugaga

SEQ ID NO: 862697 - RNA, 19 nt, Artificial Sequence
  Description of Artificial Sequence: Synthetic oligonucleotide
  Antisense strand to SEQ ID NO: 862696
ucucacaucauuaaauucu

SEQ ID NO: 862698 - RNA, 19 nt, Artificial Sequence
  Description of Artificial Sequence: Synthetic oligonucleotide
  Sense strand starting at position 3352 of SEQ ID NO: 588405
uguggcaucgacuauguaa

SEQ ID NO: 862699 - RNA, 19 nt, Artificial Sequence
  Description of Artificial Sequence: Synthetic oligonucleotide
  Antisense strand to SEQ ID NO: 862698
uuacauagucgaugccaca

SEQ ID NO: 862700 - RNA, 19 nt, Artificial Sequence
  Description of Artificial Sequence: Synthetic oligonucleotide
  Sense strand starting at position 3424 of SEQ ID NO: 588405
ggguguugccagccaugca

SEQ ID NO: 862701 - RNA, 19 nt, Artificial Sequence
  Description of Artificial Sequence: Synthetic oligonucleotide
  Antisense strand to SEQ ID NO: 862700
ugcauggcuggcaacaccc

SEQ ID NO: 862702 - RNA, 19 nt, Artificial Sequence
  Description of Artificial Sequence: Synthetic oligonucleotide
  Sense strand starting at position 3531 of SEQ ID NO: 588405
aggaguuccuacucucaca

SEQ ID NO: 862703 - RNA, 19 nt, Artificial Sequence
  Description of Artificial Sequence: Synthetic oligonucleotide
  Antisense strand to SEQ ID NO: 862702
ugugagaguaggaacuccu

SEQ ID NO: 862704 - RNA, 19 nt, Artificial Sequence
  Description of Artificial Sequence: Synthetic oligonucleotide
  Sense strand starting at position 3640 of SEQ ID NO: 588405
auauaauucugagcagaau

SEQ ID NO: 862705 - RNA, 19 nt, Artificial Sequence
  Description of Artificial Sequence: Synthetic oligonucleotide
  Antisense strand to SEQ ID NO: 862704
auucugcucagaauuauau

SEQ ID NO: 862706 - RNA, 19 nt, Artificial Sequence
  Description of Artificial Sequence: Synthetic oligonucleotide
  Sense strand starting at position 3825 of SEQ ID NO: 588405
gcaguaacacacgaugaau

SEQ ID NO: 862707 - RNA, 19 nt, Artificial Sequence
  Description of Artificial Sequence: Synthetic oligonucleotide
  Antisense strand to SEQ ID NO: 862706
auucaucguguguuacugc

SEQ ID NO: 862708 - RNA, 19 nt, Artificial Sequence
  Description of Artificial Sequence: Synthetic oligonucleotide
  Sense strand starting at position 3860 of SEQ ID NO: 588405
ggcucauuugcauggcagu

SEQ ID NO: 862709 - RNA, 19 nt, Artificial Sequence
  Description of Artificial Sequence: Synthetic oligonucleotide
  Antisense strand to SEQ ID NO: 862708
acugccaugcaaaugagcc

SEQ ID NO: 862710 - RNA, 19 nt, Artificial Sequence
  Description of Artificial Sequence: Synthetic oligonucleotide
  Sense strand starting at position 3861 of SEQ ID NO: 588405
gcucauuugcauggcagua

SEQ ID NO: 862711 - RNA, 19 nt, Artificial Sequence
  Description of Artificial Sequence: Synthetic oligonucleotide
  Antisense strand to SEQ ID NO: 862710
uacugccaugcaaaugagc

SEQ ID NO: 862712 - RNA, 19 nt, Artificial Sequence
  Description of Artificial Sequence: Synthetic oligonucleotide
  Sense strand starting at position 3914 of SEQ ID NO: 588405
gccugucugaagggaauau

SEQ ID NO: 862713 - RNA, 19 nt, Artificial Sequence
  Description of Artificial Sequence: Synthetic oligonucleotide
  Antisense strand to SEQ ID NO: 862712
auauucccuucagacaggc

SEQ ID NO: 862714 - RNA, 19 nt, Artificial Sequence
  Description of Artificial Sequence: Synthetic oligonucleotide
  Sense strand starting at position 3976 of SEQ ID NO: 588405
ccugacagcucacuugaaa

SEQ ID NO: 862715 - RNA, 19 nt, Artificial Sequence
  Description of Artificial Sequence: Synthetic oligonucleotide
  Antisense strand to SEQ ID NO: 862714
uuucaagugagcugucagg

SEQ ID NO: 862716 - RNA, 19 nt, Artificial Sequence
  Description of Artificial Sequence: Synthetic oligonucleotide
  Sense strand starting at position 176 of SEQ ID NO: 588406
acaggaaucccaggcgaua

SEQ ID NO: 862717 - RNA, 19 nt, Artificial Sequence
  Description of Artificial Sequence: Synthetic oligonucleotide
  Antisense strand to SEQ ID NO: 862716
uaucgccugggauuccugu

SEQ ID NO: 862718 - RNA, 19 nt, Artificial Sequence
  Description of Artificial Sequence: Synthetic oligonucleotide
  Sense strand starting at position 178 of SEQ ID NO: 588406
aggaaucccaggcgauaaa

SEQ ID NO: 862719 - RNA, 19 nt, Artificial Sequence
  Description of Artificial Sequence: Synthetic oligonucleotide
  Antisense strand to SEQ ID NO: 862718
uuuaucgccugggauuccu

SEQ ID NO: 862720 - RNA, 19 nt, Artificial Sequence
  Description of Artificial Sequence: Synthetic oligonucleotide
  Sense strand starting at position 292 of SEQ ID NO: 588406
guccucucgaaugaguagu

SEQ ID NO: 862721 - RNA, 19 nt, Artificial Sequence
  Description of Artificial Sequence: Synthetic oligonucleotide
  Antisense strand to SEQ ID NO: 862720
acuacucauucgagaggac

SEQ ID NO: 862722 - RNA, 19 nt, Artificial Sequence
  Description of Artificial Sequence: Synthetic oligonucleotide
  Sense strand starting at position 309 of SEQ ID NO: 588406
gugagaaagugcuugauga

SEQ ID NO: 862723 - RNA, 19 nt, Artificial Sequence
  Description of Artificial Sequence: Synthetic oligonucleotide
  Antisense strand to SEQ ID NO: 862722
ucaucaagcacuuucucac

SEQ ID NO: 862724 - RNA, 19 nt, Artificial Sequence
  Description of Artificial Sequence: Synthetic oligonucleotide
  Sense strand starting at position 310 of SEQ ID NO: 588406
ugagaaagugcuugaugaa

SEQ ID NO: 862725 - RNA, 19 nt, Artificial Sequence
  Description of Artificial Sequence: Synthetic oligonucleotide
  Antisense strand to SEQ ID NO: 862724
uucaucaagcacuuucuca

SEQ ID NO: 862726 - RNA, 19 nt, Artificial Sequence
  Description of Artificial Sequence: Synthetic oligonucleotide
  Sense strand starting at position 358 of SEQ ID NO: 588406
guggcauuugaaugcguca

SEQ ID NO: 862727 - RNA, 19 nt, Artificial Sequence
  Description of Artificial Sequence: Synthetic oligonucleotide
  Antisense strand to SEQ ID NO: 862726
ugacgcauucaaaugccac

SEQ ID NO: 862728 - RNA, 19 nt, Artificial Sequence
  Description of Artificial Sequence: Synthetic oligonucleotide
  Sense strand starting at position 360 of SEQ ID NO: 588406
ggcauuugaaugcgucaga

SEQ ID NO: 862729 - RNA, 19 nt, Artificial Sequence
  Description of Artificial Sequence: Synthetic oligonucleotide
  Antisense strand to SEQ ID NO: 862728
ucugacgcauucaaaugcc

SEQ ID NO: 862730 - RNA, 19 nt, Artificial Sequence
  Description of Artificial Sequence: Synthetic oligonucleotide
  Sense strand starting at position 518 of SEQ ID NO: 588406
ccaggaugucgaggaagga

SEQ ID NO: 862731 - RNA, 19 nt, Artificial Sequence
  Description of Artificial Sequence: Synthetic oligonucleotide
  Antisense strand to SEQ ID NO: 862730
uccuuccucgacauccugg

SEQ ID NO: 862732 - RNA, 19 nt, Artificial Sequence
  Description of Artificial Sequence: Synthetic oligonucleotide
  Sense strand starting at position 562 of SEQ ID NO: 588406
gagaauccuuucgugguaa

SEQ ID NO: 862733 - RNA, 19 nt, Artificial Sequence
  Description of Artificial Sequence: Synthetic oligonucleotide
  Antisense strand to SEQ ID NO: 862732
uuaccacgaaaggauucuc

SEQ ID NO: 862734 - RNA, 19 nt, Artificial Sequence
  Description of Artificial Sequence: Synthetic oligonucleotide
  Sense strand starting at position 734 of SEQ ID NO: 588406
agaugaacuuggcuccuua

SEQ ID NO: 862735 - RNA, 19 nt, Artificial Sequence
  Description of Artificial Sequence: Synthetic oligonucleotide
  Antisense strand to SEQ ID NO: 862734
uaaggagccaaguucaucu

SEQ ID NO: 862736 - RNA, 19 nt, Artificial Sequence
  Description of Artificial Sequence: Synthetic oligonucleotide
  Sense strand starting at position 788 of SEQ ID NO: 588406
cgaaauugucuugauugga

SEQ ID NO: 862737 - RNA, 19 nt, Artificial Sequence
  Description of Artificial Sequence: Synthetic oligonucleotide
  Antisense strand to SEQ ID NO: 862736
uccaaucaagacaauuucg

SEQ ID NO: 862738 - RNA, 19 nt, Artificial Sequence
  Description of Artificial Sequence: Synthetic oligonucleotide
  Sense strand starting at position 791 of SEQ ID NO: 588406
aauugucuugauuggaaau

SEQ ID NO: 862739 - RNA, 19 nt, Artificial Sequence
  Description of Artificial Sequence: Synthetic oligonucleotide
  Antisense strand to SEQ ID NO: 862738
auuuccaaucaagacaauu

SEQ ID NO: 862740 - RNA, 19 nt, Artificial Sequence
  Description of Artificial Sequence: Synthetic oligonucleotide
  Sense strand starting at position 868 of SEQ ID NO: 588406
ccuagaacagugcauuauu

SEQ ID NO: 862741 - RNA, 19 nt, Artificial Sequence
  Description of Artificial Sequence: Synthetic oligonucleotide
  Antisense strand to SEQ ID NO: 862740
aauaaugcacuguucuagg

SEQ ID NO: 862742 - RNA, 19 nt, Artificial Sequence
  Description of Artificial Sequence: Synthetic oligonucleotide
  Sense strand starting at position 980 of SEQ ID NO: 588406
aucauuaugucguugaaua

SEQ ID NO: 862743 - RNA, 19 nt, Artificial Sequence
  Description of Artificial Sequence: Synthetic oligonucleotide
  Antisense strand to SEQ ID NO: 862742
uauucaacgacauaaugau

SEQ ID NO: 862744 - RNA, 19 nt, Artificial Sequence
  Description of Artificial Sequence: Synthetic oligonucleotide
  Sense strand starting at position 982 of SEQ ID NO: 588406
cauuaugucguugaauauu

SEQ ID NO: 862745 - RNA, 19 nt, Artificial Sequence
  Description of Artificial Sequence: Synthetic oligonucleotide
  Antisense strand to SEQ ID NO: 862744
aauauucaacgacauaaug

SEQ ID NO: 862746 - RNA, 19 nt, Artificial Sequence
  Description of Artificial Sequence: Synthetic oligonucleotide
  Sense strand starting at position 1008 of SEQ ID NO: 588406
gguccaaagcacugaagaa

SEQ ID NO: 862747 - RNA, 19 nt, Artificial Sequence
  Description of Artificial Sequence: Synthetic oligonucleotide
  Antisense strand to SEQ ID NO: 862746
uucuucagugcuuuggacc

SEQ ID NO: 862748 - RNA, 19 nt, Artificial Sequence
  Description of Artificial Sequence: Synthetic oligonucleotide
  Sense strand starting at position 1118 of SEQ ID NO: 588406
uugcaagugcuagauggau

SEQ ID NO: 862749 - RNA, 19 nt, Artificial Sequence
  Description of Artificial Sequence: Synthetic oligonucleotide
  Antisense strand to SEQ ID NO: 862748
auccaucuagcacuugcaa

SEQ ID NO: 862750 - RNA, 19 nt, Artificial Sequence
  Description of Artificial Sequence: Synthetic oligonucleotide
  Sense strand starting at position 1127 of SEQ ID NO: 588406
cuagauggauucuugguga

SEQ ID NO: 862751 - RNA, 19 nt, Artificial Sequence
  Description of Artificial Sequence: Synthetic oligonucleotide
  Antisense strand to SEQ ID NO: 862750
ucaccaagaauccaucuag

SEQ ID NO: 862752 - RNA, 19 nt, Artificial Sequence
  Description of Artificial Sequence: Synthetic oligonucleotide
  Sense strand starting at position 1141 of SEQ ID NO: 588406
ggugaaauauugccuccac

SEQ ID NO: 862753 - RNA, 19 nt, Artificial Sequence
  Description of Artificial Sequence: Synthetic oligonucleotide
  Antisense strand to SEQ ID NO: 862752
guggaggcaauauuucacc

SEQ ID NO: 862754 - RNA, 19 nt, Artificial Sequence
  Description of Artificial Sequence: Synthetic oligonucleotide
  Sense strand starting at position 1202 of SEQ ID NO: 588406
agaguuuacagcugaaaga

SEQ ID NO: 862755 - RNA, 19 nt, Artificial Sequence
  Description of Artificial Sequence: Synthetic oligonucleotide
  Antisense strand to SEQ ID NO: 862754
ucuuucagcuguaaacucu

SEQ ID NO: 862756 - RNA, 19 nt, Artificial Sequence
  Description of Artificial Sequence: Synthetic oligonucleotide
  Sense strand starting at position 1479 of SEQ ID NO: 588406
caaugaguucuggagcuga

SEQ ID NO: 862757 - RNA, 19 nt, Artificial Sequence
  Description of Artificial Sequence: Synthetic oligonucleotide
  Antisense strand to SEQ ID NO: 862756
ucagcuccagaacucauug

SEQ ID NO: 862758 - RNA, 19 nt, Artificial Sequence
  Description of Artificial Sequence: Synthetic oligonucleotide
  Sense strand starting at position 1483 of SEQ ID NO: 588406
gaguucuggagcugagaca

SEQ ID NO: 862759 - RNA, 19 nt, Artificial Sequence
  Description of Artificial Sequence: Synthetic oligonucleotide
  Antisense strand to SEQ ID NO: 862758
ugucucagcuccagaacuc

SEQ ID NO: 862760 - RNA, 19 nt, Artificial Sequence
  Description of Artificial Sequence: Synthetic oligonucleotide
  Sense strand starting at position 1715 of SEQ ID NO: 588406
caugcagaucucggaaacu

SEQ ID NO: 862761 - RNA, 19 nt, Artificial Sequence
  Description of Artificial Sequence: Synthetic oligonucleotide
  Antisense strand to SEQ ID NO: 862760
aguuuccgagaucugcaug

SEQ ID NO: 862762 - RNA, 19 nt, Artificial Sequence
  Description of Artificial Sequence: Synthetic oligonucleotide
  Sense strand starting at position 2554 of SEQ ID NO: 588406
agguguucggcugaaggga

SEQ ID NO: 862763 - RNA, 19 nt, Artificial Sequence
  Description of Artificial Sequence: Synthetic oligonucleotide
  Antisense strand to SEQ ID NO: 862762
ucccuucagccgaacaccu

SEQ ID NO: 862764 - RNA, 19 nt, Artificial Sequence
  Description of Artificial Sequence: Synthetic oligonucleotide
  Sense strand starting at position 2643 of SEQ ID NO: 588406
gggaaacuguguucuccua

SEQ ID NO: 862765 - RNA, 19 nt, Artificial Sequence
  Description of Artificial Sequence: Synthetic oligonucleotide
  Antisense strand to SEQ ID NO: 862764
uaggagaacacaguuuccc

SEQ ID NO: 862766 - RNA, 19 nt, Artificial Sequence
  Description of Artificial Sequence: Synthetic oligonucleotide
  Sense strand starting at position 2698 of SEQ ID NO: 588406
ccuugaggguuccucaaac

SEQ ID NO: 862767 - RNA, 19 nt, Artificial Sequence
  Description of Artificial Sequence: Synthetic oligonucleotide
  Antisense strand to SEQ ID NO: 862766
guuugaggaacccucaagg

SEQ ID NO: 862768 - RNA, 19 nt, Artificial Sequence
  Description of Artificial Sequence: Synthetic oligonucleotide
  Sense strand starting at position 2863 of SEQ ID NO: 588406
cgugcugaacucuacugaa

SEQ ID NO: 862769 - RNA, 19 nt, Artificial Sequence
  Description of Artificial Sequence: Synthetic oligonucleotide
  Antisense strand to SEQ ID NO: 862768
uucaguagaguucagcacg

SEQ ID NO: 862770 - RNA, 19 nt, Artificial Sequence
  Description of Artificial Sequence: Synthetic oligonucleotide
  Sense strand starting at position 2892 of SEQ ID NO: 588406
guccauauccugcauuaga

SEQ ID NO: 862771 - RNA, 19 nt, Artificial Sequence
  Description of Artificial Sequence: Synthetic oligonucleotide
  Antisense strand to SEQ ID NO: 862770
ucuaaugcaggauauggac

SEQ ID NO: 862772 - RNA, 19 nt, Artificial Sequence
  Description of Artificial Sequence: Synthetic oligonucleotide
  Sense strand starting at position 2902 of SEQ ID NO: 588406
ugcauuagacacuggagau

SEQ ID NO: 862773 - RNA, 19 nt, Artificial Sequence
  Description of Artificial Sequence: Synthetic oligonucleotide
  Antisense strand to SEQ ID NO: 862772
aucuccagugucuaaugca

SEQ ID NO: 862774 - RNA, 19 nt, Artificial Sequence
  Description of Artificial Sequence: Synthetic oligonucleotide
  Sense strand starting at position 2903 of SEQ ID NO: 588406
gcauuagacacuggagaua

SEQ ID NO: 862775 - RNA, 19 nt, Artificial Sequence
  Description of Artificial Sequence: Synthetic oligonucleotide
  Antisense strand to SEQ ID NO: 862774
uaucuccagugucuaaugc

SEQ ID NO: 862776 - RNA, 19 nt, Artificial Sequence
  Description of Artificial Sequence: Synthetic oligonucleotide
  Sense strand starting at position 3095 of SEQ ID NO: 588406
cugaaaggccaguggaauu

SEQ ID NO: 862777 - RNA, 19 nt, Artificial Sequence
  Description of Artificial Sequence: Synthetic oligonucleotide
  Antisense strand to SEQ ID NO: 862776
aauuccacuggccuuucag

SEQ ID NO: 862778 - RNA, 19 nt, Artificial Sequence
  Description of Artificial Sequence: Synthetic oligonucleotide
  Sense strand starting at position 3105 of SEQ ID NO: 588406
aguggaauuggccagugaa

SEQ ID NO: 862779 - RNA, 19 nt, Artificial Sequence
  Description of Artificial Sequence: Synthetic oligonucleotide
  Antisense strand to SEQ ID NO: 862778
uucacuggccaauuccacu

SEQ ID NO: 862780 - RNA, 19 nt, Artificial Sequence
  Description of Artificial Sequence: Synthetic oligonucleotide
  Sense strand starting at position 3108 of SEQ ID NO: 588406
ggaauuggccagugaaagg

SEQ ID NO: 862781 - RNA, 19 nt, Artificial Sequence
  Description of Artificial Sequence: Synthetic oligonucleotide
  Antisense strand to SEQ ID NO: 862780
ccuuucacuggccaauucc

SEQ ID NO: 862782 - RNA, 19 nt, Artificial Sequence
  Description of Artificial Sequence: Synthetic oligonucleotide
  Sense strand starting at position 3242 of SEQ ID NO: 588406
gggccaauuccuggucaag

SEQ ID NO: 862783 - RNA, 19 nt, Artificial Sequence
  Description of Artificial Sequence: Synthetic oligonucleotide
  Antisense strand to SEQ ID NO: 862782
cuugaccaggaauuggccc

SEQ ID NO: 862784 - RNA, 19 nt, Artificial Sequence
  Description of Artificial Sequence: Synthetic oligonucleotide
  Sense strand starting at position 3244 of SEQ ID NO: 588406
gccaauuccuggucaagga

SEQ ID NO: 862785 - RNA, 19 nt, Artificial Sequence
  Description of Artificial Sequence: Synthetic oligonucleotide
  Antisense strand to SEQ ID NO: 862784
uccuugaccaggaauuggc

SEQ ID NO: 862786 - RNA, 19 nt, Artificial Sequence
  Description of Artificial Sequence: Synthetic oligonucleotide
  Sense strand starting at position 3248 of SEQ ID NO: 588406
auuccuggucaaggaguuu

SEQ ID NO: 862787 - RNA, 19 nt, Artificial Sequence
  Description of Artificial Sequence: Synthetic oligonucleotide
  Antisense strand to SEQ ID NO: 862786
aaacuccuugaccaggaau

SEQ ID NO: 862788 - RNA, 19 nt, Artificial Sequence
  Description of Artificial Sequence: Synthetic oligonucleotide
  Sense strand starting at position 3636 of SEQ ID NO: 588406
gucuuuguaguauacaaag

SEQ ID NO: 862789 - RNA, 19 nt, Artificial Sequence
  Description of Artificial Sequence: Synthetic oligonucleotide
  Antisense strand to SEQ ID NO: 862788
cuuuguauacuacaaagac

SEQ ID NO: 862790 - RNA, 19 nt, Artificial Sequence
  Description of Artificial Sequence: Synthetic oligonucleotide
  Sense strand starting at position 3675 of SEQ ID NO: 588406
gcaccauaaggguggaaga

SEQ ID NO: 862791 - RNA, 19 nt, Artificial Sequence
  Description of Artificial Sequence: Synthetic oligonucleotide
  Antisense strand to SEQ ID NO: 862790
ucuuccacccuuauggugc

SEQ ID NO: 862792 - RNA, 19 nt, Artificial Sequence
  Description of Artificial Sequence: Synthetic oligonucleotide
  Sense strand starting at position 3697 of SEQ ID NO: 588406
ugaagccauaguggaaaua

SEQ ID NO: 862793 - RNA, 19 nt, Artificial Sequence
  Description of Artificial Sequence: Synthetic oligonucleotide
  Antisense strand to SEQ ID NO: 862792
uauuuccacuauggcuuca

SEQ ID NO: 862794 - RNA, 19 nt, Artificial Sequence
  Description of Artificial Sequence: Synthetic oligonucleotide
  Sense strand starting at position 3763 of SEQ ID NO: 588406
uuaacaauugcaugugaau

SEQ ID NO: 862795 - RNA, 19 nt, Artificial Sequence
  Description of Artificial Sequence: Synthetic oligonucleotide
  Antisense strand to SEQ ID NO: 862794
auucacaugcaauuguuaa

SEQ ID NO: 862796 - RNA, 19 nt, Artificial Sequence
  Description of Artificial Sequence: Synthetic oligonucleotide
  Sense strand starting at position 21 of SEQ ID NO: 588407
gguaacuacuugcccugaa

SEQ ID NO: 862797 - RNA, 19 nt, Artificial Sequence
  Description of Artificial Sequence: Synthetic oligonucleotide
  Antisense strand to SEQ ID NO: 862796
uucagggcaaguaguuacc

SEQ ID NO: 862798 - RNA, 19 nt, Artificial Sequence
  Description of Artificial Sequence: Synthetic oligonucleotide
  Sense strand starting at position 84 of SEQ ID NO: 588407
uggcuucuacuguacugau

SEQ ID NO: 862799 - RNA, 19 nt, Artificial Sequence
  Description of Artificial Sequence: Synthetic oligonucleotide
  Antisense strand to SEQ ID NO: 862798
aucaguacaguagaagcca

SEQ ID NO: 862800 - RNA, 19 nt, Artificial Sequence
  Description of Artificial Sequence: Synthetic oligonucleotide
  Sense strand starting at position 157 of SEQ ID NO: 588407
ccugaaugaccuugcggaa

SEQ ID NO: 862801 - RNA, 19 nt, Artificial Sequence
  Description of Artificial Sequence: Synthetic oligonucleotide
  Antisense strand to SEQ ID NO: 862800
uuccgcaaggucauucagg

SEQ ID NO: 862802 - RNA, 19 nt, Artificial Sequence
  Description of Artificial Sequence: Synthetic oligonucleotide
  Sense strand starting at position 206 of SEQ ID NO: 588407
agacucuuaucagagagaa

SEQ ID NO: 862803 - RNA, 19 nt, Artificial Sequence
  Description of Artificial Sequence: Synthetic oligonucleotide
  Antisense strand to SEQ ID NO: 862802
uucucucugauaagagucu

SEQ ID NO: 862804 - RNA, 19 nt, Artificial Sequence
  Description of Artificial Sequence: Synthetic oligonucleotide
  Sense strand starting at position 411 of SEQ ID NO: 588407
gcaaccauaugauuaaguu

SEQ ID NO: 862805 - RNA, 19 nt, Artificial Sequence
  Description of Artificial Sequence: Synthetic oligonucleotide
  Antisense strand to SEQ ID NO: 862804
aacuuaaucauaugguugc

SEQ ID NO: 862806 - RNA, 19 nt, Artificial Sequence
  Description of Artificial Sequence: Synthetic oligonucleotide
  Sense strand starting at position 423 of SEQ ID NO: 588407
uuaaguuguggccaaagaa

SEQ ID NO: 862807 - RNA, 19 nt, Artificial Sequence
  Description of Artificial Sequence: Synthetic oligonucleotide
  Antisense strand to SEQ ID NO: 862806
uucuuuggccacaacuuaa

SEQ ID NO: 862808 - RNA, 19 nt, Artificial Sequence
  Description of Artificial Sequence: Synthetic oligonucleotide
  Sense strand starting at position 479 of SEQ ID NO: 588407
uuuauaaaguagucaguga

SEQ ID NO: 862809 - RNA, 19 nt, Artificial Sequence
  Description of Artificial Sequence: Synthetic oligonucleotide
  Antisense strand to SEQ ID NO: 862808
ucacugacuacuuuauaaa

SEQ ID NO: 862810 - RNA, 19 nt, Artificial Sequence
  Description of Artificial Sequence: Synthetic oligonucleotide
  Sense strand starting at position 483 of SEQ ID NO: 588407
uaaaguagucagugaccuu

SEQ ID NO: 862811 - RNA, 19 nt, Artificial Sequence
  Description of Artificial Sequence: Synthetic oligonucleotide
  Antisense strand to SEQ ID NO: 862810
aaggucacugacuacuuua

SEQ ID NO: 862812 - RNA, 19 nt, Artificial Sequence
  Description of Artificial Sequence: Synthetic oligonucleotide
  Sense strand starting at position 546 of SEQ ID NO: 588407
gcuguagcucaagcaguua

SEQ ID NO: 862813 - RNA, 19 nt, Artificial Sequence
  Description of Artificial Sequence: Synthetic oligonucleotide
  Antisense strand to SEQ ID NO: 862812
uaacugcuugagcuacagc

SEQ ID NO: 862814 - RNA, 19 nt, Artificial Sequence
  Description of Artificial Sequence: Synthetic oligonucleotide
  Sense strand starting at position 651 of SEQ ID NO: 588407
ccaguucuggauuaccuau

SEQ ID NO: 862815 - RNA, 19 nt, Artificial Sequence
  Description of Artificial Sequence: Synthetic oligonucleotide
  Antisense strand to SEQ ID NO: 862814
auagguaauccagaacugg

SEQ ID NO: 862816 - RNA, 19 nt, Artificial Sequence
  Description of Artificial Sequence: Synthetic oligonucleotide
  Sense strand starting at position 699 of SEQ ID NO: 588407
uucuaucuuguugaagcua

SEQ ID NO: 862817 - RNA, 19 nt, Artificial Sequence
  Description of Artificial Sequence: Synthetic oligonucleotide
  Antisense strand to SEQ ID NO: 862816
uagcuucaacaagauagaa

SEQ ID NO: 862818 - RNA, 19 nt, Artificial Sequence
  Description of Artificial Sequence: Synthetic oligonucleotide
  Sense strand starting at position 727 of SEQ ID NO: 588407
gcuuguuguauacagcuga

SEQ ID NO: 862819 - RNA, 19 nt, Artificial Sequence
  Description of Artificial Sequence: Synthetic oligonucleotide
  Antisense strand to SEQ ID NO: 862818
ucagcuguauacaacaagc

SEQ ID NO: 862820 - RNA, 19 nt, Artificial Sequence
  Description of Artificial Sequence: Synthetic oligonucleotide
  Sense strand starting at position 812 of SEQ ID NO: 588407
ccagcuugaugguuggaua

SEQ ID NO: 862821 - RNA, 19 nt, Artificial Sequence
  Description of Artificial Sequence: Synthetic oligonucleotide
  Antisense strand to SEQ ID NO: 862820
uauccaaccaucaagcugg

SEQ ID NO: 862822 - RNA, 19 nt, Artificial Sequence
  Description of Artificial Sequence: Synthetic oligonucleotide
  Sense strand starting at position 813 of SEQ ID NO: 588407
cagcuugaugguuggauau

SEQ ID NO: 862823 - RNA, 19 nt, Artificial Sequence
  Description of Artificial Sequence: Synthetic oligonucleotide
  Antisense strand to SEQ ID NO: 862822
auauccaaccaucaagcug

SEQ ID NO: 862824 - RNA, 19 nt, Artificial Sequence
  Description of Artificial Sequence: Synthetic oligonucleotide
  Sense strand starting at position 855 of SEQ ID NO: 588407
agucacuacuucccaaagu

SEQ ID NO: 862825 - RNA, 19 nt, Artificial Sequence
  Description of Artificial Sequence: Synthetic oligonucleotide
  Antisense strand to SEQ ID NO: 862824
acuuugggaaguagugacu

SEQ ID NO: 862826 - RNA, 19 nt, Artificial Sequence
  Description of Artificial Sequence: Synthetic oligonucleotide
  Sense strand starting at position 866 of SEQ ID NO: 588407
cccaaaguugcuuaaagag

SEQ ID NO: 862827 - RNA, 19 nt, Artificial Sequence
  Description of Artificial Sequence: Synthetic oligonucleotide
  Antisense strand to SEQ ID NO: 862826
cucuuuaagcaacuuuggg

SEQ ID NO: 862828 - RNA, 19 nt, Artificial Sequence
  Description of Artificial Sequence: Synthetic oligonucleotide
  Sense strand starting at position 2310 of SEQ ID NO: 588407
aacgcuccucuagagaguu

SEQ ID NO: 862829 - RNA, 19 nt, Artificial Sequence
  Description of Artificial Sequence: Synthetic oligonucleotide
  Antisense strand to SEQ ID NO: 862828
aacucucuagaggagcguu

SEQ ID NO: 862830 - RNA, 19 nt, Artificial Sequence
  Description of Artificial Sequence: Synthetic oligonucleotide
  Sense strand starting at position 2312 of SEQ ID NO: 588407
cgcuccucuagagaguuua

SEQ ID NO: 862831 - RNA, 19 nt, Artificial Sequence
  Description of Artificial Sequence: Synthetic oligonucleotide
  Antisense strand to SEQ ID NO: 862830
uaaacucucuagaggagcg

SEQ ID NO: 862832 - RNA, 19 nt, Artificial Sequence
  Description of Artificial Sequence: Synthetic oligonucleotide
  Sense strand starting at position 2322 of SEQ ID NO: 588407
gagaguuuacccuggacac

SEQ ID NO: 862833 - RNA, 19 nt, Artificial Sequence
  Description of Artificial Sequence: Synthetic oligonucleotide
  Antisense strand to SEQ ID NO: 862832
guguccaggguaaacucuc

SEQ ID NO: 862834 - RNA, 19 nt, Artificial Sequence
  Description of Artificial Sequence: Synthetic oligonucleotide
  Sense strand starting at position 2323 of SEQ ID NO: 588407
agaguuuacccuggacaca

SEQ ID NO: 862835 - RNA, 19 nt, Artificial Sequence
  Description of Artificial Sequence: Synthetic oligonucleotide
  Antisense strand to SEQ ID NO: 862834
uguguccaggguaaacucu

SEQ ID NO: 862836 - RNA, 19 nt, Artificial Sequence
  Description of Artificial Sequence: Synthetic oligonucleotide
  Sense strand starting at position 2346 of SEQ ID NO: 588407
gucagugcugccuccucaa

SEQ ID NO: 862837 - RNA, 19 nt, Artificial Sequence
  Description of Artificial Sequence: Synthetic oligonucleotide
  Antisense strand to SEQ ID NO: 862836
uugaggaggcagcacugac

SEQ ID NO: 862838 - RNA, 19 nt, Artificial Sequence
  Description of Artificial Sequence: Synthetic oligonucleotide
  Sense strand starting at position 2415 of SEQ ID NO: 588407
uuucuuggaucaucacaga

SEQ ID NO: 862839 - RNA, 19 nt, Artificial Sequence
  Description of Artificial Sequence: Synthetic oligonucleotide
  Antisense strand to SEQ ID NO: 862838
ucugugaugauccaagaaa

SEQ ID NO: 862840 - RNA, 19 nt, Artificial Sequence
  Description of Artificial Sequence: Synthetic oligonucleotide
  Sense strand starting at position 2459 of SEQ ID NO: 588407
acaauagagcuagguaaac

SEQ ID NO: 862841 - RNA, 19 nt, Artificial Sequence
  Description of Artificial Sequence: Synthetic oligonucleotide
  Antisense strand to SEQ ID NO: 862840
guuuaccuagcucuauugu

SEQ ID NO: 862842 - RNA, 19 nt, Artificial Sequence
  Description of Artificial Sequence: Synthetic oligonucleotide
  Sense strand starting at position 2471 of SEQ ID NO: 588407
gguaaacugagguguuuag

SEQ ID NO: 862843 - RNA, 19 nt, Artificial Sequence
  Description of Artificial Sequence: Synthetic oligonucleotide
  Antisense strand to SEQ ID NO: 862842
cuaaacaccucaguuuacc

SEQ ID NO: 862844 - RNA, 19 nt, Artificial Sequence
  Description of Artificial Sequence: Synthetic oligonucleotide
  Sense strand starting at position 2526 of SEQ ID NO: 588407
ggcucuugcgguguguaau

SEQ ID NO: 862845 - RNA, 19 nt, Artificial Sequence
  Description of Artificial Sequence: Synthetic oligonucleotide
  Antisense strand to SEQ ID NO: 862844
auuacacaccgcaagagcc

SEQ ID NO: 862846 - RNA, 19 nt, Artificial Sequence
  Description of Artificial Sequence: Synthetic oligonucleotide
  Sense strand starting at position 2805 of SEQ ID NO: 588407
gggugauauauucgaauug

SEQ ID NO: 862847 - RNA, 19 nt, Artificial Sequence
  Description of Artificial Sequence: Synthetic oligonucleotide
  Antisense strand to SEQ ID NO: 862846
caauucgaauauaucaccc

SEQ ID NO: 862848 - RNA, 19 nt, Artificial Sequence
  Description of Artificial Sequence: Synthetic oligonucleotide
  Sense strand starting at position 2997 of SEQ ID NO: 588407
cugaucucucaugauuagu

SEQ ID NO: 862849 - RNA, 19 nt, Artificial Sequence
  Description of Artificial Sequence: Synthetic oligonucleotide
  Antisense strand to SEQ ID NO: 862848
acuaaucaugagagaucag

SEQ ID NO: 862850 - RNA, 19 nt, Artificial Sequence
  Description of Artificial Sequence: Synthetic oligonucleotide
  Sense strand starting at position 3000 of SEQ ID NO: 588407
aucucucaugauuagucau

SEQ ID NO: 862851 - RNA, 19 nt, Artificial Sequence
  Description of Artificial Sequence: Synthetic oligonucleotide
  Antisense strand to SEQ ID NO: 862850
augacuaaucaugagagau

SEQ ID NO: 862852 - RNA, 19 nt, Artificial Sequence
  Description of Artificial Sequence: Synthetic oligonucleotide
  Sense strand starting at position 3003 of SEQ ID NO: 588407
ucucaugauuagucauuga

SEQ ID NO: 862853 - RNA, 19 nt, Artificial Sequence
  Description of Artificial Sequence: Synthetic oligonucleotide
  Antisense strand to SEQ ID NO: 862852
ucaaugacuaaucaugaga

SEQ ID NO: 862854 - RNA, 19 nt, Artificial Sequence
  Description of Artificial Sequence: Synthetic oligonucleotide
  Sense strand starting at position 3007 of SEQ ID NO: 588407
augauuagucauugacaug

SEQ ID NO: 862855 - RNA, 19 nt, Artificial Sequence
  Description of Artificial Sequence: Synthetic oligonucleotide
  Antisense strand to SEQ ID NO: 862854
caugucaaugacuaaucau

SEQ ID NO: 862856 - RNA, 19 nt, Artificial Sequence
  Description of Artificial Sequence: Synthetic oligonucleotide
  Sense strand starting at position 3029 of SEQ ID NO: 588407
caaugaagauuagggaaga

SEQ ID NO: 862857 - RNA, 19 nt, Artificial Sequence
  Description of Artificial Sequence: Synthetic oligonucleotide
  Antisense strand to SEQ ID NO: 862856
ucuucccuaaucuucauug

SEQ ID NO: 862858 - RNA, 19 nt, Artificial Sequence
  Description of Artificial Sequence: Synthetic oligonucleotide
  Sense strand starting at position 3030 of SEQ ID NO: 588407
aaugaagauuagggaagau

SEQ ID NO: 862859 - RNA, 19 nt, Artificial Sequence
  Description of Artificial Sequence: Synthetic oligonucleotide
  Antisense strand to SEQ ID NO: 862858
aucuucccuaaucuucauu

SEQ ID NO: 862860 - RNA, 19 nt, Artificial Sequence
  Description of Artificial Sequence: Synthetic oligonucleotide
  Sense strand starting at position 3133 of SEQ ID NO: 588407
ggaaacuagugaucuuaac

SEQ ID NO: 862861 - RNA, 19 nt, Artificial Sequence
  Description of Artificial Sequence: Synthetic oligonucleotide
  Antisense strand to SEQ ID NO: 862860
guuaagaucacuaguuucc

SEQ ID NO: 862862 - RNA, 19 nt, Artificial Sequence
  Description of Artificial Sequence: Synthetic oligonucleotide
  Sense strand starting at position 3160 of SEQ ID NO: 588407
gccugauuggcugagagau

SEQ ID NO: 862863 - RNA, 19 nt, Artificial Sequence
  Description of Artificial Sequence: Synthetic oligonucleotide
  Antisense strand to SEQ ID NO: 862862
aucucucagccaaucaggc

SEQ ID NO: 862864 - RNA, 19 nt, Artificial Sequence
  Description of Artificial Sequence: Synthetic oligonucleotide
  Sense strand starting at position 3299 of SEQ ID NO: 588407
gcugaauugagguguaauu

SEQ ID NO: 862865 - RNA, 19 nt, Artificial Sequence
  Description of Artificial Sequence: Synthetic oligonucleotide
  Antisense strand to SEQ ID NO: 862864
aauuacaccucaauucagc

SEQ ID NO: 862866 - RNA, 19 nt, Artificial Sequence
  Description of Artificial Sequence: Synthetic oligonucleotide
  Sense strand starting at position 3451 of SEQ ID NO: 588407
cguggcaaugcauaacauu

SEQ ID NO: 862867 - RNA, 19 nt, Artificial Sequence
  Description of Artificial Sequence: Synthetic oligonucleotide
  Antisense strand to SEQ ID NO: 862866
aauguuaugcauugccacg

SEQ ID NO: 862868 - RNA, 19 nt, Artificial Sequence
  Description of Artificial Sequence: Synthetic oligonucleotide
  Sense strand starting at position 3686 of SEQ ID NO: 588407
caguguagauucucugguu

SEQ ID NO: 862869 - RNA, 19 nt, Artificial Sequence
  Description of Artificial Sequence: Synthetic oligonucleotide
  Antisense strand to SEQ ID NO: 862868
aaccagagaaucuacacug

SEQ ID NO: 862870 - RNA, 19 nt, Artificial Sequence
  Description of Artificial Sequence: Synthetic oligonucleotide
  Sense strand starting at position 3691 of SEQ ID NO: 588407
uagauucucugguuuggga

SEQ ID NO: 862871 - RNA, 19 nt, Artificial Sequence
  Description of Artificial Sequence: Synthetic oligonucleotide
  Antisense strand to SEQ ID NO: 862870
ucccaaaccagagaaucua

SEQ ID NO: 862872 - RNA, 19 nt, Artificial Sequence
  Description of Artificial Sequence: Synthetic oligonucleotide
  Sense strand starting at position 3812 of SEQ ID NO: 588407
uucuucuccgaguaaauua

SEQ ID NO: 862873 - RNA, 19 nt, Artificial Sequence
  Description of Artificial Sequence: Synthetic oligonucleotide
  Antisense strand to SEQ ID NO: 862872
uaauuuacucggagaagaa

SEQ ID NO: 862874 - RNA, 19 nt, Artificial Sequence
  Description of Artificial Sequence: Synthetic oligonucleotide
  Sense strand starting at position 3820 of SEQ ID NO: 588407
cgaguaaauuaaucugaua

SEQ ID NO: 862875 - RNA, 19 nt, Artificial Sequence
  Description of Artificial Sequence: Synthetic oligonucleotide
  Antisense strand to SEQ ID NO: 862874
uaucagauuaauuuacucg

SEQ ID NO: 862876 - RNA, 19 nt, Artificial Sequence
  Description of Artificial Sequence: Synthetic oligonucleotide
  Sense strand starting at position 9 of SEQ ID NO: 588408
uuagaaagauuugguacca

SEQ ID NO: 862877 - RNA, 19 nt, Artificial Sequence
  Description of Artificial Sequence: Synthetic oligonucleotide
  Antisense strand to SEQ ID NO: 862876
ugguaccaaaucuuucuaa

SEQ ID NO: 862878 - RNA, 19 nt, Artificial Sequence
  Description of Artificial Sequence: Synthetic oligonucleotide
  Sense strand starting at position 20 of SEQ ID NO: 588408
ugguaccaccaaugaaauu

SEQ ID NO: 862879 - RNA, 19 nt, Artificial Sequence
  Description of Artificial Sequence: Synthetic oligonucleotide
  Antisense strand to SEQ ID NO: 862878
aauuucauuggugguacca

SEQ ID NO: 862880 - RNA, 19 nt, Artificial Sequence
  Description of Artificial Sequence: Synthetic oligonucleotide
  Sense strand starting at position 56 of SEQ ID NO: 588408
uugagaaguugauucucaa

SEQ ID NO: 862881 - RNA, 19 nt, Artificial Sequence
  Description of Artificial Sequence: Synthetic oligonucleotide
  Antisense strand to SEQ ID NO: 862880
uugagaaucaacuucucaa

SEQ ID NO: 862882 - RNA, 19 nt, Artificial Sequence
  Description of Artificial Sequence: Synthetic oligonucleotide
  Sense strand starting at position 117 of SEQ ID NO: 588408
agaagcuaauucuuugcua

SEQ ID NO: 862883 - RNA, 19 nt, Artificial Sequence
  Description of Artificial Sequence: Synthetic oligonucleotide
  Antisense strand to SEQ ID NO: 862882
uagcaaagaauuagcuucu

SEQ ID NO: 862884 - RNA, 19 nt, Artificial Sequence
  Description of Artificial Sequence: Synthetic oligonucleotide
  Sense strand starting at position 246 of SEQ ID NO: 588408
agucacaacucauuaaagu

SEQ ID NO: 862885 - RNA, 19 nt, Artificial Sequence
  Description of Artificial Sequence: Synthetic oligonucleotide
  Antisense strand to SEQ ID NO: 862884
acuuuaaugaguugugacu

SEQ ID NO: 862886 - RNA, 19 nt, Artificial Sequence
  Description of Artificial Sequence: Synthetic oligonucleotide
  Sense strand starting at position 280 of SEQ ID NO: 588408
ccugauaaaguaugaugau

SEQ ID NO: 862887 - RNA, 19 nt, Artificial Sequence
  Description of Artificial Sequence: Synthetic oligonucleotide
  Antisense strand to SEQ ID NO: 862886
aucaucauacuuuaucagg

SEQ ID NO: 862888 - RNA, 19 nt, Artificial Sequence
  Description of Artificial Sequence: Synthetic oligonucleotide
  Sense strand starting at position 347 of SEQ ID NO: 588408
uggucauacuuuguaaacu

SEQ ID NO: 862889 - RNA, 19 nt, Artificial Sequence
  Description of Artificial Sequence: Synthetic oligonucleotide
  Antisense strand to SEQ ID NO: 862888
aguuuacaaaguaugacca

SEQ ID NO: 862890 - RNA, 19 nt, Artificial Sequence
  Description of Artificial Sequence: Synthetic oligonucleotide
  Sense strand starting at position 434 of SEQ ID NO: 588408
acuucuacugcauagauga

SEQ ID NO: 862891 - RNA, 19 nt, Artificial Sequence
  Description of Artificial Sequence: Synthetic oligonucleotide
  Antisense strand to SEQ ID NO: 862890
ucaucuaugcaguagaagu

SEQ ID NO: 862892 - RNA, 19 nt, Artificial Sequence
  Description of Artificial Sequence: Synthetic oligonucleotide
  Sense strand starting at position 681 of SEQ ID NO: 588408
augccuuaagaauagucau

SEQ ID NO: 862893 - RNA, 19 nt, Artificial Sequence
  Description of Artificial Sequence: Synthetic oligonucleotide
  Antisense strand to SEQ ID NO: 862892
augacuauucuuaaggcau

SEQ ID NO: 862894 - RNA, 19 nt, Artificial Sequence
  Description of Artificial Sequence: Synthetic oligonucleotide
  Sense strand starting at position 764 of SEQ ID NO: 588408
uguaauagucaaugcucaa

SEQ ID NO: 862895 - RNA, 19 nt, Artificial Sequence
  Description of Artificial Sequence: Synthetic oligonucleotide
  Antisense strand to SEQ ID NO: 862894
uugagcauugacuauuaca

SEQ ID NO: 862896 - RNA, 19 nt, Artificial Sequence
  Description of Artificial Sequence: Synthetic oligonucleotide
  Sense strand starting at position 795 of SEQ ID NO: 588408
cucucaugcccucagugaa

SEQ ID NO: 862897 - RNA, 19 nt, Artificial Sequence
  Description of Artificial Sequence: Synthetic oligonucleotide
  Antisense strand to SEQ ID NO: 862896
uucacugagggcaugagag

SEQ ID NO: 862898 - RNA, 19 nt, Artificial Sequence
  Description of Artificial Sequence: Synthetic oligonucleotide
  Sense strand starting at position 1001 of SEQ ID NO: 588408
aagagaacagggugguuau

SEQ ID NO: 862899 - RNA, 19 nt, Artificial Sequence
  Description of Artificial Sequence: Synthetic oligonucleotide
  Antisense strand to SEQ ID NO: 862898
auaaccacccuguucucuu

SEQ ID NO: 862900 - RNA, 19 nt, Artificial Sequence
  Description of Artificial Sequence: Synthetic oligonucleotide
  Sense strand starting at position 1002 of SEQ ID NO: 588408
agagaacagggugguuauu

SEQ ID NO: 862901 - RNA, 19 nt, Artificial Sequence
  Description of Artificial Sequence: Synthetic oligonucleotide
  Antisense strand to SEQ ID NO: 862900
aauaaccacccuguucucu

SEQ ID NO: 862902 - RNA, 19 nt, Artificial Sequence
  Description of Artificial Sequence: Synthetic oligonucleotide
  Sense strand starting at position 1074 of SEQ ID NO: 588408
ggcuuuguucuccaaauac

SEQ ID NO: 862903 - RNA, 19 nt, Artificial Sequence
  Description of Artificial Sequence: Synthetic oligonucleotide
  Antisense strand to SEQ ID NO: 862902
guauuuggagaacaaagcc

SEQ ID NO: 862904 - RNA, 19 nt, Artificial Sequence
  Description of Artificial Sequence: Synthetic oligonucleotide
  Sense strand starting at position 1125 of SEQ ID NO: 588408
uuccucaacuguucggaaa

SEQ ID NO: 862905 - RNA, 19 nt, Artificial Sequence
  Description of Artificial Sequence: Synthetic oligonucleotide
  Antisense strand to SEQ ID NO: 862904
uuuccgaacaguugaggaa

SEQ ID NO: 862906 - RNA, 19 nt, Artificial Sequence
  Description of Artificial Sequence: Synthetic oligonucleotide
  Sense strand starting at position 1318 of SEQ ID NO: 588408
agauucggucccugaccua

SEQ ID NO: 862907 - RNA, 19 nt, Artificial Sequence
  Description of Artificial Sequence: Synthetic oligonucleotide
  Antisense strand to SEQ ID NO: 862906
uaggucagggaccgaaucu

SEQ ID NO: 862908 - RNA, 19 nt, Artificial Sequence
  Description of Artificial Sequence: Synthetic oligonucleotide
  Sense strand starting at position 1355 of SEQ ID NO: 588408
cgagacuuggucgaggaga

SEQ ID NO: 862909 - RNA, 19 nt, Artificial Sequence
  Description of Artificial Sequence: Synthetic oligonucleotide
  Antisense strand to SEQ ID NO: 862908
ucuccucgaccaagucucg

SEQ ID NO: 862910 - RNA, 19 nt, Artificial Sequence
  Description of Artificial Sequence: Synthetic oligonucleotide
  Sense strand starting at position 1357 of SEQ ID NO: 588408
agacuuggucgaggagaaa

SEQ ID NO: 862911 - RNA, 19 nt, Artificial Sequence
  Description of Artificial Sequence: Synthetic oligonucleotide
  Antisense strand to SEQ ID NO: 862910
uuucuccucgaccaagucu

SEQ ID NO: 862912 - RNA, 19 nt, Artificial Sequence
  Description of Artificial Sequence: Synthetic oligonucleotide
  Sense strand starting at position 1470 of SEQ ID NO: 588408
gcagucugcaggcaugaaa

SEQ ID NO: 862913 - RNA, 19 nt, Artificial Sequence
  Description of Artificial Sequence: Synthetic oligonucleotide
  Antisense strand to SEQ ID NO: 862912
uuucaugccugcagacugc

SEQ ID NO: 862914 - RNA, 19 nt, Artificial Sequence
  Description of Artificial Sequence: Synthetic oligonucleotide
  Sense strand starting at position 2469 of SEQ ID NO: 588408
gugggauuaauaugagcuu

SEQ ID NO: 862915 - RNA, 19 nt, Artificial Sequence
  Description of Artificial Sequence: Synthetic oligonucleotide
  Antisense strand to SEQ ID NO: 862914
aagcucauauuaaucccac

SEQ ID NO: 862916 - RNA, 19 nt, Artificial Sequence
  Description of Artificial Sequence: Synthetic oligonucleotide
  Sense strand starting at position 2609 of SEQ ID NO: 588408
gcggacuuugcagaggauu

SEQ ID NO: 862917 - RNA, 19 nt, Artificial Sequence
  Description of Artificial Sequence: Synthetic oligonucleotide
  Antisense strand to SEQ ID NO: 862916
aauccucugcaaaguccgc

SEQ ID NO: 862918 - RNA, 19 nt, Artificial Sequence
  Description of Artificial Sequence: Synthetic oligonucleotide
  Sense strand starting at position 2611 of SEQ ID NO: 588408
ggacuuugcagaggauugu

SEQ ID NO: 862919 - RNA, 19 nt, Artificial Sequence
  Description of Artificial Sequence: Synthetic oligonucleotide
  Antisense strand to SEQ ID NO: 862918
acaauccucugcaaagucc

SEQ ID NO: 862920 - RNA, 19 nt, Artificial Sequence
  Description of Artificial Sequence: Synthetic oligonucleotide
  Sense strand starting at position 2635 of SEQ ID NO: 588408
uuaaauaacguaugguaca

SEQ ID NO: 862921 - RNA, 19 nt, Artificial Sequence
  Description of Artificial Sequence: Synthetic oligonucleotide
  Antisense strand to SEQ ID NO: 862920
uguaccauacguuauuuaa

SEQ ID NO: 862922 - RNA, 19 nt, Artificial Sequence
  Description of Artificial Sequence: Synthetic oligonucleotide
  Sense strand starting at position 2640 of SEQ ID NO: 588408
uaacguaugguacauaauu

SEQ ID NO: 862923 - RNA, 19 nt, Artificial Sequence
  Description of Artificial Sequence: Synthetic oligonucleotide
  Antisense strand to SEQ ID NO: 862922
aauuauguaccauacguua

SEQ ID NO: 862924 - RNA, 19 nt, Artificial Sequence
  Description of Artificial Sequence: Synthetic oligonucleotide
  Sense strand starting at position 2648 of SEQ ID NO: 588408
gguacauaauuaguaguga

SEQ ID NO: 862925 - RNA, 19 nt, Artificial Sequence
  Description of Artificial Sequence: Synthetic oligonucleotide
  Antisense strand to SEQ ID NO: 862924
ucacuacuaauuauguacc

SEQ ID NO: 862926 - RNA, 19 nt, Artificial Sequence
  Description of Artificial Sequence: Synthetic oligonucleotide
  Sense strand starting at position 2999 of SEQ ID NO: 588408
ccauuauagucauucuuag

SEQ ID NO: 862927 - RNA, 19 nt, Artificial Sequence
  Description of Artificial Sequence: Synthetic oligonucleotide
  Antisense strand to SEQ ID NO: 862926
cuaagaaugacuauaaugg

SEQ ID NO: 862928 - RNA, 19 nt, Artificial Sequence
  Description of Artificial Sequence: Synthetic oligonucleotide
  Sense strand starting at position 3066 of SEQ ID NO: 588408
uuagaaagcuuggaauuua

SEQ ID NO: 862929 - RNA, 19 nt, Artificial Sequence
  Description of Artificial Sequence: Synthetic oligonucleotide
  Antisense strand to SEQ ID NO: 862928
uaaauuccaagcuuucuaa

SEQ ID NO: 862930 - RNA, 19 nt, Artificial Sequence
  Description of Artificial Sequence: Synthetic oligonucleotide
  Sense strand starting at position 3092 of SEQ ID NO: 588408
ugagaaaguucuuccucaa

SEQ ID NO: 862931 - RNA, 19 nt, Artificial Sequence
  Description of Artificial Sequence: Synthetic oligonucleotide
  Antisense strand to SEQ ID NO: 862930
uugaggaagaacuuucuca

SEQ ID NO: 862932 - RNA, 19 nt, Artificial Sequence
  Description of Artificial Sequence: Synthetic oligonucleotide
  Sense strand starting at position 3170 of SEQ ID NO: 588408
gacagucauuuaugaugaa

SEQ ID NO: 862933 - RNA, 19 nt, Artificial Sequence
  Description of Artificial Sequence: Synthetic oligonucleotide
  Antisense strand to SEQ ID NO: 862932
uucaucauaaaugacuguc

SEQ ID NO: 862934 - RNA, 19 nt, Artificial Sequence
  Description of Artificial Sequence: Synthetic oligonucleotide
  Sense strand starting at position 3171 of SEQ ID NO: 588408
acagucauuuaugaugaau

SEQ ID NO: 862935 - RNA, 19 nt, Artificial Sequence
  Description of Artificial Sequence: Synthetic oligonucleotide
  Antisense strand to SEQ ID NO: 862934
auucaucauaaaugacugu

SEQ ID NO: 862936 - RNA, 19 nt, Artificial Sequence
  Description of Artificial Sequence: Synthetic oligonucleotide
  Sense strand starting at position 3214 of SEQ ID NO: 588408
guaccuauucuguaccagu

SEQ ID NO: 862937 - RNA, 19 nt, Artificial Sequence
  Description of Artificial Sequence: Synthetic oligonucleotide
  Antisense strand to SEQ ID NO: 862936
acugguacagaauagguac

SEQ ID NO: 862938 - RNA, 19 nt, Artificial Sequence
  Description of Artificial Sequence: Synthetic oligonucleotide
  Sense strand starting at position 3411 of SEQ ID NO: 588408
gcccaaugaguggaucacu

SEQ ID NO: 862939 - RNA, 19 nt, Artificial Sequence
  Description of Artificial Sequence: Synthetic oligonucleotide
  Antisense strand to SEQ ID NO: 862938
agugauccacucauugggc

SEQ ID NO: 862940 - RNA, 19 nt, Artificial Sequence
  Description of Artificial Sequence: Synthetic oligonucleotide
  Sense strand starting at position 3416 of SEQ ID NO: 588408
augaguggaucacuugagu

SEQ ID NO: 862941 - RNA, 19 nt, Artificial Sequence
  Description of Artificial Sequence: Synthetic oligonucleotide
  Antisense strand to SEQ ID NO: 862940
acucaagugauccacucau

SEQ ID NO: 862942 - RNA, 19 nt, Artificial Sequence
  Description of Artificial Sequence: Synthetic oligonucleotide
  Sense strand starting at position 3733 of SEQ ID NO: 588408
uuggaaaugaccugaguau

SEQ ID NO: 862943 - RNA, 19 nt, Artificial Sequence
  Description of Artificial Sequence: Synthetic oligonucleotide
  Antisense strand to SEQ ID NO: 862942
auacucaggucauuuccaa

SEQ ID NO: 862944 - RNA, 19 nt, Artificial Sequence
  Description of Artificial Sequence: Synthetic oligonucleotide
  Sense strand starting at position 3835 of SEQ ID NO: 588408
gaaggagcucuguguuuga

SEQ ID NO: 862945 - RNA, 19 nt, Artificial Sequence
  Description of Artificial Sequence: Synthetic oligonucleotide
  Antisense strand to SEQ ID NO: 862944
ucaaacacagagcuccuuc

SEQ ID NO: 862946 - RNA, 19 nt, Artificial Sequence
  Description of Artificial Sequence: Synthetic oligonucleotide
  Sense strand starting at position 3838 of SEQ ID NO: 588408
ggagcucuguguuugagaa

SEQ ID NO: 862947 - RNA, 19 nt, Artificial Sequence
  Description of Artificial Sequence: Synthetic oligonucleotide
  Antisense strand to SEQ ID NO: 862946
uucucaaacacagagcucc

SEQ ID NO: 862948 - RNA, 19 nt, Artificial Sequence
  Description of Artificial Sequence: Synthetic oligonucleotide
  Sense strand starting at position 3839 of SEQ ID NO: 588408
gagcucuguguuugagaaa

SEQ ID NO: 862949 - RNA, 19 nt, Artificial Sequence
  Description of Artificial Sequence: Synthetic oligonucleotide
  Antisense strand to SEQ ID NO: 862948
uuucucaaacacagagcuc

SEQ ID NO: 862950 - RNA, 19 nt, Artificial Sequence
  Description of Artificial Sequence: Synthetic oligonucleotide
  Sense strand starting at position 3846 of SEQ ID NO: 588408
guguuugagaaacagcauu

SEQ ID NO: 862951 - RNA, 19 nt, Artificial Sequence
  Description of Artificial Sequence: Synthetic oligonucleotide
  Antisense strand to SEQ ID NO: 862950
aaugcuguuucucaaacac

SEQ ID NO: 862952 - RNA, 19 nt, Artificial Sequence
  Description of Artificial Sequence: Synthetic oligonucleotide
  Sense strand starting at position 3868 of SEQ ID NO: 588408
ucuacaauguugucauuac

SEQ ID NO: 862953 - RNA, 19 nt, Artificial Sequence
  Description of Artificial Sequence: Synthetic oligonucleotide
  Antisense strand to SEQ ID NO: 862952
guaaugacaacauuguaga

SEQ ID NO: 862954 - RNA, 19 nt, Artificial Sequence
  Description of Artificial Sequence: Synthetic oligonucleotide
  Sense strand starting at position 3879 of SEQ ID NO: 588408
gucauuacaucuccacaug

SEQ ID NO: 862955 - RNA, 19 nt, Artificial Sequence
  Description of Artificial Sequence: Synthetic oligonucleotide
  Antisense strand to SEQ ID NO: 862954
cauguggagauguaaugac

SEQ ID NO: 862956 - RNA, 19 nt, Artificial Sequence
  Description of Artificial Sequence: Synthetic oligonucleotide
  Sense strand starting at position 157 of SEQ ID NO: 588409
cuccauugggcuuauuacu

SEQ ID NO: 862957 - RNA, 19 nt, Artificial Sequence
  Description of Artificial Sequence: Synthetic oligonucleotide
  Antisense strand to SEQ ID NO: 862956
aguaauaagcccaauggag

SEQ ID NO: 862958 - RNA, 19 nt, Artificial Sequence
  Description of Artificial Sequence: Synthetic oligonucleotide
  Sense strand starting at position 260 of SEQ ID NO: 588409
uccacauuaggucagcauu

SEQ ID NO: 862959 - RNA, 19 nt, Artificial Sequence
  Description of Artificial Sequence: Synthetic oligonucleotide
  Antisense strand to SEQ ID NO: 862958
aaugcugaccuaaugugga

SEQ ID NO: 862960 - RNA, 19 nt, Artificial Sequence
  Description of Artificial Sequence: Synthetic oligonucleotide
  Sense strand starting at position 298 of SEQ ID NO: 588409
ggagcagguuguccaagaa

SEQ ID NO: 862961 - RNA, 19 nt, Artificial Sequence
  Description of Artificial Sequence: Synthetic oligonucleotide
  Antisense strand to SEQ ID NO: 862960
uucuuggacaaccugcucc

SEQ ID NO: 862962 - RNA, 19 nt, Artificial Sequence
  Description of Artificial Sequence: Synthetic oligonucleotide
  Sense strand starting at position 424 of SEQ ID NO: 588409
uagggcagugacuauaauu

SEQ ID NO: 862963 - RNA, 19 nt, Artificial Sequence
  Description of Artificial Sequence: Synthetic oligonucleotide
  Antisense strand to SEQ ID NO: 862962
aauuauagucacugcccua

SEQ ID NO: 862964 - RNA, 19 nt, Artificial Sequence
  Description of Artificial Sequence: Synthetic oligonucleotide
  Sense strand starting at position 435 of SEQ ID NO: 588409
cuauaauucuucccggaca

SEQ ID NO: 862965 - RNA, 19 nt, Artificial Sequence
  Description of Artificial Sequence: Synthetic oligonucleotide
  Antisense strand to SEQ ID NO: 862964
uguccgggaagaauuauag

SEQ ID NO: 862966 - RNA, 19 nt, Artificial Sequence
  Description of Artificial Sequence: Synthetic oligonucleotide
  Sense strand starting at position 437 of SEQ ID NO: 588409
auaauucuucccggacaua

SEQ ID NO: 862967 - RNA, 19 nt, Artificial Sequence
  Description of Artificial Sequence: Synthetic oligonucleotide
  Antisense strand to SEQ ID NO: 862966
uauguccgggaagaauuau

SEQ ID NO: 862968 - RNA, 19 nt, Artificial Sequence
  Description of Artificial Sequence: Synthetic oligonucleotide
  Sense strand starting at position 492 of SEQ ID NO: 588409
agcgaaagccauuacauau

SEQ ID NO: 862969 - RNA, 19 nt, Artificial Sequence
  Description of Artificial Sequence: Synthetic oligonucleotide
  Antisense strand to SEQ ID NO: 862968
auauguaauggcuuucgcu

SEQ ID NO: 862970 - RNA, 19 nt, Artificial Sequence
  Description of Artificial Sequence: Synthetic oligonucleotide
  Sense strand starting at position 505 of SEQ ID NO: 588409
acauauuaguagccaguga

SEQ ID NO: 862971 - RNA, 19 nt, Artificial Sequence
  Description of Artificial Sequence: Synthetic oligonucleotide
  Antisense strand to SEQ ID NO: 862970
ucacuggcuacuaauaugu

SEQ ID NO: 862972 - RNA, 19 nt, Artificial Sequence
  Description of Artificial Sequence: Synthetic oligonucleotide
  Sense strand starting at position 509 of SEQ ID NO: 588409
auuaguagccagugagaaa

SEQ ID NO: 862973 - RNA, 19 nt, Artificial Sequence
  Description of Artificial Sequence: Synthetic oligonucleotide
  Antisense strand to SEQ ID NO: 862972
uuucucacuggcuacuaau

SEQ ID NO: 862974 - RNA, 19 nt, Artificial Sequence
  Description of Artificial Sequence: Synthetic oligonucleotide
  Sense strand starting at position 551 of SEQ ID NO: 588409
agaggagagcacuguaaca

SEQ ID NO: 862975 - RNA, 19 nt, Artificial Sequence
  Description of Artificial Sequence: Synthetic oligonucleotide
  Antisense strand to SEQ ID NO: 862974
uguuacagugcucuccucu

SEQ ID NO: 862976 - RNA, 19 nt, Artificial Sequence
  Description of Artificial Sequence: Synthetic oligonucleotide
  Sense strand starting at position 642 of SEQ ID NO: 588409
gucuaaguaagauggauac

SEQ ID NO: 862977 - RNA, 19 nt, Artificial Sequence
  Description of Artificial Sequence: Synthetic oligonucleotide
  Antisense strand to SEQ ID NO: 862976
guauccaucuuacuuagac

SEQ ID NO: 862978 - RNA, 19 nt, Artificial Sequence
  Description of Artificial Sequence: Synthetic oligonucleotide
  Sense strand starting at position 652 of SEQ ID NO: 588409
gauggauacucacuacugu

SEQ ID NO: 862979 - RNA, 19 nt, Artificial Sequence
  Description of Artificial Sequence: Synthetic oligonucleotide
  Antisense strand to SEQ ID NO: 862978
acaguagugaguauccauc

SEQ ID NO: 862980 - RNA, 19 nt, Artificial Sequence
  Description of Artificial Sequence: Synthetic oligonucleotide
  Sense strand starting at position 737 of SEQ ID NO: 588409
uggaaaguucugggaucca

SEQ ID NO: 862981 - RNA, 19 nt, Artificial Sequence
  Description of Artificial Sequence: Synthetic oligonucleotide
  Antisense strand to SEQ ID NO: 862980
uggaucccagaacuuucca

SEQ ID NO: 862982 - RNA, 19 nt, Artificial Sequence
  Description of Artificial Sequence: Synthetic oligonucleotide
  Sense strand starting at position 762 of SEQ ID NO: 588409
ugucuauaggagcaucaau

SEQ ID NO: 862983 - RNA, 19 nt, Artificial Sequence
  Description of Artificial Sequence: Synthetic oligonucleotide
  Antisense strand to SEQ ID NO: 862982
auugaugcuccuauagaca

SEQ ID NO: 862984 - RNA, 19 nt, Artificial Sequence
  Description of Artificial Sequence: Synthetic oligonucleotide
  Sense strand starting at position 795 of SEQ ID NO: 588409
gucaguuaucagggaaaca

SEQ ID NO: 862985 - RNA, 19 nt, Artificial Sequence
  Description of Artificial Sequence: Synthetic oligonucleotide
  Antisense strand to SEQ ID NO: 862984
uguuucccugauaacugac

SEQ ID NO: 862986 - RNA, 19 nt, Artificial Sequence
  Description of Artificial Sequence: Synthetic oligonucleotide
  Sense strand starting at position 960 of SEQ ID NO: 588409
guaucagugcgcuuacaau

SEQ ID NO: 862987 - RNA, 19 nt, Artificial Sequence
  Description of Artificial Sequence: Synthetic oligonucleotide
  Antisense strand to SEQ ID NO: 862986
auuguaagcgcacugauac

SEQ ID NO: 862988 - RNA, 19 nt, Artificial Sequence
  Description of Artificial Sequence: Synthetic oligonucleotide
  Sense strand starting at position 974 of SEQ ID NO: 588409
acaauuacauaagaagaga

SEQ ID NO: 862989 - RNA, 19 nt, Artificial Sequence
  Description of Artificial Sequence: Synthetic oligonucleotide
  Antisense strand to SEQ ID NO: 862988
ucucuucuuauguaauugu

SEQ ID NO: 862990 - RNA, 19 nt, Artificial Sequence
  Description of Artificial Sequence: Synthetic oligonucleotide
  Sense strand starting at position 1094 of SEQ ID NO: 588409
gccagaagccaguaaguau

SEQ ID NO: 862991 - RNA, 19 nt, Artificial Sequence
  Description of Artificial Sequence: Synthetic oligonucleotide
  Antisense strand to SEQ ID NO: 862990
auacuuacuggcuucuggc

SEQ ID NO: 862992 - RNA, 19 nt, Artificial Sequence
  Description of Artificial Sequence: Synthetic oligonucleotide
  Sense strand starting at position 1181 of SEQ ID NO: 588409
ugauuaaaugcacgacauu

SEQ ID NO: 862993 - RNA, 19 nt, Artificial Sequence
  Description of Artificial Sequence: Synthetic oligonucleotide
  Antisense strand to SEQ ID NO: 862992
aaugucgugcauuuaauca

SEQ ID NO: 862994 - RNA, 19 nt, Artificial Sequence
  Description of Artificial Sequence: Synthetic oligonucleotide
  Sense strand starting at position 1197 of SEQ ID NO: 588409
auugucagacaguaaaguu

SEQ ID NO: 862995 - RNA, 19 nt, Artificial Sequence
  Description of Artificial Sequence: Synthetic oligonucleotide
  Antisense strand to SEQ ID NO: 862994
aacuuuacugucugacaau

SEQ ID NO: 862996 - RNA, 19 nt, Artificial Sequence
  Description of Artificial Sequence: Synthetic oligonucleotide
  Sense strand starting at position 1212 of SEQ ID NO: 588409
aguuucaaugucggaauga

SEQ ID NO: 862997 - RNA, 19 nt, Artificial Sequence
  Description of Artificial Sequence: Synthetic oligonucleotide
  Antisense strand to SEQ ID NO: 862996
ucauuccgacauugaaacu

SEQ ID NO: 862998 - RNA, 19 nt, Artificial Sequence
  Description of Artificial Sequence: Synthetic oligonucleotide
  Sense strand starting at position 2211 of SEQ ID NO: 588409
cgucgauggcgucuugaca

SEQ ID NO: 862999 - RNA, 19 nt, Artificial Sequence
  Description of Artificial Sequence: Synthetic oligonucleotide
  Antisense strand to SEQ ID NO: 862998
ugucaagacgccaucgacg

SEQ ID NO: 863000 - RNA, 19 nt, Artificial Sequence
  Description of Artificial Sequence: Synthetic oligonucleotide
  Sense strand starting at position 2587 of SEQ ID NO: 588409
uuacacgguccuuaacaaa

SEQ ID NO: 863001 - RNA, 19 nt, Artificial Sequence
  Description of Artificial Sequence: Synthetic oligonucleotide
  Antisense strand to SEQ ID NO: 863000
uuuguuaaggaccguguaa

SEQ ID NO: 863002 - RNA, 19 nt, Artificial Sequence
  Description of Artificial Sequence: Synthetic oligonucleotide
  Sense strand starting at position 2681 of SEQ ID NO: 588409
gcaggaggcuucuuggaac

SEQ ID NO: 863003 - RNA, 19 nt, Artificial Sequence
  Description of Artificial Sequence: Synthetic oligonucleotide
  Antisense strand to SEQ ID NO: 863002
guuccaagaagccuccugc

SEQ ID NO: 863004 - RNA, 19 nt, Artificial Sequence
  Description of Artificial Sequence: Synthetic oligonucleotide
  Sense strand starting at position 2750 of SEQ ID NO: 588409
gaaggaaucuuagugcuag

SEQ ID NO: 863005 - RNA, 19 nt, Artificial Sequence
  Description of Artificial Sequence: Synthetic oligonucleotide
  Antisense strand to SEQ ID NO: 863004
cuagcacuaagauuccuuc

SEQ ID NO: 863006 - RNA, 19 nt, Artificial Sequence
  Description of Artificial Sequence: Synthetic oligonucleotide
  Sense strand starting at position 2797 of SEQ ID NO: 588409
ucuuauaagugagcaaaca

SEQ ID NO: 863007 - RNA, 19 nt, Artificial Sequence
  Description of Artificial Sequence: Synthetic oligonucleotide
  Antisense strand to SEQ ID NO: 863006
uguuugcucacuuauaaga

SEQ ID NO: 863008 - RNA, 19 nt, Artificial Sequence
  Description of Artificial Sequence: Synthetic oligonucleotide
  Sense strand starting at position 2852 of SEQ ID NO: 588409
gcacgauugcccucguguu

SEQ ID NO: 863009 - RNA, 19 nt, Artificial Sequence
  Description of Artificial Sequence: Synthetic oligonucleotide
  Antisense strand to SEQ ID NO: 863008
aacacgagggcaaucgugc

SEQ ID NO: 863010 - RNA, 19 nt, Artificial Sequence
  Description of Artificial Sequence: Synthetic oligonucleotide
  Sense strand starting at position 2854 of SEQ ID NO: 588409
acgauugcccucguguuua

SEQ ID NO: 863011 - RNA, 19 nt, Artificial Sequence
  Description of Artificial Sequence: Synthetic oligonucleotide
  Antisense strand to SEQ ID NO: 863010
uaaacacgagggcaaucgu

SEQ ID NO: 863012 - RNA, 19 nt, Artificial Sequence
  Description of Artificial Sequence: Synthetic oligonucleotide
  Sense strand starting at position 2865 of SEQ ID NO: 588409
cguguuuaauauuucccaa

SEQ ID NO: 863013 - RNA, 19 nt, Artificial Sequence
  Description of Artificial Sequence: Synthetic oligonucleotide
  Antisense strand to SEQ ID NO: 863012
uugggaaauauuaaacacg

SEQ ID NO: 863014 - RNA, 19 nt, Artificial Sequence
  Description of Artificial Sequence: Synthetic oligonucleotide
  Sense strand starting at position 2916 of SEQ ID NO: 588409
agaaccauguugucaaaca

SEQ ID NO: 863015 - RNA, 19 nt, Artificial Sequence
  Description of Artificial Sequence: Synthetic oligonucleotide
  Antisense strand to SEQ ID NO: 863014
uguuugacaacaugguucu

SEQ ID NO: 863016 - RNA, 19 nt, Artificial Sequence
  Description of Artificial Sequence: Synthetic oligonucleotide
  Sense strand starting at position 2943 of SEQ ID NO: 588409
ccaucuugaaguugugaag

SEQ ID NO: 863017 - RNA, 19 nt, Artificial Sequence
  Description of Artificial Sequence: Synthetic oligonucleotide
  Antisense strand to SEQ ID NO: 863016
cuucacaacuucaagaugg

SEQ ID NO: 863018 - RNA, 19 nt, Artificial Sequence
  Description of Artificial Sequence: Synthetic oligonucleotide
  Sense strand starting at position 2949 of SEQ ID NO: 588409
ugaaguugugaaggaggau

SEQ ID NO: 863019 - RNA, 19 nt, Artificial Sequence
  Description of Artificial Sequence: Synthetic oligonucleotide
  Antisense strand to SEQ ID NO: 863018
auccuccuucacaacuuca

SEQ ID NO: 863020 - RNA, 19 nt, Artificial Sequence
  Description of Artificial Sequence: Synthetic oligonucleotide
  Sense strand starting at position 3341 of SEQ ID NO: 588409
ucauuaugccaagagagcu

SEQ ID NO: 863021 - RNA, 19 nt, Artificial Sequence
  Description of Artificial Sequence: Synthetic oligonucleotide
  Antisense strand to SEQ ID NO: 863020
agcucucuuggcauaauga

SEQ ID NO: 863022 - RNA, 19 nt, Artificial Sequence
  Description of Artificial Sequence: Synthetic oligonucleotide
  Sense strand starting at position 3349 of SEQ ID NO: 588409
ccaagagagcuuugggcau

SEQ ID NO: 863023 - RNA, 19 nt, Artificial Sequence
  Description of Artificial Sequence: Synthetic oligonucleotide
  Antisense strand to SEQ ID NO: 863022
augcccaaagcucucuugg

SEQ ID NO: 863024 - RNA, 19 nt, Artificial Sequence
  Description of Artificial Sequence: Synthetic oligonucleotide
  Sense strand starting at position 3353 of SEQ ID NO: 588409
gagagcuuugggcauucua

SEQ ID NO: 863025 - RNA, 19 nt, Artificial Sequence
  Description of Artificial Sequence: Synthetic oligonucleotide
  Antisense strand to SEQ ID NO: 863024
uagaaugcccaaagcucuc

SEQ ID NO: 863026 - RNA, 19 nt, Artificial Sequence
  Description of Artificial Sequence: Synthetic oligonucleotide
  Sense strand starting at position 3441 of SEQ ID NO: 588409
gacugugaguuacuuuaga

SEQ ID NO: 863027 - RNA, 19 nt, Artificial Sequence
  Description of Artificial Sequence: Synthetic oligonucleotide
  Antisense strand to SEQ ID NO: 863026
ucuaaaguaacucacaguc

SEQ ID NO: 863028 - RNA, 19 nt, Artificial Sequence
  Description of Artificial Sequence: Synthetic oligonucleotide
  Sense strand starting at position 3842 of SEQ ID NO: 588409
agaaauauaucucugaggu

SEQ ID NO: 863029 - RNA, 19 nt, Artificial Sequence
  Description of Artificial Sequence: Synthetic oligonucleotide
  Antisense strand to SEQ ID NO: 863028
accucagagauauauuucu

SEQ ID NO: 863030 - RNA, 19 nt, Artificial Sequence
  Description of Artificial Sequence: Synthetic oligonucleotide
  Sense strand starting at position 3843 of SEQ ID NO: 588409
gaaauauaucucugagguu

SEQ ID NO: 863031 - RNA, 19 nt, Artificial Sequence
  Description of Artificial Sequence: Synthetic oligonucleotide
  Antisense strand to SEQ ID NO: 863030
aaccucagagauauauuuc

SEQ ID NO: 863032 - RNA, 19 nt, Artificial Sequence
  Description of Artificial Sequence: Synthetic oligonucleotide
  Sense strand starting at position 3922 of SEQ ID NO: 588409
aggcuauuggcccaaaugu

SEQ ID NO: 863033 - RNA, 19 nt, Artificial Sequence
  Description of Artificial Sequence: Synthetic oligonucleotide
  Antisense strand to SEQ ID NO: 863032
acauuugggccaauagccu

SEQ ID NO: 863034 - RNA, 19 nt, Artificial Sequence
  Description of Artificial Sequence: Synthetic oligonucleotide
  Sense strand starting at position 3949 of SEQ ID NO: 588409
uuccaagguuugguccaaa

SEQ ID NO: 863035 - RNA, 19 nt, Artificial Sequence
  Description of Artificial Sequence: Synthetic oligonucleotide
  Antisense strand to SEQ ID NO: 863034
uuuggaccaaaccuuggaa

SEQ ID NO: 863036 - RNA, 19 nt, Artificial Sequence
  Description of Artificial Sequence: Synthetic oligonucleotide
  Sense strand starting at position 100 of SEQ ID NO: 588410
gcacgaaggccucauaggu

SEQ ID NO: 863037 - RNA, 19 nt, Artificial Sequence
  Description of Artificial Sequence: Synthetic oligonucleotide
  Antisense strand to SEQ ID NO: 863036
accuaugaggccuucgugc

SEQ ID NO: 863038 - RNA, 19 nt, Artificial Sequence
  Description of Artificial Sequence: Synthetic oligonucleotide
  Sense strand starting at position 161 of SEQ ID NO: 588410
cagugcguugcgccagaau

SEQ ID NO: 863039 - RNA, 19 nt, Artificial Sequence
  Description of Artificial Sequence: Synthetic oligonucleotide
  Antisense strand to SEQ ID NO: 863038
auucuggcgcaacgcacug

SEQ ID NO: 863040 - RNA, 19 nt, Artificial Sequence
  Description of Artificial Sequence: Synthetic oligonucleotide
  Sense strand starting at position 163 of SEQ ID NO: 588410
gugcguugcgccagaauuu

SEQ ID NO: 863041 - RNA, 19 nt, Artificial Sequence
  Description of Artificial Sequence: Synthetic oligonucleotide
  Antisense strand to SEQ ID NO: 863040
aaauucuggcgcaacgcac

SEQ ID NO: 863042 - RNA, 19 nt, Artificial Sequence
  Description of Artificial Sequence: Synthetic oligonucleotide
  Sense strand starting at position 170 of SEQ ID NO: 588410
gcgccagaauuucuccgua

SEQ ID NO: 863043 - RNA, 19 nt, Artificial Sequence
  Description of Artificial Sequence: Synthetic oligonucleotide
  Antisense strand to SEQ ID NO: 863042
uacggagaaauucuggcgc

SEQ ID NO: 863044 - RNA, 19 nt, Artificial Sequence
  Description of Artificial Sequence: Synthetic oligonucleotide
  Sense strand starting at position 172 of SEQ ID NO: 588410
gccagaauuucuccguaau

SEQ ID NO: 863045 - RNA, 19 nt, Artificial Sequence
  Description of Artificial Sequence: Synthetic oligonucleotide
  Antisense strand to SEQ ID NO: 863044
auuacggagaaauucuggc

SEQ ID NO: 863046 - RNA, 19 nt, Artificial Sequence
  Description of Artificial Sequence: Synthetic oligonucleotide
  Sense strand starting at position 174 of SEQ ID NO: 588410
cagaauuucuccguaaugu

SEQ ID NO: 863047 - RNA, 19 nt, Artificial Sequence
  Description of Artificial Sequence: Synthetic oligonucleotide
  Antisense strand to SEQ ID NO: 863046
acauuacggagaaauucug

SEQ ID NO: 863048 - RNA, 19 nt, Artificial Sequence
  Description of Artificial Sequence: Synthetic oligonucleotide
  Sense strand starting at position 201 of SEQ ID NO: 588410
ugcugagaguucucaaagg

SEQ ID NO: 863049 - RNA, 19 nt, Artificial Sequence
  Description of Artificial Sequence: Synthetic oligonucleotide
  Antisense strand to SEQ ID NO: 863048
ccuuugagaacucucagca

SEQ ID NO: 863050 - RNA, 19 nt, Artificial Sequence
  Description of Artificial Sequence: Synthetic oligonucleotide
  Sense strand starting at position 2375 of SEQ ID NO: 588410
uggagaucucaaugcaggu

SEQ ID NO: 863051 - RNA, 19 nt, Artificial Sequence
  Description of Artificial Sequence: Synthetic oligonucleotide
  Antisense strand to SEQ ID NO: 863050
accugcauugagaucucca

SEQ ID NO: 863052 - RNA, 19 nt, Artificial Sequence
  Description of Artificial Sequence: Synthetic oligonucleotide
  Sense strand starting at position 2435 of SEQ ID NO: 588410
gagggagucuugcacuauc

SEQ ID NO: 863053 - RNA, 19 nt, Artificial Sequence
  Description of Artificial Sequence: Synthetic oligonucleotide
  Antisense strand to SEQ ID NO: 863052
gauagugcaagacucccuc

SEQ ID NO: 863054 - RNA, 19 nt, Artificial Sequence
  Description of Artificial Sequence: Synthetic oligonucleotide
  Sense strand starting at position 2513 of SEQ ID NO: 588410
gaucaaguggugcgaucuu

SEQ ID NO: 863055 - RNA, 19 nt, Artificial Sequence
  Description of Artificial Sequence: Synthetic oligonucleotide
  Antisense strand to SEQ ID NO: 863054
aagaucgcaccacuugauc

SEQ ID NO: 863056 - RNA, 19 nt, Artificial Sequence
  Description of Artificial Sequence: Synthetic oligonucleotide
  Sense strand starting at position 2695 of SEQ ID NO: 588410
ucaggugauccacaaguuu

SEQ ID NO: 863057 - RNA, 19 nt, Artificial Sequence
  Description of Artificial Sequence: Synthetic oligonucleotide
  Antisense strand to SEQ ID NO: 863056
aaacuuguggaucaccuga

SEQ ID NO: 863058 - RNA, 19 nt, Artificial Sequence
  Description of Artificial Sequence: Synthetic oligonucleotide
  Sense strand starting at position 2921 of SEQ ID NO: 588410
ggucuaugggugugcacua

SEQ ID NO: 863059 - RNA, 19 nt, Artificial Sequence
  Description of Artificial Sequence: Synthetic oligonucleotide
  Antisense strand to SEQ ID NO: 863058
uagugcacacccauagacc

SEQ ID NO: 863060 - RNA, 19 nt, Artificial Sequence
  Description of Artificial Sequence: Synthetic oligonucleotide
  Sense strand starting at position 3110 of SEQ ID NO: 588410
ucguguguccugggaggaa

SEQ ID NO: 863061 - RNA, 19 nt, Artificial Sequence
  Description of Artificial Sequence: Synthetic oligonucleotide
  Antisense strand to SEQ ID NO: 863060
uuccucccaggacacacga

SEQ ID NO: 863062 - RNA, 19 nt, Artificial Sequence
  Description of Artificial Sequence: Synthetic oligonucleotide
  Sense strand starting at position 3111 of SEQ ID NO: 588410
cguguguccugggaggaau

SEQ ID NO: 863063 - RNA, 19 nt, Artificial Sequence
  Description of Artificial Sequence: Synthetic oligonucleotide
  Antisense strand to SEQ ID NO: 863062
auuccucccaggacacacg

SEQ ID NO: 863064 - RNA, 19 nt, Artificial Sequence
  Description of Artificial Sequence: Synthetic oligonucleotide
  Sense strand starting at position 3400 of SEQ ID NO: 588410
ugagcuuugcugcggaacu

SEQ ID NO: 863065 - RNA, 19 nt, Artificial Sequence
  Description of Artificial Sequence: Synthetic oligonucleotide
  Antisense strand to SEQ ID NO: 863064
aguuccgcagcaaagcuca

SEQ ID NO: 863066 - RNA, 19 nt, Artificial Sequence
  Description of Artificial Sequence: Synthetic oligonucleotide
  Sense strand starting at position 3401 of SEQ ID NO: 588410
gagcuuugcugcggaacuu

SEQ ID NO: 863067 - RNA, 19 nt, Artificial Sequence
  Description of Artificial Sequence: Synthetic oligonucleotide
  Antisense strand to SEQ ID NO: 863066
aaguuccgcagcaaagcuc

SEQ ID NO: 863068 - RNA, 19 nt, Artificial Sequence
  Description of Artificial Sequence: Synthetic oligonucleotide
  Sense strand starting at position 3591 of SEQ ID NO: 588410
ggaaacugucagugccuga

SEQ ID NO: 863069 - RNA, 19 nt, Artificial Sequence
  Description of Artificial Sequence: Synthetic oligonucleotide
  Antisense strand to SEQ ID NO: 863068
ucaggcacugacaguuucc

SEQ ID NO: 863070 - RNA, 19 nt, Artificial Sequence
  Description of Artificial Sequence: Synthetic oligonucleotide
  Sense strand starting at position 3604 of SEQ ID NO: 588410
gccugagcugcuuggcuua

SEQ ID NO: 863071 - RNA, 19 nt, Artificial Sequence
  Description of Artificial Sequence: Synthetic oligonucleotide
  Antisense strand to SEQ ID NO: 863070
uaagccaagcagcucaggc

SEQ ID NO: 863072 - RNA, 19 nt, Artificial Sequence
  Description of Artificial Sequence: Synthetic oligonucleotide
  Sense strand starting at position 41 of SEQ ID NO: 588411
uccagagaugcugggaaau

SEQ ID NO: 863073 - RNA, 19 nt, Artificial Sequence
  Description of Artificial Sequence: Synthetic oligonucleotide
  Antisense strand to SEQ ID NO: 863072
auuucccagcaucucugga

SEQ ID NO: 863074 - RNA, 19 nt, Artificial Sequence
  Description of Artificial Sequence: Synthetic oligonucleotide
  Sense strand starting at position 498 of SEQ ID NO: 588411
ccaaauaacacguguggga

SEQ ID NO: 863075 - RNA, 19 nt, Artificial Sequence
  Description of Artificial Sequence: Synthetic oligonucleotide
  Antisense strand to SEQ ID NO: 863074
ucccacacguguuauuugg

SEQ ID NO: 863076 - RNA, 19 nt, Artificial Sequence
  Description of Artificial Sequence: Synthetic oligonucleotide
  Sense strand starting at position 793 of SEQ ID NO: 588411
gcguaacugggucagauau

SEQ ID NO: 863077 - RNA, 19 nt, Artificial Sequence
  Description of Artificial Sequence: Synthetic oligonucleotide
  Antisense strand to SEQ ID NO: 863076
auaucugacccaguuacgc

SEQ ID NO: 863078 - RNA, 19 nt, Artificial Sequence
  Description of Artificial Sequence: Synthetic oligonucleotide
  Sense strand starting at position 858 of SEQ ID NO: 588411
ugaagacuuuaucuauguu

SEQ ID NO: 863079 - RNA, 19 nt, Artificial Sequence
  Description of Artificial Sequence: Synthetic oligonucleotide
  Antisense strand to SEQ ID NO: 863078
aacauagauaaagucuuca

SEQ ID NO: 863080 - RNA, 19 nt, Artificial Sequence
  Description of Artificial Sequence: Synthetic oligonucleotide
  Sense strand starting at position 949 of SEQ ID NO: 588411
ccacgucucagagagguua

SEQ ID NO: 863081 - RNA, 19 nt, Artificial Sequence
  Description of Artificial Sequence: Synthetic oligonucleotide
  Antisense strand to SEQ ID NO: 863080
uaaccucucugagacgugg

SEQ ID NO: 863082 - RNA, 19 nt, Artificial Sequence
  Description of Artificial Sequence: Synthetic oligonucleotide
  Sense strand starting at position 1213 of SEQ ID NO: 588411
acacauuauguguauguau

SEQ ID NO: 863083 - RNA, 19 nt, Artificial Sequence
  Description of Artificial Sequence: Synthetic oligonucleotide
  Antisense strand to SEQ ID NO: 863082
auacauacacauaaugugu

SEQ ID NO: 863084 - RNA, 19 nt, Artificial Sequence
  Description of Artificial Sequence: Synthetic oligonucleotide
  Sense strand starting at position 1262 of SEQ ID NO: 588411
ugaaacaaguuaucgcaga

SEQ ID NO: 863085 - RNA, 19 nt, Artificial Sequence
  Description of Artificial Sequence: Synthetic oligonucleotide
  Antisense strand to SEQ ID NO: 863084
ucugcgauaacuuguuuca

SEQ ID NO: 863086 - RNA, 19 nt, Artificial Sequence
  Description of Artificial Sequence: Synthetic oligonucleotide
  Sense strand starting at position 1267 of SEQ ID NO: 588411
caaguuaucgcagagaagu

SEQ ID NO: 863087 - RNA, 19 nt, Artificial Sequence
  Description of Artificial Sequence: Synthetic oligonucleotide
  Antisense strand to SEQ ID NO: 863086
acuucucugcgauaacuug

SEQ ID NO: 863088 - RNA, 19 nt, Artificial Sequence
  Description of Artificial Sequence: Synthetic oligonucleotide
  Sense strand starting at position 1269 of SEQ ID NO: 588411
aguuaucgcagagaaguga

SEQ ID NO: 863089 - RNA, 19 nt, Artificial Sequence
  Description of Artificial Sequence: Synthetic oligonucleotide
  Antisense strand to SEQ ID NO: 863088
ucacuucucugcgauaacu

SEQ ID NO: 863090 - RNA, 19 nt, Artificial Sequence
  Description of Artificial Sequence: Synthetic oligonucleotide
  Sense strand starting at position 2149 of SEQ ID NO: 588411
ggaugccuuguguaaaucu

SEQ ID NO: 863091 - RNA, 19 nt, Artificial Sequence
  Description of Artificial Sequence: Synthetic oligonucleotide
  Antisense strand to SEQ ID NO: 863090
agauuuacacaaggcaucc

SEQ ID NO: 863092 - RNA, 19 nt, Artificial Sequence
  Description of Artificial Sequence: Synthetic oligonucleotide
  Sense strand starting at position 2157 of SEQ ID NO: 588411
uguguaaaucuguacucug

SEQ ID NO: 863093 - RNA, 19 nt, Artificial Sequence
  Description of Artificial Sequence: Synthetic oligonucleotide
  Antisense strand to SEQ ID NO: 863092
cagaguacagauuuacaca

SEQ ID NO: 863094 - RNA, 19 nt, Artificial Sequence
  Description of Artificial Sequence: Synthetic oligonucleotide
  Sense strand starting at position 2216 of SEQ ID NO: 588411
ccucucugugccuuguuua

SEQ ID NO: 863095 - RNA, 19 nt, Artificial Sequence
  Description of Artificial Sequence: Synthetic oligonucleotide
  Antisense strand to SEQ ID NO: 863094
uaaacaaggcacagagagg

SEQ ID NO: 863096 - RNA, 19 nt, Artificial Sequence
  Description of Artificial Sequence: Synthetic oligonucleotide
  Sense strand starting at position 2288 of SEQ ID NO: 588411
ugaguuaagcccuguaaag

SEQ ID NO: 863097 - RNA, 19 nt, Artificial Sequence
  Description of Artificial Sequence: Synthetic oligonucleotide
  Antisense strand to SEQ ID NO: 863096
cuuuacagggcuuaacuca

SEQ ID NO: 863098 - RNA, 19 nt, Artificial Sequence
  Description of Artificial Sequence: Synthetic oligonucleotide
  Sense strand starting at position 2290 of SEQ ID NO: 588411
aguuaagcccuguaaaguu

SEQ ID NO: 863099 - RNA, 19 nt, Artificial Sequence
  Description of Artificial Sequence: Synthetic oligonucleotide
  Antisense strand to SEQ ID NO: 863098
aacuuuacagggcuuaacu

SEQ ID NO: 863100 - RNA, 19 nt, Artificial Sequence
  Description of Artificial Sequence: Synthetic oligonucleotide
  Sense strand starting at position 2328 of SEQ ID NO: 588411
uccuguuaagugcacaaua

SEQ ID NO: 863101 - RNA, 19 nt, Artificial Sequence
  Description of Artificial Sequence: Synthetic oligonucleotide
  Antisense strand to SEQ ID NO: 863100
uauugugcacuuaacagga

SEQ ID NO: 863102 - RNA, 19 nt, Artificial Sequence
  Description of Artificial Sequence: Synthetic oligonucleotide
  Sense strand starting at position 2330 of SEQ ID NO: 588411
cuguuaagugcacaauaaa

SEQ ID NO: 863103 - RNA, 19 nt, Artificial Sequence
  Description of Artificial Sequence: Synthetic oligonucleotide
  Antisense strand to SEQ ID NO: 863102
uuuauugugcacuuaacag

SEQ ID NO: 863104 - RNA, 19 nt, Artificial Sequence
  Description of Artificial Sequence: Synthetic oligonucleotide
  Sense strand starting at position 2915 of SEQ ID NO: 588411
gugccuugccuauuguuga

SEQ ID NO: 863105 - RNA, 19 nt, Artificial Sequence
  Description of Artificial Sequence: Synthetic oligonucleotide
  Antisense strand to SEQ ID NO: 863104
ucaacaauaggcaaggcac

SEQ ID NO: 863106 - RNA, 19 nt, Artificial Sequence
  Description of Artificial Sequence: Synthetic oligonucleotide
  Sense strand starting at position 2920 of SEQ ID NO: 588411
uugccuauuguugauagau

SEQ ID NO: 863107 - RNA, 19 nt, Artificial Sequence
  Description of Artificial Sequence: Synthetic oligonucleotide
  Antisense strand to SEQ ID NO: 863106
aucuaucaacaauaggcaa

SEQ ID NO: 863108 - RNA, 19 nt, Artificial Sequence
  Description of Artificial Sequence: Synthetic oligonucleotide
  Sense strand starting at position 2975 of SEQ ID NO: 588411
agggaugcaaauugugaaa

SEQ ID NO: 863109 - RNA, 19 nt, Artificial Sequence
  Description of Artificial Sequence: Synthetic oligonucleotide
  Antisense strand to SEQ ID NO: 863108
uuucacaauuugcaucccu

SEQ ID NO: 863110 - RNA, 19 nt, Artificial Sequence
  Description of Artificial Sequence: Synthetic oligonucleotide
  Sense strand starting at position 3015 of SEQ ID NO: 588411
ugcuuuagaggaugucaaa

SEQ ID NO: 863111 - RNA, 19 nt, Artificial Sequence
  Description of Artificial Sequence: Synthetic oligonucleotide
  Antisense strand to SEQ ID NO: 863110
uuugacauccucuaaagca

SEQ ID NO: 863112 - RNA, 19 nt, Artificial Sequence
  Description of Artificial Sequence: Synthetic oligonucleotide
  Sense strand starting at position 3220 of SEQ ID NO: 588411
guacacuuuccauggcaga

SEQ ID NO: 863113 - RNA, 19 nt, Artificial Sequence
  Description of Artificial Sequence: Synthetic oligonucleotide
  Antisense strand to SEQ ID NO: 863112
ucugccauggaaaguguac

SEQ ID NO: 863114 - RNA, 19 nt, Artificial Sequence
  Description of Artificial Sequence: Synthetic oligonucleotide
  Sense strand starting at position 3251 of SEQ ID NO: 588411
guacuaaaguucuuccaaa

SEQ ID NO: 863115 - RNA, 19 nt, Artificial Sequence
  Description of Artificial Sequence: Synthetic oligonucleotide
  Antisense strand to SEQ ID NO: 863114
uuuggaagaacuuuaguac

SEQ ID NO: 863116 - RNA, 19 nt, Artificial Sequence
  Description of Artificial Sequence: Synthetic oligonucleotide
  Sense strand starting at position 3284 of SEQ ID NO: 588411
cgugaagagagacauguuu

SEQ ID NO: 863117 - RNA, 19 nt, Artificial Sequence
  Description of Artificial Sequence: Synthetic oligonucleotide
  Antisense strand to SEQ ID NO: 863116
aaacaugucucucuucacg

SEQ ID NO: 863118 - RNA, 19 nt, Artificial Sequence
  Description of Artificial Sequence: Synthetic oligonucleotide
  Sense strand starting at position 3297 of SEQ ID NO: 588411
auguuuacauacuuaggau

SEQ ID NO: 863119 - RNA, 19 nt, Artificial Sequence
  Description of Artificial Sequence: Synthetic oligonucleotide
  Antisense strand to SEQ ID NO: 863118
auccuaaguauguaaacau

SEQ ID NO: 863120 - RNA, 19 nt, Artificial Sequence
  Description of Artificial Sequence: Synthetic oligonucleotide
  Sense strand starting at position 3303 of SEQ ID NO: 588411
acauacuuaggaugcuaaa

SEQ ID NO: 863121 - RNA, 19 nt, Artificial Sequence
  Description of Artificial Sequence: Synthetic oligonucleotide
  Antisense strand to SEQ ID NO: 863120
uuuagcauccuaaguaugu

SEQ ID NO: 863122 - RNA, 19 nt, Artificial Sequence
  Description of Artificial Sequence: Synthetic oligonucleotide
  Sense strand starting at position 3329 of SEQ ID NO: 588411
ugucaagaggaauguaaac

SEQ ID NO: 863123 - RNA, 19 nt, Artificial Sequence
  Description of Artificial Sequence: Synthetic oligonucleotide
  Antisense strand to SEQ ID NO: 863122
guuuacauuccucuugaca

SEQ ID NO: 863124 - RNA, 19 nt, Artificial Sequence
  Description of Artificial Sequence: Synthetic oligonucleotide
  Sense strand starting at position 3356 of SEQ ID NO: 588411
gugaguguugagugggaga

SEQ ID NO: 863125 - RNA, 19 nt, Artificial Sequence
  Description of Artificial Sequence: Synthetic oligonucleotide
  Antisense strand to SEQ ID NO: 863124
ucucccacucaacacucac

SEQ ID NO: 863126 - RNA, 19 nt, Artificial Sequence
  Description of Artificial Sequence: Synthetic oligonucleotide
  Sense strand starting at position 3358 of SEQ ID NO: 588411
gaguguugagugggagauu

SEQ ID NO: 863127 - RNA, 19 nt, Artificial Sequence
  Description of Artificial Sequence: Synthetic oligonucleotide
  Antisense strand to SEQ ID NO: 863126
aaucucccacucaacacuc

SEQ ID NO: 863128 - RNA, 19 nt, Artificial Sequence
  Description of Artificial Sequence: Synthetic oligonucleotide
  Sense strand starting at position 3367 of SEQ ID NO: 588411
gugggagauuuauauagag

SEQ ID NO: 863129 - RNA, 19 nt, Artificial Sequence
  Description of Artificial Sequence: Synthetic oligonucleotide
  Antisense strand to SEQ ID NO: 863128
cucuauauaaaucucccac

SEQ ID NO: 863130 - RNA, 19 nt, Artificial Sequence
  Description of Artificial Sequence: Synthetic oligonucleotide
  Sense strand starting at position 3466 of SEQ ID NO: 588411
gggaucugauugccuauca

SEQ ID NO: 863131 - RNA, 19 nt, Artificial Sequence
  Description of Artificial Sequence: Synthetic oligonucleotide
  Antisense strand to SEQ ID NO: 863130
ugauaggcaaucagauccc

SEQ ID NO: 863132 - RNA, 19 nt, Artificial Sequence
  Description of Artificial Sequence: Synthetic oligonucleotide
  Sense strand starting at position 3467 of SEQ ID NO: 588411
ggaucugauugccuaucaa

SEQ ID NO: 863133 - RNA, 19 nt, Artificial Sequence
  Description of Artificial Sequence: Synthetic oligonucleotide
  Antisense strand to SEQ ID NO: 863132
uugauaggcaaucagaucc

SEQ ID NO: 863134 - RNA, 19 nt, Artificial Sequence
  Description of Artificial Sequence: Synthetic oligonucleotide
  Sense strand starting at position 3486 of SEQ ID NO: 588411
agaggugguccagggcauu

SEQ ID NO: 863135 - RNA, 19 nt, Artificial Sequence
  Description of Artificial Sequence: Synthetic oligonucleotide
  Antisense strand to SEQ ID NO: 863134
aaugcccuggaccaccucu

SEQ ID NO: 863136 - RNA, 19 nt, Artificial Sequence
  Description of Artificial Sequence: Synthetic oligonucleotide
  Sense strand starting at position 3498 of SEQ ID NO: 588411
gggcauucuggaugagaga

SEQ ID NO: 863137 - RNA, 19 nt, Artificial Sequence
  Description of Artificial Sequence: Synthetic oligonucleotide
  Antisense strand to SEQ ID NO: 863136
ucucucauccagaaugccc

SEQ ID NO: 863138 - RNA, 19 nt, Artificial Sequence
  Description of Artificial Sequence: Synthetic oligonucleotide
  Sense strand starting at position 3519 of SEQ ID NO: 588411
uccuucuguguuuaauuaa

SEQ ID NO: 863139 - RNA, 19 nt, Artificial Sequence
  Description of Artificial Sequence: Synthetic oligonucleotide
  Antisense strand to SEQ ID NO: 863138
uuaauuaaacacagaagga

SEQ ID NO: 863140 - RNA, 19 nt, Artificial Sequence
  Description of Artificial Sequence: Synthetic oligonucleotide
  Sense strand starting at position 3570 of SEQ ID NO: 588411
augccaggccuggagaaau

SEQ ID NO: 863141 - RNA, 19 nt, Artificial Sequence
  Description of Artificial Sequence: Synthetic oligonucleotide
  Antisense strand to SEQ ID NO: 863140
auuucuccaggccuggcau

SEQ ID NO: 863142 - RNA, 19 nt, Artificial Sequence
  Description of Artificial Sequence: Synthetic oligonucleotide
  Sense strand starting at position 3599 of SEQ ID NO: 588411
cugcaaaguaucuggagau

SEQ ID NO: 863143 - RNA, 19 nt, Artificial Sequence
  Description of Artificial Sequence: Synthetic oligonucleotide
  Antisense strand to SEQ ID NO: 863142
aucuccagauacuuugcag

SEQ ID NO: 863144 - RNA, 19 nt, Artificial Sequence
  Description of Artificial Sequence: Synthetic oligonucleotide
  Sense strand starting at position 3603 of SEQ ID NO: 588411
aaaguaucuggagaugcuu

SEQ ID NO: 863145 - RNA, 19 nt, Artificial Sequence
  Description of Artificial Sequence: Synthetic oligonucleotide
  Antisense strand to SEQ ID NO: 863144
aagcaucuccagauacuuu

SEQ ID NO: 863146 - RNA, 19 nt, Artificial Sequence
  Description of Artificial Sequence: Synthetic oligonucleotide
  Sense strand starting at position 3691 of SEQ ID NO: 588411
ugaaacauccugugaugug

SEQ ID NO: 863147 - RNA, 19 nt, Artificial Sequence
  Description of Artificial Sequence: Synthetic oligonucleotide
  Antisense strand to SEQ ID NO: 863146
cacaucacaggauguuuca

SEQ ID NO: 863148 - RNA, 19 nt, Artificial Sequence
  Description of Artificial Sequence: Synthetic oligonucleotide
  Sense strand starting at position 3894 of SEQ ID NO: 588411
ugcauuauauacucagaga

SEQ ID NO: 863149 - RNA, 19 nt, Artificial Sequence
  Description of Artificial Sequence: Synthetic oligonucleotide
  Antisense strand to SEQ ID NO: 863148
ucucugaguauauaaugca

SEQ ID NO: 863150 - RNA, 19 nt, Artificial Sequence
  Description of Artificial Sequence: Synthetic oligonucleotide
  Sense strand starting at position 3911 of SEQ ID NO: 588411
gagagaaagcugcaucauu

SEQ ID NO: 863151 - RNA, 19 nt, Artificial Sequence
  Description of Artificial Sequence: Synthetic oligonucleotide
  Antisense strand to SEQ ID NO: 863150
aaugaugcagcuuucucuc

SEQ ID NO: 863152 - RNA, 19 nt, Artificial Sequence
  Description of Artificial Sequence: Synthetic oligonucleotide
  Sense strand starting at position 50 of SEQ ID NO: 588413
aggcaaugcucauugugca

SEQ ID NO: 863153 - RNA, 19 nt, Artificial Sequence
  Description of Artificial Sequence: Synthetic oligonucleotide
  Antisense strand to SEQ ID NO: 863152
ugcacaaugagcauugccu

SEQ ID NO: 863154 - RNA, 19 nt, Artificial Sequence
  Description of Artificial Sequence: Synthetic oligonucleotide
  Sense strand starting at position 55 of SEQ ID NO: 588413
augcucauugugcaggaaa

SEQ ID NO: 863155 - RNA, 19 nt, Artificial Sequence
  Description of Artificial Sequence: Synthetic oligonucleotide
  Antisense strand to SEQ ID NO: 863154
uuuccugcacaaugagcau

SEQ ID NO: 863156 - RNA, 19 nt, Artificial Sequence
  Description of Artificial Sequence: Synthetic oligonucleotide
  Sense strand starting at position 151 of SEQ ID NO: 588413
ggcacaggucacuguuauc

SEQ ID NO: 863157 - RNA, 19 nt, Artificial Sequence
  Description of Artificial Sequence: Synthetic oligonucleotide
  Antisense strand to SEQ ID NO: 863156
gauaacagugaccugugcc

SEQ ID NO: 863158 - RNA, 19 nt, Artificial Sequence
  Description of Artificial Sequence: Synthetic oligonucleotide
  Sense strand starting at position 162 of SEQ ID NO: 588413
cuguuaucgccuuggaagg

SEQ ID NO: 863159 - RNA, 19 nt, Artificial Sequence
  Description of Artificial Sequence: Synthetic oligonucleotide
  Antisense strand to SEQ ID NO: 863158
ccuuccaaggcgauaacag

SEQ ID NO: 863160 - RNA, 19 nt, Artificial Sequence
  Description of Artificial Sequence: Synthetic oligonucleotide
  Sense strand starting at position 199 of SEQ ID NO: 588413
acugucuuaucucaaguau

SEQ ID NO: 863161 - RNA, 19 nt, Artificial Sequence
  Description of Artificial Sequence: Synthetic oligonucleotide
  Antisense strand to SEQ ID NO: 863160
auacuugagauaagacagu

SEQ ID NO: 863162 - RNA, 19 nt, Artificial Sequence
  Description of Artificial Sequence: Synthetic oligonucleotide
  Sense strand starting at position 329 of SEQ ID NO: 588413
cugucauucuugcccgaca

SEQ ID NO: 863163 - RNA, 19 nt, Artificial Sequence
  Description of Artificial Sequence: Synthetic oligonucleotide
  Antisense strand to SEQ ID NO: 863162
ugucgggcaagaaugacag

SEQ ID NO: 863164 - RNA, 19 nt, Artificial Sequence
  Description of Artificial Sequence: Synthetic oligonucleotide
  Sense strand starting at position 332 of SEQ ID NO: 588413
ucauucuugcccgacagga

SEQ ID NO: 863165 - RNA, 19 nt, Artificial Sequence
  Description of Artificial Sequence: Synthetic oligonucleotide
  Antisense strand to SEQ ID NO: 863164
uccugucgggcaagaauga

SEQ ID NO: 863166 - RNA, 19 nt, Artificial Sequence
  Description of Artificial Sequence: Synthetic oligonucleotide
  Sense strand starting at position 365 of SEQ ID NO: 588413
ccaucaguuccacggaguu

SEQ ID NO: 863167 - RNA, 19 nt, Artificial Sequence
  Description of Artificial Sequence: Synthetic oligonucleotide
  Antisense strand to SEQ ID NO: 863166
aacuccguggaacugaugg

SEQ ID NO: 863168 - RNA, 19 nt, Artificial Sequence
  Description of Artificial Sequence: Synthetic oligonucleotide
  Sense strand starting at position 1121 of SEQ ID NO: 588413
gacuguacucaccgaaaug

SEQ ID NO: 863169 - RNA, 19 nt, Artificial Sequence
  Description of Artificial Sequence: Synthetic oligonucleotide
  Antisense strand to SEQ ID NO: 863168
cauuucggugaguacaguc

SEQ ID NO: 863170 - RNA, 19 nt, Artificial Sequence
  Description of Artificial Sequence: Synthetic oligonucleotide
  Sense strand starting at position 2012 of SEQ ID NO: 588413
cgcugcgcgcccuuauaua

SEQ ID NO: 863171 - RNA, 19 nt, Artificial Sequence
  Description of Artificial Sequence: Synthetic oligonucleotide
  Antisense strand to SEQ ID NO: 863170
uauauaagggcgcgcagcg

SEQ ID NO: 863172 - RNA, 19 nt, Artificial Sequence
  Description of Artificial Sequence: Synthetic oligonucleotide
  Sense strand starting at position 2089 of SEQ ID NO: 588413
cgcuuucugauguaaauga

SEQ ID NO: 863173 - RNA, 19 nt, Artificial Sequence
  Description of Artificial Sequence: Synthetic oligonucleotide
  Antisense strand to SEQ ID NO: 863172
ucauuuacaucagaaagcg

SEQ ID NO: 863174 - RNA, 19 nt, Artificial Sequence
  Description of Artificial Sequence: Synthetic oligonucleotide
  Sense strand starting at position 2159 of SEQ ID NO: 588413
ggaugacaaugccucaaau

SEQ ID NO: 863175 - RNA, 19 nt, Artificial Sequence
  Description of Artificial Sequence: Synthetic oligonucleotide
  Antisense strand to SEQ ID NO: 863174
auuugaggcauugucaucc

SEQ ID NO: 863176 - RNA, 19 nt, Artificial Sequence
  Description of Artificial Sequence: Synthetic oligonucleotide
  Sense strand starting at position 2387 of SEQ ID NO: 588413
uuguauugcuaccuuucua

SEQ ID NO: 863177 - RNA, 19 nt, Artificial Sequence
  Description of Artificial Sequence: Synthetic oligonucleotide
  Antisense strand to SEQ ID NO: 863176
uagaaagguagcaauacaa

SEQ ID NO: 863178 - RNA, 19 nt, Artificial Sequence
  Description of Artificial Sequence: Synthetic oligonucleotide
  Sense strand starting at position 2426 of SEQ ID NO: 588413
ugaagucuaugagacuguu

SEQ ID NO: 863179 - RNA, 19 nt, Artificial Sequence
  Description of Artificial Sequence: Synthetic oligonucleotide
  Antisense strand to SEQ ID NO: 863178
aacagucucauagacuuca

SEQ ID NO: 863180 - RNA, 19 nt, Artificial Sequence
  Description of Artificial Sequence: Synthetic oligonucleotide
  Sense strand starting at position 2429 of SEQ ID NO: 588413
agucuaugagacuguugca

SEQ ID NO: 863181 - RNA, 19 nt, Artificial Sequence
  Description of Artificial Sequence: Synthetic oligonucleotide
  Antisense strand to SEQ ID NO: 863180
ugcaacagucucauagacu

SEQ ID NO: 863182 - RNA, 19 nt, Artificial Sequence
  Description of Artificial Sequence: Synthetic oligonucleotide
  Sense strand starting at position 2443 of SEQ ID NO: 588413
uugcauuggagccagaaau

SEQ ID NO: 863183 - RNA, 19 nt, Artificial Sequence
  Description of Artificial Sequence: Synthetic oligonucleotide
  Antisense strand to SEQ ID NO: 863182
auuucuggcuccaaugcaa

SEQ ID NO: 863184 - RNA, 19 nt, Artificial Sequence
  Description of Artificial Sequence: Synthetic oligonucleotide
  Sense strand starting at position 2585 of SEQ ID NO: 588413
uugagccgucucuggaaga

SEQ ID NO: 863185 - RNA, 19 nt, Artificial Sequence
  Description of Artificial Sequence: Synthetic oligonucleotide
  Antisense strand to SEQ ID NO: 863184
ucuuccagagacggcucaa

SEQ ID NO: 863186 - RNA, 19 nt, Artificial Sequence
  Description of Artificial Sequence: Synthetic oligonucleotide
  Sense strand starting at position 2746 of SEQ ID NO: 588413
gcgguuugcuguagggaca

SEQ ID NO: 863187 - RNA, 19 nt, Artificial Sequence
  Description of Artificial Sequence: Synthetic oligonucleotide
  Antisense strand to SEQ ID NO: 863186
ugucccuacagcaaaccgc

SEQ ID NO: 863188 - RNA, 19 nt, Artificial Sequence
  Description of Artificial Sequence: Synthetic oligonucleotide
  Sense strand starting at position 2747 of SEQ ID NO: 588413
cgguuugcuguagggacaa

SEQ ID NO: 863189 - RNA, 19 nt, Artificial Sequence
  Description of Artificial Sequence: Synthetic oligonucleotide
  Antisense strand to SEQ ID NO: 863188
uugucccuacagcaaaccg

SEQ ID NO: 863190 - RNA, 19 nt, Artificial Sequence
  Description of Artificial Sequence: Synthetic oligonucleotide
  Sense strand starting at position 3227 of SEQ ID NO: 588413
cccagugagcccuguccaa

SEQ ID NO: 863191 - RNA, 19 nt, Artificial Sequence
  Description of Artificial Sequence: Synthetic oligonucleotide
  Antisense strand to SEQ ID NO: 863190
uuggacagggcucacuggg

SEQ ID NO: 863192 - RNA, 19 nt, Artificial Sequence
  Description of Artificial Sequence: Synthetic oligonucleotide
  Sense strand starting at position 3240 of SEQ ID NO: 588413
guccaagcugcgcauaaau

SEQ ID NO: 863193 - RNA, 19 nt, Artificial Sequence
  Description of Artificial Sequence: Synthetic oligonucleotide
  Antisense strand to SEQ ID NO: 863192
auuuaugcgcagcuuggac

SEQ ID NO: 863194 - RNA, 19 nt, Artificial Sequence
  Description of Artificial Sequence: Synthetic oligonucleotide
  Sense strand starting at position 3340 of SEQ ID NO: 588413
uccaguacugauggaguaa

SEQ ID NO: 863195 - RNA, 19 nt, Artificial Sequence
  Description of Artificial Sequence: Synthetic oligonucleotide
  Antisense strand to SEQ ID NO: 863194
uuacuccaucaguacugga

SEQ ID NO: 863196 - RNA, 19 nt, Artificial Sequence
  Description of Artificial Sequence: Synthetic oligonucleotide
  Sense strand starting at position 3368 of SEQ ID NO: 588413
cgucuuauaccauguugaa

SEQ ID NO: 863197 - RNA, 19 nt, Artificial Sequence
  Description of Artificial Sequence: Synthetic oligonucleotide
  Antisense strand to SEQ ID NO: 863196
uucaacaugguauaagacg

SEQ ID NO: 863198 - RNA, 19 nt, Artificial Sequence
  Description of Artificial Sequence: Synthetic oligonucleotide
  Sense strand starting at position 3399 of SEQ ID NO: 588413
cuuaaaugcgcauauguaa

SEQ ID NO: 863199 - RNA, 19 nt, Artificial Sequence
  Description of Artificial Sequence: Synthetic oligonucleotide
  Antisense strand to SEQ ID NO: 863198
uuacauaugcgcauuuaag

SEQ ID NO: 863200 - RNA, 19 nt, Artificial Sequence
  Description of Artificial Sequence: Synthetic oligonucleotide
  Sense strand starting at position 3437 of SEQ ID NO: 588413
uggaauaagucuggaagag

SEQ ID NO: 863201 - RNA, 19 nt, Artificial Sequence
  Description of Artificial Sequence: Synthetic oligonucleotide
  Antisense strand to SEQ ID NO: 863200
cucuuccagacuuauucca

SEQ ID NO: 863202 - RNA, 19 nt, Artificial Sequence
  Description of Artificial Sequence: Synthetic oligonucleotide
  Sense strand starting at position 3451 of SEQ ID NO: 588413
aagagaucuugggagaguu

SEQ ID NO: 863203 - RNA, 19 nt, Artificial Sequence
  Description of Artificial Sequence: Synthetic oligonucleotide
  Antisense strand to SEQ ID NO: 863202
aacucucccaagaucucuu

SEQ ID NO: 863204 - RNA, 19 nt, Artificial Sequence
  Description of Artificial Sequence: Synthetic oligonucleotide
  Sense strand starting at position 3461 of SEQ ID NO: 588413
gggagaguuuaauaggcua

SEQ ID NO: 863205 - RNA, 19 nt, Artificial Sequence
  Description of Artificial Sequence: Synthetic oligonucleotide
  Antisense strand to SEQ ID NO: 863204
uagccuauuaaacucuccc

SEQ ID NO: 863206 - RNA, 19 nt, Artificial Sequence
  Description of Artificial Sequence: Synthetic oligonucleotide
  Sense strand starting at position 3466 of SEQ ID NO: 588413
aguuuaauaggcuagaggu

SEQ ID NO: 863207 - RNA, 19 nt, Artificial Sequence
  Description of Artificial Sequence: Synthetic oligonucleotide
  Antisense strand to SEQ ID NO: 863206
accucuagccuauuaaacu

SEQ ID NO: 863208 - RNA, 19 nt, Artificial Sequence
  Description of Artificial Sequence: Synthetic oligonucleotide
  Sense strand starting at position 3539 of SEQ ID NO: 588413
ccuucugugcuacgugaaa

SEQ ID NO: 863209 - RNA, 19 nt, Artificial Sequence
  Description of Artificial Sequence: Synthetic oligonucleotide
  Antisense strand to SEQ ID NO: 863208
uuucacguagcacagaagg

SEQ ID NO: 863210 - RNA, 19 nt, Artificial Sequence
  Description of Artificial Sequence: Synthetic oligonucleotide
  Sense strand starting at position 3595 of SEQ ID NO: 588413
gggugaagccuuggagacu

SEQ ID NO: 863211 - RNA, 19 nt, Artificial Sequence
  Description of Artificial Sequence: Synthetic oligonucleotide
  Antisense strand to SEQ ID NO: 863210
agucuccaaggcuucaccc

SEQ ID NO: 863212 - RNA, 19 nt, Artificial Sequence
  Description of Artificial Sequence: Synthetic oligonucleotide
  Sense strand starting at position 3674 of SEQ ID NO: 588413
gggcgauaaugggaaagua

SEQ ID NO: 863213 - RNA, 19 nt, Artificial Sequence
  Description of Artificial Sequence: Synthetic oligonucleotide
  Antisense strand to SEQ ID NO: 863212
uacuuucccauuaucgccc

SEQ ID NO: 863214 - RNA, 19 nt, Artificial Sequence
  Description of Artificial Sequence: Synthetic oligonucleotide
  Sense strand starting at position 3736 of SEQ ID NO: 588413
guggguggugaauguacaa

SEQ ID NO: 863215 - RNA, 19 nt, Artificial Sequence
  Description of Artificial Sequence: Synthetic oligonucleotide
  Antisense strand to SEQ ID NO: 863214
uuguacauucaccacccac

SEQ ID NO: 863216 - RNA, 19 nt, Artificial Sequence
  Description of Artificial Sequence: Synthetic oligonucleotide
  Sense strand starting at position 3807 of SEQ ID NO: 588413
cacuucugccaaggugaga

SEQ ID NO: 863217 - RNA, 19 nt, Artificial Sequence
  Description of Artificial Sequence: Synthetic oligonucleotide
  Antisense strand to SEQ ID NO: 863216
ucucaccuuggcagaagug

SEQ ID NO: 863218 - RNA, 19 nt, Artificial Sequence
  Description of Artificial Sequence: Synthetic oligonucleotide
  Sense strand starting at position 3881 of SEQ ID NO: 588413
cggcccuuccuggauucua

SEQ ID NO: 863219 - RNA, 19 nt, Artificial Sequence
  Description of Artificial Sequence: Synthetic oligonucleotide
  Antisense strand to SEQ ID NO: 863218
uagaauccaggaagggccg

SEQ ID NO: 863220 - RNA, 19 nt, Artificial Sequence
  Description of Artificial Sequence: Synthetic oligonucleotide
  Sense strand starting at position 3886 of SEQ ID NO: 588413
cuuccuggauucuaagaau

SEQ ID NO: 863221 - RNA, 19 nt, Artificial Sequence
  Description of Artificial Sequence: Synthetic oligonucleotide
  Antisense strand to SEQ ID NO: 863220
auucuuagaauccaggaag

SEQ ID NO: 863222 - RNA, 19 nt, Artificial Sequence
  Description of Artificial Sequence: Synthetic oligonucleotide
  Sense strand starting at position 3889 of SEQ ID NO: 588413
ccuggauucuaagaaugaa

SEQ ID NO: 863223 - RNA, 19 nt, Artificial Sequence
  Description of Artificial Sequence: Synthetic oligonucleotide
  Antisense strand to SEQ ID NO: 863222
uucauucuuagaauccagg

SEQ ID NO: 863224 - RNA, 19 nt, Artificial Sequence
  Description of Artificial Sequence: Synthetic oligonucleotide
  Sense strand starting at position 3904 of SEQ ID NO: 588413
ugaagagcuugcucuccua

SEQ ID NO: 863225 - RNA, 19 nt, Artificial Sequence
  Description of Artificial Sequence: Synthetic oligonucleotide
  Antisense strand to SEQ ID NO: 863224
uaggagagcaagcucuuca

SEQ ID NO: 863226 - RNA, 19 nt, Artificial Sequence
  Description of Artificial Sequence: Synthetic oligonucleotide
  Sense strand starting at position 3907 of SEQ ID NO: 588413
agagcuugcucuccuagca

SEQ ID NO: 863227 - RNA, 19 nt, Artificial Sequence
  Description of Artificial Sequence: Synthetic oligonucleotide
  Antisense strand to SEQ ID NO: 863226
ugcuaggagagcaagcucu

SEQ ID NO: 863228 - RNA, 19 nt, Artificial Sequence
  Description of Artificial Sequence: Synthetic oligonucleotide
  Sense strand starting at position 3927 of SEQ ID NO: 588413
uucugaacuccagaggugu

SEQ ID NO: 863229 - RNA, 19 nt, Artificial Sequence
  Description of Artificial Sequence: Synthetic oligonucleotide
  Antisense strand to SEQ ID NO: 863228
acaccucuggaguucagaa

SEQ ID NO: 863230 - RNA, 19 nt, Artificial Sequence
  Description of Artificial Sequence: Synthetic oligonucleotide
  Sense strand starting at position 3938 of SEQ ID NO: 588413
agaggugucuccuaaggac

SEQ ID NO: 863231 - RNA, 19 nt, Artificial Sequence
  Description of Artificial Sequence: Synthetic oligonucleotide
  Antisense strand to SEQ ID NO: 863230
guccuuaggagacaccucu

SEQ ID NO: 863232 - RNA, 19 nt, Artificial Sequence
  Description of Artificial Sequence: Synthetic oligonucleotide
  Sense strand starting at position 46 of SEQ ID NO: 588414
agguauugaugcuuuauua

SEQ ID NO: 863233 - RNA, 19 nt, Artificial Sequence
  Description of Artificial Sequence: Synthetic oligonucleotide
  Antisense strand to SEQ ID NO: 863232
uaauaaagcaucaauaccu

SEQ ID NO: 863234 - RNA, 19 nt, Artificial Sequence
  Description of Artificial Sequence: Synthetic oligonucleotide
  Sense strand starting at position 98 of SEQ ID NO: 588414
uguagaaugcauggagacu

SEQ ID NO: 863235 - RNA, 19 nt, Artificial Sequence
  Description of Artificial Sequence: Synthetic oligonucleotide
  Antisense strand to SEQ ID NO: 863234
agucuccaugcauucuaca

SEQ ID NO: 863236 - RNA, 19 nt, Artificial Sequence
  Description of Artificial Sequence: Synthetic oligonucleotide
  Sense strand starting at position 125 of SEQ ID NO: 588414
ugaguuuccuauuucgcaa

SEQ ID NO: 863237 - RNA, 19 nt, Artificial Sequence
  Description of Artificial Sequence: Synthetic oligonucleotide
  Antisense strand to SEQ ID NO: 863236
uugcgaaauaggaaacuca

SEQ ID NO: 863238 - RNA, 19 nt, Artificial Sequence
  Description of Artificial Sequence: Synthetic oligonucleotide
  Sense strand starting at position 174 of SEQ ID NO: 588414
agcagcuugccagagauca

SEQ ID NO: 863239 - RNA, 19 nt, Artificial Sequence
  Description of Artificial Sequence: Synthetic oligonucleotide
  Antisense strand to SEQ ID NO: 863238
ugaucucuggcaagcugcu

SEQ ID NO: 863240 - RNA, 19 nt, Artificial Sequence
  Description of Artificial Sequence: Synthetic oligonucleotide
  Sense strand starting at position 243 of SEQ ID NO: 588414
uaaucugaagcuggguaua

SEQ ID NO: 863241 - RNA, 19 nt, Artificial Sequence
  Description of Artificial Sequence: Synthetic oligonucleotide
  Antisense strand to SEQ ID NO: 863240
uauacccagcuucagauua

SEQ ID NO: 863242 - RNA, 19 nt, Artificial Sequence
  Description of Artificial Sequence: Synthetic oligonucleotide
  Sense strand starting at position 254 of SEQ ID NO: 588414
uggguauaaccugaaagcu

SEQ ID NO: 863243 - RNA, 19 nt, Artificial Sequence
  Description of Artificial Sequence: Synthetic oligonucleotide
  Antisense strand to SEQ ID NO: 863242
agcuuucagguuauaccca

SEQ ID NO: 863244 - RNA, 19 nt, Artificial Sequence
  Description of Artificial Sequence: Synthetic oligonucleotide
  Sense strand starting at position 578 of SEQ ID NO: 588414
gggccauagucccuccaga

SEQ ID NO: 863245 - RNA, 19 nt, Artificial Sequence
  Description of Artificial Sequence: Synthetic oligonucleotide
  Antisense strand to SEQ ID NO: 863244
ucuggagggacuauggccc

SEQ ID NO: 863246 - RNA, 19 nt, Artificial Sequence
  Description of Artificial Sequence: Synthetic oligonucleotide
  Sense strand starting at position 774 of SEQ ID NO: 588414
uccucaaagucuguaagga

SEQ ID NO: 863247 - RNA, 19 nt, Artificial Sequence
  Description of Artificial Sequence: Synthetic oligonucleotide
  Antisense strand to SEQ ID NO: 863246
uccuuacagacuuugagga

SEQ ID NO: 863248 - RNA, 19 nt, Artificial Sequence
  Description of Artificial Sequence: Synthetic oligonucleotide
  Sense strand starting at position 811 of SEQ ID NO: 588414
uuggaagaucccugacacu

SEQ ID NO: 863249 - RNA, 19 nt, Artificial Sequence
  Description of Artificial Sequence: Synthetic oligonucleotide
  Antisense strand to SEQ ID NO: 863248
agugucagggaucuuccaa

SEQ ID NO: 863250 - RNA, 19 nt, Artificial Sequence
  Description of Artificial Sequence: Synthetic oligonucleotide
  Sense strand starting at position 2225 of SEQ ID NO: 588414
uauggugcauuauuaaaga

SEQ ID NO: 863251 - RNA, 19 nt, Artificial Sequence
  Description of Artificial Sequence: Synthetic oligonucleotide
  Antisense strand to SEQ ID NO: 863250
ucuuuaauaaugcaccaua

SEQ ID NO: 863252 - RNA, 19 nt, Artificial Sequence
  Description of Artificial Sequence: Synthetic oligonucleotide
  Sense strand starting at position 2238 of SEQ ID NO: 588414
uaaagagauagugguggua

SEQ ID NO: 863253 - RNA, 19 nt, Artificial Sequence
  Description of Artificial Sequence: Synthetic oligonucleotide
  Antisense strand to SEQ ID NO: 863252
uaccaccacuaucucuuua

SEQ ID NO: 863254 - RNA, 19 nt, Artificial Sequence
  Description of Artificial Sequence: Synthetic oligonucleotide
  Sense strand starting at position 2421 of SEQ ID NO: 588414
gugcgaugagaucaacaga

SEQ ID NO: 863255 - RNA, 19 nt, Artificial Sequence
  Description of Artificial Sequence: Synthetic oligonucleotide
  Antisense strand to SEQ ID NO: 863254
ucuguugaucucaucgcac

SEQ ID NO: 863256 - RNA, 19 nt, Artificial Sequence
  Description of Artificial Sequence: Synthetic oligonucleotide
  Sense strand starting at position 2567 of SEQ ID NO: 588414
ccaugaaggcuguacauga

SEQ ID NO: 863257 - RNA, 19 nt, Artificial Sequence
  Description of Artificial Sequence: Synthetic oligonucleotide
  Antisense strand to SEQ ID NO: 863256
ucauguacagccuucaugg

SEQ ID NO: 863258 - RNA, 19 nt, Artificial Sequence
  Description of Artificial Sequence: Synthetic oligonucleotide
  Sense strand starting at position 2571 of SEQ ID NO: 588414
gaaggcuguacaugauagu

SEQ ID NO: 863259 - RNA, 19 nt, Artificial Sequence
  Description of Artificial Sequence: Synthetic oligonucleotide
  Antisense strand to SEQ ID NO: 863258
acuaucauguacagccuuc

SEQ ID NO: 863260 - RNA, 19 nt, Artificial Sequence
  Description of Artificial Sequence: Synthetic oligonucleotide
  Sense strand starting at position 2644 of SEQ ID NO: 588414
aaacgagacuggucaacau

SEQ ID NO: 863261 - RNA, 19 nt, Artificial Sequence
  Description of Artificial Sequence: Synthetic oligonucleotide
  Antisense strand to SEQ ID NO: 863260
auguugaccagucucguuu

SEQ ID NO: 863262 - RNA, 19 nt, Artificial Sequence
  Description of Artificial Sequence: Synthetic oligonucleotide
  Sense strand starting at position 2779 of SEQ ID NO: 588414
ggagguuaccgugaacuau

SEQ ID NO: 863263 - RNA, 19 nt, Artificial Sequence
  Description of Artificial Sequence: Synthetic oligonucleotide
  Antisense strand to SEQ ID NO: 863262
auaguucacgguaaccucc

SEQ ID NO: 863264 - RNA, 19 nt, Artificial Sequence
  Description of Artificial Sequence: Synthetic oligonucleotide
  Sense strand starting at position 2930 of SEQ ID NO: 588414
guaagucuaauggaguaga

SEQ ID NO: 863265 - RNA, 19 nt, Artificial Sequence
  Description of Artificial Sequence: Synthetic oligonucleotide
  Antisense strand to SEQ ID NO: 863264
ucuacuccauuagacuuac

SEQ ID NO: 863266 - RNA, 19 nt, Artificial Sequence
  Description of Artificial Sequence: Synthetic oligonucleotide
  Sense strand starting at position 2992 of SEQ ID NO: 588414
gaagaauuacagggcgcua

SEQ ID NO: 863267 - RNA, 19 nt, Artificial Sequence
  Description of Artificial Sequence: Synthetic oligonucleotide
  Antisense strand to SEQ ID NO: 863266
uagcgcccuguaauucuuc

SEQ ID NO: 863268 - RNA, 19 nt, Artificial Sequence
  Description of Artificial Sequence: Synthetic oligonucleotide
  Sense strand starting at position 2994 of SEQ ID NO: 588414
agaauuacagggcgcuaaa

SEQ ID NO: 863269 - RNA, 19 nt, Artificial Sequence
  Description of Artificial Sequence: Synthetic oligonucleotide
  Antisense strand to SEQ ID NO: 863268
uuuagcgcccuguaauucu

SEQ ID NO: 863270 - RNA, 19 nt, Artificial Sequence
  Description of Artificial Sequence: Synthetic oligonucleotide
  Sense strand starting at position 3025 of SEQ ID NO: 588414
aguagaacuugaucuaguu

SEQ ID NO: 863271 - RNA, 19 nt, Artificial Sequence
  Description of Artificial Sequence: Synthetic oligonucleotide
  Antisense strand to SEQ ID NO: 863270
aacuagaucaaguucuacu

SEQ ID NO: 863272 - RNA, 19 nt, Artificial Sequence
  Description of Artificial Sequence: Synthetic oligonucleotide
  Sense strand starting at position 3052 of SEQ ID NO: 588414
uuggaaagcuucucugaug

SEQ ID NO: 863273 - RNA, 19 nt, Artificial Sequence
  Description of Artificial Sequence: Synthetic oligonucleotide
  Antisense strand to SEQ ID NO: 863272
caucagagaagcuuuccaa

SEQ ID NO: 863274 - RNA, 19 nt, Artificial Sequence
  Description of Artificial Sequence: Synthetic oligonucleotide
  Sense strand starting at position 3053 of SEQ ID NO: 588414
uggaaagcuucucugauga

SEQ ID NO: 863275 - RNA, 19 nt, Artificial Sequence
  Description of Artificial Sequence: Synthetic oligonucleotide
  Antisense strand to SEQ ID NO: 863274
ucaucagagaagcuuucca

SEQ ID NO: 863276 - RNA, 19 nt, Artificial Sequence
  Description of Artificial Sequence: Synthetic oligonucleotide
  Sense strand starting at position 3058 of SEQ ID NO: 588414
agcuucucugaugaaguaa

SEQ ID NO: 863277 - RNA, 19 nt, Artificial Sequence
  Description of Artificial Sequence: Synthetic oligonucleotide
  Antisense strand to SEQ ID NO: 863276
uuacuucaucagagaagcu

SEQ ID NO: 863278 - RNA, 19 nt, Artificial Sequence
  Description of Artificial Sequence: Synthetic oligonucleotide
  Sense strand starting at position 3157 of SEQ ID NO: 588414
uggugucuagcucagggaa

SEQ ID NO: 863279 - RNA, 19 nt, Artificial Sequence
  Description of Artificial Sequence: Synthetic oligonucleotide
  Antisense strand to SEQ ID NO: 863278
uucccugagcuagacacca

SEQ ID NO: 863280 - RNA, 19 nt, Artificial Sequence
  Description of Artificial Sequence: Synthetic oligonucleotide
  Sense strand starting at position 3204 of SEQ ID NO: 588414
gauagaguguaagcucuau

SEQ ID NO: 863281 - RNA, 19 nt, Artificial Sequence
  Description of Artificial Sequence: Synthetic oligonucleotide
  Antisense strand to SEQ ID NO: 863280
auagagcuuacacucuauc

SEQ ID NO: 863282 - RNA, 19 nt, Artificial Sequence
  Description of Artificial Sequence: Synthetic oligonucleotide
  Sense strand starting at position 3208 of SEQ ID NO: 588414
gaguguaagcucuauuugu

SEQ ID NO: 863283 - RNA, 19 nt, Artificial Sequence
  Description of Artificial Sequence: Synthetic oligonucleotide
  Antisense strand to SEQ ID NO: 863282
acaaauagagcuuacacuc

SEQ ID NO: 863284 - RNA, 19 nt, Artificial Sequence
  Description of Artificial Sequence: Synthetic oligonucleotide
  Sense strand starting at position 3212 of SEQ ID NO: 588414
guaagcucuauuuguuguu

SEQ ID NO: 863285 - RNA, 19 nt, Artificial Sequence
  Description of Artificial Sequence: Synthetic oligonucleotide
  Antisense strand to SEQ ID NO: 863284
aacaacaaauagagcuuac

SEQ ID NO: 863286 - RNA, 19 nt, Artificial Sequence
  Description of Artificial Sequence: Synthetic oligonucleotide
  Sense strand starting at position 3312 of SEQ ID NO: 588414
gcacaaaucugguccaauu

SEQ ID NO: 863287 - RNA, 19 nt, Artificial Sequence
  Description of Artificial Sequence: Synthetic oligonucleotide
  Antisense strand to SEQ ID NO: 863286
aauuggaccagauuugugc

SEQ ID NO: 863288 - RNA, 19 nt, Artificial Sequence
  Description of Artificial Sequence: Synthetic oligonucleotide
  Sense strand starting at position 3402 of SEQ ID NO: 588414
gguagaaucugacuugcug

SEQ ID NO: 863289 - RNA, 19 nt, Artificial Sequence
  Description of Artificial Sequence: Synthetic oligonucleotide
  Antisense strand to SEQ ID NO: 863288
cagcaagucagauucuacc

SEQ ID NO: 863290 - RNA, 19 nt, Artificial Sequence
  Description of Artificial Sequence: Synthetic oligonucleotide
  Sense strand starting at position 3457 of SEQ ID NO: 588414
gaggaaaucucccucaggu

SEQ ID NO: 863291 - RNA, 19 nt, Artificial Sequence
  Description of Artificial Sequence: Synthetic oligonucleotide
  Antisense strand to SEQ ID NO: 863290
accugagggagauuuccuc

SEQ ID NO: 863292 - RNA, 19 nt, Artificial Sequence
  Description of Artificial Sequence: Synthetic oligonucleotide
  Sense strand starting at position 3558 of SEQ ID NO: 588414
ggaaguggcucuucccaca

SEQ ID NO: 863293 - RNA, 19 nt, Artificial Sequence
  Description of Artificial Sequence: Synthetic oligonucleotide
  Antisense strand to SEQ ID NO: 863292
ugugggaagagccacuucc

SEQ ID NO: 863294 - RNA, 19 nt, Artificial Sequence
  Description of Artificial Sequence: Synthetic oligonucleotide
  Sense strand starting at position 3628 of SEQ ID NO: 588414
gccagaaggcgguuguguu

SEQ ID NO: 863295 - RNA, 19 nt, Artificial Sequence
  Description of Artificial Sequence: Synthetic oligonucleotide
  Antisense strand to SEQ ID NO: 863294
aacacaaccgccuucuggc

SEQ ID NO: 863296 - RNA, 19 nt, Artificial Sequence
  Description of Artificial Sequence: Synthetic oligonucleotide
  Sense strand starting at position 3695 of SEQ ID NO: 588414
cauuuaagaucugcgguca

SEQ ID NO: 863297 - RNA, 19 nt, Artificial Sequence
  Description of Artificial Sequence: Synthetic oligonucleotide
  Antisense strand to SEQ ID NO: 863296
ugaccgcagaucuuaaaug

SEQ ID NO: 863298 - RNA, 19 nt, Artificial Sequence
  Description of Artificial Sequence: Synthetic oligonucleotide
  Sense strand starting at position 3700 of SEQ ID NO: 588414
aagaucugcggucagauua

SEQ ID NO: 863299 - RNA, 19 nt, Artificial Sequence
  Description of Artificial Sequence: Synthetic oligonucleotide
  Antisense strand to SEQ ID NO: 863298
uaaucugaccgcagaucuu

SEQ ID NO: 863300 - RNA, 19 nt, Artificial Sequence
  Description of Artificial Sequence: Synthetic oligonucleotide
  Sense strand starting at position 3769 of SEQ ID NO: 588414
uuggaaugcuucucaauag

SEQ ID NO: 863301 - RNA, 19 nt, Artificial Sequence
  Description of Artificial Sequence: Synthetic oligonucleotide
  Antisense strand to SEQ ID NO: 863300
cuauugagaagcauuccaa

SEQ ID NO: 863302 - RNA, 19 nt, Artificial Sequence
  Description of Artificial Sequence: Synthetic oligonucleotide
  Sense strand starting at position 3773 of SEQ ID NO: 588414
aaugcuucucaauagaggu

SEQ ID NO: 863303 - RNA, 19 nt, Artificial Sequence
  Description of Artificial Sequence: Synthetic oligonucleotide
  Antisense strand to SEQ ID NO: 863302
accucuauugagaagcauu

SEQ ID NO: 863304 - RNA, 19 nt, Artificial Sequence
  Description of Artificial Sequence: Synthetic oligonucleotide
  Sense strand starting at position 3815 of SEQ ID NO: 588414
gcaauuaggccuuacaaga

SEQ ID NO: 863305 - RNA, 19 nt, Artificial Sequence
  Description of Artificial Sequence: Synthetic oligonucleotide
  Antisense strand to SEQ ID NO: 863304
ucuuguaaggccuaauugc

SEQ ID NO: 863306 - RNA, 19 nt, Artificial Sequence
  Description of Artificial Sequence: Synthetic oligonucleotide
  Sense strand starting at position 3868 of SEQ ID NO: 588414
auuguuuacugagcacaca

SEQ ID NO: 863307 - RNA, 19 nt, Artificial Sequence
  Description of Artificial Sequence: Synthetic oligonucleotide
  Antisense strand to SEQ ID NO: 863306
ugugugcucaguaaacaau

SEQ ID NO: 863308 - RNA, 19 nt, Artificial Sequence
  Description of Artificial Sequence: Synthetic oligonucleotide
  Sense strand starting at position 3967 of SEQ ID NO: 588414
ugagaauauguaggcucaa

SEQ ID NO: 863309 - RNA, 19 nt, Artificial Sequence
  Description of Artificial Sequence: Synthetic oligonucleotide
  Antisense strand to SEQ ID NO: 863308
uugagccuacauauucuca

SEQ ID NO: 863310 - RNA, 19 nt, Artificial Sequence
  Description of Artificial Sequence: Synthetic oligonucleotide
  Sense strand starting at position 3968 of SEQ ID NO: 588414
gagaauauguaggcucaag

SEQ ID NO: 863311 - RNA, 19 nt, Artificial Sequence
  Description of Artificial Sequence: Synthetic oligonucleotide
  Antisense strand to SEQ ID NO: 863310
cuugagccuacauauucuc

SEQ ID NO: 863312 - RNA, 19 nt, Artificial Sequence
  Description of Artificial Sequence: Synthetic oligonucleotide
  Sense strand starting at position 68 of SEQ ID NO: 588415
acaccucucucaugggaua

SEQ ID NO: 863313 - RNA, 19 nt, Artificial Sequence
  Description of Artificial Sequence: Synthetic oligonucleotide
  Antisense strand to SEQ ID NO: 863312
uaucccaugagagaggugu

SEQ ID NO: 863314 - RNA, 19 nt, Artificial Sequence
  Description of Artificial Sequence: Synthetic oligonucleotide
  Sense strand starting at position 71 of SEQ ID NO: 588415
ccucucucaugggauaaga

SEQ ID NO: 863315 - RNA, 19 nt, Artificial Sequence
  Description of Artificial Sequence: Synthetic oligonucleotide
  Antisense strand to SEQ ID NO: 863314
ucuuaucccaugagagagg

SEQ ID NO: 863316 - RNA, 19 nt, Artificial Sequence
  Description of Artificial Sequence: Synthetic oligonucleotide
  Sense strand starting at position 321 of SEQ ID NO: 588415
gcauauuuccucuguccca

SEQ ID NO: 863317 - RNA, 19 nt, Artificial Sequence
  Description of Artificial Sequence: Synthetic oligonucleotide
  Antisense strand to SEQ ID NO: 863316
ugggacagaggaaauaugc

SEQ ID NO: 863318 - RNA, 19 nt, Artificial Sequence
  Description of Artificial Sequence: Synthetic oligonucleotide
  Sense strand starting at position 839 of SEQ ID NO: 588415
cuccaacucugguuugaaa

SEQ ID NO: 863319 - RNA, 19 nt, Artificial Sequence
  Description of Artificial Sequence: Synthetic oligonucleotide
  Antisense strand to SEQ ID NO: 863318
uuucaaaccagaguuggag

SEQ ID NO: 863320 - RNA, 19 nt, Artificial Sequence
  Description of Artificial Sequence: Synthetic oligonucleotide
  Sense strand starting at position 841 of SEQ ID NO: 588415
ccaacucugguuugaaagu

SEQ ID NO: 863321 - RNA, 19 nt, Artificial Sequence
  Description of Artificial Sequence: Synthetic oligonucleotide
  Antisense strand to SEQ ID NO: 863320
acuuucaaaccagaguugg

SEQ ID NO: 863322 - RNA, 19 nt, Artificial Sequence
  Description of Artificial Sequence: Synthetic oligonucleotide
  Sense strand starting at position 842 of SEQ ID NO: 588415
caacucugguuugaaaguu

SEQ ID NO: 863323 - RNA, 19 nt, Artificial Sequence
  Description of Artificial Sequence: Synthetic oligonucleotide
  Antisense strand to SEQ ID NO: 863322
aacuuucaaaccagaguug

SEQ ID NO: 863324 - RNA, 19 nt, Artificial Sequence
  Description of Artificial Sequence: Synthetic oligonucleotide
  Sense strand starting at position 848 of SEQ ID NO: 588415
ugguuugaaaguuguaaga

SEQ ID NO: 863325 - RNA, 19 nt, Artificial Sequence
  Description of Artificial Sequence: Synthetic oligonucleotide
  Antisense strand to SEQ ID NO: 863324
ucuuacaacuuucaaacca

SEQ ID NO: 863326 - RNA, 19 nt, Artificial Sequence
  Description of Artificial Sequence: Synthetic oligonucleotide
  Sense strand starting at position 850 of SEQ ID NO: 588415
guuugaaaguuguaagagg

SEQ ID NO: 863327 - RNA, 19 nt, Artificial Sequence
  Description of Artificial Sequence: Synthetic oligonucleotide
  Antisense strand to SEQ ID NO: 863326
ccucuuacaacuuucaaac

SEQ ID NO: 863328 - RNA, 19 nt, Artificial Sequence
  Description of Artificial Sequence: Synthetic oligonucleotide
  Sense strand starting at position 883 of SEQ ID NO: 588415
accagacuccucgagcaga

SEQ ID NO: 863329 - RNA, 19 nt, Artificial Sequence
  Description of Artificial Sequence: Synthetic oligonucleotide
  Antisense strand to SEQ ID NO: 863328
ucugcucgaggagucuggu

SEQ ID NO: 863330 - RNA, 19 nt, Artificial Sequence
  Description of Artificial Sequence: Synthetic oligonucleotide
  Sense strand starting at position 923 of SEQ ID NO: 588415
aucacuggguccugaggua

SEQ ID NO: 863331 - RNA, 19 nt, Artificial Sequence
  Description of Artificial Sequence: Synthetic oligonucleotide
  Antisense strand to SEQ ID NO: 863330
uaccucaggacccagugau

SEQ ID NO: 863332 - RNA, 19 nt, Artificial Sequence
  Description of Artificial Sequence: Synthetic oligonucleotide
  Sense strand starting at position 932 of SEQ ID NO: 588415
uccugagguaaaggaguau

SEQ ID NO: 863333 - RNA, 19 nt, Artificial Sequence
  Description of Artificial Sequence: Synthetic oligonucleotide
  Antisense strand to SEQ ID NO: 863332
auacuccuuuaccucagga

SEQ ID NO: 863334 - RNA, 19 nt, Artificial Sequence
  Description of Artificial Sequence: Synthetic oligonucleotide
  Sense strand starting at position 1214 of SEQ ID NO: 588415
aaagcuuggugggauauga

SEQ ID NO: 863335 - RNA, 19 nt, Artificial Sequence
  Description of Artificial Sequence: Synthetic oligonucleotide
  Antisense strand to SEQ ID NO: 863334
ucauaucccaccaagcuuu

SEQ ID NO: 863336 - RNA, 19 nt, Artificial Sequence
  Description of Artificial Sequence: Synthetic oligonucleotide
  Sense strand starting at position 1508 of SEQ ID NO: 588415
gcagacagucaagaucagu

SEQ ID NO: 863337 - RNA, 19 nt, Artificial Sequence
  Description of Artificial Sequence: Synthetic oligonucleotide
  Antisense strand to SEQ ID NO: 863336
acugaucuugacugucugc

SEQ ID NO: 863338 - RNA, 19 nt, Artificial Sequence
  Description of Artificial Sequence: Synthetic oligonucleotide
  Sense strand starting at position 1518 of SEQ ID NO: 588415
aagaucaguccucagagcu

SEQ ID NO: 863339 - RNA, 19 nt, Artificial Sequence
  Description of Artificial Sequence: Synthetic oligonucleotide
  Antisense strand to SEQ ID NO: 863338
agcucugaggacugaucuu

SEQ ID NO: 863340 - RNA, 19 nt, Artificial Sequence
  Description of Artificial Sequence: Synthetic oligonucleotide
  Sense strand starting at position 1616 of SEQ ID NO: 588415
gagcuagaggcccaggauu

SEQ ID NO: 863341 - RNA, 19 nt, Artificial Sequence
  Description of Artificial Sequence: Synthetic oligonucleotide
  Antisense strand to SEQ ID NO: 863340
aauccugggccucuagcuc

SEQ ID NO: 863342 - RNA, 19 nt, Artificial Sequence
  Description of Artificial Sequence: Synthetic oligonucleotide
  Sense strand starting at position 1635 of SEQ ID NO: 588415
ggacuuucccagcgccaau

SEQ ID NO: 863343 - RNA, 19 nt, Artificial Sequence
  Description of Artificial Sequence: Synthetic oligonucleotide
  Antisense strand to SEQ ID NO: 863342
auuggcgcugggaaagucc

SEQ ID NO: 863344 - RNA, 19 nt, Artificial Sequence
  Description of Artificial Sequence: Synthetic oligonucleotide
  Sense strand starting at position 1733 of SEQ ID NO: 588415
gacgaaagcuuccuaagga

SEQ ID NO: 863345 - RNA, 19 nt, Artificial Sequence
  Description of Artificial Sequence: Synthetic oligonucleotide
  Antisense strand to SEQ ID NO: 863344
uccuuaggaagcuuucguc

SEQ ID NO: 863346 - RNA, 19 nt, Artificial Sequence
  Description of Artificial Sequence: Synthetic oligonucleotide
  Sense strand starting at position 1734 of SEQ ID NO: 588415
acgaaagcuuccuaaggaa

SEQ ID NO: 863347 - RNA, 19 nt, Artificial Sequence
  Description of Artificial Sequence: Synthetic oligonucleotide
  Antisense strand to SEQ ID NO: 863346
uuccuuaggaagcuuucgu

SEQ ID NO: 863348 - RNA, 19 nt, Artificial Sequence
  Description of Artificial Sequence: Synthetic oligonucleotide
  Sense strand starting at position 1802 of SEQ ID NO: 588415
accguuugcccggaagguu

SEQ ID NO: 863349 - RNA, 19 nt, Artificial Sequence
  Description of Artificial Sequence: Synthetic oligonucleotide
  Antisense strand to SEQ ID NO: 863348
aaccuuccgggcaaacggu

SEQ ID NO: 863350 - RNA, 19 nt, Artificial Sequence
  Description of Artificial Sequence: Synthetic oligonucleotide
  Sense strand starting at position 2066 of SEQ ID NO: 588415
gccgacauugaugauccua

SEQ ID NO: 863351 - RNA, 19 nt, Artificial Sequence
  Description of Artificial Sequence: Synthetic oligonucleotide
  Antisense strand to SEQ ID NO: 863350
uaggaucaucaaugucggc

SEQ ID NO: 863352 - RNA, 19 nt, Artificial Sequence
  Description of Artificial Sequence: Synthetic oligonucleotide
  Sense strand starting at position 2068 of SEQ ID NO: 588415
cgacauugaugauccuacu

SEQ ID NO: 863353 - RNA, 19 nt, Artificial Sequence
  Description of Artificial Sequence: Synthetic oligonucleotide
  Antisense strand to SEQ ID NO: 863352
aguaggaucaucaaugucg

SEQ ID NO: 863354 - RNA, 19 nt, Artificial Sequence
  Description of Artificial Sequence: Synthetic oligonucleotide
  Sense strand starting at position 2170 of SEQ ID NO: 588415
aggacuugcuugcugcaau

SEQ ID NO: 863355 - RNA, 19 nt, Artificial Sequence
  Description of Artificial Sequence: Synthetic oligonucleotide
  Antisense strand to SEQ ID NO: 863354
auugcagcaagcaaguccu

SEQ ID NO: 863356 - RNA, 19 nt, Artificial Sequence
  Description of Artificial Sequence: Synthetic oligonucleotide
  Sense strand starting at position 2173 of SEQ ID NO: 588415
acuugcuugcugcaaucau

SEQ ID NO: 863357 - RNA, 19 nt, Artificial Sequence
  Description of Artificial Sequence: Synthetic oligonucleotide
  Antisense strand to SEQ ID NO: 863356
augauugcagcaagcaagu

SEQ ID NO: 863358 - RNA, 19 nt, Artificial Sequence
  Description of Artificial Sequence: Synthetic oligonucleotide
  Sense strand starting at position 2254 of SEQ ID NO: 588415
uguguaaagcauugggaug

SEQ ID NO: 863359 - RNA, 19 nt, Artificial Sequence
  Description of Artificial Sequence: Synthetic oligonucleotide
  Antisense strand to SEQ ID NO: 863358
caucccaaugcuuuacaca

SEQ ID NO: 863360 - RNA, 19 nt, Artificial Sequence
  Description of Artificial Sequence: Synthetic oligonucleotide
  Sense strand starting at position 2308 of SEQ ID NO: 588415
uacauucuagggcgaguaa

SEQ ID NO: 863361 - RNA, 19 nt, Artificial Sequence
  Description of Artificial Sequence: Synthetic oligonucleotide
  Antisense strand to SEQ ID NO: 863360
uuacucgcccuagaaugua

SEQ ID NO: 863362 - RNA, 19 nt, Artificial Sequence
  Description of Artificial Sequence: Synthetic oligonucleotide
  Sense strand starting at position 2400 of SEQ ID NO: 588415
gggucuguguggaguacuu

SEQ ID NO: 863363 - RNA, 19 nt, Artificial Sequence
  Description of Artificial Sequence: Synthetic oligonucleotide
  Antisense strand to SEQ ID NO: 863362
aaguacuccacacagaccc

SEQ ID NO: 863364 - RNA, 19 nt, Artificial Sequence
  Description of Artificial Sequence: Synthetic oligonucleotide
  Sense strand starting at position 2402 of SEQ ID NO: 588415
gucuguguggaguacuuca

SEQ ID NO: 863365 - RNA, 19 nt, Artificial Sequence
  Description of Artificial Sequence: Synthetic oligonucleotide
  Antisense strand to SEQ ID NO: 863364
ugaaguacuccacacagac

SEQ ID NO: 863366 - RNA, 19 nt, Artificial Sequence
  Description of Artificial Sequence: Synthetic oligonucleotide
  Sense strand starting at position 2467 of SEQ ID NO: 588415
agggcuaaguaaccauauu

SEQ ID NO: 863367 - RNA, 19 nt, Artificial Sequence
  Description of Artificial Sequence: Synthetic oligonucleotide
  Antisense strand to SEQ ID NO: 863366
aauaugguuacuuagcccu

SEQ ID NO: 863368 - RNA, 19 nt, Artificial Sequence
  Description of Artificial Sequence: Synthetic oligonucleotide
  Sense strand starting at position 2971 of SEQ ID NO: 588415
ggccuaguguuuccuuuac

SEQ ID NO: 863369 - RNA, 19 nt, Artificial Sequence
  Description of Artificial Sequence: Synthetic oligonucleotide
  Antisense strand to SEQ ID NO: 863368
guaaaggaaacacuaggcc

SEQ ID NO: 863370 - RNA, 19 nt, Artificial Sequence
  Description of Artificial Sequence: Synthetic oligonucleotide
  Sense strand starting at position 2973 of SEQ ID NO: 588415
ccuaguguuuccuuuacac

SEQ ID NO: 863371 - RNA, 19 nt, Artificial Sequence
  Description of Artificial Sequence: Synthetic oligonucleotide
  Antisense strand to SEQ ID NO: 863370
guguaaaggaaacacuagg

SEQ ID NO: 863372 - RNA, 19 nt, Artificial Sequence
  Description of Artificial Sequence: Synthetic oligonucleotide
  Sense strand starting at position 3033 of SEQ ID NO: 588415
uggcuaacacuaggauaaa

SEQ ID NO: 863373 - RNA, 19 nt, Artificial Sequence
  Description of Artificial Sequence: Synthetic oligonucleotide
  Antisense strand to SEQ ID NO: 863372
uuuauccuaguguuagcca

SEQ ID NO: 863374 - RNA, 19 nt, Artificial Sequence
  Description of Artificial Sequence: Synthetic oligonucleotide
  Sense strand starting at position 3213 of SEQ ID NO: 588415
gaauuagagcugugugcca

SEQ ID NO: 863375 - RNA, 19 nt, Artificial Sequence
  Description of Artificial Sequence: Synthetic oligonucleotide
  Antisense strand to SEQ ID NO: 863374
uggcacacagcucuaauuc

SEQ ID NO: 863376 - RNA, 19 nt, Artificial Sequence
  Description of Artificial Sequence: Synthetic oligonucleotide
  Sense strand starting at position 3435 of SEQ ID NO: 588415
gagaauuaguggccaagcu

SEQ ID NO: 863377 - RNA, 19 nt, Artificial Sequence
  Description of Artificial Sequence: Synthetic oligonucleotide
  Antisense strand to SEQ ID NO: 863376
agcuuggccacuaauucuc

SEQ ID NO: 863378 - RNA, 19 nt, Artificial Sequence
  Description of Artificial Sequence: Synthetic oligonucleotide
  Sense strand starting at position 3444 of SEQ ID NO: 588415
uggccaagcugagauuuga

SEQ ID NO: 863379 - RNA, 19 nt, Artificial Sequence
  Description of Artificial Sequence: Synthetic oligonucleotide
  Antisense strand to SEQ ID NO: 863378
ucaaaucucagcuuggcca

SEQ ID NO: 863380 - RNA, 19 nt, Artificial Sequence
  Description of Artificial Sequence: Synthetic oligonucleotide
  Sense strand starting at position 3482 of SEQ ID NO: 588415
uucccagugcugugagaug

SEQ ID NO: 863381 - RNA, 19 nt, Artificial Sequence
  Description of Artificial Sequence: Synthetic oligonucleotide
  Antisense strand to SEQ ID NO: 863380
caucucacagcacugggaa

SEQ ID NO: 863382 - RNA, 19 nt, Artificial Sequence
  Description of Artificial Sequence: Synthetic oligonucleotide
  Sense strand starting at position 3493 of SEQ ID NO: 588415
gugagaugccucugaggcu

SEQ ID NO: 863383 - RNA, 19 nt, Artificial Sequence
  Description of Artificial Sequence: Synthetic oligonucleotide
  Antisense strand to SEQ ID NO: 863382
agccucagaggcaucucac

SEQ ID NO: 863384 - RNA, 19 nt, Artificial Sequence
  Description of Artificial Sequence: Synthetic oligonucleotide
  Sense strand starting at position 3532 of SEQ ID NO: 588415
gacccagugaguuagaagu

SEQ ID NO: 863385 - RNA, 19 nt, Artificial Sequence
  Description of Artificial Sequence: Synthetic oligonucleotide
  Antisense strand to SEQ ID NO: 863384
acuucuaacucacuggguc

SEQ ID NO: 863386 - RNA, 19 nt, Artificial Sequence
  Description of Artificial Sequence: Synthetic oligonucleotide
  Sense strand starting at position 3539 of SEQ ID NO: 588415
ugaguuagaaguugagcca

SEQ ID NO: 863387 - RNA, 19 nt, Artificial Sequence
  Description of Artificial Sequence: Synthetic oligonucleotide
  Antisense strand to SEQ ID NO: 863386
uggcucaacuucuaacuca

SEQ ID NO: 863388 - RNA, 19 nt, Artificial Sequence
  Description of Artificial Sequence: Synthetic oligonucleotide
  Sense strand starting at position 3540 of SEQ ID NO: 588415
gaguuagaaguugagccau

SEQ ID NO: 863389 - RNA, 19 nt, Artificial Sequence
  Description of Artificial Sequence: Synthetic oligonucleotide
  Antisense strand to SEQ ID NO: 863388
auggcucaacuucuaacuc

SEQ ID NO: 863390 - RNA, 19 nt, Artificial Sequence
  Description of Artificial Sequence: Synthetic oligonucleotide
  Sense strand starting at position 3662 of SEQ ID NO: 588415
ggguccucagacuggaaua

SEQ ID NO: 863391 - RNA, 19 nt, Artificial Sequence
  Description of Artificial Sequence: Synthetic oligonucleotide
  Antisense strand to SEQ ID NO: 863390
uauuccagucugaggaccc

SEQ ID NO: 863392 - RNA, 19 nt, Artificial Sequence
  Description of Artificial Sequence: Synthetic oligonucleotide
  Sense strand starting at position 20 of SEQ ID NO: 588416
gggugagugaccugcgaga

SEQ ID NO: 863393 - RNA, 19 nt, Artificial Sequence
  Description of Artificial Sequence: Synthetic oligonucleotide
  Antisense strand to SEQ ID NO: 863392
ucucgcaggucacucaccc

SEQ ID NO: 863394 - RNA, 19 nt, Artificial Sequence
  Description of Artificial Sequence: Synthetic oligonucleotide
  Sense strand starting at position 22 of SEQ ID NO: 588416
gugagugaccugcgagacu

SEQ ID NO: 863395 - RNA, 19 nt, Artificial Sequence
  Description of Artificial Sequence: Synthetic oligonucleotide
  Antisense strand to SEQ ID NO: 863394
agucucgcaggucacucac

SEQ ID NO: 863396 - RNA, 19 nt, Artificial Sequence
  Description of Artificial Sequence: Synthetic oligonucleotide
  Sense strand starting at position 114 of SEQ ID NO: 588416
ccacuuagugccgacaaga

SEQ ID NO: 863397 - RNA, 19 nt, Artificial Sequence
  Description of Artificial Sequence: Synthetic oligonucleotide
  Antisense strand to SEQ ID NO: 863396
ucuugucggcacuaagugg

SEQ ID NO: 863398 - RNA, 19 nt, Artificial Sequence
  Description of Artificial Sequence: Synthetic oligonucleotide
  Sense strand starting at position 175 of SEQ ID NO: 588416
gacggauuuggucguggac

SEQ ID NO: 863399 - RNA, 19 nt, Artificial Sequence
  Description of Artificial Sequence: Synthetic oligonucleotide
  Antisense strand to SEQ ID NO: 863398
guccacgaccaaauccguc

SEQ ID NO: 863400 - RNA, 19 nt, Artificial Sequence
  Description of Artificial Sequence: Synthetic oligonucleotide
  Sense strand starting at position 547 of SEQ ID NO: 588416
ucgaucucuugaccucaau

SEQ ID NO: 863401 - RNA, 19 nt, Artificial Sequence
  Description of Artificial Sequence: Synthetic oligonucleotide
  Antisense strand to SEQ ID NO: 863400
auugaggucaagagaucga

SEQ ID NO: 863402 - RNA, 19 nt, Artificial Sequence
  Description of Artificial Sequence: Synthetic oligonucleotide
  Sense strand starting at position 652 of SEQ ID NO: 588416
uggucccuuucucagauuu

SEQ ID NO: 863403 - RNA, 19 nt, Artificial Sequence
  Description of Artificial Sequence: Synthetic oligonucleotide
  Antisense strand to SEQ ID NO: 863402
aaaucugagaaagggacca

SEQ ID NO: 863404 - RNA, 19 nt, Artificial Sequence
  Description of Artificial Sequence: Synthetic oligonucleotide
  Sense strand starting at position 654 of SEQ ID NO: 588416
gucccuuucucagauuucu

SEQ ID NO: 863405 - RNA, 19 nt, Artificial Sequence
  Description of Artificial Sequence: Synthetic oligonucleotide
  Antisense strand to SEQ ID NO: 863404
agaaaucugagaaagggac

SEQ ID NO: 863406 - RNA, 19 nt, Artificial Sequence
  Description of Artificial Sequence: Synthetic oligonucleotide
  Sense strand starting at position 848 of SEQ ID NO: 588416
augauauucugagcuaucu

SEQ ID NO: 863407 - RNA, 19 nt, Artificial Sequence
  Description of Artificial Sequence: Synthetic oligonucleotide
  Antisense strand to SEQ ID NO: 863406
agauagcucagaauaucau

SEQ ID NO: 863408 - RNA, 19 nt, Artificial Sequence
  Description of Artificial Sequence: Synthetic oligonucleotide
  Sense strand starting at position 856 of SEQ ID NO: 588416
cugagcuaucugcaacugu

SEQ ID NO: 863409 - RNA, 19 nt, Artificial Sequence
  Description of Artificial Sequence: Synthetic oligonucleotide
  Antisense strand to SEQ ID NO: 863408
acaguugcagauagcucag

SEQ ID NO: 863410 - RNA, 19 nt, Artificial Sequence
  Description of Artificial Sequence: Synthetic oligonucleotide
  Sense strand starting at position 941 of SEQ ID NO: 588416
cuggcuuguuguccacauu

SEQ ID NO: 863411 - RNA, 19 nt, Artificial Sequence
  Description of Artificial Sequence: Synthetic oligonucleotide
  Antisense strand to SEQ ID NO: 863410
aauguggacaacaagccag

SEQ ID NO: 863412 - RNA, 19 nt, Artificial Sequence
  Description of Artificial Sequence: Synthetic oligonucleotide
  Sense strand starting at position 958 of SEQ ID NO: 588416
uucguaacugaaggaaaua

SEQ ID NO: 863413 - RNA, 19 nt, Artificial Sequence
  Description of Artificial Sequence: Synthetic oligonucleotide
  Antisense strand to SEQ ID NO: 863412
uauuuccuucaguuacgaa

SEQ ID NO: 863414 - RNA, 19 nt, Artificial Sequence
  Description of Artificial Sequence: Synthetic oligonucleotide
  Sense strand starting at position 1369 of SEQ ID NO: 588416
cagugagugucuguguuag

SEQ ID NO: 863415 - RNA, 19 nt, Artificial Sequence
  Description of Artificial Sequence: Synthetic oligonucleotide
  Antisense strand to SEQ ID NO: 863414
cuaacacagacacucacug

SEQ ID NO: 863416 - RNA, 19 nt, Artificial Sequence
  Description of Artificial Sequence: Synthetic oligonucleotide
  Sense strand starting at position 1436 of SEQ ID NO: 588416
gcacgauaucuuuaucagc

SEQ ID NO: 863417 - RNA, 19 nt, Artificial Sequence
  Description of Artificial Sequence: Synthetic oligonucleotide
  Antisense strand to SEQ ID NO: 863416
gcugauaaagauaucgugc

SEQ ID NO: 863418 - RNA, 19 nt, Artificial Sequence
  Description of Artificial Sequence: Synthetic oligonucleotide
  Sense strand starting at position 1438 of SEQ ID NO: 588416
acgauaucuuuaucagcga

SEQ ID NO: 863419 - RNA, 19 nt, Artificial Sequence
  Description of Artificial Sequence: Synthetic oligonucleotide
  Antisense strand to SEQ ID NO: 863418
ucgcugauaaagauaucgu

SEQ ID NO: 863420 - RNA, 19 nt, Artificial Sequence
  Description of Artificial Sequence: Synthetic oligonucleotide
  Sense strand starting at position 1476 of SEQ ID NO: 588416
uucguucucgccuccuaua

SEQ ID NO: 863421 - RNA, 19 nt, Artificial Sequence
  Description of Artificial Sequence: Synthetic oligonucleotide
  Antisense strand to SEQ ID NO: 863420
uauaggaggcgagaacgaa

SEQ ID NO: 863422 - RNA, 19 nt, Artificial Sequence
  Description of Artificial Sequence: Synthetic oligonucleotide
  Sense strand starting at position 2125 of SEQ ID NO: 588416
ccggaaucgucuuccggaa

SEQ ID NO: 863423 - RNA, 19 nt, Artificial Sequence
  Description of Artificial Sequence: Synthetic oligonucleotide
  Antisense strand to SEQ ID NO: 863422
uuccggaagacgauuccgg

SEQ ID NO: 863424 - RNA, 19 nt, Artificial Sequence
  Description of Artificial Sequence: Synthetic oligonucleotide
  Sense strand starting at position 2167 of SEQ ID NO: 588416
ugguuuccgccugcaguaa

SEQ ID NO: 863425 - RNA, 19 nt, Artificial Sequence
  Description of Artificial Sequence: Synthetic oligonucleotide
  Antisense strand to SEQ ID NO: 863424
uuacugcaggcggaaacca

SEQ ID NO: 863426 - RNA, 19 nt, Artificial Sequence
  Description of Artificial Sequence: Synthetic oligonucleotide
  Sense strand starting at position 2179 of SEQ ID NO: 588416
gcaguaaugcuggacguga

SEQ ID NO: 863427 - RNA, 19 nt, Artificial Sequence
  Description of Artificial Sequence: Synthetic oligonucleotide
  Antisense strand to SEQ ID NO: 863426
ucacguccagcauuacugc

SEQ ID NO: 863428 - RNA, 19 nt, Artificial Sequence
  Description of Artificial Sequence: Synthetic oligonucleotide
  Sense strand starting at position 2183 of SEQ ID NO: 588416
uaaugcuggacgugaagaa

SEQ ID NO: 863429 - RNA, 19 nt, Artificial Sequence
  Description of Artificial Sequence: Synthetic oligonucleotide
  Antisense strand to SEQ ID NO: 863428
uucuucacguccagcauua

SEQ ID NO: 863430 - RNA, 19 nt, Artificial Sequence
  Description of Artificial Sequence: Synthetic oligonucleotide
  Sense strand starting at position 2184 of SEQ ID NO: 588416
aaugcuggacgugaagaau

SEQ ID NO: 863431 - RNA, 19 nt, Artificial Sequence
  Description of Artificial Sequence: Synthetic oligonucleotide
  Antisense strand to SEQ ID NO: 863430
auucuucacguccagcauu

SEQ ID NO: 863432 - RNA, 19 nt, Artificial Sequence
  Description of Artificial Sequence: Synthetic oligonucleotide
  Sense strand starting at position 2192 of SEQ ID NO: 588416
acgugaagaauccgacuga

SEQ ID NO: 863433 - RNA, 19 nt, Artificial Sequence
  Description of Artificial Sequence: Synthetic oligonucleotide
  Antisense strand to SEQ ID NO: 863432
ucagucggauucuucacgu

SEQ ID NO: 863434 - RNA, 19 nt, Artificial Sequence
  Description of Artificial Sequence: Synthetic oligonucleotide
  Sense strand starting at position 2207 of SEQ ID NO: 588416
cugagcaaguauguguaaa

SEQ ID NO: 863435 - RNA, 19 nt, Artificial Sequence
  Description of Artificial Sequence: Synthetic oligonucleotide
  Antisense strand to SEQ ID NO: 863434
uuuacacauacuugcucag

SEQ ID NO: 863436 - RNA, 19 nt, Artificial Sequence
  Description of Artificial Sequence: Synthetic oligonucleotide
  Sense strand starting at position 2208 of SEQ ID NO: 588416
ugagcaaguauguguaaag

SEQ ID NO: 863437 - RNA, 19 nt, Artificial Sequence
  Description of Artificial Sequence: Synthetic oligonucleotide
  Antisense strand to SEQ ID NO: 863436
cuuuacacauacuugcuca

SEQ ID NO: 863438 - RNA, 19 nt, Artificial Sequence
  Description of Artificial Sequence: Synthetic oligonucleotide
  Sense strand starting at position 2244 of SEQ ID NO: 588416
uuaugcuuucugugacaac

SEQ ID NO: 863439 - RNA, 19 nt, Artificial Sequence
  Description of Artificial Sequence: Synthetic oligonucleotide
  Antisense strand to SEQ ID NO: 863438
guugucacagaaagcauaa

SEQ ID NO: 863440 - RNA, 19 nt, Artificial Sequence
  Description of Artificial Sequence: Synthetic oligonucleotide
  Sense strand starting at position 2276 of SEQ ID NO: 588416
ggacacauuauucgcauga

SEQ ID NO: 863441 - RNA, 19 nt, Artificial Sequence
  Description of Artificial Sequence: Synthetic oligonucleotide
  Antisense strand to SEQ ID NO: 863440
ucaugcgaauaaugugucc

SEQ ID NO: 863442 - RNA, 19 nt, Artificial Sequence
  Description of Artificial Sequence: Synthetic oligonucleotide
  Sense strand starting at position 2280 of SEQ ID NO: 588416
acauuauucgcaugaauga

SEQ ID NO: 863443 - RNA, 19 nt, Artificial Sequence
  Description of Artificial Sequence: Synthetic oligonucleotide
  Antisense strand to SEQ ID NO: 863442
ucauucaugcgaauaaugu

SEQ ID NO: 863444 - RNA, 19 nt, Artificial Sequence
  Description of Artificial Sequence: Synthetic oligonucleotide
  Sense strand starting at position 2682 of SEQ ID NO: 588416
gccauuaauugguuuggau

SEQ ID NO: 863445 - RNA, 19 nt, Artificial Sequence
  Description of Artificial Sequence: Synthetic oligonucleotide
  Antisense strand to SEQ ID NO: 863444
auccaaaccaauuaauggc

SEQ ID NO: 863446 - RNA, 19 nt, Artificial Sequence
  Description of Artificial Sequence: Synthetic oligonucleotide
  Sense strand starting at position 2694 of SEQ ID NO: 588416
uuuggaugguaucuggauu

SEQ ID NO: 863447 - RNA, 19 nt, Artificial Sequence
  Description of Artificial Sequence: Synthetic oligonucleotide
  Antisense strand to SEQ ID NO: 863446
aauccagauaccauccaaa

SEQ ID NO: 863448 - RNA, 19 nt, Artificial Sequence
  Description of Artificial Sequence: Synthetic oligonucleotide
  Sense strand starting at position 2851 of SEQ ID NO: 588416
ggucaaguuagcugaguug

SEQ ID NO: 863449 - RNA, 19 nt, Artificial Sequence
  Description of Artificial Sequence: Synthetic oligonucleotide
  Antisense strand to SEQ ID NO: 863448
caacucagcuaacuugacc

SEQ ID NO: 863450 - RNA, 19 nt, Artificial Sequence
  Description of Artificial Sequence: Synthetic oligonucleotide
  Sense strand starting at position 2854 of SEQ ID NO: 588416
caaguuagcugaguugaac

SEQ ID NO: 863451 - RNA, 19 nt, Artificial Sequence
  Description of Artificial Sequence: Synthetic oligonucleotide
  Antisense strand to SEQ ID NO: 863450
guucaacucagcuaacuug

SEQ ID NO: 863452 - RNA, 19 nt, Artificial Sequence
  Description of Artificial Sequence: Synthetic oligonucleotide
  Sense strand starting at position 2860 of SEQ ID NO: 588416
agcugaguugaacagucua

SEQ ID NO: 863453 - RNA, 19 nt, Artificial Sequence
  Description of Artificial Sequence: Synthetic oligonucleotide
  Antisense strand to SEQ ID NO: 863452
uagacuguucaacucagcu

SEQ ID NO: 863454 - RNA, 19 nt, Artificial Sequence
  Description of Artificial Sequence: Synthetic oligonucleotide
  Sense strand starting at position 2890 of SEQ ID NO: 588416
auuggaagauaccugcuua

SEQ ID NO: 863455 - RNA, 19 nt, Artificial Sequence
  Description of Artificial Sequence: Synthetic oligonucleotide
  Antisense strand to SEQ ID NO: 863454
uaagcagguaucuuccaau

SEQ ID NO: 863456 - RNA, 19 nt, Artificial Sequence
  Description of Artificial Sequence: Synthetic oligonucleotide
  Sense strand starting at position 2894 of SEQ ID NO: 588416
gaagauaccugcuuaaagg

SEQ ID NO: 863457 - RNA, 19 nt, Artificial Sequence
  Description of Artificial Sequence: Synthetic oligonucleotide
  Antisense strand to SEQ ID NO: 863456
ccuuuaagcagguaucuuc

SEQ ID NO: 863458 - RNA, 19 nt, Artificial Sequence
  Description of Artificial Sequence: Synthetic oligonucleotide
  Sense strand starting at position 2895 of SEQ ID NO: 588416
aagauaccugcuuaaaggu

SEQ ID NO: 863459 - RNA, 19 nt, Artificial Sequence
  Description of Artificial Sequence: Synthetic oligonucleotide
  Antisense strand to SEQ ID NO: 863458
accuuuaagcagguaucuu

SEQ ID NO: 863460 - RNA, 19 nt, Artificial Sequence
  Description of Artificial Sequence: Synthetic oligonucleotide
  Sense strand starting at position 3038 of SEQ ID NO: 588416
guuggacagcucuaaaugu

SEQ ID NO: 863461 - RNA, 19 nt, Artificial Sequence
  Description of Artificial Sequence: Synthetic oligonucleotide
  Antisense strand to SEQ ID NO: 863460
acauuuagagcuguccaac

SEQ ID NO: 863462 - RNA, 19 nt, Artificial Sequence
  Description of Artificial Sequence: Synthetic oligonucleotide
  Sense strand starting at position 3080 of SEQ ID NO: 588416
gcugaaaucuguuucccuu

SEQ ID NO: 863463 - RNA, 19 nt, Artificial Sequence
  Description of Artificial Sequence: Synthetic oligonucleotide
  Antisense strand to SEQ ID NO: 863462
aagggaaacagauuucagc

SEQ ID NO: 863464 - RNA, 19 nt, Artificial Sequence
  Description of Artificial Sequence: Synthetic oligonucleotide
  Sense strand starting at position 3146 of SEQ ID NO: 588416
ugucuuccacuugacagau

SEQ ID NO: 863465 - RNA, 19 nt, Artificial Sequence
  Description of Artificial Sequence: Synthetic oligonucleotide
  Antisense strand to SEQ ID NO: 863464
aucugucaaguggaagaca

SEQ ID NO: 863466 - RNA, 19 nt, Artificial Sequence
  Description of Artificial Sequence: Synthetic oligonucleotide
  Sense strand starting at position 3330 of SEQ ID NO: 588416
ggcauaugccuauaauccu

SEQ ID NO: 863467 - RNA, 19 nt, Artificial Sequence
  Description of Artificial Sequence: Synthetic oligonucleotide
  Antisense strand to SEQ ID NO: 863466
aggauuauaggcauaugcc

SEQ ID NO: 863468 - RNA, 19 nt, Artificial Sequence
  Description of Artificial Sequence: Synthetic oligonucleotide
  Sense strand starting at position 3702 of SEQ ID NO: 588416
auguuauugcuaucgugcu

SEQ ID NO: 863469 - RNA, 19 nt, Artificial Sequence
  Description of Artificial Sequence: Synthetic oligonucleotide
  Antisense strand to SEQ ID NO: 863468
agcacgauagcaauaacau

SEQ ID NO: 863470 - RNA, 19 nt, Artificial Sequence
  Description of Artificial Sequence: Synthetic oligonucleotide
  Sense strand starting at position 3776 of SEQ ID NO: 588416
caccgcuggcaugaaauaa

SEQ ID NO: 863471 - RNA, 19 nt, Artificial Sequence
  Description of Artificial Sequence: Synthetic oligonucleotide
  Antisense strand to SEQ ID NO: 863470
uuauuucaugccagcggug

SEQ ID NO: 863472 - RNA, 19 nt, Artificial Sequence
  Description of Artificial Sequence: Synthetic oligonucleotide
  Sense strand starting at position 709 of SEQ ID NO: 588417
aaauaaauguucuucguag

SEQ ID NO: 863473 - RNA, 19 nt, Artificial Sequence
  Description of Artificial Sequence: Synthetic oligonucleotide
  Antisense strand to SEQ ID NO: 863472
cuacgaagaacauuuauuu

SEQ ID NO: 863474 - RNA, 19 nt, Artificial Sequence
  Description of Artificial Sequence: Synthetic oligonucleotide
  Sense strand starting at position 711 of SEQ ID NO: 588417
auaaauguucuucguaggu

SEQ ID NO: 863475 - RNA, 19 nt, Artificial Sequence
  Description of Artificial Sequence: Synthetic oligonucleotide
  Antisense strand to SEQ ID NO: 863474
accuacgaagaacauuuau

SEQ ID NO: 863476 - RNA, 19 nt, Artificial Sequence
  Description of Artificial Sequence: Synthetic oligonucleotide
  Sense strand starting at position 715 of SEQ ID NO: 588417
auguucuucguagguauua

SEQ ID NO: 863477 - RNA, 19 nt, Artificial Sequence
  Description of Artificial Sequence: Synthetic oligonucleotide
  Antisense strand to SEQ ID NO: 863476
uaauaccuacgaagaacau

SEQ ID NO: 863478 - RNA, 19 nt, Artificial Sequence
  Description of Artificial Sequence: Synthetic oligonucleotide
  Sense strand starting at position 716 of SEQ ID NO: 588417
uguucuucguagguauuaa

SEQ ID NO: 863479 - RNA, 19 nt, Artificial Sequence
  Description of Artificial Sequence: Synthetic oligonucleotide
  Antisense strand to SEQ ID NO: 863478
uuaauaccuacgaagaaca

SEQ ID NO: 863480 - RNA, 19 nt, Artificial Sequence
  Description of Artificial Sequence: Synthetic oligonucleotide
  Sense strand starting at position 717 of SEQ ID NO: 588417
guucuucguagguauuaag

SEQ ID NO: 863481 - RNA, 19 nt, Artificial Sequence
  Description of Artificial Sequence: Synthetic oligonucleotide
  Antisense strand to SEQ ID NO: 863480
cuuaauaccuacgaagaac

SEQ ID NO: 863482 - RNA, 19 nt, Artificial Sequence
  Description of Artificial Sequence: Synthetic oligonucleotide
  Sense strand starting at position 1548 of SEQ ID NO: 588417
aaccaauuggugugauaua

SEQ ID NO: 863483 - RNA, 19 nt, Artificial Sequence
  Description of Artificial Sequence: Synthetic oligonucleotide
  Antisense strand to SEQ ID NO: 863482
uauaucacaccaauugguu

SEQ ID NO: 863484 - RNA, 19 nt, Artificial Sequence
  Description of Artificial Sequence: Synthetic oligonucleotide
  Sense strand starting at position 1571 of SEQ ID NO: 588417
gucaaugcuuaaguuacaa

SEQ ID NO: 863485 - RNA, 19 nt, Artificial Sequence
  Description of Artificial Sequence: Synthetic oligonucleotide
  Antisense strand to SEQ ID NO: 863484
uuguaacuuaagcauugac

SEQ ID NO: 863486 - RNA, 19 nt, Artificial Sequence
  Description of Artificial Sequence: Synthetic oligonucleotide
  Sense strand starting at position 1602 of SEQ ID NO: 588417
gugccuaaguuacuuaaua

SEQ ID NO: 863487 - RNA, 19 nt, Artificial Sequence
  Description of Artificial Sequence: Synthetic oligonucleotide
  Antisense strand to SEQ ID NO: 863486
uauuaaguaacuuaggcac

SEQ ID NO: 863488 - RNA, 19 nt, Artificial Sequence
  Description of Artificial Sequence: Synthetic oligonucleotide
  Sense strand starting at position 1631 of SEQ ID NO: 588417
acuguauuauaagcaaaga

SEQ ID NO: 863489 - RNA, 19 nt, Artificial Sequence
  Description of Artificial Sequence: Synthetic oligonucleotide
  Antisense strand to SEQ ID NO: 863488
ucuuugcuuauaauacagu

SEQ ID NO: 863490 - RNA, 19 nt, Artificial Sequence
  Description of Artificial Sequence: Synthetic oligonucleotide
  Sense strand starting at position 1682 of SEQ ID NO: 588417
uaaugcacuuuguuggaaa

SEQ ID NO: 863491 - RNA, 19 nt, Artificial Sequence
  Description of Artificial Sequence: Synthetic oligonucleotide
  Antisense strand to SEQ ID NO: 863490
uuuccaacaaagugcauua

SEQ ID NO: 863492 - RNA, 19 nt, Artificial Sequence
  Description of Artificial Sequence: Synthetic oligonucleotide
  Sense strand starting at position 1684 of SEQ ID NO: 588417
augcacuuuguuggaaaca

SEQ ID NO: 863493 - RNA, 19 nt, Artificial Sequence
  Description of Artificial Sequence: Synthetic oligonucleotide
  Antisense strand to SEQ ID NO: 863492
uguuuccaacaaagugcau

SEQ ID NO: 863494 - RNA, 19 nt, Artificial Sequence
  Description of Artificial Sequence: Synthetic oligonucleotide
  Sense strand starting at position 1773 of SEQ ID NO: 588417
ucaucucuuuaccugguua

SEQ ID NO: 863495 - RNA, 19 nt, Artificial Sequence
  Description of Artificial Sequence: Synthetic oligonucleotide
  Antisense strand to SEQ ID NO: 863494
uaaccagguaaagagauga

SEQ ID NO: 863496 - RNA, 19 nt, Artificial Sequence
  Description of Artificial Sequence: Synthetic oligonucleotide
  Sense strand starting at position 1777 of SEQ ID NO: 588417
cucuuuaccugguuaugau

SEQ ID NO: 863497 - RNA, 19 nt, Artificial Sequence
  Description of Artificial Sequence: Synthetic oligonucleotide
  Antisense strand to SEQ ID NO: 863496
aucauaaccagguaaagag

SEQ ID NO: 863498 - RNA, 19 nt, Artificial Sequence
  Description of Artificial Sequence: Synthetic oligonucleotide
  Sense strand starting at position 1778 of SEQ ID NO: 588417
ucuuuaccugguuaugaua

SEQ ID NO: 863499 - RNA, 19 nt, Artificial Sequence
  Description of Artificial Sequence: Synthetic oligonucleotide
  Antisense strand to SEQ ID NO: 863498
uaucauaaccagguaaaga

SEQ ID NO: 863500 - RNA, 19 nt, Artificial Sequence
  Description of Artificial Sequence: Synthetic oligonucleotide
  Sense strand starting at position 2031 of SEQ ID NO: 588417
uuauguaugucacuuaagu

SEQ ID NO: 863501 - RNA, 19 nt, Artificial Sequence
  Description of Artificial Sequence: Synthetic oligonucleotide
  Antisense strand to SEQ ID NO: 863500
acuuaagugacauacauaa

SEQ ID NO: 863502 - RNA, 19 nt, Artificial Sequence
  Description of Artificial Sequence: Synthetic oligonucleotide
  Sense strand starting at position 2367 of SEQ ID NO: 588417
gagcaagaaucguucucaa

SEQ ID NO: 863503 - RNA, 19 nt, Artificial Sequence
  Description of Artificial Sequence: Synthetic oligonucleotide
  Antisense strand to SEQ ID NO: 863502
uugagaacgauucuugcuc

SEQ ID NO: 863504 - RNA, 19 nt, Artificial Sequence
  Description of Artificial Sequence: Synthetic oligonucleotide
  Sense strand starting at position 2568 of SEQ ID NO: 588417
cuguaaacccuguguauau

SEQ ID NO: 863505 - RNA, 19 nt, Artificial Sequence
  Description of Artificial Sequence: Synthetic oligonucleotide
  Antisense strand to SEQ ID NO: 863504
auauacacaggguuuacag

SEQ ID NO: 863506 - RNA, 19 nt, Artificial Sequence
  Description of Artificial Sequence: Synthetic oligonucleotide
  Sense strand starting at position 2575 of SEQ ID NO: 588417
cccuguguauauccucaaa

SEQ ID NO: 863507 - RNA, 19 nt, Artificial Sequence
  Description of Artificial Sequence: Synthetic oligonucleotide
  Antisense strand to SEQ ID NO: 863506
uuugaggauauacacaggg

SEQ ID NO: 863508 - RNA, 19 nt, Artificial Sequence
  Description of Artificial Sequence: Synthetic oligonucleotide
  Sense strand starting at position 2577 of SEQ ID NO: 588417
cuguguauauccucaaaua

SEQ ID NO: 863509 - RNA, 19 nt, Artificial Sequence
  Description of Artificial Sequence: Synthetic oligonucleotide
  Antisense strand to SEQ ID NO: 863508
uauuugaggauauacacag

SEQ ID NO: 863510 - RNA, 19 nt, Artificial Sequence
  Description of Artificial Sequence: Synthetic oligonucleotide
  Sense strand starting at position 2578 of SEQ ID NO: 588417
uguguauauccucaaauac

SEQ ID NO: 863511 - RNA, 19 nt, Artificial Sequence
  Description of Artificial Sequence: Synthetic oligonucleotide
  Antisense strand to SEQ ID NO: 863510
guauuugaggauauacaca

SEQ ID NO: 863512 - RNA, 19 nt, Artificial Sequence
  Description of Artificial Sequence: Synthetic oligonucleotide
  Sense strand starting at position 2616 of SEQ ID NO: 588417
cagaguuauccuugacugu

SEQ ID NO: 863513 - RNA, 19 nt, Artificial Sequence
  Description of Artificial Sequence: Synthetic oligonucleotide
  Antisense strand to SEQ ID NO: 863512
acagucaaggauaacucug

SEQ ID NO: 863514 - RNA, 19 nt, Artificial Sequence
  Description of Artificial Sequence: Synthetic oligonucleotide
  Sense strand starting at position 2617 of SEQ ID NO: 588417
agaguuauccuugacugug

SEQ ID NO: 863515 - RNA, 19 nt, Artificial Sequence
  Description of Artificial Sequence: Synthetic oligonucleotide
  Antisense strand to SEQ ID NO: 863514
cacagucaaggauaacucu

SEQ ID NO: 863516 - RNA, 19 nt, Artificial Sequence
  Description of Artificial Sequence: Synthetic oligonucleotide
  Sense strand starting at position 2765 of SEQ ID NO: 588417
cuaagugaucucgcugcuu

SEQ ID NO: 863517 - RNA, 19 nt, Artificial Sequence
  Description of Artificial Sequence: Synthetic oligonucleotide
  Antisense strand to SEQ ID NO: 863516
aagcagcgagaucacuuag

SEQ ID NO: 863518 - RNA, 19 nt, Artificial Sequence
  Description of Artificial Sequence: Synthetic oligonucleotide
  Sense strand starting at position 2776 of SEQ ID NO: 588417
cgcugcuuccuuucuugua

SEQ ID NO: 863519 - RNA, 19 nt, Artificial Sequence
  Description of Artificial Sequence: Synthetic oligonucleotide
  Antisense strand to SEQ ID NO: 863518
uacaagaaaggaagcagcg

SEQ ID NO: 863520 - RNA, 19 nt, Artificial Sequence
  Description of Artificial Sequence: Synthetic oligonucleotide
  Sense strand starting at position 2784 of SEQ ID NO: 588417
ccuuucuuguacuucuaga

SEQ ID NO: 863521 - RNA, 19 nt, Artificial Sequence
  Description of Artificial Sequence: Synthetic oligonucleotide
  Antisense strand to SEQ ID NO: 863520
ucuagaaguacaagaaagg

SEQ ID NO: 863522 - RNA, 19 nt, Artificial Sequence
  Description of Artificial Sequence: Synthetic oligonucleotide
  Sense strand starting at position 2797 of SEQ ID NO: 588417
ucuagagucuguucucuac

SEQ ID NO: 863523 - RNA, 19 nt, Artificial Sequence
  Description of Artificial Sequence: Synthetic oligonucleotide
  Antisense strand to SEQ ID NO: 863522
guagagaacagacucuaga

SEQ ID NO: 863524 - RNA, 19 nt, Artificial Sequence
  Description of Artificial Sequence: Synthetic oligonucleotide
  Sense strand starting at position 2800 of SEQ ID NO: 588417
agagucuguucucuacaua

SEQ ID NO: 863525 - RNA, 19 nt, Artificial Sequence
  Description of Artificial Sequence: Synthetic oligonucleotide
  Antisense strand to SEQ ID NO: 863524
uauguagagaacagacucu

SEQ ID NO: 863526 - RNA, 19 nt, Artificial Sequence
  Description of Artificial Sequence: Synthetic oligonucleotide
  Sense strand starting at position 2801 of SEQ ID NO: 588417
gagucuguucucuacauag

SEQ ID NO: 863527 - RNA, 19 nt, Artificial Sequence
  Description of Artificial Sequence: Synthetic oligonucleotide
  Antisense strand to SEQ ID NO: 863526
cuauguagagaacagacuc

SEQ ID NO: 863528 - RNA, 19 nt, Artificial Sequence
  Description of Artificial Sequence: Synthetic oligonucleotide
  Sense strand starting at position 3211 of SEQ ID NO: 588417
augaaaucugaagguccua

SEQ ID NO: 863529 - RNA, 19 nt, Artificial Sequence
  Description of Artificial Sequence: Synthetic oligonucleotide
  Antisense strand to SEQ ID NO: 863528
uaggaccuucagauuucau

SEQ ID NO: 863530 - RNA, 19 nt, Artificial Sequence
  Description of Artificial Sequence: Synthetic oligonucleotide
  Sense strand starting at position 3345 of SEQ ID NO: 588417
cucucaaaguguccacauu

SEQ ID NO: 863531 - RNA, 19 nt, Artificial Sequence
  Description of Artificial Sequence: Synthetic oligonucleotide
  Antisense strand to SEQ ID NO: 863530
aauguggacacuuugagag

SEQ ID NO: 863532 - RNA, 19 nt, Artificial Sequence
  Description of Artificial Sequence: Synthetic oligonucleotide
  Sense strand starting at position 3378 of SEQ ID NO: 588417
ucuggaagguuauccagua

SEQ ID NO: 863533 - RNA, 19 nt, Artificial Sequence
  Description of Artificial Sequence: Synthetic oligonucleotide
  Antisense strand to SEQ ID NO: 863532
uacuggauaaccuuccaga

SEQ ID NO: 863534 - RNA, 19 nt, Artificial Sequence
  Description of Artificial Sequence: Synthetic oligonucleotide
  Sense strand starting at position 3379 of SEQ ID NO: 588417
cuggaagguuauccaguau

SEQ ID NO: 863535 - RNA, 19 nt, Artificial Sequence
  Description of Artificial Sequence: Synthetic oligonucleotide
  Antisense strand to SEQ ID NO: 863534
auacuggauaaccuuccag

SEQ ID NO: 863536 - RNA, 19 nt, Artificial Sequence
  Description of Artificial Sequence: Synthetic oligonucleotide
  Sense strand starting at position 3539 of SEQ ID NO: 588417
acagauaucuaccugcaug

SEQ ID NO: 863537 - RNA, 19 nt, Artificial Sequence
  Description of Artificial Sequence: Synthetic oligonucleotide
  Antisense strand to SEQ ID NO: 863536
caugcagguagauaucugu

SEQ ID NO: 863538 - RNA, 19 nt, Artificial Sequence
  Description of Artificial Sequence: Synthetic oligonucleotide
  Sense strand starting at position 3688 of SEQ ID NO: 588417
auaaauauuugccaaagga

SEQ ID NO: 863539 - RNA, 19 nt, Artificial Sequence
  Description of Artificial Sequence: Synthetic oligonucleotide
  Antisense strand to SEQ ID NO: 863538
uccuuuggcaaauauuuau

SEQ ID NO: 863540 - RNA, 19 nt, Artificial Sequence
  Description of Artificial Sequence: Synthetic oligonucleotide
  Sense strand starting at position 3793 of SEQ ID NO: 588417
agcuaugcccuugaaucua

SEQ ID NO: 863541 - RNA, 19 nt, Artificial Sequence
  Description of Artificial Sequence: Synthetic oligonucleotide
  Antisense strand to SEQ ID NO: 863540
uagauucaagggcauagcu

SEQ ID NO: 863542 - RNA, 19 nt, Artificial Sequence
  Description of Artificial Sequence: Synthetic oligonucleotide
  Sense strand starting at position 3810 of SEQ ID NO: 588417
uagaauuugugccagauca

SEQ ID NO: 863543 - RNA, 19 nt, Artificial Sequence
  Description of Artificial Sequence: Synthetic oligonucleotide
  Antisense strand to SEQ ID NO: 863542
ugaucuggcacaaauucua

SEQ ID NO: 863544 - RNA, 19 nt, Artificial Sequence
  Description of Artificial Sequence: Synthetic oligonucleotide
  Sense strand starting at position 3847 of SEQ ID NO: 588417
cagaaauaccuguggcaca

SEQ ID NO: 863545 - RNA, 19 nt, Artificial Sequence
  Description of Artificial Sequence: Synthetic oligonucleotide
  Antisense strand to SEQ ID NO: 863544
ugugccacagguauuucug

SEQ ID NO: 863546 - RNA, 19 nt, Artificial Sequence
  Description of Artificial Sequence: Synthetic oligonucleotide
  Sense strand starting at position 3852 of SEQ ID NO: 588417
auaccuguggcacagauaa

SEQ ID NO: 863547 - RNA, 19 nt, Artificial Sequence
  Description of Artificial Sequence: Synthetic oligonucleotide
  Antisense strand to SEQ ID NO: 863546
uuaucugugccacagguau

SEQ ID NO: 863548 - RNA, 19 nt, Artificial Sequence
  Description of Artificial Sequence: Synthetic oligonucleotide
  Sense strand starting at position 3897 of SEQ ID NO: 588417
agcagacagucaucaaguu

SEQ ID NO: 863549 - RNA, 19 nt, Artificial Sequence
  Description of Artificial Sequence: Synthetic oligonucleotide
  Antisense strand to SEQ ID NO: 863548
aacuugaugacugucugcu

SEQ ID NO: 863550 - RNA, 19 nt, Artificial Sequence
  Description of Artificial Sequence: Synthetic oligonucleotide
  Sense strand starting at position 3898 of SEQ ID NO: 588417
gcagacagucaucaaguua

SEQ ID NO: 863551 - RNA, 19 nt, Artificial Sequence
  Description of Artificial Sequence: Synthetic oligonucleotide
  Antisense strand to SEQ ID NO: 863550
uaacuugaugacugucugc

SEQ ID NO: 863552 - RNA, 19 nt, Artificial Sequence
  Description of Artificial Sequence: Synthetic oligonucleotide
  Sense strand starting at position 325 of SEQ ID NO: 588418
ggucauauauaagccaaau

SEQ ID NO: 863553 - RNA, 19 nt, Artificial Sequence
  Description of Artificial Sequence: Synthetic oligonucleotide
  Antisense strand to SEQ ID NO: 863552
auuuggcuuauauaugacc

SEQ ID NO: 863554 - RNA, 19 nt, Artificial Sequence
  Description of Artificial Sequence: Synthetic oligonucleotide
  Sense strand starting at position 487 of SEQ ID NO: 588418
aucauagccuuuguauagu

SEQ ID NO: 863555 - RNA, 19 nt, Artificial Sequence
  Description of Artificial Sequence: Synthetic oligonucleotide
  Antisense strand to SEQ ID NO: 863554
acuauacaaaggcuaugau

SEQ ID NO: 863556 - RNA, 19 nt, Artificial Sequence
  Description of Artificial Sequence: Synthetic oligonucleotide
  Sense strand starting at position 490 of SEQ ID NO: 588418
auagccuuuguauaguuau

SEQ ID NO: 863557 - RNA, 19 nt, Artificial Sequence
  Description of Artificial Sequence: Synthetic oligonucleotide
  Antisense strand to SEQ ID NO: 863556
auaacuauacaaaggcuau

SEQ ID NO: 863558 - RNA, 19 nt, Artificial Sequence
  Description of Artificial Sequence: Synthetic oligonucleotide
  Sense strand starting at position 493 of SEQ ID NO: 588418
gccuuuguauaguuauuua

SEQ ID NO: 863559 - RNA, 19 nt, Artificial Sequence
  Description of Artificial Sequence: Synthetic oligonucleotide
  Antisense strand to SEQ ID NO: 863558
uaaauaacuauacaaaggc

SEQ ID NO: 863560 - RNA, 19 nt, Artificial Sequence
  Description of Artificial Sequence: Synthetic oligonucleotide
  Sense strand starting at position 570 of SEQ ID NO: 588418
aucugaugagcuuggcaau

SEQ ID NO: 863561 - RNA, 19 nt, Artificial Sequence
  Description of Artificial Sequence: Synthetic oligonucleotide
  Antisense strand to SEQ ID NO: 863560
auugccaagcucaucagau

SEQ ID NO: 863562 - RNA, 19 nt, Artificial Sequence
  Description of Artificial Sequence: Synthetic oligonucleotide
  Sense strand starting at position 582 of SEQ ID NO: 588418
uggcaaucgucucuaaauc

SEQ ID NO: 863563 - RNA, 19 nt, Artificial Sequence
  Description of Artificial Sequence: Synthetic oligonucleotide
  Antisense strand to SEQ ID NO: 863562
gauuuagagacgauugcca

SEQ ID NO: 863564 - RNA, 19 nt, Artificial Sequence
  Description of Artificial Sequence: Synthetic oligonucleotide
  Sense strand starting at position 583 of SEQ ID NO: 588418
ggcaaucgucucuaaaucu

SEQ ID NO: 863565 - RNA, 19 nt, Artificial Sequence
  Description of Artificial Sequence: Synthetic oligonucleotide
  Antisense strand to SEQ ID NO: 863564
agauuuagagacgauugcc

SEQ ID NO: 863566 - RNA, 19 nt, Artificial Sequence
  Description of Artificial Sequence: Synthetic oligonucleotide
  Sense strand starting at position 1363 of SEQ ID NO: 588418
aaucacauguuguugaaga

SEQ ID NO: 863567 - RNA, 19 nt, Artificial Sequence
  Description of Artificial Sequence: Synthetic oligonucleotide
  Antisense strand to SEQ ID NO: 863566
ucuucaacaacaugugauu

SEQ ID NO: 863568 - RNA, 19 nt, Artificial Sequence
  Description of Artificial Sequence: Synthetic oligonucleotide
  Sense strand starting at position 1365 of SEQ ID NO: 588418
ucacauguuguugaagagu

SEQ ID NO: 863569 - RNA, 19 nt, Artificial Sequence
  Description of Artificial Sequence: Synthetic oligonucleotide
  Antisense strand to SEQ ID NO: 863568
acucuucaacaacauguga

SEQ ID NO: 863570 - RNA, 19 nt, Artificial Sequence
  Description of Artificial Sequence: Synthetic oligonucleotide
  Sense strand starting at position 1368 of SEQ ID NO: 588418
cauguuguugaagaguaau

SEQ ID NO: 863571 - RNA, 19 nt, Artificial Sequence
  Description of Artificial Sequence: Synthetic oligonucleotide
  Antisense strand to SEQ ID NO: 863570
auuacucuucaacaacaug

SEQ ID NO: 863572 - RNA, 19 nt, Artificial Sequence
  Description of Artificial Sequence: Synthetic oligonucleotide
  Sense strand starting at position 1371 of SEQ ID NO: 588418
guuguugaagaguaauuaa

SEQ ID NO: 863573 - RNA, 19 nt, Artificial Sequence
  Description of Artificial Sequence: Synthetic oligonucleotide
  Antisense strand to SEQ ID NO: 863572
uuaauuacucuucaacaac

SEQ ID NO: 863574 - RNA, 19 nt, Artificial Sequence
  Description of Artificial Sequence: Synthetic oligonucleotide
  Sense strand starting at position 1556 of SEQ ID NO: 588418
ugcaaauaacucuacgaua

SEQ ID NO: 863575 - RNA, 19 nt, Artificial Sequence
  Description of Artificial Sequence: Synthetic oligonucleotide
  Antisense strand to SEQ ID NO: 863574
uaucguagaguuauuugca

SEQ ID NO: 863576 - RNA, 19 nt, Artificial Sequence
  Description of Artificial Sequence: Synthetic oligonucleotide
  Sense strand starting at position 1597 of SEQ ID NO: 588418
ggaauaacauguuuacuau

SEQ ID NO: 863577 - RNA, 19 nt, Artificial Sequence
  Description of Artificial Sequence: Synthetic oligonucleotide
  Antisense strand to SEQ ID NO: 863576
auaguaaacauguuauucc

SEQ ID NO: 863578 - RNA, 19 nt, Artificial Sequence
  Description of Artificial Sequence: Synthetic oligonucleotide
  Sense strand starting at position 2563 of SEQ ID NO: 588418
gagaauguccacuaugugu

SEQ ID NO: 863579 - RNA, 19 nt, Artificial Sequence
  Description of Artificial Sequence: Synthetic oligonucleotide
  Antisense strand to SEQ ID NO: 863578
acacauaguggacauucuc

SEQ ID NO: 863580 - RNA, 19 nt, Artificial Sequence
  Description of Artificial Sequence: Synthetic oligonucleotide
  Sense strand starting at position 2625 of SEQ ID NO: 588418
gagggaugcuugcuaauag

SEQ ID NO: 863581 - RNA, 19 nt, Artificial Sequence
  Description of Artificial Sequence: Synthetic oligonucleotide
  Antisense strand to SEQ ID NO: 863580
cuauuagcaagcaucccuc

SEQ ID NO: 863582 - RNA, 19 nt, Artificial Sequence
  Description of Artificial Sequence: Synthetic oligonucleotide
  Sense strand starting at position 2875 of SEQ ID NO: 588418
gcaguaaaugcuuacugca

SEQ ID NO: 863583 - RNA, 19 nt, Artificial Sequence
  Description of Artificial Sequence: Synthetic oligonucleotide
  Antisense strand to SEQ ID NO: 863582
ugcaguaagcauuuacugc

SEQ ID NO: 863584 - RNA, 19 nt, Artificial Sequence
  Description of Artificial Sequence: Synthetic oligonucleotide
  Sense strand starting at position 2877 of SEQ ID NO: 588418
aguaaaugcuuacugcauu

SEQ ID NO: 863585 - RNA, 19 nt, Artificial Sequence
  Description of Artificial Sequence: Synthetic oligonucleotide
  Antisense strand to SEQ ID NO: 863584
aaugcaguaagcauuuacu

SEQ ID NO: 863586 - RNA, 19 nt, Artificial Sequence
  Description of Artificial Sequence: Synthetic oligonucleotide
  Sense strand starting at position 2883 of SEQ ID NO: 588418
ugcuuacugcauuaaugaa

SEQ ID NO: 863587 - RNA, 19 nt, Artificial Sequence
  Description of Artificial Sequence: Synthetic oligonucleotide
  Antisense strand to SEQ ID NO: 863586
uucauuaaugcaguaagca

SEQ ID NO: 863588 - RNA, 19 nt, Artificial Sequence
  Description of Artificial Sequence: Synthetic oligonucleotide
  Sense strand starting at position 3011 of SEQ ID NO: 588418
uggccauuauucccucagu

SEQ ID NO: 863589 - RNA, 19 nt, Artificial Sequence
  Description of Artificial Sequence: Synthetic oligonucleotide
  Antisense strand to SEQ ID NO: 863588
acugagggaauaauggcca

SEQ ID NO: 863590 - RNA, 19 nt, Artificial Sequence
  Description of Artificial Sequence: Synthetic oligonucleotide
  Sense strand starting at position 3016 of SEQ ID NO: 588418
auuauucccucaguccaga

SEQ ID NO: 863591 - RNA, 19 nt, Artificial Sequence
  Description of Artificial Sequence: Synthetic oligonucleotide
  Antisense strand to SEQ ID NO: 863590
ucuggacugagggaauaau

SEQ ID NO: 863592 - RNA, 19 nt, Artificial Sequence
  Description of Artificial Sequence: Synthetic oligonucleotide
  Sense strand starting at position 3089 of SEQ ID NO: 588418
uugucuuggacuuggacua

SEQ ID NO: 863593 - RNA, 19 nt, Artificial Sequence
  Description of Artificial Sequence: Synthetic oligonucleotide
  Antisense strand to SEQ ID NO: 863592
uaguccaaguccaagacaa

SEQ ID NO: 863594 - RNA, 19 nt, Artificial Sequence
  Description of Artificial Sequence: Synthetic oligonucleotide
  Sense strand starting at position 3143 of SEQ ID NO: 588418
gagacugagcucuggccaa

SEQ ID NO: 863595 - RNA, 19 nt, Artificial Sequence
  Description of Artificial Sequence: Synthetic oligonucleotide
  Antisense strand to SEQ ID NO: 863594
uuggccagagcucagucuc

SEQ ID NO: 863596 - RNA, 19 nt, Artificial Sequence
  Description of Artificial Sequence: Synthetic oligonucleotide
  Sense strand starting at position 3147 of SEQ ID NO: 588418
cugagcucuggccaagaca

SEQ ID NO: 863597 - RNA, 19 nt, Artificial Sequence
  Description of Artificial Sequence: Synthetic oligonucleotide
  Antisense strand to SEQ ID NO: 863596
ugucuuggccagagcucag

SEQ ID NO: 863598 - RNA, 19 nt, Artificial Sequence
  Description of Artificial Sequence: Synthetic oligonucleotide
  Sense strand starting at position 3150 of SEQ ID NO: 588418
agcucuggccaagacaaua

SEQ ID NO: 863599 - RNA, 19 nt, Artificial Sequence
  Description of Artificial Sequence: Synthetic oligonucleotide
  Antisense strand to SEQ ID NO: 863598
uauugucuuggccagagcu

SEQ ID NO: 863600 - RNA, 19 nt, Artificial Sequence
  Description of Artificial Sequence: Synthetic oligonucleotide
  Sense strand starting at position 3171 of SEQ ID NO: 588418
ggccaaagugauggauaug

SEQ ID NO: 863601 - RNA, 19 nt, Artificial Sequence
  Description of Artificial Sequence: Synthetic oligonucleotide
  Antisense strand to SEQ ID NO: 863600
cauauccaucacuuuggcc

SEQ ID NO: 863602 - RNA, 19 nt, Artificial Sequence
  Description of Artificial Sequence: Synthetic oligonucleotide
  Sense strand starting at position 3209 of SEQ ID NO: 588418
ucugaaaugugccugaucu

SEQ ID NO: 863603 - RNA, 19 nt, Artificial Sequence
  Description of Artificial Sequence: Synthetic oligonucleotide
  Antisense strand to SEQ ID NO: 863602
agaucaggcacauuucaga

SEQ ID NO: 863604 - RNA, 19 nt, Artificial Sequence
  Description of Artificial Sequence: Synthetic oligonucleotide
  Sense strand starting at position 3210 of SEQ ID NO: 588418
cugaaaugugccugaucuu

SEQ ID NO: 863605 - RNA, 19 nt, Artificial Sequence
  Description of Artificial Sequence: Synthetic oligonucleotide
  Antisense strand to SEQ ID NO: 863604
aagaucaggcacauuucag

SEQ ID NO: 863606 - RNA, 19 nt, Artificial Sequence
  Description of Artificial Sequence: Synthetic oligonucleotide
  Sense strand starting at position 3211 of SEQ ID NO: 588418
ugaaaugugccugaucuuc

SEQ ID NO: 863607 - RNA, 19 nt, Artificial Sequence
  Description of Artificial Sequence: Synthetic oligonucleotide
  Antisense strand to SEQ ID NO: 863606
gaagaucaggcacauuuca

SEQ ID NO: 863608 - RNA, 19 nt, Artificial Sequence
  Description of Artificial Sequence: Synthetic oligonucleotide
  Sense strand starting at position 3300 of SEQ ID NO: 588418
augggucucugauugacca

SEQ ID NO: 863609 - RNA, 19 nt, Artificial Sequence
  Description of Artificial Sequence: Synthetic oligonucleotide
  Antisense strand to SEQ ID NO: 863608
uggucaaucagagacccau

SEQ ID NO: 863610 - RNA, 19 nt, Artificial Sequence
  Description of Artificial Sequence: Synthetic oligonucleotide
  Sense strand starting at position 3383 of SEQ ID NO: 588418
agaauaugaugugagcaaa

SEQ ID NO: 863611 - RNA, 19 nt, Artificial Sequence
  Description of Artificial Sequence: Synthetic oligonucleotide
  Antisense strand to SEQ ID NO: 863610
uuugcucacaucauauucu

SEQ ID NO: 863612 - RNA, 19 nt, Artificial Sequence
  Description of Artificial Sequence: Synthetic oligonucleotide
  Sense strand starting at position 3404 of SEQ ID NO: 588418
guaaacauuuaguuguguu

SEQ ID NO: 863613 - RNA, 19 nt, Artificial Sequence
  Description of Artificial Sequence: Synthetic oligonucleotide
  Antisense strand to SEQ ID NO: 863612
aacacaacuaaauguuuac

SEQ ID NO: 863614 - RNA, 19 nt, Artificial Sequence
  Description of Artificial Sequence: Synthetic oligonucleotide
  Sense strand starting at position 3408 of SEQ ID NO: 588418
acauuuaguuguguuaauc

SEQ ID NO: 863615 - RNA, 19 nt, Artificial Sequence
  Description of Artificial Sequence: Synthetic oligonucleotide
  Antisense strand to SEQ ID NO: 863614
gauuaacacaacuaaaugu

SEQ ID NO: 863616 - RNA, 19 nt, Artificial Sequence
  Description of Artificial Sequence: Synthetic oligonucleotide
  Sense strand starting at position 3418 of SEQ ID NO: 588418
guguuaaucagguagaauu

SEQ ID NO: 863617 - RNA, 19 nt, Artificial Sequence
  Description of Artificial Sequence: Synthetic oligonucleotide
  Antisense strand to SEQ ID NO: 863616
aauucuaccugauuaacac

SEQ ID NO: 863618 - RNA, 19 nt, Artificial Sequence
  Description of Artificial Sequence: Synthetic oligonucleotide
  Sense strand starting at position 3426 of SEQ ID NO: 588418
cagguagaauuugagucua

SEQ ID NO: 863619 - RNA, 19 nt, Artificial Sequence
  Description of Artificial Sequence: Synthetic oligonucleotide
  Antisense strand to SEQ ID NO: 863618
uagacucaaauucuaccug

SEQ ID NO: 863620 - RNA, 19 nt, Artificial Sequence
  Description of Artificial Sequence: Synthetic oligonucleotide
  Sense strand starting at position 3434 of SEQ ID NO: 588418
auuugagucuaccaguuaa

SEQ ID NO: 863621 - RNA, 19 nt, Artificial Sequence
  Description of Artificial Sequence: Synthetic oligonucleotide
  Antisense strand to SEQ ID NO: 863620
uuaacugguagacucaaau

SEQ ID NO: 863622 - RNA, 19 nt, Artificial Sequence
  Description of Artificial Sequence: Synthetic oligonucleotide
  Sense strand starting at position 3584 of SEQ ID NO: 588418
ucuauauuagaugguagca

SEQ ID NO: 863623 - RNA, 19 nt, Artificial Sequence
  Description of Artificial Sequence: Synthetic oligonucleotide
  Antisense strand to SEQ ID NO: 863622
ugcuaccaucuaauauaga

SEQ ID NO: 863624 - RNA, 19 nt, Artificial Sequence
  Description of Artificial Sequence: Synthetic oligonucleotide
  Sense strand starting at position 3689 of SEQ ID NO: 588418
aaacaaucagagugaaguu

SEQ ID NO: 863625 - RNA, 19 nt, Artificial Sequence
  Description of Artificial Sequence: Synthetic oligonucleotide
  Antisense strand to SEQ ID NO: 863624
aacuucacucugauuguuu

SEQ ID NO: 863626 - RNA, 19 nt, Artificial Sequence
  Description of Artificial Sequence: Synthetic oligonucleotide
  Sense strand starting at position 3728 of SEQ ID NO: 588418
ugaacuuagcgagguucuu

SEQ ID NO: 863627 - RNA, 19 nt, Artificial Sequence
  Description of Artificial Sequence: Synthetic oligonucleotide
  Antisense strand to SEQ ID NO: 863626
aagaaccucgcuaaguuca

SEQ ID NO: 863628 - RNA, 19 nt, Artificial Sequence
  Description of Artificial Sequence: Synthetic oligonucleotide
  Sense strand starting at position 3769 of SEQ ID NO: 588418
gaaagaauuggaggcguuu

SEQ ID NO: 863629 - RNA, 19 nt, Artificial Sequence
  Description of Artificial Sequence: Synthetic oligonucleotide
  Antisense strand to SEQ ID NO: 863628
aaacgccuccaauucuuuc

SEQ ID NO: 863630 - RNA, 19 nt, Artificial Sequence
  Description of Artificial Sequence: Synthetic oligonucleotide
  Sense strand starting at position 3831 of SEQ ID NO: 588418
gccucauggacuugagaaa

SEQ ID NO: 863631 - RNA, 19 nt, Artificial Sequence
  Description of Artificial Sequence: Synthetic oligonucleotide
  Antisense strand to SEQ ID NO: 863630
uuucucaaguccaugaggc

SEQ ID NO: 863632 - RNA, 19 nt, Artificial Sequence
  Description of Artificial Sequence: Synthetic oligonucleotide
  Sense strand starting at position 21 of SEQ ID NO: 588419
aggccuaccugauuccaaa

SEQ ID NO: 863633 - RNA, 19 nt, Artificial Sequence
  Description of Artificial Sequence: Synthetic oligonucleotide
  Antisense strand to SEQ ID NO: 863632
uuuggaaucagguaggccu

SEQ ID NO: 863634 - RNA, 19 nt, Artificial Sequence
  Description of Artificial Sequence: Synthetic oligonucleotide
  Sense strand starting at position 41 of SEQ ID NO: 588419
cuugcuugcuuuguaauua

SEQ ID NO: 863635 - RNA, 19 nt, Artificial Sequence
  Description of Artificial Sequence: Synthetic oligonucleotide
  Antisense strand to SEQ ID NO: 863634
uaauuacaaagcaagcaag

SEQ ID NO: 863636 - RNA, 19 nt, Artificial Sequence
  Description of Artificial Sequence: Synthetic oligonucleotide
  Sense strand starting at position 87 of SEQ ID NO: 588419
ugcucauugccuugggaca

SEQ ID NO: 863637 - RNA, 19 nt, Artificial Sequence
  Description of Artificial Sequence: Synthetic oligonucleotide
  Antisense strand to SEQ ID NO: 863636
ugucccaaggcaaugagca

SEQ ID NO: 863638 - RNA, 19 nt, Artificial Sequence
  Description of Artificial Sequence: Synthetic oligonucleotide
  Sense strand starting at position 105 of SEQ ID NO: 588419
acggcauugccaggaauca

SEQ ID NO: 863639 - RNA, 19 nt, Artificial Sequence
  Description of Artificial Sequence: Synthetic oligonucleotide
  Antisense strand to SEQ ID NO: 863638
ugauuccuggcaaugccgu

SEQ ID NO: 863640 - RNA, 19 nt, Artificial Sequence
  Description of Artificial Sequence: Synthetic oligonucleotide
  Sense strand starting at position 106 of SEQ ID NO: 588419
cggcauugccaggaaucau

SEQ ID NO: 863641 - RNA, 19 nt, Artificial Sequence
  Description of Artificial Sequence: Synthetic oligonucleotide
  Antisense strand to SEQ ID NO: 863640
augauuccuggcaaugccg

SEQ ID NO: 863642 - RNA, 19 nt, Artificial Sequence
  Description of Artificial Sequence: Synthetic oligonucleotide
  Sense strand starting at position 120 of SEQ ID NO: 588419
aucauacuguuagcucaua

SEQ ID NO: 863643 - RNA, 19 nt, Artificial Sequence
  Description of Artificial Sequence: Synthetic oligonucleotide
  Antisense strand to SEQ ID NO: 863642
uaugagcuaacaguaugau

SEQ ID NO: 863644 - RNA, 19 nt, Artificial Sequence
  Description of Artificial Sequence: Synthetic oligonucleotide
  Sense strand starting at position 350 of SEQ ID NO: 588419
gguguggugucaccaguga

SEQ ID NO: 863645 - RNA, 19 nt, Artificial Sequence
  Description of Artificial Sequence: Synthetic oligonucleotide
  Antisense strand to SEQ ID NO: 863644
ucacuggugacaccacacc

SEQ ID NO: 863646 - RNA, 19 nt, Artificial Sequence
  Description of Artificial Sequence: Synthetic oligonucleotide
  Sense strand starting at position 354 of SEQ ID NO: 588419
uggugucaccagugacaga

SEQ ID NO: 863647 - RNA, 19 nt, Artificial Sequence
  Description of Artificial Sequence: Synthetic oligonucleotide
  Antisense strand to SEQ ID NO: 863646
ucugucacuggugacacca

SEQ ID NO: 863648 - RNA, 19 nt, Artificial Sequence
  Description of Artificial Sequence: Synthetic oligonucleotide
  Sense strand starting at position 377 of SEQ ID NO: 588419
acagguguugacugaauca

SEQ ID NO: 863649 - RNA, 19 nt, Artificial Sequence
  Description of Artificial Sequence: Synthetic oligonucleotide
  Antisense strand to SEQ ID NO: 863648
ugauucagucaacaccugu

SEQ ID NO: 863650 - RNA, 19 nt, Artificial Sequence
  Description of Artificial Sequence: Synthetic oligonucleotide
  Sense strand starting at position 467 of SEQ ID NO: 588419
acaguaagcuccuuaagaa

SEQ ID NO: 863651 - RNA, 19 nt, Artificial Sequence
  Description of Artificial Sequence: Synthetic oligonucleotide
  Antisense strand to SEQ ID NO: 863650
uucuuaaggagcuuacugu

SEQ ID NO: 863652 - RNA, 19 nt, Artificial Sequence
  Description of Artificial Sequence: Synthetic oligonucleotide
  Sense strand starting at position 559 of SEQ ID NO: 588419
auaacauaugcuugaguuc

SEQ ID NO: 863653 - RNA, 19 nt, Artificial Sequence
  Description of Artificial Sequence: Synthetic oligonucleotide
  Antisense strand to SEQ ID NO: 863652
gaacucaagcauauguuau

SEQ ID NO: 863654 - RNA, 19 nt, Artificial Sequence
  Description of Artificial Sequence: Synthetic oligonucleotide
  Sense strand starting at position 594 of SEQ ID NO: 588419
guacacaacuccgcuauaa

SEQ ID NO: 863655 - RNA, 19 nt, Artificial Sequence
  Description of Artificial Sequence: Synthetic oligonucleotide
  Antisense strand to SEQ ID NO: 863654
uuauagcggaguuguguac

SEQ ID NO: 863656 - RNA, 19 nt, Artificial Sequence
  Description of Artificial Sequence: Synthetic oligonucleotide
  Sense strand starting at position 715 of SEQ ID NO: 588419
aauaguaggcaaugucauu

SEQ ID NO: 863657 - RNA, 19 nt, Artificial Sequence
  Description of Artificial Sequence: Synthetic oligonucleotide
  Antisense strand to SEQ ID NO: 863656
aaugacauugccuacuauu

SEQ ID NO: 863658 - RNA, 19 nt, Artificial Sequence
  Description of Artificial Sequence: Synthetic oligonucleotide
  Sense strand starting at position 720 of SEQ ID NO: 588419
uaggcaaugucauuaacag

SEQ ID NO: 863659 - RNA, 19 nt, Artificial Sequence
  Description of Artificial Sequence: Synthetic oligonucleotide
  Antisense strand to SEQ ID NO: 863658
cuguuaaugacauugccua

SEQ ID NO: 863660 - RNA, 19 nt, Artificial Sequence
  Description of Artificial Sequence: Synthetic oligonucleotide
  Sense strand starting at position 721 of SEQ ID NO: 588419
aggcaaugucauuaacagu

SEQ ID NO: 863661 - RNA, 19 nt, Artificial Sequence
  Description of Artificial Sequence: Synthetic oligonucleotide
  Antisense strand to SEQ ID NO: 863660
acuguuaaugacauugccu

SEQ ID NO: 863662 - RNA, 19 nt, Artificial Sequence
  Description of Artificial Sequence: Synthetic oligonucleotide
  Sense strand starting at position 727 of SEQ ID NO: 588419
ugucauuaacaguguuaaa

SEQ ID NO: 863663 - RNA, 19 nt, Artificial Sequence
  Description of Artificial Sequence: Synthetic oligonucleotide
  Antisense strand to SEQ ID NO: 863662
uuuaacacuguuaaugaca

SEQ ID NO: 863664 - RNA, 19 nt, Artificial Sequence
  Description of Artificial Sequence: Synthetic oligonucleotide
  Sense strand starting at position 1140 of SEQ ID NO: 588419
ggucauauauaagccaaau

SEQ ID NO: 863665 - RNA, 19 nt, Artificial Sequence
  Description of Artificial Sequence: Synthetic oligonucleotide
  Antisense strand to SEQ ID NO: 863664
auuuggcuuauauaugacc

SEQ ID NO: 863666 - RNA, 19 nt, Artificial Sequence
  Description of Artificial Sequence: Synthetic oligonucleotide
  Sense strand starting at position 1302 of SEQ ID NO: 588419
aucauagccuuuguauagu

SEQ ID NO: 863667 - RNA, 19 nt, Artificial Sequence
  Description of Artificial Sequence: Synthetic oligonucleotide
  Antisense strand to SEQ ID NO: 863666
acuauacaaaggcuaugau

SEQ ID NO: 863668 - RNA, 19 nt, Artificial Sequence
  Description of Artificial Sequence: Synthetic oligonucleotide
  Sense strand starting at position 1305 of SEQ ID NO: 588419
auagccuuuguauaguuau

SEQ ID NO: 863669 - RNA, 19 nt, Artificial Sequence
  Description of Artificial Sequence: Synthetic oligonucleotide
  Antisense strand to SEQ ID NO: 863668
auaacuauacaaaggcuau

SEQ ID NO: 863670 - RNA, 19 nt, Artificial Sequence
  Description of Artificial Sequence: Synthetic oligonucleotide
  Sense strand starting at position 1308 of SEQ ID NO: 588419
gccuuuguauaguuauuua

SEQ ID NO: 863671 - RNA, 19 nt, Artificial Sequence
  Description of Artificial Sequence: Synthetic oligonucleotide
  Antisense strand to SEQ ID NO: 863670
uaaauaacuauacaaaggc

SEQ ID NO: 863672 - RNA, 19 nt, Artificial Sequence
  Description of Artificial Sequence: Synthetic oligonucleotide
  Sense strand starting at position 1385 of SEQ ID NO: 588419
aucugaugagcuuggcaau

SEQ ID NO: 863673 - RNA, 19 nt, Artificial Sequence
  Description of Artificial Sequence: Synthetic oligonucleotide
  Antisense strand to SEQ ID NO: 863672
auugccaagcucaucagau

SEQ ID NO: 863674 - RNA, 19 nt, Artificial Sequence
  Description of Artificial Sequence: Synthetic oligonucleotide
  Sense strand starting at position 1397 of SEQ ID NO: 588419
uggcaaucgucucuaaauc

SEQ ID NO: 863675 - RNA, 19 nt, Artificial Sequence
  Description of Artificial Sequence: Synthetic oligonucleotide
  Antisense strand to SEQ ID NO: 863674
gauuuagagacgauugcca

SEQ ID NO: 863676 - RNA, 19 nt, Artificial Sequence
  Description of Artificial Sequence: Synthetic oligonucleotide
  Sense strand starting at position 1398 of SEQ ID NO: 588419
ggcaaucgucucuaaaucu

SEQ ID NO: 863677 - RNA, 19 nt, Artificial Sequence
  Description of Artificial Sequence: Synthetic oligonucleotide
  Antisense strand to SEQ ID NO: 863676
agauuuagagacgauugcc

SEQ ID NO: 863678 - RNA, 19 nt, Artificial Sequence
  Description of Artificial Sequence: Synthetic oligonucleotide
  Sense strand starting at position 2178 of SEQ ID NO: 588419
aaucacauguuguugaaga

SEQ ID NO: 863679 - RNA, 19 nt, Artificial Sequence
  Description of Artificial Sequence: Synthetic oligonucleotide
  Antisense strand to SEQ ID NO: 863678
ucuucaacaacaugugauu

SEQ ID NO: 863680 - RNA, 19 nt, Artificial Sequence
  Description of Artificial Sequence: Synthetic oligonucleotide
  Sense strand starting at position 2180 of SEQ ID NO: 588419
ucacauguuguugaagagu

SEQ ID NO: 863681 - RNA, 19 nt, Artificial Sequence
  Description of Artificial Sequence: Synthetic oligonucleotide
  Antisense strand to SEQ ID NO: 863680
acucuucaacaacauguga

SEQ ID NO: 863682 - RNA, 19 nt, Artificial Sequence
  Description of Artificial Sequence: Synthetic oligonucleotide
  Sense strand starting at position 2183 of SEQ ID NO: 588419
cauguuguugaagaguaau

SEQ ID NO: 863683 - RNA, 19 nt, Artificial Sequence
  Description of Artificial Sequence: Synthetic oligonucleotide
  Antisense strand to SEQ ID NO: 863682
auuacucuucaacaacaug

SEQ ID NO: 863684 - RNA, 19 nt, Artificial Sequence
  Description of Artificial Sequence: Synthetic oligonucleotide
  Sense strand starting at position 2186 of SEQ ID NO: 588419
guuguugaagaguaauuaa

SEQ ID NO: 863685 - RNA, 19 nt, Artificial Sequence
  Description of Artificial Sequence: Synthetic oligonucleotide
  Antisense strand to SEQ ID NO: 863684
uuaauuacucuucaacaac

SEQ ID NO: 863686 - RNA, 19 nt, Artificial Sequence
  Description of Artificial Sequence: Synthetic oligonucleotide
  Sense strand starting at position 2371 of SEQ ID NO: 588419
ugcaaauaacucuacgaua

SEQ ID NO: 863687 - RNA, 19 nt, Artificial Sequence
  Description of Artificial Sequence: Synthetic oligonucleotide
  Antisense strand to SEQ ID NO: 863686
uaucguagaguuauuugca

SEQ ID NO: 863688 - RNA, 19 nt, Artificial Sequence
  Description of Artificial Sequence: Synthetic oligonucleotide
  Sense strand starting at position 2412 of SEQ ID NO: 588419
ggaauaacauguuuacuau

SEQ ID NO: 863689 - RNA, 19 nt, Artificial Sequence
  Description of Artificial Sequence: Synthetic oligonucleotide
  Antisense strand to SEQ ID NO: 863688
auaguaaacauguuauucc

SEQ ID NO: 863690 - RNA, 19 nt, Artificial Sequence
  Description of Artificial Sequence: Synthetic oligonucleotide
  Sense strand starting at position 3378 of SEQ ID NO: 588419
gagaauguccacuaugugu

SEQ ID NO: 863691 - RNA, 19 nt, Artificial Sequence
  Description of Artificial Sequence: Synthetic oligonucleotide
  Antisense strand to SEQ ID NO: 863690
acacauaguggacauucuc

SEQ ID NO: 863692 - RNA, 19 nt, Artificial Sequence
  Description of Artificial Sequence: Synthetic oligonucleotide
  Sense strand starting at position 3440 of SEQ ID NO: 588419
gagggaugcuugcuaauag

SEQ ID NO: 863693 - RNA, 19 nt, Artificial Sequence
  Description of Artificial Sequence: Synthetic oligonucleotide
  Antisense strand to SEQ ID NO: 863692
cuauuagcaagcaucccuc

SEQ ID NO: 863694 - RNA, 19 nt, Artificial Sequence
  Description of Artificial Sequence: Synthetic oligonucleotide
  Sense strand starting at position 3690 of SEQ ID NO: 588419
gcaguaaaugcuuacugca

SEQ ID NO: 863695 - RNA, 19 nt, Artificial Sequence
  Description of Artificial Sequence: Synthetic oligonucleotide
  Antisense strand to SEQ ID NO: 863694
ugcaguaagcauuuacugc

SEQ ID NO: 863696 - RNA, 19 nt, Artificial Sequence
  Description of Artificial Sequence: Synthetic oligonucleotide
  Sense strand starting at position 3692 of SEQ ID NO: 588419
aguaaaugcuuacugcauu

SEQ ID NO: 863697 - RNA, 19 nt, Artificial Sequence
  Description of Artificial Sequence: Synthetic oligonucleotide
  Antisense strand to SEQ ID NO: 863696
aaugcaguaagcauuuacu

SEQ ID NO: 863698 - RNA, 19 nt, Artificial Sequence
  Description of Artificial Sequence: Synthetic oligonucleotide
  Sense strand starting at position 3698 of SEQ ID NO: 588419
ugcuuacugcauuaaugaa

SEQ ID NO: 863699 - RNA, 19 nt, Artificial Sequence
  Description of Artificial Sequence: Synthetic oligonucleotide
  Antisense strand to SEQ ID NO: 863698
uucauuaaugcaguaagca

SEQ ID NO: 863700 - RNA, 19 nt, Artificial Sequence
  Description of Artificial Sequence: Synthetic oligonucleotide
  Sense strand starting at position 3826 of SEQ ID NO: 588419
uggccauuauucccucagu

SEQ ID NO: 863701 - RNA, 19 nt, Artificial Sequence
  Description of Artificial Sequence: Synthetic oligonucleotide
  Antisense strand to SEQ ID NO: 863700
acugagggaauaauggcca

SEQ ID NO: 863702 - RNA, 19 nt, Artificial Sequence
  Description of Artificial Sequence: Synthetic oligonucleotide
  Sense strand starting at position 3831 of SEQ ID NO: 588419
auuauucccucaguccaga

SEQ ID NO: 863703 - RNA, 19 nt, Artificial Sequence
  Description of Artificial Sequence: Synthetic oligonucleotide
  Antisense strand to SEQ ID NO: 863702
ucuggacugagggaauaau

SEQ ID NO: 863704 - RNA, 19 nt, Artificial Sequence
  Description of Artificial Sequence: Synthetic oligonucleotide
  Sense strand starting at position 3904 of SEQ ID NO: 588419
uugucuuggacuuggacua

SEQ ID NO: 863705 - RNA, 19 nt, Artificial Sequence
  Description of Artificial Sequence: Synthetic oligonucleotide
  Antisense strand to SEQ ID NO: 863704
uaguccaaguccaagacaa

SEQ ID NO: 863706 - RNA, 19 nt, Artificial Sequence
  Description of Artificial Sequence: Synthetic oligonucleotide
  Sense strand starting at position 3958 of SEQ ID NO: 588419
gagacugagcucuggccaa

SEQ ID NO: 863707 - RNA, 19 nt, Artificial Sequence
  Description of Artificial Sequence: Synthetic oligonucleotide
  Antisense strand to SEQ ID NO: 863706
uuggccagagcucagucuc

SEQ ID NO: 863708 - RNA, 19 nt, Artificial Sequence
  Description of Artificial Sequence: Synthetic oligonucleotide
  Sense strand starting at position 3962 of SEQ ID NO: 588419
cugagcucuggccaagaca

SEQ ID NO: 863709 - RNA, 19 nt, Artificial Sequence
  Description of Artificial Sequence: Synthetic oligonucleotide
  Antisense strand to SEQ ID NO: 863708
ugucuuggccagagcucag

SEQ ID NO: 863710 - RNA, 19 nt, Artificial Sequence
  Description of Artificial Sequence: Synthetic oligonucleotide
  Sense strand starting at position 3965 of SEQ ID NO: 588419
agcucuggccaagacaaua

SEQ ID NO: 863711 - RNA, 19 nt, Artificial Sequence
  Description of Artificial Sequence: Synthetic oligonucleotide
  Antisense strand to SEQ ID NO: 863710
uauugucuuggccagagcu

SEQ ID NO: 863712 - RNA, 19 nt, Artificial Sequence
  Description of Artificial Sequence: Synthetic oligonucleotide
  Sense strand starting at position 32 of SEQ ID NO: 588420
cuguuuacauaggauuaua

SEQ ID NO: 863713 - RNA, 19 nt, Artificial Sequence
  Description of Artificial Sequence: Synthetic oligonucleotide
  Antisense strand to SEQ ID NO: 863712
uauaauccuauguaaacag

SEQ ID NO: 863714 - RNA, 19 nt, Artificial Sequence
  Description of Artificial Sequence: Synthetic oligonucleotide
  Sense strand starting at position 273 of SEQ ID NO: 588420
uagcuuucuggacggcaga

SEQ ID NO: 863715 - RNA, 19 nt, Artificial Sequence
  Description of Artificial Sequence: Synthetic oligonucleotide
  Antisense strand to SEQ ID NO: 863714
ucugccguccagaaagcua

SEQ ID NO: 863716 - RNA, 19 nt, Artificial Sequence
  Description of Artificial Sequence: Synthetic oligonucleotide
  Sense strand starting at position 296 of SEQ ID NO: 588420
uugggaguuucuggagcuu

SEQ ID NO: 863717 - RNA, 19 nt, Artificial Sequence
  Description of Artificial Sequence: Synthetic oligonucleotide
  Antisense strand to SEQ ID NO: 863716
aagcuccagaaacucccaa

SEQ ID NO: 863718 - RNA, 19 nt, Artificial Sequence
  Description of Artificial Sequence: Synthetic oligonucleotide
  Sense strand starting at position 302 of SEQ ID NO: 588420
guuucuggagcuuggaauu

SEQ ID NO: 863719 - RNA, 19 nt, Artificial Sequence
  Description of Artificial Sequence: Synthetic oligonucleotide
  Antisense strand to SEQ ID NO: 863718
aauuccaagcuccagaaac

SEQ ID NO: 863720 - RNA, 19 nt, Artificial Sequence
  Description of Artificial Sequence: Synthetic oligonucleotide
  Sense strand starting at position 780 of SEQ ID NO: 588420
caucguaguccucaucgua

SEQ ID NO: 863721 - RNA, 19 nt, Artificial Sequence
  Description of Artificial Sequence: Synthetic oligonucleotide
  Antisense strand to SEQ ID NO: 863720
uacgaugaggacuacgaug

SEQ ID NO: 863722 - RNA, 19 nt, Artificial Sequence
  Description of Artificial Sequence: Synthetic oligonucleotide
  Sense strand starting at position 783 of SEQ ID NO: 588420
cguaguccucaucguagua

SEQ ID NO: 863723 - RNA, 19 nt, Artificial Sequence
  Description of Artificial Sequence: Synthetic oligonucleotide
  Antisense strand to SEQ ID NO: 863722
uacuacgaugaggacuacg

SEQ ID NO: 863724 - RNA, 19 nt, Artificial Sequence
  Description of Artificial Sequence: Synthetic oligonucleotide
  Sense strand starting at position 873 of SEQ ID NO: 588420
ccauguucuccuugaccga

SEQ ID NO: 863725 - RNA, 19 nt, Artificial Sequence
  Description of Artificial Sequence: Synthetic oligonucleotide
  Antisense strand to SEQ ID NO: 863724
ucggucaaggagaacaugg

SEQ ID NO: 863726 - RNA, 19 nt, Artificial Sequence
  Description of Artificial Sequence: Synthetic oligonucleotide
  Sense strand starting at position 956 of SEQ ID NO: 588420
gccagcauguccucaauga

SEQ ID NO: 863727 - RNA, 19 nt, Artificial Sequence
  Description of Artificial Sequence: Synthetic oligonucleotide
  Antisense strand to SEQ ID NO: 863726
ucauugaggacaugcuggc

SEQ ID NO: 863728 - RNA, 19 nt, Artificial Sequence
  Description of Artificial Sequence: Synthetic oligonucleotide
  Sense strand starting at position 960 of SEQ ID NO: 588420
gcauguccucaaugacggu

SEQ ID NO: 863729 - RNA, 19 nt, Artificial Sequence
  Description of Artificial Sequence: Synthetic oligonucleotide
  Antisense strand to SEQ ID NO: 863728
accgucauugaggacaugc

SEQ ID NO: 863730 - RNA, 19 nt, Artificial Sequence
  Description of Artificial Sequence: Synthetic oligonucleotide
  Sense strand starting at position 1008 of SEQ ID NO: 588420
ugaagacuuugccgcagua

SEQ ID NO: 863731 - RNA, 19 nt, Artificial Sequence
  Description of Artificial Sequence: Synthetic oligonucleotide
  Antisense strand to SEQ ID NO: 863730
uacugcggcaaagucuuca

SEQ ID NO: 863732 - RNA, 19 nt, Artificial Sequence
  Description of Artificial Sequence: Synthetic oligonucleotide
  Sense strand starting at position 1233 of SEQ ID NO: 588420
gcgugugguugagcugaau

SEQ ID NO: 863733 - RNA, 19 nt, Artificial Sequence
  Description of Artificial Sequence: Synthetic oligonucleotide
  Antisense strand to SEQ ID NO: 863732
auucagcucaaccacacgc

SEQ ID NO: 863734 - RNA, 19 nt, Artificial Sequence
  Description of Artificial Sequence: Synthetic oligonucleotide
  Sense strand starting at position 1686 of SEQ ID NO: 588420
gcccacuucuugcaugagu

SEQ ID NO: 863735 - RNA, 19 nt, Artificial Sequence
  Description of Artificial Sequence: Synthetic oligonucleotide
  Antisense strand to SEQ ID NO: 863734
acucaugcaagaagugggc

SEQ ID NO: 863736 - RNA, 19 nt, Artificial Sequence
  Description of Artificial Sequence: Synthetic oligonucleotide
  Sense strand starting at position 1688 of SEQ ID NO: 588420
ccacuucuugcaugagugu

SEQ ID NO: 863737 - RNA, 19 nt, Artificial Sequence
  Description of Artificial Sequence: Synthetic oligonucleotide
  Antisense strand to SEQ ID NO: 863736
acacucaugcaagaagugg

SEQ ID NO: 863738 - RNA, 19 nt, Artificial Sequence
  Description of Artificial Sequence: Synthetic oligonucleotide
  Sense strand starting at position 1775 of SEQ ID NO: 588420
ugcgguggcuuccuggaaa

SEQ ID NO: 863739 - RNA, 19 nt, Artificial Sequence
  Description of Artificial Sequence: Synthetic oligonucleotide
  Antisense strand to SEQ ID NO: 863738
uuuccaggaagccaccgca

SEQ ID NO: 863740 - RNA, 19 nt, Artificial Sequence
  Description of Artificial Sequence: Synthetic oligonucleotide
  Sense strand starting at position 1778 of SEQ ID NO: 588420
gguggcuuccuggaaauga

SEQ ID NO: 863741 - RNA, 19 nt, Artificial Sequence
  Description of Artificial Sequence: Synthetic oligonucleotide
  Antisense strand to SEQ ID NO: 863740
ucauuuccaggaagccacc

SEQ ID NO: 863742 - RNA, 19 nt, Artificial Sequence
  Description of Artificial Sequence: Synthetic oligonucleotide
  Sense strand starting at position 2267 of SEQ ID NO: 588420
cagcuucucgggugaccaa

SEQ ID NO: 863743 - RNA, 19 nt, Artificial Sequence
  Description of Artificial Sequence: Synthetic oligonucleotide
  Antisense strand to SEQ ID NO: 863742
uuggucacccgagaagcug

SEQ ID NO: 863744 - RNA, 19 nt, Artificial Sequence
  Description of Artificial Sequence: Synthetic oligonucleotide
  Sense strand starting at position 2560 of SEQ ID NO: 588420
gccuguuguuguugaaagu

SEQ ID NO: 863745 - RNA, 19 nt, Artificial Sequence
  Description of Artificial Sequence: Synthetic oligonucleotide
  Antisense strand to SEQ ID NO: 863744
acuuucaacaacaacaggc

SEQ ID NO: 863746 - RNA, 19 nt, Artificial Sequence
  Description of Artificial Sequence: Synthetic oligonucleotide
  Sense strand starting at position 2561 of SEQ ID NO: 588420
ccuguuguuguugaaaguu

SEQ ID NO: 863747 - RNA, 19 nt, Artificial Sequence
  Description of Artificial Sequence: Synthetic oligonucleotide
  Antisense strand to SEQ ID NO: 863746
aacuuucaacaacaacagg

SEQ ID NO: 863748 - RNA, 19 nt, Artificial Sequence
  Description of Artificial Sequence: Synthetic oligonucleotide
  Sense strand starting at position 2932 of SEQ ID NO: 588420
gucuuugggucuugaucac

SEQ ID NO: 863749 - RNA, 19 nt, Artificial Sequence
  Description of Artificial Sequence: Synthetic oligonucleotide
  Antisense strand to SEQ ID NO: 863748
gugaucaagacccaaagac

SEQ ID NO: 863750 - RNA, 19 nt, Artificial Sequence
  Description of Artificial Sequence: Synthetic oligonucleotide
  Sense strand starting at position 2938 of SEQ ID NO: 588420
gggucuugaucaccacaga

SEQ ID NO: 863751 - RNA, 19 nt, Artificial Sequence
  Description of Artificial Sequence: Synthetic oligonucleotide
  Antisense strand to SEQ ID NO: 863750
ucuguggugaucaagaccc

SEQ ID NO: 863752 - RNA, 19 nt, Artificial Sequence
  Description of Artificial Sequence: Synthetic oligonucleotide
  Sense strand starting at position 3028 of SEQ ID NO: 588420
cacacuuuauuagggagau

SEQ ID NO: 863753 - RNA, 19 nt, Artificial Sequence
  Description of Artificial Sequence: Synthetic oligonucleotide
  Antisense strand to SEQ ID NO: 863752
aucucccuaauaaagugug

SEQ ID NO: 863754 - RNA, 19 nt, Artificial Sequence
  Description of Artificial Sequence: Synthetic oligonucleotide
  Sense strand starting at position 3029 of SEQ ID NO: 588420
acacuuuauuagggagaug

SEQ ID NO: 863755 - RNA, 19 nt, Artificial Sequence
  Description of Artificial Sequence: Synthetic oligonucleotide
  Antisense strand to SEQ ID NO: 863754
caucucccuaauaaagugu

SEQ ID NO: 863756 - RNA, 19 nt, Artificial Sequence
  Description of Artificial Sequence: Synthetic oligonucleotide
  Sense strand starting at position 3040 of SEQ ID NO: 588420
gggagauguugaugagaug

SEQ ID NO: 863757 - RNA, 19 nt, Artificial Sequence
  Description of Artificial Sequence: Synthetic oligonucleotide
  Antisense strand to SEQ ID NO: 863756
caucucaucaacaucuccc

SEQ ID NO: 863758 - RNA, 19 nt, Artificial Sequence
  Description of Artificial Sequence: Synthetic oligonucleotide
  Sense strand starting at position 3043 of SEQ ID NO: 588420
agauguugaugagaugcuu

SEQ ID NO: 863759 - RNA, 19 nt, Artificial Sequence
  Description of Artificial Sequence: Synthetic oligonucleotide
  Antisense strand to SEQ ID NO: 863758
aagcaucucaucaacaucu

SEQ ID NO: 863760 - RNA, 19 nt, Artificial Sequence
  Description of Artificial Sequence: Synthetic oligonucleotide
  Sense strand starting at position 3178 of SEQ ID NO: 588420
ggaagauaagcuugcaaca

SEQ ID NO: 863761 - RNA, 19 nt, Artificial Sequence
  Description of Artificial Sequence: Synthetic oligonucleotide
  Antisense strand to SEQ ID NO: 863760
uguugcaagcuuaucuucc

SEQ ID NO: 863762 - RNA, 19 nt, Artificial Sequence
  Description of Artificial Sequence: Synthetic oligonucleotide
  Sense strand starting at position 3187 of SEQ ID NO: 588420
gcuugcaacacgugcaaua

SEQ ID NO: 863763 - RNA, 19 nt, Artificial Sequence
  Description of Artificial Sequence: Synthetic oligonucleotide
  Antisense strand to SEQ ID NO: 863762
uauugcacguguugcaagc

SEQ ID NO: 863764 - RNA, 19 nt, Artificial Sequence
  Description of Artificial Sequence: Synthetic oligonucleotide
  Sense strand starting at position 3189 of SEQ ID NO: 588420
uugcaacacgugcaauaau

SEQ ID NO: 863765 - RNA, 19 nt, Artificial Sequence
  Description of Artificial Sequence: Synthetic oligonucleotide
  Antisense strand to SEQ ID NO: 863764
auuauugcacguguugcaa

SEQ ID NO: 863766 - RNA, 19 nt, Artificial Sequence
  Description of Artificial Sequence: Synthetic oligonucleotide
  Sense strand starting at position 3238 of SEQ ID NO: 588420
aggaaugucgagcaauuac

SEQ ID NO: 863767 - RNA, 19 nt, Artificial Sequence
  Description of Artificial Sequence: Synthetic oligonucleotide
  Antisense strand to SEQ ID NO: 863766
guaauugcucgacauuccu

SEQ ID NO: 863768 - RNA, 19 nt, Artificial Sequence
  Description of Artificial Sequence: Synthetic oligonucleotide
  Sense strand starting at position 3301 of SEQ ID NO: 588420
gcaccaaagguuuauauua

SEQ ID NO: 863769 - RNA, 19 nt, Artificial Sequence
  Description of Artificial Sequence: Synthetic oligonucleotide
  Antisense strand to SEQ ID NO: 863768
uaauauaaaccuuuggugc

SEQ ID NO: 863770 - RNA, 19 nt, Artificial Sequence
  Description of Artificial Sequence: Synthetic oligonucleotide
  Sense strand starting at position 3356 of SEQ ID NO: 588420
ggcugcucugcagaggaaa

SEQ ID NO: 863771 - RNA, 19 nt, Artificial Sequence
  Description of Artificial Sequence: Synthetic oligonucleotide
  Antisense strand to SEQ ID NO: 863770
uuuccucugcagagcagcc

SEQ ID NO: 863772 - RNA, 19 nt, Artificial Sequence
  Description of Artificial Sequence: Synthetic oligonucleotide
  Sense strand starting at position 3391 of SEQ ID NO: 588420
gagggaguuuccgagcuac

SEQ ID NO: 863773 - RNA, 19 nt, Artificial Sequence
  Description of Artificial Sequence: Synthetic oligonucleotide
  Antisense strand to SEQ ID NO: 863772
guagcucggaaacucccuc

SEQ ID NO: 863774 - RNA, 19 nt, Artificial Sequence
  Description of Artificial Sequence: Synthetic oligonucleotide
  Sense strand starting at position 3454 of SEQ ID NO: 588420
gcgucugcggccugucaaa

SEQ ID NO: 863775 - RNA, 19 nt, Artificial Sequence
  Description of Artificial Sequence: Synthetic oligonucleotide
  Antisense strand to SEQ ID NO: 863774
uuugacaggccgcagacgc

SEQ ID NO: 863776 - RNA, 19 nt, Artificial Sequence
  Description of Artificial Sequence: Synthetic oligonucleotide
  Sense strand starting at position 3815 of SEQ ID NO: 588420
ccgucuugcucugauuuga

SEQ ID NO: 863777 - RNA, 19 nt, Artificial Sequence
  Description of Artificial Sequence: Synthetic oligonucleotide
  Antisense strand to SEQ ID NO: 863776
ucaaaucagagcaagacgg

SEQ ID NO: 863778 - RNA, 19 nt, Artificial Sequence
  Description of Artificial Sequence: Synthetic oligonucleotide
  Sense strand starting at position 3820 of SEQ ID NO: 588420
uugcucugauuugaguauu

SEQ ID NO: 863779 - RNA, 19 nt, Artificial Sequence
  Description of Artificial Sequence: Synthetic oligonucleotide
  Antisense strand to SEQ ID NO: 863778
aauacucaaaucagagcaa

SEQ ID NO: 863780 - RNA, 19 nt, Artificial Sequence
  Description of Artificial Sequence: Synthetic oligonucleotide
  Sense strand starting at position 3826 of SEQ ID NO: 588420
ugauuugaguauugguaga

SEQ ID NO: 863781 - RNA, 19 nt, Artificial Sequence
  Description of Artificial Sequence: Synthetic oligonucleotide
  Antisense strand to SEQ ID NO: 863780
ucuaccaauacucaaauca

SEQ ID NO: 863782 - RNA, 19 nt, Artificial Sequence
  Description of Artificial Sequence: Synthetic oligonucleotide
  Sense strand starting at position 3945 of SEQ ID NO: 588420
cucuauuauuuggaguugu

SEQ ID NO: 863783 - RNA, 19 nt, Artificial Sequence
  Description of Artificial Sequence: Synthetic oligonucleotide
  Antisense strand to SEQ ID NO: 863782
acaacuccaaauaauagag

SEQ ID NO: 863784 - RNA, 19 nt, Artificial Sequence
  Description of Artificial Sequence: Synthetic oligonucleotide
  Sense strand starting at position 60 of SEQ ID NO: 588421
aguguacuucucuauguac

SEQ ID NO: 863785 - RNA, 19 nt, Artificial Sequence
  Description of Artificial Sequence: Synthetic oligonucleotide
  Antisense strand to SEQ ID NO: 863784
guacauagagaaguacacu

SEQ ID NO: 863786 - RNA, 19 nt, Artificial Sequence
  Description of Artificial Sequence: Synthetic oligonucleotide
  Sense strand starting at position 63 of SEQ ID NO: 588421
guacuucucuauguacacu

SEQ ID NO: 863787 - RNA, 19 nt, Artificial Sequence
  Description of Artificial Sequence: Synthetic oligonucleotide
  Antisense strand to SEQ ID NO: 863786
aguguacauagagaaguac

SEQ ID NO: 863788 - RNA, 19 nt, Artificial Sequence
  Description of Artificial Sequence: Synthetic oligonucleotide
  Sense strand starting at position 149 of SEQ ID NO: 588421
gagggaugauucuucucug

SEQ ID NO: 863789 - RNA, 19 nt, Artificial Sequence
  Description of Artificial Sequence: Synthetic oligonucleotide
  Antisense strand to SEQ ID NO: 863788
cagagaagaaucaucccuc

SEQ ID NO: 863790 - RNA, 19 nt, Artificial Sequence
  Description of Artificial Sequence: Synthetic oligonucleotide
  Sense strand starting at position 152 of SEQ ID NO: 588421
ggaugauucuucucugcua

SEQ ID NO: 863791 - RNA, 19 nt, Artificial Sequence
  Description of Artificial Sequence: Synthetic oligonucleotide
  Antisense strand to SEQ ID NO: 863790
uagcagagaagaaucaucc

SEQ ID NO: 863792 - RNA, 19 nt, Artificial Sequence
  Description of Artificial Sequence: Synthetic oligonucleotide
  Sense strand starting at position 242 of SEQ ID NO: 588421
ggguuagauaacugaucuc

SEQ ID NO: 863793 - RNA, 19 nt, Artificial Sequence
  Description of Artificial Sequence: Synthetic oligonucleotide
  Antisense strand to SEQ ID NO: 863792
gagaucaguuaucuaaccc

SEQ ID NO: 863794 - RNA, 19 nt, Artificial Sequence
  Description of Artificial Sequence: Synthetic oligonucleotide
  Sense strand starting at position 297 of SEQ ID NO: 588421
agggucuccuacucuagaa

SEQ ID NO: 863795 - RNA, 19 nt, Artificial Sequence
  Description of Artificial Sequence: Synthetic oligonucleotide
  Antisense strand to SEQ ID NO: 863794
uucuagaguaggagacccu

SEQ ID NO: 863796 - RNA, 19 nt, Artificial Sequence
  Description of Artificial Sequence: Synthetic oligonucleotide
  Sense strand starting at position 299 of SEQ ID NO: 588421
ggucuccuacucuagaaac

SEQ ID NO: 863797 - RNA, 19 nt, Artificial Sequence
  Description of Artificial Sequence: Synthetic oligonucleotide
  Antisense strand to SEQ ID NO: 863796
guuucuagaguaggagacc

SEQ ID NO: 863798 - RNA, 19 nt, Artificial Sequence
  Description of Artificial Sequence: Synthetic oligonucleotide
  Sense strand starting at position 451 of SEQ ID NO: 588421
ccucaucacuagucuuuga

SEQ ID NO: 863799 - RNA, 19 nt, Artificial Sequence
  Description of Artificial Sequence: Synthetic oligonucleotide
  Antisense strand to SEQ ID NO: 863798
ucaaagacuagugaugagg

SEQ ID NO: 863800 - RNA, 19 nt, Artificial Sequence
  Description of Artificial Sequence: Synthetic oligonucleotide
  Sense strand starting at position 478 of SEQ ID NO: 588421
gggaucuagauggguucua

SEQ ID NO: 863801 - RNA, 19 nt, Artificial Sequence
  Description of Artificial Sequence: Synthetic oligonucleotide
  Antisense strand to SEQ ID NO: 863800
uagaacccaucuagauccc

SEQ ID NO: 863802 - RNA, 19 nt, Artificial Sequence
  Description of Artificial Sequence: Synthetic oligonucleotide
  Sense strand starting at position 489 of SEQ ID NO: 588421
ggguucuacaucuauggca

SEQ ID NO: 863803 - RNA, 19 nt, Artificial Sequence
  Description of Artificial Sequence: Synthetic oligonucleotide
  Antisense strand to SEQ ID NO: 863802
ugccauagauguagaaccc

SEQ ID NO: 863804 - RNA, 19 nt, Artificial Sequence
  Description of Artificial Sequence: Synthetic oligonucleotide
  Sense strand starting at position 537 of SEQ ID NO: 588421
agagcucucuaucccagaa

SEQ ID NO: 863805 - RNA, 19 nt, Artificial Sequence
  Description of Artificial Sequence: Synthetic oligonucleotide
  Antisense strand to SEQ ID NO: 863804
uucugggauagagagcucu

SEQ ID NO: 863806 - RNA, 19 nt, Artificial Sequence
  Description of Artificial Sequence: Synthetic oligonucleotide
  Sense strand starting at position 622 of SEQ ID NO: 588421
ggagcuaaagcuugaagaa

SEQ ID NO: 863807 - RNA, 19 nt, Artificial Sequence
  Description of Artificial Sequence: Synthetic oligonucleotide
  Antisense strand to SEQ ID NO: 863806
uucuucaagcuuuagcucc

SEQ ID NO: 863808 - RNA, 19 nt, Artificial Sequence
  Description of Artificial Sequence: Synthetic oligonucleotide
  Sense strand starting at position 659 of SEQ ID NO: 588421
acucuaacagugugucuaa

SEQ ID NO: 863809 - RNA, 19 nt, Artificial Sequence
  Description of Artificial Sequence: Synthetic oligonucleotide
  Antisense strand to SEQ ID NO: 863808
uuagacacacuguuagagu

SEQ ID NO: 863810 - RNA, 19 nt, Artificial Sequence
  Description of Artificial Sequence: Synthetic oligonucleotide
  Sense strand starting at position 660 of SEQ ID NO: 588421
cucuaacagugugucuaau

SEQ ID NO: 863811 - RNA, 19 nt, Artificial Sequence
  Description of Artificial Sequence: Synthetic oligonucleotide
  Antisense strand to SEQ ID NO: 863810
auuagacacacuguuagag

SEQ ID NO: 863812 - RNA, 19 nt, Artificial Sequence
  Description of Artificial Sequence: Synthetic oligonucleotide
  Sense strand starting at position 662 of SEQ ID NO: 588421
cuaacagugugucuaauga

SEQ ID NO: 863813 - RNA, 19 nt, Artificial Sequence
  Description of Artificial Sequence: Synthetic oligonucleotide
  Antisense strand to SEQ ID NO: 863812
ucauuagacacacuguuag

SEQ ID NO: 863814 - RNA, 19 nt, Artificial Sequence
  Description of Artificial Sequence: Synthetic oligonucleotide
  Sense strand starting at position 866 of SEQ ID NO: 588421
ggcugauugcaugaccaaa

SEQ ID NO: 863815 - RNA, 19 nt, Artificial Sequence
  Description of Artificial Sequence: Synthetic oligonucleotide
  Antisense strand to SEQ ID NO: 863814
uuuggucaugcaaucagcc

SEQ ID NO: 863816 - RNA, 19 nt, Artificial Sequence
  Description of Artificial Sequence: Synthetic oligonucleotide
  Sense strand starting at position 930 of SEQ ID NO: 588421
ggguguugcaaagagaugu

SEQ ID NO: 863817 - RNA, 19 nt, Artificial Sequence
  Description of Artificial Sequence: Synthetic oligonucleotide
  Antisense strand to SEQ ID NO: 863816
acaucucuuugcaacaccc

SEQ ID NO: 863818 - RNA, 19 nt, Artificial Sequence
  Description of Artificial Sequence: Synthetic oligonucleotide
  Sense strand starting at position 1046 of SEQ ID NO: 588421
ccaccucugcuagaaguuu

SEQ ID NO: 863819 - RNA, 19 nt, Artificial Sequence
  Description of Artificial Sequence: Synthetic oligonucleotide
  Antisense strand to SEQ ID NO: 863818
aaacuucuagcagaggugg

SEQ ID NO: 863820 - RNA, 19 nt, Artificial Sequence
  Description of Artificial Sequence: Synthetic oligonucleotide
  Sense strand starting at position 1129 of SEQ ID NO: 588421
gccuauaugcuuuaucaug

SEQ ID NO: 863821 - RNA, 19 nt, Artificial Sequence
  Description of Artificial Sequence: Synthetic oligonucleotide
  Antisense strand to SEQ ID NO: 863820
caugauaaagcauauaggc

SEQ ID NO: 863822 - RNA, 19 nt, Artificial Sequence
  Description of Artificial Sequence: Synthetic oligonucleotide
  Sense strand starting at position 1140 of SEQ ID NO: 588421
uuaucauguugcuuaggga

SEQ ID NO: 863823 - RNA, 19 nt, Artificial Sequence
  Description of Artificial Sequence: Synthetic oligonucleotide
  Antisense strand to SEQ ID NO: 863822
ucccuaagcaacaugauaa

SEQ ID NO: 863824 - RNA, 19 nt, Artificial Sequence
  Description of Artificial Sequence: Synthetic oligonucleotide
  Sense strand starting at position 1281 of SEQ ID NO: 588421
cagaguccuccggauugca

SEQ ID NO: 863825 - RNA, 19 nt, Artificial Sequence
  Description of Artificial Sequence: Synthetic oligonucleotide
  Antisense strand to SEQ ID NO: 863824
ugcaauccggaggacucug

SEQ ID NO: 863826 - RNA, 19 nt, Artificial Sequence
  Description of Artificial Sequence: Synthetic oligonucleotide
  Sense strand starting at position 1385 of SEQ ID NO: 588421
gggcaauaaacuuguggau

SEQ ID NO: 863827 - RNA, 19 nt, Artificial Sequence
  Description of Artificial Sequence: Synthetic oligonucleotide
  Antisense strand to SEQ ID NO: 863826
auccacaaguuuauugccc

SEQ ID NO: 863828 - RNA, 19 nt, Artificial Sequence
  Description of Artificial Sequence: Synthetic oligonucleotide
  Sense strand starting at position 2192 of SEQ ID NO: 588421
cggugaucuugggcuggga

SEQ ID NO: 863829 - RNA, 19 nt, Artificial Sequence
  Description of Artificial Sequence: Synthetic oligonucleotide
  Antisense strand to SEQ ID NO: 863828
ucccagcccaagaucaccg

SEQ ID NO: 863830 - RNA, 19 nt, Artificial Sequence
  Description of Artificial Sequence: Synthetic oligonucleotide
  Sense strand starting at position 2496 of SEQ ID NO: 588421
uguuuccuucuagaucuga

SEQ ID NO: 863831 - RNA, 19 nt, Artificial Sequence
  Description of Artificial Sequence: Synthetic oligonucleotide
  Antisense strand to SEQ ID NO: 863830
ucagaucuagaaggaaaca

SEQ ID NO: 863832 - RNA, 19 nt, Artificial Sequence
  Description of Artificial Sequence: Synthetic oligonucleotide
  Sense strand starting at position 2852 of SEQ ID NO: 588421
gucugcuacucuuuauuua

SEQ ID NO: 863833 - RNA, 19 nt, Artificial Sequence
  Description of Artificial Sequence: Synthetic oligonucleotide
  Antisense strand to SEQ ID NO: 863832
uaaauaaagaguagcagac

SEQ ID NO: 863834 - RNA, 19 nt, Artificial Sequence
  Description of Artificial Sequence: Synthetic oligonucleotide
  Sense strand starting at position 2870 of SEQ ID NO: 588421
aaugguuucucuuugggau

SEQ ID NO: 863835 - RNA, 19 nt, Artificial Sequence
  Description of Artificial Sequence: Synthetic oligonucleotide
  Antisense strand to SEQ ID NO: 863834
aucccaaagagaaaccauu

SEQ ID NO: 863836 - RNA, 19 nt, Artificial Sequence
  Description of Artificial Sequence: Synthetic oligonucleotide
  Sense strand starting at position 2871 of SEQ ID NO: 588421
augguuucucuuugggauu

SEQ ID NO: 863837 - RNA, 19 nt, Artificial Sequence
  Description of Artificial Sequence: Synthetic oligonucleotide
  Antisense strand to SEQ ID NO: 863836
aaucccaaagagaaaccau

SEQ ID NO: 863838 - RNA, 19 nt, Artificial Sequence
  Description of Artificial Sequence: Synthetic oligonucleotide
  Sense strand starting at position 2877 of SEQ ID NO: 588421
ucucuuugggauuguggau

SEQ ID NO: 863839 - RNA, 19 nt, Artificial Sequence
  Description of Artificial Sequence: Synthetic oligonucleotide
  Antisense strand to SEQ ID NO: 863838
auccacaaucccaaagaga

SEQ ID NO: 863840 - RNA, 19 nt, Artificial Sequence
  Description of Artificial Sequence: Synthetic oligonucleotide
  Sense strand starting at position 2920 of SEQ ID NO: 588421
uaaccuuguugguuaagau

SEQ ID NO: 863841 - RNA, 19 nt, Artificial Sequence
  Description of Artificial Sequence: Synthetic oligonucleotide
  Antisense strand to SEQ ID NO: 863840
aucuuaaccaacaagguua

SEQ ID NO: 863842 - RNA, 19 nt, Artificial Sequence
  Description of Artificial Sequence: Synthetic oligonucleotide
  Sense strand starting at position 2921 of SEQ ID NO: 588421
aaccuuguugguuaagaug

SEQ ID NO: 863843 - RNA, 19 nt, Artificial Sequence
  Description of Artificial Sequence: Synthetic oligonucleotide
  Antisense strand to SEQ ID NO: 863842
caucuuaaccaacaagguu

SEQ ID NO: 863844 - RNA, 19 nt, Artificial Sequence
  Description of Artificial Sequence: Synthetic oligonucleotide
  Sense strand starting at position 2927 of SEQ ID NO: 588421
guugguuaagaugguguga

SEQ ID NO: 863845 - RNA, 19 nt, Artificial Sequence
  Description of Artificial Sequence: Synthetic oligonucleotide
  Antisense strand to SEQ ID NO: 863844
ucacaccaucuuaaccaac

SEQ ID NO: 863846 - RNA, 19 nt, Artificial Sequence
  Description of Artificial Sequence: Synthetic oligonucleotide
  Sense strand starting at position 3207 of SEQ ID NO: 588421
cauugucacccauggguga

SEQ ID NO: 863847 - RNA, 19 nt, Artificial Sequence
  Description of Artificial Sequence: Synthetic oligonucleotide
  Antisense strand to SEQ ID NO: 863846
ucacccaugggugacaaug

SEQ ID NO: 863848 - RNA, 19 nt, Artificial Sequence
  Description of Artificial Sequence: Synthetic oligonucleotide
  Sense strand starting at position 3300 of SEQ ID NO: 588421
guagaagacuauucccauu

SEQ ID NO: 863849 - RNA, 19 nt, Artificial Sequence
  Description of Artificial Sequence: Synthetic oligonucleotide
  Antisense strand to SEQ ID NO: 863848
aaugggaauagucuucuac

SEQ ID NO: 863850 - RNA, 19 nt, Artificial Sequence
  Description of Artificial Sequence: Synthetic oligonucleotide
  Sense strand starting at position 3367 of SEQ ID NO: 588421
cgugcuagucuuguucagu

SEQ ID NO: 863851 - RNA, 19 nt, Artificial Sequence
  Description of Artificial Sequence: Synthetic oligonucleotide
  Antisense strand to SEQ ID NO: 863850
acugaacaagacuagcacg

SEQ ID NO: 863852 - RNA, 19 nt, Artificial Sequence
  Description of Artificial Sequence: Synthetic oligonucleotide
  Sense strand starting at position 3390 of SEQ ID NO: 588421
gacaaugggucauuaaauu

SEQ ID NO: 863853 - RNA, 19 nt, Artificial Sequence
  Description of Artificial Sequence: Synthetic oligonucleotide
  Antisense strand to SEQ ID NO: 863852
aauuuaaugacccauuguc

SEQ ID NO: 863854 - RNA, 19 nt, Artificial Sequence
  Description of Artificial Sequence: Synthetic oligonucleotide
  Sense strand starting at position 3503 of SEQ ID NO: 588421
guccaaaucaugugaguga

SEQ ID NO: 863855 - RNA, 19 nt, Artificial Sequence
  Description of Artificial Sequence: Synthetic oligonucleotide
  Antisense strand to SEQ ID NO: 863854
ucacucacaugauuuggac

SEQ ID NO: 863856 - RNA, 19 nt, Artificial Sequence
  Description of Artificial Sequence: Synthetic oligonucleotide
  Sense strand starting at position 3507 of SEQ ID NO: 588421
aaaucaugugagugauugu

SEQ ID NO: 863857 - RNA, 19 nt, Artificial Sequence
  Description of Artificial Sequence: Synthetic oligonucleotide
  Antisense strand to SEQ ID NO: 863856
acaaucacucacaugauuu

SEQ ID NO: 863858 - RNA, 19 nt, Artificial Sequence
  Description of Artificial Sequence: Synthetic oligonucleotide
  Sense strand starting at position 3809 of SEQ ID NO: 588421
agcagaaauugucuuagag

SEQ ID NO: 863859 - RNA, 19 nt, Artificial Sequence
  Description of Artificial Sequence: Synthetic oligonucleotide
  Antisense strand to SEQ ID NO: 863858
cucuaagacaauuucugcu

SEQ ID NO: 863860 - RNA, 19 nt, Artificial Sequence
  Description of Artificial Sequence: Synthetic oligonucleotide
  Sense strand starting at position 3848 of SEQ ID NO: 588421
gggaaacuuccuggucuca

SEQ ID NO: 863861 - RNA, 19 nt, Artificial Sequence
  Description of Artificial Sequence: Synthetic oligonucleotide
  Antisense strand to SEQ ID NO: 863860
ugagaccaggaaguuuccc

SEQ ID NO: 863862 - RNA, 19 nt, Artificial Sequence
  Description of Artificial Sequence: Synthetic oligonucleotide
  Sense strand starting at position 3850 of SEQ ID NO: 588421
gaaacuuccuggucucagu

SEQ ID NO: 863863 - RNA, 19 nt, Artificial Sequence
  Description of Artificial Sequence: Synthetic oligonucleotide
  Antisense strand to SEQ ID NO: 863862
acugagaccaggaaguuuc

SEQ ID NO: 863864 - RNA, 19 nt, Artificial Sequence
  Description of Artificial Sequence: Synthetic oligonucleotide
  Sense strand starting at position 2 of SEQ ID NO: 588422
gccaguacaaggcagaauu

SEQ ID NO: 863865 - RNA, 19 nt, Artificial Sequence
  Description of Artificial Sequence: Synthetic oligonucleotide
  Antisense strand to SEQ ID NO: 863864
aauucugccuuguacuggc

SEQ ID NO: 863866 - RNA, 19 nt, Artificial Sequence
  Description of Artificial Sequence: Synthetic oligonucleotide
  Sense strand starting at position 98 of SEQ ID NO: 588422
cuggaauccuaugaggaga

SEQ ID NO: 863867 - RNA, 19 nt, Artificial Sequence
  Description of Artificial Sequence: Synthetic oligonucleotide
  Antisense strand to SEQ ID NO: 863866
ucuccucauaggauuccag

SEQ ID NO: 863868 - RNA, 19 nt, Artificial Sequence
  Description of Artificial Sequence: Synthetic oligonucleotide
  Sense strand starting at position 129 of SEQ ID NO: 588422
gguugaucugcagagacag

SEQ ID NO: 863869 - RNA, 19 nt, Artificial Sequence
  Description of Artificial Sequence: Synthetic oligonucleotide
  Antisense strand to SEQ ID NO: 863868
cugucucugcagaucaacc

SEQ ID NO: 863870 - RNA, 19 nt, Artificial Sequence
  Description of Artificial Sequence: Synthetic oligonucleotide
  Sense strand starting at position 1055 of SEQ ID NO: 588422
ccagcuguccuuugggaga

SEQ ID NO: 863871 - RNA, 19 nt, Artificial Sequence
  Description of Artificial Sequence: Synthetic oligonucleotide
  Antisense strand to SEQ ID NO: 863870
ucucccaaaggacagcugg

SEQ ID NO: 863872 - RNA, 19 nt, Artificial Sequence
  Description of Artificial Sequence: Synthetic oligonucleotide
  Sense strand starting at position 1143 of SEQ ID NO: 588422
gguccauugucagagguga

SEQ ID NO: 863873 - RNA, 19 nt, Artificial Sequence
  Description of Artificial Sequence: Synthetic oligonucleotide
  Antisense strand to SEQ ID NO: 863872
ucaccucugacaauggacc

SEQ ID NO: 863874 - RNA, 19 nt, Artificial Sequence
  Description of Artificial Sequence: Synthetic oligonucleotide
  Sense strand starting at position 1334 of SEQ ID NO: 588422
ggguucuccacggaacgau

SEQ ID NO: 863875 - RNA, 19 nt, Artificial Sequence
  Description of Artificial Sequence: Synthetic oligonucleotide
  Antisense strand to SEQ ID NO: 863874
aucguuccguggagaaccc

SEQ ID NO: 863876 - RNA, 19 nt, Artificial Sequence
  Description of Artificial Sequence: Synthetic oligonucleotide
  Sense strand starting at position 2152 of SEQ ID NO: 588422
cuagaacucugccuaggau

SEQ ID NO: 863877 - RNA, 19 nt, Artificial Sequence
  Description of Artificial Sequence: Synthetic oligonucleotide
  Antisense strand to SEQ ID NO: 863876
auccuaggcagaguucuag

SEQ ID NO: 863878 - RNA, 19 nt, Artificial Sequence
  Description of Artificial Sequence: Synthetic oligonucleotide
  Sense strand starting at position 2265 of SEQ ID NO: 588422
ccuuguuuauaagagcuuu

SEQ ID NO: 863879 - RNA, 19 nt, Artificial Sequence
  Description of Artificial Sequence: Synthetic oligonucleotide
  Antisense strand to SEQ ID NO: 863878
aaagcucuuauaaacaagg

SEQ ID NO: 863880 - RNA, 19 nt, Artificial Sequence
  Description of Artificial Sequence: Synthetic oligonucleotide
  Sense strand starting at position 2271 of SEQ ID NO: 588422
uuauaagagcuuugaagca

SEQ ID NO: 863881 - RNA, 19 nt, Artificial Sequence
  Description of Artificial Sequence: Synthetic oligonucleotide
  Antisense strand to SEQ ID NO: 863880
ugcuucaaagcucuuauaa

SEQ ID NO: 863882 - RNA, 19 nt, Artificial Sequence
  Description of Artificial Sequence: Synthetic oligonucleotide
  Sense strand starting at position 2400 of SEQ ID NO: 588422
gugaguggcucccagaauu

SEQ ID NO: 863883 - RNA, 19 nt, Artificial Sequence
  Description of Artificial Sequence: Synthetic oligonucleotide
  Antisense strand to SEQ ID NO: 863882
aauucugggagccacucac

SEQ ID NO: 863884 - RNA, 19 nt, Artificial Sequence
  Description of Artificial Sequence: Synthetic oligonucleotide
  Sense strand starting at position 2431 of SEQ ID NO: 588422
cguguucucuucugugaaa

SEQ ID NO: 863885 - RNA, 19 nt, Artificial Sequence
  Description of Artificial Sequence: Synthetic oligonucleotide
  Antisense strand to SEQ ID NO: 863884
uuucacagaagagaacacg

SEQ ID NO: 863886 - RNA, 19 nt, Artificial Sequence
  Description of Artificial Sequence: Synthetic oligonucleotide
  Sense strand starting at position 2432 of SEQ ID NO: 588422
guguucucuucugugaaau

SEQ ID NO: 863887 - RNA, 19 nt, Artificial Sequence
  Description of Artificial Sequence: Synthetic oligonucleotide
  Antisense strand to SEQ ID NO: 863886
auuucacagaagagaacac

SEQ ID NO: 863888 - RNA, 19 nt, Artificial Sequence
  Description of Artificial Sequence: Synthetic oligonucleotide
  Sense strand starting at position 2433 of SEQ ID NO: 588422
uguucucuucugugaaaug

SEQ ID NO: 863889 - RNA, 19 nt, Artificial Sequence
  Description of Artificial Sequence: Synthetic oligonucleotide
  Antisense strand to SEQ ID NO: 863888
cauuucacagaagagaaca

SEQ ID NO: 863890 - RNA, 19 nt, Artificial Sequence
  Description of Artificial Sequence: Synthetic oligonucleotide
  Sense strand starting at position 2608 of SEQ ID NO: 588422
gcagaaaccucuccuagga

SEQ ID NO: 863891 - RNA, 19 nt, Artificial Sequence
  Description of Artificial Sequence: Synthetic oligonucleotide
  Antisense strand to SEQ ID NO: 863890
uccuaggagagguuucugc

SEQ ID NO: 863892 - RNA, 19 nt, Artificial Sequence
  Description of Artificial Sequence: Synthetic oligonucleotide
  Sense strand starting at position 2831 of SEQ ID NO: 588422
gggugugaugauuaccugu

SEQ ID NO: 863893 - RNA, 19 nt, Artificial Sequence
  Description of Artificial Sequence: Synthetic oligonucleotide
  Antisense strand to SEQ ID NO: 863892
acagguaaucaucacaccc

SEQ ID NO: 863894 - RNA, 19 nt, Artificial Sequence
  Description of Artificial Sequence: Synthetic oligonucleotide
  Sense strand starting at position 2833 of SEQ ID NO: 588422
gugugaugauuaccugugu

SEQ ID NO: 863895 - RNA, 19 nt, Artificial Sequence
  Description of Artificial Sequence: Synthetic oligonucleotide
  Antisense strand to SEQ ID NO: 863894
acacagguaaucaucacac

SEQ ID NO: 863896 - RNA, 19 nt, Artificial Sequence
  Description of Artificial Sequence: Synthetic oligonucleotide
  Sense strand starting at position 2837 of SEQ ID NO: 588422
gaugauuaccuguguccuu

SEQ ID NO: 863897 - RNA, 19 nt, Artificial Sequence
  Description of Artificial Sequence: Synthetic oligonucleotide
  Antisense strand to SEQ ID NO: 863896
aaggacacagguaaucauc

SEQ ID NO: 863898 - RNA, 19 nt, Artificial Sequence
  Description of Artificial Sequence: Synthetic oligonucleotide
  Sense strand starting at position 2939 of SEQ ID NO: 588422
gcuggugagugcuguucaa

SEQ ID NO: 863899 - RNA, 19 nt, Artificial Sequence
  Description of Artificial Sequence: Synthetic oligonucleotide
  Antisense strand to SEQ ID NO: 863898
uugaacagcacucaccagc

SEQ ID NO: 863900 - RNA, 19 nt, Artificial Sequence
  Description of Artificial Sequence: Synthetic oligonucleotide
  Sense strand starting at position 3037 of SEQ ID NO: 588422
cucaguuuauguuugcaaa

SEQ ID NO: 863901 - RNA, 19 nt, Artificial Sequence
  Description of Artificial Sequence: Synthetic oligonucleotide
  Antisense strand to SEQ ID NO: 863900
uuugcaaacauaaacugag

SEQ ID NO: 863902 - RNA, 19 nt, Artificial Sequence
  Description of Artificial Sequence: Synthetic oligonucleotide
  Sense strand starting at position 3038 of SEQ ID NO: 588422
ucaguuuauguuugcaaag

SEQ ID NO: 863903 - RNA, 19 nt, Artificial Sequence
  Description of Artificial Sequence: Synthetic oligonucleotide
  Antisense strand to SEQ ID NO: 863902
cuuugcaaacauaaacuga

SEQ ID NO: 863904 - RNA, 19 nt, Artificial Sequence
  Description of Artificial Sequence: Synthetic oligonucleotide
  Sense strand starting at position 3039 of SEQ ID NO: 588422
caguuuauguuugcaaagu

SEQ ID NO: 863905 - RNA, 19 nt, Artificial Sequence
  Description of Artificial Sequence: Synthetic oligonucleotide
  Antisense strand to SEQ ID NO: 863904
acuuugcaaacauaaacug

SEQ ID NO: 863906 - RNA, 19 nt, Artificial Sequence
  Description of Artificial Sequence: Synthetic oligonucleotide
  Sense strand starting at position 3040 of SEQ ID NO: 588422
aguuuauguuugcaaaguu

SEQ ID NO: 863907 - RNA, 19 nt, Artificial Sequence
  Description of Artificial Sequence: Synthetic oligonucleotide
  Antisense strand to SEQ ID NO: 863906
aacuuugcaaacauaaacu

SEQ ID NO: 863908 - RNA, 19 nt, Artificial Sequence
  Description of Artificial Sequence: Synthetic oligonucleotide
  Sense strand starting at position 3079 of SEQ ID NO: 588422
acugaugccucucugggaa

SEQ ID NO: 863909 - RNA, 19 nt, Artificial Sequence
  Description of Artificial Sequence: Synthetic oligonucleotide
  Antisense strand to SEQ ID NO: 863908
uucccagagaggcaucagu

SEQ ID NO: 863910 - RNA, 19 nt, Artificial Sequence
  Description of Artificial Sequence: Synthetic oligonucleotide
  Sense strand starting at position 3081 of SEQ ID NO: 588422
ugaugccucucugggaauu

SEQ ID NO: 863911 - RNA, 19 nt, Artificial Sequence
  Description of Artificial Sequence: Synthetic oligonucleotide
  Antisense strand to SEQ ID NO: 863910
aauucccagagaggcauca

SEQ ID NO: 863912 - RNA, 19 nt, Artificial Sequence
  Description of Artificial Sequence: Synthetic oligonucleotide
  Sense strand starting at position 3110 of SEQ ID NO: 588422
acagcuuuaaggugagcaa

SEQ ID NO: 863913 - RNA, 19 nt, Artificial Sequence
  Description of Artificial Sequence: Synthetic oligonucleotide
  Antisense strand to SEQ ID NO: 863912
uugcucaccuuaaagcugu

SEQ ID NO: 863914 - RNA, 19 nt, Artificial Sequence
  Description of Artificial Sequence: Synthetic oligonucleotide
  Sense strand starting at position 3293 of SEQ ID NO: 588422
aagagagaccuccgugacu

SEQ ID NO: 863915 - RNA, 19 nt, Artificial Sequence
  Description of Artificial Sequence: Synthetic oligonucleotide
  Antisense strand to SEQ ID NO: 863914
agucacggaggucucucuu

SEQ ID NO: 863916 - RNA, 19 nt, Artificial Sequence
  Description of Artificial Sequence: Synthetic oligonucleotide
  Sense strand starting at position 3295 of SEQ ID NO: 588422
gagagaccuccgugacuua

SEQ ID NO: 863917 - RNA, 19 nt, Artificial Sequence
  Description of Artificial Sequence: Synthetic oligonucleotide
  Antisense strand to SEQ ID NO: 863916
uaagucacggaggucucuc

SEQ ID NO: 863918 - RNA, 19 nt, Artificial Sequence
  Description of Artificial Sequence: Synthetic oligonucleotide
  Sense strand starting at position 3296 of SEQ ID NO: 588422
agagaccuccgugacuuaa

SEQ ID NO: 863919 - RNA, 19 nt, Artificial Sequence
  Description of Artificial Sequence: Synthetic oligonucleotide
  Antisense strand to SEQ ID NO: 863918
uuaagucacggaggucucu

SEQ ID NO: 863920 - RNA, 19 nt, Artificial Sequence
  Description of Artificial Sequence: Synthetic oligonucleotide
  Sense strand starting at position 3381 of SEQ ID NO: 588422
gcaucuuucucauccggga

SEQ ID NO: 863921 - RNA, 19 nt, Artificial Sequence
  Description of Artificial Sequence: Synthetic oligonucleotide
  Antisense strand to SEQ ID NO: 863920
ucccggaugagaaagaugc

SEQ ID NO: 863922 - RNA, 19 nt, Artificial Sequence
  Description of Artificial Sequence: Synthetic oligonucleotide
  Sense strand starting at position 3383 of SEQ ID NO: 588422
aucuuucucauccgggagu

SEQ ID NO: 863923 - RNA, 19 nt, Artificial Sequence
  Description of Artificial Sequence: Synthetic oligonucleotide
  Antisense strand to SEQ ID NO: 863922
acucccggaugagaaagau

SEQ ID NO: 863924 - RNA, 19 nt, Artificial Sequence
  Description of Artificial Sequence: Synthetic oligonucleotide
  Sense strand starting at position 3384 of SEQ ID NO: 588422
ucuuucucauccgggaguu

SEQ ID NO: 863925 - RNA, 19 nt, Artificial Sequence
  Description of Artificial Sequence: Synthetic oligonucleotide
  Antisense strand to SEQ ID NO: 863924
aacucccggaugagaaaga

SEQ ID NO: 863926 - RNA, 19 nt, Artificial Sequence
  Description of Artificial Sequence: Synthetic oligonucleotide
  Sense strand starting at position 3385 of SEQ ID NO: 588422
cuuucucauccgggaguua

SEQ ID NO: 863927 - RNA, 19 nt, Artificial Sequence
  Description of Artificial Sequence: Synthetic oligonucleotide
  Antisense strand to SEQ ID NO: 863926
uaacucccggaugagaaag

SEQ ID NO: 863928 - RNA, 19 nt, Artificial Sequence
  Description of Artificial Sequence: Synthetic oligonucleotide
  Sense strand starting at position 3386 of SEQ ID NO: 588422
uuucucauccgggaguuaa

SEQ ID NO: 863929 - RNA, 19 nt, Artificial Sequence
  Description of Artificial Sequence: Synthetic oligonucleotide
  Antisense strand to SEQ ID NO: 863928
uuaacucccggaugagaaa

SEQ ID NO: 863930 - RNA, 19 nt, Artificial Sequence
  Description of Artificial Sequence: Synthetic oligonucleotide
  Sense strand starting at position 3396 of SEQ ID NO: 588422
gggaguuaagugggcugaa

SEQ ID NO: 863931 - RNA, 19 nt, Artificial Sequence
  Description of Artificial Sequence: Synthetic oligonucleotide
  Antisense strand to SEQ ID NO: 863930
uucagcccacuuaacuccc

SEQ ID NO: 863932 - RNA, 19 nt, Artificial Sequence
  Description of Artificial Sequence: Synthetic oligonucleotide
  Sense strand starting at position 3397 of SEQ ID NO: 588422
ggaguuaagugggcugaaa

SEQ ID NO: 863933 - RNA, 19 nt, Artificial Sequence
  Description of Artificial Sequence: Synthetic oligonucleotide
  Antisense strand to SEQ ID NO: 863932
uuucagcccacuuaacucc

SEQ ID NO: 863934 - RNA, 19 nt, Artificial Sequence
  Description of Artificial Sequence: Synthetic oligonucleotide
  Sense strand starting at position 3399 of SEQ ID NO: 588422
aguuaagugggcugaaaua

SEQ ID NO: 863935 - RNA, 19 nt, Artificial Sequence
  Description of Artificial Sequence: Synthetic oligonucleotide
  Antisense strand to SEQ ID NO: 863934
uauuucagcccacuuaacu

SEQ ID NO: 863936 - RNA, 19 nt, Artificial Sequence
  Description of Artificial Sequence: Synthetic oligonucleotide
  Sense strand starting at position 3426 of SEQ ID NO: 588422
ggcagagacuugcaguguu

SEQ ID NO: 863937 - RNA, 19 nt, Artificial Sequence
  Description of Artificial Sequence: Synthetic oligonucleotide
  Antisense strand to SEQ ID NO: 863936
aacacugcaagucucugcc

SEQ ID NO: 863938 - RNA, 19 nt, Artificial Sequence
  Description of Artificial Sequence: Synthetic oligonucleotide
  Sense strand starting at position 204 of SEQ ID NO: 588423
guggaagcauugcuaucau

SEQ ID NO: 863939 - RNA, 19 nt, Artificial Sequence
  Description of Artificial Sequence: Synthetic oligonucleotide
  Antisense strand to SEQ ID NO: 863938
augauagcaaugcuuccac

SEQ ID NO: 863940 - RNA, 19 nt, Artificial Sequence
  Description of Artificial Sequence: Synthetic oligonucleotide
  Sense strand starting at position 410 of SEQ ID NO: 588423
cauaguuugguauauugua

SEQ ID NO: 863941 - RNA, 19 nt, Artificial Sequence
  Description of Artificial Sequence: Synthetic oligonucleotide
  Antisense strand to SEQ ID NO: 863940
uacaauauaccaaacuaug

SEQ ID NO: 863942 - RNA, 19 nt, Artificial Sequence
  Description of Artificial Sequence: Synthetic oligonucleotide
  Sense strand starting at position 435 of SEQ ID NO: 588423
aauaaaggaguuugccauu

SEQ ID NO: 863943 - RNA, 19 nt, Artificial Sequence
  Description of Artificial Sequence: Synthetic oligonucleotide
  Antisense strand to SEQ ID NO: 863942
aauggcaaacuccuuuauu

SEQ ID NO: 863944 - RNA, 19 nt, Artificial Sequence
  Description of Artificial Sequence: Synthetic oligonucleotide
  Sense strand starting at position 444 of SEQ ID NO: 588423
guuugccauuucuaagaaa

SEQ ID NO: 863945 - RNA, 19 nt, Artificial Sequence
  Description of Artificial Sequence: Synthetic oligonucleotide
  Antisense strand to SEQ ID NO: 863944
uuucuuagaaauggcaaac

SEQ ID NO: 863946 - RNA, 19 nt, Artificial Sequence
  Description of Artificial Sequence: Synthetic oligonucleotide
  Sense strand starting at position 618 of SEQ ID NO: 588423
gcagguaauuuacacugau

SEQ ID NO: 863947 - RNA, 19 nt, Artificial Sequence
  Description of Artificial Sequence: Synthetic oligonucleotide
  Antisense strand to SEQ ID NO: 863946
aucaguguaaauuaccugc

SEQ ID NO: 863948 - RNA, 19 nt, Artificial Sequence
  Description of Artificial Sequence: Synthetic oligonucleotide
  Sense strand starting at position 1160 of SEQ ID NO: 588423
ggaggaaucugccugagau

SEQ ID NO: 863949 - RNA, 19 nt, Artificial Sequence
  Description of Artificial Sequence: Synthetic oligonucleotide
  Antisense strand to SEQ ID NO: 863948
aucucaggcagauuccucc

SEQ ID NO: 863950 - RNA, 19 nt, Artificial Sequence
  Description of Artificial Sequence: Synthetic oligonucleotide
  Sense strand starting at position 1161 of SEQ ID NO: 588423
gaggaaucugccugagaua

SEQ ID NO: 863951 - RNA, 19 nt, Artificial Sequence
  Description of Artificial Sequence: Synthetic oligonucleotide
  Antisense strand to SEQ ID NO: 863950
uaucucaggcagauuccuc

SEQ ID NO: 863952 - RNA, 19 nt, Artificial Sequence
  Description of Artificial Sequence: Synthetic oligonucleotide
  Sense strand starting at position 1377 of SEQ ID NO: 588423
ugagucauuuauuauccua

SEQ ID NO: 863953 - RNA, 19 nt, Artificial Sequence
  Description of Artificial Sequence: Synthetic oligonucleotide
  Antisense strand to SEQ ID NO: 863952
uaggauaauaaaugacuca

SEQ ID NO: 863954 - RNA, 19 nt, Artificial Sequence
  Description of Artificial Sequence: Synthetic oligonucleotide
  Sense strand starting at position 1395 of SEQ ID NO: 588423
agcguuggccucuuuauca

SEQ ID NO: 863955 - RNA, 19 nt, Artificial Sequence
  Description of Artificial Sequence: Synthetic oligonucleotide
  Antisense strand to SEQ ID NO: 863954
ugauaaagaggccaacgcu

SEQ ID NO: 863956 - RNA, 19 nt, Artificial Sequence
  Description of Artificial Sequence: Synthetic oligonucleotide
  Sense strand starting at position 1399 of SEQ ID NO: 588423
uuggccucuuuaucaguaa

SEQ ID NO: 863957 - RNA, 19 nt, Artificial Sequence
  Description of Artificial Sequence: Synthetic oligonucleotide
  Antisense strand to SEQ ID NO: 863956
uuacugauaaagaggccaa

SEQ ID NO: 863958 - RNA, 19 nt, Artificial Sequence
  Description of Artificial Sequence: Synthetic oligonucleotide
  Sense strand starting at position 1403 of SEQ ID NO: 588423
ccucuuuaucaguaaagua

SEQ ID NO: 863959 - RNA, 19 nt, Artificial Sequence
  Description of Artificial Sequence: Synthetic oligonucleotide
  Antisense strand to SEQ ID NO: 863958
uacuuuacugauaaagagg

SEQ ID NO: 863960 - RNA, 19 nt, Artificial Sequence
  Description of Artificial Sequence: Synthetic oligonucleotide
  Sense strand starting at position 2177 of SEQ ID NO: 588423
gugcucugauucuuaagag

SEQ ID NO: 863961 - RNA, 19 nt, Artificial Sequence
  Description of Artificial Sequence: Synthetic oligonucleotide
  Antisense strand to SEQ ID NO: 863960
cucuuaagaaucagagcac

SEQ ID NO: 863962 - RNA, 19 nt, Artificial Sequence
  Description of Artificial Sequence: Synthetic oligonucleotide
  Sense strand starting at position 2183 of SEQ ID NO: 588423
ugauucuuaagaggugugu

SEQ ID NO: 863963 - RNA, 19 nt, Artificial Sequence
  Description of Artificial Sequence: Synthetic oligonucleotide
  Antisense strand to SEQ ID NO: 863962
acacaccucuuaagaauca

SEQ ID NO: 863964 - RNA, 19 nt, Artificial Sequence
  Description of Artificial Sequence: Synthetic oligonucleotide
  Sense strand starting at position 2319 of SEQ ID NO: 588423
auuccaagguucucgauau

SEQ ID NO: 863965 - RNA, 19 nt, Artificial Sequence
  Description of Artificial Sequence: Synthetic oligonucleotide
  Antisense strand to SEQ ID NO: 863964
auaucgagaaccuuggaau

SEQ ID NO: 863966 - RNA, 19 nt, Artificial Sequence
  Description of Artificial Sequence: Synthetic oligonucleotide
  Sense strand starting at position 2323 of SEQ ID NO: 588423
caagguucucgauauguaa

SEQ ID NO: 863967 - RNA, 19 nt, Artificial Sequence
  Description of Artificial Sequence: Synthetic oligonucleotide
  Antisense strand to SEQ ID NO: 863966
uuacauaucgagaaccuug

SEQ ID NO: 863968 - RNA, 19 nt, Artificial Sequence
  Description of Artificial Sequence: Synthetic oligonucleotide
  Sense strand starting at position 2325 of SEQ ID NO: 588423
agguucucgauauguaaag

SEQ ID NO: 863969 - RNA, 19 nt, Artificial Sequence
  Description of Artificial Sequence: Synthetic oligonucleotide
  Antisense strand to SEQ ID NO: 863968
cuuuacauaucgagaaccu

SEQ ID NO: 863970 - RNA, 19 nt, Artificial Sequence
  Description of Artificial Sequence: Synthetic oligonucleotide
  Sense strand starting at position 2326 of SEQ ID NO: 588423
gguucucgauauguaaagu

SEQ ID NO: 863971 - RNA, 19 nt, Artificial Sequence
  Description of Artificial Sequence: Synthetic oligonucleotide
  Antisense strand to SEQ ID NO: 863970
acuuuacauaucgagaacc

SEQ ID NO: 863972 - RNA, 19 nt, Artificial Sequence
  Description of Artificial Sequence: Synthetic oligonucleotide
  Sense strand starting at position 2327 of SEQ ID NO: 588423
guucucgauauguaaaguu

SEQ ID NO: 863973 - RNA, 19 nt, Artificial Sequence
  Description of Artificial Sequence: Synthetic oligonucleotide
  Antisense strand to SEQ ID NO: 863972
aacuuuacauaucgagaac

SEQ ID NO: 863974 - RNA, 19 nt, Artificial Sequence
  Description of Artificial Sequence: Synthetic oligonucleotide
  Sense strand starting at position 2348 of SEQ ID NO: 588423
gagauaaccauguaggugu

SEQ ID NO: 863975 - RNA, 19 nt, Artificial Sequence
  Description of Artificial Sequence: Synthetic oligonucleotide
  Antisense strand to SEQ ID NO: 863974
acaccuacaugguuaucuc

SEQ ID NO: 863976 - RNA, 19 nt, Artificial Sequence
  Description of Artificial Sequence: Synthetic oligonucleotide
  Sense strand starting at position 2479 of SEQ ID NO: 588423
cacagugcuguggaaagua

SEQ ID NO: 863977 - RNA, 19 nt, Artificial Sequence
  Description of Artificial Sequence: Synthetic oligonucleotide
  Antisense strand to SEQ ID NO: 863976
uacuuuccacagcacugug

SEQ ID NO: 863978 - RNA, 19 nt, Artificial Sequence
  Description of Artificial Sequence: Synthetic oligonucleotide
  Sense strand starting at position 2522 of SEQ ID NO: 588423
agcacagaucuuuguguca

SEQ ID NO: 863979 - RNA, 19 nt, Artificial Sequence
  Description of Artificial Sequence: Synthetic oligonucleotide
  Antisense strand to SEQ ID NO: 863978
ugacacaaagaucugugcu

SEQ ID NO: 863980 - RNA, 19 nt, Artificial Sequence
  Description of Artificial Sequence: Synthetic oligonucleotide
  Sense strand starting at position 2525 of SEQ ID NO: 588423
acagaucuuugugucaguu

SEQ ID NO: 863981 - RNA, 19 nt, Artificial Sequence
  Description of Artificial Sequence: Synthetic oligonucleotide
  Antisense strand to SEQ ID NO: 863980
aacugacacaaagaucugu

SEQ ID NO: 863982 - RNA, 19 nt, Artificial Sequence
  Description of Artificial Sequence: Synthetic oligonucleotide
  Sense strand starting at position 2529 of SEQ ID NO: 588423
aucuuugugucaguuauaa

SEQ ID NO: 863983 - RNA, 19 nt, Artificial Sequence
  Description of Artificial Sequence: Synthetic oligonucleotide
  Antisense strand to SEQ ID NO: 863982
uuauaacugacacaaagau

SEQ ID NO: 863984 - RNA, 19 nt, Artificial Sequence
  Description of Artificial Sequence: Synthetic oligonucleotide
  Sense strand starting at position 2552 of SEQ ID NO: 588423
ugacacaguucucuuugua

SEQ ID NO: 863985 - RNA, 19 nt, Artificial Sequence
  Description of Artificial Sequence: Synthetic oligonucleotide
  Antisense strand to SEQ ID NO: 863984
uacaaagagaacuguguca

SEQ ID NO: 863986 - RNA, 19 nt, Artificial Sequence
  Description of Artificial Sequence: Synthetic oligonucleotide
  Sense strand starting at position 2556 of SEQ ID NO: 588423
acaguucucuuuguaacaa

SEQ ID NO: 863987 - RNA, 19 nt, Artificial Sequence
  Description of Artificial Sequence: Synthetic oligonucleotide
  Antisense strand to SEQ ID NO: 863986
uuguuacaaagagaacugu

SEQ ID NO: 863988 - RNA, 19 nt, Artificial Sequence
  Description of Artificial Sequence: Synthetic oligonucleotide
  Sense strand starting at position 2593 of SEQ ID NO: 588423
gucuucuuucguuggauuu

SEQ ID NO: 863989 - RNA, 19 nt, Artificial Sequence
  Description of Artificial Sequence: Synthetic oligonucleotide
  Antisense strand to SEQ ID NO: 863988
aaauccaacgaaagaagac

SEQ ID NO: 863990 - RNA, 19 nt, Artificial Sequence
  Description of Artificial Sequence: Synthetic oligonucleotide
  Sense strand starting at position 2634 of SEQ ID NO: 588423
aggucuuauuuguuuccau

SEQ ID NO: 863991 - RNA, 19 nt, Artificial Sequence
  Description of Artificial Sequence: Synthetic oligonucleotide
  Antisense strand to SEQ ID NO: 863990
auggaaacaaauaagaccu

SEQ ID NO: 863992 - RNA, 19 nt, Artificial Sequence
  Description of Artificial Sequence: Synthetic oligonucleotide
  Sense strand starting at position 2635 of SEQ ID NO: 588423
ggucuuauuuguuuccaug

SEQ ID NO: 863993 - RNA, 19 nt, Artificial Sequence
  Description of Artificial Sequence: Synthetic oligonucleotide
  Antisense strand to SEQ ID NO: 863992
cauggaaacaaauaagacc

SEQ ID NO: 863994 - RNA, 19 nt, Artificial Sequence
  Description of Artificial Sequence: Synthetic oligonucleotide
  Sense strand starting at position 2637 of SEQ ID NO: 588423
ucuuauuuguuuccauguu

SEQ ID NO: 863995 - RNA, 19 nt, Artificial Sequence
  Description of Artificial Sequence: Synthetic oligonucleotide
  Antisense strand to SEQ ID NO: 863994
aacauggaaacaaauaaga

SEQ ID NO: 863996 - RNA, 19 nt, Artificial Sequence
  Description of Artificial Sequence: Synthetic oligonucleotide
  Sense strand starting at position 2988 of SEQ ID NO: 588423
aggccauuagacugugaua

SEQ ID NO: 863997 - RNA, 19 nt, Artificial Sequence
  Description of Artificial Sequence: Synthetic oligonucleotide
  Antisense strand to SEQ ID NO: 863996
uaucacagucuaauggccu

SEQ ID NO: 863998 - RNA, 19 nt, Artificial Sequence
  Description of Artificial Sequence: Synthetic oligonucleotide
  Sense strand starting at position 2990 of SEQ ID NO: 588423
gccauuagacugugauaug

SEQ ID NO: 863999 - RNA, 19 nt, Artificial Sequence
  Description of Artificial Sequence: Synthetic oligonucleotide
  Antisense strand to SEQ ID NO: 863998
cauaucacagucuaauggc

SEQ ID NO: 864000 - RNA, 19 nt, Artificial Sequence
  Description of Artificial Sequence: Synthetic oligonucleotide
  Sense strand starting at position 2999 of SEQ ID NO: 588423
cugugauauguuugacacu

SEQ ID NO: 864001 - RNA, 19 nt, Artificial Sequence
  Description of Artificial Sequence: Synthetic oligonucleotide
  Antisense strand to SEQ ID NO: 864000
agugucaaacauaucacag

SEQ ID NO: 864002 - RNA, 19 nt, Artificial Sequence
  Description of Artificial Sequence: Synthetic oligonucleotide
  Sense strand starting at position 3008 of SEQ ID NO: 588423
guuugacacuugccugauu

SEQ ID NO: 864003 - RNA, 19 nt, Artificial Sequence
  Description of Artificial Sequence: Synthetic oligonucleotide
  Antisense strand to SEQ ID NO: 864002
aaucaggcaagugucaaac

SEQ ID NO: 864004 - RNA, 19 nt, Artificial Sequence
  Description of Artificial Sequence: Synthetic oligonucleotide
  Sense strand starting at position 3013 of SEQ ID NO: 588423
acacuugccugauuuguca

SEQ ID NO: 864005 - RNA, 19 nt, Artificial Sequence
  Description of Artificial Sequence: Synthetic oligonucleotide
  Antisense strand to SEQ ID NO: 864004
ugacaaaucaggcaagugu

SEQ ID NO: 864006 - RNA, 19 nt, Artificial Sequence
  Description of Artificial Sequence: Synthetic oligonucleotide
  Sense strand starting at position 3083 of SEQ ID NO: 588423
cucucugaggcuuggauaa

SEQ ID NO: 864007 - RNA, 19 nt, Artificial Sequence
  Description of Artificial Sequence: Synthetic oligonucleotide
  Antisense strand to SEQ ID NO: 864006
uuauccaagccucagagag

SEQ ID NO: 864008 - RNA, 19 nt, Artificial Sequence
  Description of Artificial Sequence: Synthetic oligonucleotide
  Sense strand starting at position 3119 of SEQ ID NO: 588423
auugacugcagguagauua

SEQ ID NO: 864009 - RNA, 19 nt, Artificial Sequence
  Description of Artificial Sequence: Synthetic oligonucleotide
  Antisense strand to SEQ ID NO: 864008
uaaucuaccugcagucaau

SEQ ID NO: 864010 - RNA, 19 nt, Artificial Sequence
  Description of Artificial Sequence: Synthetic oligonucleotide
  Sense strand starting at position 3127 of SEQ ID NO: 588423
cagguagauuaacaagaga

SEQ ID NO: 864011 - RNA, 19 nt, Artificial Sequence
  Description of Artificial Sequence: Synthetic oligonucleotide
  Antisense strand to SEQ ID NO: 864010
ucucuuguuaaucuaccug

SEQ ID NO: 864012 - RNA, 19 nt, Artificial Sequence
  Description of Artificial Sequence: Synthetic oligonucleotide
  Sense strand starting at position 3380 of SEQ ID NO: 588423
caaguagauuagguaaaug

SEQ ID NO: 864013 - RNA, 19 nt, Artificial Sequence
  Description of Artificial Sequence: Synthetic oligonucleotide
  Antisense strand to SEQ ID NO: 864012
cauuuaccuaaucuacuug

SEQ ID NO: 864014 - RNA, 19 nt, Artificial Sequence
  Description of Artificial Sequence: Synthetic oligonucleotide
  Sense strand starting at position 3489 of SEQ ID NO: 588423
acuugaaauuucgaacaua

SEQ ID NO: 864015 - RNA, 19 nt, Artificial Sequence
  Description of Artificial Sequence: Synthetic oligonucleotide
  Antisense strand to SEQ ID NO: 864014
uauguucgaaauuucaagu

SEQ ID NO: 864016 - RNA, 19 nt, Artificial Sequence
  Description of Artificial Sequence: Synthetic oligonucleotide
  Sense strand starting at position 3563 of SEQ ID NO: 588423
cugacauguuaauugcuaa

SEQ ID NO: 864017 - RNA, 19 nt, Artificial Sequence
  Description of Artificial Sequence: Synthetic oligonucleotide
  Antisense strand to SEQ ID NO: 864016
uuagcaauuaacaugucag

SEQ ID NO: 864018 - RNA, 19 nt, Artificial Sequence
  Description of Artificial Sequence: Synthetic oligonucleotide
  Sense strand starting at position 55 of SEQ ID NO: 588424
ccauaauagccaugcugga

SEQ ID NO: 864019 - RNA, 19 nt, Artificial Sequence
  Description of Artificial Sequence: Synthetic oligonucleotide
  Antisense strand to SEQ ID NO: 864018
uccagcauggcuauuaugg

SEQ ID NO: 864020 - RNA, 19 nt, Artificial Sequence
  Description of Artificial Sequence: Synthetic oligonucleotide
  Sense strand starting at position 457 of SEQ ID NO: 588424
ccgagcuggucuucacaga

SEQ ID NO: 864021 - RNA, 19 nt, Artificial Sequence
  Description of Artificial Sequence: Synthetic oligonucleotide
  Antisense strand to SEQ ID NO: 864020
ucugugaagaccagcucgg

SEQ ID NO: 864022 - RNA, 19 nt, Artificial Sequence
  Description of Artificial Sequence: Synthetic oligonucleotide
  Sense strand starting at position 660 of SEQ ID NO: 588424
ugcuguaucucaccugaca

SEQ ID NO: 864023 - RNA, 19 nt, Artificial Sequence
  Description of Artificial Sequence: Synthetic oligonucleotide
  Antisense strand to SEQ ID NO: 864022
ugucaggugagauacagca

SEQ ID NO: 864024 - RNA, 19 nt, Artificial Sequence
  Description of Artificial Sequence: Synthetic oligonucleotide
  Sense strand starting at position 701 of SEQ ID NO: 588424
cacauacagccugggauua

SEQ ID NO: 864025 - RNA, 19 nt, Artificial Sequence
  Description of Artificial Sequence: Synthetic oligonucleotide
  Antisense strand to SEQ ID NO: 864024
uaaucccaggcuguaugug

SEQ ID NO: 864026 - RNA, 19 nt, Artificial Sequence
  Description of Artificial Sequence: Synthetic oligonucleotide
  Sense strand starting at position 823 of SEQ ID NO: 588424
ggagcucaauaauauuuga

SEQ ID NO: 864027 - RNA, 19 nt, Artificial Sequence
  Description of Artificial Sequence: Synthetic oligonucleotide
  Antisense strand to SEQ ID NO: 864026
ucaaauauuauugagcucc

SEQ ID NO: 864028 - RNA, 19 nt, Artificial Sequence
  Description of Artificial Sequence: Synthetic oligonucleotide
  Sense strand starting at position 886 of SEQ ID NO: 588424
gguacuuuguaacuuaaga

SEQ ID NO: 864029 - RNA, 19 nt, Artificial Sequence
  Description of Artificial Sequence: Synthetic oligonucleotide
  Antisense strand to SEQ ID NO: 864028
ucuuaaguuacaaaguacc

SEQ ID NO: 864030 - RNA, 19 nt, Artificial Sequence
  Description of Artificial Sequence: Synthetic oligonucleotide
  Sense strand starting at position 930 of SEQ ID NO: 588424
uucugauaaucggauaauc

SEQ ID NO: 864031 - RNA, 19 nt, Artificial Sequence
  Description of Artificial Sequence: Synthetic oligonucleotide
  Antisense strand to SEQ ID NO: 864030
gauuauccgauuaucagaa

SEQ ID NO: 864032 - RNA, 19 nt, Artificial Sequence
  Description of Artificial Sequence: Synthetic oligonucleotide
  Sense strand starting at position 960 of SEQ ID NO: 588424
cuguguuaguuucuuucuu

SEQ ID NO: 864033 - RNA, 19 nt, Artificial Sequence
  Description of Artificial Sequence: Synthetic oligonucleotide
  Antisense strand to SEQ ID NO: 864032
aagaaagaaacuaacacag

SEQ ID NO: 864034 - RNA, 19 nt, Artificial Sequence
  Description of Artificial Sequence: Synthetic oligonucleotide
  Sense strand starting at position 962 of SEQ ID NO: 588424
guguuaguuucuuucuuuc

SEQ ID NO: 864035 - RNA, 19 nt, Artificial Sequence
  Description of Artificial Sequence: Synthetic oligonucleotide
  Antisense strand to SEQ ID NO: 864034
gaaagaaagaaacuaacac

SEQ ID NO: 864036 - RNA, 19 nt, Artificial Sequence
  Description of Artificial Sequence: Synthetic oligonucleotide
  Sense strand starting at position 1262 of SEQ ID NO: 588424
ccuggucacaacuguguua

SEQ ID NO: 864037 - RNA, 19 nt, Artificial Sequence
  Description of Artificial Sequence: Synthetic oligonucleotide
  Antisense strand to SEQ ID NO: 864036
uaacacaguugugaccagg

SEQ ID NO: 864038 - RNA, 19 nt, Artificial Sequence
  Description of Artificial Sequence: Synthetic oligonucleotide
  Sense strand starting at position 1264 of SEQ ID NO: 588424
uggucacaacuguguuagu

SEQ ID NO: 864039 - RNA, 19 nt, Artificial Sequence
  Description of Artificial Sequence: Synthetic oligonucleotide
  Antisense strand to SEQ ID NO: 864038
acuaacacaguugugacca

SEQ ID NO: 864040 - RNA, 19 nt, Artificial Sequence
  Description of Artificial Sequence: Synthetic oligonucleotide
  Sense strand starting at position 1265 of SEQ ID NO: 588424
ggucacaacuguguuaguu

SEQ ID NO: 864041 - RNA, 19 nt, Artificial Sequence
  Description of Artificial Sequence: Synthetic oligonucleotide
  Antisense strand to SEQ ID NO: 864040
aacuaacacaguugugacc

SEQ ID NO: 864042 - RNA, 19 nt, Artificial Sequence
  Description of Artificial Sequence: Synthetic oligonucleotide
  Sense strand starting at position 1273 of SEQ ID NO: 588424
cuguguuaguuucuuauug

SEQ ID NO: 864043 - RNA, 19 nt, Artificial Sequence
  Description of Artificial Sequence: Synthetic oligonucleotide
  Antisense strand to SEQ ID NO: 864042
caauaagaaacuaacacag

SEQ ID NO: 864044 - RNA, 19 nt, Artificial Sequence
  Description of Artificial Sequence: Synthetic oligonucleotide
  Sense strand starting at position 1349 of SEQ ID NO: 588424
uaccguucuguaggucaga

SEQ ID NO: 864045 - RNA, 19 nt, Artificial Sequence
  Description of Artificial Sequence: Synthetic oligonucleotide
  Antisense strand to SEQ ID NO: 864044
ucugaccuacagaacggua

SEQ ID NO: 864046 - RNA, 19 nt, Artificial Sequence
  Description of Artificial Sequence: Synthetic oligonucleotide
  Sense strand starting at position 1996 of SEQ ID NO: 588424
gucugucugguaugacuca

SEQ ID NO: 864047 - RNA, 19 nt, Artificial Sequence
  Description of Artificial Sequence: Synthetic oligonucleotide
  Antisense strand to SEQ ID NO: 864046
ugagucauaccagacagac

SEQ ID NO: 864048 - RNA, 19 nt, Artificial Sequence
  Description of Artificial Sequence: Synthetic oligonucleotide
  Sense strand starting at position 2017 of SEQ ID NO: 588424
cuuucuucgugucucaaau

SEQ ID NO: 864049 - RNA, 19 nt, Artificial Sequence
  Description of Artificial Sequence: Synthetic oligonucleotide
  Antisense strand to SEQ ID NO: 864048
auuugagacacgaagaaag

SEQ ID NO: 864050 - RNA, 19 nt, Artificial Sequence
  Description of Artificial Sequence: Synthetic oligonucleotide
  Sense strand starting at position 2019 of SEQ ID NO: 588424
uucuucgugucucaaauuu

SEQ ID NO: 864051 - RNA, 19 nt, Artificial Sequence
  Description of Artificial Sequence: Synthetic oligonucleotide
  Antisense strand to SEQ ID NO: 864050
aaauuugagacacgaagaa

SEQ ID NO: 864052 - RNA, 19 nt, Artificial Sequence
  Description of Artificial Sequence: Synthetic oligonucleotide
  Sense strand starting at position 2074 of SEQ ID NO: 588424
cccauuuaauuaugugaag

SEQ ID NO: 864053 - RNA, 19 nt, Artificial Sequence
  Description of Artificial Sequence: Synthetic oligonucleotide
  Antisense strand to SEQ ID NO: 864052
cuucacauaauuaaauggg

SEQ ID NO: 864054 - RNA, 19 nt, Artificial Sequence
  Description of Artificial Sequence: Synthetic oligonucleotide
  Sense strand starting at position 2107 of SEQ ID NO: 588424
uuguuauaaugucuuagca

SEQ ID NO: 864055 - RNA, 19 nt, Artificial Sequence
  Description of Artificial Sequence: Synthetic oligonucleotide
  Antisense strand to SEQ ID NO: 864054
ugcuaagacauuauaacaa

SEQ ID NO: 864056 - RNA, 19 nt, Artificial Sequence
  Description of Artificial Sequence: Synthetic oligonucleotide
  Sense strand starting at position 2153 of SEQ ID NO: 588424
gucugaugguucucaccau

SEQ ID NO: 864057 - RNA, 19 nt, Artificial Sequence
  Description of Artificial Sequence: Synthetic oligonucleotide
  Antisense strand to SEQ ID NO: 864056
auggugagaaccaucagac

SEQ ID NO: 864058 - RNA, 19 nt, Artificial Sequence
  Description of Artificial Sequence: Synthetic oligonucleotide
  Sense strand starting at position 2170 of SEQ ID NO: 588424
auugcuacccacuggaauu

SEQ ID NO: 864059 - RNA, 19 nt, Artificial Sequence
  Description of Artificial Sequence: Synthetic oligonucleotide
  Antisense strand to SEQ ID NO: 864058
aauuccaguggguagcaau

SEQ ID NO: 864060 - RNA, 19 nt, Artificial Sequence
  Description of Artificial Sequence: Synthetic oligonucleotide
  Sense strand starting at position 2183 of SEQ ID NO: 588424
ggaauuacuuauggaaccu

SEQ ID NO: 864061 - RNA, 19 nt, Artificial Sequence
  Description of Artificial Sequence: Synthetic oligonucleotide
  Antisense strand to SEQ ID NO: 864060
agguuccauaaguaauucc

SEQ ID NO: 864062 - RNA, 19 nt, Artificial Sequence
  Description of Artificial Sequence: Synthetic oligonucleotide
  Sense strand starting at position 2547 of SEQ ID NO: 588424
uucugaugugauugcuaug

SEQ ID NO: 864063 - RNA, 19 nt, Artificial Sequence
  Description of Artificial Sequence: Synthetic oligonucleotide
  Antisense strand to SEQ ID NO: 864062
cauagcaaucacaucagaa

SEQ ID NO: 864064 - RNA, 19 nt, Artificial Sequence
  Description of Artificial Sequence: Synthetic oligonucleotide
  Sense strand starting at position 2552 of SEQ ID NO: 588424
augugauugcuauggaaug

SEQ ID NO: 864065 - RNA, 19 nt, Artificial Sequence
  Description of Artificial Sequence: Synthetic oligonucleotide
  Antisense strand to SEQ ID NO: 864064
cauuccauagcaaucacau

SEQ ID NO: 864066 - RNA, 19 nt, Artificial Sequence
  Description of Artificial Sequence: Synthetic oligonucleotide
  Sense strand starting at position 2564 of SEQ ID NO: 588424
uggaauguggccuaggcau

SEQ ID NO: 864067 - RNA, 19 nt, Artificial Sequence
  Description of Artificial Sequence: Synthetic oligonucleotide
  Antisense strand to SEQ ID NO: 864066
augccuaggccacauucca

SEQ ID NO: 864068 - RNA, 19 nt, Artificial Sequence
  Description of Artificial Sequence: Synthetic oligonucleotide
  Sense strand starting at position 2946 of SEQ ID NO: 588424
gaagacuccucuuagguag

SEQ ID NO: 864069 - RNA, 19 nt, Artificial Sequence
  Description of Artificial Sequence: Synthetic oligonucleotide
  Antisense strand to SEQ ID NO: 864068
cuaccuaagaggagucuuc

SEQ ID NO: 864070 - RNA, 19 nt, Artificial Sequence
  Description of Artificial Sequence: Synthetic oligonucleotide
  Sense strand starting at position 2953 of SEQ ID NO: 588424
ccucuuagguagcucuaaa

SEQ ID NO: 864071 - RNA, 19 nt, Artificial Sequence
  Description of Artificial Sequence: Synthetic oligonucleotide
  Antisense strand to SEQ ID NO: 864070
uuuagagcuaccuaagagg

SEQ ID NO: 864072 - RNA, 19 nt, Artificial Sequence
  Description of Artificial Sequence: Synthetic oligonucleotide
  Sense strand starting at position 3183 of SEQ ID NO: 588424
gaaacaugguaccacugua

SEQ ID NO: 864073 - RNA, 19 nt, Artificial Sequence
  Description of Artificial Sequence: Synthetic oligonucleotide
  Antisense strand to SEQ ID NO: 864072
uacagugguaccauguuuc

SEQ ID NO: 864074 - RNA, 19 nt, Artificial Sequence
  Description of Artificial Sequence: Synthetic oligonucleotide
  Sense strand starting at position 3217 of SEQ ID NO: 588424
ucaccuguggagcaaauau

SEQ ID NO: 864075 - RNA, 19 nt, Artificial Sequence
  Description of Artificial Sequence: Synthetic oligonucleotide
  Antisense strand to SEQ ID NO: 864074
auauuugcuccacagguga

SEQ ID NO: 864076 - RNA, 19 nt, Artificial Sequence
  Description of Artificial Sequence: Synthetic oligonucleotide
  Sense strand starting at position 3243 of SEQ ID NO: 588424
ggaaauguagauugauguc

SEQ ID NO: 864077 - RNA, 19 nt, Artificial Sequence
  Description of Artificial Sequence: Synthetic oligonucleotide
  Antisense strand to SEQ ID NO: 864076
gacaucaaucuacauuucc

SEQ ID NO: 864078 - RNA, 19 nt, Artificial Sequence
  Description of Artificial Sequence: Synthetic oligonucleotide
  Sense strand starting at position 3270 of SEQ ID NO: 588424
ucaucacagcuuuagugaa

SEQ ID NO: 864079 - RNA, 19 nt, Artificial Sequence
  Description of Artificial Sequence: Synthetic oligonucleotide
  Antisense strand to SEQ ID NO: 864078
uucacuaaagcugugauga

SEQ ID NO: 864080 - RNA, 19 nt, Artificial Sequence
  Description of Artificial Sequence: Synthetic oligonucleotide
  Sense strand starting at position 3365 of SEQ ID NO: 588424
uauauuaacuaguagguga

SEQ ID NO: 864081 - RNA, 19 nt, Artificial Sequence
  Description of Artificial Sequence: Synthetic oligonucleotide
  Antisense strand to SEQ ID NO: 864080
ucaccuacuaguuaauaua

SEQ ID NO: 864082 - RNA, 19 nt, Artificial Sequence
  Description of Artificial Sequence: Synthetic oligonucleotide
  Sense strand starting at position 3369 of SEQ ID NO: 588424
uuaacuaguaggugagguu

SEQ ID NO: 864083 - RNA, 19 nt, Artificial Sequence
  Description of Artificial Sequence: Synthetic oligonucleotide
  Antisense strand to SEQ ID NO: 864082
aaccucaccuacuaguuaa

SEQ ID NO: 864084 - RNA, 19 nt, Artificial Sequence
  Description of Artificial Sequence: Synthetic oligonucleotide
  Sense strand starting at position 3370 of SEQ ID NO: 588424
uaacuaguaggugagguua

SEQ ID NO: 864085 - RNA, 19 nt, Artificial Sequence
  Description of Artificial Sequence: Synthetic oligonucleotide
  Antisense strand to SEQ ID NO: 864084
uaaccucaccuacuaguua

SEQ ID NO: 864086 - RNA, 19 nt, Artificial Sequence
  Description of Artificial Sequence: Synthetic oligonucleotide
  Sense strand starting at position 3395 of SEQ ID NO: 588424
uugaaagucauguggguau

SEQ ID NO: 864087 - RNA, 19 nt, Artificial Sequence
  Description of Artificial Sequence: Synthetic oligonucleotide
  Antisense strand to SEQ ID NO: 864086
auacccacaugacuuucaa

SEQ ID NO: 864088 - RNA, 19 nt, Artificial Sequence
  Description of Artificial Sequence: Synthetic oligonucleotide
  Sense strand starting at position 3397 of SEQ ID NO: 588424
gaaagucauguggguauug

SEQ ID NO: 864089 - RNA, 19 nt, Artificial Sequence
  Description of Artificial Sequence: Synthetic oligonucleotide
  Antisense strand to SEQ ID NO: 864088
caauacccacaugacuuuc

SEQ ID NO: 864090 - RNA, 19 nt, Artificial Sequence
  Description of Artificial Sequence: Synthetic oligonucleotide
  Sense strand starting at position 3398 of SEQ ID NO: 588424
aaagucauguggguauuga

SEQ ID NO: 864091 - RNA, 19 nt, Artificial Sequence
  Description of Artificial Sequence: Synthetic oligonucleotide
  Antisense strand to SEQ ID NO: 864090
ucaauacccacaugacuuu

SEQ ID NO: 864092 - RNA, 19 nt, Artificial Sequence
  Description of Artificial Sequence: Synthetic oligonucleotide
  Sense strand starting at position 3399 of SEQ ID NO: 588424
aagucauguggguauugaa

SEQ ID NO: 864093 - RNA, 19 nt, Artificial Sequence
  Description of Artificial Sequence: Synthetic oligonucleotide
  Antisense strand to SEQ ID NO: 864092
uucaauacccacaugacuu

SEQ ID NO: 864094 - RNA, 19 nt, Artificial Sequence
  Description of Artificial Sequence: Synthetic oligonucleotide
  Sense strand starting at position 3418 of SEQ ID NO: 588424
cugaacugcucuuagaaga

SEQ ID NO: 864095 - RNA, 19 nt, Artificial Sequence
  Description of Artificial Sequence: Synthetic oligonucleotide
  Antisense strand to SEQ ID NO: 864094
ucuucuaagagcaguucag

SEQ ID NO: 864096 - RNA, 19 nt, Artificial Sequence
  Description of Artificial Sequence: Synthetic oligonucleotide
  Sense strand starting at position 3473 of SEQ ID NO: 588424
aagagaugcugagccaaga

SEQ ID NO: 864097 - RNA, 19 nt, Artificial Sequence
  Description of Artificial Sequence: Synthetic oligonucleotide
  Antisense strand to SEQ ID NO: 864096
ucuuggcucagcaucucuu

SEQ ID NO: 864098 - RNA, 19 nt, Artificial Sequence
  Description of Artificial Sequence: Synthetic oligonucleotide
  Sense strand starting at position 1554 of SEQ ID NO: 588425
aaggaauguccaugauugc

SEQ ID NO: 864099 - RNA, 19 nt, Artificial Sequence
  Description of Artificial Sequence: Synthetic oligonucleotide
  Antisense strand to SEQ ID NO: 864098
gcaaucauggacauuccuu

SEQ ID NO: 864100 - RNA, 19 nt, Artificial Sequence
  Description of Artificial Sequence: Synthetic oligonucleotide
  Sense strand starting at position 1555 of SEQ ID NO: 588425
aggaauguccaugauugca

SEQ ID NO: 864101 - RNA, 19 nt, Artificial Sequence
  Description of Artificial Sequence: Synthetic oligonucleotide
  Antisense strand to SEQ ID NO: 864100
ugcaaucauggacauuccu

SEQ ID NO: 864102 - RNA, 19 nt, Artificial Sequence
  Description of Artificial Sequence: Synthetic oligonucleotide
  Sense strand starting at position 1557 of SEQ ID NO: 588425
gaauguccaugauugcauu

SEQ ID NO: 864103 - RNA, 19 nt, Artificial Sequence
  Description of Artificial Sequence: Synthetic oligonucleotide
  Antisense strand to SEQ ID NO: 864102
aaugcaaucauggacauuc

SEQ ID NO: 864104 - RNA, 19 nt, Artificial Sequence
  Description of Artificial Sequence: Synthetic oligonucleotide
  Sense strand starting at position 1563 of SEQ ID NO: 588425
ccaugauugcauuguaucu

SEQ ID NO: 864105 - RNA, 19 nt, Artificial Sequence
  Description of Artificial Sequence: Synthetic oligonucleotide
  Antisense strand to SEQ ID NO: 864104
agauacaaugcaaucaugg

SEQ ID NO: 864106 - RNA, 19 nt, Artificial Sequence
  Description of Artificial Sequence: Synthetic oligonucleotide
  Sense strand starting at position 1573 of SEQ ID NO: 588425
auuguaucugaaugaagac

SEQ ID NO: 864107 - RNA, 19 nt, Artificial Sequence
  Description of Artificial Sequence: Synthetic oligonucleotide
  Antisense strand to SEQ ID NO: 864106
gucuucauucagauacaau

SEQ ID NO: 864108 - RNA, 19 nt, Artificial Sequence
  Description of Artificial Sequence: Synthetic oligonucleotide
  Sense strand starting at position 1591 of SEQ ID NO: 588425
ccauccuaaugguuaagaa

SEQ ID NO: 864109 - RNA, 19 nt, Artificial Sequence
  Description of Artificial Sequence: Synthetic oligonucleotide
  Antisense strand to SEQ ID NO: 864108
uucuuaaccauuaggaugg

SEQ ID NO: 864110 - RNA, 19 nt, Artificial Sequence
  Description of Artificial Sequence: Synthetic oligonucleotide
  Sense strand starting at position 1641 of SEQ ID NO: 588425
cauacaacggaucaguauu

SEQ ID NO: 864111 - RNA, 19 nt, Artificial Sequence
  Description of Artificial Sequence: Synthetic oligonucleotide
  Antisense strand to SEQ ID NO: 864110
aauacugauccguuguaug

SEQ ID NO: 864112 - RNA, 19 nt, Artificial Sequence
  Description of Artificial Sequence: Synthetic oligonucleotide
  Sense strand starting at position 1649 of SEQ ID NO: 588425
ggaucaguauuuggucuua

SEQ ID NO: 864113 - RNA, 19 nt, Artificial Sequence
  Description of Artificial Sequence: Synthetic oligonucleotide
  Antisense strand to SEQ ID NO: 864112
uaagaccaaauacugaucc

SEQ ID NO: 864114 - RNA, 19 nt, Artificial Sequence
  Description of Artificial Sequence: Synthetic oligonucleotide
  Sense strand starting at position 1677 of SEQ ID NO: 588425
gaaauucuggcuuagggua

SEQ ID NO: 864115 - RNA, 19 nt, Artificial Sequence
  Description of Artificial Sequence: Synthetic oligonucleotide
  Antisense strand to SEQ ID NO: 864114
uacccuaagccagaauuuc

SEQ ID NO: 864116 - RNA, 19 nt, Artificial Sequence
  Description of Artificial Sequence: Synthetic oligonucleotide
  Sense strand starting at position 1704 of SEQ ID NO: 588425
augaauccugaaggcauua

SEQ ID NO: 864117 - RNA, 19 nt, Artificial Sequence
  Description of Artificial Sequence: Synthetic oligonucleotide
  Antisense strand to SEQ ID NO: 864116
uaaugccuucaggauucau

SEQ ID NO: 864118 - RNA, 19 nt, Artificial Sequence
  Description of Artificial Sequence: Synthetic oligonucleotide
  Sense strand starting at position 1709 of SEQ ID NO: 588425
uccugaaggcauuaugcua

SEQ ID NO: 864119 - RNA, 19 nt, Artificial Sequence
  Description of Artificial Sequence: Synthetic oligonucleotide
  Antisense strand to SEQ ID NO: 864118
uagcauaaugccuucagga

SEQ ID NO: 864120 - RNA, 19 nt, Artificial Sequence
  Description of Artificial Sequence: Synthetic oligonucleotide
  Sense strand starting at position 1730 of SEQ ID NO: 588425
ucaaguaagucagacacaa

SEQ ID NO: 864121 - RNA, 19 nt, Artificial Sequence
  Description of Artificial Sequence: Synthetic oligonucleotide
  Antisense strand to SEQ ID NO: 864120
uugugucugacuuacuuga

SEQ ID NO: 864122 - RNA, 19 nt, Artificial Sequence
  Description of Artificial Sequence: Synthetic oligonucleotide
  Sense strand starting at position 1757 of SEQ ID NO: 588425
auaugcuauugugucugaa

SEQ ID NO: 864123 - RNA, 19 nt, Artificial Sequence
  Description of Artificial Sequence: Synthetic oligonucleotide
  Antisense strand to SEQ ID NO: 864122
uucagacacaauagcauau

SEQ ID NO: 864124 - RNA, 19 nt, Artificial Sequence
  Description of Artificial Sequence: Synthetic oligonucleotide
  Sense strand starting at position 1759 of SEQ ID NO: 588425
augcuauugugucugaaau

SEQ ID NO: 864125 - RNA, 19 nt, Artificial Sequence
  Description of Artificial Sequence: Synthetic oligonucleotide
  Antisense strand to SEQ ID NO: 864124
auuucagacacaauagcau

SEQ ID NO: 864126 - RNA, 19 nt, Artificial Sequence
  Description of Artificial Sequence: Synthetic oligonucleotide
  Sense strand starting at position 1760 of SEQ ID NO: 588425
ugcuauugugucugaaauu

SEQ ID NO: 864127 - RNA, 19 nt, Artificial Sequence
  Description of Artificial Sequence: Synthetic oligonucleotide
  Antisense strand to SEQ ID NO: 864126
aauuucagacacaauagca

SEQ ID NO: 864128 - RNA, 19 nt, Artificial Sequence
  Description of Artificial Sequence: Synthetic oligonucleotide
  Sense strand starting at position 1761 of SEQ ID NO: 588425
gcuauugugucugaaauuu

SEQ ID NO: 864129 - RNA, 19 nt, Artificial Sequence
  Description of Artificial Sequence: Synthetic oligonucleotide
  Antisense strand to SEQ ID NO: 864128
aaauuucagacacaauagc

SEQ ID NO: 864130 - RNA, 19 nt, Artificial Sequence
  Description of Artificial Sequence: Synthetic oligonucleotide
  Sense strand starting at position 1799 of SEQ ID NO: 588425
gggucuuacucaccaagaa

SEQ ID NO: 864131 - RNA, 19 nt, Artificial Sequence
  Description of Artificial Sequence: Synthetic oligonucleotide
  Antisense strand to SEQ ID NO: 864130
uucuuggugaguaagaccc

SEQ ID NO: 864132 - RNA, 19 nt, Artificial Sequence
  Description of Artificial Sequence: Synthetic oligonucleotide
  Sense strand starting at position 2003 of SEQ ID NO: 588425
cggaguucuuuguuccucu

SEQ ID NO: 864133 - RNA, 19 nt, Artificial Sequence
  Description of Artificial Sequence: Synthetic oligonucleotide
  Antisense strand to SEQ ID NO: 864132
agaggaacaaagaacuccg

SEQ ID NO: 864134 - RNA, 19 nt, Artificial Sequence
  Description of Artificial Sequence: Synthetic oligonucleotide
  Sense strand starting at position 2007 of SEQ ID NO: 588425
guucuuuguuccucucagu

SEQ ID NO: 864135 - RNA, 19 nt, Artificial Sequence
  Description of Artificial Sequence: Synthetic oligonucleotide
  Antisense strand to SEQ ID NO: 864134
acugagaggaacaaagaac

SEQ ID NO: 864136 - RNA, 19 nt, Artificial Sequence
  Description of Artificial Sequence: Synthetic oligonucleotide
  Sense strand starting at position 2344 of SEQ ID NO: 588425
cguuuacaaucuuugagcu

SEQ ID NO: 864137 - RNA, 19 nt, Artificial Sequence
  Description of Artificial Sequence: Synthetic oligonucleotide
  Antisense strand to SEQ ID NO: 864136
agcucaaagauuguaaacg

SEQ ID NO: 864138 - RNA, 19 nt, Artificial Sequence
  Description of Artificial Sequence: Synthetic oligonucleotide
  Sense strand starting at position 2345 of SEQ ID NO: 588425
guuuacaaucuuugagcua

SEQ ID NO: 864139 - RNA, 19 nt, Artificial Sequence
  Description of Artificial Sequence: Synthetic oligonucleotide
  Antisense strand to SEQ ID NO: 864138
uagcucaaagauuguaaac

SEQ ID NO: 864140 - RNA, 19 nt, Artificial Sequence
  Description of Artificial Sequence: Synthetic oligonucleotide
  Sense strand starting at position 2519 of SEQ ID NO: 588425
uagcaugguuguuuccaga

SEQ ID NO: 864141 - RNA, 19 nt, Artificial Sequence
  Description of Artificial Sequence: Synthetic oligonucleotide
  Antisense strand to SEQ ID NO: 864140
ucuggaaacaaccaugcua

SEQ ID NO: 864142 - RNA, 19 nt, Artificial Sequence
  Description of Artificial Sequence: Synthetic oligonucleotide
  Sense strand starting at position 2621 of SEQ ID NO: 588425
gggugagauggcugcacaa

SEQ ID NO: 864143 - RNA, 19 nt, Artificial Sequence
  Description of Artificial Sequence: Synthetic oligonucleotide
  Antisense strand to SEQ ID NO: 864142
uugugcagccaucucaccc

SEQ ID NO: 864144 - RNA, 19 nt, Artificial Sequence
  Description of Artificial Sequence: Synthetic oligonucleotide
  Sense strand starting at position 2623 of SEQ ID NO: 588425
gugagauggcugcacaaca

SEQ ID NO: 864145 - RNA, 19 nt, Artificial Sequence
  Description of Artificial Sequence: Synthetic oligonucleotide
  Antisense strand to SEQ ID NO: 864144
uguugugcagccaucucac

SEQ ID NO: 864146 - RNA, 19 nt, Artificial Sequence
  Description of Artificial Sequence: Synthetic oligonucleotide
  Sense strand starting at position 2643 of SEQ ID NO: 588425
ugcaaauaugcuuaaugca

SEQ ID NO: 864147 - RNA, 19 nt, Artificial Sequence
  Description of Artificial Sequence: Synthetic oligonucleotide
  Antisense strand to SEQ ID NO: 864146
ugcauuaagcauauuugca

SEQ ID NO: 864148 - RNA, 19 nt, Artificial Sequence
  Description of Artificial Sequence: Synthetic oligonucleotide
  Sense strand starting at position 2675 of SEQ ID NO: 588425
gauuuaaccuugggaguuu

SEQ ID NO: 864149 - RNA, 19 nt, Artificial Sequence
  Description of Artificial Sequence: Synthetic oligonucleotide
  Antisense strand to SEQ ID NO: 864148
aaacucccaagguuaaauc

SEQ ID NO: 864150 - RNA, 19 nt, Artificial Sequence
  Description of Artificial Sequence: Synthetic oligonucleotide
  Sense strand starting at position 2694 of SEQ ID NO: 588425
ucagucucuuuguuaugau

SEQ ID NO: 864151 - RNA, 19 nt, Artificial Sequence
  Description of Artificial Sequence: Synthetic oligonucleotide
  Antisense strand to SEQ ID NO: 864150
aucauaacaaagagacuga

SEQ ID NO: 864152 - RNA, 19 nt, Artificial Sequence
  Description of Artificial Sequence: Synthetic oligonucleotide
  Sense strand starting at position 2719 of SEQ ID NO: 588425
agaugcagcugucuuacua

SEQ ID NO: 864153 - RNA, 19 nt, Artificial Sequence
  Description of Artificial Sequence: Synthetic oligonucleotide
  Antisense strand to SEQ ID NO: 864152
uaguaagacagcugcaucu

SEQ ID NO: 864154 - RNA, 19 nt, Artificial Sequence
  Description of Artificial Sequence: Synthetic oligonucleotide
  Sense strand starting at position 2781 of SEQ ID NO: 588425
ugaagaauguuacauggaa

SEQ ID NO: 864155 - RNA, 19 nt, Artificial Sequence
  Description of Artificial Sequence: Synthetic oligonucleotide
  Antisense strand to SEQ ID NO: 864154
uuccauguaacauucuuca

SEQ ID NO: 864156 - RNA, 19 nt, Artificial Sequence
  Description of Artificial Sequence: Synthetic oligonucleotide
  Sense strand starting at position 3345 of SEQ ID NO: 588425
gguuucaaacgugagccaa

SEQ ID NO: 864157 - RNA, 19 nt, Artificial Sequence
  Description of Artificial Sequence: Synthetic oligonucleotide
  Antisense strand to SEQ ID NO: 864156
uuggcucacguuugaaacc

SEQ ID NO: 864158 - RNA, 19 nt, Artificial Sequence
  Description of Artificial Sequence: Synthetic oligonucleotide
  Sense strand starting at position 3349 of SEQ ID NO: 588425
ucaaacgugagccaagauu

SEQ ID NO: 864159 - RNA, 19 nt, Artificial Sequence
  Description of Artificial Sequence: Synthetic oligonucleotide
  Antisense strand to SEQ ID NO: 864158
aaucuuggcucacguuuga

SEQ ID NO: 864160 - RNA, 19 nt, Artificial Sequence
  Description of Artificial Sequence: Synthetic oligonucleotide
  Sense strand starting at position 3496 of SEQ ID NO: 588425
gaccgcagguugucugaaa

SEQ ID NO: 864161 - RNA, 19 nt, Artificial Sequence
  Description of Artificial Sequence: Synthetic oligonucleotide
  Antisense strand to SEQ ID NO: 864160
uuucagacaaccugcgguc

SEQ ID NO: 864162 - RNA, 19 nt, Artificial Sequence
  Description of Artificial Sequence: Synthetic oligonucleotide
  Sense strand starting at position 3538 of SEQ ID NO: 588425
caugaaaguuuagagauaa

SEQ ID NO: 864163 - RNA, 19 nt, Artificial Sequence
  Description of Artificial Sequence: Synthetic oligonucleotide
  Antisense strand to SEQ ID NO: 864162
uuaucucuaaacuuucaug

SEQ ID NO: 864164 - RNA, 19 nt, Artificial Sequence
  Description of Artificial Sequence: Synthetic oligonucleotide
  Sense strand starting at position 3559 of SEQ ID NO: 588425
gaacaaagguuguccaagu

SEQ ID NO: 864165 - RNA, 19 nt, Artificial Sequence
  Description of Artificial Sequence: Synthetic oligonucleotide
  Antisense strand to SEQ ID NO: 864164
acuuggacaaccuuuguuc

SEQ ID NO: 864166 - RNA, 19 nt, Artificial Sequence
  Description of Artificial Sequence: Synthetic oligonucleotide
  Sense strand starting at position 3560 of SEQ ID NO: 588425
aacaaagguuguccaaguu

SEQ ID NO: 864167 - RNA, 19 nt, Artificial Sequence
  Description of Artificial Sequence: Synthetic oligonucleotide
  Antisense strand to SEQ ID NO: 864166
aacuuggacaaccuuuguu

SEQ ID NO: 864168 - RNA, 19 nt, Artificial Sequence
  Description of Artificial Sequence: Synthetic oligonucleotide
  Sense strand starting at position 3711 of SEQ ID NO: 588425
ugcagaggcugacuuugau

SEQ ID NO: 864169 - RNA, 19 nt, Artificial Sequence
  Description of Artificial Sequence: Synthetic oligonucleotide
  Antisense strand to SEQ ID NO: 864168
aucaaagucagccucugca

SEQ ID NO: 864170 - RNA, 19 nt, Artificial Sequence
  Description of Artificial Sequence: Synthetic oligonucleotide
  Sense strand starting at position 3729 of SEQ ID NO: 588425
ugggcuugagcagaaauau

SEQ ID NO: 864171 - RNA, 19 nt, Artificial Sequence
  Description of Artificial Sequence: Synthetic oligonucleotide
  Antisense strand to SEQ ID NO: 864170
auauuucugcucaagccca

SEQ ID NO: 864172 - RNA, 19 nt, Artificial Sequence
  Description of Artificial Sequence: Synthetic oligonucleotide
  Sense strand starting at position 3812 of SEQ ID NO: 588425
auuaucauugcaggccaaa

SEQ ID NO: 864173 - RNA, 19 nt, Artificial Sequence
  Description of Artificial Sequence: Synthetic oligonucleotide
  Antisense strand to SEQ ID NO: 864172
uuuggccugcaaugauaau

SEQ ID NO: 864174 - RNA, 19 nt, Artificial Sequence
  Description of Artificial Sequence: Synthetic oligonucleotide
  Sense strand starting at position 3872 of SEQ ID NO: 588425
acugaagaguaauggacuu

SEQ ID NO: 864175 - RNA, 19 nt, Artificial Sequence
  Description of Artificial Sequence: Synthetic oligonucleotide
  Antisense strand to SEQ ID NO: 864174
aaguccauuacucuucagu

SEQ ID NO: 864176 - RNA, 19 nt, Artificial Sequence
  Description of Artificial Sequence: Synthetic oligonucleotide
  Sense strand starting at position 3929 of SEQ ID NO: 588425
ggcaguuuauaauaccaaa

SEQ ID NO: 864177 - RNA, 19 nt, Artificial Sequence
  Description of Artificial Sequence: Synthetic oligonucleotide
  Antisense strand to SEQ ID NO: 864176
uuugguauuauaaacugcc

SEQ ID NO: 864178 - RNA, 19 nt, Artificial Sequence
  Description of Artificial Sequence: Synthetic oligonucleotide
  Sense strand starting at position 514 of SEQ ID NO: 588426
uccucuuugcuaugagguu

SEQ ID NO: 864179 - RNA, 19 nt, Artificial Sequence
  Description of Artificial Sequence: Synthetic oligonucleotide
  Antisense strand to SEQ ID NO: 864178
aaccucauagcaaagagga

SEQ ID NO: 864180 - RNA, 19 nt, Artificial Sequence
  Description of Artificial Sequence: Synthetic oligonucleotide
  Sense strand starting at position 523 of SEQ ID NO: 588426
cuaugagguuagguuuaaa

SEQ ID NO: 864181 - RNA, 19 nt, Artificial Sequence
  Description of Artificial Sequence: Synthetic oligonucleotide
  Antisense strand to SEQ ID NO: 864180
uuuaaaccuaaccucauag

SEQ ID NO: 864182 - RNA, 19 nt, Artificial Sequence
  Description of Artificial Sequence: Synthetic oligonucleotide
  Sense strand starting at position 591 of SEQ ID NO: 588426
gcccacagucucuaguauu

SEQ ID NO: 864183 - RNA, 19 nt, Artificial Sequence
  Description of Artificial Sequence: Synthetic oligonucleotide
  Antisense strand to SEQ ID NO: 864182
aauacuagagacugugggc

SEQ ID NO: 864184 - RNA, 19 nt, Artificial Sequence
  Description of Artificial Sequence: Synthetic oligonucleotide
  Sense strand starting at position 754 of SEQ ID NO: 588426
gauugaacagucuauaguu

SEQ ID NO: 864185 - RNA, 19 nt, Artificial Sequence
  Description of Artificial Sequence: Synthetic oligonucleotide
  Antisense strand to SEQ ID NO: 864184
aacuauagacuguucaauc

SEQ ID NO: 864186 - RNA, 19 nt, Artificial Sequence
  Description of Artificial Sequence: Synthetic oligonucleotide
  Sense strand starting at position 756 of SEQ ID NO: 588426
uugaacagucuauaguuga

SEQ ID NO: 864187 - RNA, 19 nt, Artificial Sequence
  Description of Artificial Sequence: Synthetic oligonucleotide
  Antisense strand to SEQ ID NO: 864186
ucaacuauagacuguucaa

SEQ ID NO: 864188 - RNA, 19 nt, Artificial Sequence
  Description of Artificial Sequence: Synthetic oligonucleotide
  Sense strand starting at position 761 of SEQ ID NO: 588426
cagucuauaguugaugagu

SEQ ID NO: 864189 - RNA, 19 nt, Artificial Sequence
  Description of Artificial Sequence: Synthetic oligonucleotide
  Antisense strand to SEQ ID NO: 864188
acucaucaacuauagacug

SEQ ID NO: 864190 - RNA, 19 nt, Artificial Sequence
  Description of Artificial Sequence: Synthetic oligonucleotide
  Sense strand starting at position 770 of SEQ ID NO: 588426
guugaugaguuucugacac

SEQ ID NO: 864191 - RNA, 19 nt, Artificial Sequence
  Description of Artificial Sequence: Synthetic oligonucleotide
  Antisense strand to SEQ ID NO: 864190
gugucagaaacucaucaac

SEQ ID NO: 864192 - RNA, 19 nt, Artificial Sequence
  Description of Artificial Sequence: Synthetic oligonucleotide
  Sense strand starting at position 784 of SEQ ID NO: 588426
gacacugugccagaauuac

SEQ ID NO: 864193 - RNA, 19 nt, Artificial Sequence
  Description of Artificial Sequence: Synthetic oligonucleotide
  Antisense strand to SEQ ID NO: 864192
guaauucuggcacaguguc

SEQ ID NO: 864194 - RNA, 19 nt, Artificial Sequence
  Description of Artificial Sequence: Synthetic oligonucleotide
  Sense strand starting at position 813 of SEQ ID NO: 588426
ucuugaaaucguuaguaau

SEQ ID NO: 864195 - RNA, 19 nt, Artificial Sequence
  Description of Artificial Sequence: Synthetic oligonucleotide
  Antisense strand to SEQ ID NO: 864194
auuacuaacgauuucaaga

SEQ ID NO: 864196 - RNA, 19 nt, Artificial Sequence
  Description of Artificial Sequence: Synthetic oligonucleotide
  Sense strand starting at position 940 of SEQ ID NO: 588426
ggagaaguuuggaaauggu

SEQ ID NO: 864197 - RNA, 19 nt, Artificial Sequence
  Description of Artificial Sequence: Synthetic oligonucleotide
  Antisense strand to SEQ ID NO: 864196
accauuuccaaacuucucc

SEQ ID NO: 864198 - RNA, 19 nt, Artificial Sequence
  Description of Artificial Sequence: Synthetic oligonucleotide
  Sense strand starting at position 943 of SEQ ID NO: 588426
gaaguuuggaaaugguugu

SEQ ID NO: 864199 - RNA, 19 nt, Artificial Sequence
  Description of Artificial Sequence: Synthetic oligonucleotide
  Antisense strand to SEQ ID NO: 864198
acaaccauuuccaaacuuc

SEQ ID NO: 864200 - RNA, 19 nt, Artificial Sequence
  Description of Artificial Sequence: Synthetic oligonucleotide
  Sense strand starting at position 947 of SEQ ID NO: 588426
uuuggaaaugguugugacu

SEQ ID NO: 864201 - RNA, 19 nt, Artificial Sequence
  Description of Artificial Sequence: Synthetic oligonucleotide
  Antisense strand to SEQ ID NO: 864200
agucacaaccauuuccaaa

SEQ ID NO: 864202 - RNA, 19 nt, Artificial Sequence
  Description of Artificial Sequence: Synthetic oligonucleotide
  Sense strand starting at position 967 of SEQ ID NO: 588426
cuaagaaucuuugaaggaa

SEQ ID NO: 864203 - RNA, 19 nt, Artificial Sequence
  Description of Artificial Sequence: Synthetic oligonucleotide
  Antisense strand to SEQ ID NO: 864202
uuccuucaaagauucuuag

SEQ ID NO: 864204 - RNA, 19 nt, Artificial Sequence
  Description of Artificial Sequence: Synthetic oligonucleotide
  Sense strand starting at position 1059 of SEQ ID NO: 588426
ggguuagucccacaaugag

SEQ ID NO: 864205 - RNA, 19 nt, Artificial Sequence
  Description of Artificial Sequence: Synthetic oligonucleotide
  Antisense strand to SEQ ID NO: 864204
cucauugugggacuaaccc

SEQ ID NO: 864206 - RNA, 19 nt, Artificial Sequence
  Description of Artificial Sequence: Synthetic oligonucleotide
  Sense strand starting at position 1071 of SEQ ID NO: 588426
caaugaguuuaguuccaug

SEQ ID NO: 864207 - RNA, 19 nt, Artificial Sequence
  Description of Artificial Sequence: Synthetic oligonucleotide
  Antisense strand to SEQ ID NO: 864206
cauggaacuaaacucauug

SEQ ID NO: 864208 - RNA, 19 nt, Artificial Sequence
  Description of Artificial Sequence: Synthetic oligonucleotide
  Sense strand starting at position 1076 of SEQ ID NO: 588426
aguuuaguuccaugccaga

SEQ ID NO: 864209 - RNA, 19 nt, Artificial Sequence
  Description of Artificial Sequence: Synthetic oligonucleotide
  Antisense strand to SEQ ID NO: 864208
ucuggcauggaacuaaacu

SEQ ID NO: 864210 - RNA, 19 nt, Artificial Sequence
  Description of Artificial Sequence: Synthetic oligonucleotide
  Sense strand starting at position 1081 of SEQ ID NO: 588426
aguuccaugccagaaacua

SEQ ID NO: 864211 - RNA, 19 nt, Artificial Sequence
  Description of Artificial Sequence: Synthetic oligonucleotide
  Antisense strand to SEQ ID NO: 864210
uaguuucuggcauggaacu

SEQ ID NO: 864212 - RNA, 19 nt, Artificial Sequence
  Description of Artificial Sequence: Synthetic oligonucleotide
  Sense strand starting at position 1158 of SEQ ID NO: 588426
guuauaacagacuguaaua

SEQ ID NO: 864213 - RNA, 19 nt, Artificial Sequence
  Description of Artificial Sequence: Synthetic oligonucleotide
  Antisense strand to SEQ ID NO: 864212
uauuacagucuguuauaac

SEQ ID NO: 864214 - RNA, 19 nt, Artificial Sequence
  Description of Artificial Sequence: Synthetic oligonucleotide
  Sense strand starting at position 1210 of SEQ ID NO: 588426
auuguaauuuaugacagac

SEQ ID NO: 864215 - RNA, 19 nt, Artificial Sequence
  Description of Artificial Sequence: Synthetic oligonucleotide
  Antisense strand to SEQ ID NO: 864214
gucugucauaaauuacaau

SEQ ID NO: 864216 - RNA, 19 nt, Artificial Sequence
  Description of Artificial Sequence: Synthetic oligonucleotide
  Sense strand starting at position 1212 of SEQ ID NO: 588426
uguaauuuaugacagaccu

SEQ ID NO: 864217 - RNA, 19 nt, Artificial Sequence
  Description of Artificial Sequence: Synthetic oligonucleotide
  Antisense strand to SEQ ID NO: 864216
aggucugucauaaauuaca

SEQ ID NO: 864218 - RNA, 19 nt, Artificial Sequence
  Description of Artificial Sequence: Synthetic oligonucleotide
  Sense strand starting at position 1336 of SEQ ID NO: 588426
ugguucuacagcugauaag

SEQ ID NO: 864219 - RNA, 19 nt, Artificial Sequence
  Description of Artificial Sequence: Synthetic oligonucleotide
  Antisense strand to SEQ ID NO: 864218
cuuaucagcuguagaacca

SEQ ID NO: 864220 - RNA, 19 nt, Artificial Sequence
  Description of Artificial Sequence: Synthetic oligonucleotide
  Sense strand starting at position 1392 of SEQ ID NO: 588426
auuugaccguuauaaaucu

SEQ ID NO: 864221 - RNA, 19 nt, Artificial Sequence
  Description of Artificial Sequence: Synthetic oligonucleotide
  Antisense strand to SEQ ID NO: 864220
agauuuauaacggucaaau

SEQ ID NO: 864222 - RNA, 19 nt, Artificial Sequence
  Description of Artificial Sequence: Synthetic oligonucleotide
  Sense strand starting at position 1481 of SEQ ID NO: 588426
augaguugugaauaguaau

SEQ ID NO: 864223 - RNA, 19 nt, Artificial Sequence
  Description of Artificial Sequence: Synthetic oligonucleotide
  Antisense strand to SEQ ID NO: 864222
auuacuauucacaacucau

SEQ ID NO: 864224 - RNA, 19 nt, Artificial Sequence
  Description of Artificial Sequence: Synthetic oligonucleotide
  Sense strand starting at position 2000 of SEQ ID NO: 588426
uuaacaguccaguaugauu

SEQ ID NO: 864225 - RNA, 19 nt, Artificial Sequence
  Description of Artificial Sequence: Synthetic oligonucleotide
  Antisense strand to SEQ ID NO: 864224
aaucauacuggacuguuaa

SEQ ID NO: 864226 - RNA, 19 nt, Artificial Sequence
  Description of Artificial Sequence: Synthetic oligonucleotide
  Sense strand starting at position 2005 of SEQ ID NO: 588426
aguccaguaugauuagaaa

SEQ ID NO: 864227 - RNA, 19 nt, Artificial Sequence
  Description of Artificial Sequence: Synthetic oligonucleotide
  Antisense strand to SEQ ID NO: 864226
uuucuaaucauacuggacu

SEQ ID NO: 864228 - RNA, 19 nt, Artificial Sequence
  Description of Artificial Sequence: Synthetic oligonucleotide
  Sense strand starting at position 2057 of SEQ ID NO: 588426
cccaaugcucacuggcaaa

SEQ ID NO: 864229 - RNA, 19 nt, Artificial Sequence
  Description of Artificial Sequence: Synthetic oligonucleotide
  Antisense strand to SEQ ID NO: 864228
uuugccagugagcauuggg

SEQ ID NO: 864230 - RNA, 19 nt, Artificial Sequence
  Description of Artificial Sequence: Synthetic oligonucleotide
  Sense strand starting at position 2098 of SEQ ID NO: 588426
auuuguugcucaucucauu

SEQ ID NO: 864231 - RNA, 19 nt, Artificial Sequence
  Description of Artificial Sequence: Synthetic oligonucleotide
  Antisense strand to SEQ ID NO: 864230
aaugagaugagcaacaaau

SEQ ID NO: 864232 - RNA, 19 nt, Artificial Sequence
  Description of Artificial Sequence: Synthetic oligonucleotide
  Sense strand starting at position 2328 of SEQ ID NO: 588426
aaacuugagugggucucaa

SEQ ID NO: 864233 - RNA, 19 nt, Artificial Sequence
  Description of Artificial Sequence: Synthetic oligonucleotide
  Antisense strand to SEQ ID NO: 864232
uugagacccacucaaguuu

SEQ ID NO: 864234 - RNA, 19 nt, Artificial Sequence
  Description of Artificial Sequence: Synthetic oligonucleotide
  Sense strand starting at position 2339 of SEQ ID NO: 588426
ggucucaaauaacaaagaa

SEQ ID NO: 864235 - RNA, 19 nt, Artificial Sequence
  Description of Artificial Sequence: Synthetic oligonucleotide
  Antisense strand to SEQ ID NO: 864234
uucuuuguuauuugagacc

SEQ ID NO: 864236 - RNA, 19 nt, Artificial Sequence
  Description of Artificial Sequence: Synthetic oligonucleotide
  Sense strand starting at position 2437 of SEQ ID NO: 588426
agaucugauuuccaugguu

SEQ ID NO: 864237 - RNA, 19 nt, Artificial Sequence
  Description of Artificial Sequence: Synthetic oligonucleotide
  Antisense strand to SEQ ID NO: 864236
aaccauggaaaucagaucu

SEQ ID NO: 864238 - RNA, 19 nt, Artificial Sequence
  Description of Artificial Sequence: Synthetic oligonucleotide
  Sense strand starting at position 2664 of SEQ ID NO: 588426
cgaguaugguaucuaacca

SEQ ID NO: 864239 - RNA, 19 nt, Artificial Sequence
  Description of Artificial Sequence: Synthetic oligonucleotide
  Antisense strand to SEQ ID NO: 864238
ugguuagauaccauacucg

SEQ ID NO: 864240 - RNA, 19 nt, Artificial Sequence
  Description of Artificial Sequence: Synthetic oligonucleotide
  Sense strand starting at position 2860 of SEQ ID NO: 588426
agauauuaauaacagcaga

SEQ ID NO: 864241 - RNA, 19 nt, Artificial Sequence
  Description of Artificial Sequence: Synthetic oligonucleotide
  Antisense strand to SEQ ID NO: 864240
ucugcuguuauuaauaucu

SEQ ID NO: 864242 - RNA, 19 nt, Artificial Sequence
  Description of Artificial Sequence: Synthetic oligonucleotide
  Sense strand starting at position 2907 of SEQ ID NO: 588426
uguacuuucuguguaauuu

SEQ ID NO: 864243 - RNA, 19 nt, Artificial Sequence
  Description of Artificial Sequence: Synthetic oligonucleotide
  Antisense strand to SEQ ID NO: 864242
aaauuacacagaaaguaca

SEQ ID NO: 864244 - RNA, 19 nt, Artificial Sequence
  Description of Artificial Sequence: Synthetic oligonucleotide
  Sense strand starting at position 2915 of SEQ ID NO: 588426
cuguguaauuugucuguaa

SEQ ID NO: 864245 - RNA, 19 nt, Artificial Sequence
  Description of Artificial Sequence: Synthetic oligonucleotide
  Antisense strand to SEQ ID NO: 864244
uuacagacaaauuacacag

SEQ ID NO: 864246 - RNA, 19 nt, Artificial Sequence
  Description of Artificial Sequence: Synthetic oligonucleotide
  Sense strand starting at position 2916 of SEQ ID NO: 588426
uguguaauuugucuguaaa

SEQ ID NO: 864247 - RNA, 19 nt, Artificial Sequence
  Description of Artificial Sequence: Synthetic oligonucleotide
  Antisense strand to SEQ ID NO: 864246
uuuacagacaaauuacaca

SEQ ID NO: 864248 - RNA, 19 nt, Artificial Sequence
  Description of Artificial Sequence: Synthetic oligonucleotide
  Sense strand starting at position 2917 of SEQ ID NO: 588426
guguaauuugucuguaaac

SEQ ID NO: 864249 - RNA, 19 nt, Artificial Sequence
  Description of Artificial Sequence: Synthetic oligonucleotide
  Antisense strand to SEQ ID NO: 864248
guuuacagacaaauuacac

SEQ ID NO: 864250 - RNA, 19 nt, Artificial Sequence
  Description of Artificial Sequence: Synthetic oligonucleotide
  Sense strand starting at position 3167 of SEQ ID NO: 588426
aaggcagugagugacauau

SEQ ID NO: 864251 - RNA, 19 nt, Artificial Sequence
  Description of Artificial Sequence: Synthetic oligonucleotide
  Antisense strand to SEQ ID NO: 864250
auaugucacucacugccuu

SEQ ID NO: 864252 - RNA, 19 nt, Artificial Sequence
  Description of Artificial Sequence: Synthetic oligonucleotide
  Sense strand starting at position 3196 of SEQ ID NO: 588426
gaaaguuuguuggcuaggu

SEQ ID NO: 864253 - RNA, 19 nt, Artificial Sequence
  Description of Artificial Sequence: Synthetic oligonucleotide
  Antisense strand to SEQ ID NO: 864252
accuagccaacaaacuuuc

SEQ ID NO: 864254 - RNA, 19 nt, Artificial Sequence
  Description of Artificial Sequence: Synthetic oligonucleotide
  Sense strand starting at position 3552 of SEQ ID NO: 588426
cuaggauacucccagauaa

SEQ ID NO: 864255 - RNA, 19 nt, Artificial Sequence
  Description of Artificial Sequence: Synthetic oligonucleotide
  Antisense strand to SEQ ID NO: 864254
uuaucugggaguauccuag

SEQ ID NO: 864256 - RNA, 19 nt, Artificial Sequence
  Description of Artificial Sequence: Synthetic oligonucleotide
  Sense strand starting at position 3593 of SEQ ID NO: 588426
gcagccuuacccuacaaga

SEQ ID NO: 864257 - RNA, 19 nt, Artificial Sequence
  Description of Artificial Sequence: Synthetic oligonucleotide
  Antisense strand to SEQ ID NO: 864256
ucuuguaggguaaggcugc

SEQ ID NO: 864258 - RNA, 19 nt, Artificial Sequence
  Description of Artificial Sequence: Synthetic oligonucleotide
  Sense strand starting at position 10 of SEQ ID NO: 588427
ucaggagcucuguaccaua

SEQ ID NO: 864259 - RNA, 19 nt, Artificial Sequence
  Description of Artificial Sequence: Synthetic oligonucleotide
  Antisense strand to SEQ ID NO: 864258
uaugguacagagcuccuga

SEQ ID NO: 864260 - RNA, 19 nt, Artificial Sequence
  Description of Artificial Sequence: Synthetic oligonucleotide
  Sense strand starting at position 138 of SEQ ID NO: 588427
ggaauagacucccugacuc

SEQ ID NO: 864261 - RNA, 19 nt, Artificial Sequence
  Description of Artificial Sequence: Synthetic oligonucleotide
  Antisense strand to SEQ ID NO: 864260
gagucagggagucuauucc

SEQ ID NO: 864262 - RNA, 19 nt, Artificial Sequence
  Description of Artificial Sequence: Synthetic oligonucleotide
  Sense strand starting at position 423 of SEQ ID NO: 588427
accugaguucccugaaacu

SEQ ID NO: 864263 - RNA, 19 nt, Artificial Sequence
  Description of Artificial Sequence: Synthetic oligonucleotide
  Antisense strand to SEQ ID NO: 864262
aguuucagggaacucaggu

SEQ ID NO: 864264 - RNA, 19 nt, Artificial Sequence
  Description of Artificial Sequence: Synthetic oligonucleotide
  Sense strand starting at position 487 of SEQ ID NO: 588427
ccggaaucucccugggaga

SEQ ID NO: 864265 - RNA, 19 nt, Artificial Sequence
  Description of Artificial Sequence: Synthetic oligonucleotide
  Antisense strand to SEQ ID NO: 864264
ucucccagggagauuccgg

SEQ ID NO: 864266 - RNA, 19 nt, Artificial Sequence
  Description of Artificial Sequence: Synthetic oligonucleotide
  Sense strand starting at position 498 of SEQ ID NO: 588427
cugggagagcucugagagu

SEQ ID NO: 864267 - RNA, 19 nt, Artificial Sequence
  Description of Artificial Sequence: Synthetic oligonucleotide
  Antisense strand to SEQ ID NO: 864266
acucucagagcucucccag

SEQ ID NO: 864268 - RNA, 19 nt, Artificial Sequence
  Description of Artificial Sequence: Synthetic oligonucleotide
  Sense strand starting at position 554 of SEQ ID NO: 588427
cgugcauagaaagaguauu

SEQ ID NO: 864269 - RNA, 19 nt, Artificial Sequence
  Description of Artificial Sequence: Synthetic oligonucleotide
  Antisense strand to SEQ ID NO: 864268
aauacucuuucuaugcacg

SEQ ID NO: 864270 - RNA, 19 nt, Artificial Sequence
  Description of Artificial Sequence: Synthetic oligonucleotide
  Sense strand starting at position 649 of SEQ ID NO: 588427
gguagcaucuuagucaaga

SEQ ID NO: 864271 - RNA, 19 nt, Artificial Sequence
  Description of Artificial Sequence: Synthetic oligonucleotide
  Antisense strand to SEQ ID NO: 864270
ucuugacuaagaugcuacc

SEQ ID NO: 864272 - RNA, 19 nt, Artificial Sequence
  Description of Artificial Sequence: Synthetic oligonucleotide
  Sense strand starting at position 650 of SEQ ID NO: 588427
guagcaucuuagucaagaa

SEQ ID NO: 864273 - RNA, 19 nt, Artificial Sequence
  Description of Artificial Sequence: Synthetic oligonucleotide
  Antisense strand to SEQ ID NO: 864272
uucuugacuaagaugcuac

SEQ ID NO: 864274 - RNA, 19 nt, Artificial Sequence
  Description of Artificial Sequence: Synthetic oligonucleotide
  Sense strand starting at position 816 of SEQ ID NO: 588427
ccaggccauggcugauaua

SEQ ID NO: 864275 - RNA, 19 nt, Artificial Sequence
  Description of Artificial Sequence: Synthetic oligonucleotide
  Antisense strand to SEQ ID NO: 864274
uauaucagccauggccugg

SEQ ID NO: 864276 - RNA, 19 nt, Artificial Sequence
  Description of Artificial Sequence: Synthetic oligonucleotide
  Sense strand starting at position 827 of SEQ ID NO: 588427
cugauauagucacuauaug

SEQ ID NO: 864277 - RNA, 19 nt, Artificial Sequence
  Description of Artificial Sequence: Synthetic oligonucleotide
  Antisense strand to SEQ ID NO: 864276
cauauagugacuauaucag

SEQ ID NO: 864278 - RNA, 19 nt, Artificial Sequence
  Description of Artificial Sequence: Synthetic oligonucleotide
  Sense strand starting at position 828 of SEQ ID NO: 588427
ugauauagucacuauaugu

SEQ ID NO: 864279 - RNA, 19 nt, Artificial Sequence
  Description of Artificial Sequence: Synthetic oligonucleotide
  Antisense strand to SEQ ID NO: 864278
acauauagugacuauauca

SEQ ID NO: 864280 - RNA, 19 nt, Artificial Sequence
  Description of Artificial Sequence: Synthetic oligonucleotide
  Sense strand starting at position 837 of SEQ ID NO: 588427
cacuauauguguguaugga

SEQ ID NO: 864281 - RNA, 19 nt, Artificial Sequence
  Description of Artificial Sequence: Synthetic oligonucleotide
  Antisense strand to SEQ ID NO: 864280
uccauacacacauauagug

SEQ ID NO: 864282 - RNA, 19 nt, Artificial Sequence
  Description of Artificial Sequence: Synthetic oligonucleotide
  Sense strand starting at position 838 of SEQ ID NO: 588427
acuauauguguguauggaa

SEQ ID NO: 864283 - RNA, 19 nt, Artificial Sequence
  Description of Artificial Sequence: Synthetic oligonucleotide
  Antisense strand to SEQ ID NO: 864282
uuccauacacacauauagu

SEQ ID NO: 864284 - RNA, 19 nt, Artificial Sequence
  Description of Artificial Sequence: Synthetic oligonucleotide
  Sense strand starting at position 845 of SEQ ID NO: 588427
guguguauggaacaguaaa

SEQ ID NO: 864285 - RNA, 19 nt, Artificial Sequence
  Description of Artificial Sequence: Synthetic oligonucleotide
  Antisense strand to SEQ ID NO: 864284
uuuacuguuccauacacac

SEQ ID NO: 864286 - RNA, 19 nt, Artificial Sequence
  Description of Artificial Sequence: Synthetic oligonucleotide
  Sense strand starting at position 878 of SEQ ID NO: 588427
uuaccugugucauuuguag

SEQ ID NO: 864287 - RNA, 19 nt, Artificial Sequence
  Description of Artificial Sequence: Synthetic oligonucleotide
  Antisense strand to SEQ ID NO: 864286
cuacaaaugacacagguaa

SEQ ID NO: 864288 - RNA, 19 nt, Artificial Sequence
  Description of Artificial Sequence: Synthetic oligonucleotide
  Sense strand starting at position 1107 of SEQ ID NO: 588427
aguauuacaaguuguggaa

SEQ ID NO: 864289 - RNA, 19 nt, Artificial Sequence
  Description of Artificial Sequence: Synthetic oligonucleotide
  Antisense strand to SEQ ID NO: 864288
uuccacaacuuguaauacu

SEQ ID NO: 864290 - RNA, 19 nt, Artificial Sequence
  Description of Artificial Sequence: Synthetic oligonucleotide
  Sense strand starting at position 1137 of SEQ ID NO: 588427
aguauauuaucucuguuga

SEQ ID NO: 864291 - RNA, 19 nt, Artificial Sequence
  Description of Artificial Sequence: Synthetic oligonucleotide
  Antisense strand to SEQ ID NO: 864290
ucaacagagauaauauacu

SEQ ID NO: 864292 - RNA, 19 nt, Artificial Sequence
  Description of Artificial Sequence: Synthetic oligonucleotide
  Sense strand starting at position 1138 of SEQ ID NO: 588427
guauauuaucucuguugaa

SEQ ID NO: 864293 - RNA, 19 nt, Artificial Sequence
  Description of Artificial Sequence: Synthetic oligonucleotide
  Antisense strand to SEQ ID NO: 864292
uucaacagagauaauauac

SEQ ID NO: 864294 - RNA, 19 nt, Artificial Sequence
  Description of Artificial Sequence: Synthetic oligonucleotide
  Sense strand starting at position 1142 of SEQ ID NO: 588427
auuaucucuguugaaugau

SEQ ID NO: 864295 - RNA, 19 nt, Artificial Sequence
  Description of Artificial Sequence: Synthetic oligonucleotide
  Antisense strand to SEQ ID NO: 864294
aucauucaacagagauaau

SEQ ID NO: 864296 - RNA, 19 nt, Artificial Sequence
  Description of Artificial Sequence: Synthetic oligonucleotide
  Sense strand starting at position 1150 of SEQ ID NO: 588427
uguugaaugauagggugaa

SEQ ID NO: 864297 - RNA, 19 nt, Artificial Sequence
  Description of Artificial Sequence: Synthetic oligonucleotide
  Antisense strand to SEQ ID NO: 864296
uucacccuaucauucaaca

SEQ ID NO: 864298 - RNA, 19 nt, Artificial Sequence
  Description of Artificial Sequence: Synthetic oligonucleotide
  Sense strand starting at position 1162 of SEQ ID NO: 588427
gggugaauguaaucaguuc

SEQ ID NO: 864299 - RNA, 19 nt, Artificial Sequence
  Description of Artificial Sequence: Synthetic oligonucleotide
  Antisense strand to SEQ ID NO: 864298
gaacugauuacauucaccc

SEQ ID NO: 864300 - RNA, 19 nt, Artificial Sequence
  Description of Artificial Sequence: Synthetic oligonucleotide
  Sense strand starting at position 1163 of SEQ ID NO: 588427
ggugaauguaaucaguucu

SEQ ID NO: 864301 - RNA, 19 nt, Artificial Sequence
  Description of Artificial Sequence: Synthetic oligonucleotide
  Antisense strand to SEQ ID NO: 864300
agaacugauuacauucacc

SEQ ID NO: 864302 - RNA, 19 nt, Artificial Sequence
  Description of Artificial Sequence: Synthetic oligonucleotide
  Sense strand starting at position 1189 of SEQ ID NO: 588427
cuauguucuggacacgcua

SEQ ID NO: 864303 - RNA, 19 nt, Artificial Sequence
  Description of Artificial Sequence: Synthetic oligonucleotide
  Antisense strand to SEQ ID NO: 864302
uagcguguccagaacauag

SEQ ID NO: 864304 - RNA, 19 nt, Artificial Sequence
  Description of Artificial Sequence: Synthetic oligonucleotide
  Sense strand starting at position 1337 of SEQ ID NO: 588427
gauuauugccgguaucuua

SEQ ID NO: 864305 - RNA, 19 nt, Artificial Sequence
  Description of Artificial Sequence: Synthetic oligonucleotide
  Antisense strand to SEQ ID NO: 864304
uaagauaccggcaauaauc

SEQ ID NO: 864306 - RNA, 19 nt, Artificial Sequence
  Description of Artificial Sequence: Synthetic oligonucleotide
  Sense strand starting at position 1432 of SEQ ID NO: 588427
gccaguuguggcguuagca

SEQ ID NO: 864307 - RNA, 19 nt, Artificial Sequence
  Description of Artificial Sequence: Synthetic oligonucleotide
  Antisense strand to SEQ ID NO: 864306
ugcuaacgccacaacuggc

SEQ ID NO: 864308 - RNA, 19 nt, Artificial Sequence
  Description of Artificial Sequence: Synthetic oligonucleotide
  Sense strand starting at position 2076 of SEQ ID NO: 588427
cucuuugaguuaucaagau

SEQ ID NO: 864309 - RNA, 19 nt, Artificial Sequence
  Description of Artificial Sequence: Synthetic oligonucleotide
  Antisense strand to SEQ ID NO: 864308
aucuugauaacucaaagag

SEQ ID NO: 864310 - RNA, 19 nt, Artificial Sequence
  Description of Artificial Sequence: Synthetic oligonucleotide
  Sense strand starting at position 2290 of SEQ ID NO: 588427
guuuauguagacugcagaa

SEQ ID NO: 864311 - RNA, 19 nt, Artificial Sequence
  Description of Artificial Sequence: Synthetic oligonucleotide
  Antisense strand to SEQ ID NO: 864310
uucugcagucuacauaaac

SEQ ID NO: 864312 - RNA, 19 nt, Artificial Sequence
  Description of Artificial Sequence: Synthetic oligonucleotide
  Sense strand starting at position 2292 of SEQ ID NO: 588427
uuauguagacugcagaauu

SEQ ID NO: 864313 - RNA, 19 nt, Artificial Sequence
  Description of Artificial Sequence: Synthetic oligonucleotide
  Antisense strand to SEQ ID NO: 864312
aauucugcagucuacauaa

SEQ ID NO: 864314 - RNA, 19 nt, Artificial Sequence
  Description of Artificial Sequence: Synthetic oligonucleotide
  Sense strand starting at position 2306 of SEQ ID NO: 588427
gaauuaguauugguccuca

SEQ ID NO: 864315 - RNA, 19 nt, Artificial Sequence
  Description of Artificial Sequence: Synthetic oligonucleotide
  Antisense strand to SEQ ID NO: 864314
ugaggaccaauacuaauuc

SEQ ID NO: 864316 - RNA, 19 nt, Artificial Sequence
  Description of Artificial Sequence: Synthetic oligonucleotide
  Sense strand starting at position 2317 of SEQ ID NO: 588427
gguccucaccuggaagguu

SEQ ID NO: 864317 - RNA, 19 nt, Artificial Sequence
  Description of Artificial Sequence: Synthetic oligonucleotide
  Antisense strand to SEQ ID NO: 864316
aaccuuccaggugaggacc

SEQ ID NO: 864318 - RNA, 19 nt, Artificial Sequence
  Description of Artificial Sequence: Synthetic oligonucleotide
  Sense strand starting at position 2340 of SEQ ID NO: 588427
aagcaugucuuaccgaaca

SEQ ID NO: 864319 - RNA, 19 nt, Artificial Sequence
  Description of Artificial Sequence: Synthetic oligonucleotide
  Antisense strand to SEQ ID NO: 864318
uguucgguaagacaugcuu

SEQ ID NO: 864320 - RNA, 19 nt, Artificial Sequence
  Description of Artificial Sequence: Synthetic oligonucleotide
  Sense strand starting at position 2370 of SEQ ID NO: 588427
cccuaaacugggugucauu

SEQ ID NO: 864321 - RNA, 19 nt, Artificial Sequence
  Description of Artificial Sequence: Synthetic oligonucleotide
  Antisense strand to SEQ ID NO: 864320
aaugacacccaguuuaggg

SEQ ID NO: 864322 - RNA, 19 nt, Artificial Sequence
  Description of Artificial Sequence: Synthetic oligonucleotide
  Sense strand starting at position 2649 of SEQ ID NO: 588427
gagcuuggacugggucaua

SEQ ID NO: 864323 - RNA, 19 nt, Artificial Sequence
  Description of Artificial Sequence: Synthetic oligonucleotide
  Antisense strand to SEQ ID NO: 864322
uaugacccaguccaagcuc

SEQ ID NO: 864324 - RNA, 19 nt, Artificial Sequence
  Description of Artificial Sequence: Synthetic oligonucleotide
  Sense strand starting at position 2932 of SEQ ID NO: 588427
ugcauuuauuguguccauu

SEQ ID NO: 864325 - RNA, 19 nt, Artificial Sequence
  Description of Artificial Sequence: Synthetic oligonucleotide
  Antisense strand to SEQ ID NO: 864324
aauggacacaauaaaugca

SEQ ID NO: 864326 - RNA, 19 nt, Artificial Sequence
  Description of Artificial Sequence: Synthetic oligonucleotide
  Sense strand starting at position 3083 of SEQ ID NO: 588427
gugucuuaugccuagaaca

SEQ ID NO: 864327 - RNA, 19 nt, Artificial Sequence
  Description of Artificial Sequence: Synthetic oligonucleotide
  Antisense strand to SEQ ID NO: 864326
uguucuaggcauaagacac

SEQ ID NO: 864328 - RNA, 19 nt, Artificial Sequence
  Description of Artificial Sequence: Synthetic oligonucleotide
  Sense strand starting at position 3085 of SEQ ID NO: 588427
gucuuaugccuagaacaau

SEQ ID NO: 864329 - RNA, 19 nt, Artificial Sequence
  Description of Artificial Sequence: Synthetic oligonucleotide
  Antisense strand to SEQ ID NO: 864328
auuguucuaggcauaagac

SEQ ID NO: 864330 - RNA, 19 nt, Artificial Sequence
  Description of Artificial Sequence: Synthetic oligonucleotide
  Sense strand starting at position 3111 of SEQ ID NO: 588427
uuccauacauguuuauuga

SEQ ID NO: 864331 - RNA, 19 nt, Artificial Sequence
  Description of Artificial Sequence: Synthetic oligonucleotide
  Antisense strand to SEQ ID NO: 864330
ucaauaaacauguauggaa

SEQ ID NO: 864332 - RNA, 19 nt, Artificial Sequence
  Description of Artificial Sequence: Synthetic oligonucleotide
  Sense strand starting at position 3278 of SEQ ID NO: 588427
agaaaugauucguucccuu

SEQ ID NO: 864333 - RNA, 19 nt, Artificial Sequence
  Description of Artificial Sequence: Synthetic oligonucleotide
  Antisense strand to SEQ ID NO: 864332
aagggaacgaaucauuucu

SEQ ID NO: 864334 - RNA, 19 nt, Artificial Sequence
  Description of Artificial Sequence: Synthetic oligonucleotide
  Sense strand starting at position 3466 of SEQ ID NO: 588427
agcugaggucauuacacuu

SEQ ID NO: 864335 - RNA, 19 nt, Artificial Sequence
  Description of Artificial Sequence: Synthetic oligonucleotide
  Antisense strand to SEQ ID NO: 864334
aaguguaaugaccucagcu

SEQ ID NO: 864336 - RNA, 19 nt, Artificial Sequence
  Description of Artificial Sequence: Synthetic oligonucleotide
  Sense strand starting at position 3635 of SEQ ID NO: 588427
agauguuuccaacagaugu

SEQ ID NO: 864337 - RNA, 19 nt, Artificial Sequence
  Description of Artificial Sequence: Synthetic oligonucleotide
  Antisense strand to SEQ ID NO: 864336
acaucuguuggaaacaucu

SEQ ID NO: 864338 - RNA, 19 nt, Artificial Sequence
  Description of Artificial Sequence: Synthetic oligonucleotide
  Sense strand starting at position 238 of SEQ ID NO: 588428
gucauuuagccauguggca

SEQ ID NO: 864339 - RNA, 19 nt, Artificial Sequence
  Description of Artificial Sequence: Synthetic oligonucleotide
  Antisense strand to SEQ ID NO: 864338
ugccacauggcuaaaugac

SEQ ID NO: 864340 - RNA, 19 nt, Artificial Sequence
  Description of Artificial Sequence: Synthetic oligonucleotide
  Sense strand starting at position 296 of SEQ ID NO: 588428
uugacuugaugcuuauaua

SEQ ID NO: 864341 - RNA, 19 nt, Artificial Sequence
  Description of Artificial Sequence: Synthetic oligonucleotide
  Antisense strand to SEQ ID NO: 864340
uauauaagcaucaagucaa

SEQ ID NO: 864342 - RNA, 19 nt, Artificial Sequence
  Description of Artificial Sequence: Synthetic oligonucleotide
  Sense strand starting at position 297 of SEQ ID NO: 588428
ugacuugaugcuuauauag

SEQ ID NO: 864343 - RNA, 19 nt, Artificial Sequence
  Description of Artificial Sequence: Synthetic oligonucleotide
  Antisense strand to SEQ ID NO: 864342
cuauauaagcaucaaguca

SEQ ID NO: 864344 - RNA, 19 nt, Artificial Sequence
  Description of Artificial Sequence: Synthetic oligonucleotide
  Sense strand starting at position 712 of SEQ ID NO: 588428
cucucaucuguggaagauc

SEQ ID NO: 864345 - RNA, 19 nt, Artificial Sequence
  Description of Artificial Sequence: Synthetic oligonucleotide
  Antisense strand to SEQ ID NO: 864344
gaucuuccacagaugagag

SEQ ID NO: 864346 - RNA, 19 nt, Artificial Sequence
  Description of Artificial Sequence: Synthetic oligonucleotide
  Sense strand starting at position 764 of SEQ ID NO: 588428
caaccuuguugaguuauga

SEQ ID NO: 864347 - RNA, 19 nt, Artificial Sequence
  Description of Artificial Sequence: Synthetic oligonucleotide
  Antisense strand to SEQ ID NO: 864346
ucauaacucaacaagguug

SEQ ID NO: 864348 - RNA, 19 nt, Artificial Sequence
  Description of Artificial Sequence: Synthetic oligonucleotide
  Sense strand starting at position 829 of SEQ ID NO: 588428
ucagcaguuuacuuaggau

SEQ ID NO: 864349 - RNA, 19 nt, Artificial Sequence
  Description of Artificial Sequence: Synthetic oligonucleotide
  Antisense strand to SEQ ID NO: 864348
auccuaaguaaacugcuga

SEQ ID NO: 864350 - RNA, 19 nt, Artificial Sequence
  Description of Artificial Sequence: Synthetic oligonucleotide
  Sense strand starting at position 856 of SEQ ID NO: 588428
uuaggauaauugucuguau

SEQ ID NO: 864351 - RNA, 19 nt, Artificial Sequence
  Description of Artificial Sequence: Synthetic oligonucleotide
  Antisense strand to SEQ ID NO: 864350
auacagacaauuauccuaa

SEQ ID NO: 864352 - RNA, 19 nt, Artificial Sequence
  Description of Artificial Sequence: Synthetic oligonucleotide
  Sense strand starting at position 857 of SEQ ID NO: 588428
uaggauaauugucuguauu

SEQ ID NO: 864353 - RNA, 19 nt, Artificial Sequence
  Description of Artificial Sequence: Synthetic oligonucleotide
  Antisense strand to SEQ ID NO: 864352
aauacagacaauuauccua

SEQ ID NO: 864354 - RNA, 19 nt, Artificial Sequence
  Description of Artificial Sequence: Synthetic oligonucleotide
  Sense strand starting at position 1123 of SEQ ID NO: 588428
gauugagaagucuacguuc

SEQ ID NO: 864355 - RNA, 19 nt, Artificial Sequence
  Description of Artificial Sequence: Synthetic oligonucleotide
  Antisense strand to SEQ ID NO: 864354
gaacguagacuucucaauc

SEQ ID NO: 864356 - RNA, 19 nt, Artificial Sequence
  Description of Artificial Sequence: Synthetic oligonucleotide
  Sense strand starting at position 1158 of SEQ ID NO: 588428
ccaggaggaugucugagua

SEQ ID NO: 864357 - RNA, 19 nt, Artificial Sequence
  Description of Artificial Sequence: Synthetic oligonucleotide
  Antisense strand to SEQ ID NO: 864356
uacucagacauccuccugg

SEQ ID NO: 864358 - RNA, 19 nt, Artificial Sequence
  Description of Artificial Sequence: Synthetic oligonucleotide
  Sense strand starting at position 1162 of SEQ ID NO: 588428
gaggaugucugaguaagug

SEQ ID NO: 864359 - RNA, 19 nt, Artificial Sequence
  Description of Artificial Sequence: Synthetic oligonucleotide
  Antisense strand to SEQ ID NO: 864358
cacuuacucagacauccuc

SEQ ID NO: 864360 - RNA, 19 nt, Artificial Sequence
  Description of Artificial Sequence: Synthetic oligonucleotide
  Sense strand starting at position 1172 of SEQ ID NO: 588428
gaguaagugccacagaauu

SEQ ID NO: 864361 - RNA, 19 nt, Artificial Sequence
  Description of Artificial Sequence: Synthetic oligonucleotide
  Antisense strand to SEQ ID NO: 864360
aauucuguggcacuuacuc

SEQ ID NO: 864362 - RNA, 19 nt, Artificial Sequence
  Description of Artificial Sequence: Synthetic oligonucleotide
  Sense strand starting at position 1205 of SEQ ID NO: 588428
acucuauaaugggucaacu

SEQ ID NO: 864363 - RNA, 19 nt, Artificial Sequence
  Description of Artificial Sequence: Synthetic oligonucleotide
  Antisense strand to SEQ ID NO: 864362
aguugacccauuauagagu

SEQ ID NO: 864364 - RNA, 19 nt, Artificial Sequence
  Description of Artificial Sequence: Synthetic oligonucleotide
  Sense strand starting at position 1276 of SEQ ID NO: 588428
auccguauaucauuggauu

SEQ ID NO: 864365 - RNA, 19 nt, Artificial Sequence
  Description of Artificial Sequence: Synthetic oligonucleotide
  Antisense strand to SEQ ID NO: 864364
aauccaaugauauacggau

SEQ ID NO: 864366 - RNA, 19 nt, Artificial Sequence
  Description of Artificial Sequence: Synthetic oligonucleotide
  Sense strand starting at position 1278 of SEQ ID NO: 588428
ccguauaucauuggauuga

SEQ ID NO: 864367 - RNA, 19 nt, Artificial Sequence
  Description of Artificial Sequence: Synthetic oligonucleotide
  Antisense strand to SEQ ID NO: 864366
ucaauccaaugauauacgg

SEQ ID NO: 864368 - RNA, 19 nt, Artificial Sequence
  Description of Artificial Sequence: Synthetic oligonucleotide
  Sense strand starting at position 1378 of SEQ ID NO: 588428
ugagcuguuccauaacccu

SEQ ID NO: 864369 - RNA, 19 nt, Artificial Sequence
  Description of Artificial Sequence: Synthetic oligonucleotide
  Antisense strand to SEQ ID NO: 864368
aggguuauggaacagcuca

SEQ ID NO: 864370 - RNA, 19 nt, Artificial Sequence
  Description of Artificial Sequence: Synthetic oligonucleotide
  Sense strand starting at position 1603 of SEQ ID NO: 588428
ugugauauaccagguccau

SEQ ID NO: 864371 - RNA, 19 nt, Artificial Sequence
  Description of Artificial Sequence: Synthetic oligonucleotide
  Antisense strand to SEQ ID NO: 864370
auggaccugguauaucaca

SEQ ID NO: 864372 - RNA, 19 nt, Artificial Sequence
  Description of Artificial Sequence: Synthetic oligonucleotide
  Sense strand starting at position 1691 of SEQ ID NO: 588428
ugugguacucaguauggau

SEQ ID NO: 864373 - RNA, 19 nt, Artificial Sequence
  Description of Artificial Sequence: Synthetic oligonucleotide
  Antisense strand to SEQ ID NO: 864372
auccauacugaguaccaca

SEQ ID NO: 864374 - RNA, 19 nt, Artificial Sequence
  Description of Artificial Sequence: Synthetic oligonucleotide
  Sense strand starting at position 2410 of SEQ ID NO: 588428
cuacauauaguagguuuau

SEQ ID NO: 864375 - RNA, 19 nt, Artificial Sequence
  Description of Artificial Sequence: Synthetic oligonucleotide
  Antisense strand to SEQ ID NO: 864374
auaaaccuacuauauguag

SEQ ID NO: 864376 - RNA, 19 nt, Artificial Sequence
  Description of Artificial Sequence: Synthetic oligonucleotide
  Sense strand starting at position 2422 of SEQ ID NO: 588428
gguuuauuggccuacauau

SEQ ID NO: 864377 - RNA, 19 nt, Artificial Sequence
  Description of Artificial Sequence: Synthetic oligonucleotide
  Antisense strand to SEQ ID NO: 864376
auauguaggccaauaaacc

SEQ ID NO: 864378 - RNA, 19 nt, Artificial Sequence
  Description of Artificial Sequence: Synthetic oligonucleotide
  Sense strand starting at position 2461 of SEQ ID NO: 588428
agcuaauuggccuaaguau

SEQ ID NO: 864379 - RNA, 19 nt, Artificial Sequence
  Description of Artificial Sequence: Synthetic oligonucleotide
  Antisense strand to SEQ ID NO: 864378
auacuuaggccaauuagcu

SEQ ID NO: 864380 - RNA, 19 nt, Artificial Sequence
  Description of Artificial Sequence: Synthetic oligonucleotide
  Sense strand starting at position 2478 of SEQ ID NO: 588428
auguuagcuuucucagaaa

SEQ ID NO: 864381 - RNA, 19 nt, Artificial Sequence
  Description of Artificial Sequence: Synthetic oligonucleotide
  Antisense strand to SEQ ID NO: 864380
uuucugagaaagcuaacau

SEQ ID NO: 864382 - RNA, 19 nt, Artificial Sequence
  Description of Artificial Sequence: Synthetic oligonucleotide
  Sense strand starting at position 3057 of SEQ ID NO: 588428
aggauauaccucugaauuc

SEQ ID NO: 864383 - RNA, 19 nt, Artificial Sequence
  Description of Artificial Sequence: Synthetic oligonucleotide
  Antisense strand to SEQ ID NO: 864382
gaauucagagguauauccu

SEQ ID NO: 864384 - RNA, 19 nt, Artificial Sequence
  Description of Artificial Sequence: Synthetic oligonucleotide
  Sense strand starting at position 3146 of SEQ ID NO: 588428
acuugagacucugucugaa

SEQ ID NO: 864385 - RNA, 19 nt, Artificial Sequence
  Description of Artificial Sequence: Synthetic oligonucleotide
  Antisense strand to SEQ ID NO: 864384
uucagacagagucucaagu

SEQ ID NO: 864386 - RNA, 19 nt, Artificial Sequence
  Description of Artificial Sequence: Synthetic oligonucleotide
  Sense strand starting at position 3165 of SEQ ID NO: 588428
gcugccugcauuugaagau

SEQ ID NO: 864387 - RNA, 19 nt, Artificial Sequence
  Description of Artificial Sequence: Synthetic oligonucleotide
  Antisense strand to SEQ ID NO: 864386
aucuucaaaugcaggcagc

SEQ ID NO: 864388 - RNA, 19 nt, Artificial Sequence
  Description of Artificial Sequence: Synthetic oligonucleotide
  Sense strand starting at position 3220 of SEQ ID NO: 588428
aggucaccaagaugugaaa

SEQ ID NO: 864389 - RNA, 19 nt, Artificial Sequence
  Description of Artificial Sequence: Synthetic oligonucleotide
  Antisense strand to SEQ ID NO: 864388
uuucacaucuuggugaccu

SEQ ID NO: 864390 - RNA, 19 nt, Artificial Sequence
  Description of Artificial Sequence: Synthetic oligonucleotide
  Sense strand starting at position 3255 of SEQ ID NO: 588428
ccaguucugagagaugguu

SEQ ID NO: 864391 - RNA, 19 nt, Artificial Sequence
  Description of Artificial Sequence: Synthetic oligonucleotide
  Antisense strand to SEQ ID NO: 864390
aaccaucucucagaacugg

SEQ ID NO: 864392 - RNA, 19 nt, Artificial Sequence
  Description of Artificial Sequence: Synthetic oligonucleotide
  Sense strand starting at position 3263 of SEQ ID NO: 588428
gagagaugguuuccauggu

SEQ ID NO: 864393 - RNA, 19 nt, Artificial Sequence
  Description of Artificial Sequence: Synthetic oligonucleotide
  Antisense strand to SEQ ID NO: 864392
accauggaaaccaucucuc

SEQ ID NO: 864394 - RNA, 19 nt, Artificial Sequence
  Description of Artificial Sequence: Synthetic oligonucleotide
  Sense strand starting at position 3354 of SEQ ID NO: 588428
acuaguucugggcauucua

SEQ ID NO: 864395 - RNA, 19 nt, Artificial Sequence
  Description of Artificial Sequence: Synthetic oligonucleotide
  Antisense strand to SEQ ID NO: 864394
uagaaugcccagaacuagu

SEQ ID NO: 864396 - RNA, 19 nt, Artificial Sequence
  Description of Artificial Sequence: Synthetic oligonucleotide
  Sense strand starting at position 3368 of SEQ ID NO: 588428
uucuaauggcucugaacac

SEQ ID NO: 864397 - RNA, 19 nt, Artificial Sequence
  Description of Artificial Sequence: Synthetic oligonucleotide
  Antisense strand to SEQ ID NO: 864396
guguucagagccauuagaa

SEQ ID NO: 864398 - RNA, 19 nt, Artificial Sequence
  Description of Artificial Sequence: Synthetic oligonucleotide
  Sense strand starting at position 3410 of SEQ ID NO: 588428
ccgguuacucucuaauaac

SEQ ID NO: 864399 - RNA, 19 nt, Artificial Sequence
  Description of Artificial Sequence: Synthetic oligonucleotide
  Antisense strand to SEQ ID NO: 864398
guuauuagagaguaaccgg

SEQ ID NO: 864400 - RNA, 19 nt, Artificial Sequence
  Description of Artificial Sequence: Synthetic oligonucleotide
  Sense strand starting at position 3549 of SEQ ID NO: 588428
augacuauuccuuaaguug

SEQ ID NO: 864401 - RNA, 19 nt, Artificial Sequence
  Description of Artificial Sequence: Synthetic oligonucleotide
  Antisense strand to SEQ ID NO: 864400
caacuuaaggaauagucau

SEQ ID NO: 864402 - RNA, 19 nt, Artificial Sequence
  Description of Artificial Sequence: Synthetic oligonucleotide
  Sense strand starting at position 3552 of SEQ ID NO: 588428
acuauuccuuaaguugaga

SEQ ID NO: 864403 - RNA, 19 nt, Artificial Sequence
  Description of Artificial Sequence: Synthetic oligonucleotide
  Antisense strand to SEQ ID NO: 864402
ucucaacuuaaggaauagu

SEQ ID NO: 864404 - RNA, 19 nt, Artificial Sequence
  Description of Artificial Sequence: Synthetic oligonucleotide
  Sense strand starting at position 3567 of SEQ ID NO: 588428
gagaaagaguacuuugugu

SEQ ID NO: 864405 - RNA, 19 nt, Artificial Sequence
  Description of Artificial Sequence: Synthetic oligonucleotide
  Antisense strand to SEQ ID NO: 864404
acacaaaguacucuuucuc

SEQ ID NO: 864406 - RNA, 19 nt, Artificial Sequence
  Description of Artificial Sequence: Synthetic oligonucleotide
  Sense strand starting at position 3603 of SEQ ID NO: 588428
gcauguucuagauggacaa

SEQ ID NO: 864407 - RNA, 19 nt, Artificial Sequence
  Description of Artificial Sequence: Synthetic oligonucleotide
  Antisense strand to SEQ ID NO: 864406
uuguccaucuagaacaugc

SEQ ID NO: 864408 - RNA, 19 nt, Artificial Sequence
  Description of Artificial Sequence: Synthetic oligonucleotide
  Sense strand starting at position 3624 of SEQ ID NO: 588428
gcucuuaggguacaguuua

SEQ ID NO: 864409 - RNA, 19 nt, Artificial Sequence
  Description of Artificial Sequence: Synthetic oligonucleotide
  Antisense strand to SEQ ID NO: 864408
uaaacuguacccuaagagc

SEQ ID NO: 864410 - RNA, 19 nt, Artificial Sequence
  Description of Artificial Sequence: Synthetic oligonucleotide
  Sense strand starting at position 3691 of SEQ ID NO: 588428
ugugucuaugucuacagaa

SEQ ID NO: 864411 - RNA, 19 nt, Artificial Sequence
  Description of Artificial Sequence: Synthetic oligonucleotide
  Antisense strand to SEQ ID NO: 864410
uucuguagacauagacaca

SEQ ID NO: 864412 - RNA, 19 nt, Artificial Sequence
  Description of Artificial Sequence: Synthetic oligonucleotide
  Sense strand starting at position 3720 of SEQ ID NO: 588428
cgaaacauugcaugacaca

SEQ ID NO: 864413 - RNA, 19 nt, Artificial Sequence
  Description of Artificial Sequence: Synthetic oligonucleotide
  Antisense strand to SEQ ID NO: 864412
ugugucaugcaauguuucg

SEQ ID NO: 864414 - RNA, 19 nt, Artificial Sequence
  Description of Artificial Sequence: Synthetic oligonucleotide
  Sense strand starting at position 3854 of SEQ ID NO: 588428
ggcccauuacuagaguacu

SEQ ID NO: 864415 - RNA, 19 nt, Artificial Sequence
  Description of Artificial Sequence: Synthetic oligonucleotide
  Antisense strand to SEQ ID NO: 864414
aguacucuaguaaugggcc

SEQ ID NO: 864416 - RNA, 19 nt, Artificial Sequence
  Description of Artificial Sequence: Synthetic oligonucleotide
  Sense strand starting at position 3868 of SEQ ID NO: 588428
guacuaauagaaugucagu

SEQ ID NO: 864417 - RNA, 19 nt, Artificial Sequence
  Description of Artificial Sequence: Synthetic oligonucleotide
  Antisense strand to SEQ ID NO: 864416
acugacauucuauuaguac

SEQ ID NO: 864418 - RNA, 19 nt, Artificial Sequence
  Description of Artificial Sequence: Synthetic oligonucleotide
  Sense strand starting at position 36 of SEQ ID NO: 588429
ggaaguuacuguguaauag

SEQ ID NO: 864419 - RNA, 19 nt, Artificial Sequence
  Description of Artificial Sequence: Synthetic oligonucleotide
  Antisense strand to SEQ ID NO: 864418
cuauuacacaguaacuucc

SEQ ID NO: 864420 - RNA, 19 nt, Artificial Sequence
  Description of Artificial Sequence: Synthetic oligonucleotide
  Sense strand starting at position 37 of SEQ ID NO: 588429
gaaguuacuguguaauagg

SEQ ID NO: 864421 - RNA, 19 nt, Artificial Sequence
  Description of Artificial Sequence: Synthetic oligonucleotide
  Antisense strand to SEQ ID NO: 864420
ccuauuacacaguaacuuc

SEQ ID NO: 864422 - RNA, 19 nt, Artificial Sequence
  Description of Artificial Sequence: Synthetic oligonucleotide
  Sense strand starting at position 44 of SEQ ID NO: 588429
cuguguaauagguaugaag

SEQ ID NO: 864423 - RNA, 19 nt, Artificial Sequence
  Description of Artificial Sequence: Synthetic oligonucleotide
  Antisense strand to SEQ ID NO: 864422
cuucauaccuauuacacag

SEQ ID NO: 864424 - RNA, 19 nt, Artificial Sequence
  Description of Artificial Sequence: Synthetic oligonucleotide
  Sense strand starting at position 46 of SEQ ID NO: 588429
guguaauagguaugaaguu

SEQ ID NO: 864425 - RNA, 19 nt, Artificial Sequence
  Description of Artificial Sequence: Synthetic oligonucleotide
  Antisense strand to SEQ ID NO: 864424
aacuucauaccuauuacac

SEQ ID NO: 864426 - RNA, 19 nt, Artificial Sequence
  Description of Artificial Sequence: Synthetic oligonucleotide
  Sense strand starting at position 141 of SEQ ID NO: 588429
cauugaaugguacgcuuga

SEQ ID NO: 864427 - RNA, 19 nt, Artificial Sequence
  Description of Artificial Sequence: Synthetic oligonucleotide
  Antisense strand to SEQ ID NO: 864426
ucaagcguaccauucaaug

SEQ ID NO: 864428 - RNA, 19 nt, Artificial Sequence
  Description of Artificial Sequence: Synthetic oligonucleotide
  Sense strand starting at position 142 of SEQ ID NO: 588429
auugaaugguacgcuugaa

SEQ ID NO: 864429 - RNA, 19 nt, Artificial Sequence
  Description of Artificial Sequence: Synthetic oligonucleotide
  Antisense strand to SEQ ID NO: 864428
uucaagcguaccauucaau

SEQ ID NO: 864430 - RNA, 19 nt, Artificial Sequence
  Description of Artificial Sequence: Synthetic oligonucleotide
  Sense strand starting at position 268 of SEQ ID NO: 588429
cucccauuggcuugaauuc

SEQ ID NO: 864431 - RNA, 19 nt, Artificial Sequence
  Description of Artificial Sequence: Synthetic oligonucleotide
  Antisense strand to SEQ ID NO: 864430
gaauucaagccaaugggag

SEQ ID NO: 864432 - RNA, 19 nt, Artificial Sequence
  Description of Artificial Sequence: Synthetic oligonucleotide
  Sense strand starting at position 275 of SEQ ID NO: 588429
uggcuugaauuccuggcaa

SEQ ID NO: 864433 - RNA, 19 nt, Artificial Sequence
  Description of Artificial Sequence: Synthetic oligonucleotide
  Antisense strand to SEQ ID NO: 864432
uugccaggaauucaagcca

SEQ ID NO: 864434 - RNA, 19 nt, Artificial Sequence
  Description of Artificial Sequence: Synthetic oligonucleotide
  Sense strand starting at position 350 of SEQ ID NO: 588429
caaccaagggucuggauau

SEQ ID NO: 864435 - RNA, 19 nt, Artificial Sequence
  Description of Artificial Sequence: Synthetic oligonucleotide
  Antisense strand to SEQ ID NO: 864434
auauccagacccuugguug

SEQ ID NO: 864436 - RNA, 19 nt, Artificial Sequence
  Description of Artificial Sequence: Synthetic oligonucleotide
  Sense strand starting at position 381 of SEQ ID NO: 588429
agugaagaaucccauuuga

SEQ ID NO: 864437 - RNA, 19 nt, Artificial Sequence
  Description of Artificial Sequence: Synthetic oligonucleotide
  Antisense strand to SEQ ID NO: 864436
ucaaaugggauucuucacu

SEQ ID NO: 864438 - RNA, 19 nt, Artificial Sequence
  Description of Artificial Sequence: Synthetic oligonucleotide
  Sense strand starting at position 414 of SEQ ID NO: 588429
cugggugaucuggagccau

SEQ ID NO: 864439 - RNA, 19 nt, Artificial Sequence
  Description of Artificial Sequence: Synthetic oligonucleotide
  Antisense strand to SEQ ID NO: 864438
auggcuccagaucacccag

SEQ ID NO: 864440 - RNA, 19 nt, Artificial Sequence
  Description of Artificial Sequence: Synthetic oligonucleotide
  Sense strand starting at position 425 of SEQ ID NO: 588429
ggagccaucuggucccaga

SEQ ID NO: 864441 - RNA, 19 nt, Artificial Sequence
  Description of Artificial Sequence: Synthetic oligonucleotide
  Antisense strand to SEQ ID NO: 864440
ucugggaccagauggcucc

SEQ ID NO: 864442 - RNA, 19 nt, Artificial Sequence
  Description of Artificial Sequence: Synthetic oligonucleotide
  Sense strand starting at position 456 of SEQ ID NO: 588429
ccuuguacuguccaauaag

SEQ ID NO: 864443 - RNA, 19 nt, Artificial Sequence
  Description of Artificial Sequence: Synthetic oligonucleotide
  Antisense strand to SEQ ID NO: 864442
cuuauuggacaguacaagg

SEQ ID NO: 864444 - RNA, 19 nt, Artificial Sequence
  Description of Artificial Sequence: Synthetic oligonucleotide
  Sense strand starting at position 459 of SEQ ID NO: 588429
uguacuguccaauaagauu

SEQ ID NO: 864445 - RNA, 19 nt, Artificial Sequence
  Description of Artificial Sequence: Synthetic oligonucleotide
  Antisense strand to SEQ ID NO: 864444
aaucuuauuggacaguaca

SEQ ID NO: 864446 - RNA, 19 nt, Artificial Sequence
  Description of Artificial Sequence: Synthetic oligonucleotide
  Sense strand starting at position 564 of SEQ ID NO: 588429
agguauagcucuccaaugu

SEQ ID NO: 864447 - RNA, 19 nt, Artificial Sequence
  Description of Artificial Sequence: Synthetic oligonucleotide
  Antisense strand to SEQ ID NO: 864446
acauuggagagcuauaccu

SEQ ID NO: 864448 - RNA, 19 nt, Artificial Sequence
  Description of Artificial Sequence: Synthetic oligonucleotide
  Sense strand starting at position 565 of SEQ ID NO: 588429
gguauagcucuccaauguu

SEQ ID NO: 864449 - RNA, 19 nt, Artificial Sequence
  Description of Artificial Sequence: Synthetic oligonucleotide
  Antisense strand to SEQ ID NO: 864448
aacauuggagagcuauacc

SEQ ID NO: 864450 - RNA, 19 nt, Artificial Sequence
  Description of Artificial Sequence: Synthetic oligonucleotide
  Sense strand starting at position 605 of SEQ ID NO: 588429
agaccaaacucugacagaa

SEQ ID NO: 864451 - RNA, 19 nt, Artificial Sequence
  Description of Artificial Sequence: Synthetic oligonucleotide
  Antisense strand to SEQ ID NO: 864450
uucugucagaguuuggucu

SEQ ID NO: 864452 - RNA, 19 nt, Artificial Sequence
  Description of Artificial Sequence: Synthetic oligonucleotide
  Sense strand starting at position 670 of SEQ ID NO: 588429
caauacuuccgaggacaag

SEQ ID NO: 864453 - RNA, 19 nt, Artificial Sequence
  Description of Artificial Sequence: Synthetic oligonucleotide
  Antisense strand to SEQ ID NO: 864452
cuuguccucggaaguauug

SEQ ID NO: 864454 - RNA, 19 nt, Artificial Sequence
  Description of Artificial Sequence: Synthetic oligonucleotide
  Sense strand starting at position 699 of SEQ ID NO: 588429
cuuugcuagacuuggaaga

SEQ ID NO: 864455 - RNA, 19 nt, Artificial Sequence
  Description of Artificial Sequence: Synthetic oligonucleotide
  Antisense strand to SEQ ID NO: 864454
ucuuccaagucuagcaaag

SEQ ID NO: 864456 - RNA, 19 nt, Artificial Sequence
  Description of Artificial Sequence: Synthetic oligonucleotide
  Sense strand starting at position 700 of SEQ ID NO: 588429
uuugcuagacuuggaagaa

SEQ ID NO: 864457 - RNA, 19 nt, Artificial Sequence
  Description of Artificial Sequence: Synthetic oligonucleotide
  Antisense strand to SEQ ID NO: 864456
uucuuccaagucuagcaaa

SEQ ID NO: 864458 - RNA, 19 nt, Artificial Sequence
  Description of Artificial Sequence: Synthetic oligonucleotide
  Sense strand starting at position 802 of SEQ ID NO: 588429
gacucaugcccacagauug

SEQ ID NO: 864459 - RNA, 19 nt, Artificial Sequence
  Description of Artificial Sequence: Synthetic oligonucleotide
  Antisense strand to SEQ ID NO: 864458
caaucugugggcaugaguc

SEQ ID NO: 864460 - RNA, 19 nt, Artificial Sequence
  Description of Artificial Sequence: Synthetic oligonucleotide
  Sense strand starting at position 812 of SEQ ID NO: 588429
cacagauuguaaucgaauu

SEQ ID NO: 864461 - RNA, 19 nt, Artificial Sequence
  Description of Artificial Sequence: Synthetic oligonucleotide
  Antisense strand to SEQ ID NO: 864460
aauucgauuacaaucugug

SEQ ID NO: 864462 - RNA, 19 nt, Artificial Sequence
  Description of Artificial Sequence: Synthetic oligonucleotide
  Sense strand starting at position 837 of SEQ ID NO: 588429
cuaagaacucgugaaagcu

SEQ ID NO: 864463 - RNA, 19 nt, Artificial Sequence
  Description of Artificial Sequence: Synthetic oligonucleotide
  Antisense strand to SEQ ID NO: 864462
agcuuucacgaguucuuag

SEQ ID NO: 864464 - RNA, 19 nt, Artificial Sequence
  Description of Artificial Sequence: Synthetic oligonucleotide
  Sense strand starting at position 847 of SEQ ID NO: 588429
gugaaagcucuggacuuuc

SEQ ID NO: 864465 - RNA, 19 nt, Artificial Sequence
  Description of Artificial Sequence: Synthetic oligonucleotide
  Antisense strand to SEQ ID NO: 864464
gaaaguccagagcuuucac

SEQ ID NO: 864466 - RNA, 19 nt, Artificial Sequence
  Description of Artificial Sequence: Synthetic oligonucleotide
  Sense strand starting at position 942 of SEQ ID NO: 588429
gagcaugucuccucagaug

SEQ ID NO: 864467 - RNA, 19 nt, Artificial Sequence
  Description of Artificial Sequence: Synthetic oligonucleotide
  Antisense strand to SEQ ID NO: 864466
caucugaggagacaugcuc

SEQ ID NO: 864468 - RNA, 19 nt, Artificial Sequence
  Description of Artificial Sequence: Synthetic oligonucleotide
  Sense strand starting at position 1471 of SEQ ID NO: 588429
ccaggaacuuuagucaagu

SEQ ID NO: 864469 - RNA, 19 nt, Artificial Sequence
  Description of Artificial Sequence: Synthetic oligonucleotide
  Antisense strand to SEQ ID NO: 864468
acuugacuaaaguuccugg

SEQ ID NO: 864470 - RNA, 19 nt, Artificial Sequence
  Description of Artificial Sequence: Synthetic oligonucleotide
  Sense strand starting at position 1480 of SEQ ID NO: 588429
uuagucaagucccuaaagu

SEQ ID NO: 864471 - RNA, 19 nt, Artificial Sequence
  Description of Artificial Sequence: Synthetic oligonucleotide
  Antisense strand to SEQ ID NO: 864470
acuuuagggacuugacuaa

SEQ ID NO: 864472 - RNA, 19 nt, Artificial Sequence
  Description of Artificial Sequence: Synthetic oligonucleotide
  Sense strand starting at position 1580 of SEQ ID NO: 588429
cuggguuguggguaugacu

SEQ ID NO: 864473 - RNA, 19 nt, Artificial Sequence
  Description of Artificial Sequence: Synthetic oligonucleotide
  Antisense strand to SEQ ID NO: 864472
agucauacccacaacccag

SEQ ID NO: 864474 - RNA, 19 nt, Artificial Sequence
  Description of Artificial Sequence: Synthetic oligonucleotide
  Sense strand starting at position 1669 of SEQ ID NO: 588429
gcgcaauuccuagcacagu

SEQ ID NO: 864475 - RNA, 19 nt, Artificial Sequence
  Description of Artificial Sequence: Synthetic oligonucleotide
  Antisense strand to SEQ ID NO: 864474
acugugcuaggaauugcgc

SEQ ID NO: 864476 - RNA, 19 nt, Artificial Sequence
  Description of Artificial Sequence: Synthetic oligonucleotide
  Sense strand starting at position 2197 of SEQ ID NO: 588429
gcuuucucucugcagagaa

SEQ ID NO: 864477 - RNA, 19 nt, Artificial Sequence
  Description of Artificial Sequence: Synthetic oligonucleotide
  Antisense strand to SEQ ID NO: 864476
uucucugcagagagaaagc

SEQ ID NO: 864478 - RNA, 19 nt, Artificial Sequence
  Description of Artificial Sequence: Synthetic oligonucleotide
  Sense strand starting at position 2199 of SEQ ID NO: 588429
uuucucucugcagagaaau

SEQ ID NO: 864479 - RNA, 19 nt, Artificial Sequence
  Description of Artificial Sequence: Synthetic oligonucleotide
  Antisense strand to SEQ ID NO: 864478
auuucucugcagagagaaa

SEQ ID NO: 864480 - RNA, 19 nt, Artificial Sequence
  Description of Artificial Sequence: Synthetic oligonucleotide
  Sense strand starting at position 2336 of SEQ ID NO: 588429
uagggaagucauugcucuu

SEQ ID NO: 864481 - RNA, 19 nt, Artificial Sequence
  Description of Artificial Sequence: Synthetic oligonucleotide
  Antisense strand to SEQ ID NO: 864480
aagagcaaugacuucccua

SEQ ID NO: 864482 - RNA, 19 nt, Artificial Sequence
  Description of Artificial Sequence: Synthetic oligonucleotide
  Sense strand starting at position 2623 of SEQ ID NO: 588429
cacccugaggcuugugaga

SEQ ID NO: 864483 - RNA, 19 nt, Artificial Sequence
  Description of Artificial Sequence: Synthetic oligonucleotide
  Antisense strand to SEQ ID NO: 864482
ucucacaagccucagggug

SEQ ID NO: 864484 - RNA, 19 nt, Artificial Sequence
  Description of Artificial Sequence: Synthetic oligonucleotide
  Sense strand starting at position 2757 of SEQ ID NO: 588429
ugaccuuugagcggguaga

SEQ ID NO: 864485 - RNA, 19 nt, Artificial Sequence
  Description of Artificial Sequence: Synthetic oligonucleotide
  Antisense strand to SEQ ID NO: 864484
ucuacccgcucaaagguca

SEQ ID NO: 864486 - RNA, 19 nt, Artificial Sequence
  Description of Artificial Sequence: Synthetic oligonucleotide
  Sense strand starting at position 3160 of SEQ ID NO: 588429
ccgggugcuggagauauua

SEQ ID NO: 864487 - RNA, 19 nt, Artificial Sequence
  Description of Artificial Sequence: Synthetic oligonucleotide
  Antisense strand to SEQ ID NO: 864486
uaauaucuccagcacccgg

SEQ ID NO: 864488 - RNA, 19 nt, Artificial Sequence
  Description of Artificial Sequence: Synthetic oligonucleotide
  Sense strand starting at position 3331 of SEQ ID NO: 588429
gucaccaggccucaguaau

SEQ ID NO: 864489 - RNA, 19 nt, Artificial Sequence
  Description of Artificial Sequence: Synthetic oligonucleotide
  Antisense strand to SEQ ID NO: 864488
auuacugaggccuggugac

SEQ ID NO: 864490 - RNA, 19 nt, Artificial Sequence
  Description of Artificial Sequence: Synthetic oligonucleotide
  Sense strand starting at position 3408 of SEQ ID NO: 588429
uggucucucuugguggaaa

SEQ ID NO: 864491 - RNA, 19 nt, Artificial Sequence
  Description of Artificial Sequence: Synthetic oligonucleotide
  Antisense strand to SEQ ID NO: 864490
uuuccaccaagagagacca

SEQ ID NO: 864492 - RNA, 19 nt, Artificial Sequence
  Description of Artificial Sequence: Synthetic oligonucleotide
  Sense strand starting at position 3410 of SEQ ID NO: 588429
gucucucuugguggaaaga

SEQ ID NO: 864493 - RNA, 19 nt, Artificial Sequence
  Description of Artificial Sequence: Synthetic oligonucleotide
  Antisense strand to SEQ ID NO: 864492
ucuuuccaccaagagagac

SEQ ID NO: 864494 - RNA, 19 nt, Artificial Sequence
  Description of Artificial Sequence: Synthetic oligonucleotide
  Sense strand starting at position 3507 of SEQ ID NO: 588429
aggcgaggaucacuugaga

SEQ ID NO: 864495 - RNA, 19 nt, Artificial Sequence
  Description of Artificial Sequence: Synthetic oligonucleotide
  Antisense strand to SEQ ID NO: 864494
ucucaagugauccucgccu

SEQ ID NO: 864496 - RNA, 19 nt, Artificial Sequence
  Description of Artificial Sequence: Synthetic oligonucleotide
  Sense strand starting at position 3957 of SEQ ID NO: 588429
uccagucuggucuaaauca

SEQ ID NO: 864497 - RNA, 19 nt, Artificial Sequence
  Description of Artificial Sequence: Synthetic oligonucleotide
  Antisense strand to SEQ ID NO: 864496
ugauuuagaccagacugga

SEQ ID NO: 864498 - RNA, 19 nt, Artificial Sequence
  Description of Artificial Sequence: Synthetic oligonucleotide
  Sense strand starting at position 59 of SEQ ID NO: 588430
cucucugaaucuguugauu

SEQ ID NO: 864499 - RNA, 19 nt, Artificial Sequence
  Description of Artificial Sequence: Synthetic oligonucleotide
  Antisense strand to SEQ ID NO: 864498
aaucaacagauucagagag

SEQ ID NO: 864500 - RNA, 19 nt, Artificial Sequence
  Description of Artificial Sequence: Synthetic oligonucleotide
  Sense strand starting at position 62 of SEQ ID NO: 588430
ucugaaucuguugauucua

SEQ ID NO: 864501 - RNA, 19 nt, Artificial Sequence
  Description of Artificial Sequence: Synthetic oligonucleotide
  Antisense strand to SEQ ID NO: 864500
uagaaucaacagauucaga

SEQ ID NO: 864502 - RNA, 19 nt, Artificial Sequence
  Description of Artificial Sequence: Synthetic oligonucleotide
  Sense strand starting at position 64 of SEQ ID NO: 588430
ugaaucuguugauucuaga

SEQ ID NO: 864503 - RNA, 19 nt, Artificial Sequence
  Description of Artificial Sequence: Synthetic oligonucleotide
  Antisense strand to SEQ ID NO: 864502
ucuagaaucaacagauuca

SEQ ID NO: 864504 - RNA, 19 nt, Artificial Sequence
  Description of Artificial Sequence: Synthetic oligonucleotide
  Sense strand starting at position 464 of SEQ ID NO: 588430
aagguaguggucugaauag

SEQ ID NO: 864505 - RNA, 19 nt, Artificial Sequence
  Description of Artificial Sequence: Synthetic oligonucleotide
  Antisense strand to SEQ ID NO: 864504
cuauucagaccacuaccuu

SEQ ID NO: 864506 - RNA, 19 nt, Artificial Sequence
  Description of Artificial Sequence: Synthetic oligonucleotide
  Sense strand starting at position 474 of SEQ ID NO: 588430
ucugaauagugucuguuga

SEQ ID NO: 864507 - RNA, 19 nt, Artificial Sequence
  Description of Artificial Sequence: Synthetic oligonucleotide
  Antisense strand to SEQ ID NO: 864506
ucaacagacacuauucaga

SEQ ID NO: 864508 - RNA, 19 nt, Artificial Sequence
  Description of Artificial Sequence: Synthetic oligonucleotide
  Sense strand starting at position 475 of SEQ ID NO: 588430
cugaauagugucuguugag

SEQ ID NO: 864509 - RNA, 19 nt, Artificial Sequence
  Description of Artificial Sequence: Synthetic oligonucleotide
  Antisense strand to SEQ ID NO: 864508
cucaacagacacuauucag

SEQ ID NO: 864510 - RNA, 19 nt, Artificial Sequence
  Description of Artificial Sequence: Synthetic oligonucleotide
  Sense strand starting at position 482 of SEQ ID NO: 588430
gugucuguugagcaaauga

SEQ ID NO: 864511 - RNA, 19 nt, Artificial Sequence
  Description of Artificial Sequence: Synthetic oligonucleotide
  Antisense strand to SEQ ID NO: 864510
ucauuugcucaacagacac

SEQ ID NO: 864512 - RNA, 19 nt, Artificial Sequence
  Description of Artificial Sequence: Synthetic oligonucleotide
  Sense strand starting at position 749 of SEQ ID NO: 588430
aaugcauuccugcaggaug

SEQ ID NO: 864513 - RNA, 19 nt, Artificial Sequence
  Description of Artificial Sequence: Synthetic oligonucleotide
  Antisense strand to SEQ ID NO: 864512
cauccugcaggaaugcauu

SEQ ID NO: 864514 - RNA, 19 nt, Artificial Sequence
  Description of Artificial Sequence: Synthetic oligonucleotide
  Sense strand starting at position 864 of SEQ ID NO: 588430
caucacugguggucucaga

SEQ ID NO: 864515 - RNA, 19 nt, Artificial Sequence
  Description of Artificial Sequence: Synthetic oligonucleotide
  Antisense strand to SEQ ID NO: 864514
ucugagaccaccagugaug

SEQ ID NO: 864516 - RNA, 19 nt, Artificial Sequence
  Description of Artificial Sequence: Synthetic oligonucleotide
  Sense strand starting at position 936 of SEQ ID NO: 588430
ggaagagucuguuccugua

SEQ ID NO: 864517 - RNA, 19 nt, Artificial Sequence
  Description of Artificial Sequence: Synthetic oligonucleotide
  Antisense strand to SEQ ID NO: 864516
uacaggaacagacucuucc

SEQ ID NO: 864518 - RNA, 19 nt, Artificial Sequence
  Description of Artificial Sequence: Synthetic oligonucleotide
  Sense strand starting at position 938 of SEQ ID NO: 588430
aagagucuguuccuguaaa

SEQ ID NO: 864519 - RNA, 19 nt, Artificial Sequence
  Description of Artificial Sequence: Synthetic oligonucleotide
  Antisense strand to SEQ ID NO: 864518
uuuacaggaacagacucuu

SEQ ID NO: 864520 - RNA, 19 nt, Artificial Sequence
  Description of Artificial Sequence: Synthetic oligonucleotide
  Sense strand starting at position 951 of SEQ ID NO: 588430
uguaaaguaguuugcagau

SEQ ID NO: 864521 - RNA, 19 nt, Artificial Sequence
  Description of Artificial Sequence: Synthetic oligonucleotide
  Antisense strand to SEQ ID NO: 864520
aucugcaaacuacuuuaca

SEQ ID NO: 864522 - RNA, 19 nt, Artificial Sequence
  Description of Artificial Sequence: Synthetic oligonucleotide
  Sense strand starting at position 963 of SEQ ID NO: 588430
ugcagauugguggaacuga

SEQ ID NO: 864523 - RNA, 19 nt, Artificial Sequence
  Description of Artificial Sequence: Synthetic oligonucleotide
  Antisense strand to SEQ ID NO: 864522
ucaguuccaccaaucugca

SEQ ID NO: 864524 - RNA, 19 nt, Artificial Sequence
  Description of Artificial Sequence: Synthetic oligonucleotide
  Sense strand starting at position 1085 of SEQ ID NO: 588430
cguuucuggaagugaugga

SEQ ID NO: 864525 - RNA, 19 nt, Artificial Sequence
  Description of Artificial Sequence: Synthetic oligonucleotide
  Antisense strand to SEQ ID NO: 864524
uccaucacuuccagaaacg

SEQ ID NO: 864526 - RNA, 19 nt, Artificial Sequence
  Description of Artificial Sequence: Synthetic oligonucleotide
  Sense strand starting at position 1086 of SEQ ID NO: 588430
guuucuggaagugauggau

SEQ ID NO: 864527 - RNA, 19 nt, Artificial Sequence
  Description of Artificial Sequence: Synthetic oligonucleotide
  Antisense strand to SEQ ID NO: 864526
auccaucacuuccagaaac

SEQ ID NO: 864528 - RNA, 19 nt, Artificial Sequence
  Description of Artificial Sequence: Synthetic oligonucleotide
  Sense strand starting at position 1163 of SEQ ID NO: 588430
ccacuuagagcuuaaugac

SEQ ID NO: 864529 - RNA, 19 nt, Artificial Sequence
  Description of Artificial Sequence: Synthetic oligonucleotide
  Antisense strand to SEQ ID NO: 864528
gucauuaagcucuaagugg

SEQ ID NO: 864530 - RNA, 19 nt, Artificial Sequence
  Description of Artificial Sequence: Synthetic oligonucleotide
  Sense strand starting at position 1247 of SEQ ID NO: 588430
gacuaaggcucauccaguu

SEQ ID NO: 864531 - RNA, 19 nt, Artificial Sequence
  Description of Artificial Sequence: Synthetic oligonucleotide
  Antisense strand to SEQ ID NO: 864530
aacuggaugagccuuaguc

SEQ ID NO: 864532 - RNA, 19 nt, Artificial Sequence
  Description of Artificial Sequence: Synthetic oligonucleotide
  Sense strand starting at position 1396 of SEQ ID NO: 588430
uggcucuagacguaugguu

SEQ ID NO: 864533 - RNA, 19 nt, Artificial Sequence
  Description of Artificial Sequence: Synthetic oligonucleotide
  Antisense strand to SEQ ID NO: 864532
aaccauacgucuagagcca

SEQ ID NO: 864534 - RNA, 19 nt, Artificial Sequence
  Description of Artificial Sequence: Synthetic oligonucleotide
  Sense strand starting at position 1401 of SEQ ID NO: 588430
cuagacguaugguuauaaa

SEQ ID NO: 864535 - RNA, 19 nt, Artificial Sequence
  Description of Artificial Sequence: Synthetic oligonucleotide
  Antisense strand to SEQ ID NO: 864534
uuuauaaccauacgucuag

SEQ ID NO: 864536 - RNA, 19 nt, Artificial Sequence
  Description of Artificial Sequence: Synthetic oligonucleotide
  Sense strand starting at position 1768 of SEQ ID NO: 588430
guucuauuagguugaugca

SEQ ID NO: 864537 - RNA, 19 nt, Artificial Sequence
  Description of Artificial Sequence: Synthetic oligonucleotide
  Antisense strand to SEQ ID NO: 864536
ugcaucaaccuaauagaac

SEQ ID NO: 864538 - RNA, 19 nt, Artificial Sequence
  Description of Artificial Sequence: Synthetic oligonucleotide
  Sense strand starting at position 2007 of SEQ ID NO: 588430
cuaucuagugagugagcau

SEQ ID NO: 864539 - RNA, 19 nt, Artificial Sequence
  Description of Artificial Sequence: Synthetic oligonucleotide
  Antisense strand to SEQ ID NO: 864538
augcucacucacuagauag

SEQ ID NO: 864540 - RNA, 19 nt, Artificial Sequence
  Description of Artificial Sequence: Synthetic oligonucleotide
  Sense strand starting at position 2219 of SEQ ID NO: 588430
agaugucaugaguaggugu

SEQ ID NO: 864541 - RNA, 19 nt, Artificial Sequence
  Description of Artificial Sequence: Synthetic oligonucleotide
  Antisense strand to SEQ ID NO: 864540
acaccuacucaugacaucu

SEQ ID NO: 864542 - RNA, 19 nt, Artificial Sequence
  Description of Artificial Sequence: Synthetic oligonucleotide
  Sense strand starting at position 2221 of SEQ ID NO: 588430
augucaugaguagguguga

SEQ ID NO: 864543 - RNA, 19 nt, Artificial Sequence
  Description of Artificial Sequence: Synthetic oligonucleotide
  Antisense strand to SEQ ID NO: 864542
ucacaccuacucaugacau

SEQ ID NO: 864544 - RNA, 19 nt, Artificial Sequence
  Description of Artificial Sequence: Synthetic oligonucleotide
  Sense strand starting at position 2222 of SEQ ID NO: 588430
ugucaugaguaggugugaa

SEQ ID NO: 864545 - RNA, 19 nt, Artificial Sequence
  Description of Artificial Sequence: Synthetic oligonucleotide
  Antisense strand to SEQ ID NO: 864544
uucacaccuacucaugaca

SEQ ID NO: 864546 - RNA, 19 nt, Artificial Sequence
  Description of Artificial Sequence: Synthetic oligonucleotide
  Sense strand starting at position 2234 of SEQ ID NO: 588430
gugugaagugugagcuacu

SEQ ID NO: 864547 - RNA, 19 nt, Artificial Sequence
  Description of Artificial Sequence: Synthetic oligonucleotide
  Antisense strand to SEQ ID NO: 864546
aguagcucacacuucacac

SEQ ID NO: 864548 - RNA, 19 nt, Artificial Sequence
  Description of Artificial Sequence: Synthetic oligonucleotide
  Sense strand starting at position 2237 of SEQ ID NO: 588430
ugaagugugagcuacuuga

SEQ ID NO: 864549 - RNA, 19 nt, Artificial Sequence
  Description of Artificial Sequence: Synthetic oligonucleotide
  Antisense strand to SEQ ID NO: 864548
ucaaguagcucacacuuca

SEQ ID NO: 864550 - RNA, 19 nt, Artificial Sequence
  Description of Artificial Sequence: Synthetic oligonucleotide
  Sense strand starting at position 2306 of SEQ ID NO: 588430
auguuuagcccaggaagga

SEQ ID NO: 864551 - RNA, 19 nt, Artificial Sequence
  Description of Artificial Sequence: Synthetic oligonucleotide
  Antisense strand to SEQ ID NO: 864550
uccuuccugggcuaaacau

SEQ ID NO: 864552 - RNA, 19 nt, Artificial Sequence
  Description of Artificial Sequence: Synthetic oligonucleotide
  Sense strand starting at position 2412 of SEQ ID NO: 588430
ccagcagcuccuugggaaa

SEQ ID NO: 864553 - RNA, 19 nt, Artificial Sequence
  Description of Artificial Sequence: Synthetic oligonucleotide
  Antisense strand to SEQ ID NO: 864552
uuucccaaggagcugcugg

SEQ ID NO: 864554 - RNA, 19 nt, Artificial Sequence
  Description of Artificial Sequence: Synthetic oligonucleotide
  Sense strand starting at position 2674 of SEQ ID NO: 588430
gucacaagaucucuucgca

SEQ ID NO: 864555 - RNA, 19 nt, Artificial Sequence
  Description of Artificial Sequence: Synthetic oligonucleotide
  Antisense strand to SEQ ID NO: 864554
ugcgaagagaucuugugac

SEQ ID NO: 864556 - RNA, 19 nt, Artificial Sequence
  Description of Artificial Sequence: Synthetic oligonucleotide
  Sense strand starting at position 2766 of SEQ ID NO: 588430
cccacaucgucaguuauga

SEQ ID NO: 864557 - RNA, 19 nt, Artificial Sequence
  Description of Artificial Sequence: Synthetic oligonucleotide
  Antisense strand to SEQ ID NO: 864556
ucauaacugacgauguggg

SEQ ID NO: 864558 - RNA, 19 nt, Artificial Sequence
  Description of Artificial Sequence: Synthetic oligonucleotide
  Sense strand starting at position 2774 of SEQ ID NO: 588430
gucaguuaugaguggaaga

SEQ ID NO: 864559 - RNA, 19 nt, Artificial Sequence
  Description of Artificial Sequence: Synthetic oligonucleotide
  Antisense strand to SEQ ID NO: 864558
ucuuccacucauaacugac

SEQ ID NO: 864560 - RNA, 19 nt, Artificial Sequence
  Description of Artificial Sequence: Synthetic oligonucleotide
  Sense strand starting at position 2775 of SEQ ID NO: 588430
ucaguuaugaguggaagag

SEQ ID NO: 864561 - RNA, 19 nt, Artificial Sequence
  Description of Artificial Sequence: Synthetic oligonucleotide
  Antisense strand to SEQ ID NO: 864560
cucuuccacucauaacuga

SEQ ID NO: 864562 - RNA, 19 nt, Artificial Sequence
  Description of Artificial Sequence: Synthetic oligonucleotide
  Sense strand starting at position 3099 of SEQ ID NO: 588430
gcaagagacucacuugcuu

SEQ ID NO: 864563 - RNA, 19 nt, Artificial Sequence
  Description of Artificial Sequence: Synthetic oligonucleotide
  Antisense strand to SEQ ID NO: 864562
aagcaagugagucucuugc

SEQ ID NO: 864564 - RNA, 19 nt, Artificial Sequence
  Description of Artificial Sequence: Synthetic oligonucleotide
  Sense strand starting at position 3103 of SEQ ID NO: 588430
gagacucacuugcuuggua

SEQ ID NO: 864565 - RNA, 19 nt, Artificial Sequence
  Description of Artificial Sequence: Synthetic oligonucleotide
  Antisense strand to SEQ ID NO: 864564
uaccaagcaagugagucuc

SEQ ID NO: 864566 - RNA, 19 nt, Artificial Sequence
  Description of Artificial Sequence: Synthetic oligonucleotide
  Sense strand starting at position 3508 of SEQ ID NO: 588430
ggugucuccgcugaaauuu

SEQ ID NO: 864567 - RNA, 19 nt, Artificial Sequence
  Description of Artificial Sequence: Synthetic oligonucleotide
  Antisense strand to SEQ ID NO: 864566
aaauuucagcggagacacc

SEQ ID NO: 864568 - RNA, 19 nt, Artificial Sequence
  Description of Artificial Sequence: Synthetic oligonucleotide
  Sense strand starting at position 3554 of SEQ ID NO: 588430
gguguuuaauuggugguga

SEQ ID NO: 864569 - RNA, 19 nt, Artificial Sequence
  Description of Artificial Sequence: Synthetic oligonucleotide
  Antisense strand to SEQ ID NO: 864568
ucaccaccaauuaaacacc

SEQ ID NO: 864570 - RNA, 19 nt, Artificial Sequence
  Description of Artificial Sequence: Synthetic oligonucleotide
  Sense strand starting at position 3556 of SEQ ID NO: 588430
uguuuaauugguggugaaa

SEQ ID NO: 864571 - RNA, 19 nt, Artificial Sequence
  Description of Artificial Sequence: Synthetic oligonucleotide
  Antisense strand to SEQ ID NO: 864570
uuucaccaccaauuaaaca

SEQ ID NO: 864572 - RNA, 19 nt, Artificial Sequence
  Description of Artificial Sequence: Synthetic oligonucleotide
  Sense strand starting at position 3857 of SEQ ID NO: 588430
ggcagucauuaucuccuuu

SEQ ID NO: 864573 - RNA, 19 nt, Artificial Sequence
  Description of Artificial Sequence: Synthetic oligonucleotide
  Antisense strand to SEQ ID NO: 864572
aaaggagauaaugacugcc

SEQ ID NO: 864574 - RNA, 19 nt, Artificial Sequence
  Description of Artificial Sequence: Synthetic oligonucleotide
  Sense strand starting at position 3957 of SEQ ID NO: 588430
caggguacuuugccuaagu

SEQ ID NO: 864575 - RNA, 19 nt, Artificial Sequence
  Description of Artificial Sequence: Synthetic oligonucleotide
  Antisense strand to SEQ ID NO: 864574
acuuaggcaaaguacccug

SEQ ID NO: 864576 - RNA, 19 nt, Artificial Sequence
  Description of Artificial Sequence: Synthetic oligonucleotide
  Sense strand starting at position 3958 of SEQ ID NO: 588430
aggguacuuugccuaaguu

SEQ ID NO: 864577 - RNA, 19 nt, Artificial Sequence
  Description of Artificial Sequence: Synthetic oligonucleotide
  Antisense strand to SEQ ID NO: 864576
aacuuaggcaaaguacccu

SEQ ID NO: 864578 - RNA, 19 nt, Artificial Sequence
  Description of Artificial Sequence: Synthetic oligonucleotide
  Sense strand starting at position 385 of SEQ ID NO: 588431
aagugugaagugcauacua

SEQ ID NO: 864579 - RNA, 19 nt, Artificial Sequence
  Description of Artificial Sequence: Synthetic oligonucleotide
  Antisense strand to SEQ ID NO: 864578
uaguaugcacuucacacuu

SEQ ID NO: 864580 - RNA, 19 nt, Artificial Sequence
  Description of Artificial Sequence: Synthetic oligonucleotide
  Sense strand starting at position 387 of SEQ ID NO: 588431
gugugaagugcauacuaaa

SEQ ID NO: 864581 - RNA, 19 nt, Artificial Sequence
  Description of Artificial Sequence: Synthetic oligonucleotide
  Antisense strand to SEQ ID NO: 864580
uuuaguaugcacuucacac

SEQ ID NO: 864582 - RNA, 19 nt, Artificial Sequence
  Description of Artificial Sequence: Synthetic oligonucleotide
  Sense strand starting at position 418 of SEQ ID NO: 588431
acacacuuacuguaaguga

SEQ ID NO: 864583 - RNA, 19 nt, Artificial Sequence
  Description of Artificial Sequence: Synthetic oligonucleotide
  Antisense strand to SEQ ID NO: 864582
ucacuuacaguaagugugu

SEQ ID NO: 864584 - RNA, 19 nt, Artificial Sequence
  Description of Artificial Sequence: Synthetic oligonucleotide
  Sense strand starting at position 436 of SEQ ID NO: 588431
auguaaacccaauggguau

SEQ ID NO: 864585 - RNA, 19 nt, Artificial Sequence
  Description of Artificial Sequence: Synthetic oligonucleotide
  Antisense strand to SEQ ID NO: 864584
auacccauuggguuuacau

SEQ ID NO: 864586 - RNA, 19 nt, Artificial Sequence
  Description of Artificial Sequence: Synthetic oligonucleotide
  Sense strand starting at position 579 of SEQ ID NO: 588431
gggauucucccacgaguaa

SEQ ID NO: 864587 - RNA, 19 nt, Artificial Sequence
  Description of Artificial Sequence: Synthetic oligonucleotide
  Antisense strand to SEQ ID NO: 864586
uuacucgugggagaauccc

SEQ ID NO: 864588 - RNA, 19 nt, Artificial Sequence
  Description of Artificial Sequence: Synthetic oligonucleotide
  Sense strand starting at position 580 of SEQ ID NO: 588431
ggauucucccacgaguaaa

SEQ ID NO: 864589 - RNA, 19 nt, Artificial Sequence
  Description of Artificial Sequence: Synthetic oligonucleotide
  Antisense strand to SEQ ID NO: 864588
uuuacucgugggagaaucc

SEQ ID NO: 864590 - RNA, 19 nt, Artificial Sequence
  Description of Artificial Sequence: Synthetic oligonucleotide
  Sense strand starting at position 646 of SEQ ID NO: 588431
gcucuuacuccagaauuga

SEQ ID NO: 864591 - RNA, 19 nt, Artificial Sequence
  Description of Artificial Sequence: Synthetic oligonucleotide
  Antisense strand to SEQ ID NO: 864590
ucaauucuggaguaagagc

SEQ ID NO: 864592 - RNA, 19 nt, Artificial Sequence
  Description of Artificial Sequence: Synthetic oligonucleotide
  Sense strand starting at position 676 of SEQ ID NO: 588431
uguuauaaaucuguugaga

SEQ ID NO: 864593 - RNA, 19 nt, Artificial Sequence
  Description of Artificial Sequence: Synthetic oligonucleotide
  Antisense strand to SEQ ID NO: 864592
ucucaacagauuuauaaca

SEQ ID NO: 864594 - RNA, 19 nt, Artificial Sequence
  Description of Artificial Sequence: Synthetic oligonucleotide
  Sense strand starting at position 869 of SEQ ID NO: 588431
guguaagacagacgaucuu

SEQ ID NO: 864595 - RNA, 19 nt, Artificial Sequence
  Description of Artificial Sequence: Synthetic oligonucleotide
  Antisense strand to SEQ ID NO: 864594
aagaucgucugucuuacac

SEQ ID NO: 864596 - RNA, 19 nt, Artificial Sequence
  Description of Artificial Sequence: Synthetic oligonucleotide
  Sense strand starting at position 1030 of SEQ ID NO: 588431
accuuaaugcuagagaucu

SEQ ID NO: 864597 - RNA, 19 nt, Artificial Sequence
  Description of Artificial Sequence: Synthetic oligonucleotide
  Antisense strand to SEQ ID NO: 864596
agaucucuagcauuaaggu

SEQ ID NO: 864598 - RNA, 19 nt, Artificial Sequence
  Description of Artificial Sequence: Synthetic oligonucleotide
  Sense strand starting at position 1221 of SEQ ID NO: 588431
ucgcaaaguacauagagaa

SEQ ID NO: 864599 - RNA, 19 nt, Artificial Sequence
  Description of Artificial Sequence: Synthetic oligonucleotide
  Antisense strand to SEQ ID NO: 864598
uucucuauguacuuugcga

SEQ ID NO: 864600 - RNA, 19 nt, Artificial Sequence
  Description of Artificial Sequence: Synthetic oligonucleotide
  Sense strand starting at position 1314 of SEQ ID NO: 588431
gucguugcuccagaaauuu

SEQ ID NO: 864601 - RNA, 19 nt, Artificial Sequence
  Description of Artificial Sequence: Synthetic oligonucleotide
  Antisense strand to SEQ ID NO: 864600
aaauuucuggagcaacgac

SEQ ID NO: 864602 - RNA, 19 nt, Artificial Sequence
  Description of Artificial Sequence: Synthetic oligonucleotide
  Sense strand starting at position 2437 of SEQ ID NO: 588431
gguccugcaagucaagauu

SEQ ID NO: 864603 - RNA, 19 nt, Artificial Sequence
  Description of Artificial Sequence: Synthetic oligonucleotide
  Antisense strand to SEQ ID NO: 864602
aaucuugacuugcaggacc

SEQ ID NO: 864604 - RNA, 19 nt, Artificial Sequence
  Description of Artificial Sequence: Synthetic oligonucleotide
  Sense strand starting at position 2459 of SEQ ID NO: 588431
guagcaagagugcaucaga

SEQ ID NO: 864605 - RNA, 19 nt, Artificial Sequence
  Description of Artificial Sequence: Synthetic oligonucleotide
  Antisense strand to SEQ ID NO: 864604
ucugaugcacucuugcuac

SEQ ID NO: 864606 - RNA, 19 nt, Artificial Sequence
  Description of Artificial Sequence: Synthetic oligonucleotide
  Sense strand starting at position 2462 of SEQ ID NO: 588431
gcaagagugcaucagaucu

SEQ ID NO: 864607 - RNA, 19 nt, Artificial Sequence
  Description of Artificial Sequence: Synthetic oligonucleotide
  Antisense strand to SEQ ID NO: 864606
agaucugaugcacucuugc

SEQ ID NO: 864608 - RNA, 19 nt, Artificial Sequence
  Description of Artificial Sequence: Synthetic oligonucleotide
  Sense strand starting at position 2470 of SEQ ID NO: 588431
gcaucagaucucuguaagg

SEQ ID NO: 864609 - RNA, 19 nt, Artificial Sequence
  Description of Artificial Sequence: Synthetic oligonucleotide
  Antisense strand to SEQ ID NO: 864608
ccuuacagagaucugaugc

SEQ ID NO: 864610 - RNA, 19 nt, Artificial Sequence
  Description of Artificial Sequence: Synthetic oligonucleotide
  Sense strand starting at position 2861 of SEQ ID NO: 588431
gaguacugccgggaaucaa

SEQ ID NO: 864611 - RNA, 19 nt, Artificial Sequence
  Description of Artificial Sequence: Synthetic oligonucleotide
  Antisense strand to SEQ ID NO: 864610
uugauucccggcaguacuc

SEQ ID NO: 864612 - RNA, 19 nt, Artificial Sequence
  Description of Artificial Sequence: Synthetic oligonucleotide
  Sense strand starting at position 2875 of SEQ ID NO: 588431
aucaaagaaccguguauau

SEQ ID NO: 864613 - RNA, 19 nt, Artificial Sequence
  Description of Artificial Sequence: Synthetic oligonucleotide
  Antisense strand to SEQ ID NO: 864612
auauacacgguucuuugau

SEQ ID NO: 864614 - RNA, 19 nt, Artificial Sequence
  Description of Artificial Sequence: Synthetic oligonucleotide
  Sense strand starting at position 2877 of SEQ ID NO: 588431
caaagaaccguguauaucu

SEQ ID NO: 864615 - RNA, 19 nt, Artificial Sequence
  Description of Artificial Sequence: Synthetic oligonucleotide
  Antisense strand to SEQ ID NO: 864614
agauauacacgguucuuug

SEQ ID NO: 864616 - RNA, 19 nt, Artificial Sequence
  Description of Artificial Sequence: Synthetic oligonucleotide
  Sense strand starting at position 3009 of SEQ ID NO: 588431
aggcgaaucagugaaaguu

SEQ ID NO: 864617 - RNA, 19 nt, Artificial Sequence
  Description of Artificial Sequence: Synthetic oligonucleotide
  Antisense strand to SEQ ID NO: 864616
aacuuucacugauucgccu

SEQ ID NO: 864618 - RNA, 19 nt, Artificial Sequence
  Description of Artificial Sequence: Synthetic oligonucleotide
  Sense strand starting at position 3043 of SEQ ID NO: 588431
caaagacuccaggguaugu

SEQ ID NO: 864619 - RNA, 19 nt, Artificial Sequence
  Description of Artificial Sequence: Synthetic oligonucleotide
  Antisense strand to SEQ ID NO: 864618
acauacccuggagucuuug

SEQ ID NO: 864620 - RNA, 19 nt, Artificial Sequence
  Description of Artificial Sequence: Synthetic oligonucleotide
  Sense strand starting at position 3191 of SEQ ID NO: 588431
uugugcuagugauuuaucu

SEQ ID NO: 864621 - RNA, 19 nt, Artificial Sequence
  Description of Artificial Sequence: Synthetic oligonucleotide
  Antisense strand to SEQ ID NO: 864620
agauaaaucacuagcacaa

SEQ ID NO: 864622 - RNA, 19 nt, Artificial Sequence
  Description of Artificial Sequence: Synthetic oligonucleotide
  Sense strand starting at position 3193 of SEQ ID NO: 588431
gugcuagugauuuaucugu

SEQ ID NO: 864623 - RNA, 19 nt, Artificial Sequence
  Description of Artificial Sequence: Synthetic oligonucleotide
  Antisense strand to SEQ ID NO: 864622
acagauaaaucacuagcac

SEQ ID NO: 864624 - RNA, 19 nt, Artificial Sequence
  Description of Artificial Sequence: Synthetic oligonucleotide
  Sense strand starting at position 3195 of SEQ ID NO: 588431
gcuagugauuuaucuguga

SEQ ID NO: 864625 - RNA, 19 nt, Artificial Sequence
  Description of Artificial Sequence: Synthetic oligonucleotide
  Antisense strand to SEQ ID NO: 864624
ucacagauaaaucacuagc

SEQ ID NO: 864626 - RNA, 19 nt, Artificial Sequence
  Description of Artificial Sequence: Synthetic oligonucleotide
  Sense strand starting at position 3272 of SEQ ID NO: 588431
ugaugagucugaccuaaag

SEQ ID NO: 864627 - RNA, 19 nt, Artificial Sequence
  Description of Artificial Sequence: Synthetic oligonucleotide
  Antisense strand to SEQ ID NO: 864626
cuuuaggucagacucauca

SEQ ID NO: 864628 - RNA, 19 nt, Artificial Sequence
  Description of Artificial Sequence: Synthetic oligonucleotide
  Sense strand starting at position 3323 of SEQ ID NO: 588431
gagagaugaugugcaugca

SEQ ID NO: 864629 - RNA, 19 nt, Artificial Sequence
  Description of Artificial Sequence: Synthetic oligonucleotide
  Antisense strand to SEQ ID NO: 864628
ugcaugcacaucaucucuc

SEQ ID NO: 864630 - RNA, 19 nt, Artificial Sequence
  Description of Artificial Sequence: Synthetic oligonucleotide
  Sense strand starting at position 3354 of SEQ ID NO: 588431
uuuggcaacugauugauua

SEQ ID NO: 864631 - RNA, 19 nt, Artificial Sequence
  Description of Artificial Sequence: Synthetic oligonucleotide
  Antisense strand to SEQ ID NO: 864630
uaaucaaucaguugccaaa

SEQ ID NO: 864632 - RNA, 19 nt, Artificial Sequence
  Description of Artificial Sequence: Synthetic oligonucleotide
  Sense strand starting at position 3355 of SEQ ID NO: 588431
uuggcaacugauugauuaa

SEQ ID NO: 864633 - RNA, 19 nt, Artificial Sequence
  Description of Artificial Sequence: Synthetic oligonucleotide
  Antisense strand to SEQ ID NO: 864632
uuaaucaaucaguugccaa

SEQ ID NO: 864634 - RNA, 19 nt, Artificial Sequence
  Description of Artificial Sequence: Synthetic oligonucleotide
  Sense strand starting at position 3358 of SEQ ID NO: 588431
gcaacugauugauuaauug

SEQ ID NO: 864635 - RNA, 19 nt, Artificial Sequence
  Description of Artificial Sequence: Synthetic oligonucleotide
  Antisense strand to SEQ ID NO: 864634
caauuaaucaaucaguugc

SEQ ID NO: 864636 - RNA, 19 nt, Artificial Sequence
  Description of Artificial Sequence: Synthetic oligonucleotide
  Sense strand starting at position 3367 of SEQ ID NO: 588431
ugauuaauuguggguagga

SEQ ID NO: 864637 - RNA, 19 nt, Artificial Sequence
  Description of Artificial Sequence: Synthetic oligonucleotide
  Antisense strand to SEQ ID NO: 864636
uccuacccacaauuaauca

SEQ ID NO: 864638 - RNA, 19 nt, Artificial Sequence
  Description of Artificial Sequence: Synthetic oligonucleotide
  Sense strand starting at position 3368 of SEQ ID NO: 588431
gauuaauuguggguaggaa

SEQ ID NO: 864639 - RNA, 19 nt, Artificial Sequence
  Description of Artificial Sequence: Synthetic oligonucleotide
  Antisense strand to SEQ ID NO: 864638
uuccuacccacaauuaauc

SEQ ID NO: 864640 - RNA, 19 nt, Artificial Sequence
  Description of Artificial Sequence: Synthetic oligonucleotide
  Sense strand starting at position 3463 of SEQ ID NO: 588431
gggagcuacuucuugagag

SEQ ID NO: 864641 - RNA, 19 nt, Artificial Sequence
  Description of Artificial Sequence: Synthetic oligonucleotide
  Antisense strand to SEQ ID NO: 864640
cucucaagaaguagcuccc

SEQ ID NO: 864642 - RNA, 19 nt, Artificial Sequence
  Description of Artificial Sequence: Synthetic oligonucleotide
  Sense strand starting at position 3619 of SEQ ID NO: 588431
ucagccuaggagugauauu

SEQ ID NO: 864643 - RNA, 19 nt, Artificial Sequence
  Description of Artificial Sequence: Synthetic oligonucleotide
  Antisense strand to SEQ ID NO: 864642
aauaucacuccuaggcuga

SEQ ID NO: 864644 - RNA, 19 nt, Artificial Sequence
  Description of Artificial Sequence: Synthetic oligonucleotide
  Sense strand starting at position 3727 of SEQ ID NO: 588431
gcagcacugacaugaggau

SEQ ID NO: 864645 - RNA, 19 nt, Artificial Sequence
  Description of Artificial Sequence: Synthetic oligonucleotide
  Antisense strand to SEQ ID NO: 864644
auccucaugucagugcugc

SEQ ID NO: 864646 - RNA, 19 nt, Artificial Sequence
  Description of Artificial Sequence: Synthetic oligonucleotide
  Sense strand starting at position 3733 of SEQ ID NO: 588431
cugacaugaggauguuagu

SEQ ID NO: 864647 - RNA, 19 nt, Artificial Sequence
  Description of Artificial Sequence: Synthetic oligonucleotide
  Antisense strand to SEQ ID NO: 864646
acuaacauccucaugucag

SEQ ID NO: 864648 - RNA, 19 nt, Artificial Sequence
  Description of Artificial Sequence: Synthetic oligonucleotide
  Sense strand starting at position 3739 of SEQ ID NO: 588431
ugaggauguuaguuagaaa

SEQ ID NO: 864649 - RNA, 19 nt, Artificial Sequence
  Description of Artificial Sequence: Synthetic oligonucleotide
  Antisense strand to SEQ ID NO: 864648
uuucuaacuaacauccuca

SEQ ID NO: 864650 - RNA, 19 nt, Artificial Sequence
  Description of Artificial Sequence: Synthetic oligonucleotide
  Sense strand starting at position 3916 of SEQ ID NO: 588431
uaggguaacgcagaaucau

SEQ ID NO: 864651 - RNA, 19 nt, Artificial Sequence
  Description of Artificial Sequence: Synthetic oligonucleotide
  Antisense strand to SEQ ID NO: 864650
augauucugcguuacccua

SEQ ID NO: 864652 - RNA, 19 nt, Artificial Sequence
  Description of Artificial Sequence: Synthetic oligonucleotide
  Sense strand starting at position 3974 of SEQ ID NO: 588431
gaaggaguguugcucaaca

SEQ ID NO: 864653 - RNA, 19 nt, Artificial Sequence
  Description of Artificial Sequence: Synthetic oligonucleotide
  Antisense strand to SEQ ID NO: 864652
uguugagcaacacuccuuc

SEQ ID NO: 864654 - RNA, 19 nt, Artificial Sequence
  Description of Artificial Sequence: Synthetic oligonucleotide
  Sense strand starting at position 3976 of SEQ ID NO: 588431
aggaguguugcucaacaau

SEQ ID NO: 864655 - RNA, 19 nt, Artificial Sequence
  Description of Artificial Sequence: Synthetic oligonucleotide
  Antisense strand to SEQ ID NO: 864654
auuguugagcaacacuccu

SEQ ID NO: 864656 - RNA, 19 nt, Artificial Sequence
  Description of Artificial Sequence: Synthetic oligonucleotide
  Sense strand starting at position 3979 of SEQ ID NO: 588431
aguguugcucaacaauauc

SEQ ID NO: 864657 - RNA, 19 nt, Artificial Sequence
  Description of Artificial Sequence: Synthetic oligonucleotide
  Antisense strand to SEQ ID NO: 864656
gauauuguugagcaacacu

SEQ ID NO: 864658 - RNA, 19 nt, Artificial Sequence
  Description of Artificial Sequence: Synthetic oligonucleotide
  Sense strand starting at position 20 of SEQ ID NO: 588432
guaaaucuuauuugugugu

SEQ ID NO: 864659 - RNA, 19 nt, Artificial Sequence
  Description of Artificial Sequence: Synthetic oligonucleotide
  Antisense strand to SEQ ID NO: 864658
acacacaaauaagauuuac

SEQ ID NO: 864660 - RNA, 19 nt, Artificial Sequence
  Description of Artificial Sequence: Synthetic oligonucleotide
  Sense strand starting at position 463 of SEQ ID NO: 588432
ggaagauacugcgaucuaa

SEQ ID NO: 864661 - RNA, 19 nt, Artificial Sequence
  Description of Artificial Sequence: Synthetic oligonucleotide
  Antisense strand to SEQ ID NO: 864660
uuagaucgcaguaucuucc

SEQ ID NO: 864662 - RNA, 19 nt, Artificial Sequence
  Description of Artificial Sequence: Synthetic oligonucleotide
  Sense strand starting at position 502 of SEQ ID NO: 588432
cgagaugucuggucacuuc

SEQ ID NO: 864663 - RNA, 19 nt, Artificial Sequence
  Description of Artificial Sequence: Synthetic oligonucleotide
  Antisense strand to SEQ ID NO: 864662
gaagugaccagacaucucg

SEQ ID NO: 864664 - RNA, 19 nt, Artificial Sequence
  Description of Artificial Sequence: Synthetic oligonucleotide
  Sense strand starting at position 538 of SEQ ID NO: 588432
aggcaauuccuagauccuu

SEQ ID NO: 864665 - RNA, 19 nt, Artificial Sequence
  Description of Artificial Sequence: Synthetic oligonucleotide
  Antisense strand to SEQ ID NO: 864664
aaggaucuaggaauugccu

SEQ ID NO: 864666 - RNA, 19 nt, Artificial Sequence
  Description of Artificial Sequence: Synthetic oligonucleotide
  Sense strand starting at position 543 of SEQ ID NO: 588432
auuccuagauccuuugagu

SEQ ID NO: 864667 - RNA, 19 nt, Artificial Sequence
  Description of Artificial Sequence: Synthetic oligonucleotide
  Antisense strand to SEQ ID NO: 864666
acucaaaggaucuaggaau

SEQ ID NO: 864668 - RNA, 19 nt, Artificial Sequence
  Description of Artificial Sequence: Synthetic oligonucleotide
  Sense strand starting at position 566 of SEQ ID NO: 588432
ccgggucugcgcagguaau

SEQ ID NO: 864669 - RNA, 19 nt, Artificial Sequence
  Description of Artificial Sequence: Synthetic oligonucleotide
  Antisense strand to SEQ ID NO: 864668
auuaccugcgcagacccgg

SEQ ID NO: 864670 - RNA, 19 nt, Artificial Sequence
  Description of Artificial Sequence: Synthetic oligonucleotide
  Sense strand starting at position 734 of SEQ ID NO: 588432
aacugucugcuccgagaac

SEQ ID NO: 864671 - RNA, 19 nt, Artificial Sequence
  Description of Artificial Sequence: Synthetic oligonucleotide
  Antisense strand to SEQ ID NO: 864670
guucucggagcagacaguu

SEQ ID NO: 864672 - RNA, 19 nt, Artificial Sequence
  Description of Artificial Sequence: Synthetic oligonucleotide
  Sense strand starting at position 814 of SEQ ID NO: 588432
auucccaguccugagcaau

SEQ ID NO: 864673 - RNA, 19 nt, Artificial Sequence
  Description of Artificial Sequence: Synthetic oligonucleotide
  Antisense strand to SEQ ID NO: 864672
auugcucaggacugggaau

SEQ ID NO: 864674 - RNA, 19 nt, Artificial Sequence
  Description of Artificial Sequence: Synthetic oligonucleotide
  Sense strand starting at position 877 of SEQ ID NO: 588432
aggccagaauaaucuaagu

SEQ ID NO: 864675 - RNA, 19 nt, Artificial Sequence
  Description of Artificial Sequence: Synthetic oligonucleotide
  Antisense strand to SEQ ID NO: 864674
acuuagauuauucuggccu

SEQ ID NO: 864676 - RNA, 19 nt, Artificial Sequence
  Description of Artificial Sequence: Synthetic oligonucleotide
  Sense strand starting at position 967 of SEQ ID NO: 588432
cagggaccgucuucucgau

SEQ ID NO: 864677 - RNA, 19 nt, Artificial Sequence
  Description of Artificial Sequence: Synthetic oligonucleotide
  Antisense strand to SEQ ID NO: 864676
aucgagaagacggucccug

SEQ ID NO: 864678 - RNA, 19 nt, Artificial Sequence
  Description of Artificial Sequence: Synthetic oligonucleotide
  Sense strand starting at position 971 of SEQ ID NO: 588432
gaccgucuucucgaucaau

SEQ ID NO: 864679 - RNA, 19 nt, Artificial Sequence
  Description of Artificial Sequence: Synthetic oligonucleotide
  Antisense strand to SEQ ID NO: 864678
auugaucgagaagacgguc

SEQ ID NO: 864680 - RNA, 19 nt, Artificial Sequence
  Description of Artificial Sequence: Synthetic oligonucleotide
  Sense strand starting at position 1044 of SEQ ID NO: 588432
aagagucaccucuguguuu

SEQ ID NO: 864681 - RNA, 19 nt, Artificial Sequence
  Description of Artificial Sequence: Synthetic oligonucleotide
  Antisense strand to SEQ ID NO: 864680
aaacacagaggugacucuu

SEQ ID NO: 864682 - RNA, 19 nt, Artificial Sequence
  Description of Artificial Sequence: Synthetic oligonucleotide
  Sense strand starting at position 1067 of SEQ ID NO: 588432
acuacaaagccuuguggga

SEQ ID NO: 864683 - RNA, 19 nt, Artificial Sequence
  Description of Artificial Sequence: Synthetic oligonucleotide
  Antisense strand to SEQ ID NO: 864682
ucccacaaggcuuuguagu

SEQ ID NO: 864684 - RNA, 19 nt, Artificial Sequence
  Description of Artificial Sequence: Synthetic oligonucleotide
  Sense strand starting at position 1080 of SEQ ID NO: 588432
gugggaaccucauugaaau

SEQ ID NO: 864685 - RNA, 19 nt, Artificial Sequence
  Description of Artificial Sequence: Synthetic oligonucleotide
  Antisense strand to SEQ ID NO: 864684
auuucaaugagguucccac

SEQ ID NO: 864686 - RNA, 19 nt, Artificial Sequence
  Description of Artificial Sequence: Synthetic oligonucleotide
  Sense strand starting at position 1091 of SEQ ID NO: 588432
auugaaaucgccuaauuag

SEQ ID NO: 864687 - RNA, 19 nt, Artificial Sequence
  Description of Artificial Sequence: Synthetic oligonucleotide
  Antisense strand to SEQ ID NO: 864686
cuaauuaggcgauuucaau

SEQ ID NO: 864688 - RNA, 19 nt, Artificial Sequence
  Description of Artificial Sequence: Synthetic oligonucleotide
  Sense strand starting at position 1137 of SEQ ID NO: 588432
cugagcaagccagaaugau

SEQ ID NO: 864689 - RNA, 19 nt, Artificial Sequence
  Description of Artificial Sequence: Synthetic oligonucleotide
  Antisense strand to SEQ ID NO: 864688
aucauucuggcuugcucag

SEQ ID NO: 864690 - RNA, 19 nt, Artificial Sequence
  Description of Artificial Sequence: Synthetic oligonucleotide
  Sense strand starting at position 1146 of SEQ ID NO: 588432
ccagaaugauuuggaggaa

SEQ ID NO: 864691 - RNA, 19 nt, Artificial Sequence
  Description of Artificial Sequence: Synthetic oligonucleotide
  Antisense strand to SEQ ID NO: 864690
uuccuccaaaucauucugg

SEQ ID NO: 864692 - RNA, 19 nt, Artificial Sequence
  Description of Artificial Sequence: Synthetic oligonucleotide
  Sense strand starting at position 1355 of SEQ ID NO: 588432
aggagaaaguaagcuguua

SEQ ID NO: 864693 - RNA, 19 nt, Artificial Sequence
  Description of Artificial Sequence: Synthetic oligonucleotide
  Antisense strand to SEQ ID NO: 864692
uaacagcuuacuuucuccu

SEQ ID NO: 864694 - RNA, 19 nt, Artificial Sequence
  Description of Artificial Sequence: Synthetic oligonucleotide
  Sense strand starting at position 1360 of SEQ ID NO: 588432
aaaguaagcuguuaagaag

SEQ ID NO: 864695 - RNA, 19 nt, Artificial Sequence
  Description of Artificial Sequence: Synthetic oligonucleotide
  Antisense strand to SEQ ID NO: 864694
cuucuuaacagcuuacuuu

SEQ ID NO: 864696 - RNA, 19 nt, Artificial Sequence
  Description of Artificial Sequence: Synthetic oligonucleotide
  Sense strand starting at position 1984 of SEQ ID NO: 588432
aagacacucgcgcaaaguu

SEQ ID NO: 864697 - RNA, 19 nt, Artificial Sequence
  Description of Artificial Sequence: Synthetic oligonucleotide
  Antisense strand to SEQ ID NO: 864696
aacuuugcgcgagugucuu

SEQ ID NO: 864698 - RNA, 19 nt, Artificial Sequence
  Description of Artificial Sequence: Synthetic oligonucleotide
  Sense strand starting at position 2079 of SEQ ID NO: 588432
gcccuuggccaaugaaagu

SEQ ID NO: 864699 - RNA, 19 nt, Artificial Sequence
  Description of Artificial Sequence: Synthetic oligonucleotide
  Antisense strand to SEQ ID NO: 864698
acuuucauuggccaagggc

SEQ ID NO: 864700 - RNA, 19 nt, Artificial Sequence
  Description of Artificial Sequence: Synthetic oligonucleotide
  Sense strand starting at position 2353 of SEQ ID NO: 588432
ggaagaugauucucgaagc

SEQ ID NO: 864701 - RNA, 19 nt, Artificial Sequence
  Description of Artificial Sequence: Synthetic oligonucleotide
  Antisense strand to SEQ ID NO: 864700
gcuucgagaaucaucuucc

SEQ ID NO: 864702 - RNA, 19 nt, Artificial Sequence
  Description of Artificial Sequence: Synthetic oligonucleotide
  Sense strand starting at position 2391 of SEQ ID NO: 588432
gagguaucuuucucuguca

SEQ ID NO: 864703 - RNA, 19 nt, Artificial Sequence
  Description of Artificial Sequence: Synthetic oligonucleotide
  Antisense strand to SEQ ID NO: 864702
ugacagagaaagauaccuc

SEQ ID NO: 864704 - RNA, 19 nt, Artificial Sequence
  Description of Artificial Sequence: Synthetic oligonucleotide
  Sense strand starting at position 2393 of SEQ ID NO: 588432
gguaucuuucucugucaca

SEQ ID NO: 864705 - RNA, 19 nt, Artificial Sequence
  Description of Artificial Sequence: Synthetic oligonucleotide
  Antisense strand to SEQ ID NO: 864704
ugugacagagaaagauacc

SEQ ID NO: 864706 - RNA, 19 nt, Artificial Sequence
  Description of Artificial Sequence: Synthetic oligonucleotide
  Sense strand starting at position 2394 of SEQ ID NO: 588432
guaucuuucucugucacau

SEQ ID NO: 864707 - RNA, 19 nt, Artificial Sequence
  Description of Artificial Sequence: Synthetic oligonucleotide
  Antisense strand to SEQ ID NO: 864706
augugacagagaaagauac

SEQ ID NO: 864708 - RNA, 19 nt, Artificial Sequence
  Description of Artificial Sequence: Synthetic oligonucleotide
  Sense strand starting at position 2423 of SEQ ID NO: 588432
ggaaauuaauaugggcaga

SEQ ID NO: 864709 - RNA, 19 nt, Artificial Sequence
  Description of Artificial Sequence: Synthetic oligonucleotide
  Antisense strand to SEQ ID NO: 864708
ucugcccauauuaauuucc

SEQ ID NO: 864710 - RNA, 19 nt, Artificial Sequence
  Description of Artificial Sequence: Synthetic oligonucleotide
  Sense strand starting at position 2467 of SEQ ID NO: 588432
gcgugauaaaguuacucaa

SEQ ID NO: 864711 - RNA, 19 nt, Artificial Sequence
  Description of Artificial Sequence: Synthetic oligonucleotide
  Antisense strand to SEQ ID NO: 864710
uugaguaacuuuaucacgc

SEQ ID NO: 864712 - RNA, 19 nt, Artificial Sequence
  Description of Artificial Sequence: Synthetic oligonucleotide
  Sense strand starting at position 2832 of SEQ ID NO: 588432
gguugcgugcuucugaagu

SEQ ID NO: 864713 - RNA, 19 nt, Artificial Sequence
  Description of Artificial Sequence: Synthetic oligonucleotide
  Antisense strand to SEQ ID NO: 864712
acuucagaagcacgcaacc

SEQ ID NO: 864714 - RNA, 19 nt, Artificial Sequence
  Description of Artificial Sequence: Synthetic oligonucleotide
  Sense strand starting at position 2884 of SEQ ID NO: 588432
gcuugagucagggaguuuc

SEQ ID NO: 864715 - RNA, 19 nt, Artificial Sequence
  Description of Artificial Sequence: Synthetic oligonucleotide
  Antisense strand to SEQ ID NO: 864714
gaaacucccugacucaagc

SEQ ID NO: 864716 - RNA, 19 nt, Artificial Sequence
  Description of Artificial Sequence: Synthetic oligonucleotide
  Sense strand starting at position 3296 of SEQ ID NO: 588432
gaccucgugauccgucauu

SEQ ID NO: 864717 - RNA, 19 nt, Artificial Sequence
  Description of Artificial Sequence: Synthetic oligonucleotide
  Antisense strand to SEQ ID NO: 864716
aaugacggaucacgagguc

SEQ ID NO: 864718 - RNA, 19 nt, Artificial Sequence
  Description of Artificial Sequence: Synthetic oligonucleotide
  Sense strand starting at position 3374 of SEQ ID NO: 588432
acugucgucuuacuuugaa

SEQ ID NO: 864719 - RNA, 19 nt, Artificial Sequence
  Description of Artificial Sequence: Synthetic oligonucleotide
  Antisense strand to SEQ ID NO: 864718
uucaaaguaagacgacagu

SEQ ID NO: 864720 - RNA, 19 nt, Artificial Sequence
  Description of Artificial Sequence: Synthetic oligonucleotide
  Sense strand starting at position 3377 of SEQ ID NO: 588432
gucgucuuacuuugaaagu

SEQ ID NO: 864721 - RNA, 19 nt, Artificial Sequence
  Description of Artificial Sequence: Synthetic oligonucleotide
  Antisense strand to SEQ ID NO: 864720
acuuucaaaguaagacgac

SEQ ID NO: 864722 - RNA, 19 nt, Artificial Sequence
  Description of Artificial Sequence: Synthetic oligonucleotide
  Sense strand starting at position 3386 of SEQ ID NO: 588432
cuuugaaaguuagccaucu

SEQ ID NO: 864723 - RNA, 19 nt, Artificial Sequence
  Description of Artificial Sequence: Synthetic oligonucleotide
  Antisense strand to SEQ ID NO: 864722
agauggcuaacuuucaaag

SEQ ID NO: 864724 - RNA, 19 nt, Artificial Sequence
  Description of Artificial Sequence: Synthetic oligonucleotide
  Sense strand starting at position 3387 of SEQ ID NO: 588432
uuugaaaguuagccaucua

SEQ ID NO: 864725 - RNA, 19 nt, Artificial Sequence
  Description of Artificial Sequence: Synthetic oligonucleotide
  Antisense strand to SEQ ID NO: 864724
uagauggcuaacuuucaaa

SEQ ID NO: 864726 - RNA, 19 nt, Artificial Sequence
  Description of Artificial Sequence: Synthetic oligonucleotide
  Sense strand starting at position 3570 of SEQ ID NO: 588432
ucuugcuuaucugcuaagu

SEQ ID NO: 864727 - RNA, 19 nt, Artificial Sequence
  Description of Artificial Sequence: Synthetic oligonucleotide
  Antisense strand to SEQ ID NO: 864726
acuuagcagauaagcaaga

SEQ ID NO: 864728 - RNA, 19 nt, Artificial Sequence
  Description of Artificial Sequence: Synthetic oligonucleotide
  Sense strand starting at position 3828 of SEQ ID NO: 588432
agaucuccucagugccaga

SEQ ID NO: 864729 - RNA, 19 nt, Artificial Sequence
  Description of Artificial Sequence: Synthetic oligonucleotide
  Antisense strand to SEQ ID NO: 864728
ucuggcacugaggagaucu

SEQ ID NO: 864730 - RNA, 19 nt, Artificial Sequence
  Description of Artificial Sequence: Synthetic oligonucleotide
  Sense strand starting at position 3897 of SEQ ID NO: 588432
uccuauuccugucuauguu

SEQ ID NO: 864731 - RNA, 19 nt, Artificial Sequence
  Description of Artificial Sequence: Synthetic oligonucleotide
  Antisense strand to SEQ ID NO: 864730
aacauagacaggaauagga

SEQ ID NO: 864732 - RNA, 19 nt, Artificial Sequence
  Description of Artificial Sequence: Synthetic oligonucleotide
  Sense strand starting at position 3905 of SEQ ID NO: 588432
cugucuauguuguuucuau

SEQ ID NO: 864733 - RNA, 19 nt, Artificial Sequence
  Description of Artificial Sequence: Synthetic oligonucleotide
  Antisense strand to SEQ ID NO: 864732
auagaaacaacauagacag

SEQ ID NO: 864734 - RNA, 19 nt, Artificial Sequence
  Description of Artificial Sequence: Synthetic oligonucleotide
  Sense strand starting at position 3913 of SEQ ID NO: 588432
guuguuucuauguaucaga

SEQ ID NO: 864735 - RNA, 19 nt, Artificial Sequence
  Description of Artificial Sequence: Synthetic oligonucleotide
  Antisense strand to SEQ ID NO: 864734
ucugauacauagaaacaac

SEQ ID NO: 864736 - RNA, 19 nt, Artificial Sequence
  Description of Artificial Sequence: Synthetic oligonucleotide
  Sense strand starting at position 3977 of SEQ ID NO: 588432
cguggugauggauguuauu

SEQ ID NO: 864737 - RNA, 19 nt, Artificial Sequence
  Description of Artificial Sequence: Synthetic oligonucleotide
  Antisense strand to SEQ ID NO: 864736
aauaacauccaucaccacg

SEQ ID NO: 864738 - RNA, 19 nt, Artificial Sequence
  Description of Artificial Sequence: Synthetic oligonucleotide
  Sense strand starting at position 71 of SEQ ID NO: 588433
agaucuugguuugccaaua

SEQ ID NO: 864739 - RNA, 19 nt, Artificial Sequence
  Description of Artificial Sequence: Synthetic oligonucleotide
  Antisense strand to SEQ ID NO: 864738
uauuggcaaaccaagaucu

SEQ ID NO: 864740 - RNA, 19 nt, Artificial Sequence
  Description of Artificial Sequence: Synthetic oligonucleotide
  Sense strand starting at position 113 of SEQ ID NO: 588433
gagucagccucuuuggaga

SEQ ID NO: 864741 - RNA, 19 nt, Artificial Sequence
  Description of Artificial Sequence: Synthetic oligonucleotide
  Antisense strand to SEQ ID NO: 864740
ucuccaaagaggcugacuc

SEQ ID NO: 864742 - RNA, 19 nt, Artificial Sequence
  Description of Artificial Sequence: Synthetic oligonucleotide
  Sense strand starting at position 266 of SEQ ID NO: 588433
agccaaaucugggacauuu

SEQ ID NO: 864743 - RNA, 19 nt, Artificial Sequence
  Description of Artificial Sequence: Synthetic oligonucleotide
  Antisense strand to SEQ ID NO: 864742
aaaugucccagauuuggcu

SEQ ID NO: 864744 - RNA, 19 nt, Artificial Sequence
  Description of Artificial Sequence: Synthetic oligonucleotide
  Sense strand starting at position 797 of SEQ ID NO: 588433
aggaucuggcaacgucaua

SEQ ID NO: 864745 - RNA, 19 nt, Artificial Sequence
  Description of Artificial Sequence: Synthetic oligonucleotide
  Antisense strand to SEQ ID NO: 864744
uaugacguugccagauccu

SEQ ID NO: 864746 - RNA, 19 nt, Artificial Sequence
  Description of Artificial Sequence: Synthetic oligonucleotide
  Sense strand starting at position 804 of SEQ ID NO: 588433
ggcaacgucauagagguau

SEQ ID NO: 864747 - RNA, 19 nt, Artificial Sequence
  Description of Artificial Sequence: Synthetic oligonucleotide
  Antisense strand to SEQ ID NO: 864746
auaccucuaugacguugcc

SEQ ID NO: 864748 - RNA, 19 nt, Artificial Sequence
  Description of Artificial Sequence: Synthetic oligonucleotide
  Sense strand starting at position 808 of SEQ ID NO: 588433
acgucauagagguaucgau

SEQ ID NO: 864749 - RNA, 19 nt, Artificial Sequence
  Description of Artificial Sequence: Synthetic oligonucleotide
  Antisense strand to SEQ ID NO: 864748
aucgauaccucuaugacgu

SEQ ID NO: 864750 - RNA, 19 nt, Artificial Sequence
  Description of Artificial Sequence: Synthetic oligonucleotide
  Sense strand starting at position 849 of SEQ ID NO: 588433
ugcuaaagccauggaggau

SEQ ID NO: 864751 - RNA, 19 nt, Artificial Sequence
  Description of Artificial Sequence: Synthetic oligonucleotide
  Antisense strand to SEQ ID NO: 864750
auccuccauggcuuuagca

SEQ ID NO: 864752 - RNA, 19 nt, Artificial Sequence
  Description of Artificial Sequence: Synthetic oligonucleotide
  Sense strand starting at position 850 of SEQ ID NO: 588433
gcuaaagccauggaggauu

SEQ ID NO: 864753 - RNA, 19 nt, Artificial Sequence
  Description of Artificial Sequence: Synthetic oligonucleotide
  Antisense strand to SEQ ID NO: 864752
aauccuccauggcuuuagc

SEQ ID NO: 864754 - RNA, 19 nt, Artificial Sequence
  Description of Artificial Sequence: Synthetic oligonucleotide
  Sense strand starting at position 864 of SEQ ID NO: 588433
ggauuaagguuugcccaga

SEQ ID NO: 864755 - RNA, 19 nt, Artificial Sequence
  Description of Artificial Sequence: Synthetic oligonucleotide
  Antisense strand to SEQ ID NO: 864754
ucugggcaaaccuuaaucc

SEQ ID NO: 864756 - RNA, 19 nt, Artificial Sequence
  Description of Artificial Sequence: Synthetic oligonucleotide
  Sense strand starting at position 865 of SEQ ID NO: 588433
gauuaagguuugcccagaa

SEQ ID NO: 864757 - RNA, 19 nt, Artificial Sequence
  Description of Artificial Sequence: Synthetic oligonucleotide
  Antisense strand to SEQ ID NO: 864756
uucugggcaaaccuuaauc

SEQ ID NO: 864758 - RNA, 19 nt, Artificial Sequence
  Description of Artificial Sequence: Synthetic oligonucleotide
  Sense strand starting at position 969 of SEQ ID NO: 588433
guaaccaggugaucaagau

SEQ ID NO: 864759 - RNA, 19 nt, Artificial Sequence
  Description of Artificial Sequence: Synthetic oligonucleotide
  Antisense strand to SEQ ID NO: 864758
aucuugaucaccugguuac

SEQ ID NO: 864760 - RNA, 19 nt, Artificial Sequence
  Description of Artificial Sequence: Synthetic oligonucleotide
  Sense strand starting at position 1031 of SEQ ID NO: 588433
ucaugugacuuacugagaa

SEQ ID NO: 864761 - RNA, 19 nt, Artificial Sequence
  Description of Artificial Sequence: Synthetic oligonucleotide
  Antisense strand to SEQ ID NO: 864760
uucucaguaagucacauga

SEQ ID NO: 864762 - RNA, 19 nt, Artificial Sequence
  Description of Artificial Sequence: Synthetic oligonucleotide
  Sense strand starting at position 1056 of SEQ ID NO: 588433
ggcaucauuucugugguau

SEQ ID NO: 864763 - RNA, 19 nt, Artificial Sequence
  Description of Artificial Sequence: Synthetic oligonucleotide
  Antisense strand to SEQ ID NO: 864762
auaccacagaaaugaugcc

SEQ ID NO: 864764 - RNA, 19 nt, Artificial Sequence
  Description of Artificial Sequence: Synthetic oligonucleotide
  Sense strand starting at position 1104 of SEQ ID NO: 588433
gugguuugaaagcacauau

SEQ ID NO: 864765 - RNA, 19 nt, Artificial Sequence
  Description of Artificial Sequence: Synthetic oligonucleotide
  Antisense strand to SEQ ID NO: 864764
auaugugcuuucaaaccac

SEQ ID NO: 864766 - RNA, 19 nt, Artificial Sequence
  Description of Artificial Sequence: Synthetic oligonucleotide
  Sense strand starting at position 1198 of SEQ ID NO: 588433
uuaggauuguuucccaaga

SEQ ID NO: 864767 - RNA, 19 nt, Artificial Sequence
  Description of Artificial Sequence: Synthetic oligonucleotide
  Antisense strand to SEQ ID NO: 864766
ucuugggaaacaauccuaa

SEQ ID NO: 864768 - RNA, 19 nt, Artificial Sequence
  Description of Artificial Sequence: Synthetic oligonucleotide
  Sense strand starting at position 1199 of SEQ ID NO: 588433
uaggauuguuucccaagaa

SEQ ID NO: 864769 - RNA, 19 nt, Artificial Sequence
  Description of Artificial Sequence: Synthetic oligonucleotide
  Antisense strand to SEQ ID NO: 864768
uucuugggaaacaauccua

SEQ ID NO: 864770 - RNA, 19 nt, Artificial Sequence
  Description of Artificial Sequence: Synthetic oligonucleotide
  Sense strand starting at position 1203 of SEQ ID NO: 588433
auuguuucccaagaagucu

SEQ ID NO: 864771 - RNA, 19 nt, Artificial Sequence
  Description of Artificial Sequence: Synthetic oligonucleotide
  Antisense strand to SEQ ID NO: 864770
agacuucuugggaaacaau

SEQ ID NO: 864772 - RNA, 19 nt, Artificial Sequence
  Description of Artificial Sequence: Synthetic oligonucleotide
  Sense strand starting at position 1209 of SEQ ID NO: 588433
ucccaagaagucugaggau

SEQ ID NO: 864773 - RNA, 19 nt, Artificial Sequence
  Description of Artificial Sequence: Synthetic oligonucleotide
  Antisense strand to SEQ ID NO: 864772
auccucagacuucuuggga

SEQ ID NO: 864774 - RNA, 19 nt, Artificial Sequence
  Description of Artificial Sequence: Synthetic oligonucleotide
  Sense strand starting at position 1230 of SEQ ID NO: 588433
aggacaacgccuuaucugu

SEQ ID NO: 864775 - RNA, 19 nt, Artificial Sequence
  Description of Artificial Sequence: Synthetic oligonucleotide
  Antisense strand to SEQ ID NO: 864774
acagauaaggcguuguccu

SEQ ID NO: 864776 - RNA, 19 nt, Artificial Sequence
  Description of Artificial Sequence: Synthetic oligonucleotide
  Sense strand starting at position 1311 of SEQ ID NO: 588433
ucgcgcagagcuuugcaaa

SEQ ID NO: 864777 - RNA, 19 nt, Artificial Sequence
  Description of Artificial Sequence: Synthetic oligonucleotide
  Antisense strand to SEQ ID NO: 864776
uuugcaaagcucugcgcga

SEQ ID NO: 864778 - RNA, 19 nt, Artificial Sequence
  Description of Artificial Sequence: Synthetic oligonucleotide
  Sense strand starting at position 1417 of SEQ ID NO: 588433
uuaggucgugucaaucguu

SEQ ID NO: 864779 - RNA, 19 nt, Artificial Sequence
  Description of Artificial Sequence: Synthetic oligonucleotide
  Antisense strand to SEQ ID NO: 864778
aacgauugacacgaccuaa

SEQ ID NO: 864780 - RNA, 19 nt, Artificial Sequence
  Description of Artificial Sequence: Synthetic oligonucleotide
  Sense strand starting at position 1496 of SEQ ID NO: 588433
ccgagauugcuuugacaac

SEQ ID NO: 864781 - RNA, 19 nt, Artificial Sequence
  Description of Artificial Sequence: Synthetic oligonucleotide
  Antisense strand to SEQ ID NO: 864780
guugucaaagcaaucucgg

SEQ ID NO: 864782 - RNA, 19 nt, Artificial Sequence
  Description of Artificial Sequence: Synthetic oligonucleotide
  Sense strand starting at position 1668 of SEQ ID NO: 588433
gaaauaaaugcagguuguu

SEQ ID NO: 864783 - RNA, 19 nt, Artificial Sequence
  Description of Artificial Sequence: Synthetic oligonucleotide
  Antisense strand to SEQ ID NO: 864782
aacaaccugcauuuauuuc

SEQ ID NO: 864784 - RNA, 19 nt, Artificial Sequence
  Description of Artificial Sequence: Synthetic oligonucleotide
  Sense strand starting at position 1671 of SEQ ID NO: 588433
auaaaugcagguuguuaga

SEQ ID NO: 864785 - RNA, 19 nt, Artificial Sequence
  Description of Artificial Sequence: Synthetic oligonucleotide
  Antisense strand to SEQ ID NO: 864784
ucuaacaaccugcauuuau

SEQ ID NO: 864786 - RNA, 19 nt, Artificial Sequence
  Description of Artificial Sequence: Synthetic oligonucleotide
  Sense strand starting at position 2144 of SEQ ID NO: 588433
aaauuugucugugccuuga

SEQ ID NO: 864787 - RNA, 19 nt, Artificial Sequence
  Description of Artificial Sequence: Synthetic oligonucleotide
  Antisense strand to SEQ ID NO: 864786
ucaaggcacagacaaauuu

SEQ ID NO: 864788 - RNA, 19 nt, Artificial Sequence
  Description of Artificial Sequence: Synthetic oligonucleotide
  Sense strand starting at position 2146 of SEQ ID NO: 588433
auuugucugugccuugaga

SEQ ID NO: 864789 - RNA, 19 nt, Artificial Sequence
  Description of Artificial Sequence: Synthetic oligonucleotide
  Antisense strand to SEQ ID NO: 864788
ucucaaggcacagacaaau

SEQ ID NO: 864790 - RNA, 19 nt, Artificial Sequence
  Description of Artificial Sequence: Synthetic oligonucleotide
  Sense strand starting at position 2157 of SEQ ID NO: 588433
ccuugagacugugcagaaa

SEQ ID NO: 864791 - RNA, 19 nt, Artificial Sequence
  Description of Artificial Sequence: Synthetic oligonucleotide
  Antisense strand to SEQ ID NO: 864790
uuucugcacagucucaagg

SEQ ID NO: 864792 - RNA, 19 nt, Artificial Sequence
  Description of Artificial Sequence: Synthetic oligonucleotide
  Sense strand starting at position 2279 of SEQ ID NO: 588433
gcaauucuccuagguaaau

SEQ ID NO: 864793 - RNA, 19 nt, Artificial Sequence
  Description of Artificial Sequence: Synthetic oligonucleotide
  Antisense strand to SEQ ID NO: 864792
auuuaccuaggagaauugc

SEQ ID NO: 864794 - RNA, 19 nt, Artificial Sequence
  Description of Artificial Sequence: Synthetic oligonucleotide
  Sense strand starting at position 2420 of SEQ ID NO: 588433
uccauuggugaauggauaa

SEQ ID NO: 864795 - RNA, 19 nt, Artificial Sequence
  Description of Artificial Sequence: Synthetic oligonucleotide
  Antisense strand to SEQ ID NO: 864794
uuauccauucaccaaugga

SEQ ID NO: 864796 - RNA, 19 nt, Artificial Sequence
  Description of Artificial Sequence: Synthetic oligonucleotide
  Sense strand starting at position 2579 of SEQ ID NO: 588433
gcauaucccuaggcacuaa

SEQ ID NO: 864797 - RNA, 19 nt, Artificial Sequence
  Description of Artificial Sequence: Synthetic oligonucleotide
  Antisense strand to SEQ ID NO: 864796
uuagugccuagggauaugc

SEQ ID NO: 864798 - RNA, 19 nt, Artificial Sequence
  Description of Artificial Sequence: Synthetic oligonucleotide
  Sense strand starting at position 2592 of SEQ ID NO: 588433
cacuaaggauaucuagguu

SEQ ID NO: 864799 - RNA, 19 nt, Artificial Sequence
  Description of Artificial Sequence: Synthetic oligonucleotide
  Antisense strand to SEQ ID NO: 864798
aaccuagauauccuuagug

SEQ ID NO: 864800 - RNA, 19 nt, Artificial Sequence
  Description of Artificial Sequence: Synthetic oligonucleotide
  Sense strand starting at position 2595 of SEQ ID NO: 588433
uaaggauaucuagguuauu

SEQ ID NO: 864801 - RNA, 19 nt, Artificial Sequence
  Description of Artificial Sequence: Synthetic oligonucleotide
  Antisense strand to SEQ ID NO: 864800
aauaaccuagauauccuua

SEQ ID NO: 864802 - RNA, 19 nt, Artificial Sequence
  Description of Artificial Sequence: Synthetic oligonucleotide
  Sense strand starting at position 2596 of SEQ ID NO: 588433
aaggauaucuagguuauug

SEQ ID NO: 864803 - RNA, 19 nt, Artificial Sequence
  Description of Artificial Sequence: Synthetic oligonucleotide
  Antisense strand to SEQ ID NO: 864802
caauaaccuagauauccuu

SEQ ID NO: 864804 - RNA, 19 nt, Artificial Sequence
  Description of Artificial Sequence: Synthetic oligonucleotide
  Sense strand starting at position 2697 of SEQ ID NO: 588433
ggauguaccuaggugaaac

SEQ ID NO: 864805 - RNA, 19 nt, Artificial Sequence
  Description of Artificial Sequence: Synthetic oligonucleotide
  Antisense strand to SEQ ID NO: 864804
guuucaccuagguacaucc

SEQ ID NO: 864806 - RNA, 19 nt, Artificial Sequence
  Description of Artificial Sequence: Synthetic oligonucleotide
  Sense strand starting at position 2727 of SEQ ID NO: 588433
cugucugucgcgagaauug

SEQ ID NO: 864807 - RNA, 19 nt, Artificial Sequence
  Description of Artificial Sequence: Synthetic oligonucleotide
  Antisense strand to SEQ ID NO: 864806
caauucucgcgacagacag

SEQ ID NO: 864808 - RNA, 19 nt, Artificial Sequence
  Description of Artificial Sequence: Synthetic oligonucleotide
  Sense strand starting at position 2729 of SEQ ID NO: 588433
gucugucgcgagaauugcu

SEQ ID NO: 864809 - RNA, 19 nt, Artificial Sequence
  Description of Artificial Sequence: Synthetic oligonucleotide
  Antisense strand to SEQ ID NO: 864808
agcaauucucgcgacagac

SEQ ID NO: 864810 - RNA, 19 nt, Artificial Sequence
  Description of Artificial Sequence: Synthetic oligonucleotide
  Sense strand starting at position 3111 of SEQ ID NO: 588433
cccuguuuggcaggaggaa

SEQ ID NO: 864811 - RNA, 19 nt, Artificial Sequence
  Description of Artificial Sequence: Synthetic oligonucleotide
  Antisense strand to SEQ ID NO: 864810
uuccuccugccaaacaggg

SEQ ID NO: 864812 - RNA, 19 nt, Artificial Sequence
  Description of Artificial Sequence: Synthetic oligonucleotide
  Sense strand starting at position 3112 of SEQ ID NO: 588433
ccuguuuggcaggaggaaa

SEQ ID NO: 864813 - RNA, 19 nt, Artificial Sequence
  Description of Artificial Sequence: Synthetic oligonucleotide
  Antisense strand to SEQ ID NO: 864812
uuuccuccugccaaacagg

SEQ ID NO: 864814 - RNA, 19 nt, Artificial Sequence
  Description of Artificial Sequence: Synthetic oligonucleotide
  Sense strand starting at position 3703 of SEQ ID NO: 588433
gcuacacaacuuggugaau

SEQ ID NO: 864815 - RNA, 19 nt, Artificial Sequence
  Description of Artificial Sequence: Synthetic oligonucleotide
  Antisense strand to SEQ ID NO: 864814
auucaccaaguuguguagc

SEQ ID NO: 864816 - RNA, 19 nt, Artificial Sequence
  Description of Artificial Sequence: Synthetic oligonucleotide
  Sense strand starting at position 3704 of SEQ ID NO: 588433
cuacacaacuuggugaaua

SEQ ID NO: 864817 - RNA, 19 nt, Artificial Sequence
  Description of Artificial Sequence: Synthetic oligonucleotide
  Antisense strand to SEQ ID NO: 864816
uauucaccaaguuguguag

SEQ ID NO: 864818 - RNA, 19 nt, Artificial Sequence
  Description of Artificial Sequence: Synthetic oligonucleotide
  Sense strand starting at position 6 of SEQ ID NO: 588434
cugauuaagguguagccua

SEQ ID NO: 864819 - RNA, 19 nt, Artificial Sequence
  Description of Artificial Sequence: Synthetic oligonucleotide
  Antisense strand to SEQ ID NO: 864818
uaggcuacaccuuaaucag

SEQ ID NO: 864820 - RNA, 19 nt, Artificial Sequence
  Description of Artificial Sequence: Synthetic oligonucleotide
  Sense strand starting at position 313 of SEQ ID NO: 588434
aaaguagccuaagggaauu

SEQ ID NO: 864821 - RNA, 19 nt, Artificial Sequence
  Description of Artificial Sequence: Synthetic oligonucleotide
  Antisense strand to SEQ ID NO: 864820
aauucccuuaggcuacuuu

SEQ ID NO: 864822 - RNA, 19 nt, Artificial Sequence
  Description of Artificial Sequence: Synthetic oligonucleotide
  Sense strand starting at position 377 of SEQ ID NO: 588434
ccaagcagauaucucgaaa

SEQ ID NO: 864823 - RNA, 19 nt, Artificial Sequence
  Description of Artificial Sequence: Synthetic oligonucleotide
  Antisense strand to SEQ ID NO: 864822
uuucgagauaucugcuugg

SEQ ID NO: 864824 - RNA, 19 nt, Artificial Sequence
  Description of Artificial Sequence: Synthetic oligonucleotide
  Sense strand starting at position 390 of SEQ ID NO: 588434
ucgaaagacucgcucucau

SEQ ID NO: 864825 - RNA, 19 nt, Artificial Sequence
  Description of Artificial Sequence: Synthetic oligonucleotide
  Antisense strand to SEQ ID NO: 864824
augagagcgagucuuucga

SEQ ID NO: 864826 - RNA, 19 nt, Artificial Sequence
  Description of Artificial Sequence: Synthetic oligonucleotide
  Sense strand starting at position 474 of SEQ ID NO: 588434
cuuuccauacugugaagaa

SEQ ID NO: 864827 - RNA, 19 nt, Artificial Sequence
  Description of Artificial Sequence: Synthetic oligonucleotide
  Antisense strand to SEQ ID NO: 864826
uucuucacaguauggaaag

SEQ ID NO: 864828 - RNA, 19 nt, Artificial Sequence
  Description of Artificial Sequence: Synthetic oligonucleotide
  Sense strand starting at position 475 of SEQ ID NO: 588434
uuuccauacugugaagaac

SEQ ID NO: 864829 - RNA, 19 nt, Artificial Sequence
  Description of Artificial Sequence: Synthetic oligonucleotide
  Antisense strand to SEQ ID NO: 864828
guucuucacaguauggaaa

SEQ ID NO: 864830 - RNA, 19 nt, Artificial Sequence
  Description of Artificial Sequence: Synthetic oligonucleotide
  Sense strand starting at position 544 of SEQ ID NO: 588434
gaaggaggcuugcucagua

SEQ ID NO: 864831 - RNA, 19 nt, Artificial Sequence
  Description of Artificial Sequence: Synthetic oligonucleotide
  Antisense strand to SEQ ID NO: 864830
uacugagcaagccuccuuc

SEQ ID NO: 864832 - RNA, 19 nt, Artificial Sequence
  Description of Artificial Sequence: Synthetic oligonucleotide
  Sense strand starting at position 549 of SEQ ID NO: 588434
aggcuugcucaguaucaca

SEQ ID NO: 864833 - RNA, 19 nt, Artificial Sequence
  Description of Artificial Sequence: Synthetic oligonucleotide
  Antisense strand to SEQ ID NO: 864832
ugugauacugagcaagccu

SEQ ID NO: 864834 - RNA, 19 nt, Artificial Sequence
  Description of Artificial Sequence: Synthetic oligonucleotide
  Sense strand starting at position 672 of SEQ ID NO: 588434
ggcaucuccugaguccaga

SEQ ID NO: 864835 - RNA, 19 nt, Artificial Sequence
  Description of Artificial Sequence: Synthetic oligonucleotide
  Antisense strand to SEQ ID NO: 864834
ucuggacucaggagaugcc

SEQ ID NO: 864836 - RNA, 19 nt, Artificial Sequence
  Description of Artificial Sequence: Synthetic oligonucleotide
  Sense strand starting at position 713 of SEQ ID NO: 588434
gggaccuagccuuacucau

SEQ ID NO: 864837 - RNA, 19 nt, Artificial Sequence
  Description of Artificial Sequence: Synthetic oligonucleotide
  Antisense strand to SEQ ID NO: 864836
augaguaaggcuagguccc

SEQ ID NO: 864838 - RNA, 19 nt, Artificial Sequence
  Description of Artificial Sequence: Synthetic oligonucleotide
  Sense strand starting at position 739 of SEQ ID NO: 588434
ggacaauccggaugaagca

SEQ ID NO: 864839 - RNA, 19 nt, Artificial Sequence
  Description of Artificial Sequence: Synthetic oligonucleotide
  Antisense strand to SEQ ID NO: 864838
ugcuucauccggauugucc

SEQ ID NO: 864840 - RNA, 19 nt, Artificial Sequence
  Description of Artificial Sequence: Synthetic oligonucleotide
  Sense strand starting at position 865 of SEQ ID NO: 588434
gaaacaggucuauggcuga

SEQ ID NO: 864841 - RNA, 19 nt, Artificial Sequence
  Description of Artificial Sequence: Synthetic oligonucleotide
  Antisense strand to SEQ ID NO: 864840
ucagccauagaccuguuuc

SEQ ID NO: 864842 - RNA, 19 nt, Artificial Sequence
  Description of Artificial Sequence: Synthetic oligonucleotide
  Sense strand starting at position 988 of SEQ ID NO: 588434
agccuagagggaugggauu

SEQ ID NO: 864843 - RNA, 19 nt, Artificial Sequence
  Description of Artificial Sequence: Synthetic oligonucleotide
  Antisense strand to SEQ ID NO: 864842
aaucccaucccucuaggcu

SEQ ID NO: 864844 - RNA, 19 nt, Artificial Sequence
  Description of Artificial Sequence: Synthetic oligonucleotide
  Sense strand starting at position 1076 of SEQ ID NO: 588434
ucuggacagcucuagugua

SEQ ID NO: 864845 - RNA, 19 nt, Artificial Sequence
  Description of Artificial Sequence: Synthetic oligonucleotide
  Antisense strand to SEQ ID NO: 864844
uacacuagagcuguccaga

SEQ ID NO: 864846 - RNA, 19 nt, Artificial Sequence
  Description of Artificial Sequence: Synthetic oligonucleotide
  Sense strand starting at position 1407 of SEQ ID NO: 588434
gagagcuguugucacacuu

SEQ ID NO: 864847 - RNA, 19 nt, Artificial Sequence
  Description of Artificial Sequence: Synthetic oligonucleotide
  Antisense strand to SEQ ID NO: 864846
aagugugacaacagcucuc

SEQ ID NO: 864848 - RNA, 19 nt, Artificial Sequence
  Description of Artificial Sequence: Synthetic oligonucleotide
  Sense strand starting at position 1417 of SEQ ID NO: 588434
gucacacuuuggugacuuu

SEQ ID NO: 864849 - RNA, 19 nt, Artificial Sequence
  Description of Artificial Sequence: Synthetic oligonucleotide
  Antisense strand to SEQ ID NO: 864848
aaagucaccaaagugugac

SEQ ID NO: 864850 - RNA, 19 nt, Artificial Sequence
  Description of Artificial Sequence: Synthetic oligonucleotide
  Sense strand starting at position 2464 of SEQ ID NO: 588434
ccaaacauguucugggauu

SEQ ID NO: 864851 - RNA, 19 nt, Artificial Sequence
  Description of Artificial Sequence: Synthetic oligonucleotide
  Antisense strand to SEQ ID NO: 864850
aaucccagaacauguuugg

SEQ ID NO: 864852 - RNA, 19 nt, Artificial Sequence
  Description of Artificial Sequence: Synthetic oligonucleotide
  Sense strand starting at position 2465 of SEQ ID NO: 588434
caaacauguucugggauuu

SEQ ID NO: 864853 - RNA, 19 nt, Artificial Sequence
  Description of Artificial Sequence: Synthetic oligonucleotide
  Antisense strand to SEQ ID NO: 864852
aaaucccagaacauguuug

SEQ ID NO: 864854 - RNA, 19 nt, Artificial Sequence
  Description of Artificial Sequence: Synthetic oligonucleotide
  Sense strand starting at position 2697 of SEQ ID NO: 588434
ccuagucaccugugccaga

SEQ ID NO: 864855 - RNA, 19 nt, Artificial Sequence
  Description of Artificial Sequence: Synthetic oligonucleotide
  Antisense strand to SEQ ID NO: 864854
ucuggcacaggugacuagg

SEQ ID NO: 864856 - RNA, 19 nt, Artificial Sequence
  Description of Artificial Sequence: Synthetic oligonucleotide
  Sense strand starting at position 2840 of SEQ ID NO: 588434
uuguaauaccaacggcuua

SEQ ID NO: 864857 - RNA, 19 nt, Artificial Sequence
  Description of Artificial Sequence: Synthetic oligonucleotide
  Antisense strand to SEQ ID NO: 864856
uaagccguugguauuacaa

SEQ ID NO: 864858 - RNA, 19 nt, Artificial Sequence
  Description of Artificial Sequence: Synthetic oligonucleotide
  Sense strand starting at position 2845 of SEQ ID NO: 588434
auaccaacggcuuacgaau

SEQ ID NO: 864859 - RNA, 19 nt, Artificial Sequence
  Description of Artificial Sequence: Synthetic oligonucleotide
  Antisense strand to SEQ ID NO: 864858
auucguaagccguugguau

SEQ ID NO: 864860 - RNA, 19 nt, Artificial Sequence
  Description of Artificial Sequence: Synthetic oligonucleotide
  Sense strand starting at position 2938 of SEQ ID NO: 588434
uuaguaccgucaugaguaa

SEQ ID NO: 864861 - RNA, 19 nt, Artificial Sequence
  Description of Artificial Sequence: Synthetic oligonucleotide
  Antisense strand to SEQ ID NO: 864860
uuacucaugacgguacuaa

SEQ ID NO: 864862 - RNA, 19 nt, Artificial Sequence
  Description of Artificial Sequence: Synthetic oligonucleotide
  Sense strand starting at position 2939 of SEQ ID NO: 588434
uaguaccgucaugaguaau

SEQ ID NO: 864863 - RNA, 19 nt, Artificial Sequence
  Description of Artificial Sequence: Synthetic oligonucleotide
  Antisense strand to SEQ ID NO: 864862
auuacucaugacgguacua

SEQ ID NO: 864864 - RNA, 19 nt, Artificial Sequence
  Description of Artificial Sequence: Synthetic oligonucleotide
  Sense strand starting at position 2945 of SEQ ID NO: 588434
cgucaugaguaaugacauu

SEQ ID NO: 864865 - RNA, 19 nt, Artificial Sequence
  Description of Artificial Sequence: Synthetic oligonucleotide
  Antisense strand to SEQ ID NO: 864864
aaugucauuacucaugacg

SEQ ID NO: 864866 - RNA, 19 nt, Artificial Sequence
  Description of Artificial Sequence: Synthetic oligonucleotide
  Sense strand starting at position 2979 of SEQ ID NO: 588434
ccacauauacugugguagu

SEQ ID NO: 864867 - RNA, 19 nt, Artificial Sequence
  Description of Artificial Sequence: Synthetic oligonucleotide
  Antisense strand to SEQ ID NO: 864866
acuaccacaguauaugugg

SEQ ID NO: 864868 - RNA, 19 nt, Artificial Sequence
  Description of Artificial Sequence: Synthetic oligonucleotide
  Sense strand starting at position 2999 of SEQ ID NO: 588434
ccaagagauuaugauacca

SEQ ID NO: 864869 - RNA, 19 nt, Artificial Sequence
  Description of Artificial Sequence: Synthetic oligonucleotide
  Antisense strand to SEQ ID NO: 864868
ugguaucauaaucucuugg

SEQ ID NO: 864870 - RNA, 19 nt, Artificial Sequence
  Description of Artificial Sequence: Synthetic oligonucleotide
  Sense strand starting at position 3026 of SEQ ID NO: 588434
cuauguuucuauguuuaca

SEQ ID NO: 864871 - RNA, 19 nt, Artificial Sequence
  Description of Artificial Sequence: Synthetic oligonucleotide
  Antisense strand to SEQ ID NO: 864870
uguaaacauagaaacauag

SEQ ID NO: 864872 - RNA, 19 nt, Artificial Sequence
  Description of Artificial Sequence: Synthetic oligonucleotide
  Sense strand starting at position 3074 of SEQ ID NO: 588434
guguuacagucaccuaaag

SEQ ID NO: 864873 - RNA, 19 nt, Artificial Sequence
  Description of Artificial Sequence: Synthetic oligonucleotide
  Antisense strand to SEQ ID NO: 864872
cuuuaggugacuguaacac

SEQ ID NO: 864874 - RNA, 19 nt, Artificial Sequence
  Description of Artificial Sequence: Synthetic oligonucleotide
  Sense strand starting at position 3103 of SEQ ID NO: 588434
gggucaaauuggugcccaa

SEQ ID NO: 864875 - RNA, 19 nt, Artificial Sequence
  Description of Artificial Sequence: Synthetic oligonucleotide
  Antisense strand to SEQ ID NO: 864874
uugggcaccaauuugaccc

SEQ ID NO: 864876 - RNA, 19 nt, Artificial Sequence
  Description of Artificial Sequence: Synthetic oligonucleotide
  Sense strand starting at position 3383 of SEQ ID NO: 588434
ggaagaauuccauguugcc

SEQ ID NO: 864877 - RNA, 19 nt, Artificial Sequence
  Description of Artificial Sequence: Synthetic oligonucleotide
  Antisense strand to SEQ ID NO: 864876
ggcaacauggaauucuucc

SEQ ID NO: 864878 - RNA, 19 nt, Artificial Sequence
  Description of Artificial Sequence: Synthetic oligonucleotide
  Sense strand starting at position 3573 of SEQ ID NO: 588434
ggaugcauuuccuaacuua

SEQ ID NO: 864879 - RNA, 19 nt, Artificial Sequence
  Description of Artificial Sequence: Synthetic oligonucleotide
  Antisense strand to SEQ ID NO: 864878
uaaguuaggaaaugcaucc

SEQ ID NO: 864880 - RNA, 19 nt, Artificial Sequence
  Description of Artificial Sequence: Synthetic oligonucleotide
  Sense strand starting at position 3777 of SEQ ID NO: 588434
aauguauugucuuugugug

SEQ ID NO: 864881 - RNA, 19 nt, Artificial Sequence
  Description of Artificial Sequence: Synthetic oligonucleotide
  Antisense strand to SEQ ID NO: 864880
cacacaaagacaauacauu

SEQ ID NO: 864882 - RNA, 19 nt, Artificial Sequence
  Description of Artificial Sequence: Synthetic oligonucleotide
  Sense strand starting at position 3778 of SEQ ID NO: 588434
auguauugucuuugugugu

SEQ ID NO: 864883 - RNA, 19 nt, Artificial Sequence
  Description of Artificial Sequence: Synthetic oligonucleotide
  Antisense strand to SEQ ID NO: 864882
acacacaaagacaauacau

SEQ ID NO: 864884 - RNA, 19 nt, Artificial Sequence
  Description of Artificial Sequence: Synthetic oligonucleotide
  Sense strand starting at position 1 of SEQ ID NO: 588435
ugucuugugguuuggauca

SEQ ID NO: 864885 - RNA, 19 nt, Artificial Sequence
  Description of Artificial Sequence: Synthetic oligonucleotide
  Antisense strand to SEQ ID NO: 864884
ugauccaaaccacaagaca

SEQ ID NO: 864886 - RNA, 19 nt, Artificial Sequence
  Description of Artificial Sequence: Synthetic oligonucleotide
  Sense strand starting at position 3 of SEQ ID NO: 588435
ucuugugguuuggaucauu

SEQ ID NO: 864887 - RNA, 19 nt, Artificial Sequence
  Description of Artificial Sequence: Synthetic oligonucleotide
  Antisense strand to SEQ ID NO: 864886
aaugauccaaaccacaaga

SEQ ID NO: 864888 - RNA, 19 nt, Artificial Sequence
  Description of Artificial Sequence: Synthetic oligonucleotide
  Sense strand starting at position 39 of SEQ ID NO: 588435
gccagauagugccugucua

SEQ ID NO: 864889 - RNA, 19 nt, Artificial Sequence
  Description of Artificial Sequence: Synthetic oligonucleotide
  Antisense strand to SEQ ID NO: 864888
uagacaggcacuaucuggc

SEQ ID NO: 864890 - RNA, 19 nt, Artificial Sequence
  Description of Artificial Sequence: Synthetic oligonucleotide
  Sense strand starting at position 40 of SEQ ID NO: 588435
ccagauagugccugucuau

SEQ ID NO: 864891 - RNA, 19 nt, Artificial Sequence
  Description of Artificial Sequence: Synthetic oligonucleotide
  Antisense strand to SEQ ID NO: 864890
auagacaggcacuaucugg

SEQ ID NO: 864892 - RNA, 19 nt, Artificial Sequence
  Description of Artificial Sequence: Synthetic oligonucleotide
  Sense strand starting at position 61 of SEQ ID NO: 588435
ccuacauagcuuuauguau

SEQ ID NO: 864893 - RNA, 19 nt, Artificial Sequence
  Description of Artificial Sequence: Synthetic oligonucleotide
  Antisense strand to SEQ ID NO: 864892
auacauaaagcuauguagg

SEQ ID NO: 864894 - RNA, 19 nt, Artificial Sequence
  Description of Artificial Sequence: Synthetic oligonucleotide
  Sense strand starting at position 117 of SEQ ID NO: 588435
ggguccacagcuugauaca

SEQ ID NO: 864895 - RNA, 19 nt, Artificial Sequence
  Description of Artificial Sequence: Synthetic oligonucleotide
  Antisense strand to SEQ ID NO: 864894
uguaucaagcuguggaccc

SEQ ID NO: 864896 - RNA, 19 nt, Artificial Sequence
  Description of Artificial Sequence: Synthetic oligonucleotide
  Sense strand starting at position 201 of SEQ ID NO: 588435
gcugaauaugagcaguucu

SEQ ID NO: 864897 - RNA, 19 nt, Artificial Sequence
  Description of Artificial Sequence: Synthetic oligonucleotide
  Antisense strand to SEQ ID NO: 864896
agaacugcucauauucagc

SEQ ID NO: 864898 - RNA, 19 nt, Artificial Sequence
  Description of Artificial Sequence: Synthetic oligonucleotide
  Sense strand starting at position 224 of SEQ ID NO: 588435
aaccgugccuuacauaaga

SEQ ID NO: 864899 - RNA, 19 nt, Artificial Sequence
  Description of Artificial Sequence: Synthetic oligonucleotide
  Antisense strand to SEQ ID NO: 864898
ucuuauguaaggcacgguu

SEQ ID NO: 864900 - RNA, 19 nt, Artificial Sequence
  Description of Artificial Sequence: Synthetic oligonucleotide
  Sense strand starting at position 255 of SEQ ID NO: 588435
cugauuaagguguagccua

SEQ ID NO: 864901 - RNA, 19 nt, Artificial Sequence
  Description of Artificial Sequence: Synthetic oligonucleotide
  Antisense strand to SEQ ID NO: 864900
uaggcuacaccuuaaucag

SEQ ID NO: 864902 - RNA, 19 nt, Artificial Sequence
  Description of Artificial Sequence: Synthetic oligonucleotide
  Sense strand starting at position 562 of SEQ ID NO: 588435
aaaguagccuaagggaauu

SEQ ID NO: 864903 - RNA, 19 nt, Artificial Sequence
  Description of Artificial Sequence: Synthetic oligonucleotide
  Antisense strand to SEQ ID NO: 864902
aauucccuuaggcuacuuu

SEQ ID NO: 864904 - RNA, 19 nt, Artificial Sequence
  Description of Artificial Sequence: Synthetic oligonucleotide
  Sense strand starting at position 626 of SEQ ID NO: 588435
ccaagcagauaucucgaaa

SEQ ID NO: 864905 - RNA, 19 nt, Artificial Sequence
  Description of Artificial Sequence: Synthetic oligonucleotide
  Antisense strand to SEQ ID NO: 864904
uuucgagauaucugcuugg

SEQ ID NO: 864906 - RNA, 19 nt, Artificial Sequence
  Description of Artificial Sequence: Synthetic oligonucleotide
  Sense strand starting at position 639 of SEQ ID NO: 588435
ucgaaagacucgcucucau

SEQ ID NO: 864907 - RNA, 19 nt, Artificial Sequence
  Description of Artificial Sequence: Synthetic oligonucleotide
  Antisense strand to SEQ ID NO: 864906
augagagcgagucuuucga

SEQ ID NO: 864908 - RNA, 19 nt, Artificial Sequence
  Description of Artificial Sequence: Synthetic oligonucleotide
  Sense strand starting at position 723 of SEQ ID NO: 588435
cuuuccauacugugaagaa

SEQ ID NO: 864909 - RNA, 19 nt, Artificial Sequence
  Description of Artificial Sequence: Synthetic oligonucleotide
  Antisense strand to SEQ ID NO: 864908
uucuucacaguauggaaag

SEQ ID NO: 864910 - RNA, 19 nt, Artificial Sequence
  Description of Artificial Sequence: Synthetic oligonucleotide
  Sense strand starting at position 724 of SEQ ID NO: 588435
uuuccauacugugaagaac

SEQ ID NO: 864911 - RNA, 19 nt, Artificial Sequence
  Description of Artificial Sequence: Synthetic oligonucleotide
  Antisense strand to SEQ ID NO: 864910
guucuucacaguauggaaa

SEQ ID NO: 864912 - RNA, 19 nt, Artificial Sequence
  Description of Artificial Sequence: Synthetic oligonucleotide
  Sense strand starting at position 793 of SEQ ID NO: 588435
gaaggaggcuugcucagua

SEQ ID NO: 864913 - RNA, 19 nt, Artificial Sequence
  Description of Artificial Sequence: Synthetic oligonucleotide
  Antisense strand to SEQ ID NO: 864912
uacugagcaagccuccuuc

SEQ ID NO: 864914 - RNA, 19 nt, Artificial Sequence
  Description of Artificial Sequence: Synthetic oligonucleotide
  Sense strand starting at position 798 of SEQ ID NO: 588435
aggcuugcucaguaucaca

SEQ ID NO: 864915 - RNA, 19 nt, Artificial Sequence
  Description of Artificial Sequence: Synthetic oligonucleotide
  Antisense strand to SEQ ID NO: 864914
ugugauacugagcaagccu

SEQ ID NO: 864916 - RNA, 19 nt, Artificial Sequence
  Description of Artificial Sequence: Synthetic oligonucleotide
  Sense strand starting at position 921 of SEQ ID NO: 588435
ggcaucuccugaguccaga

SEQ ID NO: 864917 - RNA, 19 nt, Artificial Sequence
  Description of Artificial Sequence: Synthetic oligonucleotide
  Antisense strand to SEQ ID NO: 864916
ucuggacucaggagaugcc

SEQ ID NO: 864918 - RNA, 19 nt, Artificial Sequence
  Description of Artificial Sequence: Synthetic oligonucleotide
  Sense strand starting at position 962 of SEQ ID NO: 588435
gggaccuagccuuacucau

SEQ ID NO: 864919 - RNA, 19 nt, Artificial Sequence
  Description of Artificial Sequence: Synthetic oligonucleotide
  Antisense strand to SEQ ID NO: 864918
augaguaaggcuagguccc

SEQ ID NO: 864920 - RNA, 19 nt, Artificial Sequence
  Description of Artificial Sequence: Synthetic oligonucleotide
  Sense strand starting at position 988 of SEQ ID NO: 588435
ggacaauccggaugaagca

SEQ ID NO: 864921 - RNA, 19 nt, Artificial Sequence
  Description of Artificial Sequence: Synthetic oligonucleotide
  Antisense strand to SEQ ID NO: 864920
ugcuucauccggauugucc

SEQ ID NO: 864922 - RNA, 19 nt, Artificial Sequence
  Description of Artificial Sequence: Synthetic oligonucleotide
  Sense strand starting at position 1114 of SEQ ID NO: 588435
gaaacaggucuauggcuga

SEQ ID NO: 864923 - RNA, 19 nt, Artificial Sequence
  Description of Artificial Sequence: Synthetic oligonucleotide
  Antisense strand to SEQ ID NO: 864922
ucagccauagaccuguuuc

SEQ ID NO: 864924 - RNA, 19 nt, Artificial Sequence
  Description of Artificial Sequence: Synthetic oligonucleotide
  Sense strand starting at position 1237 of SEQ ID NO: 588435
agccuagagggaugggauu

SEQ ID NO: 864925 - RNA, 19 nt, Artificial Sequence
  Description of Artificial Sequence: Synthetic oligonucleotide
  Antisense strand to SEQ ID NO: 864924
aaucccaucccucuaggcu

SEQ ID NO: 864926 - RNA, 19 nt, Artificial Sequence
  Description of Artificial Sequence: Synthetic oligonucleotide
  Sense strand starting at position 1325 of SEQ ID NO: 588435
ucuggacagcucuagugua

SEQ ID NO: 864927 - RNA, 19 nt, Artificial Sequence
  Description of Artificial Sequence: Synthetic oligonucleotide
  Antisense strand to SEQ ID NO: 864926
uacacuagagcuguccaga

SEQ ID NO: 864928 - RNA, 19 nt, Artificial Sequence
  Description of Artificial Sequence: Synthetic oligonucleotide
  Sense strand starting at position 1656 of SEQ ID NO: 588435
gagagcuguugucacacuu

SEQ ID NO: 864929 - RNA, 19 nt, Artificial Sequence
  Description of Artificial Sequence: Synthetic oligonucleotide
  Antisense strand to SEQ ID NO: 864928
aagugugacaacagcucuc

SEQ ID NO: 864930 - RNA, 19 nt, Artificial Sequence
  Description of Artificial Sequence: Synthetic oligonucleotide
  Sense strand starting at position 1666 of SEQ ID NO: 588435
gucacacuuuggugacuuu

SEQ ID NO: 864931 - RNA, 19 nt, Artificial Sequence
  Description of Artificial Sequence: Synthetic oligonucleotide
  Antisense strand to SEQ ID NO: 864930
aaagucaccaaagugugac

SEQ ID NO: 864932 - RNA, 19 nt, Artificial Sequence
  Description of Artificial Sequence: Synthetic oligonucleotide
  Sense strand starting at position 2713 of SEQ ID NO: 588435
ccaaacauguucugggauu

SEQ ID NO: 864933 - RNA, 19 nt, Artificial Sequence
  Description of Artificial Sequence: Synthetic oligonucleotide
  Antisense strand to SEQ ID NO: 864932
aaucccagaacauguuugg

SEQ ID NO: 864934 - RNA, 19 nt, Artificial Sequence
  Description of Artificial Sequence: Synthetic oligonucleotide
  Sense strand starting at position 2714 of SEQ ID NO: 588435
caaacauguucugggauuu

SEQ ID NO: 864935 - RNA, 19 nt, Artificial Sequence
  Description of Artificial Sequence: Synthetic oligonucleotide
  Antisense strand to SEQ ID NO: 864934
aaaucccagaacauguuug

SEQ ID NO: 864936 - RNA, 19 nt, Artificial Sequence
  Description of Artificial Sequence: Synthetic oligonucleotide
  Sense strand starting at position 2946 of SEQ ID NO: 588435
ccuagucaccugugccaga

SEQ ID NO: 864937 - RNA, 19 nt, Artificial Sequence
  Description of Artificial Sequence: Synthetic oligonucleotide
  Antisense strand to SEQ ID NO: 864936
ucuggcacaggugacuagg

SEQ ID NO: 864938 - RNA, 19 nt, Artificial Sequence
  Description of Artificial Sequence: Synthetic oligonucleotide
  Sense strand starting at position 3089 of SEQ ID NO: 588435
uuguaauaccaacggcuua

SEQ ID NO: 864939 - RNA, 19 nt, Artificial Sequence
  Description of Artificial Sequence: Synthetic oligonucleotide
  Antisense strand to SEQ ID NO: 864938
uaagccguugguauuacaa

SEQ ID NO: 864940 - RNA, 19 nt, Artificial Sequence
  Description of Artificial Sequence: Synthetic oligonucleotide
  Sense strand starting at position 3094 of SEQ ID NO: 588435
auaccaacggcuuacgaau

SEQ ID NO: 864941 - RNA, 19 nt, Artificial Sequence
  Description of Artificial Sequence: Synthetic oligonucleotide
  Antisense strand to SEQ ID NO: 864940
auucguaagccguugguau

SEQ ID NO: 864942 - RNA, 19 nt, Artificial Sequence
  Description of Artificial Sequence: Synthetic oligonucleotide
  Sense strand starting at position 3187 of SEQ ID NO: 588435
uuaguaccgucaugaguaa

SEQ ID NO: 864943 - RNA, 19 nt, Artificial Sequence
  Description of Artificial Sequence: Synthetic oligonucleotide
  Antisense strand to SEQ ID NO: 864942
uuacucaugacgguacuaa

SEQ ID NO: 864944 - RNA, 19 nt, Artificial Sequence
  Description of Artificial Sequence: Synthetic oligonucleotide
  Sense strand starting at position 3188 of SEQ ID NO: 588435
uaguaccgucaugaguaau

SEQ ID NO: 864945 - RNA, 19 nt, Artificial Sequence
  Description of Artificial Sequence: Synthetic oligonucleotide
  Antisense strand to SEQ ID NO: 864944
auuacucaugacgguacua

SEQ ID NO: 864946 - RNA, 19 nt, Artificial Sequence
  Description of Artificial Sequence: Synthetic oligonucleotide
  Sense strand starting at position 3194 of SEQ ID NO: 588435
cgucaugaguaaugacauu

SEQ ID NO: 864947 - RNA, 19 nt, Artificial Sequence
  Description of Artificial Sequence: Synthetic oligonucleotide
  Antisense strand to SEQ ID NO: 864946
aaugucauuacucaugacg

SEQ ID NO: 864948 - RNA, 19 nt, Artificial Sequence
  Description of Artificial Sequence: Synthetic oligonucleotide
  Sense strand starting at position 3228 of SEQ ID NO: 588435
ccacauauacugugguagu

SEQ ID NO: 864949 - RNA, 19 nt, Artificial Sequence
  Description of Artificial Sequence: Synthetic oligonucleotide
  Antisense strand to SEQ ID NO: 864948
acuaccacaguauaugugg

SEQ ID NO: 864950 - RNA, 19 nt, Artificial Sequence
  Description of Artificial Sequence: Synthetic oligonucleotide
  Sense strand starting at position 3248 of SEQ ID NO: 588435
ccaagagauuaugauacca

SEQ ID NO: 864951 - RNA, 19 nt, Artificial Sequence
  Description of Artificial Sequence: Synthetic oligonucleotide
  Antisense strand to SEQ ID NO: 864950
ugguaucauaaucucuugg

SEQ ID NO: 864952 - RNA, 19 nt, Artificial Sequence
  Description of Artificial Sequence: Synthetic oligonucleotide
  Sense strand starting at position 3275 of SEQ ID NO: 588435
cuauguuucuauguuuaca

SEQ ID NO: 864953 - RNA, 19 nt, Artificial Sequence
  Description of Artificial Sequence: Synthetic oligonucleotide
  Antisense strand to SEQ ID NO: 864952
uguaaacauagaaacauag

SEQ ID NO: 864954 - RNA, 19 nt, Artificial Sequence
  Description of Artificial Sequence: Synthetic oligonucleotide
  Sense strand starting at position 3323 of SEQ ID NO: 588435
guguuacagucaccuaaag

SEQ ID NO: 864955 - RNA, 19 nt, Artificial Sequence
  Description of Artificial Sequence: Synthetic oligonucleotide
  Antisense strand to SEQ ID NO: 864954
cuuuaggugacuguaacac

SEQ ID NO: 864956 - RNA, 19 nt, Artificial Sequence
  Description of Artificial Sequence: Synthetic oligonucleotide
  Sense strand starting at position 3352 of SEQ ID NO: 588435
gggucaaauuggugcccaa

SEQ ID NO: 864957 - RNA, 19 nt, Artificial Sequence
  Description of Artificial Sequence: Synthetic oligonucleotide
  Antisense strand to SEQ ID NO: 864956
uugggcaccaauuugaccc

SEQ ID NO: 864958 - RNA, 19 nt, Artificial Sequence
  Description of Artificial Sequence: Synthetic oligonucleotide
  Sense strand starting at position 3632 of SEQ ID NO: 588435
ggaagaauuccauguugcc

SEQ ID NO: 864959 - RNA, 19 nt, Artificial Sequence
  Description of Artificial Sequence: Synthetic oligonucleotide
  Antisense strand to SEQ ID NO: 864958
ggcaacauggaauucuucc

SEQ ID NO: 864960 - RNA, 19 nt, Artificial Sequence
  Description of Artificial Sequence: Synthetic oligonucleotide
  Sense strand starting at position 3822 of SEQ ID NO: 588435
ggaugcauuuccuaacuua

SEQ ID NO: 864961 - RNA, 19 nt, Artificial Sequence
  Description of Artificial Sequence: Synthetic oligonucleotide
  Antisense strand to SEQ ID NO: 864960
uaaguuaggaaaugcaucc

SEQ ID NO: 864962 - RNA, 19 nt, Artificial Sequence
  Description of Artificial Sequence: Synthetic oligonucleotide
  Sense strand starting at position 224 of SEQ ID NO: 588437
gaaucuaugccagggcaaa

SEQ ID NO: 864963 - RNA, 19 nt, Artificial Sequence
  Description of Artificial Sequence: Synthetic oligonucleotide
  Antisense strand to SEQ ID NO: 864962
uuugcccuggcauagauuc

SEQ ID NO: 864964 - RNA, 19 nt, Artificial Sequence
  Description of Artificial Sequence: Synthetic oligonucleotide
  Sense strand starting at position 521 of SEQ ID NO: 588437
agauuuagaugccaagaag

SEQ ID NO: 864965 - RNA, 19 nt, Artificial Sequence
  Description of Artificial Sequence: Synthetic oligonucleotide
  Antisense strand to SEQ ID NO: 864964
cuucuuggcaucuaaaucu

SEQ ID NO: 864966 - RNA, 19 nt, Artificial Sequence
  Description of Artificial Sequence: Synthetic oligonucleotide
  Sense strand starting at position 536 of SEQ ID NO: 588437
gaaggaagauuagaaauca

SEQ ID NO: 864967 - RNA, 19 nt, Artificial Sequence
  Description of Artificial Sequence: Synthetic oligonucleotide
  Antisense strand to SEQ ID NO: 864966
ugauuucuaaucuuccuuc

SEQ ID NO: 864968 - RNA, 19 nt, Artificial Sequence
  Description of Artificial Sequence: Synthetic oligonucleotide
  Sense strand starting at position 598 of SEQ ID NO: 588437
agagauguaaagugacuuu

SEQ ID NO: 864969 - RNA, 19 nt, Artificial Sequence
  Description of Artificial Sequence: Synthetic oligonucleotide
  Antisense strand to SEQ ID NO: 864968
aaagucacuuuacaucucu

SEQ ID NO: 864970 - RNA, 19 nt, Artificial Sequence
  Description of Artificial Sequence: Synthetic oligonucleotide
  Sense strand starting at position 621 of SEQ ID NO: 588437
cggucacacagcuaguuaa

SEQ ID NO: 864971 - RNA, 19 nt, Artificial Sequence
  Description of Artificial Sequence: Synthetic oligonucleotide
  Antisense strand to SEQ ID NO: 864970
uuaacuagcugugugaccg

SEQ ID NO: 864972 - RNA, 19 nt, Artificial Sequence
  Description of Artificial Sequence: Synthetic oligonucleotide
  Sense strand starting at position 729 of SEQ ID NO: 588437
uauaaauggugcuuaauga

SEQ ID NO: 864973 - RNA, 19 nt, Artificial Sequence
  Description of Artificial Sequence: Synthetic oligonucleotide
  Antisense strand to SEQ ID NO: 864972
ucauuaagcaccauuuaua

SEQ ID NO: 864974 - RNA, 19 nt, Artificial Sequence
  Description of Artificial Sequence: Synthetic oligonucleotide
  Sense strand starting at position 730 of SEQ ID NO: 588437
auaaauggugcuuaaugau

SEQ ID NO: 864975 - RNA, 19 nt, Artificial Sequence
  Description of Artificial Sequence: Synthetic oligonucleotide
  Antisense strand to SEQ ID NO: 864974
aucauuaagcaccauuuau

SEQ ID NO: 864976 - RNA, 19 nt, Artificial Sequence
  Description of Artificial Sequence: Synthetic oligonucleotide
  Sense strand starting at position 748 of SEQ ID NO: 588437
ugcaaauaccucugaggca

SEQ ID NO: 864977 - RNA, 19 nt, Artificial Sequence
  Description of Artificial Sequence: Synthetic oligonucleotide
  Antisense strand to SEQ ID NO: 864976
ugccucagagguauuugca

SEQ ID NO: 864978 - RNA, 19 nt, Artificial Sequence
  Description of Artificial Sequence: Synthetic oligonucleotide
  Sense strand starting at position 929 of SEQ ID NO: 588437
agagaugccuacuuaacaa

SEQ ID NO: 864979 - RNA, 19 nt, Artificial Sequence
  Description of Artificial Sequence: Synthetic oligonucleotide
  Antisense strand to SEQ ID NO: 864978
uuguuaaguaggcaucucu

SEQ ID NO: 864980 - RNA, 19 nt, Artificial Sequence
  Description of Artificial Sequence: Synthetic oligonucleotide
  Sense strand starting at position 942 of SEQ ID NO: 588437
uaacaacugugccuagaga

SEQ ID NO: 864981 - RNA, 19 nt, Artificial Sequence
  Description of Artificial Sequence: Synthetic oligonucleotide
  Antisense strand to SEQ ID NO: 864980
ucucuaggcacaguuguua

SEQ ID NO: 864982 - RNA, 19 nt, Artificial Sequence
  Description of Artificial Sequence: Synthetic oligonucleotide
  Sense strand starting at position 943 of SEQ ID NO: 588437
aacaacugugccuagagau

SEQ ID NO: 864983 - RNA, 19 nt, Artificial Sequence
  Description of Artificial Sequence: Synthetic oligonucleotide
  Antisense strand to SEQ ID NO: 864982
aucucuaggcacaguuguu

SEQ ID NO: 864984 - RNA, 19 nt, Artificial Sequence
  Description of Artificial Sequence: Synthetic oligonucleotide
  Sense strand starting at position 1024 of SEQ ID NO: 588437
ugucuuugagccuagaaga

SEQ ID NO: 864985 - RNA, 19 nt, Artificial Sequence
  Description of Artificial Sequence: Synthetic oligonucleotide
  Antisense strand to SEQ ID NO: 864984
ucuucuaggcucaaagaca

SEQ ID NO: 864986 - RNA, 19 nt, Artificial Sequence
  Description of Artificial Sequence: Synthetic oligonucleotide
  Sense strand starting at position 1053 of SEQ ID NO: 588437
ugcauucucccagaucaga

SEQ ID NO: 864987 - RNA, 19 nt, Artificial Sequence
  Description of Artificial Sequence: Synthetic oligonucleotide
  Antisense strand to SEQ ID NO: 864986
ucugaucugggagaaugca

SEQ ID NO: 864988 - RNA, 19 nt, Artificial Sequence
  Description of Artificial Sequence: Synthetic oligonucleotide
  Sense strand starting at position 1389 of SEQ ID NO: 588437
gggcucuaaggcuauuauu

SEQ ID NO: 864989 - RNA, 19 nt, Artificial Sequence
  Description of Artificial Sequence: Synthetic oligonucleotide
  Antisense strand to SEQ ID NO: 864988
aauaauagccuuagagccc

SEQ ID NO: 864990 - RNA, 19 nt, Artificial Sequence
  Description of Artificial Sequence: Synthetic oligonucleotide
  Sense strand starting at position 1397 of SEQ ID NO: 588437
aggcuauuauuucuuggca

SEQ ID NO: 864991 - RNA, 19 nt, Artificial Sequence
  Description of Artificial Sequence: Synthetic oligonucleotide
  Antisense strand to SEQ ID NO: 864990
ugccaagaaauaauagccu

SEQ ID NO: 864992 - RNA, 19 nt, Artificial Sequence
  Description of Artificial Sequence: Synthetic oligonucleotide
  Sense strand starting at position 1398 of SEQ ID NO: 588437
ggcuauuauuucuuggcaa

SEQ ID NO: 864993 - RNA, 19 nt, Artificial Sequence
  Description of Artificial Sequence: Synthetic oligonucleotide
  Antisense strand to SEQ ID NO: 864992
uugccaagaaauaauagcc

SEQ ID NO: 864994 - RNA, 19 nt, Artificial Sequence
  Description of Artificial Sequence: Synthetic oligonucleotide
  Sense strand starting at position 1460 of SEQ ID NO: 588437
gggauuucuuuggauugug

SEQ ID NO: 864995 - RNA, 19 nt, Artificial Sequence
  Description of Artificial Sequence: Synthetic oligonucleotide
  Antisense strand to SEQ ID NO: 864994
cacaauccaaagaaauccc

SEQ ID NO: 864996 - RNA, 19 nt, Artificial Sequence
  Description of Artificial Sequence: Synthetic oligonucleotide
  Sense strand starting at position 1549 of SEQ ID NO: 588437
uuaugucuaugaguuugga

SEQ ID NO: 864997 - RNA, 19 nt, Artificial Sequence
  Description of Artificial Sequence: Synthetic oligonucleotide
  Antisense strand to SEQ ID NO: 864996
uccaaacucauagacauaa

SEQ ID NO: 864998 - RNA, 19 nt, Artificial Sequence
  Description of Artificial Sequence: Synthetic oligonucleotide
  Sense strand starting at position 1552 of SEQ ID NO: 588437
ugucuaugaguuuggauag

SEQ ID NO: 864999 - RNA, 19 nt, Artificial Sequence
  Description of Artificial Sequence: Synthetic oligonucleotide
  Antisense strand to SEQ ID NO: 864998
cuauccaaacucauagaca

SEQ ID NO: 865000 - RNA, 19 nt, Artificial Sequence
  Description of Artificial Sequence: Synthetic oligonucleotide
  Sense strand starting at position 1584 of SEQ ID NO: 588437
agagaccaugccugguaau

SEQ ID NO: 865001 - RNA, 19 nt, Artificial Sequence
  Description of Artificial Sequence: Synthetic oligonucleotide
  Antisense strand to SEQ ID NO: 865000
auuaccaggcauggucucu

SEQ ID NO: 865002 - RNA, 19 nt, Artificial Sequence
  Description of Artificial Sequence: Synthetic oligonucleotide
  Sense strand starting at position 1611 of SEQ ID NO: 588437
auaaucaucuguuccuagu

SEQ ID NO: 865003 - RNA, 19 nt, Artificial Sequence
  Description of Artificial Sequence: Synthetic oligonucleotide
  Antisense strand to SEQ ID NO: 865002
acuaggaacagaugauuau

SEQ ID NO: 865004 - RNA, 19 nt, Artificial Sequence
  Description of Artificial Sequence: Synthetic oligonucleotide
  Sense strand starting at position 1617 of SEQ ID NO: 588437
aucuguuccuaguuaaaca

SEQ ID NO: 865005 - RNA, 19 nt, Artificial Sequence
  Description of Artificial Sequence: Synthetic oligonucleotide
  Antisense strand to SEQ ID NO: 865004
uguuuaacuaggaacagau

SEQ ID NO: 865006 - RNA, 19 nt, Artificial Sequence
  Description of Artificial Sequence: Synthetic oligonucleotide
  Sense strand starting at position 1988 of SEQ ID NO: 588437
aaccauaaaggauguguga

SEQ ID NO: 865007 - RNA, 19 nt, Artificial Sequence
  Description of Artificial Sequence: Synthetic oligonucleotide
  Antisense strand to SEQ ID NO: 865006
ucacacauccuuuaugguu

SEQ ID NO: 865008 - RNA, 19 nt, Artificial Sequence
  Description of Artificial Sequence: Synthetic oligonucleotide
  Sense strand starting at position 2076 of SEQ ID NO: 588437
guucuuguuccuggaagaa

SEQ ID NO: 865009 - RNA, 19 nt, Artificial Sequence
  Description of Artificial Sequence: Synthetic oligonucleotide
  Antisense strand to SEQ ID NO: 865008
uucuuccaggaacaagaac

SEQ ID NO: 865010 - RNA, 19 nt, Artificial Sequence
  Description of Artificial Sequence: Synthetic oligonucleotide
  Sense strand starting at position 2363 of SEQ ID NO: 588437
aaaugcaggugaguaauua

SEQ ID NO: 865011 - RNA, 19 nt, Artificial Sequence
  Description of Artificial Sequence: Synthetic oligonucleotide
  Antisense strand to SEQ ID NO: 865010
uaauuacucaccugcauuu

SEQ ID NO: 865012 - RNA, 19 nt, Artificial Sequence
  Description of Artificial Sequence: Synthetic oligonucleotide
  Sense strand starting at position 2364 of SEQ ID NO: 588437
aaugcaggugaguaauuaa

SEQ ID NO: 865013 - RNA, 19 nt, Artificial Sequence
  Description of Artificial Sequence: Synthetic oligonucleotide
  Antisense strand to SEQ ID NO: 865012
uuaauuacucaccugcauu

SEQ ID NO: 865014 - RNA, 19 nt, Artificial Sequence
  Description of Artificial Sequence: Synthetic oligonucleotide
  Sense strand starting at position 2367 of SEQ ID NO: 588437
gcaggugaguaauuaaaua

SEQ ID NO: 865015 - RNA, 19 nt, Artificial Sequence
  Description of Artificial Sequence: Synthetic oligonucleotide
  Antisense strand to SEQ ID NO: 865014
uauuuaauuacucaccugc

SEQ ID NO: 865016 - RNA, 19 nt, Artificial Sequence
  Description of Artificial Sequence: Synthetic oligonucleotide
  Sense strand starting at position 2530 of SEQ ID NO: 588437
ggugacaagacgcaaugua

SEQ ID NO: 865017 - RNA, 19 nt, Artificial Sequence
  Description of Artificial Sequence: Synthetic oligonucleotide
  Antisense strand to SEQ ID NO: 865016
uacauugcgucuugucacc

SEQ ID NO: 865018 - RNA, 19 nt, Artificial Sequence
  Description of Artificial Sequence: Synthetic oligonucleotide
  Sense strand starting at position 2560 of SEQ ID NO: 588437
agcaauagguuucuuauau

SEQ ID NO: 865019 - RNA, 19 nt, Artificial Sequence
  Description of Artificial Sequence: Synthetic oligonucleotide
  Antisense strand to SEQ ID NO: 865018
auauaagaaaccuauugcu

SEQ ID NO: 865020 - RNA, 19 nt, Artificial Sequence
  Description of Artificial Sequence: Synthetic oligonucleotide
  Sense strand starting at position 2561 of SEQ ID NO: 588437
gcaauagguuucuuauaua

SEQ ID NO: 865021 - RNA, 19 nt, Artificial Sequence
  Description of Artificial Sequence: Synthetic oligonucleotide
  Antisense strand to SEQ ID NO: 865020
uauauaagaaaccuauugc

SEQ ID NO: 865022 - RNA, 19 nt, Artificial Sequence
  Description of Artificial Sequence: Synthetic oligonucleotide
  Sense strand starting at position 2629 of SEQ ID NO: 588437
uuaagaauggcauguaaua

SEQ ID NO: 865023 - RNA, 19 nt, Artificial Sequence
  Description of Artificial Sequence: Synthetic oligonucleotide
  Antisense strand to SEQ ID NO: 865022
uauuacaugccauucuuaa

SEQ ID NO: 865024 - RNA, 19 nt, Artificial Sequence
  Description of Artificial Sequence: Synthetic oligonucleotide
  Sense strand starting at position 2636 of SEQ ID NO: 588437
uggcauguaauaugaagaa

SEQ ID NO: 865025 - RNA, 19 nt, Artificial Sequence
  Description of Artificial Sequence: Synthetic oligonucleotide
  Antisense strand to SEQ ID NO: 865024
uucuucauauuacaugcca

SEQ ID NO: 865026 - RNA, 19 nt, Artificial Sequence
  Description of Artificial Sequence: Synthetic oligonucleotide
  Sense strand starting at position 2660 of SEQ ID NO: 588437
ccuguuucugaagaccuaa

SEQ ID NO: 865027 - RNA, 19 nt, Artificial Sequence
  Description of Artificial Sequence: Synthetic oligonucleotide
  Antisense strand to SEQ ID NO: 865026
uuaggucuucagaaacagg

SEQ ID NO: 865028 - RNA, 19 nt, Artificial Sequence
  Description of Artificial Sequence: Synthetic oligonucleotide
  Sense strand starting at position 2747 of SEQ ID NO: 588437
acuuucuuauagguugaau

SEQ ID NO: 865029 - RNA, 19 nt, Artificial Sequence
  Description of Artificial Sequence: Synthetic oligonucleotide
  Antisense strand to SEQ ID NO: 865028
auucaaccuauaagaaagu

SEQ ID NO: 865030 - RNA, 19 nt, Artificial Sequence
  Description of Artificial Sequence: Synthetic oligonucleotide
  Sense strand starting at position 2771 of SEQ ID NO: 588437
gcuucuuagccucugcauu

SEQ ID NO: 865031 - RNA, 19 nt, Artificial Sequence
  Description of Artificial Sequence: Synthetic oligonucleotide
  Antisense strand to SEQ ID NO: 865030
aaugcagaggcuaagaagc

SEQ ID NO: 865032 - RNA, 19 nt, Artificial Sequence
  Description of Artificial Sequence: Synthetic oligonucleotide
  Sense strand starting at position 2928 of SEQ ID NO: 588437
cugucuagacauugccaaa

SEQ ID NO: 865033 - RNA, 19 nt, Artificial Sequence
  Description of Artificial Sequence: Synthetic oligonucleotide
  Antisense strand to SEQ ID NO: 865032
uuuggcaaugucuagacag

SEQ ID NO: 865034 - RNA, 19 nt, Artificial Sequence
  Description of Artificial Sequence: Synthetic oligonucleotide
  Sense strand starting at position 3242 of SEQ ID NO: 588437
gugcuugugcacuccugua

SEQ ID NO: 865035 - RNA, 19 nt, Artificial Sequence
  Description of Artificial Sequence: Synthetic oligonucleotide
  Antisense strand to SEQ ID NO: 865034
uacaggagugcacaagcac

SEQ ID NO: 865036 - RNA, 19 nt, Artificial Sequence
  Description of Artificial Sequence: Synthetic oligonucleotide
  Sense strand starting at position 3537 of SEQ ID NO: 588437
gggucaacaguuuauuaua

SEQ ID NO: 865037 - RNA, 19 nt, Artificial Sequence
  Description of Artificial Sequence: Synthetic oligonucleotide
  Antisense strand to SEQ ID NO: 865036
uauaauaaacuguugaccc

SEQ ID NO: 865038 - RNA, 19 nt, Artificial Sequence
  Description of Artificial Sequence: Synthetic oligonucleotide
  Sense strand starting at position 3591 of SEQ ID NO: 588437
acaugacuuguauacaugu

SEQ ID NO: 865039 - RNA, 19 nt, Artificial Sequence
  Description of Artificial Sequence: Synthetic oligonucleotide
  Antisense strand to SEQ ID NO: 865038
acauguauacaagucaugu

SEQ ID NO: 865040 - RNA, 19 nt, Artificial Sequence
  Description of Artificial Sequence: Synthetic oligonucleotide
  Sense strand starting at position 3928 of SEQ ID NO: 588437
ugguuuccgagaggcagaa

SEQ ID NO: 865041 - RNA, 19 nt, Artificial Sequence
  Description of Artificial Sequence: Synthetic oligonucleotide
  Antisense strand to SEQ ID NO: 865040
uucugccucucggaaacca

SEQ ID NO: 865042 - RNA, 19 nt, Artificial Sequence
  Description of Artificial Sequence: Synthetic oligonucleotide
  Sense strand starting at position 81 of SEQ ID NO: 588438
cguugcaauuuccugauga

SEQ ID NO: 865043 - RNA, 19 nt, Artificial Sequence
  Description of Artificial Sequence: Synthetic oligonucleotide
  Antisense strand to SEQ ID NO: 865042
ucaucaggaaauugcaacg

SEQ ID NO: 865044 - RNA, 19 nt, Artificial Sequence
  Description of Artificial Sequence: Synthetic oligonucleotide
  Sense strand starting at position 276 of SEQ ID NO: 588438
guacaagucccuuaccaga

SEQ ID NO: 865045 - RNA, 19 nt, Artificial Sequence
  Description of Artificial Sequence: Synthetic oligonucleotide
  Antisense strand to SEQ ID NO: 865044
ucugguaagggacuuguac

SEQ ID NO: 865046 - RNA, 19 nt, Artificial Sequence
  Description of Artificial Sequence: Synthetic oligonucleotide
  Sense strand starting at position 355 of SEQ ID NO: 588438
ucaaauagccucuggaaac

SEQ ID NO: 865047 - RNA, 19 nt, Artificial Sequence
  Description of Artificial Sequence: Synthetic oligonucleotide
  Antisense strand to SEQ ID NO: 865046
guuuccagaggcuauuuga

SEQ ID NO: 865048 - RNA, 19 nt, Artificial Sequence
  Description of Artificial Sequence: Synthetic oligonucleotide
  Sense strand starting at position 857 of SEQ ID NO: 588438
auagaauuagguugacuuu

SEQ ID NO: 865049 - RNA, 19 nt, Artificial Sequence
  Description of Artificial Sequence: Synthetic oligonucleotide
  Antisense strand to SEQ ID NO: 865048
aaagucaaccuaauucuau

SEQ ID NO: 865050 - RNA, 19 nt, Artificial Sequence
  Description of Artificial Sequence: Synthetic oligonucleotide
  Sense strand starting at position 860 of SEQ ID NO: 588438
gaauuagguugacuuuagu

SEQ ID NO: 865051 - RNA, 19 nt, Artificial Sequence
  Description of Artificial Sequence: Synthetic oligonucleotide
  Antisense strand to SEQ ID NO: 865050
acuaaagucaaccuaauuc

SEQ ID NO: 865052 - RNA, 19 nt, Artificial Sequence
  Description of Artificial Sequence: Synthetic oligonucleotide
  Sense strand starting at position 901 of SEQ ID NO: 588438
auggaaccuuuaguauuau

SEQ ID NO: 865053 - RNA, 19 nt, Artificial Sequence
  Description of Artificial Sequence: Synthetic oligonucleotide
  Antisense strand to SEQ ID NO: 865052
auaauacuaaagguuccau

SEQ ID NO: 865054 - RNA, 19 nt, Artificial Sequence
  Description of Artificial Sequence: Synthetic oligonucleotide
  Sense strand starting at position 1042 of SEQ ID NO: 588438
guguauuuauugucuaccu

SEQ ID NO: 865055 - RNA, 19 nt, Artificial Sequence
  Description of Artificial Sequence: Synthetic oligonucleotide
  Antisense strand to SEQ ID NO: 865054
agguagacaauaaauacac

SEQ ID NO: 865056 - RNA, 19 nt, Artificial Sequence
  Description of Artificial Sequence: Synthetic oligonucleotide
  Sense strand starting at position 1043 of SEQ ID NO: 588438
uguauuuauugucuaccuu

SEQ ID NO: 865057 - RNA, 19 nt, Artificial Sequence
  Description of Artificial Sequence: Synthetic oligonucleotide
  Antisense strand to SEQ ID NO: 865056
aagguagacaauaaauaca

SEQ ID NO: 865058 - RNA, 19 nt, Artificial Sequence
  Description of Artificial Sequence: Synthetic oligonucleotide
  Sense strand starting at position 1072 of SEQ ID NO: 588438
aaugaaagcucccugagga

SEQ ID NO: 865059 - RNA, 19 nt, Artificial Sequence
  Description of Artificial Sequence: Synthetic oligonucleotide
  Antisense strand to SEQ ID NO: 865058
uccucagggagcuuucauu

SEQ ID NO: 865060 - RNA, 19 nt, Artificial Sequence
  Description of Artificial Sequence: Synthetic oligonucleotide
  Sense strand starting at position 1073 of SEQ ID NO: 588438
augaaagcucccugaggac

SEQ ID NO: 865061 - RNA, 19 nt, Artificial Sequence
  Description of Artificial Sequence: Synthetic oligonucleotide
  Antisense strand to SEQ ID NO: 865060
guccucagggagcuuucau

SEQ ID NO: 865062 - RNA, 19 nt, Artificial Sequence
  Description of Artificial Sequence: Synthetic oligonucleotide
  Sense strand starting at position 1208 of SEQ ID NO: 588438
uccuuugucccacaaagag

SEQ ID NO: 865063 - RNA, 19 nt, Artificial Sequence
  Description of Artificial Sequence: Synthetic oligonucleotide
  Antisense strand to SEQ ID NO: 865062
cucuuugugggacaaagga

SEQ ID NO: 865064 - RNA, 19 nt, Artificial Sequence
  Description of Artificial Sequence: Synthetic oligonucleotide
  Sense strand starting at position 1254 of SEQ ID NO: 588438
uaguauugauaucuuugga

SEQ ID NO: 865065 - RNA, 19 nt, Artificial Sequence
  Description of Artificial Sequence: Synthetic oligonucleotide
  Antisense strand to SEQ ID NO: 865064
uccaaagauaucaauacua

SEQ ID NO: 865066 - RNA, 19 nt, Artificial Sequence
  Description of Artificial Sequence: Synthetic oligonucleotide
  Sense strand starting at position 1711 of SEQ ID NO: 588438
aucaucuaacaauggguua

SEQ ID NO: 865067 - RNA, 19 nt, Artificial Sequence
  Description of Artificial Sequence: Synthetic oligonucleotide
  Antisense strand to SEQ ID NO: 865066
uaacccauuguuagaugau

SEQ ID NO: 865068 - RNA, 19 nt, Artificial Sequence
  Description of Artificial Sequence: Synthetic oligonucleotide
  Sense strand starting at position 1787 of SEQ ID NO: 588438
gagacagcgacuugaguua

SEQ ID NO: 865069 - RNA, 19 nt, Artificial Sequence
  Description of Artificial Sequence: Synthetic oligonucleotide
  Antisense strand to SEQ ID NO: 865068
uaacucaagucgcugucuc

SEQ ID NO: 865070 - RNA, 19 nt, Artificial Sequence
  Description of Artificial Sequence: Synthetic oligonucleotide
  Sense strand starting at position 1792 of SEQ ID NO: 588438
agcgacuugaguuagggaa

SEQ ID NO: 865071 - RNA, 19 nt, Artificial Sequence
  Description of Artificial Sequence: Synthetic oligonucleotide
  Antisense strand to SEQ ID NO: 865070
uucccuaacucaagucgcu

SEQ ID NO: 865072 - RNA, 19 nt, Artificial Sequence
  Description of Artificial Sequence: Synthetic oligonucleotide
  Sense strand starting at position 1903 of SEQ ID NO: 588438
cguugauugcaugaaagaa

SEQ ID NO: 865073 - RNA, 19 nt, Artificial Sequence
  Description of Artificial Sequence: Synthetic oligonucleotide
  Antisense strand to SEQ ID NO: 865072
uucuuucaugcaaucaacg

SEQ ID NO: 865074 - RNA, 19 nt, Artificial Sequence
  Description of Artificial Sequence: Synthetic oligonucleotide
  Sense strand starting at position 1965 of SEQ ID NO: 588438
ggucuugaugaggaagucu

SEQ ID NO: 865075 - RNA, 19 nt, Artificial Sequence
  Description of Artificial Sequence: Synthetic oligonucleotide
  Antisense strand to SEQ ID NO: 865074
agacuuccucaucaagacc

SEQ ID NO: 865076 - RNA, 19 nt, Artificial Sequence
  Description of Artificial Sequence: Synthetic oligonucleotide
  Sense strand starting at position 1974 of SEQ ID NO: 588438
gaggaagucuucuugaucu

SEQ ID NO: 865077 - RNA, 19 nt, Artificial Sequence
  Description of Artificial Sequence: Synthetic oligonucleotide
  Antisense strand to SEQ ID NO: 865076
agaucaagaagacuuccuc

SEQ ID NO: 865078 - RNA, 19 nt, Artificial Sequence
  Description of Artificial Sequence: Synthetic oligonucleotide
  Sense strand starting at position 1978 of SEQ ID NO: 588438
aagucuucuugaucuagga

SEQ ID NO: 865079 - RNA, 19 nt, Artificial Sequence
  Description of Artificial Sequence: Synthetic oligonucleotide
  Antisense strand to SEQ ID NO: 865078
uccuagaucaagaagacuu

SEQ ID NO: 865080 - RNA, 19 nt, Artificial Sequence
  Description of Artificial Sequence: Synthetic oligonucleotide
  Sense strand starting at position 1982 of SEQ ID NO: 588438
cuucuugaucuaggagaau

SEQ ID NO: 865081 - RNA, 19 nt, Artificial Sequence
  Description of Artificial Sequence: Synthetic oligonucleotide
  Antisense strand to SEQ ID NO: 865080
auucuccuagaucaagaag

SEQ ID NO: 865082 - RNA, 19 nt, Artificial Sequence
  Description of Artificial Sequence: Synthetic oligonucleotide
  Sense strand starting at position 1988 of SEQ ID NO: 588438
gaucuaggagaauguauuc

SEQ ID NO: 865083 - RNA, 19 nt, Artificial Sequence
  Description of Artificial Sequence: Synthetic oligonucleotide
  Antisense strand to SEQ ID NO: 865082
gaauacauucuccuagauc

SEQ ID NO: 865084 - RNA, 19 nt, Artificial Sequence
  Description of Artificial Sequence: Synthetic oligonucleotide
  Sense strand starting at position 2114 of SEQ ID NO: 588438
agaucuuguaaacggagaa

SEQ ID NO: 865085 - RNA, 19 nt, Artificial Sequence
  Description of Artificial Sequence: Synthetic oligonucleotide
  Antisense strand to SEQ ID NO: 865084
uucuccguuuacaagaucu

SEQ ID NO: 865086 - RNA, 19 nt, Artificial Sequence
  Description of Artificial Sequence: Synthetic oligonucleotide
  Sense strand starting at position 2154 of SEQ ID NO: 588438
uagacuuuacaauggaagu

SEQ ID NO: 865087 - RNA, 19 nt, Artificial Sequence
  Description of Artificial Sequence: Synthetic oligonucleotide
  Antisense strand to SEQ ID NO: 865086
acuuccauuguaaagucua

SEQ ID NO: 865088 - RNA, 19 nt, Artificial Sequence
  Description of Artificial Sequence: Synthetic oligonucleotide
  Sense strand starting at position 2205 of SEQ ID NO: 588438
gaggcuucacgugggauuu

SEQ ID NO: 865089 - RNA, 19 nt, Artificial Sequence
  Description of Artificial Sequence: Synthetic oligonucleotide
  Antisense strand to SEQ ID NO: 865088
aaaucccacgugaagccuc

SEQ ID NO: 865090 - RNA, 19 nt, Artificial Sequence
  Description of Artificial Sequence: Synthetic oligonucleotide
  Sense strand starting at position 2211 of SEQ ID NO: 588438
ucacgugggauuugguuua

SEQ ID NO: 865091 - RNA, 19 nt, Artificial Sequence
  Description of Artificial Sequence: Synthetic oligonucleotide
  Antisense strand to SEQ ID NO: 865090
uaaaccaaaucccacguga

SEQ ID NO: 865092 - RNA, 19 nt, Artificial Sequence
  Description of Artificial Sequence: Synthetic oligonucleotide
  Sense strand starting at position 2573 of SEQ ID NO: 588438
acuuuagcucugcacugau

SEQ ID NO: 865093 - RNA, 19 nt, Artificial Sequence
  Description of Artificial Sequence: Synthetic oligonucleotide
  Antisense strand to SEQ ID NO: 865092
aucagugcagagcuaaagu

SEQ ID NO: 865094 - RNA, 19 nt, Artificial Sequence
  Description of Artificial Sequence: Synthetic oligonucleotide
  Sense strand starting at position 2585 of SEQ ID NO: 588438
cacugauagccauagagua

SEQ ID NO: 865095 - RNA, 19 nt, Artificial Sequence
  Description of Artificial Sequence: Synthetic oligonucleotide
  Antisense strand to SEQ ID NO: 865094
uacucuauggcuaucagug

SEQ ID NO: 865096 - RNA, 19 nt, Artificial Sequence
  Description of Artificial Sequence: Synthetic oligonucleotide
  Sense strand starting at position 2776 of SEQ ID NO: 588438
ggugucauagucuggaaag

SEQ ID NO: 865097 - RNA, 19 nt, Artificial Sequence
  Description of Artificial Sequence: Synthetic oligonucleotide
  Antisense strand to SEQ ID NO: 865096
cuuuccagacuaugacacc

SEQ ID NO: 865098 - RNA, 19 nt, Artificial Sequence
  Description of Artificial Sequence: Synthetic oligonucleotide
  Sense strand starting at position 3340 of SEQ ID NO: 588438
cuagaaaugccauguggau

SEQ ID NO: 865099 - RNA, 19 nt, Artificial Sequence
  Description of Artificial Sequence: Synthetic oligonucleotide
  Antisense strand to SEQ ID NO: 865098
auccacauggcauuucuag

SEQ ID NO: 865100 - RNA, 19 nt, Artificial Sequence
  Description of Artificial Sequence: Synthetic oligonucleotide
  Sense strand starting at position 3413 of SEQ ID NO: 588438
ugacaucaucccugggcau

SEQ ID NO: 865101 - RNA, 19 nt, Artificial Sequence
  Description of Artificial Sequence: Synthetic oligonucleotide
  Antisense strand to SEQ ID NO: 865100
augcccagggaugauguca

SEQ ID NO: 865102 - RNA, 19 nt, Artificial Sequence
  Description of Artificial Sequence: Synthetic oligonucleotide
  Sense strand starting at position 3454 of SEQ ID NO: 588438
gcugccugucugucaauau

SEQ ID NO: 865103 - RNA, 19 nt, Artificial Sequence
  Description of Artificial Sequence: Synthetic oligonucleotide
  Antisense strand to SEQ ID NO: 865102
auauugacagacaggcagc

SEQ ID NO: 865104 - RNA, 19 nt, Artificial Sequence
  Description of Artificial Sequence: Synthetic oligonucleotide
  Sense strand starting at position 3458 of SEQ ID NO: 588438
ccugucugucaauaucuuu

SEQ ID NO: 865105 - RNA, 19 nt, Artificial Sequence
  Description of Artificial Sequence: Synthetic oligonucleotide
  Antisense strand to SEQ ID NO: 865104
aaagauauugacagacagg

SEQ ID NO: 865106 - RNA, 19 nt, Artificial Sequence
  Description of Artificial Sequence: Synthetic oligonucleotide
  Sense strand starting at position 3465 of SEQ ID NO: 588438
gucaauaucuuucugaggu

SEQ ID NO: 865107 - RNA, 19 nt, Artificial Sequence
  Description of Artificial Sequence: Synthetic oligonucleotide
  Antisense strand to SEQ ID NO: 865106
accucagaaagauauugac

SEQ ID NO: 865108 - RNA, 19 nt, Artificial Sequence
  Description of Artificial Sequence: Synthetic oligonucleotide
  Sense strand starting at position 3475 of SEQ ID NO: 588438
uucugaggucaagguuaga

SEQ ID NO: 865109 - RNA, 19 nt, Artificial Sequence
  Description of Artificial Sequence: Synthetic oligonucleotide
  Antisense strand to SEQ ID NO: 865108
ucuaaccuugaccucagaa

SEQ ID NO: 865110 - RNA, 19 nt, Artificial Sequence
  Description of Artificial Sequence: Synthetic oligonucleotide
  Sense strand starting at position 3565 of SEQ ID NO: 588438
uuggguuagagugaugcaa

SEQ ID NO: 865111 - RNA, 19 nt, Artificial Sequence
  Description of Artificial Sequence: Synthetic oligonucleotide
  Antisense strand to SEQ ID NO: 865110
uugcaucacucuaacccaa

SEQ ID NO: 865112 - RNA, 19 nt, Artificial Sequence
  Description of Artificial Sequence: Synthetic oligonucleotide
  Sense strand starting at position 3569 of SEQ ID NO: 588438
guuagagugaugcaaagag

SEQ ID NO: 865113 - RNA, 19 nt, Artificial Sequence
  Description of Artificial Sequence: Synthetic oligonucleotide
  Antisense strand to SEQ ID NO: 865112
cucuuugcaucacucuaac

SEQ ID NO: 865114 - RNA, 19 nt, Artificial Sequence
  Description of Artificial Sequence: Synthetic oligonucleotide
  Sense strand starting at position 3614 of SEQ ID NO: 588438
gggaucuucuaagcauauc

SEQ ID NO: 865115 - RNA, 19 nt, Artificial Sequence
  Description of Artificial Sequence: Synthetic oligonucleotide
  Antisense strand to SEQ ID NO: 865114
gauaugcuuagaagauccc

SEQ ID NO: 865116 - RNA, 19 nt, Artificial Sequence
  Description of Artificial Sequence: Synthetic oligonucleotide
  Sense strand starting at position 3638 of SEQ ID NO: 588438
gucugugucgugucacaaa

SEQ ID NO: 865117 - RNA, 19 nt, Artificial Sequence
  Description of Artificial Sequence: Synthetic oligonucleotide
  Antisense strand to SEQ ID NO: 865116
uuugugacacgacacagac

SEQ ID NO: 865118 - RNA, 19 nt, Artificial Sequence
  Description of Artificial Sequence: Synthetic oligonucleotide
  Sense strand starting at position 3716 of SEQ ID NO: 588438
ggcaccuuugaugaugcaa

SEQ ID NO: 865119 - RNA, 19 nt, Artificial Sequence
  Description of Artificial Sequence: Synthetic oligonucleotide
  Antisense strand to SEQ ID NO: 865118
uugcaucaucaaaggugcc

SEQ ID NO: 865120 - RNA, 19 nt, Artificial Sequence
  Description of Artificial Sequence: Synthetic oligonucleotide
  Sense strand starting at position 3781 of SEQ ID NO: 588438
ggacaagacuuugucccau

SEQ ID NO: 865121 - RNA, 19 nt, Artificial Sequence
  Description of Artificial Sequence: Synthetic oligonucleotide
  Antisense strand to SEQ ID NO: 865120
augggacaaagucuugucc

SEQ ID NO: 865122 - RNA, 19 nt, Artificial Sequence
  Description of Artificial Sequence: Synthetic oligonucleotide
  Sense strand starting at position 173 of SEQ ID NO: 588440
aaagcaugucaugggaauu

SEQ ID NO: 865123 - RNA, 19 nt, Artificial Sequence
  Description of Artificial Sequence: Synthetic oligonucleotide
  Antisense strand to SEQ ID NO: 865122
aauucccaugacaugcuuu

SEQ ID NO: 865124 - RNA, 19 nt, Artificial Sequence
  Description of Artificial Sequence: Synthetic oligonucleotide
  Sense strand starting at position 234 of SEQ ID NO: 588440
gcuuguaaaugauccagua

SEQ ID NO: 865125 - RNA, 19 nt, Artificial Sequence
  Description of Artificial Sequence: Synthetic oligonucleotide
  Antisense strand to SEQ ID NO: 865124
uacuggaucauuuacaagc

SEQ ID NO: 865126 - RNA, 19 nt, Artificial Sequence
  Description of Artificial Sequence: Synthetic oligonucleotide
  Sense strand starting at position 281 of SEQ ID NO: 588440
gguuccuugagccagcaaa

SEQ ID NO: 865127 - RNA, 19 nt, Artificial Sequence
  Description of Artificial Sequence: Synthetic oligonucleotide
  Antisense strand to SEQ ID NO: 865126
uuugcuggcucaaggaacc

SEQ ID NO: 865128 - RNA, 19 nt, Artificial Sequence
  Description of Artificial Sequence: Synthetic oligonucleotide
  Sense strand starting at position 373 of SEQ ID NO: 588440
acagaaauguuugagaaac

SEQ ID NO: 865129 - RNA, 19 nt, Artificial Sequence
  Description of Artificial Sequence: Synthetic oligonucleotide
  Antisense strand to SEQ ID NO: 865128
guuucucaaacauuucugu

SEQ ID NO: 865130 - RNA, 19 nt, Artificial Sequence
  Description of Artificial Sequence: Synthetic oligonucleotide
  Sense strand starting at position 514 of SEQ ID NO: 588440
gaacccugaucgcuugauu

SEQ ID NO: 865131 - RNA, 19 nt, Artificial Sequence
  Description of Artificial Sequence: Synthetic oligonucleotide
  Antisense strand to SEQ ID NO: 865130
aaucaagcgaucaggguuc

SEQ ID NO: 865132 - RNA, 19 nt, Artificial Sequence
  Description of Artificial Sequence: Synthetic oligonucleotide
  Sense strand starting at position 519 of SEQ ID NO: 588440
cugaucgcuugauucugaa

SEQ ID NO: 865133 - RNA, 19 nt, Artificial Sequence
  Description of Artificial Sequence: Synthetic oligonucleotide
  Antisense strand to SEQ ID NO: 865132
uucagaaucaagcgaucag

SEQ ID NO: 865134 - RNA, 19 nt, Artificial Sequence
  Description of Artificial Sequence: Synthetic oligonucleotide
  Sense strand starting at position 718 of SEQ ID NO: 588440
gguuucuauuuguugccaa

SEQ ID NO: 865135 - RNA, 19 nt, Artificial Sequence
  Description of Artificial Sequence: Synthetic oligonucleotide
  Antisense strand to SEQ ID NO: 865134
uuggcaacaaauagaaacc

SEQ ID NO: 865136 - RNA, 19 nt, Artificial Sequence
  Description of Artificial Sequence: Synthetic oligonucleotide
  Sense strand starting at position 722 of SEQ ID NO: 588440
ucuauuuguugccaagaga

SEQ ID NO: 865137 - RNA, 19 nt, Artificial Sequence
  Description of Artificial Sequence: Synthetic oligonucleotide
  Antisense strand to SEQ ID NO: 865136
ucucuuggcaacaaauaga

SEQ ID NO: 865138 - RNA, 19 nt, Artificial Sequence
  Description of Artificial Sequence: Synthetic oligonucleotide
  Sense strand starting at position 954 of SEQ ID NO: 588440
uggucugguggcuagagaa

SEQ ID NO: 865139 - RNA, 19 nt, Artificial Sequence
  Description of Artificial Sequence: Synthetic oligonucleotide
  Antisense strand to SEQ ID NO: 865138
uucucuagccaccagacca

SEQ ID NO: 865140 - RNA, 19 nt, Artificial Sequence
  Description of Artificial Sequence: Synthetic oligonucleotide
  Sense strand starting at position 968 of SEQ ID NO: 588440
gagaacagcacuuguguga

SEQ ID NO: 865141 - RNA, 19 nt, Artificial Sequence
  Description of Artificial Sequence: Synthetic oligonucleotide
  Antisense strand to SEQ ID NO: 865140
ucacacaagugcuguucuc

SEQ ID NO: 865142 - RNA, 19 nt, Artificial Sequence
  Description of Artificial Sequence: Synthetic oligonucleotide
  Sense strand starting at position 972 of SEQ ID NO: 588440
acagcacuugugugacaca

SEQ ID NO: 865143 - RNA, 19 nt, Artificial Sequence
  Description of Artificial Sequence: Synthetic oligonucleotide
  Antisense strand to SEQ ID NO: 865142
ugugucacacaagugcugu

SEQ ID NO: 865144 - RNA, 19 nt, Artificial Sequence
  Description of Artificial Sequence: Synthetic oligonucleotide
  Sense strand starting at position 981 of SEQ ID NO: 588440
gugugacacauuugggcuu

SEQ ID NO: 865145 - RNA, 19 nt, Artificial Sequence
  Description of Artificial Sequence: Synthetic oligonucleotide
  Antisense strand to SEQ ID NO: 865144
aagcccaaaugugucacac

SEQ ID NO: 865146 - RNA, 19 nt, Artificial Sequence
  Description of Artificial Sequence: Synthetic oligonucleotide
  Sense strand starting at position 1054 of SEQ ID NO: 588440
uggcuuccucaccaugagu

SEQ ID NO: 865147 - RNA, 19 nt, Artificial Sequence
  Description of Artificial Sequence: Synthetic oligonucleotide
  Antisense strand to SEQ ID NO: 865146
acucauggugaggaagcca

SEQ ID NO: 865148 - RNA, 19 nt, Artificial Sequence
  Description of Artificial Sequence: Synthetic oligonucleotide
  Sense strand starting at position 1065 of SEQ ID NO: 588440
ccaugagugcuccgggaau

SEQ ID NO: 865149 - RNA, 19 nt, Artificial Sequence
  Description of Artificial Sequence: Synthetic oligonucleotide
  Antisense strand to SEQ ID NO: 865148
auucccggagcacucaugg

SEQ ID NO: 865150 - RNA, 19 nt, Artificial Sequence
  Description of Artificial Sequence: Synthetic oligonucleotide
  Sense strand starting at position 1126 of SEQ ID NO: 588440
cccauagggcacugauaau

SEQ ID NO: 865151 - RNA, 19 nt, Artificial Sequence
  Description of Artificial Sequence: Synthetic oligonucleotide
  Antisense strand to SEQ ID NO: 865150
auuaucagugcccuauggg

SEQ ID NO: 865152 - RNA, 19 nt, Artificial Sequence
  Description of Artificial Sequence: Synthetic oligonucleotide
  Sense strand starting at position 1307 of SEQ ID NO: 588440
gccucuggucggagugauc

SEQ ID NO: 865153 - RNA, 19 nt, Artificial Sequence
  Description of Artificial Sequence: Synthetic oligonucleotide
  Antisense strand to SEQ ID NO: 865152
gaucacuccgaccagaggc

SEQ ID NO: 865154 - RNA, 19 nt, Artificial Sequence
  Description of Artificial Sequence: Synthetic oligonucleotide
  Sense strand starting at position 2880 of SEQ ID NO: 588440
cguggugagacaggaauau

SEQ ID NO: 865155 - RNA, 19 nt, Artificial Sequence
  Description of Artificial Sequence: Synthetic oligonucleotide
  Antisense strand to SEQ ID NO: 865154
auauuccugucucaccacg

SEQ ID NO: 865156 - RNA, 19 nt, Artificial Sequence
  Description of Artificial Sequence: Synthetic oligonucleotide
  Sense strand starting at position 3072 of SEQ ID NO: 588440
cuguguuucccguuccuau

SEQ ID NO: 865157 - RNA, 19 nt, Artificial Sequence
  Description of Artificial Sequence: Synthetic oligonucleotide
  Antisense strand to SEQ ID NO: 865156
auaggaacgggaaacacag

SEQ ID NO: 865158 - RNA, 19 nt, Artificial Sequence
  Description of Artificial Sequence: Synthetic oligonucleotide
  Sense strand starting at position 3073 of SEQ ID NO: 588440
uguguuucccguuccuauu

SEQ ID NO: 865159 - RNA, 19 nt, Artificial Sequence
  Description of Artificial Sequence: Synthetic oligonucleotide
  Antisense strand to SEQ ID NO: 865158
aauaggaacgggaaacaca

SEQ ID NO: 865160 - RNA, 19 nt, Artificial Sequence
  Description of Artificial Sequence: Synthetic oligonucleotide
  Sense strand starting at position 3096 of SEQ ID NO: 588440
aaacgccauucgguuagaa

SEQ ID NO: 865161 - RNA, 19 nt, Artificial Sequence
  Description of Artificial Sequence: Synthetic oligonucleotide
  Antisense strand to SEQ ID NO: 865160
uucuaaccgaauggcguuu

SEQ ID NO: 865162 - RNA, 19 nt, Artificial Sequence
  Description of Artificial Sequence: Synthetic oligonucleotide
  Sense strand starting at position 3098 of SEQ ID NO: 588440
acgccauucgguuagaaac

SEQ ID NO: 865163 - RNA, 19 nt, Artificial Sequence
  Description of Artificial Sequence: Synthetic oligonucleotide
  Antisense strand to SEQ ID NO: 865162
guuucuaaccgaauggcgu

SEQ ID NO: 865164 - RNA, 19 nt, Artificial Sequence
  Description of Artificial Sequence: Synthetic oligonucleotide
  Sense strand starting at position 3230 of SEQ ID NO: 588440
gggagauucacaggcgaag

SEQ ID NO: 865165 - RNA, 19 nt, Artificial Sequence
  Description of Artificial Sequence: Synthetic oligonucleotide
  Antisense strand to SEQ ID NO: 865164
cuucgccugugaaucuccc

SEQ ID NO: 865166 - RNA, 19 nt, Artificial Sequence
  Description of Artificial Sequence: Synthetic oligonucleotide
  Sense strand starting at position 3254 of SEQ ID NO: 588440
cgcaaaguaacgugagaua

SEQ ID NO: 865167 - RNA, 19 nt, Artificial Sequence
  Description of Artificial Sequence: Synthetic oligonucleotide
  Antisense strand to SEQ ID NO: 865166
uaucucacguuacuuugcg

SEQ ID NO: 865168 - RNA, 19 nt, Artificial Sequence
  Description of Artificial Sequence: Synthetic oligonucleotide
  Sense strand starting at position 3409 of SEQ ID NO: 588440
uuuacaaguucucuuguuu

SEQ ID NO: 865169 - RNA, 19 nt, Artificial Sequence
  Description of Artificial Sequence: Synthetic oligonucleotide
  Antisense strand to SEQ ID NO: 865168
aaacaagagaacuuguaaa

SEQ ID NO: 865170 - RNA, 19 nt, Artificial Sequence
  Description of Artificial Sequence: Synthetic oligonucleotide
  Sense strand starting at position 3416 of SEQ ID NO: 588440
guucucuuguuucugagaa

SEQ ID NO: 865171 - RNA, 19 nt, Artificial Sequence
  Description of Artificial Sequence: Synthetic oligonucleotide
  Antisense strand to SEQ ID NO: 865170
uucucagaaacaagagaac

SEQ ID NO: 865172 - RNA, 19 nt, Artificial Sequence
  Description of Artificial Sequence: Synthetic oligonucleotide
  Sense strand starting at position 3441 of SEQ ID NO: 588440
cgauguuuagccgccgagu

SEQ ID NO: 865173 - RNA, 19 nt, Artificial Sequence
  Description of Artificial Sequence: Synthetic oligonucleotide
  Antisense strand to SEQ ID NO: 865172
acucggcggcuaaacaucg

SEQ ID NO: 865174 - RNA, 19 nt, Artificial Sequence
  Description of Artificial Sequence: Synthetic oligonucleotide
  Sense strand starting at position 3442 of SEQ ID NO: 588440
gauguuuagccgccgagua

SEQ ID NO: 865175 - RNA, 19 nt, Artificial Sequence
  Description of Artificial Sequence: Synthetic oligonucleotide
  Antisense strand to SEQ ID NO: 865174
uacucggcggcuaaacauc

SEQ ID NO: 865176 - RNA, 19 nt, Artificial Sequence
  Description of Artificial Sequence: Synthetic oligonucleotide
  Sense strand starting at position 3452 of SEQ ID NO: 588440
cgccgaguaaucgaauuua

SEQ ID NO: 865177 - RNA, 19 nt, Artificial Sequence
  Description of Artificial Sequence: Synthetic oligonucleotide
  Antisense strand to SEQ ID NO: 865176
uaaauucgauuacucggcg

SEQ ID NO: 865178 - RNA, 19 nt, Artificial Sequence
  Description of Artificial Sequence: Synthetic oligonucleotide
  Sense strand starting at position 3473 of SEQ ID NO: 588440
cuucuagacugagauugaa

SEQ ID NO: 865179 - RNA, 19 nt, Artificial Sequence
  Description of Artificial Sequence: Synthetic oligonucleotide
  Antisense strand to SEQ ID NO: 865178
uucaaucucagucuagaag

SEQ ID NO: 865180 - RNA, 19 nt, Artificial Sequence
  Description of Artificial Sequence: Synthetic oligonucleotide
  Sense strand starting at position 3483 of SEQ ID NO: 588440
gagauugaauuauggauga

SEQ ID NO: 865181 - RNA, 19 nt, Artificial Sequence
  Description of Artificial Sequence: Synthetic oligonucleotide
  Antisense strand to SEQ ID NO: 865180
ucauccauaauucaaucuc

SEQ ID NO: 865182 - RNA, 19 nt, Artificial Sequence
  Description of Artificial Sequence: Synthetic oligonucleotide
  Sense strand starting at position 3494 of SEQ ID NO: 588440
auggaugacuuaugggaaa

SEQ ID NO: 865183 - RNA, 19 nt, Artificial Sequence
  Description of Artificial Sequence: Synthetic oligonucleotide
  Antisense strand to SEQ ID NO: 865182
uuucccauaagucauccau

SEQ ID NO: 865184 - RNA, 19 nt, Artificial Sequence
  Description of Artificial Sequence: Synthetic oligonucleotide
  Sense strand starting at position 3608 of SEQ ID NO: 588440
gcaauaugugauugaggca

SEQ ID NO: 865185 - RNA, 19 nt, Artificial Sequence
  Description of Artificial Sequence: Synthetic oligonucleotide
  Antisense strand to SEQ ID NO: 865184
ugccucaaucacauauugc

SEQ ID NO: 865186 - RNA, 19 nt, Artificial Sequence
  Description of Artificial Sequence: Synthetic oligonucleotide
  Sense strand starting at position 3613 of SEQ ID NO: 588440
augugauugaggcaguaaa

SEQ ID NO: 865187 - RNA, 19 nt, Artificial Sequence
  Description of Artificial Sequence: Synthetic oligonucleotide
  Antisense strand to SEQ ID NO: 865186
uuuacugccucaaucacau

SEQ ID NO: 865188 - RNA, 19 nt, Artificial Sequence
  Description of Artificial Sequence: Synthetic oligonucleotide
  Sense strand starting at position 3621 of SEQ ID NO: 588440
gaggcaguaaacugucgua

SEQ ID NO: 865189 - RNA, 19 nt, Artificial Sequence
  Description of Artificial Sequence: Synthetic oligonucleotide
  Antisense strand to SEQ ID NO: 865188
uacgacaguuuacugccuc

SEQ ID NO: 865190 - RNA, 19 nt, Artificial Sequence
  Description of Artificial Sequence: Synthetic oligonucleotide
  Sense strand starting at position 3798 of SEQ ID NO: 588440
ucauguguucucugaagug

SEQ ID NO: 865191 - RNA, 19 nt, Artificial Sequence
  Description of Artificial Sequence: Synthetic oligonucleotide
  Antisense strand to SEQ ID NO: 865190
cacuucagagaacacauga

SEQ ID NO: 865192 - RNA, 19 nt, Artificial Sequence
  Description of Artificial Sequence: Synthetic oligonucleotide
  Sense strand starting at position 3810 of SEQ ID NO: 588440
ugaagugucccuggugcaa

SEQ ID NO: 865193 - RNA, 19 nt, Artificial Sequence
  Description of Artificial Sequence: Synthetic oligonucleotide
  Antisense strand to SEQ ID NO: 865192
uugcaccagggacacuuca

SEQ ID NO: 865194 - RNA, 19 nt, Artificial Sequence
  Description of Artificial Sequence: Synthetic oligonucleotide
  Sense strand starting at position 3829 of SEQ ID NO: 588440
ccugcugauccagagugua

SEQ ID NO: 865195 - RNA, 19 nt, Artificial Sequence
  Description of Artificial Sequence: Synthetic oligonucleotide
  Antisense strand to SEQ ID NO: 865194
uacacucuggaucagcagg

SEQ ID NO: 865196 - RNA, 19 nt, Artificial Sequence
  Description of Artificial Sequence: Synthetic oligonucleotide
  Sense strand starting at position 3834 of SEQ ID NO: 588440
ugauccagaguguaaggua

SEQ ID NO: 865197 - RNA, 19 nt, Artificial Sequence
  Description of Artificial Sequence: Synthetic oligonucleotide
  Antisense strand to SEQ ID NO: 865196
uaccuuacacucuggauca

SEQ ID NO: 865198 - RNA, 19 nt, Artificial Sequence
  Description of Artificial Sequence: Synthetic oligonucleotide
  Sense strand starting at position 3889 of SEQ ID NO: 588440
cauauaggguucuuagaca

SEQ ID NO: 865199 - RNA, 19 nt, Artificial Sequence
  Description of Artificial Sequence: Synthetic oligonucleotide
  Antisense strand to SEQ ID NO: 865198
ugucuaagaacccuauaug

SEQ ID NO: 865200 - RNA, 19 nt, Artificial Sequence
  Description of Artificial Sequence: Synthetic oligonucleotide
  Sense strand starting at position 3901 of SEQ ID NO: 588440
uuagacaacagguguguaa

SEQ ID NO: 865201 - RNA, 19 nt, Artificial Sequence
  Description of Artificial Sequence: Synthetic oligonucleotide
  Antisense strand to SEQ ID NO: 865200
uuacacaccuguugucuaa

SEQ ID NO: 865202 - RNA, 19 nt, Artificial Sequence
  Description of Artificial Sequence: Synthetic oligonucleotide
  Sense strand starting at position 59 of SEQ ID NO: 588441
ucuuuauuuggauguguuc

SEQ ID NO: 865203 - RNA, 19 nt, Artificial Sequence
  Description of Artificial Sequence: Synthetic oligonucleotide
  Antisense strand to SEQ ID NO: 865202
gaacacauccaaauaaaga

SEQ ID NO: 865204 - RNA, 19 nt, Artificial Sequence
  Description of Artificial Sequence: Synthetic oligonucleotide
  Sense strand starting at position 68 of SEQ ID NO: 588441
ggauguguucuacaagcac

SEQ ID NO: 865205 - RNA, 19 nt, Artificial Sequence
  Description of Artificial Sequence: Synthetic oligonucleotide
  Antisense strand to SEQ ID NO: 865204
gugcuuguagaacacaucc

SEQ ID NO: 865206 - RNA, 19 nt, Artificial Sequence
  Description of Artificial Sequence: Synthetic oligonucleotide
  Sense strand starting at position 151 of SEQ ID NO: 588441
ccuaauucucagugaaucg

SEQ ID NO: 865207 - RNA, 19 nt, Artificial Sequence
  Description of Artificial Sequence: Synthetic oligonucleotide
  Antisense strand to SEQ ID NO: 865206
cgauucacugagaauuagg

SEQ ID NO: 865208 - RNA, 19 nt, Artificial Sequence
  Description of Artificial Sequence: Synthetic oligonucleotide
  Sense strand starting at position 163 of SEQ ID NO: 588441
ugaaucguauuaucaccua

SEQ ID NO: 865209 - RNA, 19 nt, Artificial Sequence
  Description of Artificial Sequence: Synthetic oligonucleotide
  Antisense strand to SEQ ID NO: 865208
uaggugauaauacgauuca

SEQ ID NO: 865210 - RNA, 19 nt, Artificial Sequence
  Description of Artificial Sequence: Synthetic oligonucleotide
  Sense strand starting at position 166 of SEQ ID NO: 588441
aucguauuaucaccuacua

SEQ ID NO: 865211 - RNA, 19 nt, Artificial Sequence
  Description of Artificial Sequence: Synthetic oligonucleotide
  Antisense strand to SEQ ID NO: 865210
uaguaggugauaauacgau

SEQ ID NO: 865212 - RNA, 19 nt, Artificial Sequence
  Description of Artificial Sequence: Synthetic oligonucleotide
  Sense strand starting at position 272 of SEQ ID NO: 588441
aagaguauuuccuggaaga

SEQ ID NO: 865213 - RNA, 19 nt, Artificial Sequence
  Description of Artificial Sequence: Synthetic oligonucleotide
  Antisense strand to SEQ ID NO: 865212
ucuuccaggaaauacucuu

SEQ ID NO: 865214 - RNA, 19 nt, Artificial Sequence
  Description of Artificial Sequence: Synthetic oligonucleotide
  Sense strand starting at position 411 of SEQ ID NO: 588441
ggcagaguaacuuggaaga

SEQ ID NO: 865215 - RNA, 19 nt, Artificial Sequence
  Description of Artificial Sequence: Synthetic oligonucleotide
  Antisense strand to SEQ ID NO: 865214
ucuuccaaguuacucugcc

SEQ ID NO: 865216 - RNA, 19 nt, Artificial Sequence
  Description of Artificial Sequence: Synthetic oligonucleotide
  Sense strand starting at position 665 of SEQ ID NO: 588441
cagaaagucugaccuugaa

SEQ ID NO: 865217 - RNA, 19 nt, Artificial Sequence
  Description of Artificial Sequence: Synthetic oligonucleotide
  Antisense strand to SEQ ID NO: 865216
uucaaggucagacuuucug

SEQ ID NO: 865218 - RNA, 19 nt, Artificial Sequence
  Description of Artificial Sequence: Synthetic oligonucleotide
  Sense strand starting at position 686 of SEQ ID NO: 588441
ucaauuuaagugugcuaau

SEQ ID NO: 865219 - RNA, 19 nt, Artificial Sequence
  Description of Artificial Sequence: Synthetic oligonucleotide
  Antisense strand to SEQ ID NO: 865218
auuagcacacuuaaauuga

SEQ ID NO: 865220 - RNA, 19 nt, Artificial Sequence
  Description of Artificial Sequence: Synthetic oligonucleotide
  Sense strand starting at position 739 of SEQ ID NO: 588441
gcagauagaaaguaugcau

SEQ ID NO: 865221 - RNA, 19 nt, Artificial Sequence
  Description of Artificial Sequence: Synthetic oligonucleotide
  Antisense strand to SEQ ID NO: 865220
augcauacuuucuaucugc

SEQ ID NO: 865222 - RNA, 19 nt, Artificial Sequence
  Description of Artificial Sequence: Synthetic oligonucleotide
  Sense strand starting at position 746 of SEQ ID NO: 588441
gaaaguaugcauuggugau

SEQ ID NO: 865223 - RNA, 19 nt, Artificial Sequence
  Description of Artificial Sequence: Synthetic oligonucleotide
  Antisense strand to SEQ ID NO: 865222
aucaccaaugcauacuuuc

SEQ ID NO: 865224 - RNA, 19 nt, Artificial Sequence
  Description of Artificial Sequence: Synthetic oligonucleotide
  Sense strand starting at position 758 of SEQ ID NO: 588441
uggugauacagcuaggagu

SEQ ID NO: 865225 - RNA, 19 nt, Artificial Sequence
  Description of Artificial Sequence: Synthetic oligonucleotide
  Antisense strand to SEQ ID NO: 865224
acuccuagcuguaucacca

SEQ ID NO: 865226 - RNA, 19 nt, Artificial Sequence
  Description of Artificial Sequence: Synthetic oligonucleotide
  Sense strand starting at position 760 of SEQ ID NO: 588441
gugauacagcuaggaguaa

SEQ ID NO: 865227 - RNA, 19 nt, Artificial Sequence
  Description of Artificial Sequence: Synthetic oligonucleotide
  Antisense strand to SEQ ID NO: 865226
uuacuccuagcuguaucac

SEQ ID NO: 865228 - RNA, 19 nt, Artificial Sequence
  Description of Artificial Sequence: Synthetic oligonucleotide
  Sense strand starting at position 772 of SEQ ID NO: 588441
ggaguaaacuguguuggca

SEQ ID NO: 865229 - RNA, 19 nt, Artificial Sequence
  Description of Artificial Sequence: Synthetic oligonucleotide
  Antisense strand to SEQ ID NO: 865228
ugccaacacaguuuacucc

SEQ ID NO: 865230 - RNA, 19 nt, Artificial Sequence
  Description of Artificial Sequence: Synthetic oligonucleotide
  Sense strand starting at position 776 of SEQ ID NO: 588441
uaaacuguguuggcaauaa

SEQ ID NO: 865231 - RNA, 19 nt, Artificial Sequence
  Description of Artificial Sequence: Synthetic oligonucleotide
  Antisense strand to SEQ ID NO: 865230
uuauugccaacacaguuua

SEQ ID NO: 865232 - RNA, 19 nt, Artificial Sequence
  Description of Artificial Sequence: Synthetic oligonucleotide
  Sense strand starting at position 788 of SEQ ID NO: 588441
gcaauaauugcaggaauaa

SEQ ID NO: 865233 - RNA, 19 nt, Artificial Sequence
  Description of Artificial Sequence: Synthetic oligonucleotide
  Antisense strand to SEQ ID NO: 865232
uuauuccugcaauuauugc

SEQ ID NO: 865234 - RNA, 19 nt, Artificial Sequence
  Description of Artificial Sequence: Synthetic oligonucleotide
  Sense strand starting at position 990 of SEQ ID NO: 588441
gucuguaguccugacuacu

SEQ ID NO: 865235 - RNA, 19 nt, Artificial Sequence
  Description of Artificial Sequence: Synthetic oligonucleotide
  Antisense strand to SEQ ID NO: 865234
aguagucaggacuacagac

SEQ ID NO: 865236 - RNA, 19 nt, Artificial Sequence
  Description of Artificial Sequence: Synthetic oligonucleotide
  Sense strand starting at position 1199 of SEQ ID NO: 588441
cuaauugaacugugaugau

SEQ ID NO: 865237 - RNA, 19 nt, Artificial Sequence
  Description of Artificial Sequence: Synthetic oligonucleotide
  Antisense strand to SEQ ID NO: 865236
aucaucacaguucaauuag

SEQ ID NO: 865238 - RNA, 19 nt, Artificial Sequence
  Description of Artificial Sequence: Synthetic oligonucleotide
  Sense strand starting at position 1384 of SEQ ID NO: 588441
ccaaucaugugaucaguca

SEQ ID NO: 865239 - RNA, 19 nt, Artificial Sequence
  Description of Artificial Sequence: Synthetic oligonucleotide
  Antisense strand to SEQ ID NO: 865238
ugacugaucacaugauugg

SEQ ID NO: 865240 - RNA, 19 nt, Artificial Sequence
  Description of Artificial Sequence: Synthetic oligonucleotide
  Sense strand starting at position 1392 of SEQ ID NO: 588441
gugaucagucaauaguuaa

SEQ ID NO: 865241 - RNA, 19 nt, Artificial Sequence
  Description of Artificial Sequence: Synthetic oligonucleotide
  Antisense strand to SEQ ID NO: 865240
uuaacuauugacugaucac

SEQ ID NO: 865242 - RNA, 19 nt, Artificial Sequence
  Description of Artificial Sequence: Synthetic oligonucleotide
  Sense strand starting at position 1564 of SEQ ID NO: 588441
augaaagugccaggaaucu

SEQ ID NO: 865243 - RNA, 19 nt, Artificial Sequence
  Description of Artificial Sequence: Synthetic oligonucleotide
  Antisense strand to SEQ ID NO: 865242
agauuccuggcacuuucau

SEQ ID NO: 865244 - RNA, 19 nt, Artificial Sequence
  Description of Artificial Sequence: Synthetic oligonucleotide
  Sense strand starting at position 1570 of SEQ ID NO: 588441
gugccaggaaucuggagaa

SEQ ID NO: 865245 - RNA, 19 nt, Artificial Sequence
  Description of Artificial Sequence: Synthetic oligonucleotide
  Antisense strand to SEQ ID NO: 865244
uucuccagauuccuggcac

SEQ ID NO: 865246 - RNA, 19 nt, Artificial Sequence
  Description of Artificial Sequence: Synthetic oligonucleotide
  Sense strand starting at position 1677 of SEQ ID NO: 588441
ugacuaaacugaguuagca

SEQ ID NO: 865247 - RNA, 19 nt, Artificial Sequence
  Description of Artificial Sequence: Synthetic oligonucleotide
  Antisense strand to SEQ ID NO: 865246
ugcuaacucaguuuaguca

SEQ ID NO: 865248 - RNA, 19 nt, Artificial Sequence
  Description of Artificial Sequence: Synthetic oligonucleotide
  Sense strand starting at position 1681 of SEQ ID NO: 588441
uaaacugaguuagcaguaa

SEQ ID NO: 865249 - RNA, 19 nt, Artificial Sequence
  Description of Artificial Sequence: Synthetic oligonucleotide
  Antisense strand to SEQ ID NO: 865248
uuacugcuaacucaguuua

SEQ ID NO: 865250 - RNA, 19 nt, Artificial Sequence
  Description of Artificial Sequence: Synthetic oligonucleotide
  Sense strand starting at position 1855 of SEQ ID NO: 588441
augacucccucugcagaua

SEQ ID NO: 865251 - RNA, 19 nt, Artificial Sequence
  Description of Artificial Sequence: Synthetic oligonucleotide
  Antisense strand to SEQ ID NO: 865250
uaucugcagagggagucau

SEQ ID NO: 865252 - RNA, 19 nt, Artificial Sequence
  Description of Artificial Sequence: Synthetic oligonucleotide
  Sense strand starting at position 1866 of SEQ ID NO: 588441
ugcagauaaccauagguuu

SEQ ID NO: 865253 - RNA, 19 nt, Artificial Sequence
  Description of Artificial Sequence: Synthetic oligonucleotide
  Antisense strand to SEQ ID NO: 865252
aaaccuaugguuaucugca

SEQ ID NO: 865254 - RNA, 19 nt, Artificial Sequence
  Description of Artificial Sequence: Synthetic oligonucleotide
  Sense strand starting at position 1908 of SEQ ID NO: 588441
acccuagugugguuugaaa

SEQ ID NO: 865255 - RNA, 19 nt, Artificial Sequence
  Description of Artificial Sequence: Synthetic oligonucleotide
  Antisense strand to SEQ ID NO: 865254
uuucaaaccacacuagggu

SEQ ID NO: 865256 - RNA, 19 nt, Artificial Sequence
  Description of Artificial Sequence: Synthetic oligonucleotide
  Sense strand starting at position 1910 of SEQ ID NO: 588441
ccuagugugguuugaaaua

SEQ ID NO: 865257 - RNA, 19 nt, Artificial Sequence
  Description of Artificial Sequence: Synthetic oligonucleotide
  Antisense strand to SEQ ID NO: 865256
uauuucaaaccacacuagg

SEQ ID NO: 865258 - RNA, 19 nt, Artificial Sequence
  Description of Artificial Sequence: Synthetic oligonucleotide
  Sense strand starting at position 2044 of SEQ ID NO: 588441
ggcucugaauucuucucau

SEQ ID NO: 865259 - RNA, 19 nt, Artificial Sequence
  Description of Artificial Sequence: Synthetic oligonucleotide
  Antisense strand to SEQ ID NO: 865258
augagaagaauucagagcc

SEQ ID NO: 865260 - RNA, 19 nt, Artificial Sequence
  Description of Artificial Sequence: Synthetic oligonucleotide
  Sense strand starting at position 2057 of SEQ ID NO: 588441
ucucauauuccuggacagu

SEQ ID NO: 865261 - RNA, 19 nt, Artificial Sequence
  Description of Artificial Sequence: Synthetic oligonucleotide
  Antisense strand to SEQ ID NO: 865260
acuguccaggaauaugaga

SEQ ID NO: 865262 - RNA, 19 nt, Artificial Sequence
  Description of Artificial Sequence: Synthetic oligonucleotide
  Sense strand starting at position 2058 of SEQ ID NO: 588441
cucauauuccuggacagua

SEQ ID NO: 865263 - RNA, 19 nt, Artificial Sequence
  Description of Artificial Sequence: Synthetic oligonucleotide
  Antisense strand to SEQ ID NO: 865262
uacuguccaggaauaugag

SEQ ID NO: 865264 - RNA, 19 nt, Artificial Sequence
  Description of Artificial Sequence: Synthetic oligonucleotide
  Sense strand starting at position 2068 of SEQ ID NO: 588441
uggacaguagcucgaaagu

SEQ ID NO: 865265 - RNA, 19 nt, Artificial Sequence
  Description of Artificial Sequence: Synthetic oligonucleotide
  Antisense strand to SEQ ID NO: 865264
acuuucgagcuacugucca

SEQ ID NO: 865266 - RNA, 19 nt, Artificial Sequence
  Description of Artificial Sequence: Synthetic oligonucleotide
  Sense strand starting at position 2081 of SEQ ID NO: 588441
gaaaguagguggucaguca

SEQ ID NO: 865267 - RNA, 19 nt, Artificial Sequence
  Description of Artificial Sequence: Synthetic oligonucleotide
  Antisense strand to SEQ ID NO: 865266
ugacugaccaccuacuuuc

SEQ ID NO: 865268 - RNA, 19 nt, Artificial Sequence
  Description of Artificial Sequence: Synthetic oligonucleotide
  Sense strand starting at position 2098 of SEQ ID NO: 588441
cagcgucugaguguuacuu

SEQ ID NO: 865269 - RNA, 19 nt, Artificial Sequence
  Description of Artificial Sequence: Synthetic oligonucleotide
  Antisense strand to SEQ ID NO: 865268
aaguaacacucagacgcug

SEQ ID NO: 865270 - RNA, 19 nt, Artificial Sequence
  Description of Artificial Sequence: Synthetic oligonucleotide
  Sense strand starting at position 2336 of SEQ ID NO: 588441
ggagucuugcucgugucuu

SEQ ID NO: 865271 - RNA, 19 nt, Artificial Sequence
  Description of Artificial Sequence: Synthetic oligonucleotide
  Antisense strand to SEQ ID NO: 865270
aagacacgagcaagacucc

SEQ ID NO: 865272 - RNA, 19 nt, Artificial Sequence
  Description of Artificial Sequence: Synthetic oligonucleotide
  Sense strand starting at position 2562 of SEQ ID NO: 588441
accauuguauguuuauaga

SEQ ID NO: 865273 - RNA, 19 nt, Artificial Sequence
  Description of Artificial Sequence: Synthetic oligonucleotide
  Antisense strand to SEQ ID NO: 865272
ucuauaaacauacaauggu

SEQ ID NO: 865274 - RNA, 19 nt, Artificial Sequence
  Description of Artificial Sequence: Synthetic oligonucleotide
  Sense strand starting at position 2585 of SEQ ID NO: 588441
gaagucaaccauggucuga

SEQ ID NO: 865275 - RNA, 19 nt, Artificial Sequence
  Description of Artificial Sequence: Synthetic oligonucleotide
  Antisense strand to SEQ ID NO: 865274
ucagaccaugguugacuuc

SEQ ID NO: 865276 - RNA, 19 nt, Artificial Sequence
  Description of Artificial Sequence: Synthetic oligonucleotide
  Sense strand starting at position 3237 of SEQ ID NO: 588441
ccgcuuccuccgucuuuau

SEQ ID NO: 865277 - RNA, 19 nt, Artificial Sequence
  Description of Artificial Sequence: Synthetic oligonucleotide
  Antisense strand to SEQ ID NO: 865276
auaaagacggaggaagcgg

SEQ ID NO: 865278 - RNA, 19 nt, Artificial Sequence
  Description of Artificial Sequence: Synthetic oligonucleotide
  Sense strand starting at position 3238 of SEQ ID NO: 588441
cgcuuccuccgucuuuaua

SEQ ID NO: 865279 - RNA, 19 nt, Artificial Sequence
  Description of Artificial Sequence: Synthetic oligonucleotide
  Antisense strand to SEQ ID NO: 865278
uauaaagacggaggaagcg

SEQ ID NO: 865280 - RNA, 19 nt, Artificial Sequence
  Description of Artificial Sequence: Synthetic oligonucleotide
  Sense strand starting at position 3458 of SEQ ID NO: 588441
cauggaugauuguuaugcu

SEQ ID NO: 865281 - RNA, 19 nt, Artificial Sequence
  Description of Artificial Sequence: Synthetic oligonucleotide
  Antisense strand to SEQ ID NO: 865280
agcauaacaaucauccaug

SEQ ID NO: 865282 - RNA, 19 nt, Artificial Sequence
  Description of Artificial Sequence: Synthetic oligonucleotide
  Sense strand starting at position 150 of SEQ ID NO: 588442
ccacucaaccguggaaaga

SEQ ID NO: 865283 - RNA, 19 nt, Artificial Sequence
  Description of Artificial Sequence: Synthetic oligonucleotide
  Antisense strand to SEQ ID NO: 865282
ucuuuccacgguugagugg

SEQ ID NO: 865284 - RNA, 19 nt, Artificial Sequence
  Description of Artificial Sequence: Synthetic oligonucleotide
  Sense strand starting at position 161 of SEQ ID NO: 588442
uggaaagaguucuuuguga

SEQ ID NO: 865285 - RNA, 19 nt, Artificial Sequence
  Description of Artificial Sequence: Synthetic oligonucleotide
  Antisense strand to SEQ ID NO: 865284
ucacaaagaacucuuucca

SEQ ID NO: 865286 - RNA, 19 nt, Artificial Sequence
  Description of Artificial Sequence: Synthetic oligonucleotide
  Sense strand starting at position 163 of SEQ ID NO: 588442
gaaagaguucuuugugaag

SEQ ID NO: 865287 - RNA, 19 nt, Artificial Sequence
  Description of Artificial Sequence: Synthetic oligonucleotide
  Antisense strand to SEQ ID NO: 865286
cuucacaaagaacucuuuc

SEQ ID NO: 865288 - RNA, 19 nt, Artificial Sequence
  Description of Artificial Sequence: Synthetic oligonucleotide
  Sense strand starting at position 223 of SEQ ID NO: 588442
gggucaagcagucacugaa

SEQ ID NO: 865289 - RNA, 19 nt, Artificial Sequence
  Description of Artificial Sequence: Synthetic oligonucleotide
  Antisense strand to SEQ ID NO: 865288
uucagugacugcuugaccc

SEQ ID NO: 865290 - RNA, 19 nt, Artificial Sequence
  Description of Artificial Sequence: Synthetic oligonucleotide
  Sense strand starting at position 263 of SEQ ID NO: 588442
uuugcugagcgcuucugaa

SEQ ID NO: 865291 - RNA, 19 nt, Artificial Sequence
  Description of Artificial Sequence: Synthetic oligonucleotide
  Antisense strand to SEQ ID NO: 865290
uucagaagcgcucagcaaa

SEQ ID NO: 865292 - RNA, 19 nt, Artificial Sequence
  Description of Artificial Sequence: Synthetic oligonucleotide
  Sense strand starting at position 265 of SEQ ID NO: 588442
ugcugagcgcuucugaagu

SEQ ID NO: 865293 - RNA, 19 nt, Artificial Sequence
  Description of Artificial Sequence: Synthetic oligonucleotide
  Antisense strand to SEQ ID NO: 865292
acuucagaagcgcucagca

SEQ ID NO: 865294 - RNA, 19 nt, Artificial Sequence
  Description of Artificial Sequence: Synthetic oligonucleotide
  Sense strand starting at position 284 of SEQ ID NO: 588442
gccaaacauugugcuaaua

SEQ ID NO: 865295 - RNA, 19 nt, Artificial Sequence
  Description of Artificial Sequence: Synthetic oligonucleotide
  Antisense strand to SEQ ID NO: 865294
uauuagcacaauguuuggc

SEQ ID NO: 865296 - RNA, 19 nt, Artificial Sequence
  Description of Artificial Sequence: Synthetic oligonucleotide
  Sense strand starting at position 747 of SEQ ID NO: 588442
guacaaaucuuccucgaaa

SEQ ID NO: 865297 - RNA, 19 nt, Artificial Sequence
  Description of Artificial Sequence: Synthetic oligonucleotide
  Antisense strand to SEQ ID NO: 865296
uuucgaggaagauuuguac

SEQ ID NO: 865298 - RNA, 19 nt, Artificial Sequence
  Description of Artificial Sequence: Synthetic oligonucleotide
  Sense strand starting at position 784 of SEQ ID NO: 588442
ucaucagugcaaugaggau

SEQ ID NO: 865299 - RNA, 19 nt, Artificial Sequence
  Description of Artificial Sequence: Synthetic oligonucleotide
  Antisense strand to SEQ ID NO: 865298
auccucauugcacugauga

SEQ ID NO: 865300 - RNA, 19 nt, Artificial Sequence
  Description of Artificial Sequence: Synthetic oligonucleotide
  Sense strand starting at position 833 of SEQ ID NO: 588442
auauaaagcugucugaaag

SEQ ID NO: 865301 - RNA, 19 nt, Artificial Sequence
  Description of Artificial Sequence: Synthetic oligonucleotide
  Antisense strand to SEQ ID NO: 865300
cuuucagacagcuuuauau

SEQ ID NO: 865302 - RNA, 19 nt, Artificial Sequence
  Description of Artificial Sequence: Synthetic oligonucleotide
  Sense strand starting at position 834 of SEQ ID NO: 588442
uauaaagcugucugaaagu

SEQ ID NO: 865303 - RNA, 19 nt, Artificial Sequence
  Description of Artificial Sequence: Synthetic oligonucleotide
  Antisense strand to SEQ ID NO: 865302
acuuucagacagcuuuaua

SEQ ID NO: 865304 - RNA, 19 nt, Artificial Sequence
  Description of Artificial Sequence: Synthetic oligonucleotide
  Sense strand starting at position 860 of SEQ ID NO: 588442
ccauuccgacgcuauaauu

SEQ ID NO: 865305 - RNA, 19 nt, Artificial Sequence
  Description of Artificial Sequence: Synthetic oligonucleotide
  Antisense strand to SEQ ID NO: 865304
aauuauagcgucggaaugg

SEQ ID NO: 865306 - RNA, 19 nt, Artificial Sequence
  Description of Artificial Sequence: Synthetic oligonucleotide
  Sense strand starting at position 912 of SEQ ID NO: 588442
ggguuaacgaguuaccuau

SEQ ID NO: 865307 - RNA, 19 nt, Artificial Sequence
  Description of Artificial Sequence: Synthetic oligonucleotide
  Antisense strand to SEQ ID NO: 865306
auagguaacucguuaaccc

SEQ ID NO: 865308 - RNA, 19 nt, Artificial Sequence
  Description of Artificial Sequence: Synthetic oligonucleotide
  Sense strand starting at position 923 of SEQ ID NO: 588442
uuaccuauacugcgaaacu

SEQ ID NO: 865309 - RNA, 19 nt, Artificial Sequence
  Description of Artificial Sequence: Synthetic oligonucleotide
  Antisense strand to SEQ ID NO: 865308
aguuucgcaguauagguaa

SEQ ID NO: 865310 - RNA, 19 nt, Artificial Sequence
  Description of Artificial Sequence: Synthetic oligonucleotide
  Sense strand starting at position 953 of SEQ ID NO: 588442
cuccuaccagaguaguaaa

SEQ ID NO: 865311 - RNA, 19 nt, Artificial Sequence
  Description of Artificial Sequence: Synthetic oligonucleotide
  Antisense strand to SEQ ID NO: 865310
uuuacuacucugguaggag

SEQ ID NO: 865312 - RNA, 19 nt, Artificial Sequence
  Description of Artificial Sequence: Synthetic oligonucleotide
  Sense strand starting at position 2038 of SEQ ID NO: 588442
ccgagagagcucgcgugau

SEQ ID NO: 865313 - RNA, 19 nt, Artificial Sequence
  Description of Artificial Sequence: Synthetic oligonucleotide
  Antisense strand to SEQ ID NO: 865312
aucacgcgagcucucucgg

SEQ ID NO: 865314 - RNA, 19 nt, Artificial Sequence
  Description of Artificial Sequence: Synthetic oligonucleotide
  Sense strand starting at position 2237 of SEQ ID NO: 588442
cgagucuucccgcugggua

SEQ ID NO: 865315 - RNA, 19 nt, Artificial Sequence
  Description of Artificial Sequence: Synthetic oligonucleotide
  Antisense strand to SEQ ID NO: 865314
uacccagcgggaagacucg

SEQ ID NO: 865316 - RNA, 19 nt, Artificial Sequence
  Description of Artificial Sequence: Synthetic oligonucleotide
  Sense strand starting at position 2281 of SEQ ID NO: 588442
gggauuucuugcgccucuu

SEQ ID NO: 865317 - RNA, 19 nt, Artificial Sequence
  Description of Artificial Sequence: Synthetic oligonucleotide
  Antisense strand to SEQ ID NO: 865316
aagaggcgcaagaaauccc

SEQ ID NO: 865318 - RNA, 19 nt, Artificial Sequence
  Description of Artificial Sequence: Synthetic oligonucleotide
  Sense strand starting at position 2388 of SEQ ID NO: 588442
ccgugacugcuagaagaca

SEQ ID NO: 865319 - RNA, 19 nt, Artificial Sequence
  Description of Artificial Sequence: Synthetic oligonucleotide
  Antisense strand to SEQ ID NO: 865318
ugucuucuagcagucacgg

SEQ ID NO: 865320 - RNA, 19 nt, Artificial Sequence
  Description of Artificial Sequence: Synthetic oligonucleotide
  Sense strand starting at position 2555 of SEQ ID NO: 588442
ugcgcagcuccugaagaua

SEQ ID NO: 865321 - RNA, 19 nt, Artificial Sequence
  Description of Artificial Sequence: Synthetic oligonucleotide
  Antisense strand to SEQ ID NO: 865320
uaucuucaggagcugcgca

SEQ ID NO: 865322 - RNA, 19 nt, Artificial Sequence
  Description of Artificial Sequence: Synthetic oligonucleotide
  Sense strand starting at position 2558 of SEQ ID NO: 588442
gcagcuccugaagauaaau

SEQ ID NO: 865323 - RNA, 19 nt, Artificial Sequence
  Description of Artificial Sequence: Synthetic oligonucleotide
  Antisense strand to SEQ ID NO: 865322
auuuaucuucaggagcugc

SEQ ID NO: 865324 - RNA, 19 nt, Artificial Sequence
  Description of Artificial Sequence: Synthetic oligonucleotide
  Sense strand starting at position 2710 of SEQ ID NO: 588442
cgaaucaggcuuuaagacu

SEQ ID NO: 865325 - RNA, 19 nt, Artificial Sequence
  Description of Artificial Sequence: Synthetic oligonucleotide
  Antisense strand to SEQ ID NO: 865324
agucuuaaagccugauucg

SEQ ID NO: 865326 - RNA, 19 nt, Artificial Sequence
  Description of Artificial Sequence: Synthetic oligonucleotide
  Sense strand starting at position 2828 of SEQ ID NO: 588442
acagauuccugagucacca

SEQ ID NO: 865327 - RNA, 19 nt, Artificial Sequence
  Description of Artificial Sequence: Synthetic oligonucleotide
  Antisense strand to SEQ ID NO: 865326
uggugacucaggaaucugu

SEQ ID NO: 865328 - RNA, 19 nt, Artificial Sequence
  Description of Artificial Sequence: Synthetic oligonucleotide
  Sense strand starting at position 2832 of SEQ ID NO: 588442
auuccugagucaccauuga

SEQ ID NO: 865329 - RNA, 19 nt, Artificial Sequence
  Description of Artificial Sequence: Synthetic oligonucleotide
  Antisense strand to SEQ ID NO: 865328
ucaauggugacucaggaau

SEQ ID NO: 865330 - RNA, 19 nt, Artificial Sequence
  Description of Artificial Sequence: Synthetic oligonucleotide
  Sense strand starting at position 2836 of SEQ ID NO: 588442
cugagucaccauugacaag

SEQ ID NO: 865331 - RNA, 19 nt, Artificial Sequence
  Description of Artificial Sequence: Synthetic oligonucleotide
  Antisense strand to SEQ ID NO: 865330
cuugucaauggugacucag

SEQ ID NO: 865332 - RNA, 19 nt, Artificial Sequence
  Description of Artificial Sequence: Synthetic oligonucleotide
  Sense strand starting at position 2839 of SEQ ID NO: 588442
agucaccauugacaagaaa

SEQ ID NO: 865333 - RNA, 19 nt, Artificial Sequence
  Description of Artificial Sequence: Synthetic oligonucleotide
  Antisense strand to SEQ ID NO: 865332
uuucuugucaauggugacu

SEQ ID NO: 865334 - RNA, 19 nt, Artificial Sequence
  Description of Artificial Sequence: Synthetic oligonucleotide
  Sense strand starting at position 2850 of SEQ ID NO: 588442
acaagaaacuuugaaugaa

SEQ ID NO: 865335 - RNA, 19 nt, Artificial Sequence
  Description of Artificial Sequence: Synthetic oligonucleotide
  Antisense strand to SEQ ID NO: 865334
uucauucaaaguuucuugu

SEQ ID NO: 865336 - RNA, 19 nt, Artificial Sequence
  Description of Artificial Sequence: Synthetic oligonucleotide
  Sense strand starting at position 2859 of SEQ ID NO: 588442
uuugaaugaaguugaugau

SEQ ID NO: 865337 - RNA, 19 nt, Artificial Sequence
  Description of Artificial Sequence: Synthetic oligonucleotide
  Antisense strand to SEQ ID NO: 865336
aucaucaacuucauucaaa

SEQ ID NO: 865338 - RNA, 19 nt, Artificial Sequence
  Description of Artificial Sequence: Synthetic oligonucleotide
  Sense strand starting at position 2950 of SEQ ID NO: 588442
cauugagauuucuugcugu

SEQ ID NO: 865339 - RNA, 19 nt, Artificial Sequence
  Description of Artificial Sequence: Synthetic oligonucleotide
  Antisense strand to SEQ ID NO: 865338
acagcaagaaaucucaaug

SEQ ID NO: 865340 - RNA, 19 nt, Artificial Sequence
  Description of Artificial Sequence: Synthetic oligonucleotide
  Sense strand starting at position 3498 of SEQ ID NO: 588442
ggagaauggauugguagca

SEQ ID NO: 865341 - RNA, 19 nt, Artificial Sequence
  Description of Artificial Sequence: Synthetic oligonucleotide
  Antisense strand to SEQ ID NO: 865340
ugcuaccaauccauucucc

SEQ ID NO: 865342 - RNA, 19 nt, Artificial Sequence
  Description of Artificial Sequence: Synthetic oligonucleotide
  Sense strand starting at position 3532 of SEQ ID NO: 588442
aguggauggauaugauguu

SEQ ID NO: 865343 - RNA, 19 nt, Artificial Sequence
  Description of Artificial Sequence: Synthetic oligonucleotide
  Antisense strand to SEQ ID NO: 865342
aacaucauauccauccacu

SEQ ID NO: 865344 - RNA, 19 nt, Artificial Sequence
  Description of Artificial Sequence: Synthetic oligonucleotide
  Sense strand starting at position 3720 of SEQ ID NO: 588442
aacagugagcucgaucaaa

SEQ ID NO: 865345 - RNA, 19 nt, Artificial Sequence
  Description of Artificial Sequence: Synthetic oligonucleotide
  Antisense strand to SEQ ID NO: 865344
uuugaucgagcucacuguu

SEQ ID NO: 865346 - RNA, 19 nt, Artificial Sequence
  Description of Artificial Sequence: Synthetic oligonucleotide
  Sense strand starting at position 3825 of SEQ ID NO: 588442
gguuucugccauuaggaau

SEQ ID NO: 865347 - RNA, 19 nt, Artificial Sequence
  Description of Artificial Sequence: Synthetic oligonucleotide
  Antisense strand to SEQ ID NO: 865346
auuccuaauggcagaaacc

SEQ ID NO: 865348 - RNA, 19 nt, Artificial Sequence
  Description of Artificial Sequence: Synthetic oligonucleotide
  Sense strand starting at position 3879 of SEQ ID NO: 588442
gggagagugaccugguuug

SEQ ID NO: 865349 - RNA, 19 nt, Artificial Sequence
  Description of Artificial Sequence: Synthetic oligonucleotide
  Antisense strand to SEQ ID NO: 865348
caaaccaggucacucuccc

SEQ ID NO: 865350 - RNA, 19 nt, Artificial Sequence
  Description of Artificial Sequence: Synthetic oligonucleotide
  Sense strand starting at position 3927 of SEQ ID NO: 588442
gcauguuaugauugagaug

SEQ ID NO: 865351 - RNA, 19 nt, Artificial Sequence
  Description of Artificial Sequence: Synthetic oligonucleotide
  Antisense strand to SEQ ID NO: 865350
caucucaaucauaacaugc

SEQ ID NO: 865352 - RNA, 19 nt, Artificial Sequence
  Description of Artificial Sequence: Synthetic oligonucleotide
  Sense strand starting at position 3932 of SEQ ID NO: 588442
uuaugauugagaugccugu

SEQ ID NO: 865353 - RNA, 19 nt, Artificial Sequence
  Description of Artificial Sequence: Synthetic oligonucleotide
  Antisense strand to SEQ ID NO: 865352
acaggcaucucaaucauaa

SEQ ID NO: 865354 - RNA, 19 nt, Artificial Sequence
  Description of Artificial Sequence: Synthetic oligonucleotide
  Sense strand starting at position 3938 of SEQ ID NO: 588442
uugagaugccugugagcca

SEQ ID NO: 865355 - RNA, 19 nt, Artificial Sequence
  Description of Artificial Sequence: Synthetic oligonucleotide
  Antisense strand to SEQ ID NO: 865354
uggcucacaggcaucucaa

SEQ ID NO: 865356 - RNA, 19 nt, Artificial Sequence
  Description of Artificial Sequence: Synthetic oligonucleotide
  Sense strand starting at position 3967 of SEQ ID NO: 588442
uuaaaugugcagugagaua

SEQ ID NO: 865357 - RNA, 19 nt, Artificial Sequence
  Description of Artificial Sequence: Synthetic oligonucleotide
  Antisense strand to SEQ ID NO: 865356
uaucucacugcacauuuaa

SEQ ID NO: 865358 - RNA, 19 nt, Artificial Sequence
  Description of Artificial Sequence: Synthetic oligonucleotide
  Sense strand starting at position 3972 of SEQ ID NO: 588442
ugugcagugagauauauga

SEQ ID NO: 865359 - RNA, 19 nt, Artificial Sequence
  Description of Artificial Sequence: Synthetic oligonucleotide
  Antisense strand to SEQ ID NO: 865358
ucauauaucucacugcaca

SEQ ID NO: 865360 - RNA, 19 nt, Artificial Sequence
  Description of Artificial Sequence: Synthetic oligonucleotide
  Sense strand starting at position 3983 of SEQ ID NO: 588442
auauaugaaucugaagaca

SEQ ID NO: 865361 - RNA, 19 nt, Artificial Sequence
  Description of Artificial Sequence: Synthetic oligonucleotide
  Antisense strand to SEQ ID NO: 865360
ugucuucagauucauauau

SEQ ID NO: 865362 - RNA, 19 nt, Artificial Sequence
  Description of Artificial Sequence: Synthetic oligonucleotide
  Sense strand starting at position 53 of SEQ ID NO: 588443
ccgagaucaccaggcauca

SEQ ID NO: 865363 - RNA, 19 nt, Artificial Sequence
  Description of Artificial Sequence: Synthetic oligonucleotide
  Antisense strand to SEQ ID NO: 865362
ugaugccuggugaucucgg

SEQ ID NO: 865364 - RNA, 19 nt, Artificial Sequence
  Description of Artificial Sequence: Synthetic oligonucleotide
  Sense strand starting at position 255 of SEQ ID NO: 588443
cacauuccaggaugguaaa

SEQ ID NO: 865365 - RNA, 19 nt, Artificial Sequence
  Description of Artificial Sequence: Synthetic oligonucleotide
  Antisense strand to SEQ ID NO: 865364
uuuaccauccuggaaugug

SEQ ID NO: 865366 - RNA, 19 nt, Artificial Sequence
  Description of Artificial Sequence: Synthetic oligonucleotide
  Sense strand starting at position 394 of SEQ ID NO: 588443
uuuccucugccuuagaaga

SEQ ID NO: 865367 - RNA, 19 nt, Artificial Sequence
  Description of Artificial Sequence: Synthetic oligonucleotide
  Antisense strand to SEQ ID NO: 865366
ucuucuaaggcagaggaaa

SEQ ID NO: 865368 - RNA, 19 nt, Artificial Sequence
  Description of Artificial Sequence: Synthetic oligonucleotide
  Sense strand starting at position 586 of SEQ ID NO: 588443
guuucuucccuggaaccua

SEQ ID NO: 865369 - RNA, 19 nt, Artificial Sequence
  Description of Artificial Sequence: Synthetic oligonucleotide
  Antisense strand to SEQ ID NO: 865368
uagguuccagggaagaaac

SEQ ID NO: 865370 - RNA, 19 nt, Artificial Sequence
  Description of Artificial Sequence: Synthetic oligonucleotide
  Sense strand starting at position 669 of SEQ ID NO: 588443
acacguuauuuccucuuua

SEQ ID NO: 865371 - RNA, 19 nt, Artificial Sequence
  Description of Artificial Sequence: Synthetic oligonucleotide
  Antisense strand to SEQ ID NO: 865370
uaaagaggaaauaacgugu

SEQ ID NO: 865372 - RNA, 19 nt, Artificial Sequence
  Description of Artificial Sequence: Synthetic oligonucleotide
  Sense strand starting at position 841 of SEQ ID NO: 588443
cgaugcuauguauccguua

SEQ ID NO: 865373 - RNA, 19 nt, Artificial Sequence
  Description of Artificial Sequence: Synthetic oligonucleotide
  Antisense strand to SEQ ID NO: 865372
uaacggauacauagcaucg

SEQ ID NO: 865374 - RNA, 19 nt, Artificial Sequence
  Description of Artificial Sequence: Synthetic oligonucleotide
  Sense strand starting at position 846 of SEQ ID NO: 588443
cuauguauccguuaaguug

SEQ ID NO: 865375 - RNA, 19 nt, Artificial Sequence
  Description of Artificial Sequence: Synthetic oligonucleotide
  Antisense strand to SEQ ID NO: 865374
caacuuaacggauacauag

SEQ ID NO: 865376 - RNA, 19 nt, Artificial Sequence
  Description of Artificial Sequence: Synthetic oligonucleotide
  Sense strand starting at position 956 of SEQ ID NO: 588443
uuguguuccuucuuacaga

SEQ ID NO: 865377 - RNA, 19 nt, Artificial Sequence
  Description of Artificial Sequence: Synthetic oligonucleotide
  Antisense strand to SEQ ID NO: 865376
ucuguaagaaggaacacaa

SEQ ID NO: 865378 - RNA, 19 nt, Artificial Sequence
  Description of Artificial Sequence: Synthetic oligonucleotide
  Sense strand starting at position 1039 of SEQ ID NO: 588443
cugacuaaacgcuggacau

SEQ ID NO: 865379 - RNA, 19 nt, Artificial Sequence
  Description of Artificial Sequence: Synthetic oligonucleotide
  Antisense strand to SEQ ID NO: 865378
auguccagcguuuagucag

SEQ ID NO: 865380 - RNA, 19 nt, Artificial Sequence
  Description of Artificial Sequence: Synthetic oligonucleotide
  Sense strand starting at position 1088 of SEQ ID NO: 588443
cuacuuccuugcucggaaa

SEQ ID NO: 865381 - RNA, 19 nt, Artificial Sequence
  Description of Artificial Sequence: Synthetic oligonucleotide
  Antisense strand to SEQ ID NO: 865380
uuuccgagcaaggaaguag

SEQ ID NO: 865382 - RNA, 19 nt, Artificial Sequence
  Description of Artificial Sequence: Synthetic oligonucleotide
  Sense strand starting at position 2315 of SEQ ID NO: 588443
gugacaugaguuggagaga

SEQ ID NO: 865383 - RNA, 19 nt, Artificial Sequence
  Description of Artificial Sequence: Synthetic oligonucleotide
  Antisense strand to SEQ ID NO: 865382
ucucuccaacucaugucac

SEQ ID NO: 865384 - RNA, 19 nt, Artificial Sequence
  Description of Artificial Sequence: Synthetic oligonucleotide
  Sense strand starting at position 2453 of SEQ ID NO: 588443
uuugguggaguaugguaaa

SEQ ID NO: 865385 - RNA, 19 nt, Artificial Sequence
  Description of Artificial Sequence: Synthetic oligonucleotide
  Antisense strand to SEQ ID NO: 865384
uuuaccauacuccaccaaa

SEQ ID NO: 865386 - RNA, 19 nt, Artificial Sequence
  Description of Artificial Sequence: Synthetic oligonucleotide
  Sense strand starting at position 2489 of SEQ ID NO: 588443
cccugacaucuuugugaaa

SEQ ID NO: 865387 - RNA, 19 nt, Artificial Sequence
  Description of Artificial Sequence: Synthetic oligonucleotide
  Antisense strand to SEQ ID NO: 865386
uuucacaaagaugucaggg

SEQ ID NO: 865388 - RNA, 19 nt, Artificial Sequence
  Description of Artificial Sequence: Synthetic oligonucleotide
  Sense strand starting at position 2490 of SEQ ID NO: 588443
ccugacaucuuugugaaac

SEQ ID NO: 865389 - RNA, 19 nt, Artificial Sequence
  Description of Artificial Sequence: Synthetic oligonucleotide
  Antisense strand to SEQ ID NO: 865388
guuucacaaagaugucagg

SEQ ID NO: 865390 - RNA, 19 nt, Artificial Sequence
  Description of Artificial Sequence: Synthetic oligonucleotide
  Sense strand starting at position 2560 of SEQ ID NO: 588443
cugucaucauuguuucuau

SEQ ID NO: 865391 - RNA, 19 nt, Artificial Sequence
  Description of Artificial Sequence: Synthetic oligonucleotide
  Antisense strand to SEQ ID NO: 865390
auagaaacaaugaugacag

SEQ ID NO: 865392 - RNA, 19 nt, Artificial Sequence
  Description of Artificial Sequence: Synthetic oligonucleotide
  Sense strand starting at position 2863 of SEQ ID NO: 588443
gcauuauaggccuacugca

SEQ ID NO: 865393 - RNA, 19 nt, Artificial Sequence
  Description of Artificial Sequence: Synthetic oligonucleotide
  Antisense strand to SEQ ID NO: 865392
ugcaguaggccuauaaugc

SEQ ID NO: 865394 - RNA, 19 nt, Artificial Sequence
  Description of Artificial Sequence: Synthetic oligonucleotide
  Sense strand starting at position 2906 of SEQ ID NO: 588443
cugggaucguuacuauauu

SEQ ID NO: 865395 - RNA, 19 nt, Artificial Sequence
  Description of Artificial Sequence: Synthetic oligonucleotide
  Antisense strand to SEQ ID NO: 865394
aauauaguaacgaucccag

SEQ ID NO: 865396 - RNA, 19 nt, Artificial Sequence
  Description of Artificial Sequence: Synthetic oligonucleotide
  Sense strand starting at position 2961 of SEQ ID NO: 588443
auacgucauuauucuugua

SEQ ID NO: 865397 - RNA, 19 nt, Artificial Sequence
  Description of Artificial Sequence: Synthetic oligonucleotide
  Antisense strand to SEQ ID NO: 865396
uacaagaauaaugacguau

SEQ ID NO: 865398 - RNA, 19 nt, Artificial Sequence
  Description of Artificial Sequence: Synthetic oligonucleotide
  Sense strand starting at position 2963 of SEQ ID NO: 588443
acgucauuauucuuguaca

SEQ ID NO: 865399 - RNA, 19 nt, Artificial Sequence
  Description of Artificial Sequence: Synthetic oligonucleotide
  Antisense strand to SEQ ID NO: 865398
uguacaagaauaaugacgu

SEQ ID NO: 865400 - RNA, 19 nt, Artificial Sequence
  Description of Artificial Sequence: Synthetic oligonucleotide
  Sense strand starting at position 2974 of SEQ ID NO: 588443
cuuguacaccauuguauuu

SEQ ID NO: 865401 - RNA, 19 nt, Artificial Sequence
  Description of Artificial Sequence: Synthetic oligonucleotide
  Antisense strand to SEQ ID NO: 865400
aaauacaaugguguacaag

SEQ ID NO: 865402 - RNA, 19 nt, Artificial Sequence
  Description of Artificial Sequence: Synthetic oligonucleotide
  Sense strand starting at position 2985 of SEQ ID NO: 588443
uuguauuugucagaacuca

SEQ ID NO: 865403 - RNA, 19 nt, Artificial Sequence
  Description of Artificial Sequence: Synthetic oligonucleotide
  Antisense strand to SEQ ID NO: 865402
ugaguucugacaaauacaa

SEQ ID NO: 865404 - RNA, 19 nt, Artificial Sequence
  Description of Artificial Sequence: Synthetic oligonucleotide
  Sense strand starting at position 3028 of SEQ ID NO: 588443
aauauauuggcuuguguaa

SEQ ID NO: 865405 - RNA, 19 nt, Artificial Sequence
  Description of Artificial Sequence: Synthetic oligonucleotide
  Antisense strand to SEQ ID NO: 865404
uuacacaagccaauauauu

SEQ ID NO: 865406 - RNA, 19 nt, Artificial Sequence
  Description of Artificial Sequence: Synthetic oligonucleotide
  Sense strand starting at position 3136 of SEQ ID NO: 588443
uccugagauuagccucauu

SEQ ID NO: 865407 - RNA, 19 nt, Artificial Sequence
  Description of Artificial Sequence: Synthetic oligonucleotide
  Antisense strand to SEQ ID NO: 865406
aaugaggcuaaucucagga

SEQ ID NO: 865408 - RNA, 19 nt, Artificial Sequence
  Description of Artificial Sequence: Synthetic oligonucleotide
  Sense strand starting at position 3168 of SEQ ID NO: 588443
gauggacuucucuaguggu

SEQ ID NO: 865409 - RNA, 19 nt, Artificial Sequence
  Description of Artificial Sequence: Synthetic oligonucleotide
  Antisense strand to SEQ ID NO: 865408
accacuagagaaguccauc

SEQ ID NO: 865410 - RNA, 19 nt, Artificial Sequence
  Description of Artificial Sequence: Synthetic oligonucleotide
  Sense strand starting at position 3176 of SEQ ID NO: 588443
ucucuagugguaugaagga

SEQ ID NO: 865411 - RNA, 19 nt, Artificial Sequence
  Description of Artificial Sequence: Synthetic oligonucleotide
  Antisense strand to SEQ ID NO: 865410
uccuucauaccacuagaga

SEQ ID NO: 865412 - RNA, 19 nt, Artificial Sequence
  Description of Artificial Sequence: Synthetic oligonucleotide
  Sense strand starting at position 3301 of SEQ ID NO: 588443
guauuaagucaugggccca

SEQ ID NO: 865413 - RNA, 19 nt, Artificial Sequence
  Description of Artificial Sequence: Synthetic oligonucleotide
  Antisense strand to SEQ ID NO: 865412
ugggcccaugacuuaauac

SEQ ID NO: 865414 - RNA, 19 nt, Artificial Sequence
  Description of Artificial Sequence: Synthetic oligonucleotide
  Sense strand starting at position 3359 of SEQ ID NO: 588443
cauugacgugcucagauua

SEQ ID NO: 865415 - RNA, 19 nt, Artificial Sequence
  Description of Artificial Sequence: Synthetic oligonucleotide
  Antisense strand to SEQ ID NO: 865414
uaaucugagcacgucaaug

SEQ ID NO: 865416 - RNA, 19 nt, Artificial Sequence
  Description of Artificial Sequence: Synthetic oligonucleotide
  Sense strand starting at position 3393 of SEQ ID NO: 588443
aagggagacuugcacauuu

SEQ ID NO: 865417 - RNA, 19 nt, Artificial Sequence
  Description of Artificial Sequence: Synthetic oligonucleotide
  Antisense strand to SEQ ID NO: 865416
aaaugugcaagucucccuu

SEQ ID NO: 865418 - RNA, 19 nt, Artificial Sequence
  Description of Artificial Sequence: Synthetic oligonucleotide
  Sense strand starting at position 3608 of SEQ ID NO: 588443
cucaucauagaucgugaga

SEQ ID NO: 865419 - RNA, 19 nt, Artificial Sequence
  Description of Artificial Sequence: Synthetic oligonucleotide
  Antisense strand to SEQ ID NO: 865418
ucucacgaucuaugaugag

SEQ ID NO: 865420 - RNA, 19 nt, Artificial Sequence
  Description of Artificial Sequence: Synthetic oligonucleotide
  Sense strand starting at position 3611 of SEQ ID NO: 588443
aucauagaucgugagagcu

SEQ ID NO: 865421 - RNA, 19 nt, Artificial Sequence
  Description of Artificial Sequence: Synthetic oligonucleotide
  Antisense strand to SEQ ID NO: 865420
agcucucacgaucuaugau

SEQ ID NO: 865422 - RNA, 19 nt, Artificial Sequence
  Description of Artificial Sequence: Synthetic oligonucleotide
  Sense strand starting at position 3617 of SEQ ID NO: 588443
gaucgugagagcuggacuu

SEQ ID NO: 865423 - RNA, 19 nt, Artificial Sequence
  Description of Artificial Sequence: Synthetic oligonucleotide
  Antisense strand to SEQ ID NO: 865422
aaguccagcucucacgauc

SEQ ID NO: 865424 - RNA, 19 nt, Artificial Sequence
  Description of Artificial Sequence: Synthetic oligonucleotide
  Sense strand starting at position 3630 of SEQ ID NO: 588443
ggacuuuggagauacgugu

SEQ ID NO: 865425 - RNA, 19 nt, Artificial Sequence
  Description of Artificial Sequence: Synthetic oligonucleotide
  Antisense strand to SEQ ID NO: 865424
acacguaucuccaaagucc

SEQ ID NO: 865426 - RNA, 19 nt, Artificial Sequence
  Description of Artificial Sequence: Synthetic oligonucleotide
  Sense strand starting at position 3707 of SEQ ID NO: 588443
acacauguagagugaauaa

SEQ ID NO: 865427 - RNA, 19 nt, Artificial Sequence
  Description of Artificial Sequence: Synthetic oligonucleotide
  Antisense strand to SEQ ID NO: 865426
uuauucacucuacaugugu

SEQ ID NO: 865428 - RNA, 19 nt, Artificial Sequence
  Description of Artificial Sequence: Synthetic oligonucleotide
  Sense strand starting at position 3739 of SEQ ID NO: 588443
ggaagcucuagugacuaau

SEQ ID NO: 865429 - RNA, 19 nt, Artificial Sequence
  Description of Artificial Sequence: Synthetic oligonucleotide
  Antisense strand to SEQ ID NO: 865428
auuagucacuagagcuucc

SEQ ID NO: 865430 - RNA, 19 nt, Artificial Sequence
  Description of Artificial Sequence: Synthetic oligonucleotide
  Sense strand starting at position 3818 of SEQ ID NO: 588443
uaugguaaacagugggaua

SEQ ID NO: 865431 - RNA, 19 nt, Artificial Sequence
  Description of Artificial Sequence: Synthetic oligonucleotide
  Antisense strand to SEQ ID NO: 865430
uaucccacuguuuaccaua

SEQ ID NO: 865432 - RNA, 19 nt, Artificial Sequence
  Description of Artificial Sequence: Synthetic oligonucleotide
  Sense strand starting at position 3829 of SEQ ID NO: 588443
gugggauagccacagggua

SEQ ID NO: 865433 - RNA, 19 nt, Artificial Sequence
  Description of Artificial Sequence: Synthetic oligonucleotide
  Antisense strand to SEQ ID NO: 865432
uacccuguggcuaucccac

SEQ ID NO: 865434 - RNA, 19 nt, Artificial Sequence
  Description of Artificial Sequence: Synthetic oligonucleotide
  Sense strand starting at position 3867 of SEQ ID NO: 588443
aucugagaugaaugugcaa

SEQ ID NO: 865435 - RNA, 19 nt, Artificial Sequence
  Description of Artificial Sequence: Synthetic oligonucleotide
  Antisense strand to SEQ ID NO: 865434
uugcacauucaucucagau

SEQ ID NO: 865436 - RNA, 19 nt, Artificial Sequence
  Description of Artificial Sequence: Synthetic oligonucleotide
  Sense strand starting at position 3890 of SEQ ID NO: 588443
aacugaaguugagaagaua

SEQ ID NO: 865437 - RNA, 19 nt, Artificial Sequence
  Description of Artificial Sequence: Synthetic oligonucleotide
  Antisense strand to SEQ ID NO: 865436
uaucuucucaacuucaguu

SEQ ID NO: 865438 - RNA, 19 nt, Artificial Sequence
  Description of Artificial Sequence: Synthetic oligonucleotide
  Sense strand starting at position 3903 of SEQ ID NO: 588443
aagauaaauggcugauggu

SEQ ID NO: 865439 - RNA, 19 nt, Artificial Sequence
  Description of Artificial Sequence: Synthetic oligonucleotide
  Antisense strand to SEQ ID NO: 865438
accaucagccauuuaucuu

SEQ ID NO: 865440 - RNA, 19 nt, Artificial Sequence
  Description of Artificial Sequence: Synthetic oligonucleotide
  Sense strand starting at position 3954 of SEQ ID NO: 588443
acuguuagaguaggaauga

SEQ ID NO: 865441 - RNA, 19 nt, Artificial Sequence
  Description of Artificial Sequence: Synthetic oligonucleotide
  Antisense strand to SEQ ID NO: 865440
ucauuccuacucuaacagu

SEQ ID NO: 865442 - RNA, 19 nt, Artificial Sequence
  Description of Artificial Sequence: Synthetic oligonucleotide
  Sense strand starting at position 50 of SEQ ID NO: 588444
uuacauguuggcuaugaca

SEQ ID NO: 865443 - RNA, 19 nt, Artificial Sequence
  Description of Artificial Sequence: Synthetic oligonucleotide
  Antisense strand to SEQ ID NO: 865442
ugucauagccaacauguaa

SEQ ID NO: 865444 - RNA, 19 nt, Artificial Sequence
  Description of Artificial Sequence: Synthetic oligonucleotide
  Sense strand starting at position 52 of SEQ ID NO: 588444
acauguuggcuaugacaua

SEQ ID NO: 865445 - RNA, 19 nt, Artificial Sequence
  Description of Artificial Sequence: Synthetic oligonucleotide
  Antisense strand to SEQ ID NO: 865444
uaugucauagccaacaugu

SEQ ID NO: 865446 - RNA, 19 nt, Artificial Sequence
  Description of Artificial Sequence: Synthetic oligonucleotide
  Sense strand starting at position 164 of SEQ ID NO: 588444
aguuuaguguucuuuaagu

SEQ ID NO: 865447 - RNA, 19 nt, Artificial Sequence
  Description of Artificial Sequence: Synthetic oligonucleotide
  Antisense strand to SEQ ID NO: 865446
acuuaaagaacacuaaacu

SEQ ID NO: 865448 - RNA, 19 nt, Artificial Sequence
  Description of Artificial Sequence: Synthetic oligonucleotide
  Sense strand starting at position 166 of SEQ ID NO: 588444
uuuaguguucuuuaaguug

SEQ ID NO: 865449 - RNA, 19 nt, Artificial Sequence
  Description of Artificial Sequence: Synthetic oligonucleotide
  Antisense strand to SEQ ID NO: 865448
caacuuaaagaacacuaaa

SEQ ID NO: 865450 - RNA, 19 nt, Artificial Sequence
  Description of Artificial Sequence: Synthetic oligonucleotide
  Sense strand starting at position 169 of SEQ ID NO: 588444
aguguucuuuaaguugaag

SEQ ID NO: 865451 - RNA, 19 nt, Artificial Sequence
  Description of Artificial Sequence: Synthetic oligonucleotide
  Antisense strand to SEQ ID NO: 865450
cuucaacuuaaagaacacu

SEQ ID NO: 865452 - RNA, 19 nt, Artificial Sequence
  Description of Artificial Sequence: Synthetic oligonucleotide
  Sense strand starting at position 172 of SEQ ID NO: 588444
guucuuuaaguugaagaca

SEQ ID NO: 865453 - RNA, 19 nt, Artificial Sequence
  Description of Artificial Sequence: Synthetic oligonucleotide
  Antisense strand to SEQ ID NO: 865452
ugucuucaacuuaaagaac

SEQ ID NO: 865454 - RNA, 19 nt, Artificial Sequence
  Description of Artificial Sequence: Synthetic oligonucleotide
  Sense strand starting at position 269 of SEQ ID NO: 588444
guuucaggaugguuugcaa

SEQ ID NO: 865455 - RNA, 19 nt, Artificial Sequence
  Description of Artificial Sequence: Synthetic oligonucleotide
  Antisense strand to SEQ ID NO: 865454
uugcaaaccauccugaaac

SEQ ID NO: 865456 - RNA, 19 nt, Artificial Sequence
  Description of Artificial Sequence: Synthetic oligonucleotide
  Sense strand starting at position 272 of SEQ ID NO: 588444
ucaggaugguuugcaauca

SEQ ID NO: 865457 - RNA, 19 nt, Artificial Sequence
  Description of Artificial Sequence: Synthetic oligonucleotide
  Antisense strand to SEQ ID NO: 865456
ugauugcaaaccauccuga

SEQ ID NO: 865458 - RNA, 19 nt, Artificial Sequence
  Description of Artificial Sequence: Synthetic oligonucleotide
  Sense strand starting at position 354 of SEQ ID NO: 588444
aguaucugauauccuugaa

SEQ ID NO: 865459 - RNA, 19 nt, Artificial Sequence
  Description of Artificial Sequence: Synthetic oligonucleotide
  Antisense strand to SEQ ID NO: 865458
uucaaggauaucagauacu

SEQ ID NO: 865460 - RNA, 19 nt, Artificial Sequence
  Description of Artificial Sequence: Synthetic oligonucleotide
  Sense strand starting at position 768 of SEQ ID NO: 588444
ucuuaagaauguuugacau

SEQ ID NO: 865461 - RNA, 19 nt, Artificial Sequence
  Description of Artificial Sequence: Synthetic oligonucleotide
  Antisense strand to SEQ ID NO: 865460
augucaaacauucuuaaga

SEQ ID NO: 865462 - RNA, 19 nt, Artificial Sequence
  Description of Artificial Sequence: Synthetic oligonucleotide
  Sense strand starting at position 770 of SEQ ID NO: 588444
uuaagaauguuugacauga

SEQ ID NO: 865463 - RNA, 19 nt, Artificial Sequence
  Description of Artificial Sequence: Synthetic oligonucleotide
  Antisense strand to SEQ ID NO: 865462
ucaugucaaacauucuuaa

SEQ ID NO: 865464 - RNA, 19 nt, Artificial Sequence
  Description of Artificial Sequence: Synthetic oligonucleotide
  Sense strand starting at position 935 of SEQ ID NO: 588444
cuccauuaaggcuguacaa

SEQ ID NO: 865465 - RNA, 19 nt, Artificial Sequence
  Description of Artificial Sequence: Synthetic oligonucleotide
  Antisense strand to SEQ ID NO: 865464
uuguacagccuuaauggag

SEQ ID NO: 865466 - RNA, 19 nt, Artificial Sequence
  Description of Artificial Sequence: Synthetic oligonucleotide
  Sense strand starting at position 937 of SEQ ID NO: 588444
ccauuaaggcuguacaauu

SEQ ID NO: 865467 - RNA, 19 nt, Artificial Sequence
  Description of Artificial Sequence: Synthetic oligonucleotide
  Antisense strand to SEQ ID NO: 865466
aauuguacagccuuaaugg

SEQ ID NO: 865468 - RNA, 19 nt, Artificial Sequence
  Description of Artificial Sequence: Synthetic oligonucleotide
  Sense strand starting at position 1000 of SEQ ID NO: 588444
uggcuuaucuacuagauuu

SEQ ID NO: 865469 - RNA, 19 nt, Artificial Sequence
  Description of Artificial Sequence: Synthetic oligonucleotide
  Antisense strand to SEQ ID NO: 865468
aaaucuaguagauaagcca

SEQ ID NO: 865470 - RNA, 19 nt, Artificial Sequence
  Description of Artificial Sequence: Synthetic oligonucleotide
  Sense strand starting at position 1040 of SEQ ID NO: 588444
cauucuguccugcaugaag

SEQ ID NO: 865471 - RNA, 19 nt, Artificial Sequence
  Description of Artificial Sequence: Synthetic oligonucleotide
  Antisense strand to SEQ ID NO: 865470
cuucaugcaggacagaaug

SEQ ID NO: 865472 - RNA, 19 nt, Artificial Sequence
  Description of Artificial Sequence: Synthetic oligonucleotide
  Sense strand starting at position 1261 of SEQ ID NO: 588444
gcgcauagaacagaauuga

SEQ ID NO: 865473 - RNA, 19 nt, Artificial Sequence
  Description of Artificial Sequence: Synthetic oligonucleotide
  Antisense strand to SEQ ID NO: 865472
ucaauucuguucuaugcgc

SEQ ID NO: 865474 - RNA, 19 nt, Artificial Sequence
  Description of Artificial Sequence: Synthetic oligonucleotide
  Sense strand starting at position 1334 of SEQ ID NO: 588444
uuugaaugagguuaaguuu

SEQ ID NO: 865475 - RNA, 19 nt, Artificial Sequence
  Description of Artificial Sequence: Synthetic oligonucleotide
  Antisense strand to SEQ ID NO: 865474
aaacuuaaccucauucaaa

SEQ ID NO: 865476 - RNA, 19 nt, Artificial Sequence
  Description of Artificial Sequence: Synthetic oligonucleotide
  Sense strand starting at position 1364 of SEQ ID NO: 588444
guauuuauuucucaguuga

SEQ ID NO: 865477 - RNA, 19 nt, Artificial Sequence
  Description of Artificial Sequence: Synthetic oligonucleotide
  Antisense strand to SEQ ID NO: 865476
ucaacugagaaauaaauac

SEQ ID NO: 865478 - RNA, 19 nt, Artificial Sequence
  Description of Artificial Sequence: Synthetic oligonucleotide
  Sense strand starting at position 1372 of SEQ ID NO: 588444
uucucaguugauuacuaca

SEQ ID NO: 865479 - RNA, 19 nt, Artificial Sequence
  Description of Artificial Sequence: Synthetic oligonucleotide
  Antisense strand to SEQ ID NO: 865478
uguaguaaucaacugagaa

SEQ ID NO: 865480 - RNA, 19 nt, Artificial Sequence
  Description of Artificial Sequence: Synthetic oligonucleotide
  Sense strand starting at position 1397 of SEQ ID NO: 588444
uacuguuuacccggccaga

SEQ ID NO: 865481 - RNA, 19 nt, Artificial Sequence
  Description of Artificial Sequence: Synthetic oligonucleotide
  Antisense strand to SEQ ID NO: 865480
ucuggccggguaaacagua

SEQ ID NO: 865482 - RNA, 19 nt, Artificial Sequence
  Description of Artificial Sequence: Synthetic oligonucleotide
  Sense strand starting at position 1432 of SEQ ID NO: 588444
acggaugugcacugacaaa

SEQ ID NO: 865483 - RNA, 19 nt, Artificial Sequence
  Description of Artificial Sequence: Synthetic oligonucleotide
  Antisense strand to SEQ ID NO: 865482
uuugucagugcacauccgu

SEQ ID NO: 865484 - RNA, 19 nt, Artificial Sequence
  Description of Artificial Sequence: Synthetic oligonucleotide
  Sense strand starting at position 1467 of SEQ ID NO: 588444
gguaaagacagaugucuaa

SEQ ID NO: 865485 - RNA, 19 nt, Artificial Sequence
  Description of Artificial Sequence: Synthetic oligonucleotide
  Antisense strand to SEQ ID NO: 865484
uuagacaucugucuuuacc

SEQ ID NO: 865486 - RNA, 19 nt, Artificial Sequence
  Description of Artificial Sequence: Synthetic oligonucleotide
  Sense strand starting at position 1559 of SEQ ID NO: 588444
cgugcuuuggacugucaaa

SEQ ID NO: 865487 - RNA, 19 nt, Artificial Sequence
  Description of Artificial Sequence: Synthetic oligonucleotide
  Antisense strand to SEQ ID NO: 865486
uuugacaguccaaagcacg

SEQ ID NO: 865488 - RNA, 19 nt, Artificial Sequence
  Description of Artificial Sequence: Synthetic oligonucleotide
  Sense strand starting at position 1635 of SEQ ID NO: 588444
ggaggagcgacuuguccaa

SEQ ID NO: 865489 - RNA, 19 nt, Artificial Sequence
  Description of Artificial Sequence: Synthetic oligonucleotide
  Antisense strand to SEQ ID NO: 865488
uuggacaagucgcuccucc

SEQ ID NO: 865490 - RNA, 19 nt, Artificial Sequence
  Description of Artificial Sequence: Synthetic oligonucleotide
  Sense strand starting at position 2449 of SEQ ID NO: 588444
ccaguagcuccagaaacua

SEQ ID NO: 865491 - RNA, 19 nt, Artificial Sequence
  Description of Artificial Sequence: Synthetic oligonucleotide
  Antisense strand to SEQ ID NO: 865490
uaguuucuggagcuacugg

SEQ ID NO: 865492 - RNA, 19 nt, Artificial Sequence
  Description of Artificial Sequence: Synthetic oligonucleotide
  Sense strand starting at position 2462 of SEQ ID NO: 588444
aaacuaguccugggaccuu

SEQ ID NO: 865493 - RNA, 19 nt, Artificial Sequence
  Description of Artificial Sequence: Synthetic oligonucleotide
  Antisense strand to SEQ ID NO: 865492
aaggucccaggacuaguuu

SEQ ID NO: 865494 - RNA, 19 nt, Artificial Sequence
  Description of Artificial Sequence: Synthetic oligonucleotide
  Sense strand starting at position 2554 of SEQ ID NO: 588444
guacauaacguccagcaga

SEQ ID NO: 865495 - RNA, 19 nt, Artificial Sequence
  Description of Artificial Sequence: Synthetic oligonucleotide
  Antisense strand to SEQ ID NO: 865494
ucugcuggacguuauguac

SEQ ID NO: 865496 - RNA, 19 nt, Artificial Sequence
  Description of Artificial Sequence: Synthetic oligonucleotide
  Sense strand starting at position 2576 of SEQ ID NO: 588444
acguucuuacuauguaaug

SEQ ID NO: 865497 - RNA, 19 nt, Artificial Sequence
  Description of Artificial Sequence: Synthetic oligonucleotide
  Antisense strand to SEQ ID NO: 865496
cauuacauaguaagaacgu

SEQ ID NO: 865498 - RNA, 19 nt, Artificial Sequence
  Description of Artificial Sequence: Synthetic oligonucleotide
  Sense strand starting at position 2609 of SEQ ID NO: 588444
gguggcagcucacuauauu

SEQ ID NO: 865499 - RNA, 19 nt, Artificial Sequence
  Description of Artificial Sequence: Synthetic oligonucleotide
  Antisense strand to SEQ ID NO: 865498
aauauagugagcugccacc

SEQ ID NO: 865500 - RNA, 19 nt, Artificial Sequence
  Description of Artificial Sequence: Synthetic oligonucleotide
  Sense strand starting at position 2658 of SEQ ID NO: 588444
ucuccuuucugcuuaggaa

SEQ ID NO: 865501 - RNA, 19 nt, Artificial Sequence
  Description of Artificial Sequence: Synthetic oligonucleotide
  Antisense strand to SEQ ID NO: 865500
uuccuaagcagaaaggaga

SEQ ID NO: 865502 - RNA, 19 nt, Artificial Sequence
  Description of Artificial Sequence: Synthetic oligonucleotide
  Sense strand starting at position 3178 of SEQ ID NO: 588444
gguccaaaucaguacccua

SEQ ID NO: 865503 - RNA, 19 nt, Artificial Sequence
  Description of Artificial Sequence: Synthetic oligonucleotide
  Antisense strand to SEQ ID NO: 865502
uaggguacugauuuggacc

SEQ ID NO: 865504 - RNA, 19 nt, Artificial Sequence
  Description of Artificial Sequence: Synthetic oligonucleotide
  Sense strand starting at position 3202 of SEQ ID NO: 588444
ggucccugaacucgucaau

SEQ ID NO: 865505 - RNA, 19 nt, Artificial Sequence
  Description of Artificial Sequence: Synthetic oligonucleotide
  Antisense strand to SEQ ID NO: 865504
auugacgaguucagggacc

SEQ ID NO: 865506 - RNA, 19 nt, Artificial Sequence
  Description of Artificial Sequence: Synthetic oligonucleotide
  Sense strand starting at position 3230 of SEQ ID NO: 588444
gccauuccaccuuaaggaa

SEQ ID NO: 865507 - RNA, 19 nt, Artificial Sequence
  Description of Artificial Sequence: Synthetic oligonucleotide
  Antisense strand to SEQ ID NO: 865506
uuccuuaagguggaauggc

SEQ ID NO: 865508 - RNA, 19 nt, Artificial Sequence
  Description of Artificial Sequence: Synthetic oligonucleotide
  Sense strand starting at position 3278 of SEQ ID NO: 588444
gcccaagaauaagcagauu

SEQ ID NO: 865509 - RNA, 19 nt, Artificial Sequence
  Description of Artificial Sequence: Synthetic oligonucleotide
  Antisense strand to SEQ ID NO: 865508
aaucugcuuauucuugggc

SEQ ID NO: 865510 - RNA, 19 nt, Artificial Sequence
  Description of Artificial Sequence: Synthetic oligonucleotide
  Sense strand starting at position 3325 of SEQ ID NO: 588444
ucgcguguuccaguucuga

SEQ ID NO: 865511 - RNA, 19 nt, Artificial Sequence
  Description of Artificial Sequence: Synthetic oligonucleotide
  Antisense strand to SEQ ID NO: 865510
ucagaacuggaacacgcga

SEQ ID NO: 865512 - RNA, 19 nt, Artificial Sequence
  Description of Artificial Sequence: Synthetic oligonucleotide
  Sense strand starting at position 3334 of SEQ ID NO: 588444
ccaguucugaccugcagga

SEQ ID NO: 865513 - RNA, 19 nt, Artificial Sequence
  Description of Artificial Sequence: Synthetic oligonucleotide
  Antisense strand to SEQ ID NO: 865512
uccugcaggucagaacugg

SEQ ID NO: 865514 - RNA, 19 nt, Artificial Sequence
  Description of Artificial Sequence: Synthetic oligonucleotide
  Sense strand starting at position 3600 of SEQ ID NO: 588444
guagacacauuccuagaga

SEQ ID NO: 865515 - RNA, 19 nt, Artificial Sequence
  Description of Artificial Sequence: Synthetic oligonucleotide
  Antisense strand to SEQ ID NO: 865514
ucucuaggaaugugucuac

SEQ ID NO: 865516 - RNA, 19 nt, Artificial Sequence
  Description of Artificial Sequence: Synthetic oligonucleotide
  Sense strand starting at position 3755 of SEQ ID NO: 588444
cacuguauagcaggagaaa

SEQ ID NO: 865517 - RNA, 19 nt, Artificial Sequence
  Description of Artificial Sequence: Synthetic oligonucleotide
  Antisense strand to SEQ ID NO: 865516
uuucuccugcuauacagug

SEQ ID NO: 865518 - RNA, 19 nt, Artificial Sequence
  Description of Artificial Sequence: Synthetic oligonucleotide
  Sense strand starting at position 3789 of SEQ ID NO: 588444
cugaauccgcucugcagaa

SEQ ID NO: 865519 - RNA, 19 nt, Artificial Sequence
  Description of Artificial Sequence: Synthetic oligonucleotide
  Antisense strand to SEQ ID NO: 865518
uucugcagagcggauucag

SEQ ID NO: 865520 - RNA, 19 nt, Artificial Sequence
  Description of Artificial Sequence: Synthetic oligonucleotide
  Sense strand starting at position 3790 of SEQ ID NO: 588444
ugaauccgcucugcagaau

SEQ ID NO: 865521 - RNA, 19 nt, Artificial Sequence
  Description of Artificial Sequence: Synthetic oligonucleotide
  Antisense strand to SEQ ID NO: 865520
auucugcagagcggauuca

SEQ ID NO: 865522 - RNA, 19 nt, Artificial Sequence
  Description of Artificial Sequence: Synthetic oligonucleotide
  Sense strand starting at position 101 of SEQ ID NO: 588445
uccacaaguucuugucaca

SEQ ID NO: 865523 - RNA, 19 nt, Artificial Sequence
  Description of Artificial Sequence: Synthetic oligonucleotide
  Antisense strand to SEQ ID NO: 865522
ugugacaagaacuugugga

SEQ ID NO: 865524 - RNA, 19 nt, Artificial Sequence
  Description of Artificial Sequence: Synthetic oligonucleotide
  Sense strand starting at position 104 of SEQ ID NO: 588445
acaaguucuugucacaauc

SEQ ID NO: 865525 - RNA, 19 nt, Artificial Sequence
  Description of Artificial Sequence: Synthetic oligonucleotide
  Antisense strand to SEQ ID NO: 865524
gauugugacaagaacuugu

SEQ ID NO: 865526 - RNA, 19 nt, Artificial Sequence
  Description of Artificial Sequence: Synthetic oligonucleotide
  Sense strand starting at position 301 of SEQ ID NO: 588445
gggauuggguccuaagauc

SEQ ID NO: 865527 - RNA, 19 nt, Artificial Sequence
  Description of Artificial Sequence: Synthetic oligonucleotide
  Antisense strand to SEQ ID NO: 865526
gaucuuaggacccaauccc

SEQ ID NO: 865528 - RNA, 19 nt, Artificial Sequence
  Description of Artificial Sequence: Synthetic oligonucleotide
  Sense strand starting at position 362 of SEQ ID NO: 588445
gcgacaucacuacauucca

SEQ ID NO: 865529 - RNA, 19 nt, Artificial Sequence
  Description of Artificial Sequence: Synthetic oligonucleotide
  Antisense strand to SEQ ID NO: 865528
uggaauguagugaugucgc

SEQ ID NO: 865530 - RNA, 19 nt, Artificial Sequence
  Description of Artificial Sequence: Synthetic oligonucleotide
  Sense strand starting at position 538 of SEQ ID NO: 588445
aaaugugggccggaacauu

SEQ ID NO: 865531 - RNA, 19 nt, Artificial Sequence
  Description of Artificial Sequence: Synthetic oligonucleotide
  Antisense strand to SEQ ID NO: 865530
aauguuccggcccacauuu

SEQ ID NO: 865532 - RNA, 19 nt, Artificial Sequence
  Description of Artificial Sequence: Synthetic oligonucleotide
  Sense strand starting at position 551 of SEQ ID NO: 588445
aacauuaagucggcaggaa

SEQ ID NO: 865533 - RNA, 19 nt, Artificial Sequence
  Description of Artificial Sequence: Synthetic oligonucleotide
  Antisense strand to SEQ ID NO: 865532
uuccugccgacuuaauguu

SEQ ID NO: 865534 - RNA, 19 nt, Artificial Sequence
  Description of Artificial Sequence: Synthetic oligonucleotide
  Sense strand starting at position 599 of SEQ ID NO: 588445
uccucacacguuugguaau

SEQ ID NO: 865535 - RNA, 19 nt, Artificial Sequence
  Description of Artificial Sequence: Synthetic oligonucleotide
  Antisense strand to SEQ ID NO: 865534
auuaccaaacgugugagga

SEQ ID NO: 865536 - RNA, 19 nt, Artificial Sequence
  Description of Artificial Sequence: Synthetic oligonucleotide
  Sense strand starting at position 602 of SEQ ID NO: 588445
ucacacguuugguaauguu

SEQ ID NO: 865537 - RNA, 19 nt, Artificial Sequence
  Description of Artificial Sequence: Synthetic oligonucleotide
  Antisense strand to SEQ ID NO: 865536
aacauuaccaaacguguga

SEQ ID NO: 865538 - RNA, 19 nt, Artificial Sequence
  Description of Artificial Sequence: Synthetic oligonucleotide
  Sense strand starting at position 605 of SEQ ID NO: 588445
cacguuugguaauguuaag

SEQ ID NO: 865539 - RNA, 19 nt, Artificial Sequence
  Description of Artificial Sequence: Synthetic oligonucleotide
  Antisense strand to SEQ ID NO: 865538
cuuaacauuaccaaacgug

SEQ ID NO: 865540 - RNA, 19 nt, Artificial Sequence
  Description of Artificial Sequence: Synthetic oligonucleotide
  Sense strand starting at position 684 of SEQ ID NO: 588445
uucuguugaaccugggaau

SEQ ID NO: 865541 - RNA, 19 nt, Artificial Sequence
  Description of Artificial Sequence: Synthetic oligonucleotide
  Antisense strand to SEQ ID NO: 865540
auucccagguucaacagaa

SEQ ID NO: 865542 - RNA, 19 nt, Artificial Sequence
  Description of Artificial Sequence: Synthetic oligonucleotide
  Sense strand starting at position 685 of SEQ ID NO: 588445
ucuguugaaccugggaauu

SEQ ID NO: 865543 - RNA, 19 nt, Artificial Sequence
  Description of Artificial Sequence: Synthetic oligonucleotide
  Antisense strand to SEQ ID NO: 865542
aauucccagguucaacaga

SEQ ID NO: 865544 - RNA, 19 nt, Artificial Sequence
  Description of Artificial Sequence: Synthetic oligonucleotide
  Sense strand starting at position 687 of SEQ ID NO: 588445
uguugaaccugggaauuua

SEQ ID NO: 865545 - RNA, 19 nt, Artificial Sequence
  Description of Artificial Sequence: Synthetic oligonucleotide
  Antisense strand to SEQ ID NO: 865544
uaaauucccagguucaaca

SEQ ID NO: 865546 - RNA, 19 nt, Artificial Sequence
  Description of Artificial Sequence: Synthetic oligonucleotide
  Sense strand starting at position 748 of SEQ ID NO: 588445
gguauacucuuagaaauuu

SEQ ID NO: 865547 - RNA, 19 nt, Artificial Sequence
  Description of Artificial Sequence: Synthetic oligonucleotide
  Antisense strand to SEQ ID NO: 865546
aaauuucuaagaguauacc

SEQ ID NO: 865548 - RNA, 19 nt, Artificial Sequence
  Description of Artificial Sequence: Synthetic oligonucleotide
  Sense strand starting at position 756 of SEQ ID NO: 588445
cuuagaaauuuaugugacu

SEQ ID NO: 865549 - RNA, 19 nt, Artificial Sequence
  Description of Artificial Sequence: Synthetic oligonucleotide
  Antisense strand to SEQ ID NO: 865548
agucacauaaauuucuaag

SEQ ID NO: 865550 - RNA, 19 nt, Artificial Sequence
  Description of Artificial Sequence: Synthetic oligonucleotide
  Sense strand starting at position 848 of SEQ ID NO: 588445
ccguauuuauccuguggca

SEQ ID NO: 865551 - RNA, 19 nt, Artificial Sequence
  Description of Artificial Sequence: Synthetic oligonucleotide
  Antisense strand to SEQ ID NO: 865550
ugccacaggauaaauacgg

SEQ ID NO: 865552 - RNA, 19 nt, Artificial Sequence
  Description of Artificial Sequence: Synthetic oligonucleotide
  Sense strand starting at position 850 of SEQ ID NO: 588445
guauuuauccuguggcacu

SEQ ID NO: 865553 - RNA, 19 nt, Artificial Sequence
  Description of Artificial Sequence: Synthetic oligonucleotide
  Antisense strand to SEQ ID NO: 865552
agugccacaggauaaauac

SEQ ID NO: 865554 - RNA, 19 nt, Artificial Sequence
  Description of Artificial Sequence: Synthetic oligonucleotide
  Sense strand starting at position 1008 of SEQ ID NO: 588445
ucgaauaugagguggagaa

SEQ ID NO: 865555 - RNA, 19 nt, Artificial Sequence
  Description of Artificial Sequence: Synthetic oligonucleotide
  Antisense strand to SEQ ID NO: 865554
uucuccaccucauauucga

SEQ ID NO: 865556 - RNA, 19 nt, Artificial Sequence
  Description of Artificial Sequence: Synthetic oligonucleotide
  Sense strand starting at position 1108 of SEQ ID NO: 588445
cagagauacugccaauguu

SEQ ID NO: 865557 - RNA, 19 nt, Artificial Sequence
  Description of Artificial Sequence: Synthetic oligonucleotide
  Antisense strand to SEQ ID NO: 865556
aacauuggcaguaucucug

SEQ ID NO: 865558 - RNA, 19 nt, Artificial Sequence
  Description of Artificial Sequence: Synthetic oligonucleotide
  Sense strand starting at position 1168 of SEQ ID NO: 588445
gucuauguuaaggguguaa

SEQ ID NO: 865559 - RNA, 19 nt, Artificial Sequence
  Description of Artificial Sequence: Synthetic oligonucleotide
  Antisense strand to SEQ ID NO: 865558
uuacacccuuaacauagac

SEQ ID NO: 865560 - RNA, 19 nt, Artificial Sequence
  Description of Artificial Sequence: Synthetic oligonucleotide
  Sense strand starting at position 1245 of SEQ ID NO: 588445
aauuuaugcugugaccaga

SEQ ID NO: 865561 - RNA, 19 nt, Artificial Sequence
  Description of Artificial Sequence: Synthetic oligonucleotide
  Antisense strand to SEQ ID NO: 865560
ucuggucacagcauaaauu

SEQ ID NO: 865562 - RNA, 19 nt, Artificial Sequence
  Description of Artificial Sequence: Synthetic oligonucleotide
  Sense strand starting at position 1316 of SEQ ID NO: 588445
acuggucucgcgcaacuaa

SEQ ID NO: 865563 - RNA, 19 nt, Artificial Sequence
  Description of Artificial Sequence: Synthetic oligonucleotide
  Antisense strand to SEQ ID NO: 865562
uuaguugcgcgagaccagu

SEQ ID NO: 865564 - RNA, 19 nt, Artificial Sequence
  Description of Artificial Sequence: Synthetic oligonucleotide
  Sense strand starting at position 1319 of SEQ ID NO: 588445
ggucucgcgcaacuaauua

SEQ ID NO: 865565 - RNA, 19 nt, Artificial Sequence
  Description of Artificial Sequence: Synthetic oligonucleotide
  Antisense strand to SEQ ID NO: 865564
uaauuaguugcgcgagacc

SEQ ID NO: 865566 - RNA, 19 nt, Artificial Sequence
  Description of Artificial Sequence: Synthetic oligonucleotide
  Sense strand starting at position 1588 of SEQ ID NO: 588445
gguccuagguccuuggaga

SEQ ID NO: 865567 - RNA, 19 nt, Artificial Sequence
  Description of Artificial Sequence: Synthetic oligonucleotide
  Antisense strand to SEQ ID NO: 865566
ucuccaaggaccuaggacc

SEQ ID NO: 865568 - RNA, 19 nt, Artificial Sequence
  Description of Artificial Sequence: Synthetic oligonucleotide
  Sense strand starting at position 2056 of SEQ ID NO: 588445
aggcguaaccagggcgaua

SEQ ID NO: 865569 - RNA, 19 nt, Artificial Sequence
  Description of Artificial Sequence: Synthetic oligonucleotide
  Antisense strand to SEQ ID NO: 865568
uaucgcccugguuacgccu

SEQ ID NO: 865570 - RNA, 19 nt, Artificial Sequence
  Description of Artificial Sequence: Synthetic oligonucleotide
  Sense strand starting at position 2094 of SEQ ID NO: 588445
cguggccucaaagaucaaa

SEQ ID NO: 865571 - RNA, 19 nt, Artificial Sequence
  Description of Artificial Sequence: Synthetic oligonucleotide
  Antisense strand to SEQ ID NO: 865570
uuugaucuuugaggccacg

SEQ ID NO: 865572 - RNA, 19 nt, Artificial Sequence
  Description of Artificial Sequence: Synthetic oligonucleotide
  Sense strand starting at position 2117 of SEQ ID NO: 588445
auuggucaaugagaaauau

SEQ ID NO: 865573 - RNA, 19 nt, Artificial Sequence
  Description of Artificial Sequence: Synthetic oligonucleotide
  Antisense strand to SEQ ID NO: 865572
auauuucucauugaccaau

SEQ ID NO: 865574 - RNA, 19 nt, Artificial Sequence
  Description of Artificial Sequence: Synthetic oligonucleotide
  Sense strand starting at position 2895 of SEQ ID NO: 588445
ugagaaccgccaggucauu

SEQ ID NO: 865575 - RNA, 19 nt, Artificial Sequence
  Description of Artificial Sequence: Synthetic oligonucleotide
  Antisense strand to SEQ ID NO: 865574
aaugaccuggcgguucuca

SEQ ID NO: 865576 - RNA, 19 nt, Artificial Sequence
  Description of Artificial Sequence: Synthetic oligonucleotide
  Sense strand starting at position 2956 of SEQ ID NO: 588445
aaagaaguguuauccuguc

SEQ ID NO: 865577 - RNA, 19 nt, Artificial Sequence
  Description of Artificial Sequence: Synthetic oligonucleotide
  Antisense strand to SEQ ID NO: 865576
gacaggauaacacuucuuu

SEQ ID NO: 865578 - RNA, 19 nt, Artificial Sequence
  Description of Artificial Sequence: Synthetic oligonucleotide
  Sense strand starting at position 3150 of SEQ ID NO: 588445
ccacuccuuucguugcuaa

SEQ ID NO: 865579 - RNA, 19 nt, Artificial Sequence
  Description of Artificial Sequence: Synthetic oligonucleotide
  Antisense strand to SEQ ID NO: 865578
uuagcaacgaaaggagugg

SEQ ID NO: 865580 - RNA, 19 nt, Artificial Sequence
  Description of Artificial Sequence: Synthetic oligonucleotide
  Sense strand starting at position 3235 of SEQ ID NO: 588445
uggaguugccacuacaacu

SEQ ID NO: 865581 - RNA, 19 nt, Artificial Sequence
  Description of Artificial Sequence: Synthetic oligonucleotide
  Antisense strand to SEQ ID NO: 865580
aguuguaguggcaacucca

SEQ ID NO: 865582 - RNA, 19 nt, Artificial Sequence
  Description of Artificial Sequence: Synthetic oligonucleotide
  Sense strand starting at position 3576 of SEQ ID NO: 588445
gaaguuagaucgggaaaga

SEQ ID NO: 865583 - RNA, 19 nt, Artificial Sequence
  Description of Artificial Sequence: Synthetic oligonucleotide
  Antisense strand to SEQ ID NO: 865582
ucuuucccgaucuaacuuc

SEQ ID NO: 865584 - RNA, 19 nt, Artificial Sequence
  Description of Artificial Sequence: Synthetic oligonucleotide
  Sense strand starting at position 3585 of SEQ ID NO: 588445
ucgggaaagacuugguauu

SEQ ID NO: 865585 - RNA, 19 nt, Artificial Sequence
  Description of Artificial Sequence: Synthetic oligonucleotide
  Antisense strand to SEQ ID NO: 865584
aauaccaagucuuucccga

SEQ ID NO: 865586 - RNA, 19 nt, Artificial Sequence
  Description of Artificial Sequence: Synthetic oligonucleotide
  Sense strand starting at position 3632 of SEQ ID NO: 588445
gcagguguaugccagauag

SEQ ID NO: 865587 - RNA, 19 nt, Artificial Sequence
  Description of Artificial Sequence: Synthetic oligonucleotide
  Antisense strand to SEQ ID NO: 865586
cuaucuggcauacaccugc

SEQ ID NO: 865588 - RNA, 19 nt, Artificial Sequence
  Description of Artificial Sequence: Synthetic oligonucleotide
  Sense strand starting at position 3701 of SEQ ID NO: 588445
ugcacaugguucugagaug

SEQ ID NO: 865589 - RNA, 19 nt, Artificial Sequence
  Description of Artificial Sequence: Synthetic oligonucleotide
  Antisense strand to SEQ ID NO: 865588
caucucagaaccaugugca

SEQ ID NO: 865590 - RNA, 19 nt, Artificial Sequence
  Description of Artificial Sequence: Synthetic oligonucleotide
  Sense strand starting at position 3755 of SEQ ID NO: 588445
cagagauggcagggucaga

SEQ ID NO: 865591 - RNA, 19 nt, Artificial Sequence
  Description of Artificial Sequence: Synthetic oligonucleotide
  Antisense strand to SEQ ID NO: 865590
ucugacccugccaucucug

SEQ ID NO: 865592 - RNA, 19 nt, Artificial Sequence
  Description of Artificial Sequence: Synthetic oligonucleotide
  Sense strand starting at position 3826 of SEQ ID NO: 588445
gcagccauaguuugccaaa

SEQ ID NO: 865593 - RNA, 19 nt, Artificial Sequence
  Description of Artificial Sequence: Synthetic oligonucleotide
  Antisense strand to SEQ ID NO: 865592
uuuggcaaacuauggcugc

SEQ ID NO: 865594 - RNA, 19 nt, Artificial Sequence
  Description of Artificial Sequence: Synthetic oligonucleotide
  Sense strand starting at position 3859 of SEQ ID NO: 588445
ugagcuucucucugcaagu

SEQ ID NO: 865595 - RNA, 19 nt, Artificial Sequence
  Description of Artificial Sequence: Synthetic oligonucleotide
  Antisense strand to SEQ ID NO: 865594
acuugcagagagaagcuca

SEQ ID NO: 865596 - RNA, 19 nt, Artificial Sequence
  Description of Artificial Sequence: Synthetic oligonucleotide
  Sense strand starting at position 3880 of SEQ ID NO: 588445
guugguauccacugucuuu

SEQ ID NO: 865597 - RNA, 19 nt, Artificial Sequence
  Description of Artificial Sequence: Synthetic oligonucleotide
  Antisense strand to SEQ ID NO: 865596
aaagacaguggauaccaac

SEQ ID NO: 865598 - RNA, 19 nt, Artificial Sequence
  Description of Artificial Sequence: Synthetic oligonucleotide
  Sense strand starting at position 3892 of SEQ ID NO: 588445
ugucuuugaccaugcggua

SEQ ID NO: 865599 - RNA, 19 nt, Artificial Sequence
  Description of Artificial Sequence: Synthetic oligonucleotide
  Antisense strand to SEQ ID NO: 865598
uaccgcauggucaaagaca

SEQ ID NO: 865600 - RNA, 19 nt, Artificial Sequence
  Description of Artificial Sequence: Synthetic oligonucleotide
  Sense strand starting at position 3905 of SEQ ID NO: 588445
gcgguaacucacugcagau

SEQ ID NO: 865601 - RNA, 19 nt, Artificial Sequence
  Description of Artificial Sequence: Synthetic oligonucleotide
  Antisense strand to SEQ ID NO: 865600
aucugcagugaguuaccgc

SEQ ID NO: 865602 - RNA, 19 nt, Artificial Sequence
  Description of Artificial Sequence: Synthetic oligonucleotide
  Sense strand starting at position 132 of SEQ ID NO: 588446
cuguacuuccaaugcagaa

SEQ ID NO: 865603 - RNA, 19 nt, Artificial Sequence
  Description of Artificial Sequence: Synthetic oligonucleotide
  Antisense strand to SEQ ID NO: 865602
uucugcauuggaaguacag

SEQ ID NO: 865604 - RNA, 19 nt, Artificial Sequence
  Description of Artificial Sequence: Synthetic oligonucleotide
  Sense strand starting at position 618 of SEQ ID NO: 588446
caguaagucuuagcaaguu

SEQ ID NO: 865605 - RNA, 19 nt, Artificial Sequence
  Description of Artificial Sequence: Synthetic oligonucleotide
  Antisense strand to SEQ ID NO: 865604
aacuugcuaagacuuacug

SEQ ID NO: 865606 - RNA, 19 nt, Artificial Sequence
  Description of Artificial Sequence: Synthetic oligonucleotide
  Sense strand starting at position 624 of SEQ ID NO: 588446
gucuuagcaaguuacuagu

SEQ ID NO: 865607 - RNA, 19 nt, Artificial Sequence
  Description of Artificial Sequence: Synthetic oligonucleotide
  Antisense strand to SEQ ID NO: 865606
acuaguaacuugcuaagac

SEQ ID NO: 865608 - RNA, 19 nt, Artificial Sequence
  Description of Artificial Sequence: Synthetic oligonucleotide
  Sense strand starting at position 630 of SEQ ID NO: 588446
gcaaguuacuaguuucuau

SEQ ID NO: 865609 - RNA, 19 nt, Artificial Sequence
  Description of Artificial Sequence: Synthetic oligonucleotide
  Antisense strand to SEQ ID NO: 865608
auagaaacuaguaacuugc

SEQ ID NO: 865610 - RNA, 19 nt, Artificial Sequence
  Description of Artificial Sequence: Synthetic oligonucleotide
  Sense strand starting at position 703 of SEQ ID NO: 588446
cuaggaugccuuuggagac

SEQ ID NO: 865611 - RNA, 19 nt, Artificial Sequence
  Description of Artificial Sequence: Synthetic oligonucleotide
  Antisense strand to SEQ ID NO: 865610
gucuccaaaggcauccuag

SEQ ID NO: 865612 - RNA, 19 nt, Artificial Sequence
  Description of Artificial Sequence: Synthetic oligonucleotide
  Sense strand starting at position 793 of SEQ ID NO: 588446
accugauggccaugagcua

SEQ ID NO: 865613 - RNA, 19 nt, Artificial Sequence
  Description of Artificial Sequence: Synthetic oligonucleotide
  Antisense strand to SEQ ID NO: 865612
uagcucauggccaucaggu

SEQ ID NO: 865614 - RNA, 19 nt, Artificial Sequence
  Description of Artificial Sequence: Synthetic oligonucleotide
  Sense strand starting at position 846 of SEQ ID NO: 588446
cagguuauuguguaucuca

SEQ ID NO: 865615 - RNA, 19 nt, Artificial Sequence
  Description of Artificial Sequence: Synthetic oligonucleotide
  Antisense strand to SEQ ID NO: 865614
ugagauacacaauaaccug

SEQ ID NO: 865616 - RNA, 19 nt, Artificial Sequence
  Description of Artificial Sequence: Synthetic oligonucleotide
  Sense strand starting at position 849 of SEQ ID NO: 588446
guuauuguguaucucacua

SEQ ID NO: 865617 - RNA, 19 nt, Artificial Sequence
  Description of Artificial Sequence: Synthetic oligonucleotide
  Antisense strand to SEQ ID NO: 865616
uagugagauacacaauaac

SEQ ID NO: 865618 - RNA, 19 nt, Artificial Sequence
  Description of Artificial Sequence: Synthetic oligonucleotide
  Sense strand starting at position 854 of SEQ ID NO: 588446
uguguaucucacuaaucca

SEQ ID NO: 865619 - RNA, 19 nt, Artificial Sequence
  Description of Artificial Sequence: Synthetic oligonucleotide
  Antisense strand to SEQ ID NO: 865618
uggauuagugagauacaca

SEQ ID NO: 865620 - RNA, 19 nt, Artificial Sequence
  Description of Artificial Sequence: Synthetic oligonucleotide
  Sense strand starting at position 975 of SEQ ID NO: 588446
ugcaaaucuggcuauggga

SEQ ID NO: 865621 - RNA, 19 nt, Artificial Sequence
  Description of Artificial Sequence: Synthetic oligonucleotide
  Antisense strand to SEQ ID NO: 865620
ucccauagccagauuugca

SEQ ID NO: 865622 - RNA, 19 nt, Artificial Sequence
  Description of Artificial Sequence: Synthetic oligonucleotide
  Sense strand starting at position 995 of SEQ ID NO: 588446
aucugaaauuguccagcau

SEQ ID NO: 865623 - RNA, 19 nt, Artificial Sequence
  Description of Artificial Sequence: Synthetic oligonucleotide
  Antisense strand to SEQ ID NO: 865622
augcuggacaauuucagau

SEQ ID NO: 865624 - RNA, 19 nt, Artificial Sequence
  Description of Artificial Sequence: Synthetic oligonucleotide
  Sense strand starting at position 996 of SEQ ID NO: 588446
ucugaaauuguccagcauc

SEQ ID NO: 865625 - RNA, 19 nt, Artificial Sequence
  Description of Artificial Sequence: Synthetic oligonucleotide
  Antisense strand to SEQ ID NO: 865624
gaugcuggacaauuucaga

SEQ ID NO: 865626 - RNA, 19 nt, Artificial Sequence
  Description of Artificial Sequence: Synthetic oligonucleotide
  Sense strand starting at position 1144 of SEQ ID NO: 588446
gggcaaaguuguguggauc

SEQ ID NO: 865627 - RNA, 19 nt, Artificial Sequence
  Description of Artificial Sequence: Synthetic oligonucleotide
  Antisense strand to SEQ ID NO: 865626
gauccacacaacuuugccc

SEQ ID NO: 865628 - RNA, 19 nt, Artificial Sequence
  Description of Artificial Sequence: Synthetic oligonucleotide
  Sense strand starting at position 1425 of SEQ ID NO: 588446
cuggaacuagugcgacuua

SEQ ID NO: 865629 - RNA, 19 nt, Artificial Sequence
  Description of Artificial Sequence: Synthetic oligonucleotide
  Antisense strand to SEQ ID NO: 865628
uaagucgcacuaguuccag

SEQ ID NO: 865630 - RNA, 19 nt, Artificial Sequence
  Description of Artificial Sequence: Synthetic oligonucleotide
  Sense strand starting at position 1481 of SEQ ID NO: 588446
ugacaaagcucagaacaaa

SEQ ID NO: 865631 - RNA, 19 nt, Artificial Sequence
  Description of Artificial Sequence: Synthetic oligonucleotide
  Antisense strand to SEQ ID NO: 865630
uuuguucugagcuuuguca

SEQ ID NO: 865632 - RNA, 19 nt, Artificial Sequence
  Description of Artificial Sequence: Synthetic oligonucleotide
  Sense strand starting at position 2297 of SEQ ID NO: 588446
gagggaauguucccgaaca

SEQ ID NO: 865633 - RNA, 19 nt, Artificial Sequence
  Description of Artificial Sequence: Synthetic oligonucleotide
  Antisense strand to SEQ ID NO: 865632
uguucgggaacauucccuc

SEQ ID NO: 865634 - RNA, 19 nt, Artificial Sequence
  Description of Artificial Sequence: Synthetic oligonucleotide
  Sense strand starting at position 2299 of SEQ ID NO: 588446
gggaauguucccgaacagc

SEQ ID NO: 865635 - RNA, 19 nt, Artificial Sequence
  Description of Artificial Sequence: Synthetic oligonucleotide
  Antisense strand to SEQ ID NO: 865634
gcuguucgggaacauuccc

SEQ ID NO: 865636 - RNA, 19 nt, Artificial Sequence
  Description of Artificial Sequence: Synthetic oligonucleotide
  Sense strand starting at position 2548 of SEQ ID NO: 588446
ugaagauucccggacgccu

SEQ ID NO: 865637 - RNA, 19 nt, Artificial Sequence
  Description of Artificial Sequence: Synthetic oligonucleotide
  Antisense strand to SEQ ID NO: 865636
aggcguccgggaaucuuca

SEQ ID NO: 865638 - RNA, 19 nt, Artificial Sequence
  Description of Artificial Sequence: Synthetic oligonucleotide
  Sense strand starting at position 2589 of SEQ ID NO: 588446
ggcagcugcauuugaaaca

SEQ ID NO: 865639 - RNA, 19 nt, Artificial Sequence
  Description of Artificial Sequence: Synthetic oligonucleotide
  Antisense strand to SEQ ID NO: 865638
uguuucaaaugcagcugcc

SEQ ID NO: 865640 - RNA, 19 nt, Artificial Sequence
  Description of Artificial Sequence: Synthetic oligonucleotide
  Sense strand starting at position 2629 of SEQ ID NO: 588446
cgcacugauguuugagaag

SEQ ID NO: 865641 - RNA, 19 nt, Artificial Sequence
  Description of Artificial Sequence: Synthetic oligonucleotide
  Antisense strand to SEQ ID NO: 865640
cuucucaaacaucagugcg

SEQ ID NO: 865642 - RNA, 19 nt, Artificial Sequence
  Description of Artificial Sequence: Synthetic oligonucleotide
  Sense strand starting at position 2850 of SEQ ID NO: 588446
uugagcuucccagauaauc

SEQ ID NO: 865643 - RNA, 19 nt, Artificial Sequence
  Description of Artificial Sequence: Synthetic oligonucleotide
  Antisense strand to SEQ ID NO: 865642
gauuaucugggaagcucaa

SEQ ID NO: 865644 - RNA, 19 nt, Artificial Sequence
  Description of Artificial Sequence: Synthetic oligonucleotide
  Sense strand starting at position 2874 of SEQ ID NO: 588446
acaguauacggccaagauu

SEQ ID NO: 865645 - RNA, 19 nt, Artificial Sequence
  Description of Artificial Sequence: Synthetic oligonucleotide
  Antisense strand to SEQ ID NO: 865644
aaucuuggccguauacugu

SEQ ID NO: 865646 - RNA, 19 nt, Artificial Sequence
  Description of Artificial Sequence: Synthetic oligonucleotide
  Sense strand starting at position 2932 of SEQ ID NO: 588446
agcucuggugucugggaaa

SEQ ID NO: 865647 - RNA, 19 nt, Artificial Sequence
  Description of Artificial Sequence: Synthetic oligonucleotide
  Antisense strand to SEQ ID NO: 865646
uuucccagacaccagagcu

SEQ ID NO: 865648 - RNA, 19 nt, Artificial Sequence
  Description of Artificial Sequence: Synthetic oligonucleotide
  Sense strand starting at position 3110 of SEQ ID NO: 588446
gcuucuuaacugcaggaaa

SEQ ID NO: 865649 - RNA, 19 nt, Artificial Sequence
  Description of Artificial Sequence: Synthetic oligonucleotide
  Antisense strand to SEQ ID NO: 865648
uuuccugcaguuaagaagc

SEQ ID NO: 865650 - RNA, 19 nt, Artificial Sequence
  Description of Artificial Sequence: Synthetic oligonucleotide
  Sense strand starting at position 3185 of SEQ ID NO: 588446
ccuuuagaggaauguucua

SEQ ID NO: 865651 - RNA, 19 nt, Artificial Sequence
  Description of Artificial Sequence: Synthetic oligonucleotide
  Antisense strand to SEQ ID NO: 865650
uagaacauuccucuaaagg

SEQ ID NO: 865652 - RNA, 19 nt, Artificial Sequence
  Description of Artificial Sequence: Synthetic oligonucleotide
  Sense strand starting at position 3313 of SEQ ID NO: 588446
gacuuaaguugugucacuu

SEQ ID NO: 865653 - RNA, 19 nt, Artificial Sequence
  Description of Artificial Sequence: Synthetic oligonucleotide
  Antisense strand to SEQ ID NO: 865652
aagugacacaacuuaaguc

SEQ ID NO: 865654 - RNA, 19 nt, Artificial Sequence
  Description of Artificial Sequence: Synthetic oligonucleotide
  Sense strand starting at position 3317 of SEQ ID NO: 588446
uaaguugugucacuuugau

SEQ ID NO: 865655 - RNA, 19 nt, Artificial Sequence
  Description of Artificial Sequence: Synthetic oligonucleotide
  Antisense strand to SEQ ID NO: 865654
aucaaagugacacaacuua

SEQ ID NO: 865656 - RNA, 19 nt, Artificial Sequence
  Description of Artificial Sequence: Synthetic oligonucleotide
  Sense strand starting at position 3323 of SEQ ID NO: 588446
gugucacuuugaucuucua

SEQ ID NO: 865657 - RNA, 19 nt, Artificial Sequence
  Description of Artificial Sequence: Synthetic oligonucleotide
  Antisense strand to SEQ ID NO: 865656
uagaagaucaaagugacac

SEQ ID NO: 865658 - RNA, 19 nt, Artificial Sequence
  Description of Artificial Sequence: Synthetic oligonucleotide
  Sense strand starting at position 3403 of SEQ ID NO: 588446
gcucucuuaguauaguuua

SEQ ID NO: 865659 - RNA, 19 nt, Artificial Sequence
  Description of Artificial Sequence: Synthetic oligonucleotide
  Antisense strand to SEQ ID NO: 865658
uaaacuauacuaagagagc

SEQ ID NO: 865660 - RNA, 19 nt, Artificial Sequence
  Description of Artificial Sequence: Synthetic oligonucleotide
  Sense strand starting at position 3406 of SEQ ID NO: 588446
cucuuaguauaguuuacau

SEQ ID NO: 865661 - RNA, 19 nt, Artificial Sequence
  Description of Artificial Sequence: Synthetic oligonucleotide
  Antisense strand to SEQ ID NO: 865660
auguaaacuauacuaagag

SEQ ID NO: 865662 - RNA, 19 nt, Artificial Sequence
  Description of Artificial Sequence: Synthetic oligonucleotide
  Sense strand starting at position 3434 of SEQ ID NO: 588446
gguggacuguaacuucuau

SEQ ID NO: 865663 - RNA, 19 nt, Artificial Sequence
  Description of Artificial Sequence: Synthetic oligonucleotide
  Antisense strand to SEQ ID NO: 865662
auagaaguuacaguccacc

SEQ ID NO: 865664 - RNA, 19 nt, Artificial Sequence
  Description of Artificial Sequence: Synthetic oligonucleotide
  Sense strand starting at position 3509 of SEQ ID NO: 588446
gcgacucacucagugauuc

SEQ ID NO: 865665 - RNA, 19 nt, Artificial Sequence
  Description of Artificial Sequence: Synthetic oligonucleotide
  Antisense strand to SEQ ID NO: 865664
gaaucacugagugagucgc

SEQ ID NO: 865666 - RNA, 19 nt, Artificial Sequence
  Description of Artificial Sequence: Synthetic oligonucleotide
  Sense strand starting at position 3510 of SEQ ID NO: 588446
cgacucacucagugauucu

SEQ ID NO: 865667 - RNA, 19 nt, Artificial Sequence
  Description of Artificial Sequence: Synthetic oligonucleotide
  Antisense strand to SEQ ID NO: 865666
agaaucacugagugagucg

SEQ ID NO: 865668 - RNA, 19 nt, Artificial Sequence
  Description of Artificial Sequence: Synthetic oligonucleotide
  Sense strand starting at position 3541 of SEQ ID NO: 588446
ggaacagguccauaugucu

SEQ ID NO: 865669 - RNA, 19 nt, Artificial Sequence
  Description of Artificial Sequence: Synthetic oligonucleotide
  Antisense strand to SEQ ID NO: 865668
agacauauggaccuguucc

SEQ ID NO: 865670 - RNA, 19 nt, Artificial Sequence
  Description of Artificial Sequence: Synthetic oligonucleotide
  Sense strand starting at position 3550 of SEQ ID NO: 588446
ccauaugucuaggugcuaa

SEQ ID NO: 865671 - RNA, 19 nt, Artificial Sequence
  Description of Artificial Sequence: Synthetic oligonucleotide
  Antisense strand to SEQ ID NO: 865670
uuagcaccuagacauaugg

SEQ ID NO: 865672 - RNA, 19 nt, Artificial Sequence
  Description of Artificial Sequence: Synthetic oligonucleotide
  Sense strand starting at position 3574 of SEQ ID NO: 588446
cuggcugaaugagcuauau

SEQ ID NO: 865673 - RNA, 19 nt, Artificial Sequence
  Description of Artificial Sequence: Synthetic oligonucleotide
  Antisense strand to SEQ ID NO: 865672
auauagcucauucagccag

SEQ ID NO: 865674 - RNA, 19 nt, Artificial Sequence
  Description of Artificial Sequence: Synthetic oligonucleotide
  Sense strand starting at position 3618 of SEQ ID NO: 588446
uucguuagauucuuuauga

SEQ ID NO: 865675 - RNA, 19 nt, Artificial Sequence
  Description of Artificial Sequence: Synthetic oligonucleotide
  Antisense strand to SEQ ID NO: 865674
ucauaaagaaucuaacgaa

SEQ ID NO: 865676 - RNA, 19 nt, Artificial Sequence
  Description of Artificial Sequence: Synthetic oligonucleotide
  Sense strand starting at position 3619 of SEQ ID NO: 588446
ucguuagauucuuuaugac

SEQ ID NO: 865677 - RNA, 19 nt, Artificial Sequence
  Description of Artificial Sequence: Synthetic oligonucleotide
  Antisense strand to SEQ ID NO: 865676
gucauaaagaaucuaacga

SEQ ID NO: 865678 - RNA, 19 nt, Artificial Sequence
  Description of Artificial Sequence: Synthetic oligonucleotide
  Sense strand starting at position 3748 of SEQ ID NO: 588446
uugauuaaacaaugugcaa

SEQ ID NO: 865679 - RNA, 19 nt, Artificial Sequence
  Description of Artificial Sequence: Synthetic oligonucleotide
  Antisense strand to SEQ ID NO: 865678
uugcacauuguuuaaucaa

SEQ ID NO: 865680 - RNA, 19 nt, Artificial Sequence
  Description of Artificial Sequence: Synthetic oligonucleotide
  Sense strand starting at position 3770 of SEQ ID NO: 588446
gcuacagugguugguugaa

SEQ ID NO: 865681 - RNA, 19 nt, Artificial Sequence
  Description of Artificial Sequence: Synthetic oligonucleotide
  Antisense strand to SEQ ID NO: 865680
uucaaccaaccacuguagc

SEQ ID NO: 865682 - RNA, 19 nt, Artificial Sequence
  Description of Artificial Sequence: Synthetic oligonucleotide
  Sense strand starting at position 12 of SEQ ID NO: 588447
caguaagucuuagcaaguu

SEQ ID NO: 865683 - RNA, 19 nt, Artificial Sequence
  Description of Artificial Sequence: Synthetic oligonucleotide
  Antisense strand to SEQ ID NO: 865682
aacuugcuaagacuuacug

SEQ ID NO: 865684 - RNA, 19 nt, Artificial Sequence
  Description of Artificial Sequence: Synthetic oligonucleotide
  Sense strand starting at position 18 of SEQ ID NO: 588447
gucuuagcaaguuacuagu

SEQ ID NO: 865685 - RNA, 19 nt, Artificial Sequence
  Description of Artificial Sequence: Synthetic oligonucleotide
  Antisense strand to SEQ ID NO: 865684
acuaguaacuugcuaagac

SEQ ID NO: 865686 - RNA, 19 nt, Artificial Sequence
  Description of Artificial Sequence: Synthetic oligonucleotide
  Sense strand starting at position 24 of SEQ ID NO: 588447
gcaaguuacuaguuucuau

SEQ ID NO: 865687 - RNA, 19 nt, Artificial Sequence
  Description of Artificial Sequence: Synthetic oligonucleotide
  Antisense strand to SEQ ID NO: 865686
auagaaacuaguaacuugc

SEQ ID NO: 865688 - RNA, 19 nt, Artificial Sequence
  Description of Artificial Sequence: Synthetic oligonucleotide
  Sense strand starting at position 97 of SEQ ID NO: 588447
cuaggaugccuuuggagac

SEQ ID NO: 865689 - RNA, 19 nt, Artificial Sequence
  Description of Artificial Sequence: Synthetic oligonucleotide
  Antisense strand to SEQ ID NO: 865688
gucuccaaaggcauccuag

SEQ ID NO: 865690 - RNA, 19 nt, Artificial Sequence
  Description of Artificial Sequence: Synthetic oligonucleotide
  Sense strand starting at position 187 of SEQ ID NO: 588447
accugauggccaugagcua

SEQ ID NO: 865691 - RNA, 19 nt, Artificial Sequence
  Description of Artificial Sequence: Synthetic oligonucleotide
  Antisense strand to SEQ ID NO: 865690
uagcucauggccaucaggu

SEQ ID NO: 865692 - RNA, 19 nt, Artificial Sequence
  Description of Artificial Sequence: Synthetic oligonucleotide
  Sense strand starting at position 240 of SEQ ID NO: 588447
cagguuauuguguaucuca

SEQ ID NO: 865693 - RNA, 19 nt, Artificial Sequence
  Description of Artificial Sequence: Synthetic oligonucleotide
  Antisense strand to SEQ ID NO: 865692
ugagauacacaauaaccug

SEQ ID NO: 865694 - RNA, 19 nt, Artificial Sequence
  Description of Artificial Sequence: Synthetic oligonucleotide
  Sense strand starting at position 243 of SEQ ID NO: 588447
guuauuguguaucucacua

SEQ ID NO: 865695 - RNA, 19 nt, Artificial Sequence
  Description of Artificial Sequence: Synthetic oligonucleotide
  Antisense strand to SEQ ID NO: 865694
uagugagauacacaauaac

SEQ ID NO: 865696 - RNA, 19 nt, Artificial Sequence
  Description of Artificial Sequence: Synthetic oligonucleotide
  Sense strand starting at position 248 of SEQ ID NO: 588447
uguguaucucacuaaucca

SEQ ID NO: 865697 - RNA, 19 nt, Artificial Sequence
  Description of Artificial Sequence: Synthetic oligonucleotide
  Antisense strand to SEQ ID NO: 865696
uggauuagugagauacaca

SEQ ID NO: 865698 - RNA, 19 nt, Artificial Sequence
  Description of Artificial Sequence: Synthetic oligonucleotide
  Sense strand starting at position 369 of SEQ ID NO: 588447
ugcaaaucuggcuauggga

SEQ ID NO: 865699 - RNA, 19 nt, Artificial Sequence
  Description of Artificial Sequence: Synthetic oligonucleotide
  Antisense strand to SEQ ID NO: 865698
ucccauagccagauuugca

SEQ ID NO: 865700 - RNA, 19 nt, Artificial Sequence
  Description of Artificial Sequence: Synthetic oligonucleotide
  Sense strand starting at position 389 of SEQ ID NO: 588447
aucugaaauuguccagcau

SEQ ID NO: 865701 - RNA, 19 nt, Artificial Sequence
  Description of Artificial Sequence: Synthetic oligonucleotide
  Antisense strand to SEQ ID NO: 865700
augcuggacaauuucagau

SEQ ID NO: 865702 - RNA, 19 nt, Artificial Sequence
  Description of Artificial Sequence: Synthetic oligonucleotide
  Sense strand starting at position 390 of SEQ ID NO: 588447
ucugaaauuguccagcauc

SEQ ID NO: 865703 - RNA, 19 nt, Artificial Sequence
  Description of Artificial Sequence: Synthetic oligonucleotide
  Antisense strand to SEQ ID NO: 865702
gaugcuggacaauuucaga

SEQ ID NO: 865704 - RNA, 19 nt, Artificial Sequence
  Description of Artificial Sequence: Synthetic oligonucleotide
  Sense strand starting at position 538 of SEQ ID NO: 588447
gggcaaaguuguguggauc

SEQ ID NO: 865705 - RNA, 19 nt, Artificial Sequence
  Description of Artificial Sequence: Synthetic oligonucleotide
  Antisense strand to SEQ ID NO: 865704
gauccacacaacuuugccc

SEQ ID NO: 865706 - RNA, 19 nt, Artificial Sequence
  Description of Artificial Sequence: Synthetic oligonucleotide
  Sense strand starting at position 819 of SEQ ID NO: 588447
cuggaacuagugcgacuua

SEQ ID NO: 865707 - RNA, 19 nt, Artificial Sequence
  Description of Artificial Sequence: Synthetic oligonucleotide
  Antisense strand to SEQ ID NO: 865706
uaagucgcacuaguuccag

SEQ ID NO: 865708 - RNA, 19 nt, Artificial Sequence
  Description of Artificial Sequence: Synthetic oligonucleotide
  Sense strand starting at position 875 of SEQ ID NO: 588447
ugacaaagcucagaacaaa

SEQ ID NO: 865709 - RNA, 19 nt, Artificial Sequence
  Description of Artificial Sequence: Synthetic oligonucleotide
  Antisense strand to SEQ ID NO: 865708
uuuguucugagcuuuguca

SEQ ID NO: 865710 - RNA, 19 nt, Artificial Sequence
  Description of Artificial Sequence: Synthetic oligonucleotide
  Sense strand starting at position 1691 of SEQ ID NO: 588447
gagggaauguucccgaaca

SEQ ID NO: 865711 - RNA, 19 nt, Artificial Sequence
  Description of Artificial Sequence: Synthetic oligonucleotide
  Antisense strand to SEQ ID NO: 865710
uguucgggaacauucccuc

SEQ ID NO: 865712 - RNA, 19 nt, Artificial Sequence
  Description of Artificial Sequence: Synthetic oligonucleotide
  Sense strand starting at position 1693 of SEQ ID NO: 588447
gggaauguucccgaacagc

SEQ ID NO: 865713 - RNA, 19 nt, Artificial Sequence
  Description of Artificial Sequence: Synthetic oligonucleotide
  Antisense strand to SEQ ID NO: 865712
gcuguucgggaacauuccc

SEQ ID NO: 865714 - RNA, 19 nt, Artificial Sequence
  Description of Artificial Sequence: Synthetic oligonucleotide
  Sense strand starting at position 1942 of SEQ ID NO: 588447
ugaagauucccggacgccu

SEQ ID NO: 865715 - RNA, 19 nt, Artificial Sequence
  Description of Artificial Sequence: Synthetic oligonucleotide
  Antisense strand to SEQ ID NO: 865714
aggcguccgggaaucuuca

SEQ ID NO: 865716 - RNA, 19 nt, Artificial Sequence
  Description of Artificial Sequence: Synthetic oligonucleotide
  Sense strand starting at position 1983 of SEQ ID NO: 588447
ggcagcugcauuugaaaca

SEQ ID NO: 865717 - RNA, 19 nt, Artificial Sequence
  Description of Artificial Sequence: Synthetic oligonucleotide
  Antisense strand to SEQ ID NO: 865716
uguuucaaaugcagcugcc

SEQ ID NO: 865718 - RNA, 19 nt, Artificial Sequence
  Description of Artificial Sequence: Synthetic oligonucleotide
  Sense strand starting at position 2023 of SEQ ID NO: 588447
cgcacugauguuugagaag

SEQ ID NO: 865719 - RNA, 19 nt, Artificial Sequence
  Description of Artificial Sequence: Synthetic oligonucleotide
  Antisense strand to SEQ ID NO: 865718
cuucucaaacaucagugcg

SEQ ID NO: 865720 - RNA, 19 nt, Artificial Sequence
  Description of Artificial Sequence: Synthetic oligonucleotide
  Sense strand starting at position 2244 of SEQ ID NO: 588447
uugagcuucccagauaauc

SEQ ID NO: 865721 - RNA, 19 nt, Artificial Sequence
  Description of Artificial Sequence: Synthetic oligonucleotide
  Antisense strand to SEQ ID NO: 865720
gauuaucugggaagcucaa

SEQ ID NO: 865722 - RNA, 19 nt, Artificial Sequence
  Description of Artificial Sequence: Synthetic oligonucleotide
  Sense strand starting at position 2268 of SEQ ID NO: 588447
acaguauacggccaagauu

SEQ ID NO: 865723 - RNA, 19 nt, Artificial Sequence
  Description of Artificial Sequence: Synthetic oligonucleotide
  Antisense strand to SEQ ID NO: 865722
aaucuuggccguauacugu

SEQ ID NO: 865724 - RNA, 19 nt, Artificial Sequence
  Description of Artificial Sequence: Synthetic oligonucleotide
  Sense strand starting at position 2326 of SEQ ID NO: 588447
agcucuggugucugggaaa

SEQ ID NO: 865725 - RNA, 19 nt, Artificial Sequence
  Description of Artificial Sequence: Synthetic oligonucleotide
  Antisense strand to SEQ ID NO: 865724
uuucccagacaccagagcu

SEQ ID NO: 865726 - RNA, 19 nt, Artificial Sequence
  Description of Artificial Sequence: Synthetic oligonucleotide
  Sense strand starting at position 2504 of SEQ ID NO: 588447
gcuucuuaacugcaggaaa

SEQ ID NO: 865727 - RNA, 19 nt, Artificial Sequence
  Description of Artificial Sequence: Synthetic oligonucleotide
  Antisense strand to SEQ ID NO: 865726
uuuccugcaguuaagaagc

SEQ ID NO: 865728 - RNA, 19 nt, Artificial Sequence
  Description of Artificial Sequence: Synthetic oligonucleotide
  Sense strand starting at position 2579 of SEQ ID NO: 588447
ccuuuagaggaauguucua

SEQ ID NO: 865729 - RNA, 19 nt, Artificial Sequence
  Description of Artificial Sequence: Synthetic oligonucleotide
  Antisense strand to SEQ ID NO: 865728
uagaacauuccucuaaagg

SEQ ID NO: 865730 - RNA, 19 nt, Artificial Sequence
  Description of Artificial Sequence: Synthetic oligonucleotide
  Sense strand starting at position 2707 of SEQ ID NO: 588447
gacuuaaguugugucacuu

SEQ ID NO: 865731 - RNA, 19 nt, Artificial Sequence
  Description of Artificial Sequence: Synthetic oligonucleotide
  Antisense strand to SEQ ID NO: 865730
aagugacacaacuuaaguc

SEQ ID NO: 865732 - RNA, 19 nt, Artificial Sequence
  Description of Artificial Sequence: Synthetic oligonucleotide
  Sense strand starting at position 2711 of SEQ ID NO: 588447
uaaguugugucacuuugau

SEQ ID NO: 865733 - RNA, 19 nt, Artificial Sequence
  Description of Artificial Sequence: Synthetic oligonucleotide
  Antisense strand to SEQ ID NO: 865732
aucaaagugacacaacuua

SEQ ID NO: 865734 - RNA, 19 nt, Artificial Sequence
  Description of Artificial Sequence: Synthetic oligonucleotide
  Sense strand starting at position 2717 of SEQ ID NO: 588447
gugucacuuugaucuucua

SEQ ID NO: 865735 - RNA, 19 nt, Artificial Sequence
  Description of Artificial Sequence: Synthetic oligonucleotide
  Antisense strand to SEQ ID NO: 865734
uagaagaucaaagugacac

SEQ ID NO: 865736 - RNA, 19 nt, Artificial Sequence
  Description of Artificial Sequence: Synthetic oligonucleotide
  Sense strand starting at position 2797 of SEQ ID NO: 588447
gcucucuuaguauaguuua

SEQ ID NO: 865737 - RNA, 19 nt, Artificial Sequence
  Description of Artificial Sequence: Synthetic oligonucleotide
  Antisense strand to SEQ ID NO: 865736
uaaacuauacuaagagagc

SEQ ID NO: 865738 - RNA, 19 nt, Artificial Sequence
  Description of Artificial Sequence: Synthetic oligonucleotide
  Sense strand starting at position 2800 of SEQ ID NO: 588447
cucuuaguauaguuuacau

SEQ ID NO: 865739 - RNA, 19 nt, Artificial Sequence
  Description of Artificial Sequence: Synthetic oligonucleotide
  Antisense strand to SEQ ID NO: 865738
auguaaacuauacuaagag

SEQ ID NO: 865740 - RNA, 19 nt, Artificial Sequence
  Description of Artificial Sequence: Synthetic oligonucleotide
  Sense strand starting at position 2828 of SEQ ID NO: 588447
gguggacuguaacuucuau

SEQ ID NO: 865741 - RNA, 19 nt, Artificial Sequence
  Description of Artificial Sequence: Synthetic oligonucleotide
  Antisense strand to SEQ ID NO: 865740
auagaaguuacaguccacc

SEQ ID NO: 865742 - RNA, 19 nt, Artificial Sequence
  Description of Artificial Sequence: Synthetic oligonucleotide
  Sense strand starting at position 2903 of SEQ ID NO: 588447
gcgacucacucagugauuc

SEQ ID NO: 865743 - RNA, 19 nt, Artificial Sequence
  Description of Artificial Sequence: Synthetic oligonucleotide
  Antisense strand to SEQ ID NO: 865742
gaaucacugagugagucgc

SEQ ID NO: 865744 - RNA, 19 nt, Artificial Sequence
  Description of Artificial Sequence: Synthetic oligonucleotide
  Sense strand starting at position 2904 of SEQ ID NO: 588447
cgacucacucagugauucu

SEQ ID NO: 865745 - RNA, 19 nt, Artificial Sequence
  Description of Artificial Sequence: Synthetic oligonucleotide
  Antisense strand to SEQ ID NO: 865744
agaaucacugagugagucg

SEQ ID NO: 865746 - RNA, 19 nt, Artificial Sequence
  Description of Artificial Sequence: Synthetic oligonucleotide
  Sense strand starting at position 2935 of SEQ ID NO: 588447
ggaacagguccauaugucu

SEQ ID NO: 865747 - RNA, 19 nt, Artificial Sequence
  Description of Artificial Sequence: Synthetic oligonucleotide
  Antisense strand to SEQ ID NO: 865746
agacauauggaccuguucc

SEQ ID NO: 865748 - RNA, 19 nt, Artificial Sequence
  Description of Artificial Sequence: Synthetic oligonucleotide
  Sense strand starting at position 2944 of SEQ ID NO: 588447
ccauaugucuaggugcuaa

SEQ ID NO: 865749 - RNA, 19 nt, Artificial Sequence
  Description of Artificial Sequence: Synthetic oligonucleotide
  Antisense strand to SEQ ID NO: 865748
uuagcaccuagacauaugg

SEQ ID NO: 865750 - RNA, 19 nt, Artificial Sequence
  Description of Artificial Sequence: Synthetic oligonucleotide
  Sense strand starting at position 2968 of SEQ ID NO: 588447
cuggcugaaugagcuauau

SEQ ID NO: 865751 - RNA, 19 nt, Artificial Sequence
  Description of Artificial Sequence: Synthetic oligonucleotide
  Antisense strand to SEQ ID NO: 865750
auauagcucauucagccag

SEQ ID NO: 865752 - RNA, 19 nt, Artificial Sequence
  Description of Artificial Sequence: Synthetic oligonucleotide
  Sense strand starting at position 3012 of SEQ ID NO: 588447
uucguuagauucuuuauga

SEQ ID NO: 865753 - RNA, 19 nt, Artificial Sequence
  Description of Artificial Sequence: Synthetic oligonucleotide
  Antisense strand to SEQ ID NO: 865752
ucauaaagaaucuaacgaa

SEQ ID NO: 865754 - RNA, 19 nt, Artificial Sequence
  Description of Artificial Sequence: Synthetic oligonucleotide
  Sense strand starting at position 3013 of SEQ ID NO: 588447
ucguuagauucuuuaugac

SEQ ID NO: 865755 - RNA, 19 nt, Artificial Sequence
  Description of Artificial Sequence: Synthetic oligonucleotide
  Antisense strand to SEQ ID NO: 865754
gucauaaagaaucuaacga

SEQ ID NO: 865756 - RNA, 19 nt, Artificial Sequence
  Description of Artificial Sequence: Synthetic oligonucleotide
  Sense strand starting at position 3142 of SEQ ID NO: 588447
uugauuaaacaaugugcaa

SEQ ID NO: 865757 - RNA, 19 nt, Artificial Sequence
  Description of Artificial Sequence: Synthetic oligonucleotide
  Antisense strand to SEQ ID NO: 865756
uugcacauuguuuaaucaa

SEQ ID NO: 865758 - RNA, 19 nt, Artificial Sequence
  Description of Artificial Sequence: Synthetic oligonucleotide
  Sense strand starting at position 3164 of SEQ ID NO: 588447
gcuacagugguugguugaa

SEQ ID NO: 865759 - RNA, 19 nt, Artificial Sequence
  Description of Artificial Sequence: Synthetic oligonucleotide
  Antisense strand to SEQ ID NO: 865758
uucaaccaaccacuguagc

SEQ ID NO: 865760 - RNA, 19 nt, Artificial Sequence
  Description of Artificial Sequence: Synthetic oligonucleotide
  Sense strand starting at position 3571 of SEQ ID NO: 588447
auagcauucugcuucuaug

SEQ ID NO: 865761 - RNA, 19 nt, Artificial Sequence
  Description of Artificial Sequence: Synthetic oligonucleotide
  Antisense strand to SEQ ID NO: 865760
cauagaagcagaaugcuau

SEQ ID NO: 865762 - RNA, 19 nt, Artificial Sequence
  Description of Artificial Sequence: Synthetic oligonucleotide
  Sense strand starting at position 563 of SEQ ID NO: 588448
uguacaagaguuuggguca

SEQ ID NO: 865763 - RNA, 19 nt, Artificial Sequence
  Description of Artificial Sequence: Synthetic oligonucleotide
  Antisense strand to SEQ ID NO: 865762
ugacccaaacucuuguaca

SEQ ID NO: 865764 - RNA, 19 nt, Artificial Sequence
  Description of Artificial Sequence: Synthetic oligonucleotide
  Sense strand starting at position 566 of SEQ ID NO: 588448
acaagaguuugggucauaa

SEQ ID NO: 865765 - RNA, 19 nt, Artificial Sequence
  Description of Artificial Sequence: Synthetic oligonucleotide
  Antisense strand to SEQ ID NO: 865764
uuaugacccaaacucuugu

SEQ ID NO: 865766 - RNA, 19 nt, Artificial Sequence
  Description of Artificial Sequence: Synthetic oligonucleotide
  Sense strand starting at position 653 of SEQ ID NO: 588448
gcuggaaugcaaugaguaa

SEQ ID NO: 865767 - RNA, 19 nt, Artificial Sequence
  Description of Artificial Sequence: Synthetic oligonucleotide
  Antisense strand to SEQ ID NO: 865766
uuacucauugcauuccagc

SEQ ID NO: 865768 - RNA, 19 nt, Artificial Sequence
  Description of Artificial Sequence: Synthetic oligonucleotide
  Sense strand starting at position 906 of SEQ ID NO: 588448
uggacaauuucccagauau

SEQ ID NO: 865769 - RNA, 19 nt, Artificial Sequence
  Description of Artificial Sequence: Synthetic oligonucleotide
  Antisense strand to SEQ ID NO: 865768
auaucugggaaauugucca

SEQ ID NO: 865770 - RNA, 19 nt, Artificial Sequence
  Description of Artificial Sequence: Synthetic oligonucleotide
  Sense strand starting at position 1002 of SEQ ID NO: 588448
aguaucauucuagguuuau

SEQ ID NO: 865771 - RNA, 19 nt, Artificial Sequence
  Description of Artificial Sequence: Synthetic oligonucleotide
  Antisense strand to SEQ ID NO: 865770
auaaaccuagaaugauacu

SEQ ID NO: 865772 - RNA, 19 nt, Artificial Sequence
  Description of Artificial Sequence: Synthetic oligonucleotide
  Sense strand starting at position 1003 of SEQ ID NO: 588448
guaucauucuagguuuauc

SEQ ID NO: 865773 - RNA, 19 nt, Artificial Sequence
  Description of Artificial Sequence: Synthetic oligonucleotide
  Antisense strand to SEQ ID NO: 865772
gauaaaccuagaaugauac

SEQ ID NO: 865774 - RNA, 19 nt, Artificial Sequence
  Description of Artificial Sequence: Synthetic oligonucleotide
  Sense strand starting at position 1068 of SEQ ID NO: 588448
caggcccuuugauuagaga

SEQ ID NO: 865775 - RNA, 19 nt, Artificial Sequence
  Description of Artificial Sequence: Synthetic oligonucleotide
  Antisense strand to SEQ ID NO: 865774
ucucuaaucaaagggccug

SEQ ID NO: 865776 - RNA, 19 nt, Artificial Sequence
  Description of Artificial Sequence: Synthetic oligonucleotide
  Sense strand starting at position 1091 of SEQ ID NO: 588448
ccuuaaugcuggcuuuaca

SEQ ID NO: 865777 - RNA, 19 nt, Artificial Sequence
  Description of Artificial Sequence: Synthetic oligonucleotide
  Antisense strand to SEQ ID NO: 865776
uguaaagccagcauuaagg

SEQ ID NO: 865778 - RNA, 19 nt, Artificial Sequence
  Description of Artificial Sequence: Synthetic oligonucleotide
  Sense strand starting at position 1101 of SEQ ID NO: 588448
ggcuuuacauucucaguca

SEQ ID NO: 865779 - RNA, 19 nt, Artificial Sequence
  Description of Artificial Sequence: Synthetic oligonucleotide
  Antisense strand to SEQ ID NO: 865778
ugacugagaauguaaagcc

SEQ ID NO: 865780 - RNA, 19 nt, Artificial Sequence
  Description of Artificial Sequence: Synthetic oligonucleotide
  Sense strand starting at position 1138 of SEQ ID NO: 588448
ugaaauuccuucucuagag

SEQ ID NO: 865781 - RNA, 19 nt, Artificial Sequence
  Description of Artificial Sequence: Synthetic oligonucleotide
  Antisense strand to SEQ ID NO: 865780
cucuagagaaggaauuuca

SEQ ID NO: 865782 - RNA, 19 nt, Artificial Sequence
  Description of Artificial Sequence: Synthetic oligonucleotide
  Sense strand starting at position 2165 of SEQ ID NO: 588448
ugauuucacugagcguuga

SEQ ID NO: 865783 - RNA, 19 nt, Artificial Sequence
  Description of Artificial Sequence: Synthetic oligonucleotide
  Antisense strand to SEQ ID NO: 865782
ucaacgcucagugaaauca

SEQ ID NO: 865784 - RNA, 19 nt, Artificial Sequence
  Description of Artificial Sequence: Synthetic oligonucleotide
  Sense strand starting at position 2175 of SEQ ID NO: 588448
gagcguugacucggaggaa

SEQ ID NO: 865785 - RNA, 19 nt, Artificial Sequence
  Description of Artificial Sequence: Synthetic oligonucleotide
  Antisense strand to SEQ ID NO: 865784
uuccuccgagucaacgcuc

SEQ ID NO: 865786 - RNA, 19 nt, Artificial Sequence
  Description of Artificial Sequence: Synthetic oligonucleotide
  Sense strand starting at position 2261 of SEQ ID NO: 588448
aagcgaaaugguugcaaua

SEQ ID NO: 865787 - RNA, 19 nt, Artificial Sequence
  Description of Artificial Sequence: Synthetic oligonucleotide
  Antisense strand to SEQ ID NO: 865786
uauugcaaccauuucgcuu

SEQ ID NO: 865788 - RNA, 19 nt, Artificial Sequence
  Description of Artificial Sequence: Synthetic oligonucleotide
  Sense strand starting at position 2271 of SEQ ID NO: 588448
guugcaauaauacgauuga

SEQ ID NO: 865789 - RNA, 19 nt, Artificial Sequence
  Description of Artificial Sequence: Synthetic oligonucleotide
  Antisense strand to SEQ ID NO: 865788
ucaaucguauuauugcaac

SEQ ID NO: 865790 - RNA, 19 nt, Artificial Sequence
  Description of Artificial Sequence: Synthetic oligonucleotide
  Sense strand starting at position 2282 of SEQ ID NO: 588448
acgauugauugagcccuua

SEQ ID NO: 865791 - RNA, 19 nt, Artificial Sequence
  Description of Artificial Sequence: Synthetic oligonucleotide
  Antisense strand to SEQ ID NO: 865790
uaagggcucaaucaaucgu

SEQ ID NO: 865792 - RNA, 19 nt, Artificial Sequence
  Description of Artificial Sequence: Synthetic oligonucleotide
  Sense strand starting at position 2340 of SEQ ID NO: 588448
ggaacaauuugaugagcua

SEQ ID NO: 865793 - RNA, 19 nt, Artificial Sequence
  Description of Artificial Sequence: Synthetic oligonucleotide
  Antisense strand to SEQ ID NO: 865792
uagcucaucaaauuguucc

SEQ ID NO: 865794 - RNA, 19 nt, Artificial Sequence
  Description of Artificial Sequence: Synthetic oligonucleotide
  Sense strand starting at position 2356 of SEQ ID NO: 588448
cuaggagguacguauuauc

SEQ ID NO: 865795 - RNA, 19 nt, Artificial Sequence
  Description of Artificial Sequence: Synthetic oligonucleotide
  Antisense strand to SEQ ID NO: 865794
gauaauacguaccuccuag

SEQ ID NO: 865796 - RNA, 19 nt, Artificial Sequence
  Description of Artificial Sequence: Synthetic oligonucleotide
  Sense strand starting at position 2361 of SEQ ID NO: 588448
agguacguauuaucauuau

SEQ ID NO: 865797 - RNA, 19 nt, Artificial Sequence
  Description of Artificial Sequence: Synthetic oligonucleotide
  Antisense strand to SEQ ID NO: 865796
auaaugauaauacguaccu

SEQ ID NO: 865798 - RNA, 19 nt, Artificial Sequence
  Description of Artificial Sequence: Synthetic oligonucleotide
  Sense strand starting at position 2365 of SEQ ID NO: 588448
acguauuaucauuauuccu

SEQ ID NO: 865799 - RNA, 19 nt, Artificial Sequence
  Description of Artificial Sequence: Synthetic oligonucleotide
  Antisense strand to SEQ ID NO: 865798
aggaauaaugauaauacgu

SEQ ID NO: 865800 - RNA, 19 nt, Artificial Sequence
  Description of Artificial Sequence: Synthetic oligonucleotide
  Sense strand starting at position 2527 of SEQ ID NO: 588448
ucucuuaauucuguaugga

SEQ ID NO: 865801 - RNA, 19 nt, Artificial Sequence
  Description of Artificial Sequence: Synthetic oligonucleotide
  Antisense strand to SEQ ID NO: 865800
uccauacagaauuaagaga

SEQ ID NO: 865802 - RNA, 19 nt, Artificial Sequence
  Description of Artificial Sequence: Synthetic oligonucleotide
  Sense strand starting at position 2528 of SEQ ID NO: 588448
cucuuaauucuguauggaa

SEQ ID NO: 865803 - RNA, 19 nt, Artificial Sequence
  Description of Artificial Sequence: Synthetic oligonucleotide
  Antisense strand to SEQ ID NO: 865802
uuccauacagaauuaagag

SEQ ID NO: 865804 - RNA, 19 nt, Artificial Sequence
  Description of Artificial Sequence: Synthetic oligonucleotide
  Sense strand starting at position 2530 of SEQ ID NO: 588448
cuuaauucuguauggaaac

SEQ ID NO: 865805 - RNA, 19 nt, Artificial Sequence
  Description of Artificial Sequence: Synthetic oligonucleotide
  Antisense strand to SEQ ID NO: 865804
guuuccauacagaauuaag

SEQ ID NO: 865806 - RNA, 19 nt, Artificial Sequence
  Description of Artificial Sequence: Synthetic oligonucleotide
  Sense strand starting at position 2541 of SEQ ID NO: 588448
auggaaacuuucuuugcuu

SEQ ID NO: 865807 - RNA, 19 nt, Artificial Sequence
  Description of Artificial Sequence: Synthetic oligonucleotide
  Antisense strand to SEQ ID NO: 865806
aagcaaagaaaguuuccau

SEQ ID NO: 865808 - RNA, 19 nt, Artificial Sequence
  Description of Artificial Sequence: Synthetic oligonucleotide
  Sense strand starting at position 2543 of SEQ ID NO: 588448
ggaaacuuucuuugcuucu

SEQ ID NO: 865809 - RNA, 19 nt, Artificial Sequence
  Description of Artificial Sequence: Synthetic oligonucleotide
  Antisense strand to SEQ ID NO: 865808
agaagcaaagaaaguuucc

SEQ ID NO: 865810 - RNA, 19 nt, Artificial Sequence
  Description of Artificial Sequence: Synthetic oligonucleotide
  Sense strand starting at position 2982 of SEQ ID NO: 588448
guggugauucgcgccugaa

SEQ ID NO: 865811 - RNA, 19 nt, Artificial Sequence
  Description of Artificial Sequence: Synthetic oligonucleotide
  Antisense strand to SEQ ID NO: 865810
uucaggcgcgaaucaccac

SEQ ID NO: 865812 - RNA, 19 nt, Artificial Sequence
  Description of Artificial Sequence: Synthetic oligonucleotide
  Sense strand starting at position 2983 of SEQ ID NO: 588448
uggugauucgcgccugaau

SEQ ID NO: 865813 - RNA, 19 nt, Artificial Sequence
  Description of Artificial Sequence: Synthetic oligonucleotide
  Antisense strand to SEQ ID NO: 865812
auucaggcgcgaaucacca

SEQ ID NO: 865814 - RNA, 19 nt, Artificial Sequence
  Description of Artificial Sequence: Synthetic oligonucleotide
  Sense strand starting at position 2984 of SEQ ID NO: 588448
ggugauucgcgccugaauc

SEQ ID NO: 865815 - RNA, 19 nt, Artificial Sequence
  Description of Artificial Sequence: Synthetic oligonucleotide
  Antisense strand to SEQ ID NO: 865814
gauucaggcgcgaaucacc

SEQ ID NO: 865816 - RNA, 19 nt, Artificial Sequence
  Description of Artificial Sequence: Synthetic oligonucleotide
  Sense strand starting at position 3027 of SEQ ID NO: 588448
ggcggaucacuugaaaguc

SEQ ID NO: 865817 - RNA, 19 nt, Artificial Sequence
  Description of Artificial Sequence: Synthetic oligonucleotide
  Antisense strand to SEQ ID NO: 865816
gacuuucaagugauccgcc

SEQ ID NO: 865818 - RNA, 19 nt, Artificial Sequence
  Description of Artificial Sequence: Synthetic oligonucleotide
  Sense strand starting at position 3035 of SEQ ID NO: 588448
acuugaaagucaguuguuc

SEQ ID NO: 865819 - RNA, 19 nt, Artificial Sequence
  Description of Artificial Sequence: Synthetic oligonucleotide
  Antisense strand to SEQ ID NO: 865818
gaacaacugacuuucaagu

SEQ ID NO: 865820 - RNA, 19 nt, Artificial Sequence
  Description of Artificial Sequence: Synthetic oligonucleotide
  Sense strand starting at position 3039 of SEQ ID NO: 588448
gaaagucaguuguucggga

SEQ ID NO: 865821 - RNA, 19 nt, Artificial Sequence
  Description of Artificial Sequence: Synthetic oligonucleotide
  Antisense strand to SEQ ID NO: 865820
ucccgaacaacugacuuuc

SEQ ID NO: 865822 - RNA, 19 nt, Artificial Sequence
  Description of Artificial Sequence: Synthetic oligonucleotide
  Sense strand starting at position 3344 of SEQ ID NO: 588448
uugucuuaguuucuggaca

SEQ ID NO: 865823 - RNA, 19 nt, Artificial Sequence
  Description of Artificial Sequence: Synthetic oligonucleotide
  Antisense strand to SEQ ID NO: 865822
uguccagaaacuaagacaa

SEQ ID NO: 865824 - RNA, 19 nt, Artificial Sequence
  Description of Artificial Sequence: Synthetic oligonucleotide
  Sense strand starting at position 3349 of SEQ ID NO: 588448
uuaguuucuggacaacagu

SEQ ID NO: 865825 - RNA, 19 nt, Artificial Sequence
  Description of Artificial Sequence: Synthetic oligonucleotide
  Antisense strand to SEQ ID NO: 865824
acuguuguccagaaacuaa

SEQ ID NO: 865826 - RNA, 19 nt, Artificial Sequence
  Description of Artificial Sequence: Synthetic oligonucleotide
  Sense strand starting at position 3405 of SEQ ID NO: 588448
gcuucucuauacuugggua

SEQ ID NO: 865827 - RNA, 19 nt, Artificial Sequence
  Description of Artificial Sequence: Synthetic oligonucleotide
  Antisense strand to SEQ ID NO: 865826
uacccaaguauagagaagc

SEQ ID NO: 865828 - RNA, 19 nt, Artificial Sequence
  Description of Artificial Sequence: Synthetic oligonucleotide
  Sense strand starting at position 3407 of SEQ ID NO: 588448
uucucuauacuuggguauu

SEQ ID NO: 865829 - RNA, 19 nt, Artificial Sequence
  Description of Artificial Sequence: Synthetic oligonucleotide
  Antisense strand to SEQ ID NO: 865828
aauacccaaguauagagaa

SEQ ID NO: 865830 - RNA, 19 nt, Artificial Sequence
  Description of Artificial Sequence: Synthetic oligonucleotide
  Sense strand starting at position 3409 of SEQ ID NO: 588448
cucuauacuuggguauuau

SEQ ID NO: 865831 - RNA, 19 nt, Artificial Sequence
  Description of Artificial Sequence: Synthetic oligonucleotide
  Antisense strand to SEQ ID NO: 865830
auaauacccaaguauagag

SEQ ID NO: 865832 - RNA, 19 nt, Artificial Sequence
  Description of Artificial Sequence: Synthetic oligonucleotide
  Sense strand starting at position 3410 of SEQ ID NO: 588448
ucuauacuuggguauuauc

SEQ ID NO: 865833 - RNA, 19 nt, Artificial Sequence
  Description of Artificial Sequence: Synthetic oligonucleotide
  Antisense strand to SEQ ID NO: 865832
gauaauacccaaguauaga

SEQ ID NO: 865834 - RNA, 19 nt, Artificial Sequence
  Description of Artificial Sequence: Synthetic oligonucleotide
  Sense strand starting at position 3423 of SEQ ID NO: 588448
auuaucaugugaccuacau

SEQ ID NO: 865835 - RNA, 19 nt, Artificial Sequence
  Description of Artificial Sequence: Synthetic oligonucleotide
  Antisense strand to SEQ ID NO: 865834
auguaggucacaugauaau

SEQ ID NO: 865836 - RNA, 19 nt, Artificial Sequence
  Description of Artificial Sequence: Synthetic oligonucleotide
  Sense strand starting at position 3507 of SEQ ID NO: 588448
agcuguauugugccaguca

SEQ ID NO: 865837 - RNA, 19 nt, Artificial Sequence
  Description of Artificial Sequence: Synthetic oligonucleotide
  Antisense strand to SEQ ID NO: 865836
ugacuggcacaauacagcu

SEQ ID NO: 865838 - RNA, 19 nt, Artificial Sequence
  Description of Artificial Sequence: Synthetic oligonucleotide
  Sense strand starting at position 3571 of SEQ ID NO: 588448
aaagacauuguugagcauu

SEQ ID NO: 865839 - RNA, 19 nt, Artificial Sequence
  Description of Artificial Sequence: Synthetic oligonucleotide
  Antisense strand to SEQ ID NO: 865838
aaugcucaacaaugucuuu

SEQ ID NO: 865840 - RNA, 19 nt, Artificial Sequence
  Description of Artificial Sequence: Synthetic oligonucleotide
  Sense strand starting at position 3846 of SEQ ID NO: 588448
uuacucucuuagucaagua

SEQ ID NO: 865841 - RNA, 19 nt, Artificial Sequence
  Description of Artificial Sequence: Synthetic oligonucleotide
  Antisense strand to SEQ ID NO: 865840
uacuugacuaagagaguaa

SEQ ID NO: 865842 - RNA, 19 nt, Artificial Sequence
  Description of Artificial Sequence: Synthetic oligonucleotide
  Sense strand starting at position 1617 of SEQ ID NO: 588449
acaacugaucuguacugua

SEQ ID NO: 865843 - RNA, 19 nt, Artificial Sequence
  Description of Artificial Sequence: Synthetic oligonucleotide
  Antisense strand to SEQ ID NO: 865842
uacaguacagaucaguugu

SEQ ID NO: 865844 - RNA, 19 nt, Artificial Sequence
  Description of Artificial Sequence: Synthetic oligonucleotide
  Sense strand starting at position 1622 of SEQ ID NO: 588449
ugaucuguacuguauagag

SEQ ID NO: 865845 - RNA, 19 nt, Artificial Sequence
  Description of Artificial Sequence: Synthetic oligonucleotide
  Antisense strand to SEQ ID NO: 865844
cucuauacaguacagauca

SEQ ID NO: 865846 - RNA, 19 nt, Artificial Sequence
  Description of Artificial Sequence: Synthetic oligonucleotide
  Sense strand starting at position 1890 of SEQ ID NO: 588449
ucagaauguuaccuguaau

SEQ ID NO: 865847 - RNA, 19 nt, Artificial Sequence
  Description of Artificial Sequence: Synthetic oligonucleotide
  Antisense strand to SEQ ID NO: 865846
auuacagguaacauucuga

SEQ ID NO: 865848 - RNA, 19 nt, Artificial Sequence
  Description of Artificial Sequence: Synthetic oligonucleotide
  Sense strand starting at position 1986 of SEQ ID NO: 588449
ccgcguacugcagaacuaa

SEQ ID NO: 865849 - RNA, 19 nt, Artificial Sequence
  Description of Artificial Sequence: Synthetic oligonucleotide
  Antisense strand to SEQ ID NO: 865848
uuaguucugcaguacgcgg

SEQ ID NO: 865850 - RNA, 19 nt, Artificial Sequence
  Description of Artificial Sequence: Synthetic oligonucleotide
  Sense strand starting at position 2114 of SEQ ID NO: 588449
cuggcaucuuuagcaacua

SEQ ID NO: 865851 - RNA, 19 nt, Artificial Sequence
  Description of Artificial Sequence: Synthetic oligonucleotide
  Antisense strand to SEQ ID NO: 865850
uaguugcuaaagaugccag

SEQ ID NO: 865852 - RNA, 19 nt, Artificial Sequence
  Description of Artificial Sequence: Synthetic oligonucleotide
  Sense strand starting at position 2135 of SEQ ID NO: 588449
uggaauucaucgucagaga

SEQ ID NO: 865853 - RNA, 19 nt, Artificial Sequence
  Description of Artificial Sequence: Synthetic oligonucleotide
  Antisense strand to SEQ ID NO: 865852
ucucugacgaugaauucca

SEQ ID NO: 865854 - RNA, 19 nt, Artificial Sequence
  Description of Artificial Sequence: Synthetic oligonucleotide
  Sense strand starting at position 2181 of SEQ ID NO: 588449
gugggaauggcuugcuaug

SEQ ID NO: 865855 - RNA, 19 nt, Artificial Sequence
  Description of Artificial Sequence: Synthetic oligonucleotide
  Antisense strand to SEQ ID NO: 865854
cauagcaagccauucccac

SEQ ID NO: 865856 - RNA, 19 nt, Artificial Sequence
  Description of Artificial Sequence: Synthetic oligonucleotide
  Sense strand starting at position 2251 of SEQ ID NO: 588449
uuuaguagauaagcagaau

SEQ ID NO: 865857 - RNA, 19 nt, Artificial Sequence
  Description of Artificial Sequence: Synthetic oligonucleotide
  Antisense strand to SEQ ID NO: 865856
auucugcuuaucuacuaaa

SEQ ID NO: 865858 - RNA, 19 nt, Artificial Sequence
  Description of Artificial Sequence: Synthetic oligonucleotide
  Sense strand starting at position 2262 of SEQ ID NO: 588449
agcagaauucagggugcua

SEQ ID NO: 865859 - RNA, 19 nt, Artificial Sequence
  Description of Artificial Sequence: Synthetic oligonucleotide
  Antisense strand to SEQ ID NO: 865858
uagcacccugaauucugcu

SEQ ID NO: 865860 - RNA, 19 nt, Artificial Sequence
  Description of Artificial Sequence: Synthetic oligonucleotide
  Sense strand starting at position 2302 of SEQ ID NO: 588449
agaacagggugucaggaau

SEQ ID NO: 865861 - RNA, 19 nt, Artificial Sequence
  Description of Artificial Sequence: Synthetic oligonucleotide
  Antisense strand to SEQ ID NO: 865860
auuccugacacccuguucu

SEQ ID NO: 865862 - RNA, 19 nt, Artificial Sequence
  Description of Artificial Sequence: Synthetic oligonucleotide
  Sense strand starting at position 2409 of SEQ ID NO: 588449
auguuaacuuccuuuaagu

SEQ ID NO: 865863 - RNA, 19 nt, Artificial Sequence
  Description of Artificial Sequence: Synthetic oligonucleotide
  Antisense strand to SEQ ID NO: 865862
acuuaaaggaaguuaacau

SEQ ID NO: 865864 - RNA, 19 nt, Artificial Sequence
  Description of Artificial Sequence: Synthetic oligonucleotide
  Sense strand starting at position 2411 of SEQ ID NO: 588449
guuaacuuccuuuaagugu

SEQ ID NO: 865865 - RNA, 19 nt, Artificial Sequence
  Description of Artificial Sequence: Synthetic oligonucleotide
  Antisense strand to SEQ ID NO: 865864
acacuuaaaggaaguuaac

SEQ ID NO: 865866 - RNA, 19 nt, Artificial Sequence
  Description of Artificial Sequence: Synthetic oligonucleotide
  Sense strand starting at position 2433 of SEQ ID NO: 588449
gcguauggcaacugagaau

SEQ ID NO: 865867 - RNA, 19 nt, Artificial Sequence
  Description of Artificial Sequence: Synthetic oligonucleotide
  Antisense strand to SEQ ID NO: 865866
auucucaguugccauacgc

SEQ ID NO: 865868 - RNA, 19 nt, Artificial Sequence
  Description of Artificial Sequence: Synthetic oligonucleotide
  Sense strand starting at position 2630 of SEQ ID NO: 588449
uugacacuacgcuauaauu

SEQ ID NO: 865869 - RNA, 19 nt, Artificial Sequence
  Description of Artificial Sequence: Synthetic oligonucleotide
  Antisense strand to SEQ ID NO: 865868
aauuauagcguagugucaa

SEQ ID NO: 865870 - RNA, 19 nt, Artificial Sequence
  Description of Artificial Sequence: Synthetic oligonucleotide
  Sense strand starting at position 2665 of SEQ ID NO: 588449
gcuucuaauuugcugagca

SEQ ID NO: 865871 - RNA, 19 nt, Artificial Sequence
  Description of Artificial Sequence: Synthetic oligonucleotide
  Antisense strand to SEQ ID NO: 865870
ugcucagcaaauuagaagc

SEQ ID NO: 865872 - RNA, 19 nt, Artificial Sequence
  Description of Artificial Sequence: Synthetic oligonucleotide
  Sense strand starting at position 2669 of SEQ ID NO: 588449
cuaauuugcugagcaguaa

SEQ ID NO: 865873 - RNA, 19 nt, Artificial Sequence
  Description of Artificial Sequence: Synthetic oligonucleotide
  Antisense strand to SEQ ID NO: 865872
uuacugcucagcaaauuag

SEQ ID NO: 865874 - RNA, 19 nt, Artificial Sequence
  Description of Artificial Sequence: Synthetic oligonucleotide
  Sense strand starting at position 2673 of SEQ ID NO: 588449
uuugcugagcaguaaacaa

SEQ ID NO: 865875 - RNA, 19 nt, Artificial Sequence
  Description of Artificial Sequence: Synthetic oligonucleotide
  Antisense strand to SEQ ID NO: 865874
uuguuuacugcucagcaaa

SEQ ID NO: 865876 - RNA, 19 nt, Artificial Sequence
  Description of Artificial Sequence: Synthetic oligonucleotide
  Sense strand starting at position 2730 of SEQ ID NO: 588449
ucuacucaggcauggauau

SEQ ID NO: 865877 - RNA, 19 nt, Artificial Sequence
  Description of Artificial Sequence: Synthetic oligonucleotide
  Antisense strand to SEQ ID NO: 865876
auauccaugccugaguaga

SEQ ID NO: 865878 - RNA, 19 nt, Artificial Sequence
  Description of Artificial Sequence: Synthetic oligonucleotide
  Sense strand starting at position 2731 of SEQ ID NO: 588449
cuacucaggcauggauauu

SEQ ID NO: 865879 - RNA, 19 nt, Artificial Sequence
  Description of Artificial Sequence: Synthetic oligonucleotide
  Antisense strand to SEQ ID NO: 865878
aauauccaugccugaguag

SEQ ID NO: 865880 - RNA, 19 nt, Artificial Sequence
  Description of Artificial Sequence: Synthetic oligonucleotide
  Sense strand starting at position 3009 of SEQ ID NO: 588449
gagguaggcaacugaguaa

SEQ ID NO: 865881 - RNA, 19 nt, Artificial Sequence
  Description of Artificial Sequence: Synthetic oligonucleotide
  Antisense strand to SEQ ID NO: 865880
uuacucaguugccuaccuc

SEQ ID NO: 865882 - RNA, 19 nt, Artificial Sequence
  Description of Artificial Sequence: Synthetic oligonucleotide
  Sense strand starting at position 3098 of SEQ ID NO: 588449
ccauaaucagaaugcgaug

SEQ ID NO: 865883 - RNA, 19 nt, Artificial Sequence
  Description of Artificial Sequence: Synthetic oligonucleotide
  Antisense strand to SEQ ID NO: 865882
caucgcauucugauuaugg

SEQ ID NO: 865884 - RNA, 19 nt, Artificial Sequence
  Description of Artificial Sequence: Synthetic oligonucleotide
  Sense strand starting at position 3103 of SEQ ID NO: 588449
aucagaaugcgaugaauua

SEQ ID NO: 865885 - RNA, 19 nt, Artificial Sequence
  Description of Artificial Sequence: Synthetic oligonucleotide
  Antisense strand to SEQ ID NO: 865884
uaauucaucgcauucugau

SEQ ID NO: 865886 - RNA, 19 nt, Artificial Sequence
  Description of Artificial Sequence: Synthetic oligonucleotide
  Sense strand starting at position 3104 of SEQ ID NO: 588449
ucagaaugcgaugaauuac

SEQ ID NO: 865887 - RNA, 19 nt, Artificial Sequence
  Description of Artificial Sequence: Synthetic oligonucleotide
  Antisense strand to SEQ ID NO: 865886
guaauucaucgcauucuga

SEQ ID NO: 865888 - RNA, 19 nt, Artificial Sequence
  Description of Artificial Sequence: Synthetic oligonucleotide
  Sense strand starting at position 3199 of SEQ ID NO: 588449
aaccguaauccugauagua

SEQ ID NO: 865889 - RNA, 19 nt, Artificial Sequence
  Description of Artificial Sequence: Synthetic oligonucleotide
  Antisense strand to SEQ ID NO: 865888
uacuaucaggauuacgguu

SEQ ID NO: 865890 - RNA, 19 nt, Artificial Sequence
  Description of Artificial Sequence: Synthetic oligonucleotide
  Sense strand starting at position 3207 of SEQ ID NO: 588449
uccugauaguaauauuuga

SEQ ID NO: 865891 - RNA, 19 nt, Artificial Sequence
  Description of Artificial Sequence: Synthetic oligonucleotide
  Antisense strand to SEQ ID NO: 865890
ucaaauauuacuaucagga

SEQ ID NO: 865892 - RNA, 19 nt, Artificial Sequence
  Description of Artificial Sequence: Synthetic oligonucleotide
  Sense strand starting at position 3212 of SEQ ID NO: 588449
auaguaauauuugacaggu

SEQ ID NO: 865893 - RNA, 19 nt, Artificial Sequence
  Description of Artificial Sequence: Synthetic oligonucleotide
  Antisense strand to SEQ ID NO: 865892
accugucaaauauuacuau

SEQ ID NO: 865894 - RNA, 19 nt, Artificial Sequence
  Description of Artificial Sequence: Synthetic oligonucleotide
  Sense strand starting at position 3214 of SEQ ID NO: 588449
aguaauauuugacaggucu

SEQ ID NO: 865895 - RNA, 19 nt, Artificial Sequence
  Description of Artificial Sequence: Synthetic oligonucleotide
  Antisense strand to SEQ ID NO: 865894
agaccugucaaauauuacu

SEQ ID NO: 865896 - RNA, 19 nt, Artificial Sequence
  Description of Artificial Sequence: Synthetic oligonucleotide
  Sense strand starting at position 3225 of SEQ ID NO: 588449
acaggucuuauugggaaac

SEQ ID NO: 865897 - RNA, 19 nt, Artificial Sequence
  Description of Artificial Sequence: Synthetic oligonucleotide
  Antisense strand to SEQ ID NO: 865896
guuucccaauaagaccugu

SEQ ID NO: 865898 - RNA, 19 nt, Artificial Sequence
  Description of Artificial Sequence: Synthetic oligonucleotide
  Sense strand starting at position 3227 of SEQ ID NO: 588449
aggucuuauugggaaacag

SEQ ID NO: 865899 - RNA, 19 nt, Artificial Sequence
  Description of Artificial Sequence: Synthetic oligonucleotide
  Antisense strand to SEQ ID NO: 865898
cuguuucccaauaagaccu

SEQ ID NO: 865900 - RNA, 19 nt, Artificial Sequence
  Description of Artificial Sequence: Synthetic oligonucleotide
  Sense strand starting at position 3250 of SEQ ID NO: 588449
aaguguguggcacaguaaa

SEQ ID NO: 865901 - RNA, 19 nt, Artificial Sequence
  Description of Artificial Sequence: Synthetic oligonucleotide
  Antisense strand to SEQ ID NO: 865900
uuuacugugccacacacuu

SEQ ID NO: 865902 - RNA, 19 nt, Artificial Sequence
  Description of Artificial Sequence: Synthetic oligonucleotide
  Sense strand starting at position 3522 of SEQ ID NO: 588449
uguugaaaugcuuaaggcu

SEQ ID NO: 865903 - RNA, 19 nt, Artificial Sequence
  Description of Artificial Sequence: Synthetic oligonucleotide
  Antisense strand to SEQ ID NO: 865902
agccuuaagcauuucaaca

SEQ ID NO: 865904 - RNA, 19 nt, Artificial Sequence
  Description of Artificial Sequence: Synthetic oligonucleotide
  Sense strand starting at position 3584 of SEQ ID NO: 588449
acaguucuaggucauacaa

SEQ ID NO: 865905 - RNA, 19 nt, Artificial Sequence
  Description of Artificial Sequence: Synthetic oligonucleotide
  Antisense strand to SEQ ID NO: 865904
uuguaugaccuagaacugu

SEQ ID NO: 865906 - RNA, 19 nt, Artificial Sequence
  Description of Artificial Sequence: Synthetic oligonucleotide
  Sense strand starting at position 3643 of SEQ ID NO: 588449
cauugaggcuaugcauaua

SEQ ID NO: 865907 - RNA, 19 nt, Artificial Sequence
  Description of Artificial Sequence: Synthetic oligonucleotide
  Antisense strand to SEQ ID NO: 865906
uauaugcauagccucaaug

SEQ ID NO: 865908 - RNA, 19 nt, Artificial Sequence
  Description of Artificial Sequence: Synthetic oligonucleotide
  Sense strand starting at position 3646 of SEQ ID NO: 588449
ugaggcuaugcauauacaa

SEQ ID NO: 865909 - RNA, 19 nt, Artificial Sequence
  Description of Artificial Sequence: Synthetic oligonucleotide
  Antisense strand to SEQ ID NO: 865908
uuguauaugcauagccuca

SEQ ID NO: 865910 - RNA, 19 nt, Artificial Sequence
  Description of Artificial Sequence: Synthetic oligonucleotide
  Sense strand starting at position 3690 of SEQ ID NO: 588449
gaaugaugacauggcguca

SEQ ID NO: 865911 - RNA, 19 nt, Artificial Sequence
  Description of Artificial Sequence: Synthetic oligonucleotide
  Antisense strand to SEQ ID NO: 865910
ugacgccaugucaucauuc

SEQ ID NO: 865912 - RNA, 19 nt, Artificial Sequence
  Description of Artificial Sequence: Synthetic oligonucleotide
  Sense strand starting at position 3695 of SEQ ID NO: 588449
augacauggcgucaauuau

SEQ ID NO: 865913 - RNA, 19 nt, Artificial Sequence
  Description of Artificial Sequence: Synthetic oligonucleotide
  Antisense strand to SEQ ID NO: 865912
auaauugacgccaugucau

SEQ ID NO: 865914 - RNA, 19 nt, Artificial Sequence
  Description of Artificial Sequence: Synthetic oligonucleotide
  Sense strand starting at position 3784 of SEQ ID NO: 588449
cuacaauuugccugcuagu

SEQ ID NO: 865915 - RNA, 19 nt, Artificial Sequence
  Description of Artificial Sequence: Synthetic oligonucleotide
  Antisense strand to SEQ ID NO: 865914
acuagcaggcaaauuguag

SEQ ID NO: 865916 - RNA, 19 nt, Artificial Sequence
  Description of Artificial Sequence: Synthetic oligonucleotide
  Sense strand starting at position 3826 of SEQ ID NO: 588449
gaagauguccuguagaugu

SEQ ID NO: 865917 - RNA, 19 nt, Artificial Sequence
  Description of Artificial Sequence: Synthetic oligonucleotide
  Antisense strand to SEQ ID NO: 865916
acaucuacaggacaucuuc

SEQ ID NO: 865918 - RNA, 19 nt, Artificial Sequence
  Description of Artificial Sequence: Synthetic oligonucleotide
  Sense strand starting at position 3837 of SEQ ID NO: 588449
guagauguccuguagagau

SEQ ID NO: 865919 - RNA, 19 nt, Artificial Sequence
  Description of Artificial Sequence: Synthetic oligonucleotide
  Antisense strand to SEQ ID NO: 865918
aucucuacaggacaucuac

SEQ ID NO: 865920 - RNA, 19 nt, Artificial Sequence
  Description of Artificial Sequence: Synthetic oligonucleotide
  Sense strand starting at position 3930 of SEQ ID NO: 588449
caggcacuccgguaugaaa

SEQ ID NO: 865921 - RNA, 19 nt, Artificial Sequence
  Description of Artificial Sequence: Synthetic oligonucleotide
  Antisense strand to SEQ ID NO: 865920
uuucauaccggagugccug

SEQ ID NO: 865922 - RNA, 19 nt, Artificial Sequence
  Description of Artificial Sequence: Synthetic oligonucleotide
  Sense strand starting at position 381 of SEQ ID NO: 588450
cuagcuguagccuggagaa

SEQ ID NO: 865923 - RNA, 19 nt, Artificial Sequence
  Description of Artificial Sequence: Synthetic oligonucleotide
  Antisense strand to SEQ ID NO: 865922
uucuccaggcuacagcuag

SEQ ID NO: 865924 - RNA, 19 nt, Artificial Sequence
  Description of Artificial Sequence: Synthetic oligonucleotide
  Sense strand starting at position 737 of SEQ ID NO: 588450
ggcugugucugggaccaaa

SEQ ID NO: 865925 - RNA, 19 nt, Artificial Sequence
  Description of Artificial Sequence: Synthetic oligonucleotide
  Antisense strand to SEQ ID NO: 865924
uuuggucccagacacagcc

SEQ ID NO: 865926 - RNA, 19 nt, Artificial Sequence
  Description of Artificial Sequence: Synthetic oligonucleotide
  Sense strand starting at position 1209 of SEQ ID NO: 588450
ugggaucacccaggaaugu

SEQ ID NO: 865927 - RNA, 19 nt, Artificial Sequence
  Description of Artificial Sequence: Synthetic oligonucleotide
  Antisense strand to SEQ ID NO: 865926
acauuccugggugauccca

SEQ ID NO: 865928 - RNA, 19 nt, Artificial Sequence
  Description of Artificial Sequence: Synthetic oligonucleotide
  Sense strand starting at position 1220 of SEQ ID NO: 588450
aggaaugugcccggagagu

SEQ ID NO: 865929 - RNA, 19 nt, Artificial Sequence
  Description of Artificial Sequence: Synthetic oligonucleotide
  Antisense strand to SEQ ID NO: 865928
acucuccgggcacauuccu

SEQ ID NO: 865930 - RNA, 19 nt, Artificial Sequence
  Description of Artificial Sequence: Synthetic oligonucleotide
  Sense strand starting at position 1221 of SEQ ID NO: 588450
ggaaugugcccggagagua

SEQ ID NO: 865931 - RNA, 19 nt, Artificial Sequence
  Description of Artificial Sequence: Synthetic oligonucleotide
  Antisense strand to SEQ ID NO: 865930
uacucuccgggcacauucc

SEQ ID NO: 865932 - RNA, 19 nt, Artificial Sequence
  Description of Artificial Sequence: Synthetic oligonucleotide
  Sense strand starting at position 1352 of SEQ ID NO: 588450
aggucucuuuggccaugau

SEQ ID NO: 865933 - RNA, 19 nt, Artificial Sequence
  Description of Artificial Sequence: Synthetic oligonucleotide
  Antisense strand to SEQ ID NO: 865932
aucauggccaaagagaccu

SEQ ID NO: 865934 - RNA, 19 nt, Artificial Sequence
  Description of Artificial Sequence: Synthetic oligonucleotide
  Sense strand starting at position 1613 of SEQ ID NO: 588450
gcgagagcugccuuuguuc

SEQ ID NO: 865935 - RNA, 19 nt, Artificial Sequence
  Description of Artificial Sequence: Synthetic oligonucleotide
  Antisense strand to SEQ ID NO: 865934
gaacaaaggcagcucucgc

SEQ ID NO: 865936 - RNA, 19 nt, Artificial Sequence
  Description of Artificial Sequence: Synthetic oligonucleotide
  Sense strand starting at position 1703 of SEQ ID NO: 588450
gcccguccuaccuggagua

SEQ ID NO: 865937 - RNA, 19 nt, Artificial Sequence
  Description of Artificial Sequence: Synthetic oligonucleotide
  Antisense strand to SEQ ID NO: 865936
uacuccagguaggacgggc

SEQ ID NO: 865938 - RNA, 19 nt, Artificial Sequence
  Description of Artificial Sequence: Synthetic oligonucleotide
  Sense strand starting at position 2457 of SEQ ID NO: 588450
gcugucugccugcuuuaga

SEQ ID NO: 865939 - RNA, 19 nt, Artificial Sequence
  Description of Artificial Sequence: Synthetic oligonucleotide
  Antisense strand to SEQ ID NO: 865938
ucuaaagcaggcagacagc

SEQ ID NO: 865940 - RNA, 19 nt, Artificial Sequence
  Description of Artificial Sequence: Synthetic oligonucleotide
  Sense strand starting at position 2460 of SEQ ID NO: 588450
gucugccugcuuuagagaa

SEQ ID NO: 865941 - RNA, 19 nt, Artificial Sequence
  Description of Artificial Sequence: Synthetic oligonucleotide
  Antisense strand to SEQ ID NO: 865940
uucucuaaagcaggcagac

SEQ ID NO: 865942 - RNA, 19 nt, Artificial Sequence
  Description of Artificial Sequence: Synthetic oligonucleotide
  Sense strand starting at position 2921 of SEQ ID NO: 588450
ccggguaugacucggagaa

SEQ ID NO: 865943 - RNA, 19 nt, Artificial Sequence
  Description of Artificial Sequence: Synthetic oligonucleotide
  Antisense strand to SEQ ID NO: 865942
uucuccgagucauacccgg

SEQ ID NO: 865944 - RNA, 19 nt, Artificial Sequence
  Description of Artificial Sequence: Synthetic oligonucleotide
  Sense strand starting at position 2922 of SEQ ID NO: 588450
cggguaugacucggagaag

SEQ ID NO: 865945 - RNA, 19 nt, Artificial Sequence
  Description of Artificial Sequence: Synthetic oligonucleotide
  Antisense strand to SEQ ID NO: 865944
cuucuccgagucauacccg

SEQ ID NO: 865946 - RNA, 19 nt, Artificial Sequence
  Description of Artificial Sequence: Synthetic oligonucleotide
  Sense strand starting at position 2923 of SEQ ID NO: 588450
ggguaugacucggagaagu

SEQ ID NO: 865947 - RNA, 19 nt, Artificial Sequence
  Description of Artificial Sequence: Synthetic oligonucleotide
  Antisense strand to SEQ ID NO: 865946
acuucuccgagucauaccc

SEQ ID NO: 865948 - RNA, 19 nt, Artificial Sequence
  Description of Artificial Sequence: Synthetic oligonucleotide
  Sense strand starting at position 3692 of SEQ ID NO: 588450
ggucuccuuccuugaugca

SEQ ID NO: 865949 - RNA, 19 nt, Artificial Sequence
  Description of Artificial Sequence: Synthetic oligonucleotide
  Antisense strand to SEQ ID NO: 865948
ugcaucaaggaaggagacc

SEQ ID NO: 865950 - RNA, 19 nt, Artificial Sequence
  Description of Artificial Sequence: Synthetic oligonucleotide
  Sense strand starting at position 3825 of SEQ ID NO: 588450
ggcugugugaccuggcaca

SEQ ID NO: 865951 - RNA, 19 nt, Artificial Sequence
  Description of Artificial Sequence: Synthetic oligonucleotide
  Antisense strand to SEQ ID NO: 865950
ugugccaggucacacagcc

SEQ ID NO: 865952 - RNA, 19 nt, Artificial Sequence
  Description of Artificial Sequence: Synthetic oligonucleotide
  Sense strand starting at position 256 of SEQ ID NO: 588451
accggugucugcuguguga

SEQ ID NO: 865953 - RNA, 19 nt, Artificial Sequence
  Description of Artificial Sequence: Synthetic oligonucleotide
  Antisense strand to SEQ ID NO: 865952
ucacacagcagacaccggu

SEQ ID NO: 865954 - RNA, 19 nt, Artificial Sequence
  Description of Artificial Sequence: Synthetic oligonucleotide
  Sense strand starting at position 258 of SEQ ID NO: 588451
cggugucugcugugugaau

SEQ ID NO: 865955 - RNA, 19 nt, Artificial Sequence
  Description of Artificial Sequence: Synthetic oligonucleotide
  Antisense strand to SEQ ID NO: 865954
auucacacagcagacaccg

SEQ ID NO: 865956 - RNA, 19 nt, Artificial Sequence
  Description of Artificial Sequence: Synthetic oligonucleotide
  Sense strand starting at position 260 of SEQ ID NO: 588451
gugucugcugugugaauga

SEQ ID NO: 865957 - RNA, 19 nt, Artificial Sequence
  Description of Artificial Sequence: Synthetic oligonucleotide
  Antisense strand to SEQ ID NO: 865956
ucauucacacagcagacac

SEQ ID NO: 865958 - RNA, 19 nt, Artificial Sequence
  Description of Artificial Sequence: Synthetic oligonucleotide
  Sense strand starting at position 270 of SEQ ID NO: 588451
ugugaaugaacucgaagga

SEQ ID NO: 865959 - RNA, 19 nt, Artificial Sequence
  Description of Artificial Sequence: Synthetic oligonucleotide
  Antisense strand to SEQ ID NO: 865958
uccuucgaguucauucaca

SEQ ID NO: 865960 - RNA, 19 nt, Artificial Sequence
  Description of Artificial Sequence: Synthetic oligonucleotide
  Sense strand starting at position 430 of SEQ ID NO: 588451
gcugaaggguguuugugau

SEQ ID NO: 865961 - RNA, 19 nt, Artificial Sequence
  Description of Artificial Sequence: Synthetic oligonucleotide
  Antisense strand to SEQ ID NO: 865960
aucacaaacacccuucagc

SEQ ID NO: 865962 - RNA, 19 nt, Artificial Sequence
  Description of Artificial Sequence: Synthetic oligonucleotide
  Sense strand starting at position 434 of SEQ ID NO: 588451
aaggguguuugugaugguu

SEQ ID NO: 865963 - RNA, 19 nt, Artificial Sequence
  Description of Artificial Sequence: Synthetic oligonucleotide
  Antisense strand to SEQ ID NO: 865962
aaccaucacaaacacccuu

SEQ ID NO: 865964 - RNA, 19 nt, Artificial Sequence
  Description of Artificial Sequence: Synthetic oligonucleotide
  Sense strand starting at position 559 of SEQ ID NO: 588451
agcugaacgaguuaacaag

SEQ ID NO: 865965 - RNA, 19 nt, Artificial Sequence
  Description of Artificial Sequence: Synthetic oligonucleotide
  Antisense strand to SEQ ID NO: 865964
cuuguuaacucguucagcu

SEQ ID NO: 865966 - RNA, 19 nt, Artificial Sequence
  Description of Artificial Sequence: Synthetic oligonucleotide
  Sense strand starting at position 579 of SEQ ID NO: 588451
gacgcaauguugguggaga

SEQ ID NO: 865967 - RNA, 19 nt, Artificial Sequence
  Description of Artificial Sequence: Synthetic oligonucleotide
  Antisense strand to SEQ ID NO: 865966
ucuccaccaacauugcguc

SEQ ID NO: 865968 - RNA, 19 nt, Artificial Sequence
  Description of Artificial Sequence: Synthetic oligonucleotide
  Sense strand starting at position 580 of SEQ ID NO: 588451
acgcaauguugguggagau

SEQ ID NO: 865969 - RNA, 19 nt, Artificial Sequence
  Description of Artificial Sequence: Synthetic oligonucleotide
  Antisense strand to SEQ ID NO: 865968
aucuccaccaacauugcgu

SEQ ID NO: 865970 - RNA, 19 nt, Artificial Sequence
  Description of Artificial Sequence: Synthetic oligonucleotide
  Sense strand starting at position 614 of SEQ ID NO: 588451
cccgaugcugccuggaauu

SEQ ID NO: 865971 - RNA, 19 nt, Artificial Sequence
  Description of Artificial Sequence: Synthetic oligonucleotide
  Antisense strand to SEQ ID NO: 865970
aauuccaggcagcaucggg

SEQ ID NO: 865972 - RNA, 19 nt, Artificial Sequence
  Description of Artificial Sequence: Synthetic oligonucleotide
  Sense strand starting at position 663 of SEQ ID NO: 588451
cggacagcugucugacaga

SEQ ID NO: 865973 - RNA, 19 nt, Artificial Sequence
  Description of Artificial Sequence: Synthetic oligonucleotide
  Antisense strand to SEQ ID NO: 865972
ucugucagacagcuguccg

SEQ ID NO: 865974 - RNA, 19 nt, Artificial Sequence
  Description of Artificial Sequence: Synthetic oligonucleotide
  Sense strand starting at position 666 of SEQ ID NO: 588451
acagcugucugacagacaa

SEQ ID NO: 865975 - RNA, 19 nt, Artificial Sequence
  Description of Artificial Sequence: Synthetic oligonucleotide
  Antisense strand to SEQ ID NO: 865974
uugucugucagacagcugu

SEQ ID NO: 865976 - RNA, 19 nt, Artificial Sequence
  Description of Artificial Sequence: Synthetic oligonucleotide
  Sense strand starting at position 684 of SEQ ID NO: 588451
acuggaauucccgacaccu

SEQ ID NO: 865977 - RNA, 19 nt, Artificial Sequence
  Description of Artificial Sequence: Synthetic oligonucleotide
  Antisense strand to SEQ ID NO: 865976
aggugucgggaauuccagu

SEQ ID NO: 865978 - RNA, 19 nt, Artificial Sequence
  Description of Artificial Sequence: Synthetic oligonucleotide
  Sense strand starting at position 782 of SEQ ID NO: 588451
ggccuagagacauguguga

SEQ ID NO: 865979 - RNA, 19 nt, Artificial Sequence
  Description of Artificial Sequence: Synthetic oligonucleotide
  Antisense strand to SEQ ID NO: 865978
ucacacaugucucuaggcc

SEQ ID NO: 865980 - RNA, 19 nt, Artificial Sequence
  Description of Artificial Sequence: Synthetic oligonucleotide
  Sense strand starting at position 786 of SEQ ID NO: 588451
uagagacaugugugaccua

SEQ ID NO: 865981 - RNA, 19 nt, Artificial Sequence
  Description of Artificial Sequence: Synthetic oligonucleotide
  Antisense strand to SEQ ID NO: 865980
uaggucacacaugucucua

SEQ ID NO: 865982 - RNA, 19 nt, Artificial Sequence
  Description of Artificial Sequence: Synthetic oligonucleotide
  Sense strand starting at position 808 of SEQ ID NO: 588451
aaggucaugcuggagcaaa

SEQ ID NO: 865983 - RNA, 19 nt, Artificial Sequence
  Description of Artificial Sequence: Synthetic oligonucleotide
  Antisense strand to SEQ ID NO: 865982
uuugcuccagcaugaccuu

SEQ ID NO: 865984 - RNA, 19 nt, Artificial Sequence
  Description of Artificial Sequence: Synthetic oligonucleotide
  Sense strand starting at position 1086 of SEQ ID NO: 588451
ggagaauuggcccagucug

SEQ ID NO: 865985 - RNA, 19 nt, Artificial Sequence
  Description of Artificial Sequence: Synthetic oligonucleotide
  Antisense strand to SEQ ID NO: 865984
cagacugggccaauucucc

SEQ ID NO: 865986 - RNA, 19 nt, Artificial Sequence
  Description of Artificial Sequence: Synthetic oligonucleotide
  Sense strand starting at position 1351 of SEQ ID NO: 588451
caaggucccuccugggaaa

SEQ ID NO: 865987 - RNA, 19 nt, Artificial Sequence
  Description of Artificial Sequence: Synthetic oligonucleotide
  Antisense strand to SEQ ID NO: 865986
uuucccaggagggaccuug

SEQ ID NO: 865988 - RNA, 19 nt, Artificial Sequence
  Description of Artificial Sequence: Synthetic oligonucleotide
  Sense strand starting at position 1478 of SEQ ID NO: 588451
gcugaugccucccucacau

SEQ ID NO: 865989 - RNA, 19 nt, Artificial Sequence
  Description of Artificial Sequence: Synthetic oligonucleotide
  Antisense strand to SEQ ID NO: 865988
augugagggaggcaucagc

SEQ ID NO: 865990 - RNA, 19 nt, Artificial Sequence
  Description of Artificial Sequence: Synthetic oligonucleotide
  Sense strand starting at position 1551 of SEQ ID NO: 588451
gggaaaggcucuggauagu

SEQ ID NO: 865991 - RNA, 19 nt, Artificial Sequence
  Description of Artificial Sequence: Synthetic oligonucleotide
  Antisense strand to SEQ ID NO: 865990
acuauccagagccuuuccc

SEQ ID NO: 865992 - RNA, 19 nt, Artificial Sequence
  Description of Artificial Sequence: Synthetic oligonucleotide
  Sense strand starting at position 1626 of SEQ ID NO: 588451
cugcauuuaugucccagua

SEQ ID NO: 865993 - RNA, 19 nt, Artificial Sequence
  Description of Artificial Sequence: Synthetic oligonucleotide
  Antisense strand to SEQ ID NO: 865992
uacugggacauaaaugcag

SEQ ID NO: 865994 - RNA, 19 nt, Artificial Sequence
  Description of Artificial Sequence: Synthetic oligonucleotide
  Sense strand starting at position 1628 of SEQ ID NO: 588451
gcauuuaugucccaguaga

SEQ ID NO: 865995 - RNA, 19 nt, Artificial Sequence
  Description of Artificial Sequence: Synthetic oligonucleotide
  Antisense strand to SEQ ID NO: 865994
ucuacugggacauaaaugc

SEQ ID NO: 865996 - RNA, 19 nt, Artificial Sequence
  Description of Artificial Sequence: Synthetic oligonucleotide
  Sense strand starting at position 1645 of SEQ ID NO: 588451
gaacauauccagugggacu

SEQ ID NO: 865997 - RNA, 19 nt, Artificial Sequence
  Description of Artificial Sequence: Synthetic oligonucleotide
  Antisense strand to SEQ ID NO: 865996
agucccacuggauauguuc

SEQ ID NO: 865998 - RNA, 19 nt, Artificial Sequence
  Description of Artificial Sequence: Synthetic oligonucleotide
  Sense strand starting at position 2033 of SEQ ID NO: 588451
ugggaugccugaggcuuaa

SEQ ID NO: 865999 - RNA, 19 nt, Artificial Sequence
  Description of Artificial Sequence: Synthetic oligonucleotide
  Antisense strand to SEQ ID NO: 865998
uuaagccucaggcauccca

SEQ ID NO: 866000 - RNA, 19 nt, Artificial Sequence
  Description of Artificial Sequence: Synthetic oligonucleotide
  Sense strand starting at position 2037 of SEQ ID NO: 588451
augccugaggcuuaaauag

SEQ ID NO: 866001 - RNA, 19 nt, Artificial Sequence
  Description of Artificial Sequence: Synthetic oligonucleotide
  Antisense strand to SEQ ID NO: 866000
cuauuuaagccucaggcau

SEQ ID NO: 866002 - RNA, 19 nt, Artificial Sequence
  Description of Artificial Sequence: Synthetic oligonucleotide
  Sense strand starting at position 2516 of SEQ ID NO: 588451
ugucucauuccugguugga

SEQ ID NO: 866003 - RNA, 19 nt, Artificial Sequence
  Description of Artificial Sequence: Synthetic oligonucleotide
  Antisense strand to SEQ ID NO: 866002
uccaaccaggaaugagaca

SEQ ID NO: 866004 - RNA, 19 nt, Artificial Sequence
  Description of Artificial Sequence: Synthetic oligonucleotide
  Sense strand starting at position 2591 of SEQ ID NO: 588451
cagaaugaguucucuggac

SEQ ID NO: 866005 - RNA, 19 nt, Artificial Sequence
  Description of Artificial Sequence: Synthetic oligonucleotide
  Antisense strand to SEQ ID NO: 866004
guccagagaacucauucug

SEQ ID NO: 866006 - RNA, 19 nt, Artificial Sequence
  Description of Artificial Sequence: Synthetic oligonucleotide
  Sense strand starting at position 2971 of SEQ ID NO: 588451
caguauuggugucaccaac

SEQ ID NO: 866007 - RNA, 19 nt, Artificial Sequence
  Description of Artificial Sequence: Synthetic oligonucleotide
  Antisense strand to SEQ ID NO: 866006
guuggugacaccaauacug

SEQ ID NO: 866008 - RNA, 19 nt, Artificial Sequence
  Description of Artificial Sequence: Synthetic oligonucleotide
  Sense strand starting at position 3175 of SEQ ID NO: 588451
cgguccuuacucggaggua

SEQ ID NO: 866009 - RNA, 19 nt, Artificial Sequence
  Description of Artificial Sequence: Synthetic oligonucleotide
  Antisense strand to SEQ ID NO: 866008
uaccuccgaguaaggaccg

SEQ ID NO: 866010 - RNA, 19 nt, Artificial Sequence
  Description of Artificial Sequence: Synthetic oligonucleotide
  Sense strand starting at position 3224 of SEQ ID NO: 588451
ggguucaggucagcagaaa

SEQ ID NO: 866011 - RNA, 19 nt, Artificial Sequence
  Description of Artificial Sequence: Synthetic oligonucleotide
  Antisense strand to SEQ ID NO: 866010
uuucugcugaccugaaccc

SEQ ID NO: 866012 - RNA, 19 nt, Artificial Sequence
  Description of Artificial Sequence: Synthetic oligonucleotide
  Sense strand starting at position 3511 of SEQ ID NO: 588451
ggcugugcuuucuagaaag

SEQ ID NO: 866013 - RNA, 19 nt, Artificial Sequence
  Description of Artificial Sequence: Synthetic oligonucleotide
  Antisense strand to SEQ ID NO: 866012
cuuucuagaaagcacagcc

SEQ ID NO: 866014 - RNA, 19 nt, Artificial Sequence
  Description of Artificial Sequence: Synthetic oligonucleotide
  Sense strand starting at position 3602 of SEQ ID NO: 588451
cccagaugugaugggcaga

SEQ ID NO: 866015 - RNA, 19 nt, Artificial Sequence
  Description of Artificial Sequence: Synthetic oligonucleotide
  Antisense strand to SEQ ID NO: 866014
ucugcccaucacaucuggg

SEQ ID NO: 866016 - RNA, 19 nt, Artificial Sequence
  Description of Artificial Sequence: Synthetic oligonucleotide
  Sense strand starting at position 3978 of SEQ ID NO: 588451
gacuauuucuagugguuug

SEQ ID NO: 866017 - RNA, 19 nt, Artificial Sequence
  Description of Artificial Sequence: Synthetic oligonucleotide
  Antisense strand to SEQ ID NO: 866016
caaaccacuagaaauaguc

SEQ ID NO: 866018 - RNA, 19 nt, Artificial Sequence
  Description of Artificial Sequence: Synthetic oligonucleotide
  Sense strand starting at position 1999 of SEQ ID NO: 588452
accggugucugcuguguga

SEQ ID NO: 866019 - RNA, 19 nt, Artificial Sequence
  Description of Artificial Sequence: Synthetic oligonucleotide
  Antisense strand to SEQ ID NO: 866018
ucacacagcagacaccggu

SEQ ID NO: 866020 - RNA, 19 nt, Artificial Sequence
  Description of Artificial Sequence: Synthetic oligonucleotide
  Sense strand starting at position 2001 of SEQ ID NO: 588452
cggugucugcugugugaau

SEQ ID NO: 866021 - RNA, 19 nt, Artificial Sequence
  Description of Artificial Sequence: Synthetic oligonucleotide
  Antisense strand to SEQ ID NO: 866020
auucacacagcagacaccg

SEQ ID NO: 866022 - RNA, 19 nt, Artificial Sequence
  Description of Artificial Sequence: Synthetic oligonucleotide
  Sense strand starting at position 2003 of SEQ ID NO: 588452
gugucugcugugugaauga

SEQ ID NO: 866023 - RNA, 19 nt, Artificial Sequence
  Description of Artificial Sequence: Synthetic oligonucleotide
  Antisense strand to SEQ ID NO: 866022
ucauucacacagcagacac

SEQ ID NO: 866024 - RNA, 19 nt, Artificial Sequence
  Description of Artificial Sequence: Synthetic oligonucleotide
  Sense strand starting at position 2013 of SEQ ID NO: 588452
ugugaaugaacucgaagga

SEQ ID NO: 866025 - RNA, 19 nt, Artificial Sequence
  Description of Artificial Sequence: Synthetic oligonucleotide
  Antisense strand to SEQ ID NO: 866024
uccuucgaguucauucaca

SEQ ID NO: 866026 - RNA, 19 nt, Artificial Sequence
  Description of Artificial Sequence: Synthetic oligonucleotide
  Sense strand starting at position 2173 of SEQ ID NO: 588452
gcugaaggguguuugugau

SEQ ID NO: 866027 - RNA, 19 nt, Artificial Sequence
  Description of Artificial Sequence: Synthetic oligonucleotide
  Antisense strand to SEQ ID NO: 866026
aucacaaacacccuucagc

SEQ ID NO: 866028 - RNA, 19 nt, Artificial Sequence
  Description of Artificial Sequence: Synthetic oligonucleotide
  Sense strand starting at position 2177 of SEQ ID NO: 588452
aaggguguuugugaugguu

SEQ ID NO: 866029 - RNA, 19 nt, Artificial Sequence
  Description of Artificial Sequence: Synthetic oligonucleotide
  Antisense strand to SEQ ID NO: 866028
aaccaucacaaacacccuu

SEQ ID NO: 866030 - RNA, 19 nt, Artificial Sequence
  Description of Artificial Sequence: Synthetic oligonucleotide
  Sense strand starting at position 2302 of SEQ ID NO: 588452
agcugaacgaguuaacaag

SEQ ID NO: 866031 - RNA, 19 nt, Artificial Sequence
  Description of Artificial Sequence: Synthetic oligonucleotide
  Antisense strand to SEQ ID NO: 866030
cuuguuaacucguucagcu

SEQ ID NO: 866032 - RNA, 19 nt, Artificial Sequence
  Description of Artificial Sequence: Synthetic oligonucleotide
  Sense strand starting at position 2322 of SEQ ID NO: 588452
gacgcaauguugguggaga

SEQ ID NO: 866033 - RNA, 19 nt, Artificial Sequence
  Description of Artificial Sequence: Synthetic oligonucleotide
  Antisense strand to SEQ ID NO: 866032
ucuccaccaacauugcguc

SEQ ID NO: 866034 - RNA, 19 nt, Artificial Sequence
  Description of Artificial Sequence: Synthetic oligonucleotide
  Sense strand starting at position 2323 of SEQ ID NO: 588452
acgcaauguugguggagau

SEQ ID NO: 866035 - RNA, 19 nt, Artificial Sequence
  Description of Artificial Sequence: Synthetic oligonucleotide
  Antisense strand to SEQ ID NO: 866034
aucuccaccaacauugcgu

SEQ ID NO: 866036 - RNA, 19 nt, Artificial Sequence
  Description of Artificial Sequence: Synthetic oligonucleotide
  Sense strand starting at position 2357 of SEQ ID NO: 588452
cccgaugcugccuggaauu

SEQ ID NO: 866037 - RNA, 19 nt, Artificial Sequence
  Description of Artificial Sequence: Synthetic oligonucleotide
  Antisense strand to SEQ ID NO: 866036
aauuccaggcagcaucggg

SEQ ID NO: 866038 - RNA, 19 nt, Artificial Sequence
  Description of Artificial Sequence: Synthetic oligonucleotide
  Sense strand starting at position 2406 of SEQ ID NO: 588452
cggacagcugucugacaga

SEQ ID NO: 866039 - RNA, 19 nt, Artificial Sequence
  Description of Artificial Sequence: Synthetic oligonucleotide
  Antisense strand to SEQ ID NO: 866038
ucugucagacagcuguccg

SEQ ID NO: 866040 - RNA, 19 nt, Artificial Sequence
  Description of Artificial Sequence: Synthetic oligonucleotide
  Sense strand starting at position 2409 of SEQ ID NO: 588452
acagcugucugacagacaa

SEQ ID NO: 866041 - RNA, 19 nt, Artificial Sequence
  Description of Artificial Sequence: Synthetic oligonucleotide
  Antisense strand to SEQ ID NO: 866040
uugucugucagacagcugu

SEQ ID NO: 866042 - RNA, 19 nt, Artificial Sequence
  Description of Artificial Sequence: Synthetic oligonucleotide
  Sense strand starting at position 2427 of SEQ ID NO: 588452
acuggaauucccgacaccu

SEQ ID NO: 866043 - RNA, 19 nt, Artificial Sequence
  Description of Artificial Sequence: Synthetic oligonucleotide
  Antisense strand to SEQ ID NO: 866042
aggugucgggaauuccagu

SEQ ID NO: 866044 - RNA, 19 nt, Artificial Sequence
  Description of Artificial Sequence: Synthetic oligonucleotide
  Sense strand starting at position 2525 of SEQ ID NO: 588452
ggccuagagacauguguga

SEQ ID NO: 866045 - RNA, 19 nt, Artificial Sequence
  Description of Artificial Sequence: Synthetic oligonucleotide
  Antisense strand to SEQ ID NO: 866044
ucacacaugucucuaggcc

SEQ ID NO: 866046 - RNA, 19 nt, Artificial Sequence
  Description of Artificial Sequence: Synthetic oligonucleotide
  Sense strand starting at position 2529 of SEQ ID NO: 588452
uagagacaugugugaccua

SEQ ID NO: 866047 - RNA, 19 nt, Artificial Sequence
  Description of Artificial Sequence: Synthetic oligonucleotide
  Antisense strand to SEQ ID NO: 866046
uaggucacacaugucucua

SEQ ID NO: 866048 - RNA, 19 nt, Artificial Sequence
  Description of Artificial Sequence: Synthetic oligonucleotide
  Sense strand starting at position 2551 of SEQ ID NO: 588452
aaggucaugcuggagcaaa

SEQ ID NO: 866049 - RNA, 19 nt, Artificial Sequence
  Description of Artificial Sequence: Synthetic oligonucleotide
  Antisense strand to SEQ ID NO: 866048
uuugcuccagcaugaccuu

SEQ ID NO: 866050 - RNA, 19 nt, Artificial Sequence
  Description of Artificial Sequence: Synthetic oligonucleotide
  Sense strand starting at position 2829 of SEQ ID NO: 588452
ggagaauuggcccagucug

SEQ ID NO: 866051 - RNA, 19 nt, Artificial Sequence
  Description of Artificial Sequence: Synthetic oligonucleotide
  Antisense strand to SEQ ID NO: 866050
cagacugggccaauucucc

SEQ ID NO: 866052 - RNA, 19 nt, Artificial Sequence
  Description of Artificial Sequence: Synthetic oligonucleotide
  Sense strand starting at position 3094 of SEQ ID NO: 588452
caaggucccuccugggaaa

SEQ ID NO: 866053 - RNA, 19 nt, Artificial Sequence
  Description of Artificial Sequence: Synthetic oligonucleotide
  Antisense strand to SEQ ID NO: 866052
uuucccaggagggaccuug

SEQ ID NO: 866054 - RNA, 19 nt, Artificial Sequence
  Description of Artificial Sequence: Synthetic oligonucleotide
  Sense strand starting at position 3221 of SEQ ID NO: 588452
gcugaugccucccucacau

SEQ ID NO: 866055 - RNA, 19 nt, Artificial Sequence
  Description of Artificial Sequence: Synthetic oligonucleotide
  Antisense strand to SEQ ID NO: 866054
augugagggaggcaucagc

SEQ ID NO: 866056 - RNA, 19 nt, Artificial Sequence
  Description of Artificial Sequence: Synthetic oligonucleotide
  Sense strand starting at position 3294 of SEQ ID NO: 588452
gggaaaggcucuggauagu

SEQ ID NO: 866057 - RNA, 19 nt, Artificial Sequence
  Description of Artificial Sequence: Synthetic oligonucleotide
  Antisense strand to SEQ ID NO: 866056
acuauccagagccuuuccc

SEQ ID NO: 866058 - RNA, 19 nt, Artificial Sequence
  Description of Artificial Sequence: Synthetic oligonucleotide
  Sense strand starting at position 3369 of SEQ ID NO: 588452
cugcauuuaugucccagua

SEQ ID NO: 866059 - RNA, 19 nt, Artificial Sequence
  Description of Artificial Sequence: Synthetic oligonucleotide
  Antisense strand to SEQ ID NO: 866058
uacugggacauaaaugcag

SEQ ID NO: 866060 - RNA, 19 nt, Artificial Sequence
  Description of Artificial Sequence: Synthetic oligonucleotide
  Sense strand starting at position 3371 of SEQ ID NO: 588452
gcauuuaugucccaguaga

SEQ ID NO: 866061 - RNA, 19 nt, Artificial Sequence
  Description of Artificial Sequence: Synthetic oligonucleotide
  Antisense strand to SEQ ID NO: 866060
ucuacugggacauaaaugc

SEQ ID NO: 866062 - RNA, 19 nt, Artificial Sequence
  Description of Artificial Sequence: Synthetic oligonucleotide
  Sense strand starting at position 3388 of SEQ ID NO: 588452
gaacauauccagugggacu

SEQ ID NO: 866063 - RNA, 19 nt, Artificial Sequence
  Description of Artificial Sequence: Synthetic oligonucleotide
  Antisense strand to SEQ ID NO: 866062
agucccacuggauauguuc

SEQ ID NO: 866064 - RNA, 19 nt, Artificial Sequence
  Description of Artificial Sequence: Synthetic oligonucleotide
  Sense strand starting at position 3776 of SEQ ID NO: 588452
ugggaugccugaggcuuaa

SEQ ID NO: 866065 - RNA, 19 nt, Artificial Sequence
  Description of Artificial Sequence: Synthetic oligonucleotide
  Antisense strand to SEQ ID NO: 866064
uuaagccucaggcauccca

SEQ ID NO: 866066 - RNA, 19 nt, Artificial Sequence
  Description of Artificial Sequence: Synthetic oligonucleotide
  Sense strand starting at position 3780 of SEQ ID NO: 588452
augccugaggcuuaaauag

SEQ ID NO: 866067 - RNA, 19 nt, Artificial Sequence
  Description of Artificial Sequence: Synthetic oligonucleotide
  Antisense strand to SEQ ID NO: 866066
cuauuuaagccucaggcau

SEQ ID NO: 866068 - RNA, 19 nt, Artificial Sequence
  Description of Artificial Sequence: Synthetic oligonucleotide
  Sense strand starting at position 249 of SEQ ID NO: 588453
guccguggaguccaugaaa

SEQ ID NO: 866069 - RNA, 19 nt, Artificial Sequence
  Description of Artificial Sequence: Synthetic oligonucleotide
  Antisense strand to SEQ ID NO: 866068
uuucauggacuccacggac

SEQ ID NO: 866070 - RNA, 19 nt, Artificial Sequence
  Description of Artificial Sequence: Synthetic oligonucleotide
  Sense strand starting at position 252 of SEQ ID NO: 588453
cguggaguccaugaaauag

SEQ ID NO: 866071 - RNA, 19 nt, Artificial Sequence
  Description of Artificial Sequence: Synthetic oligonucleotide
  Antisense strand to SEQ ID NO: 866070
cuauuucauggacuccacg

SEQ ID NO: 866072 - RNA, 19 nt, Artificial Sequence
  Description of Artificial Sequence: Synthetic oligonucleotide
  Sense strand starting at position 519 of SEQ ID NO: 588453
gcgugagcuacuguuacca

SEQ ID NO: 866073 - RNA, 19 nt, Artificial Sequence
  Description of Artificial Sequence: Synthetic oligonucleotide
  Antisense strand to SEQ ID NO: 866072
ugguaacaguagcucacgc

SEQ ID NO: 866074 - RNA, 19 nt, Artificial Sequence
  Description of Artificial Sequence: Synthetic oligonucleotide
  Sense strand starting at position 702 of SEQ ID NO: 588453
gaucaaaugcagugaucag

SEQ ID NO: 866075 - RNA, 19 nt, Artificial Sequence
  Description of Artificial Sequence: Synthetic oligonucleotide
  Antisense strand to SEQ ID NO: 866074
cugaucacugcauuugauc

SEQ ID NO: 866076 - RNA, 19 nt, Artificial Sequence
  Description of Artificial Sequence: Synthetic oligonucleotide
  Sense strand starting at position 730 of SEQ ID NO: 588453
agacacuucugaguacaag

SEQ ID NO: 866077 - RNA, 19 nt, Artificial Sequence
  Description of Artificial Sequence: Synthetic oligonucleotide
  Antisense strand to SEQ ID NO: 866076
cuuguacucagaagugucu

SEQ ID NO: 866078 - RNA, 19 nt, Artificial Sequence
  Description of Artificial Sequence: Synthetic oligonucleotide
  Sense strand starting at position 820 of SEQ ID NO: 588453
uaaucugugcaaugggaau

SEQ ID NO: 866079 - RNA, 19 nt, Artificial Sequence
  Description of Artificial Sequence: Synthetic oligonucleotide
  Antisense strand to SEQ ID NO: 866078
auucccauugcacagauua

SEQ ID NO: 866080 - RNA, 19 nt, Artificial Sequence
  Description of Artificial Sequence: Synthetic oligonucleotide
  Sense strand starting at position 822 of SEQ ID NO: 588453
aucugugcaaugggaauua

SEQ ID NO: 866081 - RNA, 19 nt, Artificial Sequence
  Description of Artificial Sequence: Synthetic oligonucleotide
  Antisense strand to SEQ ID NO: 866080
uaauucccauugcacagau

SEQ ID NO: 866082 - RNA, 19 nt, Artificial Sequence
  Description of Artificial Sequence: Synthetic oligonucleotide
  Sense strand starting at position 855 of SEQ ID NO: 588453
cagugcuaccaggauuaaa

SEQ ID NO: 866083 - RNA, 19 nt, Artificial Sequence
  Description of Artificial Sequence: Synthetic oligonucleotide
  Antisense strand to SEQ ID NO: 866082
uuuaauccugguagcacug

SEQ ID NO: 866084 - RNA, 19 nt, Artificial Sequence
  Description of Artificial Sequence: Synthetic oligonucleotide
  Sense strand starting at position 992 of SEQ ID NO: 588453
ggaggaucccuucguacag

SEQ ID NO: 866085 - RNA, 19 nt, Artificial Sequence
  Description of Artificial Sequence: Synthetic oligonucleotide
  Antisense strand to SEQ ID NO: 866084
cuguacgaagggauccucc

SEQ ID NO: 866086 - RNA, 19 nt, Artificial Sequence
  Description of Artificial Sequence: Synthetic oligonucleotide
  Sense strand starting at position 1129 of SEQ ID NO: 588453
gaaguaucucuugagucca

SEQ ID NO: 866087 - RNA, 19 nt, Artificial Sequence
  Description of Artificial Sequence: Synthetic oligonucleotide
  Antisense strand to SEQ ID NO: 866086
uggacucaagagauacuuc

SEQ ID NO: 866088 - RNA, 19 nt, Artificial Sequence
  Description of Artificial Sequence: Synthetic oligonucleotide
  Sense strand starting at position 1561 of SEQ ID NO: 588453
gaagaagagucaucaaagc

SEQ ID NO: 866089 - RNA, 19 nt, Artificial Sequence
  Description of Artificial Sequence: Synthetic oligonucleotide
  Antisense strand to SEQ ID NO: 866088
gcuuugaugacucuucuuc

SEQ ID NO: 866090 - RNA, 19 nt, Artificial Sequence
  Description of Artificial Sequence: Synthetic oligonucleotide
  Sense strand starting at position 1651 of SEQ ID NO: 588453
ggagaauuagccuggaccu

SEQ ID NO: 866091 - RNA, 19 nt, Artificial Sequence
  Description of Artificial Sequence: Synthetic oligonucleotide
  Antisense strand to SEQ ID NO: 866090
agguccaggcuaauucucc

SEQ ID NO: 866092 - RNA, 19 nt, Artificial Sequence
  Description of Artificial Sequence: Synthetic oligonucleotide
  Sense strand starting at position 1652 of SEQ ID NO: 588453
gagaauuagccuggaccuu

SEQ ID NO: 866093 - RNA, 19 nt, Artificial Sequence
  Description of Artificial Sequence: Synthetic oligonucleotide
  Antisense strand to SEQ ID NO: 866092
aagguccaggcuaauucuc

SEQ ID NO: 866094 - RNA, 19 nt, Artificial Sequence
  Description of Artificial Sequence: Synthetic oligonucleotide
  Sense strand starting at position 1746 of SEQ ID NO: 588453
cagagaacuuucuccgaga

SEQ ID NO: 866095 - RNA, 19 nt, Artificial Sequence
  Description of Artificial Sequence: Synthetic oligonucleotide
  Antisense strand to SEQ ID NO: 866094
ucucggagaaaguucucug

SEQ ID NO: 866096 - RNA, 19 nt, Artificial Sequence
  Description of Artificial Sequence: Synthetic oligonucleotide
  Sense strand starting at position 1747 of SEQ ID NO: 588453
agagaacuuucuccgagac

SEQ ID NO: 866097 - RNA, 19 nt, Artificial Sequence
  Description of Artificial Sequence: Synthetic oligonucleotide
  Antisense strand to SEQ ID NO: 866096
gucucggagaaaguucucu

SEQ ID NO: 866098 - RNA, 19 nt, Artificial Sequence
  Description of Artificial Sequence: Synthetic oligonucleotide
  Sense strand starting at position 1748 of SEQ ID NO: 588453
gagaacuuucuccgagacu

SEQ ID NO: 866099 - RNA, 19 nt, Artificial Sequence
  Description of Artificial Sequence: Synthetic oligonucleotide
  Antisense strand to SEQ ID NO: 866098
agucucggagaaaguucuc

SEQ ID NO: 866100 - RNA, 19 nt, Artificial Sequence
  Description of Artificial Sequence: Synthetic oligonucleotide
  Sense strand starting at position 2304 of SEQ ID NO: 588453
aggcucaggccuuaagaga

SEQ ID NO: 866101 - RNA, 19 nt, Artificial Sequence
  Description of Artificial Sequence: Synthetic oligonucleotide
  Antisense strand to SEQ ID NO: 866100
ucucuuaaggccugagccu

SEQ ID NO: 866102 - RNA, 19 nt, Artificial Sequence
  Description of Artificial Sequence: Synthetic oligonucleotide
  Sense strand starting at position 2468 of SEQ ID NO: 588453
cgucaaugaccagagguau

SEQ ID NO: 866103 - RNA, 19 nt, Artificial Sequence
  Description of Artificial Sequence: Synthetic oligonucleotide
  Antisense strand to SEQ ID NO: 866102
auaccucuggucauugacg

SEQ ID NO: 866104 - RNA, 19 nt, Artificial Sequence
  Description of Artificial Sequence: Synthetic oligonucleotide
  Sense strand starting at position 2474 of SEQ ID NO: 588453
ugaccagagguaugaguga

SEQ ID NO: 866105 - RNA, 19 nt, Artificial Sequence
  Description of Artificial Sequence: Synthetic oligonucleotide
  Antisense strand to SEQ ID NO: 866104
ucacucauaccucugguca

SEQ ID NO: 866106 - RNA, 19 nt, Artificial Sequence
  Description of Artificial Sequence: Synthetic oligonucleotide
  Sense strand starting at position 2648 of SEQ ID NO: 588453
uggaguaauucuuuaugca

SEQ ID NO: 866107 - RNA, 19 nt, Artificial Sequence
  Description of Artificial Sequence: Synthetic oligonucleotide
  Antisense strand to SEQ ID NO: 866106
ugcauaaagaauuacucca

SEQ ID NO: 866108 - RNA, 19 nt, Artificial Sequence
  Description of Artificial Sequence: Synthetic oligonucleotide
  Sense strand starting at position 2649 of SEQ ID NO: 588453
ggaguaauucuuuaugcag

SEQ ID NO: 866109 - RNA, 19 nt, Artificial Sequence
  Description of Artificial Sequence: Synthetic oligonucleotide
  Antisense strand to SEQ ID NO: 866108
cugcauaaagaauuacucc

SEQ ID NO: 866110 - RNA, 19 nt, Artificial Sequence
  Description of Artificial Sequence: Synthetic oligonucleotide
  Sense strand starting at position 2757 of SEQ ID NO: 588453
gaaugcaucugaucuugga

SEQ ID NO: 866111 - RNA, 19 nt, Artificial Sequence
  Description of Artificial Sequence: Synthetic oligonucleotide
  Antisense strand to SEQ ID NO: 866110
uccaagaucagaugcauuc

SEQ ID NO: 866112 - RNA, 19 nt, Artificial Sequence
  Description of Artificial Sequence: Synthetic oligonucleotide
  Sense strand starting at position 2761 of SEQ ID NO: 588453
gcaucugaucuuggaaacu

SEQ ID NO: 866113 - RNA, 19 nt, Artificial Sequence
  Description of Artificial Sequence: Synthetic oligonucleotide
  Antisense strand to SEQ ID NO: 866112
aguuuccaagaucagaugc

SEQ ID NO: 866114 - RNA, 19 nt, Artificial Sequence
  Description of Artificial Sequence: Synthetic oligonucleotide
  Sense strand starting at position 2801 of SEQ ID NO: 588453
gggagacugccuggaaaua

SEQ ID NO: 866115 - RNA, 19 nt, Artificial Sequence
  Description of Artificial Sequence: Synthetic oligonucleotide
  Antisense strand to SEQ ID NO: 866114
uauuuccaggcagucuccc

SEQ ID NO: 866116 - RNA, 19 nt, Artificial Sequence
  Description of Artificial Sequence: Synthetic oligonucleotide
  Sense strand starting at position 2817 of SEQ ID NO: 588453
auaccaggugccuggaaau

SEQ ID NO: 866117 - RNA, 19 nt, Artificial Sequence
  Description of Artificial Sequence: Synthetic oligonucleotide
  Antisense strand to SEQ ID NO: 866116
auuuccaggcaccugguau

SEQ ID NO: 866118 - RNA, 19 nt, Artificial Sequence
  Description of Artificial Sequence: Synthetic oligonucleotide
  Sense strand starting at position 2828 of SEQ ID NO: 588453
cuggaaauaccaggcuuau

SEQ ID NO: 866119 - RNA, 19 nt, Artificial Sequence
  Description of Artificial Sequence: Synthetic oligonucleotide
  Antisense strand to SEQ ID NO: 866118
auaagccugguauuuccag

SEQ ID NO: 866120 - RNA, 19 nt, Artificial Sequence
  Description of Artificial Sequence: Synthetic oligonucleotide
  Sense strand starting at position 2982 of SEQ ID NO: 588453
agcuuaucugaauaagcaa

SEQ ID NO: 866121 - RNA, 19 nt, Artificial Sequence
  Description of Artificial Sequence: Synthetic oligonucleotide
  Antisense strand to SEQ ID NO: 866120
uugcuuauucagauaagcu

SEQ ID NO: 866122 - RNA, 19 nt, Artificial Sequence
  Description of Artificial Sequence: Synthetic oligonucleotide
  Sense strand starting at position 3241 of SEQ ID NO: 588453
agaauugcucaugagucca

SEQ ID NO: 866123 - RNA, 19 nt, Artificial Sequence
  Description of Artificial Sequence: Synthetic oligonucleotide
  Antisense strand to SEQ ID NO: 866122
uggacucaugagcaauucu

SEQ ID NO: 866124 - RNA, 19 nt, Artificial Sequence
  Description of Artificial Sequence: Synthetic oligonucleotide
  Sense strand starting at position 3246 of SEQ ID NO: 588453
ugcucaugaguccaggaga

SEQ ID NO: 866125 - RNA, 19 nt, Artificial Sequence
  Description of Artificial Sequence: Synthetic oligonucleotide
  Antisense strand to SEQ ID NO: 866124
ucuccuggacucaugagca

SEQ ID NO: 866126 - RNA, 19 nt, Artificial Sequence
  Description of Artificial Sequence: Synthetic oligonucleotide
  Sense strand starting at position 3488 of SEQ ID NO: 588453
gaguguaaaucagcaacuu

SEQ ID NO: 866127 - RNA, 19 nt, Artificial Sequence
  Description of Artificial Sequence: Synthetic oligonucleotide
  Antisense strand to SEQ ID NO: 866126
aaguugcugauuuacacuc

SEQ ID NO: 866128 - RNA, 19 nt, Artificial Sequence
  Description of Artificial Sequence: Synthetic oligonucleotide
  Sense strand starting at position 3697 of SEQ ID NO: 588453
gggacuguucauuacguau

SEQ ID NO: 866129 - RNA, 19 nt, Artificial Sequence
  Description of Artificial Sequence: Synthetic oligonucleotide
  Antisense strand to SEQ ID NO: 866128
auacguaaugaacaguccc

SEQ ID NO: 866130 - RNA, 19 nt, Artificial Sequence
  Description of Artificial Sequence: Synthetic oligonucleotide
  Sense strand starting at position 3729 of SEQ ID NO: 588453
agugaaauacucugcauca

SEQ ID NO: 866131 - RNA, 19 nt, Artificial Sequence
  Description of Artificial Sequence: Synthetic oligonucleotide
  Antisense strand to SEQ ID NO: 866130
ugaugcagaguauuucacu

SEQ ID NO: 866132 - RNA, 19 nt, Artificial Sequence
  Description of Artificial Sequence: Synthetic oligonucleotide
  Sense strand starting at position 3730 of SEQ ID NO: 588453
gugaaauacucugcaucaa

SEQ ID NO: 866133 - RNA, 19 nt, Artificial Sequence
  Description of Artificial Sequence: Synthetic oligonucleotide
  Antisense strand to SEQ ID NO: 866132
uugaugcagaguauuucac

SEQ ID NO: 866134 - RNA, 19 nt, Artificial Sequence
  Description of Artificial Sequence: Synthetic oligonucleotide
  Sense strand starting at position 3770 of SEQ ID NO: 588453
gugcguaccaguguggaau

SEQ ID NO: 866135 - RNA, 19 nt, Artificial Sequence
  Description of Artificial Sequence: Synthetic oligonucleotide
  Antisense strand to SEQ ID NO: 866134
auuccacacugguacgcac

SEQ ID NO: 866136 - RNA, 19 nt, Artificial Sequence
  Description of Artificial Sequence: Synthetic oligonucleotide
  Sense strand starting at position 3827 of SEQ ID NO: 588453
augcaaagugcauauguua

SEQ ID NO: 866137 - RNA, 19 nt, Artificial Sequence
  Description of Artificial Sequence: Synthetic oligonucleotide
  Antisense strand to SEQ ID NO: 866136
uaacauaugcacuuugcau

SEQ ID NO: 866138 - RNA, 19 nt, Artificial Sequence
  Description of Artificial Sequence: Synthetic oligonucleotide
  Sense strand starting at position 3834 of SEQ ID NO: 588453
gugcauauguuaccauuua

SEQ ID NO: 866139 - RNA, 19 nt, Artificial Sequence
  Description of Artificial Sequence: Synthetic oligonucleotide
  Antisense strand to SEQ ID NO: 866138
uaaaugguaacauaugcac

SEQ ID NO: 866140 - RNA, 19 nt, Artificial Sequence
  Description of Artificial Sequence: Synthetic oligonucleotide
  Sense strand starting at position 3841 of SEQ ID NO: 588453
uguuaccauuuauaggaga

SEQ ID NO: 866141 - RNA, 19 nt, Artificial Sequence
  Description of Artificial Sequence: Synthetic oligonucleotide
  Antisense strand to SEQ ID NO: 866140
ucuccuauaaaugguaaca

SEQ ID NO: 866142 - RNA, 19 nt, Artificial Sequence
  Description of Artificial Sequence: Synthetic oligonucleotide
  Sense strand starting at position 3855 of SEQ ID NO: 588453
ggagaaaguauaugccuau

SEQ ID NO: 866143 - RNA, 19 nt, Artificial Sequence
  Description of Artificial Sequence: Synthetic oligonucleotide
  Antisense strand to SEQ ID NO: 866142
auaggcauauacuuucucc

SEQ ID NO: 866144 - RNA, 19 nt, Artificial Sequence
  Description of Artificial Sequence: Synthetic oligonucleotide
  Sense strand starting at position 3856 of SEQ ID NO: 588453
gagaaaguauaugccuauu

SEQ ID NO: 866145 - RNA, 19 nt, Artificial Sequence
  Description of Artificial Sequence: Synthetic oligonucleotide
  Antisense strand to SEQ ID NO: 866144
aauaggcauauacuuucuc

SEQ ID NO: 866146 - RNA, 19 nt, Artificial Sequence
  Description of Artificial Sequence: Synthetic oligonucleotide
  Sense strand starting at position 3973 of SEQ ID NO: 588453
ccuccugugcuccaaugau

SEQ ID NO: 866147 - RNA, 19 nt, Artificial Sequence
  Description of Artificial Sequence: Synthetic oligonucleotide
  Antisense strand to SEQ ID NO: 866146
aucauuggagcacaggagg

SEQ ID NO: 866148 - RNA, 19 nt, Artificial Sequence
  Description of Artificial Sequence: Synthetic oligonucleotide
  Sense strand starting at position 5 of SEQ ID NO: 588454
gguguguuccgugaguggu

SEQ ID NO: 866149 - RNA, 19 nt, Artificial Sequence
  Description of Artificial Sequence: Synthetic oligonucleotide
  Antisense strand to SEQ ID NO: 866148
accacucacggaacacacc

SEQ ID NO: 866150 - RNA, 19 nt, Artificial Sequence
  Description of Artificial Sequence: Synthetic oligonucleotide
  Sense strand starting at position 6 of SEQ ID NO: 588454
guguguuccgugaguggua

SEQ ID NO: 866151 - RNA, 19 nt, Artificial Sequence
  Description of Artificial Sequence: Synthetic oligonucleotide
  Antisense strand to SEQ ID NO: 866150
uaccacucacggaacacac

SEQ ID NO: 866152 - RNA, 19 nt, Artificial Sequence
  Description of Artificial Sequence: Synthetic oligonucleotide
  Sense strand starting at position 79 of SEQ ID NO: 588454
gggcgugaguugaagcaau

SEQ ID NO: 866153 - RNA, 19 nt, Artificial Sequence
  Description of Artificial Sequence: Synthetic oligonucleotide
  Antisense strand to SEQ ID NO: 866152
auugcuucaacucacgccc

SEQ ID NO: 866154 - RNA, 19 nt, Artificial Sequence
  Description of Artificial Sequence: Synthetic oligonucleotide
  Sense strand starting at position 353 of SEQ ID NO: 588454
cccagaggugcuuggcaaa

SEQ ID NO: 866155 - RNA, 19 nt, Artificial Sequence
  Description of Artificial Sequence: Synthetic oligonucleotide
  Antisense strand to SEQ ID NO: 866154
uuugccaagcaccucuggg

SEQ ID NO: 866156 - RNA, 19 nt, Artificial Sequence
  Description of Artificial Sequence: Synthetic oligonucleotide
  Sense strand starting at position 422 of SEQ ID NO: 588454
uaugguuaugugcaucaca

SEQ ID NO: 866157 - RNA, 19 nt, Artificial Sequence
  Description of Artificial Sequence: Synthetic oligonucleotide
  Antisense strand to SEQ ID NO: 866156
ugugaugcacauaaccaua

SEQ ID NO: 866158 - RNA, 19 nt, Artificial Sequence
  Description of Artificial Sequence: Synthetic oligonucleotide
  Sense strand starting at position 448 of SEQ ID NO: 588454
gcaugucuguucguguaca

SEQ ID NO: 866159 - RNA, 19 nt, Artificial Sequence
  Description of Artificial Sequence: Synthetic oligonucleotide
  Antisense strand to SEQ ID NO: 866158
uguacacgaacagacaugc

SEQ ID NO: 866160 - RNA, 19 nt, Artificial Sequence
  Description of Artificial Sequence: Synthetic oligonucleotide
  Sense strand starting at position 461 of SEQ ID NO: 588454
uguacaugcgugugaauga

SEQ ID NO: 866161 - RNA, 19 nt, Artificial Sequence
  Description of Artificial Sequence: Synthetic oligonucleotide
  Antisense strand to SEQ ID NO: 866160
ucauucacacgcauguaca

SEQ ID NO: 866162 - RNA, 19 nt, Artificial Sequence
  Description of Artificial Sequence: Synthetic oligonucleotide
  Sense strand starting at position 470 of SEQ ID NO: 588454
gugugaaugacuggaacca

SEQ ID NO: 866163 - RNA, 19 nt, Artificial Sequence
  Description of Artificial Sequence: Synthetic oligonucleotide
  Antisense strand to SEQ ID NO: 866162
ugguuccagucauucacac

SEQ ID NO: 866164 - RNA, 19 nt, Artificial Sequence
  Description of Artificial Sequence: Synthetic oligonucleotide
  Sense strand starting at position 479 of SEQ ID NO: 588454
acuggaaccauguguguaa

SEQ ID NO: 866165 - RNA, 19 nt, Artificial Sequence
  Description of Artificial Sequence: Synthetic oligonucleotide
  Antisense strand to SEQ ID NO: 866164
uuacacacaugguuccagu

SEQ ID NO: 866166 - RNA, 19 nt, Artificial Sequence
  Description of Artificial Sequence: Synthetic oligonucleotide
  Sense strand starting at position 480 of SEQ ID NO: 588454
cuggaaccauguguguaaa

SEQ ID NO: 866167 - RNA, 19 nt, Artificial Sequence
  Description of Artificial Sequence: Synthetic oligonucleotide
  Antisense strand to SEQ ID NO: 866166
uuuacacacaugguuccag

SEQ ID NO: 866168 - RNA, 19 nt, Artificial Sequence
  Description of Artificial Sequence: Synthetic oligonucleotide
  Sense strand starting at position 481 of SEQ ID NO: 588454
uggaaccauguguguaaau

SEQ ID NO: 866169 - RNA, 19 nt, Artificial Sequence
  Description of Artificial Sequence: Synthetic oligonucleotide
  Antisense strand to SEQ ID NO: 866168
auuuacacacaugguucca

SEQ ID NO: 866170 - RNA, 19 nt, Artificial Sequence
  Description of Artificial Sequence: Synthetic oligonucleotide
  Sense strand starting at position 483 of SEQ ID NO: 588454
gaaccauguguguaaaugu

SEQ ID NO: 866171 - RNA, 19 nt, Artificial Sequence
  Description of Artificial Sequence: Synthetic oligonucleotide
  Antisense strand to SEQ ID NO: 866170
acauuuacacacaugguuc

SEQ ID NO: 866172 - RNA, 19 nt, Artificial Sequence
  Description of Artificial Sequence: Synthetic oligonucleotide
  Sense strand starting at position 490 of SEQ ID NO: 588454
guguguaaaugugcauguu

SEQ ID NO: 866173 - RNA, 19 nt, Artificial Sequence
  Description of Artificial Sequence: Synthetic oligonucleotide
  Antisense strand to SEQ ID NO: 866172
aacaugcacauuuacacac

SEQ ID NO: 866174 - RNA, 19 nt, Artificial Sequence
  Description of Artificial Sequence: Synthetic oligonucleotide
  Sense strand starting at position 617 of SEQ ID NO: 588454
ggugcaugagugugugcua

SEQ ID NO: 866175 - RNA, 19 nt, Artificial Sequence
  Description of Artificial Sequence: Synthetic oligonucleotide
  Antisense strand to SEQ ID NO: 866174
uagcacacacucaugcacc

SEQ ID NO: 866176 - RNA, 19 nt, Artificial Sequence
  Description of Artificial Sequence: Synthetic oligonucleotide
  Sense strand starting at position 618 of SEQ ID NO: 588454
gugcaugagugugugcuaa

SEQ ID NO: 866177 - RNA, 19 nt, Artificial Sequence
  Description of Artificial Sequence: Synthetic oligonucleotide
  Antisense strand to SEQ ID NO: 866176
uuagcacacacucaugcac

SEQ ID NO: 866178 - RNA, 19 nt, Artificial Sequence
  Description of Artificial Sequence: Synthetic oligonucleotide
  Sense strand starting at position 620 of SEQ ID NO: 588454
gcaugagugugugcuaaug

SEQ ID NO: 866179 - RNA, 19 nt, Artificial Sequence
  Description of Artificial Sequence: Synthetic oligonucleotide
  Antisense strand to SEQ ID NO: 866178
cauuagcacacacucaugc

SEQ ID NO: 866180 - RNA, 19 nt, Artificial Sequence
  Description of Artificial Sequence: Synthetic oligonucleotide
  Sense strand starting at position 637 of SEQ ID NO: 588454
uguaacauuuggugugagu

SEQ ID NO: 866181 - RNA, 19 nt, Artificial Sequence
  Description of Artificial Sequence: Synthetic oligonucleotide
  Antisense strand to SEQ ID NO: 866180
acucacaccaaauguuaca

SEQ ID NO: 866182 - RNA, 19 nt, Artificial Sequence
  Description of Artificial Sequence: Synthetic oligonucleotide
  Sense strand starting at position 639 of SEQ ID NO: 588454
uaacauuuggugugagugu

SEQ ID NO: 866183 - RNA, 19 nt, Artificial Sequence
  Description of Artificial Sequence: Synthetic oligonucleotide
  Antisense strand to SEQ ID NO: 866182
acacucacaccaaauguua

SEQ ID NO: 866184 - RNA, 19 nt, Artificial Sequence
  Description of Artificial Sequence: Synthetic oligonucleotide
  Sense strand starting at position 658 of SEQ ID NO: 588454
gagcauguguguccacaga

SEQ ID NO: 866185 - RNA, 19 nt, Artificial Sequence
  Description of Artificial Sequence: Synthetic oligonucleotide
  Antisense strand to SEQ ID NO: 866184
ucuguggacacacaugcuc

SEQ ID NO: 866186 - RNA, 19 nt, Artificial Sequence
  Description of Artificial Sequence: Synthetic oligonucleotide
  Sense strand starting at position 672 of SEQ ID NO: 588454
acagaugugguguguccau

SEQ ID NO: 866187 - RNA, 19 nt, Artificial Sequence
  Description of Artificial Sequence: Synthetic oligonucleotide
  Antisense strand to SEQ ID NO: 866186
auggacacaccacaucugu

SEQ ID NO: 866188 - RNA, 19 nt, Artificial Sequence
  Description of Artificial Sequence: Synthetic oligonucleotide
  Sense strand starting at position 677 of SEQ ID NO: 588454
ugugguguguccaucaggu

SEQ ID NO: 866189 - RNA, 19 nt, Artificial Sequence
  Description of Artificial Sequence: Synthetic oligonucleotide
  Antisense strand to SEQ ID NO: 866188
accugauggacacaccaca

SEQ ID NO: 866190 - RNA, 19 nt, Artificial Sequence
  Description of Artificial Sequence: Synthetic oligonucleotide
  Sense strand starting at position 765 of SEQ ID NO: 588454
cuugcagccucauuggaau

SEQ ID NO: 866191 - RNA, 19 nt, Artificial Sequence
  Description of Artificial Sequence: Synthetic oligonucleotide
  Antisense strand to SEQ ID NO: 866190
auuccaaugaggcugcaag

SEQ ID NO: 866192 - RNA, 19 nt, Artificial Sequence
  Description of Artificial Sequence: Synthetic oligonucleotide
  Sense strand starting at position 1083 of SEQ ID NO: 588454
aggcgcuucuacucucuua

SEQ ID NO: 866193 - RNA, 19 nt, Artificial Sequence
  Description of Artificial Sequence: Synthetic oligonucleotide
  Antisense strand to SEQ ID NO: 866192
uaagagaguagaagcgccu

SEQ ID NO: 866194 - RNA, 19 nt, Artificial Sequence
  Description of Artificial Sequence: Synthetic oligonucleotide
  Sense strand starting at position 1211 of SEQ ID NO: 588454
cuggucucaggccaagaua

SEQ ID NO: 866195 - RNA, 19 nt, Artificial Sequence
  Description of Artificial Sequence: Synthetic oligonucleotide
  Antisense strand to SEQ ID NO: 866194
uaucuuggccugagaccag

SEQ ID NO: 866196 - RNA, 19 nt, Artificial Sequence
  Description of Artificial Sequence: Synthetic oligonucleotide
  Sense strand starting at position 1248 of SEQ ID NO: 588454
gguguuugguuccuaguga

SEQ ID NO: 866197 - RNA, 19 nt, Artificial Sequence
  Description of Artificial Sequence: Synthetic oligonucleotide
  Antisense strand to SEQ ID NO: 866196
ucacuaggaaccaaacacc

SEQ ID NO: 866198 - RNA, 19 nt, Artificial Sequence
  Description of Artificial Sequence: Synthetic oligonucleotide
  Sense strand starting at position 1304 of SEQ ID NO: 588454
uggugucuuacagggagga

SEQ ID NO: 866199 - RNA, 19 nt, Artificial Sequence
  Description of Artificial Sequence: Synthetic oligonucleotide
  Antisense strand to SEQ ID NO: 866198
uccucccuguaagacacca

SEQ ID NO: 866200 - RNA, 19 nt, Artificial Sequence
  Description of Artificial Sequence: Synthetic oligonucleotide
  Sense strand starting at position 1305 of SEQ ID NO: 588454
ggugucuuacagggaggaa

SEQ ID NO: 866201 - RNA, 19 nt, Artificial Sequence
  Description of Artificial Sequence: Synthetic oligonucleotide
  Antisense strand to SEQ ID NO: 866200
uuccucccuguaagacacc

SEQ ID NO: 866202 - RNA, 19 nt, Artificial Sequence
  Description of Artificial Sequence: Synthetic oligonucleotide
  Sense strand starting at position 2233 of SEQ ID NO: 588454
ucaguuuggaaacguuaga

SEQ ID NO: 866203 - RNA, 19 nt, Artificial Sequence
  Description of Artificial Sequence: Synthetic oligonucleotide
  Antisense strand to SEQ ID NO: 866202
ucuaacguuuccaaacuga

SEQ ID NO: 866204 - RNA, 19 nt, Artificial Sequence
  Description of Artificial Sequence: Synthetic oligonucleotide
  Sense strand starting at position 2339 of SEQ ID NO: 588454
gcgcaagagucgucaccca

SEQ ID NO: 866205 - RNA, 19 nt, Artificial Sequence
  Description of Artificial Sequence: Synthetic oligonucleotide
  Antisense strand to SEQ ID NO: 866204
ugggugacgacucuugcgc

SEQ ID NO: 866206 - RNA, 19 nt, Artificial Sequence
  Description of Artificial Sequence: Synthetic oligonucleotide
  Sense strand starting at position 2353 of SEQ ID NO: 588454
acccacagucagcgauauu

SEQ ID NO: 866207 - RNA, 19 nt, Artificial Sequence
  Description of Artificial Sequence: Synthetic oligonucleotide
  Antisense strand to SEQ ID NO: 866206
aauaucgcugacugugggu

SEQ ID NO: 866208 - RNA, 19 nt, Artificial Sequence
  Description of Artificial Sequence: Synthetic oligonucleotide
  Sense strand starting at position 3300 of SEQ ID NO: 588454
gcccuaucuccaggaguuu

SEQ ID NO: 866209 - RNA, 19 nt, Artificial Sequence
  Description of Artificial Sequence: Synthetic oligonucleotide
  Antisense strand to SEQ ID NO: 866208
aaacuccuggagauagggc

SEQ ID NO: 866210 - RNA, 19 nt, Artificial Sequence
  Description of Artificial Sequence: Synthetic oligonucleotide
  Sense strand starting at position 3491 of SEQ ID NO: 588454
gcggcaggcauuuguaauc

SEQ ID NO: 866211 - RNA, 19 nt, Artificial Sequence
  Description of Artificial Sequence: Synthetic oligonucleotide
  Antisense strand to SEQ ID NO: 866210
gauuacaaaugccugccgc

SEQ ID NO: 866212 - RNA, 19 nt, Artificial Sequence
  Description of Artificial Sequence: Synthetic oligonucleotide
  Sense strand starting at position 3707 of SEQ ID NO: 588454
gccucaucagcguggaaga

SEQ ID NO: 866213 - RNA, 19 nt, Artificial Sequence
  Description of Artificial Sequence: Synthetic oligonucleotide
  Antisense strand to SEQ ID NO: 866212
ucuuccacgcugaugaggc

SEQ ID NO: 866214 - RNA, 19 nt, Artificial Sequence
  Description of Artificial Sequence: Synthetic oligonucleotide
  Sense strand starting at position 3708 of SEQ ID NO: 588454
ccucaucagcguggaagaa

SEQ ID NO: 866215 - RNA, 19 nt, Artificial Sequence
  Description of Artificial Sequence: Synthetic oligonucleotide
  Antisense strand to SEQ ID NO: 866214
uucuuccacgcugaugagg

SEQ ID NO: 866216 - RNA, 19 nt, Artificial Sequence
  Description of Artificial Sequence: Synthetic oligonucleotide
  Sense strand starting at position 3709 of SEQ ID NO: 588454
cucaucagcguggaagaaa

SEQ ID NO: 866217 - RNA, 19 nt, Artificial Sequence
  Description of Artificial Sequence: Synthetic oligonucleotide
  Antisense strand to SEQ ID NO: 866216
uuucuuccacgcugaugag

SEQ ID NO: 866218 - RNA, 19 nt, Artificial Sequence
  Description of Artificial Sequence: Synthetic oligonucleotide
  Sense strand starting at position 3810 of SEQ ID NO: 588454
uggagagcugaucgcuaaa

SEQ ID NO: 866219 - RNA, 19 nt, Artificial Sequence
  Description of Artificial Sequence: Synthetic oligonucleotide
  Antisense strand to SEQ ID NO: 866218
uuuagcgaucagcucucca

SEQ ID NO: 866220 - RNA, 19 nt, Artificial Sequence
  Description of Artificial Sequence: Synthetic oligonucleotide
  Sense strand starting at position 3812 of SEQ ID NO: 588454
gagagcugaucgcuaaaug

SEQ ID NO: 866221 - RNA, 19 nt, Artificial Sequence
  Description of Artificial Sequence: Synthetic oligonucleotide
  Antisense strand to SEQ ID NO: 866220
cauuuagcgaucagcucuc

SEQ ID NO: 866222 - RNA, 19 nt, Artificial Sequence
  Description of Artificial Sequence: Synthetic oligonucleotide
  Sense strand starting at position 3813 of SEQ ID NO: 588454
agagcugaucgcuaaaugu

SEQ ID NO: 866223 - RNA, 19 nt, Artificial Sequence
  Description of Artificial Sequence: Synthetic oligonucleotide
  Antisense strand to SEQ ID NO: 866222
acauuuagcgaucagcucu

SEQ ID NO: 866224 - RNA, 19 nt, Artificial Sequence
  Description of Artificial Sequence: Synthetic oligonucleotide
  Sense strand starting at position 3855 of SEQ ID NO: 588454
acagucaggcuucgaaauu

SEQ ID NO: 866225 - RNA, 19 nt, Artificial Sequence
  Description of Artificial Sequence: Synthetic oligonucleotide
  Antisense strand to SEQ ID NO: 866224
aauuucgaagccugacugu

SEQ ID NO: 866226 - RNA, 19 nt, Artificial Sequence
  Description of Artificial Sequence: Synthetic oligonucleotide
  Sense strand starting at position 3883 of SEQ ID NO: 588454
gggauuaucucugcugcca

SEQ ID NO: 866227 - RNA, 19 nt, Artificial Sequence
  Description of Artificial Sequence: Synthetic oligonucleotide
  Antisense strand to SEQ ID NO: 866226
uggcagcagagauaauccc

SEQ ID NO: 866228 - RNA, 19 nt, Artificial Sequence
  Description of Artificial Sequence: Synthetic oligonucleotide
  Sense strand starting at position 307 of SEQ ID NO: 588456
cgauacuaugccuggcuaa

SEQ ID NO: 866229 - RNA, 19 nt, Artificial Sequence
  Description of Artificial Sequence: Synthetic oligonucleotide
  Antisense strand to SEQ ID NO: 866228
uuagccaggcauaguaucg

SEQ ID NO: 866230 - RNA, 19 nt, Artificial Sequence
  Description of Artificial Sequence: Synthetic oligonucleotide
  Sense strand starting at position 473 of SEQ ID NO: 588456
uugccaauuggaugugaua

SEQ ID NO: 866231 - RNA, 19 nt, Artificial Sequence
  Description of Artificial Sequence: Synthetic oligonucleotide
  Antisense strand to SEQ ID NO: 866230
uaucacauccaauuggcaa

SEQ ID NO: 866232 - RNA, 19 nt, Artificial Sequence
  Description of Artificial Sequence: Synthetic oligonucleotide
  Sense strand starting at position 475 of SEQ ID NO: 588456
gccaauuggaugugauaac

SEQ ID NO: 866233 - RNA, 19 nt, Artificial Sequence
  Description of Artificial Sequence: Synthetic oligonucleotide
  Antisense strand to SEQ ID NO: 866232
guuaucacauccaauuggc

SEQ ID NO: 866234 - RNA, 19 nt, Artificial Sequence
  Description of Artificial Sequence: Synthetic oligonucleotide
  Sense strand starting at position 482 of SEQ ID NO: 588456
ggaugugauaaccgaggca

SEQ ID NO: 866235 - RNA, 19 nt, Artificial Sequence
  Description of Artificial Sequence: Synthetic oligonucleotide
  Antisense strand to SEQ ID NO: 866234
ugccucgguuaucacaucc

SEQ ID NO: 866236 - RNA, 19 nt, Artificial Sequence
  Description of Artificial Sequence: Synthetic oligonucleotide
  Sense strand starting at position 576 of SEQ ID NO: 588456
ucacaagcucugggaugau

SEQ ID NO: 866237 - RNA, 19 nt, Artificial Sequence
  Description of Artificial Sequence: Synthetic oligonucleotide
  Antisense strand to SEQ ID NO: 866236
aucaucccagagcuuguga

SEQ ID NO: 866238 - RNA, 19 nt, Artificial Sequence
  Description of Artificial Sequence: Synthetic oligonucleotide
  Sense strand starting at position 646 of SEQ ID NO: 588456
gcuugcuuccuuccagcau

SEQ ID NO: 866239 - RNA, 19 nt, Artificial Sequence
  Description of Artificial Sequence: Synthetic oligonucleotide
  Antisense strand to SEQ ID NO: 866238
augcuggaaggaagcaagc

SEQ ID NO: 866240 - RNA, 19 nt, Artificial Sequence
  Description of Artificial Sequence: Synthetic oligonucleotide
  Sense strand starting at position 695 of SEQ ID NO: 588456
cugagagcucauuauccaa

SEQ ID NO: 866241 - RNA, 19 nt, Artificial Sequence
  Description of Artificial Sequence: Synthetic oligonucleotide
  Antisense strand to SEQ ID NO: 866240
uuggauaaugagcucucag

SEQ ID NO: 866242 - RNA, 19 nt, Artificial Sequence
  Description of Artificial Sequence: Synthetic oligonucleotide
  Sense strand starting at position 1086 of SEQ ID NO: 588456
ggaggcuguuggagaugaa

SEQ ID NO: 866243 - RNA, 19 nt, Artificial Sequence
  Description of Artificial Sequence: Synthetic oligonucleotide
  Antisense strand to SEQ ID NO: 866242
uucaucuccaacagccucc

SEQ ID NO: 866244 - RNA, 19 nt, Artificial Sequence
  Description of Artificial Sequence: Synthetic oligonucleotide
  Sense strand starting at position 1095 of SEQ ID NO: 588456
uggagaugaagugguuaaa

SEQ ID NO: 866245 - RNA, 19 nt, Artificial Sequence
  Description of Artificial Sequence: Synthetic oligonucleotide
  Antisense strand to SEQ ID NO: 866244
uuuaaccacuucaucucca

SEQ ID NO: 866246 - RNA, 19 nt, Artificial Sequence
  Description of Artificial Sequence: Synthetic oligonucleotide
  Sense strand starting at position 1226 of SEQ ID NO: 588456
gagaucuggugggaguaaa

SEQ ID NO: 866247 - RNA, 19 nt, Artificial Sequence
  Description of Artificial Sequence: Synthetic oligonucleotide
  Antisense strand to SEQ ID NO: 866246
uuuacucccaccagaucuc

SEQ ID NO: 866248 - RNA, 19 nt, Artificial Sequence
  Description of Artificial Sequence: Synthetic oligonucleotide
  Sense strand starting at position 1536 of SEQ ID NO: 588456
gagguaagauguuagagga

SEQ ID NO: 866249 - RNA, 19 nt, Artificial Sequence
  Description of Artificial Sequence: Synthetic oligonucleotide
  Antisense strand to SEQ ID NO: 866248
uccucuaacaucuuaccuc

SEQ ID NO: 866250 - RNA, 19 nt, Artificial Sequence
  Description of Artificial Sequence: Synthetic oligonucleotide
  Sense strand starting at position 1539 of SEQ ID NO: 588456
guaagauguuagaggagga

SEQ ID NO: 866251 - RNA, 19 nt, Artificial Sequence
  Description of Artificial Sequence: Synthetic oligonucleotide
  Antisense strand to SEQ ID NO: 866250
uccuccucuaacaucuuac

SEQ ID NO: 866252 - RNA, 19 nt, Artificial Sequence
  Description of Artificial Sequence: Synthetic oligonucleotide
  Sense strand starting at position 1584 of SEQ ID NO: 588456
gagguuagcuuccugggaa

SEQ ID NO: 866253 - RNA, 19 nt, Artificial Sequence
  Description of Artificial Sequence: Synthetic oligonucleotide
  Antisense strand to SEQ ID NO: 866252
uucccaggaagcuaaccuc

SEQ ID NO: 866254 - RNA, 19 nt, Artificial Sequence
  Description of Artificial Sequence: Synthetic oligonucleotide
  Sense strand starting at position 1587 of SEQ ID NO: 588456
guuagcuuccugggaagga

SEQ ID NO: 866255 - RNA, 19 nt, Artificial Sequence
  Description of Artificial Sequence: Synthetic oligonucleotide
  Antisense strand to SEQ ID NO: 866254
uccuucccaggaagcuaac

SEQ ID NO: 866256 - RNA, 19 nt, Artificial Sequence
  Description of Artificial Sequence: Synthetic oligonucleotide
  Sense strand starting at position 2059 of SEQ ID NO: 588456
gggaucugucucggaucuu

SEQ ID NO: 866257 - RNA, 19 nt, Artificial Sequence
  Description of Artificial Sequence: Synthetic oligonucleotide
  Antisense strand to SEQ ID NO: 866256
aagauccgagacagauccc

SEQ ID NO: 866258 - RNA, 19 nt, Artificial Sequence
  Description of Artificial Sequence: Synthetic oligonucleotide
  Sense strand starting at position 2078 of SEQ ID NO: 588456
ggagacaucuggguuccca

SEQ ID NO: 866259 - RNA, 19 nt, Artificial Sequence
  Description of Artificial Sequence: Synthetic oligonucleotide
  Antisense strand to SEQ ID NO: 866258
ugggaacccagaugucucc

SEQ ID NO: 866260 - RNA, 19 nt, Artificial Sequence
  Description of Artificial Sequence: Synthetic oligonucleotide
  Sense strand starting at position 2419 of SEQ ID NO: 588456
uugcacacagcuuguaaau

SEQ ID NO: 866261 - RNA, 19 nt, Artificial Sequence
  Description of Artificial Sequence: Synthetic oligonucleotide
  Antisense strand to SEQ ID NO: 866260
auuuacaagcugugugcaa

SEQ ID NO: 866262 - RNA, 19 nt, Artificial Sequence
  Description of Artificial Sequence: Synthetic oligonucleotide
  Sense strand starting at position 2667 of SEQ ID NO: 588456
agucacauguuuguacaca

SEQ ID NO: 866263 - RNA, 19 nt, Artificial Sequence
  Description of Artificial Sequence: Synthetic oligonucleotide
  Antisense strand to SEQ ID NO: 866262
uguguacaaacaugugacu

SEQ ID NO: 866264 - RNA, 19 nt, Artificial Sequence
  Description of Artificial Sequence: Synthetic oligonucleotide
  Sense strand starting at position 2760 of SEQ ID NO: 588456
aggguuuaccgucaugucu

SEQ ID NO: 866265 - RNA, 19 nt, Artificial Sequence
  Description of Artificial Sequence: Synthetic oligonucleotide
  Antisense strand to SEQ ID NO: 866264
agacaugacgguaaacccu

SEQ ID NO: 866266 - RNA, 19 nt, Artificial Sequence
  Description of Artificial Sequence: Synthetic oligonucleotide
  Sense strand starting at position 2768 of SEQ ID NO: 588456
ccgucaugucucuaagcaa

SEQ ID NO: 866267 - RNA, 19 nt, Artificial Sequence
  Description of Artificial Sequence: Synthetic oligonucleotide
  Antisense strand to SEQ ID NO: 866266
uugcuuagagacaugacgg

SEQ ID NO: 866268 - RNA, 19 nt, Artificial Sequence
  Description of Artificial Sequence: Synthetic oligonucleotide
  Sense strand starting at position 2789 of SEQ ID NO: 588456
ccuuguuacuuccugaagu

SEQ ID NO: 866269 - RNA, 19 nt, Artificial Sequence
  Description of Artificial Sequence: Synthetic oligonucleotide
  Antisense strand to SEQ ID NO: 866268
acuucaggaaguaacaagg

SEQ ID NO: 866270 - RNA, 19 nt, Artificial Sequence
  Description of Artificial Sequence: Synthetic oligonucleotide
  Sense strand starting at position 2791 of SEQ ID NO: 588456
uuguuacuuccugaaguug

SEQ ID NO: 866271 - RNA, 19 nt, Artificial Sequence
  Description of Artificial Sequence: Synthetic oligonucleotide
  Antisense strand to SEQ ID NO: 866270
caacuucaggaaguaacaa

SEQ ID NO: 866272 - RNA, 19 nt, Artificial Sequence
  Description of Artificial Sequence: Synthetic oligonucleotide
  Sense strand starting at position 2860 of SEQ ID NO: 588456
gacagaguuugccuuuccu

SEQ ID NO: 866273 - RNA, 19 nt, Artificial Sequence
  Description of Artificial Sequence: Synthetic oligonucleotide
  Antisense strand to SEQ ID NO: 866272
aggaaaggcaaacucuguc

SEQ ID NO: 866274 - RNA, 19 nt, Artificial Sequence
  Description of Artificial Sequence: Synthetic oligonucleotide
  Sense strand starting at position 2922 of SEQ ID NO: 588456
ccacuagagucauuggguu

SEQ ID NO: 866275 - RNA, 19 nt, Artificial Sequence
  Description of Artificial Sequence: Synthetic oligonucleotide
  Antisense strand to SEQ ID NO: 866274
aacccaaugacucuagugg

SEQ ID NO: 866276 - RNA, 19 nt, Artificial Sequence
  Description of Artificial Sequence: Synthetic oligonucleotide
  Sense strand starting at position 2924 of SEQ ID NO: 588456
acuagagucauuggguuaa

SEQ ID NO: 866277 - RNA, 19 nt, Artificial Sequence
  Description of Artificial Sequence: Synthetic oligonucleotide
  Antisense strand to SEQ ID NO: 866276
uuaacccaaugacucuagu

SEQ ID NO: 866278 - RNA, 19 nt, Artificial Sequence
  Description of Artificial Sequence: Synthetic oligonucleotide
  Sense strand starting at position 2944 of SEQ ID NO: 588456
ggaagugcuauccaaacug

SEQ ID NO: 866279 - RNA, 19 nt, Artificial Sequence
  Description of Artificial Sequence: Synthetic oligonucleotide
  Antisense strand to SEQ ID NO: 866278
caguuuggauagcacuucc

SEQ ID NO: 866280 - RNA, 19 nt, Artificial Sequence
  Description of Artificial Sequence: Synthetic oligonucleotide
  Sense strand starting at position 3035 of SEQ ID NO: 588456
ccucuaaguucucuuugua

SEQ ID NO: 866281 - RNA, 19 nt, Artificial Sequence
  Description of Artificial Sequence: Synthetic oligonucleotide
  Antisense strand to SEQ ID NO: 866280
uacaaagagaacuuagagg

SEQ ID NO: 866282 - RNA, 19 nt, Artificial Sequence
  Description of Artificial Sequence: Synthetic oligonucleotide
  Sense strand starting at position 3184 of SEQ ID NO: 588456
ugaguacaguaguugagaa

SEQ ID NO: 866283 - RNA, 19 nt, Artificial Sequence
  Description of Artificial Sequence: Synthetic oligonucleotide
  Antisense strand to SEQ ID NO: 866282
uucucaacuacuguacuca

SEQ ID NO: 866284 - RNA, 19 nt, Artificial Sequence
  Description of Artificial Sequence: Synthetic oligonucleotide
  Sense strand starting at position 3185 of SEQ ID NO: 588456
gaguacaguaguugagaau

SEQ ID NO: 866285 - RNA, 19 nt, Artificial Sequence
  Description of Artificial Sequence: Synthetic oligonucleotide
  Antisense strand to SEQ ID NO: 866284
auucucaacuacuguacuc

SEQ ID NO: 866286 - RNA, 19 nt, Artificial Sequence
  Description of Artificial Sequence: Synthetic oligonucleotide
  Sense strand starting at position 3186 of SEQ ID NO: 588456
aguacaguaguugagaauu

SEQ ID NO: 866287 - RNA, 19 nt, Artificial Sequence
  Description of Artificial Sequence: Synthetic oligonucleotide
  Antisense strand to SEQ ID NO: 866286
aauucucaacuacuguacu

SEQ ID NO: 866288 - RNA, 19 nt, Artificial Sequence
  Description of Artificial Sequence: Synthetic oligonucleotide
  Sense strand starting at position 3207 of SEQ ID NO: 588456
aucggucuguggguaugaa

SEQ ID NO: 866289 - RNA, 19 nt, Artificial Sequence
  Description of Artificial Sequence: Synthetic oligonucleotide
  Antisense strand to SEQ ID NO: 866288
uucauacccacagaccgau

SEQ ID NO: 866290 - RNA, 19 nt, Artificial Sequence
  Description of Artificial Sequence: Synthetic oligonucleotide
  Sense strand starting at position 3208 of SEQ ID NO: 588456
ucggucuguggguaugaaa

SEQ ID NO: 866291 - RNA, 19 nt, Artificial Sequence
  Description of Artificial Sequence: Synthetic oligonucleotide
  Antisense strand to SEQ ID NO: 866290
uuucauacccacagaccga

SEQ ID NO: 866292 - RNA, 19 nt, Artificial Sequence
  Description of Artificial Sequence: Synthetic oligonucleotide
  Sense strand starting at position 3240 of SEQ ID NO: 588456
cagcuagguaaaugugagu

SEQ ID NO: 866293 - RNA, 19 nt, Artificial Sequence
  Description of Artificial Sequence: Synthetic oligonucleotide
  Antisense strand to SEQ ID NO: 866292
acucacauuuaccuagcug

SEQ ID NO: 866294 - RNA, 19 nt, Artificial Sequence
  Description of Artificial Sequence: Synthetic oligonucleotide
  Sense strand starting at position 3320 of SEQ ID NO: 588456
aucuaaugaggcugaaguu

SEQ ID NO: 866295 - RNA, 19 nt, Artificial Sequence
  Description of Artificial Sequence: Synthetic oligonucleotide
  Antisense strand to SEQ ID NO: 866294
aacuucagccucauuagau

SEQ ID NO: 866296 - RNA, 19 nt, Artificial Sequence
  Description of Artificial Sequence: Synthetic oligonucleotide
  Sense strand starting at position 3321 of SEQ ID NO: 588456
ucuaaugaggcugaaguuu

SEQ ID NO: 866297 - RNA, 19 nt, Artificial Sequence
  Description of Artificial Sequence: Synthetic oligonucleotide
  Antisense strand to SEQ ID NO: 866296
aaacuucagccucauuaga

SEQ ID NO: 866298 - RNA, 19 nt, Artificial Sequence
  Description of Artificial Sequence: Synthetic oligonucleotide
  Sense strand starting at position 3430 of SEQ ID NO: 588456
gagagauuauaagaaggcu

SEQ ID NO: 866299 - RNA, 19 nt, Artificial Sequence
  Description of Artificial Sequence: Synthetic oligonucleotide
  Antisense strand to SEQ ID NO: 866298
agccuucuuauaaucucuc

SEQ ID NO: 866300 - RNA, 19 nt, Artificial Sequence
  Description of Artificial Sequence: Synthetic oligonucleotide
  Sense strand starting at position 3439 of SEQ ID NO: 588456
uaagaaggcuucguggaga

SEQ ID NO: 866301 - RNA, 19 nt, Artificial Sequence
  Description of Artificial Sequence: Synthetic oligonucleotide
  Antisense strand to SEQ ID NO: 866300
ucuccacgaagccuucuua

SEQ ID NO: 866302 - RNA, 19 nt, Artificial Sequence
  Description of Artificial Sequence: Synthetic oligonucleotide
  Sense strand starting at position 3494 of SEQ ID NO: 588456
gacggagauuaagaagaaa

SEQ ID NO: 866303 - RNA, 19 nt, Artificial Sequence
  Description of Artificial Sequence: Synthetic oligonucleotide
  Antisense strand to SEQ ID NO: 866302
uuucuucuuaaucuccguc

SEQ ID NO: 866304 - RNA, 19 nt, Artificial Sequence
  Description of Artificial Sequence: Synthetic oligonucleotide
  Sense strand starting at position 3661 of SEQ ID NO: 588456
cacugaagagucugaacuu

SEQ ID NO: 866305 - RNA, 19 nt, Artificial Sequence
  Description of Artificial Sequence: Synthetic oligonucleotide
  Antisense strand to SEQ ID NO: 866304
aaguucagacucuucagug

SEQ ID NO: 866306 - RNA, 19 nt, Artificial Sequence
  Description of Artificial Sequence: Synthetic oligonucleotide
  Sense strand starting at position 3813 of SEQ ID NO: 588456
uuuggaggaugauauuaua

SEQ ID NO: 866307 - RNA, 19 nt, Artificial Sequence
  Description of Artificial Sequence: Synthetic oligonucleotide
  Antisense strand to SEQ ID NO: 866306
uauaauaucauccuccaaa

SEQ ID NO: 866308 - RNA, 19 nt, Artificial Sequence
  Description of Artificial Sequence: Synthetic oligonucleotide
  Sense strand starting at position 1 of SEQ ID NO: 588457
ccuguuucuccugguaaau

SEQ ID NO: 866309 - RNA, 19 nt, Artificial Sequence
  Description of Artificial Sequence: Synthetic oligonucleotide
  Antisense strand to SEQ ID NO: 866308
auuuaccaggagaaacagg

SEQ ID NO: 866310 - RNA, 19 nt, Artificial Sequence
  Description of Artificial Sequence: Synthetic oligonucleotide
  Sense strand starting at position 104 of SEQ ID NO: 588457
agugucaaacaguauagau

SEQ ID NO: 866311 - RNA, 19 nt, Artificial Sequence
  Description of Artificial Sequence: Synthetic oligonucleotide
  Antisense strand to SEQ ID NO: 866310
aucuauacuguuugacacu

SEQ ID NO: 866312 - RNA, 19 nt, Artificial Sequence
  Description of Artificial Sequence: Synthetic oligonucleotide
  Sense strand starting at position 298 of SEQ ID NO: 588457
ggcucauguuagucccuaa

SEQ ID NO: 866313 - RNA, 19 nt, Artificial Sequence
  Description of Artificial Sequence: Synthetic oligonucleotide
  Antisense strand to SEQ ID NO: 866312
uuagggacuaacaugagcc

SEQ ID NO: 866314 - RNA, 19 nt, Artificial Sequence
  Description of Artificial Sequence: Synthetic oligonucleotide
  Sense strand starting at position 301 of SEQ ID NO: 588457
ucauguuagucccuaauaa

SEQ ID NO: 866315 - RNA, 19 nt, Artificial Sequence
  Description of Artificial Sequence: Synthetic oligonucleotide
  Antisense strand to SEQ ID NO: 866314
uuauuagggacuaacauga

SEQ ID NO: 866316 - RNA, 19 nt, Artificial Sequence
  Description of Artificial Sequence: Synthetic oligonucleotide
  Sense strand starting at position 597 of SEQ ID NO: 588457
agggaaugcuugucccuuu

SEQ ID NO: 866317 - RNA, 19 nt, Artificial Sequence
  Description of Artificial Sequence: Synthetic oligonucleotide
  Antisense strand to SEQ ID NO: 866316
aaagggacaagcauucccu

SEQ ID NO: 866318 - RNA, 19 nt, Artificial Sequence
  Description of Artificial Sequence: Synthetic oligonucleotide
  Sense strand starting at position 598 of SEQ ID NO: 588457
gggaaugcuugucccuuua

SEQ ID NO: 866319 - RNA, 19 nt, Artificial Sequence
  Description of Artificial Sequence: Synthetic oligonucleotide
  Antisense strand to SEQ ID NO: 866318
uaaagggacaagcauuccc

SEQ ID NO: 866320 - RNA, 19 nt, Artificial Sequence
  Description of Artificial Sequence: Synthetic oligonucleotide
  Sense strand starting at position 705 of SEQ ID NO: 588457
ugccucacugugugacaau

SEQ ID NO: 866321 - RNA, 19 nt, Artificial Sequence
  Description of Artificial Sequence: Synthetic oligonucleotide
  Antisense strand to SEQ ID NO: 866320
auugucacacagugaggca

SEQ ID NO: 866322 - RNA, 19 nt, Artificial Sequence
  Description of Artificial Sequence: Synthetic oligonucleotide
  Sense strand starting at position 844 of SEQ ID NO: 588457
uggugcccuggucagaaau

SEQ ID NO: 866323 - RNA, 19 nt, Artificial Sequence
  Description of Artificial Sequence: Synthetic oligonucleotide
  Antisense strand to SEQ ID NO: 866322
auuucugaccagggcacca

SEQ ID NO: 866324 - RNA, 19 nt, Artificial Sequence
  Description of Artificial Sequence: Synthetic oligonucleotide
  Sense strand starting at position 991 of SEQ ID NO: 588457
gaaugaguucuggguguuu

SEQ ID NO: 866325 - RNA, 19 nt, Artificial Sequence
  Description of Artificial Sequence: Synthetic oligonucleotide
  Antisense strand to SEQ ID NO: 866324
aaacacccagaacucauuc

SEQ ID NO: 866326 - RNA, 19 nt, Artificial Sequence
  Description of Artificial Sequence: Synthetic oligonucleotide
  Sense strand starting at position 1059 of SEQ ID NO: 588457
acagaugucugggcagaca

SEQ ID NO: 866327 - RNA, 19 nt, Artificial Sequence
  Description of Artificial Sequence: Synthetic oligonucleotide
  Antisense strand to SEQ ID NO: 866326
ugucugcccagacaucugu

SEQ ID NO: 866328 - RNA, 19 nt, Artificial Sequence
  Description of Artificial Sequence: Synthetic oligonucleotide
  Sense strand starting at position 1460 of SEQ ID NO: 588457
aggcaaggguccucugagu

SEQ ID NO: 866329 - RNA, 19 nt, Artificial Sequence
  Description of Artificial Sequence: Synthetic oligonucleotide
  Antisense strand to SEQ ID NO: 866328
acucagaggacccuugccu

SEQ ID NO: 866330 - RNA, 19 nt, Artificial Sequence
  Description of Artificial Sequence: Synthetic oligonucleotide
  Sense strand starting at position 1703 of SEQ ID NO: 588457
acucuuuggucccuuggaa

SEQ ID NO: 866331 - RNA, 19 nt, Artificial Sequence
  Description of Artificial Sequence: Synthetic oligonucleotide
  Antisense strand to SEQ ID NO: 866330
uuccaagggaccaaagagu

SEQ ID NO: 866332 - RNA, 19 nt, Artificial Sequence
  Description of Artificial Sequence: Synthetic oligonucleotide
  Sense strand starting at position 2344 of SEQ ID NO: 588457
ggcaaagcccucgaagagu

SEQ ID NO: 866333 - RNA, 19 nt, Artificial Sequence
  Description of Artificial Sequence: Synthetic oligonucleotide
  Antisense strand to SEQ ID NO: 866332
acucuucgagggcuuugcc

SEQ ID NO: 866334 - RNA, 19 nt, Artificial Sequence
  Description of Artificial Sequence: Synthetic oligonucleotide
  Sense strand starting at position 2350 of SEQ ID NO: 588457
gcccucgaagagugacaua

SEQ ID NO: 866335 - RNA, 19 nt, Artificial Sequence
  Description of Artificial Sequence: Synthetic oligonucleotide
  Antisense strand to SEQ ID NO: 866334
uaugucacucuucgagggc

SEQ ID NO: 866336 - RNA, 19 nt, Artificial Sequence
  Description of Artificial Sequence: Synthetic oligonucleotide
  Sense strand starting at position 2434 of SEQ ID NO: 588457
gcucauuccgaaugaagua

SEQ ID NO: 866337 - RNA, 19 nt, Artificial Sequence
  Description of Artificial Sequence: Synthetic oligonucleotide
  Antisense strand to SEQ ID NO: 866336
uacuucauucggaaugagc

SEQ ID NO: 866338 - RNA, 19 nt, Artificial Sequence
  Description of Artificial Sequence: Synthetic oligonucleotide
  Sense strand starting at position 2543 of SEQ ID NO: 588457
cgacuaguccuguaacuuu

SEQ ID NO: 866339 - RNA, 19 nt, Artificial Sequence
  Description of Artificial Sequence: Synthetic oligonucleotide
  Antisense strand to SEQ ID NO: 866338
aaaguuacaggacuagucg

SEQ ID NO: 866340 - RNA, 19 nt, Artificial Sequence
  Description of Artificial Sequence: Synthetic oligonucleotide
  Sense strand starting at position 2590 of SEQ ID NO: 588457
ccguuuccucguuugucaa

SEQ ID NO: 866341 - RNA, 19 nt, Artificial Sequence
  Description of Artificial Sequence: Synthetic oligonucleotide
  Antisense strand to SEQ ID NO: 866340
uugacaaacgaggaaacgg

SEQ ID NO: 866342 - RNA, 19 nt, Artificial Sequence
  Description of Artificial Sequence: Synthetic oligonucleotide
  Sense strand starting at position 2779 of SEQ ID NO: 588457
agaugagugcaaggucaau

SEQ ID NO: 866343 - RNA, 19 nt, Artificial Sequence
  Description of Artificial Sequence: Synthetic oligonucleotide
  Antisense strand to SEQ ID NO: 866342
auugaccuugcacucaucu

SEQ ID NO: 866344 - RNA, 19 nt, Artificial Sequence
  Description of Artificial Sequence: Synthetic oligonucleotide
  Sense strand starting at position 2839 of SEQ ID NO: 588457
auaugcauuugagacgaua

SEQ ID NO: 866345 - RNA, 19 nt, Artificial Sequence
  Description of Artificial Sequence: Synthetic oligonucleotide
  Antisense strand to SEQ ID NO: 866344
uaucgucucaaaugcauau

SEQ ID NO: 866346 - RNA, 19 nt, Artificial Sequence
  Description of Artificial Sequence: Synthetic oligonucleotide
  Sense strand starting at position 2848 of SEQ ID NO: 588457
ugagacgauagccguuuau

SEQ ID NO: 866347 - RNA, 19 nt, Artificial Sequence
  Description of Artificial Sequence: Synthetic oligonucleotide
  Antisense strand to SEQ ID NO: 866346
auaaacggcuaucgucuca

SEQ ID NO: 866348 - RNA, 19 nt, Artificial Sequence
  Description of Artificial Sequence: Synthetic oligonucleotide
  Sense strand starting at position 2852 of SEQ ID NO: 588457
acgauagccguuuauaaug

SEQ ID NO: 866349 - RNA, 19 nt, Artificial Sequence
  Description of Artificial Sequence: Synthetic oligonucleotide
  Antisense strand to SEQ ID NO: 866348
cauuauaaacggcuaucgu

SEQ ID NO: 866350 - RNA, 19 nt, Artificial Sequence
  Description of Artificial Sequence: Synthetic oligonucleotide
  Sense strand starting at position 2948 of SEQ ID NO: 588457
uccgguuuggaaggauuca

SEQ ID NO: 866351 - RNA, 19 nt, Artificial Sequence
  Description of Artificial Sequence: Synthetic oligonucleotide
  Antisense strand to SEQ ID NO: 866350
ugaauccuuccaaaccgga

SEQ ID NO: 866352 - RNA, 19 nt, Artificial Sequence
  Description of Artificial Sequence: Synthetic oligonucleotide
  Sense strand starting at position 3048 of SEQ ID NO: 588457
ggguaaagcucccucuuaa

SEQ ID NO: 866353 - RNA, 19 nt, Artificial Sequence
  Description of Artificial Sequence: Synthetic oligonucleotide
  Antisense strand to SEQ ID NO: 866352
uuaagagggagcuuuaccc

SEQ ID NO: 866354 - RNA, 19 nt, Artificial Sequence
  Description of Artificial Sequence: Synthetic oligonucleotide
  Sense strand starting at position 3078 of SEQ ID NO: 588457
auguacuagagucaguaau

SEQ ID NO: 866355 - RNA, 19 nt, Artificial Sequence
  Description of Artificial Sequence: Synthetic oligonucleotide
  Antisense strand to SEQ ID NO: 866354
auuacugacucuaguacau

SEQ ID NO: 866356 - RNA, 19 nt, Artificial Sequence
  Description of Artificial Sequence: Synthetic oligonucleotide
  Sense strand starting at position 3080 of SEQ ID NO: 588457
guacuagagucaguaauug

SEQ ID NO: 866357 - RNA, 19 nt, Artificial Sequence
  Description of Artificial Sequence: Synthetic oligonucleotide
  Antisense strand to SEQ ID NO: 866356
caauuacugacucuaguac

SEQ ID NO: 866358 - RNA, 19 nt, Artificial Sequence
  Description of Artificial Sequence: Synthetic oligonucleotide
  Sense strand starting at position 3123 of SEQ ID NO: 588457
aaaggcuguuguuuaagua

SEQ ID NO: 866359 - RNA, 19 nt, Artificial Sequence
  Description of Artificial Sequence: Synthetic oligonucleotide
  Antisense strand to SEQ ID NO: 866358
uacuuaaacaacagccuuu

SEQ ID NO: 866360 - RNA, 19 nt, Artificial Sequence
  Description of Artificial Sequence: Synthetic oligonucleotide
  Sense strand starting at position 3287 of SEQ ID NO: 588457
ucuugaaugccucaugcca

SEQ ID NO: 866361 - RNA, 19 nt, Artificial Sequence
  Description of Artificial Sequence: Synthetic oligonucleotide
  Antisense strand to SEQ ID NO: 866360
uggcaugaggcauucaaga

SEQ ID NO: 866362 - RNA, 19 nt, Artificial Sequence
  Description of Artificial Sequence: Synthetic oligonucleotide
  Sense strand starting at position 3368 of SEQ ID NO: 588457
gaggcauuaccauguguau

SEQ ID NO: 866363 - RNA, 19 nt, Artificial Sequence
  Description of Artificial Sequence: Synthetic oligonucleotide
  Antisense strand to SEQ ID NO: 866362
auacacaugguaaugccuc

SEQ ID NO: 866364 - RNA, 19 nt, Artificial Sequence
  Description of Artificial Sequence: Synthetic oligonucleotide
  Sense strand starting at position 3421 of SEQ ID NO: 588457
uuaaguacucucuggaggu

SEQ ID NO: 866365 - RNA, 19 nt, Artificial Sequence
  Description of Artificial Sequence: Synthetic oligonucleotide
  Antisense strand to SEQ ID NO: 866364
accuccagagaguacuuaa

SEQ ID NO: 866366 - RNA, 19 nt, Artificial Sequence
  Description of Artificial Sequence: Synthetic oligonucleotide
  Sense strand starting at position 3529 of SEQ ID NO: 588457
ccuuuccuggcuugggaaa

SEQ ID NO: 866367 - RNA, 19 nt, Artificial Sequence
  Description of Artificial Sequence: Synthetic oligonucleotide
  Antisense strand to SEQ ID NO: 866366
uuucccaagccaggaaagg

SEQ ID NO: 866368 - RNA, 19 nt, Artificial Sequence
  Description of Artificial Sequence: Synthetic oligonucleotide
  Sense strand starting at position 3540 of SEQ ID NO: 588457
uugggaaauucugcccagu

SEQ ID NO: 866369 - RNA, 19 nt, Artificial Sequence
  Description of Artificial Sequence: Synthetic oligonucleotide
  Antisense strand to SEQ ID NO: 866368
acugggcagaauuucccaa

SEQ ID NO: 866370 - RNA, 19 nt, Artificial Sequence
  Description of Artificial Sequence: Synthetic oligonucleotide
  Sense strand starting at position 3542 of SEQ ID NO: 588457
gggaaauucugcccaguuc

SEQ ID NO: 866371 - RNA, 19 nt, Artificial Sequence
  Description of Artificial Sequence: Synthetic oligonucleotide
  Antisense strand to SEQ ID NO: 866370
gaacugggcagaauuuccc

SEQ ID NO: 866372 - RNA, 19 nt, Artificial Sequence
  Description of Artificial Sequence: Synthetic oligonucleotide
  Sense strand starting at position 3556 of SEQ ID NO: 588457
aguuccacuuucucugaga

SEQ ID NO: 866373 - RNA, 19 nt, Artificial Sequence
  Description of Artificial Sequence: Synthetic oligonucleotide
  Antisense strand to SEQ ID NO: 866372
ucucagagaaaguggaacu

SEQ ID NO: 866374 - RNA, 19 nt, Artificial Sequence
  Description of Artificial Sequence: Synthetic oligonucleotide
  Sense strand starting at position 3557 of SEQ ID NO: 588457
guuccacuuucucugagaa

SEQ ID NO: 866375 - RNA, 19 nt, Artificial Sequence
  Description of Artificial Sequence: Synthetic oligonucleotide
  Antisense strand to SEQ ID NO: 866374
uucucagagaaaguggaac

SEQ ID NO: 866376 - RNA, 19 nt, Artificial Sequence
  Description of Artificial Sequence: Synthetic oligonucleotide
  Sense strand starting at position 3732 of SEQ ID NO: 588457
auacacaugccuuggaauu

SEQ ID NO: 866377 - RNA, 19 nt, Artificial Sequence
  Description of Artificial Sequence: Synthetic oligonucleotide
  Antisense strand to SEQ ID NO: 866376
aauuccaaggcauguguau

SEQ ID NO: 866378 - RNA, 19 nt, Artificial Sequence
  Description of Artificial Sequence: Synthetic oligonucleotide
  Sense strand starting at position 3863 of SEQ ID NO: 588457
uggagaaugucugcuccaa

SEQ ID NO: 866379 - RNA, 19 nt, Artificial Sequence
  Description of Artificial Sequence: Synthetic oligonucleotide
  Antisense strand to SEQ ID NO: 866378
uuggagcagacauucucca

SEQ ID NO: 866380 - RNA, 19 nt, Artificial Sequence
  Description of Artificial Sequence: Synthetic oligonucleotide
  Sense strand starting at position 3865 of SEQ ID NO: 588457
gagaaugucugcuccaacu

SEQ ID NO: 866381 - RNA, 19 nt, Artificial Sequence
  Description of Artificial Sequence: Synthetic oligonucleotide
  Antisense strand to SEQ ID NO: 866380
aguuggagcagacauucuc

SEQ ID NO: 866382 - RNA, 19 nt, Artificial Sequence
  Description of Artificial Sequence: Synthetic oligonucleotide
  Sense strand starting at position 3959 of SEQ ID NO: 588457
uauucuaagcugggucaga

SEQ ID NO: 866383 - RNA, 19 nt, Artificial Sequence
  Description of Artificial Sequence: Synthetic oligonucleotide
  Antisense strand to SEQ ID NO: 866382
ucugacccagcuuagaaua

SEQ ID NO: 866384 - RNA, 19 nt, Artificial Sequence
  Description of Artificial Sequence: Synthetic oligonucleotide
  Sense strand starting at position 3960 of SEQ ID NO: 588457
auucuaagcugggucagau

SEQ ID NO: 866385 - RNA, 19 nt, Artificial Sequence
  Description of Artificial Sequence: Synthetic oligonucleotide
  Antisense strand to SEQ ID NO: 866384
aucugacccagcuuagaau

SEQ ID NO: 866386 - RNA, 19 nt, Artificial Sequence
  Description of Artificial Sequence: Synthetic oligonucleotide
  Sense strand starting at position 3970 of SEQ ID NO: 588457
gggucagaugccuacccau

SEQ ID NO: 866387 - RNA, 19 nt, Artificial Sequence
  Description of Artificial Sequence: Synthetic oligonucleotide
  Antisense strand to SEQ ID NO: 866386
auggguaggcaucugaccc

SEQ ID NO: 866388 - RNA, 19 nt, Artificial Sequence
  Description of Artificial Sequence: Synthetic oligonucleotide
  Sense strand starting at position 300 of SEQ ID NO: 588458
gagugaauuauguguaugu

SEQ ID NO: 866389 - RNA, 19 nt, Artificial Sequence
  Description of Artificial Sequence: Synthetic oligonucleotide
  Antisense strand to SEQ ID NO: 866388
acauacacauaauucacuc

SEQ ID NO: 866390 - RNA, 19 nt, Artificial Sequence
  Description of Artificial Sequence: Synthetic oligonucleotide
  Sense strand starting at position 301 of SEQ ID NO: 588458
agugaauuauguguaugua

SEQ ID NO: 866391 - RNA, 19 nt, Artificial Sequence
  Description of Artificial Sequence: Synthetic oligonucleotide
  Antisense strand to SEQ ID NO: 866390
uacauacacauaauucacu

SEQ ID NO: 866392 - RNA, 19 nt, Artificial Sequence
  Description of Artificial Sequence: Synthetic oligonucleotide
  Sense strand starting at position 302 of SEQ ID NO: 588458
gugaauuauguguauguaa

SEQ ID NO: 866393 - RNA, 19 nt, Artificial Sequence
  Description of Artificial Sequence: Synthetic oligonucleotide
  Antisense strand to SEQ ID NO: 866392
uuacauacacauaauucac

SEQ ID NO: 866394 - RNA, 19 nt, Artificial Sequence
  Description of Artificial Sequence: Synthetic oligonucleotide
  Sense strand starting at position 404 of SEQ ID NO: 588458
acacgcuuccuguguacua

SEQ ID NO: 866395 - RNA, 19 nt, Artificial Sequence
  Description of Artificial Sequence: Synthetic oligonucleotide
  Antisense strand to SEQ ID NO: 866394
uaguacacaggaagcgugu

SEQ ID NO: 866396 - RNA, 19 nt, Artificial Sequence
  Description of Artificial Sequence: Synthetic oligonucleotide
  Sense strand starting at position 406 of SEQ ID NO: 588458
acgcuuccuguguacuauu

SEQ ID NO: 866397 - RNA, 19 nt, Artificial Sequence
  Description of Artificial Sequence: Synthetic oligonucleotide
  Antisense strand to SEQ ID NO: 866396
aauaguacacaggaagcgu

SEQ ID NO: 866398 - RNA, 19 nt, Artificial Sequence
  Description of Artificial Sequence: Synthetic oligonucleotide
  Sense strand starting at position 415 of SEQ ID NO: 588458
guguacuauucugccaaag

SEQ ID NO: 866399 - RNA, 19 nt, Artificial Sequence
  Description of Artificial Sequence: Synthetic oligonucleotide
  Antisense strand to SEQ ID NO: 866398
cuuuggcagaauaguacac

SEQ ID NO: 866400 - RNA, 19 nt, Artificial Sequence
  Description of Artificial Sequence: Synthetic oligonucleotide
  Sense strand starting at position 456 of SEQ ID NO: 588458
cccugugggucagugaagu

SEQ ID NO: 866401 - RNA, 19 nt, Artificial Sequence
  Description of Artificial Sequence: Synthetic oligonucleotide
  Antisense strand to SEQ ID NO: 866400
acuucacugacccacaggg

SEQ ID NO: 866402 - RNA, 19 nt, Artificial Sequence
  Description of Artificial Sequence: Synthetic oligonucleotide
  Sense strand starting at position 735 of SEQ ID NO: 588458
ccuggucagaccuaguuga

SEQ ID NO: 866403 - RNA, 19 nt, Artificial Sequence
  Description of Artificial Sequence: Synthetic oligonucleotide
  Antisense strand to SEQ ID NO: 866402
ucaacuaggucugaccagg

SEQ ID NO: 866404 - RNA, 19 nt, Artificial Sequence
  Description of Artificial Sequence: Synthetic oligonucleotide
  Sense strand starting at position 765 of SEQ ID NO: 588458
gagagccagggcuagaauu

SEQ ID NO: 866405 - RNA, 19 nt, Artificial Sequence
  Description of Artificial Sequence: Synthetic oligonucleotide
  Antisense strand to SEQ ID NO: 866404
aauucuagcccuggcucuc

SEQ ID NO: 866406 - RNA, 19 nt, Artificial Sequence
  Description of Artificial Sequence: Synthetic oligonucleotide
  Sense strand starting at position 892 of SEQ ID NO: 588458
gaggaaacuucuuaggaaa

SEQ ID NO: 866407 - RNA, 19 nt, Artificial Sequence
  Description of Artificial Sequence: Synthetic oligonucleotide
  Antisense strand to SEQ ID NO: 866406
uuuccuaagaaguuuccuc

SEQ ID NO: 866408 - RNA, 19 nt, Artificial Sequence
  Description of Artificial Sequence: Synthetic oligonucleotide
  Sense strand starting at position 1109 of SEQ ID NO: 588458
auagaagcccauugugaug

SEQ ID NO: 866409 - RNA, 19 nt, Artificial Sequence
  Description of Artificial Sequence: Synthetic oligonucleotide
  Antisense strand to SEQ ID NO: 866408
caucacaaugggcuucuau

SEQ ID NO: 866410 - RNA, 19 nt, Artificial Sequence
  Description of Artificial Sequence: Synthetic oligonucleotide
  Sense strand starting at position 1115 of SEQ ID NO: 588458
gcccauugugaugauaagu

SEQ ID NO: 866411 - RNA, 19 nt, Artificial Sequence
  Description of Artificial Sequence: Synthetic oligonucleotide
  Antisense strand to SEQ ID NO: 866410
acuuaucaucacaaugggc

SEQ ID NO: 866412 - RNA, 19 nt, Artificial Sequence
  Description of Artificial Sequence: Synthetic oligonucleotide
  Sense strand starting at position 1120 of SEQ ID NO: 588458
uugugaugauaaguacuuu

SEQ ID NO: 866413 - RNA, 19 nt, Artificial Sequence
  Description of Artificial Sequence: Synthetic oligonucleotide
  Antisense strand to SEQ ID NO: 866412
aaaguacuuaucaucacaa

SEQ ID NO: 866414 - RNA, 19 nt, Artificial Sequence
  Description of Artificial Sequence: Synthetic oligonucleotide
  Sense strand starting at position 1126 of SEQ ID NO: 588458
ugauaaguacuuuauaagc

SEQ ID NO: 866415 - RNA, 19 nt, Artificial Sequence
  Description of Artificial Sequence: Synthetic oligonucleotide
  Antisense strand to SEQ ID NO: 866414
gcuuauaaaguacuuauca

SEQ ID NO: 866416 - RNA, 19 nt, Artificial Sequence
  Description of Artificial Sequence: Synthetic oligonucleotide
  Sense strand starting at position 1142 of SEQ ID NO: 588458
agcauugucuuguugaauc

SEQ ID NO: 866417 - RNA, 19 nt, Artificial Sequence
  Description of Artificial Sequence: Synthetic oligonucleotide
  Antisense strand to SEQ ID NO: 866416
gauucaacaagacaaugcu

SEQ ID NO: 866418 - RNA, 19 nt, Artificial Sequence
  Description of Artificial Sequence: Synthetic oligonucleotide
  Sense strand starting at position 1255 of SEQ ID NO: 588458
agggcugucugacucugaa

SEQ ID NO: 866419 - RNA, 19 nt, Artificial Sequence
  Description of Artificial Sequence: Synthetic oligonucleotide
  Antisense strand to SEQ ID NO: 866418
uucagagucagacagcccu

SEQ ID NO: 866420 - RNA, 19 nt, Artificial Sequence
  Description of Artificial Sequence: Synthetic oligonucleotide
  Sense strand starting at position 1631 of SEQ ID NO: 588458
gcguaaacaguuuggagaa

SEQ ID NO: 866421 - RNA, 19 nt, Artificial Sequence
  Description of Artificial Sequence: Synthetic oligonucleotide
  Antisense strand to SEQ ID NO: 866420
uucuccaaacuguuuacgc

SEQ ID NO: 866422 - RNA, 19 nt, Artificial Sequence
  Description of Artificial Sequence: Synthetic oligonucleotide
  Sense strand starting at position 1795 of SEQ ID NO: 588458
gguguugaacuaggaguca

SEQ ID NO: 866423 - RNA, 19 nt, Artificial Sequence
  Description of Artificial Sequence: Synthetic oligonucleotide
  Antisense strand to SEQ ID NO: 866422
ugacuccuaguucaacacc

SEQ ID NO: 866424 - RNA, 19 nt, Artificial Sequence
  Description of Artificial Sequence: Synthetic oligonucleotide
  Sense strand starting at position 2013 of SEQ ID NO: 588458
ucaggauuagucuggaaau

SEQ ID NO: 866425 - RNA, 19 nt, Artificial Sequence
  Description of Artificial Sequence: Synthetic oligonucleotide
  Antisense strand to SEQ ID NO: 866424
auuuccagacuaauccuga

SEQ ID NO: 866426 - RNA, 19 nt, Artificial Sequence
  Description of Artificial Sequence: Synthetic oligonucleotide
  Sense strand starting at position 2025 of SEQ ID NO: 588458
uggaaauagcugugccaag

SEQ ID NO: 866427 - RNA, 19 nt, Artificial Sequence
  Description of Artificial Sequence: Synthetic oligonucleotide
  Antisense strand to SEQ ID NO: 866426
cuuggcacagcuauuucca

SEQ ID NO: 866428 - RNA, 19 nt, Artificial Sequence
  Description of Artificial Sequence: Synthetic oligonucleotide
  Sense strand starting at position 2220 of SEQ ID NO: 588458
guaugcuuuguggagagga

SEQ ID NO: 866429 - RNA, 19 nt, Artificial Sequence
  Description of Artificial Sequence: Synthetic oligonucleotide
  Antisense strand to SEQ ID NO: 866428
uccucuccacaaagcauac

SEQ ID NO: 866430 - RNA, 19 nt, Artificial Sequence
  Description of Artificial Sequence: Synthetic oligonucleotide
  Sense strand starting at position 2378 of SEQ ID NO: 588458
guaauaaacaugugagcag

SEQ ID NO: 866431 - RNA, 19 nt, Artificial Sequence
  Description of Artificial Sequence: Synthetic oligonucleotide
  Antisense strand to SEQ ID NO: 866430
cugcucacauguuuauuac

SEQ ID NO: 866432 - RNA, 19 nt, Artificial Sequence
  Description of Artificial Sequence: Synthetic oligonucleotide
  Sense strand starting at position 2739 of SEQ ID NO: 588458
gggacaucuuguuucuagu

SEQ ID NO: 866433 - RNA, 19 nt, Artificial Sequence
  Description of Artificial Sequence: Synthetic oligonucleotide
  Antisense strand to SEQ ID NO: 866432
acuagaaacaagauguccc

SEQ ID NO: 866434 - RNA, 19 nt, Artificial Sequence
  Description of Artificial Sequence: Synthetic oligonucleotide
  Sense strand starting at position 2745 of SEQ ID NO: 588458
ucuuguuucuaguugagaa

SEQ ID NO: 866435 - RNA, 19 nt, Artificial Sequence
  Description of Artificial Sequence: Synthetic oligonucleotide
  Antisense strand to SEQ ID NO: 866434
uucucaacuagaaacaaga

SEQ ID NO: 866436 - RNA, 19 nt, Artificial Sequence
  Description of Artificial Sequence: Synthetic oligonucleotide
  Sense strand starting at position 2747 of SEQ ID NO: 588458
uuguuucuaguugagaauu

SEQ ID NO: 866437 - RNA, 19 nt, Artificial Sequence
  Description of Artificial Sequence: Synthetic oligonucleotide
  Antisense strand to SEQ ID NO: 866436
aauucucaacuagaaacaa

SEQ ID NO: 866438 - RNA, 19 nt, Artificial Sequence
  Description of Artificial Sequence: Synthetic oligonucleotide
  Sense strand starting at position 2860 of SEQ ID NO: 588458
aucguuauacaccagacau

SEQ ID NO: 866439 - RNA, 19 nt, Artificial Sequence
  Description of Artificial Sequence: Synthetic oligonucleotide
  Antisense strand to SEQ ID NO: 866438
augucugguguauaacgau

SEQ ID NO: 866440 - RNA, 19 nt, Artificial Sequence
  Description of Artificial Sequence: Synthetic oligonucleotide
  Sense strand starting at position 2862 of SEQ ID NO: 588458
cguuauacaccagacaugu

SEQ ID NO: 866441 - RNA, 19 nt, Artificial Sequence
  Description of Artificial Sequence: Synthetic oligonucleotide
  Antisense strand to SEQ ID NO: 866440
acaugucugguguauaacg

SEQ ID NO: 866442 - RNA, 19 nt, Artificial Sequence
  Description of Artificial Sequence: Synthetic oligonucleotide
  Sense strand starting at position 3274 of SEQ ID NO: 588458
auggacuaauuguucugaa

SEQ ID NO: 866443 - RNA, 19 nt, Artificial Sequence
  Description of Artificial Sequence: Synthetic oligonucleotide
  Antisense strand to SEQ ID NO: 866442
uucagaacaauuaguccau

SEQ ID NO: 866444 - RNA, 19 nt, Artificial Sequence
  Description of Artificial Sequence: Synthetic oligonucleotide
  Sense strand starting at position 3275 of SEQ ID NO: 588458
uggacuaauuguucugaaa

SEQ ID NO: 866445 - RNA, 19 nt, Artificial Sequence
  Description of Artificial Sequence: Synthetic oligonucleotide
  Antisense strand to SEQ ID NO: 866444
uuucagaacaauuagucca

SEQ ID NO: 866446 - RNA, 19 nt, Artificial Sequence
  Description of Artificial Sequence: Synthetic oligonucleotide
  Sense strand starting at position 3287 of SEQ ID NO: 588458
ucugaaaucccauggauca

SEQ ID NO: 866447 - RNA, 19 nt, Artificial Sequence
  Description of Artificial Sequence: Synthetic oligonucleotide
  Antisense strand to SEQ ID NO: 866446
ugauccaugggauuucaga

SEQ ID NO: 866448 - RNA, 19 nt, Artificial Sequence
  Description of Artificial Sequence: Synthetic oligonucleotide
  Sense strand starting at position 3469 of SEQ ID NO: 588458
ggugccuucuugccuggaa

SEQ ID NO: 866449 - RNA, 19 nt, Artificial Sequence
  Description of Artificial Sequence: Synthetic oligonucleotide
  Antisense strand to SEQ ID NO: 866448
uuccaggcaagaaggcacc

SEQ ID NO: 866450 - RNA, 19 nt, Artificial Sequence
  Description of Artificial Sequence: Synthetic oligonucleotide
  Sense strand starting at position 3470 of SEQ ID NO: 588458
gugccuucuugccuggaau

SEQ ID NO: 866451 - RNA, 19 nt, Artificial Sequence
  Description of Artificial Sequence: Synthetic oligonucleotide
  Antisense strand to SEQ ID NO: 866450
auuccaggcaagaaggcac

SEQ ID NO: 866452 - RNA, 19 nt, Artificial Sequence
  Description of Artificial Sequence: Synthetic oligonucleotide
  Sense strand starting at position 3574 of SEQ ID NO: 588458
agagcacucugggcguuaa

SEQ ID NO: 866453 - RNA, 19 nt, Artificial Sequence
  Description of Artificial Sequence: Synthetic oligonucleotide
  Antisense strand to SEQ ID NO: 866452
uuaacgcccagagugcucu

SEQ ID NO: 866454 - RNA, 19 nt, Artificial Sequence
  Description of Artificial Sequence: Synthetic oligonucleotide
  Sense strand starting at position 3609 of SEQ ID NO: 588458
cuuggauuagaguggaucu

SEQ ID NO: 866455 - RNA, 19 nt, Artificial Sequence
  Description of Artificial Sequence: Synthetic oligonucleotide
  Antisense strand to SEQ ID NO: 866454
agauccacucuaauccaag

SEQ ID NO: 866456 - RNA, 19 nt, Artificial Sequence
  Description of Artificial Sequence: Synthetic oligonucleotide
  Sense strand starting at position 3716 of SEQ ID NO: 588458
cugagagaauccugggaaa

SEQ ID NO: 866457 - RNA, 19 nt, Artificial Sequence
  Description of Artificial Sequence: Synthetic oligonucleotide
  Antisense strand to SEQ ID NO: 866456
uuucccaggauucucucag

SEQ ID NO: 866458 - RNA, 19 nt, Artificial Sequence
  Description of Artificial Sequence: Synthetic oligonucleotide
  Sense strand starting at position 3719 of SEQ ID NO: 588458
agagaauccugggaaagug

SEQ ID NO: 866459 - RNA, 19 nt, Artificial Sequence
  Description of Artificial Sequence: Synthetic oligonucleotide
  Antisense strand to SEQ ID NO: 866458
cacuuucccaggauucucu

SEQ ID NO: 866460 - RNA, 19 nt, Artificial Sequence
  Description of Artificial Sequence: Synthetic oligonucleotide
  Sense strand starting at position 3824 of SEQ ID NO: 588458
ccucauggcuuaucaggau

SEQ ID NO: 866461 - RNA, 19 nt, Artificial Sequence
  Description of Artificial Sequence: Synthetic oligonucleotide
  Antisense strand to SEQ ID NO: 866460
auccugauaagccaugagg

SEQ ID NO: 866462 - RNA, 19 nt, Artificial Sequence
  Description of Artificial Sequence: Synthetic oligonucleotide
  Sense strand starting at position 3876 of SEQ ID NO: 588458
uaaugaaaucugggcaagu

SEQ ID NO: 866463 - RNA, 19 nt, Artificial Sequence
  Description of Artificial Sequence: Synthetic oligonucleotide
  Antisense strand to SEQ ID NO: 866462
acuugcccagauuucauua

SEQ ID NO: 866464 - RNA, 19 nt, Artificial Sequence
  Description of Artificial Sequence: Synthetic oligonucleotide
  Sense strand starting at position 3877 of SEQ ID NO: 588458
aaugaaaucugggcaaguc

SEQ ID NO: 866465 - RNA, 19 nt, Artificial Sequence
  Description of Artificial Sequence: Synthetic oligonucleotide
  Antisense strand to SEQ ID NO: 866464
gacuugcccagauuucauu

SEQ ID NO: 866466 - RNA, 19 nt, Artificial Sequence
  Description of Artificial Sequence: Synthetic oligonucleotide
  Sense strand starting at position 3923 of SEQ ID NO: 588458
uucccagaggucuagcaua

SEQ ID NO: 866467 - RNA, 19 nt, Artificial Sequence
  Description of Artificial Sequence: Synthetic oligonucleotide
  Antisense strand to SEQ ID NO: 866466
uaugcuagaccucugggaa

SEQ ID NO: 866468 - RNA, 19 nt, Artificial Sequence
  Description of Artificial Sequence: Synthetic oligonucleotide
  Sense strand starting at position 39 of SEQ ID NO: 588459
guagguaaugcauguaaga

SEQ ID NO: 866469 - RNA, 19 nt, Artificial Sequence
  Description of Artificial Sequence: Synthetic oligonucleotide
  Antisense strand to SEQ ID NO: 866468
ucuuacaugcauuaccuac

SEQ ID NO: 866470 - RNA, 19 nt, Artificial Sequence
  Description of Artificial Sequence: Synthetic oligonucleotide
  Sense strand starting at position 41 of SEQ ID NO: 588459
agguaaugcauguaagaug

SEQ ID NO: 866471 - RNA, 19 nt, Artificial Sequence
  Description of Artificial Sequence: Synthetic oligonucleotide
  Antisense strand to SEQ ID NO: 866470
caucuuacaugcauuaccu

SEQ ID NO: 866472 - RNA, 19 nt, Artificial Sequence
  Description of Artificial Sequence: Synthetic oligonucleotide
  Sense strand starting at position 50 of SEQ ID NO: 588459
auguaagaugcuuaaucua

SEQ ID NO: 866473 - RNA, 19 nt, Artificial Sequence
  Description of Artificial Sequence: Synthetic oligonucleotide
  Antisense strand to SEQ ID NO: 866472
uagauuaagcaucuuacau

SEQ ID NO: 866474 - RNA, 19 nt, Artificial Sequence
  Description of Artificial Sequence: Synthetic oligonucleotide
  Sense strand starting at position 198 of SEQ ID NO: 588459
cacugugcacauuagugaa

SEQ ID NO: 866475 - RNA, 19 nt, Artificial Sequence
  Description of Artificial Sequence: Synthetic oligonucleotide
  Antisense strand to SEQ ID NO: 866474
uucacuaaugugcacagug

SEQ ID NO: 866476 - RNA, 19 nt, Artificial Sequence
  Description of Artificial Sequence: Synthetic oligonucleotide
  Sense strand starting at position 200 of SEQ ID NO: 588459
cugugcacauuagugaaau

SEQ ID NO: 866477 - RNA, 19 nt, Artificial Sequence
  Description of Artificial Sequence: Synthetic oligonucleotide
  Antisense strand to SEQ ID NO: 866476
auuucacuaaugugcacag

SEQ ID NO: 866478 - RNA, 19 nt, Artificial Sequence
  Description of Artificial Sequence: Synthetic oligonucleotide
  Sense strand starting at position 234 of SEQ ID NO: 588459
caaggaggguaggauuauu

SEQ ID NO: 866479 - RNA, 19 nt, Artificial Sequence
  Description of Artificial Sequence: Synthetic oligonucleotide
  Antisense strand to SEQ ID NO: 866478
aauaauccuacccuccuug

SEQ ID NO: 866480 - RNA, 19 nt, Artificial Sequence
  Description of Artificial Sequence: Synthetic oligonucleotide
  Sense strand starting at position 242 of SEQ ID NO: 588459
guaggauuauucccucuca

SEQ ID NO: 866481 - RNA, 19 nt, Artificial Sequence
  Description of Artificial Sequence: Synthetic oligonucleotide
  Antisense strand to SEQ ID NO: 866480
ugagagggaauaauccuac

SEQ ID NO: 866482 - RNA, 19 nt, Artificial Sequence
  Description of Artificial Sequence: Synthetic oligonucleotide
  Sense strand starting at position 267 of SEQ ID NO: 588459
ggaguaauggaagggcaau

SEQ ID NO: 866483 - RNA, 19 nt, Artificial Sequence
  Description of Artificial Sequence: Synthetic oligonucleotide
  Antisense strand to SEQ ID NO: 866482
auugcccuuccauuacucc

SEQ ID NO: 866484 - RNA, 19 nt, Artificial Sequence
  Description of Artificial Sequence: Synthetic oligonucleotide
  Sense strand starting at position 408 of SEQ ID NO: 588459
ggaggaauccauugaguuc

SEQ ID NO: 866485 - RNA, 19 nt, Artificial Sequence
  Description of Artificial Sequence: Synthetic oligonucleotide
  Antisense strand to SEQ ID NO: 866484
gaacucaauggauuccucc

SEQ ID NO: 866486 - RNA, 19 nt, Artificial Sequence
  Description of Artificial Sequence: Synthetic oligonucleotide
  Sense strand starting at position 799 of SEQ ID NO: 588459
gagugaauuauguguaugu

SEQ ID NO: 866487 - RNA, 19 nt, Artificial Sequence
  Description of Artificial Sequence: Synthetic oligonucleotide
  Antisense strand to SEQ ID NO: 866486
acauacacauaauucacuc

SEQ ID NO: 866488 - RNA, 19 nt, Artificial Sequence
  Description of Artificial Sequence: Synthetic oligonucleotide
  Sense strand starting at position 800 of SEQ ID NO: 588459
agugaauuauguguaugua

SEQ ID NO: 866489 - RNA, 19 nt, Artificial Sequence
  Description of Artificial Sequence: Synthetic oligonucleotide
  Antisense strand to SEQ ID NO: 866488
uacauacacauaauucacu

SEQ ID NO: 866490 - RNA, 19 nt, Artificial Sequence
  Description of Artificial Sequence: Synthetic oligonucleotide
  Sense strand starting at position 801 of SEQ ID NO: 588459
gugaauuauguguauguaa

SEQ ID NO: 866491 - RNA, 19 nt, Artificial Sequence
  Description of Artificial Sequence: Synthetic oligonucleotide
  Antisense strand to SEQ ID NO: 866490
uuacauacacauaauucac

SEQ ID NO: 866492 - RNA, 19 nt, Artificial Sequence
  Description of Artificial Sequence: Synthetic oligonucleotide
  Sense strand starting at position 905 of SEQ ID NO: 588459
acgcuuccuguguacuauu

SEQ ID NO: 866493 - RNA, 19 nt, Artificial Sequence
  Description of Artificial Sequence: Synthetic oligonucleotide
  Antisense strand to SEQ ID NO: 866492
aauaguacacaggaagcgu

SEQ ID NO: 866494 - RNA, 19 nt, Artificial Sequence
  Description of Artificial Sequence: Synthetic oligonucleotide
  Sense strand starting at position 914 of SEQ ID NO: 588459
guguacuauucugccaaag

SEQ ID NO: 866495 - RNA, 19 nt, Artificial Sequence
  Description of Artificial Sequence: Synthetic oligonucleotide
  Antisense strand to SEQ ID NO: 866494
cuuuggcagaauaguacac

SEQ ID NO: 866496 - RNA, 19 nt, Artificial Sequence
  Description of Artificial Sequence: Synthetic oligonucleotide
  Sense strand starting at position 955 of SEQ ID NO: 588459
cccugugggucagugaagu

SEQ ID NO: 866497 - RNA, 19 nt, Artificial Sequence
  Description of Artificial Sequence: Synthetic oligonucleotide
  Antisense strand to SEQ ID NO: 866496
acuucacugacccacaggg

SEQ ID NO: 866498 - RNA, 19 nt, Artificial Sequence
  Description of Artificial Sequence: Synthetic oligonucleotide
  Sense strand starting at position 1234 of SEQ ID NO: 588459
ccuggucagaccuaguuga

SEQ ID NO: 866499 - RNA, 19 nt, Artificial Sequence
  Description of Artificial Sequence: Synthetic oligonucleotide
  Antisense strand to SEQ ID NO: 866498
ucaacuaggucugaccagg

SEQ ID NO: 866500 - RNA, 19 nt, Artificial Sequence
  Description of Artificial Sequence: Synthetic oligonucleotide
  Sense strand starting at position 1264 of SEQ ID NO: 588459
gagagccagggcuagaauu

SEQ ID NO: 866501 - RNA, 19 nt, Artificial Sequence
  Description of Artificial Sequence: Synthetic oligonucleotide
  Antisense strand to SEQ ID NO: 866500
aauucuagcccuggcucuc

SEQ ID NO: 866502 - RNA, 19 nt, Artificial Sequence
  Description of Artificial Sequence: Synthetic oligonucleotide
  Sense strand starting at position 1391 of SEQ ID NO: 588459
gaggaaacuucuuaggaaa

SEQ ID NO: 866503 - RNA, 19 nt, Artificial Sequence
  Description of Artificial Sequence: Synthetic oligonucleotide
  Antisense strand to SEQ ID NO: 866502
uuuccuaagaaguuuccuc

SEQ ID NO: 866504 - RNA, 19 nt, Artificial Sequence
  Description of Artificial Sequence: Synthetic oligonucleotide
  Sense strand starting at position 1608 of SEQ ID NO: 588459
auagaagcccauugugaug

SEQ ID NO: 866505 - RNA, 19 nt, Artificial Sequence
  Description of Artificial Sequence: Synthetic oligonucleotide
  Antisense strand to SEQ ID NO: 866504
caucacaaugggcuucuau

SEQ ID NO: 866506 - RNA, 19 nt, Artificial Sequence
  Description of Artificial Sequence: Synthetic oligonucleotide
  Sense strand starting at position 1614 of SEQ ID NO: 588459
gcccauugugaugauaagu

SEQ ID NO: 866507 - RNA, 19 nt, Artificial Sequence
  Description of Artificial Sequence: Synthetic oligonucleotide
  Antisense strand to SEQ ID NO: 866506
acuuaucaucacaaugggc

SEQ ID NO: 866508 - RNA, 19 nt, Artificial Sequence
  Description of Artificial Sequence: Synthetic oligonucleotide
  Sense strand starting at position 1619 of SEQ ID NO: 588459
uugugaugauaaguacuuu

SEQ ID NO: 866509 - RNA, 19 nt, Artificial Sequence
  Description of Artificial Sequence: Synthetic oligonucleotide
  Antisense strand to SEQ ID NO: 866508
aaaguacuuaucaucacaa

SEQ ID NO: 866510 - RNA, 19 nt, Artificial Sequence
  Description of Artificial Sequence: Synthetic oligonucleotide
  Sense strand starting at position 1625 of SEQ ID NO: 588459
ugauaaguacuuuauaagc

SEQ ID NO: 866511 - RNA, 19 nt, Artificial Sequence
  Description of Artificial Sequence: Synthetic oligonucleotide
  Antisense strand to SEQ ID NO: 866510
gcuuauaaaguacuuauca

SEQ ID NO: 866512 - RNA, 19 nt, Artificial Sequence
  Description of Artificial Sequence: Synthetic oligonucleotide
  Sense strand starting at position 1641 of SEQ ID NO: 588459
agcauugucuuguugaauc

SEQ ID NO: 866513 - RNA, 19 nt, Artificial Sequence
  Description of Artificial Sequence: Synthetic oligonucleotide
  Antisense strand to SEQ ID NO: 866512
gauucaacaagacaaugcu

SEQ ID NO: 866514 - RNA, 19 nt, Artificial Sequence
  Description of Artificial Sequence: Synthetic oligonucleotide
  Sense strand starting at position 1754 of SEQ ID NO: 588459
agggcugucugacucugaa

SEQ ID NO: 866515 - RNA, 19 nt, Artificial Sequence
  Description of Artificial Sequence: Synthetic oligonucleotide
  Antisense strand to SEQ ID NO: 866514
uucagagucagacagcccu

SEQ ID NO: 866516 - RNA, 19 nt, Artificial Sequence
  Description of Artificial Sequence: Synthetic oligonucleotide
  Sense strand starting at position 2130 of SEQ ID NO: 588459
gcguaaacaguuuggagaa

SEQ ID NO: 866517 - RNA, 19 nt, Artificial Sequence
  Description of Artificial Sequence: Synthetic oligonucleotide
  Antisense strand to SEQ ID NO: 866516
uucuccaaacuguuuacgc

SEQ ID NO: 866518 - RNA, 19 nt, Artificial Sequence
  Description of Artificial Sequence: Synthetic oligonucleotide
  Sense strand starting at position 2294 of SEQ ID NO: 588459
gguguugaacuaggaguca

SEQ ID NO: 866519 - RNA, 19 nt, Artificial Sequence
  Description of Artificial Sequence: Synthetic oligonucleotide
  Antisense strand to SEQ ID NO: 866518
ugacuccuaguucaacacc

SEQ ID NO: 866520 - RNA, 19 nt, Artificial Sequence
  Description of Artificial Sequence: Synthetic oligonucleotide
  Sense strand starting at position 2512 of SEQ ID NO: 588459
ucaggauuagucuggaaau

SEQ ID NO: 866521 - RNA, 19 nt, Artificial Sequence
  Description of Artificial Sequence: Synthetic oligonucleotide
  Antisense strand to SEQ ID NO: 866520
auuuccagacuaauccuga

SEQ ID NO: 866522 - RNA, 19 nt, Artificial Sequence
  Description of Artificial Sequence: Synthetic oligonucleotide
  Sense strand starting at position 2524 of SEQ ID NO: 588459
uggaaauagcugugccaag

SEQ ID NO: 866523 - RNA, 19 nt, Artificial Sequence
  Description of Artificial Sequence: Synthetic oligonucleotide
  Antisense strand to SEQ ID NO: 866522
cuuggcacagcuauuucca

SEQ ID NO: 866524 - RNA, 19 nt, Artificial Sequence
  Description of Artificial Sequence: Synthetic oligonucleotide
  Sense strand starting at position 2719 of SEQ ID NO: 588459
guaugcuuuguggagagga

SEQ ID NO: 866525 - RNA, 19 nt, Artificial Sequence
  Description of Artificial Sequence: Synthetic oligonucleotide
  Antisense strand to SEQ ID NO: 866524
uccucuccacaaagcauac

SEQ ID NO: 866526 - RNA, 19 nt, Artificial Sequence
  Description of Artificial Sequence: Synthetic oligonucleotide
  Sense strand starting at position 2877 of SEQ ID NO: 588459
guaauaaacaugugagcag

SEQ ID NO: 866527 - RNA, 19 nt, Artificial Sequence
  Description of Artificial Sequence: Synthetic oligonucleotide
  Antisense strand to SEQ ID NO: 866526
cugcucacauguuuauuac

SEQ ID NO: 866528 - RNA, 19 nt, Artificial Sequence
  Description of Artificial Sequence: Synthetic oligonucleotide
  Sense strand starting at position 3238 of SEQ ID NO: 588459
gggacaucuuguuucuagu

SEQ ID NO: 866529 - RNA, 19 nt, Artificial Sequence
  Description of Artificial Sequence: Synthetic oligonucleotide
  Antisense strand to SEQ ID NO: 866528
acuagaaacaagauguccc

SEQ ID NO: 866530 - RNA, 19 nt, Artificial Sequence
  Description of Artificial Sequence: Synthetic oligonucleotide
  Sense strand starting at position 3244 of SEQ ID NO: 588459
ucuuguuucuaguugagaa

SEQ ID NO: 866531 - RNA, 19 nt, Artificial Sequence
  Description of Artificial Sequence: Synthetic oligonucleotide
  Antisense strand to SEQ ID NO: 866530
uucucaacuagaaacaaga

SEQ ID NO: 866532 - RNA, 19 nt, Artificial Sequence
  Description of Artificial Sequence: Synthetic oligonucleotide
  Sense strand starting at position 3246 of SEQ ID NO: 588459
uuguuucuaguugagaauu

SEQ ID NO: 866533 - RNA, 19 nt, Artificial Sequence
  Description of Artificial Sequence: Synthetic oligonucleotide
  Antisense strand to SEQ ID NO: 866532
aauucucaacuagaaacaa

SEQ ID NO: 866534 - RNA, 19 nt, Artificial Sequence
  Description of Artificial Sequence: Synthetic oligonucleotide
  Sense strand starting at position 3359 of SEQ ID NO: 588459
aucguuauacaccagacau

SEQ ID NO: 866535 - RNA, 19 nt, Artificial Sequence
  Description of Artificial Sequence: Synthetic oligonucleotide
  Antisense strand to SEQ ID NO: 866534
augucugguguauaacgau

SEQ ID NO: 866536 - RNA, 19 nt, Artificial Sequence
  Description of Artificial Sequence: Synthetic oligonucleotide
  Sense strand starting at position 3361 of SEQ ID NO: 588459
cguuauacaccagacaugu

SEQ ID NO: 866537 - RNA, 19 nt, Artificial Sequence
  Description of Artificial Sequence: Synthetic oligonucleotide
  Antisense strand to SEQ ID NO: 866536
acaugucugguguauaacg

SEQ ID NO: 866538 - RNA, 19 nt, Artificial Sequence
  Description of Artificial Sequence: Synthetic oligonucleotide
  Sense strand starting at position 3773 of SEQ ID NO: 588459
auggacuaauuguucugaa

SEQ ID NO: 866539 - RNA, 19 nt, Artificial Sequence
  Description of Artificial Sequence: Synthetic oligonucleotide
  Antisense strand to SEQ ID NO: 866538
uucagaacaauuaguccau

SEQ ID NO: 866540 - RNA, 19 nt, Artificial Sequence
  Description of Artificial Sequence: Synthetic oligonucleotide
  Sense strand starting at position 3774 of SEQ ID NO: 588459
uggacuaauuguucugaaa

SEQ ID NO: 866541 - RNA, 19 nt, Artificial Sequence
  Description of Artificial Sequence: Synthetic oligonucleotide
  Antisense strand to SEQ ID NO: 866540
uuucagaacaauuagucca

SEQ ID NO: 866542 - RNA, 19 nt, Artificial Sequence
  Description of Artificial Sequence: Synthetic oligonucleotide
  Sense strand starting at position 3786 of SEQ ID NO: 588459
ucugaaaucccauggauca

SEQ ID NO: 866543 - RNA, 19 nt, Artificial Sequence
  Description of Artificial Sequence: Synthetic oligonucleotide
  Antisense strand to SEQ ID NO: 866542
ugauccaugggauuucaga

SEQ ID NO: 866544 - RNA, 19 nt, Artificial Sequence
  Description of Artificial Sequence: Synthetic oligonucleotide
  Sense strand starting at position 3968 of SEQ ID NO: 588459
ggugccuucuugccuggaa

SEQ ID NO: 866545 - RNA, 19 nt, Artificial Sequence
  Description of Artificial Sequence: Synthetic oligonucleotide
  Antisense strand to SEQ ID NO: 866544
uuccaggcaagaaggcacc

SEQ ID NO: 866546 - RNA, 19 nt, Artificial Sequence
  Description of Artificial Sequence: Synthetic oligonucleotide
  Sense strand starting at position 3969 of SEQ ID NO: 588459
gugccuucuugccuggaau

SEQ ID NO: 866547 - RNA, 19 nt, Artificial Sequence
  Description of Artificial Sequence: Synthetic oligonucleotide
  Antisense strand to SEQ ID NO: 866546
auuccaggcaagaaggcac

SEQ ID NO: 866548 - RNA, 19 nt, Artificial Sequence
  Description of Artificial Sequence: Synthetic oligonucleotide
  Sense strand starting at position 28 of SEQ ID NO: 588460
uaagguauucgaugucuac

SEQ ID NO: 866549 - RNA, 19 nt, Artificial Sequence
  Description of Artificial Sequence: Synthetic oligonucleotide
  Antisense strand to SEQ ID NO: 866548
guagacaucgaauaccuua

SEQ ID NO: 866550 - RNA, 19 nt, Artificial Sequence
  Description of Artificial Sequence: Synthetic oligonucleotide
  Sense strand starting at position 31 of SEQ ID NO: 588460
gguauucgaugucuacuau

SEQ ID NO: 866551 - RNA, 19 nt, Artificial Sequence
  Description of Artificial Sequence: Synthetic oligonucleotide
  Antisense strand to SEQ ID NO: 866550
auaguagacaucgaauacc

SEQ ID NO: 866552 - RNA, 19 nt, Artificial Sequence
  Description of Artificial Sequence: Synthetic oligonucleotide
  Sense strand starting at position 32 of SEQ ID NO: 588460
guauucgaugucuacuaua

SEQ ID NO: 866553 - RNA, 19 nt, Artificial Sequence
  Description of Artificial Sequence: Synthetic oligonucleotide
  Antisense strand to SEQ ID NO: 866552
uauaguagacaucgaauac

SEQ ID NO: 866554 - RNA, 19 nt, Artificial Sequence
  Description of Artificial Sequence: Synthetic oligonucleotide
  Sense strand starting at position 56 of SEQ ID NO: 588460
auacauacuuuccuugagu

SEQ ID NO: 866555 - RNA, 19 nt, Artificial Sequence
  Description of Artificial Sequence: Synthetic oligonucleotide
  Antisense strand to SEQ ID NO: 866554
acucaaggaaaguauguau

SEQ ID NO: 866556 - RNA, 19 nt, Artificial Sequence
  Description of Artificial Sequence: Synthetic oligonucleotide
  Sense strand starting at position 58 of SEQ ID NO: 588460
acauacuuuccuugaguug

SEQ ID NO: 866557 - RNA, 19 nt, Artificial Sequence
  Description of Artificial Sequence: Synthetic oligonucleotide
  Antisense strand to SEQ ID NO: 866556
caacucaaggaaaguaugu

SEQ ID NO: 866558 - RNA, 19 nt, Artificial Sequence
  Description of Artificial Sequence: Synthetic oligonucleotide
  Sense strand starting at position 188 of SEQ ID NO: 588460
guugcaucugucuaucuga

SEQ ID NO: 866559 - RNA, 19 nt, Artificial Sequence
  Description of Artificial Sequence: Synthetic oligonucleotide
  Antisense strand to SEQ ID NO: 866558
ucagauagacagaugcaac

SEQ ID NO: 866560 - RNA, 19 nt, Artificial Sequence
  Description of Artificial Sequence: Synthetic oligonucleotide
  Sense strand starting at position 191 of SEQ ID NO: 588460
gcaucugucuaucugauuu

SEQ ID NO: 866561 - RNA, 19 nt, Artificial Sequence
  Description of Artificial Sequence: Synthetic oligonucleotide
  Antisense strand to SEQ ID NO: 866560
aaaucagauagacagaugc

SEQ ID NO: 866562 - RNA, 19 nt, Artificial Sequence
  Description of Artificial Sequence: Synthetic oligonucleotide
  Sense strand starting at position 195 of SEQ ID NO: 588460
cugucuaucugauuuguuu

SEQ ID NO: 866563 - RNA, 19 nt, Artificial Sequence
  Description of Artificial Sequence: Synthetic oligonucleotide
  Antisense strand to SEQ ID NO: 866562
aaacaaaucagauagacag

SEQ ID NO: 866564 - RNA, 19 nt, Artificial Sequence
  Description of Artificial Sequence: Synthetic oligonucleotide
  Sense strand starting at position 203 of SEQ ID NO: 588460
cugauuuguuuacacuuga

SEQ ID NO: 866565 - RNA, 19 nt, Artificial Sequence
  Description of Artificial Sequence: Synthetic oligonucleotide
  Antisense strand to SEQ ID NO: 866564
ucaaguguaaacaaaucag

SEQ ID NO: 866566 - RNA, 19 nt, Artificial Sequence
  Description of Artificial Sequence: Synthetic oligonucleotide
  Sense strand starting at position 243 of SEQ ID NO: 588460
ucaagaagaucuuagagga

SEQ ID NO: 866567 - RNA, 19 nt, Artificial Sequence
  Description of Artificial Sequence: Synthetic oligonucleotide
  Antisense strand to SEQ ID NO: 866566
uccucuaagaucuucuuga

SEQ ID NO: 866568 - RNA, 19 nt, Artificial Sequence
  Description of Artificial Sequence: Synthetic oligonucleotide
  Sense strand starting at position 256 of SEQ ID NO: 588460
agaggaagcuuagucauac

SEQ ID NO: 866569 - RNA, 19 nt, Artificial Sequence
  Description of Artificial Sequence: Synthetic oligonucleotide
  Antisense strand to SEQ ID NO: 866568
guaugacuaagcuuccucu

SEQ ID NO: 866570 - RNA, 19 nt, Artificial Sequence
  Description of Artificial Sequence: Synthetic oligonucleotide
  Sense strand starting at position 257 of SEQ ID NO: 588460
gaggaagcuuagucauaca

SEQ ID NO: 866571 - RNA, 19 nt, Artificial Sequence
  Description of Artificial Sequence: Synthetic oligonucleotide
  Antisense strand to SEQ ID NO: 866570
uguaugacuaagcuuccuc

SEQ ID NO: 866572 - RNA, 19 nt, Artificial Sequence
  Description of Artificial Sequence: Synthetic oligonucleotide
  Sense strand starting at position 315 of SEQ ID NO: 588460
uugaauuaaguaugcuaca

SEQ ID NO: 866573 - RNA, 19 nt, Artificial Sequence
  Description of Artificial Sequence: Synthetic oligonucleotide
  Antisense strand to SEQ ID NO: 866572
uguagcauacuuaauucaa

SEQ ID NO: 866574 - RNA, 19 nt, Artificial Sequence
  Description of Artificial Sequence: Synthetic oligonucleotide
  Sense strand starting at position 316 of SEQ ID NO: 588460
ugaauuaaguaugcuacaa

SEQ ID NO: 866575 - RNA, 19 nt, Artificial Sequence
  Description of Artificial Sequence: Synthetic oligonucleotide
  Antisense strand to SEQ ID NO: 866574
uuguagcauacuuaauuca

SEQ ID NO: 866576 - RNA, 19 nt, Artificial Sequence
  Description of Artificial Sequence: Synthetic oligonucleotide
  Sense strand starting at position 341 of SEQ ID NO: 588460
gaggguuaucugcacccua

SEQ ID NO: 866577 - RNA, 19 nt, Artificial Sequence
  Description of Artificial Sequence: Synthetic oligonucleotide
  Antisense strand to SEQ ID NO: 866576
uagggugcagauaacccuc

SEQ ID NO: 866578 - RNA, 19 nt, Artificial Sequence
  Description of Artificial Sequence: Synthetic oligonucleotide
  Sense strand starting at position 438 of SEQ ID NO: 588460
ggauacacaucuuuacagu

SEQ ID NO: 866579 - RNA, 19 nt, Artificial Sequence
  Description of Artificial Sequence: Synthetic oligonucleotide
  Antisense strand to SEQ ID NO: 866578
acuguaaagauguguaucc

SEQ ID NO: 866580 - RNA, 19 nt, Artificial Sequence
  Description of Artificial Sequence: Synthetic oligonucleotide
  Sense strand starting at position 444 of SEQ ID NO: 588460
acaucuuuacagugcuuau

SEQ ID NO: 866581 - RNA, 19 nt, Artificial Sequence
  Description of Artificial Sequence: Synthetic oligonucleotide
  Antisense strand to SEQ ID NO: 866580
auaagcacuguaaagaugu

SEQ ID NO: 866582 - RNA, 19 nt, Artificial Sequence
  Description of Artificial Sequence: Synthetic oligonucleotide
  Sense strand starting at position 454 of SEQ ID NO: 588460
agugcuuaucacuaccuga

SEQ ID NO: 866583 - RNA, 19 nt, Artificial Sequence
  Description of Artificial Sequence: Synthetic oligonucleotide
  Antisense strand to SEQ ID NO: 866582
ucagguagugauaagcacu

SEQ ID NO: 866584 - RNA, 19 nt, Artificial Sequence
  Description of Artificial Sequence: Synthetic oligonucleotide
  Sense strand starting at position 489 of SEQ ID NO: 588460
gugcuugacuugccaaaga

SEQ ID NO: 866585 - RNA, 19 nt, Artificial Sequence
  Description of Artificial Sequence: Synthetic oligonucleotide
  Antisense strand to SEQ ID NO: 866584
ucuuuggcaagucaagcac

SEQ ID NO: 866586 - RNA, 19 nt, Artificial Sequence
  Description of Artificial Sequence: Synthetic oligonucleotide
  Sense strand starting at position 573 of SEQ ID NO: 588460
caccaagcagaaugguauu

SEQ ID NO: 866587 - RNA, 19 nt, Artificial Sequence
  Description of Artificial Sequence: Synthetic oligonucleotide
  Antisense strand to SEQ ID NO: 866586
aauaccauucugcuuggug

SEQ ID NO: 866588 - RNA, 19 nt, Artificial Sequence
  Description of Artificial Sequence: Synthetic oligonucleotide
  Sense strand starting at position 692 of SEQ ID NO: 588460
aaaggaacgcuauggcuua

SEQ ID NO: 866589 - RNA, 19 nt, Artificial Sequence
  Description of Artificial Sequence: Synthetic oligonucleotide
  Antisense strand to SEQ ID NO: 866588
uaagccauagcguuccuuu

SEQ ID NO: 866590 - RNA, 19 nt, Artificial Sequence
  Description of Artificial Sequence: Synthetic oligonucleotide
  Sense strand starting at position 723 of SEQ ID NO: 588460
gcgcuugaaguuuaagaua

SEQ ID NO: 866591 - RNA, 19 nt, Artificial Sequence
  Description of Artificial Sequence: Synthetic oligonucleotide
  Antisense strand to SEQ ID NO: 866590
uaucuuaaacuucaagcgc

SEQ ID NO: 866592 - RNA, 19 nt, Artificial Sequence
  Description of Artificial Sequence: Synthetic oligonucleotide
  Sense strand starting at position 732 of SEQ ID NO: 588460
guuuaagauagguaguugu

SEQ ID NO: 866593 - RNA, 19 nt, Artificial Sequence
  Description of Artificial Sequence: Synthetic oligonucleotide
  Antisense strand to SEQ ID NO: 866592
acaacuaccuaucuuaaac

SEQ ID NO: 866594 - RNA, 19 nt, Artificial Sequence
  Description of Artificial Sequence: Synthetic oligonucleotide
  Sense strand starting at position 739 of SEQ ID NO: 588460
auagguaguuguuucgaau

SEQ ID NO: 866595 - RNA, 19 nt, Artificial Sequence
  Description of Artificial Sequence: Synthetic oligonucleotide
  Antisense strand to SEQ ID NO: 866594
auucgaaacaacuaccuau

SEQ ID NO: 866596 - RNA, 19 nt, Artificial Sequence
  Description of Artificial Sequence: Synthetic oligonucleotide
  Sense strand starting at position 776 of SEQ ID NO: 588460
ucccaaagauguuuagcua

SEQ ID NO: 866597 - RNA, 19 nt, Artificial Sequence
  Description of Artificial Sequence: Synthetic oligonucleotide
  Antisense strand to SEQ ID NO: 866596
uagcuaaacaucuuuggga

SEQ ID NO: 866598 - RNA, 19 nt, Artificial Sequence
  Description of Artificial Sequence: Synthetic oligonucleotide
  Sense strand starting at position 779 of SEQ ID NO: 588460
caaagauguuuagcuagua

SEQ ID NO: 866599 - RNA, 19 nt, Artificial Sequence
  Description of Artificial Sequence: Synthetic oligonucleotide
  Antisense strand to SEQ ID NO: 866598
uacuagcuaaacaucuuug

SEQ ID NO: 866600 - RNA, 19 nt, Artificial Sequence
  Description of Artificial Sequence: Synthetic oligonucleotide
  Sense strand starting at position 780 of SEQ ID NO: 588460
aaagauguuuagcuaguaa

SEQ ID NO: 866601 - RNA, 19 nt, Artificial Sequence
  Description of Artificial Sequence: Synthetic oligonucleotide
  Antisense strand to SEQ ID NO: 866600
uuacuagcuaaacaucuuu

SEQ ID NO: 866602 - RNA, 19 nt, Artificial Sequence
  Description of Artificial Sequence: Synthetic oligonucleotide
  Sense strand starting at position 1069 of SEQ ID NO: 588460
cgaguaacccgcuccaugu

SEQ ID NO: 866603 - RNA, 19 nt, Artificial Sequence
  Description of Artificial Sequence: Synthetic oligonucleotide
  Antisense strand to SEQ ID NO: 866602
acauggagcggguuacucg

SEQ ID NO: 866604 - RNA, 19 nt, Artificial Sequence
  Description of Artificial Sequence: Synthetic oligonucleotide
  Sense strand starting at position 2029 of SEQ ID NO: 588460
aggcuuuaguuccuaaagu

SEQ ID NO: 866605 - RNA, 19 nt, Artificial Sequence
  Description of Artificial Sequence: Synthetic oligonucleotide
  Antisense strand to SEQ ID NO: 866604
acuuuaggaacuaaagccu

SEQ ID NO: 866606 - RNA, 19 nt, Artificial Sequence
  Description of Artificial Sequence: Synthetic oligonucleotide
  Sense strand starting at position 2143 of SEQ ID NO: 588460
gaacucucggccgaaugua

SEQ ID NO: 866607 - RNA, 19 nt, Artificial Sequence
  Description of Artificial Sequence: Synthetic oligonucleotide
  Antisense strand to SEQ ID NO: 866606
uacauucggccgagaguuc

SEQ ID NO: 866608 - RNA, 19 nt, Artificial Sequence
  Description of Artificial Sequence: Synthetic oligonucleotide
  Sense strand starting at position 2216 of SEQ ID NO: 588460
cgcgguagucuugucccua

SEQ ID NO: 866609 - RNA, 19 nt, Artificial Sequence
  Description of Artificial Sequence: Synthetic oligonucleotide
  Antisense strand to SEQ ID NO: 866608
uagggacaagacuaccgcg

SEQ ID NO: 866610 - RNA, 19 nt, Artificial Sequence
  Description of Artificial Sequence: Synthetic oligonucleotide
  Sense strand starting at position 2420 of SEQ ID NO: 588460
gacgguucgcucuucgaca

SEQ ID NO: 866611 - RNA, 19 nt, Artificial Sequence
  Description of Artificial Sequence: Synthetic oligonucleotide
  Antisense strand to SEQ ID NO: 866610
ugucgaagagcgaaccguc

SEQ ID NO: 866612 - RNA, 19 nt, Artificial Sequence
  Description of Artificial Sequence: Synthetic oligonucleotide
  Sense strand starting at position 2584 of SEQ ID NO: 588460
cggaguuaagcgggagaaa

SEQ ID NO: 866613 - RNA, 19 nt, Artificial Sequence
  Description of Artificial Sequence: Synthetic oligonucleotide
  Antisense strand to SEQ ID NO: 866612
uuucucccgcuuaacuccg

SEQ ID NO: 866614 - RNA, 19 nt, Artificial Sequence
  Description of Artificial Sequence: Synthetic oligonucleotide
  Sense strand starting at position 2743 of SEQ ID NO: 588460
gaaggaauuagaggcuguu

SEQ ID NO: 866615 - RNA, 19 nt, Artificial Sequence
  Description of Artificial Sequence: Synthetic oligonucleotide
  Antisense strand to SEQ ID NO: 866614
aacagccucuaauuccuuc

SEQ ID NO: 866616 - RNA, 19 nt, Artificial Sequence
  Description of Artificial Sequence: Synthetic oligonucleotide
  Sense strand starting at position 2757 of SEQ ID NO: 588460
cuguuucccguggaaggua

SEQ ID NO: 866617 - RNA, 19 nt, Artificial Sequence
  Description of Artificial Sequence: Synthetic oligonucleotide
  Antisense strand to SEQ ID NO: 866616
uaccuuccacgggaaacag

SEQ ID NO: 866618 - RNA, 19 nt, Artificial Sequence
  Description of Artificial Sequence: Synthetic oligonucleotide
  Sense strand starting at position 2769 of SEQ ID NO: 588460
gaagguaggaccugaaguu

SEQ ID NO: 866619 - RNA, 19 nt, Artificial Sequence
  Description of Artificial Sequence: Synthetic oligonucleotide
  Antisense strand to SEQ ID NO: 866618
aacuucagguccuaccuuc

SEQ ID NO: 866620 - RNA, 19 nt, Artificial Sequence
  Description of Artificial Sequence: Synthetic oligonucleotide
  Sense strand starting at position 2825 of SEQ ID NO: 588460
gccaguuuccucgacugag

SEQ ID NO: 866621 - RNA, 19 nt, Artificial Sequence
  Description of Artificial Sequence: Synthetic oligonucleotide
  Antisense strand to SEQ ID NO: 866620
cucagucgaggaaacuggc

SEQ ID NO: 866622 - RNA, 19 nt, Artificial Sequence
  Description of Artificial Sequence: Synthetic oligonucleotide
  Sense strand starting at position 2975 of SEQ ID NO: 588460
cuggcucuggccuaacauu

SEQ ID NO: 866623 - RNA, 19 nt, Artificial Sequence
  Description of Artificial Sequence: Synthetic oligonucleotide
  Antisense strand to SEQ ID NO: 866622
aauguuaggccagagccag

SEQ ID NO: 866624 - RNA, 19 nt, Artificial Sequence
  Description of Artificial Sequence: Synthetic oligonucleotide
  Sense strand starting at position 3308 of SEQ ID NO: 588460
aucccagguguuuagacaa

SEQ ID NO: 866625 - RNA, 19 nt, Artificial Sequence
  Description of Artificial Sequence: Synthetic oligonucleotide
  Antisense strand to SEQ ID NO: 866624
uugucuaaacaccugggau

SEQ ID NO: 866626 - RNA, 19 nt, Artificial Sequence
  Description of Artificial Sequence: Synthetic oligonucleotide
  Sense strand starting at position 3445 of SEQ ID NO: 588460
gccucucuagaauguauaa

SEQ ID NO: 866627 - RNA, 19 nt, Artificial Sequence
  Description of Artificial Sequence: Synthetic oligonucleotide
  Antisense strand to SEQ ID NO: 866626
uuauacauucuagagaggc

SEQ ID NO: 866628 - RNA, 19 nt, Artificial Sequence
  Description of Artificial Sequence: Synthetic oligonucleotide
  Sense strand starting at position 130 of SEQ ID NO: 588461
gggaaacuguucuauacag

SEQ ID NO: 866629 - RNA, 19 nt, Artificial Sequence
  Description of Artificial Sequence: Synthetic oligonucleotide
  Antisense strand to SEQ ID NO: 866628
cuguauagaacaguuuccc

SEQ ID NO: 866630 - RNA, 19 nt, Artificial Sequence
  Description of Artificial Sequence: Synthetic oligonucleotide
  Sense strand starting at position 132 of SEQ ID NO: 588461
gaaacuguucuauacagug

SEQ ID NO: 866631 - RNA, 19 nt, Artificial Sequence
  Description of Artificial Sequence: Synthetic oligonucleotide
  Antisense strand to SEQ ID NO: 866630
cacuguauagaacaguuuc

SEQ ID NO: 866632 - RNA, 19 nt, Artificial Sequence
  Description of Artificial Sequence: Synthetic oligonucleotide
  Sense strand starting at position 137 of SEQ ID NO: 588461
uguucuauacagugaauuc

SEQ ID NO: 866633 - RNA, 19 nt, Artificial Sequence
  Description of Artificial Sequence: Synthetic oligonucleotide
  Antisense strand to SEQ ID NO: 866632
gaauucacuguauagaaca

SEQ ID NO: 866634 - RNA, 19 nt, Artificial Sequence
  Description of Artificial Sequence: Synthetic oligonucleotide
  Sense strand starting at position 211 of SEQ ID NO: 588461
gucuaacuuccuuguucuu

SEQ ID NO: 866635 - RNA, 19 nt, Artificial Sequence
  Description of Artificial Sequence: Synthetic oligonucleotide
  Antisense strand to SEQ ID NO: 866634
aagaacaaggaaguuagac

SEQ ID NO: 866636 - RNA, 19 nt, Artificial Sequence
  Description of Artificial Sequence: Synthetic oligonucleotide
  Sense strand starting at position 247 of SEQ ID NO: 588461
aguuacccgcucuguuuaa

SEQ ID NO: 866637 - RNA, 19 nt, Artificial Sequence
  Description of Artificial Sequence: Synthetic oligonucleotide
  Antisense strand to SEQ ID NO: 866636
uuaaacagagcggguaacu

SEQ ID NO: 866638 - RNA, 19 nt, Artificial Sequence
  Description of Artificial Sequence: Synthetic oligonucleotide
  Sense strand starting at position 349 of SEQ ID NO: 588461
gccaauugagauuagcuua

SEQ ID NO: 866639 - RNA, 19 nt, Artificial Sequence
  Description of Artificial Sequence: Synthetic oligonucleotide
  Antisense strand to SEQ ID NO: 866638
uaagcuaaucucaauuggc

SEQ ID NO: 866640 - RNA, 19 nt, Artificial Sequence
  Description of Artificial Sequence: Synthetic oligonucleotide
  Sense strand starting at position 416 of SEQ ID NO: 588461
gacugacugccuuagggau

SEQ ID NO: 866641 - RNA, 19 nt, Artificial Sequence
  Description of Artificial Sequence: Synthetic oligonucleotide
  Antisense strand to SEQ ID NO: 866640
aucccuaaggcagucaguc

SEQ ID NO: 866642 - RNA, 19 nt, Artificial Sequence
  Description of Artificial Sequence: Synthetic oligonucleotide
  Sense strand starting at position 418 of SEQ ID NO: 588461
cugacugccuuagggauaa

SEQ ID NO: 866643 - RNA, 19 nt, Artificial Sequence
  Description of Artificial Sequence: Synthetic oligonucleotide
  Antisense strand to SEQ ID NO: 866642
uuaucccuaaggcagucag

SEQ ID NO: 866644 - RNA, 19 nt, Artificial Sequence
  Description of Artificial Sequence: Synthetic oligonucleotide
  Sense strand starting at position 936 of SEQ ID NO: 588461
aguagagacuagcugugua

SEQ ID NO: 866645 - RNA, 19 nt, Artificial Sequence
  Description of Artificial Sequence: Synthetic oligonucleotide
  Antisense strand to SEQ ID NO: 866644
uacacagcuagucucuacu

SEQ ID NO: 866646 - RNA, 19 nt, Artificial Sequence
  Description of Artificial Sequence: Synthetic oligonucleotide
  Sense strand starting at position 939 of SEQ ID NO: 588461
agagacuagcuguguaaga

SEQ ID NO: 866647 - RNA, 19 nt, Artificial Sequence
  Description of Artificial Sequence: Synthetic oligonucleotide
  Antisense strand to SEQ ID NO: 866646
ucuuacacagcuagucucu

SEQ ID NO: 866648 - RNA, 19 nt, Artificial Sequence
  Description of Artificial Sequence: Synthetic oligonucleotide
  Sense strand starting at position 940 of SEQ ID NO: 588461
gagacuagcuguguaagag

SEQ ID NO: 866649 - RNA, 19 nt, Artificial Sequence
  Description of Artificial Sequence: Synthetic oligonucleotide
  Antisense strand to SEQ ID NO: 866648
cucuuacacagcuagucuc

SEQ ID NO: 866650 - RNA, 19 nt, Artificial Sequence
  Description of Artificial Sequence: Synthetic oligonucleotide
  Sense strand starting at position 941 of SEQ ID NO: 588461
agacuagcuguguaagaga

SEQ ID NO: 866651 - RNA, 19 nt, Artificial Sequence
  Description of Artificial Sequence: Synthetic oligonucleotide
  Antisense strand to SEQ ID NO: 866650
ucucuuacacagcuagucu

SEQ ID NO: 866652 - RNA, 19 nt, Artificial Sequence
  Description of Artificial Sequence: Synthetic oligonucleotide
  Sense strand starting at position 946 of SEQ ID NO: 588461
agcuguguaagagauagga

SEQ ID NO: 866653 - RNA, 19 nt, Artificial Sequence
  Description of Artificial Sequence: Synthetic oligonucleotide
  Antisense strand to SEQ ID NO: 866652
uccuaucucuuacacagcu

SEQ ID NO: 866654 - RNA, 19 nt, Artificial Sequence
  Description of Artificial Sequence: Synthetic oligonucleotide
  Sense strand starting at position 1055 of SEQ ID NO: 588461
aacuguuugccagagugcu

SEQ ID NO: 866655 - RNA, 19 nt, Artificial Sequence
  Description of Artificial Sequence: Synthetic oligonucleotide
  Antisense strand to SEQ ID NO: 866654
agcacucuggcaaacaguu

SEQ ID NO: 866656 - RNA, 19 nt, Artificial Sequence
  Description of Artificial Sequence: Synthetic oligonucleotide
  Sense strand starting at position 1396 of SEQ ID NO: 588461
gcacccuucugcguaagua

SEQ ID NO: 866657 - RNA, 19 nt, Artificial Sequence
  Description of Artificial Sequence: Synthetic oligonucleotide
  Antisense strand to SEQ ID NO: 866656
uacuuacgcagaagggugc

SEQ ID NO: 866658 - RNA, 19 nt, Artificial Sequence
  Description of Artificial Sequence: Synthetic oligonucleotide
  Sense strand starting at position 1397 of SEQ ID NO: 588461
cacccuucugcguaaguaa

SEQ ID NO: 866659 - RNA, 19 nt, Artificial Sequence
  Description of Artificial Sequence: Synthetic oligonucleotide
  Antisense strand to SEQ ID NO: 866658
uuacuuacgcagaagggug

SEQ ID NO: 866660 - RNA, 19 nt, Artificial Sequence
  Description of Artificial Sequence: Synthetic oligonucleotide
  Sense strand starting at position 1400 of SEQ ID NO: 588461
ccuucugcguaaguaaauu

SEQ ID NO: 866661 - RNA, 19 nt, Artificial Sequence
  Description of Artificial Sequence: Synthetic oligonucleotide
  Antisense strand to SEQ ID NO: 866660
aauuuacuuacgcagaagg

SEQ ID NO: 866662 - RNA, 19 nt, Artificial Sequence
  Description of Artificial Sequence: Synthetic oligonucleotide
  Sense strand starting at position 1472 of SEQ ID NO: 588461
ccgagcucuuauuccaaca

SEQ ID NO: 866663 - RNA, 19 nt, Artificial Sequence
  Description of Artificial Sequence: Synthetic oligonucleotide
  Antisense strand to SEQ ID NO: 866662
uguuggaauaagagcucgg

SEQ ID NO: 866664 - RNA, 19 nt, Artificial Sequence
  Description of Artificial Sequence: Synthetic oligonucleotide
  Sense strand starting at position 1480 of SEQ ID NO: 588461
uuauuccaacaccgagauu

SEQ ID NO: 866665 - RNA, 19 nt, Artificial Sequence
  Description of Artificial Sequence: Synthetic oligonucleotide
  Antisense strand to SEQ ID NO: 866664
aaucucgguguuggaauaa

SEQ ID NO: 866666 - RNA, 19 nt, Artificial Sequence
  Description of Artificial Sequence: Synthetic oligonucleotide
  Sense strand starting at position 2101 of SEQ ID NO: 588461
uagaguuaaccacguccca

SEQ ID NO: 866667 - RNA, 19 nt, Artificial Sequence
  Description of Artificial Sequence: Synthetic oligonucleotide
  Antisense strand to SEQ ID NO: 866666
ugggacgugguuaacucua

SEQ ID NO: 866668 - RNA, 19 nt, Artificial Sequence
  Description of Artificial Sequence: Synthetic oligonucleotide
  Sense strand starting at position 2200 of SEQ ID NO: 588461
aaaggucccggcugagaau

SEQ ID NO: 866669 - RNA, 19 nt, Artificial Sequence
  Description of Artificial Sequence: Synthetic oligonucleotide
  Antisense strand to SEQ ID NO: 866668
auucucagccgggaccuuu

SEQ ID NO: 866670 - RNA, 19 nt, Artificial Sequence
  Description of Artificial Sequence: Synthetic oligonucleotide
  Sense strand starting at position 2239 of SEQ ID NO: 588461
ccugguauucugucggugu

SEQ ID NO: 866671 - RNA, 19 nt, Artificial Sequence
  Description of Artificial Sequence: Synthetic oligonucleotide
  Antisense strand to SEQ ID NO: 866670
acaccgacagaauaccagg

SEQ ID NO: 866672 - RNA, 19 nt, Artificial Sequence
  Description of Artificial Sequence: Synthetic oligonucleotide
  Sense strand starting at position 2240 of SEQ ID NO: 588461
cugguauucugucgguguu

SEQ ID NO: 866673 - RNA, 19 nt, Artificial Sequence
  Description of Artificial Sequence: Synthetic oligonucleotide
  Antisense strand to SEQ ID NO: 866672
aacaccgacagaauaccag

SEQ ID NO: 866674 - RNA, 19 nt, Artificial Sequence
  Description of Artificial Sequence: Synthetic oligonucleotide
  Sense strand starting at position 2361 of SEQ ID NO: 588461
ggaacugugcuguaaccau

SEQ ID NO: 866675 - RNA, 19 nt, Artificial Sequence
  Description of Artificial Sequence: Synthetic oligonucleotide
  Antisense strand to SEQ ID NO: 866674
augguuacagcacaguucc

SEQ ID NO: 866676 - RNA, 19 nt, Artificial Sequence
  Description of Artificial Sequence: Synthetic oligonucleotide
  Sense strand starting at position 2437 of SEQ ID NO: 588461
ggcguucgucuguuaggca

SEQ ID NO: 866677 - RNA, 19 nt, Artificial Sequence
  Description of Artificial Sequence: Synthetic oligonucleotide
  Antisense strand to SEQ ID NO: 866676
ugccuaacagacgaacgcc

SEQ ID NO: 866678 - RNA, 19 nt, Artificial Sequence
  Description of Artificial Sequence: Synthetic oligonucleotide
  Sense strand starting at position 2703 of SEQ ID NO: 588461
gaaggaaucucgcuguguc

SEQ ID NO: 866679 - RNA, 19 nt, Artificial Sequence
  Description of Artificial Sequence: Synthetic oligonucleotide
  Antisense strand to SEQ ID NO: 866678
gacacagcgagauuccuuc

SEQ ID NO: 866680 - RNA, 19 nt, Artificial Sequence
  Description of Artificial Sequence: Synthetic oligonucleotide
  Sense strand starting at position 3126 of SEQ ID NO: 588461
gggacuggguuugagaaua

SEQ ID NO: 866681 - RNA, 19 nt, Artificial Sequence
  Description of Artificial Sequence: Synthetic oligonucleotide
  Antisense strand to SEQ ID NO: 866680
uauucucaaacccaguccc

SEQ ID NO: 866682 - RNA, 19 nt, Artificial Sequence
  Description of Artificial Sequence: Synthetic oligonucleotide
  Sense strand starting at position 3134 of SEQ ID NO: 588461
guuugagaauauugggaga

SEQ ID NO: 866683 - RNA, 19 nt, Artificial Sequence
  Description of Artificial Sequence: Synthetic oligonucleotide
  Antisense strand to SEQ ID NO: 866682
ucucccaauauucucaaac

SEQ ID NO: 866684 - RNA, 19 nt, Artificial Sequence
  Description of Artificial Sequence: Synthetic oligonucleotide
  Sense strand starting at position 3136 of SEQ ID NO: 588461
uugagaauauugggagaug

SEQ ID NO: 866685 - RNA, 19 nt, Artificial Sequence
  Description of Artificial Sequence: Synthetic oligonucleotide
  Antisense strand to SEQ ID NO: 866684
caucucccaauauucucaa

SEQ ID NO: 866686 - RNA, 19 nt, Artificial Sequence
  Description of Artificial Sequence: Synthetic oligonucleotide
  Sense strand starting at position 3137 of SEQ ID NO: 588461
ugagaauauugggagauga

SEQ ID NO: 866687 - RNA, 19 nt, Artificial Sequence
  Description of Artificial Sequence: Synthetic oligonucleotide
  Antisense strand to SEQ ID NO: 866686
ucaucucccaauauucuca

SEQ ID NO: 866688 - RNA, 19 nt, Artificial Sequence
  Description of Artificial Sequence: Synthetic oligonucleotide
  Sense strand starting at position 3411 of SEQ ID NO: 588461
gcauuacagcuagaaauua

SEQ ID NO: 866689 - RNA, 19 nt, Artificial Sequence
  Description of Artificial Sequence: Synthetic oligonucleotide
  Antisense strand to SEQ ID NO: 866688
uaauuucuagcuguaaugc

SEQ ID NO: 866690 - RNA, 19 nt, Artificial Sequence
  Description of Artificial Sequence: Synthetic oligonucleotide
  Sense strand starting at position 3672 of SEQ ID NO: 588461
ucacuauguugccuaaagu

SEQ ID NO: 866691 - RNA, 19 nt, Artificial Sequence
  Description of Artificial Sequence: Synthetic oligonucleotide
  Antisense strand to SEQ ID NO: 866690
acuuuaggcaacauaguga

SEQ ID NO: 866692 - RNA, 19 nt, Artificial Sequence
  Description of Artificial Sequence: Synthetic oligonucleotide
  Sense strand starting at position 3781 of SEQ ID NO: 588461
cuccgacucccugguauaa

SEQ ID NO: 866693 - RNA, 19 nt, Artificial Sequence
  Description of Artificial Sequence: Synthetic oligonucleotide
  Antisense strand to SEQ ID NO: 866692
uuauaccagggagucggag

SEQ ID NO: 866694 - RNA, 19 nt, Artificial Sequence
  Description of Artificial Sequence: Synthetic oligonucleotide
  Sense strand starting at position 216 of SEQ ID NO: 588463
ccuuauacauuguauaagu

SEQ ID NO: 866695 - RNA, 19 nt, Artificial Sequence
  Description of Artificial Sequence: Synthetic oligonucleotide
  Antisense strand to SEQ ID NO: 866694
acuuauacaauguauaagg

SEQ ID NO: 866696 - RNA, 19 nt, Artificial Sequence
  Description of Artificial Sequence: Synthetic oligonucleotide
  Sense strand starting at position 655 of SEQ ID NO: 588463
guuagcuacugucucuaaa

SEQ ID NO: 866697 - RNA, 19 nt, Artificial Sequence
  Description of Artificial Sequence: Synthetic oligonucleotide
  Antisense strand to SEQ ID NO: 866696
uuuagagacaguagcuaac

SEQ ID NO: 866698 - RNA, 19 nt, Artificial Sequence
  Description of Artificial Sequence: Synthetic oligonucleotide
  Sense strand starting at position 996 of SEQ ID NO: 588463
ggccuacagugggaaugau

SEQ ID NO: 866699 - RNA, 19 nt, Artificial Sequence
  Description of Artificial Sequence: Synthetic oligonucleotide
  Antisense strand to SEQ ID NO: 866698
aucauucccacuguaggcc

SEQ ID NO: 866700 - RNA, 19 nt, Artificial Sequence
  Description of Artificial Sequence: Synthetic oligonucleotide
  Sense strand starting at position 1019 of SEQ ID NO: 588463
uagagauacuggcuaaagu

SEQ ID NO: 866701 - RNA, 19 nt, Artificial Sequence
  Description of Artificial Sequence: Synthetic oligonucleotide
  Antisense strand to SEQ ID NO: 866700
acuuuagccaguaucucua

SEQ ID NO: 866702 - RNA, 19 nt, Artificial Sequence
  Description of Artificial Sequence: Synthetic oligonucleotide
  Sense strand starting at position 1311 of SEQ ID NO: 588463
gaguuaagcugcuccucca

SEQ ID NO: 866703 - RNA, 19 nt, Artificial Sequence
  Description of Artificial Sequence: Synthetic oligonucleotide
  Antisense strand to SEQ ID NO: 866702
uggaggagcagcuuaacuc

SEQ ID NO: 866704 - RNA, 19 nt, Artificial Sequence
  Description of Artificial Sequence: Synthetic oligonucleotide
  Sense strand starting at position 1603 of SEQ ID NO: 588463
acgaucuuuccgcaggcaa

SEQ ID NO: 866705 - RNA, 19 nt, Artificial Sequence
  Description of Artificial Sequence: Synthetic oligonucleotide
  Antisense strand to SEQ ID NO: 866704
uugccugcggaaagaucgu

SEQ ID NO: 866706 - RNA, 19 nt, Artificial Sequence
  Description of Artificial Sequence: Synthetic oligonucleotide
  Sense strand starting at position 1605 of SEQ ID NO: 588463
gaucuuuccgcaggcaaug

SEQ ID NO: 866707 - RNA, 19 nt, Artificial Sequence
  Description of Artificial Sequence: Synthetic oligonucleotide
  Antisense strand to SEQ ID NO: 866706
cauugccugcggaaagauc

SEQ ID NO: 866708 - RNA, 19 nt, Artificial Sequence
  Description of Artificial Sequence: Synthetic oligonucleotide
  Sense strand starting at position 1666 of SEQ ID NO: 588463
cagagaugcuccuucucga

SEQ ID NO: 866709 - RNA, 19 nt, Artificial Sequence
  Description of Artificial Sequence: Synthetic oligonucleotide
  Antisense strand to SEQ ID NO: 866708
ucgagaaggagcaucucug

SEQ ID NO: 866710 - RNA, 19 nt, Artificial Sequence
  Description of Artificial Sequence: Synthetic oligonucleotide
  Sense strand starting at position 1870 of SEQ ID NO: 588463
cucacaaccuccgggaaau

SEQ ID NO: 866711 - RNA, 19 nt, Artificial Sequence
  Description of Artificial Sequence: Synthetic oligonucleotide
  Antisense strand to SEQ ID NO: 866710
auuucccggagguugugag

SEQ ID NO: 866712 - RNA, 19 nt, Artificial Sequence
  Description of Artificial Sequence: Synthetic oligonucleotide
  Sense strand starting at position 1871 of SEQ ID NO: 588463
ucacaaccuccgggaaauu

SEQ ID NO: 866713 - RNA, 19 nt, Artificial Sequence
  Description of Artificial Sequence: Synthetic oligonucleotide
  Antisense strand to SEQ ID NO: 866712
aauuucccggagguuguga

SEQ ID NO: 866714 - RNA, 19 nt, Artificial Sequence
  Description of Artificial Sequence: Synthetic oligonucleotide
  Sense strand starting at position 1880 of SEQ ID NO: 588463
ccgggaaauugaguuucua

SEQ ID NO: 866715 - RNA, 19 nt, Artificial Sequence
  Description of Artificial Sequence: Synthetic oligonucleotide
  Antisense strand to SEQ ID NO: 866714
uagaaacucaauuucccgg

SEQ ID NO: 866716 - RNA, 19 nt, Artificial Sequence
  Description of Artificial Sequence: Synthetic oligonucleotide
  Sense strand starting at position 1889 of SEQ ID NO: 588463
ugaguuucuaacgguauag

SEQ ID NO: 866717 - RNA, 19 nt, Artificial Sequence
  Description of Artificial Sequence: Synthetic oligonucleotide
  Antisense strand to SEQ ID NO: 866716
cuauaccguuagaaacuca

SEQ ID NO: 866718 - RNA, 19 nt, Artificial Sequence
  Description of Artificial Sequence: Synthetic oligonucleotide
  Sense strand starting at position 2121 of SEQ ID NO: 588463
uugcucugcgcuugcuuaa

SEQ ID NO: 866719 - RNA, 19 nt, Artificial Sequence
  Description of Artificial Sequence: Synthetic oligonucleotide
  Antisense strand to SEQ ID NO: 866718
uuaagcaagcgcagagcaa

SEQ ID NO: 866720 - RNA, 19 nt, Artificial Sequence
  Description of Artificial Sequence: Synthetic oligonucleotide
  Sense strand starting at position 2171 of SEQ ID NO: 588463
gguuucugauucuugguua

SEQ ID NO: 866721 - RNA, 19 nt, Artificial Sequence
  Description of Artificial Sequence: Synthetic oligonucleotide
  Antisense strand to SEQ ID NO: 866720
uaaccaagaaucagaaacc

SEQ ID NO: 866722 - RNA, 19 nt, Artificial Sequence
  Description of Artificial Sequence: Synthetic oligonucleotide
  Sense strand starting at position 2174 of SEQ ID NO: 588463
uucugauucuugguuagug

SEQ ID NO: 866723 - RNA, 19 nt, Artificial Sequence
  Description of Artificial Sequence: Synthetic oligonucleotide
  Antisense strand to SEQ ID NO: 866722
cacuaaccaagaaucagaa

SEQ ID NO: 866724 - RNA, 19 nt, Artificial Sequence
  Description of Artificial Sequence: Synthetic oligonucleotide
  Sense strand starting at position 2201 of SEQ ID NO: 588463
uugcuuguguauccuaguu

SEQ ID NO: 866725 - RNA, 19 nt, Artificial Sequence
  Description of Artificial Sequence: Synthetic oligonucleotide
  Antisense strand to SEQ ID NO: 866724
aacuaggauacacaagcaa

SEQ ID NO: 866726 - RNA, 19 nt, Artificial Sequence
  Description of Artificial Sequence: Synthetic oligonucleotide
  Sense strand starting at position 2206 of SEQ ID NO: 588463
uguguauccuaguuguuac

SEQ ID NO: 866727 - RNA, 19 nt, Artificial Sequence
  Description of Artificial Sequence: Synthetic oligonucleotide
  Antisense strand to SEQ ID NO: 866726
guaacaacuaggauacaca

SEQ ID NO: 866728 - RNA, 19 nt, Artificial Sequence
  Description of Artificial Sequence: Synthetic oligonucleotide
  Sense strand starting at position 2213 of SEQ ID NO: 588463
ccuaguuguuacgucacaa

SEQ ID NO: 866729 - RNA, 19 nt, Artificial Sequence
  Description of Artificial Sequence: Synthetic oligonucleotide
  Antisense strand to SEQ ID NO: 866728
uugugacguaacaacuagg

SEQ ID NO: 866730 - RNA, 19 nt, Artificial Sequence
  Description of Artificial Sequence: Synthetic oligonucleotide
  Sense strand starting at position 2247 of SEQ ID NO: 588463
agcacuaugccucggugua

SEQ ID NO: 866731 - RNA, 19 nt, Artificial Sequence
  Description of Artificial Sequence: Synthetic oligonucleotide
  Antisense strand to SEQ ID NO: 866730
uacaccgaggcauagugcu

SEQ ID NO: 866732 - RNA, 19 nt, Artificial Sequence
  Description of Artificial Sequence: Synthetic oligonucleotide
  Sense strand starting at position 2248 of SEQ ID NO: 588463
gcacuaugccucgguguag

SEQ ID NO: 866733 - RNA, 19 nt, Artificial Sequence
  Description of Artificial Sequence: Synthetic oligonucleotide
  Antisense strand to SEQ ID NO: 866732
cuacaccgaggcauagugc

SEQ ID NO: 866734 - RNA, 19 nt, Artificial Sequence
  Description of Artificial Sequence: Synthetic oligonucleotide
  Sense strand starting at position 2249 of SEQ ID NO: 588463
cacuaugccucgguguaga

SEQ ID NO: 866735 - RNA, 19 nt, Artificial Sequence
  Description of Artificial Sequence: Synthetic oligonucleotide
  Antisense strand to SEQ ID NO: 866734
ucuacaccgaggcauagug

SEQ ID NO: 866736 - RNA, 19 nt, Artificial Sequence
  Description of Artificial Sequence: Synthetic oligonucleotide
  Sense strand starting at position 2291 of SEQ ID NO: 588463
cgcuaugcucacugugacu

SEQ ID NO: 866737 - RNA, 19 nt, Artificial Sequence
  Description of Artificial Sequence: Synthetic oligonucleotide
  Antisense strand to SEQ ID NO: 866736
agucacagugagcauagcg

SEQ ID NO: 866738 - RNA, 19 nt, Artificial Sequence
  Description of Artificial Sequence: Synthetic oligonucleotide
  Sense strand starting at position 2296 of SEQ ID NO: 588463
ugcucacugugacucuaau

SEQ ID NO: 866739 - RNA, 19 nt, Artificial Sequence
  Description of Artificial Sequence: Synthetic oligonucleotide
  Antisense strand to SEQ ID NO: 866738
auuagagucacagugagca

SEQ ID NO: 866740 - RNA, 19 nt, Artificial Sequence
  Description of Artificial Sequence: Synthetic oligonucleotide
  Sense strand starting at position 2302 of SEQ ID NO: 588463
cugugacucuaaucaaguc

SEQ ID NO: 866741 - RNA, 19 nt, Artificial Sequence
  Description of Artificial Sequence: Synthetic oligonucleotide
  Antisense strand to SEQ ID NO: 866740
gacuugauuagagucacag

SEQ ID NO: 866742 - RNA, 19 nt, Artificial Sequence
  Description of Artificial Sequence: Synthetic oligonucleotide
  Sense strand starting at position 2319 of SEQ ID NO: 588463
ucacguaaucucugagccu

SEQ ID NO: 866743 - RNA, 19 nt, Artificial Sequence
  Description of Artificial Sequence: Synthetic oligonucleotide
  Antisense strand to SEQ ID NO: 866742
aggcucagagauuacguga

SEQ ID NO: 866744 - RNA, 19 nt, Artificial Sequence
  Description of Artificial Sequence: Synthetic oligonucleotide
  Sense strand starting at position 2322 of SEQ ID NO: 588463
cguaaucucugagccucau

SEQ ID NO: 866745 - RNA, 19 nt, Artificial Sequence
  Description of Artificial Sequence: Synthetic oligonucleotide
  Antisense strand to SEQ ID NO: 866744
augaggcucagagauuacg

SEQ ID NO: 866746 - RNA, 19 nt, Artificial Sequence
  Description of Artificial Sequence: Synthetic oligonucleotide
  Sense strand starting at position 2333 of SEQ ID NO: 588463
agccucauuucugucguua

SEQ ID NO: 866747 - RNA, 19 nt, Artificial Sequence
  Description of Artificial Sequence: Synthetic oligonucleotide
  Antisense strand to SEQ ID NO: 866746
uaacgacagaaaugaggcu

SEQ ID NO: 866748 - RNA, 19 nt, Artificial Sequence
  Description of Artificial Sequence: Synthetic oligonucleotide
  Sense strand starting at position 2337 of SEQ ID NO: 588463
ucauuucugucguuagcga

SEQ ID NO: 866749 - RNA, 19 nt, Artificial Sequence
  Description of Artificial Sequence: Synthetic oligonucleotide
  Antisense strand to SEQ ID NO: 866748
ucgcuaacgacagaaauga

SEQ ID NO: 866750 - RNA, 19 nt, Artificial Sequence
  Description of Artificial Sequence: Synthetic oligonucleotide
  Sense strand starting at position 2338 of SEQ ID NO: 588463
cauuucugucguuagcgaa

SEQ ID NO: 866751 - RNA, 19 nt, Artificial Sequence
  Description of Artificial Sequence: Synthetic oligonucleotide
  Antisense strand to SEQ ID NO: 866750
uucgcuaacgacagaaaug

SEQ ID NO: 866752 - RNA, 19 nt, Artificial Sequence
  Description of Artificial Sequence: Synthetic oligonucleotide
  Sense strand starting at position 2342 of SEQ ID NO: 588463
ucugucguuagcgaaaucu

SEQ ID NO: 866753 - RNA, 19 nt, Artificial Sequence
  Description of Artificial Sequence: Synthetic oligonucleotide
  Antisense strand to SEQ ID NO: 866752
agauuucgcuaacgacaga

SEQ ID NO: 866754 - RNA, 19 nt, Artificial Sequence
  Description of Artificial Sequence: Synthetic oligonucleotide
  Sense strand starting at position 2350 of SEQ ID NO: 588463
uagcgaaaucuauguccuc

SEQ ID NO: 866755 - RNA, 19 nt, Artificial Sequence
  Description of Artificial Sequence: Synthetic oligonucleotide
  Antisense strand to SEQ ID NO: 866754
gaggacauagauuucgcua

SEQ ID NO: 866756 - RNA, 19 nt, Artificial Sequence
  Description of Artificial Sequence: Synthetic oligonucleotide
  Sense strand starting at position 2351 of SEQ ID NO: 588463
agcgaaaucuauguccuca

SEQ ID NO: 866757 - RNA, 19 nt, Artificial Sequence
  Description of Artificial Sequence: Synthetic oligonucleotide
  Antisense strand to SEQ ID NO: 866756
ugaggacauagauuucgcu

SEQ ID NO: 866758 - RNA, 19 nt, Artificial Sequence
  Description of Artificial Sequence: Synthetic oligonucleotide
  Sense strand starting at position 2353 of SEQ ID NO: 588463
cgaaaucuauguccucaaa

SEQ ID NO: 866759 - RNA, 19 nt, Artificial Sequence
  Description of Artificial Sequence: Synthetic oligonucleotide
  Antisense strand to SEQ ID NO: 866758
uuugaggacauagauuucg

SEQ ID NO: 866760 - RNA, 19 nt, Artificial Sequence
  Description of Artificial Sequence: Synthetic oligonucleotide
  Sense strand starting at position 3163 of SEQ ID NO: 588463
ugcuaccucuggcaaugau

SEQ ID NO: 866761 - RNA, 19 nt, Artificial Sequence
  Description of Artificial Sequence: Synthetic oligonucleotide
  Antisense strand to SEQ ID NO: 866760
aucauugccagagguagca

SEQ ID NO: 866762 - RNA, 19 nt, Artificial Sequence
  Description of Artificial Sequence: Synthetic oligonucleotide
  Sense strand starting at position 3660 of SEQ ID NO: 588463
uuugaaguuuaugcuauca

SEQ ID NO: 866763 - RNA, 19 nt, Artificial Sequence
  Description of Artificial Sequence: Synthetic oligonucleotide
  Antisense strand to SEQ ID NO: 866762
ugauagcauaaacuucaaa

SEQ ID NO: 866764 - RNA, 19 nt, Artificial Sequence
  Description of Artificial Sequence: Synthetic oligonucleotide
  Sense strand starting at position 3665 of SEQ ID NO: 588463
aguuuaugcuaucacccau

SEQ ID NO: 866765 - RNA, 19 nt, Artificial Sequence
  Description of Artificial Sequence: Synthetic oligonucleotide
  Antisense strand to SEQ ID NO: 866764
augggugauagcauaaacu

SEQ ID NO: 866766 - RNA, 19 nt, Artificial Sequence
  Description of Artificial Sequence: Synthetic oligonucleotide
  Sense strand starting at position 3697 of SEQ ID NO: 588463
ggaggucaucuguaagauc

SEQ ID NO: 866767 - RNA, 19 nt, Artificial Sequence
  Description of Artificial Sequence: Synthetic oligonucleotide
  Antisense strand to SEQ ID NO: 866766
gaucuuacagaugaccucc

SEQ ID NO: 866768 - RNA, 19 nt, Artificial Sequence
  Description of Artificial Sequence: Synthetic oligonucleotide
  Sense strand starting at position 3700 of SEQ ID NO: 588463
ggucaucuguaagaucucu

SEQ ID NO: 866769 - RNA, 19 nt, Artificial Sequence
  Description of Artificial Sequence: Synthetic oligonucleotide
  Antisense strand to SEQ ID NO: 866768
agagaucuuacagaugacc

SEQ ID NO: 866770 - RNA, 19 nt, Artificial Sequence
  Description of Artificial Sequence: Synthetic oligonucleotide
  Sense strand starting at position 3705 of SEQ ID NO: 588463
ucuguaagaucucugacuc

SEQ ID NO: 866771 - RNA, 19 nt, Artificial Sequence
  Description of Artificial Sequence: Synthetic oligonucleotide
  Antisense strand to SEQ ID NO: 866770
gagucagagaucuuacaga

SEQ ID NO: 866772 - RNA, 19 nt, Artificial Sequence
  Description of Artificial Sequence: Synthetic oligonucleotide
  Sense strand starting at position 3809 of SEQ ID NO: 588463
guaaacugugauugcacga

SEQ ID NO: 866773 - RNA, 19 nt, Artificial Sequence
  Description of Artificial Sequence: Synthetic oligonucleotide
  Antisense strand to SEQ ID NO: 866772
ucgugcaaucacaguuuac

SEQ ID NO: 866774 - RNA, 19 nt, Artificial Sequence
  Description of Artificial Sequence: Synthetic oligonucleotide
  Sense strand starting at position 149 of SEQ ID NO: 588464
agccuuguuccagggcuga

SEQ ID NO: 866775 - RNA, 19 nt, Artificial Sequence
  Description of Artificial Sequence: Synthetic oligonucleotide
  Antisense strand to SEQ ID NO: 866774
ucagcccuggaacaaggcu

SEQ ID NO: 866776 - RNA, 19 nt, Artificial Sequence
  Description of Artificial Sequence: Synthetic oligonucleotide
  Sense strand starting at position 411 of SEQ ID NO: 588464
gggucagauuugcuggcua

SEQ ID NO: 866777 - RNA, 19 nt, Artificial Sequence
  Description of Artificial Sequence: Synthetic oligonucleotide
  Antisense strand to SEQ ID NO: 866776
uagccagcaaaucugaccc

SEQ ID NO: 866778 - RNA, 19 nt, Artificial Sequence
  Description of Artificial Sequence: Synthetic oligonucleotide
  Sense strand starting at position 413 of SEQ ID NO: 588464
gucagauuugcuggcuaac

SEQ ID NO: 866779 - RNA, 19 nt, Artificial Sequence
  Description of Artificial Sequence: Synthetic oligonucleotide
  Antisense strand to SEQ ID NO: 866778
guuagccagcaaaucugac

SEQ ID NO: 866780 - RNA, 19 nt, Artificial Sequence
  Description of Artificial Sequence: Synthetic oligonucleotide
  Sense strand starting at position 431 of SEQ ID NO: 588464
caugaagcacuugggaaau

SEQ ID NO: 866781 - RNA, 19 nt, Artificial Sequence
  Description of Artificial Sequence: Synthetic oligonucleotide
  Antisense strand to SEQ ID NO: 866780
auuucccaagugcuucaug

SEQ ID NO: 866782 - RNA, 19 nt, Artificial Sequence
  Description of Artificial Sequence: Synthetic oligonucleotide
  Sense strand starting at position 559 of SEQ ID NO: 588464
cuaggaaagucacucugaa

SEQ ID NO: 866783 - RNA, 19 nt, Artificial Sequence
  Description of Artificial Sequence: Synthetic oligonucleotide
  Antisense strand to SEQ ID NO: 866782
uucagagugacuuuccuag

SEQ ID NO: 866784 - RNA, 19 nt, Artificial Sequence
  Description of Artificial Sequence: Synthetic oligonucleotide
  Sense strand starting at position 612 of SEQ ID NO: 588464
gcugcuagcauaugggaua

SEQ ID NO: 866785 - RNA, 19 nt, Artificial Sequence
  Description of Artificial Sequence: Synthetic oligonucleotide
  Antisense strand to SEQ ID NO: 866784
uaucccauaugcuagcagc

SEQ ID NO: 866786 - RNA, 19 nt, Artificial Sequence
  Description of Artificial Sequence: Synthetic oligonucleotide
  Sense strand starting at position 615 of SEQ ID NO: 588464
gcuagcauaugggauagau

SEQ ID NO: 866787 - RNA, 19 nt, Artificial Sequence
  Description of Artificial Sequence: Synthetic oligonucleotide
  Antisense strand to SEQ ID NO: 866786
aucuaucccauaugcuagc

SEQ ID NO: 866788 - RNA, 19 nt, Artificial Sequence
  Description of Artificial Sequence: Synthetic oligonucleotide
  Sense strand starting at position 675 of SEQ ID NO: 588464
uacggauauuaggcaaaga

SEQ ID NO: 866789 - RNA, 19 nt, Artificial Sequence
  Description of Artificial Sequence: Synthetic oligonucleotide
  Antisense strand to SEQ ID NO: 866788
ucuuugccuaauauccgua

SEQ ID NO: 866790 - RNA, 19 nt, Artificial Sequence
  Description of Artificial Sequence: Synthetic oligonucleotide
  Sense strand starting at position 726 of SEQ ID NO: 588464
uagauaccguaaggaucua

SEQ ID NO: 866791 - RNA, 19 nt, Artificial Sequence
  Description of Artificial Sequence: Synthetic oligonucleotide
  Antisense strand to SEQ ID NO: 866790
uagauccuuacgguaucua

SEQ ID NO: 866792 - RNA, 19 nt, Artificial Sequence
  Description of Artificial Sequence: Synthetic oligonucleotide
  Sense strand starting at position 757 of SEQ ID NO: 588464
gcaucuagucuguguaguu

SEQ ID NO: 866793 - RNA, 19 nt, Artificial Sequence
  Description of Artificial Sequence: Synthetic oligonucleotide
  Antisense strand to SEQ ID NO: 866792
aacuacacagacuagaugc

SEQ ID NO: 866794 - RNA, 19 nt, Artificial Sequence
  Description of Artificial Sequence: Synthetic oligonucleotide
  Sense strand starting at position 758 of SEQ ID NO: 588464
caucuagucuguguaguua

SEQ ID NO: 866795 - RNA, 19 nt, Artificial Sequence
  Description of Artificial Sequence: Synthetic oligonucleotide
  Antisense strand to SEQ ID NO: 866794
uaacuacacagacuagaug

SEQ ID NO: 866796 - RNA, 19 nt, Artificial Sequence
  Description of Artificial Sequence: Synthetic oligonucleotide
  Sense strand starting at position 762 of SEQ ID NO: 588464
uagucuguguaguuaggga

SEQ ID NO: 866797 - RNA, 19 nt, Artificial Sequence
  Description of Artificial Sequence: Synthetic oligonucleotide
  Antisense strand to SEQ ID NO: 866796
ucccuaacuacacagacua

SEQ ID NO: 866798 - RNA, 19 nt, Artificial Sequence
  Description of Artificial Sequence: Synthetic oligonucleotide
  Sense strand starting at position 770 of SEQ ID NO: 588464
guaguuagggaaugucaua

SEQ ID NO: 866799 - RNA, 19 nt, Artificial Sequence
  Description of Artificial Sequence: Synthetic oligonucleotide
  Antisense strand to SEQ ID NO: 866798
uaugacauucccuaacuac

SEQ ID NO: 866800 - RNA, 19 nt, Artificial Sequence
  Description of Artificial Sequence: Synthetic oligonucleotide
  Sense strand starting at position 775 of SEQ ID NO: 588464
uagggaaugucauaagcaa

SEQ ID NO: 866801 - RNA, 19 nt, Artificial Sequence
  Description of Artificial Sequence: Synthetic oligonucleotide
  Antisense strand to SEQ ID NO: 866800
uugcuuaugacauucccua

SEQ ID NO: 866802 - RNA, 19 nt, Artificial Sequence
  Description of Artificial Sequence: Synthetic oligonucleotide
  Sense strand starting at position 783 of SEQ ID NO: 588464
gucauaagcaagugaaguu

SEQ ID NO: 866803 - RNA, 19 nt, Artificial Sequence
  Description of Artificial Sequence: Synthetic oligonucleotide
  Antisense strand to SEQ ID NO: 866802
aacuucacuugcuuaugac

SEQ ID NO: 866804 - RNA, 19 nt, Artificial Sequence
  Description of Artificial Sequence: Synthetic oligonucleotide
  Sense strand starting at position 1185 of SEQ ID NO: 588464
gcucccgucaguggaaaua

SEQ ID NO: 866805 - RNA, 19 nt, Artificial Sequence
  Description of Artificial Sequence: Synthetic oligonucleotide
  Antisense strand to SEQ ID NO: 866804
uauuuccacugacgggagc

SEQ ID NO: 866806 - RNA, 19 nt, Artificial Sequence
  Description of Artificial Sequence: Synthetic oligonucleotide
  Sense strand starting at position 1262 of SEQ ID NO: 588464
ggacacaauuauuaugauu

SEQ ID NO: 866807 - RNA, 19 nt, Artificial Sequence
  Description of Artificial Sequence: Synthetic oligonucleotide
  Antisense strand to SEQ ID NO: 866806
aaucauaauaauugugucc

SEQ ID NO: 866808 - RNA, 19 nt, Artificial Sequence
  Description of Artificial Sequence: Synthetic oligonucleotide
  Sense strand starting at position 1285 of SEQ ID NO: 588464
uuaucauuauuagggaugu

SEQ ID NO: 866809 - RNA, 19 nt, Artificial Sequence
  Description of Artificial Sequence: Synthetic oligonucleotide
  Antisense strand to SEQ ID NO: 866808
acaucccuaauaaugauaa

SEQ ID NO: 866810 - RNA, 19 nt, Artificial Sequence
  Description of Artificial Sequence: Synthetic oligonucleotide
  Sense strand starting at position 1289 of SEQ ID NO: 588464
cauuauuagggaugucaaa

SEQ ID NO: 866811 - RNA, 19 nt, Artificial Sequence
  Description of Artificial Sequence: Synthetic oligonucleotide
  Antisense strand to SEQ ID NO: 866810
uuugacaucccuaauaaug

SEQ ID NO: 866812 - RNA, 19 nt, Artificial Sequence
  Description of Artificial Sequence: Synthetic oligonucleotide
  Sense strand starting at position 1325 of SEQ ID NO: 588464
agagcauaugaacgauauc

SEQ ID NO: 866813 - RNA, 19 nt, Artificial Sequence
  Description of Artificial Sequence: Synthetic oligonucleotide
  Antisense strand to SEQ ID NO: 866812
gauaucguucauaugcucu

SEQ ID NO: 866814 - RNA, 19 nt, Artificial Sequence
  Description of Artificial Sequence: Synthetic oligonucleotide
  Sense strand starting at position 1328 of SEQ ID NO: 588464
gcauaugaacgauaucuug

SEQ ID NO: 866815 - RNA, 19 nt, Artificial Sequence
  Description of Artificial Sequence: Synthetic oligonucleotide
  Antisense strand to SEQ ID NO: 866814
caagauaucguucauaugc

SEQ ID NO: 866816 - RNA, 19 nt, Artificial Sequence
  Description of Artificial Sequence: Synthetic oligonucleotide
  Sense strand starting at position 1334 of SEQ ID NO: 588464
gaacgauaucuuggcugcu

SEQ ID NO: 866817 - RNA, 19 nt, Artificial Sequence
  Description of Artificial Sequence: Synthetic oligonucleotide
  Antisense strand to SEQ ID NO: 866816
agcagccaagauaucguuc

SEQ ID NO: 866818 - RNA, 19 nt, Artificial Sequence
  Description of Artificial Sequence: Synthetic oligonucleotide
  Sense strand starting at position 1384 of SEQ ID NO: 588464
guacuuacccaaggucaca

SEQ ID NO: 866819 - RNA, 19 nt, Artificial Sequence
  Description of Artificial Sequence: Synthetic oligonucleotide
  Antisense strand to SEQ ID NO: 866818
ugugaccuuggguaaguac

SEQ ID NO: 866820 - RNA, 19 nt, Artificial Sequence
  Description of Artificial Sequence: Synthetic oligonucleotide
  Sense strand starting at position 1462 of SEQ ID NO: 588464
uccacuguaccaugagaua

SEQ ID NO: 866821 - RNA, 19 nt, Artificial Sequence
  Description of Artificial Sequence: Synthetic oligonucleotide
  Antisense strand to SEQ ID NO: 866820
uaucucaugguacagugga

SEQ ID NO: 866822 - RNA, 19 nt, Artificial Sequence
  Description of Artificial Sequence: Synthetic oligonucleotide
  Sense strand starting at position 1465 of SEQ ID NO: 588464
acuguaccaugagauauau

SEQ ID NO: 866823 - RNA, 19 nt, Artificial Sequence
  Description of Artificial Sequence: Synthetic oligonucleotide
  Antisense strand to SEQ ID NO: 866822
auauaucucaugguacagu

SEQ ID NO: 866824 - RNA, 19 nt, Artificial Sequence
  Description of Artificial Sequence: Synthetic oligonucleotide
  Sense strand starting at position 1581 of SEQ ID NO: 588464
aucuuuacuggagguaaua

SEQ ID NO: 866825 - RNA, 19 nt, Artificial Sequence
  Description of Artificial Sequence: Synthetic oligonucleotide
  Antisense strand to SEQ ID NO: 866824
uauuaccuccaguaaagau

SEQ ID NO: 866826 - RNA, 19 nt, Artificial Sequence
  Description of Artificial Sequence: Synthetic oligonucleotide
  Sense strand starting at position 1592 of SEQ ID NO: 588464
agguaauaacacuggccua

SEQ ID NO: 866827 - RNA, 19 nt, Artificial Sequence
  Description of Artificial Sequence: Synthetic oligonucleotide
  Antisense strand to SEQ ID NO: 866826
uaggccaguguuauuaccu

SEQ ID NO: 866828 - RNA, 19 nt, Artificial Sequence
  Description of Artificial Sequence: Synthetic oligonucleotide
  Sense strand starting at position 1764 of SEQ ID NO: 588464
cuaaguugauacuuaggga

SEQ ID NO: 866829 - RNA, 19 nt, Artificial Sequence
  Description of Artificial Sequence: Synthetic oligonucleotide
  Antisense strand to SEQ ID NO: 866828
ucccuaaguaucaacuuag

SEQ ID NO: 866830 - RNA, 19 nt, Artificial Sequence
  Description of Artificial Sequence: Synthetic oligonucleotide
  Sense strand starting at position 1782 of SEQ ID NO: 588464
aagggcgucacugguaaau

SEQ ID NO: 866831 - RNA, 19 nt, Artificial Sequence
  Description of Artificial Sequence: Synthetic oligonucleotide
  Antisense strand to SEQ ID NO: 866830
auuuaccagugacgcccuu

SEQ ID NO: 866832 - RNA, 19 nt, Artificial Sequence
  Description of Artificial Sequence: Synthetic oligonucleotide
  Sense strand starting at position 1814 of SEQ ID NO: 588464
ggaggaaguuuguccagga

SEQ ID NO: 866833 - RNA, 19 nt, Artificial Sequence
  Description of Artificial Sequence: Synthetic oligonucleotide
  Antisense strand to SEQ ID NO: 866832
uccuggacaaacuuccucc

SEQ ID NO: 866834 - RNA, 19 nt, Artificial Sequence
  Description of Artificial Sequence: Synthetic oligonucleotide
  Sense strand starting at position 1815 of SEQ ID NO: 588464
gaggaaguuuguccaggaa

SEQ ID NO: 866835 - RNA, 19 nt, Artificial Sequence
  Description of Artificial Sequence: Synthetic oligonucleotide
  Antisense strand to SEQ ID NO: 866834
uuccuggacaaacuuccuc

SEQ ID NO: 866836 - RNA, 19 nt, Artificial Sequence
  Description of Artificial Sequence: Synthetic oligonucleotide
  Sense strand starting at position 1818 of SEQ ID NO: 588464
gaaguuuguccaggaaaug

SEQ ID NO: 866837 - RNA, 19 nt, Artificial Sequence
  Description of Artificial Sequence: Synthetic oligonucleotide
  Antisense strand to SEQ ID NO: 866836
cauuuccuggacaaacuuc

SEQ ID NO: 866838 - RNA, 19 nt, Artificial Sequence
  Description of Artificial Sequence: Synthetic oligonucleotide
  Sense strand starting at position 1932 of SEQ ID NO: 588464
gucacauuggcacagcuaa

SEQ ID NO: 866839 - RNA, 19 nt, Artificial Sequence
  Description of Artificial Sequence: Synthetic oligonucleotide
  Antisense strand to SEQ ID NO: 866838
uuagcugugccaaugugac

SEQ ID NO: 866840 - RNA, 19 nt, Artificial Sequence
  Description of Artificial Sequence: Synthetic oligonucleotide
  Sense strand starting at position 2653 of SEQ ID NO: 588464
gcacgaacugcucaccuuu

SEQ ID NO: 866841 - RNA, 19 nt, Artificial Sequence
  Description of Artificial Sequence: Synthetic oligonucleotide
  Antisense strand to SEQ ID NO: 866840
aaaggugagcaguucgugc

SEQ ID NO: 866842 - RNA, 19 nt, Artificial Sequence
  Description of Artificial Sequence: Synthetic oligonucleotide
  Sense strand starting at position 3323 of SEQ ID NO: 588464
ccuccuuuggaucgggaaa

SEQ ID NO: 866843 - RNA, 19 nt, Artificial Sequence
  Description of Artificial Sequence: Synthetic oligonucleotide
  Antisense strand to SEQ ID NO: 866842
uuucccgauccaaaggagg

SEQ ID NO: 866844 - RNA, 19 nt, Artificial Sequence
  Description of Artificial Sequence: Synthetic oligonucleotide
  Sense strand starting at position 3400 of SEQ ID NO: 588464
cuuaguguugugugaaccu

SEQ ID NO: 866845 - RNA, 19 nt, Artificial Sequence
  Description of Artificial Sequence: Synthetic oligonucleotide
  Antisense strand to SEQ ID NO: 866844
agguucacacaacacuaag

SEQ ID NO: 866846 - RNA, 19 nt, Artificial Sequence
  Description of Artificial Sequence: Synthetic oligonucleotide
  Sense strand starting at position 3457 of SEQ ID NO: 588464
guugguauuggagggaauu

SEQ ID NO: 866847 - RNA, 19 nt, Artificial Sequence
  Description of Artificial Sequence: Synthetic oligonucleotide
  Antisense strand to SEQ ID NO: 866846
aauucccuccaauaccaac

SEQ ID NO: 866848 - RNA, 19 nt, Artificial Sequence
  Description of Artificial Sequence: Synthetic oligonucleotide
  Sense strand starting at position 3483 of SEQ ID NO: 588464
guuggaaacuuguuaaauc

SEQ ID NO: 866849 - RNA, 19 nt, Artificial Sequence
  Description of Artificial Sequence: Synthetic oligonucleotide
  Antisense strand to SEQ ID NO: 866848
gauuuaacaaguuuccaac

SEQ ID NO: 866850 - RNA, 19 nt, Artificial Sequence
  Description of Artificial Sequence: Synthetic oligonucleotide
  Sense strand starting at position 3503 of SEQ ID NO: 588464
aagauaacuuggugagggu

SEQ ID NO: 866851 - RNA, 19 nt, Artificial Sequence
  Description of Artificial Sequence: Synthetic oligonucleotide
  Antisense strand to SEQ ID NO: 866850
acccucaccaaguuaucuu

SEQ ID NO: 866852 - RNA, 19 nt, Artificial Sequence
  Description of Artificial Sequence: Synthetic oligonucleotide
  Sense strand starting at position 3519 of SEQ ID NO: 588464
gguagaguccgcugcagua

SEQ ID NO: 866853 - RNA, 19 nt, Artificial Sequence
  Description of Artificial Sequence: Synthetic oligonucleotide
  Antisense strand to SEQ ID NO: 866852
uacugcagcggacucuacc

SEQ ID NO: 866854 - RNA, 19 nt, Artificial Sequence
  Description of Artificial Sequence: Synthetic oligonucleotide
  Sense strand starting at position 4 of SEQ ID NO: 588465
agaugagagcccugguaca

SEQ ID NO: 866855 - RNA, 19 nt, Artificial Sequence
  Description of Artificial Sequence: Synthetic oligonucleotide
  Antisense strand to SEQ ID NO: 866854
uguaccagggcucucaucu

SEQ ID NO: 866856 - RNA, 19 nt, Artificial Sequence
  Description of Artificial Sequence: Synthetic oligonucleotide
  Sense strand starting at position 37 of SEQ ID NO: 588465
gccauagucagagagccau

SEQ ID NO: 866857 - RNA, 19 nt, Artificial Sequence
  Description of Artificial Sequence: Synthetic oligonucleotide
  Antisense strand to SEQ ID NO: 866856
auggcucucugacuauggc

SEQ ID NO: 866858 - RNA, 19 nt, Artificial Sequence
  Description of Artificial Sequence: Synthetic oligonucleotide
  Sense strand starting at position 60 of SEQ ID NO: 588465
ugaagaccauauuauauga

SEQ ID NO: 866859 - RNA, 19 nt, Artificial Sequence
  Description of Artificial Sequence: Synthetic oligonucleotide
  Antisense strand to SEQ ID NO: 866858
ucauauaauauggucuuca

SEQ ID NO: 866860 - RNA, 19 nt, Artificial Sequence
  Description of Artificial Sequence: Synthetic oligonucleotide
  Sense strand starting at position 103 of SEQ ID NO: 588465
gguacagggcucuaucauu

SEQ ID NO: 866861 - RNA, 19 nt, Artificial Sequence
  Description of Artificial Sequence: Synthetic oligonucleotide
  Antisense strand to SEQ ID NO: 866860
aaugauagagcccuguacc

SEQ ID NO: 866862 - RNA, 19 nt, Artificial Sequence
  Description of Artificial Sequence: Synthetic oligonucleotide
  Sense strand starting at position 295 of SEQ ID NO: 588465
aguguugauagugauauua

SEQ ID NO: 866863 - RNA, 19 nt, Artificial Sequence
  Description of Artificial Sequence: Synthetic oligonucleotide
  Antisense strand to SEQ ID NO: 866862
uaauaucacuaucaacacu

SEQ ID NO: 866864 - RNA, 19 nt, Artificial Sequence
  Description of Artificial Sequence: Synthetic oligonucleotide
  Sense strand starting at position 305 of SEQ ID NO: 588465
gugauauuagaguguucua

SEQ ID NO: 866865 - RNA, 19 nt, Artificial Sequence
  Description of Artificial Sequence: Synthetic oligonucleotide
  Antisense strand to SEQ ID NO: 866864
uagaacacucuaauaucac

SEQ ID NO: 866866 - RNA, 19 nt, Artificial Sequence
  Description of Artificial Sequence: Synthetic oligonucleotide
  Sense strand starting at position 472 of SEQ ID NO: 588465
uugcuuuccuaaguggaga

SEQ ID NO: 866867 - RNA, 19 nt, Artificial Sequence
  Description of Artificial Sequence: Synthetic oligonucleotide
  Antisense strand to SEQ ID NO: 866866
ucuccacuuaggaaagcaa

SEQ ID NO: 866868 - RNA, 19 nt, Artificial Sequence
  Description of Artificial Sequence: Synthetic oligonucleotide
  Sense strand starting at position 473 of SEQ ID NO: 588465
ugcuuuccuaaguggagaa

SEQ ID NO: 866869 - RNA, 19 nt, Artificial Sequence
  Description of Artificial Sequence: Synthetic oligonucleotide
  Antisense strand to SEQ ID NO: 866868
uucuccacuuaggaaagca

SEQ ID NO: 866870 - RNA, 19 nt, Artificial Sequence
  Description of Artificial Sequence: Synthetic oligonucleotide
  Sense strand starting at position 527 of SEQ ID NO: 588465
ucuguugaugcaugauaaa

SEQ ID NO: 866871 - RNA, 19 nt, Artificial Sequence
  Description of Artificial Sequence: Synthetic oligonucleotide
  Antisense strand to SEQ ID NO: 866870
uuuaucaugcaucaacaga

SEQ ID NO: 866872 - RNA, 19 nt, Artificial Sequence
  Description of Artificial Sequence: Synthetic oligonucleotide
  Sense strand starting at position 545 of SEQ ID NO: 588465
augacuucugucugcuaaa

SEQ ID NO: 866873 - RNA, 19 nt, Artificial Sequence
  Description of Artificial Sequence: Synthetic oligonucleotide
  Antisense strand to SEQ ID NO: 866872
uuuagcagacagaagucau

SEQ ID NO: 866874 - RNA, 19 nt, Artificial Sequence
  Description of Artificial Sequence: Synthetic oligonucleotide
  Sense strand starting at position 811 of SEQ ID NO: 588465
cuaguaauauauucucagu

SEQ ID NO: 866875 - RNA, 19 nt, Artificial Sequence
  Description of Artificial Sequence: Synthetic oligonucleotide
  Antisense strand to SEQ ID NO: 866874
acugagaauauauuacuag

SEQ ID NO: 866876 - RNA, 19 nt, Artificial Sequence
  Description of Artificial Sequence: Synthetic oligonucleotide
  Sense strand starting at position 813 of SEQ ID NO: 588465
aguaauauauucucagugu

SEQ ID NO: 866877 - RNA, 19 nt, Artificial Sequence
  Description of Artificial Sequence: Synthetic oligonucleotide
  Antisense strand to SEQ ID NO: 866876
acacugagaauauauuacu

SEQ ID NO: 866878 - RNA, 19 nt, Artificial Sequence
  Description of Artificial Sequence: Synthetic oligonucleotide
  Sense strand starting at position 926 of SEQ ID NO: 588465
ggccaaauccaguggucca

SEQ ID NO: 866879 - RNA, 19 nt, Artificial Sequence
  Description of Artificial Sequence: Synthetic oligonucleotide
  Antisense strand to SEQ ID NO: 866878
uggaccacuggauuuggcc

SEQ ID NO: 866880 - RNA, 19 nt, Artificial Sequence
  Description of Artificial Sequence: Synthetic oligonucleotide
  Sense strand starting at position 976 of SEQ ID NO: 588465
gcuuauaauuccucugagu

SEQ ID NO: 866881 - RNA, 19 nt, Artificial Sequence
  Description of Artificial Sequence: Synthetic oligonucleotide
  Antisense strand to SEQ ID NO: 866880
acucagaggaauuauaagc

SEQ ID NO: 866882 - RNA, 19 nt, Artificial Sequence
  Description of Artificial Sequence: Synthetic oligonucleotide
  Sense strand starting at position 1125 of SEQ ID NO: 588465
cuagguaugggagguguuu

SEQ ID NO: 866883 - RNA, 19 nt, Artificial Sequence
  Description of Artificial Sequence: Synthetic oligonucleotide
  Antisense strand to SEQ ID NO: 866882
aaacaccucccauaccuag

SEQ ID NO: 866884 - RNA, 19 nt, Artificial Sequence
  Description of Artificial Sequence: Synthetic oligonucleotide
  Sense strand starting at position 1145 of SEQ ID NO: 588465
ccaagagucccugauccuu

SEQ ID NO: 866885 - RNA, 19 nt, Artificial Sequence
  Description of Artificial Sequence: Synthetic oligonucleotide
  Antisense strand to SEQ ID NO: 866884
aaggaucagggacucuugg

SEQ ID NO: 866886 - RNA, 19 nt, Artificial Sequence
  Description of Artificial Sequence: Synthetic oligonucleotide
  Sense strand starting at position 1224 of SEQ ID NO: 588465
cuuugcagaugucuucuaa

SEQ ID NO: 866887 - RNA, 19 nt, Artificial Sequence
  Description of Artificial Sequence: Synthetic oligonucleotide
  Antisense strand to SEQ ID NO: 866886
uuagaagacaucugcaaag

SEQ ID NO: 866888 - RNA, 19 nt, Artificial Sequence
  Description of Artificial Sequence: Synthetic oligonucleotide
  Sense strand starting at position 1263 of SEQ ID NO: 588465
agaucacauuuccaagugu

SEQ ID NO: 866889 - RNA, 19 nt, Artificial Sequence
  Description of Artificial Sequence: Synthetic oligonucleotide
  Antisense strand to SEQ ID NO: 866888
acacuuggaaaugugaucu

SEQ ID NO: 866890 - RNA, 19 nt, Artificial Sequence
  Description of Artificial Sequence: Synthetic oligonucleotide
  Sense strand starting at position 1276 of SEQ ID NO: 588465
aaguguuucuugguuauca

SEQ ID NO: 866891 - RNA, 19 nt, Artificial Sequence
  Description of Artificial Sequence: Synthetic oligonucleotide
  Antisense strand to SEQ ID NO: 866890
ugauaaccaagaaacacuu

SEQ ID NO: 866892 - RNA, 19 nt, Artificial Sequence
  Description of Artificial Sequence: Synthetic oligonucleotide
  Sense strand starting at position 1278 of SEQ ID NO: 588465
guguuucuugguuaucacu

SEQ ID NO: 866893 - RNA, 19 nt, Artificial Sequence
  Description of Artificial Sequence: Synthetic oligonucleotide
  Antisense strand to SEQ ID NO: 866892
agugauaaccaagaaacac

SEQ ID NO: 866894 - RNA, 19 nt, Artificial Sequence
  Description of Artificial Sequence: Synthetic oligonucleotide
  Sense strand starting at position 1280 of SEQ ID NO: 588465
guuucuugguuaucacuua

SEQ ID NO: 866895 - RNA, 19 nt, Artificial Sequence
  Description of Artificial Sequence: Synthetic oligonucleotide
  Antisense strand to SEQ ID NO: 866894
uaagugauaaccaagaaac

SEQ ID NO: 866896 - RNA, 19 nt, Artificial Sequence
  Description of Artificial Sequence: Synthetic oligonucleotide
  Sense strand starting at position 1379 of SEQ ID NO: 588465
ugcuuuauuucuguuagaa

SEQ ID NO: 866897 - RNA, 19 nt, Artificial Sequence
  Description of Artificial Sequence: Synthetic oligonucleotide
  Antisense strand to SEQ ID NO: 866896
uucuaacagaaauaaagca

SEQ ID NO: 866898 - RNA, 19 nt, Artificial Sequence
  Description of Artificial Sequence: Synthetic oligonucleotide
  Sense strand starting at position 1434 of SEQ ID NO: 588465
ucagaagucucuuugacuc

SEQ ID NO: 866899 - RNA, 19 nt, Artificial Sequence
  Description of Artificial Sequence: Synthetic oligonucleotide
  Antisense strand to SEQ ID NO: 866898
gagucaaagagacuucuga

SEQ ID NO: 866900 - RNA, 19 nt, Artificial Sequence
  Description of Artificial Sequence: Synthetic oligonucleotide
  Sense strand starting at position 1484 of SEQ ID NO: 588465
agauacaguucugccaguu

SEQ ID NO: 866901 - RNA, 19 nt, Artificial Sequence
  Description of Artificial Sequence: Synthetic oligonucleotide
  Antisense strand to SEQ ID NO: 866900
aacuggcagaacuguaucu

SEQ ID NO: 866902 - RNA, 19 nt, Artificial Sequence
  Description of Artificial Sequence: Synthetic oligonucleotide
  Sense strand starting at position 1719 of SEQ ID NO: 588465
ccuguaaagccucaguauu

SEQ ID NO: 866903 - RNA, 19 nt, Artificial Sequence
  Description of Artificial Sequence: Synthetic oligonucleotide
  Antisense strand to SEQ ID NO: 866902
aauacugaggcuuuacagg

SEQ ID NO: 866904 - RNA, 19 nt, Artificial Sequence
  Description of Artificial Sequence: Synthetic oligonucleotide
  Sense strand starting at position 1731 of SEQ ID NO: 588465
caguauugccugcagaaua

SEQ ID NO: 866905 - RNA, 19 nt, Artificial Sequence
  Description of Artificial Sequence: Synthetic oligonucleotide
  Antisense strand to SEQ ID NO: 866904
uauucugcaggcaauacug

SEQ ID NO: 866906 - RNA, 19 nt, Artificial Sequence
  Description of Artificial Sequence: Synthetic oligonucleotide
  Sense strand starting at position 1866 of SEQ ID NO: 588465
ccgugaaucuuucuaacac

SEQ ID NO: 866907 - RNA, 19 nt, Artificial Sequence
  Description of Artificial Sequence: Synthetic oligonucleotide
  Antisense strand to SEQ ID NO: 866906
guguuagaaagauucacgg

SEQ ID NO: 866908 - RNA, 19 nt, Artificial Sequence
  Description of Artificial Sequence: Synthetic oligonucleotide
  Sense strand starting at position 1944 of SEQ ID NO: 588465
ccagauagugagugccuua

SEQ ID NO: 866909 - RNA, 19 nt, Artificial Sequence
  Description of Artificial Sequence: Synthetic oligonucleotide
  Antisense strand to SEQ ID NO: 866908
uaaggcacucacuaucugg

SEQ ID NO: 866910 - RNA, 19 nt, Artificial Sequence
  Description of Artificial Sequence: Synthetic oligonucleotide
  Sense strand starting at position 1947 of SEQ ID NO: 588465
gauagugagugccuuaauc

SEQ ID NO: 866911 - RNA, 19 nt, Artificial Sequence
  Description of Artificial Sequence: Synthetic oligonucleotide
  Antisense strand to SEQ ID NO: 866910
gauuaaggcacucacuauc

SEQ ID NO: 866912 - RNA, 19 nt, Artificial Sequence
  Description of Artificial Sequence: Synthetic oligonucleotide
  Sense strand starting at position 1949 of SEQ ID NO: 588465
uagugagugccuuaaucac

SEQ ID NO: 866913 - RNA, 19 nt, Artificial Sequence
  Description of Artificial Sequence: Synthetic oligonucleotide
  Antisense strand to SEQ ID NO: 866912
gugauuaaggcacucacua

SEQ ID NO: 866914 - RNA, 19 nt, Artificial Sequence
  Description of Artificial Sequence: Synthetic oligonucleotide
  Sense strand starting at position 1964 of SEQ ID NO: 588465
ucacaaagccuuugaugau

SEQ ID NO: 866915 - RNA, 19 nt, Artificial Sequence
  Description of Artificial Sequence: Synthetic oligonucleotide
  Antisense strand to SEQ ID NO: 866914
aucaucaaaggcuuuguga

SEQ ID NO: 866916 - RNA, 19 nt, Artificial Sequence
  Description of Artificial Sequence: Synthetic oligonucleotide
  Sense strand starting at position 2000 of SEQ ID NO: 588465
ugacaaugauaugaugaga

SEQ ID NO: 866917 - RNA, 19 nt, Artificial Sequence
  Description of Artificial Sequence: Synthetic oligonucleotide
  Antisense strand to SEQ ID NO: 866916
ucucaucauaucauuguca

SEQ ID NO: 866918 - RNA, 19 nt, Artificial Sequence
  Description of Artificial Sequence: Synthetic oligonucleotide
  Sense strand starting at position 2005 of SEQ ID NO: 588465
augauaugaugagacuuua

SEQ ID NO: 866919 - RNA, 19 nt, Artificial Sequence
  Description of Artificial Sequence: Synthetic oligonucleotide
  Antisense strand to SEQ ID NO: 866918
uaaagucucaucauaucau

SEQ ID NO: 866920 - RNA, 19 nt, Artificial Sequence
  Description of Artificial Sequence: Synthetic oligonucleotide
  Sense strand starting at position 2013 of SEQ ID NO: 588465
augagacuuuagucacucu

SEQ ID NO: 866921 - RNA, 19 nt, Artificial Sequence
  Description of Artificial Sequence: Synthetic oligonucleotide
  Antisense strand to SEQ ID NO: 866920
agagugacuaaagucucau

SEQ ID NO: 866922 - RNA, 19 nt, Artificial Sequence
  Description of Artificial Sequence: Synthetic oligonucleotide
  Sense strand starting at position 2016 of SEQ ID NO: 588465
agacuuuagucacucuaca

SEQ ID NO: 866923 - RNA, 19 nt, Artificial Sequence
  Description of Artificial Sequence: Synthetic oligonucleotide
  Antisense strand to SEQ ID NO: 866922
uguagagugacuaaagucu

SEQ ID NO: 866924 - RNA, 19 nt, Artificial Sequence
  Description of Artificial Sequence: Synthetic oligonucleotide
  Sense strand starting at position 2134 of SEQ ID NO: 588465
gagguuauaucccuagauc

SEQ ID NO: 866925 - RNA, 19 nt, Artificial Sequence
  Description of Artificial Sequence: Synthetic oligonucleotide
  Antisense strand to SEQ ID NO: 866924
gaucuagggauauaaccuc

SEQ ID NO: 866926 - RNA, 19 nt, Artificial Sequence
  Description of Artificial Sequence: Synthetic oligonucleotide
  Sense strand starting at position 2156 of SEQ ID NO: 588465
uaaacucaugaguggcaga

SEQ ID NO: 866927 - RNA, 19 nt, Artificial Sequence
  Description of Artificial Sequence: Synthetic oligonucleotide
  Antisense strand to SEQ ID NO: 866926
ucugccacucaugaguuua

SEQ ID NO: 866928 - RNA, 19 nt, Artificial Sequence
  Description of Artificial Sequence: Synthetic oligonucleotide
  Sense strand starting at position 2239 of SEQ ID NO: 588465
cccuuuaauugccuagaug

SEQ ID NO: 866929 - RNA, 19 nt, Artificial Sequence
  Description of Artificial Sequence: Synthetic oligonucleotide
  Antisense strand to SEQ ID NO: 866928
caucuaggcaauuaaaggg

SEQ ID NO: 866930 - RNA, 19 nt, Artificial Sequence
  Description of Artificial Sequence: Synthetic oligonucleotide
  Sense strand starting at position 2240 of SEQ ID NO: 588465
ccuuuaauugccuagaugu

SEQ ID NO: 866931 - RNA, 19 nt, Artificial Sequence
  Description of Artificial Sequence: Synthetic oligonucleotide
  Antisense strand to SEQ ID NO: 866930
acaucuaggcaauuaaagg

SEQ ID NO: 866932 - RNA, 19 nt, Artificial Sequence
  Description of Artificial Sequence: Synthetic oligonucleotide
  Sense strand starting at position 3395 of SEQ ID NO: 588465
gguaguugugcugugcaga

SEQ ID NO: 866933 - RNA, 19 nt, Artificial Sequence
  Description of Artificial Sequence: Synthetic oligonucleotide
  Antisense strand to SEQ ID NO: 866932
ucugcacagcacaacuacc

SEQ ID NO: 866934 - RNA, 19 nt, Artificial Sequence
  Description of Artificial Sequence: Synthetic oligonucleotide
  Sense strand starting at position 7 of SEQ ID NO: 588466
auccuuguaucuccagaga

SEQ ID NO: 866935 - RNA, 19 nt, Artificial Sequence
  Description of Artificial Sequence: Synthetic oligonucleotide
  Antisense strand to SEQ ID NO: 866934
ucucuggagauacaaggau

SEQ ID NO: 866936 - RNA, 19 nt, Artificial Sequence
  Description of Artificial Sequence: Synthetic oligonucleotide
  Sense strand starting at position 356 of SEQ ID NO: 588466
ugauacauagucuaguuga

SEQ ID NO: 866937 - RNA, 19 nt, Artificial Sequence
  Description of Artificial Sequence: Synthetic oligonucleotide
  Antisense strand to SEQ ID NO: 866936
ucaacuagacuauguauca

SEQ ID NO: 866938 - RNA, 19 nt, Artificial Sequence
  Description of Artificial Sequence: Synthetic oligonucleotide
  Sense strand starting at position 393 of SEQ ID NO: 588466
aucauuccucuuggauuga

SEQ ID NO: 866939 - RNA, 19 nt, Artificial Sequence
  Description of Artificial Sequence: Synthetic oligonucleotide
  Antisense strand to SEQ ID NO: 866938
ucaauccaagaggaaugau

SEQ ID NO: 866940 - RNA, 19 nt, Artificial Sequence
  Description of Artificial Sequence: Synthetic oligonucleotide
  Sense strand starting at position 412 of SEQ ID NO: 588466
gcauuuagauuguugcuag

SEQ ID NO: 866941 - RNA, 19 nt, Artificial Sequence
  Description of Artificial Sequence: Synthetic oligonucleotide
  Antisense strand to SEQ ID NO: 866940
cuagcaacaaucuaaaugc

SEQ ID NO: 866942 - RNA, 19 nt, Artificial Sequence
  Description of Artificial Sequence: Synthetic oligonucleotide
  Sense strand starting at position 689 of SEQ ID NO: 588466
uuguucuugggauaagggu

SEQ ID NO: 866943 - RNA, 19 nt, Artificial Sequence
  Description of Artificial Sequence: Synthetic oligonucleotide
  Antisense strand to SEQ ID NO: 866942
acccuuaucccaagaacaa

SEQ ID NO: 866944 - RNA, 19 nt, Artificial Sequence
  Description of Artificial Sequence: Synthetic oligonucleotide
  Sense strand starting at position 991 of SEQ ID NO: 588466
augacuuggucccuauaaa

SEQ ID NO: 866945 - RNA, 19 nt, Artificial Sequence
  Description of Artificial Sequence: Synthetic oligonucleotide
  Antisense strand to SEQ ID NO: 866944
uuuauagggaccaagucau

SEQ ID NO: 866946 - RNA, 19 nt, Artificial Sequence
  Description of Artificial Sequence: Synthetic oligonucleotide
  Sense strand starting at position 1064 of SEQ ID NO: 588466
accuacuggcuaugacuua

SEQ ID NO: 866947 - RNA, 19 nt, Artificial Sequence
  Description of Artificial Sequence: Synthetic oligonucleotide
  Antisense strand to SEQ ID NO: 866946
uaagucauagccaguaggu

SEQ ID NO: 866948 - RNA, 19 nt, Artificial Sequence
  Description of Artificial Sequence: Synthetic oligonucleotide
  Sense strand starting at position 1277 of SEQ ID NO: 588466
caaagagauccauguagca

SEQ ID NO: 866949 - RNA, 19 nt, Artificial Sequence
  Description of Artificial Sequence: Synthetic oligonucleotide
  Antisense strand to SEQ ID NO: 866948
ugcuacauggaucucuuug

SEQ ID NO: 866950 - RNA, 19 nt, Artificial Sequence
  Description of Artificial Sequence: Synthetic oligonucleotide
  Sense strand starting at position 1330 of SEQ ID NO: 588466
aggccuaaguuuccacaaa

SEQ ID NO: 866951 - RNA, 19 nt, Artificial Sequence
  Description of Artificial Sequence: Synthetic oligonucleotide
  Antisense strand to SEQ ID NO: 866950
uuuguggaaacuuaggccu

SEQ ID NO: 866952 - RNA, 19 nt, Artificial Sequence
  Description of Artificial Sequence: Synthetic oligonucleotide
  Sense strand starting at position 1355 of SEQ ID NO: 588466
ugagaaauguugcuuuagg

SEQ ID NO: 866953 - RNA, 19 nt, Artificial Sequence
  Description of Artificial Sequence: Synthetic oligonucleotide
  Antisense strand to SEQ ID NO: 866952
ccuaaagcaacauuucuca

SEQ ID NO: 866954 - RNA, 19 nt, Artificial Sequence
  Description of Artificial Sequence: Synthetic oligonucleotide
  Sense strand starting at position 1356 of SEQ ID NO: 588466
gagaaauguugcuuuagga

SEQ ID NO: 866955 - RNA, 19 nt, Artificial Sequence
  Description of Artificial Sequence: Synthetic oligonucleotide
  Antisense strand to SEQ ID NO: 866954
uccuaaagcaacauuucuc

SEQ ID NO: 866956 - RNA, 19 nt, Artificial Sequence
  Description of Artificial Sequence: Synthetic oligonucleotide
  Sense strand starting at position 1511 of SEQ ID NO: 588466
acagccaucgaaugaaauu

SEQ ID NO: 866957 - RNA, 19 nt, Artificial Sequence
  Description of Artificial Sequence: Synthetic oligonucleotide
  Antisense strand to SEQ ID NO: 866956
aauuucauucgauggcugu

SEQ ID NO: 866958 - RNA, 19 nt, Artificial Sequence
  Description of Artificial Sequence: Synthetic oligonucleotide
  Sense strand starting at position 1617 of SEQ ID NO: 588466
cccgaauucuucucaacag

SEQ ID NO: 866959 - RNA, 19 nt, Artificial Sequence
  Description of Artificial Sequence: Synthetic oligonucleotide
  Antisense strand to SEQ ID NO: 866958
cuguugagaagaauucggg

SEQ ID NO: 866960 - RNA, 19 nt, Artificial Sequence
  Description of Artificial Sequence: Synthetic oligonucleotide
  Sense strand starting at position 1664 of SEQ ID NO: 588466
ccuggagaaugguucucuu

SEQ ID NO: 866961 - RNA, 19 nt, Artificial Sequence
  Description of Artificial Sequence: Synthetic oligonucleotide
  Antisense strand to SEQ ID NO: 866960
aagagaaccauucuccagg

SEQ ID NO: 866962 - RNA, 19 nt, Artificial Sequence
  Description of Artificial Sequence: Synthetic oligonucleotide
  Sense strand starting at position 1667 of SEQ ID NO: 588466
ggagaaugguucucuucuu

SEQ ID NO: 866963 - RNA, 19 nt, Artificial Sequence
  Description of Artificial Sequence: Synthetic oligonucleotide
  Antisense strand to SEQ ID NO: 866962
aagaagagaaccauucucc

SEQ ID NO: 866964 - RNA, 19 nt, Artificial Sequence
  Description of Artificial Sequence: Synthetic oligonucleotide
  Sense strand starting at position 1668 of SEQ ID NO: 588466
gagaaugguucucuucuug

SEQ ID NO: 866965 - RNA, 19 nt, Artificial Sequence
  Description of Artificial Sequence: Synthetic oligonucleotide
  Antisense strand to SEQ ID NO: 866964
caagaagagaaccauucuc

SEQ ID NO: 866966 - RNA, 19 nt, Artificial Sequence
  Description of Artificial Sequence: Synthetic oligonucleotide
  Sense strand starting at position 1715 of SEQ ID NO: 588466
aaaugagauugguccuuuc

SEQ ID NO: 866967 - RNA, 19 nt, Artificial Sequence
  Description of Artificial Sequence: Synthetic oligonucleotide
  Antisense strand to SEQ ID NO: 866966
gaaaggaccaaucucauuu

SEQ ID NO: 866968 - RNA, 19 nt, Artificial Sequence
  Description of Artificial Sequence: Synthetic oligonucleotide
  Sense strand starting at position 1981 of SEQ ID NO: 588466
uagcauagguugcuauuua

SEQ ID NO: 866969 - RNA, 19 nt, Artificial Sequence
  Description of Artificial Sequence: Synthetic oligonucleotide
  Antisense strand to SEQ ID NO: 866968
uaaauagcaaccuaugcua

SEQ ID NO: 866970 - RNA, 19 nt, Artificial Sequence
  Description of Artificial Sequence: Synthetic oligonucleotide
  Sense strand starting at position 2113 of SEQ ID NO: 588466
uagccuaguguagaaagaa

SEQ ID NO: 866971 - RNA, 19 nt, Artificial Sequence
  Description of Artificial Sequence: Synthetic oligonucleotide
  Antisense strand to SEQ ID NO: 866970
uucuuucuacacuaggcua

SEQ ID NO: 866972 - RNA, 19 nt, Artificial Sequence
  Description of Artificial Sequence: Synthetic oligonucleotide
  Sense strand starting at position 2379 of SEQ ID NO: 588466
cuguuagacuuaguuaaga

SEQ ID NO: 866973 - RNA, 19 nt, Artificial Sequence
  Description of Artificial Sequence: Synthetic oligonucleotide
  Antisense strand to SEQ ID NO: 866972
ucuuaacuaagucuaacag

SEQ ID NO: 866974 - RNA, 19 nt, Artificial Sequence
  Description of Artificial Sequence: Synthetic oligonucleotide
  Sense strand starting at position 2465 of SEQ ID NO: 588466
ucgcaagugacucaagaua

SEQ ID NO: 866975 - RNA, 19 nt, Artificial Sequence
  Description of Artificial Sequence: Synthetic oligonucleotide
  Antisense strand to SEQ ID NO: 866974
uaucuugagucacuugcga

SEQ ID NO: 866976 - RNA, 19 nt, Artificial Sequence
  Description of Artificial Sequence: Synthetic oligonucleotide
  Sense strand starting at position 2699 of SEQ ID NO: 588466
cugggagaugcaggauuaa

SEQ ID NO: 866977 - RNA, 19 nt, Artificial Sequence
  Description of Artificial Sequence: Synthetic oligonucleotide
  Antisense strand to SEQ ID NO: 866976
uuaauccugcaucucccag

SEQ ID NO: 866978 - RNA, 19 nt, Artificial Sequence
  Description of Artificial Sequence: Synthetic oligonucleotide
  Sense strand starting at position 2708 of SEQ ID NO: 588466
gcaggauuaauauaugugu

SEQ ID NO: 866979 - RNA, 19 nt, Artificial Sequence
  Description of Artificial Sequence: Synthetic oligonucleotide
  Antisense strand to SEQ ID NO: 866978
acacauauauuaauccugc

SEQ ID NO: 866980 - RNA, 19 nt, Artificial Sequence
  Description of Artificial Sequence: Synthetic oligonucleotide
  Sense strand starting at position 2738 of SEQ ID NO: 588466
auugaauugaagugaguuu

SEQ ID NO: 866981 - RNA, 19 nt, Artificial Sequence
  Description of Artificial Sequence: Synthetic oligonucleotide
  Antisense strand to SEQ ID NO: 866980
aaacucacuucaauucaau

SEQ ID NO: 866982 - RNA, 19 nt, Artificial Sequence
  Description of Artificial Sequence: Synthetic oligonucleotide
  Sense strand starting at position 2840 of SEQ ID NO: 588466
gggacaauauugguaucua

SEQ ID NO: 866983 - RNA, 19 nt, Artificial Sequence
  Description of Artificial Sequence: Synthetic oligonucleotide
  Antisense strand to SEQ ID NO: 866982
uagauaccaauauuguccc

SEQ ID NO: 866984 - RNA, 19 nt, Artificial Sequence
  Description of Artificial Sequence: Synthetic oligonucleotide
  Sense strand starting at position 2848 of SEQ ID NO: 588466
auugguaucuaccucagaa

SEQ ID NO: 866985 - RNA, 19 nt, Artificial Sequence
  Description of Artificial Sequence: Synthetic oligonucleotide
  Antisense strand to SEQ ID NO: 866984
uucugagguagauaccaau

SEQ ID NO: 866986 - RNA, 19 nt, Artificial Sequence
  Description of Artificial Sequence: Synthetic oligonucleotide
  Sense strand starting at position 2860 of SEQ ID NO: 588466
cucagaaaguuacugggau

SEQ ID NO: 866987 - RNA, 19 nt, Artificial Sequence
  Description of Artificial Sequence: Synthetic oligonucleotide
  Antisense strand to SEQ ID NO: 866986
aucccaguaacuuucugag

SEQ ID NO: 866988 - RNA, 19 nt, Artificial Sequence
  Description of Artificial Sequence: Synthetic oligonucleotide
  Sense strand starting at position 2925 of SEQ ID NO: 588466
uauugaacuuggucaguaa

SEQ ID NO: 866989 - RNA, 19 nt, Artificial Sequence
  Description of Artificial Sequence: Synthetic oligonucleotide
  Antisense strand to SEQ ID NO: 866988
uuacugaccaaguucaaua

SEQ ID NO: 866990 - RNA, 19 nt, Artificial Sequence
  Description of Artificial Sequence: Synthetic oligonucleotide
  Sense strand starting at position 2928 of SEQ ID NO: 588466
ugaacuuggucaguaaaug

SEQ ID NO: 866991 - RNA, 19 nt, Artificial Sequence
  Description of Artificial Sequence: Synthetic oligonucleotide
  Antisense strand to SEQ ID NO: 866990
cauuuacugaccaaguuca

SEQ ID NO: 866992 - RNA, 19 nt, Artificial Sequence
  Description of Artificial Sequence: Synthetic oligonucleotide
  Sense strand starting at position 2929 of SEQ ID NO: 588466
gaacuuggucaguaaaugu

SEQ ID NO: 866993 - RNA, 19 nt, Artificial Sequence
  Description of Artificial Sequence: Synthetic oligonucleotide
  Antisense strand to SEQ ID NO: 866992
acauuuacugaccaaguuc

SEQ ID NO: 866994 - RNA, 19 nt, Artificial Sequence
  Description of Artificial Sequence: Synthetic oligonucleotide
  Sense strand starting at position 2981 of SEQ ID NO: 588466
gguaaagcaagucauaguu

SEQ ID NO: 866995 - RNA, 19 nt, Artificial Sequence
  Description of Artificial Sequence: Synthetic oligonucleotide
  Antisense strand to SEQ ID NO: 866994
aacuaugacuugcuuuacc

SEQ ID NO: 866996 - RNA, 19 nt, Artificial Sequence
  Description of Artificial Sequence: Synthetic oligonucleotide
  Sense strand starting at position 3086 of SEQ ID NO: 588466
gucuuaaggcauuagaacu

SEQ ID NO: 866997 - RNA, 19 nt, Artificial Sequence
  Description of Artificial Sequence: Synthetic oligonucleotide
  Antisense strand to SEQ ID NO: 866996
aguucuaaugccuuaagac

SEQ ID NO: 866998 - RNA, 19 nt, Artificial Sequence
  Description of Artificial Sequence: Synthetic oligonucleotide
  Sense strand starting at position 3254 of SEQ ID NO: 588466
ugaucuuuccuggguauaa

SEQ ID NO: 866999 - RNA, 19 nt, Artificial Sequence
  Description of Artificial Sequence: Synthetic oligonucleotide
  Antisense strand to SEQ ID NO: 866998
uuauacccaggaaagauca

SEQ ID NO: 867000 - RNA, 19 nt, Artificial Sequence
  Description of Artificial Sequence: Synthetic oligonucleotide
  Sense strand starting at position 3255 of SEQ ID NO: 588466
gaucuuuccuggguauaaa

SEQ ID NO: 867001 - RNA, 19 nt, Artificial Sequence
  Description of Artificial Sequence: Synthetic oligonucleotide
  Antisense strand to SEQ ID NO: 867000
uuuauacccaggaaagauc

SEQ ID NO: 867002 - RNA, 19 nt, Artificial Sequence
  Description of Artificial Sequence: Synthetic oligonucleotide
  Sense strand starting at position 3327 of SEQ ID NO: 588466
ggguaucgagaaugauaua

SEQ ID NO: 867003 - RNA, 19 nt, Artificial Sequence
  Description of Artificial Sequence: Synthetic oligonucleotide
  Antisense strand to SEQ ID NO: 867002
uauaucauucucgauaccc

SEQ ID NO: 867004 - RNA, 19 nt, Artificial Sequence
  Description of Artificial Sequence: Synthetic oligonucleotide
  Sense strand starting at position 3446 of SEQ ID NO: 588466
aguaaaucucuguaucuaa

SEQ ID NO: 867005 - RNA, 19 nt, Artificial Sequence
  Description of Artificial Sequence: Synthetic oligonucleotide
  Antisense strand to SEQ ID NO: 867004
uuagauacagagauuuacu

SEQ ID NO: 867006 - RNA, 19 nt, Artificial Sequence
  Description of Artificial Sequence: Synthetic oligonucleotide
  Sense strand starting at position 3657 of SEQ ID NO: 588466
uguuucuuacauuaggaua

SEQ ID NO: 867007 - RNA, 19 nt, Artificial Sequence
  Description of Artificial Sequence: Synthetic oligonucleotide
  Antisense strand to SEQ ID NO: 867006
uauccuaauguaagaaaca

SEQ ID NO: 867008 - RNA, 19 nt, Artificial Sequence
  Description of Artificial Sequence: Synthetic oligonucleotide
  Sense strand starting at position 3754 of SEQ ID NO: 588466
uuacuaagagcuuguaaca

SEQ ID NO: 867009 - RNA, 19 nt, Artificial Sequence
  Description of Artificial Sequence: Synthetic oligonucleotide
  Antisense strand to SEQ ID NO: 867008
uguuacaagcucuuaguaa

SEQ ID NO: 867010 - RNA, 19 nt, Artificial Sequence
  Description of Artificial Sequence: Synthetic oligonucleotide
  Sense strand starting at position 3872 of SEQ ID NO: 588466
ggagaaaguguguacaucu

SEQ ID NO: 867011 - RNA, 19 nt, Artificial Sequence
  Description of Artificial Sequence: Synthetic oligonucleotide
  Antisense strand to SEQ ID NO: 867010
agauguacacacuuucucc

SEQ ID NO: 867012 - RNA, 19 nt, Artificial Sequence
  Description of Artificial Sequence: Synthetic oligonucleotide
  Sense strand starting at position 3888 of SEQ ID NO: 588466
ucuguauugcaaggaaaua

SEQ ID NO: 867013 - RNA, 19 nt, Artificial Sequence
  Description of Artificial Sequence: Synthetic oligonucleotide
  Antisense strand to SEQ ID NO: 867012
uauuuccuugcaauacaga

SEQ ID NO: 867014 - RNA, 19 nt, Artificial Sequence
  Description of Artificial Sequence: Synthetic oligonucleotide
  Sense strand starting at position 66 of SEQ ID NO: 588467
agcaguaaugaucaucuuu

SEQ ID NO: 867015 - RNA, 19 nt, Artificial Sequence
  Description of Artificial Sequence: Synthetic oligonucleotide
  Antisense strand to SEQ ID NO: 867014
aaagaugaucauuacugcu

SEQ ID NO: 867016 - RNA, 19 nt, Artificial Sequence
  Description of Artificial Sequence: Synthetic oligonucleotide
  Sense strand starting at position 137 of SEQ ID NO: 588467
gagcaagggucuugaaaga

SEQ ID NO: 867017 - RNA, 19 nt, Artificial Sequence
  Description of Artificial Sequence: Synthetic oligonucleotide
  Antisense strand to SEQ ID NO: 867016
ucuuucaagacccuugcuc

SEQ ID NO: 867018 - RNA, 19 nt, Artificial Sequence
  Description of Artificial Sequence: Synthetic oligonucleotide
  Sense strand starting at position 158 of SEQ ID NO: 588467
uagucaaagucugggucaa

SEQ ID NO: 867019 - RNA, 19 nt, Artificial Sequence
  Description of Artificial Sequence: Synthetic oligonucleotide
  Antisense strand to SEQ ID NO: 867018
uugacccagacuuugacua

SEQ ID NO: 867020 - RNA, 19 nt, Artificial Sequence
  Description of Artificial Sequence: Synthetic oligonucleotide
  Sense strand starting at position 159 of SEQ ID NO: 588467
agucaaagucugggucaaa

SEQ ID NO: 867021 - RNA, 19 nt, Artificial Sequence
  Description of Artificial Sequence: Synthetic oligonucleotide
  Antisense strand to SEQ ID NO: 867020
uuugacccagacuuugacu

SEQ ID NO: 867022 - RNA, 19 nt, Artificial Sequence
  Description of Artificial Sequence: Synthetic oligonucleotide
  Sense strand starting at position 183 of SEQ ID NO: 588467
ugaggaaauucugagcaua

SEQ ID NO: 867023 - RNA, 19 nt, Artificial Sequence
  Description of Artificial Sequence: Synthetic oligonucleotide
  Antisense strand to SEQ ID NO: 867022
uaugcucagaauuuccuca

SEQ ID NO: 867024 - RNA, 19 nt, Artificial Sequence
  Description of Artificial Sequence: Synthetic oligonucleotide
  Sense strand starting at position 252 of SEQ ID NO: 588467
gcuagacuuucugauuguu

SEQ ID NO: 867025 - RNA, 19 nt, Artificial Sequence
  Description of Artificial Sequence: Synthetic oligonucleotide
  Antisense strand to SEQ ID NO: 867024
aacaaucagaaagucuagc

SEQ ID NO: 867026 - RNA, 19 nt, Artificial Sequence
  Description of Artificial Sequence: Synthetic oligonucleotide
  Sense strand starting at position 293 of SEQ ID NO: 588467
gaagcuaccucgcagguua

SEQ ID NO: 867027 - RNA, 19 nt, Artificial Sequence
  Description of Artificial Sequence: Synthetic oligonucleotide
  Antisense strand to SEQ ID NO: 867026
uaaccugcgagguagcuuc

SEQ ID NO: 867028 - RNA, 19 nt, Artificial Sequence
  Description of Artificial Sequence: Synthetic oligonucleotide
  Sense strand starting at position 319 of SEQ ID NO: 588467
ggccacugguuaguaauua

SEQ ID NO: 867029 - RNA, 19 nt, Artificial Sequence
  Description of Artificial Sequence: Synthetic oligonucleotide
  Antisense strand to SEQ ID NO: 867028
uaauuacuaaccaguggcc

SEQ ID NO: 867030 - RNA, 19 nt, Artificial Sequence
  Description of Artificial Sequence: Synthetic oligonucleotide
  Sense strand starting at position 327 of SEQ ID NO: 588467
guuaguaauuacuguccau

SEQ ID NO: 867031 - RNA, 19 nt, Artificial Sequence
  Description of Artificial Sequence: Synthetic oligonucleotide
  Antisense strand to SEQ ID NO: 867030
auggacaguaauuacuaac

SEQ ID NO: 867032 - RNA, 19 nt, Artificial Sequence
  Description of Artificial Sequence: Synthetic oligonucleotide
  Sense strand starting at position 330 of SEQ ID NO: 588467
aguaauuacuguccaucaa

SEQ ID NO: 867033 - RNA, 19 nt, Artificial Sequence
  Description of Artificial Sequence: Synthetic oligonucleotide
  Antisense strand to SEQ ID NO: 867032
uugauggacaguaauuacu

SEQ ID NO: 867034 - RNA, 19 nt, Artificial Sequence
  Description of Artificial Sequence: Synthetic oligonucleotide
  Sense strand starting at position 331 of SEQ ID NO: 588467
guaauuacuguccaucaau

SEQ ID NO: 867035 - RNA, 19 nt, Artificial Sequence
  Description of Artificial Sequence: Synthetic oligonucleotide
  Antisense strand to SEQ ID NO: 867034
auugauggacaguaauuac

SEQ ID NO: 867036 - RNA, 19 nt, Artificial Sequence
  Description of Artificial Sequence: Synthetic oligonucleotide
  Sense strand starting at position 410 of SEQ ID NO: 588467
gucuacuuaacgcgaauca

SEQ ID NO: 867037 - RNA, 19 nt, Artificial Sequence
  Description of Artificial Sequence: Synthetic oligonucleotide
  Antisense strand to SEQ ID NO: 867036
ugauucgcguuaaguagac

SEQ ID NO: 867038 - RNA, 19 nt, Artificial Sequence
  Description of Artificial Sequence: Synthetic oligonucleotide
  Sense strand starting at position 411 of SEQ ID NO: 588467
ucuacuuaacgcgaaucaa

SEQ ID NO: 867039 - RNA, 19 nt, Artificial Sequence
  Description of Artificial Sequence: Synthetic oligonucleotide
  Antisense strand to SEQ ID NO: 867038
uugauucgcguuaaguaga

SEQ ID NO: 867040 - RNA, 19 nt, Artificial Sequence
  Description of Artificial Sequence: Synthetic oligonucleotide
  Sense strand starting at position 707 of SEQ ID NO: 588467
accuacuaauagggauuua

SEQ ID NO: 867041 - RNA, 19 nt, Artificial Sequence
  Description of Artificial Sequence: Synthetic oligonucleotide
  Antisense strand to SEQ ID NO: 867040
uaaaucccuauuaguaggu

SEQ ID NO: 867042 - RNA, 19 nt, Artificial Sequence
  Description of Artificial Sequence: Synthetic oligonucleotide
  Sense strand starting at position 861 of SEQ ID NO: 588467
cccauugugucaguuucua

SEQ ID NO: 867043 - RNA, 19 nt, Artificial Sequence
  Description of Artificial Sequence: Synthetic oligonucleotide
  Antisense strand to SEQ ID NO: 867042
uagaaacugacacaauggg

SEQ ID NO: 867044 - RNA, 19 nt, Artificial Sequence
  Description of Artificial Sequence: Synthetic oligonucleotide
  Sense strand starting at position 958 of SEQ ID NO: 588467
cgacaaacccucuaggcuu

SEQ ID NO: 867045 - RNA, 19 nt, Artificial Sequence
  Description of Artificial Sequence: Synthetic oligonucleotide
  Antisense strand to SEQ ID NO: 867044
aagccuagaggguuugucg

SEQ ID NO: 867046 - RNA, 19 nt, Artificial Sequence
  Description of Artificial Sequence: Synthetic oligonucleotide
  Sense strand starting at position 972 of SEQ ID NO: 588467
ggcuuaauauugcaccaua

SEQ ID NO: 867047 - RNA, 19 nt, Artificial Sequence
  Description of Artificial Sequence: Synthetic oligonucleotide
  Antisense strand to SEQ ID NO: 867046
uauggugcaauauuaagcc

SEQ ID NO: 867048 - RNA, 19 nt, Artificial Sequence
  Description of Artificial Sequence: Synthetic oligonucleotide
  Sense strand starting at position 1010 of SEQ ID NO: 588467
aaggccuguucugccgaaa

SEQ ID NO: 867049 - RNA, 19 nt, Artificial Sequence
  Description of Artificial Sequence: Synthetic oligonucleotide
  Antisense strand to SEQ ID NO: 867048
uuucggcagaacaggccuu

SEQ ID NO: 867050 - RNA, 19 nt, Artificial Sequence
  Description of Artificial Sequence: Synthetic oligonucleotide
  Sense strand starting at position 1013 of SEQ ID NO: 588467
gccuguucugccgaaacca

SEQ ID NO: 867051 - RNA, 19 nt, Artificial Sequence
  Description of Artificial Sequence: Synthetic oligonucleotide
  Antisense strand to SEQ ID NO: 867050
ugguuucggcagaacaggc

SEQ ID NO: 867052 - RNA, 19 nt, Artificial Sequence
  Description of Artificial Sequence: Synthetic oligonucleotide
  Sense strand starting at position 1034 of SEQ ID NO: 588467
ccaguuaagucagggcuca

SEQ ID NO: 867053 - RNA, 19 nt, Artificial Sequence
  Description of Artificial Sequence: Synthetic oligonucleotide
  Antisense strand to SEQ ID NO: 867052
ugagcccugacuuaacugg

SEQ ID NO: 867054 - RNA, 19 nt, Artificial Sequence
  Description of Artificial Sequence: Synthetic oligonucleotide
  Sense strand starting at position 1035 of SEQ ID NO: 588467
caguuaagucagggcucaa

SEQ ID NO: 867055 - RNA, 19 nt, Artificial Sequence
  Description of Artificial Sequence: Synthetic oligonucleotide
  Antisense strand to SEQ ID NO: 867054
uugagcccugacuuaacug

SEQ ID NO: 867056 - RNA, 19 nt, Artificial Sequence
  Description of Artificial Sequence: Synthetic oligonucleotide
  Sense strand starting at position 1046 of SEQ ID NO: 588467
gggcucaauugcuucugua

SEQ ID NO: 867057 - RNA, 19 nt, Artificial Sequence
  Description of Artificial Sequence: Synthetic oligonucleotide
  Antisense strand to SEQ ID NO: 867056
uacagaagcaauugagccc

SEQ ID NO: 867058 - RNA, 19 nt, Artificial Sequence
  Description of Artificial Sequence: Synthetic oligonucleotide
  Sense strand starting at position 1059 of SEQ ID NO: 588467
ucuguaucauugucagaag

SEQ ID NO: 867059 - RNA, 19 nt, Artificial Sequence
  Description of Artificial Sequence: Synthetic oligonucleotide
  Antisense strand to SEQ ID NO: 867058
cuucugacaaugauacaga

SEQ ID NO: 867060 - RNA, 19 nt, Artificial Sequence
  Description of Artificial Sequence: Synthetic oligonucleotide
  Sense strand starting at position 1062 of SEQ ID NO: 588467
guaucauugucagaagcca

SEQ ID NO: 867061 - RNA, 19 nt, Artificial Sequence
  Description of Artificial Sequence: Synthetic oligonucleotide
  Antisense strand to SEQ ID NO: 867060
uggcuucugacaaugauac

SEQ ID NO: 867062 - RNA, 19 nt, Artificial Sequence
  Description of Artificial Sequence: Synthetic oligonucleotide
  Sense strand starting at position 1295 of SEQ ID NO: 588467
cauguagacuuggagagaa

SEQ ID NO: 867063 - RNA, 19 nt, Artificial Sequence
  Description of Artificial Sequence: Synthetic oligonucleotide
  Antisense strand to SEQ ID NO: 867062
uucucuccaagucuacaug

SEQ ID NO: 867064 - RNA, 19 nt, Artificial Sequence
  Description of Artificial Sequence: Synthetic oligonucleotide
  Sense strand starting at position 1309 of SEQ ID NO: 588467
gagaaacugcgccaggaaa

SEQ ID NO: 867065 - RNA, 19 nt, Artificial Sequence
  Description of Artificial Sequence: Synthetic oligonucleotide
  Antisense strand to SEQ ID NO: 867064
uuuccuggcgcaguuucuc

SEQ ID NO: 867066 - RNA, 19 nt, Artificial Sequence
  Description of Artificial Sequence: Synthetic oligonucleotide
  Sense strand starting at position 1349 of SEQ ID NO: 588467
gacggagaacuccgaaaua

SEQ ID NO: 867067 - RNA, 19 nt, Artificial Sequence
  Description of Artificial Sequence: Synthetic oligonucleotide
  Antisense strand to SEQ ID NO: 867066
uauuucggaguucuccguc

SEQ ID NO: 867068 - RNA, 19 nt, Artificial Sequence
  Description of Artificial Sequence: Synthetic oligonucleotide
  Sense strand starting at position 1467 of SEQ ID NO: 588467
aaaccuguauucgugauga

SEQ ID NO: 867069 - RNA, 19 nt, Artificial Sequence
  Description of Artificial Sequence: Synthetic oligonucleotide
  Antisense strand to SEQ ID NO: 867068
ucaucacgaauacagguuu

SEQ ID NO: 867070 - RNA, 19 nt, Artificial Sequence
  Description of Artificial Sequence: Synthetic oligonucleotide
  Sense strand starting at position 1469 of SEQ ID NO: 588467
accuguauucgugaugaau

SEQ ID NO: 867071 - RNA, 19 nt, Artificial Sequence
  Description of Artificial Sequence: Synthetic oligonucleotide
  Antisense strand to SEQ ID NO: 867070
auucaucacgaauacaggu

SEQ ID NO: 867072 - RNA, 19 nt, Artificial Sequence
  Description of Artificial Sequence: Synthetic oligonucleotide
  Sense strand starting at position 2199 of SEQ ID NO: 588467
ggaaguacgucauuucgag

SEQ ID NO: 867073 - RNA, 19 nt, Artificial Sequence
  Description of Artificial Sequence: Synthetic oligonucleotide
  Antisense strand to SEQ ID NO: 867072
cucgaaaugacguacuucc

SEQ ID NO: 867074 - RNA, 19 nt, Artificial Sequence
  Description of Artificial Sequence: Synthetic oligonucleotide
  Sense strand starting at position 2291 of SEQ ID NO: 588467
ggguuugguagugauugca

SEQ ID NO: 867075 - RNA, 19 nt, Artificial Sequence
  Description of Artificial Sequence: Synthetic oligonucleotide
  Antisense strand to SEQ ID NO: 867074
ugcaaucacuaccaaaccc

SEQ ID NO: 867076 - RNA, 19 nt, Artificial Sequence
  Description of Artificial Sequence: Synthetic oligonucleotide
  Sense strand starting at position 2294 of SEQ ID NO: 588467
uuugguagugauugcaguu

SEQ ID NO: 867077 - RNA, 19 nt, Artificial Sequence
  Description of Artificial Sequence: Synthetic oligonucleotide
  Antisense strand to SEQ ID NO: 867076
aacugcaaucacuaccaaa

SEQ ID NO: 867078 - RNA, 19 nt, Artificial Sequence
  Description of Artificial Sequence: Synthetic oligonucleotide
  Sense strand starting at position 2339 of SEQ ID NO: 588467
ccgccaaccucucaaguuu

SEQ ID NO: 867079 - RNA, 19 nt, Artificial Sequence
  Description of Artificial Sequence: Synthetic oligonucleotide
  Antisense strand to SEQ ID NO: 867078
aaacuugagagguuggcgg

SEQ ID NO: 867080 - RNA, 19 nt, Artificial Sequence
  Description of Artificial Sequence: Synthetic oligonucleotide
  Sense strand starting at position 2357 of SEQ ID NO: 588467
uuucuaugguucucuaaga

SEQ ID NO: 867081 - RNA, 19 nt, Artificial Sequence
  Description of Artificial Sequence: Synthetic oligonucleotide
  Antisense strand to SEQ ID NO: 867080
ucuuagagaaccauagaaa

SEQ ID NO: 867082 - RNA, 19 nt, Artificial Sequence
  Description of Artificial Sequence: Synthetic oligonucleotide
  Sense strand starting at position 2358 of SEQ ID NO: 588467
uucuaugguucucuaagaa

SEQ ID NO: 867083 - RNA, 19 nt, Artificial Sequence
  Description of Artificial Sequence: Synthetic oligonucleotide
  Antisense strand to SEQ ID NO: 867082
uucuuagagaaccauagaa

SEQ ID NO: 867084 - RNA, 19 nt, Artificial Sequence
  Description of Artificial Sequence: Synthetic oligonucleotide
  Sense strand starting at position 2362 of SEQ ID NO: 588467
augguucucuaagaagaaa

SEQ ID NO: 867085 - RNA, 19 nt, Artificial Sequence
  Description of Artificial Sequence: Synthetic oligonucleotide
  Antisense strand to SEQ ID NO: 867084
uuucuucuuagagaaccau

SEQ ID NO: 867086 - RNA, 19 nt, Artificial Sequence
  Description of Artificial Sequence: Synthetic oligonucleotide
  Sense strand starting at position 2451 of SEQ ID NO: 588467
ucuuguagaauguguagga

SEQ ID NO: 867087 - RNA, 19 nt, Artificial Sequence
  Description of Artificial Sequence: Synthetic oligonucleotide
  Antisense strand to SEQ ID NO: 867086
uccuacacauucuacaaga

SEQ ID NO: 867088 - RNA, 19 nt, Artificial Sequence
  Description of Artificial Sequence: Synthetic oligonucleotide
  Sense strand starting at position 3409 of SEQ ID NO: 588467
agaucaguggcgugaucua

SEQ ID NO: 867089 - RNA, 19 nt, Artificial Sequence
  Description of Artificial Sequence: Synthetic oligonucleotide
  Antisense strand to SEQ ID NO: 867088
uagaucacgccacugaucu

SEQ ID NO: 867090 - RNA, 19 nt, Artificial Sequence
  Description of Artificial Sequence: Synthetic oligonucleotide
  Sense strand starting at position 3799 of SEQ ID NO: 588467
ggcuaucuucuguauguuu

SEQ ID NO: 867091 - RNA, 19 nt, Artificial Sequence
  Description of Artificial Sequence: Synthetic oligonucleotide
  Antisense strand to SEQ ID NO: 867090
aaacauacagaagauagcc

SEQ ID NO: 867092 - RNA, 19 nt, Artificial Sequence
  Description of Artificial Sequence: Synthetic oligonucleotide
  Sense strand starting at position 3812 of SEQ ID NO: 588467
auguuuaguagagacaagu

SEQ ID NO: 867093 - RNA, 19 nt, Artificial Sequence
  Description of Artificial Sequence: Synthetic oligonucleotide
  Antisense strand to SEQ ID NO: 867092
acuugucucuacuaaacau

SEQ ID NO: 867094 - RNA, 19 nt, Artificial Sequence
  Description of Artificial Sequence: Synthetic oligonucleotide
  Sense strand starting at position 43 of SEQ ID NO: 588468
aguacaugaaugugcagau

SEQ ID NO: 867095 - RNA, 19 nt, Artificial Sequence
  Description of Artificial Sequence: Synthetic oligonucleotide
  Antisense strand to SEQ ID NO: 867094
aucugcacauucauguacu

SEQ ID NO: 867096 - RNA, 19 nt, Artificial Sequence
  Description of Artificial Sequence: Synthetic oligonucleotide
  Sense strand starting at position 89 of SEQ ID NO: 588468
caucguugaucacugaaau

SEQ ID NO: 867097 - RNA, 19 nt, Artificial Sequence
  Description of Artificial Sequence: Synthetic oligonucleotide
  Antisense strand to SEQ ID NO: 867096
auuucagugaucaacgaug

SEQ ID NO: 867098 - RNA, 19 nt, Artificial Sequence
  Description of Artificial Sequence: Synthetic oligonucleotide
  Sense strand starting at position 90 of SEQ ID NO: 588468
aucguugaucacugaaauu

SEQ ID NO: 867099 - RNA, 19 nt, Artificial Sequence
  Description of Artificial Sequence: Synthetic oligonucleotide
  Antisense strand to SEQ ID NO: 867098
aauuucagugaucaacgau

SEQ ID NO: 867100 - RNA, 19 nt, Artificial Sequence
  Description of Artificial Sequence: Synthetic oligonucleotide
  Sense strand starting at position 135 of SEQ ID NO: 588468
auggcagaggucgaagaau

SEQ ID NO: 867101 - RNA, 19 nt, Artificial Sequence
  Description of Artificial Sequence: Synthetic oligonucleotide
  Antisense strand to SEQ ID NO: 867100
auucuucgaccucugccau

SEQ ID NO: 867102 - RNA, 19 nt, Artificial Sequence
  Description of Artificial Sequence: Synthetic oligonucleotide
  Sense strand starting at position 217 of SEQ ID NO: 588468
ucaccaagucgguauccau

SEQ ID NO: 867103 - RNA, 19 nt, Artificial Sequence
  Description of Artificial Sequence: Synthetic oligonucleotide
  Antisense strand to SEQ ID NO: 867102
auggauaccgacuugguga

SEQ ID NO: 867104 - RNA, 19 nt, Artificial Sequence
  Description of Artificial Sequence: Synthetic oligonucleotide
  Sense strand starting at position 274 of SEQ ID NO: 588468
aggaguagguguccuagaa

SEQ ID NO: 867105 - RNA, 19 nt, Artificial Sequence
  Description of Artificial Sequence: Synthetic oligonucleotide
  Antisense strand to SEQ ID NO: 867104
uucuaggacaccuacuccu

SEQ ID NO: 867106 - RNA, 19 nt, Artificial Sequence
  Description of Artificial Sequence: Synthetic oligonucleotide
  Sense strand starting at position 311 of SEQ ID NO: 588468
ggacauagguggcuucauu

SEQ ID NO: 867107 - RNA, 19 nt, Artificial Sequence
  Description of Artificial Sequence: Synthetic oligonucleotide
  Antisense strand to SEQ ID NO: 867106
aaugaagccaccuaugucc

SEQ ID NO: 867108 - RNA, 19 nt, Artificial Sequence
  Description of Artificial Sequence: Synthetic oligonucleotide
  Sense strand starting at position 546 of SEQ ID NO: 588468
guuggaugguaucuacaac

SEQ ID NO: 867109 - RNA, 19 nt, Artificial Sequence
  Description of Artificial Sequence: Synthetic oligonucleotide
  Antisense strand to SEQ ID NO: 867108
guuguagauaccauccaac

SEQ ID NO: 867110 - RNA, 19 nt, Artificial Sequence
  Description of Artificial Sequence: Synthetic oligonucleotide
  Sense strand starting at position 612 of SEQ ID NO: 588468
uagagaaugucagcuggga

SEQ ID NO: 867111 - RNA, 19 nt, Artificial Sequence
  Description of Artificial Sequence: Synthetic oligonucleotide
  Antisense strand to SEQ ID NO: 867110
ucccagcugacauucucua

SEQ ID NO: 867112 - RNA, 19 nt, Artificial Sequence
  Description of Artificial Sequence: Synthetic oligonucleotide
  Sense strand starting at position 798 of SEQ ID NO: 588468
uuguuaauuucguccuucu

SEQ ID NO: 867113 - RNA, 19 nt, Artificial Sequence
  Description of Artificial Sequence: Synthetic oligonucleotide
  Antisense strand to SEQ ID NO: 867112
agaaggacgaaauuaacaa

SEQ ID NO: 867114 - RNA, 19 nt, Artificial Sequence
  Description of Artificial Sequence: Synthetic oligonucleotide
  Sense strand starting at position 898 of SEQ ID NO: 588468
gcuggaccugguuagauaa

SEQ ID NO: 867115 - RNA, 19 nt, Artificial Sequence
  Description of Artificial Sequence: Synthetic oligonucleotide
  Antisense strand to SEQ ID NO: 867114
uuaucuaaccagguccagc

SEQ ID NO: 867116 - RNA, 19 nt, Artificial Sequence
  Description of Artificial Sequence: Synthetic oligonucleotide
  Sense strand starting at position 910 of SEQ ID NO: 588468
uagauaacaggcgguauua

SEQ ID NO: 867117 - RNA, 19 nt, Artificial Sequence
  Description of Artificial Sequence: Synthetic oligonucleotide
  Antisense strand to SEQ ID NO: 867116
uaauaccgccuguuaucua

SEQ ID NO: 867118 - RNA, 19 nt, Artificial Sequence
  Description of Artificial Sequence: Synthetic oligonucleotide
  Sense strand starting at position 912 of SEQ ID NO: 588468
gauaacaggcgguauuauu

SEQ ID NO: 867119 - RNA, 19 nt, Artificial Sequence
  Description of Artificial Sequence: Synthetic oligonucleotide
  Antisense strand to SEQ ID NO: 867118
aauaauaccgccuguuauc

SEQ ID NO: 867120 - RNA, 19 nt, Artificial Sequence
  Description of Artificial Sequence: Synthetic oligonucleotide
  Sense strand starting at position 962 of SEQ ID NO: 588468
ucauguguccacgaaauau

SEQ ID NO: 867121 - RNA, 19 nt, Artificial Sequence
  Description of Artificial Sequence: Synthetic oligonucleotide
  Antisense strand to SEQ ID NO: 867120
auauuucguggacacauga

SEQ ID NO: 867122 - RNA, 19 nt, Artificial Sequence
  Description of Artificial Sequence: Synthetic oligonucleotide
  Sense strand starting at position 974 of SEQ ID NO: 588468
gaaauauagcacuguuuag

SEQ ID NO: 867123 - RNA, 19 nt, Artificial Sequence
  Description of Artificial Sequence: Synthetic oligonucleotide
  Antisense strand to SEQ ID NO: 867122
cuaaacagugcuauauuuc

SEQ ID NO: 867124 - RNA, 19 nt, Artificial Sequence
  Description of Artificial Sequence: Synthetic oligonucleotide
  Sense strand starting at position 1101 of SEQ ID NO: 588468
aagggaugguuuccauaau

SEQ ID NO: 867125 - RNA, 19 nt, Artificial Sequence
  Description of Artificial Sequence: Synthetic oligonucleotide
  Antisense strand to SEQ ID NO: 867124
auuauggaaaccaucccuu

SEQ ID NO: 867126 - RNA, 19 nt, Artificial Sequence
  Description of Artificial Sequence: Synthetic oligonucleotide
  Sense strand starting at position 1170 of SEQ ID NO: 588468
ccacuuauuuccguuacuu

SEQ ID NO: 867127 - RNA, 19 nt, Artificial Sequence
  Description of Artificial Sequence: Synthetic oligonucleotide
  Antisense strand to SEQ ID NO: 867126
aaguaacggaaauaagugg

SEQ ID NO: 867128 - RNA, 19 nt, Artificial Sequence
  Description of Artificial Sequence: Synthetic oligonucleotide
  Sense strand starting at position 1172 of SEQ ID NO: 588468
acuuauuuccguuacuugu

SEQ ID NO: 867129 - RNA, 19 nt, Artificial Sequence
  Description of Artificial Sequence: Synthetic oligonucleotide
  Antisense strand to SEQ ID NO: 867128
acaaguaacggaaauaagu

SEQ ID NO: 867130 - RNA, 19 nt, Artificial Sequence
  Description of Artificial Sequence: Synthetic oligonucleotide
  Sense strand starting at position 1244 of SEQ ID NO: 588468
ccuguuugacacuaguuga

SEQ ID NO: 867131 - RNA, 19 nt, Artificial Sequence
  Description of Artificial Sequence: Synthetic oligonucleotide
  Antisense strand to SEQ ID NO: 867130
ucaacuagugucaaacagg

SEQ ID NO: 867132 - RNA, 19 nt, Artificial Sequence
  Description of Artificial Sequence: Synthetic oligonucleotide
  Sense strand starting at position 1311 of SEQ ID NO: 588468
ccuugaaugaguggaggua

SEQ ID NO: 867133 - RNA, 19 nt, Artificial Sequence
  Description of Artificial Sequence: Synthetic oligonucleotide
  Antisense strand to SEQ ID NO: 867132
uaccuccacucauucaagg

SEQ ID NO: 867134 - RNA, 19 nt, Artificial Sequence
  Description of Artificial Sequence: Synthetic oligonucleotide
  Sense strand starting at position 1437 of SEQ ID NO: 588468
ugaauucucugaccuccga

SEQ ID NO: 867135 - RNA, 19 nt, Artificial Sequence
  Description of Artificial Sequence: Synthetic oligonucleotide
  Antisense strand to SEQ ID NO: 867134
ucggaggucagagaauuca

SEQ ID NO: 867136 - RNA, 19 nt, Artificial Sequence
  Description of Artificial Sequence: Synthetic oligonucleotide
  Sense strand starting at position 2186 of SEQ ID NO: 588468
guccgugugaacguucuuu

SEQ ID NO: 867137 - RNA, 19 nt, Artificial Sequence
  Description of Artificial Sequence: Synthetic oligonucleotide
  Antisense strand to SEQ ID NO: 867136
aaagaacguucacacggac

SEQ ID NO: 867138 - RNA, 19 nt, Artificial Sequence
  Description of Artificial Sequence: Synthetic oligonucleotide
  Sense strand starting at position 2222 of SEQ ID NO: 588468
acuaguuucucugugagag

SEQ ID NO: 867139 - RNA, 19 nt, Artificial Sequence
  Description of Artificial Sequence: Synthetic oligonucleotide
  Antisense strand to SEQ ID NO: 867138
cucucacagagaaacuagu

SEQ ID NO: 867140 - RNA, 19 nt, Artificial Sequence
  Description of Artificial Sequence: Synthetic oligonucleotide
  Sense strand starting at position 2223 of SEQ ID NO: 588468
cuaguuucucugugagaga

SEQ ID NO: 867141 - RNA, 19 nt, Artificial Sequence
  Description of Artificial Sequence: Synthetic oligonucleotide
  Antisense strand to SEQ ID NO: 867140
ucucucacagagaaacuag

SEQ ID NO: 867142 - RNA, 19 nt, Artificial Sequence
  Description of Artificial Sequence: Synthetic oligonucleotide
  Sense strand starting at position 2503 of SEQ ID NO: 588468
gcuuauuggcuccaagaac

SEQ ID NO: 867143 - RNA, 19 nt, Artificial Sequence
  Description of Artificial Sequence: Synthetic oligonucleotide
  Antisense strand to SEQ ID NO: 867142
guucuuggagccaauaagc

SEQ ID NO: 867144 - RNA, 19 nt, Artificial Sequence
  Description of Artificial Sequence: Synthetic oligonucleotide
  Sense strand starting at position 2768 of SEQ ID NO: 588468
aggagauaagaguguccua

SEQ ID NO: 867145 - RNA, 19 nt, Artificial Sequence
  Description of Artificial Sequence: Synthetic oligonucleotide
  Antisense strand to SEQ ID NO: 867144
uaggacacucuuaucuccu

SEQ ID NO: 867146 - RNA, 19 nt, Artificial Sequence
  Description of Artificial Sequence: Synthetic oligonucleotide
  Sense strand starting at position 2771 of SEQ ID NO: 588468
agauaagaguguccuauau

SEQ ID NO: 867147 - RNA, 19 nt, Artificial Sequence
  Description of Artificial Sequence: Synthetic oligonucleotide
  Antisense strand to SEQ ID NO: 867146
auauaggacacucuuaucu

SEQ ID NO: 867148 - RNA, 19 nt, Artificial Sequence
  Description of Artificial Sequence: Synthetic oligonucleotide
  Sense strand starting at position 2810 of SEQ ID NO: 588468
uaagcaaaggaguauguau

SEQ ID NO: 867149 - RNA, 19 nt, Artificial Sequence
  Description of Artificial Sequence: Synthetic oligonucleotide
  Antisense strand to SEQ ID NO: 867148
auacauacuccuuugcuua

SEQ ID NO: 867150 - RNA, 19 nt, Artificial Sequence
  Description of Artificial Sequence: Synthetic oligonucleotide
  Sense strand starting at position 3381 of SEQ ID NO: 588468
acauauagguggucaguaa

SEQ ID NO: 867151 - RNA, 19 nt, Artificial Sequence
  Description of Artificial Sequence: Synthetic oligonucleotide
  Antisense strand to SEQ ID NO: 867150
uuacugaccaccuauaugu

SEQ ID NO: 867152 - RNA, 19 nt, Artificial Sequence
  Description of Artificial Sequence: Synthetic oligonucleotide
  Sense strand starting at position 3382 of SEQ ID NO: 588468
cauauagguggucaguaau

SEQ ID NO: 867153 - RNA, 19 nt, Artificial Sequence
  Description of Artificial Sequence: Synthetic oligonucleotide
  Antisense strand to SEQ ID NO: 867152
auuacugaccaccuauaug

SEQ ID NO: 867154 - RNA, 19 nt, Artificial Sequence
  Description of Artificial Sequence: Synthetic oligonucleotide
  Sense strand starting at position 3385 of SEQ ID NO: 588468
auagguggucaguaauugu

SEQ ID NO: 867155 - RNA, 19 nt, Artificial Sequence
  Description of Artificial Sequence: Synthetic oligonucleotide
  Antisense strand to SEQ ID NO: 867154
acaauuacugaccaccuau

SEQ ID NO: 867156 - RNA, 19 nt, Artificial Sequence
  Description of Artificial Sequence: Synthetic oligonucleotide
  Sense strand starting at position 3505 of SEQ ID NO: 588468
agucuacguaaauauaguu

SEQ ID NO: 867157 - RNA, 19 nt, Artificial Sequence
  Description of Artificial Sequence: Synthetic oligonucleotide
  Antisense strand to SEQ ID NO: 867156
aacuauauuuacguagacu

SEQ ID NO: 867158 - RNA, 19 nt, Artificial Sequence
  Description of Artificial Sequence: Synthetic oligonucleotide
  Sense strand starting at position 3576 of SEQ ID NO: 588468
ucuauuguugacuauuagu

SEQ ID NO: 867159 - RNA, 19 nt, Artificial Sequence
  Description of Artificial Sequence: Synthetic oligonucleotide
  Antisense strand to SEQ ID NO: 867158
acuaauagucaacaauaga

SEQ ID NO: 867160 - RNA, 19 nt, Artificial Sequence
  Description of Artificial Sequence: Synthetic oligonucleotide
  Sense strand starting at position 3581 of SEQ ID NO: 588468
uguugacuauuaguugaau

SEQ ID NO: 867161 - RNA, 19 nt, Artificial Sequence
  Description of Artificial Sequence: Synthetic oligonucleotide
  Antisense strand to SEQ ID NO: 867160
auucaacuaauagucaaca

SEQ ID NO: 867162 - RNA, 19 nt, Artificial Sequence
  Description of Artificial Sequence: Synthetic oligonucleotide
  Sense strand starting at position 3582 of SEQ ID NO: 588468
guugacuauuaguugaauu

SEQ ID NO: 867163 - RNA, 19 nt, Artificial Sequence
  Description of Artificial Sequence: Synthetic oligonucleotide
  Antisense strand to SEQ ID NO: 867162
aauucaacuaauagucaac

SEQ ID NO: 867164 - RNA, 19 nt, Artificial Sequence
  Description of Artificial Sequence: Synthetic oligonucleotide
  Sense strand starting at position 3605 of SEQ ID NO: 588468
uuaggugaaugguuaucau

SEQ ID NO: 867165 - RNA, 19 nt, Artificial Sequence
  Description of Artificial Sequence: Synthetic oligonucleotide
  Antisense strand to SEQ ID NO: 867164
augauaaccauucaccuaa

SEQ ID NO: 867166 - RNA, 19 nt, Artificial Sequence
  Description of Artificial Sequence: Synthetic oligonucleotide
  Sense strand starting at position 3774 of SEQ ID NO: 588468
cauuccuucccuuggagga

SEQ ID NO: 867167 - RNA, 19 nt, Artificial Sequence
  Description of Artificial Sequence: Synthetic oligonucleotide
  Antisense strand to SEQ ID NO: 867166
uccuccaagggaaggaaug

SEQ ID NO: 867168 - RNA, 19 nt, Artificial Sequence
  Description of Artificial Sequence: Synthetic oligonucleotide
  Sense strand starting at position 3775 of SEQ ID NO: 588468
auuccuucccuuggaggaa

SEQ ID NO: 867169 - RNA, 19 nt, Artificial Sequence
  Description of Artificial Sequence: Synthetic oligonucleotide
  Antisense strand to SEQ ID NO: 867168
uuccuccaagggaaggaau

SEQ ID NO: 867170 - RNA, 19 nt, Artificial Sequence
  Description of Artificial Sequence: Synthetic oligonucleotide
  Sense strand starting at position 3893 of SEQ ID NO: 588468
uagaguugcccuggagaag

SEQ ID NO: 867171 - RNA, 19 nt, Artificial Sequence
  Description of Artificial Sequence: Synthetic oligonucleotide
  Antisense strand to SEQ ID NO: 867170
cuucuccagggcaacucua

SEQ ID NO: 867172 - RNA, 19 nt, Artificial Sequence
  Description of Artificial Sequence: Synthetic oligonucleotide
  Sense strand starting at position 3913 of SEQ ID NO: 588468
gcgagagauaaguggaucu

SEQ ID NO: 867173 - RNA, 19 nt, Artificial Sequence
  Description of Artificial Sequence: Synthetic oligonucleotide
  Antisense strand to SEQ ID NO: 867172
agauccacuuaucucucgc

SEQ ID NO: 867174 - RNA, 19 nt, Artificial Sequence
  Description of Artificial Sequence: Synthetic oligonucleotide
  Sense strand starting at position 10 of SEQ ID NO: 588469
gcuuaagugccagaacaca

SEQ ID NO: 867175 - RNA, 19 nt, Artificial Sequence
  Description of Artificial Sequence: Synthetic oligonucleotide
  Antisense strand to SEQ ID NO: 867174
uguguucuggcacuuaagc

SEQ ID NO: 867176 - RNA, 19 nt, Artificial Sequence
  Description of Artificial Sequence: Synthetic oligonucleotide
  Sense strand starting at position 92 of SEQ ID NO: 588469
uccaucugauguuccuaga

SEQ ID NO: 867177 - RNA, 19 nt, Artificial Sequence
  Description of Artificial Sequence: Synthetic oligonucleotide
  Antisense strand to SEQ ID NO: 867176
ucuaggaacaucagaugga

SEQ ID NO: 867178 - RNA, 19 nt, Artificial Sequence
  Description of Artificial Sequence: Synthetic oligonucleotide
  Sense strand starting at position 105 of SEQ ID NO: 588469
ccuagaaaucuuugucuag

SEQ ID NO: 867179 - RNA, 19 nt, Artificial Sequence
  Description of Artificial Sequence: Synthetic oligonucleotide
  Antisense strand to SEQ ID NO: 867178
cuagacaaagauuucuagg

SEQ ID NO: 867180 - RNA, 19 nt, Artificial Sequence
  Description of Artificial Sequence: Synthetic oligonucleotide
  Sense strand starting at position 106 of SEQ ID NO: 588469
cuagaaaucuuugucuaga

SEQ ID NO: 867181 - RNA, 19 nt, Artificial Sequence
  Description of Artificial Sequence: Synthetic oligonucleotide
  Antisense strand to SEQ ID NO: 867180
ucuagacaaagauuucuag

SEQ ID NO: 867182 - RNA, 19 nt, Artificial Sequence
  Description of Artificial Sequence: Synthetic oligonucleotide
  Sense strand starting at position 107 of SEQ ID NO: 588469
uagaaaucuuugucuagag

SEQ ID NO: 867183 - RNA, 19 nt, Artificial Sequence
  Description of Artificial Sequence: Synthetic oligonucleotide
  Antisense strand to SEQ ID NO: 867182
cucuagacaaagauuucua

SEQ ID NO: 867184 - RNA, 19 nt, Artificial Sequence
  Description of Artificial Sequence: Synthetic oligonucleotide
  Sense strand starting at position 165 of SEQ ID NO: 588469
cccagaacuccuggaagca

SEQ ID NO: 867185 - RNA, 19 nt, Artificial Sequence
  Description of Artificial Sequence: Synthetic oligonucleotide
  Antisense strand to SEQ ID NO: 867184
ugcuuccaggaguucuggg

SEQ ID NO: 867186 - RNA, 19 nt, Artificial Sequence
  Description of Artificial Sequence: Synthetic oligonucleotide
  Sense strand starting at position 221 of SEQ ID NO: 588469
gaagccuacguagaacuau

SEQ ID NO: 867187 - RNA, 19 nt, Artificial Sequence
  Description of Artificial Sequence: Synthetic oligonucleotide
  Antisense strand to SEQ ID NO: 867186
auaguucuacguaggcuuc

SEQ ID NO: 867188 - RNA, 19 nt, Artificial Sequence
  Description of Artificial Sequence: Synthetic oligonucleotide
  Sense strand starting at position 299 of SEQ ID NO: 588469
gcaaaucccucugcaagga

SEQ ID NO: 867189 - RNA, 19 nt, Artificial Sequence
  Description of Artificial Sequence: Synthetic oligonucleotide
  Antisense strand to SEQ ID NO: 867188
uccuugcagagggauuugc

SEQ ID NO: 867190 - RNA, 19 nt, Artificial Sequence
  Description of Artificial Sequence: Synthetic oligonucleotide
  Sense strand starting at position 362 of SEQ ID NO: 588469
acaagaacacucugcagua

SEQ ID NO: 867191 - RNA, 19 nt, Artificial Sequence
  Description of Artificial Sequence: Synthetic oligonucleotide
  Antisense strand to SEQ ID NO: 867190
uacugcagaguguucuugu

SEQ ID NO: 867192 - RNA, 19 nt, Artificial Sequence
  Description of Artificial Sequence: Synthetic oligonucleotide
  Sense strand starting at position 377 of SEQ ID NO: 588469
aguacaauuuagcaaggaa

SEQ ID NO: 867193 - RNA, 19 nt, Artificial Sequence
  Description of Artificial Sequence: Synthetic oligonucleotide
  Antisense strand to SEQ ID NO: 867192
uuccuugcuaaauuguacu

SEQ ID NO: 867194 - RNA, 19 nt, Artificial Sequence
  Description of Artificial Sequence: Synthetic oligonucleotide
  Sense strand starting at position 507 of SEQ ID NO: 588469
ggugaaugauagagagaug

SEQ ID NO: 867195 - RNA, 19 nt, Artificial Sequence
  Description of Artificial Sequence: Synthetic oligonucleotide
  Antisense strand to SEQ ID NO: 867194
caucucucuaucauucacc

SEQ ID NO: 867196 - RNA, 19 nt, Artificial Sequence
  Description of Artificial Sequence: Synthetic oligonucleotide
  Sense strand starting at position 1114 of SEQ ID NO: 588469
gcggaacucagcugugaga

SEQ ID NO: 867197 - RNA, 19 nt, Artificial Sequence
  Description of Artificial Sequence: Synthetic oligonucleotide
  Antisense strand to SEQ ID NO: 867196
ucucacagcugaguuccgc

SEQ ID NO: 867198 - RNA, 19 nt, Artificial Sequence
  Description of Artificial Sequence: Synthetic oligonucleotide
  Sense strand starting at position 1116 of SEQ ID NO: 588469
ggaacucagcugugagaac

SEQ ID NO: 867199 - RNA, 19 nt, Artificial Sequence
  Description of Artificial Sequence: Synthetic oligonucleotide
  Antisense strand to SEQ ID NO: 867198
guucucacagcugaguucc

SEQ ID NO: 867200 - RNA, 19 nt, Artificial Sequence
  Description of Artificial Sequence: Synthetic oligonucleotide
  Sense strand starting at position 1466 of SEQ ID NO: 588469
ugaggucacuugcugaagu

SEQ ID NO: 867201 - RNA, 19 nt, Artificial Sequence
  Description of Artificial Sequence: Synthetic oligonucleotide
  Antisense strand to SEQ ID NO: 867200
acuucagcaagugaccuca

SEQ ID NO: 867202 - RNA, 19 nt, Artificial Sequence
  Description of Artificial Sequence: Synthetic oligonucleotide
  Sense strand starting at position 1520 of SEQ ID NO: 588469
ccuugagcgagggaauguu

SEQ ID NO: 867203 - RNA, 19 nt, Artificial Sequence
  Description of Artificial Sequence: Synthetic oligonucleotide
  Antisense strand to SEQ ID NO: 867202
aacauucccucgcucaagg

SEQ ID NO: 867204 - RNA, 19 nt, Artificial Sequence
  Description of Artificial Sequence: Synthetic oligonucleotide
  Sense strand starting at position 2248 of SEQ ID NO: 588469
cacuguucgcccguccaga

SEQ ID NO: 867205 - RNA, 19 nt, Artificial Sequence
  Description of Artificial Sequence: Synthetic oligonucleotide
  Antisense strand to SEQ ID NO: 867204
ucuggacgggcgaacagug

SEQ ID NO: 867206 - RNA, 19 nt, Artificial Sequence
  Description of Artificial Sequence: Synthetic oligonucleotide
  Sense strand starting at position 2249 of SEQ ID NO: 588469
acuguucgcccguccagau

SEQ ID NO: 867207 - RNA, 19 nt, Artificial Sequence
  Description of Artificial Sequence: Synthetic oligonucleotide
  Antisense strand to SEQ ID NO: 867206
aucuggacgggcgaacagu

SEQ ID NO: 867208 - RNA, 19 nt, Artificial Sequence
  Description of Artificial Sequence: Synthetic oligonucleotide
  Sense strand starting at position 2498 of SEQ ID NO: 588469
cacccagugcugcgacaaa

SEQ ID NO: 867209 - RNA, 19 nt, Artificial Sequence
  Description of Artificial Sequence: Synthetic oligonucleotide
  Antisense strand to SEQ ID NO: 867208
uuugucgcagcacugggug

SEQ ID NO: 867210 - RNA, 19 nt, Artificial Sequence
  Description of Artificial Sequence: Synthetic oligonucleotide
  Sense strand starting at position 2629 of SEQ ID NO: 588469
caagaagucuuguuguuaa

SEQ ID NO: 867211 - RNA, 19 nt, Artificial Sequence
  Description of Artificial Sequence: Synthetic oligonucleotide
  Antisense strand to SEQ ID NO: 867210
uuaacaacaagacuucuug

SEQ ID NO: 867212 - RNA, 19 nt, Artificial Sequence
  Description of Artificial Sequence: Synthetic oligonucleotide
  Sense strand starting at position 2632 of SEQ ID NO: 588469
gaagucuuguuguuaacca

SEQ ID NO: 867213 - RNA, 19 nt, Artificial Sequence
  Description of Artificial Sequence: Synthetic oligonucleotide
  Antisense strand to SEQ ID NO: 867212
ugguuaacaacaagacuuc

SEQ ID NO: 867214 - RNA, 19 nt, Artificial Sequence
  Description of Artificial Sequence: Synthetic oligonucleotide
  Sense strand starting at position 2639 of SEQ ID NO: 588469
uguuguuaaccauguucua

SEQ ID NO: 867215 - RNA, 19 nt, Artificial Sequence
  Description of Artificial Sequence: Synthetic oligonucleotide
  Antisense strand to SEQ ID NO: 867214
uagaacaugguuaacaaca

SEQ ID NO: 867216 - RNA, 19 nt, Artificial Sequence
  Description of Artificial Sequence: Synthetic oligonucleotide
  Sense strand starting at position 2687 of SEQ ID NO: 588469
gcugcaacccuagaaugaa

SEQ ID NO: 867217 - RNA, 19 nt, Artificial Sequence
  Description of Artificial Sequence: Synthetic oligonucleotide
  Antisense strand to SEQ ID NO: 867216
uucauucuaggguugcagc

SEQ ID NO: 867218 - RNA, 19 nt, Artificial Sequence
  Description of Artificial Sequence: Synthetic oligonucleotide
  Sense strand starting at position 2762 of SEQ ID NO: 588469
gcauuugcuccaggucacu

SEQ ID NO: 867219 - RNA, 19 nt, Artificial Sequence
  Description of Artificial Sequence: Synthetic oligonucleotide
  Antisense strand to SEQ ID NO: 867218
agugaccuggagcaaaugc

SEQ ID NO: 867220 - RNA, 19 nt, Artificial Sequence
  Description of Artificial Sequence: Synthetic oligonucleotide
  Sense strand starting at position 2848 of SEQ ID NO: 588469
gcugccucccuuguguuaa

SEQ ID NO: 867221 - RNA, 19 nt, Artificial Sequence
  Description of Artificial Sequence: Synthetic oligonucleotide
  Antisense strand to SEQ ID NO: 867220
uuaacacaagggaggcagc

SEQ ID NO: 867222 - RNA, 19 nt, Artificial Sequence
  Description of Artificial Sequence: Synthetic oligonucleotide
  Sense strand starting at position 3187 of SEQ ID NO: 588469
gcacuaauguugucugaau

SEQ ID NO: 867223 - RNA, 19 nt, Artificial Sequence
  Description of Artificial Sequence: Synthetic oligonucleotide
  Antisense strand to SEQ ID NO: 867222
auucagacaacauuagugc

SEQ ID NO: 867224 - RNA, 19 nt, Artificial Sequence
  Description of Artificial Sequence: Synthetic oligonucleotide
  Sense strand starting at position 3189 of SEQ ID NO: 588469
acuaauguugucugaauaa

SEQ ID NO: 867225 - RNA, 19 nt, Artificial Sequence
  Description of Artificial Sequence: Synthetic oligonucleotide
  Antisense strand to SEQ ID NO: 867224
uuauucagacaacauuagu

SEQ ID NO: 867226 - RNA, 19 nt, Artificial Sequence
  Description of Artificial Sequence: Synthetic oligonucleotide
  Sense strand starting at position 3240 of SEQ ID NO: 588469
uugagucaugugcgagaag

SEQ ID NO: 867227 - RNA, 19 nt, Artificial Sequence
  Description of Artificial Sequence: Synthetic oligonucleotide
  Antisense strand to SEQ ID NO: 867226
cuucucgcacaugacucaa

SEQ ID NO: 867228 - RNA, 19 nt, Artificial Sequence
  Description of Artificial Sequence: Synthetic oligonucleotide
  Sense strand starting at position 3242 of SEQ ID NO: 588469
gagucaugugcgagaaggu

SEQ ID NO: 867229 - RNA, 19 nt, Artificial Sequence
  Description of Artificial Sequence: Synthetic oligonucleotide
  Antisense strand to SEQ ID NO: 867228
accuucucgcacaugacuc

SEQ ID NO: 867230 - RNA, 19 nt, Artificial Sequence
  Description of Artificial Sequence: Synthetic oligonucleotide
  Sense strand starting at position 3243 of SEQ ID NO: 588469
agucaugugcgagaaggua

SEQ ID NO: 867231 - RNA, 19 nt, Artificial Sequence
  Description of Artificial Sequence: Synthetic oligonucleotide
  Antisense strand to SEQ ID NO: 867230
uaccuucucgcacaugacu

SEQ ID NO: 867232 - RNA, 19 nt, Artificial Sequence
  Description of Artificial Sequence: Synthetic oligonucleotide
  Sense strand starting at position 3249 of SEQ ID NO: 588469
gugcgagaagguagcuaau

SEQ ID NO: 867233 - RNA, 19 nt, Artificial Sequence
  Description of Artificial Sequence: Synthetic oligonucleotide
  Antisense strand to SEQ ID NO: 867232
auuagcuaccuucucgcac

SEQ ID NO: 867234 - RNA, 19 nt, Artificial Sequence
  Description of Artificial Sequence: Synthetic oligonucleotide
  Sense strand starting at position 3319 of SEQ ID NO: 588469
gcucuaggucugugaguga

SEQ ID NO: 867235 - RNA, 19 nt, Artificial Sequence
  Description of Artificial Sequence: Synthetic oligonucleotide
  Antisense strand to SEQ ID NO: 867234
ucacucacagaccuagagc

SEQ ID NO: 867236 - RNA, 19 nt, Artificial Sequence
  Description of Artificial Sequence: Synthetic oligonucleotide
  Sense strand starting at position 3559 of SEQ ID NO: 588469
cugugaguucuauggcaga

SEQ ID NO: 867237 - RNA, 19 nt, Artificial Sequence
  Description of Artificial Sequence: Synthetic oligonucleotide
  Antisense strand to SEQ ID NO: 867236
ucugccauagaacucacag

SEQ ID NO: 867238 - RNA, 19 nt, Artificial Sequence
  Description of Artificial Sequence: Synthetic oligonucleotide
  Sense strand starting at position 3636 of SEQ ID NO: 588469
gcaggcaucagagaagcuu

SEQ ID NO: 867239 - RNA, 19 nt, Artificial Sequence
  Description of Artificial Sequence: Synthetic oligonucleotide
  Antisense strand to SEQ ID NO: 867238
aagcuucucugaugccugc

SEQ ID NO: 867240 - RNA, 19 nt, Artificial Sequence
  Description of Artificial Sequence: Synthetic oligonucleotide
  Sense strand starting at position 3755 of SEQ ID NO: 588469
accagucucguggaauaua

SEQ ID NO: 867241 - RNA, 19 nt, Artificial Sequence
  Description of Artificial Sequence: Synthetic oligonucleotide
  Antisense strand to SEQ ID NO: 867240
uauauuccacgagacuggu

SEQ ID NO: 867242 - RNA, 19 nt, Artificial Sequence
  Description of Artificial Sequence: Synthetic oligonucleotide
  Sense strand starting at position 3850 of SEQ ID NO: 588469
ucuuaaugcuggcucuuua

SEQ ID NO: 867243 - RNA, 19 nt, Artificial Sequence
  Description of Artificial Sequence: Synthetic oligonucleotide
  Antisense strand to SEQ ID NO: 867242
uaaagagccagcauuaaga

SEQ ID NO: 867244 - RNA, 19 nt, Artificial Sequence
  Description of Artificial Sequence: Synthetic oligonucleotide
  Sense strand starting at position 3865 of SEQ ID NO: 588469
uuuaaaucucccugggcua

SEQ ID NO: 867245 - RNA, 19 nt, Artificial Sequence
  Description of Artificial Sequence: Synthetic oligonucleotide
  Antisense strand to SEQ ID NO: 867244
uagcccagggagauuuaaa

SEQ ID NO: 867246 - RNA, 19 nt, Artificial Sequence
  Description of Artificial Sequence: Synthetic oligonucleotide
  Sense strand starting at position 3866 of SEQ ID NO: 588469
uuaaaucucccugggcuaa

SEQ ID NO: 867247 - RNA, 19 nt, Artificial Sequence
  Description of Artificial Sequence: Synthetic oligonucleotide
  Antisense strand to SEQ ID NO: 867246
uuagcccagggagauuuaa

SEQ ID NO: 867248 - RNA, 19 nt, Artificial Sequence
  Description of Artificial Sequence: Synthetic oligonucleotide
  Sense strand starting at position 3876 of SEQ ID NO: 588469
cugggcuaagucugugaua

SEQ ID NO: 867249 - RNA, 19 nt, Artificial Sequence
  Description of Artificial Sequence: Synthetic oligonucleotide
  Antisense strand to SEQ ID NO: 867248
uaucacagacuuagcccag

SEQ ID NO: 867250 - RNA, 19 nt, Artificial Sequence
  Description of Artificial Sequence: Synthetic oligonucleotide
  Sense strand starting at position 3877 of SEQ ID NO: 588469
ugggcuaagucugugauaa

SEQ ID NO: 867251 - RNA, 19 nt, Artificial Sequence
  Description of Artificial Sequence: Synthetic oligonucleotide
  Antisense strand to SEQ ID NO: 867250
uuaucacagacuuagccca

SEQ ID NO: 867252 - RNA, 19 nt, Artificial Sequence
  Description of Artificial Sequence: Synthetic oligonucleotide
  Sense strand starting at position 3878 of SEQ ID NO: 588469
gggcuaagucugugauaac

SEQ ID NO: 867253 - RNA, 19 nt, Artificial Sequence
  Description of Artificial Sequence: Synthetic oligonucleotide
  Antisense strand to SEQ ID NO: 867252
guuaucacagacuuagccc

SEQ ID NO: 867254 - RNA, 19 nt, Artificial Sequence
  Description of Artificial Sequence: Synthetic oligonucleotide
  Sense strand starting at position 204 of SEQ ID NO: 588470
aagcgaucuuaugugacau

SEQ ID NO: 867255 - RNA, 19 nt, Artificial Sequence
  Description of Artificial Sequence: Synthetic oligonucleotide
  Antisense strand to SEQ ID NO: 867254
augucacauaagaucgcuu

SEQ ID NO: 867256 - RNA, 19 nt, Artificial Sequence
  Description of Artificial Sequence: Synthetic oligonucleotide
  Sense strand starting at position 205 of SEQ ID NO: 588470
agcgaucuuaugugacauc

SEQ ID NO: 867257 - RNA, 19 nt, Artificial Sequence
  Description of Artificial Sequence: Synthetic oligonucleotide
  Antisense strand to SEQ ID NO: 867256
gaugucacauaagaucgcu

SEQ ID NO: 867258 - RNA, 19 nt, Artificial Sequence
  Description of Artificial Sequence: Synthetic oligonucleotide
  Sense strand starting at position 214 of SEQ ID NO: 588470
augugacaucucuaaaguu

SEQ ID NO: 867259 - RNA, 19 nt, Artificial Sequence
  Description of Artificial Sequence: Synthetic oligonucleotide
  Antisense strand to SEQ ID NO: 867258
aacuuuagagaugucacau

SEQ ID NO: 867260 - RNA, 19 nt, Artificial Sequence
  Description of Artificial Sequence: Synthetic oligonucleotide
  Sense strand starting at position 340 of SEQ ID NO: 588470
gucuauuauuaaucagcga

SEQ ID NO: 867261 - RNA, 19 nt, Artificial Sequence
  Description of Artificial Sequence: Synthetic oligonucleotide
  Antisense strand to SEQ ID NO: 867260
ucgcugauuaauaauagac

SEQ ID NO: 867262 - RNA, 19 nt, Artificial Sequence
  Description of Artificial Sequence: Synthetic oligonucleotide
  Sense strand starting at position 344 of SEQ ID NO: 588470
auuauuaaucagcgaaaca

SEQ ID NO: 867263 - RNA, 19 nt, Artificial Sequence
  Description of Artificial Sequence: Synthetic oligonucleotide
  Antisense strand to SEQ ID NO: 867262
uguuucgcugauuaauaau

SEQ ID NO: 867264 - RNA, 19 nt, Artificial Sequence
  Description of Artificial Sequence: Synthetic oligonucleotide
  Sense strand starting at position 384 of SEQ ID NO: 588470
cagucacuagcggauuauu

SEQ ID NO: 867265 - RNA, 19 nt, Artificial Sequence
  Description of Artificial Sequence: Synthetic oligonucleotide
  Antisense strand to SEQ ID NO: 867264
aauaauccgcuagugacug

SEQ ID NO: 867266 - RNA, 19 nt, Artificial Sequence
  Description of Artificial Sequence: Synthetic oligonucleotide
  Sense strand starting at position 699 of SEQ ID NO: 588470
ggagaagaguuggauaaga

SEQ ID NO: 867267 - RNA, 19 nt, Artificial Sequence
  Description of Artificial Sequence: Synthetic oligonucleotide
  Antisense strand to SEQ ID NO: 867266
ucuuauccaacucuucucc

SEQ ID NO: 867268 - RNA, 19 nt, Artificial Sequence
  Description of Artificial Sequence: Synthetic oligonucleotide
  Sense strand starting at position 736 of SEQ ID NO: 588470
cagggcuuaucuguaagaa

SEQ ID NO: 867269 - RNA, 19 nt, Artificial Sequence
  Description of Artificial Sequence: Synthetic oligonucleotide
  Antisense strand to SEQ ID NO: 867268
uucuuacagauaagcccug

SEQ ID NO: 867270 - RNA, 19 nt, Artificial Sequence
  Description of Artificial Sequence: Synthetic oligonucleotide
  Sense strand starting at position 737 of SEQ ID NO: 588470
agggcuuaucuguaagaau

SEQ ID NO: 867271 - RNA, 19 nt, Artificial Sequence
  Description of Artificial Sequence: Synthetic oligonucleotide
  Antisense strand to SEQ ID NO: 867270
auucuuacagauaagcccu

SEQ ID NO: 867272 - RNA, 19 nt, Artificial Sequence
  Description of Artificial Sequence: Synthetic oligonucleotide
  Sense strand starting at position 1279 of SEQ ID NO: 588470
aggcacaugccucacgaau

SEQ ID NO: 867273 - RNA, 19 nt, Artificial Sequence
  Description of Artificial Sequence: Synthetic oligonucleotide
  Antisense strand to SEQ ID NO: 867272
auucgugaggcaugugccu

SEQ ID NO: 867274 - RNA, 19 nt, Artificial Sequence
  Description of Artificial Sequence: Synthetic oligonucleotide
  Sense strand starting at position 1739 of SEQ ID NO: 588470
ccacuaagggcucgagaaa

SEQ ID NO: 867275 - RNA, 19 nt, Artificial Sequence
  Description of Artificial Sequence: Synthetic oligonucleotide
  Antisense strand to SEQ ID NO: 867274
uuucucgagcccuuagugg

SEQ ID NO: 867276 - RNA, 19 nt, Artificial Sequence
  Description of Artificial Sequence: Synthetic oligonucleotide
  Sense strand starting at position 2005 of SEQ ID NO: 588470
aaccucucgcgagaucuaa

SEQ ID NO: 867277 - RNA, 19 nt, Artificial Sequence
  Description of Artificial Sequence: Synthetic oligonucleotide
  Antisense strand to SEQ ID NO: 867276
uuagaucucgcgagagguu

SEQ ID NO: 867278 - RNA, 19 nt, Artificial Sequence
  Description of Artificial Sequence: Synthetic oligonucleotide
  Sense strand starting at position 2395 of SEQ ID NO: 588470
ggaaacccguuguuuguaa

SEQ ID NO: 867279 - RNA, 19 nt, Artificial Sequence
  Description of Artificial Sequence: Synthetic oligonucleotide
  Antisense strand to SEQ ID NO: 867278
uuacaaacaacggguuucc

SEQ ID NO: 867280 - RNA, 19 nt, Artificial Sequence
  Description of Artificial Sequence: Synthetic oligonucleotide
  Sense strand starting at position 2396 of SEQ ID NO: 588470
gaaacccguuguuuguaau

SEQ ID NO: 867281 - RNA, 19 nt, Artificial Sequence
  Description of Artificial Sequence: Synthetic oligonucleotide
  Antisense strand to SEQ ID NO: 867280
auuacaaacaacggguuuc

SEQ ID NO: 867282 - RNA, 19 nt, Artificial Sequence
  Description of Artificial Sequence: Synthetic oligonucleotide
  Sense strand starting at position 2528 of SEQ ID NO: 588470
gagaacuucucgccgagag

SEQ ID NO: 867283 - RNA, 19 nt, Artificial Sequence
  Description of Artificial Sequence: Synthetic oligonucleotide
  Antisense strand to SEQ ID NO: 867282
cucucggcgagaaguucuc

SEQ ID NO: 867284 - RNA, 19 nt, Artificial Sequence
  Description of Artificial Sequence: Synthetic oligonucleotide
  Sense strand starting at position 2581 of SEQ ID NO: 588470
gacuuuccucuuggguaau

SEQ ID NO: 867285 - RNA, 19 nt, Artificial Sequence
  Description of Artificial Sequence: Synthetic oligonucleotide
  Antisense strand to SEQ ID NO: 867284
auuacccaagaggaaaguc

SEQ ID NO: 867286 - RNA, 19 nt, Artificial Sequence
  Description of Artificial Sequence: Synthetic oligonucleotide
  Sense strand starting at position 2696 of SEQ ID NO: 588470
ugcguaucgcugaauacgu

SEQ ID NO: 867287 - RNA, 19 nt, Artificial Sequence
  Description of Artificial Sequence: Synthetic oligonucleotide
  Antisense strand to SEQ ID NO: 867286
acguauucagcgauacgca

SEQ ID NO: 867288 - RNA, 19 nt, Artificial Sequence
  Description of Artificial Sequence: Synthetic oligonucleotide
  Sense strand starting at position 2697 of SEQ ID NO: 588470
gcguaucgcugaauacguu

SEQ ID NO: 867289 - RNA, 19 nt, Artificial Sequence
  Description of Artificial Sequence: Synthetic oligonucleotide
  Antisense strand to SEQ ID NO: 867288
aacguauucagcgauacgc

SEQ ID NO: 867290 - RNA, 19 nt, Artificial Sequence
  Description of Artificial Sequence: Synthetic oligonucleotide
  Sense strand starting at position 2747 of SEQ ID NO: 588470
ccuuguggcagugaugaaa

SEQ ID NO: 867291 - RNA, 19 nt, Artificial Sequence
  Description of Artificial Sequence: Synthetic oligonucleotide
  Antisense strand to SEQ ID NO: 867290
uuucaucacugccacaagg

SEQ ID NO: 867292 - RNA, 19 nt, Artificial Sequence
  Description of Artificial Sequence: Synthetic oligonucleotide
  Sense strand starting at position 2911 of SEQ ID NO: 588470
cggugacagcccugggaaa

SEQ ID NO: 867293 - RNA, 19 nt, Artificial Sequence
  Description of Artificial Sequence: Synthetic oligonucleotide
  Antisense strand to SEQ ID NO: 867292
uuucccagggcugucaccg

SEQ ID NO: 867294 - RNA, 19 nt, Artificial Sequence
  Description of Artificial Sequence: Synthetic oligonucleotide
  Sense strand starting at position 2912 of SEQ ID NO: 588470
ggugacagcccugggaaau

SEQ ID NO: 867295 - RNA, 19 nt, Artificial Sequence
  Description of Artificial Sequence: Synthetic oligonucleotide
  Antisense strand to SEQ ID NO: 867294
auuucccagggcugucacc

SEQ ID NO: 867296 - RNA, 19 nt, Artificial Sequence
  Description of Artificial Sequence: Synthetic oligonucleotide
  Sense strand starting at position 3022 of SEQ ID NO: 588470
gugucauaaucugcacaua

SEQ ID NO: 867297 - RNA, 19 nt, Artificial Sequence
  Description of Artificial Sequence: Synthetic oligonucleotide
  Antisense strand to SEQ ID NO: 867296
uaugugcagauuaugacac

SEQ ID NO: 867298 - RNA, 19 nt, Artificial Sequence
  Description of Artificial Sequence: Synthetic oligonucleotide
  Sense strand starting at position 3050 of SEQ ID NO: 588470
ccaccauuggccgaauaca

SEQ ID NO: 867299 - RNA, 19 nt, Artificial Sequence
  Description of Artificial Sequence: Synthetic oligonucleotide
  Antisense strand to SEQ ID NO: 867298
uguauucggccaauggugg

SEQ ID NO: 867300 - RNA, 19 nt, Artificial Sequence
  Description of Artificial Sequence: Synthetic oligonucleotide
  Sense strand starting at position 3112 of SEQ ID NO: 588470
guuauaauguuuccuucuu

SEQ ID NO: 867301 - RNA, 19 nt, Artificial Sequence
  Description of Artificial Sequence: Synthetic oligonucleotide
  Antisense strand to SEQ ID NO: 867300
aagaaggaaacauuauaac

SEQ ID NO: 867302 - RNA, 19 nt, Artificial Sequence
  Description of Artificial Sequence: Synthetic oligonucleotide
  Sense strand starting at position 3117 of SEQ ID NO: 588470
aauguuuccuucuugggua

SEQ ID NO: 867303 - RNA, 19 nt, Artificial Sequence
  Description of Artificial Sequence: Synthetic oligonucleotide
  Antisense strand to SEQ ID NO: 867302
uacccaagaaggaaacauu

SEQ ID NO: 867304 - RNA, 19 nt, Artificial Sequence
  Description of Artificial Sequence: Synthetic oligonucleotide
  Sense strand starting at position 3119 of SEQ ID NO: 588470
uguuuccuucuuggguaau

SEQ ID NO: 867305 - RNA, 19 nt, Artificial Sequence
  Description of Artificial Sequence: Synthetic oligonucleotide
  Antisense strand to SEQ ID NO: 867304
auuacccaagaaggaaaca

SEQ ID NO: 867306 - RNA, 19 nt, Artificial Sequence
  Description of Artificial Sequence: Synthetic oligonucleotide
  Sense strand starting at position 3202 of SEQ ID NO: 588470
cuugacugauuagaggaaa

SEQ ID NO: 867307 - RNA, 19 nt, Artificial Sequence
  Description of Artificial Sequence: Synthetic oligonucleotide
  Antisense strand to SEQ ID NO: 867306
uuuccucuaaucagucaag

SEQ ID NO: 867308 - RNA, 19 nt, Artificial Sequence
  Description of Artificial Sequence: Synthetic oligonucleotide
  Sense strand starting at position 3263 of SEQ ID NO: 588470
uauuuacauucugggagga

SEQ ID NO: 867309 - RNA, 19 nt, Artificial Sequence
  Description of Artificial Sequence: Synthetic oligonucleotide
  Antisense strand to SEQ ID NO: 867308
uccucccagaauguaaaua

SEQ ID NO: 867310 - RNA, 19 nt, Artificial Sequence
  Description of Artificial Sequence: Synthetic oligonucleotide
  Sense strand starting at position 3302 of SEQ ID NO: 588470
gaacauaauguccgggauu

SEQ ID NO: 867311 - RNA, 19 nt, Artificial Sequence
  Description of Artificial Sequence: Synthetic oligonucleotide
  Antisense strand to SEQ ID NO: 867310
aaucccggacauuauguuc

SEQ ID NO: 867312 - RNA, 19 nt, Artificial Sequence
  Description of Artificial Sequence: Synthetic oligonucleotide
  Sense strand starting at position 3304 of SEQ ID NO: 588470
acauaauguccgggauugu

SEQ ID NO: 867313 - RNA, 19 nt, Artificial Sequence
  Description of Artificial Sequence: Synthetic oligonucleotide
  Antisense strand to SEQ ID NO: 867312
acaaucccggacauuaugu

SEQ ID NO: 867314 - RNA, 19 nt, Artificial Sequence
  Description of Artificial Sequence: Synthetic oligonucleotide
  Sense strand starting at position 3335 of SEQ ID NO: 588470
aguucucuuuaagugauaa

SEQ ID NO: 867315 - RNA, 19 nt, Artificial Sequence
  Description of Artificial Sequence: Synthetic oligonucleotide
  Antisense strand to SEQ ID NO: 867314
uuaucacuuaaagagaacu

SEQ ID NO: 867316 - RNA, 19 nt, Artificial Sequence
  Description of Artificial Sequence: Synthetic oligonucleotide
  Sense strand starting at position 3382 of SEQ ID NO: 588470
aagaguguauagucuuguu

SEQ ID NO: 867317 - RNA, 19 nt, Artificial Sequence
  Description of Artificial Sequence: Synthetic oligonucleotide
  Antisense strand to SEQ ID NO: 867316
aacaagacuauacacucuu

SEQ ID NO: 867318 - RNA, 19 nt, Artificial Sequence
  Description of Artificial Sequence: Synthetic oligonucleotide
  Sense strand starting at position 3391 of SEQ ID NO: 588470
uagucuuguuggguaggua

SEQ ID NO: 867319 - RNA, 19 nt, Artificial Sequence
  Description of Artificial Sequence: Synthetic oligonucleotide
  Antisense strand to SEQ ID NO: 867318
uaccuacccaacaagacua

SEQ ID NO: 867320 - RNA, 19 nt, Artificial Sequence
  Description of Artificial Sequence: Synthetic oligonucleotide
  Sense strand starting at position 3392 of SEQ ID NO: 588470
agucuuguuggguagguaa

SEQ ID NO: 867321 - RNA, 19 nt, Artificial Sequence
  Description of Artificial Sequence: Synthetic oligonucleotide
  Antisense strand to SEQ ID NO: 867320
uuaccuacccaacaagacu

SEQ ID NO: 867322 - RNA, 19 nt, Artificial Sequence
  Description of Artificial Sequence: Synthetic oligonucleotide
  Sense strand starting at position 3489 of SEQ ID NO: 588470
ggcuuaggauacuuggauu

SEQ ID NO: 867323 - RNA, 19 nt, Artificial Sequence
  Description of Artificial Sequence: Synthetic oligonucleotide
  Antisense strand to SEQ ID NO: 867322
aauccaaguauccuaagcc

SEQ ID NO: 867324 - RNA, 19 nt, Artificial Sequence
  Description of Artificial Sequence: Synthetic oligonucleotide
  Sense strand starting at position 3492 of SEQ ID NO: 588470
uuaggauacuuggauuaua

SEQ ID NO: 867325 - RNA, 19 nt, Artificial Sequence
  Description of Artificial Sequence: Synthetic oligonucleotide
  Antisense strand to SEQ ID NO: 867324
uauaauccaaguauccuaa

SEQ ID NO: 867326 - RNA, 19 nt, Artificial Sequence
  Description of Artificial Sequence: Synthetic oligonucleotide
  Sense strand starting at position 3497 of SEQ ID NO: 588470
auacuuggauuauagagau

SEQ ID NO: 867327 - RNA, 19 nt, Artificial Sequence
  Description of Artificial Sequence: Synthetic oligonucleotide
  Antisense strand to SEQ ID NO: 867326
aucucuauaauccaaguau

SEQ ID NO: 867328 - RNA, 19 nt, Artificial Sequence
  Description of Artificial Sequence: Synthetic oligonucleotide
  Sense strand starting at position 3511 of SEQ ID NO: 588470
gagauuuaauccgccaguu

SEQ ID NO: 867329 - RNA, 19 nt, Artificial Sequence
  Description of Artificial Sequence: Synthetic oligonucleotide
  Antisense strand to SEQ ID NO: 867328
aacuggcggauuaaaucuc

SEQ ID NO: 867330 - RNA, 19 nt, Artificial Sequence
  Description of Artificial Sequence: Synthetic oligonucleotide
  Sense strand starting at position 3523 of SEQ ID NO: 588470
gccaguuaguauuugcaac

SEQ ID NO: 867331 - RNA, 19 nt, Artificial Sequence
  Description of Artificial Sequence: Synthetic oligonucleotide
  Antisense strand to SEQ ID NO: 867330
guugcaaauacuaacuggc

SEQ ID NO: 867332 - RNA, 19 nt, Artificial Sequence
  Description of Artificial Sequence: Synthetic oligonucleotide
  Sense strand starting at position 3570 of SEQ ID NO: 588470
gagacaugucacugacacu

SEQ ID NO: 867333 - RNA, 19 nt, Artificial Sequence
  Description of Artificial Sequence: Synthetic oligonucleotide
  Antisense strand to SEQ ID NO: 867332
agugucagugacaugucuc

SEQ ID NO: 867334 - RNA, 19 nt, Artificial Sequence
  Description of Artificial Sequence: Synthetic oligonucleotide
  Sense strand starting at position 1 of SEQ ID NO: 588471
gcacaccaaucuguggaaa

SEQ ID NO: 867335 - RNA, 19 nt, Artificial Sequence
  Description of Artificial Sequence: Synthetic oligonucleotide
  Antisense strand to SEQ ID NO: 867334
uuuccacagauuggugugc

SEQ ID NO: 867336 - RNA, 19 nt, Artificial Sequence
  Description of Artificial Sequence: Synthetic oligonucleotide
  Sense strand starting at position 30 of SEQ ID NO: 588471
cuaguacauuuggcuuauu

SEQ ID NO: 867337 - RNA, 19 nt, Artificial Sequence
  Description of Artificial Sequence: Synthetic oligonucleotide
  Antisense strand to SEQ ID NO: 867336
aauaagccaaauguacuag

SEQ ID NO: 867338 - RNA, 19 nt, Artificial Sequence
  Description of Artificial Sequence: Synthetic oligonucleotide
  Sense strand starting at position 98 of SEQ ID NO: 588471
acguaccaguuauuauaua

SEQ ID NO: 867339 - RNA, 19 nt, Artificial Sequence
  Description of Artificial Sequence: Synthetic oligonucleotide
  Antisense strand to SEQ ID NO: 867338
uauauaauaacugguacgu

SEQ ID NO: 867340 - RNA, 19 nt, Artificial Sequence
  Description of Artificial Sequence: Synthetic oligonucleotide
  Sense strand starting at position 106 of SEQ ID NO: 588471
guuauuauauauccuugca

SEQ ID NO: 867341 - RNA, 19 nt, Artificial Sequence
  Description of Artificial Sequence: Synthetic oligonucleotide
  Antisense strand to SEQ ID NO: 867340
ugcaaggauauauaauaac

SEQ ID NO: 867342 - RNA, 19 nt, Artificial Sequence
  Description of Artificial Sequence: Synthetic oligonucleotide
  Sense strand starting at position 109 of SEQ ID NO: 588471
auuauauauccuugcagag

SEQ ID NO: 867343 - RNA, 19 nt, Artificial Sequence
  Description of Artificial Sequence: Synthetic oligonucleotide
  Antisense strand to SEQ ID NO: 867342
cucugcaaggauauauaau

SEQ ID NO: 867344 - RNA, 19 nt, Artificial Sequence
  Description of Artificial Sequence: Synthetic oligonucleotide
  Sense strand starting at position 173 of SEQ ID NO: 588471
gcugcaguagccuauaaga

SEQ ID NO: 867345 - RNA, 19 nt, Artificial Sequence
  Description of Artificial Sequence: Synthetic oligonucleotide
  Antisense strand to SEQ ID NO: 867344
ucuuauaggcuacugcagc

SEQ ID NO: 867346 - RNA, 19 nt, Artificial Sequence
  Description of Artificial Sequence: Synthetic oligonucleotide
  Sense strand starting at position 243 of SEQ ID NO: 588471
uuccgaucacagugaauac

SEQ ID NO: 867347 - RNA, 19 nt, Artificial Sequence
  Description of Artificial Sequence: Synthetic oligonucleotide
  Antisense strand to SEQ ID NO: 867346
guauucacugugaucggaa

SEQ ID NO: 867348 - RNA, 19 nt, Artificial Sequence
  Description of Artificial Sequence: Synthetic oligonucleotide
  Sense strand starting at position 589 of SEQ ID NO: 588471
aagcgaucuuaugugacau

SEQ ID NO: 867349 - RNA, 19 nt, Artificial Sequence
  Description of Artificial Sequence: Synthetic oligonucleotide
  Antisense strand to SEQ ID NO: 867348
augucacauaagaucgcuu

SEQ ID NO: 867350 - RNA, 19 nt, Artificial Sequence
  Description of Artificial Sequence: Synthetic oligonucleotide
  Sense strand starting at position 590 of SEQ ID NO: 588471
agcgaucuuaugugacauc

SEQ ID NO: 867351 - RNA, 19 nt, Artificial Sequence
  Description of Artificial Sequence: Synthetic oligonucleotide
  Antisense strand to SEQ ID NO: 867350
gaugucacauaagaucgcu

SEQ ID NO: 867352 - RNA, 19 nt, Artificial Sequence
  Description of Artificial Sequence: Synthetic oligonucleotide
  Sense strand starting at position 599 of SEQ ID NO: 588471
augugacaucucuaaaguu

SEQ ID NO: 867353 - RNA, 19 nt, Artificial Sequence
  Description of Artificial Sequence: Synthetic oligonucleotide
  Antisense strand to SEQ ID NO: 867352
aacuuuagagaugucacau

SEQ ID NO: 867354 - RNA, 19 nt, Artificial Sequence
  Description of Artificial Sequence: Synthetic oligonucleotide
  Sense strand starting at position 725 of SEQ ID NO: 588471
gucuauuauuaaucagcga

SEQ ID NO: 867355 - RNA, 19 nt, Artificial Sequence
  Description of Artificial Sequence: Synthetic oligonucleotide
  Antisense strand to SEQ ID NO: 867354
ucgcugauuaauaauagac

SEQ ID NO: 867356 - RNA, 19 nt, Artificial Sequence
  Description of Artificial Sequence: Synthetic oligonucleotide
  Sense strand starting at position 729 of SEQ ID NO: 588471
auuauuaaucagcgaaaca

SEQ ID NO: 867357 - RNA, 19 nt, Artificial Sequence
  Description of Artificial Sequence: Synthetic oligonucleotide
  Antisense strand to SEQ ID NO: 867356
uguuucgcugauuaauaau

SEQ ID NO: 867358 - RNA, 19 nt, Artificial Sequence
  Description of Artificial Sequence: Synthetic oligonucleotide
  Sense strand starting at position 769 of SEQ ID NO: 588471
cagucacuagcggauuauu

SEQ ID NO: 867359 - RNA, 19 nt, Artificial Sequence
  Description of Artificial Sequence: Synthetic oligonucleotide
  Antisense strand to SEQ ID NO: 867358
aauaauccgcuagugacug

SEQ ID NO: 867360 - RNA, 19 nt, Artificial Sequence
  Description of Artificial Sequence: Synthetic oligonucleotide
  Sense strand starting at position 1084 of SEQ ID NO: 588471
ggagaagaguuggauaaga

SEQ ID NO: 867361 - RNA, 19 nt, Artificial Sequence
  Description of Artificial Sequence: Synthetic oligonucleotide
  Antisense strand to SEQ ID NO: 867360
ucuuauccaacucuucucc

SEQ ID NO: 867362 - RNA, 19 nt, Artificial Sequence
  Description of Artificial Sequence: Synthetic oligonucleotide
  Sense strand starting at position 1121 of SEQ ID NO: 588471
cagggcuuaucuguaagaa

SEQ ID NO: 867363 - RNA, 19 nt, Artificial Sequence
  Description of Artificial Sequence: Synthetic oligonucleotide
  Antisense strand to SEQ ID NO: 867362
uucuuacagauaagcccug

SEQ ID NO: 867364 - RNA, 19 nt, Artificial Sequence
  Description of Artificial Sequence: Synthetic oligonucleotide
  Sense strand starting at position 1122 of SEQ ID NO: 588471
agggcuuaucuguaagaau

SEQ ID NO: 867365 - RNA, 19 nt, Artificial Sequence
  Description of Artificial Sequence: Synthetic oligonucleotide
  Antisense strand to SEQ ID NO: 867364
auucuuacagauaagcccu

SEQ ID NO: 867366 - RNA, 19 nt, Artificial Sequence
  Description of Artificial Sequence: Synthetic oligonucleotide
  Sense strand starting at position 1664 of SEQ ID NO: 588471
aggcacaugccucacgaau

SEQ ID NO: 867367 - RNA, 19 nt, Artificial Sequence
  Description of Artificial Sequence: Synthetic oligonucleotide
  Antisense strand to SEQ ID NO: 867366
auucgugaggcaugugccu

SEQ ID NO: 867368 - RNA, 19 nt, Artificial Sequence
  Description of Artificial Sequence: Synthetic oligonucleotide
  Sense strand starting at position 2124 of SEQ ID NO: 588471
ccacuaagggcucgagaaa

SEQ ID NO: 867369 - RNA, 19 nt, Artificial Sequence
  Description of Artificial Sequence: Synthetic oligonucleotide
  Antisense strand to SEQ ID NO: 867368
uuucucgagcccuuagugg

SEQ ID NO: 867370 - RNA, 19 nt, Artificial Sequence
  Description of Artificial Sequence: Synthetic oligonucleotide
  Sense strand starting at position 2390 of SEQ ID NO: 588471
aaccucucgcgagaucuaa

SEQ ID NO: 867371 - RNA, 19 nt, Artificial Sequence
  Description of Artificial Sequence: Synthetic oligonucleotide
  Antisense strand to SEQ ID NO: 867370
uuagaucucgcgagagguu

SEQ ID NO: 867372 - RNA, 19 nt, Artificial Sequence
  Description of Artificial Sequence: Synthetic oligonucleotide
  Sense strand starting at position 2913 of SEQ ID NO: 588471
gagaacuucucgccgagag

SEQ ID NO: 867373 - RNA, 19 nt, Artificial Sequence
  Description of Artificial Sequence: Synthetic oligonucleotide
  Antisense strand to SEQ ID NO: 867372
cucucggcgagaaguucuc

SEQ ID NO: 867374 - RNA, 19 nt, Artificial Sequence
  Description of Artificial Sequence: Synthetic oligonucleotide
  Sense strand starting at position 2966 of SEQ ID NO: 588471
gacuuuccucuuggguaau

SEQ ID NO: 867375 - RNA, 19 nt, Artificial Sequence
  Description of Artificial Sequence: Synthetic oligonucleotide
  Antisense strand to SEQ ID NO: 867374
auuacccaagaggaaaguc

SEQ ID NO: 867376 - RNA, 19 nt, Artificial Sequence
  Description of Artificial Sequence: Synthetic oligonucleotide
  Sense strand starting at position 3081 of SEQ ID NO: 588471
ugcguaucgcugaauacgu

SEQ ID NO: 867377 - RNA, 19 nt, Artificial Sequence
  Description of Artificial Sequence: Synthetic oligonucleotide
  Antisense strand to SEQ ID NO: 867376
acguauucagcgauacgca

SEQ ID NO: 867378 - RNA, 19 nt, Artificial Sequence
  Description of Artificial Sequence: Synthetic oligonucleotide
  Sense strand starting at position 3132 of SEQ ID NO: 588471
ccuuguggcagugaugaaa

SEQ ID NO: 867379 - RNA, 19 nt, Artificial Sequence
  Description of Artificial Sequence: Synthetic oligonucleotide
  Antisense strand to SEQ ID NO: 867378
uuucaucacugccacaagg

SEQ ID NO: 867380 - RNA, 19 nt, Artificial Sequence
  Description of Artificial Sequence: Synthetic oligonucleotide
  Sense strand starting at position 3296 of SEQ ID NO: 588471
cggugacagcccugggaaa

SEQ ID NO: 867381 - RNA, 19 nt, Artificial Sequence
  Description of Artificial Sequence: Synthetic oligonucleotide
  Antisense strand to SEQ ID NO: 867380
uuucccagggcugucaccg

SEQ ID NO: 867382 - RNA, 19 nt, Artificial Sequence
  Description of Artificial Sequence: Synthetic oligonucleotide
  Sense strand starting at position 3297 of SEQ ID NO: 588471
ggugacagcccugggaaau

SEQ ID NO: 867383 - RNA, 19 nt, Artificial Sequence
  Description of Artificial Sequence: Synthetic oligonucleotide
  Antisense strand to SEQ ID NO: 867382
auuucccagggcugucacc

SEQ ID NO: 867384 - RNA, 19 nt, Artificial Sequence
  Description of Artificial Sequence: Synthetic oligonucleotide
  Sense strand starting at position 3407 of SEQ ID NO: 588471
gugucauaaucugcacaua

SEQ ID NO: 867385 - RNA, 19 nt, Artificial Sequence
  Description of Artificial Sequence: Synthetic oligonucleotide
  Antisense strand to SEQ ID NO: 867384
uaugugcagauuaugacac

SEQ ID NO: 867386 - RNA, 19 nt, Artificial Sequence
  Description of Artificial Sequence: Synthetic oligonucleotide
  Sense strand starting at position 3435 of SEQ ID NO: 588471
ccaccauuggccgaauaca

SEQ ID NO: 867387 - RNA, 19 nt, Artificial Sequence
  Description of Artificial Sequence: Synthetic oligonucleotide
  Antisense strand to SEQ ID NO: 867386
uguauucggccaauggugg

SEQ ID NO: 867388 - RNA, 19 nt, Artificial Sequence
  Description of Artificial Sequence: Synthetic oligonucleotide
  Sense strand starting at position 3502 of SEQ ID NO: 588471
aauguuuccuucuugggua

SEQ ID NO: 867389 - RNA, 19 nt, Artificial Sequence
  Description of Artificial Sequence: Synthetic oligonucleotide
  Antisense strand to SEQ ID NO: 867388
uacccaagaaggaaacauu

SEQ ID NO: 867390 - RNA, 19 nt, Artificial Sequence
  Description of Artificial Sequence: Synthetic oligonucleotide
  Sense strand starting at position 3587 of SEQ ID NO: 588471
cuugacugauuagaggaaa

SEQ ID NO: 867391 - RNA, 19 nt, Artificial Sequence
  Description of Artificial Sequence: Synthetic oligonucleotide
  Antisense strand to SEQ ID NO: 867390
uuuccucuaaucagucaag

SEQ ID NO: 867392 - RNA, 19 nt, Artificial Sequence
  Description of Artificial Sequence: Synthetic oligonucleotide
  Sense strand starting at position 3648 of SEQ ID NO: 588471
uauuuacauucugggagga

SEQ ID NO: 867393 - RNA, 19 nt, Artificial Sequence
  Description of Artificial Sequence: Synthetic oligonucleotide
  Antisense strand to SEQ ID NO: 867392
uccucccagaauguaaaua

SEQ ID NO: 867394 - RNA, 19 nt, Artificial Sequence
  Description of Artificial Sequence: Synthetic oligonucleotide
  Sense strand starting at position 3687 of SEQ ID NO: 588471
gaacauaauguccgggauu

SEQ ID NO: 867395 - RNA, 19 nt, Artificial Sequence
  Description of Artificial Sequence: Synthetic oligonucleotide
  Antisense strand to SEQ ID NO: 867394
aaucccggacauuauguuc

SEQ ID NO: 867396 - RNA, 19 nt, Artificial Sequence
  Description of Artificial Sequence: Synthetic oligonucleotide
  Sense strand starting at position 3689 of SEQ ID NO: 588471
acauaauguccgggauugu

SEQ ID NO: 867397 - RNA, 19 nt, Artificial Sequence
  Description of Artificial Sequence: Synthetic oligonucleotide
  Antisense strand to SEQ ID NO: 867396
acaaucccggacauuaugu

SEQ ID NO: 867398 - RNA, 19 nt, Artificial Sequence
  Description of Artificial Sequence: Synthetic oligonucleotide
  Sense strand starting at position 3720 of SEQ ID NO: 588471
aguucucuuuaagugauaa

SEQ ID NO: 867399 - RNA, 19 nt, Artificial Sequence
  Description of Artificial Sequence: Synthetic oligonucleotide
  Antisense strand to SEQ ID NO: 867398
uuaucacuuaaagagaacu

SEQ ID NO: 867400 - RNA, 19 nt, Artificial Sequence
  Description of Artificial Sequence: Synthetic oligonucleotide
  Sense strand starting at position 3767 of SEQ ID NO: 588471
aagaguguauagucuuguu

SEQ ID NO: 867401 - RNA, 19 nt, Artificial Sequence
  Description of Artificial Sequence: Synthetic oligonucleotide
  Antisense strand to SEQ ID NO: 867400
aacaagacuauacacucuu

SEQ ID NO: 867402 - RNA, 19 nt, Artificial Sequence
  Description of Artificial Sequence: Synthetic oligonucleotide
  Sense strand starting at position 3777 of SEQ ID NO: 588471
agucuuguuggguagguaa

SEQ ID NO: 867403 - RNA, 19 nt, Artificial Sequence
  Description of Artificial Sequence: Synthetic oligonucleotide
  Antisense strand to SEQ ID NO: 867402
uuaccuacccaacaagacu

SEQ ID NO: 867404 - RNA, 19 nt, Artificial Sequence
  Description of Artificial Sequence: Synthetic oligonucleotide
  Sense strand starting at position 3874 of SEQ ID NO: 588471
ggcuuaggauacuuggauu

SEQ ID NO: 867405 - RNA, 19 nt, Artificial Sequence
  Description of Artificial Sequence: Synthetic oligonucleotide
  Antisense strand to SEQ ID NO: 867404
aauccaaguauccuaagcc

SEQ ID NO: 867406 - RNA, 19 nt, Artificial Sequence
  Description of Artificial Sequence: Synthetic oligonucleotide
  Sense strand starting at position 3882 of SEQ ID NO: 588471
auacuuggauuauagagau

SEQ ID NO: 867407 - RNA, 19 nt, Artificial Sequence
  Description of Artificial Sequence: Synthetic oligonucleotide
  Antisense strand to SEQ ID NO: 867406
aucucuauaauccaaguau

SEQ ID NO: 867408 - RNA, 19 nt, Artificial Sequence
  Description of Artificial Sequence: Synthetic oligonucleotide
  Sense strand starting at position 3896 of SEQ ID NO: 588471
gagauuuaauccgccaguu

SEQ ID NO: 867409 - RNA, 19 nt, Artificial Sequence
  Description of Artificial Sequence: Synthetic oligonucleotide
  Antisense strand to SEQ ID NO: 867408
aacuggcggauuaaaucuc

SEQ ID NO: 867410 - RNA, 19 nt, Artificial Sequence
  Description of Artificial Sequence: Synthetic oligonucleotide
  Sense strand starting at position 3908 of SEQ ID NO: 588471
gccaguuaguauuugcaac

SEQ ID NO: 867411 - RNA, 19 nt, Artificial Sequence
  Description of Artificial Sequence: Synthetic oligonucleotide
  Antisense strand to SEQ ID NO: 867410
guugcaaauacuaacuggc

SEQ ID NO: 867412 - RNA, 19 nt, Artificial Sequence
  Description of Artificial Sequence: Synthetic oligonucleotide
  Sense strand starting at position 3955 of SEQ ID NO: 588471
gagacaugucacugacacu

SEQ ID NO: 867413 - RNA, 19 nt, Artificial Sequence
  Description of Artificial Sequence: Synthetic oligonucleotide
  Antisense strand to SEQ ID NO: 867412
agugucagugacaugucuc

SEQ ID NO: 867414 - RNA, 19 nt, Artificial Sequence
  Description of Artificial Sequence: Synthetic oligonucleotide
  Sense strand starting at position 117 of SEQ ID NO: 588472
agaaaucagugugaauuug

SEQ ID NO: 867415 - RNA, 19 nt, Artificial Sequence
  Description of Artificial Sequence: Synthetic oligonucleotide
  Antisense strand to SEQ ID NO: 867414
caaauucacacugauuucu

SEQ ID NO: 867416 - RNA, 19 nt, Artificial Sequence
  Description of Artificial Sequence: Synthetic oligonucleotide
  Sense strand starting at position 211 of SEQ ID NO: 588472
auucuauuccagugaguca

SEQ ID NO: 867417 - RNA, 19 nt, Artificial Sequence
  Description of Artificial Sequence: Synthetic oligonucleotide
  Antisense strand to SEQ ID NO: 867416
ugacucacuggaauagaau

SEQ ID NO: 867418 - RNA, 19 nt, Artificial Sequence
  Description of Artificial Sequence: Synthetic oligonucleotide
  Sense strand starting at position 695 of SEQ ID NO: 588472
cucagucugcccuggacau

SEQ ID NO: 867419 - RNA, 19 nt, Artificial Sequence
  Description of Artificial Sequence: Synthetic oligonucleotide
  Antisense strand to SEQ ID NO: 867418
auguccagggcagacugag

SEQ ID NO: 867420 - RNA, 19 nt, Artificial Sequence
  Description of Artificial Sequence: Synthetic oligonucleotide
  Sense strand starting at position 2039 of SEQ ID NO: 588472
ggcgaagccuguuuggacu

SEQ ID NO: 867421 - RNA, 19 nt, Artificial Sequence
  Description of Artificial Sequence: Synthetic oligonucleotide
  Antisense strand to SEQ ID NO: 867420
aguccaaacaggcuucgcc

SEQ ID NO: 867422 - RNA, 19 nt, Artificial Sequence
  Description of Artificial Sequence: Synthetic oligonucleotide
  Sense strand starting at position 2088 of SEQ ID NO: 588472
cgcuguuaacucugaggag

SEQ ID NO: 867423 - RNA, 19 nt, Artificial Sequence
  Description of Artificial Sequence: Synthetic oligonucleotide
  Antisense strand to SEQ ID NO: 867422
cuccucagaguuaacagcg

SEQ ID NO: 867424 - RNA, 19 nt, Artificial Sequence
  Description of Artificial Sequence: Synthetic oligonucleotide
  Sense strand starting at position 2147 of SEQ ID NO: 588472
gcuggaucugguugaggga

SEQ ID NO: 867425 - RNA, 19 nt, Artificial Sequence
  Description of Artificial Sequence: Synthetic oligonucleotide
  Antisense strand to SEQ ID NO: 867424
ucccucaaccagauccagc

SEQ ID NO: 867426 - RNA, 19 nt, Artificial Sequence
  Description of Artificial Sequence: Synthetic oligonucleotide
  Sense strand starting at position 2295 of SEQ ID NO: 588472
ccacucacuugcucugaga

SEQ ID NO: 867427 - RNA, 19 nt, Artificial Sequence
  Description of Artificial Sequence: Synthetic oligonucleotide
  Antisense strand to SEQ ID NO: 867426
ucucagagcaagugagugg

SEQ ID NO: 867428 - RNA, 19 nt, Artificial Sequence
  Description of Artificial Sequence: Synthetic oligonucleotide
  Sense strand starting at position 2297 of SEQ ID NO: 588472
acucacuugcucugagauu

SEQ ID NO: 867429 - RNA, 19 nt, Artificial Sequence
  Description of Artificial Sequence: Synthetic oligonucleotide
  Antisense strand to SEQ ID NO: 867428
aaucucagagcaagugagu

SEQ ID NO: 867430 - RNA, 19 nt, Artificial Sequence
  Description of Artificial Sequence: Synthetic oligonucleotide
  Sense strand starting at position 2298 of SEQ ID NO: 588472
cucacuugcucugagauug

SEQ ID NO: 867431 - RNA, 19 nt, Artificial Sequence
  Description of Artificial Sequence: Synthetic oligonucleotide
  Antisense strand to SEQ ID NO: 867430
caaucucagagcaagugag

SEQ ID NO: 867432 - RNA, 19 nt, Artificial Sequence
  Description of Artificial Sequence: Synthetic oligonucleotide
  Sense strand starting at position 2309 of SEQ ID NO: 588472
ugagauugugcacaaguua

SEQ ID NO: 867433 - RNA, 19 nt, Artificial Sequence
  Description of Artificial Sequence: Synthetic oligonucleotide
  Antisense strand to SEQ ID NO: 867432
uaacuugugcacaaucuca

SEQ ID NO: 867434 - RNA, 19 nt, Artificial Sequence
  Description of Artificial Sequence: Synthetic oligonucleotide
  Sense strand starting at position 2371 of SEQ ID NO: 588472
aacgguuccuuccucagua

SEQ ID NO: 867435 - RNA, 19 nt, Artificial Sequence
  Description of Artificial Sequence: Synthetic oligonucleotide
  Antisense strand to SEQ ID NO: 867434
uacugaggaaggaaccguu

SEQ ID NO: 867436 - RNA, 19 nt, Artificial Sequence
  Description of Artificial Sequence: Synthetic oligonucleotide
  Sense strand starting at position 2387 of SEQ ID NO: 588472
guaggguguuccgaggacu

SEQ ID NO: 867437 - RNA, 19 nt, Artificial Sequence
  Description of Artificial Sequence: Synthetic oligonucleotide
  Antisense strand to SEQ ID NO: 867436
aguccucggaacacccuac

SEQ ID NO: 867438 - RNA, 19 nt, Artificial Sequence
  Description of Artificial Sequence: Synthetic oligonucleotide
  Sense strand starting at position 2390 of SEQ ID NO: 588472
ggguguuccgaggacuaaa

SEQ ID NO: 867439 - RNA, 19 nt, Artificial Sequence
  Description of Artificial Sequence: Synthetic oligonucleotide
  Antisense strand to SEQ ID NO: 867438
uuuaguccucggaacaccc

SEQ ID NO: 867440 - RNA, 19 nt, Artificial Sequence
  Description of Artificial Sequence: Synthetic oligonucleotide
  Sense strand starting at position 2409 of SEQ ID NO: 588472
ggaguugagaugcguaaag

SEQ ID NO: 867441 - RNA, 19 nt, Artificial Sequence
  Description of Artificial Sequence: Synthetic oligonucleotide
  Antisense strand to SEQ ID NO: 867440
cuuuacgcaucucaacucc

SEQ ID NO: 867442 - RNA, 19 nt, Artificial Sequence
  Description of Artificial Sequence: Synthetic oligonucleotide
  Sense strand starting at position 2411 of SEQ ID NO: 588472
aguugagaugcguaaagca

SEQ ID NO: 867443 - RNA, 19 nt, Artificial Sequence
  Description of Artificial Sequence: Synthetic oligonucleotide
  Antisense strand to SEQ ID NO: 867442
ugcuuuacgcaucucaacu

SEQ ID NO: 867444 - RNA, 19 nt, Artificial Sequence
  Description of Artificial Sequence: Synthetic oligonucleotide
  Sense strand starting at position 2439 of SEQ ID NO: 588472
gcucccgucauguuugcaa

SEQ ID NO: 867445 - RNA, 19 nt, Artificial Sequence
  Description of Artificial Sequence: Synthetic oligonucleotide
  Antisense strand to SEQ ID NO: 867444
uugcaaacaugacgggagc

SEQ ID NO: 867446 - RNA, 19 nt, Artificial Sequence
  Description of Artificial Sequence: Synthetic oligonucleotide
  Sense strand starting at position 2450 of SEQ ID NO: 588472
guuugcaacugauauuacu

SEQ ID NO: 867447 - RNA, 19 nt, Artificial Sequence
  Description of Artificial Sequence: Synthetic oligonucleotide
  Antisense strand to SEQ ID NO: 867446
aguaauaucaguugcaaac

SEQ ID NO: 867448 - RNA, 19 nt, Artificial Sequence
  Description of Artificial Sequence: Synthetic oligonucleotide
  Sense strand starting at position 2552 of SEQ ID NO: 588472
ugagucaggcucugucaga

SEQ ID NO: 867449 - RNA, 19 nt, Artificial Sequence
  Description of Artificial Sequence: Synthetic oligonucleotide
  Antisense strand to SEQ ID NO: 867448
ucugacagagccugacuca

SEQ ID NO: 867450 - RNA, 19 nt, Artificial Sequence
  Description of Artificial Sequence: Synthetic oligonucleotide
  Sense strand starting at position 2553 of SEQ ID NO: 588472
gagucaggcucugucagau

SEQ ID NO: 867451 - RNA, 19 nt, Artificial Sequence
  Description of Artificial Sequence: Synthetic oligonucleotide
  Antisense strand to SEQ ID NO: 867450
aucugacagagccugacuc

SEQ ID NO: 867452 - RNA, 19 nt, Artificial Sequence
  Description of Artificial Sequence: Synthetic oligonucleotide
  Sense strand starting at position 2559 of SEQ ID NO: 588472
ggcucugucagaugagcca

SEQ ID NO: 867453 - RNA, 19 nt, Artificial Sequence
  Description of Artificial Sequence: Synthetic oligonucleotide
  Antisense strand to SEQ ID NO: 867452
uggcucaucugacagagcc

SEQ ID NO: 867454 - RNA, 19 nt, Artificial Sequence
  Description of Artificial Sequence: Synthetic oligonucleotide
  Sense strand starting at position 2578 of SEQ ID NO: 588472
ucccgagcucaaugagcuu

SEQ ID NO: 867455 - RNA, 19 nt, Artificial Sequence
  Description of Artificial Sequence: Synthetic oligonucleotide
  Antisense strand to SEQ ID NO: 867454
aagcucauugagcucggga

SEQ ID NO: 867456 - RNA, 19 nt, Artificial Sequence
  Description of Artificial Sequence: Synthetic oligonucleotide
  Sense strand starting at position 2584 of SEQ ID NO: 588472
gcucaaugagcuugagaag

SEQ ID NO: 867457 - RNA, 19 nt, Artificial Sequence
  Description of Artificial Sequence: Synthetic oligonucleotide
  Antisense strand to SEQ ID NO: 867456
cuucucaagcucauugagc

SEQ ID NO: 867458 - RNA, 19 nt, Artificial Sequence
  Description of Artificial Sequence: Synthetic oligonucleotide
  Sense strand starting at position 2773 of SEQ ID NO: 588472
agucucaacuggccauaaa

SEQ ID NO: 867459 - RNA, 19 nt, Artificial Sequence
  Description of Artificial Sequence: Synthetic oligonucleotide
  Antisense strand to SEQ ID NO: 867458
uuuauggccaguugagacu

SEQ ID NO: 867460 - RNA, 19 nt, Artificial Sequence
  Description of Artificial Sequence: Synthetic oligonucleotide
  Sense strand starting at position 2774 of SEQ ID NO: 588472
gucucaacuggccauaaau

SEQ ID NO: 867461 - RNA, 19 nt, Artificial Sequence
  Description of Artificial Sequence: Synthetic oligonucleotide
  Antisense strand to SEQ ID NO: 867460
auuuauggccaguugagac

SEQ ID NO: 867462 - RNA, 19 nt, Artificial Sequence
  Description of Artificial Sequence: Synthetic oligonucleotide
  Sense strand starting at position 2828 of SEQ ID NO: 588472
agcagugaugagugccauu

SEQ ID NO: 867463 - RNA, 19 nt, Artificial Sequence
  Description of Artificial Sequence: Synthetic oligonucleotide
  Antisense strand to SEQ ID NO: 867462
aauggcacucaucacugcu

SEQ ID NO: 867464 - RNA, 19 nt, Artificial Sequence
  Description of Artificial Sequence: Synthetic oligonucleotide
  Sense strand starting at position 2874 of SEQ ID NO: 588472
gcaggaucugagcaguacu

SEQ ID NO: 867465 - RNA, 19 nt, Artificial Sequence
  Description of Artificial Sequence: Synthetic oligonucleotide
  Antisense strand to SEQ ID NO: 867464
aguacugcucagauccugc

SEQ ID NO: 867466 - RNA, 19 nt, Artificial Sequence
  Description of Artificial Sequence: Synthetic oligonucleotide
  Sense strand starting at position 3159 of SEQ ID NO: 588472
ggaggaaugucugcagaca

SEQ ID NO: 867467 - RNA, 19 nt, Artificial Sequence
  Description of Artificial Sequence: Synthetic oligonucleotide
  Antisense strand to SEQ ID NO: 867466
ugucugcagacauuccucc

SEQ ID NO: 867468 - RNA, 19 nt, Artificial Sequence
  Description of Artificial Sequence: Synthetic oligonucleotide
  Sense strand starting at position 3182 of SEQ ID NO: 588472
aaggcugguucucugaguu

SEQ ID NO: 867469 - RNA, 19 nt, Artificial Sequence
  Description of Artificial Sequence: Synthetic oligonucleotide
  Antisense strand to SEQ ID NO: 867468
aacucagagaaccagccuu

SEQ ID NO: 867470 - RNA, 19 nt, Artificial Sequence
  Description of Artificial Sequence: Synthetic oligonucleotide
  Sense strand starting at position 3216 of SEQ ID NO: 588472
cccugugauguugggcaaa

SEQ ID NO: 867471 - RNA, 19 nt, Artificial Sequence
  Description of Artificial Sequence: Synthetic oligonucleotide
  Antisense strand to SEQ ID NO: 867470
uuugcccaacaucacaggg

SEQ ID NO: 867472 - RNA, 19 nt, Artificial Sequence
  Description of Artificial Sequence: Synthetic oligonucleotide
  Sense strand starting at position 3252 of SEQ ID NO: 588472
gccugucuccucugcagaa

SEQ ID NO: 867473 - RNA, 19 nt, Artificial Sequence
  Description of Artificial Sequence: Synthetic oligonucleotide
  Antisense strand to SEQ ID NO: 867472
uucugcagaggagacaggc

SEQ ID NO: 867474 - RNA, 19 nt, Artificial Sequence
  Description of Artificial Sequence: Synthetic oligonucleotide
  Sense strand starting at position 3264 of SEQ ID NO: 588472
ugcagaacucccggagcaa

SEQ ID NO: 867475 - RNA, 19 nt, Artificial Sequence
  Description of Artificial Sequence: Synthetic oligonucleotide
  Antisense strand to SEQ ID NO: 867474
uugcuccgggaguucugca

SEQ ID NO: 867476 - RNA, 19 nt, Artificial Sequence
  Description of Artificial Sequence: Synthetic oligonucleotide
  Sense strand starting at position 3428 of SEQ ID NO: 588472
ucuaaugaauccuggcacu

SEQ ID NO: 867477 - RNA, 19 nt, Artificial Sequence
  Description of Artificial Sequence: Synthetic oligonucleotide
  Antisense strand to SEQ ID NO: 867476
agugccaggauucauuaga

SEQ ID NO: 867478 - RNA, 19 nt, Artificial Sequence
  Description of Artificial Sequence: Synthetic oligonucleotide
  Sense strand starting at position 3533 of SEQ ID NO: 588472
ggcugccuucccuagggaa

SEQ ID NO: 867479 - RNA, 19 nt, Artificial Sequence
  Description of Artificial Sequence: Synthetic oligonucleotide
  Antisense strand to SEQ ID NO: 867478
uucccuagggaaggcagcc

SEQ ID NO: 867480 - RNA, 19 nt, Artificial Sequence
  Description of Artificial Sequence: Synthetic oligonucleotide
  Sense strand starting at position 3535 of SEQ ID NO: 588472
cugccuucccuagggaagu

SEQ ID NO: 867481 - RNA, 19 nt, Artificial Sequence
  Description of Artificial Sequence: Synthetic oligonucleotide
  Antisense strand to SEQ ID NO: 867480
acuucccuagggaaggcag

SEQ ID NO: 867482 - RNA, 19 nt, Artificial Sequence
  Description of Artificial Sequence: Synthetic oligonucleotide
  Sense strand starting at position 3557 of SEQ ID NO: 588472
ggagggaagucuguuguga

SEQ ID NO: 867483 - RNA, 19 nt, Artificial Sequence
  Description of Artificial Sequence: Synthetic oligonucleotide
  Antisense strand to SEQ ID NO: 867482
ucacaacagacuucccucc

SEQ ID NO: 867484 - RNA, 19 nt, Artificial Sequence
  Description of Artificial Sequence: Synthetic oligonucleotide
  Sense strand starting at position 3561 of SEQ ID NO: 588472
ggaagucuguugugaggag

SEQ ID NO: 867485 - RNA, 19 nt, Artificial Sequence
  Description of Artificial Sequence: Synthetic oligonucleotide
  Antisense strand to SEQ ID NO: 867484
cuccucacaacagacuucc

SEQ ID NO: 867486 - RNA, 19 nt, Artificial Sequence
  Description of Artificial Sequence: Synthetic oligonucleotide
  Sense strand starting at position 3774 of SEQ ID NO: 588472
gggaaacacuugccuaagu

SEQ ID NO: 867487 - RNA, 19 nt, Artificial Sequence
  Description of Artificial Sequence: Synthetic oligonucleotide
  Antisense strand to SEQ ID NO: 867486
acuuaggcaaguguuuccc

SEQ ID NO: 867488 - RNA, 19 nt, Artificial Sequence
  Description of Artificial Sequence: Synthetic oligonucleotide
  Sense strand starting at position 3775 of SEQ ID NO: 588472
ggaaacacuugccuaaguu

SEQ ID NO: 867489 - RNA, 19 nt, Artificial Sequence
  Description of Artificial Sequence: Synthetic oligonucleotide
  Antisense strand to SEQ ID NO: 867488
aacuuaggcaaguguuucc

SEQ ID NO: 867490 - RNA, 19 nt, Artificial Sequence
  Description of Artificial Sequence: Synthetic oligonucleotide
  Sense strand starting at position 3799 of SEQ ID NO: 588472
agccucgugcgcuaaucua

SEQ ID NO: 867491 - RNA, 19 nt, Artificial Sequence
  Description of Artificial Sequence: Synthetic oligonucleotide
  Antisense strand to SEQ ID NO: 867490
uagauuagcgcacgaggcu

SEQ ID NO: 867492 - RNA, 19 nt, Artificial Sequence
  Description of Artificial Sequence: Synthetic oligonucleotide
  Sense strand starting at position 3806 of SEQ ID NO: 588472
ugcgcuaaucuauacagca

SEQ ID NO: 867493 - RNA, 19 nt, Artificial Sequence
  Description of Artificial Sequence: Synthetic oligonucleotide
  Antisense strand to SEQ ID NO: 867492
ugcuguauagauuagcgca

SEQ ID NO: 867494 - RNA, 19 nt, Artificial Sequence
  Description of Artificial Sequence: Synthetic oligonucleotide
  Sense strand starting at position 282 of SEQ ID NO: 588473
ugucucaugccauauguga

SEQ ID NO: 867495 - RNA, 19 nt, Artificial Sequence
  Description of Artificial Sequence: Synthetic oligonucleotide
  Antisense strand to SEQ ID NO: 867494
ucacauauggcaugagaca

SEQ ID NO: 867496 - RNA, 19 nt, Artificial Sequence
  Description of Artificial Sequence: Synthetic oligonucleotide
  Sense strand starting at position 289 of SEQ ID NO: 588473
ugccauaugugaguuauac

SEQ ID NO: 867497 - RNA, 19 nt, Artificial Sequence
  Description of Artificial Sequence: Synthetic oligonucleotide
  Antisense strand to SEQ ID NO: 867496
guauaacucacauauggca

SEQ ID NO: 867498 - RNA, 19 nt, Artificial Sequence
  Description of Artificial Sequence: Synthetic oligonucleotide
  Sense strand starting at position 372 of SEQ ID NO: 588473
gcccuauaagcauauuaga

SEQ ID NO: 867499 - RNA, 19 nt, Artificial Sequence
  Description of Artificial Sequence: Synthetic oligonucleotide
  Antisense strand to SEQ ID NO: 867498
ucuaauaugcuuauagggc

SEQ ID NO: 867500 - RNA, 19 nt, Artificial Sequence
  Description of Artificial Sequence: Synthetic oligonucleotide
  Sense strand starting at position 483 of SEQ ID NO: 588473
guguccaaauuugaaauau

SEQ ID NO: 867501 - RNA, 19 nt, Artificial Sequence
  Description of Artificial Sequence: Synthetic oligonucleotide
  Antisense strand to SEQ ID NO: 867500
auauuucaaauuuggacac

SEQ ID NO: 867502 - RNA, 19 nt, Artificial Sequence
  Description of Artificial Sequence: Synthetic oligonucleotide
  Sense strand starting at position 581 of SEQ ID NO: 588473
cagucauagggcugaaguu

SEQ ID NO: 867503 - RNA, 19 nt, Artificial Sequence
  Description of Artificial Sequence: Synthetic oligonucleotide
  Antisense strand to SEQ ID NO: 867502
aacuucagcccuaugacug

SEQ ID NO: 867504 - RNA, 19 nt, Artificial Sequence
  Description of Artificial Sequence: Synthetic oligonucleotide
  Sense strand starting at position 607 of SEQ ID NO: 588473
ggcguuccaguagauaaau

SEQ ID NO: 867505 - RNA, 19 nt, Artificial Sequence
  Description of Artificial Sequence: Synthetic oligonucleotide
  Antisense strand to SEQ ID NO: 867504
auuuaucuacuggaacgcc

SEQ ID NO: 867506 - RNA, 19 nt, Artificial Sequence
  Description of Artificial Sequence: Synthetic oligonucleotide
  Sense strand starting at position 702 of SEQ ID NO: 588473
uagaguuaugcguugccuu

SEQ ID NO: 867507 - RNA, 19 nt, Artificial Sequence
  Description of Artificial Sequence: Synthetic oligonucleotide
  Antisense strand to SEQ ID NO: 867506
aaggcaacgcauaacucua

SEQ ID NO: 867508 - RNA, 19 nt, Artificial Sequence
  Description of Artificial Sequence: Synthetic oligonucleotide
  Sense strand starting at position 704 of SEQ ID NO: 588473
gaguuaugcguugccuuga

SEQ ID NO: 867509 - RNA, 19 nt, Artificial Sequence
  Description of Artificial Sequence: Synthetic oligonucleotide
  Antisense strand to SEQ ID NO: 867508
ucaaggcaacgcauaacuc

SEQ ID NO: 867510 - RNA, 19 nt, Artificial Sequence
  Description of Artificial Sequence: Synthetic oligonucleotide
  Sense strand starting at position 891 of SEQ ID NO: 588473
uuuguauuagcaggaaacu

SEQ ID NO: 867511 - RNA, 19 nt, Artificial Sequence
  Description of Artificial Sequence: Synthetic oligonucleotide
  Antisense strand to SEQ ID NO: 867510
aguuuccugcuaauacaaa

SEQ ID NO: 867512 - RNA, 19 nt, Artificial Sequence
  Description of Artificial Sequence: Synthetic oligonucleotide
  Sense strand starting at position 943 of SEQ ID NO: 588473
gaggauaagugcuuagcaa

SEQ ID NO: 867513 - RNA, 19 nt, Artificial Sequence
  Description of Artificial Sequence: Synthetic oligonucleotide
  Antisense strand to SEQ ID NO: 867512
uugcuaagcacuuauccuc

SEQ ID NO: 867514 - RNA, 19 nt, Artificial Sequence
  Description of Artificial Sequence: Synthetic oligonucleotide
  Sense strand starting at position 944 of SEQ ID NO: 588473
aggauaagugcuuagcaag

SEQ ID NO: 867515 - RNA, 19 nt, Artificial Sequence
  Description of Artificial Sequence: Synthetic oligonucleotide
  Antisense strand to SEQ ID NO: 867514
cuugcuaagcacuuauccu

SEQ ID NO: 867516 - RNA, 19 nt, Artificial Sequence
  Description of Artificial Sequence: Synthetic oligonucleotide
  Sense strand starting at position 1073 of SEQ ID NO: 588473
ggaauuacuucuuugcucu

SEQ ID NO: 867517 - RNA, 19 nt, Artificial Sequence
  Description of Artificial Sequence: Synthetic oligonucleotide
  Antisense strand to SEQ ID NO: 867516
agagcaaagaaguaauucc

SEQ ID NO: 867518 - RNA, 19 nt, Artificial Sequence
  Description of Artificial Sequence: Synthetic oligonucleotide
  Sense strand starting at position 1809 of SEQ ID NO: 588473
ucccauugaccgcaagaaa

SEQ ID NO: 867519 - RNA, 19 nt, Artificial Sequence
  Description of Artificial Sequence: Synthetic oligonucleotide
  Antisense strand to SEQ ID NO: 867518
uuucuugcggucaauggga

SEQ ID NO: 867520 - RNA, 19 nt, Artificial Sequence
  Description of Artificial Sequence: Synthetic oligonucleotide
  Sense strand starting at position 2036 of SEQ ID NO: 588473
gaucuucuuccaggaguca

SEQ ID NO: 867521 - RNA, 19 nt, Artificial Sequence
  Description of Artificial Sequence: Synthetic oligonucleotide
  Antisense strand to SEQ ID NO: 867520
ugacuccuggaagaagauc

SEQ ID NO: 867522 - RNA, 19 nt, Artificial Sequence
  Description of Artificial Sequence: Synthetic oligonucleotide
  Sense strand starting at position 2119 of SEQ ID NO: 588473
cucacaggccuuugaauaa

SEQ ID NO: 867523 - RNA, 19 nt, Artificial Sequence
  Description of Artificial Sequence: Synthetic oligonucleotide
  Antisense strand to SEQ ID NO: 867522
uuauucaaaggccugugag

SEQ ID NO: 867524 - RNA, 19 nt, Artificial Sequence
  Description of Artificial Sequence: Synthetic oligonucleotide
  Sense strand starting at position 2240 of SEQ ID NO: 588473
cccugaauuugggaaaguu

SEQ ID NO: 867525 - RNA, 19 nt, Artificial Sequence
  Description of Artificial Sequence: Synthetic oligonucleotide
  Antisense strand to SEQ ID NO: 867524
aacuuucccaaauucaggg

SEQ ID NO: 867526 - RNA, 19 nt, Artificial Sequence
  Description of Artificial Sequence: Synthetic oligonucleotide
  Sense strand starting at position 2267 of SEQ ID NO: 588473
ugcagaauccaaggcaauu

SEQ ID NO: 867527 - RNA, 19 nt, Artificial Sequence
  Description of Artificial Sequence: Synthetic oligonucleotide
  Antisense strand to SEQ ID NO: 867526
aauugccuuggauucugca

SEQ ID NO: 867528 - RNA, 19 nt, Artificial Sequence
  Description of Artificial Sequence: Synthetic oligonucleotide
  Sense strand starting at position 2343 of SEQ ID NO: 588473
gcauuaggaaguuaauagu

SEQ ID NO: 867529 - RNA, 19 nt, Artificial Sequence
  Description of Artificial Sequence: Synthetic oligonucleotide
  Antisense strand to SEQ ID NO: 867528
acuauuaacuuccuaaugc

SEQ ID NO: 867530 - RNA, 19 nt, Artificial Sequence
  Description of Artificial Sequence: Synthetic oligonucleotide
  Sense strand starting at position 2352 of SEQ ID NO: 588473
aguuaauagugaccacaga

SEQ ID NO: 867531 - RNA, 19 nt, Artificial Sequence
  Description of Artificial Sequence: Synthetic oligonucleotide
  Antisense strand to SEQ ID NO: 867530
ucuguggucacuauuaacu

SEQ ID NO: 867532 - RNA, 19 nt, Artificial Sequence
  Description of Artificial Sequence: Synthetic oligonucleotide
  Sense strand starting at position 2421 of SEQ ID NO: 588473
gcagauaaauaagauaaca

SEQ ID NO: 867533 - RNA, 19 nt, Artificial Sequence
  Description of Artificial Sequence: Synthetic oligonucleotide
  Antisense strand to SEQ ID NO: 867532
uguuaucuuauuuaucugc

SEQ ID NO: 867534 - RNA, 19 nt, Artificial Sequence
  Description of Artificial Sequence: Synthetic oligonucleotide
  Sense strand starting at position 2500 of SEQ ID NO: 588473
gucacaugaagucaagagu

SEQ ID NO: 867535 - RNA, 19 nt, Artificial Sequence
  Description of Artificial Sequence: Synthetic oligonucleotide
  Antisense strand to SEQ ID NO: 867534
acucuugacuucaugugac

SEQ ID NO: 867536 - RNA, 19 nt, Artificial Sequence
  Description of Artificial Sequence: Synthetic oligonucleotide
  Sense strand starting at position 2760 of SEQ ID NO: 588473
gcacuauugaaugaugugu

SEQ ID NO: 867537 - RNA, 19 nt, Artificial Sequence
  Description of Artificial Sequence: Synthetic oligonucleotide
  Antisense strand to SEQ ID NO: 867536
acacaucauucaauagugc

SEQ ID NO: 867538 - RNA, 19 nt, Artificial Sequence
  Description of Artificial Sequence: Synthetic oligonucleotide
  Sense strand starting at position 2768 of SEQ ID NO: 588473
gaaugauguguuugaguag

SEQ ID NO: 867539 - RNA, 19 nt, Artificial Sequence
  Description of Artificial Sequence: Synthetic oligonucleotide
  Antisense strand to SEQ ID NO: 867538
cuacucaaacacaucauuc

SEQ ID NO: 867540 - RNA, 19 nt, Artificial Sequence
  Description of Artificial Sequence: Synthetic oligonucleotide
  Sense strand starting at position 2871 of SEQ ID NO: 588473
gagccagcuccgcaaagau

SEQ ID NO: 867541 - RNA, 19 nt, Artificial Sequence
  Description of Artificial Sequence: Synthetic oligonucleotide
  Antisense strand to SEQ ID NO: 867540
aucuuugcggagcuggcuc

SEQ ID NO: 867542 - RNA, 19 nt, Artificial Sequence
  Description of Artificial Sequence: Synthetic oligonucleotide
  Sense strand starting at position 2921 of SEQ ID NO: 588473
aguacaaugccugaaguga

SEQ ID NO: 867543 - RNA, 19 nt, Artificial Sequence
  Description of Artificial Sequence: Synthetic oligonucleotide
  Antisense strand to SEQ ID NO: 867542
ucacuucaggcauuguacu

SEQ ID NO: 867544 - RNA, 19 nt, Artificial Sequence
  Description of Artificial Sequence: Synthetic oligonucleotide
  Sense strand starting at position 2945 of SEQ ID NO: 588473
auccacguauuugaggaau

SEQ ID NO: 867545 - RNA, 19 nt, Artificial Sequence
  Description of Artificial Sequence: Synthetic oligonucleotide
  Antisense strand to SEQ ID NO: 867544
auuccucaaauacguggau

SEQ ID NO: 867546 - RNA, 19 nt, Artificial Sequence
  Description of Artificial Sequence: Synthetic oligonucleotide
  Sense strand starting at position 2947 of SEQ ID NO: 588473
ccacguauuugaggaauaa

SEQ ID NO: 867547 - RNA, 19 nt, Artificial Sequence
  Description of Artificial Sequence: Synthetic oligonucleotide
  Antisense strand to SEQ ID NO: 867546
uuauuccucaaauacgugg

SEQ ID NO: 867548 - RNA, 19 nt, Artificial Sequence
  Description of Artificial Sequence: Synthetic oligonucleotide
  Sense strand starting at position 3093 of SEQ ID NO: 588473
ggagcaugccuguaaucuu

SEQ ID NO: 867549 - RNA, 19 nt, Artificial Sequence
  Description of Artificial Sequence: Synthetic oligonucleotide
  Antisense strand to SEQ ID NO: 867548
aagauuacaggcaugcucc

SEQ ID NO: 867550 - RNA, 19 nt, Artificial Sequence
  Description of Artificial Sequence: Synthetic oligonucleotide
  Sense strand starting at position 3360 of SEQ ID NO: 588473
ugcacagauuuaggaaaca

SEQ ID NO: 867551 - RNA, 19 nt, Artificial Sequence
  Description of Artificial Sequence: Synthetic oligonucleotide
  Antisense strand to SEQ ID NO: 867550
uguuuccuaaaucugugca

SEQ ID NO: 867552 - RNA, 19 nt, Artificial Sequence
  Description of Artificial Sequence: Synthetic oligonucleotide
  Sense strand starting at position 3378 of SEQ ID NO: 588473
agaguucuauacucugaau

SEQ ID NO: 867553 - RNA, 19 nt, Artificial Sequence
  Description of Artificial Sequence: Synthetic oligonucleotide
  Antisense strand to SEQ ID NO: 867552
auucagaguauagaacucu

SEQ ID NO: 867554 - RNA, 19 nt, Artificial Sequence
  Description of Artificial Sequence: Synthetic oligonucleotide
  Sense strand starting at position 3460 of SEQ ID NO: 588473
gggugugacaacugaagca

SEQ ID NO: 867555 - RNA, 19 nt, Artificial Sequence
  Description of Artificial Sequence: Synthetic oligonucleotide
  Antisense strand to SEQ ID NO: 867554
ugcuucaguugucacaccc

SEQ ID NO: 867556 - RNA, 19 nt, Artificial Sequence
  Description of Artificial Sequence: Synthetic oligonucleotide
  Sense strand starting at position 3495 of SEQ ID NO: 588473
ugaagucaucccugcagag

SEQ ID NO: 867557 - RNA, 19 nt, Artificial Sequence
  Description of Artificial Sequence: Synthetic oligonucleotide
  Antisense strand to SEQ ID NO: 867556
cucugcagggaugacuuca

SEQ ID NO: 867558 - RNA, 19 nt, Artificial Sequence
  Description of Artificial Sequence: Synthetic oligonucleotide
  Sense strand starting at position 3609 of SEQ ID NO: 588473
agcagaauugcuggccaga

SEQ ID NO: 867559 - RNA, 19 nt, Artificial Sequence
  Description of Artificial Sequence: Synthetic oligonucleotide
  Antisense strand to SEQ ID NO: 867558
ucuggccagcaauucugcu

SEQ ID NO: 867560 - RNA, 19 nt, Artificial Sequence
  Description of Artificial Sequence: Synthetic oligonucleotide
  Sense strand starting at position 3611 of SEQ ID NO: 588473
cagaauugcuggccagaac

SEQ ID NO: 867561 - RNA, 19 nt, Artificial Sequence
  Description of Artificial Sequence: Synthetic oligonucleotide
  Antisense strand to SEQ ID NO: 867560
guucuggccagcaauucug

SEQ ID NO: 867562 - RNA, 19 nt, Artificial Sequence
  Description of Artificial Sequence: Synthetic oligonucleotide
  Sense strand starting at position 3612 of SEQ ID NO: 588473
agaauugcuggccagaaca

SEQ ID NO: 867563 - RNA, 19 nt, Artificial Sequence
  Description of Artificial Sequence: Synthetic oligonucleotide
  Antisense strand to SEQ ID NO: 867562
uguucuggccagcaauucu

SEQ ID NO: 867564 - RNA, 19 nt, Artificial Sequence
  Description of Artificial Sequence: Synthetic oligonucleotide
  Sense strand starting at position 3642 of SEQ ID NO: 588473
gucuuuaugcuagauauug

SEQ ID NO: 867565 - RNA, 19 nt, Artificial Sequence
  Description of Artificial Sequence: Synthetic oligonucleotide
  Antisense strand to SEQ ID NO: 867564
caauaucuagcauaaagac

SEQ ID NO: 867566 - RNA, 19 nt, Artificial Sequence
  Description of Artificial Sequence: Synthetic oligonucleotide
  Sense strand starting at position 3720 of SEQ ID NO: 588473
cugccuuagcaguaaagca

SEQ ID NO: 867567 - RNA, 19 nt, Artificial Sequence
  Description of Artificial Sequence: Synthetic oligonucleotide
  Antisense strand to SEQ ID NO: 867566
ugcuuuacugcuaaggcag

SEQ ID NO: 867568 - RNA, 19 nt, Artificial Sequence
  Description of Artificial Sequence: Synthetic oligonucleotide
  Sense strand starting at position 3947 of SEQ ID NO: 588473
ucaggacucugauuaguca

SEQ ID NO: 867569 - RNA, 19 nt, Artificial Sequence
  Description of Artificial Sequence: Synthetic oligonucleotide
  Antisense strand to SEQ ID NO: 867568
ugacuaaucagaguccuga

SEQ ID NO: 867570 - RNA, 19 nt, Artificial Sequence
  Description of Artificial Sequence: Synthetic oligonucleotide
  Sense strand starting at position 3950 of SEQ ID NO: 588473
ggacucugauuagucagaa

SEQ ID NO: 867571 - RNA, 19 nt, Artificial Sequence
  Description of Artificial Sequence: Synthetic oligonucleotide
  Antisense strand to SEQ ID NO: 867570
uucugacuaaucagagucc

SEQ ID NO: 867572 - RNA, 19 nt, Artificial Sequence
  Description of Artificial Sequence: Synthetic oligonucleotide
  Sense strand starting at position 3951 of SEQ ID NO: 588473
gacucugauuagucagaaa

SEQ ID NO: 867573 - RNA, 19 nt, Artificial Sequence
  Description of Artificial Sequence: Synthetic oligonucleotide
  Antisense strand to SEQ ID NO: 867572
uuucugacuaaucagaguc

SEQ ID NO: 867574 - RNA, 19 nt, Artificial Sequence
  Description of Artificial Sequence: Synthetic oligonucleotide
  Sense strand starting at position 10 of SEQ ID NO: 588474
cuuauauaugugcaaauag

SEQ ID NO: 867575 - RNA, 19 nt, Artificial Sequence
  Description of Artificial Sequence: Synthetic oligonucleotide
  Antisense strand to SEQ ID NO: 867574
cuauuugcacauauauaag

SEQ ID NO: 867576 - RNA, 19 nt, Artificial Sequence
  Description of Artificial Sequence: Synthetic oligonucleotide
  Sense strand starting at position 82 of SEQ ID NO: 588474
acagucuaguauccaacaa

SEQ ID NO: 867577 - RNA, 19 nt, Artificial Sequence
  Description of Artificial Sequence: Synthetic oligonucleotide
  Antisense strand to SEQ ID NO: 867576
uuguuggauacuagacugu

SEQ ID NO: 867578 - RNA, 19 nt, Artificial Sequence
  Description of Artificial Sequence: Synthetic oligonucleotide
  Sense strand starting at position 132 of SEQ ID NO: 588474
ucauauacagguugagcaa

SEQ ID NO: 867579 - RNA, 19 nt, Artificial Sequence
  Description of Artificial Sequence: Synthetic oligonucleotide
  Antisense strand to SEQ ID NO: 867578
uugcucaaccuguauauga

SEQ ID NO: 867580 - RNA, 19 nt, Artificial Sequence
  Description of Artificial Sequence: Synthetic oligonucleotide
  Sense strand starting at position 217 of SEQ ID NO: 588474
gcuguuacagaauauuaug

SEQ ID NO: 867581 - RNA, 19 nt, Artificial Sequence
  Description of Artificial Sequence: Synthetic oligonucleotide
  Antisense strand to SEQ ID NO: 867580
cauaauauucuguaacagc

SEQ ID NO: 867582 - RNA, 19 nt, Artificial Sequence
  Description of Artificial Sequence: Synthetic oligonucleotide
  Sense strand starting at position 639 of SEQ ID NO: 588474
ggaacaucagccugggagu

SEQ ID NO: 867583 - RNA, 19 nt, Artificial Sequence
  Description of Artificial Sequence: Synthetic oligonucleotide
  Antisense strand to SEQ ID NO: 867582
acucccaggcugauguucc

SEQ ID NO: 867584 - RNA, 19 nt, Artificial Sequence
  Description of Artificial Sequence: Synthetic oligonucleotide
  Sense strand starting at position 640 of SEQ ID NO: 588474
gaacaucagccugggaguu

SEQ ID NO: 867585 - RNA, 19 nt, Artificial Sequence
  Description of Artificial Sequence: Synthetic oligonucleotide
  Antisense strand to SEQ ID NO: 867584
aacucccaggcugauguuc

SEQ ID NO: 867586 - RNA, 19 nt, Artificial Sequence
  Description of Artificial Sequence: Synthetic oligonucleotide
  Sense strand starting at position 819 of SEQ ID NO: 588474
uguauccggauguauacaa

SEQ ID NO: 867587 - RNA, 19 nt, Artificial Sequence
  Description of Artificial Sequence: Synthetic oligonucleotide
  Antisense strand to SEQ ID NO: 867586
uuguauacauccggauaca

SEQ ID NO: 867588 - RNA, 19 nt, Artificial Sequence
  Description of Artificial Sequence: Synthetic oligonucleotide
  Sense strand starting at position 855 of SEQ ID NO: 588474
acgaaauagaaacguaagu

SEQ ID NO: 867589 - RNA, 19 nt, Artificial Sequence
  Description of Artificial Sequence: Synthetic oligonucleotide
  Antisense strand to SEQ ID NO: 867588
acuuacguuucuauuucgu

SEQ ID NO: 867590 - RNA, 19 nt, Artificial Sequence
  Description of Artificial Sequence: Synthetic oligonucleotide
  Sense strand starting at position 948 of SEQ ID NO: 588474
ggcuauaugccugcauguu

SEQ ID NO: 867591 - RNA, 19 nt, Artificial Sequence
  Description of Artificial Sequence: Synthetic oligonucleotide
  Antisense strand to SEQ ID NO: 867590
aacaugcaggcauauagcc

SEQ ID NO: 867592 - RNA, 19 nt, Artificial Sequence
  Description of Artificial Sequence: Synthetic oligonucleotide
  Sense strand starting at position 1135 of SEQ ID NO: 588474
acugcacaacgauaugaau

SEQ ID NO: 867593 - RNA, 19 nt, Artificial Sequence
  Description of Artificial Sequence: Synthetic oligonucleotide
  Antisense strand to SEQ ID NO: 867592
auucauaucguugugcagu

SEQ ID NO: 867594 - RNA, 19 nt, Artificial Sequence
  Description of Artificial Sequence: Synthetic oligonucleotide
  Sense strand starting at position 1274 of SEQ ID NO: 588474
ucgguuuaguuucuaauuu

SEQ ID NO: 867595 - RNA, 19 nt, Artificial Sequence
  Description of Artificial Sequence: Synthetic oligonucleotide
  Antisense strand to SEQ ID NO: 867594
aaauuagaaacuaaaccga

SEQ ID NO: 867596 - RNA, 19 nt, Artificial Sequence
  Description of Artificial Sequence: Synthetic oligonucleotide
  Sense strand starting at position 1327 of SEQ ID NO: 588474
agaauugagcgucaggaac

SEQ ID NO: 867597 - RNA, 19 nt, Artificial Sequence
  Description of Artificial Sequence: Synthetic oligonucleotide
  Antisense strand to SEQ ID NO: 867596
guuccugacgcucaauucu

SEQ ID NO: 867598 - RNA, 19 nt, Artificial Sequence
  Description of Artificial Sequence: Synthetic oligonucleotide
  Sense strand starting at position 2462 of SEQ ID NO: 588474
agaaguuucuacuucugga

SEQ ID NO: 867599 - RNA, 19 nt, Artificial Sequence
  Description of Artificial Sequence: Synthetic oligonucleotide
  Antisense strand to SEQ ID NO: 867598
uccagaaguagaaacuucu

SEQ ID NO: 867600 - RNA, 19 nt, Artificial Sequence
  Description of Artificial Sequence: Synthetic oligonucleotide
  Sense strand starting at position 2526 of SEQ ID NO: 588474
gggauuaugccuuggacua

SEQ ID NO: 867601 - RNA, 19 nt, Artificial Sequence
  Description of Artificial Sequence: Synthetic oligonucleotide
  Antisense strand to SEQ ID NO: 867600
uaguccaaggcauaauccc

SEQ ID NO: 867602 - RNA, 19 nt, Artificial Sequence
  Description of Artificial Sequence: Synthetic oligonucleotide
  Sense strand starting at position 2527 of SEQ ID NO: 588474
ggauuaugccuuggacuaa

SEQ ID NO: 867603 - RNA, 19 nt, Artificial Sequence
  Description of Artificial Sequence: Synthetic oligonucleotide
  Antisense strand to SEQ ID NO: 867602
uuaguccaaggcauaaucc

SEQ ID NO: 867604 - RNA, 19 nt, Artificial Sequence
  Description of Artificial Sequence: Synthetic oligonucleotide
  Sense strand starting at position 2562 of SEQ ID NO: 588474
agcuaaagacuguaguaua

SEQ ID NO: 867605 - RNA, 19 nt, Artificial Sequence
  Description of Artificial Sequence: Synthetic oligonucleotide
  Antisense strand to SEQ ID NO: 867604
uauacuacagucuuuagcu

SEQ ID NO: 867606 - RNA, 19 nt, Artificial Sequence
  Description of Artificial Sequence: Synthetic oligonucleotide
  Sense strand starting at position 3017 of SEQ ID NO: 588474
uguuaugggcccuaaauga

SEQ ID NO: 867607 - RNA, 19 nt, Artificial Sequence
  Description of Artificial Sequence: Synthetic oligonucleotide
  Antisense strand to SEQ ID NO: 867606
ucauuuagggcccauaaca

SEQ ID NO: 867608 - RNA, 19 nt, Artificial Sequence
  Description of Artificial Sequence: Synthetic oligonucleotide
  Sense strand starting at position 3024 of SEQ ID NO: 588474
ggcccuaaaugacucuauu

SEQ ID NO: 867609 - RNA, 19 nt, Artificial Sequence
  Description of Artificial Sequence: Synthetic oligonucleotide
  Antisense strand to SEQ ID NO: 867608
aauagagucauuuagggcc

SEQ ID NO: 867610 - RNA, 19 nt, Artificial Sequence
  Description of Artificial Sequence: Synthetic oligonucleotide
  Sense strand starting at position 3150 of SEQ ID NO: 588474
gugauugcugauuaccuga

SEQ ID NO: 867611 - RNA, 19 nt, Artificial Sequence
  Description of Artificial Sequence: Synthetic oligonucleotide
  Antisense strand to SEQ ID NO: 867610
ucagguaaucagcaaucac

SEQ ID NO: 867612 - RNA, 19 nt, Artificial Sequence
  Description of Artificial Sequence: Synthetic oligonucleotide
  Sense strand starting at position 3152 of SEQ ID NO: 588474
gauugcugauuaccugaga

SEQ ID NO: 867613 - RNA, 19 nt, Artificial Sequence
  Description of Artificial Sequence: Synthetic oligonucleotide
  Antisense strand to SEQ ID NO: 867612
ucucagguaaucagcaauc

SEQ ID NO: 867614 - RNA, 19 nt, Artificial Sequence
  Description of Artificial Sequence: Synthetic oligonucleotide
  Sense strand starting at position 3153 of SEQ ID NO: 588474
auugcugauuaccugagau

SEQ ID NO: 867615 - RNA, 19 nt, Artificial Sequence
  Description of Artificial Sequence: Synthetic oligonucleotide
  Antisense strand to SEQ ID NO: 867614
aucucagguaaucagcaau

SEQ ID NO: 867616 - RNA, 19 nt, Artificial Sequence
  Description of Artificial Sequence: Synthetic oligonucleotide
  Sense strand starting at position 3155 of SEQ ID NO: 588474
ugcugauuaccugagauac

SEQ ID NO: 867617 - RNA, 19 nt, Artificial Sequence
  Description of Artificial Sequence: Synthetic oligonucleotide
  Antisense strand to SEQ ID NO: 867616
guaucucagguaaucagca

SEQ ID NO: 867618 - RNA, 19 nt, Artificial Sequence
  Description of Artificial Sequence: Synthetic oligonucleotide
  Sense strand starting at position 3200 of SEQ ID NO: 588474
gccuaugggagguaugagu

SEQ ID NO: 867619 - RNA, 19 nt, Artificial Sequence
  Description of Artificial Sequence: Synthetic oligonucleotide
  Antisense strand to SEQ ID NO: 867618
acucauaccucccauaggc

SEQ ID NO: 867620 - RNA, 19 nt, Artificial Sequence
  Description of Artificial Sequence: Synthetic oligonucleotide
  Sense strand starting at position 3217 of SEQ ID NO: 588474
guagccaguguguucuuua

SEQ ID NO: 867621 - RNA, 19 nt, Artificial Sequence
  Description of Artificial Sequence: Synthetic oligonucleotide
  Antisense strand to SEQ ID NO: 867620
uaaagaacacacuggcuac

SEQ ID NO: 867622 - RNA, 19 nt, Artificial Sequence
  Description of Artificial Sequence: Synthetic oligonucleotide
  Sense strand starting at position 3271 of SEQ ID NO: 588474
guugauagagacuguuaga

SEQ ID NO: 867623 - RNA, 19 nt, Artificial Sequence
  Description of Artificial Sequence: Synthetic oligonucleotide
  Antisense strand to SEQ ID NO: 867622
ucuaacagucucuaucaac

SEQ ID NO: 867624 - RNA, 19 nt, Artificial Sequence
  Description of Artificial Sequence: Synthetic oligonucleotide
  Sense strand starting at position 3340 of SEQ ID NO: 588474
uauauaucugucgaauaga

SEQ ID NO: 867625 - RNA, 19 nt, Artificial Sequence
  Description of Artificial Sequence: Synthetic oligonucleotide
  Antisense strand to SEQ ID NO: 867624
ucuauucgacagauauaua

SEQ ID NO: 867626 - RNA, 19 nt, Artificial Sequence
  Description of Artificial Sequence: Synthetic oligonucleotide
  Sense strand starting at position 3343 of SEQ ID NO: 588474
auaucugucgaauagagug

SEQ ID NO: 867627 - RNA, 19 nt, Artificial Sequence
  Description of Artificial Sequence: Synthetic oligonucleotide
  Antisense strand to SEQ ID NO: 867626
cacucuauucgacagauau

SEQ ID NO: 867628 - RNA, 19 nt, Artificial Sequence
  Description of Artificial Sequence: Synthetic oligonucleotide
  Sense strand starting at position 3349 of SEQ ID NO: 588474
gucgaauagagugaauucu

SEQ ID NO: 867629 - RNA, 19 nt, Artificial Sequence
  Description of Artificial Sequence: Synthetic oligonucleotide
  Antisense strand to SEQ ID NO: 867628
agaauucacucuauucgac

SEQ ID NO: 867630 - RNA, 19 nt, Artificial Sequence
  Description of Artificial Sequence: Synthetic oligonucleotide
  Sense strand starting at position 3355 of SEQ ID NO: 588474
uagagugaauucuuaguaa

SEQ ID NO: 867631 - RNA, 19 nt, Artificial Sequence
  Description of Artificial Sequence: Synthetic oligonucleotide
  Antisense strand to SEQ ID NO: 867630
uuacuaagaauucacucua

SEQ ID NO: 867632 - RNA, 19 nt, Artificial Sequence
  Description of Artificial Sequence: Synthetic oligonucleotide
  Sense strand starting at position 3458 of SEQ ID NO: 588474
cuugaauuugugugcuucu

SEQ ID NO: 867633 - RNA, 19 nt, Artificial Sequence
  Description of Artificial Sequence: Synthetic oligonucleotide
  Antisense strand to SEQ ID NO: 867632
agaagcacacaaauucaag

SEQ ID NO: 867634 - RNA, 19 nt, Artificial Sequence
  Description of Artificial Sequence: Synthetic oligonucleotide
  Sense strand starting at position 3459 of SEQ ID NO: 588474
uugaauuugugugcuucua

SEQ ID NO: 867635 - RNA, 19 nt, Artificial Sequence
  Description of Artificial Sequence: Synthetic oligonucleotide
  Antisense strand to SEQ ID NO: 867634
uagaagcacacaaauucaa

SEQ ID NO: 867636 - RNA, 19 nt, Artificial Sequence
  Description of Artificial Sequence: Synthetic oligonucleotide
  Sense strand starting at position 3461 of SEQ ID NO: 588474
gaauuugugugcuucuauu

SEQ ID NO: 867637 - RNA, 19 nt, Artificial Sequence
  Description of Artificial Sequence: Synthetic oligonucleotide
  Antisense strand to SEQ ID NO: 867636
aauagaagcacacaaauuc

SEQ ID NO: 867638 - RNA, 19 nt, Artificial Sequence
  Description of Artificial Sequence: Synthetic oligonucleotide
  Sense strand starting at position 3477 of SEQ ID NO: 588474
auuuccauuuguuacggaa

SEQ ID NO: 867639 - RNA, 19 nt, Artificial Sequence
  Description of Artificial Sequence: Synthetic oligonucleotide
  Antisense strand to SEQ ID NO: 867638
uuccguaacaaauggaaau

SEQ ID NO: 867640 - RNA, 19 nt, Artificial Sequence
  Description of Artificial Sequence: Synthetic oligonucleotide
  Sense strand starting at position 3684 of SEQ ID NO: 588474
caguacuuugacuagaguu

SEQ ID NO: 867641 - RNA, 19 nt, Artificial Sequence
  Description of Artificial Sequence: Synthetic oligonucleotide
  Antisense strand to SEQ ID NO: 867640
aacucuagucaaaguacug

SEQ ID NO: 867642 - RNA, 19 nt, Artificial Sequence
  Description of Artificial Sequence: Synthetic oligonucleotide
  Sense strand starting at position 3719 of SEQ ID NO: 588474
uggaguuacccaugaccuu

SEQ ID NO: 867643 - RNA, 19 nt, Artificial Sequence
  Description of Artificial Sequence: Synthetic oligonucleotide
  Antisense strand to SEQ ID NO: 867642
aaggucauggguaacucca

SEQ ID NO: 867644 - RNA, 19 nt, Artificial Sequence
  Description of Artificial Sequence: Synthetic oligonucleotide
  Sense strand starting at position 3808 of SEQ ID NO: 588474
uugugaacauaauuagauc

SEQ ID NO: 867645 - RNA, 19 nt, Artificial Sequence
  Description of Artificial Sequence: Synthetic oligonucleotide
  Antisense strand to SEQ ID NO: 867644
gaucuaauuauguucacaa

SEQ ID NO: 867646 - RNA, 19 nt, Artificial Sequence
  Description of Artificial Sequence: Synthetic oligonucleotide
  Sense strand starting at position 3876 of SEQ ID NO: 588474
caugaagaauaguuuguga

SEQ ID NO: 867647 - RNA, 19 nt, Artificial Sequence
  Description of Artificial Sequence: Synthetic oligonucleotide
  Antisense strand to SEQ ID NO: 867646
ucacaaacuauucuucaug

SEQ ID NO: 867648 - RNA, 19 nt, Artificial Sequence
  Description of Artificial Sequence: Synthetic oligonucleotide
  Sense strand starting at position 3879 of SEQ ID NO: 588474
gaagaauaguuugugagua

SEQ ID NO: 867649 - RNA, 19 nt, Artificial Sequence
  Description of Artificial Sequence: Synthetic oligonucleotide
  Antisense strand to SEQ ID NO: 867648
uacucacaaacuauucuuc

SEQ ID NO: 867650 - RNA, 19 nt, Artificial Sequence
  Description of Artificial Sequence: Synthetic oligonucleotide
  Sense strand starting at position 3883 of SEQ ID NO: 588474
aauaguuugugaguagaua

SEQ ID NO: 867651 - RNA, 19 nt, Artificial Sequence
  Description of Artificial Sequence: Synthetic oligonucleotide
  Antisense strand to SEQ ID NO: 867650
uaucuacucacaaacuauu

SEQ ID NO: 867652 - RNA, 19 nt, Artificial Sequence
  Description of Artificial Sequence: Synthetic oligonucleotide
  Sense strand starting at position 3884 of SEQ ID NO: 588474
auaguuugugaguagauaa

SEQ ID NO: 867653 - RNA, 19 nt, Artificial Sequence
  Description of Artificial Sequence: Synthetic oligonucleotide
  Antisense strand to SEQ ID NO: 867652
uuaucuacucacaaacuau

SEQ ID NO: 867654 - RNA, 19 nt, Artificial Sequence
  Description of Artificial Sequence: Synthetic oligonucleotide
  Sense strand starting at position 5 of SEQ ID NO: 588475
uaugccguaucccugaauu

SEQ ID NO: 867655 - RNA, 19 nt, Artificial Sequence
  Description of Artificial Sequence: Synthetic oligonucleotide
  Antisense strand to SEQ ID NO: 867654
aauucagggauacggcaua

SEQ ID NO: 867656 - RNA, 19 nt, Artificial Sequence
  Description of Artificial Sequence: Synthetic oligonucleotide
  Sense strand starting at position 7 of SEQ ID NO: 588475
ugccguaucccugaauuuc

SEQ ID NO: 867657 - RNA, 19 nt, Artificial Sequence
  Description of Artificial Sequence: Synthetic oligonucleotide
  Antisense strand to SEQ ID NO: 867656
gaaauucagggauacggca

SEQ ID NO: 867658 - RNA, 19 nt, Artificial Sequence
  Description of Artificial Sequence: Synthetic oligonucleotide
  Sense strand starting at position 26 of SEQ ID NO: 588475
auacuuacggcucguugau

SEQ ID NO: 867659 - RNA, 19 nt, Artificial Sequence
  Description of Artificial Sequence: Synthetic oligonucleotide
  Antisense strand to SEQ ID NO: 867658
aucaacgagccguaaguau

SEQ ID NO: 867660 - RNA, 19 nt, Artificial Sequence
  Description of Artificial Sequence: Synthetic oligonucleotide
  Sense strand starting at position 38 of SEQ ID NO: 588475
cguugaugauccucauaac

SEQ ID NO: 867661 - RNA, 19 nt, Artificial Sequence
  Description of Artificial Sequence: Synthetic oligonucleotide
  Antisense strand to SEQ ID NO: 867660
guuaugaggaucaucaacg

SEQ ID NO: 867662 - RNA, 19 nt, Artificial Sequence
  Description of Artificial Sequence: Synthetic oligonucleotide
  Sense strand starting at position 67 of SEQ ID NO: 588475
gcaauaguuccagcgucuu

SEQ ID NO: 867663 - RNA, 19 nt, Artificial Sequence
  Description of Artificial Sequence: Synthetic oligonucleotide
  Antisense strand to SEQ ID NO: 867662
aagacgcuggaacuauugc

SEQ ID NO: 867664 - RNA, 19 nt, Artificial Sequence
  Description of Artificial Sequence: Synthetic oligonucleotide
  Sense strand starting at position 95 of SEQ ID NO: 588475
ggcguugggcaucauuaaa

SEQ ID NO: 867665 - RNA, 19 nt, Artificial Sequence
  Description of Artificial Sequence: Synthetic oligonucleotide
  Antisense strand to SEQ ID NO: 867664
uuuaaugaugcccaacgcc

SEQ ID NO: 867666 - RNA, 19 nt, Artificial Sequence
  Description of Artificial Sequence: Synthetic oligonucleotide
  Sense strand starting at position 127 of SEQ ID NO: 588475
guaacaacugcauggguaa

SEQ ID NO: 867667 - RNA, 19 nt, Artificial Sequence
  Description of Artificial Sequence: Synthetic oligonucleotide
  Antisense strand to SEQ ID NO: 867666
uuacccaugcaguuguuac

SEQ ID NO: 867668 - RNA, 19 nt, Artificial Sequence
  Description of Artificial Sequence: Synthetic oligonucleotide
  Sense strand starting at position 166 of SEQ ID NO: 588475
uuaaguguauugucacaua

SEQ ID NO: 867669 - RNA, 19 nt, Artificial Sequence
  Description of Artificial Sequence: Synthetic oligonucleotide
  Antisense strand to SEQ ID NO: 867668
uaugugacaauacacuuaa

SEQ ID NO: 867670 - RNA, 19 nt, Artificial Sequence
  Description of Artificial Sequence: Synthetic oligonucleotide
  Sense strand starting at position 518 of SEQ ID NO: 588475
gucaaaccaucacuuuagu

SEQ ID NO: 867671 - RNA, 19 nt, Artificial Sequence
  Description of Artificial Sequence: Synthetic oligonucleotide
  Antisense strand to SEQ ID NO: 867670
acuaaagugaugguuugac

SEQ ID NO: 867672 - RNA, 19 nt, Artificial Sequence
  Description of Artificial Sequence: Synthetic oligonucleotide
  Sense strand starting at position 584 of SEQ ID NO: 588475
cuggaauuguaagcauuaa

SEQ ID NO: 867673 - RNA, 19 nt, Artificial Sequence
  Description of Artificial Sequence: Synthetic oligonucleotide
  Antisense strand to SEQ ID NO: 867672
uuaaugcuuacaauuccag

SEQ ID NO: 867674 - RNA, 19 nt, Artificial Sequence
  Description of Artificial Sequence: Synthetic oligonucleotide
  Sense strand starting at position 631 of SEQ ID NO: 588475
gcuuauaguaagggacuca

SEQ ID NO: 867675 - RNA, 19 nt, Artificial Sequence
  Description of Artificial Sequence: Synthetic oligonucleotide
  Antisense strand to SEQ ID NO: 867674
ugagucccuuacuauaagc

SEQ ID NO: 867676 - RNA, 19 nt, Artificial Sequence
  Description of Artificial Sequence: Synthetic oligonucleotide
  Sense strand starting at position 823 of SEQ ID NO: 588475
uagugagaaccauggcaga

SEQ ID NO: 867677 - RNA, 19 nt, Artificial Sequence
  Description of Artificial Sequence: Synthetic oligonucleotide
  Antisense strand to SEQ ID NO: 867676
ucugccaugguucucacua

SEQ ID NO: 867678 - RNA, 19 nt, Artificial Sequence
  Description of Artificial Sequence: Synthetic oligonucleotide
  Sense strand starting at position 826 of SEQ ID NO: 588475
ugagaaccauggcagaaau

SEQ ID NO: 867679 - RNA, 19 nt, Artificial Sequence
  Description of Artificial Sequence: Synthetic oligonucleotide
  Antisense strand to SEQ ID NO: 867678
auuucugccaugguucuca

SEQ ID NO: 867680 - RNA, 19 nt, Artificial Sequence
  Description of Artificial Sequence: Synthetic oligonucleotide
  Sense strand starting at position 853 of SEQ ID NO: 588475
gagcaaaugucuuuguuug

SEQ ID NO: 867681 - RNA, 19 nt, Artificial Sequence
  Description of Artificial Sequence: Synthetic oligonucleotide
  Antisense strand to SEQ ID NO: 867680
caaacaaagacauuugcuc

SEQ ID NO: 867682 - RNA, 19 nt, Artificial Sequence
  Description of Artificial Sequence: Synthetic oligonucleotide
  Sense strand starting at position 890 of SEQ ID NO: 588475
uugaauguaugguuuaguu

SEQ ID NO: 867683 - RNA, 19 nt, Artificial Sequence
  Description of Artificial Sequence: Synthetic oligonucleotide
  Antisense strand to SEQ ID NO: 867682
aacuaaaccauacauucaa

SEQ ID NO: 867684 - RNA, 19 nt, Artificial Sequence
  Description of Artificial Sequence: Synthetic oligonucleotide
  Sense strand starting at position 1026 of SEQ ID NO: 588475
gcugcaaauugacuagaaa

SEQ ID NO: 867685 - RNA, 19 nt, Artificial Sequence
  Description of Artificial Sequence: Synthetic oligonucleotide
  Antisense strand to SEQ ID NO: 867684
uuucuagucaauuugcagc

SEQ ID NO: 867686 - RNA, 19 nt, Artificial Sequence
  Description of Artificial Sequence: Synthetic oligonucleotide
  Sense strand starting at position 1054 of SEQ ID NO: 588475
gaguauaggugucuuacaa

SEQ ID NO: 867687 - RNA, 19 nt, Artificial Sequence
  Description of Artificial Sequence: Synthetic oligonucleotide
  Antisense strand to SEQ ID NO: 867686
uuguaagacaccuauacuc

SEQ ID NO: 867688 - RNA, 19 nt, Artificial Sequence
  Description of Artificial Sequence: Synthetic oligonucleotide
  Sense strand starting at position 1101 of SEQ ID NO: 588475
uaaacuaucguagacagua

SEQ ID NO: 867689 - RNA, 19 nt, Artificial Sequence
  Description of Artificial Sequence: Synthetic oligonucleotide
  Antisense strand to SEQ ID NO: 867688
uacugucuacgauaguuua

SEQ ID NO: 867690 - RNA, 19 nt, Artificial Sequence
  Description of Artificial Sequence: Synthetic oligonucleotide
  Sense strand starting at position 1121 of SEQ ID NO: 588475
gacagcaacugucuuaagu

SEQ ID NO: 867691 - RNA, 19 nt, Artificial Sequence
  Description of Artificial Sequence: Synthetic oligonucleotide
  Antisense strand to SEQ ID NO: 867690
acuuaagacaguugcuguc

SEQ ID NO: 867692 - RNA, 19 nt, Artificial Sequence
  Description of Artificial Sequence: Synthetic oligonucleotide
  Sense strand starting at position 1253 of SEQ ID NO: 588475
ccguucucuaacuggauga

SEQ ID NO: 867693 - RNA, 19 nt, Artificial Sequence
  Description of Artificial Sequence: Synthetic oligonucleotide
  Antisense strand to SEQ ID NO: 867692
ucauccaguuagagaacgg

SEQ ID NO: 867694 - RNA, 19 nt, Artificial Sequence
  Description of Artificial Sequence: Synthetic oligonucleotide
  Sense strand starting at position 1350 of SEQ ID NO: 588475
agccgcuuggcgucaaaga

SEQ ID NO: 867695 - RNA, 19 nt, Artificial Sequence
  Description of Artificial Sequence: Synthetic oligonucleotide
  Antisense strand to SEQ ID NO: 867694
ucuuugacgccaagcggcu

SEQ ID NO: 867696 - RNA, 19 nt, Artificial Sequence
  Description of Artificial Sequence: Synthetic oligonucleotide
  Sense strand starting at position 1470 of SEQ ID NO: 588475
cccugaucguuggcgauga

SEQ ID NO: 867697 - RNA, 19 nt, Artificial Sequence
  Description of Artificial Sequence: Synthetic oligonucleotide
  Antisense strand to SEQ ID NO: 867696
ucaucgccaacgaucaggg

SEQ ID NO: 867698 - RNA, 19 nt, Artificial Sequence
  Description of Artificial Sequence: Synthetic oligonucleotide
  Sense strand starting at position 1474 of SEQ ID NO: 588475
gaucguuggcgaugaucuc

SEQ ID NO: 867699 - RNA, 19 nt, Artificial Sequence
  Description of Artificial Sequence: Synthetic oligonucleotide
  Antisense strand to SEQ ID NO: 867698
gagaucaucgccaacgauc

SEQ ID NO: 867700 - RNA, 19 nt, Artificial Sequence
  Description of Artificial Sequence: Synthetic oligonucleotide
  Sense strand starting at position 1967 of SEQ ID NO: 588475
ucgccuacucggcuuauau

SEQ ID NO: 867701 - RNA, 19 nt, Artificial Sequence
  Description of Artificial Sequence: Synthetic oligonucleotide
  Antisense strand to SEQ ID NO: 867700
auauaagccgaguaggcga

SEQ ID NO: 867702 - RNA, 19 nt, Artificial Sequence
  Description of Artificial Sequence: Synthetic oligonucleotide
  Sense strand starting at position 2144 of SEQ ID NO: 588475
gcugcuauucguuucuaac

SEQ ID NO: 867703 - RNA, 19 nt, Artificial Sequence
  Description of Artificial Sequence: Synthetic oligonucleotide
  Antisense strand to SEQ ID NO: 867702
guuagaaacgaauagcagc

SEQ ID NO: 867704 - RNA, 19 nt, Artificial Sequence
  Description of Artificial Sequence: Synthetic oligonucleotide
  Sense strand starting at position 2247 of SEQ ID NO: 588475
cgaggcauuuccgcuggua

SEQ ID NO: 867705 - RNA, 19 nt, Artificial Sequence
  Description of Artificial Sequence: Synthetic oligonucleotide
  Antisense strand to SEQ ID NO: 867704
uaccagcggaaaugccucg

SEQ ID NO: 867706 - RNA, 19 nt, Artificial Sequence
  Description of Artificial Sequence: Synthetic oligonucleotide
  Sense strand starting at position 2249 of SEQ ID NO: 588475
aggcauuuccgcugguaac

SEQ ID NO: 867707 - RNA, 19 nt, Artificial Sequence
  Description of Artificial Sequence: Synthetic oligonucleotide
  Antisense strand to SEQ ID NO: 867706
guuaccagcggaaaugccu

SEQ ID NO: 867708 - RNA, 19 nt, Artificial Sequence
  Description of Artificial Sequence: Synthetic oligonucleotide
  Sense strand starting at position 2336 of SEQ ID NO: 588475
ggcugugggaucugaaacu

SEQ ID NO: 867709 - RNA, 19 nt, Artificial Sequence
  Description of Artificial Sequence: Synthetic oligonucleotide
  Antisense strand to SEQ ID NO: 867708
aguuucagaucccacagcc

SEQ ID NO: 867710 - RNA, 19 nt, Artificial Sequence
  Description of Artificial Sequence: Synthetic oligonucleotide
  Sense strand starting at position 2469 of SEQ ID NO: 588475
cugggaucgccucagaaca

SEQ ID NO: 867711 - RNA, 19 nt, Artificial Sequence
  Description of Artificial Sequence: Synthetic oligonucleotide
  Antisense strand to SEQ ID NO: 867710
uguucugaggcgaucccag

SEQ ID NO: 867712 - RNA, 19 nt, Artificial Sequence
  Description of Artificial Sequence: Synthetic oligonucleotide
  Sense strand starting at position 2839 of SEQ ID NO: 588475
ggcaaagguuaucauuuac

SEQ ID NO: 867713 - RNA, 19 nt, Artificial Sequence
  Description of Artificial Sequence: Synthetic oligonucleotide
  Antisense strand to SEQ ID NO: 867712
guaaaugauaaccuuugcc

SEQ ID NO: 867714 - RNA, 19 nt, Artificial Sequence
  Description of Artificial Sequence: Synthetic oligonucleotide
  Sense strand starting at position 2871 of SEQ ID NO: 588475
uccuuuauuguugauacuu

SEQ ID NO: 867715 - RNA, 19 nt, Artificial Sequence
  Description of Artificial Sequence: Synthetic oligonucleotide
  Antisense strand to SEQ ID NO: 867714
aaguaucaacaauaaagga

SEQ ID NO: 867716 - RNA, 19 nt, Artificial Sequence
  Description of Artificial Sequence: Synthetic oligonucleotide
  Sense strand starting at position 3021 of SEQ ID NO: 588475
gaaagccuaccguggauua

SEQ ID NO: 867717 - RNA, 19 nt, Artificial Sequence
  Description of Artificial Sequence: Synthetic oligonucleotide
  Antisense strand to SEQ ID NO: 867716
uaauccacgguaggcuuuc

SEQ ID NO: 867718 - RNA, 19 nt, Artificial Sequence
  Description of Artificial Sequence: Synthetic oligonucleotide
  Sense strand starting at position 3062 of SEQ ID NO: 588475
augugucauuuagucuuga

SEQ ID NO: 867719 - RNA, 19 nt, Artificial Sequence
  Description of Artificial Sequence: Synthetic oligonucleotide
  Antisense strand to SEQ ID NO: 867718
ucaagacuaaaugacacau

SEQ ID NO: 867720 - RNA, 19 nt, Artificial Sequence
  Description of Artificial Sequence: Synthetic oligonucleotide
  Sense strand starting at position 3083 of SEQ ID NO: 588475
guucaauacucgguaggca

SEQ ID NO: 867721 - RNA, 19 nt, Artificial Sequence
  Description of Artificial Sequence: Synthetic oligonucleotide
  Antisense strand to SEQ ID NO: 867720
ugccuaccgaguauugaac

SEQ ID NO: 867722 - RNA, 19 nt, Artificial Sequence
  Description of Artificial Sequence: Synthetic oligonucleotide
  Sense strand starting at position 3189 of SEQ ID NO: 588475
uugauaaccagguggaguu

SEQ ID NO: 867723 - RNA, 19 nt, Artificial Sequence
  Description of Artificial Sequence: Synthetic oligonucleotide
  Antisense strand to SEQ ID NO: 867722
aacuccaccugguuaucaa

SEQ ID NO: 867724 - RNA, 19 nt, Artificial Sequence
  Description of Artificial Sequence: Synthetic oligonucleotide
  Sense strand starting at position 3853 of SEQ ID NO: 588475
ucauuuguuugaggaaugu

SEQ ID NO: 867725 - RNA, 19 nt, Artificial Sequence
  Description of Artificial Sequence: Synthetic oligonucleotide
  Antisense strand to SEQ ID NO: 867724
acauuccucaaacaaauga

SEQ ID NO: 867726 - RNA, 19 nt, Artificial Sequence
  Description of Artificial Sequence: Synthetic oligonucleotide
  Sense strand starting at position 3894 of SEQ ID NO: 588475
agggcaaagcucugauaug

SEQ ID NO: 867727 - RNA, 19 nt, Artificial Sequence
  Description of Artificial Sequence: Synthetic oligonucleotide
  Antisense strand to SEQ ID NO: 867726
cauaucagagcuuugcccu

SEQ ID NO: 867728 - RNA, 19 nt, Artificial Sequence
  Description of Artificial Sequence: Synthetic oligonucleotide
  Sense strand starting at position 3929 of SEQ ID NO: 588475
uggguauacuguguccaga

SEQ ID NO: 867729 - RNA, 19 nt, Artificial Sequence
  Description of Artificial Sequence: Synthetic oligonucleotide
  Antisense strand to SEQ ID NO: 867728
ucuggacacaguauaccca

SEQ ID NO: 867730 - RNA, 19 nt, Artificial Sequence
  Description of Artificial Sequence: Synthetic oligonucleotide
  Sense strand starting at position 3931 of SEQ ID NO: 588475
gguauacuguguccagaua

SEQ ID NO: 867731 - RNA, 19 nt, Artificial Sequence
  Description of Artificial Sequence: Synthetic oligonucleotide
  Antisense strand to SEQ ID NO: 867730
uaucuggacacaguauacc

SEQ ID NO: 867732 - RNA, 19 nt, Artificial Sequence
  Description of Artificial Sequence: Synthetic oligonucleotide
  Sense strand starting at position 3980 of SEQ ID NO: 588475
agauguugagccugugacu

SEQ ID NO: 867733 - RNA, 19 nt, Artificial Sequence
  Description of Artificial Sequence: Synthetic oligonucleotide
  Antisense strand to SEQ ID NO: 867732
agucacaggcucaacaucu

SEQ ID NO: 867734 - RNA, 19 nt, Artificial Sequence
  Description of Artificial Sequence: Synthetic oligonucleotide
  Sense strand starting at position 80 of SEQ ID NO: 588477
ggcugagacgcauggauca

SEQ ID NO: 867735 - RNA, 19 nt, Artificial Sequence
  Description of Artificial Sequence: Synthetic oligonucleotide
  Antisense strand to SEQ ID NO: 867734
ugauccaugcgucucagcc

SEQ ID NO: 867736 - RNA, 19 nt, Artificial Sequence
  Description of Artificial Sequence: Synthetic oligonucleotide
  Sense strand starting at position 580 of SEQ ID NO: 588477
gaauguaaauccuuugagg

SEQ ID NO: 867737 - RNA, 19 nt, Artificial Sequence
  Description of Artificial Sequence: Synthetic oligonucleotide
  Antisense strand to SEQ ID NO: 867736
ccucaaaggauuuacauuc

SEQ ID NO: 867738 - RNA, 19 nt, Artificial Sequence
  Description of Artificial Sequence: Synthetic oligonucleotide
  Sense strand starting at position 608 of SEQ ID NO: 588477
uuaucuguccuguucgcua

SEQ ID NO: 867739 - RNA, 19 nt, Artificial Sequence
  Description of Artificial Sequence: Synthetic oligonucleotide
  Antisense strand to SEQ ID NO: 867738
uagcgaacaggacagauaa

SEQ ID NO: 867740 - RNA, 19 nt, Artificial Sequence
  Description of Artificial Sequence: Synthetic oligonucleotide
  Sense strand starting at position 615 of SEQ ID NO: 588477
uccuguucgcuauaugaca

SEQ ID NO: 867741 - RNA, 19 nt, Artificial Sequence
  Description of Artificial Sequence: Synthetic oligonucleotide
  Antisense strand to SEQ ID NO: 867740
ugucauauagcgaacagga

SEQ ID NO: 867742 - RNA, 19 nt, Artificial Sequence
  Description of Artificial Sequence: Synthetic oligonucleotide
  Sense strand starting at position 623 of SEQ ID NO: 588477
gcuauaugacaaugacaua

SEQ ID NO: 867743 - RNA, 19 nt, Artificial Sequence
  Description of Artificial Sequence: Synthetic oligonucleotide
  Antisense strand to SEQ ID NO: 867742
uaugucauugucauauagc

SEQ ID NO: 867744 - RNA, 19 nt, Artificial Sequence
  Description of Artificial Sequence: Synthetic oligonucleotide
  Sense strand starting at position 655 of SEQ ID NO: 588477
gcucaauaauuacugagua

SEQ ID NO: 867745 - RNA, 19 nt, Artificial Sequence
  Description of Artificial Sequence: Synthetic oligonucleotide
  Antisense strand to SEQ ID NO: 867744
uacucaguaauuauugagc

SEQ ID NO: 867746 - RNA, 19 nt, Artificial Sequence
  Description of Artificial Sequence: Synthetic oligonucleotide
  Sense strand starting at position 707 of SEQ ID NO: 588477
aggccucccucaucugauu

SEQ ID NO: 867747 - RNA, 19 nt, Artificial Sequence
  Description of Artificial Sequence: Synthetic oligonucleotide
  Antisense strand to SEQ ID NO: 867746
aaucagaugagggaggccu

SEQ ID NO: 867748 - RNA, 19 nt, Artificial Sequence
  Description of Artificial Sequence: Synthetic oligonucleotide
  Sense strand starting at position 921 of SEQ ID NO: 588477
uuaucuuuguggcugagaa

SEQ ID NO: 867749 - RNA, 19 nt, Artificial Sequence
  Description of Artificial Sequence: Synthetic oligonucleotide
  Antisense strand to SEQ ID NO: 867748
uucucagccacaaagauaa

SEQ ID NO: 867750 - RNA, 19 nt, Artificial Sequence
  Description of Artificial Sequence: Synthetic oligonucleotide
  Sense strand starting at position 922 of SEQ ID NO: 588477
uaucuuuguggcugagaac

SEQ ID NO: 867751 - RNA, 19 nt, Artificial Sequence
  Description of Artificial Sequence: Synthetic oligonucleotide
  Antisense strand to SEQ ID NO: 867750
guucucagccacaaagaua

SEQ ID NO: 867752 - RNA, 19 nt, Artificial Sequence
  Description of Artificial Sequence: Synthetic oligonucleotide
  Sense strand starting at position 965 of SEQ ID NO: 588477
acccaucuaccuggaguaa

SEQ ID NO: 867753 - RNA, 19 nt, Artificial Sequence
  Description of Artificial Sequence: Synthetic oligonucleotide
  Antisense strand to SEQ ID NO: 867752
uuacuccagguagaugggu

SEQ ID NO: 867754 - RNA, 19 nt, Artificial Sequence
  Description of Artificial Sequence: Synthetic oligonucleotide
  Sense strand starting at position 1155 of SEQ ID NO: 588477
acaguuagacuuugguuua

SEQ ID NO: 867755 - RNA, 19 nt, Artificial Sequence
  Description of Artificial Sequence: Synthetic oligonucleotide
  Antisense strand to SEQ ID NO: 867754
uaaaccaaagucuaacugu

SEQ ID NO: 867756 - RNA, 19 nt, Artificial Sequence
  Description of Artificial Sequence: Synthetic oligonucleotide
  Sense strand starting at position 1158 of SEQ ID NO: 588477
guuagacuuugguuuaaac

SEQ ID NO: 867757 - RNA, 19 nt, Artificial Sequence
  Description of Artificial Sequence: Synthetic oligonucleotide
  Antisense strand to SEQ ID NO: 867756
guuuaaaccaaagucuaac

SEQ ID NO: 867758 - RNA, 19 nt, Artificial Sequence
  Description of Artificial Sequence: Synthetic oligonucleotide
  Sense strand starting at position 1270 of SEQ ID NO: 588477
ggagccacccuccauauua

SEQ ID NO: 867759 - RNA, 19 nt, Artificial Sequence
  Description of Artificial Sequence: Synthetic oligonucleotide
  Antisense strand to SEQ ID NO: 867758
uaauauggaggguggcucc

SEQ ID NO: 867760 - RNA, 19 nt, Artificial Sequence
  Description of Artificial Sequence: Synthetic oligonucleotide
  Sense strand starting at position 1402 of SEQ ID NO: 588477
uggccaaaggucugugaga

SEQ ID NO: 867761 - RNA, 19 nt, Artificial Sequence
  Description of Artificial Sequence: Synthetic oligonucleotide
  Antisense strand to SEQ ID NO: 867760
ucucacagaccuuuggcca

SEQ ID NO: 867762 - RNA, 19 nt, Artificial Sequence
  Description of Artificial Sequence: Synthetic oligonucleotide
  Sense strand starting at position 1403 of SEQ ID NO: 588477
ggccaaaggucugugagag

SEQ ID NO: 867763 - RNA, 19 nt, Artificial Sequence
  Description of Artificial Sequence: Synthetic oligonucleotide
  Antisense strand to SEQ ID NO: 867762
cucucacagaccuuuggcc

SEQ ID NO: 867764 - RNA, 19 nt, Artificial Sequence
  Description of Artificial Sequence: Synthetic oligonucleotide
  Sense strand starting at position 2105 of SEQ ID NO: 588477
uuccucuucccggaaguga

SEQ ID NO: 867765 - RNA, 19 nt, Artificial Sequence
  Description of Artificial Sequence: Synthetic oligonucleotide
  Antisense strand to SEQ ID NO: 867764
ucacuuccgggaagaggaa

SEQ ID NO: 867766 - RNA, 19 nt, Artificial Sequence
  Description of Artificial Sequence: Synthetic oligonucleotide
  Sense strand starting at position 2397 of SEQ ID NO: 588477
gucguagauagauggguau

SEQ ID NO: 867767 - RNA, 19 nt, Artificial Sequence
  Description of Artificial Sequence: Synthetic oligonucleotide
  Antisense strand to SEQ ID NO: 867766
auacccaucuaucuacgac

SEQ ID NO: 867768 - RNA, 19 nt, Artificial Sequence
  Description of Artificial Sequence: Synthetic oligonucleotide
  Sense strand starting at position 2399 of SEQ ID NO: 588477
cguagauagauggguauga

SEQ ID NO: 867769 - RNA, 19 nt, Artificial Sequence
  Description of Artificial Sequence: Synthetic oligonucleotide
  Antisense strand to SEQ ID NO: 867768
ucauacccaucuaucuacg

SEQ ID NO: 867770 - RNA, 19 nt, Artificial Sequence
  Description of Artificial Sequence: Synthetic oligonucleotide
  Sense strand starting at position 2403 of SEQ ID NO: 588477
gauagauggguaugaguau

SEQ ID NO: 867771 - RNA, 19 nt, Artificial Sequence
  Description of Artificial Sequence: Synthetic oligonucleotide
  Antisense strand to SEQ ID NO: 867770
auacucauacccaucuauc

SEQ ID NO: 867772 - RNA, 19 nt, Artificial Sequence
  Description of Artificial Sequence: Synthetic oligonucleotide
  Sense strand starting at position 2515 of SEQ ID NO: 588477
ggguugaguguugaccgua

SEQ ID NO: 867773 - RNA, 19 nt, Artificial Sequence
  Description of Artificial Sequence: Synthetic oligonucleotide
  Antisense strand to SEQ ID NO: 867772
uacggucaacacucaaccc

SEQ ID NO: 867774 - RNA, 19 nt, Artificial Sequence
  Description of Artificial Sequence: Synthetic oligonucleotide
  Sense strand starting at position 2615 of SEQ ID NO: 588477
aguguccauuugcuuuaaa

SEQ ID NO: 867775 - RNA, 19 nt, Artificial Sequence
  Description of Artificial Sequence: Synthetic oligonucleotide
  Antisense strand to SEQ ID NO: 867774
uuuaaagcaaauggacacu

SEQ ID NO: 867776 - RNA, 19 nt, Artificial Sequence
  Description of Artificial Sequence: Synthetic oligonucleotide
  Sense strand starting at position 3113 of SEQ ID NO: 588477
ccgaguaggugagauuuca

SEQ ID NO: 867777 - RNA, 19 nt, Artificial Sequence
  Description of Artificial Sequence: Synthetic oligonucleotide
  Antisense strand to SEQ ID NO: 867776
ugaaaucucaccuacucgg

SEQ ID NO: 867778 - RNA, 19 nt, Artificial Sequence
  Description of Artificial Sequence: Synthetic oligonucleotide
  Sense strand starting at position 3143 of SEQ ID NO: 588477
ggcuguacaggugaagaaa

SEQ ID NO: 867779 - RNA, 19 nt, Artificial Sequence
  Description of Artificial Sequence: Synthetic oligonucleotide
  Antisense strand to SEQ ID NO: 867778
uuucuucaccuguacagcc

SEQ ID NO: 867780 - RNA, 19 nt, Artificial Sequence
  Description of Artificial Sequence: Synthetic oligonucleotide
  Sense strand starting at position 3191 of SEQ ID NO: 588477
aguuauggucaauacacau

SEQ ID NO: 867781 - RNA, 19 nt, Artificial Sequence
  Description of Artificial Sequence: Synthetic oligonucleotide
  Antisense strand to SEQ ID NO: 867780
auguguauugaccauaacu

SEQ ID NO: 867782 - RNA, 19 nt, Artificial Sequence
  Description of Artificial Sequence: Synthetic oligonucleotide
  Sense strand starting at position 3224 of SEQ ID NO: 588477
ccaugugcugguuaauauc

SEQ ID NO: 867783 - RNA, 19 nt, Artificial Sequence
  Description of Artificial Sequence: Synthetic oligonucleotide
  Antisense strand to SEQ ID NO: 867782
gauauuaaccagcacaugg

SEQ ID NO: 867784 - RNA, 19 nt, Artificial Sequence
  Description of Artificial Sequence: Synthetic oligonucleotide
  Sense strand starting at position 3296 of SEQ ID NO: 588477
aggaauagauguguaugca

SEQ ID NO: 867785 - RNA, 19 nt, Artificial Sequence
  Description of Artificial Sequence: Synthetic oligonucleotide
  Antisense strand to SEQ ID NO: 867784
ugcauacacaucuauuccu

SEQ ID NO: 867786 - RNA, 19 nt, Artificial Sequence
  Description of Artificial Sequence: Synthetic oligonucleotide
  Sense strand starting at position 3297 of SEQ ID NO: 588477
ggaauagauguguaugcaa

SEQ ID NO: 867787 - RNA, 19 nt, Artificial Sequence
  Description of Artificial Sequence: Synthetic oligonucleotide
  Antisense strand to SEQ ID NO: 867786
uugcauacacaucuauucc

SEQ ID NO: 867788 - RNA, 19 nt, Artificial Sequence
  Description of Artificial Sequence: Synthetic oligonucleotide
  Sense strand starting at position 3299 of SEQ ID NO: 588477
aauagauguguaugcaaau

SEQ ID NO: 867789 - RNA, 19 nt, Artificial Sequence
  Description of Artificial Sequence: Synthetic oligonucleotide
  Antisense strand to SEQ ID NO: 867788
auuugcauacacaucuauu

SEQ ID NO: 867790 - RNA, 19 nt, Artificial Sequence
  Description of Artificial Sequence: Synthetic oligonucleotide
  Sense strand starting at position 3300 of SEQ ID NO: 588477
auagauguguaugcaaaua

SEQ ID NO: 867791 - RNA, 19 nt, Artificial Sequence
  Description of Artificial Sequence: Synthetic oligonucleotide
  Antisense strand to SEQ ID NO: 867790
uauuugcauacacaucuau

SEQ ID NO: 867792 - RNA, 19 nt, Artificial Sequence
  Description of Artificial Sequence: Synthetic oligonucleotide
  Sense strand starting at position 3339 of SEQ ID NO: 588477
ucgcuagcucaguaugaaa

SEQ ID NO: 867793 - RNA, 19 nt, Artificial Sequence
  Description of Artificial Sequence: Synthetic oligonucleotide
  Antisense strand to SEQ ID NO: 867792
uuucauacugagcuagcga

SEQ ID NO: 867794 - RNA, 19 nt, Artificial Sequence
  Description of Artificial Sequence: Synthetic oligonucleotide
  Sense strand starting at position 3410 of SEQ ID NO: 588477
ucugauucuucuccuugga

SEQ ID NO: 867795 - RNA, 19 nt, Artificial Sequence
  Description of Artificial Sequence: Synthetic oligonucleotide
  Antisense strand to SEQ ID NO: 867794
uccaaggagaagaaucaga

SEQ ID NO: 867796 - RNA, 19 nt, Artificial Sequence
  Description of Artificial Sequence: Synthetic oligonucleotide
  Sense strand starting at position 3412 of SEQ ID NO: 588477
ugauucuucuccuuggauu

SEQ ID NO: 867797 - RNA, 19 nt, Artificial Sequence
  Description of Artificial Sequence: Synthetic oligonucleotide
  Antisense strand to SEQ ID NO: 867796
aauccaaggagaagaauca

SEQ ID NO: 867798 - RNA, 19 nt, Artificial Sequence
  Description of Artificial Sequence: Synthetic oligonucleotide
  Sense strand starting at position 3440 of SEQ ID NO: 588477
agacauguccaaggaucuu

SEQ ID NO: 867799 - RNA, 19 nt, Artificial Sequence
  Description of Artificial Sequence: Synthetic oligonucleotide
  Antisense strand to SEQ ID NO: 867798
aagauccuuggacaugucu

SEQ ID NO: 867800 - RNA, 19 nt, Artificial Sequence
  Description of Artificial Sequence: Synthetic oligonucleotide
  Sense strand starting at position 3536 of SEQ ID NO: 588477
ggacuauuagcacaggugu

SEQ ID NO: 867801 - RNA, 19 nt, Artificial Sequence
  Description of Artificial Sequence: Synthetic oligonucleotide
  Antisense strand to SEQ ID NO: 867800
acaccugugcuaauagucc

SEQ ID NO: 867802 - RNA, 19 nt, Artificial Sequence
  Description of Artificial Sequence: Synthetic oligonucleotide
  Sense strand starting at position 3588 of SEQ ID NO: 588477
uccacaucugaguaaccga

SEQ ID NO: 867803 - RNA, 19 nt, Artificial Sequence
  Description of Artificial Sequence: Synthetic oligonucleotide
  Antisense strand to SEQ ID NO: 867802
ucgguuacucagaugugga

SEQ ID NO: 867804 - RNA, 19 nt, Artificial Sequence
  Description of Artificial Sequence: Synthetic oligonucleotide
  Sense strand starting at position 3593 of SEQ ID NO: 588477
aucugaguaaccgagaagu

SEQ ID NO: 867805 - RNA, 19 nt, Artificial Sequence
  Description of Artificial Sequence: Synthetic oligonucleotide
  Antisense strand to SEQ ID NO: 867804
acuucucgguuacucagau

SEQ ID NO: 867806 - RNA, 19 nt, Artificial Sequence
  Description of Artificial Sequence: Synthetic oligonucleotide
  Sense strand starting at position 3595 of SEQ ID NO: 588477
cugaguaaccgagaagugu

SEQ ID NO: 867807 - RNA, 19 nt, Artificial Sequence
  Description of Artificial Sequence: Synthetic oligonucleotide
  Antisense strand to SEQ ID NO: 867806
acacuucucgguuacucag

SEQ ID NO: 867808 - RNA, 19 nt, Artificial Sequence
  Description of Artificial Sequence: Synthetic oligonucleotide
  Sense strand starting at position 3750 of SEQ ID NO: 588477
gauagacauuccuuguuga

SEQ ID NO: 867809 - RNA, 19 nt, Artificial Sequence
  Description of Artificial Sequence: Synthetic oligonucleotide
  Antisense strand to SEQ ID NO: 867808
ucaacaaggaaugucuauc

SEQ ID NO: 867810 - RNA, 19 nt, Artificial Sequence
  Description of Artificial Sequence: Synthetic oligonucleotide
  Sense strand starting at position 3751 of SEQ ID NO: 588477
auagacauuccuuguugac

SEQ ID NO: 867811 - RNA, 19 nt, Artificial Sequence
  Description of Artificial Sequence: Synthetic oligonucleotide
  Antisense strand to SEQ ID NO: 867810
gucaacaaggaaugucuau

SEQ ID NO: 867812 - RNA, 19 nt, Artificial Sequence
  Description of Artificial Sequence: Synthetic oligonucleotide
  Sense strand starting at position 3946 of SEQ ID NO: 588477
ggagauuguaucuggaggu

SEQ ID NO: 867813 - RNA, 19 nt, Artificial Sequence
  Description of Artificial Sequence: Synthetic oligonucleotide
  Antisense strand to SEQ ID NO: 867812
accuccagauacaaucucc

SEQ ID NO: 867814 - RNA, 19 nt, Artificial Sequence
  Description of Artificial Sequence: Synthetic oligonucleotide
  Sense strand starting at position 16 of SEQ ID NO: 588478
ggaaaugugacccaaacgu

SEQ ID NO: 867815 - RNA, 19 nt, Artificial Sequence
  Description of Artificial Sequence: Synthetic oligonucleotide
  Antisense strand to SEQ ID NO: 867814
acguuugggucacauuucc

SEQ ID NO: 867816 - RNA, 19 nt, Artificial Sequence
  Description of Artificial Sequence: Synthetic oligonucleotide
  Sense strand starting at position 33 of SEQ ID NO: 588478
gucccuuucggagauagag

SEQ ID NO: 867817 - RNA, 19 nt, Artificial Sequence
  Description of Artificial Sequence: Synthetic oligonucleotide
  Antisense strand to SEQ ID NO: 867816
cucuaucuccgaaagggac

SEQ ID NO: 867818 - RNA, 19 nt, Artificial Sequence
  Description of Artificial Sequence: Synthetic oligonucleotide
  Sense strand starting at position 35 of SEQ ID NO: 588478
cccuuucggagauagaguu

SEQ ID NO: 867819 - RNA, 19 nt, Artificial Sequence
  Description of Artificial Sequence: Synthetic oligonucleotide
  Antisense strand to SEQ ID NO: 867818
aacucuaucuccgaaaggg

SEQ ID NO: 867820 - RNA, 19 nt, Artificial Sequence
  Description of Artificial Sequence: Synthetic oligonucleotide
  Sense strand starting at position 42 of SEQ ID NO: 588478
ggagauagaguuugccuuu

SEQ ID NO: 867821 - RNA, 19 nt, Artificial Sequence
  Description of Artificial Sequence: Synthetic oligonucleotide
  Antisense strand to SEQ ID NO: 867820
aaaggcaaacucuaucucc

SEQ ID NO: 867822 - RNA, 19 nt, Artificial Sequence
  Description of Artificial Sequence: Synthetic oligonucleotide
  Sense strand starting at position 45 of SEQ ID NO: 588478
gauagaguuugccuuuguu

SEQ ID NO: 867823 - RNA, 19 nt, Artificial Sequence
  Description of Artificial Sequence: Synthetic oligonucleotide
  Antisense strand to SEQ ID NO: 867822
aacaaaggcaaacucuauc

SEQ ID NO: 867824 - RNA, 19 nt, Artificial Sequence
  Description of Artificial Sequence: Synthetic oligonucleotide
  Sense strand starting at position 276 of SEQ ID NO: 588478
gugguaggcuccucgcuaa

SEQ ID NO: 867825 - RNA, 19 nt, Artificial Sequence
  Description of Artificial Sequence: Synthetic oligonucleotide
  Antisense strand to SEQ ID NO: 867824
uuagcgaggagccuaccac

SEQ ID NO: 867826 - RNA, 19 nt, Artificial Sequence
  Description of Artificial Sequence: Synthetic oligonucleotide
  Sense strand starting at position 279 of SEQ ID NO: 588478
guaggcuccucgcuaaaca

SEQ ID NO: 867827 - RNA, 19 nt, Artificial Sequence
  Description of Artificial Sequence: Synthetic oligonucleotide
  Antisense strand to SEQ ID NO: 867826
uguuuagcgaggagccuac

SEQ ID NO: 867828 - RNA, 19 nt, Artificial Sequence
  Description of Artificial Sequence: Synthetic oligonucleotide
  Sense strand starting at position 721 of SEQ ID NO: 588478
gaucaaguuugagauguug

SEQ ID NO: 867829 - RNA, 19 nt, Artificial Sequence
  Description of Artificial Sequence: Synthetic oligonucleotide
  Antisense strand to SEQ ID NO: 867828
caacaucucaaacuugauc

SEQ ID NO: 867830 - RNA, 19 nt, Artificial Sequence
  Description of Artificial Sequence: Synthetic oligonucleotide
  Sense strand starting at position 723 of SEQ ID NO: 588478
ucaaguuugagauguugga

SEQ ID NO: 867831 - RNA, 19 nt, Artificial Sequence
  Description of Artificial Sequence: Synthetic oligonucleotide
  Antisense strand to SEQ ID NO: 867830
uccaacaucucaaacuuga

SEQ ID NO: 867832 - RNA, 19 nt, Artificial Sequence
  Description of Artificial Sequence: Synthetic oligonucleotide
  Sense strand starting at position 864 of SEQ ID NO: 588478
ccuccuggccaggguaaua

SEQ ID NO: 867833 - RNA, 19 nt, Artificial Sequence
  Description of Artificial Sequence: Synthetic oligonucleotide
  Antisense strand to SEQ ID NO: 867832
uauuacccuggccaggagg

SEQ ID NO: 867834 - RNA, 19 nt, Artificial Sequence
  Description of Artificial Sequence: Synthetic oligonucleotide
  Sense strand starting at position 876 of SEQ ID NO: 588478
gguaauacuugcgcuugca

SEQ ID NO: 867835 - RNA, 19 nt, Artificial Sequence
  Description of Artificial Sequence: Synthetic oligonucleotide
  Antisense strand to SEQ ID NO: 867834
ugcaagcgcaaguauuacc

SEQ ID NO: 867836 - RNA, 19 nt, Artificial Sequence
  Description of Artificial Sequence: Synthetic oligonucleotide
  Sense strand starting at position 1737 of SEQ ID NO: 588478
ggaucuugcgcagggagau

SEQ ID NO: 867837 - RNA, 19 nt, Artificial Sequence
  Description of Artificial Sequence: Synthetic oligonucleotide
  Antisense strand to SEQ ID NO: 867836
aucucccugcgcaagaucc

SEQ ID NO: 867838 - RNA, 19 nt, Artificial Sequence
  Description of Artificial Sequence: Synthetic oligonucleotide
  Sense strand starting at position 2074 of SEQ ID NO: 588478
cucugagagucuccugagu

SEQ ID NO: 867839 - RNA, 19 nt, Artificial Sequence
  Description of Artificial Sequence: Synthetic oligonucleotide
  Antisense strand to SEQ ID NO: 867838
acucaggagacucucagag

SEQ ID NO: 867840 - RNA, 19 nt, Artificial Sequence
  Description of Artificial Sequence: Synthetic oligonucleotide
  Sense strand starting at position 2141 of SEQ ID NO: 588478
ggcgguuccuuugugcuau

SEQ ID NO: 867841 - RNA, 19 nt, Artificial Sequence
  Description of Artificial Sequence: Synthetic oligonucleotide
  Antisense strand to SEQ ID NO: 867840
auagcacaaaggaaccgcc

SEQ ID NO: 867842 - RNA, 19 nt, Artificial Sequence
  Description of Artificial Sequence: Synthetic oligonucleotide
  Sense strand starting at position 2193 of SEQ ID NO: 588478
cgcugcugccucgaauguu

SEQ ID NO: 867843 - RNA, 19 nt, Artificial Sequence
  Description of Artificial Sequence: Synthetic oligonucleotide
  Antisense strand to SEQ ID NO: 867842
aacauucgaggcagcagcg

SEQ ID NO: 867844 - RNA, 19 nt, Artificial Sequence
  Description of Artificial Sequence: Synthetic oligonucleotide
  Sense strand starting at position 2586 of SEQ ID NO: 588478
gggccugacuccuugacuu

SEQ ID NO: 867845 - RNA, 19 nt, Artificial Sequence
  Description of Artificial Sequence: Synthetic oligonucleotide
  Antisense strand to SEQ ID NO: 867844
aagucaaggagucaggccc

SEQ ID NO: 867846 - RNA, 19 nt, Artificial Sequence
  Description of Artificial Sequence: Synthetic oligonucleotide
  Sense strand starting at position 2651 of SEQ ID NO: 588478
ccauuugucugacaggaaa

SEQ ID NO: 867847 - RNA, 19 nt, Artificial Sequence
  Description of Artificial Sequence: Synthetic oligonucleotide
  Antisense strand to SEQ ID NO: 867846
uuuccugucagacaaaugg

SEQ ID NO: 867848 - RNA, 19 nt, Artificial Sequence
  Description of Artificial Sequence: Synthetic oligonucleotide
  Sense strand starting at position 2691 of SEQ ID NO: 588478
gaccuucucugauggagag

SEQ ID NO: 867849 - RNA, 19 nt, Artificial Sequence
  Description of Artificial Sequence: Synthetic oligonucleotide
  Antisense strand to SEQ ID NO: 867848
cucuccaucagagaagguc

SEQ ID NO: 867850 - RNA, 19 nt, Artificial Sequence
  Description of Artificial Sequence: Synthetic oligonucleotide
  Sense strand starting at position 2790 of SEQ ID NO: 588478
cgcugagugcccuaaucac

SEQ ID NO: 867851 - RNA, 19 nt, Artificial Sequence
  Description of Artificial Sequence: Synthetic oligonucleotide
  Antisense strand to SEQ ID NO: 867850
gugauuagggcacucagcg

SEQ ID NO: 867852 - RNA, 19 nt, Artificial Sequence
  Description of Artificial Sequence: Synthetic oligonucleotide
  Sense strand starting at position 2823 of SEQ ID NO: 588478
uuccuuucgugccuaacua

SEQ ID NO: 867853 - RNA, 19 nt, Artificial Sequence
  Description of Artificial Sequence: Synthetic oligonucleotide
  Antisense strand to SEQ ID NO: 867852
uaguuaggcacgaaaggaa

SEQ ID NO: 867854 - RNA, 19 nt, Artificial Sequence
  Description of Artificial Sequence: Synthetic oligonucleotide
  Sense strand starting at position 2824 of SEQ ID NO: 588478
uccuuucgugccuaacuaa

SEQ ID NO: 867855 - RNA, 19 nt, Artificial Sequence
  Description of Artificial Sequence: Synthetic oligonucleotide
  Antisense strand to SEQ ID NO: 867854
uuaguuaggcacgaaagga

SEQ ID NO: 867856 - RNA, 19 nt, Artificial Sequence
  Description of Artificial Sequence: Synthetic oligonucleotide
  Sense strand starting at position 2827 of SEQ ID NO: 588478
uuucgugccuaacuaauaa

SEQ ID NO: 867857 - RNA, 19 nt, Artificial Sequence
  Description of Artificial Sequence: Synthetic oligonucleotide
  Antisense strand to SEQ ID NO: 867856
uuauuaguuaggcacgaaa

SEQ ID NO: 867858 - RNA, 19 nt, Artificial Sequence
  Description of Artificial Sequence: Synthetic oligonucleotide
  Sense strand starting at position 2861 of SEQ ID NO: 588478
cuauuauuaugggccuaau

SEQ ID NO: 867859 - RNA, 19 nt, Artificial Sequence
  Description of Artificial Sequence: Synthetic oligonucleotide
  Antisense strand to SEQ ID NO: 867858
auuaggcccauaauaauag

SEQ ID NO: 867860 - RNA, 19 nt, Artificial Sequence
  Description of Artificial Sequence: Synthetic oligonucleotide
  Sense strand starting at position 2864 of SEQ ID NO: 588478
uuauuaugggccuaauaug

SEQ ID NO: 867861 - RNA, 19 nt, Artificial Sequence
  Description of Artificial Sequence: Synthetic oligonucleotide
  Antisense strand to SEQ ID NO: 867860
cauauuaggcccauaauaa

SEQ ID NO: 867862 - RNA, 19 nt, Artificial Sequence
  Description of Artificial Sequence: Synthetic oligonucleotide
  Sense strand starting at position 3264 of SEQ ID NO: 588478
ucuggaggcucuuggaaau

SEQ ID NO: 867863 - RNA, 19 nt, Artificial Sequence
  Description of Artificial Sequence: Synthetic oligonucleotide
  Antisense strand to SEQ ID NO: 867862
auuuccaagagccuccaga

SEQ ID NO: 867864 - RNA, 19 nt, Artificial Sequence
  Description of Artificial Sequence: Synthetic oligonucleotide
  Sense strand starting at position 3267 of SEQ ID NO: 588478
ggaggcucuuggaaauggu

SEQ ID NO: 867865 - RNA, 19 nt, Artificial Sequence
  Description of Artificial Sequence: Synthetic oligonucleotide
  Antisense strand to SEQ ID NO: 867864
accauuuccaagagccucc

SEQ ID NO: 867866 - RNA, 19 nt, Artificial Sequence
  Description of Artificial Sequence: Synthetic oligonucleotide
  Sense strand starting at position 3275 of SEQ ID NO: 588478
uuggaaauggucuggaggu

SEQ ID NO: 867867 - RNA, 19 nt, Artificial Sequence
  Description of Artificial Sequence: Synthetic oligonucleotide
  Antisense strand to SEQ ID NO: 867866
accuccagaccauuuccaa

SEQ ID NO: 867868 - RNA, 19 nt, Artificial Sequence
  Description of Artificial Sequence: Synthetic oligonucleotide
  Sense strand starting at position 3342 of SEQ ID NO: 588478
ugcagagucucccagagau

SEQ ID NO: 867869 - RNA, 19 nt, Artificial Sequence
  Description of Artificial Sequence: Synthetic oligonucleotide
  Antisense strand to SEQ ID NO: 867868
aucucugggagacucugca

SEQ ID NO: 867870 - RNA, 19 nt, Artificial Sequence
  Description of Artificial Sequence: Synthetic oligonucleotide
  Sense strand starting at position 3346 of SEQ ID NO: 588478
gagucucccagagauaggu

SEQ ID NO: 867871 - RNA, 19 nt, Artificial Sequence
  Description of Artificial Sequence: Synthetic oligonucleotide
  Antisense strand to SEQ ID NO: 867870
accuaucucugggagacuc

SEQ ID NO: 867872 - RNA, 19 nt, Artificial Sequence
  Description of Artificial Sequence: Synthetic oligonucleotide
  Sense strand starting at position 3463 of SEQ ID NO: 588478
gcuuccuucugaguucuca

SEQ ID NO: 867873 - RNA, 19 nt, Artificial Sequence
  Description of Artificial Sequence: Synthetic oligonucleotide
  Antisense strand to SEQ ID NO: 867872
ugagaacucagaaggaagc

SEQ ID NO: 867874 - RNA, 19 nt, Artificial Sequence
  Description of Artificial Sequence: Synthetic oligonucleotide
  Sense strand starting at position 3542 of SEQ ID NO: 588478
ggucuuucuuuagucuuaa

SEQ ID NO: 867875 - RNA, 19 nt, Artificial Sequence
  Description of Artificial Sequence: Synthetic oligonucleotide
  Antisense strand to SEQ ID NO: 867874
uuaagacuaaagaaagacc

SEQ ID NO: 867876 - RNA, 19 nt, Artificial Sequence
  Description of Artificial Sequence: Synthetic oligonucleotide
  Sense strand starting at position 3543 of SEQ ID NO: 588478
gucuuucuuuagucuuaag

SEQ ID NO: 867877 - RNA, 19 nt, Artificial Sequence
  Description of Artificial Sequence: Synthetic oligonucleotide
  Antisense strand to SEQ ID NO: 867876
cuuaagacuaaagaaagac

SEQ ID NO: 867878 - RNA, 19 nt, Artificial Sequence
  Description of Artificial Sequence: Synthetic oligonucleotide
  Sense strand starting at position 3624 of SEQ ID NO: 588478
gacagaguuagcggguguu

SEQ ID NO: 867879 - RNA, 19 nt, Artificial Sequence
  Description of Artificial Sequence: Synthetic oligonucleotide
  Antisense strand to SEQ ID NO: 867878
aacacccgcuaacucuguc

SEQ ID NO: 867880 - RNA, 19 nt, Artificial Sequence
  Description of Artificial Sequence: Synthetic oligonucleotide
  Sense strand starting at position 3627 of SEQ ID NO: 588478
agaguuagcggguguuuac

SEQ ID NO: 867881 - RNA, 19 nt, Artificial Sequence
  Description of Artificial Sequence: Synthetic oligonucleotide
  Antisense strand to SEQ ID NO: 867880
guaaacacccgcuaacucu

SEQ ID NO: 867882 - RNA, 19 nt, Artificial Sequence
  Description of Artificial Sequence: Synthetic oligonucleotide
  Sense strand starting at position 3634 of SEQ ID NO: 588478
gcggguguuuacuucauuu

SEQ ID NO: 867883 - RNA, 19 nt, Artificial Sequence
  Description of Artificial Sequence: Synthetic oligonucleotide
  Antisense strand to SEQ ID NO: 867882
aaaugaaguaaacacccgc

SEQ ID NO: 867884 - RNA, 19 nt, Artificial Sequence
  Description of Artificial Sequence: Synthetic oligonucleotide
  Sense strand starting at position 3681 of SEQ ID NO: 588478
gcgugagacuugcccaaga

SEQ ID NO: 867885 - RNA, 19 nt, Artificial Sequence
  Description of Artificial Sequence: Synthetic oligonucleotide
  Antisense strand to SEQ ID NO: 867884
ucuugggcaagucucacgc

SEQ ID NO: 867886 - RNA, 19 nt, Artificial Sequence
  Description of Artificial Sequence: Synthetic oligonucleotide
  Sense strand starting at position 3683 of SEQ ID NO: 588478
gugagacuugcccaagauc

SEQ ID NO: 867887 - RNA, 19 nt, Artificial Sequence
  Description of Artificial Sequence: Synthetic oligonucleotide
  Antisense strand to SEQ ID NO: 867886
gaucuugggcaagucucac

SEQ ID NO: 867888 - RNA, 19 nt, Artificial Sequence
  Description of Artificial Sequence: Synthetic oligonucleotide
  Sense strand starting at position 3836 of SEQ ID NO: 588478
ucagauaaaggauguccua

SEQ ID NO: 867889 - RNA, 19 nt, Artificial Sequence
  Description of Artificial Sequence: Synthetic oligonucleotide
  Antisense strand to SEQ ID NO: 867888
uaggacauccuuuaucuga

SEQ ID NO: 867890 - RNA, 19 nt, Artificial Sequence
  Description of Artificial Sequence: Synthetic oligonucleotide
  Sense strand starting at position 3894 of SEQ ID NO: 588478
acuugcucaggugauaaca

SEQ ID NO: 867891 - RNA, 19 nt, Artificial Sequence
  Description of Artificial Sequence: Synthetic oligonucleotide
  Antisense strand to SEQ ID NO: 867890
uguuaucaccugagcaagu

SEQ ID NO: 867892 - RNA, 19 nt, Artificial Sequence
  Description of Artificial Sequence: Synthetic oligonucleotide
  Sense strand starting at position 3903 of SEQ ID NO: 588478
ggugauaacacguagaagu

SEQ ID NO: 867893 - RNA, 19 nt, Artificial Sequence
  Description of Artificial Sequence: Synthetic oligonucleotide
  Antisense strand to SEQ ID NO: 867892
acuucuacguguuaucacc

SEQ ID NO: 867894 - RNA, 19 nt, Artificial Sequence
  Description of Artificial Sequence: Synthetic oligonucleotide
  Sense strand starting at position 102 of SEQ ID NO: 588479
acaguaucaguccauuguu

SEQ ID NO: 867895 - RNA, 19 nt, Artificial Sequence
  Description of Artificial Sequence: Synthetic oligonucleotide
  Antisense strand to SEQ ID NO: 867894
aacaauggacugauacugu

SEQ ID NO: 867896 - RNA, 19 nt, Artificial Sequence
  Description of Artificial Sequence: Synthetic oligonucleotide
  Sense strand starting at position 105 of SEQ ID NO: 588479
guaucaguccauuguugca

SEQ ID NO: 867897 - RNA, 19 nt, Artificial Sequence
  Description of Artificial Sequence: Synthetic oligonucleotide
  Antisense strand to SEQ ID NO: 867896
ugcaacaauggacugauac

SEQ ID NO: 867898 - RNA, 19 nt, Artificial Sequence
  Description of Artificial Sequence: Synthetic oligonucleotide
  Sense strand starting at position 118 of SEQ ID NO: 588479
guugcagugcuacaaagaa

SEQ ID NO: 867899 - RNA, 19 nt, Artificial Sequence
  Description of Artificial Sequence: Synthetic oligonucleotide
  Antisense strand to SEQ ID NO: 867898
uucuuuguagcacugcaac

SEQ ID NO: 867900 - RNA, 19 nt, Artificial Sequence
  Description of Artificial Sequence: Synthetic oligonucleotide
  Sense strand starting at position 481 of SEQ ID NO: 588479
ucuuguuguuagucuaaua

SEQ ID NO: 867901 - RNA, 19 nt, Artificial Sequence
  Description of Artificial Sequence: Synthetic oligonucleotide
  Antisense strand to SEQ ID NO: 867900
uauuagacuaacaacaaga

SEQ ID NO: 867902 - RNA, 19 nt, Artificial Sequence
  Description of Artificial Sequence: Synthetic oligonucleotide
  Sense strand starting at position 486 of SEQ ID NO: 588479
uuguuagucuaauauaagg

SEQ ID NO: 867903 - RNA, 19 nt, Artificial Sequence
  Description of Artificial Sequence: Synthetic oligonucleotide
  Antisense strand to SEQ ID NO: 867902
ccuuauauuagacuaacaa

SEQ ID NO: 867904 - RNA, 19 nt, Artificial Sequence
  Description of Artificial Sequence: Synthetic oligonucleotide
  Sense strand starting at position 618 of SEQ ID NO: 588479
acuuccauuucugggauuu

SEQ ID NO: 867905 - RNA, 19 nt, Artificial Sequence
  Description of Artificial Sequence: Synthetic oligonucleotide
  Antisense strand to SEQ ID NO: 867904
aaaucccagaaauggaagu

SEQ ID NO: 867906 - RNA, 19 nt, Artificial Sequence
  Description of Artificial Sequence: Synthetic oligonucleotide
  Sense strand starting at position 660 of SEQ ID NO: 588479
gcaacugcauuccuuguaa

SEQ ID NO: 867907 - RNA, 19 nt, Artificial Sequence
  Description of Artificial Sequence: Synthetic oligonucleotide
  Antisense strand to SEQ ID NO: 867906
uuacaaggaaugcaguugc

SEQ ID NO: 867908 - RNA, 19 nt, Artificial Sequence
  Description of Artificial Sequence: Synthetic oligonucleotide
  Sense strand starting at position 717 of SEQ ID NO: 588479
cuacuagauguuuaccagu

SEQ ID NO: 867909 - RNA, 19 nt, Artificial Sequence
  Description of Artificial Sequence: Synthetic oligonucleotide
  Antisense strand to SEQ ID NO: 867908
acugguaaacaucuaguag

SEQ ID NO: 867910 - RNA, 19 nt, Artificial Sequence
  Description of Artificial Sequence: Synthetic oligonucleotide
  Sense strand starting at position 719 of SEQ ID NO: 588479
acuagauguuuaccaguca

SEQ ID NO: 867911 - RNA, 19 nt, Artificial Sequence
  Description of Artificial Sequence: Synthetic oligonucleotide
  Antisense strand to SEQ ID NO: 867910
ugacugguaaacaucuagu

SEQ ID NO: 867912 - RNA, 19 nt, Artificial Sequence
  Description of Artificial Sequence: Synthetic oligonucleotide
  Sense strand starting at position 798 of SEQ ID NO: 588479
gagaaaucauuaguugcuc

SEQ ID NO: 867913 - RNA, 19 nt, Artificial Sequence
  Description of Artificial Sequence: Synthetic oligonucleotide
  Antisense strand to SEQ ID NO: 867912
gagcaacuaaugauuucuc

SEQ ID NO: 867914 - RNA, 19 nt, Artificial Sequence
  Description of Artificial Sequence: Synthetic oligonucleotide
  Sense strand starting at position 810 of SEQ ID NO: 588479
guugcuccuucuucucaua

SEQ ID NO: 867915 - RNA, 19 nt, Artificial Sequence
  Description of Artificial Sequence: Synthetic oligonucleotide
  Antisense strand to SEQ ID NO: 867914
uaugagaagaaggagcaac

SEQ ID NO: 867916 - RNA, 19 nt, Artificial Sequence
  Description of Artificial Sequence: Synthetic oligonucleotide
  Sense strand starting at position 855 of SEQ ID NO: 588479
ugauuaccaucuuuaguuu

SEQ ID NO: 867917 - RNA, 19 nt, Artificial Sequence
  Description of Artificial Sequence: Synthetic oligonucleotide
  Antisense strand to SEQ ID NO: 867916
aaacuaaagaugguaauca

SEQ ID NO: 867918 - RNA, 19 nt, Artificial Sequence
  Description of Artificial Sequence: Synthetic oligonucleotide
  Sense strand starting at position 927 of SEQ ID NO: 588479
ucagcuuuauaucuugagu

SEQ ID NO: 867919 - RNA, 19 nt, Artificial Sequence
  Description of Artificial Sequence: Synthetic oligonucleotide
  Antisense strand to SEQ ID NO: 867918
acucaagauauaaagcuga

SEQ ID NO: 867920 - RNA, 19 nt, Artificial Sequence
  Description of Artificial Sequence: Synthetic oligonucleotide
  Sense strand starting at position 930 of SEQ ID NO: 588479
gcuuuauaucuugaguaca

SEQ ID NO: 867921 - RNA, 19 nt, Artificial Sequence
  Description of Artificial Sequence: Synthetic oligonucleotide
  Antisense strand to SEQ ID NO: 867920
uguacucaagauauaaagc

SEQ ID NO: 867922 - RNA, 19 nt, Artificial Sequence
  Description of Artificial Sequence: Synthetic oligonucleotide
  Sense strand starting at position 960 of SEQ ID NO: 588479
gguuuagagaaaggucauu

SEQ ID NO: 867923 - RNA, 19 nt, Artificial Sequence
  Description of Artificial Sequence: Synthetic oligonucleotide
  Antisense strand to SEQ ID NO: 867922
aaugaccuuucucuaaacc

SEQ ID NO: 867924 - RNA, 19 nt, Artificial Sequence
  Description of Artificial Sequence: Synthetic oligonucleotide
  Sense strand starting at position 1088 of SEQ ID NO: 588479
acaggaaguuccuauagua

SEQ ID NO: 867925 - RNA, 19 nt, Artificial Sequence
  Description of Artificial Sequence: Synthetic oligonucleotide
  Antisense strand to SEQ ID NO: 867924
uacuauaggaacuuccugu

SEQ ID NO: 867926 - RNA, 19 nt, Artificial Sequence
  Description of Artificial Sequence: Synthetic oligonucleotide
  Sense strand starting at position 2019 of SEQ ID NO: 588479
aggccuugcuuccugcaaa

SEQ ID NO: 867927 - RNA, 19 nt, Artificial Sequence
  Description of Artificial Sequence: Synthetic oligonucleotide
  Antisense strand to SEQ ID NO: 867926
uuugcaggaagcaaggccu

SEQ ID NO: 867928 - RNA, 19 nt, Artificial Sequence
  Description of Artificial Sequence: Synthetic oligonucleotide
  Sense strand starting at position 2031 of SEQ ID NO: 588479
cugcaaaugccuuaaauag

SEQ ID NO: 867929 - RNA, 19 nt, Artificial Sequence
  Description of Artificial Sequence: Synthetic oligonucleotide
  Antisense strand to SEQ ID NO: 867928
cuauuuaaggcauuugcag

SEQ ID NO: 867930 - RNA, 19 nt, Artificial Sequence
  Description of Artificial Sequence: Synthetic oligonucleotide
  Sense strand starting at position 2038 of SEQ ID NO: 588479
ugccuuaaauagggaacau

SEQ ID NO: 867931 - RNA, 19 nt, Artificial Sequence
  Description of Artificial Sequence: Synthetic oligonucleotide
  Antisense strand to SEQ ID NO: 867930
auguucccuauuuaaggca

SEQ ID NO: 867932 - RNA, 19 nt, Artificial Sequence
  Description of Artificial Sequence: Synthetic oligonucleotide
  Sense strand starting at position 2123 of SEQ ID NO: 588479
cucuuuacaugaguuuaga

SEQ ID NO: 867933 - RNA, 19 nt, Artificial Sequence
  Description of Artificial Sequence: Synthetic oligonucleotide
  Antisense strand to SEQ ID NO: 867932
ucuaaacucauguaaagag

SEQ ID NO: 867934 - RNA, 19 nt, Artificial Sequence
  Description of Artificial Sequence: Synthetic oligonucleotide
  Sense strand starting at position 2132 of SEQ ID NO: 588479
ugaguuuagagccguguuu

SEQ ID NO: 867935 - RNA, 19 nt, Artificial Sequence
  Description of Artificial Sequence: Synthetic oligonucleotide
  Antisense strand to SEQ ID NO: 867934
aaacacggcucuaaacuca

SEQ ID NO: 867936 - RNA, 19 nt, Artificial Sequence
  Description of Artificial Sequence: Synthetic oligonucleotide
  Sense strand starting at position 2134 of SEQ ID NO: 588479
aguuuagagccguguuucu

SEQ ID NO: 867937 - RNA, 19 nt, Artificial Sequence
  Description of Artificial Sequence: Synthetic oligonucleotide
  Antisense strand to SEQ ID NO: 867936
agaaacacggcucuaaacu

SEQ ID NO: 867938 - RNA, 19 nt, Artificial Sequence
  Description of Artificial Sequence: Synthetic oligonucleotide
  Sense strand starting at position 2182 of SEQ ID NO: 588479
cccaucuuguucccagaga

SEQ ID NO: 867939 - RNA, 19 nt, Artificial Sequence
  Description of Artificial Sequence: Synthetic oligonucleotide
  Antisense strand to SEQ ID NO: 867938
ucucugggaacaagauggg

SEQ ID NO: 867940 - RNA, 19 nt, Artificial Sequence
  Description of Artificial Sequence: Synthetic oligonucleotide
  Sense strand starting at position 2884 of SEQ ID NO: 588479
auuugaaagugauaaacac

SEQ ID NO: 867941 - RNA, 19 nt, Artificial Sequence
  Description of Artificial Sequence: Synthetic oligonucleotide
  Antisense strand to SEQ ID NO: 867940
guguuuaucacuuucaaau

SEQ ID NO: 867942 - RNA, 19 nt, Artificial Sequence
  Description of Artificial Sequence: Synthetic oligonucleotide
  Sense strand starting at position 3207 of SEQ ID NO: 588479
uugauuuauuccugggaug

SEQ ID NO: 867943 - RNA, 19 nt, Artificial Sequence
  Description of Artificial Sequence: Synthetic oligonucleotide
  Antisense strand to SEQ ID NO: 867942
caucccaggaauaaaucaa

SEQ ID NO: 867944 - RNA, 19 nt, Artificial Sequence
  Description of Artificial Sequence: Synthetic oligonucleotide
  Sense strand starting at position 3421 of SEQ ID NO: 588479
gcuauaagauaagccauua

SEQ ID NO: 867945 - RNA, 19 nt, Artificial Sequence
  Description of Artificial Sequence: Synthetic oligonucleotide
  Antisense strand to SEQ ID NO: 867944
uaauggcuuaucuuauagc

SEQ ID NO: 867946 - RNA, 19 nt, Artificial Sequence
  Description of Artificial Sequence: Synthetic oligonucleotide
  Sense strand starting at position 3444 of SEQ ID NO: 588479
acacuauagucagugguga

SEQ ID NO: 867947 - RNA, 19 nt, Artificial Sequence
  Description of Artificial Sequence: Synthetic oligonucleotide
  Antisense strand to SEQ ID NO: 867946
ucaccacugacuauagugu

SEQ ID NO: 867948 - RNA, 19 nt, Artificial Sequence
  Description of Artificial Sequence: Synthetic oligonucleotide
  Sense strand starting at position 3445 of SEQ ID NO: 588479
cacuauagucaguggugaa

SEQ ID NO: 867949 - RNA, 19 nt, Artificial Sequence
  Description of Artificial Sequence: Synthetic oligonucleotide
  Antisense strand to SEQ ID NO: 867948
uucaccacugacuauagug

SEQ ID NO: 867950 - RNA, 19 nt, Artificial Sequence
  Description of Artificial Sequence: Synthetic oligonucleotide
  Sense strand starting at position 3446 of SEQ ID NO: 588479
acuauagucaguggugaaa

SEQ ID NO: 867951 - RNA, 19 nt, Artificial Sequence
  Description of Artificial Sequence: Synthetic oligonucleotide
  Antisense strand to SEQ ID NO: 867950
uuucaccacugacuauagu

SEQ ID NO: 867952 - RNA, 19 nt, Artificial Sequence
  Description of Artificial Sequence: Synthetic oligonucleotide
  Sense strand starting at position 3549 of SEQ ID NO: 588479
cucagaauauuagacaaga

SEQ ID NO: 867953 - RNA, 19 nt, Artificial Sequence
  Description of Artificial Sequence: Synthetic oligonucleotide
  Antisense strand to SEQ ID NO: 867952
ucuugucuaauauucugag

SEQ ID NO: 867954 - RNA, 19 nt, Artificial Sequence
  Description of Artificial Sequence: Synthetic oligonucleotide
  Sense strand starting at position 3614 of SEQ ID NO: 588479
ggagauuaaugcucagagu

SEQ ID NO: 867955 - RNA, 19 nt, Artificial Sequence
  Description of Artificial Sequence: Synthetic oligonucleotide
  Antisense strand to SEQ ID NO: 867954
acucugagcauuaaucucc

SEQ ID NO: 867956 - RNA, 19 nt, Artificial Sequence
  Description of Artificial Sequence: Synthetic oligonucleotide
  Sense strand starting at position 3615 of SEQ ID NO: 588479
gagauuaaugcucagaguu

SEQ ID NO: 867957 - RNA, 19 nt, Artificial Sequence
  Description of Artificial Sequence: Synthetic oligonucleotide
  Antisense strand to SEQ ID NO: 867956
aacucugagcauuaaucuc

SEQ ID NO: 867958 - RNA, 19 nt, Artificial Sequence
  Description of Artificial Sequence: Synthetic oligonucleotide
  Sense strand starting at position 3654 of SEQ ID NO: 588479
caugaaagcugguacaauc

SEQ ID NO: 867959 - RNA, 19 nt, Artificial Sequence
  Description of Artificial Sequence: Synthetic oligonucleotide
  Antisense strand to SEQ ID NO: 867958
gauuguaccagcuuucaug

SEQ ID NO: 867960 - RNA, 19 nt, Artificial Sequence
  Description of Artificial Sequence: Synthetic oligonucleotide
  Sense strand starting at position 3661 of SEQ ID NO: 588479
gcugguacaauccaggaau

SEQ ID NO: 867961 - RNA, 19 nt, Artificial Sequence
  Description of Artificial Sequence: Synthetic oligonucleotide
  Antisense strand to SEQ ID NO: 867960
auuccuggauuguaccagc

SEQ ID NO: 867962 - RNA, 19 nt, Artificial Sequence
  Description of Artificial Sequence: Synthetic oligonucleotide
  Sense strand starting at position 3663 of SEQ ID NO: 588479
ugguacaauccaggaauca

SEQ ID NO: 867963 - RNA, 19 nt, Artificial Sequence
  Description of Artificial Sequence: Synthetic oligonucleotide
  Antisense strand to SEQ ID NO: 867962
ugauuccuggauuguacca

SEQ ID NO: 867964 - RNA, 19 nt, Artificial Sequence
  Description of Artificial Sequence: Synthetic oligonucleotide
  Sense strand starting at position 3758 of SEQ ID NO: 588479
ggauguuuccauugucuac

SEQ ID NO: 867965 - RNA, 19 nt, Artificial Sequence
  Description of Artificial Sequence: Synthetic oligonucleotide
  Antisense strand to SEQ ID NO: 867964
guagacaauggaaacaucc

SEQ ID NO: 867966 - RNA, 19 nt, Artificial Sequence
  Description of Artificial Sequence: Synthetic oligonucleotide
  Sense strand starting at position 3762 of SEQ ID NO: 588479
guuuccauugucuacacau

SEQ ID NO: 867967 - RNA, 19 nt, Artificial Sequence
  Description of Artificial Sequence: Synthetic oligonucleotide
  Antisense strand to SEQ ID NO: 867966
auguguagacaauggaaac

SEQ ID NO: 867968 - RNA, 19 nt, Artificial Sequence
  Description of Artificial Sequence: Synthetic oligonucleotide
  Sense strand starting at position 3863 of SEQ ID NO: 588479
ugugaaaccugacagguuu

SEQ ID NO: 867969 - RNA, 19 nt, Artificial Sequence
  Description of Artificial Sequence: Synthetic oligonucleotide
  Antisense strand to SEQ ID NO: 867968
aaaccugucagguuucaca

SEQ ID NO: 867970 - RNA, 19 nt, Artificial Sequence
  Description of Artificial Sequence: Synthetic oligonucleotide
  Sense strand starting at position 3957 of SEQ ID NO: 588479
aggucaucaucugugacuu

SEQ ID NO: 867971 - RNA, 19 nt, Artificial Sequence
  Description of Artificial Sequence: Synthetic oligonucleotide
  Antisense strand to SEQ ID NO: 867970
aagucacagaugaugaccu

SEQ ID NO: 867972 - RNA, 19 nt, Artificial Sequence
  Description of Artificial Sequence: Synthetic oligonucleotide
  Sense strand starting at position 3958 of SEQ ID NO: 588479
ggucaucaucugugacuuu

SEQ ID NO: 867973 - RNA, 19 nt, Artificial Sequence
  Description of Artificial Sequence: Synthetic oligonucleotide
  Antisense strand to SEQ ID NO: 867972
aaagucacagaugaugacc

SEQ ID NO: 867974 - RNA, 19 nt, Artificial Sequence
  Description of Artificial Sequence: Synthetic oligonucleotide
  Sense strand starting at position 264 of SEQ ID NO: 588480
gcugauuaauucuaugaau

SEQ ID NO: 867975 - RNA, 19 nt, Artificial Sequence
  Description of Artificial Sequence: Synthetic oligonucleotide
  Antisense strand to SEQ ID NO: 867974
auucauagaauuaaucagc

SEQ ID NO: 867976 - RNA, 19 nt, Artificial Sequence
  Description of Artificial Sequence: Synthetic oligonucleotide
  Sense strand starting at position 420 of SEQ ID NO: 588480
uuguccuucuaauguuaag

SEQ ID NO: 867977 - RNA, 19 nt, Artificial Sequence
  Description of Artificial Sequence: Synthetic oligonucleotide
  Antisense strand to SEQ ID NO: 867976
cuuaacauuagaaggacaa

SEQ ID NO: 867978 - RNA, 19 nt, Artificial Sequence
  Description of Artificial Sequence: Synthetic oligonucleotide
  Sense strand starting at position 423 of SEQ ID NO: 588480
uccuucuaauguuaaggua

SEQ ID NO: 867979 - RNA, 19 nt, Artificial Sequence
  Description of Artificial Sequence: Synthetic oligonucleotide
  Antisense strand to SEQ ID NO: 867978
uaccuuaacauuagaagga

SEQ ID NO: 867980 - RNA, 19 nt, Artificial Sequence
  Description of Artificial Sequence: Synthetic oligonucleotide
  Sense strand starting at position 478 of SEQ ID NO: 588480
acacuuuaaugguggaaga

SEQ ID NO: 867981 - RNA, 19 nt, Artificial Sequence
  Description of Artificial Sequence: Synthetic oligonucleotide
  Antisense strand to SEQ ID NO: 867980
ucuuccaccauuaaagugu

SEQ ID NO: 867982 - RNA, 19 nt, Artificial Sequence
  Description of Artificial Sequence: Synthetic oligonucleotide
  Sense strand starting at position 479 of SEQ ID NO: 588480
cacuuuaaugguggaagau

SEQ ID NO: 867983 - RNA, 19 nt, Artificial Sequence
  Description of Artificial Sequence: Synthetic oligonucleotide
  Antisense strand to SEQ ID NO: 867982
aucuuccaccauuaaagug

SEQ ID NO: 867984 - RNA, 19 nt, Artificial Sequence
  Description of Artificial Sequence: Synthetic oligonucleotide
  Sense strand starting at position 491 of SEQ ID NO: 588480
ggaagauccucagaaucca

SEQ ID NO: 867985 - RNA, 19 nt, Artificial Sequence
  Description of Artificial Sequence: Synthetic oligonucleotide
  Antisense strand to SEQ ID NO: 867984
uggauucugaggaucuucc

SEQ ID NO: 867986 - RNA, 19 nt, Artificial Sequence
  Description of Artificial Sequence: Synthetic oligonucleotide
  Sense strand starting at position 557 of SEQ ID NO: 588480
ucauuugcguccuuuccau

SEQ ID NO: 867987 - RNA, 19 nt, Artificial Sequence
  Description of Artificial Sequence: Synthetic oligonucleotide
  Antisense strand to SEQ ID NO: 867986
auggaaaggacgcaaauga

SEQ ID NO: 867988 - RNA, 19 nt, Artificial Sequence
  Description of Artificial Sequence: Synthetic oligonucleotide
  Sense strand starting at position 868 of SEQ ID NO: 588480
ucacguuuauauccugaag

SEQ ID NO: 867989 - RNA, 19 nt, Artificial Sequence
  Description of Artificial Sequence: Synthetic oligonucleotide
  Antisense strand to SEQ ID NO: 867988
cuucaggauauaaacguga

SEQ ID NO: 867990 - RNA, 19 nt, Artificial Sequence
  Description of Artificial Sequence: Synthetic oligonucleotide
  Sense strand starting at position 871 of SEQ ID NO: 588480
cguuuauauccugaaggca

SEQ ID NO: 867991 - RNA, 19 nt, Artificial Sequence
  Description of Artificial Sequence: Synthetic oligonucleotide
  Antisense strand to SEQ ID NO: 867990
ugccuucaggauauaaacg

SEQ ID NO: 867992 - RNA, 19 nt, Artificial Sequence
  Description of Artificial Sequence: Synthetic oligonucleotide
  Sense strand starting at position 1117 of SEQ ID NO: 588480
uguaaagcgacucaugaua

SEQ ID NO: 867993 - RNA, 19 nt, Artificial Sequence
  Description of Artificial Sequence: Synthetic oligonucleotide
  Antisense strand to SEQ ID NO: 867992
uaucaugagucgcuuuaca

SEQ ID NO: 867994 - RNA, 19 nt, Artificial Sequence
  Description of Artificial Sequence: Synthetic oligonucleotide
  Sense strand starting at position 1122 of SEQ ID NO: 588480
agcgacucaugauauuaca

SEQ ID NO: 867995 - RNA, 19 nt, Artificial Sequence
  Description of Artificial Sequence: Synthetic oligonucleotide
  Antisense strand to SEQ ID NO: 867994
uguaauaucaugagucgcu

SEQ ID NO: 867996 - RNA, 19 nt, Artificial Sequence
  Description of Artificial Sequence: Synthetic oligonucleotide
  Sense strand starting at position 1277 of SEQ ID NO: 588480
gauucaacgcgucgugguu

SEQ ID NO: 867997 - RNA, 19 nt, Artificial Sequence
  Description of Artificial Sequence: Synthetic oligonucleotide
  Antisense strand to SEQ ID NO: 867996
aaccacgacgcguugaauc

SEQ ID NO: 867998 - RNA, 19 nt, Artificial Sequence
  Description of Artificial Sequence: Synthetic oligonucleotide
  Sense strand starting at position 1283 of SEQ ID NO: 588480
acgcgucgugguuauagaa

SEQ ID NO: 867999 - RNA, 19 nt, Artificial Sequence
  Description of Artificial Sequence: Synthetic oligonucleotide
  Antisense strand to SEQ ID NO: 867998
uucuauaaccacgacgcgu

SEQ ID NO: 868000 - RNA, 19 nt, Artificial Sequence
  Description of Artificial Sequence: Synthetic oligonucleotide
  Sense strand starting at position 1285 of SEQ ID NO: 588480
gcgucgugguuauagaagu

SEQ ID NO: 868001 - RNA, 19 nt, Artificial Sequence
  Description of Artificial Sequence: Synthetic oligonucleotide
  Antisense strand to SEQ ID NO: 868000
acuucuauaaccacgacgc

SEQ ID NO: 868002 - RNA, 19 nt, Artificial Sequence
  Description of Artificial Sequence: Synthetic oligonucleotide
  Sense strand starting at position 1474 of SEQ ID NO: 588480
ggcuguauuuccucucuau

SEQ ID NO: 868003 - RNA, 19 nt, Artificial Sequence
  Description of Artificial Sequence: Synthetic oligonucleotide
  Antisense strand to SEQ ID NO: 868002
auagagaggaaauacagcc

SEQ ID NO: 868004 - RNA, 19 nt, Artificial Sequence
  Description of Artificial Sequence: Synthetic oligonucleotide
  Sense strand starting at position 1820 of SEQ ID NO: 588480
ucccauuugucccaggagu

SEQ ID NO: 868005 - RNA, 19 nt, Artificial Sequence
  Description of Artificial Sequence: Synthetic oligonucleotide
  Antisense strand to SEQ ID NO: 868004
acuccugggacaaauggga

SEQ ID NO: 868006 - RNA, 19 nt, Artificial Sequence
  Description of Artificial Sequence: Synthetic oligonucleotide
  Sense strand starting at position 2502 of SEQ ID NO: 588480
auaugaauguaguuaccua

SEQ ID NO: 868007 - RNA, 19 nt, Artificial Sequence
  Description of Artificial Sequence: Synthetic oligonucleotide
  Antisense strand to SEQ ID NO: 868006
uagguaacuacauucauau

SEQ ID NO: 868008 - RNA, 19 nt, Artificial Sequence
  Description of Artificial Sequence: Synthetic oligonucleotide
  Sense strand starting at position 2510 of SEQ ID NO: 588480
guaguuaccuaccuaauca

SEQ ID NO: 868009 - RNA, 19 nt, Artificial Sequence
  Description of Artificial Sequence: Synthetic oligonucleotide
  Antisense strand to SEQ ID NO: 868008
ugauuagguagguaacuac

SEQ ID NO: 868010 - RNA, 19 nt, Artificial Sequence
  Description of Artificial Sequence: Synthetic oligonucleotide
  Sense strand starting at position 2684 of SEQ ID NO: 588480
ugacacaaguacugaugua

SEQ ID NO: 868011 - RNA, 19 nt, Artificial Sequence
  Description of Artificial Sequence: Synthetic oligonucleotide
  Antisense strand to SEQ ID NO: 868010
uacaucaguacuuguguca

SEQ ID NO: 868012 - RNA, 19 nt, Artificial Sequence
  Description of Artificial Sequence: Synthetic oligonucleotide
  Sense strand starting at position 2736 of SEQ ID NO: 588480
guaagcuauuuggauugaa

SEQ ID NO: 868013 - RNA, 19 nt, Artificial Sequence
  Description of Artificial Sequence: Synthetic oligonucleotide
  Antisense strand to SEQ ID NO: 868012
uucaauccaaauagcuuac

SEQ ID NO: 868014 - RNA, 19 nt, Artificial Sequence
  Description of Artificial Sequence: Synthetic oligonucleotide
  Sense strand starting at position 2746 of SEQ ID NO: 588480
uggauugaauucucaaagu

SEQ ID NO: 868015 - RNA, 19 nt, Artificial Sequence
  Description of Artificial Sequence: Synthetic oligonucleotide
  Antisense strand to SEQ ID NO: 868014
acuuugagaauucaaucca

SEQ ID NO: 868016 - RNA, 19 nt, Artificial Sequence
  Description of Artificial Sequence: Synthetic oligonucleotide
  Sense strand starting at position 2915 of SEQ ID NO: 588480
ucaucuauuugcuauaggu

SEQ ID NO: 868017 - RNA, 19 nt, Artificial Sequence
  Description of Artificial Sequence: Synthetic oligonucleotide
  Antisense strand to SEQ ID NO: 868016
accuauagcaaauagauga

SEQ ID NO: 868018 - RNA, 19 nt, Artificial Sequence
  Description of Artificial Sequence: Synthetic oligonucleotide
  Sense strand starting at position 2923 of SEQ ID NO: 588480
uugcuauagguuuguaaca

SEQ ID NO: 868019 - RNA, 19 nt, Artificial Sequence
  Description of Artificial Sequence: Synthetic oligonucleotide
  Antisense strand to SEQ ID NO: 868018
uguuacaaaccuauagcaa

SEQ ID NO: 868020 - RNA, 19 nt, Artificial Sequence
  Description of Artificial Sequence: Synthetic oligonucleotide
  Sense strand starting at position 2924 of SEQ ID NO: 588480
ugcuauagguuuguaacau

SEQ ID NO: 868021 - RNA, 19 nt, Artificial Sequence
  Description of Artificial Sequence: Synthetic oligonucleotide
  Antisense strand to SEQ ID NO: 868020
auguuacaaaccuauagca

SEQ ID NO: 868022 - RNA, 19 nt, Artificial Sequence
  Description of Artificial Sequence: Synthetic oligonucleotide
  Sense strand starting at position 2925 of SEQ ID NO: 588480
gcuauagguuuguaacauu

SEQ ID NO: 868023 - RNA, 19 nt, Artificial Sequence
  Description of Artificial Sequence: Synthetic oligonucleotide
  Antisense strand to SEQ ID NO: 868022
aauguuacaaaccuauagc

SEQ ID NO: 868024 - RNA, 19 nt, Artificial Sequence
  Description of Artificial Sequence: Synthetic oligonucleotide
  Sense strand starting at position 2932 of SEQ ID NO: 588480
guuuguaacauuggucuua

SEQ ID NO: 868025 - RNA, 19 nt, Artificial Sequence
  Description of Artificial Sequence: Synthetic oligonucleotide
  Antisense strand to SEQ ID NO: 868024
uaagaccaauguuacaaac

SEQ ID NO: 868026 - RNA, 19 nt, Artificial Sequence
  Description of Artificial Sequence: Synthetic oligonucleotide
  Sense strand starting at position 2934 of SEQ ID NO: 588480
uuguaacauuggucuuaca

SEQ ID NO: 868027 - RNA, 19 nt, Artificial Sequence
  Description of Artificial Sequence: Synthetic oligonucleotide
  Antisense strand to SEQ ID NO: 868026
uguaagaccaauguuacaa

SEQ ID NO: 868028 - RNA, 19 nt, Artificial Sequence
  Description of Artificial Sequence: Synthetic oligonucleotide
  Sense strand starting at position 3052 of SEQ ID NO: 588480
uggauagaguuguuggaaa

SEQ ID NO: 868029 - RNA, 19 nt, Artificial Sequence
  Description of Artificial Sequence: Synthetic oligonucleotide
  Antisense strand to SEQ ID NO: 868028
uuuccaacaacucuaucca

SEQ ID NO: 868030 - RNA, 19 nt, Artificial Sequence
  Description of Artificial Sequence: Synthetic oligonucleotide
  Sense strand starting at position 3054 of SEQ ID NO: 588480
gauagaguuguuggaaagu

SEQ ID NO: 868031 - RNA, 19 nt, Artificial Sequence
  Description of Artificial Sequence: Synthetic oligonucleotide
  Antisense strand to SEQ ID NO: 868030
acuuuccaacaacucuauc

SEQ ID NO: 868032 - RNA, 19 nt, Artificial Sequence
  Description of Artificial Sequence: Synthetic oligonucleotide
  Sense strand starting at position 3063 of SEQ ID NO: 588480
guuggaaagucagaaacua

SEQ ID NO: 868033 - RNA, 19 nt, Artificial Sequence
  Description of Artificial Sequence: Synthetic oligonucleotide
  Antisense strand to SEQ ID NO: 868032
uaguuucugacuuuccaac

SEQ ID NO: 868034 - RNA, 19 nt, Artificial Sequence
  Description of Artificial Sequence: Synthetic oligonucleotide
  Sense strand starting at position 3071 of SEQ ID NO: 588480
gucagaaacuauuguaaua

SEQ ID NO: 868035 - RNA, 19 nt, Artificial Sequence
  Description of Artificial Sequence: Synthetic oligonucleotide
  Antisense strand to SEQ ID NO: 868034
uauuacaauaguuucugac

SEQ ID NO: 868036 - RNA, 19 nt, Artificial Sequence
  Description of Artificial Sequence: Synthetic oligonucleotide
  Sense strand starting at position 3339 of SEQ ID NO: 588480
ucagcaugauccugaacuc

SEQ ID NO: 868037 - RNA, 19 nt, Artificial Sequence
  Description of Artificial Sequence: Synthetic oligonucleotide
  Antisense strand to SEQ ID NO: 868036
gaguucaggaucaugcuga

SEQ ID NO: 868038 - RNA, 19 nt, Artificial Sequence
  Description of Artificial Sequence: Synthetic oligonucleotide
  Sense strand starting at position 418 of SEQ ID NO: 588481
gcuggucugccugagauuu

SEQ ID NO: 868039 - RNA, 19 nt, Artificial Sequence
  Description of Artificial Sequence: Synthetic oligonucleotide
  Antisense strand to SEQ ID NO: 868038
aaaucucaggcagaccagc

SEQ ID NO: 868040 - RNA, 19 nt, Artificial Sequence
  Description of Artificial Sequence: Synthetic oligonucleotide
  Sense strand starting at position 533 of SEQ ID NO: 588481
gguggaagguccuuagaau

SEQ ID NO: 868041 - RNA, 19 nt, Artificial Sequence
  Description of Artificial Sequence: Synthetic oligonucleotide
  Antisense strand to SEQ ID NO: 868040
auucuaaggaccuuccacc

SEQ ID NO: 868042 - RNA, 19 nt, Artificial Sequence
  Description of Artificial Sequence: Synthetic oligonucleotide
  Sense strand starting at position 534 of SEQ ID NO: 588481
guggaagguccuuagaauc

SEQ ID NO: 868043 - RNA, 19 nt, Artificial Sequence
  Description of Artificial Sequence: Synthetic oligonucleotide
  Antisense strand to SEQ ID NO: 868042
gauucuaaggaccuuccac

SEQ ID NO: 868044 - RNA, 19 nt, Artificial Sequence
  Description of Artificial Sequence: Synthetic oligonucleotide
  Sense strand starting at position 540 of SEQ ID NO: 588481
gguccuuagaaucacguuu

SEQ ID NO: 868045 - RNA, 19 nt, Artificial Sequence
  Description of Artificial Sequence: Synthetic oligonucleotide
  Antisense strand to SEQ ID NO: 868044
aaacgugauucuaaggacc

SEQ ID NO: 868046 - RNA, 19 nt, Artificial Sequence
  Description of Artificial Sequence: Synthetic oligonucleotide
  Sense strand starting at position 722 of SEQ ID NO: 588481
uauagaggauaucuguuua

SEQ ID NO: 868047 - RNA, 19 nt, Artificial Sequence
  Description of Artificial Sequence: Synthetic oligonucleotide
  Antisense strand to SEQ ID NO: 868046
uaaacagauauccucuaua

SEQ ID NO: 868048 - RNA, 19 nt, Artificial Sequence
  Description of Artificial Sequence: Synthetic oligonucleotide
  Sense strand starting at position 775 of SEQ ID NO: 588481
gccgaaagaaaucauuguu

SEQ ID NO: 868049 - RNA, 19 nt, Artificial Sequence
  Description of Artificial Sequence: Synthetic oligonucleotide
  Antisense strand to SEQ ID NO: 868048
aacaaugauuucuuucggc

SEQ ID NO: 868050 - RNA, 19 nt, Artificial Sequence
  Description of Artificial Sequence: Synthetic oligonucleotide
  Sense strand starting at position 945 of SEQ ID NO: 588481
gguuuagagaaaggucauu

SEQ ID NO: 868051 - RNA, 19 nt, Artificial Sequence
  Description of Artificial Sequence: Synthetic oligonucleotide
  Antisense strand to SEQ ID NO: 868050
aaugaccuuucucuaaacc

SEQ ID NO: 868052 - RNA, 19 nt, Artificial Sequence
  Description of Artificial Sequence: Synthetic oligonucleotide
  Sense strand starting at position 1012 of SEQ ID NO: 588481
uuuauucucucaucagguu

SEQ ID NO: 868053 - RNA, 19 nt, Artificial Sequence
  Description of Artificial Sequence: Synthetic oligonucleotide
  Antisense strand to SEQ ID NO: 868052
aaccugaugagagaauaaa

SEQ ID NO: 868054 - RNA, 19 nt, Artificial Sequence
  Description of Artificial Sequence: Synthetic oligonucleotide
  Sense strand starting at position 1263 of SEQ ID NO: 588481
auaguuauagcagaaguga

SEQ ID NO: 868055 - RNA, 19 nt, Artificial Sequence
  Description of Artificial Sequence: Synthetic oligonucleotide
  Antisense strand to SEQ ID NO: 868054
ucacuucugcuauaacuau

SEQ ID NO: 868056 - RNA, 19 nt, Artificial Sequence
  Description of Artificial Sequence: Synthetic oligonucleotide
  Sense strand starting at position 1276 of SEQ ID NO: 588481
aagugagagucuuugaaau

SEQ ID NO: 868057 - RNA, 19 nt, Artificial Sequence
  Description of Artificial Sequence: Synthetic oligonucleotide
  Antisense strand to SEQ ID NO: 868056
auuucaaagacucucacuu

SEQ ID NO: 868058 - RNA, 19 nt, Artificial Sequence
  Description of Artificial Sequence: Synthetic oligonucleotide
  Sense strand starting at position 1317 of SEQ ID NO: 588481
ccugguauaugagucaaua

SEQ ID NO: 868059 - RNA, 19 nt, Artificial Sequence
  Description of Artificial Sequence: Synthetic oligonucleotide
  Antisense strand to SEQ ID NO: 868058
uauugacucauauaccagg

SEQ ID NO: 868060 - RNA, 19 nt, Artificial Sequence
  Description of Artificial Sequence: Synthetic oligonucleotide
  Sense strand starting at position 1346 of SEQ ID NO: 588481
cauguuggaccagguguua

SEQ ID NO: 868061 - RNA, 19 nt, Artificial Sequence
  Description of Artificial Sequence: Synthetic oligonucleotide
  Antisense strand to SEQ ID NO: 868060
uaacaccugguccaacaug

SEQ ID NO: 868062 - RNA, 19 nt, Artificial Sequence
  Description of Artificial Sequence: Synthetic oligonucleotide
  Sense strand starting at position 1476 of SEQ ID NO: 588481
gagagugauucuucggaag

SEQ ID NO: 868063 - RNA, 19 nt, Artificial Sequence
  Description of Artificial Sequence: Synthetic oligonucleotide
  Antisense strand to SEQ ID NO: 868062
cuuccgaagaaucacucuc

SEQ ID NO: 868064 - RNA, 19 nt, Artificial Sequence
  Description of Artificial Sequence: Synthetic oligonucleotide
  Sense strand starting at position 1594 of SEQ ID NO: 588481
uagaguucggugcagaauu

SEQ ID NO: 868065 - RNA, 19 nt, Artificial Sequence
  Description of Artificial Sequence: Synthetic oligonucleotide
  Antisense strand to SEQ ID NO: 868064
aauucugcaccgaacucua

SEQ ID NO: 868066 - RNA, 19 nt, Artificial Sequence
  Description of Artificial Sequence: Synthetic oligonucleotide
  Sense strand starting at position 1655 of SEQ ID NO: 588481
ugguaaagagguugaagau

SEQ ID NO: 868067 - RNA, 19 nt, Artificial Sequence
  Description of Artificial Sequence: Synthetic oligonucleotide
  Antisense strand to SEQ ID NO: 868066
aucuucaaccucuuuacca

SEQ ID NO: 868068 - RNA, 19 nt, Artificial Sequence
  Description of Artificial Sequence: Synthetic oligonucleotide
  Sense strand starting at position 1664 of SEQ ID NO: 588481
gguugaagaucugcuggau

SEQ ID NO: 868069 - RNA, 19 nt, Artificial Sequence
  Description of Artificial Sequence: Synthetic oligonucleotide
  Antisense strand to SEQ ID NO: 868068
auccagcagaucuucaacc

SEQ ID NO: 868070 - RNA, 19 nt, Artificial Sequence
  Description of Artificial Sequence: Synthetic oligonucleotide
  Sense strand starting at position 1667 of SEQ ID NO: 588481
ugaagaucugcuggaucag

SEQ ID NO: 868071 - RNA, 19 nt, Artificial Sequence
  Description of Artificial Sequence: Synthetic oligonucleotide
  Antisense strand to SEQ ID NO: 868070
cugauccagcagaucuuca

SEQ ID NO: 868072 - RNA, 19 nt, Artificial Sequence
  Description of Artificial Sequence: Synthetic oligonucleotide
  Sense strand starting at position 1785 of SEQ ID NO: 588481
aggagagauucugcucauu

SEQ ID NO: 868073 - RNA, 19 nt, Artificial Sequence
  Description of Artificial Sequence: Synthetic oligonucleotide
  Antisense strand to SEQ ID NO: 868072
aaugagcagaaucucuccu

SEQ ID NO: 868074 - RNA, 19 nt, Artificial Sequence
  Description of Artificial Sequence: Synthetic oligonucleotide
  Sense strand starting at position 1920 of SEQ ID NO: 588481
gggcgaggccaucauagau

SEQ ID NO: 868075 - RNA, 19 nt, Artificial Sequence
  Description of Artificial Sequence: Synthetic oligonucleotide
  Antisense strand to SEQ ID NO: 868074
aucuaugauggccucgccc

SEQ ID NO: 868076 - RNA, 19 nt, Artificial Sequence
  Description of Artificial Sequence: Synthetic oligonucleotide
  Sense strand starting at position 1933 of SEQ ID NO: 588481
auagauauugcagaugcuu

SEQ ID NO: 868077 - RNA, 19 nt, Artificial Sequence
  Description of Artificial Sequence: Synthetic oligonucleotide
  Antisense strand to SEQ ID NO: 868076
aagcaucugcaauaucuau

SEQ ID NO: 868078 - RNA, 19 nt, Artificial Sequence
  Description of Artificial Sequence: Synthetic oligonucleotide
  Sense strand starting at position 2013 of SEQ ID NO: 588481
uccugcagaugccuuaaau

SEQ ID NO: 868079 - RNA, 19 nt, Artificial Sequence
  Description of Artificial Sequence: Synthetic oligonucleotide
  Antisense strand to SEQ ID NO: 868078
auuuaaggcaucugcagga

SEQ ID NO: 868080 - RNA, 19 nt, Artificial Sequence
  Description of Artificial Sequence: Synthetic oligonucleotide
  Sense strand starting at position 2107 of SEQ ID NO: 588481
cucuuuacaugaguuuaga

SEQ ID NO: 868081 - RNA, 19 nt, Artificial Sequence
  Description of Artificial Sequence: Synthetic oligonucleotide
  Antisense strand to SEQ ID NO: 868080
ucuaaacucauguaaagag

SEQ ID NO: 868082 - RNA, 19 nt, Artificial Sequence
  Description of Artificial Sequence: Synthetic oligonucleotide
  Sense strand starting at position 2166 of SEQ ID NO: 588481
cccaucuuguucccagaga

SEQ ID NO: 868083 - RNA, 19 nt, Artificial Sequence
  Description of Artificial Sequence: Synthetic oligonucleotide
  Antisense strand to SEQ ID NO: 868082
ucucugggaacaagauggg

SEQ ID NO: 868084 - RNA, 19 nt, Artificial Sequence
  Description of Artificial Sequence: Synthetic oligonucleotide
  Sense strand starting at position 2653 of SEQ ID NO: 588481
gcuagauacucaccuagag

SEQ ID NO: 868085 - RNA, 19 nt, Artificial Sequence
  Description of Artificial Sequence: Synthetic oligonucleotide
  Antisense strand to SEQ ID NO: 868084
cucuaggugaguaucuagc

SEQ ID NO: 868086 - RNA, 19 nt, Artificial Sequence
  Description of Artificial Sequence: Synthetic oligonucleotide
  Sense strand starting at position 2705 of SEQ ID NO: 588481
aaauauagauguguugaac

SEQ ID NO: 868087 - RNA, 19 nt, Artificial Sequence
  Description of Artificial Sequence: Synthetic oligonucleotide
  Antisense strand to SEQ ID NO: 868086
guucaacacaucuauauuu

SEQ ID NO: 868088 - RNA, 19 nt, Artificial Sequence
  Description of Artificial Sequence: Synthetic oligonucleotide
  Sense strand starting at position 2822 of SEQ ID NO: 588481
uaagauggccagugacaaa

SEQ ID NO: 868089 - RNA, 19 nt, Artificial Sequence
  Description of Artificial Sequence: Synthetic oligonucleotide
  Antisense strand to SEQ ID NO: 868088
uuugucacuggccaucuua

SEQ ID NO: 868090 - RNA, 19 nt, Artificial Sequence
  Description of Artificial Sequence: Synthetic oligonucleotide
  Sense strand starting at position 2885 of SEQ ID NO: 588481
cuaauacaucuuggaaagu

SEQ ID NO: 868091 - RNA, 19 nt, Artificial Sequence
  Description of Artificial Sequence: Synthetic oligonucleotide
  Antisense strand to SEQ ID NO: 868090
acuuuccaagauguauuag

SEQ ID NO: 868092 - RNA, 19 nt, Artificial Sequence
  Description of Artificial Sequence: Synthetic oligonucleotide
  Sense strand starting at position 2894 of SEQ ID NO: 588481
cuuggaaaguacuccaauc

SEQ ID NO: 868093 - RNA, 19 nt, Artificial Sequence
  Description of Artificial Sequence: Synthetic oligonucleotide
  Antisense strand to SEQ ID NO: 868092
gauuggaguacuuuccaag

SEQ ID NO: 868094 - RNA, 19 nt, Artificial Sequence
  Description of Artificial Sequence: Synthetic oligonucleotide
  Sense strand starting at position 2934 of SEQ ID NO: 588481
guuuguaaugcugaacuuu

SEQ ID NO: 868095 - RNA, 19 nt, Artificial Sequence
  Description of Artificial Sequence: Synthetic oligonucleotide
  Antisense strand to SEQ ID NO: 868094
aaaguucagcauuacaaac

SEQ ID NO: 868096 - RNA, 19 nt, Artificial Sequence
  Description of Artificial Sequence: Synthetic oligonucleotide
  Sense strand starting at position 3058 of SEQ ID NO: 588481
guuaaauagguugagcuuu

SEQ ID NO: 868097 - RNA, 19 nt, Artificial Sequence
  Description of Artificial Sequence: Synthetic oligonucleotide
  Antisense strand to SEQ ID NO: 868096
aaagcucaaccuauuuaac

SEQ ID NO: 868098 - RNA, 19 nt, Artificial Sequence
  Description of Artificial Sequence: Synthetic oligonucleotide
  Sense strand starting at position 3132 of SEQ ID NO: 588481
cuucuacauccuugggagu

SEQ ID NO: 868099 - RNA, 19 nt, Artificial Sequence
  Description of Artificial Sequence: Synthetic oligonucleotide
  Antisense strand to SEQ ID NO: 868098
acucccaaggauguagaag

SEQ ID NO: 868100 - RNA, 19 nt, Artificial Sequence
  Description of Artificial Sequence: Synthetic oligonucleotide
  Sense strand starting at position 3133 of SEQ ID NO: 588481
uucuacauccuugggagua

SEQ ID NO: 868101 - RNA, 19 nt, Artificial Sequence
  Description of Artificial Sequence: Synthetic oligonucleotide
  Antisense strand to SEQ ID NO: 868100
uacucccaaggauguagaa

SEQ ID NO: 868102 - RNA, 19 nt, Artificial Sequence
  Description of Artificial Sequence: Synthetic oligonucleotide
  Sense strand starting at position 3149 of SEQ ID NO: 588481
guaguaucauaugcaauga

SEQ ID NO: 868103 - RNA, 19 nt, Artificial Sequence
  Description of Artificial Sequence: Synthetic oligonucleotide
  Antisense strand to SEQ ID NO: 868102
ucauugcauaugauacuac

SEQ ID NO: 868104 - RNA, 19 nt, Artificial Sequence
  Description of Artificial Sequence: Synthetic oligonucleotide
  Sense strand starting at position 3277 of SEQ ID NO: 588481
ggaaacuaucuuuguccua

SEQ ID NO: 868105 - RNA, 19 nt, Artificial Sequence
  Description of Artificial Sequence: Synthetic oligonucleotide
  Antisense strand to SEQ ID NO: 868104
uaggacaaagauaguuucc

SEQ ID NO: 868106 - RNA, 19 nt, Artificial Sequence
  Description of Artificial Sequence: Synthetic oligonucleotide
  Sense strand starting at position 3290 of SEQ ID NO: 588481
guccuagaugcgcauaaua

SEQ ID NO: 868107 - RNA, 19 nt, Artificial Sequence
  Description of Artificial Sequence: Synthetic oligonucleotide
  Antisense strand to SEQ ID NO: 868106
uauuaugcgcaucuaggac

SEQ ID NO: 868108 - RNA, 19 nt, Artificial Sequence
  Description of Artificial Sequence: Synthetic oligonucleotide
  Sense strand starting at position 3300 of SEQ ID NO: 588481
cgcauaauaggauguaaau

SEQ ID NO: 868109 - RNA, 19 nt, Artificial Sequence
  Description of Artificial Sequence: Synthetic oligonucleotide
  Antisense strand to SEQ ID NO: 868108
auuuacauccuauuaugcg

SEQ ID NO: 868110 - RNA, 19 nt, Artificial Sequence
  Description of Artificial Sequence: Synthetic oligonucleotide
  Sense strand starting at position 3427 of SEQ ID NO: 588481
ccuaacuaaugggaacaaa

SEQ ID NO: 868111 - RNA, 19 nt, Artificial Sequence
  Description of Artificial Sequence: Synthetic oligonucleotide
  Antisense strand to SEQ ID NO: 868110
uuuguucccauuaguuagg

SEQ ID NO: 868112 - RNA, 19 nt, Artificial Sequence
  Description of Artificial Sequence: Synthetic oligonucleotide
  Sense strand starting at position 3627 of SEQ ID NO: 588481
guaaguaugggcuggaaga

SEQ ID NO: 868113 - RNA, 19 nt, Artificial Sequence
  Description of Artificial Sequence: Synthetic oligonucleotide
  Antisense strand to SEQ ID NO: 868112
ucuuccagcccauacuuac

SEQ ID NO: 868114 - RNA, 19 nt, Artificial Sequence
  Description of Artificial Sequence: Synthetic oligonucleotide
  Sense strand starting at position 3628 of SEQ ID NO: 588481
uaaguaugggcuggaagaa

SEQ ID NO: 868115 - RNA, 19 nt, Artificial Sequence
  Description of Artificial Sequence: Synthetic oligonucleotide
  Antisense strand to SEQ ID NO: 868114
uucuuccagcccauacuua

SEQ ID NO: 868116 - RNA, 19 nt, Artificial Sequence
  Description of Artificial Sequence: Synthetic oligonucleotide
  Sense strand starting at position 3752 of SEQ ID NO: 588481
guacaauauucucucugga

SEQ ID NO: 868117 - RNA, 19 nt, Artificial Sequence
  Description of Artificial Sequence: Synthetic oligonucleotide
  Antisense strand to SEQ ID NO: 868116
uccagagagaauauuguac

SEQ ID NO: 868118 - RNA, 19 nt, Artificial Sequence
  Description of Artificial Sequence: Synthetic oligonucleotide
  Sense strand starting at position 137 of SEQ ID NO: 588482
gcggguccaacuuauuacu

SEQ ID NO: 868119 - RNA, 19 nt, Artificial Sequence
  Description of Artificial Sequence: Synthetic oligonucleotide
  Antisense strand to SEQ ID NO: 868118
aguaauaaguuggacccgc

SEQ ID NO: 868120 - RNA, 19 nt, Artificial Sequence
  Description of Artificial Sequence: Synthetic oligonucleotide
  Sense strand starting at position 280 of SEQ ID NO: 588482
cucaguaaucucugcauug

SEQ ID NO: 868121 - RNA, 19 nt, Artificial Sequence
  Description of Artificial Sequence: Synthetic oligonucleotide
  Antisense strand to SEQ ID NO: 868120
caaugcagagauuacugag

SEQ ID NO: 868122 - RNA, 19 nt, Artificial Sequence
  Description of Artificial Sequence: Synthetic oligonucleotide
  Sense strand starting at position 613 of SEQ ID NO: 588482
ucauauaucugacuggcaa

SEQ ID NO: 868123 - RNA, 19 nt, Artificial Sequence
  Description of Artificial Sequence: Synthetic oligonucleotide
  Antisense strand to SEQ ID NO: 868122
uugccagucagauauauga

SEQ ID NO: 868124 - RNA, 19 nt, Artificial Sequence
  Description of Artificial Sequence: Synthetic oligonucleotide
  Sense strand starting at position 641 of SEQ ID NO: 588482
ucaauuacauguuugaaag

SEQ ID NO: 868125 - RNA, 19 nt, Artificial Sequence
  Description of Artificial Sequence: Synthetic oligonucleotide
  Antisense strand to SEQ ID NO: 868124
cuuucaaacauguaauuga

SEQ ID NO: 868126 - RNA, 19 nt, Artificial Sequence
  Description of Artificial Sequence: Synthetic oligonucleotide
  Sense strand starting at position 649 of SEQ ID NO: 588482
auguuugaaagucaguuua

SEQ ID NO: 868127 - RNA, 19 nt, Artificial Sequence
  Description of Artificial Sequence: Synthetic oligonucleotide
  Antisense strand to SEQ ID NO: 868126
uaaacugacuuucaaacau

SEQ ID NO: 868128 - RNA, 19 nt, Artificial Sequence
  Description of Artificial Sequence: Synthetic oligonucleotide
  Sense strand starting at position 651 of SEQ ID NO: 588482
guuugaaagucaguuuauc

SEQ ID NO: 868129 - RNA, 19 nt, Artificial Sequence
  Description of Artificial Sequence: Synthetic oligonucleotide
  Antisense strand to SEQ ID NO: 868128
gauaaacugacuuucaaac

SEQ ID NO: 868130 - RNA, 19 nt, Artificial Sequence
  Description of Artificial Sequence: Synthetic oligonucleotide
  Sense strand starting at position 730 of SEQ ID NO: 588482
uuuacuucguuaccauaca

SEQ ID NO: 868131 - RNA, 19 nt, Artificial Sequence
  Description of Artificial Sequence: Synthetic oligonucleotide
  Antisense strand to SEQ ID NO: 868130
uguaugguaacgaaguaaa

SEQ ID NO: 868132 - RNA, 19 nt, Artificial Sequence
  Description of Artificial Sequence: Synthetic oligonucleotide
  Sense strand starting at position 855 of SEQ ID NO: 588482
uguuuacauccuuaaggca

SEQ ID NO: 868133 - RNA, 19 nt, Artificial Sequence
  Description of Artificial Sequence: Synthetic oligonucleotide
  Antisense strand to SEQ ID NO: 868132
ugccuuaaggauguaaaca

SEQ ID NO: 868134 - RNA, 19 nt, Artificial Sequence
  Description of Artificial Sequence: Synthetic oligonucleotide
  Sense strand starting at position 923 of SEQ ID NO: 588482
uaugauagguaacuugauu

SEQ ID NO: 868135 - RNA, 19 nt, Artificial Sequence
  Description of Artificial Sequence: Synthetic oligonucleotide
  Antisense strand to SEQ ID NO: 868134
aaucaaguuaccuaucaua

SEQ ID NO: 868136 - RNA, 19 nt, Artificial Sequence
  Description of Artificial Sequence: Synthetic oligonucleotide
  Sense strand starting at position 954 of SEQ ID NO: 588482
uugaaaucagguuguacag

SEQ ID NO: 868137 - RNA, 19 nt, Artificial Sequence
  Description of Artificial Sequence: Synthetic oligonucleotide
  Antisense strand to SEQ ID NO: 868136
cuguacaaccugauuucaa

SEQ ID NO: 868138 - RNA, 19 nt, Artificial Sequence
  Description of Artificial Sequence: Synthetic oligonucleotide
  Sense strand starting at position 1282 of SEQ ID NO: 588482
acuuguggugguuauagga

SEQ ID NO: 868139 - RNA, 19 nt, Artificial Sequence
  Description of Artificial Sequence: Synthetic oligonucleotide
  Antisense strand to SEQ ID NO: 868138
uccuauaaccaccacaagu

SEQ ID NO: 868140 - RNA, 19 nt, Artificial Sequence
  Description of Artificial Sequence: Synthetic oligonucleotide
  Sense strand starting at position 1341 of SEQ ID NO: 588482
gaugauguauuagucaaug

SEQ ID NO: 868141 - RNA, 19 nt, Artificial Sequence
  Description of Artificial Sequence: Synthetic oligonucleotide
  Antisense strand to SEQ ID NO: 868140
cauugacuaauacaucauc

SEQ ID NO: 868142 - RNA, 19 nt, Artificial Sequence
  Description of Artificial Sequence: Synthetic oligonucleotide
  Sense strand starting at position 1346 of SEQ ID NO: 588482
uguauuagucaaugagaau

SEQ ID NO: 868143 - RNA, 19 nt, Artificial Sequence
  Description of Artificial Sequence: Synthetic oligonucleotide
  Antisense strand to SEQ ID NO: 868142
auucucauugacuaauaca

SEQ ID NO: 868144 - RNA, 19 nt, Artificial Sequence
  Description of Artificial Sequence: Synthetic oligonucleotide
  Sense strand starting at position 1672 of SEQ ID NO: 588482
guucuuugugcugaagaga

SEQ ID NO: 868145 - RNA, 19 nt, Artificial Sequence
  Description of Artificial Sequence: Synthetic oligonucleotide
  Antisense strand to SEQ ID NO: 868144
ucucuucagcacaaagaac

SEQ ID NO: 868146 - RNA, 19 nt, Artificial Sequence
  Description of Artificial Sequence: Synthetic oligonucleotide
  Sense strand starting at position 1722 of SEQ ID NO: 588482
cagagauggcuugagcuuu

SEQ ID NO: 868147 - RNA, 19 nt, Artificial Sequence
  Description of Artificial Sequence: Synthetic oligonucleotide
  Antisense strand to SEQ ID NO: 868146
aaagcucaagccaucucug

SEQ ID NO: 868148 - RNA, 19 nt, Artificial Sequence
  Description of Artificial Sequence: Synthetic oligonucleotide
  Sense strand starting at position 1746 of SEQ ID NO: 588482
acugguugccaucaaauuc

SEQ ID NO: 868149 - RNA, 19 nt, Artificial Sequence
  Description of Artificial Sequence: Synthetic oligonucleotide
  Antisense strand to SEQ ID NO: 868148
gaauuugauggcaaccagu

SEQ ID NO: 868150 - RNA, 19 nt, Artificial Sequence
  Description of Artificial Sequence: Synthetic oligonucleotide
  Sense strand starting at position 1824 of SEQ ID NO: 588482
ucauuugugccaugagcau

SEQ ID NO: 868151 - RNA, 19 nt, Artificial Sequence
  Description of Artificial Sequence: Synthetic oligonucleotide
  Antisense strand to SEQ ID NO: 868150
augcucauggcacaaauga

SEQ ID NO: 868152 - RNA, 19 nt, Artificial Sequence
  Description of Artificial Sequence: Synthetic oligonucleotide
  Sense strand starting at position 1945 of SEQ ID NO: 588482
gggcaaugccauugggaau

SEQ ID NO: 868153 - RNA, 19 nt, Artificial Sequence
  Description of Artificial Sequence: Synthetic oligonucleotide
  Antisense strand to SEQ ID NO: 868152
auucccaauggcauugccc

SEQ ID NO: 868154 - RNA, 19 nt, Artificial Sequence
  Description of Artificial Sequence: Synthetic oligonucleotide
  Sense strand starting at position 2060 of SEQ ID NO: 588482
ggaacauacuagcuuccau

SEQ ID NO: 868155 - RNA, 19 nt, Artificial Sequence
  Description of Artificial Sequence: Synthetic oligonucleotide
  Antisense strand to SEQ ID NO: 868154
auggaagcuaguauguucc

SEQ ID NO: 868156 - RNA, 19 nt, Artificial Sequence
  Description of Artificial Sequence: Synthetic oligonucleotide
  Sense strand starting at position 2277 of SEQ ID NO: 588482
guugauauacuguacauau

SEQ ID NO: 868157 - RNA, 19 nt, Artificial Sequence
  Description of Artificial Sequence: Synthetic oligonucleotide
  Antisense strand to SEQ ID NO: 868156
auauguacaguauaucaac

SEQ ID NO: 868158 - RNA, 19 nt, Artificial Sequence
  Description of Artificial Sequence: Synthetic oligonucleotide
  Sense strand starting at position 2300 of SEQ ID NO: 588482
uuauaaggaguguaaaguu

SEQ ID NO: 868159 - RNA, 19 nt, Artificial Sequence
  Description of Artificial Sequence: Synthetic oligonucleotide
  Antisense strand to SEQ ID NO: 868158
aacuuuacacuccuuauaa

SEQ ID NO: 868160 - RNA, 19 nt, Artificial Sequence
  Description of Artificial Sequence: Synthetic oligonucleotide
  Sense strand starting at position 2307 of SEQ ID NO: 588482
gaguguaaaguuuaaucuu

SEQ ID NO: 868161 - RNA, 19 nt, Artificial Sequence
  Description of Artificial Sequence: Synthetic oligonucleotide
  Antisense strand to SEQ ID NO: 868160
aagauuaaacuuuacacuc

SEQ ID NO: 868162 - RNA, 19 nt, Artificial Sequence
  Description of Artificial Sequence: Synthetic oligonucleotide
  Sense strand starting at position 2337 of SEQ ID NO: 588482
uaguguuaagaaugaccaa

SEQ ID NO: 868163 - RNA, 19 nt, Artificial Sequence
  Description of Artificial Sequence: Synthetic oligonucleotide
  Antisense strand to SEQ ID NO: 868162
uuggucauucuuaacacua

SEQ ID NO: 868164 - RNA, 19 nt, Artificial Sequence
  Description of Artificial Sequence: Synthetic oligonucleotide
  Sense strand starting at position 2729 of SEQ ID NO: 588482
acucaauuuguuugugucu

SEQ ID NO: 868165 - RNA, 19 nt, Artificial Sequence
  Description of Artificial Sequence: Synthetic oligonucleotide
  Antisense strand to SEQ ID NO: 868164
agacacaaacaaauugagu

SEQ ID NO: 868166 - RNA, 19 nt, Artificial Sequence
  Description of Artificial Sequence: Synthetic oligonucleotide
  Sense strand starting at position 2774 of SEQ ID NO: 588482
auuguaauguguccaauuc

SEQ ID NO: 868167 - RNA, 19 nt, Artificial Sequence
  Description of Artificial Sequence: Synthetic oligonucleotide
  Antisense strand to SEQ ID NO: 868166
gaauuggacacauuacaau

SEQ ID NO: 868168 - RNA, 19 nt, Artificial Sequence
  Description of Artificial Sequence: Synthetic oligonucleotide
  Sense strand starting at position 3020 of SEQ ID NO: 588482
ugauguauugagcaccuuu

SEQ ID NO: 868169 - RNA, 19 nt, Artificial Sequence
  Description of Artificial Sequence: Synthetic oligonucleotide
  Antisense strand to SEQ ID NO: 868168
aaaggugcucaauacauca

SEQ ID NO: 868170 - RNA, 19 nt, Artificial Sequence
  Description of Artificial Sequence: Synthetic oligonucleotide
  Sense strand starting at position 3028 of SEQ ID NO: 588482
ugagcaccuuuaguagaau

SEQ ID NO: 868171 - RNA, 19 nt, Artificial Sequence
  Description of Artificial Sequence: Synthetic oligonucleotide
  Antisense strand to SEQ ID NO: 868170
auucuacuaaaggugcuca

SEQ ID NO: 868172 - RNA, 19 nt, Artificial Sequence
  Description of Artificial Sequence: Synthetic oligonucleotide
  Sense strand starting at position 3031 of SEQ ID NO: 588482
gcaccuuuaguagaauuaa

SEQ ID NO: 868173 - RNA, 19 nt, Artificial Sequence
  Description of Artificial Sequence: Synthetic oligonucleotide
  Antisense strand to SEQ ID NO: 868172
uuaauucuacuaaaggugc

SEQ ID NO: 868174 - RNA, 19 nt, Artificial Sequence
  Description of Artificial Sequence: Synthetic oligonucleotide
  Sense strand starting at position 3187 of SEQ ID NO: 588482
ugacuuugaugucuaguaa

SEQ ID NO: 868175 - RNA, 19 nt, Artificial Sequence
  Description of Artificial Sequence: Synthetic oligonucleotide
  Antisense strand to SEQ ID NO: 868174
uuacuagacaucaaaguca

SEQ ID NO: 868176 - RNA, 19 nt, Artificial Sequence
  Description of Artificial Sequence: Synthetic oligonucleotide
  Sense strand starting at position 3188 of SEQ ID NO: 588482
gacuuugaugucuaguaaa

SEQ ID NO: 868177 - RNA, 19 nt, Artificial Sequence
  Description of Artificial Sequence: Synthetic oligonucleotide
  Antisense strand to SEQ ID NO: 868176
uuuacuagacaucaaaguc

SEQ ID NO: 868178 - RNA, 19 nt, Artificial Sequence
  Description of Artificial Sequence: Synthetic oligonucleotide
  Sense strand starting at position 3364 of SEQ ID NO: 588482
gucagauagaguugaguuu

SEQ ID NO: 868179 - RNA, 19 nt, Artificial Sequence
  Description of Artificial Sequence: Synthetic oligonucleotide
  Antisense strand to SEQ ID NO: 868178
aaacucaacucuaucugac

SEQ ID NO: 868180 - RNA, 19 nt, Artificial Sequence
  Description of Artificial Sequence: Synthetic oligonucleotide
  Sense strand starting at position 3389 of SEQ ID NO: 588482
gcuaccaaucaccgaaaua

SEQ ID NO: 868181 - RNA, 19 nt, Artificial Sequence
  Description of Artificial Sequence: Synthetic oligonucleotide
  Antisense strand to SEQ ID NO: 868180
uauuucggugauugguagc

SEQ ID NO: 868182 - RNA, 19 nt, Artificial Sequence
  Description of Artificial Sequence: Synthetic oligonucleotide
  Sense strand starting at position 3459 of SEQ ID NO: 588482
uaucauacugaaggaguau

SEQ ID NO: 868183 - RNA, 19 nt, Artificial Sequence
  Description of Artificial Sequence: Synthetic oligonucleotide
  Antisense strand to SEQ ID NO: 868182
auacuccuucaguaugaua

SEQ ID NO: 868184 - RNA, 19 nt, Artificial Sequence
  Description of Artificial Sequence: Synthetic oligonucleotide
  Sense strand starting at position 3468 of SEQ ID NO: 588482
gaaggaguauauguaguua

SEQ ID NO: 868185 - RNA, 19 nt, Artificial Sequence
  Description of Artificial Sequence: Synthetic oligonucleotide
  Antisense strand to SEQ ID NO: 868184
uaacuacauauacuccuuc

SEQ ID NO: 868186 - RNA, 19 nt, Artificial Sequence
  Description of Artificial Sequence: Synthetic oligonucleotide
  Sense strand starting at position 3472 of SEQ ID NO: 588482
gaguauauguaguuaagaa

SEQ ID NO: 868187 - RNA, 19 nt, Artificial Sequence
  Description of Artificial Sequence: Synthetic oligonucleotide
  Antisense strand to SEQ ID NO: 868186
uucuuaacuacauauacuc

SEQ ID NO: 868188 - RNA, 19 nt, Artificial Sequence
  Description of Artificial Sequence: Synthetic oligonucleotide
  Sense strand starting at position 3602 of SEQ ID NO: 588482
uguccuaaauguccauaau

SEQ ID NO: 868189 - RNA, 19 nt, Artificial Sequence
  Description of Artificial Sequence: Synthetic oligonucleotide
  Antisense strand to SEQ ID NO: 868188
auuauggacauuuaggaca

SEQ ID NO: 868190 - RNA, 19 nt, Artificial Sequence
  Description of Artificial Sequence: Synthetic oligonucleotide
  Sense strand starting at position 3603 of SEQ ID NO: 588482
guccuaaauguccauaaug

SEQ ID NO: 868191 - RNA, 19 nt, Artificial Sequence
  Description of Artificial Sequence: Synthetic oligonucleotide
  Antisense strand to SEQ ID NO: 868190
cauuauggacauuuaggac

SEQ ID NO: 868192 - RNA, 19 nt, Artificial Sequence
  Description of Artificial Sequence: Synthetic oligonucleotide
  Sense strand starting at position 3613 of SEQ ID NO: 588482
uccauaaugggauguaaau

SEQ ID NO: 868193 - RNA, 19 nt, Artificial Sequence
  Description of Artificial Sequence: Synthetic oligonucleotide
  Antisense strand to SEQ ID NO: 868192
auuuacaucccauuaugga

SEQ ID NO: 868194 - RNA, 19 nt, Artificial Sequence
  Description of Artificial Sequence: Synthetic oligonucleotide
  Sense strand starting at position 3619 of SEQ ID NO: 588482
augggauguaaaugugaua

SEQ ID NO: 868195 - RNA, 19 nt, Artificial Sequence
  Description of Artificial Sequence: Synthetic oligonucleotide
  Antisense strand to SEQ ID NO: 868194
uaucacauuuacaucccau

SEQ ID NO: 868196 - RNA, 19 nt, Artificial Sequence
  Description of Artificial Sequence: Synthetic oligonucleotide
  Sense strand starting at position 3642 of SEQ ID NO: 588482
aaauguguuguacaauugu

SEQ ID NO: 868197 - RNA, 19 nt, Artificial Sequence
  Description of Artificial Sequence: Synthetic oligonucleotide
  Antisense strand to SEQ ID NO: 868196
acaauuguacaacacauuu

SEQ ID NO: 868198 - RNA, 19 nt, Artificial Sequence
  Description of Artificial Sequence: Synthetic oligonucleotide
  Sense strand starting at position 66 of SEQ ID NO: 588483
auauuagaccugugucagu

SEQ ID NO: 868199 - RNA, 19 nt, Artificial Sequence
  Description of Artificial Sequence: Synthetic oligonucleotide
  Antisense strand to SEQ ID NO: 868198
acugacacaggucuaauau

SEQ ID NO: 868200 - RNA, 19 nt, Artificial Sequence
  Description of Artificial Sequence: Synthetic oligonucleotide
  Sense strand starting at position 84 of SEQ ID NO: 588483
uuggguaggcugcaaagau

SEQ ID NO: 868201 - RNA, 19 nt, Artificial Sequence
  Description of Artificial Sequence: Synthetic oligonucleotide
  Antisense strand to SEQ ID NO: 868200
aucuuugcagccuacccaa

SEQ ID NO: 868202 - RNA, 19 nt, Artificial Sequence
  Description of Artificial Sequence: Synthetic oligonucleotide
  Sense strand starting at position 136 of SEQ ID NO: 588483
gaugauggauaguuucuuu

SEQ ID NO: 868203 - RNA, 19 nt, Artificial Sequence
  Description of Artificial Sequence: Synthetic oligonucleotide
  Antisense strand to SEQ ID NO: 868202
aaagaaacuauccaucauc

SEQ ID NO: 868204 - RNA, 19 nt, Artificial Sequence
  Description of Artificial Sequence: Synthetic oligonucleotide
  Sense strand starting at position 156 of SEQ ID NO: 588483
gcgugcauacguucucuaa

SEQ ID NO: 868205 - RNA, 19 nt, Artificial Sequence
  Description of Artificial Sequence: Synthetic oligonucleotide
  Antisense strand to SEQ ID NO: 868204
uuagagaacguaugcacgc

SEQ ID NO: 868206 - RNA, 19 nt, Artificial Sequence
  Description of Artificial Sequence: Synthetic oligonucleotide
  Sense strand starting at position 157 of SEQ ID NO: 588483
cgugcauacguucucuaau

SEQ ID NO: 868207 - RNA, 19 nt, Artificial Sequence
  Description of Artificial Sequence: Synthetic oligonucleotide
  Antisense strand to SEQ ID NO: 868206
auuagagaacguaugcacg

SEQ ID NO: 868208 - RNA, 19 nt, Artificial Sequence
  Description of Artificial Sequence: Synthetic oligonucleotide
  Sense strand starting at position 159 of SEQ ID NO: 588483
ugcauacguucucuaauua

SEQ ID NO: 868209 - RNA, 19 nt, Artificial Sequence
  Description of Artificial Sequence: Synthetic oligonucleotide
  Antisense strand to SEQ ID NO: 868208
uaauuagagaacguaugca

SEQ ID NO: 868210 - RNA, 19 nt, Artificial Sequence
  Description of Artificial Sequence: Synthetic oligonucleotide
  Sense strand starting at position 160 of SEQ ID NO: 588483
gcauacguucucuaauuag

SEQ ID NO: 868211 - RNA, 19 nt, Artificial Sequence
  Description of Artificial Sequence: Synthetic oligonucleotide
  Antisense strand to SEQ ID NO: 868210
cuaauuagagaacguaugc

SEQ ID NO: 868212 - RNA, 19 nt, Artificial Sequence
  Description of Artificial Sequence: Synthetic oligonucleotide
  Sense strand starting at position 163 of SEQ ID NO: 588483
uacguucucuaauuagaug

SEQ ID NO: 868213 - RNA, 19 nt, Artificial Sequence
  Description of Artificial Sequence: Synthetic oligonucleotide
  Antisense strand to SEQ ID NO: 868212
caucuaauuagagaacgua

SEQ ID NO: 868214 - RNA, 19 nt, Artificial Sequence
  Description of Artificial Sequence: Synthetic oligonucleotide
  Sense strand starting at position 692 of SEQ ID NO: 588483
guuuauagagaguaucucu

SEQ ID NO: 868215 - RNA, 19 nt, Artificial Sequence
  Description of Artificial Sequence: Synthetic oligonucleotide
  Antisense strand to SEQ ID NO: 868214
agagauacucucuauaaac

SEQ ID NO: 868216 - RNA, 19 nt, Artificial Sequence
  Description of Artificial Sequence: Synthetic oligonucleotide
  Sense strand starting at position 895 of SEQ ID NO: 588483
aguuuauauccugaaggca

SEQ ID NO: 868217 - RNA, 19 nt, Artificial Sequence
  Description of Artificial Sequence: Synthetic oligonucleotide
  Antisense strand to SEQ ID NO: 868216
ugccuucaggauauaaacu

SEQ ID NO: 868218 - RNA, 19 nt, Artificial Sequence
  Description of Artificial Sequence: Synthetic oligonucleotide
  Sense strand starting at position 1009 of SEQ ID NO: 588483
uacagucaggcuugguauu

SEQ ID NO: 868219 - RNA, 19 nt, Artificial Sequence
  Description of Artificial Sequence: Synthetic oligonucleotide
  Antisense strand to SEQ ID NO: 868218
aauaccaagccugacugua

SEQ ID NO: 868220 - RNA, 19 nt, Artificial Sequence
  Description of Artificial Sequence: Synthetic oligonucleotide
  Sense strand starting at position 1010 of SEQ ID NO: 588483
acagucaggcuugguauuu

SEQ ID NO: 868221 - RNA, 19 nt, Artificial Sequence
  Description of Artificial Sequence: Synthetic oligonucleotide
  Antisense strand to SEQ ID NO: 868220
aaauaccaagccugacugu

SEQ ID NO: 868222 - RNA, 19 nt, Artificial Sequence
  Description of Artificial Sequence: Synthetic oligonucleotide
  Sense strand starting at position 1011 of SEQ ID NO: 588483
cagucaggcuugguauuua

SEQ ID NO: 868223 - RNA, 19 nt, Artificial Sequence
  Description of Artificial Sequence: Synthetic oligonucleotide
  Antisense strand to SEQ ID NO: 868222
uaaauaccaagccugacug

SEQ ID NO: 868224 - RNA, 19 nt, Artificial Sequence
  Description of Artificial Sequence: Synthetic oligonucleotide
  Sense strand starting at position 1384 of SEQ ID NO: 588483
uguauuaaucaaugaggau

SEQ ID NO: 868225 - RNA, 19 nt, Artificial Sequence
  Description of Artificial Sequence: Synthetic oligonucleotide
  Antisense strand to SEQ ID NO: 868224
auccucauugauuaauaca

SEQ ID NO: 868226 - RNA, 19 nt, Artificial Sequence
  Description of Artificial Sequence: Synthetic oligonucleotide
  Sense strand starting at position 1704 of SEQ ID NO: 588483
agaugaauccuuugugcug

SEQ ID NO: 868227 - RNA, 19 nt, Artificial Sequence
  Description of Artificial Sequence: Synthetic oligonucleotide
  Antisense strand to SEQ ID NO: 868226
cagcacaaaggauucaucu

SEQ ID NO: 868228 - RNA, 19 nt, Artificial Sequence
  Description of Artificial Sequence: Synthetic oligonucleotide
  Sense strand starting at position 1705 of SEQ ID NO: 588483
gaugaauccuuugugcuga

SEQ ID NO: 868229 - RNA, 19 nt, Artificial Sequence
  Description of Artificial Sequence: Synthetic oligonucleotide
  Antisense strand to SEQ ID NO: 868228
ucagcacaaaggauucauc

SEQ ID NO: 868230 - RNA, 19 nt, Artificial Sequence
  Description of Artificial Sequence: Synthetic oligonucleotide
  Sense strand starting at position 1710 of SEQ ID NO: 588483
auccuuugugcugaagaga

SEQ ID NO: 868231 - RNA, 19 nt, Artificial Sequence
  Description of Artificial Sequence: Synthetic oligonucleotide
  Antisense strand to SEQ ID NO: 868230
ucucuucagcacaaaggau

SEQ ID NO: 868232 - RNA, 19 nt, Artificial Sequence
  Description of Artificial Sequence: Synthetic oligonucleotide
  Sense strand starting at position 2170 of SEQ ID NO: 588483
cucuacauguguuuacaua

SEQ ID NO: 868233 - RNA, 19 nt, Artificial Sequence
  Description of Artificial Sequence: Synthetic oligonucleotide
  Antisense strand to SEQ ID NO: 868232
uauguaaacacauguagag

SEQ ID NO: 868234 - RNA, 19 nt, Artificial Sequence
  Description of Artificial Sequence: Synthetic oligonucleotide
  Sense strand starting at position 2739 of SEQ ID NO: 588483
ugauguguugaauaacugu

SEQ ID NO: 868235 - RNA, 19 nt, Artificial Sequence
  Description of Artificial Sequence: Synthetic oligonucleotide
  Antisense strand to SEQ ID NO: 868234
acaguuauucaacacauca

SEQ ID NO: 868236 - RNA, 19 nt, Artificial Sequence
  Description of Artificial Sequence: Synthetic oligonucleotide
  Sense strand starting at position 2779 of SEQ ID NO: 588483
acaagcuauuugcauugaa

SEQ ID NO: 868237 - RNA, 19 nt, Artificial Sequence
  Description of Artificial Sequence: Synthetic oligonucleotide
  Antisense strand to SEQ ID NO: 868236
uucaaugcaaauagcuugu

SEQ ID NO: 868238 - RNA, 19 nt, Artificial Sequence
  Description of Artificial Sequence: Synthetic oligonucleotide
  Sense strand starting at position 2886 of SEQ ID NO: 588483
agguuaaagccacauauua

SEQ ID NO: 868239 - RNA, 19 nt, Artificial Sequence
  Description of Artificial Sequence: Synthetic oligonucleotide
  Antisense strand to SEQ ID NO: 868238
uaauauguggcuuuaaccu

SEQ ID NO: 868240 - RNA, 19 nt, Artificial Sequence
  Description of Artificial Sequence: Synthetic oligonucleotide
  Sense strand starting at position 2953 of SEQ ID NO: 588483
acagucuucuauuugccau

SEQ ID NO: 868241 - RNA, 19 nt, Artificial Sequence
  Description of Artificial Sequence: Synthetic oligonucleotide
  Antisense strand to SEQ ID NO: 868240
auggcaaauagaagacugu

SEQ ID NO: 868242 - RNA, 19 nt, Artificial Sequence
  Description of Artificial Sequence: Synthetic oligonucleotide
  Sense strand starting at position 2976 of SEQ ID NO: 588483
uuguaacacugaucuugca

SEQ ID NO: 868243 - RNA, 19 nt, Artificial Sequence
  Description of Artificial Sequence: Synthetic oligonucleotide
  Antisense strand to SEQ ID NO: 868242
ugcaagaucaguguuacaa

SEQ ID NO: 868244 - RNA, 19 nt, Artificial Sequence
  Description of Artificial Sequence: Synthetic oligonucleotide
  Sense strand starting at position 3092 of SEQ ID NO: 588483
guuggacagaguuguuaga

SEQ ID NO: 868245 - RNA, 19 nt, Artificial Sequence
  Description of Artificial Sequence: Synthetic oligonucleotide
  Antisense strand to SEQ ID NO: 868244
ucuaacaacucuguccaac

SEQ ID NO: 868246 - RNA, 19 nt, Artificial Sequence
  Description of Artificial Sequence: Synthetic oligonucleotide
  Sense strand starting at position 3094 of SEQ ID NO: 588483
uggacagaguuguuagaga

SEQ ID NO: 868247 - RNA, 19 nt, Artificial Sequence
  Description of Artificial Sequence: Synthetic oligonucleotide
  Antisense strand to SEQ ID NO: 868246
ucucuaacaacucugucca

SEQ ID NO: 868248 - RNA, 19 nt, Artificial Sequence
  Description of Artificial Sequence: Synthetic oligonucleotide
  Sense strand starting at position 3138 of SEQ ID NO: 588483
guuaguuuauacuucgaga

SEQ ID NO: 868249 - RNA, 19 nt, Artificial Sequence
  Description of Artificial Sequence: Synthetic oligonucleotide
  Antisense strand to SEQ ID NO: 868248
ucucgaaguauaaacuaac

SEQ ID NO: 868250 - RNA, 19 nt, Artificial Sequence
  Description of Artificial Sequence: Synthetic oligonucleotide
  Sense strand starting at position 3140 of SEQ ID NO: 588483
uaguuuauacuucgagaac

SEQ ID NO: 868251 - RNA, 19 nt, Artificial Sequence
  Description of Artificial Sequence: Synthetic oligonucleotide
  Antisense strand to SEQ ID NO: 868250
guucucgaaguauaaacua

SEQ ID NO: 868252 - RNA, 19 nt, Artificial Sequence
  Description of Artificial Sequence: Synthetic oligonucleotide
  Sense strand starting at position 3143 of SEQ ID NO: 588483
uuuauacuucgagaacccu

SEQ ID NO: 868253 - RNA, 19 nt, Artificial Sequence
  Description of Artificial Sequence: Synthetic oligonucleotide
  Antisense strand to SEQ ID NO: 868252
aggguucucgaaguauaaa

SEQ ID NO: 868254 - RNA, 19 nt, Artificial Sequence
  Description of Artificial Sequence: Synthetic oligonucleotide
  Sense strand starting at position 3277 of SEQ ID NO: 588483
uugccuuggcccuauagau

SEQ ID NO: 868255 - RNA, 19 nt, Artificial Sequence
  Description of Artificial Sequence: Synthetic oligonucleotide
  Antisense strand to SEQ ID NO: 868254
aucuauagggccaaggcaa

SEQ ID NO: 868256 - RNA, 19 nt, Artificial Sequence
  Description of Artificial Sequence: Synthetic oligonucleotide
  Sense strand starting at position 3293 of SEQ ID NO: 588483
gauacugagucuuuaaaug

SEQ ID NO: 868257 - RNA, 19 nt, Artificial Sequence
  Description of Artificial Sequence: Synthetic oligonucleotide
  Antisense strand to SEQ ID NO: 868256
cauuuaaagacucaguauc

SEQ ID NO: 868258 - RNA, 19 nt, Artificial Sequence
  Description of Artificial Sequence: Synthetic oligonucleotide
  Sense strand starting at position 3497 of SEQ ID NO: 588483
ccauuuaguuuacugcuua

SEQ ID NO: 868259 - RNA, 19 nt, Artificial Sequence
  Description of Artificial Sequence: Synthetic oligonucleotide
  Antisense strand to SEQ ID NO: 868258
uaagcaguaaacuaaaugg

SEQ ID NO: 868260 - RNA, 19 nt, Artificial Sequence
  Description of Artificial Sequence: Synthetic oligonucleotide
  Sense strand starting at position 3510 of SEQ ID NO: 588483
ugcuuaaaccacugggauu

SEQ ID NO: 868261 - RNA, 19 nt, Artificial Sequence
  Description of Artificial Sequence: Synthetic oligonucleotide
  Antisense strand to SEQ ID NO: 868260
aaucccagugguuuaagca

SEQ ID NO: 868262 - RNA, 19 nt, Artificial Sequence
  Description of Artificial Sequence: Synthetic oligonucleotide
  Sense strand starting at position 3592 of SEQ ID NO: 588483
cuuugcuagcacuauguua

SEQ ID NO: 868263 - RNA, 19 nt, Artificial Sequence
  Description of Artificial Sequence: Synthetic oligonucleotide
  Antisense strand to SEQ ID NO: 868262
uaacauagugcuagcaaag

SEQ ID NO: 868264 - RNA, 19 nt, Artificial Sequence
  Description of Artificial Sequence: Synthetic oligonucleotide
  Sense strand starting at position 3761 of SEQ ID NO: 588483
agggaauaauagccucuau

SEQ ID NO: 868265 - RNA, 19 nt, Artificial Sequence
  Description of Artificial Sequence: Synthetic oligonucleotide
  Antisense strand to SEQ ID NO: 868264
auagaggcuauuauucccu

SEQ ID NO: 868266 - RNA, 19 nt, Artificial Sequence
  Description of Artificial Sequence: Synthetic oligonucleotide
  Sense strand starting at position 3822 of SEQ ID NO: 588483
ccagaauguguaugugaac

SEQ ID NO: 868267 - RNA, 19 nt, Artificial Sequence
  Description of Artificial Sequence: Synthetic oligonucleotide
  Antisense strand to SEQ ID NO: 868266
guucacauacacauucugg

SEQ ID NO: 868268 - RNA, 19 nt, Artificial Sequence
  Description of Artificial Sequence: Synthetic oligonucleotide
  Sense strand starting at position 3828 of SEQ ID NO: 588483
uguguaugugaacgguaga

SEQ ID NO: 868269 - RNA, 19 nt, Artificial Sequence
  Description of Artificial Sequence: Synthetic oligonucleotide
  Antisense strand to SEQ ID NO: 868268
ucuaccguucacauacaca

SEQ ID NO: 868270 - RNA, 19 nt, Artificial Sequence
  Description of Artificial Sequence: Synthetic oligonucleotide
  Sense strand starting at position 3829 of SEQ ID NO: 588483
guguaugugaacgguagau

SEQ ID NO: 868271 - RNA, 19 nt, Artificial Sequence
  Description of Artificial Sequence: Synthetic oligonucleotide
  Antisense strand to SEQ ID NO: 868270
aucuaccguucacauacac

SEQ ID NO: 868272 - RNA, 19 nt, Artificial Sequence
  Description of Artificial Sequence: Synthetic oligonucleotide
  Sense strand starting at position 3831 of SEQ ID NO: 588483
guaugugaacgguagauac

SEQ ID NO: 868273 - RNA, 19 nt, Artificial Sequence
  Description of Artificial Sequence: Synthetic oligonucleotide
  Antisense strand to SEQ ID NO: 868272
guaucuaccguucacauac

SEQ ID NO: 868274 - RNA, 19 nt, Artificial Sequence
  Description of Artificial Sequence: Synthetic oligonucleotide
  Sense strand starting at position 3833 of SEQ ID NO: 588483
augugaacgguagauacuu

SEQ ID NO: 868275 - RNA, 19 nt, Artificial Sequence
  Description of Artificial Sequence: Synthetic oligonucleotide
  Antisense strand to SEQ ID NO: 868274
aaguaucuaccguucacau

SEQ ID NO: 868276 - RNA, 19 nt, Artificial Sequence
  Description of Artificial Sequence: Synthetic oligonucleotide
  Sense strand starting at position 3839 of SEQ ID NO: 588483
acgguagauacuugugaca

SEQ ID NO: 868277 - RNA, 19 nt, Artificial Sequence
  Description of Artificial Sequence: Synthetic oligonucleotide
  Antisense strand to SEQ ID NO: 868276
ugucacaaguaucuaccgu

SEQ ID NO: 868278 - RNA, 19 nt, Artificial Sequence
  Description of Artificial Sequence: Synthetic oligonucleotide
  Sense strand starting at position 441 of SEQ ID NO: 588484
cuuugugacucuucuguac

SEQ ID NO: 868279 - RNA, 19 nt, Artificial Sequence
  Description of Artificial Sequence: Synthetic oligonucleotide
  Antisense strand to SEQ ID NO: 868278
guacagaagagucacaaag

SEQ ID NO: 868280 - RNA, 19 nt, Artificial Sequence
  Description of Artificial Sequence: Synthetic oligonucleotide
  Sense strand starting at position 464 of SEQ ID NO: 588484
acuuuaaugguggaagguu

SEQ ID NO: 868281 - RNA, 19 nt, Artificial Sequence
  Description of Artificial Sequence: Synthetic oligonucleotide
  Antisense strand to SEQ ID NO: 868280
aaccuuccaccauuaaagu

SEQ ID NO: 868282 - RNA, 19 nt, Artificial Sequence
  Description of Artificial Sequence: Synthetic oligonucleotide
  Sense strand starting at position 472 of SEQ ID NO: 588484
gguggaagguucucagaau

SEQ ID NO: 868283 - RNA, 19 nt, Artificial Sequence
  Description of Artificial Sequence: Synthetic oligonucleotide
  Antisense strand to SEQ ID NO: 868282
auucugagaaccuuccacc

SEQ ID NO: 868284 - RNA, 19 nt, Artificial Sequence
  Description of Artificial Sequence: Synthetic oligonucleotide
  Sense strand starting at position 473 of SEQ ID NO: 588484
guggaagguucucagaauc

SEQ ID NO: 868285 - RNA, 19 nt, Artificial Sequence
  Description of Artificial Sequence: Synthetic oligonucleotide
  Antisense strand to SEQ ID NO: 868284
gauucugagaaccuuccac

SEQ ID NO: 868286 - RNA, 19 nt, Artificial Sequence
  Description of Artificial Sequence: Synthetic oligonucleotide
  Sense strand starting at position 579 of SEQ ID NO: 588484
gauuucguaugccuuggaa

SEQ ID NO: 868287 - RNA, 19 nt, Artificial Sequence
  Description of Artificial Sequence: Synthetic oligonucleotide
  Antisense strand to SEQ ID NO: 868286
uuccaaggcauacgaaauc

SEQ ID NO: 868288 - RNA, 19 nt, Artificial Sequence
  Description of Artificial Sequence: Synthetic oligonucleotide
  Sense strand starting at position 581 of SEQ ID NO: 588484
uuucguaugccuuggaaac

SEQ ID NO: 868289 - RNA, 19 nt, Artificial Sequence
  Description of Artificial Sequence: Synthetic oligonucleotide
  Antisense strand to SEQ ID NO: 868288
guuuccaaggcauacgaaa

SEQ ID NO: 868290 - RNA, 19 nt, Artificial Sequence
  Description of Artificial Sequence: Synthetic oligonucleotide
  Sense strand starting at position 582 of SEQ ID NO: 588484
uucguaugccuuggaaacu

SEQ ID NO: 868291 - RNA, 19 nt, Artificial Sequence
  Description of Artificial Sequence: Synthetic oligonucleotide
  Antisense strand to SEQ ID NO: 868290
aguuuccaaggcauacgaa

SEQ ID NO: 868292 - RNA, 19 nt, Artificial Sequence
  Description of Artificial Sequence: Synthetic oligonucleotide
  Sense strand starting at position 852 of SEQ ID NO: 588484
ucacguuuauaucuugaag

SEQ ID NO: 868293 - RNA, 19 nt, Artificial Sequence
  Description of Artificial Sequence: Synthetic oligonucleotide
  Antisense strand to SEQ ID NO: 868292
cuucaagauauaaacguga

SEQ ID NO: 868294 - RNA, 19 nt, Artificial Sequence
  Description of Artificial Sequence: Synthetic oligonucleotide
  Sense strand starting at position 855 of SEQ ID NO: 588484
cguuuauaucuugaaggca

SEQ ID NO: 868295 - RNA, 19 nt, Artificial Sequence
  Description of Artificial Sequence: Synthetic oligonucleotide
  Antisense strand to SEQ ID NO: 868294
ugccuucaagauauaaacg

SEQ ID NO: 868296 - RNA, 19 nt, Artificial Sequence
  Description of Artificial Sequence: Synthetic oligonucleotide
  Sense strand starting at position 858 of SEQ ID NO: 588484
uuauaucuugaaggcaaca

SEQ ID NO: 868297 - RNA, 19 nt, Artificial Sequence
  Description of Artificial Sequence: Synthetic oligonucleotide
  Antisense strand to SEQ ID NO: 868296
uguugccuucaagauauaa

SEQ ID NO: 868298 - RNA, 19 nt, Artificial Sequence
  Description of Artificial Sequence: Synthetic oligonucleotide
  Sense strand starting at position 968 of SEQ ID NO: 588484
uaaagucagccucgacauu

SEQ ID NO: 868299 - RNA, 19 nt, Artificial Sequence
  Description of Artificial Sequence: Synthetic oligonucleotide
  Antisense strand to SEQ ID NO: 868298
aaugucgaggcugacuuua

SEQ ID NO: 868300 - RNA, 19 nt, Artificial Sequence
  Description of Artificial Sequence: Synthetic oligonucleotide
  Sense strand starting at position 1194 of SEQ ID NO: 588484
cauggucaucuguaaagua

SEQ ID NO: 868301 - RNA, 19 nt, Artificial Sequence
  Description of Artificial Sequence: Synthetic oligonucleotide
  Antisense strand to SEQ ID NO: 868300
uacuuuacagaugaccaug

SEQ ID NO: 868302 - RNA, 19 nt, Artificial Sequence
  Description of Artificial Sequence: Synthetic oligonucleotide
  Sense strand starting at position 1239 of SEQ ID NO: 588484
gcuucuuuacacugcugaa

SEQ ID NO: 868303 - RNA, 19 nt, Artificial Sequence
  Description of Artificial Sequence: Synthetic oligonucleotide
  Antisense strand to SEQ ID NO: 868302
uucagcaguguaaagaagc

SEQ ID NO: 868304 - RNA, 19 nt, Artificial Sequence
  Description of Artificial Sequence: Synthetic oligonucleotide
  Sense strand starting at position 1553 of SEQ ID NO: 588484
gggagucucuuccauccca

SEQ ID NO: 868305 - RNA, 19 nt, Artificial Sequence
  Description of Artificial Sequence: Synthetic oligonucleotide
  Antisense strand to SEQ ID NO: 868304
ugggauggaagagacuccc

SEQ ID NO: 868306 - RNA, 19 nt, Artificial Sequence
  Description of Artificial Sequence: Synthetic oligonucleotide
  Sense strand starting at position 2034 of SEQ ID NO: 588484
gugcauaggccuuaaauag

SEQ ID NO: 868307 - RNA, 19 nt, Artificial Sequence
  Description of Artificial Sequence: Synthetic oligonucleotide
  Antisense strand to SEQ ID NO: 868306
cuauuuaaggccuaugcac

SEQ ID NO: 868308 - RNA, 19 nt, Artificial Sequence
  Description of Artificial Sequence: Synthetic oligonucleotide
  Sense strand starting at position 2041 of SEQ ID NO: 588484
ggccuuaaauagugaacau

SEQ ID NO: 868309 - RNA, 19 nt, Artificial Sequence
  Description of Artificial Sequence: Synthetic oligonucleotide
  Antisense strand to SEQ ID NO: 868308
auguucacuauuuaaggcc

SEQ ID NO: 868310 - RNA, 19 nt, Artificial Sequence
  Description of Artificial Sequence: Synthetic oligonucleotide
  Sense strand starting at position 2127 of SEQ ID NO: 588484
cucuacauguguuuaagaa

SEQ ID NO: 868311 - RNA, 19 nt, Artificial Sequence
  Description of Artificial Sequence: Synthetic oligonucleotide
  Antisense strand to SEQ ID NO: 868310
uucuuaaacacauguagag

SEQ ID NO: 868312 - RNA, 19 nt, Artificial Sequence
  Description of Artificial Sequence: Synthetic oligonucleotide
  Sense strand starting at position 2128 of SEQ ID NO: 588484
ucuacauguguuuaagaau

SEQ ID NO: 868313 - RNA, 19 nt, Artificial Sequence
  Description of Artificial Sequence: Synthetic oligonucleotide
  Antisense strand to SEQ ID NO: 868312
auucuuaaacacauguaga

SEQ ID NO: 868314 - RNA, 19 nt, Artificial Sequence
  Description of Artificial Sequence: Synthetic oligonucleotide
  Sense strand starting at position 2252 of SEQ ID NO: 588484
uggcauauguauuuaugua

SEQ ID NO: 868315 - RNA, 19 nt, Artificial Sequence
  Description of Artificial Sequence: Synthetic oligonucleotide
  Antisense strand to SEQ ID NO: 868314
uacauaaauacauaugcca

SEQ ID NO: 868316 - RNA, 19 nt, Artificial Sequence
  Description of Artificial Sequence: Synthetic oligonucleotide
  Sense strand starting at position 2682 of SEQ ID NO: 588484
gacauaaauguauaugugu

SEQ ID NO: 868317 - RNA, 19 nt, Artificial Sequence
  Description of Artificial Sequence: Synthetic oligonucleotide
  Antisense strand to SEQ ID NO: 868316
acacauauacauuuauguc

SEQ ID NO: 868318 - RNA, 19 nt, Artificial Sequence
  Description of Artificial Sequence: Synthetic oligonucleotide
  Sense strand starting at position 2690 of SEQ ID NO: 588484
uguauauguguugaauaac

SEQ ID NO: 868319 - RNA, 19 nt, Artificial Sequence
  Description of Artificial Sequence: Synthetic oligonucleotide
  Antisense strand to SEQ ID NO: 868318
guuauucaacacauauaca

SEQ ID NO: 868320 - RNA, 19 nt, Artificial Sequence
  Description of Artificial Sequence: Synthetic oligonucleotide
  Sense strand starting at position 2988 of SEQ ID NO: 588484
ucucauaucguacacaaga

SEQ ID NO: 868321 - RNA, 19 nt, Artificial Sequence
  Description of Artificial Sequence: Synthetic oligonucleotide
  Antisense strand to SEQ ID NO: 868320
ucuuguguacgauaugaga

SEQ ID NO: 868322 - RNA, 19 nt, Artificial Sequence
  Description of Artificial Sequence: Synthetic oligonucleotide
  Sense strand starting at position 3051 of SEQ ID NO: 588484
gauagaguuguuggagagu

SEQ ID NO: 868323 - RNA, 19 nt, Artificial Sequence
  Description of Artificial Sequence: Synthetic oligonucleotide
  Antisense strand to SEQ ID NO: 868322
acucuccaacaacucuauc

SEQ ID NO: 868324 - RNA, 19 nt, Artificial Sequence
  Description of Artificial Sequence: Synthetic oligonucleotide
  Sense strand starting at position 3123 of SEQ ID NO: 588484
uuuguacucuucgaagaag

SEQ ID NO: 868325 - RNA, 19 nt, Artificial Sequence
  Description of Artificial Sequence: Synthetic oligonucleotide
  Antisense strand to SEQ ID NO: 868324
cuucuucgaagaguacaaa

SEQ ID NO: 868326 - RNA, 19 nt, Artificial Sequence
  Description of Artificial Sequence: Synthetic oligonucleotide
  Sense strand starting at position 3126 of SEQ ID NO: 588484
guacucuucgaagaaguau

SEQ ID NO: 868327 - RNA, 19 nt, Artificial Sequence
  Description of Artificial Sequence: Synthetic oligonucleotide
  Antisense strand to SEQ ID NO: 868326
auacuucuucgaagaguac

SEQ ID NO: 868328 - RNA, 19 nt, Artificial Sequence
  Description of Artificial Sequence: Synthetic oligonucleotide
  Sense strand starting at position 3419 of SEQ ID NO: 588484
uggaaugaagucugcuuua

SEQ ID NO: 868329 - RNA, 19 nt, Artificial Sequence
  Description of Artificial Sequence: Synthetic oligonucleotide
  Antisense strand to SEQ ID NO: 868328
uaaagcagacuucauucca

SEQ ID NO: 868330 - RNA, 19 nt, Artificial Sequence
  Description of Artificial Sequence: Synthetic oligonucleotide
  Sense strand starting at position 3422 of SEQ ID NO: 588484
aaugaagucugcuuuagca

SEQ ID NO: 868331 - RNA, 19 nt, Artificial Sequence
  Description of Artificial Sequence: Synthetic oligonucleotide
  Antisense strand to SEQ ID NO: 868330
ugcuaaagcagacuucauu

SEQ ID NO: 868332 - RNA, 19 nt, Artificial Sequence
  Description of Artificial Sequence: Synthetic oligonucleotide
  Sense strand starting at position 3424 of SEQ ID NO: 588484
ugaagucugcuuuagcaaa

SEQ ID NO: 868333 - RNA, 19 nt, Artificial Sequence
  Description of Artificial Sequence: Synthetic oligonucleotide
  Antisense strand to SEQ ID NO: 868332
uuugcuaaagcagacuuca

SEQ ID NO: 868334 - RNA, 19 nt, Artificial Sequence
  Description of Artificial Sequence: Synthetic oligonucleotide
  Sense strand starting at position 3533 of SEQ ID NO: 588484
gcacauauuugcugggauu

SEQ ID NO: 868335 - RNA, 19 nt, Artificial Sequence
  Description of Artificial Sequence: Synthetic oligonucleotide
  Antisense strand to SEQ ID NO: 868334
aaucccagcaaauaugugc

SEQ ID NO: 868336 - RNA, 19 nt, Artificial Sequence
  Description of Artificial Sequence: Synthetic oligonucleotide
  Sense strand starting at position 3536 of SEQ ID NO: 588484
cauauuugcugggauuaua

SEQ ID NO: 868337 - RNA, 19 nt, Artificial Sequence
  Description of Artificial Sequence: Synthetic oligonucleotide
  Antisense strand to SEQ ID NO: 868336
uauaaucccagcaaauaug

SEQ ID NO: 868338 - RNA, 19 nt, Artificial Sequence
  Description of Artificial Sequence: Synthetic oligonucleotide
  Sense strand starting at position 3544 of SEQ ID NO: 588484
cugggauuauaauagauaa

SEQ ID NO: 868339 - RNA, 19 nt, Artificial Sequence
  Description of Artificial Sequence: Synthetic oligonucleotide
  Antisense strand to SEQ ID NO: 868338
uuaucuauuauaaucccag

SEQ ID NO: 868340 - RNA, 19 nt, Artificial Sequence
  Description of Artificial Sequence: Synthetic oligonucleotide
  Sense strand starting at position 3746 of SEQ ID NO: 588484
uguccucuacuuugugaua

SEQ ID NO: 868341 - RNA, 19 nt, Artificial Sequence
  Description of Artificial Sequence: Synthetic oligonucleotide
  Antisense strand to SEQ ID NO: 868340
uaucacaaaguagaggaca

SEQ ID NO: 868342 - RNA, 19 nt, Artificial Sequence
  Description of Artificial Sequence: Synthetic oligonucleotide
  Sense strand starting at position 3747 of SEQ ID NO: 588484
guccucuacuuugugauaa

SEQ ID NO: 868343 - RNA, 19 nt, Artificial Sequence
  Description of Artificial Sequence: Synthetic oligonucleotide
  Antisense strand to SEQ ID NO: 868342
uuaucacaaaguagaggac

SEQ ID NO: 868344 - RNA, 19 nt, Artificial Sequence
  Description of Artificial Sequence: Synthetic oligonucleotide
  Sense strand starting at position 3751 of SEQ ID NO: 588484
ucuacuuugugauaauaga

SEQ ID NO: 868345 - RNA, 19 nt, Artificial Sequence
  Description of Artificial Sequence: Synthetic oligonucleotide
  Antisense strand to SEQ ID NO: 868344
ucuauuaucacaaaguaga

SEQ ID NO: 868346 - RNA, 19 nt, Artificial Sequence
  Description of Artificial Sequence: Synthetic oligonucleotide
  Sense strand starting at position 3920 of SEQ ID NO: 588484
uggaucaaaucccaagaau

SEQ ID NO: 868347 - RNA, 19 nt, Artificial Sequence
  Description of Artificial Sequence: Synthetic oligonucleotide
  Antisense strand to SEQ ID NO: 868346
auucuugggauuugaucca

SEQ ID NO: 868348 - RNA, 19 nt, Artificial Sequence
  Description of Artificial Sequence: Synthetic oligonucleotide
  Sense strand starting at position 3932 of SEQ ID NO: 588484
caagaauguguaugugaau

SEQ ID NO: 868349 - RNA, 19 nt, Artificial Sequence
  Description of Artificial Sequence: Synthetic oligonucleotide
  Antisense strand to SEQ ID NO: 868348
auucacauacacauucuug

SEQ ID NO: 868350 - RNA, 19 nt, Artificial Sequence
  Description of Artificial Sequence: Synthetic oligonucleotide
  Sense strand starting at position 3933 of SEQ ID NO: 588484
aagaauguguaugugaauu

SEQ ID NO: 868351 - RNA, 19 nt, Artificial Sequence
  Description of Artificial Sequence: Synthetic oligonucleotide
  Antisense strand to SEQ ID NO: 868350
aauucacauacacauucuu

SEQ ID NO: 868352 - RNA, 19 nt, Artificial Sequence
  Description of Artificial Sequence: Synthetic oligonucleotide
  Sense strand starting at position 3939 of SEQ ID NO: 588484
guguaugugaauuguaaag

SEQ ID NO: 868353 - RNA, 19 nt, Artificial Sequence
  Description of Artificial Sequence: Synthetic oligonucleotide
  Antisense strand to SEQ ID NO: 868352
cuuuacaauucacauacac

SEQ ID NO: 868354 - RNA, 19 nt, Artificial Sequence
  Description of Artificial Sequence: Synthetic oligonucleotide
  Sense strand starting at position 3941 of SEQ ID NO: 588484
guaugugaauuguaaagac

SEQ ID NO: 868355 - RNA, 19 nt, Artificial Sequence
  Description of Artificial Sequence: Synthetic oligonucleotide
  Antisense strand to SEQ ID NO: 868354
gucuuuacaauucacauac

SEQ ID NO: 868356 - RNA, 19 nt, Artificial Sequence
  Description of Artificial Sequence: Synthetic oligonucleotide
  Sense strand starting at position 3945 of SEQ ID NO: 588484
gugaauuguaaagacuugu

SEQ ID NO: 868357 - RNA, 19 nt, Artificial Sequence
  Description of Artificial Sequence: Synthetic oligonucleotide
  Antisense strand to SEQ ID NO: 868356
acaagucuuuacaauucac

SEQ ID NO: 868358 - RNA, 19 nt, Artificial Sequence
  Description of Artificial Sequence: Synthetic oligonucleotide
  Sense strand starting at position 93 of SEQ ID NO: 588485
guguauuaacuuuacccaa

SEQ ID NO: 868359 - RNA, 19 nt, Artificial Sequence
  Description of Artificial Sequence: Synthetic oligonucleotide
  Antisense strand to SEQ ID NO: 868358
uuggguaaaguuaauacac

SEQ ID NO: 868360 - RNA, 19 nt, Artificial Sequence
  Description of Artificial Sequence: Synthetic oligonucleotide
  Sense strand starting at position 111 of SEQ ID NO: 588485
aucaguucucacuaagggu

SEQ ID NO: 868361 - RNA, 19 nt, Artificial Sequence
  Description of Artificial Sequence: Synthetic oligonucleotide
  Antisense strand to SEQ ID NO: 868360
acccuuagugagaacugau

SEQ ID NO: 868362 - RNA, 19 nt, Artificial Sequence
  Description of Artificial Sequence: Synthetic oligonucleotide
  Sense strand starting at position 365 of SEQ ID NO: 588485
ugcuguugccuucuaaugu

SEQ ID NO: 868363 - RNA, 19 nt, Artificial Sequence
  Description of Artificial Sequence: Synthetic oligonucleotide
  Antisense strand to SEQ ID NO: 868362
acauuagaaggcaacagca

SEQ ID NO: 868364 - RNA, 19 nt, Artificial Sequence
  Description of Artificial Sequence: Synthetic oligonucleotide
  Sense strand starting at position 446 of SEQ ID NO: 588485
agcgaaagguccucagaau

SEQ ID NO: 868365 - RNA, 19 nt, Artificial Sequence
  Description of Artificial Sequence: Synthetic oligonucleotide
  Antisense strand to SEQ ID NO: 868364
auucugaggaccuuucgcu

SEQ ID NO: 868366 - RNA, 19 nt, Artificial Sequence
  Description of Artificial Sequence: Synthetic oligonucleotide
  Sense strand starting at position 447 of SEQ ID NO: 588485
gcgaaagguccucagaauc

SEQ ID NO: 868367 - RNA, 19 nt, Artificial Sequence
  Description of Artificial Sequence: Synthetic oligonucleotide
  Antisense strand to SEQ ID NO: 868366
gauucugaggaccuuucgc

SEQ ID NO: 868368 - RNA, 19 nt, Artificial Sequence
  Description of Artificial Sequence: Synthetic oligonucleotide
  Sense strand starting at position 610 of SEQ ID NO: 588485
cuaauagauguauacuagu

SEQ ID NO: 868369 - RNA, 19 nt, Artificial Sequence
  Description of Artificial Sequence: Synthetic oligonucleotide
  Antisense strand to SEQ ID NO: 868368
acuaguauacaucuauuag

SEQ ID NO: 868370 - RNA, 19 nt, Artificial Sequence
  Description of Artificial Sequence: Synthetic oligonucleotide
  Sense strand starting at position 637 of SEQ ID NO: 588485
agagaaugucucugucuua

SEQ ID NO: 868371 - RNA, 19 nt, Artificial Sequence
  Description of Artificial Sequence: Synthetic oligonucleotide
  Antisense strand to SEQ ID NO: 868370
uaagacagagacauucucu

SEQ ID NO: 868372 - RNA, 19 nt, Artificial Sequence
  Description of Artificial Sequence: Synthetic oligonucleotide
  Sense strand starting at position 693 of SEQ ID NO: 588485
gagagaaaucaucgguugu

SEQ ID NO: 868373 - RNA, 19 nt, Artificial Sequence
  Description of Artificial Sequence: Synthetic oligonucleotide
  Antisense strand to SEQ ID NO: 868372
acaaccgaugauuucucuc

SEQ ID NO: 868374 - RNA, 19 nt, Artificial Sequence
  Description of Artificial Sequence: Synthetic oligonucleotide
  Sense strand starting at position 832 of SEQ ID NO: 588485
uguuaucuugaguacaaca

SEQ ID NO: 868375 - RNA, 19 nt, Artificial Sequence
  Description of Artificial Sequence: Synthetic oligonucleotide
  Antisense strand to SEQ ID NO: 868374
uguuguacucaagauaaca

SEQ ID NO: 868376 - RNA, 19 nt, Artificial Sequence
  Description of Artificial Sequence: Synthetic oligonucleotide
  Sense strand starting at position 907 of SEQ ID NO: 588485
ggauaaaugaaguguacca

SEQ ID NO: 868377 - RNA, 19 nt, Artificial Sequence
  Description of Artificial Sequence: Synthetic oligonucleotide
  Antisense strand to SEQ ID NO: 868376
ugguacacuucauuuaucc

SEQ ID NO: 868378 - RNA, 19 nt, Artificial Sequence
  Description of Artificial Sequence: Synthetic oligonucleotide
  Sense strand starting at position 922 of SEQ ID NO: 588485
accaguuauucuguaauca

SEQ ID NO: 868379 - RNA, 19 nt, Artificial Sequence
  Description of Artificial Sequence: Synthetic oligonucleotide
  Antisense strand to SEQ ID NO: 868378
ugauuacagaauaacuggu

SEQ ID NO: 868380 - RNA, 19 nt, Artificial Sequence
  Description of Artificial Sequence: Synthetic oligonucleotide
  Sense strand starting at position 923 of SEQ ID NO: 588485
ccaguuauucuguaaucag

SEQ ID NO: 868381 - RNA, 19 nt, Artificial Sequence
  Description of Artificial Sequence: Synthetic oligonucleotide
  Antisense strand to SEQ ID NO: 868380
cugauuacagaauaacugg

SEQ ID NO: 868382 - RNA, 19 nt, Artificial Sequence
  Description of Artificial Sequence: Synthetic oligonucleotide
  Sense strand starting at position 1177 of SEQ ID NO: 588485
caugguccucuguaaggga

SEQ ID NO: 868383 - RNA, 19 nt, Artificial Sequence
  Description of Artificial Sequence: Synthetic oligonucleotide
  Antisense strand to SEQ ID NO: 868382
ucccuuacagaggaccaug

SEQ ID NO: 868384 - RNA, 19 nt, Artificial Sequence
  Description of Artificial Sequence: Synthetic oligonucleotide
  Sense strand starting at position 1191 of SEQ ID NO: 588485
agggacuagugccuuaaga

SEQ ID NO: 868385 - RNA, 19 nt, Artificial Sequence
  Description of Artificial Sequence: Synthetic oligonucleotide
  Antisense strand to SEQ ID NO: 868384
ucuuaaggcacuagucccu

SEQ ID NO: 868386 - RNA, 19 nt, Artificial Sequence
  Description of Artificial Sequence: Synthetic oligonucleotide
  Sense strand starting at position 1193 of SEQ ID NO: 588485
ggacuagugccuuaagagc

SEQ ID NO: 868387 - RNA, 19 nt, Artificial Sequence
  Description of Artificial Sequence: Synthetic oligonucleotide
  Antisense strand to SEQ ID NO: 868386
gcucuuaaggcacuagucc

SEQ ID NO: 868388 - RNA, 19 nt, Artificial Sequence
  Description of Artificial Sequence: Synthetic oligonucleotide
  Sense strand starting at position 1201 of SEQ ID NO: 588485
gccuuaagagcugaauaca

SEQ ID NO: 868389 - RNA, 19 nt, Artificial Sequence
  Description of Artificial Sequence: Synthetic oligonucleotide
  Antisense strand to SEQ ID NO: 868388
uguauucagcucuuaaggc

SEQ ID NO: 868390 - RNA, 19 nt, Artificial Sequence
  Description of Artificial Sequence: Synthetic oligonucleotide
  Sense strand starting at position 1209 of SEQ ID NO: 588485
agcugaauacaauguugau

SEQ ID NO: 868391 - RNA, 19 nt, Artificial Sequence
  Description of Artificial Sequence: Synthetic oligonucleotide
  Antisense strand to SEQ ID NO: 868390
aucaacauuguauucagcu

SEQ ID NO: 868392 - RNA, 19 nt, Artificial Sequence
  Description of Artificial Sequence: Synthetic oligonucleotide
  Sense strand starting at position 1288 of SEQ ID NO: 588485
agucuuugaaauggcagau

SEQ ID NO: 868393 - RNA, 19 nt, Artificial Sequence
  Description of Artificial Sequence: Synthetic oligonucleotide
  Antisense strand to SEQ ID NO: 868392
aucugccauuucaaagacu

SEQ ID NO: 868394 - RNA, 19 nt, Artificial Sequence
  Description of Artificial Sequence: Synthetic oligonucleotide
  Sense strand starting at position 1455 of SEQ ID NO: 588485
ggcuguauuucuucucuuu

SEQ ID NO: 868395 - RNA, 19 nt, Artificial Sequence
  Description of Artificial Sequence: Synthetic oligonucleotide
  Antisense strand to SEQ ID NO: 868394
aaagagaagaaauacagcc

SEQ ID NO: 868396 - RNA, 19 nt, Artificial Sequence
  Description of Artificial Sequence: Synthetic oligonucleotide
  Sense strand starting at position 1476 of SEQ ID NO: 588485
gauagagagugauucuuug

SEQ ID NO: 868397 - RNA, 19 nt, Artificial Sequence
  Description of Artificial Sequence: Synthetic oligonucleotide
  Antisense strand to SEQ ID NO: 868396
caaagaaucacucucuauc

SEQ ID NO: 868398 - RNA, 19 nt, Artificial Sequence
  Description of Artificial Sequence: Synthetic oligonucleotide
  Sense strand starting at position 1668 of SEQ ID NO: 588485
gauugaagaucugcuggau

SEQ ID NO: 868399 - RNA, 19 nt, Artificial Sequence
  Description of Artificial Sequence: Synthetic oligonucleotide
  Antisense strand to SEQ ID NO: 868398
auccagcagaucuucaauc

SEQ ID NO: 868400 - RNA, 19 nt, Artificial Sequence
  Description of Artificial Sequence: Synthetic oligonucleotide
  Sense strand starting at position 1671 of SEQ ID NO: 588485
ugaagaucugcuggaucau

SEQ ID NO: 868401 - RNA, 19 nt, Artificial Sequence
  Description of Artificial Sequence: Synthetic oligonucleotide
  Antisense strand to SEQ ID NO: 868400
augauccagcagaucuuca

SEQ ID NO: 868402 - RNA, 19 nt, Artificial Sequence
  Description of Artificial Sequence: Synthetic oligonucleotide
  Sense strand starting at position 1789 of SEQ ID NO: 588485
agagauucuccucaucugu

SEQ ID NO: 868403 - RNA, 19 nt, Artificial Sequence
  Description of Artificial Sequence: Synthetic oligonucleotide
  Antisense strand to SEQ ID NO: 868402
acagaugaggagaaucucu

SEQ ID NO: 868404 - RNA, 19 nt, Artificial Sequence
  Description of Artificial Sequence: Synthetic oligonucleotide
  Sense strand starting at position 1843 of SEQ ID NO: 588485
guggguuugaggcagauca

SEQ ID NO: 868405 - RNA, 19 nt, Artificial Sequence
  Description of Artificial Sequence: Synthetic oligonucleotide
  Antisense strand to SEQ ID NO: 868404
ugaucugccucaaacccac

SEQ ID NO: 868406 - RNA, 19 nt, Artificial Sequence
  Description of Artificial Sequence: Synthetic oligonucleotide
  Sense strand starting at position 1845 of SEQ ID NO: 588485
ggguuugaggcagaucaca

SEQ ID NO: 868407 - RNA, 19 nt, Artificial Sequence
  Description of Artificial Sequence: Synthetic oligonucleotide
  Antisense strand to SEQ ID NO: 868406
ugugaucugccucaaaccc

SEQ ID NO: 868408 - RNA, 19 nt, Artificial Sequence
  Description of Artificial Sequence: Synthetic oligonucleotide
  Sense strand starting at position 1950 of SEQ ID NO: 588485
cugcuagacugguugaaau

SEQ ID NO: 868409 - RNA, 19 nt, Artificial Sequence
  Description of Artificial Sequence: Synthetic oligonucleotide
  Antisense strand to SEQ ID NO: 868408
auuucaaccagucuagcag

SEQ ID NO: 868410 - RNA, 19 nt, Artificial Sequence
  Description of Artificial Sequence: Synthetic oligonucleotide
  Sense strand starting at position 1961 of SEQ ID NO: 588485
guugaaaugggugagccua

SEQ ID NO: 868411 - RNA, 19 nt, Artificial Sequence
  Description of Artificial Sequence: Synthetic oligonucleotide
  Antisense strand to SEQ ID NO: 868410
uaggcucacccauuucaac

SEQ ID NO: 868412 - RNA, 19 nt, Artificial Sequence
  Description of Artificial Sequence: Synthetic oligonucleotide
  Sense strand starting at position 1963 of SEQ ID NO: 588485
ugaaaugggugagccuaaa

SEQ ID NO: 868413 - RNA, 19 nt, Artificial Sequence
  Description of Artificial Sequence: Synthetic oligonucleotide
  Antisense strand to SEQ ID NO: 868412
uuuaggcucacccauuuca

SEQ ID NO: 868414 - RNA, 19 nt, Artificial Sequence
  Description of Artificial Sequence: Synthetic oligonucleotide
  Sense strand starting at position 2031 of SEQ ID NO: 588485
uagggaacauacucguuua

SEQ ID NO: 868415 - RNA, 19 nt, Artificial Sequence
  Description of Artificial Sequence: Synthetic oligonucleotide
  Antisense strand to SEQ ID NO: 868414
uaaacgaguauguucccua

SEQ ID NO: 868416 - RNA, 19 nt, Artificial Sequence
  Description of Artificial Sequence: Synthetic oligonucleotide
  Sense strand starting at position 2034 of SEQ ID NO: 588485
ggaacauacucguuuacau

SEQ ID NO: 868417 - RNA, 19 nt, Artificial Sequence
  Description of Artificial Sequence: Synthetic oligonucleotide
  Antisense strand to SEQ ID NO: 868416
auguaaacgaguauguucc

SEQ ID NO: 868418 - RNA, 19 nt, Artificial Sequence
  Description of Artificial Sequence: Synthetic oligonucleotide
  Sense strand starting at position 2628 of SEQ ID NO: 588485
ugugcuaucgaauacuaaa

SEQ ID NO: 868419 - RNA, 19 nt, Artificial Sequence
  Description of Artificial Sequence: Synthetic oligonucleotide
  Antisense strand to SEQ ID NO: 868418
uuuaguauucgauagcaca

SEQ ID NO: 868420 - RNA, 19 nt, Artificial Sequence
  Description of Artificial Sequence: Synthetic oligonucleotide
  Sense strand starting at position 2678 of SEQ ID NO: 588485
gcccguuagccaucuccau

SEQ ID NO: 868421 - RNA, 19 nt, Artificial Sequence
  Description of Artificial Sequence: Synthetic oligonucleotide
  Antisense strand to SEQ ID NO: 868420
auggagauggcuaacgggc

SEQ ID NO: 868422 - RNA, 19 nt, Artificial Sequence
  Description of Artificial Sequence: Synthetic oligonucleotide
  Sense strand starting at position 3321 of SEQ ID NO: 588485
ccaucagauccugaguucu

SEQ ID NO: 868423 - RNA, 19 nt, Artificial Sequence
  Description of Artificial Sequence: Synthetic oligonucleotide
  Antisense strand to SEQ ID NO: 868422
agaacucaggaucugaugg

SEQ ID NO: 868424 - RNA, 19 nt, Artificial Sequence
  Description of Artificial Sequence: Synthetic oligonucleotide
  Sense strand starting at position 3323 of SEQ ID NO: 588485
aucagauccugaguucuuu

SEQ ID NO: 868425 - RNA, 19 nt, Artificial Sequence
  Description of Artificial Sequence: Synthetic oligonucleotide
  Antisense strand to SEQ ID NO: 868424
aaagaacucaggaucugau

SEQ ID NO: 868426 - RNA, 19 nt, Artificial Sequence
  Description of Artificial Sequence: Synthetic oligonucleotide
  Sense strand starting at position 3659 of SEQ ID NO: 588485
uuguauuuauuugggacuu

SEQ ID NO: 868427 - RNA, 19 nt, Artificial Sequence
  Description of Artificial Sequence: Synthetic oligonucleotide
  Antisense strand to SEQ ID NO: 868426
aagucccaaauaaauacaa

SEQ ID NO: 868428 - RNA, 19 nt, Artificial Sequence
  Description of Artificial Sequence: Synthetic oligonucleotide
  Sense strand starting at position 3661 of SEQ ID NO: 588485
guauuuauuugggacuucu

SEQ ID NO: 868429 - RNA, 19 nt, Artificial Sequence
  Description of Artificial Sequence: Synthetic oligonucleotide
  Antisense strand to SEQ ID NO: 868428
agaagucccaaauaaauac

SEQ ID NO: 868430 - RNA, 19 nt, Artificial Sequence
  Description of Artificial Sequence: Synthetic oligonucleotide
  Sense strand starting at position 3687 of SEQ ID NO: 588485
uuagucuguggugagagaa

SEQ ID NO: 868431 - RNA, 19 nt, Artificial Sequence
  Description of Artificial Sequence: Synthetic oligonucleotide
  Antisense strand to SEQ ID NO: 868430
uucucucaccacagacuaa

SEQ ID NO: 868432 - RNA, 19 nt, Artificial Sequence
  Description of Artificial Sequence: Synthetic oligonucleotide
  Sense strand starting at position 3765 of SEQ ID NO: 588485
uuugguauauccuugagaa

SEQ ID NO: 868433 - RNA, 19 nt, Artificial Sequence
  Description of Artificial Sequence: Synthetic oligonucleotide
  Antisense strand to SEQ ID NO: 868432
uucucaaggauauaccaaa

SEQ ID NO: 868434 - RNA, 19 nt, Artificial Sequence
  Description of Artificial Sequence: Synthetic oligonucleotide
  Sense strand starting at position 3766 of SEQ ID NO: 588485
uugguauauccuugagaau

SEQ ID NO: 868435 - RNA, 19 nt, Artificial Sequence
  Description of Artificial Sequence: Synthetic oligonucleotide
  Antisense strand to SEQ ID NO: 868434
auucucaaggauauaccaa

SEQ ID NO: 868436 - RNA, 19 nt, Artificial Sequence
  Description of Artificial Sequence: Synthetic oligonucleotide
  Sense strand starting at position 3865 of SEQ ID NO: 588485
gccuauggugcagaugaaa

SEQ ID NO: 868437 - RNA, 19 nt, Artificial Sequence
  Description of Artificial Sequence: Synthetic oligonucleotide
  Antisense strand to SEQ ID NO: 868436
uuucaucugcaccauaggc

SEQ ID NO: 868438 - RNA, 19 nt, Artificial Sequence
  Description of Artificial Sequence: Synthetic oligonucleotide
  Sense strand starting at position 81 of SEQ ID NO: 588486
auauuaaagugguuuggcu

SEQ ID NO: 868439 - RNA, 19 nt, Artificial Sequence
  Description of Artificial Sequence: Synthetic oligonucleotide
  Antisense strand to SEQ ID NO: 868438
agccaaaccacuuuaauau

SEQ ID NO: 868440 - RNA, 19 nt, Artificial Sequence
  Description of Artificial Sequence: Synthetic oligonucleotide
  Sense strand starting at position 243 of SEQ ID NO: 588486
cuauauguauugucacuga

SEQ ID NO: 868441 - RNA, 19 nt, Artificial Sequence
  Description of Artificial Sequence: Synthetic oligonucleotide
  Antisense strand to SEQ ID NO: 868440
ucagugacaauacauauag

SEQ ID NO: 868442 - RNA, 19 nt, Artificial Sequence
  Description of Artificial Sequence: Synthetic oligonucleotide
  Sense strand starting at position 350 of SEQ ID NO: 588486
ccagauguaguguacacuu

SEQ ID NO: 868443 - RNA, 19 nt, Artificial Sequence
  Description of Artificial Sequence: Synthetic oligonucleotide
  Antisense strand to SEQ ID NO: 868442
aaguguacacuacaucugg

SEQ ID NO: 868444 - RNA, 19 nt, Artificial Sequence
  Description of Artificial Sequence: Synthetic oligonucleotide
  Sense strand starting at position 383 of SEQ ID NO: 588486
gcaagaaugcauugauucu

SEQ ID NO: 868445 - RNA, 19 nt, Artificial Sequence
  Description of Artificial Sequence: Synthetic oligonucleotide
  Antisense strand to SEQ ID NO: 868444
agaaucaaugcauucuugc

SEQ ID NO: 868446 - RNA, 19 nt, Artificial Sequence
  Description of Artificial Sequence: Synthetic oligonucleotide
  Sense strand starting at position 389 of SEQ ID NO: 588486
augcauugauucuucuaag

SEQ ID NO: 868447 - RNA, 19 nt, Artificial Sequence
  Description of Artificial Sequence: Synthetic oligonucleotide
  Antisense strand to SEQ ID NO: 868446
cuuagaagaaucaaugcau

SEQ ID NO: 868448 - RNA, 19 nt, Artificial Sequence
  Description of Artificial Sequence: Synthetic oligonucleotide
  Sense strand starting at position 557 of SEQ ID NO: 588486
gugacauauucuguuccca

SEQ ID NO: 868449 - RNA, 19 nt, Artificial Sequence
  Description of Artificial Sequence: Synthetic oligonucleotide
  Antisense strand to SEQ ID NO: 868448
ugggaacagaauaugucac

SEQ ID NO: 868450 - RNA, 19 nt, Artificial Sequence
  Description of Artificial Sequence: Synthetic oligonucleotide
  Sense strand starting at position 587 of SEQ ID NO: 588486
caugguauugcuuguaaau

SEQ ID NO: 868451 - RNA, 19 nt, Artificial Sequence
  Description of Artificial Sequence: Synthetic oligonucleotide
  Antisense strand to SEQ ID NO: 868450
auuuacaagcaauaccaug

SEQ ID NO: 868452 - RNA, 19 nt, Artificial Sequence
  Description of Artificial Sequence: Synthetic oligonucleotide
  Sense strand starting at position 655 of SEQ ID NO: 588486
acuugucugcuauagagga

SEQ ID NO: 868453 - RNA, 19 nt, Artificial Sequence
  Description of Artificial Sequence: Synthetic oligonucleotide
  Antisense strand to SEQ ID NO: 868452
uccucuauagcagacaagu

SEQ ID NO: 868454 - RNA, 19 nt, Artificial Sequence
  Description of Artificial Sequence: Synthetic oligonucleotide
  Sense strand starting at position 657 of SEQ ID NO: 588486
uugucugcuauagaggaua

SEQ ID NO: 868455 - RNA, 19 nt, Artificial Sequence
  Description of Artificial Sequence: Synthetic oligonucleotide
  Antisense strand to SEQ ID NO: 868454
uauccucuauagcagacaa

SEQ ID NO: 868456 - RNA, 19 nt, Artificial Sequence
  Description of Artificial Sequence: Synthetic oligonucleotide
  Sense strand starting at position 774 of SEQ ID NO: 588486
gguauuagaaaguauaguu

SEQ ID NO: 868457 - RNA, 19 nt, Artificial Sequence
  Description of Artificial Sequence: Synthetic oligonucleotide
  Antisense strand to SEQ ID NO: 868456
aacuauacuuucuaauacc

SEQ ID NO: 868458 - RNA, 19 nt, Artificial Sequence
  Description of Artificial Sequence: Synthetic oligonucleotide
  Sense strand starting at position 931 of SEQ ID NO: 588486
ggguaaaugaauuguacca

SEQ ID NO: 868459 - RNA, 19 nt, Artificial Sequence
  Description of Artificial Sequence: Synthetic oligonucleotide
  Antisense strand to SEQ ID NO: 868458
ugguacaauucauuuaccc

SEQ ID NO: 868460 - RNA, 19 nt, Artificial Sequence
  Description of Artificial Sequence: Synthetic oligonucleotide
  Sense strand starting at position 956 of SEQ ID NO: 588486
cuuuaaugagauugcacau

SEQ ID NO: 868461 - RNA, 19 nt, Artificial Sequence
  Description of Artificial Sequence: Synthetic oligonucleotide
  Antisense strand to SEQ ID NO: 868460
augugcaaucucauuaaag

SEQ ID NO: 868462 - RNA, 19 nt, Artificial Sequence
  Description of Artificial Sequence: Synthetic oligonucleotide
  Sense strand starting at position 976 of SEQ ID NO: 588486
ugggcuugguauuucuuua

SEQ ID NO: 868463 - RNA, 19 nt, Artificial Sequence
  Description of Artificial Sequence: Synthetic oligonucleotide
  Antisense strand to SEQ ID NO: 868462
uaaagaaauaccaagccca

SEQ ID NO: 868464 - RNA, 19 nt, Artificial Sequence
  Description of Artificial Sequence: Synthetic oligonucleotide
  Sense strand starting at position 1180 of SEQ ID NO: 588486
gaucuaucagcauggucau

SEQ ID NO: 868465 - RNA, 19 nt, Artificial Sequence
  Description of Artificial Sequence: Synthetic oligonucleotide
  Antisense strand to SEQ ID NO: 868464
augaccaugcugauagauc

SEQ ID NO: 868466 - RNA, 19 nt, Artificial Sequence
  Description of Artificial Sequence: Synthetic oligonucleotide
  Sense strand starting at position 1228 of SEQ ID NO: 588486
acaugauguuuccuuacac

SEQ ID NO: 868467 - RNA, 19 nt, Artificial Sequence
  Description of Artificial Sequence: Synthetic oligonucleotide
  Antisense strand to SEQ ID NO: 868466
guguaaggaaacaucaugu

SEQ ID NO: 868468 - RNA, 19 nt, Artificial Sequence
  Description of Artificial Sequence: Synthetic oligonucleotide
  Sense strand starting at position 1316 of SEQ ID NO: 588486
gcagaagucauagaagugu

SEQ ID NO: 868469 - RNA, 19 nt, Artificial Sequence
  Description of Artificial Sequence: Synthetic oligonucleotide
  Antisense strand to SEQ ID NO: 868468
acacuucuaugacuucugc

SEQ ID NO: 868470 - RNA, 19 nt, Artificial Sequence
  Description of Artificial Sequence: Synthetic oligonucleotide
  Sense strand starting at position 1327 of SEQ ID NO: 588486
agaaguguggacuggugua

SEQ ID NO: 868471 - RNA, 19 nt, Artificial Sequence
  Description of Artificial Sequence: Synthetic oligonucleotide
  Antisense strand to SEQ ID NO: 868470
uacaccaguccacacuucu

SEQ ID NO: 868472 - RNA, 19 nt, Artificial Sequence
  Description of Artificial Sequence: Synthetic oligonucleotide
  Sense strand starting at position 1332 of SEQ ID NO: 588486
uguggacugguguauuagu

SEQ ID NO: 868473 - RNA, 19 nt, Artificial Sequence
  Description of Artificial Sequence: Synthetic oligonucleotide
  Antisense strand to SEQ ID NO: 868472
acuaauacaccaguccaca

SEQ ID NO: 868474 - RNA, 19 nt, Artificial Sequence
  Description of Artificial Sequence: Synthetic oligonucleotide
  Sense strand starting at position 1337 of SEQ ID NO: 588486
acugguguauuagucaaua

SEQ ID NO: 868475 - RNA, 19 nt, Artificial Sequence
  Description of Artificial Sequence: Synthetic oligonucleotide
  Antisense strand to SEQ ID NO: 868474
uauugacuaauacaccagu

SEQ ID NO: 868476 - RNA, 19 nt, Artificial Sequence
  Description of Artificial Sequence: Synthetic oligonucleotide
  Sense strand starting at position 1339 of SEQ ID NO: 588486
ugguguauuagucaauaca

SEQ ID NO: 868477 - RNA, 19 nt, Artificial Sequence
  Description of Artificial Sequence: Synthetic oligonucleotide
  Antisense strand to SEQ ID NO: 868476
uguauugacuaauacacca

SEQ ID NO: 868478 - RNA, 19 nt, Artificial Sequence
  Description of Artificial Sequence: Synthetic oligonucleotide
  Sense strand starting at position 1342 of SEQ ID NO: 588486
uguauuagucaauacagau

SEQ ID NO: 868479 - RNA, 19 nt, Artificial Sequence
  Description of Artificial Sequence: Synthetic oligonucleotide
  Antisense strand to SEQ ID NO: 868478
aucuguauugacuaauaca

SEQ ID NO: 868480 - RNA, 19 nt, Artificial Sequence
  Description of Artificial Sequence: Synthetic oligonucleotide
  Sense strand starting at position 1612 of SEQ ID NO: 588486
ugguuaaguucaguggaaa

SEQ ID NO: 868481 - RNA, 19 nt, Artificial Sequence
  Description of Artificial Sequence: Synthetic oligonucleotide
  Antisense strand to SEQ ID NO: 868480
uuuccacugaacuuaacca

SEQ ID NO: 868482 - RNA, 19 nt, Artificial Sequence
  Description of Artificial Sequence: Synthetic oligonucleotide
  Sense strand starting at position 1641 of SEQ ID NO: 588486
gaggcucuguucccaagua

SEQ ID NO: 868483 - RNA, 19 nt, Artificial Sequence
  Description of Artificial Sequence: Synthetic oligonucleotide
  Antisense strand to SEQ ID NO: 868482
uacuugggaacagagccuc

SEQ ID NO: 868484 - RNA, 19 nt, Artificial Sequence
  Description of Artificial Sequence: Synthetic oligonucleotide
  Sense strand starting at position 1955 of SEQ ID NO: 588486
ggauguugccaauauugcu

SEQ ID NO: 868485 - RNA, 19 nt, Artificial Sequence
  Description of Artificial Sequence: Synthetic oligonucleotide
  Antisense strand to SEQ ID NO: 868484
agcaauauuggcaacaucc

SEQ ID NO: 868486 - RNA, 19 nt, Artificial Sequence
  Description of Artificial Sequence: Synthetic oligonucleotide
  Sense strand starting at position 1963 of SEQ ID NO: 588486
ccaauauugcuaggcuacu

SEQ ID NO: 868487 - RNA, 19 nt, Artificial Sequence
  Description of Artificial Sequence: Synthetic oligonucleotide
  Antisense strand to SEQ ID NO: 868486
aguagccuagcaauauugg

SEQ ID NO: 868488 - RNA, 19 nt, Artificial Sequence
  Description of Artificial Sequence: Synthetic oligonucleotide
  Sense strand starting at position 2039 of SEQ ID NO: 588486
guaggucuuaaauagugaa

SEQ ID NO: 868489 - RNA, 19 nt, Artificial Sequence
  Description of Artificial Sequence: Synthetic oligonucleotide
  Antisense strand to SEQ ID NO: 868488
uucacuauuuaagaccuac

SEQ ID NO: 868490 - RNA, 19 nt, Artificial Sequence
  Description of Artificial Sequence: Synthetic oligonucleotide
  Sense strand starting at position 2128 of SEQ ID NO: 588486
cucuacauguguuuacaga

SEQ ID NO: 868491 - RNA, 19 nt, Artificial Sequence
  Description of Artificial Sequence: Synthetic oligonucleotide
  Antisense strand to SEQ ID NO: 868490
ucuguaaacacauguagag

SEQ ID NO: 868492 - RNA, 19 nt, Artificial Sequence
  Description of Artificial Sequence: Synthetic oligonucleotide
  Sense strand starting at position 2129 of SEQ ID NO: 588486
ucuacauguguuuacagau

SEQ ID NO: 868493 - RNA, 19 nt, Artificial Sequence
  Description of Artificial Sequence: Synthetic oligonucleotide
  Antisense strand to SEQ ID NO: 868492
aucuguaaacacauguaga

SEQ ID NO: 868494 - RNA, 19 nt, Artificial Sequence
  Description of Artificial Sequence: Synthetic oligonucleotide
  Sense strand starting at position 2330 of SEQ ID NO: 588486
aguaaagaaugacagaaau

SEQ ID NO: 868495 - RNA, 19 nt, Artificial Sequence
  Description of Artificial Sequence: Synthetic oligonucleotide
  Antisense strand to SEQ ID NO: 868494
auuucugucauucuuuacu

SEQ ID NO: 868496 - RNA, 19 nt, Artificial Sequence
  Description of Artificial Sequence: Synthetic oligonucleotide
  Sense strand starting at position 3091 of SEQ ID NO: 588486
uguaauaugugagauuugu

SEQ ID NO: 868497 - RNA, 19 nt, Artificial Sequence
  Description of Artificial Sequence: Synthetic oligonucleotide
  Antisense strand to SEQ ID NO: 868496
acaaaucucacauauuaca

SEQ ID NO: 868498 - RNA, 19 nt, Artificial Sequence
  Description of Artificial Sequence: Synthetic oligonucleotide
  Sense strand starting at position 3101 of SEQ ID NO: 588486
gagauuuguuuauacuaug

SEQ ID NO: 868499 - RNA, 19 nt, Artificial Sequence
  Description of Artificial Sequence: Synthetic oligonucleotide
  Antisense strand to SEQ ID NO: 868498
cauaguauaaacaaaucuc

SEQ ID NO: 868500 - RNA, 19 nt, Artificial Sequence
  Description of Artificial Sequence: Synthetic oligonucleotide
  Sense strand starting at position 3106 of SEQ ID NO: 588486
uuguuuauacuaugagaac

SEQ ID NO: 868501 - RNA, 19 nt, Artificial Sequence
  Description of Artificial Sequence: Synthetic oligonucleotide
  Antisense strand to SEQ ID NO: 868500
guucucauaguauaaacaa

SEQ ID NO: 868502 - RNA, 19 nt, Artificial Sequence
  Description of Artificial Sequence: Synthetic oligonucleotide
  Sense strand starting at position 3277 of SEQ ID NO: 588486
agagaccaucuuuguucua

SEQ ID NO: 868503 - RNA, 19 nt, Artificial Sequence
  Description of Artificial Sequence: Synthetic oligonucleotide
  Antisense strand to SEQ ID NO: 868502
uagaacaaagauggucucu

SEQ ID NO: 868504 - RNA, 19 nt, Artificial Sequence
  Description of Artificial Sequence: Synthetic oligonucleotide
  Sense strand starting at position 3406 of SEQ ID NO: 588486
uugccucugcccuauagau

SEQ ID NO: 868505 - RNA, 19 nt, Artificial Sequence
  Description of Artificial Sequence: Synthetic oligonucleotide
  Antisense strand to SEQ ID NO: 868504
aucuauagggcagaggcaa

SEQ ID NO: 868506 - RNA, 19 nt, Artificial Sequence
  Description of Artificial Sequence: Synthetic oligonucleotide
  Sense strand starting at position 3551 of SEQ ID NO: 588486
uggccauauuugcugcaau

SEQ ID NO: 868507 - RNA, 19 nt, Artificial Sequence
  Description of Artificial Sequence: Synthetic oligonucleotide
  Antisense strand to SEQ ID NO: 868506
auugcagcaaauauggcca

SEQ ID NO: 868508 - RNA, 19 nt, Artificial Sequence
  Description of Artificial Sequence: Synthetic oligonucleotide
  Sense strand starting at position 3670 of SEQ ID NO: 588486
gcaagagcagcauaauauu

SEQ ID NO: 868509 - RNA, 19 nt, Artificial Sequence
  Description of Artificial Sequence: Synthetic oligonucleotide
  Antisense strand to SEQ ID NO: 868508
aauauuaugcugcucuugc

SEQ ID NO: 868510 - RNA, 19 nt, Artificial Sequence
  Description of Artificial Sequence: Synthetic oligonucleotide
  Sense strand starting at position 3786 of SEQ ID NO: 588486
agagucacauaucugaauu

SEQ ID NO: 868511 - RNA, 19 nt, Artificial Sequence
  Description of Artificial Sequence: Synthetic oligonucleotide
  Antisense strand to SEQ ID NO: 868510
aauucagauaugugacucu

SEQ ID NO: 868512 - RNA, 19 nt, Artificial Sequence
  Description of Artificial Sequence: Synthetic oligonucleotide
  Sense strand starting at position 3873 of SEQ ID NO: 588486
gccucuguccuccagauaa

SEQ ID NO: 868513 - RNA, 19 nt, Artificial Sequence
  Description of Artificial Sequence: Synthetic oligonucleotide
  Antisense strand to SEQ ID NO: 868512
uuaucuggaggacagaggc

SEQ ID NO: 868514 - RNA, 19 nt, Artificial Sequence
  Description of Artificial Sequence: Synthetic oligonucleotide
  Sense strand starting at position 3930 of SEQ ID NO: 588486
guguaugugaacuguaaau

SEQ ID NO: 868515 - RNA, 19 nt, Artificial Sequence
  Description of Artificial Sequence: Synthetic oligonucleotide
  Antisense strand to SEQ ID NO: 868514
auuuacaguucacauacac

SEQ ID NO: 868516 - RNA, 19 nt, Artificial Sequence
  Description of Artificial Sequence: Synthetic oligonucleotide
  Sense strand starting at position 3932 of SEQ ID NO: 588486
guaugugaacuguaaauac

SEQ ID NO: 868517 - RNA, 19 nt, Artificial Sequence
  Description of Artificial Sequence: Synthetic oligonucleotide
  Antisense strand to SEQ ID NO: 868516
guauuuacaguucacauac

SEQ ID NO: 868518 - RNA, 19 nt, Artificial Sequence
  Description of Artificial Sequence: Synthetic oligonucleotide
  Sense strand starting at position 25 of SEQ ID NO: 588487
accagugcaucacauuuau

SEQ ID NO: 868519 - RNA, 19 nt, Artificial Sequence
  Description of Artificial Sequence: Synthetic oligonucleotide
  Antisense strand to SEQ ID NO: 868518
auaaaugugaugcacuggu

SEQ ID NO: 868520 - RNA, 19 nt, Artificial Sequence
  Description of Artificial Sequence: Synthetic oligonucleotide
  Sense strand starting at position 168 of SEQ ID NO: 588487
cuauauguguuaucuugau

SEQ ID NO: 868521 - RNA, 19 nt, Artificial Sequence
  Description of Artificial Sequence: Synthetic oligonucleotide
  Antisense strand to SEQ ID NO: 868520
aucaagauaacacauauag

SEQ ID NO: 868522 - RNA, 19 nt, Artificial Sequence
  Description of Artificial Sequence: Synthetic oligonucleotide
  Sense strand starting at position 288 of SEQ ID NO: 588487
uugcuauagugcucaguuu

SEQ ID NO: 868523 - RNA, 19 nt, Artificial Sequence
  Description of Artificial Sequence: Synthetic oligonucleotide
  Antisense strand to SEQ ID NO: 868522
aaacugagcacuauagcaa

SEQ ID NO: 868524 - RNA, 19 nt, Artificial Sequence
  Description of Artificial Sequence: Synthetic oligonucleotide
  Sense strand starting at position 548 of SEQ ID NO: 588487
aguuaugaauguccagaua

SEQ ID NO: 868525 - RNA, 19 nt, Artificial Sequence
  Description of Artificial Sequence: Synthetic oligonucleotide
  Antisense strand to SEQ ID NO: 868524
uaucuggacauucauaacu

SEQ ID NO: 868526 - RNA, 19 nt, Artificial Sequence
  Description of Artificial Sequence: Synthetic oligonucleotide
  Sense strand starting at position 563 of SEQ ID NO: 588487
gauauuguauuccuuggaa

SEQ ID NO: 868527 - RNA, 19 nt, Artificial Sequence
  Description of Artificial Sequence: Synthetic oligonucleotide
  Antisense strand to SEQ ID NO: 868526
uuccaaggaauacaauauc

SEQ ID NO: 868528 - RNA, 19 nt, Artificial Sequence
  Description of Artificial Sequence: Synthetic oligonucleotide
  Sense strand starting at position 566 of SEQ ID NO: 588487
auuguauuccuuggaaacu

SEQ ID NO: 868529 - RNA, 19 nt, Artificial Sequence
  Description of Artificial Sequence: Synthetic oligonucleotide
  Antisense strand to SEQ ID NO: 868528
aguuuccaaggaauacaau

SEQ ID NO: 868530 - RNA, 19 nt, Artificial Sequence
  Description of Artificial Sequence: Synthetic oligonucleotide
  Sense strand starting at position 567 of SEQ ID NO: 588487
uuguauuccuuggaaacug

SEQ ID NO: 868531 - RNA, 19 nt, Artificial Sequence
  Description of Artificial Sequence: Synthetic oligonucleotide
  Antisense strand to SEQ ID NO: 868530
caguuuccaaggaauacaa

SEQ ID NO: 868532 - RNA, 19 nt, Artificial Sequence
  Description of Artificial Sequence: Synthetic oligonucleotide
  Sense strand starting at position 644 of SEQ ID NO: 588487
cagagaauaucugugcuuu

SEQ ID NO: 868533 - RNA, 19 nt, Artificial Sequence
  Description of Artificial Sequence: Synthetic oligonucleotide
  Antisense strand to SEQ ID NO: 868532
aaagcacagauauucucug

SEQ ID NO: 868534 - RNA, 19 nt, Artificial Sequence
  Description of Artificial Sequence: Synthetic oligonucleotide
  Sense strand starting at position 1085 of SEQ ID NO: 588487
auguaaagguacucaugau

SEQ ID NO: 868535 - RNA, 19 nt, Artificial Sequence
  Description of Artificial Sequence: Synthetic oligonucleotide
  Antisense strand to SEQ ID NO: 868534
aucaugaguaccuuuacau

SEQ ID NO: 868536 - RNA, 19 nt, Artificial Sequence
  Description of Artificial Sequence: Synthetic oligonucleotide
  Sense strand starting at position 1091 of SEQ ID NO: 588487
agguacucaugauaucaca

SEQ ID NO: 868537 - RNA, 19 nt, Artificial Sequence
  Description of Artificial Sequence: Synthetic oligonucleotide
  Antisense strand to SEQ ID NO: 868536
ugugauaucaugaguaccu

SEQ ID NO: 868538 - RNA, 19 nt, Artificial Sequence
  Description of Artificial Sequence: Synthetic oligonucleotide
  Sense strand starting at position 1166 of SEQ ID NO: 588487
agacaucagcauugucauc

SEQ ID NO: 868539 - RNA, 19 nt, Artificial Sequence
  Description of Artificial Sequence: Synthetic oligonucleotide
  Antisense strand to SEQ ID NO: 868538
gaugacaaugcugaugucu

SEQ ID NO: 868540 - RNA, 19 nt, Artificial Sequence
  Description of Artificial Sequence: Synthetic oligonucleotide
  Sense strand starting at position 1171 of SEQ ID NO: 588487
ucagcauugucaucuguaa

SEQ ID NO: 868541 - RNA, 19 nt, Artificial Sequence
  Description of Artificial Sequence: Synthetic oligonucleotide
  Antisense strand to SEQ ID NO: 868540
uuacagaugacaaugcuga

SEQ ID NO: 868542 - RNA, 19 nt, Artificial Sequence
  Description of Artificial Sequence: Synthetic oligonucleotide
  Sense strand starting at position 1175 of SEQ ID NO: 588487
cauugucaucuguaaagga

SEQ ID NO: 868543 - RNA, 19 nt, Artificial Sequence
  Description of Artificial Sequence: Synthetic oligonucleotide
  Antisense strand to SEQ ID NO: 868542
uccuuuacagaugacaaug

SEQ ID NO: 868544 - RNA, 19 nt, Artificial Sequence
  Description of Artificial Sequence: Synthetic oligonucleotide
  Sense strand starting at position 1755 of SEQ ID NO: 588487
cgaaaucaugucuguccuu

SEQ ID NO: 868545 - RNA, 19 nt, Artificial Sequence
  Description of Artificial Sequence: Synthetic oligonucleotide
  Antisense strand to SEQ ID NO: 868544
aaggacagacaugauuucg

SEQ ID NO: 868546 - RNA, 19 nt, Artificial Sequence
  Description of Artificial Sequence: Synthetic oligonucleotide
  Sense strand starting at position 2054 of SEQ ID NO: 588487
uucuaaauucccuaguugu

SEQ ID NO: 868547 - RNA, 19 nt, Artificial Sequence
  Description of Artificial Sequence: Synthetic oligonucleotide
  Antisense strand to SEQ ID NO: 868546
acaacuagggaauuuagaa

SEQ ID NO: 868548 - RNA, 19 nt, Artificial Sequence
  Description of Artificial Sequence: Synthetic oligonucleotide
  Sense strand starting at position 2106 of SEQ ID NO: 588487
cucucuacauguguuuaaa

SEQ ID NO: 868549 - RNA, 19 nt, Artificial Sequence
  Description of Artificial Sequence: Synthetic oligonucleotide
  Antisense strand to SEQ ID NO: 868548
uuuaaacacauguagagag

SEQ ID NO: 868550 - RNA, 19 nt, Artificial Sequence
  Description of Artificial Sequence: Synthetic oligonucleotide
  Sense strand starting at position 2625 of SEQ ID NO: 588487
uccagauguugccaacacu

SEQ ID NO: 868551 - RNA, 19 nt, Artificial Sequence
  Description of Artificial Sequence: Synthetic oligonucleotide
  Antisense strand to SEQ ID NO: 868550
aguguuggcaacaucugga

SEQ ID NO: 868552 - RNA, 19 nt, Artificial Sequence
  Description of Artificial Sequence: Synthetic oligonucleotide
  Sense strand starting at position 2909 of SEQ ID NO: 588487
guuuguaacacuggucuua

SEQ ID NO: 868553 - RNA, 19 nt, Artificial Sequence
  Description of Artificial Sequence: Synthetic oligonucleotide
  Antisense strand to SEQ ID NO: 868552
uaagaccaguguuacaaac

SEQ ID NO: 868554 - RNA, 19 nt, Artificial Sequence
  Description of Artificial Sequence: Synthetic oligonucleotide
  Sense strand starting at position 2911 of SEQ ID NO: 588487
uuguaacacuggucuuaca

SEQ ID NO: 868555 - RNA, 19 nt, Artificial Sequence
  Description of Artificial Sequence: Synthetic oligonucleotide
  Antisense strand to SEQ ID NO: 868554
uguaagaccaguguuacaa

SEQ ID NO: 868556 - RNA, 19 nt, Artificial Sequence
  Description of Artificial Sequence: Synthetic oligonucleotide
  Sense strand starting at position 3027 of SEQ ID NO: 588487
guuggauagaauuguugga

SEQ ID NO: 868557 - RNA, 19 nt, Artificial Sequence
  Description of Artificial Sequence: Synthetic oligonucleotide
  Antisense strand to SEQ ID NO: 868556
uccaacaauucuauccaac

SEQ ID NO: 868558 - RNA, 19 nt, Artificial Sequence
  Description of Artificial Sequence: Synthetic oligonucleotide
  Sense strand starting at position 3031 of SEQ ID NO: 588487
gauagaauuguuggagagu

SEQ ID NO: 868559 - RNA, 19 nt, Artificial Sequence
  Description of Artificial Sequence: Synthetic oligonucleotide
  Antisense strand to SEQ ID NO: 868558
acucuccaacaauucuauc

SEQ ID NO: 868560 - RNA, 19 nt, Artificial Sequence
  Description of Artificial Sequence: Synthetic oligonucleotide
  Sense strand starting at position 3032 of SEQ ID NO: 588487
auagaauuguuggagaguc

SEQ ID NO: 868561 - RNA, 19 nt, Artificial Sequence
  Description of Artificial Sequence: Synthetic oligonucleotide
  Antisense strand to SEQ ID NO: 868560
gacucuccaacaauucuau

SEQ ID NO: 868562 - RNA, 19 nt, Artificial Sequence
  Description of Artificial Sequence: Synthetic oligonucleotide
  Sense strand starting at position 3111 of SEQ ID NO: 588487
gaagaagugucauuccaau

SEQ ID NO: 868563 - RNA, 19 nt, Artificial Sequence
  Description of Artificial Sequence: Synthetic oligonucleotide
  Antisense strand to SEQ ID NO: 868562
auuggaaugacacuucuuc

SEQ ID NO: 868564 - RNA, 19 nt, Artificial Sequence
  Description of Artificial Sequence: Synthetic oligonucleotide
  Sense strand starting at position 3117 of SEQ ID NO: 588487
gugucauuccaauaaacau

SEQ ID NO: 868565 - RNA, 19 nt, Artificial Sequence
  Description of Artificial Sequence: Synthetic oligonucleotide
  Antisense strand to SEQ ID NO: 868564
auguuuauuggaaugacac

SEQ ID NO: 868566 - RNA, 19 nt, Artificial Sequence
  Description of Artificial Sequence: Synthetic oligonucleotide
  Sense strand starting at position 3250 of SEQ ID NO: 588487
agaccaucuuuguuguaaa

SEQ ID NO: 868567 - RNA, 19 nt, Artificial Sequence
  Description of Artificial Sequence: Synthetic oligonucleotide
  Antisense strand to SEQ ID NO: 868566
uuuacaacaaagauggucu

SEQ ID NO: 868568 - RNA, 19 nt, Artificial Sequence
  Description of Artificial Sequence: Synthetic oligonucleotide
  Sense strand starting at position 3253 of SEQ ID NO: 588487
ccaucuuuguuguaaauuc

SEQ ID NO: 868569 - RNA, 19 nt, Artificial Sequence
  Description of Artificial Sequence: Synthetic oligonucleotide
  Antisense strand to SEQ ID NO: 868568
gaauuuacaacaaagaugg

SEQ ID NO: 868570 - RNA, 19 nt, Artificial Sequence
  Description of Artificial Sequence: Synthetic oligonucleotide
  Sense strand starting at position 3584 of SEQ ID NO: 588487
aguguuuacugagagucag

SEQ ID NO: 868571 - RNA, 19 nt, Artificial Sequence
  Description of Artificial Sequence: Synthetic oligonucleotide
  Antisense strand to SEQ ID NO: 868570
cugacucucaguaaacacu

SEQ ID NO: 868572 - RNA, 19 nt, Artificial Sequence
  Description of Artificial Sequence: Synthetic oligonucleotide
  Sense strand starting at position 3942 of SEQ ID NO: 588487
guguaugugaacugugaag

SEQ ID NO: 868573 - RNA, 19 nt, Artificial Sequence
  Description of Artificial Sequence: Synthetic oligonucleotide
  Antisense strand to SEQ ID NO: 868572
cuucacaguucacauacac

SEQ ID NO: 868574 - RNA, 19 nt, Artificial Sequence
  Description of Artificial Sequence: Synthetic oligonucleotide
  Sense strand starting at position 3944 of SEQ ID NO: 588487
guaugugaacugugaagac

SEQ ID NO: 868575 - RNA, 19 nt, Artificial Sequence
  Description of Artificial Sequence: Synthetic oligonucleotide
  Antisense strand to SEQ ID NO: 868574
gucuucacaguucacauac

SEQ ID NO: 868576 - RNA, 19 nt, Artificial Sequence
  Description of Artificial Sequence: Synthetic oligonucleotide
  Sense strand starting at position 3954 of SEQ ID NO: 588487
ugugaagacuugugacauc

SEQ ID NO: 868577 - RNA, 19 nt, Artificial Sequence
  Description of Artificial Sequence: Synthetic oligonucleotide
  Antisense strand to SEQ ID NO: 868576
gaugucacaagucuucaca

SEQ ID NO: 868578 - RNA, 19 nt, Artificial Sequence
  Description of Artificial Sequence: Synthetic oligonucleotide
  Sense strand starting at position 168 of SEQ ID NO: 588488
ccuacauaugguuaucacu

SEQ ID NO: 868579 - RNA, 19 nt, Artificial Sequence
  Description of Artificial Sequence: Synthetic oligonucleotide
  Antisense strand to SEQ ID NO: 868578
agugauaaccauauguagg

SEQ ID NO: 868580 - RNA, 19 nt, Artificial Sequence
  Description of Artificial Sequence: Synthetic oligonucleotide
  Sense strand starting at position 229 of SEQ ID NO: 588488
guuuguacugauuaauucu

SEQ ID NO: 868581 - RNA, 19 nt, Artificial Sequence
  Description of Artificial Sequence: Synthetic oligonucleotide
  Antisense strand to SEQ ID NO: 868580
agaauuaaucaguacaaac

SEQ ID NO: 868582 - RNA, 19 nt, Artificial Sequence
  Description of Artificial Sequence: Synthetic oligonucleotide
  Sense strand starting at position 395 of SEQ ID NO: 588488
ccuucuaauguuuaaggua

SEQ ID NO: 868583 - RNA, 19 nt, Artificial Sequence
  Description of Artificial Sequence: Synthetic oligonucleotide
  Antisense strand to SEQ ID NO: 868582
uaccuuaaacauuagaagg

SEQ ID NO: 868584 - RNA, 19 nt, Artificial Sequence
  Description of Artificial Sequence: Synthetic oligonucleotide
  Sense strand starting at position 471 of SEQ ID NO: 588488
cucagaaucuaguuuaagu

SEQ ID NO: 868585 - RNA, 19 nt, Artificial Sequence
  Description of Artificial Sequence: Synthetic oligonucleotide
  Antisense strand to SEQ ID NO: 868584
acuuaaacuagauucugag

SEQ ID NO: 868586 - RNA, 19 nt, Artificial Sequence
  Description of Artificial Sequence: Synthetic oligonucleotide
  Sense strand starting at position 539 of SEQ ID NO: 588488
ggcauuugguugccaguua

SEQ ID NO: 868587 - RNA, 19 nt, Artificial Sequence
  Description of Artificial Sequence: Synthetic oligonucleotide
  Antisense strand to SEQ ID NO: 868586
uaacuggcaaccaaaugcc

SEQ ID NO: 868588 - RNA, 19 nt, Artificial Sequence
  Description of Artificial Sequence: Synthetic oligonucleotide
  Sense strand starting at position 568 of SEQ ID NO: 588488
gacauuguauuccuuggau

SEQ ID NO: 868589 - RNA, 19 nt, Artificial Sequence
  Description of Artificial Sequence: Synthetic oligonucleotide
  Antisense strand to SEQ ID NO: 868588
auccaaggaauacaauguc

SEQ ID NO: 868590 - RNA, 19 nt, Artificial Sequence
  Description of Artificial Sequence: Synthetic oligonucleotide
  Sense strand starting at position 574 of SEQ ID NO: 588488
guauuccuuggauauugca

SEQ ID NO: 868591 - RNA, 19 nt, Artificial Sequence
  Description of Artificial Sequence: Synthetic oligonucleotide
  Antisense strand to SEQ ID NO: 868590
ugcaauauccaaggaauac

SEQ ID NO: 868592 - RNA, 19 nt, Artificial Sequence
  Description of Artificial Sequence: Synthetic oligonucleotide
  Sense strand starting at position 1050 of SEQ ID NO: 588488
caaaguaaagguggaugua

SEQ ID NO: 868593 - RNA, 19 nt, Artificial Sequence
  Description of Artificial Sequence: Synthetic oligonucleotide
  Antisense strand to SEQ ID NO: 868592
uacauccaccuuuacuuug

SEQ ID NO: 868594 - RNA, 19 nt, Artificial Sequence
  Description of Artificial Sequence: Synthetic oligonucleotide
  Sense strand starting at position 1053 of SEQ ID NO: 588488
aguaaagguggauguaaua

SEQ ID NO: 868595 - RNA, 19 nt, Artificial Sequence
  Description of Artificial Sequence: Synthetic oligonucleotide
  Antisense strand to SEQ ID NO: 868594
uauuacauccaccuuuacu

SEQ ID NO: 868596 - RNA, 19 nt, Artificial Sequence
  Description of Artificial Sequence: Synthetic oligonucleotide
  Sense strand starting at position 1171 of SEQ ID NO: 588488
auagauagauuggcaugau

SEQ ID NO: 868597 - RNA, 19 nt, Artificial Sequence
  Description of Artificial Sequence: Synthetic oligonucleotide
  Antisense strand to SEQ ID NO: 868596
aucaugccaaucuaucuau

SEQ ID NO: 868598 - RNA, 19 nt, Artificial Sequence
  Description of Artificial Sequence: Synthetic oligonucleotide
  Sense strand starting at position 1174 of SEQ ID NO: 588488
gauagauuggcaugaucau

SEQ ID NO: 868599 - RNA, 19 nt, Artificial Sequence
  Description of Artificial Sequence: Synthetic oligonucleotide
  Antisense strand to SEQ ID NO: 868598
augaucaugccaaucuauc

SEQ ID NO: 868600 - RNA, 19 nt, Artificial Sequence
  Description of Artificial Sequence: Synthetic oligonucleotide
  Sense strand starting at position 1183 of SEQ ID NO: 588488
gcaugaucaucuguaaaga

SEQ ID NO: 868601 - RNA, 19 nt, Artificial Sequence
  Description of Artificial Sequence: Synthetic oligonucleotide
  Antisense strand to SEQ ID NO: 868600
ucuuuacagaugaucaugc

SEQ ID NO: 868602 - RNA, 19 nt, Artificial Sequence
  Description of Artificial Sequence: Synthetic oligonucleotide
  Sense strand starting at position 1220 of SEQ ID NO: 588488
aaagaaguguugcuuaaca

SEQ ID NO: 868603 - RNA, 19 nt, Artificial Sequence
  Description of Artificial Sequence: Synthetic oligonucleotide
  Antisense strand to SEQ ID NO: 868602
uguuaagcaacacuucuuu

SEQ ID NO: 868604 - RNA, 19 nt, Artificial Sequence
  Description of Artificial Sequence: Synthetic oligonucleotide
  Sense strand starting at position 1270 of SEQ ID NO: 588488
ucaagucauggauauagca

SEQ ID NO: 868605 - RNA, 19 nt, Artificial Sequence
  Description of Artificial Sequence: Synthetic oligonucleotide
  Antisense strand to SEQ ID NO: 868604
ugcuauauccaugacuuga

SEQ ID NO: 868606 - RNA, 19 nt, Artificial Sequence
  Description of Artificial Sequence: Synthetic oligonucleotide
  Sense strand starting at position 1313 of SEQ ID NO: 588488
acucaagaagugugaaaug

SEQ ID NO: 868607 - RNA, 19 nt, Artificial Sequence
  Description of Artificial Sequence: Synthetic oligonucleotide
  Antisense strand to SEQ ID NO: 868606
cauuucacacuucuugagu

SEQ ID NO: 868608 - RNA, 19 nt, Artificial Sequence
  Description of Artificial Sequence: Synthetic oligonucleotide
  Sense strand starting at position 1333 of SEQ ID NO: 588488
uguacuagucaaugagaau

SEQ ID NO: 868609 - RNA, 19 nt, Artificial Sequence
  Description of Artificial Sequence: Synthetic oligonucleotide
  Antisense strand to SEQ ID NO: 868608
auucucauugacuaguaca

SEQ ID NO: 868610 - RNA, 19 nt, Artificial Sequence
  Description of Artificial Sequence: Synthetic oligonucleotide
  Sense strand starting at position 1630 of SEQ ID NO: 588488
agaagugucucaucccaag

SEQ ID NO: 868611 - RNA, 19 nt, Artificial Sequence
  Description of Artificial Sequence: Synthetic oligonucleotide
  Antisense strand to SEQ ID NO: 868610
cuugggaugagacacuucu

SEQ ID NO: 868612 - RNA, 19 nt, Artificial Sequence
  Description of Artificial Sequence: Synthetic oligonucleotide
  Sense strand starting at position 1978 of SEQ ID NO: 588488
uugagugacccugaaccuu

SEQ ID NO: 868613 - RNA, 19 nt, Artificial Sequence
  Description of Artificial Sequence: Synthetic oligonucleotide
  Antisense strand to SEQ ID NO: 868612
aagguucagggucacucaa

SEQ ID NO: 868614 - RNA, 19 nt, Artificial Sequence
  Description of Artificial Sequence: Synthetic oligonucleotide
  Sense strand starting at position 2259 of SEQ ID NO: 588488
uuggcugauguauauacau

SEQ ID NO: 868615 - RNA, 19 nt, Artificial Sequence
  Description of Artificial Sequence: Synthetic oligonucleotide
  Antisense strand to SEQ ID NO: 868614
auguauauacaucagccaa

SEQ ID NO: 868616 - RNA, 19 nt, Artificial Sequence
  Description of Artificial Sequence: Synthetic oligonucleotide
  Sense strand starting at position 2360 of SEQ ID NO: 588488
ucagucccggauuaagaau

SEQ ID NO: 868617 - RNA, 19 nt, Artificial Sequence
  Description of Artificial Sequence: Synthetic oligonucleotide
  Antisense strand to SEQ ID NO: 868616
auucuuaauccgggacuga

SEQ ID NO: 868618 - RNA, 19 nt, Artificial Sequence
  Description of Artificial Sequence: Synthetic oligonucleotide
  Sense strand starting at position 2366 of SEQ ID NO: 588488
ccggauuaagaaugagcaa

SEQ ID NO: 868619 - RNA, 19 nt, Artificial Sequence
  Description of Artificial Sequence: Synthetic oligonucleotide
  Antisense strand to SEQ ID NO: 868618
uugcucauucuuaauccgg

SEQ ID NO: 868620 - RNA, 19 nt, Artificial Sequence
  Description of Artificial Sequence: Synthetic oligonucleotide
  Sense strand starting at position 2732 of SEQ ID NO: 588488
aauuauugauguguugaac

SEQ ID NO: 868621 - RNA, 19 nt, Artificial Sequence
  Description of Artificial Sequence: Synthetic oligonucleotide
  Antisense strand to SEQ ID NO: 868620
guucaacacaucaauaauu

SEQ ID NO: 868622 - RNA, 19 nt, Artificial Sequence
  Description of Artificial Sequence: Synthetic oligonucleotide
  Sense strand starting at position 2735 of SEQ ID NO: 588488
uauugauguguugaacaac

SEQ ID NO: 868623 - RNA, 19 nt, Artificial Sequence
  Description of Artificial Sequence: Synthetic oligonucleotide
  Antisense strand to SEQ ID NO: 868622
guuguucaacacaucaaua

SEQ ID NO: 868624 - RNA, 19 nt, Artificial Sequence
  Description of Artificial Sequence: Synthetic oligonucleotide
  Sense strand starting at position 2738 of SEQ ID NO: 588488
ugauguguugaacaacuuu

SEQ ID NO: 868625 - RNA, 19 nt, Artificial Sequence
  Description of Artificial Sequence: Synthetic oligonucleotide
  Antisense strand to SEQ ID NO: 868624
aaaguuguucaacacauca

SEQ ID NO: 868626 - RNA, 19 nt, Artificial Sequence
  Description of Artificial Sequence: Synthetic oligonucleotide
  Sense strand starting at position 2816 of SEQ ID NO: 588488
agucauaaaugcucaggau

SEQ ID NO: 868627 - RNA, 19 nt, Artificial Sequence
  Description of Artificial Sequence: Synthetic oligonucleotide
  Antisense strand to SEQ ID NO: 868626
auccugagcauuuaugacu

SEQ ID NO: 868628 - RNA, 19 nt, Artificial Sequence
  Description of Artificial Sequence: Synthetic oligonucleotide
  Sense strand starting at position 2817 of SEQ ID NO: 588488
gucauaaaugcucaggauc

SEQ ID NO: 868629 - RNA, 19 nt, Artificial Sequence
  Description of Artificial Sequence: Synthetic oligonucleotide
  Antisense strand to SEQ ID NO: 868628
gauccugagcauuuaugac

SEQ ID NO: 868630 - RNA, 19 nt, Artificial Sequence
  Description of Artificial Sequence: Synthetic oligonucleotide
  Sense strand starting at position 2899 of SEQ ID NO: 588488
augauaugacuuugacauc

SEQ ID NO: 868631 - RNA, 19 nt, Artificial Sequence
  Description of Artificial Sequence: Synthetic oligonucleotide
  Antisense strand to SEQ ID NO: 868630
gaugucaaagucauaucau

SEQ ID NO: 868632 - RNA, 19 nt, Artificial Sequence
  Description of Artificial Sequence: Synthetic oligonucleotide
  Sense strand starting at position 2926 of SEQ ID NO: 588488
cuuggaaaguccuccaaua

SEQ ID NO: 868633 - RNA, 19 nt, Artificial Sequence
  Description of Artificial Sequence: Synthetic oligonucleotide
  Antisense strand to SEQ ID NO: 868632
uauuggaggacuuuccaag

SEQ ID NO: 868634 - RNA, 19 nt, Artificial Sequence
  Description of Artificial Sequence: Synthetic oligonucleotide
  Sense strand starting at position 3004 of SEQ ID NO: 588488
ccaugaacucaaggucaau

SEQ ID NO: 868635 - RNA, 19 nt, Artificial Sequence
  Description of Artificial Sequence: Synthetic oligonucleotide
  Antisense strand to SEQ ID NO: 868634
auugaccuugaguucaugg

SEQ ID NO: 868636 - RNA, 19 nt, Artificial Sequence
  Description of Artificial Sequence: Synthetic oligonucleotide
  Sense strand starting at position 3401 of SEQ ID NO: 588488
gucagacagaguugaacuu

SEQ ID NO: 868637 - RNA, 19 nt, Artificial Sequence
  Description of Artificial Sequence: Synthetic oligonucleotide
  Antisense strand to SEQ ID NO: 868636
aaguucaacucugucugac

SEQ ID NO: 868638 - RNA, 19 nt, Artificial Sequence
  Description of Artificial Sequence: Synthetic oligonucleotide
  Sense strand starting at position 3467 of SEQ ID NO: 588488
acuuaaugaguauaugcaa

SEQ ID NO: 868639 - RNA, 19 nt, Artificial Sequence
  Description of Artificial Sequence: Synthetic oligonucleotide
  Antisense strand to SEQ ID NO: 868638
uugcauauacucauuaagu

SEQ ID NO: 868640 - RNA, 19 nt, Artificial Sequence
  Description of Artificial Sequence: Synthetic oligonucleotide
  Sense strand starting at position 3474 of SEQ ID NO: 588488
gaguauaugcaauggagaa

SEQ ID NO: 868641 - RNA, 19 nt, Artificial Sequence
  Description of Artificial Sequence: Synthetic oligonucleotide
  Antisense strand to SEQ ID NO: 868640
uucuccauugcauauacuc

SEQ ID NO: 868642 - RNA, 19 nt, Artificial Sequence
  Description of Artificial Sequence: Synthetic oligonucleotide
  Sense strand starting at position 3475 of SEQ ID NO: 588488
aguauaugcaauggagaaa

SEQ ID NO: 868643 - RNA, 19 nt, Artificial Sequence
  Description of Artificial Sequence: Synthetic oligonucleotide
  Antisense strand to SEQ ID NO: 868642
uuucuccauugcauauacu

SEQ ID NO: 868644 - RNA, 19 nt, Artificial Sequence
  Description of Artificial Sequence: Synthetic oligonucleotide
  Sense strand starting at position 3524 of SEQ ID NO: 588488
uuugucaugaaaggucaga

SEQ ID NO: 868645 - RNA, 19 nt, Artificial Sequence
  Description of Artificial Sequence: Synthetic oligonucleotide
  Antisense strand to SEQ ID NO: 868644
ucugaccuuucaugacaaa

SEQ ID NO: 868646 - RNA, 19 nt, Artificial Sequence
  Description of Artificial Sequence: Synthetic oligonucleotide
  Sense strand starting at position 3535 of SEQ ID NO: 588488
aggucagauuuccaaagaa

SEQ ID NO: 868647 - RNA, 19 nt, Artificial Sequence
  Description of Artificial Sequence: Synthetic oligonucleotide
  Antisense strand to SEQ ID NO: 868646
uucuuuggaaaucugaccu

SEQ ID NO: 868648 - RNA, 19 nt, Artificial Sequence
  Description of Artificial Sequence: Synthetic oligonucleotide
  Sense strand starting at position 3575 of SEQ ID NO: 588488
guugauucuccucaaacug

SEQ ID NO: 868649 - RNA, 19 nt, Artificial Sequence
  Description of Artificial Sequence: Synthetic oligonucleotide
  Antisense strand to SEQ ID NO: 868648
caguuugaggagaaucaac

SEQ ID NO: 868650 - RNA, 19 nt, Artificial Sequence
  Description of Artificial Sequence: Synthetic oligonucleotide
  Sense strand starting at position 3611 of SEQ ID NO: 588488
ccuaaauguccauagugua

SEQ ID NO: 868651 - RNA, 19 nt, Artificial Sequence
  Description of Artificial Sequence: Synthetic oligonucleotide
  Antisense strand to SEQ ID NO: 868650
uacacuauggacauuuagg

SEQ ID NO: 868652 - RNA, 19 nt, Artificial Sequence
  Description of Artificial Sequence: Synthetic oligonucleotide
  Sense strand starting at position 3826 of SEQ ID NO: 588488
acaaauguguaucuaaaug

SEQ ID NO: 868653 - RNA, 19 nt, Artificial Sequence
  Description of Artificial Sequence: Synthetic oligonucleotide
  Antisense strand to SEQ ID NO: 868652
cauuuagauacacauuugu

SEQ ID NO: 868654 - RNA, 19 nt, Artificial Sequence
  Description of Artificial Sequence: Synthetic oligonucleotide
  Sense strand starting at position 3871 of SEQ ID NO: 588488
ggucacuugggcuaggaga

SEQ ID NO: 868655 - RNA, 19 nt, Artificial Sequence
  Description of Artificial Sequence: Synthetic oligonucleotide
  Antisense strand to SEQ ID NO: 868654
ucuccuagcccaagugacc

SEQ ID NO: 868656 - RNA, 19 nt, Artificial Sequence
  Description of Artificial Sequence: Synthetic oligonucleotide
  Sense strand starting at position 3873 of SEQ ID NO: 588488
ucacuugggcuaggagauu

SEQ ID NO: 868657 - RNA, 19 nt, Artificial Sequence
  Description of Artificial Sequence: Synthetic oligonucleotide
  Antisense strand to SEQ ID NO: 868656
aaucuccuagcccaaguga

SEQ ID NO: 868658 - RNA, 19 nt, Artificial Sequence
  Description of Artificial Sequence: Synthetic oligonucleotide
  Sense strand starting at position 291 of SEQ ID NO: 588489
guuucuacugauuaagucu

SEQ ID NO: 868659 - RNA, 19 nt, Artificial Sequence
  Description of Artificial Sequence: Synthetic oligonucleotide
  Antisense strand to SEQ ID NO: 868658
agacuuaaucaguagaaac

SEQ ID NO: 868660 - RNA, 19 nt, Artificial Sequence
  Description of Artificial Sequence: Synthetic oligonucleotide
  Sense strand starting at position 297 of SEQ ID NO: 588489
acugauuaagucuaucagu

SEQ ID NO: 868661 - RNA, 19 nt, Artificial Sequence
  Description of Artificial Sequence: Synthetic oligonucleotide
  Antisense strand to SEQ ID NO: 868660
acugauagacuuaaucagu

SEQ ID NO: 868662 - RNA, 19 nt, Artificial Sequence
  Description of Artificial Sequence: Synthetic oligonucleotide
  Sense strand starting at position 313 of SEQ ID NO: 588489
agucaacugguugauucua

SEQ ID NO: 868663 - RNA, 19 nt, Artificial Sequence
  Description of Artificial Sequence: Synthetic oligonucleotide
  Antisense strand to SEQ ID NO: 868662
uagaaucaaccaguugacu

SEQ ID NO: 868664 - RNA, 19 nt, Artificial Sequence
  Description of Artificial Sequence: Synthetic oligonucleotide
  Sense strand starting at position 399 of SEQ ID NO: 588489
gcaugaaugcaucaauucu

SEQ ID NO: 868665 - RNA, 19 nt, Artificial Sequence
  Description of Artificial Sequence: Synthetic oligonucleotide
  Antisense strand to SEQ ID NO: 868664
agaauugaugcauucaugc

SEQ ID NO: 868666 - RNA, 19 nt, Artificial Sequence
  Description of Artificial Sequence: Synthetic oligonucleotide
  Sense strand starting at position 519 of SEQ ID NO: 588489
cccuuuaaaguugaaaguu

SEQ ID NO: 868667 - RNA, 19 nt, Artificial Sequence
  Description of Artificial Sequence: Synthetic oligonucleotide
  Antisense strand to SEQ ID NO: 868666
aacuuucaacuuuaaaggg

SEQ ID NO: 868668 - RNA, 19 nt, Artificial Sequence
  Description of Artificial Sequence: Synthetic oligonucleotide
  Sense strand starting at position 529 of SEQ ID NO: 588489
uugaaaguugcaggaggaa

SEQ ID NO: 868669 - RNA, 19 nt, Artificial Sequence
  Description of Artificial Sequence: Synthetic oligonucleotide
  Antisense strand to SEQ ID NO: 868668
uuccuccugcaacuuucaa

SEQ ID NO: 868670 - RNA, 19 nt, Artificial Sequence
  Description of Artificial Sequence: Synthetic oligonucleotide
  Sense strand starting at position 560 of SEQ ID NO: 588489
uuugucauucuguaaacac

SEQ ID NO: 868671 - RNA, 19 nt, Artificial Sequence
  Description of Artificial Sequence: Synthetic oligonucleotide
  Antisense strand to SEQ ID NO: 868670
guguuuacagaaugacaaa

SEQ ID NO: 868672 - RNA, 19 nt, Artificial Sequence
  Description of Artificial Sequence: Synthetic oligonucleotide
  Sense strand starting at position 866 of SEQ ID NO: 588489
ugaaguguauuuguaucuu

SEQ ID NO: 868673 - RNA, 19 nt, Artificial Sequence
  Description of Artificial Sequence: Synthetic oligonucleotide
  Antisense strand to SEQ ID NO: 868672
aagauacaaauacacuuca

SEQ ID NO: 868674 - RNA, 19 nt, Artificial Sequence
  Description of Artificial Sequence: Synthetic oligonucleotide
  Sense strand starting at position 916 of SEQ ID NO: 588489
uggcuuauagaauguaaau

SEQ ID NO: 868675 - RNA, 19 nt, Artificial Sequence
  Description of Artificial Sequence: Synthetic oligonucleotide
  Antisense strand to SEQ ID NO: 868674
auuuacauucuauaagcca

SEQ ID NO: 868676 - RNA, 19 nt, Artificial Sequence
  Description of Artificial Sequence: Synthetic oligonucleotide
  Sense strand starting at position 996 of SEQ ID NO: 588489
uuaaaucauguuggagaau

SEQ ID NO: 868677 - RNA, 19 nt, Artificial Sequence
  Description of Artificial Sequence: Synthetic oligonucleotide
  Antisense strand to SEQ ID NO: 868676
auucuccaacaugauuuaa

SEQ ID NO: 868678 - RNA, 19 nt, Artificial Sequence
  Description of Artificial Sequence: Synthetic oligonucleotide
  Sense strand starting at position 1021 of SEQ ID NO: 588489
gguguuucuccuuagagaa

SEQ ID NO: 868679 - RNA, 19 nt, Artificial Sequence
  Description of Artificial Sequence: Synthetic oligonucleotide
  Antisense strand to SEQ ID NO: 868678
uucucuaaggagaaacacc

SEQ ID NO: 868680 - RNA, 19 nt, Artificial Sequence
  Description of Artificial Sequence: Synthetic oligonucleotide
  Sense strand starting at position 1238 of SEQ ID NO: 588489
cuuagucaucuguaaggga

SEQ ID NO: 868681 - RNA, 19 nt, Artificial Sequence
  Description of Artificial Sequence: Synthetic oligonucleotide
  Antisense strand to SEQ ID NO: 868680
ucccuuacagaugacuaag

SEQ ID NO: 868682 - RNA, 19 nt, Artificial Sequence
  Description of Artificial Sequence: Synthetic oligonucleotide
  Sense strand starting at position 1277 of SEQ ID NO: 588489
cacgauguugcuuaacaca

SEQ ID NO: 868683 - RNA, 19 nt, Artificial Sequence
  Description of Artificial Sequence: Synthetic oligonucleotide
  Antisense strand to SEQ ID NO: 868682
uguguuaagcaacaucgug

SEQ ID NO: 868684 - RNA, 19 nt, Artificial Sequence
  Description of Artificial Sequence: Synthetic oligonucleotide
  Sense strand starting at position 1394 of SEQ ID NO: 588489
gucgucaaugggagucguu

SEQ ID NO: 868685 - RNA, 19 nt, Artificial Sequence
  Description of Artificial Sequence: Synthetic oligonucleotide
  Antisense strand to SEQ ID NO: 868684
aacgacucccauugacgac

SEQ ID NO: 868686 - RNA, 19 nt, Artificial Sequence
  Description of Artificial Sequence: Synthetic oligonucleotide
  Sense strand starting at position 1407 of SEQ ID NO: 588489
gucguuucuguguuggauc

SEQ ID NO: 868687 - RNA, 19 nt, Artificial Sequence
  Description of Artificial Sequence: Synthetic oligonucleotide
  Antisense strand to SEQ ID NO: 868686
gauccaacacagaaacgac

SEQ ID NO: 868688 - RNA, 19 nt, Artificial Sequence
  Description of Artificial Sequence: Synthetic oligonucleotide
  Sense strand starting at position 1539 of SEQ ID NO: 588489
cagguagagagugauucuu

SEQ ID NO: 868689 - RNA, 19 nt, Artificial Sequence
  Description of Artificial Sequence: Synthetic oligonucleotide
  Antisense strand to SEQ ID NO: 868688
aagaaucacucucuaccug

SEQ ID NO: 868690 - RNA, 19 nt, Artificial Sequence
  Description of Artificial Sequence: Synthetic oligonucleotide
  Sense strand starting at position 1541 of SEQ ID NO: 588489
gguagagagugauucuuug

SEQ ID NO: 868691 - RNA, 19 nt, Artificial Sequence
  Description of Artificial Sequence: Synthetic oligonucleotide
  Antisense strand to SEQ ID NO: 868690
caaagaaucacucucuacc

SEQ ID NO: 868692 - RNA, 19 nt, Artificial Sequence
  Description of Artificial Sequence: Synthetic oligonucleotide
  Sense strand starting at position 1661 of SEQ ID NO: 588489
gguaaaguucaguauagag

SEQ ID NO: 868693 - RNA, 19 nt, Artificial Sequence
  Description of Artificial Sequence: Synthetic oligonucleotide
  Antisense strand to SEQ ID NO: 868692
cucuauacugaacuuuacc

SEQ ID NO: 868694 - RNA, 19 nt, Artificial Sequence
  Description of Artificial Sequence: Synthetic oligonucleotide
  Sense strand starting at position 1671 of SEQ ID NO: 588489
aguauagaguuugucuaga

SEQ ID NO: 868695 - RNA, 19 nt, Artificial Sequence
  Description of Artificial Sequence: Synthetic oligonucleotide
  Antisense strand to SEQ ID NO: 868694
ucuagacaaacucuauacu

SEQ ID NO: 868696 - RNA, 19 nt, Artificial Sequence
  Description of Artificial Sequence: Synthetic oligonucleotide
  Sense strand starting at position 1673 of SEQ ID NO: 588489
uauagaguuugucuagaag

SEQ ID NO: 868697 - RNA, 19 nt, Artificial Sequence
  Description of Artificial Sequence: Synthetic oligonucleotide
  Antisense strand to SEQ ID NO: 868696
cuucuagacaaacucuaua

SEQ ID NO: 868698 - RNA, 19 nt, Artificial Sequence
  Description of Artificial Sequence: Synthetic oligonucleotide
  Sense strand starting at position 1676 of SEQ ID NO: 588489
agaguuugucuagaagccu

SEQ ID NO: 868699 - RNA, 19 nt, Artificial Sequence
  Description of Artificial Sequence: Synthetic oligonucleotide
  Antisense strand to SEQ ID NO: 868698
aggcuucuagacaaacucu

SEQ ID NO: 868700 - RNA, 19 nt, Artificial Sequence
  Description of Artificial Sequence: Synthetic oligonucleotide
  Sense strand starting at position 2103 of SEQ ID NO: 588489
ggaacauacuaguuuccau

SEQ ID NO: 868701 - RNA, 19 nt, Artificial Sequence
  Description of Artificial Sequence: Synthetic oligonucleotide
  Antisense strand to SEQ ID NO: 868700
auggaaacuaguauguucc

SEQ ID NO: 868702 - RNA, 19 nt, Artificial Sequence
  Description of Artificial Sequence: Synthetic oligonucleotide
  Sense strand starting at position 2167 of SEQ ID NO: 588489
cucucuacauggguauaga

SEQ ID NO: 868703 - RNA, 19 nt, Artificial Sequence
  Description of Artificial Sequence: Synthetic oligonucleotide
  Antisense strand to SEQ ID NO: 868702
ucuauacccauguagagag

SEQ ID NO: 868704 - RNA, 19 nt, Artificial Sequence
  Description of Artificial Sequence: Synthetic oligonucleotide
  Sense strand starting at position 2224 of SEQ ID NO: 588489
guauguggucauuauugac

SEQ ID NO: 868705 - RNA, 19 nt, Artificial Sequence
  Description of Artificial Sequence: Synthetic oligonucleotide
  Antisense strand to SEQ ID NO: 868704
gucaauaaugaccacauac

SEQ ID NO: 868706 - RNA, 19 nt, Artificial Sequence
  Description of Artificial Sequence: Synthetic oligonucleotide
  Sense strand starting at position 2334 of SEQ ID NO: 588489
uguauaucuccuuauguac

SEQ ID NO: 868707 - RNA, 19 nt, Artificial Sequence
  Description of Artificial Sequence: Synthetic oligonucleotide
  Antisense strand to SEQ ID NO: 868706
guacauaaggagauauaca

SEQ ID NO: 868708 - RNA, 19 nt, Artificial Sequence
  Description of Artificial Sequence: Synthetic oligonucleotide
  Sense strand starting at position 2416 of SEQ ID NO: 588489
aucuguuaggaauggcaaa

SEQ ID NO: 868709 - RNA, 19 nt, Artificial Sequence
  Description of Artificial Sequence: Synthetic oligonucleotide
  Antisense strand to SEQ ID NO: 868708
uuugccauuccuaacagau

SEQ ID NO: 868710 - RNA, 19 nt, Artificial Sequence
  Description of Artificial Sequence: Synthetic oligonucleotide
  Sense strand starting at position 2586 of SEQ ID NO: 588489
ugaugacaugcauaaguuu

SEQ ID NO: 868711 - RNA, 19 nt, Artificial Sequence
  Description of Artificial Sequence: Synthetic oligonucleotide
  Antisense strand to SEQ ID NO: 868710
aaacuuaugcaugucauca

SEQ ID NO: 868712 - RNA, 19 nt, Artificial Sequence
  Description of Artificial Sequence: Synthetic oligonucleotide
  Sense strand starting at position 2593 of SEQ ID NO: 588489
augcauaaguuucuuaaag

SEQ ID NO: 868713 - RNA, 19 nt, Artificial Sequence
  Description of Artificial Sequence: Synthetic oligonucleotide
  Antisense strand to SEQ ID NO: 868712
cuuuaagaaacuuaugcau

SEQ ID NO: 868714 - RNA, 19 nt, Artificial Sequence
  Description of Artificial Sequence: Synthetic oligonucleotide
  Sense strand starting at position 2909 of SEQ ID NO: 588489
gaaagaaaguccuccagua

SEQ ID NO: 868715 - RNA, 19 nt, Artificial Sequence
  Description of Artificial Sequence: Synthetic oligonucleotide
  Antisense strand to SEQ ID NO: 868714
uacuggaggacuuucuuuc

SEQ ID NO: 868716 - RNA, 19 nt, Artificial Sequence
  Description of Artificial Sequence: Synthetic oligonucleotide
  Sense strand starting at position 2930 of SEQ ID NO: 588489
ccaucuauucgccauagau

SEQ ID NO: 868717 - RNA, 19 nt, Artificial Sequence
  Description of Artificial Sequence: Synthetic oligonucleotide
  Antisense strand to SEQ ID NO: 868716
aucuauggcgaauagaugg

SEQ ID NO: 868718 - RNA, 19 nt, Artificial Sequence
  Description of Artificial Sequence: Synthetic oligonucleotide
  Sense strand starting at position 2956 of SEQ ID NO: 588489
acugauugugcauguauuu

SEQ ID NO: 868719 - RNA, 19 nt, Artificial Sequence
  Description of Artificial Sequence: Synthetic oligonucleotide
  Antisense strand to SEQ ID NO: 868718
aaauacaugcacaaucagu

SEQ ID NO: 868720 - RNA, 19 nt, Artificial Sequence
  Description of Artificial Sequence: Synthetic oligonucleotide
  Sense strand starting at position 2999 of SEQ ID NO: 588489
ucaguaugucuugugcgau

SEQ ID NO: 868721 - RNA, 19 nt, Artificial Sequence
  Description of Artificial Sequence: Synthetic oligonucleotide
  Antisense strand to SEQ ID NO: 868720
aucgcacaagacauacuga

SEQ ID NO: 868722 - RNA, 19 nt, Artificial Sequence
  Description of Artificial Sequence: Synthetic oligonucleotide
  Sense strand starting at position 3009 of SEQ ID NO: 588489
uugugcgauacacaagaaa

SEQ ID NO: 868723 - RNA, 19 nt, Artificial Sequence
  Description of Artificial Sequence: Synthetic oligonucleotide
  Antisense strand to SEQ ID NO: 868722
uuucuuguguaucgcacaa

SEQ ID NO: 868724 - RNA, 19 nt, Artificial Sequence
  Description of Artificial Sequence: Synthetic oligonucleotide
  Sense strand starting at position 3069 of SEQ ID NO: 588489
agaauugagcuuuggagga

SEQ ID NO: 868725 - RNA, 19 nt, Artificial Sequence
  Description of Artificial Sequence: Synthetic oligonucleotide
  Antisense strand to SEQ ID NO: 868724
uccuccaaagcucaauucu

SEQ ID NO: 868726 - RNA, 19 nt, Artificial Sequence
  Description of Artificial Sequence: Synthetic oligonucleotide
  Sense strand starting at position 3403 of SEQ ID NO: 588489
gccucagaccuauagauuc

SEQ ID NO: 868727 - RNA, 19 nt, Artificial Sequence
  Description of Artificial Sequence: Synthetic oligonucleotide
  Antisense strand to SEQ ID NO: 868726
gaaucuauaggucugaggc

SEQ ID NO: 868728 - RNA, 19 nt, Artificial Sequence
  Description of Artificial Sequence: Synthetic oligonucleotide
  Sense strand starting at position 3442 of SEQ ID NO: 588489
auggaaucaucuuuggcaa

SEQ ID NO: 868729 - RNA, 19 nt, Artificial Sequence
  Description of Artificial Sequence: Synthetic oligonucleotide
  Antisense strand to SEQ ID NO: 868728
uugccaaagaugauuccau

SEQ ID NO: 868730 - RNA, 19 nt, Artificial Sequence
  Description of Artificial Sequence: Synthetic oligonucleotide
  Sense strand starting at position 3443 of SEQ ID NO: 588489
uggaaucaucuuuggcaaa

SEQ ID NO: 868731 - RNA, 19 nt, Artificial Sequence
  Description of Artificial Sequence: Synthetic oligonucleotide
  Antisense strand to SEQ ID NO: 868730
uuugccaaagaugauucca

SEQ ID NO: 868732 - RNA, 19 nt, Artificial Sequence
  Description of Artificial Sequence: Synthetic oligonucleotide
  Sense strand starting at position 3571 of SEQ ID NO: 588489
cucuuuauacuagaaggca

SEQ ID NO: 868733 - RNA, 19 nt, Artificial Sequence
  Description of Artificial Sequence: Synthetic oligonucleotide
  Antisense strand to SEQ ID NO: 868732
ugccuucuaguauaaagag

SEQ ID NO: 868734 - RNA, 19 nt, Artificial Sequence
  Description of Artificial Sequence: Synthetic oligonucleotide
  Sense strand starting at position 3586 of SEQ ID NO: 588489
ggcauucaugggugaccaa

SEQ ID NO: 868735 - RNA, 19 nt, Artificial Sequence
  Description of Artificial Sequence: Synthetic oligonucleotide
  Antisense strand to SEQ ID NO: 868734
uuggucacccaugaaugcc

SEQ ID NO: 868736 - RNA, 19 nt, Artificial Sequence
  Description of Artificial Sequence: Synthetic oligonucleotide
  Sense strand starting at position 3816 of SEQ ID NO: 588489
auauuaugaccucaugucu

SEQ ID NO: 868737 - RNA, 19 nt, Artificial Sequence
  Description of Artificial Sequence: Synthetic oligonucleotide
  Antisense strand to SEQ ID NO: 868736
agacaugaggucauaauau

SEQ ID NO: 868738 - RNA, 19 nt, Artificial Sequence
  Description of Artificial Sequence: Synthetic oligonucleotide
  Sense strand starting at position 31 of SEQ ID NO: 588490
ggauauuagaccuguguga

SEQ ID NO: 868739 - RNA, 19 nt, Artificial Sequence
  Description of Artificial Sequence: Synthetic oligonucleotide
  Antisense strand to SEQ ID NO: 868738
ucacacaggucuaauaucc

SEQ ID NO: 868740 - RNA, 19 nt, Artificial Sequence
  Description of Artificial Sequence: Synthetic oligonucleotide
  Sense strand starting at position 33 of SEQ ID NO: 588490
auauuagaccugugugagu

SEQ ID NO: 868741 - RNA, 19 nt, Artificial Sequence
  Description of Artificial Sequence: Synthetic oligonucleotide
  Antisense strand to SEQ ID NO: 868740
acucacacaggucuaauau

SEQ ID NO: 868742 - RNA, 19 nt, Artificial Sequence
  Description of Artificial Sequence: Synthetic oligonucleotide
  Sense strand starting at position 310 of SEQ ID NO: 588490
ggaagugguccagguucaa

SEQ ID NO: 868743 - RNA, 19 nt, Artificial Sequence
  Description of Artificial Sequence: Synthetic oligonucleotide
  Antisense strand to SEQ ID NO: 868742
uugaaccuggaccacuucc

SEQ ID NO: 868744 - RNA, 19 nt, Artificial Sequence
  Description of Artificial Sequence: Synthetic oligonucleotide
  Sense strand starting at position 553 of SEQ ID NO: 588490
ggcguuuccauugcuuagu

SEQ ID NO: 868745 - RNA, 19 nt, Artificial Sequence
  Description of Artificial Sequence: Synthetic oligonucleotide
  Antisense strand to SEQ ID NO: 868744
acuaagcaauggaaacgcc

SEQ ID NO: 868746 - RNA, 19 nt, Artificial Sequence
  Description of Artificial Sequence: Synthetic oligonucleotide
  Sense strand starting at position 555 of SEQ ID NO: 588490
cguuuccauugcuuaguua

SEQ ID NO: 868747 - RNA, 19 nt, Artificial Sequence
  Description of Artificial Sequence: Synthetic oligonucleotide
  Antisense strand to SEQ ID NO: 868746
uaacuaagcaauggaaacg

SEQ ID NO: 868748 - RNA, 19 nt, Artificial Sequence
  Description of Artificial Sequence: Synthetic oligonucleotide
  Sense strand starting at position 556 of SEQ ID NO: 588490
guuuccauugcuuaguuau

SEQ ID NO: 868749 - RNA, 19 nt, Artificial Sequence
  Description of Artificial Sequence: Synthetic oligonucleotide
  Antisense strand to SEQ ID NO: 868748
auaacuaagcaauggaaac

SEQ ID NO: 868750 - RNA, 19 nt, Artificial Sequence
  Description of Artificial Sequence: Synthetic oligonucleotide
  Sense strand starting at position 558 of SEQ ID NO: 588490
uuccauugcuuaguuauga

SEQ ID NO: 868751 - RNA, 19 nt, Artificial Sequence
  Description of Artificial Sequence: Synthetic oligonucleotide
  Antisense strand to SEQ ID NO: 868750
ucauaacuaagcaauggaa

SEQ ID NO: 868752 - RNA, 19 nt, Artificial Sequence
  Description of Artificial Sequence: Synthetic oligonucleotide
  Sense strand starting at position 559 of SEQ ID NO: 588490
uccauugcuuaguuaugaa

SEQ ID NO: 868753 - RNA, 19 nt, Artificial Sequence
  Description of Artificial Sequence: Synthetic oligonucleotide
  Antisense strand to SEQ ID NO: 868752
uucauaacuaagcaaugga

SEQ ID NO: 868754 - RNA, 19 nt, Artificial Sequence
  Description of Artificial Sequence: Synthetic oligonucleotide
  Sense strand starting at position 756 of SEQ ID NO: 588490
caguuaguauaaccgauau

SEQ ID NO: 868755 - RNA, 19 nt, Artificial Sequence
  Description of Artificial Sequence: Synthetic oligonucleotide
  Antisense strand to SEQ ID NO: 868754
auaucgguuauacuaacug

SEQ ID NO: 868756 - RNA, 19 nt, Artificial Sequence
  Description of Artificial Sequence: Synthetic oligonucleotide
  Sense strand starting at position 861 of SEQ ID NO: 588490
cguuuauaucaugaaggca

SEQ ID NO: 868757 - RNA, 19 nt, Artificial Sequence
  Description of Artificial Sequence: Synthetic oligonucleotide
  Antisense strand to SEQ ID NO: 868756
ugccuucaugauauaaacg

SEQ ID NO: 868758 - RNA, 19 nt, Artificial Sequence
  Description of Artificial Sequence: Synthetic oligonucleotide
  Sense strand starting at position 881 of SEQ ID NO: 588490
cagauaaccugguauagaa

SEQ ID NO: 868759 - RNA, 19 nt, Artificial Sequence
  Description of Artificial Sequence: Synthetic oligonucleotide
  Antisense strand to SEQ ID NO: 868758
uucuauaccagguuaucug

SEQ ID NO: 868760 - RNA, 19 nt, Artificial Sequence
  Description of Artificial Sequence: Synthetic oligonucleotide
  Sense strand starting at position 977 of SEQ ID NO: 588490
cagucaggcuuggcauuua

SEQ ID NO: 868761 - RNA, 19 nt, Artificial Sequence
  Description of Artificial Sequence: Synthetic oligonucleotide
  Antisense strand to SEQ ID NO: 868760
uaaaugccaagccugacug

SEQ ID NO: 868762 - RNA, 19 nt, Artificial Sequence
  Description of Artificial Sequence: Synthetic oligonucleotide
  Sense strand starting at position 1111 of SEQ ID NO: 588490
agguacauaugauauuaca

SEQ ID NO: 868763 - RNA, 19 nt, Artificial Sequence
  Description of Artificial Sequence: Synthetic oligonucleotide
  Antisense strand to SEQ ID NO: 868762
uguaauaucauauguaccu

SEQ ID NO: 868764 - RNA, 19 nt, Artificial Sequence
  Description of Artificial Sequence: Synthetic oligonucleotide
  Sense strand starting at position 1241 of SEQ ID NO: 588490
acacgaugcuucuuaacac

SEQ ID NO: 868765 - RNA, 19 nt, Artificial Sequence
  Description of Artificial Sequence: Synthetic oligonucleotide
  Antisense strand to SEQ ID NO: 868764
guguuaagaagcaucgugu

SEQ ID NO: 868766 - RNA, 19 nt, Artificial Sequence
  Description of Artificial Sequence: Synthetic oligonucleotide
  Sense strand starting at position 1335 of SEQ ID NO: 588490
gaaagugugagaugaugca

SEQ ID NO: 868767 - RNA, 19 nt, Artificial Sequence
  Description of Artificial Sequence: Synthetic oligonucleotide
  Antisense strand to SEQ ID NO: 868766
ugcaucaucucacacuuuc

SEQ ID NO: 868768 - RNA, 19 nt, Artificial Sequence
  Description of Artificial Sequence: Synthetic oligonucleotide
  Sense strand starting at position 1350 of SEQ ID NO: 588490
ugcauuagucaaugagaau

SEQ ID NO: 868769 - RNA, 19 nt, Artificial Sequence
  Description of Artificial Sequence: Synthetic oligonucleotide
  Antisense strand to SEQ ID NO: 868768
auucucauugacuaaugca

SEQ ID NO: 868770 - RNA, 19 nt, Artificial Sequence
  Description of Artificial Sequence: Synthetic oligonucleotide
  Sense strand starting at position 1906 of SEQ ID NO: 588490
uggauuuguagcugaguac

SEQ ID NO: 868771 - RNA, 19 nt, Artificial Sequence
  Description of Artificial Sequence: Synthetic oligonucleotide
  Antisense strand to SEQ ID NO: 868770
guacucagcuacaaaucca

SEQ ID NO: 868772 - RNA, 19 nt, Artificial Sequence
  Description of Artificial Sequence: Synthetic oligonucleotide
  Sense strand starting at position 1969 of SEQ ID NO: 588490
ugcaaauaucacuaggcua

SEQ ID NO: 868773 - RNA, 19 nt, Artificial Sequence
  Description of Artificial Sequence: Synthetic oligonucleotide
  Antisense strand to SEQ ID NO: 868772
uagccuagugauauuugca

SEQ ID NO: 868774 - RNA, 19 nt, Artificial Sequence
  Description of Artificial Sequence: Synthetic oligonucleotide
  Sense strand starting at position 2029 of SEQ ID NO: 588490
gagacuuugcucugugcau

SEQ ID NO: 868775 - RNA, 19 nt, Artificial Sequence
  Description of Artificial Sequence: Synthetic oligonucleotide
  Antisense strand to SEQ ID NO: 868774
augcacagagcaaagucuc

SEQ ID NO: 868776 - RNA, 19 nt, Artificial Sequence
  Description of Artificial Sequence: Synthetic oligonucleotide
  Sense strand starting at position 2135 of SEQ ID NO: 588490
cucuccauguguuuaaaga

SEQ ID NO: 868777 - RNA, 19 nt, Artificial Sequence
  Description of Artificial Sequence: Synthetic oligonucleotide
  Antisense strand to SEQ ID NO: 868776
ucuuuaaacacauggagag

SEQ ID NO: 868778 - RNA, 19 nt, Artificial Sequence
  Description of Artificial Sequence: Synthetic oligonucleotide
  Sense strand starting at position 2136 of SEQ ID NO: 588490
ucuccauguguuuaaagac

SEQ ID NO: 868779 - RNA, 19 nt, Artificial Sequence
  Description of Artificial Sequence: Synthetic oligonucleotide
  Antisense strand to SEQ ID NO: 868778
gucuuuaaacacauggaga

SEQ ID NO: 868780 - RNA, 19 nt, Artificial Sequence
  Description of Artificial Sequence: Synthetic oligonucleotide
  Sense strand starting at position 2698 of SEQ ID NO: 588490
aaguacugauguguugaau

SEQ ID NO: 868781 - RNA, 19 nt, Artificial Sequence
  Description of Artificial Sequence: Synthetic oligonucleotide
  Antisense strand to SEQ ID NO: 868780
auucaacacaucaguacuu

SEQ ID NO: 868782 - RNA, 19 nt, Artificial Sequence
  Description of Artificial Sequence: Synthetic oligonucleotide
  Sense strand starting at position 2701 of SEQ ID NO: 588490
uacugauguguugaauaac

SEQ ID NO: 868783 - RNA, 19 nt, Artificial Sequence
  Description of Artificial Sequence: Synthetic oligonucleotide
  Antisense strand to SEQ ID NO: 868782
guuauucaacacaucagua

SEQ ID NO: 868784 - RNA, 19 nt, Artificial Sequence
  Description of Artificial Sequence: Synthetic oligonucleotide
  Sense strand starting at position 2744 of SEQ ID NO: 588490
auaggcuauuugcauugaa

SEQ ID NO: 868785 - RNA, 19 nt, Artificial Sequence
  Description of Artificial Sequence: Synthetic oligonucleotide
  Antisense strand to SEQ ID NO: 868784
uucaaugcaaauagccuau

SEQ ID NO: 868786 - RNA, 19 nt, Artificial Sequence
  Description of Artificial Sequence: Synthetic oligonucleotide
  Sense strand starting at position 2747 of SEQ ID NO: 588490
ggcuauuugcauugaauuc

SEQ ID NO: 868787 - RNA, 19 nt, Artificial Sequence
  Description of Artificial Sequence: Synthetic oligonucleotide
  Antisense strand to SEQ ID NO: 868786
gaauucaaugcaaauagcc

SEQ ID NO: 868788 - RNA, 19 nt, Artificial Sequence
  Description of Artificial Sequence: Synthetic oligonucleotide
  Sense strand starting at position 2861 of SEQ ID NO: 588490
cacauauugugguaagacu

SEQ ID NO: 868789 - RNA, 19 nt, Artificial Sequence
  Description of Artificial Sequence: Synthetic oligonucleotide
  Antisense strand to SEQ ID NO: 868788
agucuuaccacaauaugug

SEQ ID NO: 868790 - RNA, 19 nt, Artificial Sequence
  Description of Artificial Sequence: Synthetic oligonucleotide
  Sense strand starting at position 3063 of SEQ ID NO: 588490
gauagaguucuuggagagu

SEQ ID NO: 868791 - RNA, 19 nt, Artificial Sequence
  Description of Artificial Sequence: Synthetic oligonucleotide
  Antisense strand to SEQ ID NO: 868790
acucuccaagaacucuauc

SEQ ID NO: 868792 - RNA, 19 nt, Artificial Sequence
  Description of Artificial Sequence: Synthetic oligonucleotide
  Sense strand starting at position 3066 of SEQ ID NO: 588490
agaguucuuggagaguuac

SEQ ID NO: 868793 - RNA, 19 nt, Artificial Sequence
  Description of Artificial Sequence: Synthetic oligonucleotide
  Antisense strand to SEQ ID NO: 868792
guaacucuccaagaacucu

SEQ ID NO: 868794 - RNA, 19 nt, Artificial Sequence
  Description of Artificial Sequence: Synthetic oligonucleotide
  Sense strand starting at position 3072 of SEQ ID NO: 588490
cuuggagaguuacaaacuu

SEQ ID NO: 868795 - RNA, 19 nt, Artificial Sequence
  Description of Artificial Sequence: Synthetic oligonucleotide
  Antisense strand to SEQ ID NO: 868794
aaguuuguaacucuccaag

SEQ ID NO: 868796 - RNA, 19 nt, Artificial Sequence
  Description of Artificial Sequence: Synthetic oligonucleotide
  Sense strand starting at position 3090 of SEQ ID NO: 588490
uuugcaauaugucagauuu

SEQ ID NO: 868797 - RNA, 19 nt, Artificial Sequence
  Description of Artificial Sequence: Synthetic oligonucleotide
  Antisense strand to SEQ ID NO: 868796
aaaucugacauauugcaaa

SEQ ID NO: 868798 - RNA, 19 nt, Artificial Sequence
  Description of Artificial Sequence: Synthetic oligonucleotide
  Sense strand starting at position 3092 of SEQ ID NO: 588490
ugcaauaugucagauuugu

SEQ ID NO: 868799 - RNA, 19 nt, Artificial Sequence
  Description of Artificial Sequence: Synthetic oligonucleotide
  Antisense strand to SEQ ID NO: 868798
acaaaucugacauauugca

SEQ ID NO: 868800 - RNA, 19 nt, Artificial Sequence
  Description of Artificial Sequence: Synthetic oligonucleotide
  Sense strand starting at position 3355 of SEQ ID NO: 588490
gguccugaacucuggcaaa

SEQ ID NO: 868801 - RNA, 19 nt, Artificial Sequence
  Description of Artificial Sequence: Synthetic oligonucleotide
  Antisense strand to SEQ ID NO: 868800
uuugccagaguucaggacc

SEQ ID NO: 868802 - RNA, 19 nt, Artificial Sequence
  Description of Artificial Sequence: Synthetic oligonucleotide
  Sense strand starting at position 3380 of SEQ ID NO: 588490
uugccucggcccuauagau

SEQ ID NO: 868803 - RNA, 19 nt, Artificial Sequence
  Description of Artificial Sequence: Synthetic oligonucleotide
  Antisense strand to SEQ ID NO: 868802
aucuauagggccgaggcaa

SEQ ID NO: 868804 - RNA, 19 nt, Artificial Sequence
  Description of Artificial Sequence: Synthetic oligonucleotide
  Sense strand starting at position 3440 of SEQ ID NO: 588490
gcuauuuaguagguggagu

SEQ ID NO: 868805 - RNA, 19 nt, Artificial Sequence
  Description of Artificial Sequence: Synthetic oligonucleotide
  Antisense strand to SEQ ID NO: 868804
acuccaccuacuaaauagc

SEQ ID NO: 868806 - RNA, 19 nt, Artificial Sequence
  Description of Artificial Sequence: Synthetic oligonucleotide
  Sense strand starting at position 3493 of SEQ ID NO: 588490
gguguucaagaaugaagcu

SEQ ID NO: 868807 - RNA, 19 nt, Artificial Sequence
  Description of Artificial Sequence: Synthetic oligonucleotide
  Antisense strand to SEQ ID NO: 868806
agcuucauucuugaacacc

SEQ ID NO: 868808 - RNA, 19 nt, Artificial Sequence
  Description of Artificial Sequence: Synthetic oligonucleotide
  Sense strand starting at position 3526 of SEQ ID NO: 588490
uggccauauuugggauugu

SEQ ID NO: 868809 - RNA, 19 nt, Artificial Sequence
  Description of Artificial Sequence: Synthetic oligonucleotide
  Antisense strand to SEQ ID NO: 868808
acaaucccaaauauggcca

SEQ ID NO: 868810 - RNA, 19 nt, Artificial Sequence
  Description of Artificial Sequence: Synthetic oligonucleotide
  Sense strand starting at position 3527 of SEQ ID NO: 588490
ggccauauuugggauugua

SEQ ID NO: 868811 - RNA, 19 nt, Artificial Sequence
  Description of Artificial Sequence: Synthetic oligonucleotide
  Antisense strand to SEQ ID NO: 868810
uacaaucccaaauauggcc

SEQ ID NO: 868812 - RNA, 19 nt, Artificial Sequence
  Description of Artificial Sequence: Synthetic oligonucleotide
  Sense strand starting at position 3535 of SEQ ID NO: 588490
uugggauuguaauagacaa

SEQ ID NO: 868813 - RNA, 19 nt, Artificial Sequence
  Description of Artificial Sequence: Synthetic oligonucleotide
  Antisense strand to SEQ ID NO: 868812
uugucuauuacaaucccaa

SEQ ID NO: 868814 - RNA, 19 nt, Artificial Sequence
  Description of Artificial Sequence: Synthetic oligonucleotide
  Sense strand starting at position 3761 of SEQ ID NO: 588490
aauaaauagccugguguca

SEQ ID NO: 868815 - RNA, 19 nt, Artificial Sequence
  Description of Artificial Sequence: Synthetic oligonucleotide
  Antisense strand to SEQ ID NO: 868814
ugacaccaggcuauuuauu

SEQ ID NO: 868816 - RNA, 19 nt, Artificial Sequence
  Description of Artificial Sequence: Synthetic oligonucleotide
  Sense strand starting at position 3861 of SEQ ID NO: 588490
agggaauaauagucucugu

SEQ ID NO: 868817 - RNA, 19 nt, Artificial Sequence
  Description of Artificial Sequence: Synthetic oligonucleotide
  Antisense strand to SEQ ID NO: 868816
acagagacuauuauucccu

SEQ ID NO: 868818 - RNA, 19 nt, Artificial Sequence
  Description of Artificial Sequence: Synthetic oligonucleotide
  Sense strand starting at position 341 of SEQ ID NO: 588491
uguauaucuucuguaaauc

SEQ ID NO: 868819 - RNA, 19 nt, Artificial Sequence
  Description of Artificial Sequence: Synthetic oligonucleotide
  Antisense strand to SEQ ID NO: 868818
gauuuacagaagauauaca

SEQ ID NO: 868820 - RNA, 19 nt, Artificial Sequence
  Description of Artificial Sequence: Synthetic oligonucleotide
  Sense strand starting at position 342 of SEQ ID NO: 588491
guauaucuucuguaaaucu

SEQ ID NO: 868821 - RNA, 19 nt, Artificial Sequence
  Description of Artificial Sequence: Synthetic oligonucleotide
  Antisense strand to SEQ ID NO: 868820
agauuuacagaagauauac

SEQ ID NO: 868822 - RNA, 19 nt, Artificial Sequence
  Description of Artificial Sequence: Synthetic oligonucleotide
  Sense strand starting at position 486 of SEQ ID NO: 588491
uguggaagguccucagaau

SEQ ID NO: 868823 - RNA, 19 nt, Artificial Sequence
  Description of Artificial Sequence: Synthetic oligonucleotide
  Antisense strand to SEQ ID NO: 868822
auucugaggaccuuccaca

SEQ ID NO: 868824 - RNA, 19 nt, Artificial Sequence
  Description of Artificial Sequence: Synthetic oligonucleotide
  Sense strand starting at position 487 of SEQ ID NO: 588491
guggaagguccucagaauc

SEQ ID NO: 868825 - RNA, 19 nt, Artificial Sequence
  Description of Artificial Sequence: Synthetic oligonucleotide
  Antisense strand to SEQ ID NO: 868824
gauucugaggaccuuccac

SEQ ID NO: 868826 - RNA, 19 nt, Artificial Sequence
  Description of Artificial Sequence: Synthetic oligonucleotide
  Sense strand starting at position 569 of SEQ ID NO: 588491
ucaguuacugcauaugaac

SEQ ID NO: 868827 - RNA, 19 nt, Artificial Sequence
  Description of Artificial Sequence: Synthetic oligonucleotide
  Antisense strand to SEQ ID NO: 868826
guucauaugcaguaacuga

SEQ ID NO: 868828 - RNA, 19 nt, Artificial Sequence
  Description of Artificial Sequence: Synthetic oligonucleotide
  Sense strand starting at position 773 of SEQ ID NO: 588491
agacauaacugauauuaag

SEQ ID NO: 868829 - RNA, 19 nt, Artificial Sequence
  Description of Artificial Sequence: Synthetic oligonucleotide
  Antisense strand to SEQ ID NO: 868828
cuuaauaucaguuaugucu

SEQ ID NO: 868830 - RNA, 19 nt, Artificial Sequence
  Description of Artificial Sequence: Synthetic oligonucleotide
  Sense strand starting at position 835 of SEQ ID NO: 588491
auaugagagagcgggaauu

SEQ ID NO: 868831 - RNA, 19 nt, Artificial Sequence
  Description of Artificial Sequence: Synthetic oligonucleotide
  Antisense strand to SEQ ID NO: 868830
aauucccgcucucucauau

SEQ ID NO: 868832 - RNA, 19 nt, Artificial Sequence
  Description of Artificial Sequence: Synthetic oligonucleotide
  Sense strand starting at position 870 of SEQ ID NO: 588491
ccuggauaucuugagggca

SEQ ID NO: 868833 - RNA, 19 nt, Artificial Sequence
  Description of Artificial Sequence: Synthetic oligonucleotide
  Antisense strand to SEQ ID NO: 868832
ugcccucaagauauccagg

SEQ ID NO: 868834 - RNA, 19 nt, Artificial Sequence
  Description of Artificial Sequence: Synthetic oligonucleotide
  Sense strand starting at position 873 of SEQ ID NO: 588491
ggauaucuugagggcaaca

SEQ ID NO: 868835 - RNA, 19 nt, Artificial Sequence
  Description of Artificial Sequence: Synthetic oligonucleotide
  Antisense strand to SEQ ID NO: 868834
uguugcccucaagauaucc

SEQ ID NO: 868836 - RNA, 19 nt, Artificial Sequence
  Description of Artificial Sequence: Synthetic oligonucleotide
  Sense strand starting at position 935 of SEQ ID NO: 588491
auguaauaagcauggauaa

SEQ ID NO: 868837 - RNA, 19 nt, Artificial Sequence
  Description of Artificial Sequence: Synthetic oligonucleotide
  Antisense strand to SEQ ID NO: 868836
uuauccaugcuuauuacau

SEQ ID NO: 868838 - RNA, 19 nt, Artificial Sequence
  Description of Artificial Sequence: Synthetic oligonucleotide
  Sense strand starting at position 936 of SEQ ID NO: 588491
uguaauaagcauggauaaa

SEQ ID NO: 868839 - RNA, 19 nt, Artificial Sequence
  Description of Artificial Sequence: Synthetic oligonucleotide
  Antisense strand to SEQ ID NO: 868838
uuuauccaugcuuauuaca

SEQ ID NO: 868840 - RNA, 19 nt, Artificial Sequence
  Description of Artificial Sequence: Synthetic oligonucleotide
  Sense strand starting at position 2018 of SEQ ID NO: 588491
uaaccugggucucugaaga

SEQ ID NO: 868841 - RNA, 19 nt, Artificial Sequence
  Description of Artificial Sequence: Synthetic oligonucleotide
  Antisense strand to SEQ ID NO: 868840
ucuucagagacccagguua

SEQ ID NO: 868842 - RNA, 19 nt, Artificial Sequence
  Description of Artificial Sequence: Synthetic oligonucleotide
  Sense strand starting at position 2031 of SEQ ID NO: 588491
ugaagacuuugguuuguac

SEQ ID NO: 868843 - RNA, 19 nt, Artificial Sequence
  Description of Artificial Sequence: Synthetic oligonucleotide
  Antisense strand to SEQ ID NO: 868842
guacaaaccaaagucuuca

SEQ ID NO: 868844 - RNA, 19 nt, Artificial Sequence
  Description of Artificial Sequence: Synthetic oligonucleotide
  Sense strand starting at position 2051 of SEQ ID NO: 588491
ccgccuuauauagggaaca

SEQ ID NO: 868845 - RNA, 19 nt, Artificial Sequence
  Description of Artificial Sequence: Synthetic oligonucleotide
  Antisense strand to SEQ ID NO: 868844
uguucccuauauaaggcgg

SEQ ID NO: 868846 - RNA, 19 nt, Artificial Sequence
  Description of Artificial Sequence: Synthetic oligonucleotide
  Sense strand starting at position 2213 of SEQ ID NO: 588491
cagaguccuguuugauaau

SEQ ID NO: 868847 - RNA, 19 nt, Artificial Sequence
  Description of Artificial Sequence: Synthetic oligonucleotide
  Antisense strand to SEQ ID NO: 868846
auuaucaaacaggacucug

SEQ ID NO: 868848 - RNA, 19 nt, Artificial Sequence
  Description of Artificial Sequence: Synthetic oligonucleotide
  Sense strand starting at position 2430 of SEQ ID NO: 588491
guuauuugcugagugacuu

SEQ ID NO: 868849 - RNA, 19 nt, Artificial Sequence
  Description of Artificial Sequence: Synthetic oligonucleotide
  Antisense strand to SEQ ID NO: 868848
aagucacucagcaaauaac

SEQ ID NO: 868850 - RNA, 19 nt, Artificial Sequence
  Description of Artificial Sequence: Synthetic oligonucleotide
  Sense strand starting at position 2752 of SEQ ID NO: 588491
ccuauaaguagugauguuu

SEQ ID NO: 868851 - RNA, 19 nt, Artificial Sequence
  Description of Artificial Sequence: Synthetic oligonucleotide
  Antisense strand to SEQ ID NO: 868850
aaacaucacuacuuauagg

SEQ ID NO: 868852 - RNA, 19 nt, Artificial Sequence
  Description of Artificial Sequence: Synthetic oligonucleotide
  Sense strand starting at position 2918 of SEQ ID NO: 588491
augguaugacucugagauu

SEQ ID NO: 868853 - RNA, 19 nt, Artificial Sequence
  Description of Artificial Sequence: Synthetic oligonucleotide
  Antisense strand to SEQ ID NO: 868852
aaucucagagucauaccau

SEQ ID NO: 868854 - RNA, 19 nt, Artificial Sequence
  Description of Artificial Sequence: Synthetic oligonucleotide
  Sense strand starting at position 2927 of SEQ ID NO: 588491
cucugagauugagcacaua

SEQ ID NO: 868855 - RNA, 19 nt, Artificial Sequence
  Description of Artificial Sequence: Synthetic oligonucleotide
  Antisense strand to SEQ ID NO: 868854
uaugugcucaaucucagag

SEQ ID NO: 868856 - RNA, 19 nt, Artificial Sequence
  Description of Artificial Sequence: Synthetic oligonucleotide
  Sense strand starting at position 2981 of SEQ ID NO: 588491
auugguuugcaacacuaau

SEQ ID NO: 868857 - RNA, 19 nt, Artificial Sequence
  Description of Artificial Sequence: Synthetic oligonucleotide
  Antisense strand to SEQ ID NO: 868856
auuaguguugcaaaccaau

SEQ ID NO: 868858 - RNA, 19 nt, Artificial Sequence
  Description of Artificial Sequence: Synthetic oligonucleotide
  Sense strand starting at position 3089 of SEQ ID NO: 588491
acaggauaggguugucuua

SEQ ID NO: 868859 - RNA, 19 nt, Artificial Sequence
  Description of Artificial Sequence: Synthetic oligonucleotide
  Antisense strand to SEQ ID NO: 868858
uaagacaacccuauccugu

SEQ ID NO: 868860 - RNA, 19 nt, Artificial Sequence
  Description of Artificial Sequence: Synthetic oligonucleotide
  Sense strand starting at position 3091 of SEQ ID NO: 588491
aggauaggguugucuuaga

SEQ ID NO: 868861 - RNA, 19 nt, Artificial Sequence
  Description of Artificial Sequence: Synthetic oligonucleotide
  Antisense strand to SEQ ID NO: 868860
ucuaagacaacccuauccu

SEQ ID NO: 868862 - RNA, 19 nt, Artificial Sequence
  Description of Artificial Sequence: Synthetic oligonucleotide
  Sense strand starting at position 3104 of SEQ ID NO: 588491
cuuagaguucugcauugag

SEQ ID NO: 868863 - RNA, 19 nt, Artificial Sequence
  Description of Artificial Sequence: Synthetic oligonucleotide
  Antisense strand to SEQ ID NO: 868862
cucaaugcagaacucuaag

SEQ ID NO: 868864 - RNA, 19 nt, Artificial Sequence
  Description of Artificial Sequence: Synthetic oligonucleotide
  Sense strand starting at position 3373 of SEQ ID NO: 588491
aaguaaaugaggugugcaa

SEQ ID NO: 868865 - RNA, 19 nt, Artificial Sequence
  Description of Artificial Sequence: Synthetic oligonucleotide
  Antisense strand to SEQ ID NO: 868864
uugcacaccucauuuacuu

SEQ ID NO: 868866 - RNA, 19 nt, Artificial Sequence
  Description of Artificial Sequence: Synthetic oligonucleotide
  Sense strand starting at position 3377 of SEQ ID NO: 588491
aaaugaggugugcaauugu

SEQ ID NO: 868867 - RNA, 19 nt, Artificial Sequence
  Description of Artificial Sequence: Synthetic oligonucleotide
  Antisense strand to SEQ ID NO: 868866
acaauugcacaccucauuu

SEQ ID NO: 868868 - RNA, 19 nt, Artificial Sequence
  Description of Artificial Sequence: Synthetic oligonucleotide
  Sense strand starting at position 3397 of SEQ ID NO: 588491
guacauagcaugcaggaua

SEQ ID NO: 868869 - RNA, 19 nt, Artificial Sequence
  Description of Artificial Sequence: Synthetic oligonucleotide
  Antisense strand to SEQ ID NO: 868868
uauccugcaugcuauguac

SEQ ID NO: 868870 - RNA, 19 nt, Artificial Sequence
  Description of Artificial Sequence: Synthetic oligonucleotide
  Sense strand starting at position 3637 of SEQ ID NO: 588491
uggugcaagagauguagaa

SEQ ID NO: 868871 - RNA, 19 nt, Artificial Sequence
  Description of Artificial Sequence: Synthetic oligonucleotide
  Antisense strand to SEQ ID NO: 868870
uucuacaucucuugcacca

SEQ ID NO: 868872 - RNA, 19 nt, Artificial Sequence
  Description of Artificial Sequence: Synthetic oligonucleotide
  Sense strand starting at position 3746 of SEQ ID NO: 588491
gacaguugagggugaugaa

SEQ ID NO: 868873 - RNA, 19 nt, Artificial Sequence
  Description of Artificial Sequence: Synthetic oligonucleotide
  Antisense strand to SEQ ID NO: 868872
uucaucacccucaacuguc

SEQ ID NO: 868874 - RNA, 19 nt, Artificial Sequence
  Description of Artificial Sequence: Synthetic oligonucleotide
  Sense strand starting at position 3799 of SEQ ID NO: 588491
uuuguaagagcacaauauu

SEQ ID NO: 868875 - RNA, 19 nt, Artificial Sequence
  Description of Artificial Sequence: Synthetic oligonucleotide
  Antisense strand to SEQ ID NO: 868874
aauauugugcucuuacaaa

SEQ ID NO: 868876 - RNA, 19 nt, Artificial Sequence
  Description of Artificial Sequence: Synthetic oligonucleotide
  Sense strand starting at position 3810 of SEQ ID NO: 588491
acaauauucugucuguaga

SEQ ID NO: 868877 - RNA, 19 nt, Artificial Sequence
  Description of Artificial Sequence: Synthetic oligonucleotide
  Antisense strand to SEQ ID NO: 868876
ucuacagacagaauauugu

SEQ ID NO: 868878 - RNA, 19 nt, Artificial Sequence
  Description of Artificial Sequence: Synthetic oligonucleotide
  Sense strand starting at position 3813 of SEQ ID NO: 588491
auauucugucuguagaaug

SEQ ID NO: 868879 - RNA, 19 nt, Artificial Sequence
  Description of Artificial Sequence: Synthetic oligonucleotide
  Antisense strand to SEQ ID NO: 868878
cauucuacagacagaauau

SEQ ID NO: 868880 - RNA, 19 nt, Artificial Sequence
  Description of Artificial Sequence: Synthetic oligonucleotide
  Sense strand starting at position 3818 of SEQ ID NO: 588491
cugucuguagaauggacaa

SEQ ID NO: 868881 - RNA, 19 nt, Artificial Sequence
  Description of Artificial Sequence: Synthetic oligonucleotide
  Antisense strand to SEQ ID NO: 868880
uuguccauucuacagacag

SEQ ID NO: 868882 - RNA, 19 nt, Artificial Sequence
  Description of Artificial Sequence: Synthetic oligonucleotide
  Sense strand starting at position 3846 of SEQ ID NO: 588491
ucucaaguucuccacuagu

SEQ ID NO: 868883 - RNA, 19 nt, Artificial Sequence
  Description of Artificial Sequence: Synthetic oligonucleotide
  Antisense strand to SEQ ID NO: 868882
acuaguggagaacuugaga

SEQ ID NO: 868884 - RNA, 19 nt, Artificial Sequence
  Description of Artificial Sequence: Synthetic oligonucleotide
  Sense strand starting at position 3876 of SEQ ID NO: 588491
cucagaagaucaguauauu

SEQ ID NO: 868885 - RNA, 19 nt, Artificial Sequence
  Description of Artificial Sequence: Synthetic oligonucleotide
  Antisense strand to SEQ ID NO: 868884
aauauacugaucuucugag

SEQ ID NO: 868886 - RNA, 19 nt, Artificial Sequence
  Description of Artificial Sequence: Synthetic oligonucleotide
  Sense strand starting at position 3905 of SEQ ID NO: 588491
uguugugaugguuaacauu

SEQ ID NO: 868887 - RNA, 19 nt, Artificial Sequence
  Description of Artificial Sequence: Synthetic oligonucleotide
  Antisense strand to SEQ ID NO: 868886
aauguuaaccaucacaaca

SEQ ID NO: 868888 - RNA, 19 nt, Artificial Sequence
  Description of Artificial Sequence: Synthetic oligonucleotide
  Sense strand starting at position 3914 of SEQ ID NO: 588491
gguuaacauugaguguuau

SEQ ID NO: 868889 - RNA, 19 nt, Artificial Sequence
  Description of Artificial Sequence: Synthetic oligonucleotide
  Antisense strand to SEQ ID NO: 868888
auaacacucaauguuaacc

SEQ ID NO: 868890 - RNA, 19 nt, Artificial Sequence
  Description of Artificial Sequence: Synthetic oligonucleotide
  Sense strand starting at position 3920 of SEQ ID NO: 588491
cauugaguguuauccugau

SEQ ID NO: 868891 - RNA, 19 nt, Artificial Sequence
  Description of Artificial Sequence: Synthetic oligonucleotide
  Antisense strand to SEQ ID NO: 868890
aucaggauaacacucaaug

SEQ ID NO: 868892 - RNA, 19 nt, Artificial Sequence
  Description of Artificial Sequence: Synthetic oligonucleotide
  Sense strand starting at position 3924 of SEQ ID NO: 588491
gaguguuauccugauugaa

SEQ ID NO: 868893 - RNA, 19 nt, Artificial Sequence
  Description of Artificial Sequence: Synthetic oligonucleotide
  Antisense strand to SEQ ID NO: 868892
uucaaucaggauaacacuc

SEQ ID NO: 868894 - RNA, 19 nt, Artificial Sequence
  Description of Artificial Sequence: Synthetic oligonucleotide
  Sense strand starting at position 3926 of SEQ ID NO: 588491
guguuauccugauugaauu

SEQ ID NO: 868895 - RNA, 19 nt, Artificial Sequence
  Description of Artificial Sequence: Synthetic oligonucleotide
  Antisense strand to SEQ ID NO: 868894
aauucaaucaggauaacac

SEQ ID NO: 868896 - RNA, 19 nt, Artificial Sequence
  Description of Artificial Sequence: Synthetic oligonucleotide
  Sense strand starting at position 3927 of SEQ ID NO: 588491
uguuauccugauugaauug

SEQ ID NO: 868897 - RNA, 19 nt, Artificial Sequence
  Description of Artificial Sequence: Synthetic oligonucleotide
  Antisense strand to SEQ ID NO: 868896
caauucaaucaggauaaca

SEQ ID NO: 868898 - RNA, 19 nt, Artificial Sequence
  Description of Artificial Sequence: Synthetic oligonucleotide
  Sense strand starting at position 74 of SEQ ID NO: 588492
ccgauuaucuaugugggau

SEQ ID NO: 868899 - RNA, 19 nt, Artificial Sequence
  Description of Artificial Sequence: Synthetic oligonucleotide
  Antisense strand to SEQ ID NO: 868898
aucccacauagauaaucgg

SEQ ID NO: 868900 - RNA, 19 nt, Artificial Sequence
  Description of Artificial Sequence: Synthetic oligonucleotide
  Sense strand starting at position 346 of SEQ ID NO: 588492
ugguuugaaacuggacuua

SEQ ID NO: 868901 - RNA, 19 nt, Artificial Sequence
  Description of Artificial Sequence: Synthetic oligonucleotide
  Antisense strand to SEQ ID NO: 868900
uaaguccaguuucaaacca

SEQ ID NO: 868902 - RNA, 19 nt, Artificial Sequence
  Description of Artificial Sequence: Synthetic oligonucleotide
  Sense strand starting at position 448 of SEQ ID NO: 588492
uggaauucuguaugaacaa

SEQ ID NO: 868903 - RNA, 19 nt, Artificial Sequence
  Description of Artificial Sequence: Synthetic oligonucleotide
  Antisense strand to SEQ ID NO: 868902
uuguucauacagaauucca

SEQ ID NO: 868904 - RNA, 19 nt, Artificial Sequence
  Description of Artificial Sequence: Synthetic oligonucleotide
  Sense strand starting at position 521 of SEQ ID NO: 588492
accagauggcuaggguaua

SEQ ID NO: 868905 - RNA, 19 nt, Artificial Sequence
  Description of Artificial Sequence: Synthetic oligonucleotide
  Antisense strand to SEQ ID NO: 868904
uauacccuagccaucuggu

SEQ ID NO: 868906 - RNA, 19 nt, Artificial Sequence
  Description of Artificial Sequence: Synthetic oligonucleotide
  Sense strand starting at position 624 of SEQ ID NO: 588492
gucccaugaugagcagaau

SEQ ID NO: 868907 - RNA, 19 nt, Artificial Sequence
  Description of Artificial Sequence: Synthetic oligonucleotide
  Antisense strand to SEQ ID NO: 868906
auucugcucaucaugggac

SEQ ID NO: 868908 - RNA, 19 nt, Artificial Sequence
  Description of Artificial Sequence: Synthetic oligonucleotide
  Sense strand starting at position 679 of SEQ ID NO: 588492
ugggacuucucacccuuaa

SEQ ID NO: 868909 - RNA, 19 nt, Artificial Sequence
  Description of Artificial Sequence: Synthetic oligonucleotide
  Antisense strand to SEQ ID NO: 868908
uuaagggugagaaguccca

SEQ ID NO: 868910 - RNA, 19 nt, Artificial Sequence
  Description of Artificial Sequence: Synthetic oligonucleotide
  Sense strand starting at position 1370 of SEQ ID NO: 588492
ggagguaaccuguaagucu

SEQ ID NO: 868911 - RNA, 19 nt, Artificial Sequence
  Description of Artificial Sequence: Synthetic oligonucleotide
  Antisense strand to SEQ ID NO: 868910
agacuuacagguuaccucc

SEQ ID NO: 868912 - RNA, 19 nt, Artificial Sequence
  Description of Artificial Sequence: Synthetic oligonucleotide
  Sense strand starting at position 1568 of SEQ ID NO: 588492
ucagaugguuuaucugaug

SEQ ID NO: 868913 - RNA, 19 nt, Artificial Sequence
  Description of Artificial Sequence: Synthetic oligonucleotide
  Antisense strand to SEQ ID NO: 868912
caucagauaaaccaucuga

SEQ ID NO: 868914 - RNA, 19 nt, Artificial Sequence
  Description of Artificial Sequence: Synthetic oligonucleotide
  Sense strand starting at position 1589 of SEQ ID NO: 588492
agacauuagccaggagguu

SEQ ID NO: 868915 - RNA, 19 nt, Artificial Sequence
  Description of Artificial Sequence: Synthetic oligonucleotide
  Antisense strand to SEQ ID NO: 868914
aaccuccuggcuaaugucu

SEQ ID NO: 868916 - RNA, 19 nt, Artificial Sequence
  Description of Artificial Sequence: Synthetic oligonucleotide
  Sense strand starting at position 1627 of SEQ ID NO: 588492
cagccagugcuagaugaau

SEQ ID NO: 868917 - RNA, 19 nt, Artificial Sequence
  Description of Artificial Sequence: Synthetic oligonucleotide
  Antisense strand to SEQ ID NO: 868916
auucaucuagcacuggcug

SEQ ID NO: 868918 - RNA, 19 nt, Artificial Sequence
  Description of Artificial Sequence: Synthetic oligonucleotide
  Sense strand starting at position 1638 of SEQ ID NO: 588492
agaugaaucuugucugaaa

SEQ ID NO: 868919 - RNA, 19 nt, Artificial Sequence
  Description of Artificial Sequence: Synthetic oligonucleotide
  Antisense strand to SEQ ID NO: 868918
uuucagacaagauucaucu

SEQ ID NO: 868920 - RNA, 19 nt, Artificial Sequence
  Description of Artificial Sequence: Synthetic oligonucleotide
  Sense strand starting at position 1726 of SEQ ID NO: 588492
ugcuuaaucuccucaggga

SEQ ID NO: 868921 - RNA, 19 nt, Artificial Sequence
  Description of Artificial Sequence: Synthetic oligonucleotide
  Antisense strand to SEQ ID NO: 868920
ucccugaggagauuaagca

SEQ ID NO: 868922 - RNA, 19 nt, Artificial Sequence
  Description of Artificial Sequence: Synthetic oligonucleotide
  Sense strand starting at position 1727 of SEQ ID NO: 588492
gcuuaaucuccucagggau

SEQ ID NO: 868923 - RNA, 19 nt, Artificial Sequence
  Description of Artificial Sequence: Synthetic oligonucleotide
  Antisense strand to SEQ ID NO: 868922
aucccugaggagauuaagc

SEQ ID NO: 868924 - RNA, 19 nt, Artificial Sequence
  Description of Artificial Sequence: Synthetic oligonucleotide
  Sense strand starting at position 1733 of SEQ ID NO: 588492
ucuccucagggaugucaaa

SEQ ID NO: 868925 - RNA, 19 nt, Artificial Sequence
  Description of Artificial Sequence: Synthetic oligonucleotide
  Antisense strand to SEQ ID NO: 868924
uuugacaucccugaggaga

SEQ ID NO: 868926 - RNA, 19 nt, Artificial Sequence
  Description of Artificial Sequence: Synthetic oligonucleotide
  Sense strand starting at position 1848 of SEQ ID NO: 588492
caaguuguagcucauggaa

SEQ ID NO: 868927 - RNA, 19 nt, Artificial Sequence
  Description of Artificial Sequence: Synthetic oligonucleotide
  Antisense strand to SEQ ID NO: 868926
uuccaugagcuacaacuug

SEQ ID NO: 868928 - RNA, 19 nt, Artificial Sequence
  Description of Artificial Sequence: Synthetic oligonucleotide
  Sense strand starting at position 1904 of SEQ ID NO: 588492
ggaggagacacuuguuggu

SEQ ID NO: 868929 - RNA, 19 nt, Artificial Sequence
  Description of Artificial Sequence: Synthetic oligonucleotide
  Antisense strand to SEQ ID NO: 868928
accaacaagugucuccucc

SEQ ID NO: 868930 - RNA, 19 nt, Artificial Sequence
  Description of Artificial Sequence: Synthetic oligonucleotide
  Sense strand starting at position 1917 of SEQ ID NO: 588492
guuggucauguugacaaca

SEQ ID NO: 868931 - RNA, 19 nt, Artificial Sequence
  Description of Artificial Sequence: Synthetic oligonucleotide
  Antisense strand to SEQ ID NO: 868930
uguugucaacaugaccaac

SEQ ID NO: 868932 - RNA, 19 nt, Artificial Sequence
  Description of Artificial Sequence: Synthetic oligonucleotide
  Sense strand starting at position 2016 of SEQ ID NO: 588492
auggccuauuuauaugaga

SEQ ID NO: 868933 - RNA, 19 nt, Artificial Sequence
  Description of Artificial Sequence: Synthetic oligonucleotide
  Antisense strand to SEQ ID NO: 868932
ucucauauaaauaggccau

SEQ ID NO: 868934 - RNA, 19 nt, Artificial Sequence
  Description of Artificial Sequence: Synthetic oligonucleotide
  Sense strand starting at position 2052 of SEQ ID NO: 588492
agaggaauuucccacuuuc

SEQ ID NO: 868935 - RNA, 19 nt, Artificial Sequence
  Description of Artificial Sequence: Synthetic oligonucleotide
  Antisense strand to SEQ ID NO: 868934
gaaagugggaaauuccucu

SEQ ID NO: 868936 - RNA, 19 nt, Artificial Sequence
  Description of Artificial Sequence: Synthetic oligonucleotide
  Sense strand starting at position 2342 of SEQ ID NO: 588492
guggauucuacugacugua

SEQ ID NO: 868937 - RNA, 19 nt, Artificial Sequence
  Description of Artificial Sequence: Synthetic oligonucleotide
  Antisense strand to SEQ ID NO: 868936
uacagucaguagaauccac

SEQ ID NO: 868938 - RNA, 19 nt, Artificial Sequence
  Description of Artificial Sequence: Synthetic oligonucleotide
  Sense strand starting at position 2344 of SEQ ID NO: 588492
ggauucuacugacuguaga

SEQ ID NO: 868939 - RNA, 19 nt, Artificial Sequence
  Description of Artificial Sequence: Synthetic oligonucleotide
  Antisense strand to SEQ ID NO: 868938
ucuacagucaguagaaucc

SEQ ID NO: 868940 - RNA, 19 nt, Artificial Sequence
  Description of Artificial Sequence: Synthetic oligonucleotide
  Sense strand starting at position 2345 of SEQ ID NO: 588492
gauucuacugacuguagau

SEQ ID NO: 868941 - RNA, 19 nt, Artificial Sequence
  Description of Artificial Sequence: Synthetic oligonucleotide
  Antisense strand to SEQ ID NO: 868940
aucuacagucaguagaauc

SEQ ID NO: 868942 - RNA, 19 nt, Artificial Sequence
  Description of Artificial Sequence: Synthetic oligonucleotide
  Sense strand starting at position 2507 of SEQ ID NO: 588492
agaaauacaugugcagauu

SEQ ID NO: 868943 - RNA, 19 nt, Artificial Sequence
  Description of Artificial Sequence: Synthetic oligonucleotide
  Antisense strand to SEQ ID NO: 868942
aaucugcacauguauuucu

SEQ ID NO: 868944 - RNA, 19 nt, Artificial Sequence
  Description of Artificial Sequence: Synthetic oligonucleotide
  Sense strand starting at position 2671 of SEQ ID NO: 588492
gggaauaguagcugaaacu

SEQ ID NO: 868945 - RNA, 19 nt, Artificial Sequence
  Description of Artificial Sequence: Synthetic oligonucleotide
  Antisense strand to SEQ ID NO: 868944
aguuucagcuacuauuccc

SEQ ID NO: 868946 - RNA, 19 nt, Artificial Sequence
  Description of Artificial Sequence: Synthetic oligonucleotide
  Sense strand starting at position 2745 of SEQ ID NO: 588492
ucugaaaggcacuggaaua

SEQ ID NO: 868947 - RNA, 19 nt, Artificial Sequence
  Description of Artificial Sequence: Synthetic oligonucleotide
  Antisense strand to SEQ ID NO: 868946
uauuccagugccuuucaga

SEQ ID NO: 868948 - RNA, 19 nt, Artificial Sequence
  Description of Artificial Sequence: Synthetic oligonucleotide
  Sense strand starting at position 2757 of SEQ ID NO: 588492
uggaauagucuaggguaua

SEQ ID NO: 868949 - RNA, 19 nt, Artificial Sequence
  Description of Artificial Sequence: Synthetic oligonucleotide
  Antisense strand to SEQ ID NO: 868948
uauacccuagacuauucca

SEQ ID NO: 868950 - RNA, 19 nt, Artificial Sequence
  Description of Artificial Sequence: Synthetic oligonucleotide
  Sense strand starting at position 3104 of SEQ ID NO: 588492
uugggaagauggcugauua

SEQ ID NO: 868951 - RNA, 19 nt, Artificial Sequence
  Description of Artificial Sequence: Synthetic oligonucleotide
  Antisense strand to SEQ ID NO: 868950
uaaucagccaucuucccaa

SEQ ID NO: 868952 - RNA, 19 nt, Artificial Sequence
  Description of Artificial Sequence: Synthetic oligonucleotide
  Sense strand starting at position 3270 of SEQ ID NO: 588492
augagauuguuccuuuaac

SEQ ID NO: 868953 - RNA, 19 nt, Artificial Sequence
  Description of Artificial Sequence: Synthetic oligonucleotide
  Antisense strand to SEQ ID NO: 868952
guuaaaggaacaaucucau

SEQ ID NO: 868954 - RNA, 19 nt, Artificial Sequence
  Description of Artificial Sequence: Synthetic oligonucleotide
  Sense strand starting at position 3271 of SEQ ID NO: 588492
ugagauuguuccuuuaacu

SEQ ID NO: 868955 - RNA, 19 nt, Artificial Sequence
  Description of Artificial Sequence: Synthetic oligonucleotide
  Antisense strand to SEQ ID NO: 868954
aguuaaaggaacaaucuca

SEQ ID NO: 868956 - RNA, 19 nt, Artificial Sequence
  Description of Artificial Sequence: Synthetic oligonucleotide
  Sense strand starting at position 3298 of SEQ ID NO: 588492
cguuacuaguuauuuacua

SEQ ID NO: 868957 - RNA, 19 nt, Artificial Sequence
  Description of Artificial Sequence: Synthetic oligonucleotide
  Antisense strand to SEQ ID NO: 868956
uaguaaauaacuaguaacg

SEQ ID NO: 868958 - RNA, 19 nt, Artificial Sequence
  Description of Artificial Sequence: Synthetic oligonucleotide
  Sense strand starting at position 3317 of SEQ ID NO: 588492
uggcuaucccugcagaaau

SEQ ID NO: 868959 - RNA, 19 nt, Artificial Sequence
  Description of Artificial Sequence: Synthetic oligonucleotide
  Antisense strand to SEQ ID NO: 868958
auuucugcagggauagcca

SEQ ID NO: 868960 - RNA, 19 nt, Artificial Sequence
  Description of Artificial Sequence: Synthetic oligonucleotide
  Sense strand starting at position 3319 of SEQ ID NO: 588492
gcuaucccugcagaaauau

SEQ ID NO: 868961 - RNA, 19 nt, Artificial Sequence
  Description of Artificial Sequence: Synthetic oligonucleotide
  Antisense strand to SEQ ID NO: 868960
auauuucugcagggauagc

SEQ ID NO: 868962 - RNA, 19 nt, Artificial Sequence
  Description of Artificial Sequence: Synthetic oligonucleotide
  Sense strand starting at position 3617 of SEQ ID NO: 588492
cuguuauaugcauaugauu

SEQ ID NO: 868963 - RNA, 19 nt, Artificial Sequence
  Description of Artificial Sequence: Synthetic oligonucleotide
  Antisense strand to SEQ ID NO: 868962
aaucauaugcauauaacag

SEQ ID NO: 868964 - RNA, 19 nt, Artificial Sequence
  Description of Artificial Sequence: Synthetic oligonucleotide
  Sense strand starting at position 3644 of SEQ ID NO: 588492
uggguagaauuacuaucua

SEQ ID NO: 868965 - RNA, 19 nt, Artificial Sequence
  Description of Artificial Sequence: Synthetic oligonucleotide
  Antisense strand to SEQ ID NO: 868964
uagauaguaauucuaccca

SEQ ID NO: 868966 - RNA, 19 nt, Artificial Sequence
  Description of Artificial Sequence: Synthetic oligonucleotide
  Sense strand starting at position 3748 of SEQ ID NO: 588492
uuagaacuaucugcauaug

SEQ ID NO: 868967 - RNA, 19 nt, Artificial Sequence
  Description of Artificial Sequence: Synthetic oligonucleotide
  Antisense strand to SEQ ID NO: 868966
cauaugcagauaguucuaa

SEQ ID NO: 868968 - RNA, 19 nt, Artificial Sequence
  Description of Artificial Sequence: Synthetic oligonucleotide
  Sense strand starting at position 3751 of SEQ ID NO: 588492
gaacuaucugcauaugagu

SEQ ID NO: 868969 - RNA, 19 nt, Artificial Sequence
  Description of Artificial Sequence: Synthetic oligonucleotide
  Antisense strand to SEQ ID NO: 868968
acucauaugcagauaguuc

SEQ ID NO: 868970 - RNA, 19 nt, Artificial Sequence
  Description of Artificial Sequence: Synthetic oligonucleotide
  Sense strand starting at position 3801 of SEQ ID NO: 588492
uaggguuauuaggccacua

SEQ ID NO: 868971 - RNA, 19 nt, Artificial Sequence
  Description of Artificial Sequence: Synthetic oligonucleotide
  Antisense strand to SEQ ID NO: 868970
uaguggccuaauaacccua

SEQ ID NO: 868972 - RNA, 19 nt, Artificial Sequence
  Description of Artificial Sequence: Synthetic oligonucleotide
  Sense strand starting at position 3819 of SEQ ID NO: 588492
agggaauuagguuguuaca

SEQ ID NO: 868973 - RNA, 19 nt, Artificial Sequence
  Description of Artificial Sequence: Synthetic oligonucleotide
  Antisense strand to SEQ ID NO: 868972
uguaacaaccuaauucccu

SEQ ID NO: 868974 - RNA, 19 nt, Artificial Sequence
  Description of Artificial Sequence: Synthetic oligonucleotide
  Sense strand starting at position 3821 of SEQ ID NO: 588492
ggaauuagguuguuacauu

SEQ ID NO: 868975 - RNA, 19 nt, Artificial Sequence
  Description of Artificial Sequence: Synthetic oligonucleotide
  Antisense strand to SEQ ID NO: 868974
aauguaacaaccuaauucc

SEQ ID NO: 868976 - RNA, 19 nt, Artificial Sequence
  Description of Artificial Sequence: Synthetic oligonucleotide
  Sense strand starting at position 3828 of SEQ ID NO: 588492
gguuguuacauuuguaauu

SEQ ID NO: 868977 - RNA, 19 nt, Artificial Sequence
  Description of Artificial Sequence: Synthetic oligonucleotide
  Antisense strand to SEQ ID NO: 868976
aauuacaaauguaacaacc

SEQ ID NO: 868978 - RNA, 19 nt, Artificial Sequence
  Description of Artificial Sequence: Synthetic oligonucleotide
  Sense strand starting at position 141 of SEQ ID NO: 588493
gaugaaaggcuacaugcau

SEQ ID NO: 868979 - RNA, 19 nt, Artificial Sequence
  Description of Artificial Sequence: Synthetic oligonucleotide
  Antisense strand to SEQ ID NO: 868978
augcauguagccuuucauc

SEQ ID NO: 868980 - RNA, 19 nt, Artificial Sequence
  Description of Artificial Sequence: Synthetic oligonucleotide
  Sense strand starting at position 235 of SEQ ID NO: 588493
cuauuaucaugagugagau

SEQ ID NO: 868981 - RNA, 19 nt, Artificial Sequence
  Description of Artificial Sequence: Synthetic oligonucleotide
  Antisense strand to SEQ ID NO: 868980
aucucacucaugauaauag

SEQ ID NO: 868982 - RNA, 19 nt, Artificial Sequence
  Description of Artificial Sequence: Synthetic oligonucleotide
  Sense strand starting at position 236 of SEQ ID NO: 588493
uauuaucaugagugagauu

SEQ ID NO: 868983 - RNA, 19 nt, Artificial Sequence
  Description of Artificial Sequence: Synthetic oligonucleotide
  Antisense strand to SEQ ID NO: 868982
aaucucacucaugauaaua

SEQ ID NO: 868984 - RNA, 19 nt, Artificial Sequence
  Description of Artificial Sequence: Synthetic oligonucleotide
  Sense strand starting at position 438 of SEQ ID NO: 588493
aauggaguucuauguuaag

SEQ ID NO: 868985 - RNA, 19 nt, Artificial Sequence
  Description of Artificial Sequence: Synthetic oligonucleotide
  Antisense strand to SEQ ID NO: 868984
cuuaacauagaacuccauu

SEQ ID NO: 868986 - RNA, 19 nt, Artificial Sequence
  Description of Artificial Sequence: Synthetic oligonucleotide
  Sense strand starting at position 624 of SEQ ID NO: 588493
ggucaauaugcacaaucuu

SEQ ID NO: 868987 - RNA, 19 nt, Artificial Sequence
  Description of Artificial Sequence: Synthetic oligonucleotide
  Antisense strand to SEQ ID NO: 868986
aagauugugcauauugacc

SEQ ID NO: 868988 - RNA, 19 nt, Artificial Sequence
  Description of Artificial Sequence: Synthetic oligonucleotide
  Sense strand starting at position 684 of SEQ ID NO: 588493
gugauuguacuauaaauug

SEQ ID NO: 868989 - RNA, 19 nt, Artificial Sequence
  Description of Artificial Sequence: Synthetic oligonucleotide
  Antisense strand to SEQ ID NO: 868988
caauuuauaguacaaucac

SEQ ID NO: 868990 - RNA, 19 nt, Artificial Sequence
  Description of Artificial Sequence: Synthetic oligonucleotide
  Sense strand starting at position 766 of SEQ ID NO: 588493
uucuaaacucuguaguaag

SEQ ID NO: 868991 - RNA, 19 nt, Artificial Sequence
  Description of Artificial Sequence: Synthetic oligonucleotide
  Antisense strand to SEQ ID NO: 868990
cuuacuacagaguuuagaa

SEQ ID NO: 868992 - RNA, 19 nt, Artificial Sequence
  Description of Artificial Sequence: Synthetic oligonucleotide
  Sense strand starting at position 922 of SEQ ID NO: 588493
aaucauggauccuucggaa

SEQ ID NO: 868993 - RNA, 19 nt, Artificial Sequence
  Description of Artificial Sequence: Synthetic oligonucleotide
  Antisense strand to SEQ ID NO: 868992
uuccgaaggauccaugauu

SEQ ID NO: 868994 - RNA, 19 nt, Artificial Sequence
  Description of Artificial Sequence: Synthetic oligonucleotide
  Sense strand starting at position 955 of SEQ ID NO: 588493
guaaucuaagguuaucacu

SEQ ID NO: 868995 - RNA, 19 nt, Artificial Sequence
  Description of Artificial Sequence: Synthetic oligonucleotide
  Antisense strand to SEQ ID NO: 868994
agugauaaccuuagauuac

SEQ ID NO: 868996 - RNA, 19 nt, Artificial Sequence
  Description of Artificial Sequence: Synthetic oligonucleotide
  Sense strand starting at position 1035 of SEQ ID NO: 588493
uguugaugaaguugaauga

SEQ ID NO: 868997 - RNA, 19 nt, Artificial Sequence
  Description of Artificial Sequence: Synthetic oligonucleotide
  Antisense strand to SEQ ID NO: 868996
ucauucaacuucaucaaca

SEQ ID NO: 868998 - RNA, 19 nt, Artificial Sequence
  Description of Artificial Sequence: Synthetic oligonucleotide
  Sense strand starting at position 1051 of SEQ ID NO: 588493
ugaggaauuucuccgugug

SEQ ID NO: 868999 - RNA, 19 nt, Artificial Sequence
  Description of Artificial Sequence: Synthetic oligonucleotide
  Antisense strand to SEQ ID NO: 868998
cacacggagaaauuccuca

SEQ ID NO: 869000 - RNA, 19 nt, Artificial Sequence
  Description of Artificial Sequence: Synthetic oligonucleotide
  Sense strand starting at position 1053 of SEQ ID NO: 588493
aggaauuucuccguguggu

SEQ ID NO: 869001 - RNA, 19 nt, Artificial Sequence
  Description of Artificial Sequence: Synthetic oligonucleotide
  Antisense strand to SEQ ID NO: 869000
accacacggagaaauuccu

SEQ ID NO: 869002 - RNA, 19 nt, Artificial Sequence
  Description of Artificial Sequence: Synthetic oligonucleotide
  Sense strand starting at position 1126 of SEQ ID NO: 588493
gaagcaucucauggagaau

SEQ ID NO: 869003 - RNA, 19 nt, Artificial Sequence
  Description of Artificial Sequence: Synthetic oligonucleotide
  Antisense strand to SEQ ID NO: 869002
auucuccaugagaugcuuc

SEQ ID NO: 869004 - RNA, 19 nt, Artificial Sequence
  Description of Artificial Sequence: Synthetic oligonucleotide
  Sense strand starting at position 1283 of SEQ ID NO: 588493
uugucuuugcuggaagaua

SEQ ID NO: 869005 - RNA, 19 nt, Artificial Sequence
  Description of Artificial Sequence: Synthetic oligonucleotide
  Antisense strand to SEQ ID NO: 869004
uaucuuccagcaaagacaa

SEQ ID NO: 869006 - RNA, 19 nt, Artificial Sequence
  Description of Artificial Sequence: Synthetic oligonucleotide
  Sense strand starting at position 1370 of SEQ ID NO: 588493
cuugauaaucauggugaag

SEQ ID NO: 869007 - RNA, 19 nt, Artificial Sequence
  Description of Artificial Sequence: Synthetic oligonucleotide
  Antisense strand to SEQ ID NO: 869006
cuucaccaugauuaucaag

SEQ ID NO: 869008 - RNA, 19 nt, Artificial Sequence
  Description of Artificial Sequence: Synthetic oligonucleotide
  Sense strand starting at position 1376 of SEQ ID NO: 588493
aaucauggugaaggucaaa

SEQ ID NO: 869009 - RNA, 19 nt, Artificial Sequence
  Description of Artificial Sequence: Synthetic oligonucleotide
  Antisense strand to SEQ ID NO: 869008
uuugaccuucaccaugauu

SEQ ID NO: 869010 - RNA, 19 nt, Artificial Sequence
  Description of Artificial Sequence: Synthetic oligonucleotide
  Sense strand starting at position 1650 of SEQ ID NO: 588493
gcaauuacagacuagucau

SEQ ID NO: 869011 - RNA, 19 nt, Artificial Sequence
  Description of Artificial Sequence: Synthetic oligonucleotide
  Antisense strand to SEQ ID NO: 869010
augacuagucuguaauugc

SEQ ID NO: 869012 - RNA, 19 nt, Artificial Sequence
  Description of Artificial Sequence: Synthetic oligonucleotide
  Sense strand starting at position 1910 of SEQ ID NO: 588493
ucacaaaugcuugagcaaa

SEQ ID NO: 869013 - RNA, 19 nt, Artificial Sequence
  Description of Artificial Sequence: Synthetic oligonucleotide
  Antisense strand to SEQ ID NO: 869012
uuugcucaagcauuuguga

SEQ ID NO: 869014 - RNA, 19 nt, Artificial Sequence
  Description of Artificial Sequence: Synthetic oligonucleotide
  Sense strand starting at position 1912 of SEQ ID NO: 588493
acaaaugcuugagcaaaua

SEQ ID NO: 869015 - RNA, 19 nt, Artificial Sequence
  Description of Artificial Sequence: Synthetic oligonucleotide
  Antisense strand to SEQ ID NO: 869014
uauuugcucaagcauuugu

SEQ ID NO: 869016 - RNA, 19 nt, Artificial Sequence
  Description of Artificial Sequence: Synthetic oligonucleotide
  Sense strand starting at position 1996 of SEQ ID NO: 588493
cuaagauucuagccuauag

SEQ ID NO: 869017 - RNA, 19 nt, Artificial Sequence
  Description of Artificial Sequence: Synthetic oligonucleotide
  Antisense strand to SEQ ID NO: 869016
cuauaggcuagaaucuuag

SEQ ID NO: 869018 - RNA, 19 nt, Artificial Sequence
  Description of Artificial Sequence: Synthetic oligonucleotide
  Sense strand starting at position 2122 of SEQ ID NO: 588493
uugguacagccauauaauu

SEQ ID NO: 869019 - RNA, 19 nt, Artificial Sequence
  Description of Artificial Sequence: Synthetic oligonucleotide
  Antisense strand to SEQ ID NO: 869018
aauuauauggcuguaccaa

SEQ ID NO: 869020 - RNA, 19 nt, Artificial Sequence
  Description of Artificial Sequence: Synthetic oligonucleotide
  Sense strand starting at position 2208 of SEQ ID NO: 588493
guauauucccuagaauagu

SEQ ID NO: 869021 - RNA, 19 nt, Artificial Sequence
  Description of Artificial Sequence: Synthetic oligonucleotide
  Antisense strand to SEQ ID NO: 869020
acuauucuagggaauauac

SEQ ID NO: 869022 - RNA, 19 nt, Artificial Sequence
  Description of Artificial Sequence: Synthetic oligonucleotide
  Sense strand starting at position 2361 of SEQ ID NO: 588493
cuaaauauagugugaagga

SEQ ID NO: 869023 - RNA, 19 nt, Artificial Sequence
  Description of Artificial Sequence: Synthetic oligonucleotide
  Antisense strand to SEQ ID NO: 869022
uccuucacacuauauuuag

SEQ ID NO: 869024 - RNA, 19 nt, Artificial Sequence
  Description of Artificial Sequence: Synthetic oligonucleotide
  Sense strand starting at position 2633 of SEQ ID NO: 588493
auacuugacuauguacuua

SEQ ID NO: 869025 - RNA, 19 nt, Artificial Sequence
  Description of Artificial Sequence: Synthetic oligonucleotide
  Antisense strand to SEQ ID NO: 869024
uaaguacauagucaaguau

SEQ ID NO: 869026 - RNA, 19 nt, Artificial Sequence
  Description of Artificial Sequence: Synthetic oligonucleotide
  Sense strand starting at position 2695 of SEQ ID NO: 588493
cugauuucuuugcugucua

SEQ ID NO: 869027 - RNA, 19 nt, Artificial Sequence
  Description of Artificial Sequence: Synthetic oligonucleotide
  Antisense strand to SEQ ID NO: 869026
uagacagcaaagaaaucag

SEQ ID NO: 869028 - RNA, 19 nt, Artificial Sequence
  Description of Artificial Sequence: Synthetic oligonucleotide
  Sense strand starting at position 2741 of SEQ ID NO: 588493
auguguugacuuggaauaa

SEQ ID NO: 869029 - RNA, 19 nt, Artificial Sequence
  Description of Artificial Sequence: Synthetic oligonucleotide
  Antisense strand to SEQ ID NO: 869028
uuauuccaagucaacacau

SEQ ID NO: 869030 - RNA, 19 nt, Artificial Sequence
  Description of Artificial Sequence: Synthetic oligonucleotide
  Sense strand starting at position 2783 of SEQ ID NO: 588493
auacaagauguugagucuu

SEQ ID NO: 869031 - RNA, 19 nt, Artificial Sequence
  Description of Artificial Sequence: Synthetic oligonucleotide
  Antisense strand to SEQ ID NO: 869030
aagacucaacaucuuguau

SEQ ID NO: 869032 - RNA, 19 nt, Artificial Sequence
  Description of Artificial Sequence: Synthetic oligonucleotide
  Sense strand starting at position 2785 of SEQ ID NO: 588493
acaagauguugagucuuau

SEQ ID NO: 869033 - RNA, 19 nt, Artificial Sequence
  Description of Artificial Sequence: Synthetic oligonucleotide
  Antisense strand to SEQ ID NO: 869032
auaagacucaacaucuugu

SEQ ID NO: 869034 - RNA, 19 nt, Artificial Sequence
  Description of Artificial Sequence: Synthetic oligonucleotide
  Sense strand starting at position 2828 of SEQ ID NO: 588493
cugggugaaucccuaaaug

SEQ ID NO: 869035 - RNA, 19 nt, Artificial Sequence
  Description of Artificial Sequence: Synthetic oligonucleotide
  Antisense strand to SEQ ID NO: 869034
cauuuagggauucacccag

SEQ ID NO: 869036 - RNA, 19 nt, Artificial Sequence
  Description of Artificial Sequence: Synthetic oligonucleotide
  Sense strand starting at position 2853 of SEQ ID NO: 588493
acaggcacucuguaaacau

SEQ ID NO: 869037 - RNA, 19 nt, Artificial Sequence
  Description of Artificial Sequence: Synthetic oligonucleotide
  Antisense strand to SEQ ID NO: 869036
auguuuacagagugccugu

SEQ ID NO: 869038 - RNA, 19 nt, Artificial Sequence
  Description of Artificial Sequence: Synthetic oligonucleotide
  Sense strand starting at position 3092 of SEQ ID NO: 588493
ugcucaaucuaucuggaaa

SEQ ID NO: 869039 - RNA, 19 nt, Artificial Sequence
  Description of Artificial Sequence: Synthetic oligonucleotide
  Antisense strand to SEQ ID NO: 869038
uuuccagauagauugagca

SEQ ID NO: 869040 - RNA, 19 nt, Artificial Sequence
  Description of Artificial Sequence: Synthetic oligonucleotide
  Sense strand starting at position 3318 of SEQ ID NO: 588493
gccuuucuguuacugauuu

SEQ ID NO: 869041 - RNA, 19 nt, Artificial Sequence
  Description of Artificial Sequence: Synthetic oligonucleotide
  Antisense strand to SEQ ID NO: 869040
aaaucaguaacagaaaggc

SEQ ID NO: 869042 - RNA, 19 nt, Artificial Sequence
  Description of Artificial Sequence: Synthetic oligonucleotide
  Sense strand starting at position 3346 of SEQ ID NO: 588493
aucuguugugguuaaagaa

SEQ ID NO: 869043 - RNA, 19 nt, Artificial Sequence
  Description of Artificial Sequence: Synthetic oligonucleotide
  Antisense strand to SEQ ID NO: 869042
uucuuuaaccacaacagau

SEQ ID NO: 869044 - RNA, 19 nt, Artificial Sequence
  Description of Artificial Sequence: Synthetic oligonucleotide
  Sense strand starting at position 3355 of SEQ ID NO: 588493
gguuaaagaauguaguuua

SEQ ID NO: 869045 - RNA, 19 nt, Artificial Sequence
  Description of Artificial Sequence: Synthetic oligonucleotide
  Antisense strand to SEQ ID NO: 869044
uaaacuacauucuuuaacc

SEQ ID NO: 869046 - RNA, 19 nt, Artificial Sequence
  Description of Artificial Sequence: Synthetic oligonucleotide
  Sense strand starting at position 3398 of SEQ ID NO: 588493
cuuagaauaugguuuaucu

SEQ ID NO: 869047 - RNA, 19 nt, Artificial Sequence
  Description of Artificial Sequence: Synthetic oligonucleotide
  Antisense strand to SEQ ID NO: 869046
agauaaaccauauucuaag

SEQ ID NO: 869048 - RNA, 19 nt, Artificial Sequence
  Description of Artificial Sequence: Synthetic oligonucleotide
  Sense strand starting at position 3492 of SEQ ID NO: 588493
agguuaagcugauugaaag

SEQ ID NO: 869049 - RNA, 19 nt, Artificial Sequence
  Description of Artificial Sequence: Synthetic oligonucleotide
  Antisense strand to SEQ ID NO: 869048
cuuucaaucagcuuaaccu

SEQ ID NO: 869050 - RNA, 19 nt, Artificial Sequence
  Description of Artificial Sequence: Synthetic oligonucleotide
  Sense strand starting at position 3502 of SEQ ID NO: 588493
gauugaaaguguuugaaau

SEQ ID NO: 869051 - RNA, 19 nt, Artificial Sequence
  Description of Artificial Sequence: Synthetic oligonucleotide
  Antisense strand to SEQ ID NO: 869050
auuucaaacacuuucaauc

SEQ ID NO: 869052 - RNA, 19 nt, Artificial Sequence
  Description of Artificial Sequence: Synthetic oligonucleotide
  Sense strand starting at position 3539 of SEQ ID NO: 588493
uggucuauuuguucuauca

SEQ ID NO: 869053 - RNA, 19 nt, Artificial Sequence
  Description of Artificial Sequence: Synthetic oligonucleotide
  Antisense strand to SEQ ID NO: 869052
ugauagaacaaauagacca

SEQ ID NO: 869054 - RNA, 19 nt, Artificial Sequence
  Description of Artificial Sequence: Synthetic oligonucleotide
  Sense strand starting at position 3574 of SEQ ID NO: 588493
agcugaaaucccuaguaua

SEQ ID NO: 869055 - RNA, 19 nt, Artificial Sequence
  Description of Artificial Sequence: Synthetic oligonucleotide
  Antisense strand to SEQ ID NO: 869054
uauacuagggauuucagcu

SEQ ID NO: 869056 - RNA, 19 nt, Artificial Sequence
  Description of Artificial Sequence: Synthetic oligonucleotide
  Sense strand starting at position 3935 of SEQ ID NO: 588493
gaguguuuaggucauuaaa

SEQ ID NO: 869057 - RNA, 19 nt, Artificial Sequence
  Description of Artificial Sequence: Synthetic oligonucleotide
  Antisense strand to SEQ ID NO: 869056
uuuaaugaccuaaacacuc

SEQ ID NO: 869058 - RNA, 19 nt, Artificial Sequence
  Description of Artificial Sequence: Synthetic oligonucleotide
  Sense strand starting at position 355 of SEQ ID NO: 588494
cagcuagguggugaauuaa

SEQ ID NO: 869059 - RNA, 19 nt, Artificial Sequence
  Description of Artificial Sequence: Synthetic oligonucleotide
  Antisense strand to SEQ ID NO: 869058
uuaauucaccaccuagcug

SEQ ID NO: 869060 - RNA, 19 nt, Artificial Sequence
  Description of Artificial Sequence: Synthetic oligonucleotide
  Sense strand starting at position 400 of SEQ ID NO: 588494
guaaauaaucuagguaguc

SEQ ID NO: 869061 - RNA, 19 nt, Artificial Sequence
  Description of Artificial Sequence: Synthetic oligonucleotide
  Antisense strand to SEQ ID NO: 869060
gacuaccuagauuauuuac

SEQ ID NO: 869062 - RNA, 19 nt, Artificial Sequence
  Description of Artificial Sequence: Synthetic oligonucleotide
  Sense strand starting at position 466 of SEQ ID NO: 588494
guauuauuggaauagcuag

SEQ ID NO: 869063 - RNA, 19 nt, Artificial Sequence
  Description of Artificial Sequence: Synthetic oligonucleotide
  Antisense strand to SEQ ID NO: 869062
cuagcuauuccaauaauac

SEQ ID NO: 869064 - RNA, 19 nt, Artificial Sequence
  Description of Artificial Sequence: Synthetic oligonucleotide
  Sense strand starting at position 504 of SEQ ID NO: 588494
guagucuucuaacuaggaa

SEQ ID NO: 869065 - RNA, 19 nt, Artificial Sequence
  Description of Artificial Sequence: Synthetic oligonucleotide
  Antisense strand to SEQ ID NO: 869064
uuccuaguuagaagacuac

SEQ ID NO: 869066 - RNA, 19 nt, Artificial Sequence
  Description of Artificial Sequence: Synthetic oligonucleotide
  Sense strand starting at position 544 of SEQ ID NO: 588494
auauuaugacucuggacau

SEQ ID NO: 869067 - RNA, 19 nt, Artificial Sequence
  Description of Artificial Sequence: Synthetic oligonucleotide
  Antisense strand to SEQ ID NO: 869066
auguccagagucauaauau

SEQ ID NO: 869068 - RNA, 19 nt, Artificial Sequence
  Description of Artificial Sequence: Synthetic oligonucleotide
  Sense strand starting at position 631 of SEQ ID NO: 588494
ugccuuuagauguaggaau

SEQ ID NO: 869069 - RNA, 19 nt, Artificial Sequence
  Description of Artificial Sequence: Synthetic oligonucleotide
  Antisense strand to SEQ ID NO: 869068
auuccuacaucuaaaggca

SEQ ID NO: 869070 - RNA, 19 nt, Artificial Sequence
  Description of Artificial Sequence: Synthetic oligonucleotide
  Sense strand starting at position 633 of SEQ ID NO: 588494
ccuuuagauguaggaauca

SEQ ID NO: 869071 - RNA, 19 nt, Artificial Sequence
  Description of Artificial Sequence: Synthetic oligonucleotide
  Antisense strand to SEQ ID NO: 869070
ugauuccuacaucuaaagg

SEQ ID NO: 869072 - RNA, 19 nt, Artificial Sequence
  Description of Artificial Sequence: Synthetic oligonucleotide
  Sense strand starting at position 665 of SEQ ID NO: 588494
aggaaugaagagugugcua

SEQ ID NO: 869073 - RNA, 19 nt, Artificial Sequence
  Description of Artificial Sequence: Synthetic oligonucleotide
  Antisense strand to SEQ ID NO: 869072
uagcacacucuucauuccu

SEQ ID NO: 869074 - RNA, 19 nt, Artificial Sequence
  Description of Artificial Sequence: Synthetic oligonucleotide
  Sense strand starting at position 667 of SEQ ID NO: 588494
gaaugaagagugugcuaca

SEQ ID NO: 869075 - RNA, 19 nt, Artificial Sequence
  Description of Artificial Sequence: Synthetic oligonucleotide
  Antisense strand to SEQ ID NO: 869074
uguagcacacucuucauuc

SEQ ID NO: 869076 - RNA, 19 nt, Artificial Sequence
  Description of Artificial Sequence: Synthetic oligonucleotide
  Sense strand starting at position 668 of SEQ ID NO: 588494
aaugaagagugugcuacau

SEQ ID NO: 869077 - RNA, 19 nt, Artificial Sequence
  Description of Artificial Sequence: Synthetic oligonucleotide
  Antisense strand to SEQ ID NO: 869076
auguagcacacucuucauu

SEQ ID NO: 869078 - RNA, 19 nt, Artificial Sequence
  Description of Artificial Sequence: Synthetic oligonucleotide
  Sense strand starting at position 672 of SEQ ID NO: 588494
aagagugugcuacauuaga

SEQ ID NO: 869079 - RNA, 19 nt, Artificial Sequence
  Description of Artificial Sequence: Synthetic oligonucleotide
  Antisense strand to SEQ ID NO: 869078
ucuaauguagcacacucuu

SEQ ID NO: 869080 - RNA, 19 nt, Artificial Sequence
  Description of Artificial Sequence: Synthetic oligonucleotide
  Sense strand starting at position 965 of SEQ ID NO: 588494
acaguuaagucauugaaau

SEQ ID NO: 869081 - RNA, 19 nt, Artificial Sequence
  Description of Artificial Sequence: Synthetic oligonucleotide
  Antisense strand to SEQ ID NO: 869080
auuucaaugacuuaacugu

SEQ ID NO: 869082 - RNA, 19 nt, Artificial Sequence
  Description of Artificial Sequence: Synthetic oligonucleotide
  Sense strand starting at position 966 of SEQ ID NO: 588494
caguuaagucauugaaaug

SEQ ID NO: 869083 - RNA, 19 nt, Artificial Sequence
  Description of Artificial Sequence: Synthetic oligonucleotide
  Antisense strand to SEQ ID NO: 869082
cauuucaaugacuuaacug

SEQ ID NO: 869084 - RNA, 19 nt, Artificial Sequence
  Description of Artificial Sequence: Synthetic oligonucleotide
  Sense strand starting at position 1036 of SEQ ID NO: 588494
gaaguccacaggugguaua

SEQ ID NO: 869085 - RNA, 19 nt, Artificial Sequence
  Description of Artificial Sequence: Synthetic oligonucleotide
  Antisense strand to SEQ ID NO: 869084
uauaccaccuguggacuuc

SEQ ID NO: 869086 - RNA, 19 nt, Artificial Sequence
  Description of Artificial Sequence: Synthetic oligonucleotide
  Sense strand starting at position 1117 of SEQ ID NO: 588494
agggaaucuuauuccuuua

SEQ ID NO: 869087 - RNA, 19 nt, Artificial Sequence
  Description of Artificial Sequence: Synthetic oligonucleotide
  Antisense strand to SEQ ID NO: 869086
uaaaggaauaagauucccu

SEQ ID NO: 869088 - RNA, 19 nt, Artificial Sequence
  Description of Artificial Sequence: Synthetic oligonucleotide
  Sense strand starting at position 1197 of SEQ ID NO: 588494
ucuccuuagagaggugagu

SEQ ID NO: 869089 - RNA, 19 nt, Artificial Sequence
  Description of Artificial Sequence: Synthetic oligonucleotide
  Antisense strand to SEQ ID NO: 869088
acucaccucucuaaggaga

SEQ ID NO: 869090 - RNA, 19 nt, Artificial Sequence
  Description of Artificial Sequence: Synthetic oligonucleotide
  Sense strand starting at position 1308 of SEQ ID NO: 588494
gaaagagauuucggaggga

SEQ ID NO: 869091 - RNA, 19 nt, Artificial Sequence
  Description of Artificial Sequence: Synthetic oligonucleotide
  Antisense strand to SEQ ID NO: 869090
ucccuccgaaaucucuuuc

SEQ ID NO: 869092 - RNA, 19 nt, Artificial Sequence
  Description of Artificial Sequence: Synthetic oligonucleotide
  Sense strand starting at position 1999 of SEQ ID NO: 588494
uccagaagauguguauaug

SEQ ID NO: 869093 - RNA, 19 nt, Artificial Sequence
  Description of Artificial Sequence: Synthetic oligonucleotide
  Antisense strand to SEQ ID NO: 869092
cauauacacaucuucugga

SEQ ID NO: 869094 - RNA, 19 nt, Artificial Sequence
  Description of Artificial Sequence: Synthetic oligonucleotide
  Sense strand starting at position 2182 of SEQ ID NO: 588494
cgacuuuggaagugauaac

SEQ ID NO: 869095 - RNA, 19 nt, Artificial Sequence
  Description of Artificial Sequence: Synthetic oligonucleotide
  Antisense strand to SEQ ID NO: 869094
guuaucacuuccaaagucg

SEQ ID NO: 869096 - RNA, 19 nt, Artificial Sequence
  Description of Artificial Sequence: Synthetic oligonucleotide
  Sense strand starting at position 2245 of SEQ ID NO: 588494
accuuaaaugccuggauga

SEQ ID NO: 869097 - RNA, 19 nt, Artificial Sequence
  Description of Artificial Sequence: Synthetic oligonucleotide
  Antisense strand to SEQ ID NO: 869096
ucauccaggcauuuaaggu

SEQ ID NO: 869098 - RNA, 19 nt, Artificial Sequence
  Description of Artificial Sequence: Synthetic oligonucleotide
  Sense strand starting at position 2246 of SEQ ID NO: 588494
ccuuaaaugccuggaugau

SEQ ID NO: 869099 - RNA, 19 nt, Artificial Sequence
  Description of Artificial Sequence: Synthetic oligonucleotide
  Antisense strand to SEQ ID NO: 869098
aucauccaggcauuuaagg

SEQ ID NO: 869100 - RNA, 19 nt, Artificial Sequence
  Description of Artificial Sequence: Synthetic oligonucleotide
  Sense strand starting at position 2247 of SEQ ID NO: 588494
cuuaaaugccuggaugauc

SEQ ID NO: 869101 - RNA, 19 nt, Artificial Sequence
  Description of Artificial Sequence: Synthetic oligonucleotide
  Antisense strand to SEQ ID NO: 869100
gaucauccaggcauuuaag

SEQ ID NO: 869102 - RNA, 19 nt, Artificial Sequence
  Description of Artificial Sequence: Synthetic oligonucleotide
  Sense strand starting at position 2294 of SEQ ID NO: 588494
aagacugaugcaggguauu

SEQ ID NO: 869103 - RNA, 19 nt, Artificial Sequence
  Description of Artificial Sequence: Synthetic oligonucleotide
  Antisense strand to SEQ ID NO: 869102
aauacccugcaucagucuu

SEQ ID NO: 869104 - RNA, 19 nt, Artificial Sequence
  Description of Artificial Sequence: Synthetic oligonucleotide
  Sense strand starting at position 2466 of SEQ ID NO: 588494
ugaccaaaugacugugauu

SEQ ID NO: 869105 - RNA, 19 nt, Artificial Sequence
  Description of Artificial Sequence: Synthetic oligonucleotide
  Antisense strand to SEQ ID NO: 869104
aaucacagucauuugguca

SEQ ID NO: 869106 - RNA, 19 nt, Artificial Sequence
  Description of Artificial Sequence: Synthetic oligonucleotide
  Sense strand starting at position 2468 of SEQ ID NO: 588494
accaaaugacugugauuau

SEQ ID NO: 869107 - RNA, 19 nt, Artificial Sequence
  Description of Artificial Sequence: Synthetic oligonucleotide
  Antisense strand to SEQ ID NO: 869106
auaaucacagucauuuggu

SEQ ID NO: 869108 - RNA, 19 nt, Artificial Sequence
  Description of Artificial Sequence: Synthetic oligonucleotide
  Sense strand starting at position 2971 of SEQ ID NO: 588494
ggagguaugugaguaggaa

SEQ ID NO: 869109 - RNA, 19 nt, Artificial Sequence
  Description of Artificial Sequence: Synthetic oligonucleotide
  Antisense strand to SEQ ID NO: 869108
uuccuacucacauaccucc

SEQ ID NO: 869110 - RNA, 19 nt, Artificial Sequence
  Description of Artificial Sequence: Synthetic oligonucleotide
  Sense strand starting at position 3036 of SEQ ID NO: 588494
ugguaaugauggcuaucua

SEQ ID NO: 869111 - RNA, 19 nt, Artificial Sequence
  Description of Artificial Sequence: Synthetic oligonucleotide
  Antisense strand to SEQ ID NO: 869110
uagauagccaucauuacca

SEQ ID NO: 869112 - RNA, 19 nt, Artificial Sequence
  Description of Artificial Sequence: Synthetic oligonucleotide
  Sense strand starting at position 3037 of SEQ ID NO: 588494
gguaaugauggcuaucuau

SEQ ID NO: 869113 - RNA, 19 nt, Artificial Sequence
  Description of Artificial Sequence: Synthetic oligonucleotide
  Antisense strand to SEQ ID NO: 869112
auagauagccaucauuacc

SEQ ID NO: 869114 - RNA, 19 nt, Artificial Sequence
  Description of Artificial Sequence: Synthetic oligonucleotide
  Sense strand starting at position 3095 of SEQ ID NO: 588494
ucugauuaugguuaaagca

SEQ ID NO: 869115 - RNA, 19 nt, Artificial Sequence
  Description of Artificial Sequence: Synthetic oligonucleotide
  Antisense strand to SEQ ID NO: 869114
ugcuuuaaccauaaucaga

SEQ ID NO: 869116 - RNA, 19 nt, Artificial Sequence
  Description of Artificial Sequence: Synthetic oligonucleotide
  Sense strand starting at position 3209 of SEQ ID NO: 588494
gcaauuaagucauuguaaa

SEQ ID NO: 869117 - RNA, 19 nt, Artificial Sequence
  Description of Artificial Sequence: Synthetic oligonucleotide
  Antisense strand to SEQ ID NO: 869116
uuuacaaugacuuaauugc

SEQ ID NO: 869118 - RNA, 19 nt, Artificial Sequence
  Description of Artificial Sequence: Synthetic oligonucleotide
  Sense strand starting at position 3254 of SEQ ID NO: 588494
cauggcagacuuugauuga

SEQ ID NO: 869119 - RNA, 19 nt, Artificial Sequence
  Description of Artificial Sequence: Synthetic oligonucleotide
  Antisense strand to SEQ ID NO: 869118
ucaaucaaagucugccaug

SEQ ID NO: 869120 - RNA, 19 nt, Artificial Sequence
  Description of Artificial Sequence: Synthetic oligonucleotide
  Sense strand starting at position 3301 of SEQ ID NO: 588494
aucaguugacugcaccaaa

SEQ ID NO: 869121 - RNA, 19 nt, Artificial Sequence
  Description of Artificial Sequence: Synthetic oligonucleotide
  Antisense strand to SEQ ID NO: 869120
uuuggugcagucaacugau

SEQ ID NO: 869122 - RNA, 19 nt, Artificial Sequence
  Description of Artificial Sequence: Synthetic oligonucleotide
  Sense strand starting at position 3363 of SEQ ID NO: 588494
aggaaagguuucuuacgga

SEQ ID NO: 869123 - RNA, 19 nt, Artificial Sequence
  Description of Artificial Sequence: Synthetic oligonucleotide
  Antisense strand to SEQ ID NO: 869122
uccguaagaaaccuuuccu

SEQ ID NO: 869124 - RNA, 19 nt, Artificial Sequence
  Description of Artificial Sequence: Synthetic oligonucleotide
  Sense strand starting at position 3586 of SEQ ID NO: 588494
agcgauugauccucuagga

SEQ ID NO: 869125 - RNA, 19 nt, Artificial Sequence
  Description of Artificial Sequence: Synthetic oligonucleotide
  Antisense strand to SEQ ID NO: 869124
uccuagaggaucaaucgcu

SEQ ID NO: 869126 - RNA, 19 nt, Artificial Sequence
  Description of Artificial Sequence: Synthetic oligonucleotide
  Sense strand starting at position 3634 of SEQ ID NO: 588494
cuuaaagacuuagcuguaa

SEQ ID NO: 869127 - RNA, 19 nt, Artificial Sequence
  Description of Artificial Sequence: Synthetic oligonucleotide
  Antisense strand to SEQ ID NO: 869126
uuacagcuaagucuuuaag

SEQ ID NO: 869128 - RNA, 19 nt, Artificial Sequence
  Description of Artificial Sequence: Synthetic oligonucleotide
  Sense strand starting at position 3713 of SEQ ID NO: 588494
uaaguaagccaucaguaga

SEQ ID NO: 869129 - RNA, 19 nt, Artificial Sequence
  Description of Artificial Sequence: Synthetic oligonucleotide
  Antisense strand to SEQ ID NO: 869128
ucuacugauggcuuacuua

SEQ ID NO: 869130 - RNA, 19 nt, Artificial Sequence
  Description of Artificial Sequence: Synthetic oligonucleotide
  Sense strand starting at position 3753 of SEQ ID NO: 588494
aaauuaugugugggaauau

SEQ ID NO: 869131 - RNA, 19 nt, Artificial Sequence
  Description of Artificial Sequence: Synthetic oligonucleotide
  Antisense strand to SEQ ID NO: 869130
auauucccacacauaauuu

SEQ ID NO: 869132 - RNA, 19 nt, Artificial Sequence
  Description of Artificial Sequence: Synthetic oligonucleotide
  Sense strand starting at position 3786 of SEQ ID NO: 588494
auagauacacuuuguaguu

SEQ ID NO: 869133 - RNA, 19 nt, Artificial Sequence
  Description of Artificial Sequence: Synthetic oligonucleotide
  Antisense strand to SEQ ID NO: 869132
aacuacaaaguguaucuau

SEQ ID NO: 869134 - RNA, 19 nt, Artificial Sequence
  Description of Artificial Sequence: Synthetic oligonucleotide
  Sense strand starting at position 3946 of SEQ ID NO: 588494
ggaagaauaaugggugguu

SEQ ID NO: 869135 - RNA, 19 nt, Artificial Sequence
  Description of Artificial Sequence: Synthetic oligonucleotide
  Antisense strand to SEQ ID NO: 869134
aaccacccauuauucuucc

SEQ ID NO: 869136 - RNA, 19 nt, Artificial Sequence
  Description of Artificial Sequence: Synthetic oligonucleotide
  Sense strand starting at position 3947 of SEQ ID NO: 588494
gaagaauaaugggugguuu

SEQ ID NO: 869137 - RNA, 19 nt, Artificial Sequence
  Description of Artificial Sequence: Synthetic oligonucleotide
  Antisense strand to SEQ ID NO: 869136
aaaccacccauuauucuuc

SEQ ID NO: 869138 - RNA, 19 nt, Artificial Sequence
  Description of Artificial Sequence: Synthetic oligonucleotide
  Sense strand starting at position 69 of SEQ ID NO: 588495
aagcuucuaguaugagaac

SEQ ID NO: 869139 - RNA, 19 nt, Artificial Sequence
  Description of Artificial Sequence: Synthetic oligonucleotide
  Antisense strand to SEQ ID NO: 869138
guucucauacuagaagcuu

SEQ ID NO: 869140 - RNA, 19 nt, Artificial Sequence
  Description of Artificial Sequence: Synthetic oligonucleotide
  Sense strand starting at position 127 of SEQ ID NO: 588495
gcgaaauugguacaucuuu

SEQ ID NO: 869141 - RNA, 19 nt, Artificial Sequence
  Description of Artificial Sequence: Synthetic oligonucleotide
  Antisense strand to SEQ ID NO: 869140
aaagauguaccaauuucgc

SEQ ID NO: 869142 - RNA, 19 nt, Artificial Sequence
  Description of Artificial Sequence: Synthetic oligonucleotide
  Sense strand starting at position 183 of SEQ ID NO: 588495
acggaaagaaacuguguuu

SEQ ID NO: 869143 - RNA, 19 nt, Artificial Sequence
  Description of Artificial Sequence: Synthetic oligonucleotide
  Antisense strand to SEQ ID NO: 869142
aaacacaguuucuuuccgu

SEQ ID NO: 869144 - RNA, 19 nt, Artificial Sequence
  Description of Artificial Sequence: Synthetic oligonucleotide
  Sense strand starting at position 266 of SEQ ID NO: 588495
auuuauugguuacaugaga

SEQ ID NO: 869145 - RNA, 19 nt, Artificial Sequence
  Description of Artificial Sequence: Synthetic oligonucleotide
  Antisense strand to SEQ ID NO: 869144
ucucauguaaccaauaaau

SEQ ID NO: 869146 - RNA, 19 nt, Artificial Sequence
  Description of Artificial Sequence: Synthetic oligonucleotide
  Sense strand starting at position 314 of SEQ ID NO: 588495
ccugcauugcuugacauca

SEQ ID NO: 869147 - RNA, 19 nt, Artificial Sequence
  Description of Artificial Sequence: Synthetic oligonucleotide
  Antisense strand to SEQ ID NO: 869146
ugaugucaagcaaugcagg

SEQ ID NO: 869148 - RNA, 19 nt, Artificial Sequence
  Description of Artificial Sequence: Synthetic oligonucleotide
  Sense strand starting at position 389 of SEQ ID NO: 588495
augaauagguaaguguaua

SEQ ID NO: 869149 - RNA, 19 nt, Artificial Sequence
  Description of Artificial Sequence: Synthetic oligonucleotide
  Antisense strand to SEQ ID NO: 869148
uauacacuuaccuauucau

SEQ ID NO: 869150 - RNA, 19 nt, Artificial Sequence
  Description of Artificial Sequence: Synthetic oligonucleotide
  Sense strand starting at position 390 of SEQ ID NO: 588495
ugaauagguaaguguauau

SEQ ID NO: 869151 - RNA, 19 nt, Artificial Sequence
  Description of Artificial Sequence: Synthetic oligonucleotide
  Antisense strand to SEQ ID NO: 869150
auauacacuuaccuauuca

SEQ ID NO: 869152 - RNA, 19 nt, Artificial Sequence
  Description of Artificial Sequence: Synthetic oligonucleotide
  Sense strand starting at position 410 of SEQ ID NO: 588495
accguccauuccuugauuu

SEQ ID NO: 869153 - RNA, 19 nt, Artificial Sequence
  Description of Artificial Sequence: Synthetic oligonucleotide
  Antisense strand to SEQ ID NO: 869152
aaaucaaggaauggacggu

SEQ ID NO: 869154 - RNA, 19 nt, Artificial Sequence
  Description of Artificial Sequence: Synthetic oligonucleotide
  Sense strand starting at position 739 of SEQ ID NO: 588495
ucagucaauucugugauua

SEQ ID NO: 869155 - RNA, 19 nt, Artificial Sequence
  Description of Artificial Sequence: Synthetic oligonucleotide
  Antisense strand to SEQ ID NO: 869154
uaaucacagaauugacuga

SEQ ID NO: 869156 - RNA, 19 nt, Artificial Sequence
  Description of Artificial Sequence: Synthetic oligonucleotide
  Sense strand starting at position 743 of SEQ ID NO: 588495
ucaauucugugauuaaagc

SEQ ID NO: 869157 - RNA, 19 nt, Artificial Sequence
  Description of Artificial Sequence: Synthetic oligonucleotide
  Antisense strand to SEQ ID NO: 869156
gcuuuaaucacagaauuga

SEQ ID NO: 869158 - RNA, 19 nt, Artificial Sequence
  Description of Artificial Sequence: Synthetic oligonucleotide
  Sense strand starting at position 750 of SEQ ID NO: 588495
ugugauuaaagccgaaaua

SEQ ID NO: 869159 - RNA, 19 nt, Artificial Sequence
  Description of Artificial Sequence: Synthetic oligonucleotide
  Antisense strand to SEQ ID NO: 869158
uauuucggcuuuaaucaca

SEQ ID NO: 869160 - RNA, 19 nt, Artificial Sequence
  Description of Artificial Sequence: Synthetic oligonucleotide
  Sense strand starting at position 751 of SEQ ID NO: 588495
gugauuaaagccgaaauaa

SEQ ID NO: 869161 - RNA, 19 nt, Artificial Sequence
  Description of Artificial Sequence: Synthetic oligonucleotide
  Antisense strand to SEQ ID NO: 869160
uuauuucggcuuuaaucac

SEQ ID NO: 869162 - RNA, 19 nt, Artificial Sequence
  Description of Artificial Sequence: Synthetic oligonucleotide
  Sense strand starting at position 972 of SEQ ID NO: 588495
cacggauucccuggaagua

SEQ ID NO: 869163 - RNA, 19 nt, Artificial Sequence
  Description of Artificial Sequence: Synthetic oligonucleotide
  Antisense strand to SEQ ID NO: 869162
uacuuccagggaauccgug

SEQ ID NO: 869164 - RNA, 19 nt, Artificial Sequence
  Description of Artificial Sequence: Synthetic oligonucleotide
  Sense strand starting at position 984 of SEQ ID NO: 588495
ggaaguaccuccucaaggu

SEQ ID NO: 869165 - RNA, 19 nt, Artificial Sequence
  Description of Artificial Sequence: Synthetic oligonucleotide
  Antisense strand to SEQ ID NO: 869164
accuugaggagguacuucc

SEQ ID NO: 869166 - RNA, 19 nt, Artificial Sequence
  Description of Artificial Sequence: Synthetic oligonucleotide
  Sense strand starting at position 1338 of SEQ ID NO: 588495
gguucugaggcagaucaca

SEQ ID NO: 869167 - RNA, 19 nt, Artificial Sequence
  Description of Artificial Sequence: Synthetic oligonucleotide
  Antisense strand to SEQ ID NO: 869166
ugugaucugccucagaacc

SEQ ID NO: 869168 - RNA, 19 nt, Artificial Sequence
  Description of Artificial Sequence: Synthetic oligonucleotide
  Sense strand starting at position 1448 of SEQ ID NO: 588495
cuuuacugagcugggauau

SEQ ID NO: 869169 - RNA, 19 nt, Artificial Sequence
  Description of Artificial Sequence: Synthetic oligonucleotide
  Antisense strand to SEQ ID NO: 869168
auaucccagcucaguaaag

SEQ ID NO: 869170 - RNA, 19 nt, Artificial Sequence
  Description of Artificial Sequence: Synthetic oligonucleotide
  Sense strand starting at position 1459 of SEQ ID NO: 588495
ugggauauggcuuaaccuu

SEQ ID NO: 869171 - RNA, 19 nt, Artificial Sequence
  Description of Artificial Sequence: Synthetic oligonucleotide
  Antisense strand to SEQ ID NO: 869170
aagguuaagccauauccca

SEQ ID NO: 869172 - RNA, 19 nt, Artificial Sequence
  Description of Artificial Sequence: Synthetic oligonucleotide
  Sense strand starting at position 1493 of SEQ ID NO: 588495
ugaagacauugcuuguaug

SEQ ID NO: 869173 - RNA, 19 nt, Artificial Sequence
  Description of Artificial Sequence: Synthetic oligonucleotide
  Antisense strand to SEQ ID NO: 869172
cauacaagcaaugucuuca

SEQ ID NO: 869174 - RNA, 19 nt, Artificial Sequence
  Description of Artificial Sequence: Synthetic oligonucleotide
  Sense strand starting at position 1589 of SEQ ID NO: 588495
auuuguguguucucccuau

SEQ ID NO: 869175 - RNA, 19 nt, Artificial Sequence
  Description of Artificial Sequence: Synthetic oligonucleotide
  Antisense strand to SEQ ID NO: 869174
auagggagaacacacaaau

SEQ ID NO: 869176 - RNA, 19 nt, Artificial Sequence
  Description of Artificial Sequence: Synthetic oligonucleotide
  Sense strand starting at position 1720 of SEQ ID NO: 588495
ggguacuaaagucauaagu

SEQ ID NO: 869177 - RNA, 19 nt, Artificial Sequence
  Description of Artificial Sequence: Synthetic oligonucleotide
  Antisense strand to SEQ ID NO: 869176
acuuaugacuuuaguaccc

SEQ ID NO: 869178 - RNA, 19 nt, Artificial Sequence
  Description of Artificial Sequence: Synthetic oligonucleotide
  Sense strand starting at position 1730 of SEQ ID NO: 588495
gucauaaguguauauacua

SEQ ID NO: 869179 - RNA, 19 nt, Artificial Sequence
  Description of Artificial Sequence: Synthetic oligonucleotide
  Antisense strand to SEQ ID NO: 869178
uaguauauacacuuaugac

SEQ ID NO: 869180 - RNA, 19 nt, Artificial Sequence
  Description of Artificial Sequence: Synthetic oligonucleotide
  Sense strand starting at position 1737 of SEQ ID NO: 588495
guguauauacuauaugcau

SEQ ID NO: 869181 - RNA, 19 nt, Artificial Sequence
  Description of Artificial Sequence: Synthetic oligonucleotide
  Antisense strand to SEQ ID NO: 869180
augcauauaguauauacac

SEQ ID NO: 869182 - RNA, 19 nt, Artificial Sequence
  Description of Artificial Sequence: Synthetic oligonucleotide
  Sense strand starting at position 1752 of SEQ ID NO: 588495
gcauguaaauaaucagaca

SEQ ID NO: 869183 - RNA, 19 nt, Artificial Sequence
  Description of Artificial Sequence: Synthetic oligonucleotide
  Antisense strand to SEQ ID NO: 869182
ugucugauuauuuacaugc

SEQ ID NO: 869184 - RNA, 19 nt, Artificial Sequence
  Description of Artificial Sequence: Synthetic oligonucleotide
  Sense strand starting at position 1883 of SEQ ID NO: 588495
uucucuguucuagaagcaa

SEQ ID NO: 869185 - RNA, 19 nt, Artificial Sequence
  Description of Artificial Sequence: Synthetic oligonucleotide
  Antisense strand to SEQ ID NO: 869184
uugcuucuagaacagagaa

SEQ ID NO: 869186 - RNA, 19 nt, Artificial Sequence
  Description of Artificial Sequence: Synthetic oligonucleotide
  Sense strand starting at position 1937 of SEQ ID NO: 588495
uccuuacuuuauguaggaa

SEQ ID NO: 869187 - RNA, 19 nt, Artificial Sequence
  Description of Artificial Sequence: Synthetic oligonucleotide
  Antisense strand to SEQ ID NO: 869186
uuccuacauaaaguaagga

SEQ ID NO: 869188 - RNA, 19 nt, Artificial Sequence
  Description of Artificial Sequence: Synthetic oligonucleotide
  Sense strand starting at position 1962 of SEQ ID NO: 588495
cccuauagguuucuauauu

SEQ ID NO: 869189 - RNA, 19 nt, Artificial Sequence
  Description of Artificial Sequence: Synthetic oligonucleotide
  Antisense strand to SEQ ID NO: 869188
aauauagaaaccuauaggg

SEQ ID NO: 869190 - RNA, 19 nt, Artificial Sequence
  Description of Artificial Sequence: Synthetic oligonucleotide
  Sense strand starting at position 1993 of SEQ ID NO: 588495
accagaucaucugcagcaa

SEQ ID NO: 869191 - RNA, 19 nt, Artificial Sequence
  Description of Artificial Sequence: Synthetic oligonucleotide
  Antisense strand to SEQ ID NO: 869190
uugcugcagaugaucuggu

SEQ ID NO: 869192 - RNA, 19 nt, Artificial Sequence
  Description of Artificial Sequence: Synthetic oligonucleotide
  Sense strand starting at position 1994 of SEQ ID NO: 588495
ccagaucaucugcagcaaa

SEQ ID NO: 869193 - RNA, 19 nt, Artificial Sequence
  Description of Artificial Sequence: Synthetic oligonucleotide
  Antisense strand to SEQ ID NO: 869192
uuugcugcagaugaucugg

SEQ ID NO: 869194 - RNA, 19 nt, Artificial Sequence
  Description of Artificial Sequence: Synthetic oligonucleotide
  Sense strand starting at position 2520 of SEQ ID NO: 588495
gcuuacugaggucaauagu

SEQ ID NO: 869195 - RNA, 19 nt, Artificial Sequence
  Description of Artificial Sequence: Synthetic oligonucleotide
  Antisense strand to SEQ ID NO: 869194
acuauugaccucaguaagc

SEQ ID NO: 869196 - RNA, 19 nt, Artificial Sequence
  Description of Artificial Sequence: Synthetic oligonucleotide
  Sense strand starting at position 2564 of SEQ ID NO: 588495
cuggaauccugauucuuua

SEQ ID NO: 869197 - RNA, 19 nt, Artificial Sequence
  Description of Artificial Sequence: Synthetic oligonucleotide
  Antisense strand to SEQ ID NO: 869196
uaaagaaucaggauuccag

SEQ ID NO: 869198 - RNA, 19 nt, Artificial Sequence
  Description of Artificial Sequence: Synthetic oligonucleotide
  Sense strand starting at position 2587 of SEQ ID NO: 588495
cgcauauggauguagagau

SEQ ID NO: 869199 - RNA, 19 nt, Artificial Sequence
  Description of Artificial Sequence: Synthetic oligonucleotide
  Antisense strand to SEQ ID NO: 869198
aucucuacauccauaugcg

SEQ ID NO: 869200 - RNA, 19 nt, Artificial Sequence
  Description of Artificial Sequence: Synthetic oligonucleotide
  Sense strand starting at position 2599 of SEQ ID NO: 588495
uagagauucuaauucgcag

SEQ ID NO: 869201 - RNA, 19 nt, Artificial Sequence
  Description of Artificial Sequence: Synthetic oligonucleotide
  Antisense strand to SEQ ID NO: 869200
cugcgaauuagaaucucua

SEQ ID NO: 869202 - RNA, 19 nt, Artificial Sequence
  Description of Artificial Sequence: Synthetic oligonucleotide
  Sense strand starting at position 2602 of SEQ ID NO: 588495
agauucuaauucgcagaua

SEQ ID NO: 869203 - RNA, 19 nt, Artificial Sequence
  Description of Artificial Sequence: Synthetic oligonucleotide
  Antisense strand to SEQ ID NO: 869202
uaucugcgaauuagaaucu

SEQ ID NO: 869204 - RNA, 19 nt, Artificial Sequence
  Description of Artificial Sequence: Synthetic oligonucleotide
  Sense strand starting at position 2790 of SEQ ID NO: 588495
uuacuuugugagcaaagca

SEQ ID NO: 869205 - RNA, 19 nt, Artificial Sequence
  Description of Artificial Sequence: Synthetic oligonucleotide
  Antisense strand to SEQ ID NO: 869204
ugcuuugcucacaaaguaa

SEQ ID NO: 869206 - RNA, 19 nt, Artificial Sequence
  Description of Artificial Sequence: Synthetic oligonucleotide
  Sense strand starting at position 2893 of SEQ ID NO: 588495
gacccauguguccagguau

SEQ ID NO: 869207 - RNA, 19 nt, Artificial Sequence
  Description of Artificial Sequence: Synthetic oligonucleotide
  Antisense strand to SEQ ID NO: 869206
auaccuggacacauggguc

SEQ ID NO: 869208 - RNA, 19 nt, Artificial Sequence
  Description of Artificial Sequence: Synthetic oligonucleotide
  Sense strand starting at position 2969 of SEQ ID NO: 588495
guggaaggauuacccaauu

SEQ ID NO: 869209 - RNA, 19 nt, Artificial Sequence
  Description of Artificial Sequence: Synthetic oligonucleotide
  Antisense strand to SEQ ID NO: 869208
aauuggguaauccuuccac

SEQ ID NO: 869210 - RNA, 19 nt, Artificial Sequence
  Description of Artificial Sequence: Synthetic oligonucleotide
  Sense strand starting at position 3190 of SEQ ID NO: 588495
ucauuagaagcuuauaugu

SEQ ID NO: 869211 - RNA, 19 nt, Artificial Sequence
  Description of Artificial Sequence: Synthetic oligonucleotide
  Antisense strand to SEQ ID NO: 869210
acauauaagcuucuaauga

SEQ ID NO: 869212 - RNA, 19 nt, Artificial Sequence
  Description of Artificial Sequence: Synthetic oligonucleotide
  Sense strand starting at position 3502 of SEQ ID NO: 588495
uuuccugacuuguugauga

SEQ ID NO: 869213 - RNA, 19 nt, Artificial Sequence
  Description of Artificial Sequence: Synthetic oligonucleotide
  Antisense strand to SEQ ID NO: 869212
ucaucaacaagucaggaaa

SEQ ID NO: 869214 - RNA, 19 nt, Artificial Sequence
  Description of Artificial Sequence: Synthetic oligonucleotide
  Sense strand starting at position 3504 of SEQ ID NO: 588495
uccugacuuguugaugauc

SEQ ID NO: 869215 - RNA, 19 nt, Artificial Sequence
  Description of Artificial Sequence: Synthetic oligonucleotide
  Antisense strand to SEQ ID NO: 869214
gaucaucaacaagucagga

SEQ ID NO: 869216 - RNA, 19 nt, Artificial Sequence
  Description of Artificial Sequence: Synthetic oligonucleotide
  Sense strand starting at position 3513 of SEQ ID NO: 588495
guugaugaucgccauucua

SEQ ID NO: 869217 - RNA, 19 nt, Artificial Sequence
  Description of Artificial Sequence: Synthetic oligonucleotide
  Antisense strand to SEQ ID NO: 869216
uagaauggcgaucaucaac

SEQ ID NO: 869218 - RNA, 19 nt, Artificial Sequence
  Description of Artificial Sequence: Synthetic oligonucleotide
  Sense strand starting at position 144 of SEQ ID NO: 588496
aguaaauuagaugguuaag

SEQ ID NO: 869219 - RNA, 19 nt, Artificial Sequence
  Description of Artificial Sequence: Synthetic oligonucleotide
  Antisense strand to SEQ ID NO: 869218
cuuaaccaucuaauuuacu

SEQ ID NO: 869220 - RNA, 19 nt, Artificial Sequence
  Description of Artificial Sequence: Synthetic oligonucleotide
  Sense strand starting at position 313 of SEQ ID NO: 588496
uaaacugguguugaacuau

SEQ ID NO: 869221 - RNA, 19 nt, Artificial Sequence
  Description of Artificial Sequence: Synthetic oligonucleotide
  Antisense strand to SEQ ID NO: 869220
auaguucaacaccaguuua

SEQ ID NO: 869222 - RNA, 19 nt, Artificial Sequence
  Description of Artificial Sequence: Synthetic oligonucleotide
  Sense strand starting at position 319 of SEQ ID NO: 588496
gguguugaacuaugacaga

SEQ ID NO: 869223 - RNA, 19 nt, Artificial Sequence
  Description of Artificial Sequence: Synthetic oligonucleotide
  Antisense strand to SEQ ID NO: 869222
ucugucauaguucaacacc

SEQ ID NO: 869224 - RNA, 19 nt, Artificial Sequence
  Description of Artificial Sequence: Synthetic oligonucleotide
  Sense strand starting at position 346 of SEQ ID NO: 588496
guggaauucuaaguuuaaa

SEQ ID NO: 869225 - RNA, 19 nt, Artificial Sequence
  Description of Artificial Sequence: Synthetic oligonucleotide
  Antisense strand to SEQ ID NO: 869224
uuuaaacuuagaauuccac

SEQ ID NO: 869226 - RNA, 19 nt, Artificial Sequence
  Description of Artificial Sequence: Synthetic oligonucleotide
  Sense strand starting at position 410 of SEQ ID NO: 588496
gcauaauguguucagggaa

SEQ ID NO: 869227 - RNA, 19 nt, Artificial Sequence
  Description of Artificial Sequence: Synthetic oligonucleotide
  Antisense strand to SEQ ID NO: 869226
uucccugaacacauuaugc

SEQ ID NO: 869228 - RNA, 19 nt, Artificial Sequence
  Description of Artificial Sequence: Synthetic oligonucleotide
  Sense strand starting at position 429 of SEQ ID NO: 588496
uugugacaaauucgaaaug

SEQ ID NO: 869229 - RNA, 19 nt, Artificial Sequence
  Description of Artificial Sequence: Synthetic oligonucleotide
  Antisense strand to SEQ ID NO: 869228
cauuucgaauuugucacaa

SEQ ID NO: 869230 - RNA, 19 nt, Artificial Sequence
  Description of Artificial Sequence: Synthetic oligonucleotide
  Sense strand starting at position 438 of SEQ ID NO: 588496
auucgaaaugucuagagua

SEQ ID NO: 869231 - RNA, 19 nt, Artificial Sequence
  Description of Artificial Sequence: Synthetic oligonucleotide
  Antisense strand to SEQ ID NO: 869230
uacucuagacauuucgaau

SEQ ID NO: 869232 - RNA, 19 nt, Artificial Sequence
  Description of Artificial Sequence: Synthetic oligonucleotide
  Sense strand starting at position 440 of SEQ ID NO: 588496
ucgaaaugucuagaguaag

SEQ ID NO: 869233 - RNA, 19 nt, Artificial Sequence
  Description of Artificial Sequence: Synthetic oligonucleotide
  Antisense strand to SEQ ID NO: 869232
cuuacucuagacauuucga

SEQ ID NO: 869234 - RNA, 19 nt, Artificial Sequence
  Description of Artificial Sequence: Synthetic oligonucleotide
  Sense strand starting at position 507 of SEQ ID NO: 588496
ugugaaaggcccuauguaa

SEQ ID NO: 869235 - RNA, 19 nt, Artificial Sequence
  Description of Artificial Sequence: Synthetic oligonucleotide
  Antisense strand to SEQ ID NO: 869234
uuacauagggccuuucaca

SEQ ID NO: 869236 - RNA, 19 nt, Artificial Sequence
  Description of Artificial Sequence: Synthetic oligonucleotide
  Sense strand starting at position 946 of SEQ ID NO: 588496
guaggauuggcuggagaga

SEQ ID NO: 869237 - RNA, 19 nt, Artificial Sequence
  Description of Artificial Sequence: Synthetic oligonucleotide
  Antisense strand to SEQ ID NO: 869236
ucucuccagccaauccuac

SEQ ID NO: 869238 - RNA, 19 nt, Artificial Sequence
  Description of Artificial Sequence: Synthetic oligonucleotide
  Sense strand starting at position 1015 of SEQ ID NO: 588496
gguacagauuucuaacaga

SEQ ID NO: 869239 - RNA, 19 nt, Artificial Sequence
  Description of Artificial Sequence: Synthetic oligonucleotide
  Antisense strand to SEQ ID NO: 869238
ucuguuagaaaucuguacc

SEQ ID NO: 869240 - RNA, 19 nt, Artificial Sequence
  Description of Artificial Sequence: Synthetic oligonucleotide
  Sense strand starting at position 1018 of SEQ ID NO: 588496
acagauuucuaacagauag

SEQ ID NO: 869241 - RNA, 19 nt, Artificial Sequence
  Description of Artificial Sequence: Synthetic oligonucleotide
  Antisense strand to SEQ ID NO: 869240
cuaucuguuagaaaucugu

SEQ ID NO: 869242 - RNA, 19 nt, Artificial Sequence
  Description of Artificial Sequence: Synthetic oligonucleotide
  Sense strand starting at position 1243 of SEQ ID NO: 588496
gugaauugggcuuagcaau

SEQ ID NO: 869243 - RNA, 19 nt, Artificial Sequence
  Description of Artificial Sequence: Synthetic oligonucleotide
  Antisense strand to SEQ ID NO: 869242
auugcuaagcccaauucac

SEQ ID NO: 869244 - RNA, 19 nt, Artificial Sequence
  Description of Artificial Sequence: Synthetic oligonucleotide
  Sense strand starting at position 1262 of SEQ ID NO: 588496
uuagaaagguuuguggaaa

SEQ ID NO: 869245 - RNA, 19 nt, Artificial Sequence
  Description of Artificial Sequence: Synthetic oligonucleotide
  Antisense strand to SEQ ID NO: 869244
uuuccacaaaccuuucuaa

SEQ ID NO: 869246 - RNA, 19 nt, Artificial Sequence
  Description of Artificial Sequence: Synthetic oligonucleotide
  Sense strand starting at position 1355 of SEQ ID NO: 588496
cucaauaaggucugauaau

SEQ ID NO: 869247 - RNA, 19 nt, Artificial Sequence
  Description of Artificial Sequence: Synthetic oligonucleotide
  Antisense strand to SEQ ID NO: 869246
auuaucagaccuuauugag

SEQ ID NO: 869248 - RNA, 19 nt, Artificial Sequence
  Description of Artificial Sequence: Synthetic oligonucleotide
  Sense strand starting at position 1364 of SEQ ID NO: 588496
gucugauaaugacuagcaa

SEQ ID NO: 869249 - RNA, 19 nt, Artificial Sequence
  Description of Artificial Sequence: Synthetic oligonucleotide
  Antisense strand to SEQ ID NO: 869248
uugcuagucauuaucagac

SEQ ID NO: 869250 - RNA, 19 nt, Artificial Sequence
  Description of Artificial Sequence: Synthetic oligonucleotide
  Sense strand starting at position 1530 of SEQ ID NO: 588496
ugcuaaauuugacaacaga

SEQ ID NO: 869251 - RNA, 19 nt, Artificial Sequence
  Description of Artificial Sequence: Synthetic oligonucleotide
  Antisense strand to SEQ ID NO: 869250
ucuguugucaaauuuagca

SEQ ID NO: 869252 - RNA, 19 nt, Artificial Sequence
  Description of Artificial Sequence: Synthetic oligonucleotide
  Sense strand starting at position 2559 of SEQ ID NO: 588496
cuauuagaacucuguaaga

SEQ ID NO: 869253 - RNA, 19 nt, Artificial Sequence
  Description of Artificial Sequence: Synthetic oligonucleotide
  Antisense strand to SEQ ID NO: 869252
ucuuacagaguucuaauag

SEQ ID NO: 869254 - RNA, 19 nt, Artificial Sequence
  Description of Artificial Sequence: Synthetic oligonucleotide
  Sense strand starting at position 2572 of SEQ ID NO: 588496
guaagaaaccaucgggauu

SEQ ID NO: 869255 - RNA, 19 nt, Artificial Sequence
  Description of Artificial Sequence: Synthetic oligonucleotide
  Antisense strand to SEQ ID NO: 869254
aaucccgaugguuucuuac

SEQ ID NO: 869256 - RNA, 19 nt, Artificial Sequence
  Description of Artificial Sequence: Synthetic oligonucleotide
  Sense strand starting at position 2574 of SEQ ID NO: 588496
aagaaaccaucgggauuua

SEQ ID NO: 869257 - RNA, 19 nt, Artificial Sequence
  Description of Artificial Sequence: Synthetic oligonucleotide
  Antisense strand to SEQ ID NO: 869256
uaaaucccgaugguuucuu

SEQ ID NO: 869258 - RNA, 19 nt, Artificial Sequence
  Description of Artificial Sequence: Synthetic oligonucleotide
  Sense strand starting at position 2628 of SEQ ID NO: 588496
ugccuuguugugcuaacuu

SEQ ID NO: 869259 - RNA, 19 nt, Artificial Sequence
  Description of Artificial Sequence: Synthetic oligonucleotide
  Antisense strand to SEQ ID NO: 869258
aaguuagcacaacaaggca

SEQ ID NO: 869260 - RNA, 19 nt, Artificial Sequence
  Description of Artificial Sequence: Synthetic oligonucleotide
  Sense strand starting at position 2637 of SEQ ID NO: 588496
gugcuaacuugaccacaga

SEQ ID NO: 869261 - RNA, 19 nt, Artificial Sequence
  Description of Artificial Sequence: Synthetic oligonucleotide
  Antisense strand to SEQ ID NO: 869260
ucuguggucaaguuagcac

SEQ ID NO: 869262 - RNA, 19 nt, Artificial Sequence
  Description of Artificial Sequence: Synthetic oligonucleotide
  Sense strand starting at position 2688 of SEQ ID NO: 588496
ggacgaugaucucccaagu

SEQ ID NO: 869263 - RNA, 19 nt, Artificial Sequence
  Description of Artificial Sequence: Synthetic oligonucleotide
  Antisense strand to SEQ ID NO: 869262
acuugggagaucaucgucc

SEQ ID NO: 869264 - RNA, 19 nt, Artificial Sequence
  Description of Artificial Sequence: Synthetic oligonucleotide
  Sense strand starting at position 2758 of SEQ ID NO: 588496
guaguuugaaggcaucuga

SEQ ID NO: 869265 - RNA, 19 nt, Artificial Sequence
  Description of Artificial Sequence: Synthetic oligonucleotide
  Antisense strand to SEQ ID NO: 869264
ucagaugccuucaaacuac

SEQ ID NO: 869266 - RNA, 19 nt, Artificial Sequence
  Description of Artificial Sequence: Synthetic oligonucleotide
  Sense strand starting at position 2810 of SEQ ID NO: 588496
ugcucuguagucuucugua

SEQ ID NO: 869267 - RNA, 19 nt, Artificial Sequence
  Description of Artificial Sequence: Synthetic oligonucleotide
  Antisense strand to SEQ ID NO: 869266
uacagaagacuacagagca

SEQ ID NO: 869268 - RNA, 19 nt, Artificial Sequence
  Description of Artificial Sequence: Synthetic oligonucleotide
  Sense strand starting at position 2841 of SEQ ID NO: 588496
ugaagacuuuaguucucaa

SEQ ID NO: 869269 - RNA, 19 nt, Artificial Sequence
  Description of Artificial Sequence: Synthetic oligonucleotide
  Antisense strand to SEQ ID NO: 869268
uugagaacuaaagucuuca

SEQ ID NO: 869270 - RNA, 19 nt, Artificial Sequence
  Description of Artificial Sequence: Synthetic oligonucleotide
  Sense strand starting at position 3004 of SEQ ID NO: 588496
aaggauuuaucagaagggu

SEQ ID NO: 869271 - RNA, 19 nt, Artificial Sequence
  Description of Artificial Sequence: Synthetic oligonucleotide
  Antisense strand to SEQ ID NO: 869270
acccuucugauaaauccuu

SEQ ID NO: 869272 - RNA, 19 nt, Artificial Sequence
  Description of Artificial Sequence: Synthetic oligonucleotide
  Sense strand starting at position 3057 of SEQ ID NO: 588496
ggaaucaguccugaucgag

SEQ ID NO: 869273 - RNA, 19 nt, Artificial Sequence
  Description of Artificial Sequence: Synthetic oligonucleotide
  Antisense strand to SEQ ID NO: 869272
cucgaucaggacugauucc

SEQ ID NO: 869274 - RNA, 19 nt, Artificial Sequence
  Description of Artificial Sequence: Synthetic oligonucleotide
  Sense strand starting at position 3089 of SEQ ID NO: 588496
cccugauuuggcugguugu

SEQ ID NO: 869275 - RNA, 19 nt, Artificial Sequence
  Description of Artificial Sequence: Synthetic oligonucleotide
  Antisense strand to SEQ ID NO: 869274
acaaccagccaaaucaggg

SEQ ID NO: 869276 - RNA, 19 nt, Artificial Sequence
  Description of Artificial Sequence: Synthetic oligonucleotide
  Sense strand starting at position 3090 of SEQ ID NO: 588496
ccugauuuggcugguugua

SEQ ID NO: 869277 - RNA, 19 nt, Artificial Sequence
  Description of Artificial Sequence: Synthetic oligonucleotide
  Antisense strand to SEQ ID NO: 869276
uacaaccagccaaaucagg

SEQ ID NO: 869278 - RNA, 19 nt, Artificial Sequence
  Description of Artificial Sequence: Synthetic oligonucleotide
  Sense strand starting at position 3092 of SEQ ID NO: 588496
ugauuuggcugguuguaac

SEQ ID NO: 869279 - RNA, 19 nt, Artificial Sequence
  Description of Artificial Sequence: Synthetic oligonucleotide
  Antisense strand to SEQ ID NO: 869278
guuacaaccagccaaauca

SEQ ID NO: 869280 - RNA, 19 nt, Artificial Sequence
  Description of Artificial Sequence: Synthetic oligonucleotide
  Sense strand starting at position 3100 of SEQ ID NO: 588496
cugguuguaacaggauauu

SEQ ID NO: 869281 - RNA, 19 nt, Artificial Sequence
  Description of Artificial Sequence: Synthetic oligonucleotide
  Antisense strand to SEQ ID NO: 869280
aauauccuguuacaaccag

SEQ ID NO: 869282 - RNA, 19 nt, Artificial Sequence
  Description of Artificial Sequence: Synthetic oligonucleotide
  Sense strand starting at position 3398 of SEQ ID NO: 588496
acaguuaauuagguggaga

SEQ ID NO: 869283 - RNA, 19 nt, Artificial Sequence
  Description of Artificial Sequence: Synthetic oligonucleotide
  Antisense strand to SEQ ID NO: 869282
ucuccaccuaauuaacugu

SEQ ID NO: 869284 - RNA, 19 nt, Artificial Sequence
  Description of Artificial Sequence: Synthetic oligonucleotide
  Sense strand starting at position 3399 of SEQ ID NO: 588496
caguuaauuagguggagag

SEQ ID NO: 869285 - RNA, 19 nt, Artificial Sequence
  Description of Artificial Sequence: Synthetic oligonucleotide
  Antisense strand to SEQ ID NO: 869284
cucuccaccuaauuaacug

SEQ ID NO: 869286 - RNA, 19 nt, Artificial Sequence
  Description of Artificial Sequence: Synthetic oligonucleotide
  Sense strand starting at position 3400 of SEQ ID NO: 588496
aguuaauuagguggagaga

SEQ ID NO: 869287 - RNA, 19 nt, Artificial Sequence
  Description of Artificial Sequence: Synthetic oligonucleotide
  Antisense strand to SEQ ID NO: 869286
ucucuccaccuaauuaacu

SEQ ID NO: 869288 - RNA, 19 nt, Artificial Sequence
  Description of Artificial Sequence: Synthetic oligonucleotide
  Sense strand starting at position 3665 of SEQ ID NO: 588496
aucugauuuccguguugag

SEQ ID NO: 869289 - RNA, 19 nt, Artificial Sequence
  Description of Artificial Sequence: Synthetic oligonucleotide
  Antisense strand to SEQ ID NO: 869288
cucaacacggaaaucagau

SEQ ID NO: 869290 - RNA, 19 nt, Artificial Sequence
  Description of Artificial Sequence: Synthetic oligonucleotide
  Sense strand starting at position 3707 of SEQ ID NO: 588496
agaauagauugagaaggga

SEQ ID NO: 869291 - RNA, 19 nt, Artificial Sequence
  Description of Artificial Sequence: Synthetic oligonucleotide
  Antisense strand to SEQ ID NO: 869290
ucccuucucaaucuauucu

SEQ ID NO: 869292 - RNA, 19 nt, Artificial Sequence
  Description of Artificial Sequence: Synthetic oligonucleotide
  Sense strand starting at position 3809 of SEQ ID NO: 588496
agcaaauuccuguauugaa

SEQ ID NO: 869293 - RNA, 19 nt, Artificial Sequence
  Description of Artificial Sequence: Synthetic oligonucleotide
  Antisense strand to SEQ ID NO: 869292
uucaauacaggaauuugcu

SEQ ID NO: 869294 - RNA, 19 nt, Artificial Sequence
  Description of Artificial Sequence: Synthetic oligonucleotide
  Sense strand starting at position 3958 of SEQ ID NO: 588496
gaagcauaagcccaguaga

SEQ ID NO: 869295 - RNA, 19 nt, Artificial Sequence
  Description of Artificial Sequence: Synthetic oligonucleotide
  Antisense strand to SEQ ID NO: 869294
ucuacugggcuuaugcuuc

SEQ ID NO: 869296 - RNA, 19 nt, Artificial Sequence
  Description of Artificial Sequence: Synthetic oligonucleotide
  Sense strand starting at position 3961 of SEQ ID NO: 588496
gcauaagcccaguagaaua

SEQ ID NO: 869297 - RNA, 19 nt, Artificial Sequence
  Description of Artificial Sequence: Synthetic oligonucleotide
  Antisense strand to SEQ ID NO: 869296
uauucuacugggcuuaugc

SEQ ID NO: 869298 - RNA, 19 nt, Artificial Sequence
  Description of Artificial Sequence: Synthetic oligonucleotide
  Sense strand starting at position 40 of SEQ ID NO: 588497
uaaacugguguugaacuau

SEQ ID NO: 869299 - RNA, 19 nt, Artificial Sequence
  Description of Artificial Sequence: Synthetic oligonucleotide
  Antisense strand to SEQ ID NO: 869298
auaguucaacaccaguuua

SEQ ID NO: 869300 - RNA, 19 nt, Artificial Sequence
  Description of Artificial Sequence: Synthetic oligonucleotide
  Sense strand starting at position 46 of SEQ ID NO: 588497
gguguugaacuaugacaga

SEQ ID NO: 869301 - RNA, 19 nt, Artificial Sequence
  Description of Artificial Sequence: Synthetic oligonucleotide
  Antisense strand to SEQ ID NO: 869300
ucugucauaguucaacacc

SEQ ID NO: 869302 - RNA, 19 nt, Artificial Sequence
  Description of Artificial Sequence: Synthetic oligonucleotide
  Sense strand starting at position 73 of SEQ ID NO: 588497
guggaauucuaaguuuaaa

SEQ ID NO: 869303 - RNA, 19 nt, Artificial Sequence
  Description of Artificial Sequence: Synthetic oligonucleotide
  Antisense strand to SEQ ID NO: 869302
uuuaaacuuagaauuccac

SEQ ID NO: 869304 - RNA, 19 nt, Artificial Sequence
  Description of Artificial Sequence: Synthetic oligonucleotide
  Sense strand starting at position 137 of SEQ ID NO: 588497
gcauaauguguucagggaa

SEQ ID NO: 869305 - RNA, 19 nt, Artificial Sequence
  Description of Artificial Sequence: Synthetic oligonucleotide
  Antisense strand to SEQ ID NO: 869304
uucccugaacacauuaugc

SEQ ID NO: 869306 - RNA, 19 nt, Artificial Sequence
  Description of Artificial Sequence: Synthetic oligonucleotide
  Sense strand starting at position 156 of SEQ ID NO: 588497
uugugacaaauucgaaaug

SEQ ID NO: 869307 - RNA, 19 nt, Artificial Sequence
  Description of Artificial Sequence: Synthetic oligonucleotide
  Antisense strand to SEQ ID NO: 869306
cauuucgaauuugucacaa

SEQ ID NO: 869308 - RNA, 19 nt, Artificial Sequence
  Description of Artificial Sequence: Synthetic oligonucleotide
  Sense strand starting at position 165 of SEQ ID NO: 588497
auucgaaaugucuagagua

SEQ ID NO: 869309 - RNA, 19 nt, Artificial Sequence
  Description of Artificial Sequence: Synthetic oligonucleotide
  Antisense strand to SEQ ID NO: 869308
uacucuagacauuucgaau

SEQ ID NO: 869310 - RNA, 19 nt, Artificial Sequence
  Description of Artificial Sequence: Synthetic oligonucleotide
  Sense strand starting at position 167 of SEQ ID NO: 588497
ucgaaaugucuagaguaag

SEQ ID NO: 869311 - RNA, 19 nt, Artificial Sequence
  Description of Artificial Sequence: Synthetic oligonucleotide
  Antisense strand to SEQ ID NO: 869310
cuuacucuagacauuucga

SEQ ID NO: 869312 - RNA, 19 nt, Artificial Sequence
  Description of Artificial Sequence: Synthetic oligonucleotide
  Sense strand starting at position 234 of SEQ ID NO: 588497
ugugaaaggcccuauguaa

SEQ ID NO: 869313 - RNA, 19 nt, Artificial Sequence
  Description of Artificial Sequence: Synthetic oligonucleotide
  Antisense strand to SEQ ID NO: 869312
uuacauagggccuuucaca

SEQ ID NO: 869314 - RNA, 19 nt, Artificial Sequence
  Description of Artificial Sequence: Synthetic oligonucleotide
  Sense strand starting at position 673 of SEQ ID NO: 588497
guaggauuggcuggagaga

SEQ ID NO: 869315 - RNA, 19 nt, Artificial Sequence
  Description of Artificial Sequence: Synthetic oligonucleotide
  Antisense strand to SEQ ID NO: 869314
ucucuccagccaauccuac

SEQ ID NO: 869316 - RNA, 19 nt, Artificial Sequence
  Description of Artificial Sequence: Synthetic oligonucleotide
  Sense strand starting at position 742 of SEQ ID NO: 588497
gguacagauuucuaacaga

SEQ ID NO: 869317 - RNA, 19 nt, Artificial Sequence
  Description of Artificial Sequence: Synthetic oligonucleotide
  Antisense strand to SEQ ID NO: 869316
ucuguuagaaaucuguacc

SEQ ID NO: 869318 - RNA, 19 nt, Artificial Sequence
  Description of Artificial Sequence: Synthetic oligonucleotide
  Sense strand starting at position 745 of SEQ ID NO: 588497
acagauuucuaacagauag

SEQ ID NO: 869319 - RNA, 19 nt, Artificial Sequence
  Description of Artificial Sequence: Synthetic oligonucleotide
  Antisense strand to SEQ ID NO: 869318
cuaucuguuagaaaucugu

SEQ ID NO: 869320 - RNA, 19 nt, Artificial Sequence
  Description of Artificial Sequence: Synthetic oligonucleotide
  Sense strand starting at position 989 of SEQ ID NO: 588497
uuagaaagguuuguggaaa

SEQ ID NO: 869321 - RNA, 19 nt, Artificial Sequence
  Description of Artificial Sequence: Synthetic oligonucleotide
  Antisense strand to SEQ ID NO: 869320
uuuccacaaaccuuucuaa

SEQ ID NO: 869322 - RNA, 19 nt, Artificial Sequence
  Description of Artificial Sequence: Synthetic oligonucleotide
  Sense strand starting at position 1082 of SEQ ID NO: 588497
cucaauaaggucugauaau

SEQ ID NO: 869323 - RNA, 19 nt, Artificial Sequence
  Description of Artificial Sequence: Synthetic oligonucleotide
  Antisense strand to SEQ ID NO: 869322
auuaucagaccuuauugag

SEQ ID NO: 869324 - RNA, 19 nt, Artificial Sequence
  Description of Artificial Sequence: Synthetic oligonucleotide
  Sense strand starting at position 1091 of SEQ ID NO: 588497
gucugauaaugacuagcaa

SEQ ID NO: 869325 - RNA, 19 nt, Artificial Sequence
  Description of Artificial Sequence: Synthetic oligonucleotide
  Antisense strand to SEQ ID NO: 869324
uugcuagucauuaucagac

SEQ ID NO: 869326 - RNA, 19 nt, Artificial Sequence
  Description of Artificial Sequence: Synthetic oligonucleotide
  Sense strand starting at position 1257 of SEQ ID NO: 588497
ugcuaaauuugacaacaga

SEQ ID NO: 869327 - RNA, 19 nt, Artificial Sequence
  Description of Artificial Sequence: Synthetic oligonucleotide
  Antisense strand to SEQ ID NO: 869326
ucuguugucaaauuuagca

SEQ ID NO: 869328 - RNA, 19 nt, Artificial Sequence
  Description of Artificial Sequence: Synthetic oligonucleotide
  Sense strand starting at position 2286 of SEQ ID NO: 588497
cuauuagaacucuguaaga

SEQ ID NO: 869329 - RNA, 19 nt, Artificial Sequence
  Description of Artificial Sequence: Synthetic oligonucleotide
  Antisense strand to SEQ ID NO: 869328
ucuuacagaguucuaauag

SEQ ID NO: 869330 - RNA, 19 nt, Artificial Sequence
  Description of Artificial Sequence: Synthetic oligonucleotide
  Sense strand starting at position 2299 of SEQ ID NO: 588497
guaagaaaccaucgggauu

SEQ ID NO: 869331 - RNA, 19 nt, Artificial Sequence
  Description of Artificial Sequence: Synthetic oligonucleotide
  Antisense strand to SEQ ID NO: 869330
aaucccgaugguuucuuac

SEQ ID NO: 869332 - RNA, 19 nt, Artificial Sequence
  Description of Artificial Sequence: Synthetic oligonucleotide
  Sense strand starting at position 2355 of SEQ ID NO: 588497
ugccuuguugugcuaacuu

SEQ ID NO: 869333 - RNA, 19 nt, Artificial Sequence
  Description of Artificial Sequence: Synthetic oligonucleotide
  Antisense strand to SEQ ID NO: 869332
aaguuagcacaacaaggca

SEQ ID NO: 869334 - RNA, 19 nt, Artificial Sequence
  Description of Artificial Sequence: Synthetic oligonucleotide
  Sense strand starting at position 2485 of SEQ ID NO: 588497
guaguuugaaggcaucuga

SEQ ID NO: 869335 - RNA, 19 nt, Artificial Sequence
  Description of Artificial Sequence: Synthetic oligonucleotide
  Antisense strand to SEQ ID NO: 869334
ucagaugccuucaaacuac

SEQ ID NO: 869336 - RNA, 19 nt, Artificial Sequence
  Description of Artificial Sequence: Synthetic oligonucleotide
  Sense strand starting at position 2537 of SEQ ID NO: 588497
ugcucuguagucuucugua

SEQ ID NO: 869337 - RNA, 19 nt, Artificial Sequence
  Description of Artificial Sequence: Synthetic oligonucleotide
  Antisense strand to SEQ ID NO: 869336
uacagaagacuacagagca

SEQ ID NO: 869338 - RNA, 19 nt, Artificial Sequence
  Description of Artificial Sequence: Synthetic oligonucleotide
  Sense strand starting at position 2568 of SEQ ID NO: 588497
ugaagacuuuaguucucaa

SEQ ID NO: 869339 - RNA, 19 nt, Artificial Sequence
  Description of Artificial Sequence: Synthetic oligonucleotide
  Antisense strand to SEQ ID NO: 869338
uugagaacuaaagucuuca

SEQ ID NO: 869340 - RNA, 19 nt, Artificial Sequence
  Description of Artificial Sequence: Synthetic oligonucleotide
  Sense strand starting at position 2731 of SEQ ID NO: 588497
aaggauuuaucagaagggu

SEQ ID NO: 869341 - RNA, 19 nt, Artificial Sequence
  Description of Artificial Sequence: Synthetic oligonucleotide
  Antisense strand to SEQ ID NO: 869340
acccuucugauaaauccuu

SEQ ID NO: 869342 - RNA, 19 nt, Artificial Sequence
  Description of Artificial Sequence: Synthetic oligonucleotide
  Sense strand starting at position 2784 of SEQ ID NO: 588497
ggaaucaguccugaucgag

SEQ ID NO: 869343 - RNA, 19 nt, Artificial Sequence
  Description of Artificial Sequence: Synthetic oligonucleotide
  Antisense strand to SEQ ID NO: 869342
cucgaucaggacugauucc

SEQ ID NO: 869344 - RNA, 19 nt, Artificial Sequence
  Description of Artificial Sequence: Synthetic oligonucleotide
  Sense strand starting at position 2816 of SEQ ID NO: 588497
cccugauuuggcugguugu

SEQ ID NO: 869345 - RNA, 19 nt, Artificial Sequence
  Description of Artificial Sequence: Synthetic oligonucleotide
  Antisense strand to SEQ ID NO: 869344
acaaccagccaaaucaggg

SEQ ID NO: 869346 - RNA, 19 nt, Artificial Sequence
  Description of Artificial Sequence: Synthetic oligonucleotide
  Sense strand starting at position 2817 of SEQ ID NO: 588497
ccugauuuggcugguugua

SEQ ID NO: 869347 - RNA, 19 nt, Artificial Sequence
  Description of Artificial Sequence: Synthetic oligonucleotide
  Antisense strand to SEQ ID NO: 869346
uacaaccagccaaaucagg

SEQ ID NO: 869348 - RNA, 19 nt, Artificial Sequence
  Description of Artificial Sequence: Synthetic oligonucleotide
  Sense strand starting at position 2819 of SEQ ID NO: 588497
ugauuuggcugguuguaac

SEQ ID NO: 869349 - RNA, 19 nt, Artificial Sequence
  Description of Artificial Sequence: Synthetic oligonucleotide
  Antisense strand to SEQ ID NO: 869348
guuacaaccagccaaauca

SEQ ID NO: 869350 - RNA, 19 nt, Artificial Sequence
  Description of Artificial Sequence: Synthetic oligonucleotide
  Sense strand starting at position 3125 of SEQ ID NO: 588497
acaguuaauuagguggaga

SEQ ID NO: 869351 - RNA, 19 nt, Artificial Sequence
  Description of Artificial Sequence: Synthetic oligonucleotide
  Antisense strand to SEQ ID NO: 869350
ucuccaccuaauuaacugu

SEQ ID NO: 869352 - RNA, 19 nt, Artificial Sequence
  Description of Artificial Sequence: Synthetic oligonucleotide
  Sense strand starting at position 3126 of SEQ ID NO: 588497
caguuaauuagguggagag

SEQ ID NO: 869353 - RNA, 19 nt, Artificial Sequence
  Description of Artificial Sequence: Synthetic oligonucleotide
  Antisense strand to SEQ ID NO: 869352
cucuccaccuaauuaacug

SEQ ID NO: 869354 - RNA, 19 nt, Artificial Sequence
  Description of Artificial Sequence: Synthetic oligonucleotide
  Sense strand starting at position 3127 of SEQ ID NO: 588497
aguuaauuagguggagaga

SEQ ID NO: 869355 - RNA, 19 nt, Artificial Sequence
  Description of Artificial Sequence: Synthetic oligonucleotide
  Antisense strand to SEQ ID NO: 869354
ucucuccaccuaauuaacu

SEQ ID NO: 869356 - RNA, 19 nt, Artificial Sequence
  Description of Artificial Sequence: Synthetic oligonucleotide
  Sense strand starting at position 3392 of SEQ ID NO: 588497
aucugauuuccguguugag

SEQ ID NO: 869357 - RNA, 19 nt, Artificial Sequence
  Description of Artificial Sequence: Synthetic oligonucleotide
  Antisense strand to SEQ ID NO: 869356
cucaacacggaaaucagau

SEQ ID NO: 869358 - RNA, 19 nt, Artificial Sequence
  Description of Artificial Sequence: Synthetic oligonucleotide
  Sense strand starting at position 3434 of SEQ ID NO: 588497
agaauagauugagaaggga

SEQ ID NO: 869359 - RNA, 19 nt, Artificial Sequence
  Description of Artificial Sequence: Synthetic oligonucleotide
  Antisense strand to SEQ ID NO: 869358
ucccuucucaaucuauucu

SEQ ID NO: 869360 - RNA, 19 nt, Artificial Sequence
  Description of Artificial Sequence: Synthetic oligonucleotide
  Sense strand starting at position 3536 of SEQ ID NO: 588497
agcaaauuccuguauugaa

SEQ ID NO: 869361 - RNA, 19 nt, Artificial Sequence
  Description of Artificial Sequence: Synthetic oligonucleotide
  Antisense strand to SEQ ID NO: 869360
uucaauacaggaauuugcu

SEQ ID NO: 869362 - RNA, 19 nt, Artificial Sequence
  Description of Artificial Sequence: Synthetic oligonucleotide
  Sense strand starting at position 3685 of SEQ ID NO: 588497
gaagcauaagcccaguaga

SEQ ID NO: 869363 - RNA, 19 nt, Artificial Sequence
  Description of Artificial Sequence: Synthetic oligonucleotide
  Antisense strand to SEQ ID NO: 869362
ucuacugggcuuaugcuuc

SEQ ID NO: 869364 - RNA, 19 nt, Artificial Sequence
  Description of Artificial Sequence: Synthetic oligonucleotide
  Sense strand starting at position 3688 of SEQ ID NO: 588497
gcauaagcccaguagaaua

SEQ ID NO: 869365 - RNA, 19 nt, Artificial Sequence
  Description of Artificial Sequence: Synthetic oligonucleotide
  Antisense strand to SEQ ID NO: 869364
uauucuacugggcuuaugc

SEQ ID NO: 869366 - RNA, 19 nt, Artificial Sequence
  Description of Artificial Sequence: Synthetic oligonucleotide
  Sense strand starting at position 3714 of SEQ ID NO: 588497
ugcaguaaggaguauaauc

SEQ ID NO: 869367 - RNA, 19 nt, Artificial Sequence
  Description of Artificial Sequence: Synthetic oligonucleotide
  Antisense strand to SEQ ID NO: 869366
gauuauacuccuuacugca

SEQ ID NO: 869368 - RNA, 19 nt, Artificial Sequence
  Description of Artificial Sequence: Synthetic oligonucleotide
  Sense strand starting at position 3754 of SEQ ID NO: 588497
ggaauccugucauuaaacu

SEQ ID NO: 869369 - RNA, 19 nt, Artificial Sequence
  Description of Artificial Sequence: Synthetic oligonucleotide
  Antisense strand to SEQ ID NO: 869368
aguuuaaugacaggauucc

SEQ ID NO: 869370 - RNA, 19 nt, Artificial Sequence
  Description of Artificial Sequence: Synthetic oligonucleotide
  Sense strand starting at position 3796 of SEQ ID NO: 588497
aggguuuaaucacuggagu

SEQ ID NO: 869371 - RNA, 19 nt, Artificial Sequence
  Description of Artificial Sequence: Synthetic oligonucleotide
  Antisense strand to SEQ ID NO: 869370
acuccagugauuaaacccu

SEQ ID NO: 869372 - RNA, 19 nt, Artificial Sequence
  Description of Artificial Sequence: Synthetic oligonucleotide
  Sense strand starting at position 3797 of SEQ ID NO: 588497
ggguuuaaucacuggagug

SEQ ID NO: 869373 - RNA, 19 nt, Artificial Sequence
  Description of Artificial Sequence: Synthetic oligonucleotide
  Antisense strand to SEQ ID NO: 869372
cacuccagugauuaaaccc

SEQ ID NO: 869374 - RNA, 19 nt, Artificial Sequence
  Description of Artificial Sequence: Synthetic oligonucleotide
  Sense strand starting at position 3799 of SEQ ID NO: 588497
guuuaaucacuggaguggu

SEQ ID NO: 869375 - RNA, 19 nt, Artificial Sequence
  Description of Artificial Sequence: Synthetic oligonucleotide
  Antisense strand to SEQ ID NO: 869374
accacuccagugauuaaac

SEQ ID NO: 869376 - RNA, 19 nt, Artificial Sequence
  Description of Artificial Sequence: Synthetic oligonucleotide
  Sense strand starting at position 3836 of SEQ ID NO: 588497
gaagaacuuugggcugaac

SEQ ID NO: 869377 - RNA, 19 nt, Artificial Sequence
  Description of Artificial Sequence: Synthetic oligonucleotide
  Antisense strand to SEQ ID NO: 869376
guucagcccaaaguucuuc

SEQ ID NO: 869378 - RNA, 19 nt, Artificial Sequence
  Description of Artificial Sequence: Synthetic oligonucleotide
  Sense strand starting at position 21 of SEQ ID NO: 588498
guccauaacuggucuugga

SEQ ID NO: 869379 - RNA, 19 nt, Artificial Sequence
  Description of Artificial Sequence: Synthetic oligonucleotide
  Antisense strand to SEQ ID NO: 869378
uccaagaccaguuauggac

SEQ ID NO: 869380 - RNA, 19 nt, Artificial Sequence
  Description of Artificial Sequence: Synthetic oligonucleotide
  Sense strand starting at position 97 of SEQ ID NO: 588498
uguguauuacuuuauucca

SEQ ID NO: 869381 - RNA, 19 nt, Artificial Sequence
  Description of Artificial Sequence: Synthetic oligonucleotide
  Antisense strand to SEQ ID NO: 869380
uggaauaaaguaauacaca

SEQ ID NO: 869382 - RNA, 19 nt, Artificial Sequence
  Description of Artificial Sequence: Synthetic oligonucleotide
  Sense strand starting at position 99 of SEQ ID NO: 588498
uguauuacuuuauuccaga

SEQ ID NO: 869383 - RNA, 19 nt, Artificial Sequence
  Description of Artificial Sequence: Synthetic oligonucleotide
  Antisense strand to SEQ ID NO: 869382
ucuggaauaaaguaauaca

SEQ ID NO: 869384 - RNA, 19 nt, Artificial Sequence
  Description of Artificial Sequence: Synthetic oligonucleotide
  Sense strand starting at position 132 of SEQ ID NO: 588498
uugaaaugaucugcuuaag

SEQ ID NO: 869385 - RNA, 19 nt, Artificial Sequence
  Description of Artificial Sequence: Synthetic oligonucleotide
  Antisense strand to SEQ ID NO: 869384
cuuaagcagaucauuucaa

SEQ ID NO: 869386 - RNA, 19 nt, Artificial Sequence
  Description of Artificial Sequence: Synthetic oligonucleotide
  Sense strand starting at position 741 of SEQ ID NO: 588498
cuaaucaaugucuacaguu

SEQ ID NO: 869387 - RNA, 19 nt, Artificial Sequence
  Description of Artificial Sequence: Synthetic oligonucleotide
  Antisense strand to SEQ ID NO: 869386
aacuguagacauugauuag

SEQ ID NO: 869388 - RNA, 19 nt, Artificial Sequence
  Description of Artificial Sequence: Synthetic oligonucleotide
  Sense strand starting at position 965 of SEQ ID NO: 588498
gaagacgguguaugaucaa

SEQ ID NO: 869389 - RNA, 19 nt, Artificial Sequence
  Description of Artificial Sequence: Synthetic oligonucleotide
  Antisense strand to SEQ ID NO: 869388
uugaucauacaccgucuuc

SEQ ID NO: 869390 - RNA, 19 nt, Artificial Sequence
  Description of Artificial Sequence: Synthetic oligonucleotide
  Sense strand starting at position 1054 of SEQ ID NO: 588498
uccugcuaacuuugagaaa

SEQ ID NO: 869391 - RNA, 19 nt, Artificial Sequence
  Description of Artificial Sequence: Synthetic oligonucleotide
  Antisense strand to SEQ ID NO: 869390
uuucucaaaguuagcagga

SEQ ID NO: 869392 - RNA, 19 nt, Artificial Sequence
  Description of Artificial Sequence: Synthetic oligonucleotide
  Sense strand starting at position 1146 of SEQ ID NO: 588498
uauuauuaccagugggauu

SEQ ID NO: 869393 - RNA, 19 nt, Artificial Sequence
  Description of Artificial Sequence: Synthetic oligonucleotide
  Antisense strand to SEQ ID NO: 869392
aaucccacugguaauaaua

SEQ ID NO: 869394 - RNA, 19 nt, Artificial Sequence
  Description of Artificial Sequence: Synthetic oligonucleotide
  Sense strand starting at position 1148 of SEQ ID NO: 588498
uuauuaccagugggauuaa

SEQ ID NO: 869395 - RNA, 19 nt, Artificial Sequence
  Description of Artificial Sequence: Synthetic oligonucleotide
  Antisense strand to SEQ ID NO: 869394
uuaaucccacugguaauaa

SEQ ID NO: 869396 - RNA, 19 nt, Artificial Sequence
  Description of Artificial Sequence: Synthetic oligonucleotide
  Sense strand starting at position 1172 of SEQ ID NO: 588498
gggcauuagcaacaaauau

SEQ ID NO: 869397 - RNA, 19 nt, Artificial Sequence
  Description of Artificial Sequence: Synthetic oligonucleotide
  Antisense strand to SEQ ID NO: 869396
auauuuguugcuaaugccc

SEQ ID NO: 869398 - RNA, 19 nt, Artificial Sequence
  Description of Artificial Sequence: Synthetic oligonucleotide
  Sense strand starting at position 1261 of SEQ ID NO: 588498
ggccuuuggauccagaaug

SEQ ID NO: 869399 - RNA, 19 nt, Artificial Sequence
  Description of Artificial Sequence: Synthetic oligonucleotide
  Antisense strand to SEQ ID NO: 869398
cauucuggauccaaaggcc

SEQ ID NO: 869400 - RNA, 19 nt, Artificial Sequence
  Description of Artificial Sequence: Synthetic oligonucleotide
  Sense strand starting at position 1269 of SEQ ID NO: 588498
gauccagaaugauuagcga

SEQ ID NO: 869401 - RNA, 19 nt, Artificial Sequence
  Description of Artificial Sequence: Synthetic oligonucleotide
  Antisense strand to SEQ ID NO: 869400
ucgcuaaucauucuggauc

SEQ ID NO: 869402 - RNA, 19 nt, Artificial Sequence
  Description of Artificial Sequence: Synthetic oligonucleotide
  Sense strand starting at position 1394 of SEQ ID NO: 588498
ggcuguugugaagacgaua

SEQ ID NO: 869403 - RNA, 19 nt, Artificial Sequence
  Description of Artificial Sequence: Synthetic oligonucleotide
  Antisense strand to SEQ ID NO: 869402
uaucgucuucacaacagcc

SEQ ID NO: 869404 - RNA, 19 nt, Artificial Sequence
  Description of Artificial Sequence: Synthetic oligonucleotide
  Sense strand starting at position 1397 of SEQ ID NO: 588498
uguugugaagacgauaagu

SEQ ID NO: 869405 - RNA, 19 nt, Artificial Sequence
  Description of Artificial Sequence: Synthetic oligonucleotide
  Antisense strand to SEQ ID NO: 869404
acuuaucgucuucacaaca

SEQ ID NO: 869406 - RNA, 19 nt, Artificial Sequence
  Description of Artificial Sequence: Synthetic oligonucleotide
  Sense strand starting at position 1399 of SEQ ID NO: 588498
uugugaagacgauaaguau

SEQ ID NO: 869407 - RNA, 19 nt, Artificial Sequence
  Description of Artificial Sequence: Synthetic oligonucleotide
  Antisense strand to SEQ ID NO: 869406
auacuuaucgucuucacaa

SEQ ID NO: 869408 - RNA, 19 nt, Artificial Sequence
  Description of Artificial Sequence: Synthetic oligonucleotide
  Sense strand starting at position 1487 of SEQ ID NO: 588498
aggugaauaaguggaaagu

SEQ ID NO: 869409 - RNA, 19 nt, Artificial Sequence
  Description of Artificial Sequence: Synthetic oligonucleotide
  Antisense strand to SEQ ID NO: 869408
acuuuccacuuauucaccu

SEQ ID NO: 869410 - RNA, 19 nt, Artificial Sequence
  Description of Artificial Sequence: Synthetic oligonucleotide
  Sense strand starting at position 1516 of SEQ ID NO: 588498
ccgcacugugaucaacaga

SEQ ID NO: 869411 - RNA, 19 nt, Artificial Sequence
  Description of Artificial Sequence: Synthetic oligonucleotide
  Antisense strand to SEQ ID NO: 869410
ucuguugaucacagugcgg

SEQ ID NO: 869412 - RNA, 19 nt, Artificial Sequence
  Description of Artificial Sequence: Synthetic oligonucleotide
  Sense strand starting at position 1696 of SEQ ID NO: 588498
ucgacuagaauugguacau

SEQ ID NO: 869413 - RNA, 19 nt, Artificial Sequence
  Description of Artificial Sequence: Synthetic oligonucleotide
  Antisense strand to SEQ ID NO: 869412
auguaccaauucuagucga

SEQ ID NO: 869414 - RNA, 19 nt, Artificial Sequence
  Description of Artificial Sequence: Synthetic oligonucleotide
  Sense strand starting at position 2012 of SEQ ID NO: 588498
ccucauccugagugaccaa

SEQ ID NO: 869415 - RNA, 19 nt, Artificial Sequence
  Description of Artificial Sequence: Synthetic oligonucleotide
  Antisense strand to SEQ ID NO: 869414
uuggucacucaggaugagg

SEQ ID NO: 869416 - RNA, 19 nt, Artificial Sequence
  Description of Artificial Sequence: Synthetic oligonucleotide
  Sense strand starting at position 2059 of SEQ ID NO: 588498
ggagcucucgcgagaauug

SEQ ID NO: 869417 - RNA, 19 nt, Artificial Sequence
  Description of Artificial Sequence: Synthetic oligonucleotide
  Antisense strand to SEQ ID NO: 869416
caauucucgcgagagcucc

SEQ ID NO: 869418 - RNA, 19 nt, Artificial Sequence
  Description of Artificial Sequence: Synthetic oligonucleotide
  Sense strand starting at position 2068 of SEQ ID NO: 588498
gcgagaauugaggauaugu

SEQ ID NO: 869419 - RNA, 19 nt, Artificial Sequence
  Description of Artificial Sequence: Synthetic oligonucleotide
  Antisense strand to SEQ ID NO: 869418
acauauccucaauucucgc

SEQ ID NO: 869420 - RNA, 19 nt, Artificial Sequence
  Description of Artificial Sequence: Synthetic oligonucleotide
  Sense strand starting at position 2202 of SEQ ID NO: 588498
ugugccuuacuugaaguaa

SEQ ID NO: 869421 - RNA, 19 nt, Artificial Sequence
  Description of Artificial Sequence: Synthetic oligonucleotide
  Antisense strand to SEQ ID NO: 869420
uuacuucaaguaaggcaca

SEQ ID NO: 869422 - RNA, 19 nt, Artificial Sequence
  Description of Artificial Sequence: Synthetic oligonucleotide
  Sense strand starting at position 2378 of SEQ ID NO: 588498
cgcaucaugaaguauggau

SEQ ID NO: 869423 - RNA, 19 nt, Artificial Sequence
  Description of Artificial Sequence: Synthetic oligonucleotide
  Antisense strand to SEQ ID NO: 869422
auccauacuucaugaugcg

SEQ ID NO: 869424 - RNA, 19 nt, Artificial Sequence
  Description of Artificial Sequence: Synthetic oligonucleotide
  Sense strand starting at position 2614 of SEQ ID NO: 588498
uugauaacagcuuaaaugu

SEQ ID NO: 869425 - RNA, 19 nt, Artificial Sequence
  Description of Artificial Sequence: Synthetic oligonucleotide
  Antisense strand to SEQ ID NO: 869424
acauuuaagcuguuaucaa

SEQ ID NO: 869426 - RNA, 19 nt, Artificial Sequence
  Description of Artificial Sequence: Synthetic oligonucleotide
  Sense strand starting at position 2743 of SEQ ID NO: 588498
ugaauucucccuuaguuug

SEQ ID NO: 869427 - RNA, 19 nt, Artificial Sequence
  Description of Artificial Sequence: Synthetic oligonucleotide
  Antisense strand to SEQ ID NO: 869426
caaacuaagggagaauuca

SEQ ID NO: 869428 - RNA, 19 nt, Artificial Sequence
  Description of Artificial Sequence: Synthetic oligonucleotide
  Sense strand starting at position 2883 of SEQ ID NO: 588498
gacagauacuggcuuuccu

SEQ ID NO: 869429 - RNA, 19 nt, Artificial Sequence
  Description of Artificial Sequence: Synthetic oligonucleotide
  Antisense strand to SEQ ID NO: 869428
aggaaagccaguaucuguc

SEQ ID NO: 869430 - RNA, 19 nt, Artificial Sequence
  Description of Artificial Sequence: Synthetic oligonucleotide
  Sense strand starting at position 2907 of SEQ ID NO: 588498
uccuuauuacugggacaug

SEQ ID NO: 869431 - RNA, 19 nt, Artificial Sequence
  Description of Artificial Sequence: Synthetic oligonucleotide
  Antisense strand to SEQ ID NO: 869430
caugucccaguaauaagga

SEQ ID NO: 869432 - RNA, 19 nt, Artificial Sequence
  Description of Artificial Sequence: Synthetic oligonucleotide
  Sense strand starting at position 2912 of SEQ ID NO: 588498
auuacugggacaugaguau

SEQ ID NO: 869433 - RNA, 19 nt, Artificial Sequence
  Description of Artificial Sequence: Synthetic oligonucleotide
  Antisense strand to SEQ ID NO: 869432
auacucaugucccaguaau

SEQ ID NO: 869434 - RNA, 19 nt, Artificial Sequence
  Description of Artificial Sequence: Synthetic oligonucleotide
  Sense strand starting at position 3003 of SEQ ID NO: 588498
uucagagagucuguugaag

SEQ ID NO: 869435 - RNA, 19 nt, Artificial Sequence
  Description of Artificial Sequence: Synthetic oligonucleotide
  Antisense strand to SEQ ID NO: 869434
cuucaacagacucucugaa

SEQ ID NO: 869436 - RNA, 19 nt, Artificial Sequence
  Description of Artificial Sequence: Synthetic oligonucleotide
  Sense strand starting at position 3136 of SEQ ID NO: 588498
gcuuuauugggaggagaac

SEQ ID NO: 869437 - RNA, 19 nt, Artificial Sequence
  Description of Artificial Sequence: Synthetic oligonucleotide
  Antisense strand to SEQ ID NO: 869436
guucuccucccaauaaagc

SEQ ID NO: 869438 - RNA, 19 nt, Artificial Sequence
  Description of Artificial Sequence: Synthetic oligonucleotide
  Sense strand starting at position 3345 of SEQ ID NO: 588498
ugcuuaagcucauuuaggu

SEQ ID NO: 869439 - RNA, 19 nt, Artificial Sequence
  Description of Artificial Sequence: Synthetic oligonucleotide
  Antisense strand to SEQ ID NO: 869438
accuaaaugagcuuaagca

SEQ ID NO: 869440 - RNA, 19 nt, Artificial Sequence
  Description of Artificial Sequence: Synthetic oligonucleotide
  Sense strand starting at position 3358 of SEQ ID NO: 588498
uuagguaguaaguauugau

SEQ ID NO: 869441 - RNA, 19 nt, Artificial Sequence
  Description of Artificial Sequence: Synthetic oligonucleotide
  Antisense strand to SEQ ID NO: 869440
aucaauacuuacuaccuaa

SEQ ID NO: 869442 - RNA, 19 nt, Artificial Sequence
  Description of Artificial Sequence: Synthetic oligonucleotide
  Sense strand starting at position 3435 of SEQ ID NO: 588498
cuuauuugccucugagcuu

SEQ ID NO: 869443 - RNA, 19 nt, Artificial Sequence
  Description of Artificial Sequence: Synthetic oligonucleotide
  Antisense strand to SEQ ID NO: 869442
aagcucagaggcaaauaag

SEQ ID NO: 869444 - RNA, 19 nt, Artificial Sequence
  Description of Artificial Sequence: Synthetic oligonucleotide
  Sense strand starting at position 3481 of SEQ ID NO: 588498
gacuuuggaucauuaugua

SEQ ID NO: 869445 - RNA, 19 nt, Artificial Sequence
  Description of Artificial Sequence: Synthetic oligonucleotide
  Antisense strand to SEQ ID NO: 869444
uacauaaugauccaaaguc

SEQ ID NO: 869446 - RNA, 19 nt, Artificial Sequence
  Description of Artificial Sequence: Synthetic oligonucleotide
  Sense strand starting at position 3551 of SEQ ID NO: 588498
aguuguaauuugguuagua

SEQ ID NO: 869447 - RNA, 19 nt, Artificial Sequence
  Description of Artificial Sequence: Synthetic oligonucleotide
  Antisense strand to SEQ ID NO: 869446
uacuaaccaaauuacaacu

SEQ ID NO: 869448 - RNA, 19 nt, Artificial Sequence
  Description of Artificial Sequence: Synthetic oligonucleotide
  Sense strand starting at position 3552 of SEQ ID NO: 588498
guuguaauuugguuaguaa

SEQ ID NO: 869449 - RNA, 19 nt, Artificial Sequence
  Description of Artificial Sequence: Synthetic oligonucleotide
  Antisense strand to SEQ ID NO: 869448
uuacuaaccaaauuacaac

SEQ ID NO: 869450 - RNA, 19 nt, Artificial Sequence
  Description of Artificial Sequence: Synthetic oligonucleotide
  Sense strand starting at position 3560 of SEQ ID NO: 588498
uugguuaguaauuagguua

SEQ ID NO: 869451 - RNA, 19 nt, Artificial Sequence
  Description of Artificial Sequence: Synthetic oligonucleotide
  Antisense strand to SEQ ID NO: 869450
uaaccuaauuacuaaccaa

SEQ ID NO: 869452 - RNA, 19 nt, Artificial Sequence
  Description of Artificial Sequence: Synthetic oligonucleotide
  Sense strand starting at position 3565 of SEQ ID NO: 588498
uaguaauuagguuauguca

SEQ ID NO: 869453 - RNA, 19 nt, Artificial Sequence
  Description of Artificial Sequence: Synthetic oligonucleotide
  Antisense strand to SEQ ID NO: 869452
ugacauaaccuaauuacua

SEQ ID NO: 869454 - RNA, 19 nt, Artificial Sequence
  Description of Artificial Sequence: Synthetic oligonucleotide
  Sense strand starting at position 3847 of SEQ ID NO: 588498
aaagguaaacuuuggcaca

SEQ ID NO: 869455 - RNA, 19 nt, Artificial Sequence
  Description of Artificial Sequence: Synthetic oligonucleotide
  Antisense strand to SEQ ID NO: 869454
ugugccaaaguuuaccuuu

SEQ ID NO: 869456 - RNA, 19 nt, Artificial Sequence
  Description of Artificial Sequence: Synthetic oligonucleotide
  Sense strand starting at position 3849 of SEQ ID NO: 588498
agguaaacuuuggcacauu

SEQ ID NO: 869457 - RNA, 19 nt, Artificial Sequence
  Description of Artificial Sequence: Synthetic oligonucleotide
  Antisense strand to SEQ ID NO: 869456
aaugugccaaaguuuaccu

SEQ ID NO: 869458 - RNA, 19 nt, Artificial Sequence
  Description of Artificial Sequence: Synthetic oligonucleotide
  Sense strand starting at position 2 of SEQ ID NO: 588499
ugaauuaacggcugaggaa

SEQ ID NO: 869459 - RNA, 19 nt, Artificial Sequence
  Description of Artificial Sequence: Synthetic oligonucleotide
  Antisense strand to SEQ ID NO: 869458
uuccucagccguuaauuca

SEQ ID NO: 869460 - RNA, 19 nt, Artificial Sequence
  Description of Artificial Sequence: Synthetic oligonucleotide
  Sense strand starting at position 98 of SEQ ID NO: 588499
aacuguuccgagugaaagg

SEQ ID NO: 869461 - RNA, 19 nt, Artificial Sequence
  Description of Artificial Sequence: Synthetic oligonucleotide
  Antisense strand to SEQ ID NO: 869460
ccuuucacucggaacaguu

SEQ ID NO: 869462 - RNA, 19 nt, Artificial Sequence
  Description of Artificial Sequence: Synthetic oligonucleotide
  Sense strand starting at position 140 of SEQ ID NO: 588499
ggcugauauggccagagag

SEQ ID NO: 869463 - RNA, 19 nt, Artificial Sequence
  Description of Artificial Sequence: Synthetic oligonucleotide
  Antisense strand to SEQ ID NO: 869462
cucucuggccauaucagcc

SEQ ID NO: 869464 - RNA, 19 nt, Artificial Sequence
  Description of Artificial Sequence: Synthetic oligonucleotide
  Sense strand starting at position 364 of SEQ ID NO: 588499
ggguacaucuaccugaacu

SEQ ID NO: 869465 - RNA, 19 nt, Artificial Sequence
  Description of Artificial Sequence: Synthetic oligonucleotide
  Antisense strand to SEQ ID NO: 869464
aguucagguagauguaccc

SEQ ID NO: 869466 - RNA, 19 nt, Artificial Sequence
  Description of Artificial Sequence: Synthetic oligonucleotide
  Sense strand starting at position 408 of SEQ ID NO: 588499
cuucuuaaggcuuggaaag

SEQ ID NO: 869467 - RNA, 19 nt, Artificial Sequence
  Description of Artificial Sequence: Synthetic oligonucleotide
  Antisense strand to SEQ ID NO: 869466
cuuuccaagccuuaagaag

SEQ ID NO: 869468 - RNA, 19 nt, Artificial Sequence
  Description of Artificial Sequence: Synthetic oligonucleotide
  Sense strand starting at position 443 of SEQ ID NO: 588499
ggcuucuuucuugaagcua

SEQ ID NO: 869469 - RNA, 19 nt, Artificial Sequence
  Description of Artificial Sequence: Synthetic oligonucleotide
  Antisense strand to SEQ ID NO: 869468
uagcuucaagaaagaagcc

SEQ ID NO: 869470 - RNA, 19 nt, Artificial Sequence
  Description of Artificial Sequence: Synthetic oligonucleotide
  Sense strand starting at position 451 of SEQ ID NO: 588499
ucuugaagcuaagucauua

SEQ ID NO: 869471 - RNA, 19 nt, Artificial Sequence
  Description of Artificial Sequence: Synthetic oligonucleotide
  Antisense strand to SEQ ID NO: 869470
uaaugacuuagcuucaaga

SEQ ID NO: 869472 - RNA, 19 nt, Artificial Sequence
  Description of Artificial Sequence: Synthetic oligonucleotide
  Sense strand starting at position 506 of SEQ ID NO: 588499
gggcucaggccagaauuau

SEQ ID NO: 869473 - RNA, 19 nt, Artificial Sequence
  Description of Artificial Sequence: Synthetic oligonucleotide
  Antisense strand to SEQ ID NO: 869472
auaauucuggccugagccc

SEQ ID NO: 869474 - RNA, 19 nt, Artificial Sequence
  Description of Artificial Sequence: Synthetic oligonucleotide
  Sense strand starting at position 517 of SEQ ID NO: 588499
agaauuauuucccagaagc

SEQ ID NO: 869475 - RNA, 19 nt, Artificial Sequence
  Description of Artificial Sequence: Synthetic oligonucleotide
  Antisense strand to SEQ ID NO: 869474
gcuucugggaaauaauucu

SEQ ID NO: 869476 - RNA, 19 nt, Artificial Sequence
  Description of Artificial Sequence: Synthetic oligonucleotide
  Sense strand starting at position 643 of SEQ ID NO: 588499
aaaccuaguggguggaaua

SEQ ID NO: 869477 - RNA, 19 nt, Artificial Sequence
  Description of Artificial Sequence: Synthetic oligonucleotide
  Antisense strand to SEQ ID NO: 869476
uauuccacccacuagguuu

SEQ ID NO: 869478 - RNA, 19 nt, Artificial Sequence
  Description of Artificial Sequence: Synthetic oligonucleotide
  Sense strand starting at position 659 of SEQ ID NO: 588499
auacacucaugcuuaggaa

SEQ ID NO: 869479 - RNA, 19 nt, Artificial Sequence
  Description of Artificial Sequence: Synthetic oligonucleotide
  Antisense strand to SEQ ID NO: 869478
uuccuaagcaugaguguau

SEQ ID NO: 869480 - RNA, 19 nt, Artificial Sequence
  Description of Artificial Sequence: Synthetic oligonucleotide
  Sense strand starting at position 678 of SEQ ID NO: 588499
gccgguaaagcagugcuaa

SEQ ID NO: 869481 - RNA, 19 nt, Artificial Sequence
  Description of Artificial Sequence: Synthetic oligonucleotide
  Antisense strand to SEQ ID NO: 869480
uuagcacugcuuuaccggc

SEQ ID NO: 869482 - RNA, 19 nt, Artificial Sequence
  Description of Artificial Sequence: Synthetic oligonucleotide
  Sense strand starting at position 776 of SEQ ID NO: 588499
ugugauguuaaugaagcuu

SEQ ID NO: 869483 - RNA, 19 nt, Artificial Sequence
  Description of Artificial Sequence: Synthetic oligonucleotide
  Antisense strand to SEQ ID NO: 869482
aagcuucauuaacaucaca

SEQ ID NO: 869484 - RNA, 19 nt, Artificial Sequence
  Description of Artificial Sequence: Synthetic oligonucleotide
  Sense strand starting at position 822 of SEQ ID NO: 588499
auaaguuucuaagucccua

SEQ ID NO: 869485 - RNA, 19 nt, Artificial Sequence
  Description of Artificial Sequence: Synthetic oligonucleotide
  Antisense strand to SEQ ID NO: 869484
uagggacuuagaaacuuau

SEQ ID NO: 869486 - RNA, 19 nt, Artificial Sequence
  Description of Artificial Sequence: Synthetic oligonucleotide
  Sense strand starting at position 956 of SEQ ID NO: 588499
aggucuuacuucuccugga

SEQ ID NO: 869487 - RNA, 19 nt, Artificial Sequence
  Description of Artificial Sequence: Synthetic oligonucleotide
  Antisense strand to SEQ ID NO: 869486
uccaggagaaguaagaccu

SEQ ID NO: 869488 - RNA, 19 nt, Artificial Sequence
  Description of Artificial Sequence: Synthetic oligonucleotide
  Sense strand starting at position 957 of SEQ ID NO: 588499
ggucuuacuucuccuggau

SEQ ID NO: 869489 - RNA, 19 nt, Artificial Sequence
  Description of Artificial Sequence: Synthetic oligonucleotide
  Antisense strand to SEQ ID NO: 869488
auccaggagaaguaagacc

SEQ ID NO: 869490 - RNA, 19 nt, Artificial Sequence
  Description of Artificial Sequence: Synthetic oligonucleotide
  Sense strand starting at position 960 of SEQ ID NO: 588499
cuuacuucuccuggaugga

SEQ ID NO: 869491 - RNA, 19 nt, Artificial Sequence
  Description of Artificial Sequence: Synthetic oligonucleotide
  Antisense strand to SEQ ID NO: 869490
uccauccaggagaaguaag

SEQ ID NO: 869492 - RNA, 19 nt, Artificial Sequence
  Description of Artificial Sequence: Synthetic oligonucleotide
  Sense strand starting at position 2322 of SEQ ID NO: 588499
ccagaaggaugcgcuauuu

SEQ ID NO: 869493 - RNA, 19 nt, Artificial Sequence
  Description of Artificial Sequence: Synthetic oligonucleotide
  Antisense strand to SEQ ID NO: 869492
aaauagcgcauccuucugg

SEQ ID NO: 869494 - RNA, 19 nt, Artificial Sequence
  Description of Artificial Sequence: Synthetic oligonucleotide
  Sense strand starting at position 2760 of SEQ ID NO: 588499
uucuuaaugcugcauaaag

SEQ ID NO: 869495 - RNA, 19 nt, Artificial Sequence
  Description of Artificial Sequence: Synthetic oligonucleotide
  Antisense strand to SEQ ID NO: 869494
cuuuaugcagcauuaagaa

SEQ ID NO: 869496 - RNA, 19 nt, Artificial Sequence
  Description of Artificial Sequence: Synthetic oligonucleotide
  Sense strand starting at position 2768 of SEQ ID NO: 588499
gcugcauaaagucauggua

SEQ ID NO: 869497 - RNA, 19 nt, Artificial Sequence
  Description of Artificial Sequence: Synthetic oligonucleotide
  Antisense strand to SEQ ID NO: 869496
uaccaugacuuuaugcagc

SEQ ID NO: 869498 - RNA, 19 nt, Artificial Sequence
  Description of Artificial Sequence: Synthetic oligonucleotide
  Sense strand starting at position 2771 of SEQ ID NO: 588499
gcauaaagucaugguacau

SEQ ID NO: 869499 - RNA, 19 nt, Artificial Sequence
  Description of Artificial Sequence: Synthetic oligonucleotide
  Antisense strand to SEQ ID NO: 869498
auguaccaugacuuuaugc

SEQ ID NO: 869500 - RNA, 19 nt, Artificial Sequence
  Description of Artificial Sequence: Synthetic oligonucleotide
  Sense strand starting at position 2811 of SEQ ID NO: 588499
ugugaugagauauggugau

SEQ ID NO: 869501 - RNA, 19 nt, Artificial Sequence
  Description of Artificial Sequence: Synthetic oligonucleotide
  Antisense strand to SEQ ID NO: 869500
aucaccauaucucaucaca

SEQ ID NO: 869502 - RNA, 19 nt, Artificial Sequence
  Description of Artificial Sequence: Synthetic oligonucleotide
  Sense strand starting at position 2817 of SEQ ID NO: 588499
gagauauggugauauauuu

SEQ ID NO: 869503 - RNA, 19 nt, Artificial Sequence
  Description of Artificial Sequence: Synthetic oligonucleotide
  Antisense strand to SEQ ID NO: 869502
aaauauaucaccauaucuc

SEQ ID NO: 869504 - RNA, 19 nt, Artificial Sequence
  Description of Artificial Sequence: Synthetic oligonucleotide
  Sense strand starting at position 2907 of SEQ ID NO: 588499
gguuaauacgaauaaugcu

SEQ ID NO: 869505 - RNA, 19 nt, Artificial Sequence
  Description of Artificial Sequence: Synthetic oligonucleotide
  Antisense strand to SEQ ID NO: 869504
agcauuauucguauuaacc

SEQ ID NO: 869506 - RNA, 19 nt, Artificial Sequence
  Description of Artificial Sequence: Synthetic oligonucleotide
  Sense strand starting at position 2913 of SEQ ID NO: 588499
uacgaauaaugcuuugaug

SEQ ID NO: 869507 - RNA, 19 nt, Artificial Sequence
  Description of Artificial Sequence: Synthetic oligonucleotide
  Antisense strand to SEQ ID NO: 869506
caucaaagcauuauucgua

SEQ ID NO: 869508 - RNA, 19 nt, Artificial Sequence
  Description of Artificial Sequence: Synthetic oligonucleotide
  Sense strand starting at position 2915 of SEQ ID NO: 588499
cgaauaaugcuuugaugaa

SEQ ID NO: 869509 - RNA, 19 nt, Artificial Sequence
  Description of Artificial Sequence: Synthetic oligonucleotide
  Antisense strand to SEQ ID NO: 869508
uucaucaaagcauuauucg

SEQ ID NO: 869510 - RNA, 19 nt, Artificial Sequence
  Description of Artificial Sequence: Synthetic oligonucleotide
  Sense strand starting at position 3119 of SEQ ID NO: 588499
ugggauuugauguguugcu

SEQ ID NO: 869511 - RNA, 19 nt, Artificial Sequence
  Description of Artificial Sequence: Synthetic oligonucleotide
  Antisense strand to SEQ ID NO: 869510
agcaacacaucaaauccca

SEQ ID NO: 869512 - RNA, 19 nt, Artificial Sequence
  Description of Artificial Sequence: Synthetic oligonucleotide
  Sense strand starting at position 3219 of SEQ ID NO: 588499
augugucuugugcucuauu

SEQ ID NO: 869513 - RNA, 19 nt, Artificial Sequence
  Description of Artificial Sequence: Synthetic oligonucleotide
  Antisense strand to SEQ ID NO: 869512
aauagagcacaagacacau

SEQ ID NO: 869514 - RNA, 19 nt, Artificial Sequence
  Description of Artificial Sequence: Synthetic oligonucleotide
  Sense strand starting at position 3221 of SEQ ID NO: 588499
gugucuugugcucuauugu

SEQ ID NO: 869515 - RNA, 19 nt, Artificial Sequence
  Description of Artificial Sequence: Synthetic oligonucleotide
  Antisense strand to SEQ ID NO: 869514
acaauagagcacaagacac

SEQ ID NO: 869516 - RNA, 19 nt, Artificial Sequence
  Description of Artificial Sequence: Synthetic oligonucleotide
  Sense strand starting at position 3248 of SEQ ID NO: 588499
ugcugaacuccuggagaug

SEQ ID NO: 869517 - RNA, 19 nt, Artificial Sequence
  Description of Artificial Sequence: Synthetic oligonucleotide
  Antisense strand to SEQ ID NO: 869516
caucuccaggaguucagca

SEQ ID NO: 869518 - RNA, 19 nt, Artificial Sequence
  Description of Artificial Sequence: Synthetic oligonucleotide
  Sense strand starting at position 3399 of SEQ ID NO: 588499
uuaugugguggucagagga

SEQ ID NO: 869519 - RNA, 19 nt, Artificial Sequence
  Description of Artificial Sequence: Synthetic oligonucleotide
  Antisense strand to SEQ ID NO: 869518
uccucugaccaccacauaa

SEQ ID NO: 869520 - RNA, 19 nt, Artificial Sequence
  Description of Artificial Sequence: Synthetic oligonucleotide
  Sense strand starting at position 3666 of SEQ ID NO: 588499
aaaugaucacuauguguga

SEQ ID NO: 869521 - RNA, 19 nt, Artificial Sequence
  Description of Artificial Sequence: Synthetic oligonucleotide
  Antisense strand to SEQ ID NO: 869520
ucacacauagugaucauuu

SEQ ID NO: 869522 - RNA, 19 nt, Artificial Sequence
  Description of Artificial Sequence: Synthetic oligonucleotide
  Sense strand starting at position 3667 of SEQ ID NO: 588499
aaugaucacuaugugugaa

SEQ ID NO: 869523 - RNA, 19 nt, Artificial Sequence
  Description of Artificial Sequence: Synthetic oligonucleotide
  Antisense strand to SEQ ID NO: 869522
uucacacauagugaucauu

SEQ ID NO: 869524 - RNA, 19 nt, Artificial Sequence
  Description of Artificial Sequence: Synthetic oligonucleotide
  Sense strand starting at position 3669 of SEQ ID NO: 588499
ugaucacuaugugugaaga

SEQ ID NO: 869525 - RNA, 19 nt, Artificial Sequence
  Description of Artificial Sequence: Synthetic oligonucleotide
  Antisense strand to SEQ ID NO: 869524
ucuucacacauagugauca

SEQ ID NO: 869526 - RNA, 19 nt, Artificial Sequence
  Description of Artificial Sequence: Synthetic oligonucleotide
  Sense strand starting at position 3670 of SEQ ID NO: 588499
gaucacuaugugugaagau

SEQ ID NO: 869527 - RNA, 19 nt, Artificial Sequence
  Description of Artificial Sequence: Synthetic oligonucleotide
  Antisense strand to SEQ ID NO: 869526
aucuucacacauagugauc

SEQ ID NO: 869528 - RNA, 19 nt, Artificial Sequence
  Description of Artificial Sequence: Synthetic oligonucleotide
  Sense strand starting at position 3694 of SEQ ID NO: 588499
ccuggaguugguuacuaua

SEQ ID NO: 869529 - RNA, 19 nt, Artificial Sequence
  Description of Artificial Sequence: Synthetic oligonucleotide
  Antisense strand to SEQ ID NO: 869528
uauaguaaccaacuccagg

SEQ ID NO: 869530 - RNA, 19 nt, Artificial Sequence
  Description of Artificial Sequence: Synthetic oligonucleotide
  Sense strand starting at position 3775 of SEQ ID NO: 588499
agaggcaaucguuaaauaa

SEQ ID NO: 869531 - RNA, 19 nt, Artificial Sequence
  Description of Artificial Sequence: Synthetic oligonucleotide
  Antisense strand to SEQ ID NO: 869530
uuauuuaacgauugccucu

SEQ ID NO: 869532 - RNA, 19 nt, Artificial Sequence
  Description of Artificial Sequence: Synthetic oligonucleotide
  Sense strand starting at position 3817 of SEQ ID NO: 588499
ggauuaugcaggcauuaac

SEQ ID NO: 869533 - RNA, 19 nt, Artificial Sequence
  Description of Artificial Sequence: Synthetic oligonucleotide
  Antisense strand to SEQ ID NO: 869532
guuaaugccugcauaaucc

SEQ ID NO: 869534 - RNA, 19 nt, Artificial Sequence
  Description of Artificial Sequence: Synthetic oligonucleotide
  Sense strand starting at position 3820 of SEQ ID NO: 588499
uuaugcaggcauuaacaau

SEQ ID NO: 869535 - RNA, 19 nt, Artificial Sequence
  Description of Artificial Sequence: Synthetic oligonucleotide
  Antisense strand to SEQ ID NO: 869534
auuguuaaugccugcauaa

SEQ ID NO: 869536 - RNA, 19 nt, Artificial Sequence
  Description of Artificial Sequence: Synthetic oligonucleotide
  Sense strand starting at position 3944 of SEQ ID NO: 588499
auaugugaauguguaaaca

SEQ ID NO: 869537 - RNA, 19 nt, Artificial Sequence
  Description of Artificial Sequence: Synthetic oligonucleotide
  Antisense strand to SEQ ID NO: 869536
uguuuacacauucacauau

SEQ ID NO: 869538 - RNA, 19 nt, Artificial Sequence
  Description of Artificial Sequence: Synthetic oligonucleotide
  Sense strand starting at position 391 of SEQ ID NO: 588500
ccuuaucuucucggaggaa

SEQ ID NO: 869539 - RNA, 19 nt, Artificial Sequence
  Description of Artificial Sequence: Synthetic oligonucleotide
  Antisense strand to SEQ ID NO: 869538
uuccuccgagaagauaagg

SEQ ID NO: 869540 - RNA, 19 nt, Artificial Sequence
  Description of Artificial Sequence: Synthetic oligonucleotide
  Sense strand starting at position 423 of SEQ ID NO: 588500
uucuuuccaggcuaggaaa

SEQ ID NO: 869541 - RNA, 19 nt, Artificial Sequence
  Description of Artificial Sequence: Synthetic oligonucleotide
  Antisense strand to SEQ ID NO: 869540
uuuccuagccuggaaagaa

SEQ ID NO: 869542 - RNA, 19 nt, Artificial Sequence
  Description of Artificial Sequence: Synthetic oligonucleotide
  Sense strand starting at position 649 of SEQ ID NO: 588500
ccaccucuuggcuagacau

SEQ ID NO: 869543 - RNA, 19 nt, Artificial Sequence
  Description of Artificial Sequence: Synthetic oligonucleotide
  Antisense strand to SEQ ID NO: 869542
augucuagccaagaggugg

SEQ ID NO: 869544 - RNA, 19 nt, Artificial Sequence
  Description of Artificial Sequence: Synthetic oligonucleotide
  Sense strand starting at position 651 of SEQ ID NO: 588500
accucuuggcuagacauca

SEQ ID NO: 869545 - RNA, 19 nt, Artificial Sequence
  Description of Artificial Sequence: Synthetic oligonucleotide
  Antisense strand to SEQ ID NO: 869544
ugaugucuagccaagaggu

SEQ ID NO: 869546 - RNA, 19 nt, Artificial Sequence
  Description of Artificial Sequence: Synthetic oligonucleotide
  Sense strand starting at position 679 of SEQ ID NO: 588500
uuacauauaccagguagau

SEQ ID NO: 869547 - RNA, 19 nt, Artificial Sequence
  Description of Artificial Sequence: Synthetic oligonucleotide
  Antisense strand to SEQ ID NO: 869546
aucuaccugguauauguaa

SEQ ID NO: 869548 - RNA, 19 nt, Artificial Sequence
  Description of Artificial Sequence: Synthetic oligonucleotide
  Sense strand starting at position 725 of SEQ ID NO: 588500
ccuagcccugacugaauua

SEQ ID NO: 869549 - RNA, 19 nt, Artificial Sequence
  Description of Artificial Sequence: Synthetic oligonucleotide
  Antisense strand to SEQ ID NO: 869548
uaauucagucagggcuagg

SEQ ID NO: 869550 - RNA, 19 nt, Artificial Sequence
  Description of Artificial Sequence: Synthetic oligonucleotide
  Sense strand starting at position 989 of SEQ ID NO: 588500
acaguugaauucuuuacga

SEQ ID NO: 869551 - RNA, 19 nt, Artificial Sequence
  Description of Artificial Sequence: Synthetic oligonucleotide
  Antisense strand to SEQ ID NO: 869550
ucguaaagaauucaacugu

SEQ ID NO: 869552 - RNA, 19 nt, Artificial Sequence
  Description of Artificial Sequence: Synthetic oligonucleotide
  Sense strand starting at position 991 of SEQ ID NO: 588500
aguugaauucuuuacgauc

SEQ ID NO: 869553 - RNA, 19 nt, Artificial Sequence
  Description of Artificial Sequence: Synthetic oligonucleotide
  Antisense strand to SEQ ID NO: 869552
gaucguaaagaauucaacu

SEQ ID NO: 869554 - RNA, 19 nt, Artificial Sequence
  Description of Artificial Sequence: Synthetic oligonucleotide
  Sense strand starting at position 1096 of SEQ ID NO: 588500
caucguuaacgggagagaa

SEQ ID NO: 869555 - RNA, 19 nt, Artificial Sequence
  Description of Artificial Sequence: Synthetic oligonucleotide
  Antisense strand to SEQ ID NO: 869554
uucucucccguuaacgaug

SEQ ID NO: 869556 - RNA, 19 nt, Artificial Sequence
  Description of Artificial Sequence: Synthetic oligonucleotide
  Sense strand starting at position 1286 of SEQ ID NO: 588500
caaucaagaggcuggguua

SEQ ID NO: 869557 - RNA, 19 nt, Artificial Sequence
  Description of Artificial Sequence: Synthetic oligonucleotide
  Antisense strand to SEQ ID NO: 869556
uaacccagccucuugauug

SEQ ID NO: 869558 - RNA, 19 nt, Artificial Sequence
  Description of Artificial Sequence: Synthetic oligonucleotide
  Sense strand starting at position 1287 of SEQ ID NO: 588500
aaucaagaggcuggguuaa

SEQ ID NO: 869559 - RNA, 19 nt, Artificial Sequence
  Description of Artificial Sequence: Synthetic oligonucleotide
  Antisense strand to SEQ ID NO: 869558
uuaacccagccucuugauu

SEQ ID NO: 869560 - RNA, 19 nt, Artificial Sequence
  Description of Artificial Sequence: Synthetic oligonucleotide
  Sense strand starting at position 1685 of SEQ ID NO: 588500
gcacuaggccuccaaggau

SEQ ID NO: 869561 - RNA, 19 nt, Artificial Sequence
  Description of Artificial Sequence: Synthetic oligonucleotide
  Antisense strand to SEQ ID NO: 869560
auccuuggaggccuagugc

SEQ ID NO: 869562 - RNA, 19 nt, Artificial Sequence
  Description of Artificial Sequence: Synthetic oligonucleotide
  Sense strand starting at position 2279 of SEQ ID NO: 588500
ccuaaugcuguguagacua

SEQ ID NO: 869563 - RNA, 19 nt, Artificial Sequence
  Description of Artificial Sequence: Synthetic oligonucleotide
  Antisense strand to SEQ ID NO: 869562
uagucuacacagcauuagg

SEQ ID NO: 869564 - RNA, 19 nt, Artificial Sequence
  Description of Artificial Sequence: Synthetic oligonucleotide
  Sense strand starting at position 2469 of SEQ ID NO: 588500
gguguugcucgcaguaaga

SEQ ID NO: 869565 - RNA, 19 nt, Artificial Sequence
  Description of Artificial Sequence: Synthetic oligonucleotide
  Antisense strand to SEQ ID NO: 869564
ucuuacugcgagcaacacc

SEQ ID NO: 869566 - RNA, 19 nt, Artificial Sequence
  Description of Artificial Sequence: Synthetic oligonucleotide
  Sense strand starting at position 2724 of SEQ ID NO: 588500
gccacuuagaaguagguau

SEQ ID NO: 869567 - RNA, 19 nt, Artificial Sequence
  Description of Artificial Sequence: Synthetic oligonucleotide
  Antisense strand to SEQ ID NO: 869566
auaccuacuucuaaguggc

SEQ ID NO: 869568 - RNA, 19 nt, Artificial Sequence
  Description of Artificial Sequence: Synthetic oligonucleotide
  Sense strand starting at position 2818 of SEQ ID NO: 588500
cagugauaaugguuauacu

SEQ ID NO: 869569 - RNA, 19 nt, Artificial Sequence
  Description of Artificial Sequence: Synthetic oligonucleotide
  Antisense strand to SEQ ID NO: 869568
aguauaaccauuaucacug

SEQ ID NO: 869570 - RNA, 19 nt, Artificial Sequence
  Description of Artificial Sequence: Synthetic oligonucleotide
  Sense strand starting at position 2827 of SEQ ID NO: 588500
ugguuauacucaguuuaaa

SEQ ID NO: 869571 - RNA, 19 nt, Artificial Sequence
  Description of Artificial Sequence: Synthetic oligonucleotide
  Antisense strand to SEQ ID NO: 869570
uuuaaacugaguauaacca

SEQ ID NO: 869572 - RNA, 19 nt, Artificial Sequence
  Description of Artificial Sequence: Synthetic oligonucleotide
  Sense strand starting at position 2885 of SEQ ID NO: 588500
gggugaccaaccuguccua

SEQ ID NO: 869573 - RNA, 19 nt, Artificial Sequence
  Description of Artificial Sequence: Synthetic oligonucleotide
  Antisense strand to SEQ ID NO: 869572
uaggacagguuggucaccc

SEQ ID NO: 869574 - RNA, 19 nt, Artificial Sequence
  Description of Artificial Sequence: Synthetic oligonucleotide
  Sense strand starting at position 2994 of SEQ ID NO: 588500
uaaagaacgggaugcuaau

SEQ ID NO: 869575 - RNA, 19 nt, Artificial Sequence
  Description of Artificial Sequence: Synthetic oligonucleotide
  Antisense strand to SEQ ID NO: 869574
auuagcaucccguucuuua

SEQ ID NO: 869576 - RNA, 19 nt, Artificial Sequence
  Description of Artificial Sequence: Synthetic oligonucleotide
  Sense strand starting at position 3054 of SEQ ID NO: 588500
gugaguguaaaguaagaug

SEQ ID NO: 869577 - RNA, 19 nt, Artificial Sequence
  Description of Artificial Sequence: Synthetic oligonucleotide
  Antisense strand to SEQ ID NO: 869576
caucuuacuuuacacucac

SEQ ID NO: 869578 - RNA, 19 nt, Artificial Sequence
  Description of Artificial Sequence: Synthetic oligonucleotide
  Sense strand starting at position 3078 of SEQ ID NO: 588500
aggaguuaauuaccuuaau

SEQ ID NO: 869579 - RNA, 19 nt, Artificial Sequence
  Description of Artificial Sequence: Synthetic oligonucleotide
  Antisense strand to SEQ ID NO: 869578
auuaagguaauuaacuccu

SEQ ID NO: 869580 - RNA, 19 nt, Artificial Sequence
  Description of Artificial Sequence: Synthetic oligonucleotide
  Sense strand starting at position 3079 of SEQ ID NO: 588500
ggaguuaauuaccuuaaug

SEQ ID NO: 869581 - RNA, 19 nt, Artificial Sequence
  Description of Artificial Sequence: Synthetic oligonucleotide
  Antisense strand to SEQ ID NO: 869580
cauuaagguaauuaacucc

SEQ ID NO: 869582 - RNA, 19 nt, Artificial Sequence
  Description of Artificial Sequence: Synthetic oligonucleotide
  Sense strand starting at position 3107 of SEQ ID NO: 588500
uuauucuaucugggccaga

SEQ ID NO: 869583 - RNA, 19 nt, Artificial Sequence
  Description of Artificial Sequence: Synthetic oligonucleotide
  Antisense strand to SEQ ID NO: 869582
ucuggcccagauagaauaa

SEQ ID NO: 869584 - RNA, 19 nt, Artificial Sequence
  Description of Artificial Sequence: Synthetic oligonucleotide
  Sense strand starting at position 3108 of SEQ ID NO: 588500
uauucuaucugggccagau

SEQ ID NO: 869585 - RNA, 19 nt, Artificial Sequence
  Description of Artificial Sequence: Synthetic oligonucleotide
  Antisense strand to SEQ ID NO: 869584
aucuggcccagauagaaua

SEQ ID NO: 869586 - RNA, 19 nt, Artificial Sequence
  Description of Artificial Sequence: Synthetic oligonucleotide
  Sense strand starting at position 3117 of SEQ ID NO: 588500
ugggccagaucucuuuaaa

SEQ ID NO: 869587 - RNA, 19 nt, Artificial Sequence
  Description of Artificial Sequence: Synthetic oligonucleotide
  Antisense strand to SEQ ID NO: 869586
uuuaaagagaucuggccca

SEQ ID NO: 869588 - RNA, 19 nt, Artificial Sequence
  Description of Artificial Sequence: Synthetic oligonucleotide
  Sense strand starting at position 3177 of SEQ ID NO: 588500
aagggauacccgugaucag

SEQ ID NO: 869589 - RNA, 19 nt, Artificial Sequence
  Description of Artificial Sequence: Synthetic oligonucleotide
  Antisense strand to SEQ ID NO: 869588
cugaucacggguaucccuu

SEQ ID NO: 869590 - RNA, 19 nt, Artificial Sequence
  Description of Artificial Sequence: Synthetic oligonucleotide
  Sense strand starting at position 3258 of SEQ ID NO: 588500
agugguaguaaauauugau

SEQ ID NO: 869591 - RNA, 19 nt, Artificial Sequence
  Description of Artificial Sequence: Synthetic oligonucleotide
  Antisense strand to SEQ ID NO: 869590
aucaauauuuacuaccacu

SEQ ID NO: 869592 - RNA, 19 nt, Artificial Sequence
  Description of Artificial Sequence: Synthetic oligonucleotide
  Sense strand starting at position 3290 of SEQ ID NO: 588500
agacucauguauucuucua

SEQ ID NO: 869593 - RNA, 19 nt, Artificial Sequence
  Description of Artificial Sequence: Synthetic oligonucleotide
  Antisense strand to SEQ ID NO: 869592
uagaagaauacaugagucu

SEQ ID NO: 869594 - RNA, 19 nt, Artificial Sequence
  Description of Artificial Sequence: Synthetic oligonucleotide
  Sense strand starting at position 3292 of SEQ ID NO: 588500
acucauguauucuucuaga

SEQ ID NO: 869595 - RNA, 19 nt, Artificial Sequence
  Description of Artificial Sequence: Synthetic oligonucleotide
  Antisense strand to SEQ ID NO: 869594
ucuagaagaauacaugagu

SEQ ID NO: 869596 - RNA, 19 nt, Artificial Sequence
  Description of Artificial Sequence: Synthetic oligonucleotide
  Sense strand starting at position 3297 of SEQ ID NO: 588500
uguauucuucuagauguca

SEQ ID NO: 869597 - RNA, 19 nt, Artificial Sequence
  Description of Artificial Sequence: Synthetic oligonucleotide
  Antisense strand to SEQ ID NO: 869596
ugacaucuagaagaauaca

SEQ ID NO: 869598 - RNA, 19 nt, Artificial Sequence
  Description of Artificial Sequence: Synthetic oligonucleotide
  Sense strand starting at position 3431 of SEQ ID NO: 588500
guggucuuggauugaacaa

SEQ ID NO: 869599 - RNA, 19 nt, Artificial Sequence
  Description of Artificial Sequence: Synthetic oligonucleotide
  Antisense strand to SEQ ID NO: 869598
uuguucaauccaagaccac

SEQ ID NO: 869600 - RNA, 19 nt, Artificial Sequence
  Description of Artificial Sequence: Synthetic oligonucleotide
  Sense strand starting at position 3478 of SEQ ID NO: 588500
aucuucuacuguguugaaa

SEQ ID NO: 869601 - RNA, 19 nt, Artificial Sequence
  Description of Artificial Sequence: Synthetic oligonucleotide
  Antisense strand to SEQ ID NO: 869600
uuucaacacaguagaagau

SEQ ID NO: 869602 - RNA, 19 nt, Artificial Sequence
  Description of Artificial Sequence: Synthetic oligonucleotide
  Sense strand starting at position 3498 of SEQ ID NO: 588500
gguauuauuauaggaguuu

SEQ ID NO: 869603 - RNA, 19 nt, Artificial Sequence
  Description of Artificial Sequence: Synthetic oligonucleotide
  Antisense strand to SEQ ID NO: 869602
aaacuccuauaauaauacc

SEQ ID NO: 869604 - RNA, 19 nt, Artificial Sequence
  Description of Artificial Sequence: Synthetic oligonucleotide
  Sense strand starting at position 3510 of SEQ ID NO: 588500
ggaguuuguuuggcaagaa

SEQ ID NO: 869605 - RNA, 19 nt, Artificial Sequence
  Description of Artificial Sequence: Synthetic oligonucleotide
  Antisense strand to SEQ ID NO: 869604
uucuugccaaacaaacucc

SEQ ID NO: 869606 - RNA, 19 nt, Artificial Sequence
  Description of Artificial Sequence: Synthetic oligonucleotide
  Sense strand starting at position 3673 of SEQ ID NO: 588500
gguagagacauguauggua

SEQ ID NO: 869607 - RNA, 19 nt, Artificial Sequence
  Description of Artificial Sequence: Synthetic oligonucleotide
  Antisense strand to SEQ ID NO: 869606
uaccauacaugucucuacc

SEQ ID NO: 869608 - RNA, 19 nt, Artificial Sequence
  Description of Artificial Sequence: Synthetic oligonucleotide
  Sense strand starting at position 3675 of SEQ ID NO: 588500
uagagacauguaugguauc

SEQ ID NO: 869609 - RNA, 19 nt, Artificial Sequence
  Description of Artificial Sequence: Synthetic oligonucleotide
  Antisense strand to SEQ ID NO: 869608
gauaccauacaugucucua

SEQ ID NO: 869610 - RNA, 19 nt, Artificial Sequence
  Description of Artificial Sequence: Synthetic oligonucleotide
  Sense strand starting at position 3709 of SEQ ID NO: 588500
ugccuuauuucuuugucuu

SEQ ID NO: 869611 - RNA, 19 nt, Artificial Sequence
  Description of Artificial Sequence: Synthetic oligonucleotide
  Antisense strand to SEQ ID NO: 869610
aagacaaagaaauaaggca

SEQ ID NO: 869612 - RNA, 19 nt, Artificial Sequence
  Description of Artificial Sequence: Synthetic oligonucleotide
  Sense strand starting at position 3710 of SEQ ID NO: 588500
gccuuauuucuuugucuuc

SEQ ID NO: 869613 - RNA, 19 nt, Artificial Sequence
  Description of Artificial Sequence: Synthetic oligonucleotide
  Antisense strand to SEQ ID NO: 869612
gaagacaaagaaauaaggc

SEQ ID NO: 869614 - RNA, 19 nt, Artificial Sequence
  Description of Artificial Sequence: Synthetic oligonucleotide
  Sense strand starting at position 3735 of SEQ ID NO: 588500
agugcuaccuaccuaaaga

SEQ ID NO: 869615 - RNA, 19 nt, Artificial Sequence
  Description of Artificial Sequence: Synthetic oligonucleotide
  Antisense strand to SEQ ID NO: 869614
ucuuuagguagguagcacu

SEQ ID NO: 869616 - RNA, 19 nt, Artificial Sequence
  Description of Artificial Sequence: Synthetic oligonucleotide
  Sense strand starting at position 3766 of SEQ ID NO: 588500
uucccuuuccugggaaaga

SEQ ID NO: 869617 - RNA, 19 nt, Artificial Sequence
  Description of Artificial Sequence: Synthetic oligonucleotide
  Antisense strand to SEQ ID NO: 869616
ucuuucccaggaaagggaa

SEQ ID NO: 869618 - RNA, 19 nt, Artificial Sequence
  Description of Artificial Sequence: Synthetic oligonucleotide
  Sense strand starting at position 488 of SEQ ID NO: 588501
uacuuaugucccugucagu

SEQ ID NO: 869619 - RNA, 19 nt, Artificial Sequence
  Description of Artificial Sequence: Synthetic oligonucleotide
  Antisense strand to SEQ ID NO: 869618
acugacagggacauaagua

SEQ ID NO: 869620 - RNA, 19 nt, Artificial Sequence
  Description of Artificial Sequence: Synthetic oligonucleotide
  Sense strand starting at position 494 of SEQ ID NO: 588501
ugucccugucagugagaga

SEQ ID NO: 869621 - RNA, 19 nt, Artificial Sequence
  Description of Artificial Sequence: Synthetic oligonucleotide
  Antisense strand to SEQ ID NO: 869620
ucucucacugacagggaca

SEQ ID NO: 869622 - RNA, 19 nt, Artificial Sequence
  Description of Artificial Sequence: Synthetic oligonucleotide
  Sense strand starting at position 495 of SEQ ID NO: 588501
gucccugucagugagagau

SEQ ID NO: 869623 - RNA, 19 nt, Artificial Sequence
  Description of Artificial Sequence: Synthetic oligonucleotide
  Antisense strand to SEQ ID NO: 869622
aucucucacugacagggac

SEQ ID NO: 869624 - RNA, 19 nt, Artificial Sequence
  Description of Artificial Sequence: Synthetic oligonucleotide
  Sense strand starting at position 658 of SEQ ID NO: 588501
ccaaauguuuccuuagggu

SEQ ID NO: 869625 - RNA, 19 nt, Artificial Sequence
  Description of Artificial Sequence: Synthetic oligonucleotide
  Antisense strand to SEQ ID NO: 869624
acccuaaggaaacauuugg

SEQ ID NO: 869626 - RNA, 19 nt, Artificial Sequence
  Description of Artificial Sequence: Synthetic oligonucleotide
  Sense strand starting at position 1074 of SEQ ID NO: 588501
gcaucucaucacuguuaca

SEQ ID NO: 869627 - RNA, 19 nt, Artificial Sequence
  Description of Artificial Sequence: Synthetic oligonucleotide
  Antisense strand to SEQ ID NO: 869626
uguaacagugaugagaugc

SEQ ID NO: 869628 - RNA, 19 nt, Artificial Sequence
  Description of Artificial Sequence: Synthetic oligonucleotide
  Sense strand starting at position 1235 of SEQ ID NO: 588501
agguaucucuaguaagaca

SEQ ID NO: 869629 - RNA, 19 nt, Artificial Sequence
  Description of Artificial Sequence: Synthetic oligonucleotide
  Antisense strand to SEQ ID NO: 869628
ugucuuacuagagauaccu

SEQ ID NO: 869630 - RNA, 19 nt, Artificial Sequence
  Description of Artificial Sequence: Synthetic oligonucleotide
  Sense strand starting at position 1377 of SEQ ID NO: 588501
gugggugugucugucaaug

SEQ ID NO: 869631 - RNA, 19 nt, Artificial Sequence
  Description of Artificial Sequence: Synthetic oligonucleotide
  Antisense strand to SEQ ID NO: 869630
cauugacagacacacccac

SEQ ID NO: 869632 - RNA, 19 nt, Artificial Sequence
  Description of Artificial Sequence: Synthetic oligonucleotide
  Sense strand starting at position 1387 of SEQ ID NO: 588501
cugucaaugcuggacacuu

SEQ ID NO: 869633 - RNA, 19 nt, Artificial Sequence
  Description of Artificial Sequence: Synthetic oligonucleotide
  Antisense strand to SEQ ID NO: 869632
aaguguccagcauugacag

SEQ ID NO: 869634 - RNA, 19 nt, Artificial Sequence
  Description of Artificial Sequence: Synthetic oligonucleotide
  Sense strand starting at position 1389 of SEQ ID NO: 588501
gucaaugcuggacacuuaa

SEQ ID NO: 869635 - RNA, 19 nt, Artificial Sequence
  Description of Artificial Sequence: Synthetic oligonucleotide
  Antisense strand to SEQ ID NO: 869634
uuaaguguccagcauugac

SEQ ID NO: 869636 - RNA, 19 nt, Artificial Sequence
  Description of Artificial Sequence: Synthetic oligonucleotide
  Sense strand starting at position 1407 of SEQ ID NO: 588501
agagaaaggucagucccau

SEQ ID NO: 869637 - RNA, 19 nt, Artificial Sequence
  Description of Artificial Sequence: Synthetic oligonucleotide
  Antisense strand to SEQ ID NO: 869636
augggacugaccuuucucu

SEQ ID NO: 869638 - RNA, 19 nt, Artificial Sequence
  Description of Artificial Sequence: Synthetic oligonucleotide
  Sense strand starting at position 1857 of SEQ ID NO: 588501
cacugacagucguuaguca

SEQ ID NO: 869639 - RNA, 19 nt, Artificial Sequence
  Description of Artificial Sequence: Synthetic oligonucleotide
  Antisense strand to SEQ ID NO: 869638
ugacuaacgacugucagug

SEQ ID NO: 869640 - RNA, 19 nt, Artificial Sequence
  Description of Artificial Sequence: Synthetic oligonucleotide
  Sense strand starting at position 2352 of SEQ ID NO: 588501
ucucaaacuuugcuggaua

SEQ ID NO: 869641 - RNA, 19 nt, Artificial Sequence
  Description of Artificial Sequence: Synthetic oligonucleotide
  Antisense strand to SEQ ID NO: 869640
uauccagcaaaguuugaga

SEQ ID NO: 869642 - RNA, 19 nt, Artificial Sequence
  Description of Artificial Sequence: Synthetic oligonucleotide
  Sense strand starting at position 2354 of SEQ ID NO: 588501
ucaaacuuugcuggauauu

SEQ ID NO: 869643 - RNA, 19 nt, Artificial Sequence
  Description of Artificial Sequence: Synthetic oligonucleotide
  Antisense strand to SEQ ID NO: 869642
aauauccagcaaaguuuga

SEQ ID NO: 869644 - RNA, 19 nt, Artificial Sequence
  Description of Artificial Sequence: Synthetic oligonucleotide
  Sense strand starting at position 2482 of SEQ ID NO: 588501
agccaaaucagagguguaa

SEQ ID NO: 869645 - RNA, 19 nt, Artificial Sequence
  Description of Artificial Sequence: Synthetic oligonucleotide
  Antisense strand to SEQ ID NO: 869644
uuacaccucugauuuggcu

SEQ ID NO: 869646 - RNA, 19 nt, Artificial Sequence
  Description of Artificial Sequence: Synthetic oligonucleotide
  Sense strand starting at position 2495 of SEQ ID NO: 588501
guguaaggugugucgggua

SEQ ID NO: 869647 - RNA, 19 nt, Artificial Sequence
  Description of Artificial Sequence: Synthetic oligonucleotide
  Antisense strand to SEQ ID NO: 869646
uacccgacacaccuuacac

SEQ ID NO: 869648 - RNA, 19 nt, Artificial Sequence
  Description of Artificial Sequence: Synthetic oligonucleotide
  Sense strand starting at position 2497 of SEQ ID NO: 588501
guaaggugugucggguaua

SEQ ID NO: 869649 - RNA, 19 nt, Artificial Sequence
  Description of Artificial Sequence: Synthetic oligonucleotide
  Antisense strand to SEQ ID NO: 869648
uauacccgacacaccuuac

SEQ ID NO: 869650 - RNA, 19 nt, Artificial Sequence
  Description of Artificial Sequence: Synthetic oligonucleotide
  Sense strand starting at position 2500 of SEQ ID NO: 588501
aggugugucggguauaugu

SEQ ID NO: 869651 - RNA, 19 nt, Artificial Sequence
  Description of Artificial Sequence: Synthetic oligonucleotide
  Antisense strand to SEQ ID NO: 869650
acauauacccgacacaccu

SEQ ID NO: 869652 - RNA, 19 nt, Artificial Sequence
  Description of Artificial Sequence: Synthetic oligonucleotide
  Sense strand starting at position 2502 of SEQ ID NO: 588501
gugugucggguauauguau

SEQ ID NO: 869653 - RNA, 19 nt, Artificial Sequence
  Description of Artificial Sequence: Synthetic oligonucleotide
  Antisense strand to SEQ ID NO: 869652
auacauauacccgacacac

SEQ ID NO: 869654 - RNA, 19 nt, Artificial Sequence
  Description of Artificial Sequence: Synthetic oligonucleotide
  Sense strand starting at position 2508 of SEQ ID NO: 588501
cggguauauguaugccuca

SEQ ID NO: 869655 - RNA, 19 nt, Artificial Sequence
  Description of Artificial Sequence: Synthetic oligonucleotide
  Antisense strand to SEQ ID NO: 869654
ugaggcauacauauacccg

SEQ ID NO: 869656 - RNA, 19 nt, Artificial Sequence
  Description of Artificial Sequence: Synthetic oligonucleotide
  Sense strand starting at position 2509 of SEQ ID NO: 588501
ggguauauguaugccucaa

SEQ ID NO: 869657 - RNA, 19 nt, Artificial Sequence
  Description of Artificial Sequence: Synthetic oligonucleotide
  Antisense strand to SEQ ID NO: 869656
uugaggcauacauauaccc

SEQ ID NO: 869658 - RNA, 19 nt, Artificial Sequence
  Description of Artificial Sequence: Synthetic oligonucleotide
  Sense strand starting at position 2511 of SEQ ID NO: 588501
guauauguaugccucaaga

SEQ ID NO: 869659 - RNA, 19 nt, Artificial Sequence
  Description of Artificial Sequence: Synthetic oligonucleotide
  Antisense strand to SEQ ID NO: 869658
ucuugaggcauacauauac

SEQ ID NO: 869660 - RNA, 19 nt, Artificial Sequence
  Description of Artificial Sequence: Synthetic oligonucleotide
  Sense strand starting at position 2513 of SEQ ID NO: 588501
auauguaugccucaagaaa

SEQ ID NO: 869661 - RNA, 19 nt, Artificial Sequence
  Description of Artificial Sequence: Synthetic oligonucleotide
  Antisense strand to SEQ ID NO: 869660
uuucuugaggcauacauau

SEQ ID NO: 869662 - RNA, 19 nt, Artificial Sequence
  Description of Artificial Sequence: Synthetic oligonucleotide
  Sense strand starting at position 2570 of SEQ ID NO: 588501
augggaagcucgagggaaa

SEQ ID NO: 869663 - RNA, 19 nt, Artificial Sequence
  Description of Artificial Sequence: Synthetic oligonucleotide
  Antisense strand to SEQ ID NO: 869662
uuucccucgagcuucccau

SEQ ID NO: 869664 - RNA, 19 nt, Artificial Sequence
  Description of Artificial Sequence: Synthetic oligonucleotide
  Sense strand starting at position 2571 of SEQ ID NO: 588501
ugggaagcucgagggaaau

SEQ ID NO: 869665 - RNA, 19 nt, Artificial Sequence
  Description of Artificial Sequence: Synthetic oligonucleotide
  Antisense strand to SEQ ID NO: 869664
auuucccucgagcuuccca

SEQ ID NO: 869666 - RNA, 19 nt, Artificial Sequence
  Description of Artificial Sequence: Synthetic oligonucleotide
  Sense strand starting at position 2581 of SEQ ID NO: 588501
gagggaaaugugugcauac

SEQ ID NO: 869667 - RNA, 19 nt, Artificial Sequence
  Description of Artificial Sequence: Synthetic oligonucleotide
  Antisense strand to SEQ ID NO: 869666
guaugcacacauuucccuc

SEQ ID NO: 869668 - RNA, 19 nt, Artificial Sequence
  Description of Artificial Sequence: Synthetic oligonucleotide
  Sense strand starting at position 2582 of SEQ ID NO: 588501
agggaaaugugugcauacu

SEQ ID NO: 869669 - RNA, 19 nt, Artificial Sequence
  Description of Artificial Sequence: Synthetic oligonucleotide
  Antisense strand to SEQ ID NO: 869668
aguaugcacacauuucccu

SEQ ID NO: 869670 - RNA, 19 nt, Artificial Sequence
  Description of Artificial Sequence: Synthetic oligonucleotide
  Sense strand starting at position 2583 of SEQ ID NO: 588501
gggaaaugugugcauacua

SEQ ID NO: 869671 - RNA, 19 nt, Artificial Sequence
  Description of Artificial Sequence: Synthetic oligonucleotide
  Antisense strand to SEQ ID NO: 869670
uaguaugcacacauuuccc

SEQ ID NO: 869672 - RNA, 19 nt, Artificial Sequence
  Description of Artificial Sequence: Synthetic oligonucleotide
  Sense strand starting at position 2590 of SEQ ID NO: 588501
gugugcauacuaugucuau

SEQ ID NO: 869673 - RNA, 19 nt, Artificial Sequence
  Description of Artificial Sequence: Synthetic oligonucleotide
  Antisense strand to SEQ ID NO: 869672
auagacauaguaugcacac

SEQ ID NO: 869674 - RNA, 19 nt, Artificial Sequence
  Description of Artificial Sequence: Synthetic oligonucleotide
  Sense strand starting at position 2594 of SEQ ID NO: 588501
gcauacuaugucuaucaga

SEQ ID NO: 869675 - RNA, 19 nt, Artificial Sequence
  Description of Artificial Sequence: Synthetic oligonucleotide
  Antisense strand to SEQ ID NO: 869674
ucugauagacauaguaugc

SEQ ID NO: 869676 - RNA, 19 nt, Artificial Sequence
  Description of Artificial Sequence: Synthetic oligonucleotide
  Sense strand starting at position 2704 of SEQ ID NO: 588501
aaguuucuccugggccaga

SEQ ID NO: 869677 - RNA, 19 nt, Artificial Sequence
  Description of Artificial Sequence: Synthetic oligonucleotide
  Antisense strand to SEQ ID NO: 869676
ucuggcccaggagaaacuu

SEQ ID NO: 869678 - RNA, 19 nt, Artificial Sequence
  Description of Artificial Sequence: Synthetic oligonucleotide
  Sense strand starting at position 2732 of SEQ ID NO: 588501
uguccagccuuagugugau

SEQ ID NO: 869679 - RNA, 19 nt, Artificial Sequence
  Description of Artificial Sequence: Synthetic oligonucleotide
  Antisense strand to SEQ ID NO: 869678
aucacacuaaggcuggaca

SEQ ID NO: 869680 - RNA, 19 nt, Artificial Sequence
  Description of Artificial Sequence: Synthetic oligonucleotide
  Sense strand starting at position 2806 of SEQ ID NO: 588501
uggccaucccugcaucauu

SEQ ID NO: 869681 - RNA, 19 nt, Artificial Sequence
  Description of Artificial Sequence: Synthetic oligonucleotide
  Antisense strand to SEQ ID NO: 869680
aaugaugcagggauggcca

SEQ ID NO: 869682 - RNA, 19 nt, Artificial Sequence
  Description of Artificial Sequence: Synthetic oligonucleotide
  Sense strand starting at position 2870 of SEQ ID NO: 588501
ucaggucuccuguguugca

SEQ ID NO: 869683 - RNA, 19 nt, Artificial Sequence
  Description of Artificial Sequence: Synthetic oligonucleotide
  Antisense strand to SEQ ID NO: 869682
ugcaacacaggagaccuga

SEQ ID NO: 869684 - RNA, 19 nt, Artificial Sequence
  Description of Artificial Sequence: Synthetic oligonucleotide
  Sense strand starting at position 2905 of SEQ ID NO: 588501
cagcguugccagggaaaca

SEQ ID NO: 869685 - RNA, 19 nt, Artificial Sequence
  Description of Artificial Sequence: Synthetic oligonucleotide
  Antisense strand to SEQ ID NO: 869684
uguuucccuggcaacgcug

SEQ ID NO: 869686 - RNA, 19 nt, Artificial Sequence
  Description of Artificial Sequence: Synthetic oligonucleotide
  Sense strand starting at position 3026 of SEQ ID NO: 588501
guuucuguuugugcaauga

SEQ ID NO: 869687 - RNA, 19 nt, Artificial Sequence
  Description of Artificial Sequence: Synthetic oligonucleotide
  Antisense strand to SEQ ID NO: 869686
ucauugcacaaacagaaac

SEQ ID NO: 869688 - RNA, 19 nt, Artificial Sequence
  Description of Artificial Sequence: Synthetic oligonucleotide
  Sense strand starting at position 3424 of SEQ ID NO: 588501
gagaaucuauaggcuagau

SEQ ID NO: 869689 - RNA, 19 nt, Artificial Sequence
  Description of Artificial Sequence: Synthetic oligonucleotide
  Antisense strand to SEQ ID NO: 869688
aucuagccuauagauucuc

SEQ ID NO: 869690 - RNA, 19 nt, Artificial Sequence
  Description of Artificial Sequence: Synthetic oligonucleotide
  Sense strand starting at position 3521 of SEQ ID NO: 588501
aaaguuguagcuggagcua

SEQ ID NO: 869691 - RNA, 19 nt, Artificial Sequence
  Description of Artificial Sequence: Synthetic oligonucleotide
  Antisense strand to SEQ ID NO: 869690
uagcuccagcuacaacuuu

SEQ ID NO: 869692 - RNA, 19 nt, Artificial Sequence
  Description of Artificial Sequence: Synthetic oligonucleotide
  Sense strand starting at position 3534 of SEQ ID NO: 588501
gagcuaugccuuuagcuuu

SEQ ID NO: 869693 - RNA, 19 nt, Artificial Sequence
  Description of Artificial Sequence: Synthetic oligonucleotide
  Antisense strand to SEQ ID NO: 869692
aaagcuaaaggcauagcuc

SEQ ID NO: 869694 - RNA, 19 nt, Artificial Sequence
  Description of Artificial Sequence: Synthetic oligonucleotide
  Sense strand starting at position 3555 of SEQ ID NO: 588501
acccuagaucucugaaggu

SEQ ID NO: 869695 - RNA, 19 nt, Artificial Sequence
  Description of Artificial Sequence: Synthetic oligonucleotide
  Antisense strand to SEQ ID NO: 869694
accuucagagaucuagggu

SEQ ID NO: 869696 - RNA, 19 nt, Artificial Sequence
  Description of Artificial Sequence: Synthetic oligonucleotide
  Sense strand starting at position 3586 of SEQ ID NO: 588501
gauauuagaguaugugaua

SEQ ID NO: 869697 - RNA, 19 nt, Artificial Sequence
  Description of Artificial Sequence: Synthetic oligonucleotide
  Antisense strand to SEQ ID NO: 869696
uaucacauacucuaauauc

SEQ ID NO: 869698 - RNA, 19 nt, Artificial Sequence
  Description of Artificial Sequence: Synthetic oligonucleotide
  Sense strand starting at position 147 of SEQ ID NO: 588502
cuccacuuaggguaucaau

SEQ ID NO: 869699 - RNA, 19 nt, Artificial Sequence
  Description of Artificial Sequence: Synthetic oligonucleotide
  Antisense strand to SEQ ID NO: 869698
auugauacccuaaguggag

SEQ ID NO: 869700 - RNA, 19 nt, Artificial Sequence
  Description of Artificial Sequence: Synthetic oligonucleotide
  Sense strand starting at position 156 of SEQ ID NO: 588502
ggguaucaauuccuuguuu

SEQ ID NO: 869701 - RNA, 19 nt, Artificial Sequence
  Description of Artificial Sequence: Synthetic oligonucleotide
  Antisense strand to SEQ ID NO: 869700
aaacaaggaauugauaccc

SEQ ID NO: 869702 - RNA, 19 nt, Artificial Sequence
  Description of Artificial Sequence: Synthetic oligonucleotide
  Sense strand starting at position 356 of SEQ ID NO: 588502
gggagaaauuuaggguaug

SEQ ID NO: 869703 - RNA, 19 nt, Artificial Sequence
  Description of Artificial Sequence: Synthetic oligonucleotide
  Antisense strand to SEQ ID NO: 869702
cauacccuaaauuucuccc

SEQ ID NO: 869704 - RNA, 19 nt, Artificial Sequence
  Description of Artificial Sequence: Synthetic oligonucleotide
  Sense strand starting at position 403 of SEQ ID NO: 588502
aguaaaccaccuugguaaa

SEQ ID NO: 869705 - RNA, 19 nt, Artificial Sequence
  Description of Artificial Sequence: Synthetic oligonucleotide
  Antisense strand to SEQ ID NO: 869704
uuuaccaaggugguuuacu

SEQ ID NO: 869706 - RNA, 19 nt, Artificial Sequence
  Description of Artificial Sequence: Synthetic oligonucleotide
  Sense strand starting at position 471 of SEQ ID NO: 588502
cuaagauguaggcauagua

SEQ ID NO: 869707 - RNA, 19 nt, Artificial Sequence
  Description of Artificial Sequence: Synthetic oligonucleotide
  Antisense strand to SEQ ID NO: 869706
uacuaugccuacaucuuag

SEQ ID NO: 869708 - RNA, 19 nt, Artificial Sequence
  Description of Artificial Sequence: Synthetic oligonucleotide
  Sense strand starting at position 562 of SEQ ID NO: 588502
acuauuguauaagcuaaga

SEQ ID NO: 869709 - RNA, 19 nt, Artificial Sequence
  Description of Artificial Sequence: Synthetic oligonucleotide
  Antisense strand to SEQ ID NO: 869708
ucuuagcuuauacaauagu

SEQ ID NO: 869710 - RNA, 19 nt, Artificial Sequence
  Description of Artificial Sequence: Synthetic oligonucleotide
  Sense strand starting at position 590 of SEQ ID NO: 588502
agagaugucuguucaggcu

SEQ ID NO: 869711 - RNA, 19 nt, Artificial Sequence
  Description of Artificial Sequence: Synthetic oligonucleotide
  Antisense strand to SEQ ID NO: 869710
agccugaacagacaucucu

SEQ ID NO: 869712 - RNA, 19 nt, Artificial Sequence
  Description of Artificial Sequence: Synthetic oligonucleotide
  Sense strand starting at position 653 of SEQ ID NO: 588502
gaaauagacucagugcaua

SEQ ID NO: 869713 - RNA, 19 nt, Artificial Sequence
  Description of Artificial Sequence: Synthetic oligonucleotide
  Antisense strand to SEQ ID NO: 869712
uaugcacugagucuauuuc

SEQ ID NO: 869714 - RNA, 19 nt, Artificial Sequence
  Description of Artificial Sequence: Synthetic oligonucleotide
  Sense strand starting at position 890 of SEQ ID NO: 588502
uuugucugugcagaucaga

SEQ ID NO: 869715 - RNA, 19 nt, Artificial Sequence
  Description of Artificial Sequence: Synthetic oligonucleotide
  Antisense strand to SEQ ID NO: 869714
ucugaucugcacagacaaa

SEQ ID NO: 869716 - RNA, 19 nt, Artificial Sequence
  Description of Artificial Sequence: Synthetic oligonucleotide
  Sense strand starting at position 893 of SEQ ID NO: 588502
gucugugcagaucagagau

SEQ ID NO: 869717 - RNA, 19 nt, Artificial Sequence
  Description of Artificial Sequence: Synthetic oligonucleotide
  Antisense strand to SEQ ID NO: 869716
aucucugaucugcacagac

SEQ ID NO: 869718 - RNA, 19 nt, Artificial Sequence
  Description of Artificial Sequence: Synthetic oligonucleotide
  Sense strand starting at position 985 of SEQ ID NO: 588502
ucuaauccucuuugugaag

SEQ ID NO: 869719 - RNA, 19 nt, Artificial Sequence
  Description of Artificial Sequence: Synthetic oligonucleotide
  Antisense strand to SEQ ID NO: 869718
cuucacaaagaggauuaga

SEQ ID NO: 869720 - RNA, 19 nt, Artificial Sequence
  Description of Artificial Sequence: Synthetic oligonucleotide
  Sense strand starting at position 1377 of SEQ ID NO: 588502
cauguuugucuugaguaag

SEQ ID NO: 869721 - RNA, 19 nt, Artificial Sequence
  Description of Artificial Sequence: Synthetic oligonucleotide
  Antisense strand to SEQ ID NO: 869720
cuuacucaagacaaacaug

SEQ ID NO: 869722 - RNA, 19 nt, Artificial Sequence
  Description of Artificial Sequence: Synthetic oligonucleotide
  Sense strand starting at position 1387 of SEQ ID NO: 588502
uugaguaagcauuaggagu

SEQ ID NO: 869723 - RNA, 19 nt, Artificial Sequence
  Description of Artificial Sequence: Synthetic oligonucleotide
  Antisense strand to SEQ ID NO: 869722
acuccuaaugcuuacucaa

SEQ ID NO: 869724 - RNA, 19 nt, Artificial Sequence
  Description of Artificial Sequence: Synthetic oligonucleotide
  Sense strand starting at position 1394 of SEQ ID NO: 588502
agcauuaggaguuagaagu

SEQ ID NO: 869725 - RNA, 19 nt, Artificial Sequence
  Description of Artificial Sequence: Synthetic oligonucleotide
  Antisense strand to SEQ ID NO: 869724
acuucuaacuccuaaugcu

SEQ ID NO: 869726 - RNA, 19 nt, Artificial Sequence
  Description of Artificial Sequence: Synthetic oligonucleotide
  Sense strand starting at position 1871 of SEQ ID NO: 588502
caugguucccaagguuuaa

SEQ ID NO: 869727 - RNA, 19 nt, Artificial Sequence
  Description of Artificial Sequence: Synthetic oligonucleotide
  Antisense strand to SEQ ID NO: 869726
uuaaaccuugggaaccaug

SEQ ID NO: 869728 - RNA, 19 nt, Artificial Sequence
  Description of Artificial Sequence: Synthetic oligonucleotide
  Sense strand starting at position 2011 of SEQ ID NO: 588502
agccaaaguuuggcagaga

SEQ ID NO: 869729 - RNA, 19 nt, Artificial Sequence
  Description of Artificial Sequence: Synthetic oligonucleotide
  Antisense strand to SEQ ID NO: 869728
ucucugccaaacuuuggcu

SEQ ID NO: 869730 - RNA, 19 nt, Artificial Sequence
  Description of Artificial Sequence: Synthetic oligonucleotide
  Sense strand starting at position 2106 of SEQ ID NO: 588502
aguuacaauucugucaaca

SEQ ID NO: 869731 - RNA, 19 nt, Artificial Sequence
  Description of Artificial Sequence: Synthetic oligonucleotide
  Antisense strand to SEQ ID NO: 869730
uguugacagaauuguaacu

SEQ ID NO: 869732 - RNA, 19 nt, Artificial Sequence
  Description of Artificial Sequence: Synthetic oligonucleotide
  Sense strand starting at position 2301 of SEQ ID NO: 588502
ggccguuggcuucuuaauu

SEQ ID NO: 869733 - RNA, 19 nt, Artificial Sequence
  Description of Artificial Sequence: Synthetic oligonucleotide
  Antisense strand to SEQ ID NO: 869732
aauuaagaagccaacggcc

SEQ ID NO: 869734 - RNA, 19 nt, Artificial Sequence
  Description of Artificial Sequence: Synthetic oligonucleotide
  Sense strand starting at position 2302 of SEQ ID NO: 588502
gccguuggcuucuuaauuu

SEQ ID NO: 869735 - RNA, 19 nt, Artificial Sequence
  Description of Artificial Sequence: Synthetic oligonucleotide
  Antisense strand to SEQ ID NO: 869734
aaauuaagaagccaacggc

SEQ ID NO: 869736 - RNA, 19 nt, Artificial Sequence
  Description of Artificial Sequence: Synthetic oligonucleotide
  Sense strand starting at position 2331 of SEQ ID NO: 588502
uuaagagaucaguguauuc

SEQ ID NO: 869737 - RNA, 19 nt, Artificial Sequence
  Description of Artificial Sequence: Synthetic oligonucleotide
  Antisense strand to SEQ ID NO: 869736
gaauacacugaucucuuaa

SEQ ID NO: 869738 - RNA, 19 nt, Artificial Sequence
  Description of Artificial Sequence: Synthetic oligonucleotide
  Sense strand starting at position 2333 of SEQ ID NO: 588502
aagagaucaguguauucuu

SEQ ID NO: 869739 - RNA, 19 nt, Artificial Sequence
  Description of Artificial Sequence: Synthetic oligonucleotide
  Antisense strand to SEQ ID NO: 869738
aagaauacacugaucucuu

SEQ ID NO: 869740 - RNA, 19 nt, Artificial Sequence
  Description of Artificial Sequence: Synthetic oligonucleotide
  Sense strand starting at position 2386 of SEQ ID NO: 588502
uuuggccuaucaguaauaa

SEQ ID NO: 869741 - RNA, 19 nt, Artificial Sequence
  Description of Artificial Sequence: Synthetic oligonucleotide
  Antisense strand to SEQ ID NO: 869740
uuauuacugauaggccaaa

SEQ ID NO: 869742 - RNA, 19 nt, Artificial Sequence
  Description of Artificial Sequence: Synthetic oligonucleotide
  Sense strand starting at position 2387 of SEQ ID NO: 588502
uuggccuaucaguaauaag

SEQ ID NO: 869743 - RNA, 19 nt, Artificial Sequence
  Description of Artificial Sequence: Synthetic oligonucleotide
  Antisense strand to SEQ ID NO: 869742
cuuauuacugauaggccaa

SEQ ID NO: 869744 - RNA, 19 nt, Artificial Sequence
  Description of Artificial Sequence: Synthetic oligonucleotide
  Sense strand starting at position 2564 of SEQ ID NO: 588502
augagaaguuguucuucuu

SEQ ID NO: 869745 - RNA, 19 nt, Artificial Sequence
  Description of Artificial Sequence: Synthetic oligonucleotide
  Antisense strand to SEQ ID NO: 869744
aagaagaacaacuucucau

SEQ ID NO: 869746 - RNA, 19 nt, Artificial Sequence
  Description of Artificial Sequence: Synthetic oligonucleotide
  Sense strand starting at position 2727 of SEQ ID NO: 588502
cuguacuuagaaggauauu

SEQ ID NO: 869747 - RNA, 19 nt, Artificial Sequence
  Description of Artificial Sequence: Synthetic oligonucleotide
  Antisense strand to SEQ ID NO: 869746
aauauccuucuaaguacag

SEQ ID NO: 869748 - RNA, 19 nt, Artificial Sequence
  Description of Artificial Sequence: Synthetic oligonucleotide
  Sense strand starting at position 2739 of SEQ ID NO: 588502
ggauauugugauggacugu

SEQ ID NO: 869749 - RNA, 19 nt, Artificial Sequence
  Description of Artificial Sequence: Synthetic oligonucleotide
  Antisense strand to SEQ ID NO: 869748
acaguccaucacaauaucc

SEQ ID NO: 869750 - RNA, 19 nt, Artificial Sequence
  Description of Artificial Sequence: Synthetic oligonucleotide
  Sense strand starting at position 2740 of SEQ ID NO: 588502
gauauugugauggacuguu

SEQ ID NO: 869751 - RNA, 19 nt, Artificial Sequence
  Description of Artificial Sequence: Synthetic oligonucleotide
  Antisense strand to SEQ ID NO: 869750
aacaguccaucacaauauc

SEQ ID NO: 869752 - RNA, 19 nt, Artificial Sequence
  Description of Artificial Sequence: Synthetic oligonucleotide
  Sense strand starting at position 2870 of SEQ ID NO: 588502
uuucucauggcauguugaa

SEQ ID NO: 869753 - RNA, 19 nt, Artificial Sequence
  Description of Artificial Sequence: Synthetic oligonucleotide
  Antisense strand to SEQ ID NO: 869752
uucaacaugccaugagaaa

SEQ ID NO: 869754 - RNA, 19 nt, Artificial Sequence
  Description of Artificial Sequence: Synthetic oligonucleotide
  Sense strand starting at position 2877 of SEQ ID NO: 588502
uggcauguugaaggauaga

SEQ ID NO: 869755 - RNA, 19 nt, Artificial Sequence
  Description of Artificial Sequence: Synthetic oligonucleotide
  Antisense strand to SEQ ID NO: 869754
ucuauccuucaacaugcca

SEQ ID NO: 869756 - RNA, 19 nt, Artificial Sequence
  Description of Artificial Sequence: Synthetic oligonucleotide
  Sense strand starting at position 3007 of SEQ ID NO: 588502
ggaacucuguuaucuuguu

SEQ ID NO: 869757 - RNA, 19 nt, Artificial Sequence
  Description of Artificial Sequence: Synthetic oligonucleotide
  Antisense strand to SEQ ID NO: 869756
aacaagauaacagaguucc

SEQ ID NO: 869758 - RNA, 19 nt, Artificial Sequence
  Description of Artificial Sequence: Synthetic oligonucleotide
  Sense strand starting at position 3012 of SEQ ID NO: 588502
ucuguuaucuuguuuaaag

SEQ ID NO: 869759 - RNA, 19 nt, Artificial Sequence
  Description of Artificial Sequence: Synthetic oligonucleotide
  Antisense strand to SEQ ID NO: 869758
cuuuaaacaagauaacaga

SEQ ID NO: 869760 - RNA, 19 nt, Artificial Sequence
  Description of Artificial Sequence: Synthetic oligonucleotide
  Sense strand starting at position 3101 of SEQ ID NO: 588502
uaguguugcauuugugagu

SEQ ID NO: 869761 - RNA, 19 nt, Artificial Sequence
  Description of Artificial Sequence: Synthetic oligonucleotide
  Antisense strand to SEQ ID NO: 869760
acucacaaaugcaacacua

SEQ ID NO: 869762 - RNA, 19 nt, Artificial Sequence
  Description of Artificial Sequence: Synthetic oligonucleotide
  Sense strand starting at position 3102 of SEQ ID NO: 588502
aguguugcauuugugagua

SEQ ID NO: 869763 - RNA, 19 nt, Artificial Sequence
  Description of Artificial Sequence: Synthetic oligonucleotide
  Antisense strand to SEQ ID NO: 869762
uacucacaaaugcaacacu

SEQ ID NO: 869764 - RNA, 19 nt, Artificial Sequence
  Description of Artificial Sequence: Synthetic oligonucleotide
  Sense strand starting at position 3110 of SEQ ID NO: 588502
auuugugaguaaugaagaa

SEQ ID NO: 869765 - RNA, 19 nt, Artificial Sequence
  Description of Artificial Sequence: Synthetic oligonucleotide
  Antisense strand to SEQ ID NO: 869764
uucuucauuacucacaaau

SEQ ID NO: 869766 - RNA, 19 nt, Artificial Sequence
  Description of Artificial Sequence: Synthetic oligonucleotide
  Sense strand starting at position 3137 of SEQ ID NO: 588502
augucugcccuuuggauaa

SEQ ID NO: 869767 - RNA, 19 nt, Artificial Sequence
  Description of Artificial Sequence: Synthetic oligonucleotide
  Antisense strand to SEQ ID NO: 869766
uuauccaaagggcagacau

SEQ ID NO: 869768 - RNA, 19 nt, Artificial Sequence
  Description of Artificial Sequence: Synthetic oligonucleotide
  Sense strand starting at position 3207 of SEQ ID NO: 588502
uugagcugugugcaauaaa

SEQ ID NO: 869769 - RNA, 19 nt, Artificial Sequence
  Description of Artificial Sequence: Synthetic oligonucleotide
  Antisense strand to SEQ ID NO: 869768
uuuauugcacacagcucaa

SEQ ID NO: 869770 - RNA, 19 nt, Artificial Sequence
  Description of Artificial Sequence: Synthetic oligonucleotide
  Sense strand starting at position 3210 of SEQ ID NO: 588502
agcugugugcaauaaauag

SEQ ID NO: 869771 - RNA, 19 nt, Artificial Sequence
  Description of Artificial Sequence: Synthetic oligonucleotide
  Antisense strand to SEQ ID NO: 869770
cuauuuauugcacacagcu

SEQ ID NO: 869772 - RNA, 19 nt, Artificial Sequence
  Description of Artificial Sequence: Synthetic oligonucleotide
  Sense strand starting at position 3427 of SEQ ID NO: 588502
ugcuuucuccauuagcaga

SEQ ID NO: 869773 - RNA, 19 nt, Artificial Sequence
  Description of Artificial Sequence: Synthetic oligonucleotide
  Antisense strand to SEQ ID NO: 869772
ucugcuaauggagaaagca

SEQ ID NO: 869774 - RNA, 19 nt, Artificial Sequence
  Description of Artificial Sequence: Synthetic oligonucleotide
  Sense strand starting at position 3518 of SEQ ID NO: 588502
guguccuuacauuaaagau

SEQ ID NO: 869775 - RNA, 19 nt, Artificial Sequence
  Description of Artificial Sequence: Synthetic oligonucleotide
  Antisense strand to SEQ ID NO: 869774
aucuuuaauguaaggacac

SEQ ID NO: 869776 - RNA, 19 nt, Artificial Sequence
  Description of Artificial Sequence: Synthetic oligonucleotide
  Sense strand starting at position 3533 of SEQ ID NO: 588502
agaugugucacauauaagu

SEQ ID NO: 869777 - RNA, 19 nt, Artificial Sequence
  Description of Artificial Sequence: Synthetic oligonucleotide
  Antisense strand to SEQ ID NO: 869776
acuuauaugugacacaucu

SEQ ID NO: 869778 - RNA, 19 nt, Artificial Sequence
  Description of Artificial Sequence: Synthetic oligonucleotide
  Sense strand starting at position 248 of SEQ ID NO: 588503
uuaaauucuggcuacagua

SEQ ID NO: 869779 - RNA, 19 nt, Artificial Sequence
  Description of Artificial Sequence: Synthetic oligonucleotide
  Antisense strand to SEQ ID NO: 869778
uacuguagccagaauuuaa

SEQ ID NO: 869780 - RNA, 19 nt, Artificial Sequence
  Description of Artificial Sequence: Synthetic oligonucleotide
  Sense strand starting at position 350 of SEQ ID NO: 588503
uuaccuuguccugaagagu

SEQ ID NO: 869781 - RNA, 19 nt, Artificial Sequence
  Description of Artificial Sequence: Synthetic oligonucleotide
  Antisense strand to SEQ ID NO: 869780
acucuucaggacaagguaa

SEQ ID NO: 869782 - RNA, 19 nt, Artificial Sequence
  Description of Artificial Sequence: Synthetic oligonucleotide
  Sense strand starting at position 502 of SEQ ID NO: 588503
gccuccuuacaaugaaaug

SEQ ID NO: 869783 - RNA, 19 nt, Artificial Sequence
  Description of Artificial Sequence: Synthetic oligonucleotide
  Antisense strand to SEQ ID NO: 869782
cauuucauuguaaggaggc

SEQ ID NO: 869784 - RNA, 19 nt, Artificial Sequence
  Description of Artificial Sequence: Synthetic oligonucleotide
  Sense strand starting at position 1005 of SEQ ID NO: 588503
uaauaaacgucauuagguu

SEQ ID NO: 869785 - RNA, 19 nt, Artificial Sequence
  Description of Artificial Sequence: Synthetic oligonucleotide
  Antisense strand to SEQ ID NO: 869784
aaccuaaugacguuuauua

SEQ ID NO: 869786 - RNA, 19 nt, Artificial Sequence
  Description of Artificial Sequence: Synthetic oligonucleotide
  Sense strand starting at position 1011 of SEQ ID NO: 588503
acgucauuagguuguauuu

SEQ ID NO: 869787 - RNA, 19 nt, Artificial Sequence
  Description of Artificial Sequence: Synthetic oligonucleotide
  Antisense strand to SEQ ID NO: 869786
aaauacaaccuaaugacgu

SEQ ID NO: 869788 - RNA, 19 nt, Artificial Sequence
  Description of Artificial Sequence: Synthetic oligonucleotide
  Sense strand starting at position 1054 of SEQ ID NO: 588503
gagucaauauaaucauggu

SEQ ID NO: 869789 - RNA, 19 nt, Artificial Sequence
  Description of Artificial Sequence: Synthetic oligonucleotide
  Antisense strand to SEQ ID NO: 869788
accaugauuauauugacuc

SEQ ID NO: 869790 - RNA, 19 nt, Artificial Sequence
  Description of Artificial Sequence: Synthetic oligonucleotide
  Sense strand starting at position 1100 of SEQ ID NO: 588503
gugucucugcauucgucua

SEQ ID NO: 869791 - RNA, 19 nt, Artificial Sequence
  Description of Artificial Sequence: Synthetic oligonucleotide
  Antisense strand to SEQ ID NO: 869790
uagacgaaugcagagacac

SEQ ID NO: 869792 - RNA, 19 nt, Artificial Sequence
  Description of Artificial Sequence: Synthetic oligonucleotide
  Sense strand starting at position 1190 of SEQ ID NO: 588503
accauacacuguguaacau

SEQ ID NO: 869793 - RNA, 19 nt, Artificial Sequence
  Description of Artificial Sequence: Synthetic oligonucleotide
  Antisense strand to SEQ ID NO: 869792
auguuacacaguguauggu

SEQ ID NO: 869794 - RNA, 19 nt, Artificial Sequence
  Description of Artificial Sequence: Synthetic oligonucleotide
  Sense strand starting at position 1201 of SEQ ID NO: 588503
uguaacaugcucgaaauua

SEQ ID NO: 869795 - RNA, 19 nt, Artificial Sequence
  Description of Artificial Sequence: Synthetic oligonucleotide
  Antisense strand to SEQ ID NO: 869794
uaauuucgagcauguuaca

SEQ ID NO: 869796 - RNA, 19 nt, Artificial Sequence
  Description of Artificial Sequence: Synthetic oligonucleotide
  Sense strand starting at position 1317 of SEQ ID NO: 588503
cgugcuuucguacuaaauc

SEQ ID NO: 869797 - RNA, 19 nt, Artificial Sequence
  Description of Artificial Sequence: Synthetic oligonucleotide
  Antisense strand to SEQ ID NO: 869796
gauuuaguacgaaagcacg

SEQ ID NO: 869798 - RNA, 19 nt, Artificial Sequence
  Description of Artificial Sequence: Synthetic oligonucleotide
  Sense strand starting at position 1650 of SEQ ID NO: 588503
caucuugugacaggguaga

SEQ ID NO: 869799 - RNA, 19 nt, Artificial Sequence
  Description of Artificial Sequence: Synthetic oligonucleotide
  Antisense strand to SEQ ID NO: 869798
ucuacccugucacaagaug

SEQ ID NO: 869800 - RNA, 19 nt, Artificial Sequence
  Description of Artificial Sequence: Synthetic oligonucleotide
  Sense strand starting at position 1744 of SEQ ID NO: 588503
gcaaguaggagccagaaau

SEQ ID NO: 869801 - RNA, 19 nt, Artificial Sequence
  Description of Artificial Sequence: Synthetic oligonucleotide
  Antisense strand to SEQ ID NO: 869800
auuucuggcuccuacuugc

SEQ ID NO: 869802 - RNA, 19 nt, Artificial Sequence
  Description of Artificial Sequence: Synthetic oligonucleotide
  Sense strand starting at position 1756 of SEQ ID NO: 588503
cagaaauguuagguggcaa

SEQ ID NO: 869803 - RNA, 19 nt, Artificial Sequence
  Description of Artificial Sequence: Synthetic oligonucleotide
  Antisense strand to SEQ ID NO: 869802
uugccaccuaacauuucug

SEQ ID NO: 869804 - RNA, 19 nt, Artificial Sequence
  Description of Artificial Sequence: Synthetic oligonucleotide
  Sense strand starting at position 2369 of SEQ ID NO: 588503
cucgcuuucgagcuuuaac

SEQ ID NO: 869805 - RNA, 19 nt, Artificial Sequence
  Description of Artificial Sequence: Synthetic oligonucleotide
  Antisense strand to SEQ ID NO: 869804
guuaaagcucgaaagcgag

SEQ ID NO: 869806 - RNA, 19 nt, Artificial Sequence
  Description of Artificial Sequence: Synthetic oligonucleotide
  Sense strand starting at position 2461 of SEQ ID NO: 588503
uugucuacaguuuacauaa

SEQ ID NO: 869807 - RNA, 19 nt, Artificial Sequence
  Description of Artificial Sequence: Synthetic oligonucleotide
  Antisense strand to SEQ ID NO: 869806
uuauguaaacuguagacaa

SEQ ID NO: 869808 - RNA, 19 nt, Artificial Sequence
  Description of Artificial Sequence: Synthetic oligonucleotide
  Sense strand starting at position 2523 of SEQ ID NO: 588503
gugcaauaaucugcauuua

SEQ ID NO: 869809 - RNA, 19 nt, Artificial Sequence
  Description of Artificial Sequence: Synthetic oligonucleotide
  Antisense strand to SEQ ID NO: 869808
uaaaugcagauuauugcac

SEQ ID NO: 869810 - RNA, 19 nt, Artificial Sequence
  Description of Artificial Sequence: Synthetic oligonucleotide
  Sense strand starting at position 2603 of SEQ ID NO: 588503
accugauuccagcacagua

SEQ ID NO: 869811 - RNA, 19 nt, Artificial Sequence
  Description of Artificial Sequence: Synthetic oligonucleotide
  Antisense strand to SEQ ID NO: 869810
uacugugcuggaaucaggu

SEQ ID NO: 869812 - RNA, 19 nt, Artificial Sequence
  Description of Artificial Sequence: Synthetic oligonucleotide
  Sense strand starting at position 2644 of SEQ ID NO: 588503
aagguaaucguauauugac

SEQ ID NO: 869813 - RNA, 19 nt, Artificial Sequence
  Description of Artificial Sequence: Synthetic oligonucleotide
  Antisense strand to SEQ ID NO: 869812
gucaauauacgauuaccuu

SEQ ID NO: 869814 - RNA, 19 nt, Artificial Sequence
  Description of Artificial Sequence: Synthetic oligonucleotide
  Sense strand starting at position 2962 of SEQ ID NO: 588503
auaauugauguuugcucaa

SEQ ID NO: 869815 - RNA, 19 nt, Artificial Sequence
  Description of Artificial Sequence: Synthetic oligonucleotide
  Antisense strand to SEQ ID NO: 869814
uugagcaaacaucaauuau

SEQ ID NO: 869816 - RNA, 19 nt, Artificial Sequence
  Description of Artificial Sequence: Synthetic oligonucleotide
  Sense strand starting at position 2964 of SEQ ID NO: 588503
aauugauguuugcucaaga

SEQ ID NO: 869817 - RNA, 19 nt, Artificial Sequence
  Description of Artificial Sequence: Synthetic oligonucleotide
  Antisense strand to SEQ ID NO: 869816
ucuugagcaaacaucaauu

SEQ ID NO: 869818 - RNA, 19 nt, Artificial Sequence
  Description of Artificial Sequence: Synthetic oligonucleotide
  Sense strand starting at position 2965 of SEQ ID NO: 588503
auugauguuugcucaagag

SEQ ID NO: 869819 - RNA, 19 nt, Artificial Sequence
  Description of Artificial Sequence: Synthetic oligonucleotide
  Antisense strand to SEQ ID NO: 869818
cucuugagcaaacaucaau

SEQ ID NO: 869820 - RNA, 19 nt, Artificial Sequence
  Description of Artificial Sequence: Synthetic oligonucleotide
  Sense strand starting at position 3150 of SEQ ID NO: 588503
uccugcuguucccugauuu

SEQ ID NO: 869821 - RNA, 19 nt, Artificial Sequence
  Description of Artificial Sequence: Synthetic oligonucleotide
  Antisense strand to SEQ ID NO: 869820
aaaucagggaacagcagga

SEQ ID NO: 869822 - RNA, 19 nt, Artificial Sequence
  Description of Artificial Sequence: Synthetic oligonucleotide
  Sense strand starting at position 3151 of SEQ ID NO: 588503
ccugcuguucccugauuua

SEQ ID NO: 869823 - RNA, 19 nt, Artificial Sequence
  Description of Artificial Sequence: Synthetic oligonucleotide
  Antisense strand to SEQ ID NO: 869822
uaaaucagggaacagcagg

SEQ ID NO: 869824 - RNA, 19 nt, Artificial Sequence
  Description of Artificial Sequence: Synthetic oligonucleotide
  Sense strand starting at position 3154 of SEQ ID NO: 588503
gcuguucccugauuuauau

SEQ ID NO: 869825 - RNA, 19 nt, Artificial Sequence
  Description of Artificial Sequence: Synthetic oligonucleotide
  Antisense strand to SEQ ID NO: 869824
auauaaaucagggaacagc

SEQ ID NO: 869826 - RNA, 19 nt, Artificial Sequence
  Description of Artificial Sequence: Synthetic oligonucleotide
  Sense strand starting at position 3245 of SEQ ID NO: 588503
aggccugaguucuuaaauc

SEQ ID NO: 869827 - RNA, 19 nt, Artificial Sequence
  Description of Artificial Sequence: Synthetic oligonucleotide
  Antisense strand to SEQ ID NO: 869826
gauuuaagaacucaggccu

SEQ ID NO: 869828 - RNA, 19 nt, Artificial Sequence
  Description of Artificial Sequence: Synthetic oligonucleotide
  Sense strand starting at position 3273 of SEQ ID NO: 588503
gccucugcucuggaggaau

SEQ ID NO: 869829 - RNA, 19 nt, Artificial Sequence
  Description of Artificial Sequence: Synthetic oligonucleotide
  Antisense strand to SEQ ID NO: 869828
auuccuccagagcagaggc

SEQ ID NO: 869830 - RNA, 19 nt, Artificial Sequence
  Description of Artificial Sequence: Synthetic oligonucleotide
  Sense strand starting at position 3275 of SEQ ID NO: 588503
cucugcucuggaggaauga

SEQ ID NO: 869831 - RNA, 19 nt, Artificial Sequence
  Description of Artificial Sequence: Synthetic oligonucleotide
  Antisense strand to SEQ ID NO: 869830
ucauuccuccagagcagag

SEQ ID NO: 869832 - RNA, 19 nt, Artificial Sequence
  Description of Artificial Sequence: Synthetic oligonucleotide
  Sense strand starting at position 3306 of SEQ ID NO: 588503
ccaguucuugcugacuuga

SEQ ID NO: 869833 - RNA, 19 nt, Artificial Sequence
  Description of Artificial Sequence: Synthetic oligonucleotide
  Antisense strand to SEQ ID NO: 869832
ucaagucagcaagaacugg

SEQ ID NO: 869834 - RNA, 19 nt, Artificial Sequence
  Description of Artificial Sequence: Synthetic oligonucleotide
  Sense strand starting at position 3388 of SEQ ID NO: 588503
uuaagaggacuuggugagu

SEQ ID NO: 869835 - RNA, 19 nt, Artificial Sequence
  Description of Artificial Sequence: Synthetic oligonucleotide
  Antisense strand to SEQ ID NO: 869834
acucaccaaguccucuuaa

SEQ ID NO: 869836 - RNA, 19 nt, Artificial Sequence
  Description of Artificial Sequence: Synthetic oligonucleotide
  Sense strand starting at position 3402 of SEQ ID NO: 588503
ugaguucuaguaugacuaa

SEQ ID NO: 869837 - RNA, 19 nt, Artificial Sequence
  Description of Artificial Sequence: Synthetic oligonucleotide
  Antisense strand to SEQ ID NO: 869836
uuagucauacuagaacuca

SEQ ID NO: 869838 - RNA, 19 nt, Artificial Sequence
  Description of Artificial Sequence: Synthetic oligonucleotide
  Sense strand starting at position 3433 of SEQ ID NO: 588503
gaucuauauggcugauaga

SEQ ID NO: 869839 - RNA, 19 nt, Artificial Sequence
  Description of Artificial Sequence: Synthetic oligonucleotide
  Antisense strand to SEQ ID NO: 869838
ucuaucagccauauagauc

SEQ ID NO: 869840 - RNA, 19 nt, Artificial Sequence
  Description of Artificial Sequence: Synthetic oligonucleotide
  Sense strand starting at position 3619 of SEQ ID NO: 588503
gccucugagaguugaaaga

SEQ ID NO: 869841 - RNA, 19 nt, Artificial Sequence
  Description of Artificial Sequence: Synthetic oligonucleotide
  Antisense strand to SEQ ID NO: 869840
ucuuucaacucucagaggc

SEQ ID NO: 869842 - RNA, 19 nt, Artificial Sequence
  Description of Artificial Sequence: Synthetic oligonucleotide
  Sense strand starting at position 3757 of SEQ ID NO: 588503
uguguuaaccucuaacaca

SEQ ID NO: 869843 - RNA, 19 nt, Artificial Sequence
  Description of Artificial Sequence: Synthetic oligonucleotide
  Antisense strand to SEQ ID NO: 869842
uguguuagagguuaacaca

SEQ ID NO: 869844 - RNA, 19 nt, Artificial Sequence
  Description of Artificial Sequence: Synthetic oligonucleotide
  Sense strand starting at position 3765 of SEQ ID NO: 588503
ccucuaacacagugguuaa

SEQ ID NO: 869845 - RNA, 19 nt, Artificial Sequence
  Description of Artificial Sequence: Synthetic oligonucleotide
  Antisense strand to SEQ ID NO: 869844
uuaaccacuguguuagagg

SEQ ID NO: 869846 - RNA, 19 nt, Artificial Sequence
  Description of Artificial Sequence: Synthetic oligonucleotide
  Sense strand starting at position 3780 of SEQ ID NO: 588503
uuaauagugagucaguuua

SEQ ID NO: 869847 - RNA, 19 nt, Artificial Sequence
  Description of Artificial Sequence: Synthetic oligonucleotide
  Antisense strand to SEQ ID NO: 869846
uaaacugacucacuauuaa

SEQ ID NO: 869848 - RNA, 19 nt, Artificial Sequence
  Description of Artificial Sequence: Synthetic oligonucleotide
  Sense strand starting at position 3788 of SEQ ID NO: 588503
gagucaguuuacuugaaug

SEQ ID NO: 869849 - RNA, 19 nt, Artificial Sequence
  Description of Artificial Sequence: Synthetic oligonucleotide
  Antisense strand to SEQ ID NO: 869848
cauucaaguaaacugacuc

SEQ ID NO: 869850 - RNA, 19 nt, Artificial Sequence
  Description of Artificial Sequence: Synthetic oligonucleotide
  Sense strand starting at position 3790 of SEQ ID NO: 588503
gucaguuuacuugaaugca

SEQ ID NO: 869851 - RNA, 19 nt, Artificial Sequence
  Description of Artificial Sequence: Synthetic oligonucleotide
  Antisense strand to SEQ ID NO: 869850
ugcauucaaguaaacugac

SEQ ID NO: 869852 - RNA, 19 nt, Artificial Sequence
  Description of Artificial Sequence: Synthetic oligonucleotide
  Sense strand starting at position 3793 of SEQ ID NO: 588503
aguuuacuugaaugcaaau

SEQ ID NO: 869853 - RNA, 19 nt, Artificial Sequence
  Description of Artificial Sequence: Synthetic oligonucleotide
  Antisense strand to SEQ ID NO: 869852
auuugcauucaaguaaacu

SEQ ID NO: 869854 - RNA, 19 nt, Artificial Sequence
  Description of Artificial Sequence: Synthetic oligonucleotide
  Sense strand starting at position 3898 of SEQ ID NO: 588503
agugauuggguauacguaa

SEQ ID NO: 869855 - RNA, 19 nt, Artificial Sequence
  Description of Artificial Sequence: Synthetic oligonucleotide
  Antisense strand to SEQ ID NO: 869854
uuacguauacccaaucacu

SEQ ID NO: 869856 - RNA, 19 nt, Artificial Sequence
  Description of Artificial Sequence: Synthetic oligonucleotide
  Sense strand starting at position 3909 of SEQ ID NO: 588503
auacguaaaucacuuagaa

SEQ ID NO: 869857 - RNA, 19 nt, Artificial Sequence
  Description of Artificial Sequence: Synthetic oligonucleotide
  Antisense strand to SEQ ID NO: 869856
uucuaagugauuuacguau

SEQ ID NO: 869858 - RNA, 19 nt, Artificial Sequence
  Description of Artificial Sequence: Synthetic oligonucleotide
  Sense strand starting at position 67 of SEQ ID NO: 588504
gggagaggucauggguuca

SEQ ID NO: 869859 - RNA, 19 nt, Artificial Sequence
  Description of Artificial Sequence: Synthetic oligonucleotide
  Antisense strand to SEQ ID NO: 869858
ugaacccaugaccucuccc

SEQ ID NO: 869860 - RNA, 19 nt, Artificial Sequence
  Description of Artificial Sequence: Synthetic oligonucleotide
  Sense strand starting at position 489 of SEQ ID NO: 588504
aucguauacauugacgaca

SEQ ID NO: 869861 - RNA, 19 nt, Artificial Sequence
  Description of Artificial Sequence: Synthetic oligonucleotide
  Antisense strand to SEQ ID NO: 869860
ugucgucaauguauacgau

SEQ ID NO: 869862 - RNA, 19 nt, Artificial Sequence
  Description of Artificial Sequence: Synthetic oligonucleotide
  Sense strand starting at position 532 of SEQ ID NO: 588504
gcgccagauacguaauugu

SEQ ID NO: 869863 - RNA, 19 nt, Artificial Sequence
  Description of Artificial Sequence: Synthetic oligonucleotide
  Antisense strand to SEQ ID NO: 869862
acaauuacguaucuggcgc

SEQ ID NO: 869864 - RNA, 19 nt, Artificial Sequence
  Description of Artificial Sequence: Synthetic oligonucleotide
  Sense strand starting at position 535 of SEQ ID NO: 588504
ccagauacguaauuguaug

SEQ ID NO: 869865 - RNA, 19 nt, Artificial Sequence
  Description of Artificial Sequence: Synthetic oligonucleotide
  Antisense strand to SEQ ID NO: 869864
cauacaauuacguaucugg

SEQ ID NO: 869866 - RNA, 19 nt, Artificial Sequence
  Description of Artificial Sequence: Synthetic oligonucleotide
  Sense strand starting at position 540 of SEQ ID NO: 588504
uacguaauuguaugcagga

SEQ ID NO: 869867 - RNA, 19 nt, Artificial Sequence
  Description of Artificial Sequence: Synthetic oligonucleotide
  Antisense strand to SEQ ID NO: 869866
uccugcauacaauuacgua

SEQ ID NO: 869868 - RNA, 19 nt, Artificial Sequence
  Description of Artificial Sequence: Synthetic oligonucleotide
  Sense strand starting at position 541 of SEQ ID NO: 588504
acguaauuguaugcaggau

SEQ ID NO: 869869 - RNA, 19 nt, Artificial Sequence
  Description of Artificial Sequence: Synthetic oligonucleotide
  Antisense strand to SEQ ID NO: 869868
auccugcauacaauuacgu

SEQ ID NO: 869870 - RNA, 19 nt, Artificial Sequence
  Description of Artificial Sequence: Synthetic oligonucleotide
  Sense strand starting at position 593 of SEQ ID NO: 588504
cacgaaugguucugaaacg

SEQ ID NO: 869871 - RNA, 19 nt, Artificial Sequence
  Description of Artificial Sequence: Synthetic oligonucleotide
  Antisense strand to SEQ ID NO: 869870
cguuucagaaccauucgug

SEQ ID NO: 869872 - RNA, 19 nt, Artificial Sequence
  Description of Artificial Sequence: Synthetic oligonucleotide
  Sense strand starting at position 686 of SEQ ID NO: 588504
cguucuuuccgguuaggca

SEQ ID NO: 869873 - RNA, 19 nt, Artificial Sequence
  Description of Artificial Sequence: Synthetic oligonucleotide
  Antisense strand to SEQ ID NO: 869872
ugccuaaccggaaagaacg

SEQ ID NO: 869874 - RNA, 19 nt, Artificial Sequence
  Description of Artificial Sequence: Synthetic oligonucleotide
  Sense strand starting at position 687 of SEQ ID NO: 588504
guucuuuccgguuaggcau

SEQ ID NO: 869875 - RNA, 19 nt, Artificial Sequence
  Description of Artificial Sequence: Synthetic oligonucleotide
  Antisense strand to SEQ ID NO: 869874
augccuaaccggaaagaac

SEQ ID NO: 869876 - RNA, 19 nt, Artificial Sequence
  Description of Artificial Sequence: Synthetic oligonucleotide
  Sense strand starting at position 848 of SEQ ID NO: 588504
ggaggauuuggccgagcga

SEQ ID NO: 869877 - RNA, 19 nt, Artificial Sequence
  Description of Artificial Sequence: Synthetic oligonucleotide
  Antisense strand to SEQ ID NO: 869876
ucgcucggccaaauccucc

SEQ ID NO: 869878 - RNA, 19 nt, Artificial Sequence
  Description of Artificial Sequence: Synthetic oligonucleotide
  Sense strand starting at position 951 of SEQ ID NO: 588504
cggagcuuguagucugcaa

SEQ ID NO: 869879 - RNA, 19 nt, Artificial Sequence
  Description of Artificial Sequence: Synthetic oligonucleotide
  Antisense strand to SEQ ID NO: 869878
uugcagacuacaagcuccg

SEQ ID NO: 869880 - RNA, 19 nt, Artificial Sequence
  Description of Artificial Sequence: Synthetic oligonucleotide
  Sense strand starting at position 953 of SEQ ID NO: 588504
gagcuuguagucugcaaga

SEQ ID NO: 869881 - RNA, 19 nt, Artificial Sequence
  Description of Artificial Sequence: Synthetic oligonucleotide
  Antisense strand to SEQ ID NO: 869880
ucuugcagacuacaagcuc

SEQ ID NO: 869882 - RNA, 19 nt, Artificial Sequence
  Description of Artificial Sequence: Synthetic oligonucleotide
  Sense strand starting at position 955 of SEQ ID NO: 588504
gcuuguagucugcaagauc

SEQ ID NO: 869883 - RNA, 19 nt, Artificial Sequence
  Description of Artificial Sequence: Synthetic oligonucleotide
  Antisense strand to SEQ ID NO: 869882
gaucuugcagacuacaagc

SEQ ID NO: 869884 - RNA, 19 nt, Artificial Sequence
  Description of Artificial Sequence: Synthetic oligonucleotide
  Sense strand starting at position 2379 of SEQ ID NO: 588504
ggaggaagcuucuugaauc

SEQ ID NO: 869885 - RNA, 19 nt, Artificial Sequence
  Description of Artificial Sequence: Synthetic oligonucleotide
  Antisense strand to SEQ ID NO: 869884
gauucaagaagcuuccucc

SEQ ID NO: 869886 - RNA, 19 nt, Artificial Sequence
  Description of Artificial Sequence: Synthetic oligonucleotide
  Sense strand starting at position 2380 of SEQ ID NO: 588504
gaggaagcuucuugaauca

SEQ ID NO: 869887 - RNA, 19 nt, Artificial Sequence
  Description of Artificial Sequence: Synthetic oligonucleotide
  Antisense strand to SEQ ID NO: 869886
ugauucaagaagcuuccuc

SEQ ID NO: 869888 - RNA, 19 nt, Artificial Sequence
  Description of Artificial Sequence: Synthetic oligonucleotide
  Sense strand starting at position 2506 of SEQ ID NO: 588504
cuggccuuucuccaaguga

SEQ ID NO: 869889 - RNA, 19 nt, Artificial Sequence
  Description of Artificial Sequence: Synthetic oligonucleotide
  Antisense strand to SEQ ID NO: 869888
ucacuuggagaaaggccag

SEQ ID NO: 869890 - RNA, 19 nt, Artificial Sequence
  Description of Artificial Sequence: Synthetic oligonucleotide
  Sense strand starting at position 2578 of SEQ ID NO: 588504
cuggguggucugggcuaaa

SEQ ID NO: 869891 - RNA, 19 nt, Artificial Sequence
  Description of Artificial Sequence: Synthetic oligonucleotide
  Antisense strand to SEQ ID NO: 869890
uuuagcccagaccacccag

SEQ ID NO: 869892 - RNA, 19 nt, Artificial Sequence
  Description of Artificial Sequence: Synthetic oligonucleotide
  Sense strand starting at position 2581 of SEQ ID NO: 588504
gguggucugggcuaaauga

SEQ ID NO: 869893 - RNA, 19 nt, Artificial Sequence
  Description of Artificial Sequence: Synthetic oligonucleotide
  Antisense strand to SEQ ID NO: 869892
ucauuuagcccagaccacc

SEQ ID NO: 869894 - RNA, 19 nt, Artificial Sequence
  Description of Artificial Sequence: Synthetic oligonucleotide
  Sense strand starting at position 2618 of SEQ ID NO: 588504
caggaaggaucugugcuaa

SEQ ID NO: 869895 - RNA, 19 nt, Artificial Sequence
  Description of Artificial Sequence: Synthetic oligonucleotide
  Antisense strand to SEQ ID NO: 869894
uuagcacagauccuuccug

SEQ ID NO: 869896 - RNA, 19 nt, Artificial Sequence
  Description of Artificial Sequence: Synthetic oligonucleotide
  Sense strand starting at position 2777 of SEQ ID NO: 588504
cgaagaguuucagaacagu

SEQ ID NO: 869897 - RNA, 19 nt, Artificial Sequence
  Description of Artificial Sequence: Synthetic oligonucleotide
  Antisense strand to SEQ ID NO: 869896
acuguucugaaacucuucg

SEQ ID NO: 869898 - RNA, 19 nt, Artificial Sequence
  Description of Artificial Sequence: Synthetic oligonucleotide
  Sense strand starting at position 2803 of SEQ ID NO: 588504
gccuuaaagcuuugcauca

SEQ ID NO: 869899 - RNA, 19 nt, Artificial Sequence
  Description of Artificial Sequence: Synthetic oligonucleotide
  Antisense strand to SEQ ID NO: 869898
ugaugcaaagcuuuaaggc

SEQ ID NO: 869900 - RNA, 19 nt, Artificial Sequence
  Description of Artificial Sequence: Synthetic oligonucleotide
  Sense strand starting at position 2805 of SEQ ID NO: 588504
cuuaaagcuuugcaucagu

SEQ ID NO: 869901 - RNA, 19 nt, Artificial Sequence
  Description of Artificial Sequence: Synthetic oligonucleotide
  Antisense strand to SEQ ID NO: 869900
acugaugcaaagcuuuaag

SEQ ID NO: 869902 - RNA, 19 nt, Artificial Sequence
  Description of Artificial Sequence: Synthetic oligonucleotide
  Sense strand starting at position 2832 of SEQ ID NO: 588504
gcccgucucugaguugaac

SEQ ID NO: 869903 - RNA, 19 nt, Artificial Sequence
  Description of Artificial Sequence: Synthetic oligonucleotide
  Antisense strand to SEQ ID NO: 869902
guucaacucagagacgggc

SEQ ID NO: 869904 - RNA, 19 nt, Artificial Sequence
  Description of Artificial Sequence: Synthetic oligonucleotide
  Sense strand starting at position 2877 of SEQ ID NO: 588504
aaagucucaguguggcaaa

SEQ ID NO: 869905 - RNA, 19 nt, Artificial Sequence
  Description of Artificial Sequence: Synthetic oligonucleotide
  Antisense strand to SEQ ID NO: 869904
uuugccacacugagacuuu

SEQ ID NO: 869906 - RNA, 19 nt, Artificial Sequence
  Description of Artificial Sequence: Synthetic oligonucleotide
  Sense strand starting at position 2920 of SEQ ID NO: 588504
cagagcugcugucaagaaa

SEQ ID NO: 869907 - RNA, 19 nt, Artificial Sequence
  Description of Artificial Sequence: Synthetic oligonucleotide
  Antisense strand to SEQ ID NO: 869906
uuucuugacagcagcucug

SEQ ID NO: 869908 - RNA, 19 nt, Artificial Sequence
  Description of Artificial Sequence: Synthetic oligonucleotide
  Sense strand starting at position 2931 of SEQ ID NO: 588504
ucaagaaacuguguuaaga

SEQ ID NO: 869909 - RNA, 19 nt, Artificial Sequence
  Description of Artificial Sequence: Synthetic oligonucleotide
  Antisense strand to SEQ ID NO: 869908
ucuuaacacaguuucuuga

SEQ ID NO: 869910 - RNA, 19 nt, Artificial Sequence
  Description of Artificial Sequence: Synthetic oligonucleotide
  Sense strand starting at position 2933 of SEQ ID NO: 588504
aagaaacuguguuaagaua

SEQ ID NO: 869911 - RNA, 19 nt, Artificial Sequence
  Description of Artificial Sequence: Synthetic oligonucleotide
  Antisense strand to SEQ ID NO: 869910
uaucuuaacacaguuucuu

SEQ ID NO: 869912 - RNA, 19 nt, Artificial Sequence
  Description of Artificial Sequence: Synthetic oligonucleotide
  Sense strand starting at position 3002 of SEQ ID NO: 588504
gugggucauguggauugua

SEQ ID NO: 869913 - RNA, 19 nt, Artificial Sequence
  Description of Artificial Sequence: Synthetic oligonucleotide
  Antisense strand to SEQ ID NO: 869912
uacaauccacaugacccac

SEQ ID NO: 869914 - RNA, 19 nt, Artificial Sequence
  Description of Artificial Sequence: Synthetic oligonucleotide
  Sense strand starting at position 3005 of SEQ ID NO: 588504
ggucauguggauuguacca

SEQ ID NO: 869915 - RNA, 19 nt, Artificial Sequence
  Description of Artificial Sequence: Synthetic oligonucleotide
  Antisense strand to SEQ ID NO: 869914
ugguacaauccacaugacc

SEQ ID NO: 869916 - RNA, 19 nt, Artificial Sequence
  Description of Artificial Sequence: Synthetic oligonucleotide
  Sense strand starting at position 3010 of SEQ ID NO: 588504
uguggauuguaccacgaaa

SEQ ID NO: 869917 - RNA, 19 nt, Artificial Sequence
  Description of Artificial Sequence: Synthetic oligonucleotide
  Antisense strand to SEQ ID NO: 869916
uuucgugguacaauccaca

SEQ ID NO: 869918 - RNA, 19 nt, Artificial Sequence
  Description of Artificial Sequence: Synthetic oligonucleotide
  Sense strand starting at position 3297 of SEQ ID NO: 588504
gcuggaagcgucuuugcaa

SEQ ID NO: 869919 - RNA, 19 nt, Artificial Sequence
  Description of Artificial Sequence: Synthetic oligonucleotide
  Antisense strand to SEQ ID NO: 869918
uugcaaagacgcuuccagc

SEQ ID NO: 869920 - RNA, 19 nt, Artificial Sequence
  Description of Artificial Sequence: Synthetic oligonucleotide
  Sense strand starting at position 3298 of SEQ ID NO: 588504
cuggaagcgucuuugcaac

SEQ ID NO: 869921 - RNA, 19 nt, Artificial Sequence
  Description of Artificial Sequence: Synthetic oligonucleotide
  Antisense strand to SEQ ID NO: 869920
guugcaaagacgcuuccag

SEQ ID NO: 869922 - RNA, 19 nt, Artificial Sequence
  Description of Artificial Sequence: Synthetic oligonucleotide
  Sense strand starting at position 3304 of SEQ ID NO: 588504
gcgucuuugcaacaggaaa

SEQ ID NO: 869923 - RNA, 19 nt, Artificial Sequence
  Description of Artificial Sequence: Synthetic oligonucleotide
  Antisense strand to SEQ ID NO: 869922
uuuccuguugcaaagacgc

SEQ ID NO: 869924 - RNA, 19 nt, Artificial Sequence
  Description of Artificial Sequence: Synthetic oligonucleotide
  Sense strand starting at position 3306 of SEQ ID NO: 588504
gucuuugcaacaggaaaga

SEQ ID NO: 869925 - RNA, 19 nt, Artificial Sequence
  Description of Artificial Sequence: Synthetic oligonucleotide
  Antisense strand to SEQ ID NO: 869924
ucuuuccuguugcaaagac

SEQ ID NO: 869926 - RNA, 19 nt, Artificial Sequence
  Description of Artificial Sequence: Synthetic oligonucleotide
  Sense strand starting at position 3398 of SEQ ID NO: 588504
ggcgcugauugagaacaca

SEQ ID NO: 869927 - RNA, 19 nt, Artificial Sequence
  Description of Artificial Sequence: Synthetic oligonucleotide
  Antisense strand to SEQ ID NO: 869926
uguguucucaaucagcgcc

SEQ ID NO: 869928 - RNA, 19 nt, Artificial Sequence
  Description of Artificial Sequence: Synthetic oligonucleotide
  Sense strand starting at position 3595 of SEQ ID NO: 588504
guggcucuccuguggcaga

SEQ ID NO: 869929 - RNA, 19 nt, Artificial Sequence
  Description of Artificial Sequence: Synthetic oligonucleotide
  Antisense strand to SEQ ID NO: 869928
ucugccacaggagagccac

SEQ ID NO: 869930 - RNA, 19 nt, Artificial Sequence
  Description of Artificial Sequence: Synthetic oligonucleotide
  Sense strand starting at position 3712 of SEQ ID NO: 588504
ggcaaacaauucugaguca

SEQ ID NO: 869931 - RNA, 19 nt, Artificial Sequence
  Description of Artificial Sequence: Synthetic oligonucleotide
  Antisense strand to SEQ ID NO: 869930
ugacucagaauuguuugcc

SEQ ID NO: 869932 - RNA, 19 nt, Artificial Sequence
  Description of Artificial Sequence: Synthetic oligonucleotide
  Sense strand starting at position 3713 of SEQ ID NO: 588504
gcaaacaauucugagucaa

SEQ ID NO: 869933 - RNA, 19 nt, Artificial Sequence
  Description of Artificial Sequence: Synthetic oligonucleotide
  Antisense strand to SEQ ID NO: 869932
uugacucagaauuguuugc

SEQ ID NO: 869934 - RNA, 19 nt, Artificial Sequence
  Description of Artificial Sequence: Synthetic oligonucleotide
  Sense strand starting at position 3756 of SEQ ID NO: 588504
cugaaaggaugguggaauu

SEQ ID NO: 869935 - RNA, 19 nt, Artificial Sequence
  Description of Artificial Sequence: Synthetic oligonucleotide
  Antisense strand to SEQ ID NO: 869934
aauuccaccauccuuucag

SEQ ID NO: 869936 - RNA, 19 nt, Artificial Sequence
  Description of Artificial Sequence: Synthetic oligonucleotide
  Sense strand starting at position 3964 of SEQ ID NO: 588504
aggugcuuccucuggccaa

SEQ ID NO: 869937 - RNA, 19 nt, Artificial Sequence
  Description of Artificial Sequence: Synthetic oligonucleotide
  Antisense strand to SEQ ID NO: 869936
uuggccagaggaagcaccu

SEQ ID NO: 869938 - RNA, 19 nt, Artificial Sequence
  Description of Artificial Sequence: Synthetic oligonucleotide
  Sense strand starting at position 85 of SEQ ID NO: 588505
uuauguacuggauagcaau

SEQ ID NO: 869939 - RNA, 19 nt, Artificial Sequence
  Description of Artificial Sequence: Synthetic oligonucleotide
  Antisense strand to SEQ ID NO: 869938
auugcuauccaguacauaa

SEQ ID NO: 869940 - RNA, 19 nt, Artificial Sequence
  Description of Artificial Sequence: Synthetic oligonucleotide
  Sense strand starting at position 183 of SEQ ID NO: 588505
ucuauaucaguggaucuua

SEQ ID NO: 869941 - RNA, 19 nt, Artificial Sequence
  Description of Artificial Sequence: Synthetic oligonucleotide
  Antisense strand to SEQ ID NO: 869940
uaagauccacugauauaga

SEQ ID NO: 869942 - RNA, 19 nt, Artificial Sequence
  Description of Artificial Sequence: Synthetic oligonucleotide
  Sense strand starting at position 392 of SEQ ID NO: 588505
cuuaguuugcauuagaaau

SEQ ID NO: 869943 - RNA, 19 nt, Artificial Sequence
  Description of Artificial Sequence: Synthetic oligonucleotide
  Antisense strand to SEQ ID NO: 869942
auuucuaaugcaaacuaag

SEQ ID NO: 869944 - RNA, 19 nt, Artificial Sequence
  Description of Artificial Sequence: Synthetic oligonucleotide
  Sense strand starting at position 402 of SEQ ID NO: 588505
auuagaaauuguuuggacu

SEQ ID NO: 869945 - RNA, 19 nt, Artificial Sequence
  Description of Artificial Sequence: Synthetic oligonucleotide
  Antisense strand to SEQ ID NO: 869944
aguccaaacaauuucuaau

SEQ ID NO: 869946 - RNA, 19 nt, Artificial Sequence
  Description of Artificial Sequence: Synthetic oligonucleotide
  Sense strand starting at position 453 of SEQ ID NO: 588505
ugaaacaagcucugacuaa

SEQ ID NO: 869947 - RNA, 19 nt, Artificial Sequence
  Description of Artificial Sequence: Synthetic oligonucleotide
  Antisense strand to SEQ ID NO: 869946
uuagucagagcuuguuuca

SEQ ID NO: 869948 - RNA, 19 nt, Artificial Sequence
  Description of Artificial Sequence: Synthetic oligonucleotide
  Sense strand starting at position 535 of SEQ ID NO: 588505
cacugugcacgauaacuuu

SEQ ID NO: 869949 - RNA, 19 nt, Artificial Sequence
  Description of Artificial Sequence: Synthetic oligonucleotide
  Antisense strand to SEQ ID NO: 869948
aaaguuaucgugcacagug

SEQ ID NO: 869950 - RNA, 19 nt, Artificial Sequence
  Description of Artificial Sequence: Synthetic oligonucleotide
  Sense strand starting at position 541 of SEQ ID NO: 588505
gcacgauaacuuuaaacag

SEQ ID NO: 869951 - RNA, 19 nt, Artificial Sequence
  Description of Artificial Sequence: Synthetic oligonucleotide
  Antisense strand to SEQ ID NO: 869950
cuguuuaaaguuaucgugc

SEQ ID NO: 869952 - RNA, 19 nt, Artificial Sequence
  Description of Artificial Sequence: Synthetic oligonucleotide
  Sense strand starting at position 573 of SEQ ID NO: 588505
uuuaaugaaguguaugcau

SEQ ID NO: 869953 - RNA, 19 nt, Artificial Sequence
  Description of Artificial Sequence: Synthetic oligonucleotide
  Antisense strand to SEQ ID NO: 869952
augcauacacuucauuaaa

SEQ ID NO: 869954 - RNA, 19 nt, Artificial Sequence
  Description of Artificial Sequence: Synthetic oligonucleotide
  Sense strand starting at position 575 of SEQ ID NO: 588505
uaaugaaguguaugcauau

SEQ ID NO: 869955 - RNA, 19 nt, Artificial Sequence
  Description of Artificial Sequence: Synthetic oligonucleotide
  Antisense strand to SEQ ID NO: 869954
auaugcauacacuucauua

SEQ ID NO: 869956 - RNA, 19 nt, Artificial Sequence
  Description of Artificial Sequence: Synthetic oligonucleotide
  Sense strand starting at position 584 of SEQ ID NO: 588505
guaugcauauggguuacaa

SEQ ID NO: 869957 - RNA, 19 nt, Artificial Sequence
  Description of Artificial Sequence: Synthetic oligonucleotide
  Antisense strand to SEQ ID NO: 869956
uuguaacccauaugcauac

SEQ ID NO: 869958 - RNA, 19 nt, Artificial Sequence
  Description of Artificial Sequence: Synthetic oligonucleotide
  Sense strand starting at position 719 of SEQ ID NO: 588505
agaauauaguagccucuau

SEQ ID NO: 869959 - RNA, 19 nt, Artificial Sequence
  Description of Artificial Sequence: Synthetic oligonucleotide
  Antisense strand to SEQ ID NO: 869958
auagaggcuacuauauucu

SEQ ID NO: 869960 - RNA, 19 nt, Artificial Sequence
  Description of Artificial Sequence: Synthetic oligonucleotide
  Sense strand starting at position 773 of SEQ ID NO: 588505
gcuggcaauuuaucuuuau

SEQ ID NO: 869961 - RNA, 19 nt, Artificial Sequence
  Description of Artificial Sequence: Synthetic oligonucleotide
  Antisense strand to SEQ ID NO: 869960
auaaagauaaauugccagc

SEQ ID NO: 869962 - RNA, 19 nt, Artificial Sequence
  Description of Artificial Sequence: Synthetic oligonucleotide
  Sense strand starting at position 794 of SEQ ID NO: 588505
auaccuuguuacuugguaa

SEQ ID NO: 869963 - RNA, 19 nt, Artificial Sequence
  Description of Artificial Sequence: Synthetic oligonucleotide
  Antisense strand to SEQ ID NO: 869962
uuaccaaguaacaagguau

SEQ ID NO: 869964 - RNA, 19 nt, Artificial Sequence
  Description of Artificial Sequence: Synthetic oligonucleotide
  Sense strand starting at position 913 of SEQ ID NO: 588505
cagcuaugauggucugaac

SEQ ID NO: 869965 - RNA, 19 nt, Artificial Sequence
  Description of Artificial Sequence: Synthetic oligonucleotide
  Antisense strand to SEQ ID NO: 869964
guucagaccaucauagcug

SEQ ID NO: 869966 - RNA, 19 nt, Artificial Sequence
  Description of Artificial Sequence: Synthetic oligonucleotide
  Sense strand starting at position 922 of SEQ ID NO: 588505
uggucugaacagugaaauu

SEQ ID NO: 869967 - RNA, 19 nt, Artificial Sequence
  Description of Artificial Sequence: Synthetic oligonucleotide
  Antisense strand to SEQ ID NO: 869966
aauuucacuguucagacca

SEQ ID NO: 869968 - RNA, 19 nt, Artificial Sequence
  Description of Artificial Sequence: Synthetic oligonucleotide
  Sense strand starting at position 1385 of SEQ ID NO: 588505
gguguuugagaauagucac

SEQ ID NO: 869969 - RNA, 19 nt, Artificial Sequence
  Description of Artificial Sequence: Synthetic oligonucleotide
  Antisense strand to SEQ ID NO: 869968
gugacuauucucaaacacc

SEQ ID NO: 869970 - RNA, 19 nt, Artificial Sequence
  Description of Artificial Sequence: Synthetic oligonucleotide
  Sense strand starting at position 1388 of SEQ ID NO: 588505
guuugagaauagucaccuu

SEQ ID NO: 869971 - RNA, 19 nt, Artificial Sequence
  Description of Artificial Sequence: Synthetic oligonucleotide
  Antisense strand to SEQ ID NO: 869970
aaggugacuauucucaaac

SEQ ID NO: 869972 - RNA, 19 nt, Artificial Sequence
  Description of Artificial Sequence: Synthetic oligonucleotide
  Sense strand starting at position 1398 of SEQ ID NO: 588505
agucaccuucucugaggau

SEQ ID NO: 869973 - RNA, 19 nt, Artificial Sequence
  Description of Artificial Sequence: Synthetic oligonucleotide
  Antisense strand to SEQ ID NO: 869972
auccucagagaaggugacu

SEQ ID NO: 869974 - RNA, 19 nt, Artificial Sequence
  Description of Artificial Sequence: Synthetic oligonucleotide
  Sense strand starting at position 1407 of SEQ ID NO: 588505
cucugaggauucccuguuu

SEQ ID NO: 869975 - RNA, 19 nt, Artificial Sequence
  Description of Artificial Sequence: Synthetic oligonucleotide
  Antisense strand to SEQ ID NO: 869974
aaacagggaauccucagag

SEQ ID NO: 869976 - RNA, 19 nt, Artificial Sequence
  Description of Artificial Sequence: Synthetic oligonucleotide
  Sense strand starting at position 1608 of SEQ ID NO: 588505
aguagagucugaguugacu

SEQ ID NO: 869977 - RNA, 19 nt, Artificial Sequence
  Description of Artificial Sequence: Synthetic oligonucleotide
  Antisense strand to SEQ ID NO: 869976
agucaacucagacucuacu

SEQ ID NO: 869978 - RNA, 19 nt, Artificial Sequence
  Description of Artificial Sequence: Synthetic oligonucleotide
  Sense strand starting at position 2058 of SEQ ID NO: 588505
gcgucaauggugucaguuc

SEQ ID NO: 869979 - RNA, 19 nt, Artificial Sequence
  Description of Artificial Sequence: Synthetic oligonucleotide
  Antisense strand to SEQ ID NO: 869978
gaacugacaccauugacgc

SEQ ID NO: 869980 - RNA, 19 nt, Artificial Sequence
  Description of Artificial Sequence: Synthetic oligonucleotide
  Sense strand starting at position 2101 of SEQ ID NO: 588505
ggaacuuucucccucaguu

SEQ ID NO: 869981 - RNA, 19 nt, Artificial Sequence
  Description of Artificial Sequence: Synthetic oligonucleotide
  Antisense strand to SEQ ID NO: 869980
aacugagggagaaaguucc

SEQ ID NO: 869982 - RNA, 19 nt, Artificial Sequence
  Description of Artificial Sequence: Synthetic oligonucleotide
  Sense strand starting at position 2284 of SEQ ID NO: 588505
auguccuuugcuuagauga

SEQ ID NO: 869983 - RNA, 19 nt, Artificial Sequence
  Description of Artificial Sequence: Synthetic oligonucleotide
  Antisense strand to SEQ ID NO: 869982
ucaucuaagcaaaggacau

SEQ ID NO: 869984 - RNA, 19 nt, Artificial Sequence
  Description of Artificial Sequence: Synthetic oligonucleotide
  Sense strand starting at position 2327 of SEQ ID NO: 588505
gcucauuggcuagaaauua

SEQ ID NO: 869985 - RNA, 19 nt, Artificial Sequence
  Description of Artificial Sequence: Synthetic oligonucleotide
  Antisense strand to SEQ ID NO: 869984
uaauuucuagccaaugagc

SEQ ID NO: 869986 - RNA, 19 nt, Artificial Sequence
  Description of Artificial Sequence: Synthetic oligonucleotide
  Sense strand starting at position 2335 of SEQ ID NO: 588505
gcuagaaauuaucuuaguu

SEQ ID NO: 869987 - RNA, 19 nt, Artificial Sequence
  Description of Artificial Sequence: Synthetic oligonucleotide
  Antisense strand to SEQ ID NO: 869986
aacuaagauaauuucuagc

SEQ ID NO: 869988 - RNA, 19 nt, Artificial Sequence
  Description of Artificial Sequence: Synthetic oligonucleotide
  Sense strand starting at position 2567 of SEQ ID NO: 588505
gacgaaggucuugaguaaa

SEQ ID NO: 869989 - RNA, 19 nt, Artificial Sequence
  Description of Artificial Sequence: Synthetic oligonucleotide
  Antisense strand to SEQ ID NO: 869988
uuuacucaagaccuucguc

SEQ ID NO: 869990 - RNA, 19 nt, Artificial Sequence
  Description of Artificial Sequence: Synthetic oligonucleotide
  Sense strand starting at position 2705 of SEQ ID NO: 588505
auuuguaucugugccuuaa

SEQ ID NO: 869991 - RNA, 19 nt, Artificial Sequence
  Description of Artificial Sequence: Synthetic oligonucleotide
  Antisense strand to SEQ ID NO: 869990
uuaaggcacagauacaaau

SEQ ID NO: 869992 - RNA, 19 nt, Artificial Sequence
  Description of Artificial Sequence: Synthetic oligonucleotide
  Sense strand starting at position 2897 of SEQ ID NO: 588505
ucggguucuguugacuuaa

SEQ ID NO: 869993 - RNA, 19 nt, Artificial Sequence
  Description of Artificial Sequence: Synthetic oligonucleotide
  Antisense strand to SEQ ID NO: 869992
uuaagucaacagaacccga

SEQ ID NO: 869994 - RNA, 19 nt, Artificial Sequence
  Description of Artificial Sequence: Synthetic oligonucleotide
  Sense strand starting at position 2899 of SEQ ID NO: 588505
ggguucuguugacuuaaga

SEQ ID NO: 869995 - RNA, 19 nt, Artificial Sequence
  Description of Artificial Sequence: Synthetic oligonucleotide
  Antisense strand to SEQ ID NO: 869994
ucuuaagucaacagaaccc

SEQ ID NO: 869996 - RNA, 19 nt, Artificial Sequence
  Description of Artificial Sequence: Synthetic oligonucleotide
  Sense strand starting at position 2963 of SEQ ID NO: 588505
ccggcuuugcaucauagaa

SEQ ID NO: 869997 - RNA, 19 nt, Artificial Sequence
  Description of Artificial Sequence: Synthetic oligonucleotide
  Antisense strand to SEQ ID NO: 869996
uucuaugaugcaaagccgg

SEQ ID NO: 869998 - RNA, 19 nt, Artificial Sequence
  Description of Artificial Sequence: Synthetic oligonucleotide
  Sense strand starting at position 2992 of SEQ ID NO: 588505
acguaagacaaucaugagu

SEQ ID NO: 869999 - RNA, 19 nt, Artificial Sequence
  Description of Artificial Sequence: Synthetic oligonucleotide
  Antisense strand to SEQ ID NO: 869998
acucaugauugucuuacgu

SEQ ID NO: 870000 - RNA, 19 nt, Artificial Sequence
  Description of Artificial Sequence: Synthetic oligonucleotide
  Sense strand starting at position 3366 of SEQ ID NO: 588505
gugcaagaaucucuugauc

SEQ ID NO: 870001 - RNA, 19 nt, Artificial Sequence
  Description of Artificial Sequence: Synthetic oligonucleotide
  Antisense strand to SEQ ID NO: 870000
gaucaagagauucuugcac

SEQ ID NO: 870002 - RNA, 19 nt, Artificial Sequence
  Description of Artificial Sequence: Synthetic oligonucleotide
  Sense strand starting at position 3423 of SEQ ID NO: 588505
uggccaaauugucuacaaa

SEQ ID NO: 870003 - RNA, 19 nt, Artificial Sequence
  Description of Artificial Sequence: Synthetic oligonucleotide
  Antisense strand to SEQ ID NO: 870002
uuuguagacaauuuggcca

SEQ ID NO: 870004 - RNA, 19 nt, Artificial Sequence
  Description of Artificial Sequence: Synthetic oligonucleotide
  Sense strand starting at position 3614 of SEQ ID NO: 588505
gucaaauugacggguagga

SEQ ID NO: 870005 - RNA, 19 nt, Artificial Sequence
  Description of Artificial Sequence: Synthetic oligonucleotide
  Antisense strand to SEQ ID NO: 870004
uccuacccgucaauuugac

SEQ ID NO: 870006 - RNA, 19 nt, Artificial Sequence
  Description of Artificial Sequence: Synthetic oligonucleotide
  Sense strand starting at position 3660 of SEQ ID NO: 588505
ugacacuaguaguauuuaa

SEQ ID NO: 870007 - RNA, 19 nt, Artificial Sequence
  Description of Artificial Sequence: Synthetic oligonucleotide
  Antisense strand to SEQ ID NO: 870006
uuaaauacuacuaguguca

SEQ ID NO: 870008 - RNA, 19 nt, Artificial Sequence
  Description of Artificial Sequence: Synthetic oligonucleotide
  Sense strand starting at position 3814 of SEQ ID NO: 588505
agggacugaucagugugau

SEQ ID NO: 870009 - RNA, 19 nt, Artificial Sequence
  Description of Artificial Sequence: Synthetic oligonucleotide
  Antisense strand to SEQ ID NO: 870008
aucacacugaucagucccu

SEQ ID NO: 870010 - RNA, 19 nt, Artificial Sequence
  Description of Artificial Sequence: Synthetic oligonucleotide
  Sense strand starting at position 3815 of SEQ ID NO: 588505
gggacugaucagugugauu

SEQ ID NO: 870011 - RNA, 19 nt, Artificial Sequence
  Description of Artificial Sequence: Synthetic oligonucleotide
  Antisense strand to SEQ ID NO: 870010
aaucacacugaucaguccc

SEQ ID NO: 870012 - RNA, 19 nt, Artificial Sequence
  Description of Artificial Sequence: Synthetic oligonucleotide
  Sense strand starting at position 3817 of SEQ ID NO: 588505
gacugaucagugugauuau

SEQ ID NO: 870013 - RNA, 19 nt, Artificial Sequence
  Description of Artificial Sequence: Synthetic oligonucleotide
  Antisense strand to SEQ ID NO: 870012
auaaucacacugaucaguc

SEQ ID NO: 870014 - RNA, 19 nt, Artificial Sequence
  Description of Artificial Sequence: Synthetic oligonucleotide
  Sense strand starting at position 3905 of SEQ ID NO: 588505
uaagaugucccaggcaaca

SEQ ID NO: 870015 - RNA, 19 nt, Artificial Sequence
  Description of Artificial Sequence: Synthetic oligonucleotide
  Antisense strand to SEQ ID NO: 870014
uguugccugggacaucuua

SEQ ID NO: 870016 - RNA, 19 nt, Artificial Sequence
  Description of Artificial Sequence: Synthetic oligonucleotide
  Sense strand starting at position 3963 of SEQ ID NO: 588505
gggauauccuauccuccca

SEQ ID NO: 870017 - RNA, 19 nt, Artificial Sequence
  Description of Artificial Sequence: Synthetic oligonucleotide
  Antisense strand to SEQ ID NO: 870016
ugggaggauaggauauccc

SEQ ID NO: 870018 - RNA, 19 nt, Artificial Sequence
  Description of Artificial Sequence: Synthetic oligonucleotide
  Sense strand starting at position 57 of SEQ ID NO: 588506
aguauuugaugugagagaa

SEQ ID NO: 870019 - RNA, 19 nt, Artificial Sequence
  Description of Artificial Sequence: Synthetic oligonucleotide
  Antisense strand to SEQ ID NO: 870018
uucucucacaucaaauacu

SEQ ID NO: 870020 - RNA, 19 nt, Artificial Sequence
  Description of Artificial Sequence: Synthetic oligonucleotide
  Sense strand starting at position 112 of SEQ ID NO: 588506
ccuugcacuccugggagaa

SEQ ID NO: 870021 - RNA, 19 nt, Artificial Sequence
  Description of Artificial Sequence: Synthetic oligonucleotide
  Antisense strand to SEQ ID NO: 870020
uucucccaggagugcaagg

SEQ ID NO: 870022 - RNA, 19 nt, Artificial Sequence
  Description of Artificial Sequence: Synthetic oligonucleotide
  Sense strand starting at position 113 of SEQ ID NO: 588506
cuugcacuccugggagaaa

SEQ ID NO: 870023 - RNA, 19 nt, Artificial Sequence
  Description of Artificial Sequence: Synthetic oligonucleotide
  Antisense strand to SEQ ID NO: 870022
uuucucccaggagugcaag

SEQ ID NO: 870024 - RNA, 19 nt, Artificial Sequence
  Description of Artificial Sequence: Synthetic oligonucleotide
  Sense strand starting at position 226 of SEQ ID NO: 588506
gcaccugggagcuaguuaa

SEQ ID NO: 870025 - RNA, 19 nt, Artificial Sequence
  Description of Artificial Sequence: Synthetic oligonucleotide
  Antisense strand to SEQ ID NO: 870024
uuaacuagcucccaggugc

SEQ ID NO: 870026 - RNA, 19 nt, Artificial Sequence
  Description of Artificial Sequence: Synthetic oligonucleotide
  Sense strand starting at position 280 of SEQ ID NO: 588506
aacucagagucgguaaauu

SEQ ID NO: 870027 - RNA, 19 nt, Artificial Sequence
  Description of Artificial Sequence: Synthetic oligonucleotide
  Antisense strand to SEQ ID NO: 870026
aauuuaccgacucugaguu

SEQ ID NO: 870028 - RNA, 19 nt, Artificial Sequence
  Description of Artificial Sequence: Synthetic oligonucleotide
  Sense strand starting at position 705 of SEQ ID NO: 588506
guaaucuucuuccuaugga

SEQ ID NO: 870029 - RNA, 19 nt, Artificial Sequence
  Description of Artificial Sequence: Synthetic oligonucleotide
  Antisense strand to SEQ ID NO: 870028
uccauaggaagaagauuac

SEQ ID NO: 870030 - RNA, 19 nt, Artificial Sequence
  Description of Artificial Sequence: Synthetic oligonucleotide
  Sense strand starting at position 836 of SEQ ID NO: 588506
agaauauccuuccugcaga

SEQ ID NO: 870031 - RNA, 19 nt, Artificial Sequence
  Description of Artificial Sequence: Synthetic oligonucleotide
  Antisense strand to SEQ ID NO: 870030
ucugcaggaaggauauucu

SEQ ID NO: 870032 - RNA, 19 nt, Artificial Sequence
  Description of Artificial Sequence: Synthetic oligonucleotide
  Sense strand starting at position 857 of SEQ ID NO: 588506
gcuugaaagcaucaaguau

SEQ ID NO: 870033 - RNA, 19 nt, Artificial Sequence
  Description of Artificial Sequence: Synthetic oligonucleotide
  Antisense strand to SEQ ID NO: 870032
auacuugaugcuuucaagc

SEQ ID NO: 870034 - RNA, 19 nt, Artificial Sequence
  Description of Artificial Sequence: Synthetic oligonucleotide
  Sense strand starting at position 956 of SEQ ID NO: 588506
ccuauaauacaguauggua

SEQ ID NO: 870035 - RNA, 19 nt, Artificial Sequence
  Description of Artificial Sequence: Synthetic oligonucleotide
  Antisense strand to SEQ ID NO: 870034
uaccauacuguauuauagg

SEQ ID NO: 870036 - RNA, 19 nt, Artificial Sequence
  Description of Artificial Sequence: Synthetic oligonucleotide
  Sense strand starting at position 972 of SEQ ID NO: 588506
guauauagggcugacuuua

SEQ ID NO: 870037 - RNA, 19 nt, Artificial Sequence
  Description of Artificial Sequence: Synthetic oligonucleotide
  Antisense strand to SEQ ID NO: 870036
uaaagucagcccuauauac

SEQ ID NO: 870038 - RNA, 19 nt, Artificial Sequence
  Description of Artificial Sequence: Synthetic oligonucleotide
  Sense strand starting at position 981 of SEQ ID NO: 588506
gcugacuuuaugggacuga

SEQ ID NO: 870039 - RNA, 19 nt, Artificial Sequence
  Description of Artificial Sequence: Synthetic oligonucleotide
  Antisense strand to SEQ ID NO: 870038
ucagucccauaaagucagc

SEQ ID NO: 870040 - RNA, 19 nt, Artificial Sequence
  Description of Artificial Sequence: Synthetic oligonucleotide
  Sense strand starting at position 994 of SEQ ID NO: 588506
gacugaaaccuauguaguc

SEQ ID NO: 870041 - RNA, 19 nt, Artificial Sequence
  Description of Artificial Sequence: Synthetic oligonucleotide
  Antisense strand to SEQ ID NO: 870040
gacuacauagguuucaguc

SEQ ID NO: 870042 - RNA, 19 nt, Artificial Sequence
  Description of Artificial Sequence: Synthetic oligonucleotide
  Sense strand starting at position 995 of SEQ ID NO: 588506
acugaaaccuauguaguca

SEQ ID NO: 870043 - RNA, 19 nt, Artificial Sequence
  Description of Artificial Sequence: Synthetic oligonucleotide
  Antisense strand to SEQ ID NO: 870042
ugacuacauagguuucagu

SEQ ID NO: 870044 - RNA, 19 nt, Artificial Sequence
  Description of Artificial Sequence: Synthetic oligonucleotide
  Sense strand starting at position 1305 of SEQ ID NO: 588506
auacaacuaugugcuagau

SEQ ID NO: 870045 - RNA, 19 nt, Artificial Sequence
  Description of Artificial Sequence: Synthetic oligonucleotide
  Antisense strand to SEQ ID NO: 870044
aucuagcacauaguuguau

SEQ ID NO: 870046 - RNA, 19 nt, Artificial Sequence
  Description of Artificial Sequence: Synthetic oligonucleotide
  Sense strand starting at position 1344 of SEQ ID NO: 588506
ggagccauuggccaugaaa

SEQ ID NO: 870047 - RNA, 19 nt, Artificial Sequence
  Description of Artificial Sequence: Synthetic oligonucleotide
  Antisense strand to SEQ ID NO: 870046
uuucauggccaauggcucc

SEQ ID NO: 870048 - RNA, 19 nt, Artificial Sequence
  Description of Artificial Sequence: Synthetic oligonucleotide
  Sense strand starting at position 1631 of SEQ ID NO: 588506
agagcaaaugcaggaauaa

SEQ ID NO: 870049 - RNA, 19 nt, Artificial Sequence
  Description of Artificial Sequence: Synthetic oligonucleotide
  Antisense strand to SEQ ID NO: 870048
uuauuccugcauuugcucu

SEQ ID NO: 870050 - RNA, 19 nt, Artificial Sequence
  Description of Artificial Sequence: Synthetic oligonucleotide
  Sense strand starting at position 1787 of SEQ ID NO: 588506
ugcaaucaaccgugagaaa

SEQ ID NO: 870051 - RNA, 19 nt, Artificial Sequence
  Description of Artificial Sequence: Synthetic oligonucleotide
  Antisense strand to SEQ ID NO: 870050
uuucucacgguugauugca

SEQ ID NO: 870052 - RNA, 19 nt, Artificial Sequence
  Description of Artificial Sequence: Synthetic oligonucleotide
  Sense strand starting at position 1788 of SEQ ID NO: 588506
gcaaucaaccgugagaaag

SEQ ID NO: 870053 - RNA, 19 nt, Artificial Sequence
  Description of Artificial Sequence: Synthetic oligonucleotide
  Antisense strand to SEQ ID NO: 870052
cuuucucacgguugauugc

SEQ ID NO: 870054 - RNA, 19 nt, Artificial Sequence
  Description of Artificial Sequence: Synthetic oligonucleotide
  Sense strand starting at position 2270 of SEQ ID NO: 588506
uuccuuccucaaugggaga

SEQ ID NO: 870055 - RNA, 19 nt, Artificial Sequence
  Description of Artificial Sequence: Synthetic oligonucleotide
  Antisense strand to SEQ ID NO: 870054
ucucccauugaggaaggaa

SEQ ID NO: 870056 - RNA, 19 nt, Artificial Sequence
  Description of Artificial Sequence: Synthetic oligonucleotide
  Sense strand starting at position 2313 of SEQ ID NO: 588506
ggaucccuguuaccugaua

SEQ ID NO: 870057 - RNA, 19 nt, Artificial Sequence
  Description of Artificial Sequence: Synthetic oligonucleotide
  Antisense strand to SEQ ID NO: 870056
uaucagguaacagggaucc

SEQ ID NO: 870058 - RNA, 19 nt, Artificial Sequence
  Description of Artificial Sequence: Synthetic oligonucleotide
  Sense strand starting at position 2362 of SEQ ID NO: 588506
cuggaaugcguuucucguu

SEQ ID NO: 870059 - RNA, 19 nt, Artificial Sequence
  Description of Artificial Sequence: Synthetic oligonucleotide
  Antisense strand to SEQ ID NO: 870058
aacgagaaacgcauuccag

SEQ ID NO: 870060 - RNA, 19 nt, Artificial Sequence
  Description of Artificial Sequence: Synthetic oligonucleotide
  Sense strand starting at position 2406 of SEQ ID NO: 588506
cuucgucucccucacagaa

SEQ ID NO: 870061 - RNA, 19 nt, Artificial Sequence
  Description of Artificial Sequence: Synthetic oligonucleotide
  Antisense strand to SEQ ID NO: 870060
uucugugagggagacgaag

SEQ ID NO: 870062 - RNA, 19 nt, Artificial Sequence
  Description of Artificial Sequence: Synthetic oligonucleotide
  Sense strand starting at position 2478 of SEQ ID NO: 588506
uguaaccucuuuccugaga

SEQ ID NO: 870063 - RNA, 19 nt, Artificial Sequence
  Description of Artificial Sequence: Synthetic oligonucleotide
  Antisense strand to SEQ ID NO: 870062
ucucaggaaagagguuaca

SEQ ID NO: 870064 - RNA, 19 nt, Artificial Sequence
  Description of Artificial Sequence: Synthetic oligonucleotide
  Sense strand starting at position 2557 of SEQ ID NO: 588506
cuggcauuuagcuggcaau

SEQ ID NO: 870065 - RNA, 19 nt, Artificial Sequence
  Description of Artificial Sequence: Synthetic oligonucleotide
  Antisense strand to SEQ ID NO: 870064
auugccagcuaaaugccag

SEQ ID NO: 870066 - RNA, 19 nt, Artificial Sequence
  Description of Artificial Sequence: Synthetic oligonucleotide
  Sense strand starting at position 2576 of SEQ ID NO: 588506
caaauauguggugaaacgu

SEQ ID NO: 870067 - RNA, 19 nt, Artificial Sequence
  Description of Artificial Sequence: Synthetic oligonucleotide
  Antisense strand to SEQ ID NO: 870066
acguuucaccacauauuug

SEQ ID NO: 870068 - RNA, 19 nt, Artificial Sequence
  Description of Artificial Sequence: Synthetic oligonucleotide
  Sense strand starting at position 2610 of SEQ ID NO: 588506
ggccaugugcguuuaguca

SEQ ID NO: 870069 - RNA, 19 nt, Artificial Sequence
  Description of Artificial Sequence: Synthetic oligonucleotide
  Antisense strand to SEQ ID NO: 870068
ugacuaaacgcacauggcc

SEQ ID NO: 870070 - RNA, 19 nt, Artificial Sequence
  Description of Artificial Sequence: Synthetic oligonucleotide
  Sense strand starting at position 2735 of SEQ ID NO: 588506
auggaaaucugguucuuuc

SEQ ID NO: 870071 - RNA, 19 nt, Artificial Sequence
  Description of Artificial Sequence: Synthetic oligonucleotide
  Antisense strand to SEQ ID NO: 870070
gaaagaaccagauuuccau

SEQ ID NO: 870072 - RNA, 19 nt, Artificial Sequence
  Description of Artificial Sequence: Synthetic oligonucleotide
  Sense strand starting at position 2745 of SEQ ID NO: 588506
gguucuuucgguuagauaa

SEQ ID NO: 870073 - RNA, 19 nt, Artificial Sequence
  Description of Artificial Sequence: Synthetic oligonucleotide
  Antisense strand to SEQ ID NO: 870072
uuaucuaaccgaaagaacc

SEQ ID NO: 870074 - RNA, 19 nt, Artificial Sequence
  Description of Artificial Sequence: Synthetic oligonucleotide
  Sense strand starting at position 2758 of SEQ ID NO: 588506
agauaauguagaggauugu

SEQ ID NO: 870075 - RNA, 19 nt, Artificial Sequence
  Description of Artificial Sequence: Synthetic oligonucleotide
  Antisense strand to SEQ ID NO: 870074
acaauccucuacauuaucu

SEQ ID NO: 870076 - RNA, 19 nt, Artificial Sequence
  Description of Artificial Sequence: Synthetic oligonucleotide
  Sense strand starting at position 2762 of SEQ ID NO: 588506
aauguagaggauuguguau

SEQ ID NO: 870077 - RNA, 19 nt, Artificial Sequence
  Description of Artificial Sequence: Synthetic oligonucleotide
  Antisense strand to SEQ ID NO: 870076
auacacaauccucuacauu

SEQ ID NO: 870078 - RNA, 19 nt, Artificial Sequence
  Description of Artificial Sequence: Synthetic oligonucleotide
  Sense strand starting at position 2854 of SEQ ID NO: 588506
ucauuuaggugagauaauu

SEQ ID NO: 870079 - RNA, 19 nt, Artificial Sequence
  Description of Artificial Sequence: Synthetic oligonucleotide
  Antisense strand to SEQ ID NO: 870078
aauuaucucaccuaaauga

SEQ ID NO: 870080 - RNA, 19 nt, Artificial Sequence
  Description of Artificial Sequence: Synthetic oligonucleotide
  Sense strand starting at position 2979 of SEQ ID NO: 588506
uguacuaucggccacaaga

SEQ ID NO: 870081 - RNA, 19 nt, Artificial Sequence
  Description of Artificial Sequence: Synthetic oligonucleotide
  Antisense strand to SEQ ID NO: 870080
ucuuguggccgauaguaca

SEQ ID NO: 870082 - RNA, 19 nt, Artificial Sequence
  Description of Artificial Sequence: Synthetic oligonucleotide
  Sense strand starting at position 3011 of SEQ ID NO: 588506
cugucucaggaauaagguu

SEQ ID NO: 870083 - RNA, 19 nt, Artificial Sequence
  Description of Artificial Sequence: Synthetic oligonucleotide
  Antisense strand to SEQ ID NO: 870082
aaccuuauuccugagacag

SEQ ID NO: 870084 - RNA, 19 nt, Artificial Sequence
  Description of Artificial Sequence: Synthetic oligonucleotide
  Sense strand starting at position 3311 of SEQ ID NO: 588506
gucagaacuuuaucaggua

SEQ ID NO: 870085 - RNA, 19 nt, Artificial Sequence
  Description of Artificial Sequence: Synthetic oligonucleotide
  Antisense strand to SEQ ID NO: 870084
uaccugauaaaguucugac

SEQ ID NO: 870086 - RNA, 19 nt, Artificial Sequence
  Description of Artificial Sequence: Synthetic oligonucleotide
  Sense strand starting at position 3580 of SEQ ID NO: 588506
aauggauuauguucuuuga

SEQ ID NO: 870087 - RNA, 19 nt, Artificial Sequence
  Description of Artificial Sequence: Synthetic oligonucleotide
  Antisense strand to SEQ ID NO: 870086
ucaaagaacauaauccauu

SEQ ID NO: 870088 - RNA, 19 nt, Artificial Sequence
  Description of Artificial Sequence: Synthetic oligonucleotide
  Sense strand starting at position 3582 of SEQ ID NO: 588506
uggauuauguucuuugauc

SEQ ID NO: 870089 - RNA, 19 nt, Artificial Sequence
  Description of Artificial Sequence: Synthetic oligonucleotide
  Antisense strand to SEQ ID NO: 870088
gaucaaagaacauaaucca

SEQ ID NO: 870090 - RNA, 19 nt, Artificial Sequence
  Description of Artificial Sequence: Synthetic oligonucleotide
  Sense strand starting at position 3583 of SEQ ID NO: 588506
ggauuauguucuuugauca

SEQ ID NO: 870091 - RNA, 19 nt, Artificial Sequence
  Description of Artificial Sequence: Synthetic oligonucleotide
  Antisense strand to SEQ ID NO: 870090
ugaucaaagaacauaaucc

SEQ ID NO: 870092 - RNA, 19 nt, Artificial Sequence
  Description of Artificial Sequence: Synthetic oligonucleotide
  Sense strand starting at position 3704 of SEQ ID NO: 588506
acagauauuuaugggacau

SEQ ID NO: 870093 - RNA, 19 nt, Artificial Sequence
  Description of Artificial Sequence: Synthetic oligonucleotide
  Antisense strand to SEQ ID NO: 870092
augucccauaaauaucugu

SEQ ID NO: 870094 - RNA, 19 nt, Artificial Sequence
  Description of Artificial Sequence: Synthetic oligonucleotide
  Sense strand starting at position 3706 of SEQ ID NO: 588506
agauauuuaugggacauuc

SEQ ID NO: 870095 - RNA, 19 nt, Artificial Sequence
  Description of Artificial Sequence: Synthetic oligonucleotide
  Antisense strand to SEQ ID NO: 870094
gaaugucccauaaauaucu

SEQ ID NO: 870096 - RNA, 19 nt, Artificial Sequence
  Description of Artificial Sequence: Synthetic oligonucleotide
  Sense strand starting at position 3857 of SEQ ID NO: 588506
gccacaauggaaugaaagu

SEQ ID NO: 870097 - RNA, 19 nt, Artificial Sequence
  Description of Artificial Sequence: Synthetic oligonucleotide
  Antisense strand to SEQ ID NO: 870096
acuuucauuccauuguggc

SEQ ID NO: 870098 - RNA, 19 nt, Artificial Sequence
  Description of Artificial Sequence: Synthetic oligonucleotide
  Sense strand starting at position 34 of SEQ ID NO: 588507
cauucuaagugaucagagu

SEQ ID NO: 870099 - RNA, 19 nt, Artificial Sequence
  Description of Artificial Sequence: Synthetic oligonucleotide
  Antisense strand to SEQ ID NO: 870098
acucugaucacuuagaaug

SEQ ID NO: 870100 - RNA, 19 nt, Artificial Sequence
  Description of Artificial Sequence: Synthetic oligonucleotide
  Sense strand starting at position 35 of SEQ ID NO: 588507
auucuaagugaucagaguu

SEQ ID NO: 870101 - RNA, 19 nt, Artificial Sequence
  Description of Artificial Sequence: Synthetic oligonucleotide
  Antisense strand to SEQ ID NO: 870100
aacucugaucacuuagaau

SEQ ID NO: 870102 - RNA, 19 nt, Artificial Sequence
  Description of Artificial Sequence: Synthetic oligonucleotide
  Sense strand starting at position 700 of SEQ ID NO: 588507
gccaguacucaguagaugu

SEQ ID NO: 870103 - RNA, 19 nt, Artificial Sequence
  Description of Artificial Sequence: Synthetic oligonucleotide
  Antisense strand to SEQ ID NO: 870102
acaucuacugaguacuggc

SEQ ID NO: 870104 - RNA, 19 nt, Artificial Sequence
  Description of Artificial Sequence: Synthetic oligonucleotide
  Sense strand starting at position 708 of SEQ ID NO: 588507
ucaguagauguuuguugga

SEQ ID NO: 870105 - RNA, 19 nt, Artificial Sequence
  Description of Artificial Sequence: Synthetic oligonucleotide
  Antisense strand to SEQ ID NO: 870104
uccaacaaacaucuacuga

SEQ ID NO: 870106 - RNA, 19 nt, Artificial Sequence
  Description of Artificial Sequence: Synthetic oligonucleotide
  Sense strand starting at position 880 of SEQ ID NO: 588507
ggagcacuagucuaggagu

SEQ ID NO: 870107 - RNA, 19 nt, Artificial Sequence
  Description of Artificial Sequence: Synthetic oligonucleotide
  Antisense strand to SEQ ID NO: 870106
acuccuagacuagugcucc

SEQ ID NO: 870108 - RNA, 19 nt, Artificial Sequence
  Description of Artificial Sequence: Synthetic oligonucleotide
  Sense strand starting at position 911 of SEQ ID NO: 588507
guaagaguauuggcucuau

SEQ ID NO: 870109 - RNA, 19 nt, Artificial Sequence
  Description of Artificial Sequence: Synthetic oligonucleotide
  Antisense strand to SEQ ID NO: 870108
auagagccaauacucuuac

SEQ ID NO: 870110 - RNA, 19 nt, Artificial Sequence
  Description of Artificial Sequence: Synthetic oligonucleotide
  Sense strand starting at position 915 of SEQ ID NO: 588507
gaguauuggcucuaucacu

SEQ ID NO: 870111 - RNA, 19 nt, Artificial Sequence
  Description of Artificial Sequence: Synthetic oligonucleotide
  Antisense strand to SEQ ID NO: 870110
agugauagagccaauacuc

SEQ ID NO: 870112 - RNA, 19 nt, Artificial Sequence
  Description of Artificial Sequence: Synthetic oligonucleotide
  Sense strand starting at position 951 of SEQ ID NO: 588507
ugagaaagccauuaugcag

SEQ ID NO: 870113 - RNA, 19 nt, Artificial Sequence
  Description of Artificial Sequence: Synthetic oligonucleotide
  Antisense strand to SEQ ID NO: 870112
cugcauaauggcuuucuca

SEQ ID NO: 870114 - RNA, 19 nt, Artificial Sequence
  Description of Artificial Sequence: Synthetic oligonucleotide
  Sense strand starting at position 1184 of SEQ ID NO: 588507
gaguaauucugauuaggac

SEQ ID NO: 870115 - RNA, 19 nt, Artificial Sequence
  Description of Artificial Sequence: Synthetic oligonucleotide
  Antisense strand to SEQ ID NO: 870114
guccuaaucagaauuacuc

SEQ ID NO: 870116 - RNA, 19 nt, Artificial Sequence
  Description of Artificial Sequence: Synthetic oligonucleotide
  Sense strand starting at position 1225 of SEQ ID NO: 588507
guucucagagauggugaca

SEQ ID NO: 870117 - RNA, 19 nt, Artificial Sequence
  Description of Artificial Sequence: Synthetic oligonucleotide
  Antisense strand to SEQ ID NO: 870116
ugucaccaucucugagaac

SEQ ID NO: 870118 - RNA, 19 nt, Artificial Sequence
  Description of Artificial Sequence: Synthetic oligonucleotide
  Sense strand starting at position 1230 of SEQ ID NO: 588507
cagagauggugacauuuaa

SEQ ID NO: 870119 - RNA, 19 nt, Artificial Sequence
  Description of Artificial Sequence: Synthetic oligonucleotide
  Antisense strand to SEQ ID NO: 870118
uuaaaugucaccaucucug

SEQ ID NO: 870120 - RNA, 19 nt, Artificial Sequence
  Description of Artificial Sequence: Synthetic oligonucleotide
  Sense strand starting at position 1237 of SEQ ID NO: 588507
ggugacauuuaagauagca

SEQ ID NO: 870121 - RNA, 19 nt, Artificial Sequence
  Description of Artificial Sequence: Synthetic oligonucleotide
  Antisense strand to SEQ ID NO: 870120
ugcuaucuuaaaugucacc

SEQ ID NO: 870122 - RNA, 19 nt, Artificial Sequence
  Description of Artificial Sequence: Synthetic oligonucleotide
  Sense strand starting at position 1387 of SEQ ID NO: 588507
cacugaguguuugcagaag

SEQ ID NO: 870123 - RNA, 19 nt, Artificial Sequence
  Description of Artificial Sequence: Synthetic oligonucleotide
  Antisense strand to SEQ ID NO: 870122
cuucugcaaacacucagug

SEQ ID NO: 870124 - RNA, 19 nt, Artificial Sequence
  Description of Artificial Sequence: Synthetic oligonucleotide
  Sense strand starting at position 1454 of SEQ ID NO: 588507
uagggaauuucguaauuau

SEQ ID NO: 870125 - RNA, 19 nt, Artificial Sequence
  Description of Artificial Sequence: Synthetic oligonucleotide
  Antisense strand to SEQ ID NO: 870124
auaauuacgaaauucccua

SEQ ID NO: 870126 - RNA, 19 nt, Artificial Sequence
  Description of Artificial Sequence: Synthetic oligonucleotide
  Sense strand starting at position 1464 of SEQ ID NO: 588507
cguaauuauacuggaggag

SEQ ID NO: 870127 - RNA, 19 nt, Artificial Sequence
  Description of Artificial Sequence: Synthetic oligonucleotide
  Antisense strand to SEQ ID NO: 870126
cuccuccaguauaauuacg

SEQ ID NO: 870128 - RNA, 19 nt, Artificial Sequence
  Description of Artificial Sequence: Synthetic oligonucleotide
  Sense strand starting at position 1520 of SEQ ID NO: 588507
ccaguuuacgacgugcuau

SEQ ID NO: 870129 - RNA, 19 nt, Artificial Sequence
  Description of Artificial Sequence: Synthetic oligonucleotide
  Antisense strand to SEQ ID NO: 870128
auagcacgucguaaacugg

SEQ ID NO: 870130 - RNA, 19 nt, Artificial Sequence
  Description of Artificial Sequence: Synthetic oligonucleotide
  Sense strand starting at position 1531 of SEQ ID NO: 588507
cgugcuaucccaucccgua

SEQ ID NO: 870131 - RNA, 19 nt, Artificial Sequence
  Description of Artificial Sequence: Synthetic oligonucleotide
  Antisense strand to SEQ ID NO: 870130
uacgggaugggauagcacg

SEQ ID NO: 870132 - RNA, 19 nt, Artificial Sequence
  Description of Artificial Sequence: Synthetic oligonucleotide
  Sense strand starting at position 1587 of SEQ ID NO: 588507
agggauaagucauugacuc

SEQ ID NO: 870133 - RNA, 19 nt, Artificial Sequence
  Description of Artificial Sequence: Synthetic oligonucleotide
  Antisense strand to SEQ ID NO: 870132
gagucaaugacuuaucccu

SEQ ID NO: 870134 - RNA, 19 nt, Artificial Sequence
  Description of Artificial Sequence: Synthetic oligonucleotide
  Sense strand starting at position 1588 of SEQ ID NO: 588507
gggauaagucauugacuca

SEQ ID NO: 870135 - RNA, 19 nt, Artificial Sequence
  Description of Artificial Sequence: Synthetic oligonucleotide
  Antisense strand to SEQ ID NO: 870134
ugagucaaugacuuauccc

SEQ ID NO: 870136 - RNA, 19 nt, Artificial Sequence
  Description of Artificial Sequence: Synthetic oligonucleotide
  Sense strand starting at position 1637 of SEQ ID NO: 588507
cuuuauaaugcaggaauua

SEQ ID NO: 870137 - RNA, 19 nt, Artificial Sequence
  Description of Artificial Sequence: Synthetic oligonucleotide
  Antisense strand to SEQ ID NO: 870136
uaauuccugcauuauaaag

SEQ ID NO: 870138 - RNA, 19 nt, Artificial Sequence
  Description of Artificial Sequence: Synthetic oligonucleotide
  Sense strand starting at position 2096 of SEQ ID NO: 588507
ggaaguucuagaugacgga

SEQ ID NO: 870139 - RNA, 19 nt, Artificial Sequence
  Description of Artificial Sequence: Synthetic oligonucleotide
  Antisense strand to SEQ ID NO: 870138
uccgucaucuagaacuucc

SEQ ID NO: 870140 - RNA, 19 nt, Artificial Sequence
  Description of Artificial Sequence: Synthetic oligonucleotide
  Sense strand starting at position 2646 of SEQ ID NO: 588507
gagaauuagcccugaggga

SEQ ID NO: 870141 - RNA, 19 nt, Artificial Sequence
  Description of Artificial Sequence: Synthetic oligonucleotide
  Antisense strand to SEQ ID NO: 870140
ucccucagggcuaauucuc

SEQ ID NO: 870142 - RNA, 19 nt, Artificial Sequence
  Description of Artificial Sequence: Synthetic oligonucleotide
  Sense strand starting at position 2897 of SEQ ID NO: 588507
uguuguggcuugaugcgau

SEQ ID NO: 870143 - RNA, 19 nt, Artificial Sequence
  Description of Artificial Sequence: Synthetic oligonucleotide
  Antisense strand to SEQ ID NO: 870142
aucgcaucaagccacaaca

SEQ ID NO: 870144 - RNA, 19 nt, Artificial Sequence
  Description of Artificial Sequence: Synthetic oligonucleotide
  Sense strand starting at position 2907 of SEQ ID NO: 588507
ugaugcgauugguugggaa

SEQ ID NO: 870145 - RNA, 19 nt, Artificial Sequence
  Description of Artificial Sequence: Synthetic oligonucleotide
  Antisense strand to SEQ ID NO: 870144
uucccaaccaaucgcauca

SEQ ID NO: 870146 - RNA, 19 nt, Artificial Sequence
  Description of Artificial Sequence: Synthetic oligonucleotide
  Sense strand starting at position 2932 of SEQ ID NO: 588507
acuggagacugguuuggau

SEQ ID NO: 870147 - RNA, 19 nt, Artificial Sequence
  Description of Artificial Sequence: Synthetic oligonucleotide
  Antisense strand to SEQ ID NO: 870146
auccaaaccagucuccagu

SEQ ID NO: 870148 - RNA, 19 nt, Artificial Sequence
  Description of Artificial Sequence: Synthetic oligonucleotide
  Sense strand starting at position 2964 of SEQ ID NO: 588507
uagaguuugaaggguggaa

SEQ ID NO: 870149 - RNA, 19 nt, Artificial Sequence
  Description of Artificial Sequence: Synthetic oligonucleotide
  Antisense strand to SEQ ID NO: 870148
uuccacccuucaaacucua

SEQ ID NO: 870150 - RNA, 19 nt, Artificial Sequence
  Description of Artificial Sequence: Synthetic oligonucleotide
  Sense strand starting at position 2982 of SEQ ID NO: 588507
aggugugguuaccugacaa

SEQ ID NO: 870151 - RNA, 19 nt, Artificial Sequence
  Description of Artificial Sequence: Synthetic oligonucleotide
  Antisense strand to SEQ ID NO: 870150
uugucagguaaccacaccu

SEQ ID NO: 870152 - RNA, 19 nt, Artificial Sequence
  Description of Artificial Sequence: Synthetic oligonucleotide
  Sense strand starting at position 3024 of SEQ ID NO: 588507
aucuuauugcaacguauuu

SEQ ID NO: 870153 - RNA, 19 nt, Artificial Sequence
  Description of Artificial Sequence: Synthetic oligonucleotide
  Antisense strand to SEQ ID NO: 870152
aaauacguugcaauaagau

SEQ ID NO: 870154 - RNA, 19 nt, Artificial Sequence
  Description of Artificial Sequence: Synthetic oligonucleotide
  Sense strand starting at position 3176 of SEQ ID NO: 588507
gagugugcagacuaauuga

SEQ ID NO: 870155 - RNA, 19 nt, Artificial Sequence
  Description of Artificial Sequence: Synthetic oligonucleotide
  Antisense strand to SEQ ID NO: 870154
ucaauuagucugcacacuc

SEQ ID NO: 870156 - RNA, 19 nt, Artificial Sequence
  Description of Artificial Sequence: Synthetic oligonucleotide
  Sense strand starting at position 3229 of SEQ ID NO: 588507
ggacuaaacacguauggca

SEQ ID NO: 870157 - RNA, 19 nt, Artificial Sequence
  Description of Artificial Sequence: Synthetic oligonucleotide
  Antisense strand to SEQ ID NO: 870156
ugccauacguguuuagucc

SEQ ID NO: 870158 - RNA, 19 nt, Artificial Sequence
  Description of Artificial Sequence: Synthetic oligonucleotide
  Sense strand starting at position 3265 of SEQ ID NO: 588507
uugggcuguuaauuauaau

SEQ ID NO: 870159 - RNA, 19 nt, Artificial Sequence
  Description of Artificial Sequence: Synthetic oligonucleotide
  Antisense strand to SEQ ID NO: 870158
auuauaauuaacagcccaa

SEQ ID NO: 870160 - RNA, 19 nt, Artificial Sequence
  Description of Artificial Sequence: Synthetic oligonucleotide
  Sense strand starting at position 3291 of SEQ ID NO: 588507
uugaaaguaccuuaauugu

SEQ ID NO: 870161 - RNA, 19 nt, Artificial Sequence
  Description of Artificial Sequence: Synthetic oligonucleotide
  Antisense strand to SEQ ID NO: 870160
acaauuaagguacuuucaa

SEQ ID NO: 870162 - RNA, 19 nt, Artificial Sequence
  Description of Artificial Sequence: Synthetic oligonucleotide
  Sense strand starting at position 3374 of SEQ ID NO: 588507
uuuagugacgcauaugaag

SEQ ID NO: 870163 - RNA, 19 nt, Artificial Sequence
  Description of Artificial Sequence: Synthetic oligonucleotide
  Antisense strand to SEQ ID NO: 870162
cuucauaugcgucacuaaa

SEQ ID NO: 870164 - RNA, 19 nt, Artificial Sequence
  Description of Artificial Sequence: Synthetic oligonucleotide
  Sense strand starting at position 3425 of SEQ ID NO: 588507
agaaacaagucucuugacu

SEQ ID NO: 870165 - RNA, 19 nt, Artificial Sequence
  Description of Artificial Sequence: Synthetic oligonucleotide
  Antisense strand to SEQ ID NO: 870164
agucaagagacuuguuucu

SEQ ID NO: 870166 - RNA, 19 nt, Artificial Sequence
  Description of Artificial Sequence: Synthetic oligonucleotide
  Sense strand starting at position 3448 of SEQ ID NO: 588507
gugcuuauuccgccauauc

SEQ ID NO: 870167 - RNA, 19 nt, Artificial Sequence
  Description of Artificial Sequence: Synthetic oligonucleotide
  Antisense strand to SEQ ID NO: 870166
gauauggcggaauaagcac

SEQ ID NO: 870168 - RNA, 19 nt, Artificial Sequence
  Description of Artificial Sequence: Synthetic oligonucleotide
  Sense strand starting at position 3615 of SEQ ID NO: 588507
augauagagugucuuauug

SEQ ID NO: 870169 - RNA, 19 nt, Artificial Sequence
  Description of Artificial Sequence: Synthetic oligonucleotide
  Antisense strand to SEQ ID NO: 870168
caauaagacacucuaucau

SEQ ID NO: 870170 - RNA, 19 nt, Artificial Sequence
  Description of Artificial Sequence: Synthetic oligonucleotide
  Sense strand starting at position 3646 of SEQ ID NO: 588507
aguauacaacagugaauga

SEQ ID NO: 870171 - RNA, 19 nt, Artificial Sequence
  Description of Artificial Sequence: Synthetic oligonucleotide
  Antisense strand to SEQ ID NO: 870170
ucauucacuguuguauacu

SEQ ID NO: 870172 - RNA, 19 nt, Artificial Sequence
  Description of Artificial Sequence: Synthetic oligonucleotide
  Sense strand starting at position 3659 of SEQ ID NO: 588507
gaaugacuucuguaucgag

SEQ ID NO: 870173 - RNA, 19 nt, Artificial Sequence
  Description of Artificial Sequence: Synthetic oligonucleotide
  Antisense strand to SEQ ID NO: 870172
cucgauacagaagucauuc

SEQ ID NO: 870174 - RNA, 19 nt, Artificial Sequence
  Description of Artificial Sequence: Synthetic oligonucleotide
  Sense strand starting at position 3695 of SEQ ID NO: 588507
uguuguuucuuggugauuu

SEQ ID NO: 870175 - RNA, 19 nt, Artificial Sequence
  Description of Artificial Sequence: Synthetic oligonucleotide
  Antisense strand to SEQ ID NO: 870174
aaaucaccaagaaacaaca

SEQ ID NO: 870176 - RNA, 19 nt, Artificial Sequence
  Description of Artificial Sequence: Synthetic oligonucleotide
  Sense strand starting at position 3958 of SEQ ID NO: 588507
uuguaaagcuaaguuauga

SEQ ID NO: 870177 - RNA, 19 nt, Artificial Sequence
  Description of Artificial Sequence: Synthetic oligonucleotide
  Antisense strand to SEQ ID NO: 870176
ucauaacuuagcuuuacaa

SEQ ID NO: 870178 - RNA, 19 nt, Artificial Sequence
  Description of Artificial Sequence: Synthetic oligonucleotide
  Sense strand starting at position 38 of SEQ ID NO: 588508
caaucagagcugugcaaca

SEQ ID NO: 870179 - RNA, 19 nt, Artificial Sequence
  Description of Artificial Sequence: Synthetic oligonucleotide
  Antisense strand to SEQ ID NO: 870178
uguugcacagcucugauug

SEQ ID NO: 870180 - RNA, 19 nt, Artificial Sequence
  Description of Artificial Sequence: Synthetic oligonucleotide
  Sense strand starting at position 77 of SEQ ID NO: 588508
ggagaugccuacucaggga

SEQ ID NO: 870181 - RNA, 19 nt, Artificial Sequence
  Description of Artificial Sequence: Synthetic oligonucleotide
  Antisense strand to SEQ ID NO: 870180
ucccugaguaggcaucucc

SEQ ID NO: 870182 - RNA, 19 nt, Artificial Sequence
  Description of Artificial Sequence: Synthetic oligonucleotide
  Sense strand starting at position 104 of SEQ ID NO: 588508
gacacauacuugucuggaa

SEQ ID NO: 870183 - RNA, 19 nt, Artificial Sequence
  Description of Artificial Sequence: Synthetic oligonucleotide
  Antisense strand to SEQ ID NO: 870182
uuccagacaaguauguguc

SEQ ID NO: 870184 - RNA, 19 nt, Artificial Sequence
  Description of Artificial Sequence: Synthetic oligonucleotide
  Sense strand starting at position 318 of SEQ ID NO: 588508
uuggaagauuaguauuugu

SEQ ID NO: 870185 - RNA, 19 nt, Artificial Sequence
  Description of Artificial Sequence: Synthetic oligonucleotide
  Antisense strand to SEQ ID NO: 870184
acaaauacuaaucuuccaa

SEQ ID NO: 870186 - RNA, 19 nt, Artificial Sequence
  Description of Artificial Sequence: Synthetic oligonucleotide
  Sense strand starting at position 404 of SEQ ID NO: 588508
ucacuuugccaauagugga

SEQ ID NO: 870187 - RNA, 19 nt, Artificial Sequence
  Description of Artificial Sequence: Synthetic oligonucleotide
  Antisense strand to SEQ ID NO: 870186
uccacuauuggcaaaguga

SEQ ID NO: 870188 - RNA, 19 nt, Artificial Sequence
  Description of Artificial Sequence: Synthetic oligonucleotide
  Sense strand starting at position 444 of SEQ ID NO: 588508
uuagguuagccugguccau

SEQ ID NO: 870189 - RNA, 19 nt, Artificial Sequence
  Description of Artificial Sequence: Synthetic oligonucleotide
  Antisense strand to SEQ ID NO: 870188
auggaccaggcuaaccuaa

SEQ ID NO: 870190 - RNA, 19 nt, Artificial Sequence
  Description of Artificial Sequence: Synthetic oligonucleotide
  Sense strand starting at position 446 of SEQ ID NO: 588508
agguuagccugguccauua

SEQ ID NO: 870191 - RNA, 19 nt, Artificial Sequence
  Description of Artificial Sequence: Synthetic oligonucleotide
  Antisense strand to SEQ ID NO: 870190
uaauggaccaggcuaaccu

SEQ ID NO: 870192 - RNA, 19 nt, Artificial Sequence
  Description of Artificial Sequence: Synthetic oligonucleotide
  Sense strand starting at position 497 of SEQ ID NO: 588508
uagucucuguucuuuaguu

SEQ ID NO: 870193 - RNA, 19 nt, Artificial Sequence
  Description of Artificial Sequence: Synthetic oligonucleotide
  Antisense strand to SEQ ID NO: 870192
aacuaaagaacagagacua

SEQ ID NO: 870194 - RNA, 19 nt, Artificial Sequence
  Description of Artificial Sequence: Synthetic oligonucleotide
  Sense strand starting at position 509 of SEQ ID NO: 588508
uuuaguucccugugcuaau

SEQ ID NO: 870195 - RNA, 19 nt, Artificial Sequence
  Description of Artificial Sequence: Synthetic oligonucleotide
  Antisense strand to SEQ ID NO: 870194
auuagcacagggaacuaaa

SEQ ID NO: 870196 - RNA, 19 nt, Artificial Sequence
  Description of Artificial Sequence: Synthetic oligonucleotide
  Sense strand starting at position 568 of SEQ ID NO: 588508
guguuugcagcuuacacua

SEQ ID NO: 870197 - RNA, 19 nt, Artificial Sequence
  Description of Artificial Sequence: Synthetic oligonucleotide
  Antisense strand to SEQ ID NO: 870196
uaguguaagcugcaaacac

SEQ ID NO: 870198 - RNA, 19 nt, Artificial Sequence
  Description of Artificial Sequence: Synthetic oligonucleotide
  Sense strand starting at position 709 of SEQ ID NO: 588508
uuaucuguccaagggauga

SEQ ID NO: 870199 - RNA, 19 nt, Artificial Sequence
  Description of Artificial Sequence: Synthetic oligonucleotide
  Antisense strand to SEQ ID NO: 870198
ucaucccuuggacagauaa

SEQ ID NO: 870200 - RNA, 19 nt, Artificial Sequence
  Description of Artificial Sequence: Synthetic oligonucleotide
  Sense strand starting at position 765 of SEQ ID NO: 588508
gcguaacuggucuuugcaa

SEQ ID NO: 870201 - RNA, 19 nt, Artificial Sequence
  Description of Artificial Sequence: Synthetic oligonucleotide
  Antisense strand to SEQ ID NO: 870200
uugcaaagaccaguuacgc

SEQ ID NO: 870202 - RNA, 19 nt, Artificial Sequence
  Description of Artificial Sequence: Synthetic oligonucleotide
  Sense strand starting at position 767 of SEQ ID NO: 588508
guaacuggucuuugcaaca

SEQ ID NO: 870203 - RNA, 19 nt, Artificial Sequence
  Description of Artificial Sequence: Synthetic oligonucleotide
  Antisense strand to SEQ ID NO: 870202
uguugcaaagaccaguuac

SEQ ID NO: 870204 - RNA, 19 nt, Artificial Sequence
  Description of Artificial Sequence: Synthetic oligonucleotide
  Sense strand starting at position 836 of SEQ ID NO: 588508
ugagauuccugugccuuua

SEQ ID NO: 870205 - RNA, 19 nt, Artificial Sequence
  Description of Artificial Sequence: Synthetic oligonucleotide
  Antisense strand to SEQ ID NO: 870204
uaaaggcacaggaaucuca

SEQ ID NO: 870206 - RNA, 19 nt, Artificial Sequence
  Description of Artificial Sequence: Synthetic oligonucleotide
  Sense strand starting at position 943 of SEQ ID NO: 588508
gguuguaccagacagcaaa

SEQ ID NO: 870207 - RNA, 19 nt, Artificial Sequence
  Description of Artificial Sequence: Synthetic oligonucleotide
  Antisense strand to SEQ ID NO: 870206
uuugcugucugguacaacc

SEQ ID NO: 870208 - RNA, 19 nt, Artificial Sequence
  Description of Artificial Sequence: Synthetic oligonucleotide
  Sense strand starting at position 1010 of SEQ ID NO: 588508
gggauucaccuuugcgaga

SEQ ID NO: 870209 - RNA, 19 nt, Artificial Sequence
  Description of Artificial Sequence: Synthetic oligonucleotide
  Antisense strand to SEQ ID NO: 870208
ucucgcaaaggugaauccc

SEQ ID NO: 870210 - RNA, 19 nt, Artificial Sequence
  Description of Artificial Sequence: Synthetic oligonucleotide
  Sense strand starting at position 1015 of SEQ ID NO: 588508
ucaccuuugcgagaucuua

SEQ ID NO: 870211 - RNA, 19 nt, Artificial Sequence
  Description of Artificial Sequence: Synthetic oligonucleotide
  Antisense strand to SEQ ID NO: 870210
uaagaucucgcaaagguga

SEQ ID NO: 870212 - RNA, 19 nt, Artificial Sequence
  Description of Artificial Sequence: Synthetic oligonucleotide
  Sense strand starting at position 1559 of SEQ ID NO: 588508
uguugaggaaacggauaau

SEQ ID NO: 870213 - RNA, 19 nt, Artificial Sequence
  Description of Artificial Sequence: Synthetic oligonucleotide
  Antisense strand to SEQ ID NO: 870212
auuauccguuuccucaaca

SEQ ID NO: 870214 - RNA, 19 nt, Artificial Sequence
  Description of Artificial Sequence: Synthetic oligonucleotide
  Sense strand starting at position 1934 of SEQ ID NO: 588508
ucgugacacuuuccucaca

SEQ ID NO: 870215 - RNA, 19 nt, Artificial Sequence
  Description of Artificial Sequence: Synthetic oligonucleotide
  Antisense strand to SEQ ID NO: 870214
ugugaggaaagugucacga

SEQ ID NO: 870216 - RNA, 19 nt, Artificial Sequence
  Description of Artificial Sequence: Synthetic oligonucleotide
  Sense strand starting at position 2221 of SEQ ID NO: 588508
ggguguacucaucguacau

SEQ ID NO: 870217 - RNA, 19 nt, Artificial Sequence
  Description of Artificial Sequence: Synthetic oligonucleotide
  Antisense strand to SEQ ID NO: 870216
auguacgaugaguacaccc

SEQ ID NO: 870218 - RNA, 19 nt, Artificial Sequence
  Description of Artificial Sequence: Synthetic oligonucleotide
  Sense strand starting at position 2298 of SEQ ID NO: 588508
caacguucuacgcgaggaa

SEQ ID NO: 870219 - RNA, 19 nt, Artificial Sequence
  Description of Artificial Sequence: Synthetic oligonucleotide
  Antisense strand to SEQ ID NO: 870218
uuccucgcguagaacguug

SEQ ID NO: 870220 - RNA, 19 nt, Artificial Sequence
  Description of Artificial Sequence: Synthetic oligonucleotide
  Sense strand starting at position 2299 of SEQ ID NO: 588508
aacguucuacgcgaggaaa

SEQ ID NO: 870221 - RNA, 19 nt, Artificial Sequence
  Description of Artificial Sequence: Synthetic oligonucleotide
  Antisense strand to SEQ ID NO: 870220
uuuccucgcguagaacguu

SEQ ID NO: 870222 - RNA, 19 nt, Artificial Sequence
  Description of Artificial Sequence: Synthetic oligonucleotide
  Sense strand starting at position 2300 of SEQ ID NO: 588508
acguucuacgcgaggaaau

SEQ ID NO: 870223 - RNA, 19 nt, Artificial Sequence
  Description of Artificial Sequence: Synthetic oligonucleotide
  Antisense strand to SEQ ID NO: 870222
auuuccucgcguagaacgu

SEQ ID NO: 870224 - RNA, 19 nt, Artificial Sequence
  Description of Artificial Sequence: Synthetic oligonucleotide
  Sense strand starting at position 2301 of SEQ ID NO: 588508
cguucuacgcgaggaaaug

SEQ ID NO: 870225 - RNA, 19 nt, Artificial Sequence
  Description of Artificial Sequence: Synthetic oligonucleotide
  Antisense strand to SEQ ID NO: 870224
cauuuccucgcguagaacg

SEQ ID NO: 870226 - RNA, 19 nt, Artificial Sequence
  Description of Artificial Sequence: Synthetic oligonucleotide
  Sense strand starting at position 2302 of SEQ ID NO: 588508
guucuacgcgaggaaaugu

SEQ ID NO: 870227 - RNA, 19 nt, Artificial Sequence
  Description of Artificial Sequence: Synthetic oligonucleotide
  Antisense strand to SEQ ID NO: 870226
acauuuccucgcguagaac

SEQ ID NO: 870228 - RNA, 19 nt, Artificial Sequence
  Description of Artificial Sequence: Synthetic oligonucleotide
  Sense strand starting at position 2359 of SEQ ID NO: 588508
gccugaagacuucgaggga

SEQ ID NO: 870229 - RNA, 19 nt, Artificial Sequence
  Description of Artificial Sequence: Synthetic oligonucleotide
  Antisense strand to SEQ ID NO: 870228
ucccucgaagucuucaggc

SEQ ID NO: 870230 - RNA, 19 nt, Artificial Sequence
  Description of Artificial Sequence: Synthetic oligonucleotide
  Sense strand starting at position 2561 of SEQ ID NO: 588508
guggguuacagcuaucgau

SEQ ID NO: 870231 - RNA, 19 nt, Artificial Sequence
  Description of Artificial Sequence: Synthetic oligonucleotide
  Antisense strand to SEQ ID NO: 870230
aucgauagcuguaacccac

SEQ ID NO: 870232 - RNA, 19 nt, Artificial Sequence
  Description of Artificial Sequence: Synthetic oligonucleotide
  Sense strand starting at position 2565 of SEQ ID NO: 588508
guuacagcuaucgauguua

SEQ ID NO: 870233 - RNA, 19 nt, Artificial Sequence
  Description of Artificial Sequence: Synthetic oligonucleotide
  Antisense strand to SEQ ID NO: 870232
uaacaucgauagcuguaac

SEQ ID NO: 870234 - RNA, 19 nt, Artificial Sequence
  Description of Artificial Sequence: Synthetic oligonucleotide
  Sense strand starting at position 3025 of SEQ ID NO: 588508
ccuaauagguucucacaug

SEQ ID NO: 870235 - RNA, 19 nt, Artificial Sequence
  Description of Artificial Sequence: Synthetic oligonucleotide
  Antisense strand to SEQ ID NO: 870234
caugugagaaccuauuagg

SEQ ID NO: 870236 - RNA, 19 nt, Artificial Sequence
  Description of Artificial Sequence: Synthetic oligonucleotide
  Sense strand starting at position 3051 of SEQ ID NO: 588508
gcauucggucugcugcaau

SEQ ID NO: 870237 - RNA, 19 nt, Artificial Sequence
  Description of Artificial Sequence: Synthetic oligonucleotide
  Antisense strand to SEQ ID NO: 870236
auugcagcagaccgaaugc

SEQ ID NO: 870238 - RNA, 19 nt, Artificial Sequence
  Description of Artificial Sequence: Synthetic oligonucleotide
  Sense strand starting at position 3054 of SEQ ID NO: 588508
uucggucugcugcaauaua

SEQ ID NO: 870239 - RNA, 19 nt, Artificial Sequence
  Description of Artificial Sequence: Synthetic oligonucleotide
  Antisense strand to SEQ ID NO: 870238
uauauugcagcagaccgaa

SEQ ID NO: 870240 - RNA, 19 nt, Artificial Sequence
  Description of Artificial Sequence: Synthetic oligonucleotide
  Sense strand starting at position 3067 of SEQ ID NO: 588508
aauauauugcauugguuga

SEQ ID NO: 870241 - RNA, 19 nt, Artificial Sequence
  Description of Artificial Sequence: Synthetic oligonucleotide
  Antisense strand to SEQ ID NO: 870240
ucaaccaaugcaauauauu

SEQ ID NO: 870242 - RNA, 19 nt, Artificial Sequence
  Description of Artificial Sequence: Synthetic oligonucleotide
  Sense strand starting at position 3069 of SEQ ID NO: 588508
uauauugcauugguugaca

SEQ ID NO: 870243 - RNA, 19 nt, Artificial Sequence
  Description of Artificial Sequence: Synthetic oligonucleotide
  Antisense strand to SEQ ID NO: 870242
ugucaaccaaugcaauaua

SEQ ID NO: 870244 - RNA, 19 nt, Artificial Sequence
  Description of Artificial Sequence: Synthetic oligonucleotide
  Sense strand starting at position 3071 of SEQ ID NO: 588508
uauugcauugguugacaua

SEQ ID NO: 870245 - RNA, 19 nt, Artificial Sequence
  Description of Artificial Sequence: Synthetic oligonucleotide
  Antisense strand to SEQ ID NO: 870244
uaugucaaccaaugcaaua

SEQ ID NO: 870246 - RNA, 19 nt, Artificial Sequence
  Description of Artificial Sequence: Synthetic oligonucleotide
  Sense strand starting at position 3083 of SEQ ID NO: 588508
ugacauacacauugugaag

SEQ ID NO: 870247 - RNA, 19 nt, Artificial Sequence
  Description of Artificial Sequence: Synthetic oligonucleotide
  Antisense strand to SEQ ID NO: 870246
cuucacaauguguauguca

SEQ ID NO: 870248 - RNA, 19 nt, Artificial Sequence
  Description of Artificial Sequence: Synthetic oligonucleotide
  Sense strand starting at position 3085 of SEQ ID NO: 588508
acauacacauugugaagaa

SEQ ID NO: 870249 - RNA, 19 nt, Artificial Sequence
  Description of Artificial Sequence: Synthetic oligonucleotide
  Antisense strand to SEQ ID NO: 870248
uucuucacaauguguaugu

SEQ ID NO: 870250 - RNA, 19 nt, Artificial Sequence
  Description of Artificial Sequence: Synthetic oligonucleotide
  Sense strand starting at position 3097 of SEQ ID NO: 588508
ugaagaacaucugcaguua

SEQ ID NO: 870251 - RNA, 19 nt, Artificial Sequence
  Description of Artificial Sequence: Synthetic oligonucleotide
  Antisense strand to SEQ ID NO: 870250
uaacugcagauguucuuca

SEQ ID NO: 870252 - RNA, 19 nt, Artificial Sequence
  Description of Artificial Sequence: Synthetic oligonucleotide
  Sense strand starting at position 3098 of SEQ ID NO: 588508
gaagaacaucugcaguuau

SEQ ID NO: 870253 - RNA, 19 nt, Artificial Sequence
  Description of Artificial Sequence: Synthetic oligonucleotide
  Antisense strand to SEQ ID NO: 870252
auaacugcagauguucuuc

SEQ ID NO: 870254 - RNA, 19 nt, Artificial Sequence
  Description of Artificial Sequence: Synthetic oligonucleotide
  Sense strand starting at position 3222 of SEQ ID NO: 588508
agcugaaggcuuugagcau

SEQ ID NO: 870255 - RNA, 19 nt, Artificial Sequence
  Description of Artificial Sequence: Synthetic oligonucleotide
  Antisense strand to SEQ ID NO: 870254
augcucaaagccuucagcu

SEQ ID NO: 870256 - RNA, 19 nt, Artificial Sequence
  Description of Artificial Sequence: Synthetic oligonucleotide
  Sense strand starting at position 3412 of SEQ ID NO: 588508
gugguaucugugccuguag

SEQ ID NO: 870257 - RNA, 19 nt, Artificial Sequence
  Description of Artificial Sequence: Synthetic oligonucleotide
  Antisense strand to SEQ ID NO: 870256
cuacaggcacagauaccac

SEQ ID NO: 870258 - RNA, 19 nt, Artificial Sequence
  Description of Artificial Sequence: Synthetic oligonucleotide
  Sense strand starting at position 316 of SEQ ID NO: 588509
gaacuacagccugggagau

SEQ ID NO: 870259 - RNA, 19 nt, Artificial Sequence
  Description of Artificial Sequence: Synthetic oligonucleotide
  Antisense strand to SEQ ID NO: 870258
aucucccaggcuguaguuc

SEQ ID NO: 870260 - RNA, 19 nt, Artificial Sequence
  Description of Artificial Sequence: Synthetic oligonucleotide
  Sense strand starting at position 410 of SEQ ID NO: 588509
aguuaauaggguugcuaaa

SEQ ID NO: 870261 - RNA, 19 nt, Artificial Sequence
  Description of Artificial Sequence: Synthetic oligonucleotide
  Antisense strand to SEQ ID NO: 870260
uuuagcaacccuauuaacu

SEQ ID NO: 870262 - RNA, 19 nt, Artificial Sequence
  Description of Artificial Sequence: Synthetic oligonucleotide
  Sense strand starting at position 467 of SEQ ID NO: 588509
cuggcucuuccuggaucua

SEQ ID NO: 870263 - RNA, 19 nt, Artificial Sequence
  Description of Artificial Sequence: Synthetic oligonucleotide
  Antisense strand to SEQ ID NO: 870262
uagauccaggaagagccag

SEQ ID NO: 870264 - RNA, 19 nt, Artificial Sequence
  Description of Artificial Sequence: Synthetic oligonucleotide
  Sense strand starting at position 484 of SEQ ID NO: 588509
uaccauuaccaguggaaga

SEQ ID NO: 870265 - RNA, 19 nt, Artificial Sequence
  Description of Artificial Sequence: Synthetic oligonucleotide
  Antisense strand to SEQ ID NO: 870264
ucuuccacugguaauggua

SEQ ID NO: 870266 - RNA, 19 nt, Artificial Sequence
  Description of Artificial Sequence: Synthetic oligonucleotide
  Sense strand starting at position 506 of SEQ ID NO: 588509
cugaauaauucuuacugag

SEQ ID NO: 870267 - RNA, 19 nt, Artificial Sequence
  Description of Artificial Sequence: Synthetic oligonucleotide
  Antisense strand to SEQ ID NO: 870266
cucaguaagaauuauucag

SEQ ID NO: 870268 - RNA, 19 nt, Artificial Sequence
  Description of Artificial Sequence: Synthetic oligonucleotide
  Sense strand starting at position 586 of SEQ ID NO: 588509
caucccacgguguaugaaa

SEQ ID NO: 870269 - RNA, 19 nt, Artificial Sequence
  Description of Artificial Sequence: Synthetic oligonucleotide
  Antisense strand to SEQ ID NO: 870268
uuucauacaccgugggaug

SEQ ID NO: 870270 - RNA, 19 nt, Artificial Sequence
  Description of Artificial Sequence: Synthetic oligonucleotide
  Sense strand starting at position 788 of SEQ ID NO: 588509
uggcauuagaugcaacaga

SEQ ID NO: 870271 - RNA, 19 nt, Artificial Sequence
  Description of Artificial Sequence: Synthetic oligonucleotide
  Antisense strand to SEQ ID NO: 870270
ucuguugcaucuaaugcca

SEQ ID NO: 870272 - RNA, 19 nt, Artificial Sequence
  Description of Artificial Sequence: Synthetic oligonucleotide
  Sense strand starting at position 803 of SEQ ID NO: 588509
cagaaucgaugagucaauu

SEQ ID NO: 870273 - RNA, 19 nt, Artificial Sequence
  Description of Artificial Sequence: Synthetic oligonucleotide
  Antisense strand to SEQ ID NO: 870272
aauugacucaucgauucug

SEQ ID NO: 870274 - RNA, 19 nt, Artificial Sequence
  Description of Artificial Sequence: Synthetic oligonucleotide
  Sense strand starting at position 845 of SEQ ID NO: 588509
cuaagcgaaugguugcaua

SEQ ID NO: 870275 - RNA, 19 nt, Artificial Sequence
  Description of Artificial Sequence: Synthetic oligonucleotide
  Antisense strand to SEQ ID NO: 870274
uaugcaaccauucgcuuag

SEQ ID NO: 870276 - RNA, 19 nt, Artificial Sequence
  Description of Artificial Sequence: Synthetic oligonucleotide
  Sense strand starting at position 893 of SEQ ID NO: 588509
uauguaggaacgugaucau

SEQ ID NO: 870277 - RNA, 19 nt, Artificial Sequence
  Description of Artificial Sequence: Synthetic oligonucleotide
  Antisense strand to SEQ ID NO: 870276
augaucacguuccuacaua

SEQ ID NO: 870278 - RNA, 19 nt, Artificial Sequence
  Description of Artificial Sequence: Synthetic oligonucleotide
  Sense strand starting at position 896 of SEQ ID NO: 588509
guaggaacgugaucauaaa

SEQ ID NO: 870279 - RNA, 19 nt, Artificial Sequence
  Description of Artificial Sequence: Synthetic oligonucleotide
  Antisense strand to SEQ ID NO: 870278
uuuaugaucacguuccuac

SEQ ID NO: 870280 - RNA, 19 nt, Artificial Sequence
  Description of Artificial Sequence: Synthetic oligonucleotide
  Sense strand starting at position 967 of SEQ ID NO: 588509
cgacacugugaaugucuua

SEQ ID NO: 870281 - RNA, 19 nt, Artificial Sequence
  Description of Artificial Sequence: Synthetic oligonucleotide
  Antisense strand to SEQ ID NO: 870280
uaagacauucacagugucg

SEQ ID NO: 870282 - RNA, 19 nt, Artificial Sequence
  Description of Artificial Sequence: Synthetic oligonucleotide
  Sense strand starting at position 1074 of SEQ ID NO: 588509
cacugagcucagugaauuc

SEQ ID NO: 870283 - RNA, 19 nt, Artificial Sequence
  Description of Artificial Sequence: Synthetic oligonucleotide
  Antisense strand to SEQ ID NO: 870282
gaauucacugagcucagug

SEQ ID NO: 870284 - RNA, 19 nt, Artificial Sequence
  Description of Artificial Sequence: Synthetic oligonucleotide
  Sense strand starting at position 1081 of SEQ ID NO: 588509
cucagugaauucucuaagu

SEQ ID NO: 870285 - RNA, 19 nt, Artificial Sequence
  Description of Artificial Sequence: Synthetic oligonucleotide
  Antisense strand to SEQ ID NO: 870284
acuuagagaauucacugag

SEQ ID NO: 870286 - RNA, 19 nt, Artificial Sequence
  Description of Artificial Sequence: Synthetic oligonucleotide
  Sense strand starting at position 1158 of SEQ ID NO: 588509
guaaacucacucugggaaa

SEQ ID NO: 870287 - RNA, 19 nt, Artificial Sequence
  Description of Artificial Sequence: Synthetic oligonucleotide
  Antisense strand to SEQ ID NO: 870286
uuucccagagugaguuuac

SEQ ID NO: 870288 - RNA, 19 nt, Artificial Sequence
  Description of Artificial Sequence: Synthetic oligonucleotide
  Sense strand starting at position 1610 of SEQ ID NO: 588509
ccgggacuuguuuaucguu

SEQ ID NO: 870289 - RNA, 19 nt, Artificial Sequence
  Description of Artificial Sequence: Synthetic oligonucleotide
  Antisense strand to SEQ ID NO: 870288
aacgauaaacaagucccgg

SEQ ID NO: 870290 - RNA, 19 nt, Artificial Sequence
  Description of Artificial Sequence: Synthetic oligonucleotide
  Sense strand starting at position 1615 of SEQ ID NO: 588509
acuuguuuaucguugcaaa

SEQ ID NO: 870291 - RNA, 19 nt, Artificial Sequence
  Description of Artificial Sequence: Synthetic oligonucleotide
  Antisense strand to SEQ ID NO: 870290
uuugcaacgauaaacaagu

SEQ ID NO: 870292 - RNA, 19 nt, Artificial Sequence
  Description of Artificial Sequence: Synthetic oligonucleotide
  Sense strand starting at position 2026 of SEQ ID NO: 588509
gggugaguugcaugaguga

SEQ ID NO: 870293 - RNA, 19 nt, Artificial Sequence
  Description of Artificial Sequence: Synthetic oligonucleotide
  Antisense strand to SEQ ID NO: 870292
ucacucaugcaacucaccc

SEQ ID NO: 870294 - RNA, 19 nt, Artificial Sequence
  Description of Artificial Sequence: Synthetic oligonucleotide
  Sense strand starting at position 2315 of SEQ ID NO: 588509
uuuaauacucaccgugaca

SEQ ID NO: 870295 - RNA, 19 nt, Artificial Sequence
  Description of Artificial Sequence: Synthetic oligonucleotide
  Antisense strand to SEQ ID NO: 870294
ugucacggugaguauuaaa

SEQ ID NO: 870296 - RNA, 19 nt, Artificial Sequence
  Description of Artificial Sequence: Synthetic oligonucleotide
  Sense strand starting at position 2352 of SEQ ID NO: 588509
gacacuuaaggacgcauaa

SEQ ID NO: 870297 - RNA, 19 nt, Artificial Sequence
  Description of Artificial Sequence: Synthetic oligonucleotide
  Antisense strand to SEQ ID NO: 870296
uuaugcguccuuaaguguc

SEQ ID NO: 870298 - RNA, 19 nt, Artificial Sequence
  Description of Artificial Sequence: Synthetic oligonucleotide
  Sense strand starting at position 2385 of SEQ ID NO: 588509
gggagcuuaugcucucaaa

SEQ ID NO: 870299 - RNA, 19 nt, Artificial Sequence
  Description of Artificial Sequence: Synthetic oligonucleotide
  Antisense strand to SEQ ID NO: 870298
uuugagagcauaagcuccc

SEQ ID NO: 870300 - RNA, 19 nt, Artificial Sequence
  Description of Artificial Sequence: Synthetic oligonucleotide
  Sense strand starting at position 2396 of SEQ ID NO: 588509
cucucaaaugcagagugau

SEQ ID NO: 870301 - RNA, 19 nt, Artificial Sequence
  Description of Artificial Sequence: Synthetic oligonucleotide
  Antisense strand to SEQ ID NO: 870300
aucacucugcauuugagag

SEQ ID NO: 870302 - RNA, 19 nt, Artificial Sequence
  Description of Artificial Sequence: Synthetic oligonucleotide
  Sense strand starting at position 2462 of SEQ ID NO: 588509
guccaauuaggcuguucuu

SEQ ID NO: 870303 - RNA, 19 nt, Artificial Sequence
  Description of Artificial Sequence: Synthetic oligonucleotide
  Antisense strand to SEQ ID NO: 870302
aagaacagccuaauuggac

SEQ ID NO: 870304 - RNA, 19 nt, Artificial Sequence
  Description of Artificial Sequence: Synthetic oligonucleotide
  Sense strand starting at position 2465 of SEQ ID NO: 588509
caauuaggcuguucuuaag

SEQ ID NO: 870305 - RNA, 19 nt, Artificial Sequence
  Description of Artificial Sequence: Synthetic oligonucleotide
  Antisense strand to SEQ ID NO: 870304
cuuaagaacagccuaauug

SEQ ID NO: 870306 - RNA, 19 nt, Artificial Sequence
  Description of Artificial Sequence: Synthetic oligonucleotide
  Sense strand starting at position 2490 of SEQ ID NO: 588509
gcguuaccgcagaguugua

SEQ ID NO: 870307 - RNA, 19 nt, Artificial Sequence
  Description of Artificial Sequence: Synthetic oligonucleotide
  Antisense strand to SEQ ID NO: 870306
uacaacucugcgguaacgc

SEQ ID NO: 870308 - RNA, 19 nt, Artificial Sequence
  Description of Artificial Sequence: Synthetic oligonucleotide
  Sense strand starting at position 2641 of SEQ ID NO: 588509
ugugaauagucacauuuau

SEQ ID NO: 870309 - RNA, 19 nt, Artificial Sequence
  Description of Artificial Sequence: Synthetic oligonucleotide
  Antisense strand to SEQ ID NO: 870308
auaaaugugacuauucaca

SEQ ID NO: 870310 - RNA, 19 nt, Artificial Sequence
  Description of Artificial Sequence: Synthetic oligonucleotide
  Sense strand starting at position 2742 of SEQ ID NO: 588509
aguauuccugagcaccaga

SEQ ID NO: 870311 - RNA, 19 nt, Artificial Sequence
  Description of Artificial Sequence: Synthetic oligonucleotide
  Antisense strand to SEQ ID NO: 870310
ucuggugcucaggaauacu

SEQ ID NO: 870312 - RNA, 19 nt, Artificial Sequence
  Description of Artificial Sequence: Synthetic oligonucleotide
  Sense strand starting at position 2874 of SEQ ID NO: 588509
acagguggcauuugucauu

SEQ ID NO: 870313 - RNA, 19 nt, Artificial Sequence
  Description of Artificial Sequence: Synthetic oligonucleotide
  Antisense strand to SEQ ID NO: 870312
aaugacaaaugccaccugu

SEQ ID NO: 870314 - RNA, 19 nt, Artificial Sequence
  Description of Artificial Sequence: Synthetic oligonucleotide
  Sense strand starting at position 2877 of SEQ ID NO: 588509
gguggcauuugucauugaa

SEQ ID NO: 870315 - RNA, 19 nt, Artificial Sequence
  Description of Artificial Sequence: Synthetic oligonucleotide
  Antisense strand to SEQ ID NO: 870314
uucaaugacaaaugccacc

SEQ ID NO: 870316 - RNA, 19 nt, Artificial Sequence
  Description of Artificial Sequence: Synthetic oligonucleotide
  Sense strand starting at position 2879 of SEQ ID NO: 588509
uggcauuugucauugaagu

SEQ ID NO: 870317 - RNA, 19 nt, Artificial Sequence
  Description of Artificial Sequence: Synthetic oligonucleotide
  Antisense strand to SEQ ID NO: 870316
acuucaaugacaaaugcca

SEQ ID NO: 870318 - RNA, 19 nt, Artificial Sequence
  Description of Artificial Sequence: Synthetic oligonucleotide
  Sense strand starting at position 2880 of SEQ ID NO: 588509
ggcauuugucauugaagug

SEQ ID NO: 870319 - RNA, 19 nt, Artificial Sequence
  Description of Artificial Sequence: Synthetic oligonucleotide
  Antisense strand to SEQ ID NO: 870318
cacuucaaugacaaaugcc

SEQ ID NO: 870320 - RNA, 19 nt, Artificial Sequence
  Description of Artificial Sequence: Synthetic oligonucleotide
  Sense strand starting at position 2885 of SEQ ID NO: 588509
uugucauugaagugcuaga

SEQ ID NO: 870321 - RNA, 19 nt, Artificial Sequence
  Description of Artificial Sequence: Synthetic oligonucleotide
  Antisense strand to SEQ ID NO: 870320
ucuagcacuucaaugacaa

SEQ ID NO: 870322 - RNA, 19 nt, Artificial Sequence
  Description of Artificial Sequence: Synthetic oligonucleotide
  Sense strand starting at position 2890 of SEQ ID NO: 588509
auugaagugcuagaaguga

SEQ ID NO: 870323 - RNA, 19 nt, Artificial Sequence
  Description of Artificial Sequence: Synthetic oligonucleotide
  Antisense strand to SEQ ID NO: 870322
ucacuucuagcacuucaau

SEQ ID NO: 870324 - RNA, 19 nt, Artificial Sequence
  Description of Artificial Sequence: Synthetic oligonucleotide
  Sense strand starting at position 2952 of SEQ ID NO: 588509
acagauucgcaguguuuga

SEQ ID NO: 870325 - RNA, 19 nt, Artificial Sequence
  Description of Artificial Sequence: Synthetic oligonucleotide
  Antisense strand to SEQ ID NO: 870324
ucaaacacugcgaaucugu

SEQ ID NO: 870326 - RNA, 19 nt, Artificial Sequence
  Description of Artificial Sequence: Synthetic oligonucleotide
  Sense strand starting at position 2962 of SEQ ID NO: 588509
aguguuugaaugugggaag

SEQ ID NO: 870327 - RNA, 19 nt, Artificial Sequence
  Description of Artificial Sequence: Synthetic oligonucleotide
  Antisense strand to SEQ ID NO: 870326
cuucccacauucaaacacu

SEQ ID NO: 870328 - RNA, 19 nt, Artificial Sequence
  Description of Artificial Sequence: Synthetic oligonucleotide
  Sense strand starting at position 3006 of SEQ ID NO: 588509
agccaaguuuaucuucgau

SEQ ID NO: 870329 - RNA, 19 nt, Artificial Sequence
  Description of Artificial Sequence: Synthetic oligonucleotide
  Antisense strand to SEQ ID NO: 870328
aucgaagauaaacuuggcu

SEQ ID NO: 870330 - RNA, 19 nt, Artificial Sequence
  Description of Artificial Sequence: Synthetic oligonucleotide
  Sense strand starting at position 3008 of SEQ ID NO: 588509
ccaaguuuaucuucgaucu

SEQ ID NO: 870331 - RNA, 19 nt, Artificial Sequence
  Description of Artificial Sequence: Synthetic oligonucleotide
  Antisense strand to SEQ ID NO: 870330
agaucgaagauaaacuugg

SEQ ID NO: 870332 - RNA, 19 nt, Artificial Sequence
  Description of Artificial Sequence: Synthetic oligonucleotide
  Sense strand starting at position 3090 of SEQ ID NO: 588509
augcaaucgcauugacaau

SEQ ID NO: 870333 - RNA, 19 nt, Artificial Sequence
  Description of Artificial Sequence: Synthetic oligonucleotide
  Antisense strand to SEQ ID NO: 870332
auugucaaugcgauugcau

SEQ ID NO: 870334 - RNA, 19 nt, Artificial Sequence
  Description of Artificial Sequence: Synthetic oligonucleotide
  Sense strand starting at position 3595 of SEQ ID NO: 588509
ccggcagauuacuugagau

SEQ ID NO: 870335 - RNA, 19 nt, Artificial Sequence
  Description of Artificial Sequence: Synthetic oligonucleotide
  Antisense strand to SEQ ID NO: 870334
aucucaaguaaucugccgg

SEQ ID NO: 870336 - RNA, 19 nt, Artificial Sequence
  Description of Artificial Sequence: Synthetic oligonucleotide
  Sense strand starting at position 3931 of SEQ ID NO: 588509
uacagauauugugaagauu

SEQ ID NO: 870337 - RNA, 19 nt, Artificial Sequence
  Description of Artificial Sequence: Synthetic oligonucleotide
  Antisense strand to SEQ ID NO: 870336
aaucuucacaauaucugua

SEQ ID NO: 870338 - RNA, 19 nt, Artificial Sequence
  Description of Artificial Sequence: Synthetic oligonucleotide
  Sense strand starting at position 121 of SEQ ID NO: 588510
agagaaauagcuugugaca

SEQ ID NO: 870339 - RNA, 19 nt, Artificial Sequence
  Description of Artificial Sequence: Synthetic oligonucleotide
  Antisense strand to SEQ ID NO: 870338
ugucacaagcuauuucucu

SEQ ID NO: 870340 - RNA, 19 nt, Artificial Sequence
  Description of Artificial Sequence: Synthetic oligonucleotide
  Sense strand starting at position 452 of SEQ ID NO: 588510
uagaauaaaucagugagca

SEQ ID NO: 870341 - RNA, 19 nt, Artificial Sequence
  Description of Artificial Sequence: Synthetic oligonucleotide
  Antisense strand to SEQ ID NO: 870340
ugcucacugauuuauucua

SEQ ID NO: 870342 - RNA, 19 nt, Artificial Sequence
  Description of Artificial Sequence: Synthetic oligonucleotide
  Sense strand starting at position 563 of SEQ ID NO: 588510
cgaagacacguccaacaau

SEQ ID NO: 870343 - RNA, 19 nt, Artificial Sequence
  Description of Artificial Sequence: Synthetic oligonucleotide
  Antisense strand to SEQ ID NO: 870342
auuguuggacgugucuucg

SEQ ID NO: 870344 - RNA, 19 nt, Artificial Sequence
  Description of Artificial Sequence: Synthetic oligonucleotide
  Sense strand starting at position 622 of SEQ ID NO: 588510
gaaagauaaucagaaagag

SEQ ID NO: 870345 - RNA, 19 nt, Artificial Sequence
  Description of Artificial Sequence: Synthetic oligonucleotide
  Antisense strand to SEQ ID NO: 870344
cucuuucugauuaucuuuc

SEQ ID NO: 870346 - RNA, 19 nt, Artificial Sequence
  Description of Artificial Sequence: Synthetic oligonucleotide
  Sense strand starting at position 716 of SEQ ID NO: 588510
uuugcauugcugugaauuu

SEQ ID NO: 870347 - RNA, 19 nt, Artificial Sequence
  Description of Artificial Sequence: Synthetic oligonucleotide
  Antisense strand to SEQ ID NO: 870346
aaauucacagcaaugcaaa

SEQ ID NO: 870348 - RNA, 19 nt, Artificial Sequence
  Description of Artificial Sequence: Synthetic oligonucleotide
  Sense strand starting at position 753 of SEQ ID NO: 588510
aaguuucuugauggaucaa

SEQ ID NO: 870349 - RNA, 19 nt, Artificial Sequence
  Description of Artificial Sequence: Synthetic oligonucleotide
  Antisense strand to SEQ ID NO: 870348
uugauccaucaagaaacuu

SEQ ID NO: 870350 - RNA, 19 nt, Artificial Sequence
  Description of Artificial Sequence: Synthetic oligonucleotide
  Sense strand starting at position 778 of SEQ ID NO: 588510
uaagucugaucuccaggaa

SEQ ID NO: 870351 - RNA, 19 nt, Artificial Sequence
  Description of Artificial Sequence: Synthetic oligonucleotide
  Antisense strand to SEQ ID NO: 870350
uuccuggagaucagacuua

SEQ ID NO: 870352 - RNA, 19 nt, Artificial Sequence
  Description of Artificial Sequence: Synthetic oligonucleotide
  Sense strand starting at position 837 of SEQ ID NO: 588510
gguuguaaaccauauguua

SEQ ID NO: 870353 - RNA, 19 nt, Artificial Sequence
  Description of Artificial Sequence: Synthetic oligonucleotide
  Antisense strand to SEQ ID NO: 870352
uaacauaugguuuacaacc

SEQ ID NO: 870354 - RNA, 19 nt, Artificial Sequence
  Description of Artificial Sequence: Synthetic oligonucleotide
  Sense strand starting at position 840 of SEQ ID NO: 588510
uguaaaccauauguuagaa

SEQ ID NO: 870355 - RNA, 19 nt, Artificial Sequence
  Description of Artificial Sequence: Synthetic oligonucleotide
  Antisense strand to SEQ ID NO: 870354
uucuaacauaugguuuaca

SEQ ID NO: 870356 - RNA, 19 nt, Artificial Sequence
  Description of Artificial Sequence: Synthetic oligonucleotide
  Sense strand starting at position 1267 of SEQ ID NO: 588510
agugcuguuauauagaaag

SEQ ID NO: 870357 - RNA, 19 nt, Artificial Sequence
  Description of Artificial Sequence: Synthetic oligonucleotide
  Antisense strand to SEQ ID NO: 870356
cuuucuauauaacagcacu

SEQ ID NO: 870358 - RNA, 19 nt, Artificial Sequence
  Description of Artificial Sequence: Synthetic oligonucleotide
  Sense strand starting at position 1302 of SEQ ID NO: 588510
cagagaaguucuuuaguaa

SEQ ID NO: 870359 - RNA, 19 nt, Artificial Sequence
  Description of Artificial Sequence: Synthetic oligonucleotide
  Antisense strand to SEQ ID NO: 870358
uuacuaaagaacuucucug

SEQ ID NO: 870360 - RNA, 19 nt, Artificial Sequence
  Description of Artificial Sequence: Synthetic oligonucleotide
  Sense strand starting at position 1359 of SEQ ID NO: 588510
gaagcuugccuugauagau

SEQ ID NO: 870361 - RNA, 19 nt, Artificial Sequence
  Description of Artificial Sequence: Synthetic oligonucleotide
  Antisense strand to SEQ ID NO: 870360
aucuaucaaggcaagcuuc

SEQ ID NO: 870362 - RNA, 19 nt, Artificial Sequence
  Description of Artificial Sequence: Synthetic oligonucleotide
  Sense strand starting at position 1492 of SEQ ID NO: 588510
uugcuugagcaauacaaac

SEQ ID NO: 870363 - RNA, 19 nt, Artificial Sequence
  Description of Artificial Sequence: Synthetic oligonucleotide
  Antisense strand to SEQ ID NO: 870362
guuuguauugcucaagcaa

SEQ ID NO: 870364 - RNA, 19 nt, Artificial Sequence
  Description of Artificial Sequence: Synthetic oligonucleotide
  Sense strand starting at position 1650 of SEQ ID NO: 588510
acaucuaugcaggaaguua

SEQ ID NO: 870365 - RNA, 19 nt, Artificial Sequence
  Description of Artificial Sequence: Synthetic oligonucleotide
  Antisense strand to SEQ ID NO: 870364
uaacuuccugcauagaugu

SEQ ID NO: 870366 - RNA, 19 nt, Artificial Sequence
  Description of Artificial Sequence: Synthetic oligonucleotide
  Sense strand starting at position 1773 of SEQ ID NO: 588510
gugggagaccuugaagcuu

SEQ ID NO: 870367 - RNA, 19 nt, Artificial Sequence
  Description of Artificial Sequence: Synthetic oligonucleotide
  Antisense strand to SEQ ID NO: 870366
aagcuucaaggucucccac

SEQ ID NO: 870368 - RNA, 19 nt, Artificial Sequence
  Description of Artificial Sequence: Synthetic oligonucleotide
  Sense strand starting at position 1840 of SEQ ID NO: 588510
gggacuucugaagguauca

SEQ ID NO: 870369 - RNA, 19 nt, Artificial Sequence
  Description of Artificial Sequence: Synthetic oligonucleotide
  Antisense strand to SEQ ID NO: 870368
ugauaccuucagaaguccc

SEQ ID NO: 870370 - RNA, 19 nt, Artificial Sequence
  Description of Artificial Sequence: Synthetic oligonucleotide
  Sense strand starting at position 1913 of SEQ ID NO: 588510
agccuuugacuccauggaa

SEQ ID NO: 870371 - RNA, 19 nt, Artificial Sequence
  Description of Artificial Sequence: Synthetic oligonucleotide
  Antisense strand to SEQ ID NO: 870370
uuccauggagucaaaggcu

SEQ ID NO: 870372 - RNA, 19 nt, Artificial Sequence
  Description of Artificial Sequence: Synthetic oligonucleotide
  Sense strand starting at position 2071 of SEQ ID NO: 588510
uggauagucugacuccacu

SEQ ID NO: 870373 - RNA, 19 nt, Artificial Sequence
  Description of Artificial Sequence: Synthetic oligonucleotide
  Antisense strand to SEQ ID NO: 870372
aguggagucagacuaucca

SEQ ID NO: 870374 - RNA, 19 nt, Artificial Sequence
  Description of Artificial Sequence: Synthetic oligonucleotide
  Sense strand starting at position 2215 of SEQ ID NO: 588510
gaguucugaguguagaaca

SEQ ID NO: 870375 - RNA, 19 nt, Artificial Sequence
  Description of Artificial Sequence: Synthetic oligonucleotide
  Antisense strand to SEQ ID NO: 870374
uguucuacacucagaacuc

SEQ ID NO: 870376 - RNA, 19 nt, Artificial Sequence
  Description of Artificial Sequence: Synthetic oligonucleotide
  Sense strand starting at position 2242 of SEQ ID NO: 588510
uagagaagccuugagcuca

SEQ ID NO: 870377 - RNA, 19 nt, Artificial Sequence
  Description of Artificial Sequence: Synthetic oligonucleotide
  Antisense strand to SEQ ID NO: 870376
ugagcucaaggcuucucua

SEQ ID NO: 870378 - RNA, 19 nt, Artificial Sequence
  Description of Artificial Sequence: Synthetic oligonucleotide
  Sense strand starting at position 2364 of SEQ ID NO: 588510
cagagauguuuaucaucag

SEQ ID NO: 870379 - RNA, 19 nt, Artificial Sequence
  Description of Artificial Sequence: Synthetic oligonucleotide
  Antisense strand to SEQ ID NO: 870378
cugaugauaaacaucucug

SEQ ID NO: 870380 - RNA, 19 nt, Artificial Sequence
  Description of Artificial Sequence: Synthetic oligonucleotide
  Sense strand starting at position 2367 of SEQ ID NO: 588510
agauguuuaucaucagaga

SEQ ID NO: 870381 - RNA, 19 nt, Artificial Sequence
  Description of Artificial Sequence: Synthetic oligonucleotide
  Antisense strand to SEQ ID NO: 870380
ucucugaugauaaacaucu

SEQ ID NO: 870382 - RNA, 19 nt, Artificial Sequence
  Description of Artificial Sequence: Synthetic oligonucleotide
  Sense strand starting at position 2387 of SEQ ID NO: 588510
ggguuauggaagugauccu

SEQ ID NO: 870383 - RNA, 19 nt, Artificial Sequence
  Description of Artificial Sequence: Synthetic oligonucleotide
  Antisense strand to SEQ ID NO: 870382
aggaucacuuccauaaccc

SEQ ID NO: 870384 - RNA, 19 nt, Artificial Sequence
  Description of Artificial Sequence: Synthetic oligonucleotide
  Sense strand starting at position 2388 of SEQ ID NO: 588510
gguuauggaagugauccua

SEQ ID NO: 870385 - RNA, 19 nt, Artificial Sequence
  Description of Artificial Sequence: Synthetic oligonucleotide
  Antisense strand to SEQ ID NO: 870384
uaggaucacuuccauaacc

SEQ ID NO: 870386 - RNA, 19 nt, Artificial Sequence
  Description of Artificial Sequence: Synthetic oligonucleotide
  Sense strand starting at position 2413 of SEQ ID NO: 588510
cugagagauugcuuaacuc

SEQ ID NO: 870387 - RNA, 19 nt, Artificial Sequence
  Description of Artificial Sequence: Synthetic oligonucleotide
  Antisense strand to SEQ ID NO: 870386
gaguuaagcaaucucucag

SEQ ID NO: 870388 - RNA, 19 nt, Artificial Sequence
  Description of Artificial Sequence: Synthetic oligonucleotide
  Sense strand starting at position 2505 of SEQ ID NO: 588510
ggcaguauuguugacaaau

SEQ ID NO: 870389 - RNA, 19 nt, Artificial Sequence
  Description of Artificial Sequence: Synthetic oligonucleotide
  Antisense strand to SEQ ID NO: 870388
auuugucaacaauacugcc

SEQ ID NO: 870390 - RNA, 19 nt, Artificial Sequence
  Description of Artificial Sequence: Synthetic oligonucleotide
  Sense strand starting at position 2530 of SEQ ID NO: 588510
ggcaguauuguugagaaua

SEQ ID NO: 870391 - RNA, 19 nt, Artificial Sequence
  Description of Artificial Sequence: Synthetic oligonucleotide
  Antisense strand to SEQ ID NO: 870390
uauucucaacaauacugcc

SEQ ID NO: 870392 - RNA, 19 nt, Artificial Sequence
  Description of Artificial Sequence: Synthetic oligonucleotide
  Sense strand starting at position 2616 of SEQ ID NO: 588510
auuuaucacuaggaugauu

SEQ ID NO: 870393 - RNA, 19 nt, Artificial Sequence
  Description of Artificial Sequence: Synthetic oligonucleotide
  Antisense strand to SEQ ID NO: 870392
aaucauccuagugauaaau

SEQ ID NO: 870394 - RNA, 19 nt, Artificial Sequence
  Description of Artificial Sequence: Synthetic oligonucleotide
  Sense strand starting at position 2848 of SEQ ID NO: 588510
uucuucuuucgagauggga

SEQ ID NO: 870395 - RNA, 19 nt, Artificial Sequence
  Description of Artificial Sequence: Synthetic oligonucleotide
  Antisense strand to SEQ ID NO: 870394
ucccaucucgaaagaagaa

SEQ ID NO: 870396 - RNA, 19 nt, Artificial Sequence
  Description of Artificial Sequence: Synthetic oligonucleotide
  Sense strand starting at position 3128 of SEQ ID NO: 588510
ugugccuggugauuucuaa

SEQ ID NO: 870397 - RNA, 19 nt, Artificial Sequence
  Description of Artificial Sequence: Synthetic oligonucleotide
  Antisense strand to SEQ ID NO: 870396
uuagaaaucaccaggcaca

SEQ ID NO: 870398 - RNA, 19 nt, Artificial Sequence
  Description of Artificial Sequence: Synthetic oligonucleotide
  Sense strand starting at position 3545 of SEQ ID NO: 588510
gggugaucacaguggaaug

SEQ ID NO: 870399 - RNA, 19 nt, Artificial Sequence
  Description of Artificial Sequence: Synthetic oligonucleotide
  Antisense strand to SEQ ID NO: 870398
cauuccacugugaucaccc

SEQ ID NO: 870400 - RNA, 19 nt, Artificial Sequence
  Description of Artificial Sequence: Synthetic oligonucleotide
  Sense strand starting at position 3547 of SEQ ID NO: 588510
gugaucacaguggaauguu

SEQ ID NO: 870401 - RNA, 19 nt, Artificial Sequence
  Description of Artificial Sequence: Synthetic oligonucleotide
  Antisense strand to SEQ ID NO: 870400
aacauuccacugugaucac

SEQ ID NO: 870402 - RNA, 19 nt, Artificial Sequence
  Description of Artificial Sequence: Synthetic oligonucleotide
  Sense strand starting at position 3562 of SEQ ID NO: 588510
uguugugcgggaaguuaaa

SEQ ID NO: 870403 - RNA, 19 nt, Artificial Sequence
  Description of Artificial Sequence: Synthetic oligonucleotide
  Antisense strand to SEQ ID NO: 870402
uuuaacuucccgcacaaca

SEQ ID NO: 870404 - RNA, 19 nt, Artificial Sequence
  Description of Artificial Sequence: Synthetic oligonucleotide
  Sense strand starting at position 3663 of SEQ ID NO: 588510
gcgcgcaauccuuuggaga

SEQ ID NO: 870405 - RNA, 19 nt, Artificial Sequence
  Description of Artificial Sequence: Synthetic oligonucleotide
  Antisense strand to SEQ ID NO: 870404
ucuccaaaggauugcgcgc

SEQ ID NO: 870406 - RNA, 19 nt, Artificial Sequence
  Description of Artificial Sequence: Synthetic oligonucleotide
  Sense strand starting at position 3682 of SEQ ID NO: 588510
uugucauuucuauguuacu

SEQ ID NO: 870407 - RNA, 19 nt, Artificial Sequence
  Description of Artificial Sequence: Synthetic oligonucleotide
  Antisense strand to SEQ ID NO: 870406
aguaacauagaaaugacaa

SEQ ID NO: 870408 - RNA, 19 nt, Artificial Sequence
  Description of Artificial Sequence: Synthetic oligonucleotide
  Sense strand starting at position 3728 of SEQ ID NO: 588510
aaagaauccucgcuggaag

SEQ ID NO: 870409 - RNA, 19 nt, Artificial Sequence
  Description of Artificial Sequence: Synthetic oligonucleotide
  Antisense strand to SEQ ID NO: 870408
cuuccagcgaggauucuuu

SEQ ID NO: 870410 - RNA, 19 nt, Artificial Sequence
  Description of Artificial Sequence: Synthetic oligonucleotide
  Sense strand starting at position 3729 of SEQ ID NO: 588510
aagaauccucgcuggaaga

SEQ ID NO: 870411 - RNA, 19 nt, Artificial Sequence
  Description of Artificial Sequence: Synthetic oligonucleotide
  Antisense strand to SEQ ID NO: 870410
ucuuccagcgaggauucuu

SEQ ID NO: 870412 - RNA, 19 nt, Artificial Sequence
  Description of Artificial Sequence: Synthetic oligonucleotide
  Sense strand starting at position 3730 of SEQ ID NO: 588510
agaauccucgcuggaagaa

SEQ ID NO: 870413 - RNA, 19 nt, Artificial Sequence
  Description of Artificial Sequence: Synthetic oligonucleotide
  Antisense strand to SEQ ID NO: 870412
uucuuccagcgaggauucu

SEQ ID NO: 870414 - RNA, 19 nt, Artificial Sequence
  Description of Artificial Sequence: Synthetic oligonucleotide
  Sense strand starting at position 3731 of SEQ ID NO: 588510
gaauccucgcuggaagaau

SEQ ID NO: 870415 - RNA, 19 nt, Artificial Sequence
  Description of Artificial Sequence: Synthetic oligonucleotide
  Antisense strand to SEQ ID NO: 870414
auucuuccagcgaggauuc

SEQ ID NO: 870416 - RNA, 19 nt, Artificial Sequence
  Description of Artificial Sequence: Synthetic oligonucleotide
  Sense strand starting at position 3755 of SEQ ID NO: 588510
agaguaugaguucaggguu

SEQ ID NO: 870417 - RNA, 19 nt, Artificial Sequence
  Description of Artificial Sequence: Synthetic oligonucleotide
  Antisense strand to SEQ ID NO: 870416
aacccugaacucauacucu

SEQ ID NO: 870418 - RNA, 19 nt, Artificial Sequence
  Description of Artificial Sequence: Synthetic oligonucleotide
  Sense strand starting at position 125 of SEQ ID NO: 588511
aggcaagugcuggauacau

SEQ ID NO: 870419 - RNA, 19 nt, Artificial Sequence
  Description of Artificial Sequence: Synthetic oligonucleotide
  Antisense strand to SEQ ID NO: 870418
auguauccagcacuugccu

SEQ ID NO: 870420 - RNA, 19 nt, Artificial Sequence
  Description of Artificial Sequence: Synthetic oligonucleotide
  Sense strand starting at position 144 of SEQ ID NO: 588511
ccagucuguacauacguua

SEQ ID NO: 870421 - RNA, 19 nt, Artificial Sequence
  Description of Artificial Sequence: Synthetic oligonucleotide
  Antisense strand to SEQ ID NO: 870420
uaacguauguacagacugg

SEQ ID NO: 870422 - RNA, 19 nt, Artificial Sequence
  Description of Artificial Sequence: Synthetic oligonucleotide
  Sense strand starting at position 267 of SEQ ID NO: 588511
ucaaauguucuggguguua

SEQ ID NO: 870423 - RNA, 19 nt, Artificial Sequence
  Description of Artificial Sequence: Synthetic oligonucleotide
  Antisense strand to SEQ ID NO: 870422
uaacacccagaacauuuga

SEQ ID NO: 870424 - RNA, 19 nt, Artificial Sequence
  Description of Artificial Sequence: Synthetic oligonucleotide
  Sense strand starting at position 269 of SEQ ID NO: 588511
aaauguucuggguguuaua

SEQ ID NO: 870425 - RNA, 19 nt, Artificial Sequence
  Description of Artificial Sequence: Synthetic oligonucleotide
  Antisense strand to SEQ ID NO: 870424
uauaacacccagaacauuu

SEQ ID NO: 870426 - RNA, 19 nt, Artificial Sequence
  Description of Artificial Sequence: Synthetic oligonucleotide
  Sense strand starting at position 438 of SEQ ID NO: 588511
ugacuuaguggcuguguga

SEQ ID NO: 870427 - RNA, 19 nt, Artificial Sequence
  Description of Artificial Sequence: Synthetic oligonucleotide
  Antisense strand to SEQ ID NO: 870426
ucacacagccacuaaguca

SEQ ID NO: 870428 - RNA, 19 nt, Artificial Sequence
  Description of Artificial Sequence: Synthetic oligonucleotide
  Sense strand starting at position 441 of SEQ ID NO: 588511
cuuaguggcugugugaaua

SEQ ID NO: 870429 - RNA, 19 nt, Artificial Sequence
  Description of Artificial Sequence: Synthetic oligonucleotide
  Antisense strand to SEQ ID NO: 870428
uauucacacagccacuaag

SEQ ID NO: 870430 - RNA, 19 nt, Artificial Sequence
  Description of Artificial Sequence: Synthetic oligonucleotide
  Sense strand starting at position 475 of SEQ ID NO: 588511
aaacgaauuucguauuuac

SEQ ID NO: 870431 - RNA, 19 nt, Artificial Sequence
  Description of Artificial Sequence: Synthetic oligonucleotide
  Antisense strand to SEQ ID NO: 870430
guaaauacgaaauucguuu

SEQ ID NO: 870432 - RNA, 19 nt, Artificial Sequence
  Description of Artificial Sequence: Synthetic oligonucleotide
  Sense strand starting at position 797 of SEQ ID NO: 588511
cagcaagcuuaggcagaua

SEQ ID NO: 870433 - RNA, 19 nt, Artificial Sequence
  Description of Artificial Sequence: Synthetic oligonucleotide
  Antisense strand to SEQ ID NO: 870432
uaucugccuaagcuugcug

SEQ ID NO: 870434 - RNA, 19 nt, Artificial Sequence
  Description of Artificial Sequence: Synthetic oligonucleotide
  Sense strand starting at position 865 of SEQ ID NO: 588511
gcuaacguguucucccaaa

SEQ ID NO: 870435 - RNA, 19 nt, Artificial Sequence
  Description of Artificial Sequence: Synthetic oligonucleotide
  Antisense strand to SEQ ID NO: 870434
uuugggagaacacguuagc

SEQ ID NO: 870436 - RNA, 19 nt, Artificial Sequence
  Description of Artificial Sequence: Synthetic oligonucleotide
  Sense strand starting at position 888 of SEQ ID NO: 588511
aucucuuauugcuuggaaa

SEQ ID NO: 870437 - RNA, 19 nt, Artificial Sequence
  Description of Artificial Sequence: Synthetic oligonucleotide
  Antisense strand to SEQ ID NO: 870436
uuuccaagcaauaagagau

SEQ ID NO: 870438 - RNA, 19 nt, Artificial Sequence
  Description of Artificial Sequence: Synthetic oligonucleotide
  Sense strand starting at position 889 of SEQ ID NO: 588511
ucucuuauugcuuggaaau

SEQ ID NO: 870439 - RNA, 19 nt, Artificial Sequence
  Description of Artificial Sequence: Synthetic oligonucleotide
  Antisense strand to SEQ ID NO: 870438
auuuccaagcaauaagaga

SEQ ID NO: 870440 - RNA, 19 nt, Artificial Sequence
  Description of Artificial Sequence: Synthetic oligonucleotide
  Sense strand starting at position 890 of SEQ ID NO: 588511
cucuuauugcuuggaaaua

SEQ ID NO: 870441 - RNA, 19 nt, Artificial Sequence
  Description of Artificial Sequence: Synthetic oligonucleotide
  Antisense strand to SEQ ID NO: 870440
uauuuccaagcaauaagag

SEQ ID NO: 870442 - RNA, 19 nt, Artificial Sequence
  Description of Artificial Sequence: Synthetic oligonucleotide
  Sense strand starting at position 927 of SEQ ID NO: 588511
agaaucucuggcugcuuaa

SEQ ID NO: 870443 - RNA, 19 nt, Artificial Sequence
  Description of Artificial Sequence: Synthetic oligonucleotide
  Antisense strand to SEQ ID NO: 870442
uuaagcagccagagauucu

SEQ ID NO: 870444 - RNA, 19 nt, Artificial Sequence
  Description of Artificial Sequence: Synthetic oligonucleotide
  Sense strand starting at position 985 of SEQ ID NO: 588511
aagucacguuauguguaaa

SEQ ID NO: 870445 - RNA, 19 nt, Artificial Sequence
  Description of Artificial Sequence: Synthetic oligonucleotide
  Antisense strand to SEQ ID NO: 870444
uuuacacauaacgugacuu

SEQ ID NO: 870446 - RNA, 19 nt, Artificial Sequence
  Description of Artificial Sequence: Synthetic oligonucleotide
  Sense strand starting at position 986 of SEQ ID NO: 588511
agucacguuauguguaaag

SEQ ID NO: 870447 - RNA, 19 nt, Artificial Sequence
  Description of Artificial Sequence: Synthetic oligonucleotide
  Antisense strand to SEQ ID NO: 870446
cuuuacacauaacgugacu

SEQ ID NO: 870448 - RNA, 19 nt, Artificial Sequence
  Description of Artificial Sequence: Synthetic oligonucleotide
  Sense strand starting at position 1190 of SEQ ID NO: 588511
ccuuuacugcagcgauaaa

SEQ ID NO: 870449 - RNA, 19 nt, Artificial Sequence
  Description of Artificial Sequence: Synthetic oligonucleotide
  Antisense strand to SEQ ID NO: 870448
uuuaucgcugcaguaaagg

SEQ ID NO: 870450 - RNA, 19 nt, Artificial Sequence
  Description of Artificial Sequence: Synthetic oligonucleotide
  Sense strand starting at position 1373 of SEQ ID NO: 588511
cuguuuaagugucuagaaa

SEQ ID NO: 870451 - RNA, 19 nt, Artificial Sequence
  Description of Artificial Sequence: Synthetic oligonucleotide
  Antisense strand to SEQ ID NO: 870450
uuucuagacacuuaaacag

SEQ ID NO: 870452 - RNA, 19 nt, Artificial Sequence
  Description of Artificial Sequence: Synthetic oligonucleotide
  Sense strand starting at position 1422 of SEQ ID NO: 588511
agggaauuauaagacacaa

SEQ ID NO: 870453 - RNA, 19 nt, Artificial Sequence
  Description of Artificial Sequence: Synthetic oligonucleotide
  Antisense strand to SEQ ID NO: 870452
uugugucuuauaauucccu

SEQ ID NO: 870454 - RNA, 19 nt, Artificial Sequence
  Description of Artificial Sequence: Synthetic oligonucleotide
  Sense strand starting at position 1475 of SEQ ID NO: 588511
ggugucgucuuaaagagga

SEQ ID NO: 870455 - RNA, 19 nt, Artificial Sequence
  Description of Artificial Sequence: Synthetic oligonucleotide
  Antisense strand to SEQ ID NO: 870454
uccucuuuaagacgacacc

SEQ ID NO: 870456 - RNA, 19 nt, Artificial Sequence
  Description of Artificial Sequence: Synthetic oligonucleotide
  Sense strand starting at position 1479 of SEQ ID NO: 588511
ucgucuuaaagaggaagau

SEQ ID NO: 870457 - RNA, 19 nt, Artificial Sequence
  Description of Artificial Sequence: Synthetic oligonucleotide
  Antisense strand to SEQ ID NO: 870456
aucuuccucuuuaagacga

SEQ ID NO: 870458 - RNA, 19 nt, Artificial Sequence
  Description of Artificial Sequence: Synthetic oligonucleotide
  Sense strand starting at position 2791 of SEQ ID NO: 588511
agcgaauguuucuccuaga

SEQ ID NO: 870459 - RNA, 19 nt, Artificial Sequence
  Description of Artificial Sequence: Synthetic oligonucleotide
  Antisense strand to SEQ ID NO: 870458
ucuaggagaaacauucgcu

SEQ ID NO: 870460 - RNA, 19 nt, Artificial Sequence
  Description of Artificial Sequence: Synthetic oligonucleotide
  Sense strand starting at position 2792 of SEQ ID NO: 588511
gcgaauguuucuccuagag

SEQ ID NO: 870461 - RNA, 19 nt, Artificial Sequence
  Description of Artificial Sequence: Synthetic oligonucleotide
  Antisense strand to SEQ ID NO: 870460
cucuaggagaaacauucgc

SEQ ID NO: 870462 - RNA, 19 nt, Artificial Sequence
  Description of Artificial Sequence: Synthetic oligonucleotide
  Sense strand starting at position 2798 of SEQ ID NO: 588511
guuucuccuagaggagaaa

SEQ ID NO: 870463 - RNA, 19 nt, Artificial Sequence
  Description of Artificial Sequence: Synthetic oligonucleotide
  Antisense strand to SEQ ID NO: 870462
uuucuccucuaggagaaac

SEQ ID NO: 870464 - RNA, 19 nt, Artificial Sequence
  Description of Artificial Sequence: Synthetic oligonucleotide
  Sense strand starting at position 2998 of SEQ ID NO: 588511
acuggauuguauucugaug

SEQ ID NO: 870465 - RNA, 19 nt, Artificial Sequence
  Description of Artificial Sequence: Synthetic oligonucleotide
  Antisense strand to SEQ ID NO: 870464
caucagaauacaauccagu

SEQ ID NO: 870466 - RNA, 19 nt, Artificial Sequence
  Description of Artificial Sequence: Synthetic oligonucleotide
  Sense strand starting at position 3005 of SEQ ID NO: 588511
uguauucugauggaagcga

SEQ ID NO: 870467 - RNA, 19 nt, Artificial Sequence
  Description of Artificial Sequence: Synthetic oligonucleotide
  Antisense strand to SEQ ID NO: 870466
ucgcuuccaucagaauaca

SEQ ID NO: 870468 - RNA, 19 nt, Artificial Sequence
  Description of Artificial Sequence: Synthetic oligonucleotide
  Sense strand starting at position 3009 of SEQ ID NO: 588511
uucugauggaagcgacaaa

SEQ ID NO: 870469 - RNA, 19 nt, Artificial Sequence
  Description of Artificial Sequence: Synthetic oligonucleotide
  Antisense strand to SEQ ID NO: 870468
uuugucgcuuccaucagaa

SEQ ID NO: 870470 - RNA, 19 nt, Artificial Sequence
  Description of Artificial Sequence: Synthetic oligonucleotide
  Sense strand starting at position 3040 of SEQ ID NO: 588511
gcuuuaaaugcauaaugug

SEQ ID NO: 870471 - RNA, 19 nt, Artificial Sequence
  Description of Artificial Sequence: Synthetic oligonucleotide
  Antisense strand to SEQ ID NO: 870470
cacauuaugcauuuaaagc

SEQ ID NO: 870472 - RNA, 19 nt, Artificial Sequence
  Description of Artificial Sequence: Synthetic oligonucleotide
  Sense strand starting at position 3066 of SEQ ID NO: 588511
uguaauugccacuaagaaa

SEQ ID NO: 870473 - RNA, 19 nt, Artificial Sequence
  Description of Artificial Sequence: Synthetic oligonucleotide
  Antisense strand to SEQ ID NO: 870472
uuucuuaguggcaauuaca

SEQ ID NO: 870474 - RNA, 19 nt, Artificial Sequence
  Description of Artificial Sequence: Synthetic oligonucleotide
  Sense strand starting at position 3178 of SEQ ID NO: 588511
uuccuagaauaagugacau

SEQ ID NO: 870475 - RNA, 19 nt, Artificial Sequence
  Description of Artificial Sequence: Synthetic oligonucleotide
  Antisense strand to SEQ ID NO: 870474
augucacuuauucuaggaa

SEQ ID NO: 870476 - RNA, 19 nt, Artificial Sequence
  Description of Artificial Sequence: Synthetic oligonucleotide
  Sense strand starting at position 3182 of SEQ ID NO: 588511
uagaauaagugacauuuga

SEQ ID NO: 870477 - RNA, 19 nt, Artificial Sequence
  Description of Artificial Sequence: Synthetic oligonucleotide
  Antisense strand to SEQ ID NO: 870476
ucaaaugucacuuauucua

SEQ ID NO: 870478 - RNA, 19 nt, Artificial Sequence
  Description of Artificial Sequence: Synthetic oligonucleotide
  Sense strand starting at position 3231 of SEQ ID NO: 588511
ucccaugacuaucugggaa

SEQ ID NO: 870479 - RNA, 19 nt, Artificial Sequence
  Description of Artificial Sequence: Synthetic oligonucleotide
  Antisense strand to SEQ ID NO: 870478
uucccagauagucauggga

SEQ ID NO: 870480 - RNA, 19 nt, Artificial Sequence
  Description of Artificial Sequence: Synthetic oligonucleotide
  Sense strand starting at position 3293 of SEQ ID NO: 588511
aagggaaaguguuuggcaa

SEQ ID NO: 870481 - RNA, 19 nt, Artificial Sequence
  Description of Artificial Sequence: Synthetic oligonucleotide
  Antisense strand to SEQ ID NO: 870480
uugccaaacacuuucccuu

SEQ ID NO: 870482 - RNA, 19 nt, Artificial Sequence
  Description of Artificial Sequence: Synthetic oligonucleotide
  Sense strand starting at position 3726 of SEQ ID NO: 588511
auagguaauauaugggcaa

SEQ ID NO: 870483 - RNA, 19 nt, Artificial Sequence
  Description of Artificial Sequence: Synthetic oligonucleotide
  Antisense strand to SEQ ID NO: 870482
uugcccauauauuaccuau

SEQ ID NO: 870484 - RNA, 19 nt, Artificial Sequence
  Description of Artificial Sequence: Synthetic oligonucleotide
  Sense strand starting at position 3729 of SEQ ID NO: 588511
gguaauauaugggcaaagu

SEQ ID NO: 870485 - RNA, 19 nt, Artificial Sequence
  Description of Artificial Sequence: Synthetic oligonucleotide
  Antisense strand to SEQ ID NO: 870484
acuuugcccauauauuacc

SEQ ID NO: 870486 - RNA, 19 nt, Artificial Sequence
  Description of Artificial Sequence: Synthetic oligonucleotide
  Sense strand starting at position 3730 of SEQ ID NO: 588511
guaauauaugggcaaaguu

SEQ ID NO: 870487 - RNA, 19 nt, Artificial Sequence
  Description of Artificial Sequence: Synthetic oligonucleotide
  Antisense strand to SEQ ID NO: 870486
aacuuugcccauauauuac

SEQ ID NO: 870488 - RNA, 19 nt, Artificial Sequence
  Description of Artificial Sequence: Synthetic oligonucleotide
  Sense strand starting at position 3773 of SEQ ID NO: 588511
gugacucaauggcuuagaa

SEQ ID NO: 870489 - RNA, 19 nt, Artificial Sequence
  Description of Artificial Sequence: Synthetic oligonucleotide
  Antisense strand to SEQ ID NO: 870488
uucuaagccauugagucac

SEQ ID NO: 870490 - RNA, 19 nt, Artificial Sequence
  Description of Artificial Sequence: Synthetic oligonucleotide
  Sense strand starting at position 3914 of SEQ ID NO: 588511
gcuuaacgucauggguaaa

SEQ ID NO: 870491 - RNA, 19 nt, Artificial Sequence
  Description of Artificial Sequence: Synthetic oligonucleotide
  Antisense strand to SEQ ID NO: 870490
uuuacccaugacguuaagc

SEQ ID NO: 870492 - RNA, 19 nt, Artificial Sequence
  Description of Artificial Sequence: Synthetic oligonucleotide
  Sense strand starting at position 3915 of SEQ ID NO: 588511
cuuaacgucauggguaaau

SEQ ID NO: 870493 - RNA, 19 nt, Artificial Sequence
  Description of Artificial Sequence: Synthetic oligonucleotide
  Antisense strand to SEQ ID NO: 870492
auuuacccaugacguuaag

SEQ ID NO: 870494 - RNA, 19 nt, Artificial Sequence
  Description of Artificial Sequence: Synthetic oligonucleotide
  Sense strand starting at position 3917 of SEQ ID NO: 588511
uaacgucauggguaaauga

SEQ ID NO: 870495 - RNA, 19 nt, Artificial Sequence
  Description of Artificial Sequence: Synthetic oligonucleotide
  Antisense strand to SEQ ID NO: 870494
ucauuuacccaugacguua

SEQ ID NO: 870496 - RNA, 19 nt, Artificial Sequence
  Description of Artificial Sequence: Synthetic oligonucleotide
  Sense strand starting at position 3939 of SEQ ID NO: 588511
gcaucacaacuguggaaau

SEQ ID NO: 870497 - RNA, 19 nt, Artificial Sequence
  Description of Artificial Sequence: Synthetic oligonucleotide
  Antisense strand to SEQ ID NO: 870496
auuuccacaguugugaugc

SEQ ID NO: 870498 - RNA, 19 nt, Artificial Sequence
  Description of Artificial Sequence: Synthetic oligonucleotide
  Sense strand starting at position 32 of SEQ ID NO: 588514
cugcccucuccugaguaua

SEQ ID NO: 870499 - RNA, 19 nt, Artificial Sequence
  Description of Artificial Sequence: Synthetic oligonucleotide
  Antisense strand to SEQ ID NO: 870498
uauacucaggagagggcag

SEQ ID NO: 870500 - RNA, 19 nt, Artificial Sequence
  Description of Artificial Sequence: Synthetic oligonucleotide
  Sense strand starting at position 34 of SEQ ID NO: 588514
gcccucuccugaguauaca

SEQ ID NO: 870501 - RNA, 19 nt, Artificial Sequence
  Description of Artificial Sequence: Synthetic oligonucleotide
  Antisense strand to SEQ ID NO: 870500
uguauacucaggagagggc

SEQ ID NO: 870502 - RNA, 19 nt, Artificial Sequence
  Description of Artificial Sequence: Synthetic oligonucleotide
  Sense strand starting at position 152 of SEQ ID NO: 588514
gugugaaugcugugaagaa

SEQ ID NO: 870503 - RNA, 19 nt, Artificial Sequence
  Description of Artificial Sequence: Synthetic oligonucleotide
  Antisense strand to SEQ ID NO: 870502
uucuucacagcauucacac

SEQ ID NO: 870504 - RNA, 19 nt, Artificial Sequence
  Description of Artificial Sequence: Synthetic oligonucleotide
  Sense strand starting at position 198 of SEQ ID NO: 588514
uucccaaauguuggaaaga

SEQ ID NO: 870505 - RNA, 19 nt, Artificial Sequence
  Description of Artificial Sequence: Synthetic oligonucleotide
  Antisense strand to SEQ ID NO: 870504
ucuuuccaacauuugggaa

SEQ ID NO: 870506 - RNA, 19 nt, Artificial Sequence
  Description of Artificial Sequence: Synthetic oligonucleotide
  Sense strand starting at position 290 of SEQ ID NO: 588514
auuaaauugcucuagcugu

SEQ ID NO: 870507 - RNA, 19 nt, Artificial Sequence
  Description of Artificial Sequence: Synthetic oligonucleotide
  Antisense strand to SEQ ID NO: 870506
acagcuagagcaauuuaau

SEQ ID NO: 870508 - RNA, 19 nt, Artificial Sequence
  Description of Artificial Sequence: Synthetic oligonucleotide
  Sense strand starting at position 296 of SEQ ID NO: 588514
uugcucuagcuguucgauu

SEQ ID NO: 870509 - RNA, 19 nt, Artificial Sequence
  Description of Artificial Sequence: Synthetic oligonucleotide
  Antisense strand to SEQ ID NO: 870508
aaucgaacagcuagagcaa

SEQ ID NO: 870510 - RNA, 19 nt, Artificial Sequence
  Description of Artificial Sequence: Synthetic oligonucleotide
  Sense strand starting at position 311 of SEQ ID NO: 588514
gauucuaacacguguggga

SEQ ID NO: 870511 - RNA, 19 nt, Artificial Sequence
  Description of Artificial Sequence: Synthetic oligonucleotide
  Antisense strand to SEQ ID NO: 870510
ucccacacguguuagaauc

SEQ ID NO: 870512 - RNA, 19 nt, Artificial Sequence
  Description of Artificial Sequence: Synthetic oligonucleotide
  Sense strand starting at position 329 of SEQ ID NO: 588514
aagugaauucuaugugaaa

SEQ ID NO: 870513 - RNA, 19 nt, Artificial Sequence
  Description of Artificial Sequence: Synthetic oligonucleotide
  Antisense strand to SEQ ID NO: 870512
uuucacauagaauucacuu

SEQ ID NO: 870514 - RNA, 19 nt, Artificial Sequence
  Description of Artificial Sequence: Synthetic oligonucleotide
  Sense strand starting at position 330 of SEQ ID NO: 588514
agugaauucuaugugaaag

SEQ ID NO: 870515 - RNA, 19 nt, Artificial Sequence
  Description of Artificial Sequence: Synthetic oligonucleotide
  Antisense strand to SEQ ID NO: 870514
cuuucacauagaauucacu

SEQ ID NO: 870516 - RNA, 19 nt, Artificial Sequence
  Description of Artificial Sequence: Synthetic oligonucleotide
  Sense strand starting at position 331 of SEQ ID NO: 588514
gugaauucuaugugaaaga

SEQ ID NO: 870517 - RNA, 19 nt, Artificial Sequence
  Description of Artificial Sequence: Synthetic oligonucleotide
  Antisense strand to SEQ ID NO: 870516
ucuuucacauagaauucac

SEQ ID NO: 870518 - RNA, 19 nt, Artificial Sequence
  Description of Artificial Sequence: Synthetic oligonucleotide
  Sense strand starting at position 523 of SEQ ID NO: 588514
uccaguacugucugaaauu

SEQ ID NO: 870519 - RNA, 19 nt, Artificial Sequence
  Description of Artificial Sequence: Synthetic oligonucleotide
  Antisense strand to SEQ ID NO: 870518
aauuucagacaguacugga

SEQ ID NO: 870520 - RNA, 19 nt, Artificial Sequence
  Description of Artificial Sequence: Synthetic oligonucleotide
  Sense strand starting at position 2091 of SEQ ID NO: 588514
acacguggcaaguaguuau

SEQ ID NO: 870521 - RNA, 19 nt, Artificial Sequence
  Description of Artificial Sequence: Synthetic oligonucleotide
  Antisense strand to SEQ ID NO: 870520
auaacuacuugccacgugu

SEQ ID NO: 870522 - RNA, 19 nt, Artificial Sequence
  Description of Artificial Sequence: Synthetic oligonucleotide
  Sense strand starting at position 2095 of SEQ ID NO: 588514
guggcaaguaguuauccuu

SEQ ID NO: 870523 - RNA, 19 nt, Artificial Sequence
  Description of Artificial Sequence: Synthetic oligonucleotide
  Antisense strand to SEQ ID NO: 870522
aaggauaacuacuugccac

SEQ ID NO: 870524 - RNA, 19 nt, Artificial Sequence
  Description of Artificial Sequence: Synthetic oligonucleotide
  Sense strand starting at position 2098 of SEQ ID NO: 588514
gcaaguaguuauccuuuau

SEQ ID NO: 870525 - RNA, 19 nt, Artificial Sequence
  Description of Artificial Sequence: Synthetic oligonucleotide
  Antisense strand to SEQ ID NO: 870524
auaaaggauaacuacuugc

SEQ ID NO: 870526 - RNA, 19 nt, Artificial Sequence
  Description of Artificial Sequence: Synthetic oligonucleotide
  Sense strand starting at position 2102 of SEQ ID NO: 588514
guaguuauccuuuaucauu

SEQ ID NO: 870527 - RNA, 19 nt, Artificial Sequence
  Description of Artificial Sequence: Synthetic oligonucleotide
  Antisense strand to SEQ ID NO: 870526
aaugauaaaggauaacuac

SEQ ID NO: 870528 - RNA, 19 nt, Artificial Sequence
  Description of Artificial Sequence: Synthetic oligonucleotide
  Sense strand starting at position 2132 of SEQ ID NO: 588514
agccuuugccacugaugaa

SEQ ID NO: 870529 - RNA, 19 nt, Artificial Sequence
  Description of Artificial Sequence: Synthetic oligonucleotide
  Antisense strand to SEQ ID NO: 870528
uucaucaguggcaaaggcu

SEQ ID NO: 870530 - RNA, 19 nt, Artificial Sequence
  Description of Artificial Sequence: Synthetic oligonucleotide
  Sense strand starting at position 2201 of SEQ ID NO: 588514
aguaguacaugcuuguaaa

SEQ ID NO: 870531 - RNA, 19 nt, Artificial Sequence
  Description of Artificial Sequence: Synthetic oligonucleotide
  Antisense strand to SEQ ID NO: 870530
uuuacaagcauguacuacu

SEQ ID NO: 870532 - RNA, 19 nt, Artificial Sequence
  Description of Artificial Sequence: Synthetic oligonucleotide
  Sense strand starting at position 2295 of SEQ ID NO: 588514
aguggcaagcguuaauauu

SEQ ID NO: 870533 - RNA, 19 nt, Artificial Sequence
  Description of Artificial Sequence: Synthetic oligonucleotide
  Antisense strand to SEQ ID NO: 870532
aauauuaacgcuugccacu

SEQ ID NO: 870534 - RNA, 19 nt, Artificial Sequence
  Description of Artificial Sequence: Synthetic oligonucleotide
  Sense strand starting at position 2438 of SEQ ID NO: 588514
cugguccaucuuuaguuau

SEQ ID NO: 870535 - RNA, 19 nt, Artificial Sequence
  Description of Artificial Sequence: Synthetic oligonucleotide
  Antisense strand to SEQ ID NO: 870534
auaacuaaagauggaccag

SEQ ID NO: 870536 - RNA, 19 nt, Artificial Sequence
  Description of Artificial Sequence: Synthetic oligonucleotide
  Sense strand starting at position 2440 of SEQ ID NO: 588514
gguccaucuuuaguuauuu

SEQ ID NO: 870537 - RNA, 19 nt, Artificial Sequence
  Description of Artificial Sequence: Synthetic oligonucleotide
  Antisense strand to SEQ ID NO: 870536
aaauaacuaaagauggacc

SEQ ID NO: 870538 - RNA, 19 nt, Artificial Sequence
  Description of Artificial Sequence: Synthetic oligonucleotide
  Sense strand starting at position 2489 of SEQ ID NO: 588514
gcauguaucacguuguauu

SEQ ID NO: 870539 - RNA, 19 nt, Artificial Sequence
  Description of Artificial Sequence: Synthetic oligonucleotide
  Antisense strand to SEQ ID NO: 870538
aauacaacgugauacaugc

SEQ ID NO: 870540 - RNA, 19 nt, Artificial Sequence
  Description of Artificial Sequence: Synthetic oligonucleotide
  Sense strand starting at position 2512 of SEQ ID NO: 588514
ccaaaugaacuuuggacuu

SEQ ID NO: 870541 - RNA, 19 nt, Artificial Sequence
  Description of Artificial Sequence: Synthetic oligonucleotide
  Antisense strand to SEQ ID NO: 870540
aaguccaaaguucauuugg

SEQ ID NO: 870542 - RNA, 19 nt, Artificial Sequence
  Description of Artificial Sequence: Synthetic oligonucleotide
  Sense strand starting at position 2522 of SEQ ID NO: 588514
uuuggacuucugggaauca

SEQ ID NO: 870543 - RNA, 19 nt, Artificial Sequence
  Description of Artificial Sequence: Synthetic oligonucleotide
  Antisense strand to SEQ ID NO: 870542
ugauucccagaaguccaaa

SEQ ID NO: 870544 - RNA, 19 nt, Artificial Sequence
  Description of Artificial Sequence: Synthetic oligonucleotide
  Sense strand starting at position 2561 of SEQ ID NO: 588514
aaguuaggcuugcuuauuu

SEQ ID NO: 870545 - RNA, 19 nt, Artificial Sequence
  Description of Artificial Sequence: Synthetic oligonucleotide
  Antisense strand to SEQ ID NO: 870544
aaauaagcaagccuaacuu

SEQ ID NO: 870546 - RNA, 19 nt, Artificial Sequence
  Description of Artificial Sequence: Synthetic oligonucleotide
  Sense strand starting at position 2566 of SEQ ID NO: 588514
aggcuugcuuauuuccuaa

SEQ ID NO: 870547 - RNA, 19 nt, Artificial Sequence
  Description of Artificial Sequence: Synthetic oligonucleotide
  Antisense strand to SEQ ID NO: 870546
uuaggaaauaagcaagccu

SEQ ID NO: 870548 - RNA, 19 nt, Artificial Sequence
  Description of Artificial Sequence: Synthetic oligonucleotide
  Sense strand starting at position 2752 of SEQ ID NO: 588514
uuucuaguguauguuuaca

SEQ ID NO: 870549 - RNA, 19 nt, Artificial Sequence
  Description of Artificial Sequence: Synthetic oligonucleotide
  Antisense strand to SEQ ID NO: 870548
uguaaacauacacuagaaa

SEQ ID NO: 870550 - RNA, 19 nt, Artificial Sequence
  Description of Artificial Sequence: Synthetic oligonucleotide
  Sense strand starting at position 2754 of SEQ ID NO: 588514
ucuaguguauguuuacaua

SEQ ID NO: 870551 - RNA, 19 nt, Artificial Sequence
  Description of Artificial Sequence: Synthetic oligonucleotide
  Antisense strand to SEQ ID NO: 870550
uauguaaacauacacuaga

SEQ ID NO: 870552 - RNA, 19 nt, Artificial Sequence
  Description of Artificial Sequence: Synthetic oligonucleotide
  Sense strand starting at position 3290 of SEQ ID NO: 588514
ucugacaacguuuacugaa

SEQ ID NO: 870553 - RNA, 19 nt, Artificial Sequence
  Description of Artificial Sequence: Synthetic oligonucleotide
  Antisense strand to SEQ ID NO: 870552
uucaguaaacguugucaga

SEQ ID NO: 870554 - RNA, 19 nt, Artificial Sequence
  Description of Artificial Sequence: Synthetic oligonucleotide
  Sense strand starting at position 3297 of SEQ ID NO: 588514
acguuuacugaaggaauaa

SEQ ID NO: 870555 - RNA, 19 nt, Artificial Sequence
  Description of Artificial Sequence: Synthetic oligonucleotide
  Antisense strand to SEQ ID NO: 870554
uuauuccuucaguaaacgu

SEQ ID NO: 870556 - RNA, 19 nt, Artificial Sequence
  Description of Artificial Sequence: Synthetic oligonucleotide
  Sense strand starting at position 3338 of SEQ ID NO: 588514
auaauaaacuugcuagagu

SEQ ID NO: 870557 - RNA, 19 nt, Artificial Sequence
  Description of Artificial Sequence: Synthetic oligonucleotide
  Antisense strand to SEQ ID NO: 870556
acucuagcaaguuuauuau

SEQ ID NO: 870558 - RNA, 19 nt, Artificial Sequence
  Description of Artificial Sequence: Synthetic oligonucleotide
  Sense strand starting at position 3594 of SEQ ID NO: 588514
gugccuggccaacagaaua

SEQ ID NO: 870559 - RNA, 19 nt, Artificial Sequence
  Description of Artificial Sequence: Synthetic oligonucleotide
  Antisense strand to SEQ ID NO: 870558
uauucuguuggccaggcac

SEQ ID NO: 870560 - RNA, 19 nt, Artificial Sequence
  Description of Artificial Sequence: Synthetic oligonucleotide
  Sense strand starting at position 3650 of SEQ ID NO: 588514
gacagaaguuguucguuaa

SEQ ID NO: 870561 - RNA, 19 nt, Artificial Sequence
  Description of Artificial Sequence: Synthetic oligonucleotide
  Antisense strand to SEQ ID NO: 870560
uuaacgaacaacuucuguc

SEQ ID NO: 870562 - RNA, 19 nt, Artificial Sequence
  Description of Artificial Sequence: Synthetic oligonucleotide
  Sense strand starting at position 3651 of SEQ ID NO: 588514
acagaaguuguucguuaaa

SEQ ID NO: 870563 - RNA, 19 nt, Artificial Sequence
  Description of Artificial Sequence: Synthetic oligonucleotide
  Antisense strand to SEQ ID NO: 870562
uuuaacgaacaacuucugu

SEQ ID NO: 870564 - RNA, 19 nt, Artificial Sequence
  Description of Artificial Sequence: Synthetic oligonucleotide
  Sense strand starting at position 3653 of SEQ ID NO: 588514
agaaguuguucguuaaaua

SEQ ID NO: 870565 - RNA, 19 nt, Artificial Sequence
  Description of Artificial Sequence: Synthetic oligonucleotide
  Antisense strand to SEQ ID NO: 870564
uauuuaacgaacaacuucu

SEQ ID NO: 870566 - RNA, 19 nt, Artificial Sequence
  Description of Artificial Sequence: Synthetic oligonucleotide
  Sense strand starting at position 3654 of SEQ ID NO: 588514
gaaguuguucguuaaauau

SEQ ID NO: 870567 - RNA, 19 nt, Artificial Sequence
  Description of Artificial Sequence: Synthetic oligonucleotide
  Antisense strand to SEQ ID NO: 870566
auauuuaacgaacaacuuc

SEQ ID NO: 870568 - RNA, 19 nt, Artificial Sequence
  Description of Artificial Sequence: Synthetic oligonucleotide
  Sense strand starting at position 3682 of SEQ ID NO: 588514
ggacauuucuuccaugaua

SEQ ID NO: 870569 - RNA, 19 nt, Artificial Sequence
  Description of Artificial Sequence: Synthetic oligonucleotide
  Antisense strand to SEQ ID NO: 870568
uaucauggaagaaaugucc

SEQ ID NO: 870570 - RNA, 19 nt, Artificial Sequence
  Description of Artificial Sequence: Synthetic oligonucleotide
  Sense strand starting at position 3708 of SEQ ID NO: 588514
aguuguuaucuuuagguug

SEQ ID NO: 870571 - RNA, 19 nt, Artificial Sequence
  Description of Artificial Sequence: Synthetic oligonucleotide
  Antisense strand to SEQ ID NO: 870570
caaccuaaagauaacaacu

SEQ ID NO: 870572 - RNA, 19 nt, Artificial Sequence
  Description of Artificial Sequence: Synthetic oligonucleotide
  Sense strand starting at position 3713 of SEQ ID NO: 588514
uuaucuuuagguuguggaa

SEQ ID NO: 870573 - RNA, 19 nt, Artificial Sequence
  Description of Artificial Sequence: Synthetic oligonucleotide
  Antisense strand to SEQ ID NO: 870572
uuccacaaccuaaagauaa

SEQ ID NO: 870574 - RNA, 19 nt, Artificial Sequence
  Description of Artificial Sequence: Synthetic oligonucleotide
  Sense strand starting at position 3929 of SEQ ID NO: 588514
ugggaacuauagguaugua

SEQ ID NO: 870575 - RNA, 19 nt, Artificial Sequence
  Description of Artificial Sequence: Synthetic oligonucleotide
  Antisense strand to SEQ ID NO: 870574
uacauaccuauaguuccca

SEQ ID NO: 870576 - RNA, 19 nt, Artificial Sequence
  Description of Artificial Sequence: Synthetic oligonucleotide
  Sense strand starting at position 3932 of SEQ ID NO: 588514
gaacuauagguauguagca

SEQ ID NO: 870577 - RNA, 19 nt, Artificial Sequence
  Description of Artificial Sequence: Synthetic oligonucleotide
  Antisense strand to SEQ ID NO: 870576
ugcuacauaccuauaguuc

SEQ ID NO: 870578 - RNA, 19 nt, Artificial Sequence
  Description of Artificial Sequence: Synthetic oligonucleotide
  Sense strand starting at position 81 of SEQ ID NO: 588515
gaagguucuucuuucugca

SEQ ID NO: 870579 - RNA, 19 nt, Artificial Sequence
  Description of Artificial Sequence: Synthetic oligonucleotide
  Antisense strand to SEQ ID NO: 870578
ugcagaaagaagaaccuuc

SEQ ID NO: 870580 - RNA, 19 nt, Artificial Sequence
  Description of Artificial Sequence: Synthetic oligonucleotide
  Sense strand starting at position 251 of SEQ ID NO: 588515
cagggaaucucuguugcaa

SEQ ID NO: 870581 - RNA, 19 nt, Artificial Sequence
  Description of Artificial Sequence: Synthetic oligonucleotide
  Antisense strand to SEQ ID NO: 870580
uugcaacagagauucccug

SEQ ID NO: 870582 - RNA, 19 nt, Artificial Sequence
  Description of Artificial Sequence: Synthetic oligonucleotide
  Sense strand starting at position 362 of SEQ ID NO: 588515
ggaugaggccuggagcuaa

SEQ ID NO: 870583 - RNA, 19 nt, Artificial Sequence
  Description of Artificial Sequence: Synthetic oligonucleotide
  Antisense strand to SEQ ID NO: 870582
uuagcuccaggccucaucc

SEQ ID NO: 870584 - RNA, 19 nt, Artificial Sequence
  Description of Artificial Sequence: Synthetic oligonucleotide
  Sense strand starting at position 584 of SEQ ID NO: 588515
cggauagucccucagagca

SEQ ID NO: 870585 - RNA, 19 nt, Artificial Sequence
  Description of Artificial Sequence: Synthetic oligonucleotide
  Antisense strand to SEQ ID NO: 870584
ugcucugagggacuauccg

SEQ ID NO: 870586 - RNA, 19 nt, Artificial Sequence
  Description of Artificial Sequence: Synthetic oligonucleotide
  Sense strand starting at position 722 of SEQ ID NO: 588515
gccucuugauucugggaac

SEQ ID NO: 870587 - RNA, 19 nt, Artificial Sequence
  Description of Artificial Sequence: Synthetic oligonucleotide
  Antisense strand to SEQ ID NO: 870586
guucccagaaucaagaggc

SEQ ID NO: 870588 - RNA, 19 nt, Artificial Sequence
  Description of Artificial Sequence: Synthetic oligonucleotide
  Sense strand starting at position 725 of SEQ ID NO: 588515
ucuugauucugggaaccuc

SEQ ID NO: 870589 - RNA, 19 nt, Artificial Sequence
  Description of Artificial Sequence: Synthetic oligonucleotide
  Antisense strand to SEQ ID NO: 870588
gagguucccagaaucaaga

SEQ ID NO: 870590 - RNA, 19 nt, Artificial Sequence
  Description of Artificial Sequence: Synthetic oligonucleotide
  Sense strand starting at position 1333 of SEQ ID NO: 588515
ggacucuuccuuggaaggu

SEQ ID NO: 870591 - RNA, 19 nt, Artificial Sequence
  Description of Artificial Sequence: Synthetic oligonucleotide
  Antisense strand to SEQ ID NO: 870590
accuuccaaggaagagucc

SEQ ID NO: 870592 - RNA, 19 nt, Artificial Sequence
  Description of Artificial Sequence: Synthetic oligonucleotide
  Sense strand starting at position 1343 of SEQ ID NO: 588515
uuggaagguugcucuggaa

SEQ ID NO: 870593 - RNA, 19 nt, Artificial Sequence
  Description of Artificial Sequence: Synthetic oligonucleotide
  Antisense strand to SEQ ID NO: 870592
uuccagagcaaccuuccaa

SEQ ID NO: 870594 - RNA, 19 nt, Artificial Sequence
  Description of Artificial Sequence: Synthetic oligonucleotide
  Sense strand starting at position 1346 of SEQ ID NO: 588515
gaagguugcucuggaaacc

SEQ ID NO: 870595 - RNA, 19 nt, Artificial Sequence
  Description of Artificial Sequence: Synthetic oligonucleotide
  Antisense strand to SEQ ID NO: 870594
gguuuccagagcaaccuuc

SEQ ID NO: 870596 - RNA, 19 nt, Artificial Sequence
  Description of Artificial Sequence: Synthetic oligonucleotide
  Sense strand starting at position 1703 of SEQ ID NO: 588515
guuggauggcccugggaau

SEQ ID NO: 870597 - RNA, 19 nt, Artificial Sequence
  Description of Artificial Sequence: Synthetic oligonucleotide
  Antisense strand to SEQ ID NO: 870596
auucccagggccauccaac

SEQ ID NO: 870598 - RNA, 19 nt, Artificial Sequence
  Description of Artificial Sequence: Synthetic oligonucleotide
  Sense strand starting at position 2211 of SEQ ID NO: 588515
ggguucgucaauggcuaga

SEQ ID NO: 870599 - RNA, 19 nt, Artificial Sequence
  Description of Artificial Sequence: Synthetic oligonucleotide
  Antisense strand to SEQ ID NO: 870598
ucuagccauugacgaaccc

SEQ ID NO: 870600 - RNA, 19 nt, Artificial Sequence
  Description of Artificial Sequence: Synthetic oligonucleotide
  Sense strand starting at position 2213 of SEQ ID NO: 588515
guucgucaauggcuagaaa

SEQ ID NO: 870601 - RNA, 19 nt, Artificial Sequence
  Description of Artificial Sequence: Synthetic oligonucleotide
  Antisense strand to SEQ ID NO: 870600
uuucuagccauugacgaac

SEQ ID NO: 870602 - RNA, 19 nt, Artificial Sequence
  Description of Artificial Sequence: Synthetic oligonucleotide
  Sense strand starting at position 2395 of SEQ ID NO: 588515
gcugcucugccguggucaa

SEQ ID NO: 870603 - RNA, 19 nt, Artificial Sequence
  Description of Artificial Sequence: Synthetic oligonucleotide
  Antisense strand to SEQ ID NO: 870602
uugaccacggcagagcagc

SEQ ID NO: 870604 - RNA, 19 nt, Artificial Sequence
  Description of Artificial Sequence: Synthetic oligonucleotide
  Sense strand starting at position 2406 of SEQ ID NO: 588515
guggucaacacuggucauu

SEQ ID NO: 870605 - RNA, 19 nt, Artificial Sequence
  Description of Artificial Sequence: Synthetic oligonucleotide
  Antisense strand to SEQ ID NO: 870604
aaugaccaguguugaccac

SEQ ID NO: 870606 - RNA, 19 nt, Artificial Sequence
  Description of Artificial Sequence: Synthetic oligonucleotide
  Sense strand starting at position 2408 of SEQ ID NO: 588515
ggucaacacuggucauuga

SEQ ID NO: 870607 - RNA, 19 nt, Artificial Sequence
  Description of Artificial Sequence: Synthetic oligonucleotide
  Antisense strand to SEQ ID NO: 870606
ucaaugaccaguguugacc

SEQ ID NO: 870608 - RNA, 19 nt, Artificial Sequence
  Description of Artificial Sequence: Synthetic oligonucleotide
  Sense strand starting at position 2409 of SEQ ID NO: 588515
gucaacacuggucauugaa

SEQ ID NO: 870609 - RNA, 19 nt, Artificial Sequence
  Description of Artificial Sequence: Synthetic oligonucleotide
  Antisense strand to SEQ ID NO: 870608
uucaaugaccaguguugac

SEQ ID NO: 870610 - RNA, 19 nt, Artificial Sequence
  Description of Artificial Sequence: Synthetic oligonucleotide
  Sense strand starting at position 2677 of SEQ ID NO: 588515
acgugcucacacuguuaca

SEQ ID NO: 870611 - RNA, 19 nt, Artificial Sequence
  Description of Artificial Sequence: Synthetic oligonucleotide
  Antisense strand to SEQ ID NO: 870610
uguaacagugugagcacgu

SEQ ID NO: 870612 - RNA, 19 nt, Artificial Sequence
  Description of Artificial Sequence: Synthetic oligonucleotide
  Sense strand starting at position 2719 of SEQ ID NO: 588515
cacacagagcucuggagaa

SEQ ID NO: 870613 - RNA, 19 nt, Artificial Sequence
  Description of Artificial Sequence: Synthetic oligonucleotide
  Antisense strand to SEQ ID NO: 870612
uucuccagagcucugugug

SEQ ID NO: 870614 - RNA, 19 nt, Artificial Sequence
  Description of Artificial Sequence: Synthetic oligonucleotide
  Sense strand starting at position 2752 of SEQ ID NO: 588515
cccagagcuuuguugguuu

SEQ ID NO: 870615 - RNA, 19 nt, Artificial Sequence
  Description of Artificial Sequence: Synthetic oligonucleotide
  Antisense strand to SEQ ID NO: 870614
aaaccaacaaagcucuggg

SEQ ID NO: 870616 - RNA, 19 nt, Artificial Sequence
  Description of Artificial Sequence: Synthetic oligonucleotide
  Sense strand starting at position 2907 of SEQ ID NO: 588515
ccuguuucuccaggaggca

SEQ ID NO: 870617 - RNA, 19 nt, Artificial Sequence
  Description of Artificial Sequence: Synthetic oligonucleotide
  Antisense strand to SEQ ID NO: 870616
ugccuccuggagaaacagg

SEQ ID NO: 870618 - RNA, 19 nt, Artificial Sequence
  Description of Artificial Sequence: Synthetic oligonucleotide
  Sense strand starting at position 3052 of SEQ ID NO: 588515
uuccucaggucccuagauu

SEQ ID NO: 870619 - RNA, 19 nt, Artificial Sequence
  Description of Artificial Sequence: Synthetic oligonucleotide
  Antisense strand to SEQ ID NO: 870618
aaucuagggaccugaggaa

SEQ ID NO: 870620 - RNA, 19 nt, Artificial Sequence
  Description of Artificial Sequence: Synthetic oligonucleotide
  Sense strand starting at position 3188 of SEQ ID NO: 588515
ccaucugcaucugugauua

SEQ ID NO: 870621 - RNA, 19 nt, Artificial Sequence
  Description of Artificial Sequence: Synthetic oligonucleotide
  Antisense strand to SEQ ID NO: 870620
uaaucacagaugcagaugg

SEQ ID NO: 870622 - RNA, 19 nt, Artificial Sequence
  Description of Artificial Sequence: Synthetic oligonucleotide
  Sense strand starting at position 3190 of SEQ ID NO: 588515
aucugcaucugugauuaau

SEQ ID NO: 870623 - RNA, 19 nt, Artificial Sequence
  Description of Artificial Sequence: Synthetic oligonucleotide
  Antisense strand to SEQ ID NO: 870622
auuaaucacagaugcagau

SEQ ID NO: 870624 - RNA, 19 nt, Artificial Sequence
  Description of Artificial Sequence: Synthetic oligonucleotide
  Sense strand starting at position 3192 of SEQ ID NO: 588515
cugcaucugugauuaauua

SEQ ID NO: 870625 - RNA, 19 nt, Artificial Sequence
  Description of Artificial Sequence: Synthetic oligonucleotide
  Antisense strand to SEQ ID NO: 870624
uaauuaaucacagaugcag

SEQ ID NO: 870626 - RNA, 19 nt, Artificial Sequence
  Description of Artificial Sequence: Synthetic oligonucleotide
  Sense strand starting at position 3193 of SEQ ID NO: 588515
ugcaucugugauuaauuag

SEQ ID NO: 870627 - RNA, 19 nt, Artificial Sequence
  Description of Artificial Sequence: Synthetic oligonucleotide
  Antisense strand to SEQ ID NO: 870626
cuaauuaaucacagaugca

SEQ ID NO: 870628 - RNA, 19 nt, Artificial Sequence
  Description of Artificial Sequence: Synthetic oligonucleotide
  Sense strand starting at position 3199 of SEQ ID NO: 588515
ugugauuaauuagcaguaa

SEQ ID NO: 870629 - RNA, 19 nt, Artificial Sequence
  Description of Artificial Sequence: Synthetic oligonucleotide
  Antisense strand to SEQ ID NO: 870628
uuacugcuaauuaaucaca

SEQ ID NO: 870630 - RNA, 19 nt, Artificial Sequence
  Description of Artificial Sequence: Synthetic oligonucleotide
  Sense strand starting at position 3200 of SEQ ID NO: 588515
gugauuaauuagcaguaau

SEQ ID NO: 870631 - RNA, 19 nt, Artificial Sequence
  Description of Artificial Sequence: Synthetic oligonucleotide
  Antisense strand to SEQ ID NO: 870630
auuacugcuaauuaaucac

SEQ ID NO: 870632 - RNA, 19 nt, Artificial Sequence
  Description of Artificial Sequence: Synthetic oligonucleotide
  Sense strand starting at position 3211 of SEQ ID NO: 588515
gcaguaauuacacguguug

SEQ ID NO: 870633 - RNA, 19 nt, Artificial Sequence
  Description of Artificial Sequence: Synthetic oligonucleotide
  Antisense strand to SEQ ID NO: 870632
caacacguguaauuacugc

SEQ ID NO: 870634 - RNA, 19 nt, Artificial Sequence
  Description of Artificial Sequence: Synthetic oligonucleotide
  Sense strand starting at position 3213 of SEQ ID NO: 588515
aguaauuacacguguuguc

SEQ ID NO: 870635 - RNA, 19 nt, Artificial Sequence
  Description of Artificial Sequence: Synthetic oligonucleotide
  Antisense strand to SEQ ID NO: 870634
gacaacacguguaauuacu

SEQ ID NO: 870636 - RNA, 19 nt, Artificial Sequence
  Description of Artificial Sequence: Synthetic oligonucleotide
  Sense strand starting at position 3236 of SEQ ID NO: 588515
gcaggagagucacagguuu

SEQ ID NO: 870637 - RNA, 19 nt, Artificial Sequence
  Description of Artificial Sequence: Synthetic oligonucleotide
  Antisense strand to SEQ ID NO: 870636
aaaccugugacucuccugc

SEQ ID NO: 870638 - RNA, 19 nt, Artificial Sequence
  Description of Artificial Sequence: Synthetic oligonucleotide
  Sense strand starting at position 3238 of SEQ ID NO: 588515
aggagagucacagguuuga

SEQ ID NO: 870639 - RNA, 19 nt, Artificial Sequence
  Description of Artificial Sequence: Synthetic oligonucleotide
  Antisense strand to SEQ ID NO: 870638
ucaaaccugugacucuccu

SEQ ID NO: 870640 - RNA, 19 nt, Artificial Sequence
  Description of Artificial Sequence: Synthetic oligonucleotide
  Sense strand starting at position 3256 of SEQ ID NO: 588515
augacauuccgagggcuuu

SEQ ID NO: 870641 - RNA, 19 nt, Artificial Sequence
  Description of Artificial Sequence: Synthetic oligonucleotide
  Antisense strand to SEQ ID NO: 870640
aaagcccucggaaugucau

SEQ ID NO: 870642 - RNA, 19 nt, Artificial Sequence
  Description of Artificial Sequence: Synthetic oligonucleotide
  Sense strand starting at position 3257 of SEQ ID NO: 588515
ugacauuccgagggcuuua

SEQ ID NO: 870643 - RNA, 19 nt, Artificial Sequence
  Description of Artificial Sequence: Synthetic oligonucleotide
  Antisense strand to SEQ ID NO: 870642
uaaagcccucggaauguca

SEQ ID NO: 870644 - RNA, 19 nt, Artificial Sequence
  Description of Artificial Sequence: Synthetic oligonucleotide
  Sense strand starting at position 3556 of SEQ ID NO: 588515
gcgccuucuccacaggaga

SEQ ID NO: 870645 - RNA, 19 nt, Artificial Sequence
  Description of Artificial Sequence: Synthetic oligonucleotide
  Antisense strand to SEQ ID NO: 870644
ucuccuguggagaaggcgc

SEQ ID NO: 870646 - RNA, 19 nt, Artificial Sequence
  Description of Artificial Sequence: Synthetic oligonucleotide
  Sense strand starting at position 3773 of SEQ ID NO: 588515
ccgcaaccuccgugaaaga

SEQ ID NO: 870647 - RNA, 19 nt, Artificial Sequence
  Description of Artificial Sequence: Synthetic oligonucleotide
  Antisense strand to SEQ ID NO: 870646
ucuuucacggagguugcgg

SEQ ID NO: 870648 - RNA, 19 nt, Artificial Sequence
  Description of Artificial Sequence: Synthetic oligonucleotide
  Sense strand starting at position 3910 of SEQ ID NO: 588515
gccggagcuuucugaauuu

SEQ ID NO: 870649 - RNA, 19 nt, Artificial Sequence
  Description of Artificial Sequence: Synthetic oligonucleotide
  Antisense strand to SEQ ID NO: 870648
aaauucagaaagcuccggc

SEQ ID NO: 870650 - RNA, 19 nt, Artificial Sequence
  Description of Artificial Sequence: Synthetic oligonucleotide
  Sense strand starting at position 3954 of SEQ ID NO: 588515
gcagaaaccuguugagagu

SEQ ID NO: 870651 - RNA, 19 nt, Artificial Sequence
  Description of Artificial Sequence: Synthetic oligonucleotide
  Antisense strand to SEQ ID NO: 870650
acucucaacagguuucugc

SEQ ID NO: 870652 - RNA, 19 nt, Artificial Sequence
  Description of Artificial Sequence: Synthetic oligonucleotide
  Sense strand starting at position 94 of SEQ ID NO: 588516
gagauaagcuuugucagga

SEQ ID NO: 870653 - RNA, 19 nt, Artificial Sequence
  Description of Artificial Sequence: Synthetic oligonucleotide
  Antisense strand to SEQ ID NO: 870652
uccugacaaagcuuaucuc

SEQ ID NO: 870654 - RNA, 19 nt, Artificial Sequence
  Description of Artificial Sequence: Synthetic oligonucleotide
  Sense strand starting at position 95 of SEQ ID NO: 588516
agauaagcuuugucaggac

SEQ ID NO: 870655 - RNA, 19 nt, Artificial Sequence
  Description of Artificial Sequence: Synthetic oligonucleotide
  Antisense strand to SEQ ID NO: 870654
guccugacaaagcuuaucu

SEQ ID NO: 870656 - RNA, 19 nt, Artificial Sequence
  Description of Artificial Sequence: Synthetic oligonucleotide
  Sense strand starting at position 203 of SEQ ID NO: 588516
uuuggagauuucuacgacu

SEQ ID NO: 870657 - RNA, 19 nt, Artificial Sequence
  Description of Artificial Sequence: Synthetic oligonucleotide
  Antisense strand to SEQ ID NO: 870656
agucguagaaaucuccaaa

SEQ ID NO: 870658 - RNA, 19 nt, Artificial Sequence
  Description of Artificial Sequence: Synthetic oligonucleotide
  Sense strand starting at position 206 of SEQ ID NO: 588516
ggagauuucuacgacuaag

SEQ ID NO: 870659 - RNA, 19 nt, Artificial Sequence
  Description of Artificial Sequence: Synthetic oligonucleotide
  Antisense strand to SEQ ID NO: 870658
cuuagucguagaaaucucc

SEQ ID NO: 870660 - RNA, 19 nt, Artificial Sequence
  Description of Artificial Sequence: Synthetic oligonucleotide
  Sense strand starting at position 240 of SEQ ID NO: 588516
uacugaucugcugaguucu

SEQ ID NO: 870661 - RNA, 19 nt, Artificial Sequence
  Description of Artificial Sequence: Synthetic oligonucleotide
  Antisense strand to SEQ ID NO: 870660
agaacucagcagaucagua

SEQ ID NO: 870662 - RNA, 19 nt, Artificial Sequence
  Description of Artificial Sequence: Synthetic oligonucleotide
  Sense strand starting at position 2005 of SEQ ID NO: 588516
uguugacugcucuaaucuu

SEQ ID NO: 870663 - RNA, 19 nt, Artificial Sequence
  Description of Artificial Sequence: Synthetic oligonucleotide
  Antisense strand to SEQ ID NO: 870662
aagauuagagcagucaaca

SEQ ID NO: 870664 - RNA, 19 nt, Artificial Sequence
  Description of Artificial Sequence: Synthetic oligonucleotide
  Sense strand starting at position 2013 of SEQ ID NO: 588516
gcucuaaucuugcugauuu

SEQ ID NO: 870665 - RNA, 19 nt, Artificial Sequence
  Description of Artificial Sequence: Synthetic oligonucleotide
  Antisense strand to SEQ ID NO: 870664
aaaucagcaagauuagagc

SEQ ID NO: 870666 - RNA, 19 nt, Artificial Sequence
  Description of Artificial Sequence: Synthetic oligonucleotide
  Sense strand starting at position 2112 of SEQ ID NO: 588516
augauuauguggucuuaaa

SEQ ID NO: 870667 - RNA, 19 nt, Artificial Sequence
  Description of Artificial Sequence: Synthetic oligonucleotide
  Antisense strand to SEQ ID NO: 870666
uuuaagaccacauaaucau

SEQ ID NO: 870668 - RNA, 19 nt, Artificial Sequence
  Description of Artificial Sequence: Synthetic oligonucleotide
  Sense strand starting at position 2122 of SEQ ID NO: 588516
ggucuuaaaucucuaggua

SEQ ID NO: 870669 - RNA, 19 nt, Artificial Sequence
  Description of Artificial Sequence: Synthetic oligonucleotide
  Antisense strand to SEQ ID NO: 870668
uaccuagagauuuaagacc

SEQ ID NO: 870670 - RNA, 19 nt, Artificial Sequence
  Description of Artificial Sequence: Synthetic oligonucleotide
  Sense strand starting at position 2123 of SEQ ID NO: 588516
gucuuaaaucucuagguaa

SEQ ID NO: 870671 - RNA, 19 nt, Artificial Sequence
  Description of Artificial Sequence: Synthetic oligonucleotide
  Antisense strand to SEQ ID NO: 870670
uuaccuagagauuuaagac

SEQ ID NO: 870672 - RNA, 19 nt, Artificial Sequence
  Description of Artificial Sequence: Synthetic oligonucleotide
  Sense strand starting at position 2193 of SEQ ID NO: 588516
uuaggaagcgcucagugua

SEQ ID NO: 870673 - RNA, 19 nt, Artificial Sequence
  Description of Artificial Sequence: Synthetic oligonucleotide
  Antisense strand to SEQ ID NO: 870672
uacacugagcgcuuccuaa

SEQ ID NO: 870674 - RNA, 19 nt, Artificial Sequence
  Description of Artificial Sequence: Synthetic oligonucleotide
  Sense strand starting at position 2205 of SEQ ID NO: 588516
caguguaugugugcugaga

SEQ ID NO: 870675 - RNA, 19 nt, Artificial Sequence
  Description of Artificial Sequence: Synthetic oligonucleotide
  Antisense strand to SEQ ID NO: 870674
ucucagcacacauacacug

SEQ ID NO: 870676 - RNA, 19 nt, Artificial Sequence
  Description of Artificial Sequence: Synthetic oligonucleotide
  Sense strand starting at position 2213 of SEQ ID NO: 588516
gugugcugagaugaaauca

SEQ ID NO: 870677 - RNA, 19 nt, Artificial Sequence
  Description of Artificial Sequence: Synthetic oligonucleotide
  Antisense strand to SEQ ID NO: 870676
ugauuucaucucagcacac

SEQ ID NO: 870678 - RNA, 19 nt, Artificial Sequence
  Description of Artificial Sequence: Synthetic oligonucleotide
  Sense strand starting at position 2309 of SEQ ID NO: 588516
ucaccauuagcagggauga

SEQ ID NO: 870679 - RNA, 19 nt, Artificial Sequence
  Description of Artificial Sequence: Synthetic oligonucleotide
  Antisense strand to SEQ ID NO: 870678
ucaucccugcuaaugguga

SEQ ID NO: 870680 - RNA, 19 nt, Artificial Sequence
  Description of Artificial Sequence: Synthetic oligonucleotide
  Sense strand starting at position 2380 of SEQ ID NO: 588516
cguaacucuucguuuagag

SEQ ID NO: 870681 - RNA, 19 nt, Artificial Sequence
  Description of Artificial Sequence: Synthetic oligonucleotide
  Antisense strand to SEQ ID NO: 870680
cucuaaacgaagaguuacg

SEQ ID NO: 870682 - RNA, 19 nt, Artificial Sequence
  Description of Artificial Sequence: Synthetic oligonucleotide
  Sense strand starting at position 2382 of SEQ ID NO: 588516
uaacucuucguuuagagca

SEQ ID NO: 870683 - RNA, 19 nt, Artificial Sequence
  Description of Artificial Sequence: Synthetic oligonucleotide
  Antisense strand to SEQ ID NO: 870682
ugcucuaaacgaagaguua

SEQ ID NO: 870684 - RNA, 19 nt, Artificial Sequence
  Description of Artificial Sequence: Synthetic oligonucleotide
  Sense strand starting at position 2387 of SEQ ID NO: 588516
cuucguuuagagcauauaa

SEQ ID NO: 870685 - RNA, 19 nt, Artificial Sequence
  Description of Artificial Sequence: Synthetic oligonucleotide
  Antisense strand to SEQ ID NO: 870684
uuauaugcucuaaacgaag

SEQ ID NO: 870686 - RNA, 19 nt, Artificial Sequence
  Description of Artificial Sequence: Synthetic oligonucleotide
  Sense strand starting at position 2389 of SEQ ID NO: 588516
ucguuuagagcauauaaga

SEQ ID NO: 870687 - RNA, 19 nt, Artificial Sequence
  Description of Artificial Sequence: Synthetic oligonucleotide
  Antisense strand to SEQ ID NO: 870686
ucuuauaugcucuaaacga

SEQ ID NO: 870688 - RNA, 19 nt, Artificial Sequence
  Description of Artificial Sequence: Synthetic oligonucleotide
  Sense strand starting at position 2577 of SEQ ID NO: 588516
aagguagaauuccaggaau

SEQ ID NO: 870689 - RNA, 19 nt, Artificial Sequence
  Description of Artificial Sequence: Synthetic oligonucleotide
  Antisense strand to SEQ ID NO: 870688
auuccuggaauucuaccuu

SEQ ID NO: 870690 - RNA, 19 nt, Artificial Sequence
  Description of Artificial Sequence: Synthetic oligonucleotide
  Sense strand starting at position 2740 of SEQ ID NO: 588516
ugauuaaggcaaugugcaa

SEQ ID NO: 870691 - RNA, 19 nt, Artificial Sequence
  Description of Artificial Sequence: Synthetic oligonucleotide
  Antisense strand to SEQ ID NO: 870690
uugcacauugccuuaauca

SEQ ID NO: 870692 - RNA, 19 nt, Artificial Sequence
  Description of Artificial Sequence: Synthetic oligonucleotide
  Sense strand starting at position 2755 of SEQ ID NO: 588516
gcaaaugcuggauaugcaa

SEQ ID NO: 870693 - RNA, 19 nt, Artificial Sequence
  Description of Artificial Sequence: Synthetic oligonucleotide
  Antisense strand to SEQ ID NO: 870692
uugcauauccagcauuugc

SEQ ID NO: 870694 - RNA, 19 nt, Artificial Sequence
  Description of Artificial Sequence: Synthetic oligonucleotide
  Sense strand starting at position 2789 of SEQ ID NO: 588516
aguuguagcagucaaagaa

SEQ ID NO: 870695 - RNA, 19 nt, Artificial Sequence
  Description of Artificial Sequence: Synthetic oligonucleotide
  Antisense strand to SEQ ID NO: 870694
uucuuugacugcuacaacu

SEQ ID NO: 870696 - RNA, 19 nt, Artificial Sequence
  Description of Artificial Sequence: Synthetic oligonucleotide
  Sense strand starting at position 2890 of SEQ ID NO: 588516
uugcuuugagcagggaauu

SEQ ID NO: 870697 - RNA, 19 nt, Artificial Sequence
  Description of Artificial Sequence: Synthetic oligonucleotide
  Antisense strand to SEQ ID NO: 870696
aauucccugcucaaagcaa

SEQ ID NO: 870698 - RNA, 19 nt, Artificial Sequence
  Description of Artificial Sequence: Synthetic oligonucleotide
  Sense strand starting at position 3186 of SEQ ID NO: 588516
uuuccaguuggccauauaa

SEQ ID NO: 870699 - RNA, 19 nt, Artificial Sequence
  Description of Artificial Sequence: Synthetic oligonucleotide
  Antisense strand to SEQ ID NO: 870698
uuauauggccaacuggaaa

SEQ ID NO: 870700 - RNA, 19 nt, Artificial Sequence
  Description of Artificial Sequence: Synthetic oligonucleotide
  Sense strand starting at position 3257 of SEQ ID NO: 588516
cugagcacuuuccuaauga

SEQ ID NO: 870701 - RNA, 19 nt, Artificial Sequence
  Description of Artificial Sequence: Synthetic oligonucleotide
  Antisense strand to SEQ ID NO: 870700
ucauuaggaaagugcucag

SEQ ID NO: 870702 - RNA, 19 nt, Artificial Sequence
  Description of Artificial Sequence: Synthetic oligonucleotide
  Sense strand starting at position 3373 of SEQ ID NO: 588516
gauaaauucuuagagguga

SEQ ID NO: 870703 - RNA, 19 nt, Artificial Sequence
  Description of Artificial Sequence: Synthetic oligonucleotide
  Antisense strand to SEQ ID NO: 870702
ucaccucuaagaauuuauc

SEQ ID NO: 870704 - RNA, 19 nt, Artificial Sequence
  Description of Artificial Sequence: Synthetic oligonucleotide
  Sense strand starting at position 3533 of SEQ ID NO: 588516
aaaugauguguggguuaau

SEQ ID NO: 870705 - RNA, 19 nt, Artificial Sequence
  Description of Artificial Sequence: Synthetic oligonucleotide
  Antisense strand to SEQ ID NO: 870704
auuaacccacacaucauuu

SEQ ID NO: 870706 - RNA, 19 nt, Artificial Sequence
  Description of Artificial Sequence: Synthetic oligonucleotide
  Sense strand starting at position 3534 of SEQ ID NO: 588516
aaugauguguggguuaauu

SEQ ID NO: 870707 - RNA, 19 nt, Artificial Sequence
  Description of Artificial Sequence: Synthetic oligonucleotide
  Antisense strand to SEQ ID NO: 870706
aauuaacccacacaucauu

SEQ ID NO: 870708 - RNA, 19 nt, Artificial Sequence
  Description of Artificial Sequence: Synthetic oligonucleotide
  Sense strand starting at position 3543 of SEQ ID NO: 588516
uggguuaauuuguauuucu

SEQ ID NO: 870709 - RNA, 19 nt, Artificial Sequence
  Description of Artificial Sequence: Synthetic oligonucleotide
  Antisense strand to SEQ ID NO: 870708
agaaauacaaauuaaccca

SEQ ID NO: 870710 - RNA, 19 nt, Artificial Sequence
  Description of Artificial Sequence: Synthetic oligonucleotide
  Sense strand starting at position 3615 of SEQ ID NO: 588516
ggaacugucuguucaucga

SEQ ID NO: 870711 - RNA, 19 nt, Artificial Sequence
  Description of Artificial Sequence: Synthetic oligonucleotide
  Antisense strand to SEQ ID NO: 870710
ucgaugaacagacaguucc

SEQ ID NO: 870712 - RNA, 19 nt, Artificial Sequence
  Description of Artificial Sequence: Synthetic oligonucleotide
  Sense strand starting at position 3648 of SEQ ID NO: 588516
uccacugaguuguuuacau

SEQ ID NO: 870713 - RNA, 19 nt, Artificial Sequence
  Description of Artificial Sequence: Synthetic oligonucleotide
  Antisense strand to SEQ ID NO: 870712
auguaaacaacucagugga

SEQ ID NO: 870714 - RNA, 19 nt, Artificial Sequence
  Description of Artificial Sequence: Synthetic oligonucleotide
  Sense strand starting at position 3674 of SEQ ID NO: 588516
auugauuuguaggagagcu

SEQ ID NO: 870715 - RNA, 19 nt, Artificial Sequence
  Description of Artificial Sequence: Synthetic oligonucleotide
  Antisense strand to SEQ ID NO: 870714
agcucuccuacaaaucaau

SEQ ID NO: 870716 - RNA, 19 nt, Artificial Sequence
  Description of Artificial Sequence: Synthetic oligonucleotide
  Sense strand starting at position 3684 of SEQ ID NO: 588516
aggagagcuuaauacauua

SEQ ID NO: 870717 - RNA, 19 nt, Artificial Sequence
  Description of Artificial Sequence: Synthetic oligonucleotide
  Antisense strand to SEQ ID NO: 870716
uaauguauuaagcucuccu

SEQ ID NO: 870718 - RNA, 19 nt, Artificial Sequence
  Description of Artificial Sequence: Synthetic oligonucleotide
  Sense strand starting at position 3717 of SEQ ID NO: 588516
uuacuugugauauggauug

SEQ ID NO: 870719 - RNA, 19 nt, Artificial Sequence
  Description of Artificial Sequence: Synthetic oligonucleotide
  Antisense strand to SEQ ID NO: 870718
caauccauaucacaaguaa

SEQ ID NO: 870720 - RNA, 19 nt, Artificial Sequence
  Description of Artificial Sequence: Synthetic oligonucleotide
  Sense strand starting at position 3719 of SEQ ID NO: 588516
acuugugauauggauugca

SEQ ID NO: 870721 - RNA, 19 nt, Artificial Sequence
  Description of Artificial Sequence: Synthetic oligonucleotide
  Antisense strand to SEQ ID NO: 870720
ugcaauccauaucacaagu

SEQ ID NO: 870722 - RNA, 19 nt, Artificial Sequence
  Description of Artificial Sequence: Synthetic oligonucleotide
  Sense strand starting at position 3789 of SEQ ID NO: 588516
uaugauuucuggguguugu

SEQ ID NO: 870723 - RNA, 19 nt, Artificial Sequence
  Description of Artificial Sequence: Synthetic oligonucleotide
  Antisense strand to SEQ ID NO: 870722
acaacacccagaaaucaua

SEQ ID NO: 870724 - RNA, 19 nt, Artificial Sequence
  Description of Artificial Sequence: Synthetic oligonucleotide
  Sense strand starting at position 3797 of SEQ ID NO: 588516
cuggguguuguguaguauu

SEQ ID NO: 870725 - RNA, 19 nt, Artificial Sequence
  Description of Artificial Sequence: Synthetic oligonucleotide
  Antisense strand to SEQ ID NO: 870724
aauacuacacaacacccag

SEQ ID NO: 870726 - RNA, 19 nt, Artificial Sequence
  Description of Artificial Sequence: Synthetic oligonucleotide
  Sense strand starting at position 3883 of SEQ ID NO: 588516
ugauguaaagagugaagua

SEQ ID NO: 870727 - RNA, 19 nt, Artificial Sequence
  Description of Artificial Sequence: Synthetic oligonucleotide
  Antisense strand to SEQ ID NO: 870726
uacuucacucuuuacauca

SEQ ID NO: 870728 - RNA, 19 nt, Artificial Sequence
  Description of Artificial Sequence: Synthetic oligonucleotide
  Sense strand starting at position 3975 of SEQ ID NO: 588516
acugauuugugguacuauc

SEQ ID NO: 870729 - RNA, 19 nt, Artificial Sequence
  Description of Artificial Sequence: Synthetic oligonucleotide
  Antisense strand to SEQ ID NO: 870728
gauaguaccacaaaucagu

SEQ ID NO: 870730 - RNA, 19 nt, Artificial Sequence
  Description of Artificial Sequence: Synthetic oligonucleotide
  Sense strand starting at position 3983 of SEQ ID NO: 588516
gugguacuaucuuugucac

SEQ ID NO: 870731 - RNA, 19 nt, Artificial Sequence
  Description of Artificial Sequence: Synthetic oligonucleotide
  Antisense strand to SEQ ID NO: 870730
gugacaaagauaguaccac

SEQ ID NO: 870732 - RNA, 19 nt, Artificial Sequence
  Description of Artificial Sequence: Synthetic oligonucleotide
  Sense strand starting at position 19 of SEQ ID NO: 588517
agaaauaagucuucgguuu

SEQ ID NO: 870733 - RNA, 19 nt, Artificial Sequence
  Description of Artificial Sequence: Synthetic oligonucleotide
  Antisense strand to SEQ ID NO: 870732
aaaccgaagacuuauuucu

SEQ ID NO: 870734 - RNA, 19 nt, Artificial Sequence
  Description of Artificial Sequence: Synthetic oligonucleotide
  Sense strand starting at position 20 of SEQ ID NO: 588517
gaaauaagucuucgguuua

SEQ ID NO: 870735 - RNA, 19 nt, Artificial Sequence
  Description of Artificial Sequence: Synthetic oligonucleotide
  Antisense strand to SEQ ID NO: 870734
uaaaccgaagacuuauuuc

SEQ ID NO: 870736 - RNA, 19 nt, Artificial Sequence
  Description of Artificial Sequence: Synthetic oligonucleotide
  Sense strand starting at position 25 of SEQ ID NO: 588517
aagucuucgguuuaaauug

SEQ ID NO: 870737 - RNA, 19 nt, Artificial Sequence
  Description of Artificial Sequence: Synthetic oligonucleotide
  Antisense strand to SEQ ID NO: 870736
caauuuaaaccgaagacuu

SEQ ID NO: 870738 - RNA, 19 nt, Artificial Sequence
  Description of Artificial Sequence: Synthetic oligonucleotide
  Sense strand starting at position 56 of SEQ ID NO: 588517
aaguuugcgggauacugua

SEQ ID NO: 870739 - RNA, 19 nt, Artificial Sequence
  Description of Artificial Sequence: Synthetic oligonucleotide
  Antisense strand to SEQ ID NO: 870738
uacaguaucccgcaaacuu

SEQ ID NO: 870740 - RNA, 19 nt, Artificial Sequence
  Description of Artificial Sequence: Synthetic oligonucleotide
  Sense strand starting at position 68 of SEQ ID NO: 588517
uacuguaaagcuuauguga

SEQ ID NO: 870741 - RNA, 19 nt, Artificial Sequence
  Description of Artificial Sequence: Synthetic oligonucleotide
  Antisense strand to SEQ ID NO: 870740
ucacauaagcuuuacagua

SEQ ID NO: 870742 - RNA, 19 nt, Artificial Sequence
  Description of Artificial Sequence: Synthetic oligonucleotide
  Sense strand starting at position 132 of SEQ ID NO: 588517
cccgaacaaccguguaauc

SEQ ID NO: 870743 - RNA, 19 nt, Artificial Sequence
  Description of Artificial Sequence: Synthetic oligonucleotide
  Antisense strand to SEQ ID NO: 870742
gauuacacgguuguucggg

SEQ ID NO: 870744 - RNA, 19 nt, Artificial Sequence
  Description of Artificial Sequence: Synthetic oligonucleotide
  Sense strand starting at position 226 of SEQ ID NO: 588517
gccgacugcuuccuaauaa

SEQ ID NO: 870745 - RNA, 19 nt, Artificial Sequence
  Description of Artificial Sequence: Synthetic oligonucleotide
  Antisense strand to SEQ ID NO: 870744
uuauuaggaagcagucggc

SEQ ID NO: 870746 - RNA, 19 nt, Artificial Sequence
  Description of Artificial Sequence: Synthetic oligonucleotide
  Sense strand starting at position 299 of SEQ ID NO: 588517
ugagaauauuagucaccgu

SEQ ID NO: 870747 - RNA, 19 nt, Artificial Sequence
  Description of Artificial Sequence: Synthetic oligonucleotide
  Antisense strand to SEQ ID NO: 870746
acggugacuaauauucuca

SEQ ID NO: 870748 - RNA, 19 nt, Artificial Sequence
  Description of Artificial Sequence: Synthetic oligonucleotide
  Sense strand starting at position 400 of SEQ ID NO: 588517
cagaguuuagugugaaccu

SEQ ID NO: 870749 - RNA, 19 nt, Artificial Sequence
  Description of Artificial Sequence: Synthetic oligonucleotide
  Antisense strand to SEQ ID NO: 870748
agguucacacuaaacucug

SEQ ID NO: 870750 - RNA, 19 nt, Artificial Sequence
  Description of Artificial Sequence: Synthetic oligonucleotide
  Sense strand starting at position 476 of SEQ ID NO: 588517
accuacauuuccgaacagu

SEQ ID NO: 870751 - RNA, 19 nt, Artificial Sequence
  Description of Artificial Sequence: Synthetic oligonucleotide
  Antisense strand to SEQ ID NO: 870750
acuguucggaaauguaggu

SEQ ID NO: 870752 - RNA, 19 nt, Artificial Sequence
  Description of Artificial Sequence: Synthetic oligonucleotide
  Sense strand starting at position 485 of SEQ ID NO: 588517
uccgaacagugcuuuauaa

SEQ ID NO: 870753 - RNA, 19 nt, Artificial Sequence
  Description of Artificial Sequence: Synthetic oligonucleotide
  Antisense strand to SEQ ID NO: 870752
uuauaaagcacuguucgga

SEQ ID NO: 870754 - RNA, 19 nt, Artificial Sequence
  Description of Artificial Sequence: Synthetic oligonucleotide
  Sense strand starting at position 487 of SEQ ID NO: 588517
cgaacagugcuuuauaaau

SEQ ID NO: 870755 - RNA, 19 nt, Artificial Sequence
  Description of Artificial Sequence: Synthetic oligonucleotide
  Antisense strand to SEQ ID NO: 870754
auuuauaaagcacuguucg

SEQ ID NO: 870756 - RNA, 19 nt, Artificial Sequence
  Description of Artificial Sequence: Synthetic oligonucleotide
  Sense strand starting at position 545 of SEQ ID NO: 588517
uaccuugucucuuccggaa

SEQ ID NO: 870757 - RNA, 19 nt, Artificial Sequence
  Description of Artificial Sequence: Synthetic oligonucleotide
  Antisense strand to SEQ ID NO: 870756
uuccggaagagacaaggua

SEQ ID NO: 870758 - RNA, 19 nt, Artificial Sequence
  Description of Artificial Sequence: Synthetic oligonucleotide
  Sense strand starting at position 549 of SEQ ID NO: 588517
uugucucuuccggaagaag

SEQ ID NO: 870759 - RNA, 19 nt, Artificial Sequence
  Description of Artificial Sequence: Synthetic oligonucleotide
  Antisense strand to SEQ ID NO: 870758
cuucuuccggaagagacaa

SEQ ID NO: 870760 - RNA, 19 nt, Artificial Sequence
  Description of Artificial Sequence: Synthetic oligonucleotide
  Sense strand starting at position 587 of SEQ ID NO: 588517
ccgguaguauugcccacaa

SEQ ID NO: 870761 - RNA, 19 nt, Artificial Sequence
  Description of Artificial Sequence: Synthetic oligonucleotide
  Antisense strand to SEQ ID NO: 870760
uugugggcaauacuaccgg

SEQ ID NO: 870762 - RNA, 19 nt, Artificial Sequence
  Description of Artificial Sequence: Synthetic oligonucleotide
  Sense strand starting at position 589 of SEQ ID NO: 588517
gguaguauugcccacaauc

SEQ ID NO: 870763 - RNA, 19 nt, Artificial Sequence
  Description of Artificial Sequence: Synthetic oligonucleotide
  Antisense strand to SEQ ID NO: 870762
gauugugggcaauacuacc

SEQ ID NO: 870764 - RNA, 19 nt, Artificial Sequence
  Description of Artificial Sequence: Synthetic oligonucleotide
  Sense strand starting at position 1096 of SEQ ID NO: 588517
ggcguuaagagguccgcau

SEQ ID NO: 870765 - RNA, 19 nt, Artificial Sequence
  Description of Artificial Sequence: Synthetic oligonucleotide
  Antisense strand to SEQ ID NO: 870764
augcggaccucuuaacgcc

SEQ ID NO: 870766 - RNA, 19 nt, Artificial Sequence
  Description of Artificial Sequence: Synthetic oligonucleotide
  Sense strand starting at position 2304 of SEQ ID NO: 588517
cgcccaagugugcucuuaa

SEQ ID NO: 870767 - RNA, 19 nt, Artificial Sequence
  Description of Artificial Sequence: Synthetic oligonucleotide
  Antisense strand to SEQ ID NO: 870766
uuaagagcacacuugggcg

SEQ ID NO: 870768 - RNA, 19 nt, Artificial Sequence
  Description of Artificial Sequence: Synthetic oligonucleotide
  Sense strand starting at position 2389 of SEQ ID NO: 588517
gauaacaguuuggccagaa

SEQ ID NO: 870769 - RNA, 19 nt, Artificial Sequence
  Description of Artificial Sequence: Synthetic oligonucleotide
  Antisense strand to SEQ ID NO: 870768
uucuggccaaacuguuauc

SEQ ID NO: 870770 - RNA, 19 nt, Artificial Sequence
  Description of Artificial Sequence: Synthetic oligonucleotide
  Sense strand starting at position 2393 of SEQ ID NO: 588517
acaguuuggccagaacuga

SEQ ID NO: 870771 - RNA, 19 nt, Artificial Sequence
  Description of Artificial Sequence: Synthetic oligonucleotide
  Antisense strand to SEQ ID NO: 870770
ucaguucuggccaaacugu

SEQ ID NO: 870772 - RNA, 19 nt, Artificial Sequence
  Description of Artificial Sequence: Synthetic oligonucleotide
  Sense strand starting at position 2437 of SEQ ID NO: 588517
agcgucugagacuagauaa

SEQ ID NO: 870773 - RNA, 19 nt, Artificial Sequence
  Description of Artificial Sequence: Synthetic oligonucleotide
  Antisense strand to SEQ ID NO: 870772
uuaucuagucucagacgcu

SEQ ID NO: 870774 - RNA, 19 nt, Artificial Sequence
  Description of Artificial Sequence: Synthetic oligonucleotide
  Sense strand starting at position 2549 of SEQ ID NO: 588517
aagacagaugguugagcau

SEQ ID NO: 870775 - RNA, 19 nt, Artificial Sequence
  Description of Artificial Sequence: Synthetic oligonucleotide
  Antisense strand to SEQ ID NO: 870774
augcucaaccaucugucuu

SEQ ID NO: 870776 - RNA, 19 nt, Artificial Sequence
  Description of Artificial Sequence: Synthetic oligonucleotide
  Sense strand starting at position 2646 of SEQ ID NO: 588517
ucuaacgucuuagcuaaga

SEQ ID NO: 870777 - RNA, 19 nt, Artificial Sequence
  Description of Artificial Sequence: Synthetic oligonucleotide
  Antisense strand to SEQ ID NO: 870776
ucuuagcuaagacguuaga

SEQ ID NO: 870778 - RNA, 19 nt, Artificial Sequence
  Description of Artificial Sequence: Synthetic oligonucleotide
  Sense strand starting at position 2691 of SEQ ID NO: 588517
gagcaaaguugggcuaaua

SEQ ID NO: 870779 - RNA, 19 nt, Artificial Sequence
  Description of Artificial Sequence: Synthetic oligonucleotide
  Antisense strand to SEQ ID NO: 870778
uauuagcccaacuuugcuc

SEQ ID NO: 870780 - RNA, 19 nt, Artificial Sequence
  Description of Artificial Sequence: Synthetic oligonucleotide
  Sense strand starting at position 2823 of SEQ ID NO: 588517
gaaugugauuaauugagcu

SEQ ID NO: 870781 - RNA, 19 nt, Artificial Sequence
  Description of Artificial Sequence: Synthetic oligonucleotide
  Antisense strand to SEQ ID NO: 870780
agcucaauuaaucacauuc

SEQ ID NO: 870782 - RNA, 19 nt, Artificial Sequence
  Description of Artificial Sequence: Synthetic oligonucleotide
  Sense strand starting at position 2841 of SEQ ID NO: 588517
uaaggcuaacgggauuauu

SEQ ID NO: 870783 - RNA, 19 nt, Artificial Sequence
  Description of Artificial Sequence: Synthetic oligonucleotide
  Antisense strand to SEQ ID NO: 870782
aauaaucccguuagccuua

SEQ ID NO: 870784 - RNA, 19 nt, Artificial Sequence
  Description of Artificial Sequence: Synthetic oligonucleotide
  Sense strand starting at position 2850 of SEQ ID NO: 588517
cgggauuauugggucacca

SEQ ID NO: 870785 - RNA, 19 nt, Artificial Sequence
  Description of Artificial Sequence: Synthetic oligonucleotide
  Antisense strand to SEQ ID NO: 870784
uggugacccaauaaucccg

SEQ ID NO: 870786 - RNA, 19 nt, Artificial Sequence
  Description of Artificial Sequence: Synthetic oligonucleotide
  Sense strand starting at position 2854 of SEQ ID NO: 588517
auuauugggucaccauauu

SEQ ID NO: 870787 - RNA, 19 nt, Artificial Sequence
  Description of Artificial Sequence: Synthetic oligonucleotide
  Antisense strand to SEQ ID NO: 870786
aauauggugacccaauaau

SEQ ID NO: 870788 - RNA, 19 nt, Artificial Sequence
  Description of Artificial Sequence: Synthetic oligonucleotide
  Sense strand starting at position 3232 of SEQ ID NO: 588517
cguauacucaacugggaau

SEQ ID NO: 870789 - RNA, 19 nt, Artificial Sequence
  Description of Artificial Sequence: Synthetic oligonucleotide
  Antisense strand to SEQ ID NO: 870788
auucccaguugaguauacg

SEQ ID NO: 870790 - RNA, 19 nt, Artificial Sequence
  Description of Artificial Sequence: Synthetic oligonucleotide
  Sense strand starting at position 3252 of SEQ ID NO: 588517
uuccaaaugugugcaugua

SEQ ID NO: 870791 - RNA, 19 nt, Artificial Sequence
  Description of Artificial Sequence: Synthetic oligonucleotide
  Antisense strand to SEQ ID NO: 870790
uacaugcacacauuuggaa

SEQ ID NO: 870792 - RNA, 19 nt, Artificial Sequence
  Description of Artificial Sequence: Synthetic oligonucleotide
  Sense strand starting at position 3346 of SEQ ID NO: 588517
agaacaguaaugugagcua

SEQ ID NO: 870793 - RNA, 19 nt, Artificial Sequence
  Description of Artificial Sequence: Synthetic oligonucleotide
  Antisense strand to SEQ ID NO: 870792
uagcucacauuacuguucu

SEQ ID NO: 870794 - RNA, 19 nt, Artificial Sequence
  Description of Artificial Sequence: Synthetic oligonucleotide
  Sense strand starting at position 3462 of SEQ ID NO: 588517
aagcauagcgguuaagaaa

SEQ ID NO: 870795 - RNA, 19 nt, Artificial Sequence
  Description of Artificial Sequence: Synthetic oligonucleotide
  Antisense strand to SEQ ID NO: 870794
uuucuuaaccgcuaugcuu

SEQ ID NO: 870796 - RNA, 19 nt, Artificial Sequence
  Description of Artificial Sequence: Synthetic oligonucleotide
  Sense strand starting at position 3515 of SEQ ID NO: 588517
agccauaugcuauauuaga

SEQ ID NO: 870797 - RNA, 19 nt, Artificial Sequence
  Description of Artificial Sequence: Synthetic oligonucleotide
  Antisense strand to SEQ ID NO: 870796
ucuaauauagcauauggcu

SEQ ID NO: 870798 - RNA, 19 nt, Artificial Sequence
  Description of Artificial Sequence: Synthetic oligonucleotide
  Sense strand starting at position 3531 of SEQ ID NO: 588517
agaaaucuugugcaccaga

SEQ ID NO: 870799 - RNA, 19 nt, Artificial Sequence
  Description of Artificial Sequence: Synthetic oligonucleotide
  Antisense strand to SEQ ID NO: 870798
ucuggugcacaagauuucu

SEQ ID NO: 870800 - RNA, 19 nt, Artificial Sequence
  Description of Artificial Sequence: Synthetic oligonucleotide
  Sense strand starting at position 3536 of SEQ ID NO: 588517
ucuugugcaccagaauaaa

SEQ ID NO: 870801 - RNA, 19 nt, Artificial Sequence
  Description of Artificial Sequence: Synthetic oligonucleotide
  Antisense strand to SEQ ID NO: 870800
uuuauucuggugcacaaga

SEQ ID NO: 870802 - RNA, 19 nt, Artificial Sequence
  Description of Artificial Sequence: Synthetic oligonucleotide
  Sense strand starting at position 3589 of SEQ ID NO: 588517
uuugcagaugcacaaauaa

SEQ ID NO: 870803 - RNA, 19 nt, Artificial Sequence
  Description of Artificial Sequence: Synthetic oligonucleotide
  Antisense strand to SEQ ID NO: 870802
uuauuugugcaucugcaaa

SEQ ID NO: 870804 - RNA, 19 nt, Artificial Sequence
  Description of Artificial Sequence: Synthetic oligonucleotide
  Sense strand starting at position 3624 of SEQ ID NO: 588517
ugaauuagaguaugacuuu

SEQ ID NO: 870805 - RNA, 19 nt, Artificial Sequence
  Description of Artificial Sequence: Synthetic oligonucleotide
  Antisense strand to SEQ ID NO: 870804
aaagucauacucuaauuca

SEQ ID NO: 870806 - RNA, 19 nt, Artificial Sequence
  Description of Artificial Sequence: Synthetic oligonucleotide
  Sense strand starting at position 3670 of SEQ ID NO: 588517
auacgaaccuugcuaacuu

SEQ ID NO: 870807 - RNA, 19 nt, Artificial Sequence
  Description of Artificial Sequence: Synthetic oligonucleotide
  Antisense strand to SEQ ID NO: 870806
aaguuagcaagguucguau

SEQ ID NO: 870808 - RNA, 19 nt, Artificial Sequence
  Description of Artificial Sequence: Synthetic oligonucleotide
  Sense strand starting at position 3746 of SEQ ID NO: 588517
gcuguaaagcacuauguga

SEQ ID NO: 870809 - RNA, 19 nt, Artificial Sequence
  Description of Artificial Sequence: Synthetic oligonucleotide
  Antisense strand to SEQ ID NO: 870808
ucacauagugcuuuacagc

SEQ ID NO: 870810 - RNA, 19 nt, Artificial Sequence
  Description of Artificial Sequence: Synthetic oligonucleotide
  Sense strand starting at position 3957 of SEQ ID NO: 588517
auauuaauggaaggcugua

SEQ ID NO: 870811 - RNA, 19 nt, Artificial Sequence
  Description of Artificial Sequence: Synthetic oligonucleotide
  Antisense strand to SEQ ID NO: 870810
uacagccuuccauuaauau

SEQ ID NO: 870812 - RNA, 19 nt, Artificial Sequence
  Description of Artificial Sequence: Synthetic oligonucleotide
  Sense strand starting at position 714 of SEQ ID NO: 588518
cagguuggaugccaaauuu

SEQ ID NO: 870813 - RNA, 19 nt, Artificial Sequence
  Description of Artificial Sequence: Synthetic oligonucleotide
  Antisense strand to SEQ ID NO: 870812
aaauuuggcauccaaccug

SEQ ID NO: 870814 - RNA, 19 nt, Artificial Sequence
  Description of Artificial Sequence: Synthetic oligonucleotide
  Sense strand starting at position 723 of SEQ ID NO: 588518
ugccaaauuugucaaggcu

SEQ ID NO: 870815 - RNA, 19 nt, Artificial Sequence
  Description of Artificial Sequence: Synthetic oligonucleotide
  Antisense strand to SEQ ID NO: 870814
agccuugacaaauuuggca

SEQ ID NO: 870816 - RNA, 19 nt, Artificial Sequence
  Description of Artificial Sequence: Synthetic oligonucleotide
  Sense strand starting at position 738 of SEQ ID NO: 588518
ggcuaacagaguuguccua

SEQ ID NO: 870817 - RNA, 19 nt, Artificial Sequence
  Description of Artificial Sequence: Synthetic oligonucleotide
  Antisense strand to SEQ ID NO: 870816
uaggacaacucuguuagcc

SEQ ID NO: 870818 - RNA, 19 nt, Artificial Sequence
  Description of Artificial Sequence: Synthetic oligonucleotide
  Sense strand starting at position 745 of SEQ ID NO: 588518
agaguuguccuaggcuauu

SEQ ID NO: 870819 - RNA, 19 nt, Artificial Sequence
  Description of Artificial Sequence: Synthetic oligonucleotide
  Antisense strand to SEQ ID NO: 870818
aauagccuaggacaacucu

SEQ ID NO: 870820 - RNA, 19 nt, Artificial Sequence
  Description of Artificial Sequence: Synthetic oligonucleotide
  Sense strand starting at position 776 of SEQ ID NO: 588518
cggaacaguuccucuacaa

SEQ ID NO: 870821 - RNA, 19 nt, Artificial Sequence
  Description of Artificial Sequence: Synthetic oligonucleotide
  Antisense strand to SEQ ID NO: 870820
uuguagaggaacuguuccg

SEQ ID NO: 870822 - RNA, 19 nt, Artificial Sequence
  Description of Artificial Sequence: Synthetic oligonucleotide
  Sense strand starting at position 1636 of SEQ ID NO: 588518
aguggcaugcacugguaau

SEQ ID NO: 870823 - RNA, 19 nt, Artificial Sequence
  Description of Artificial Sequence: Synthetic oligonucleotide
  Antisense strand to SEQ ID NO: 870822
auuaccagugcaugccacu

SEQ ID NO: 870824 - RNA, 19 nt, Artificial Sequence
  Description of Artificial Sequence: Synthetic oligonucleotide
  Sense strand starting at position 1791 of SEQ ID NO: 588518
uuaacauugcuuuaagugu

SEQ ID NO: 870825 - RNA, 19 nt, Artificial Sequence
  Description of Artificial Sequence: Synthetic oligonucleotide
  Antisense strand to SEQ ID NO: 870824
acacuuaaagcaauguuaa

SEQ ID NO: 870826 - RNA, 19 nt, Artificial Sequence
  Description of Artificial Sequence: Synthetic oligonucleotide
  Sense strand starting at position 1797 of SEQ ID NO: 588518
uugcuuuaagugugacaga

SEQ ID NO: 870827 - RNA, 19 nt, Artificial Sequence
  Description of Artificial Sequence: Synthetic oligonucleotide
  Antisense strand to SEQ ID NO: 870826
ucugucacacuuaaagcaa

SEQ ID NO: 870828 - RNA, 19 nt, Artificial Sequence
  Description of Artificial Sequence: Synthetic oligonucleotide
  Sense strand starting at position 1827 of SEQ ID NO: 588518
uguacaaaguguccuggau

SEQ ID NO: 870829 - RNA, 19 nt, Artificial Sequence
  Description of Artificial Sequence: Synthetic oligonucleotide
  Antisense strand to SEQ ID NO: 870828
auccaggacacuuuguaca

SEQ ID NO: 870830 - RNA, 19 nt, Artificial Sequence
  Description of Artificial Sequence: Synthetic oligonucleotide
  Sense strand starting at position 1831 of SEQ ID NO: 588518
caaaguguccuggauuaug

SEQ ID NO: 870831 - RNA, 19 nt, Artificial Sequence
  Description of Artificial Sequence: Synthetic oligonucleotide
  Antisense strand to SEQ ID NO: 870830
cauaauccaggacacuuug

SEQ ID NO: 870832 - RNA, 19 nt, Artificial Sequence
  Description of Artificial Sequence: Synthetic oligonucleotide
  Sense strand starting at position 2018 of SEQ ID NO: 588518
uuguauuuguccuugauua

SEQ ID NO: 870833 - RNA, 19 nt, Artificial Sequence
  Description of Artificial Sequence: Synthetic oligonucleotide
  Antisense strand to SEQ ID NO: 870832
uaaucaaggacaaauacaa

SEQ ID NO: 870834 - RNA, 19 nt, Artificial Sequence
  Description of Artificial Sequence: Synthetic oligonucleotide
  Sense strand starting at position 2022 of SEQ ID NO: 588518
auuuguccuugauuaagcu

SEQ ID NO: 870835 - RNA, 19 nt, Artificial Sequence
  Description of Artificial Sequence: Synthetic oligonucleotide
  Antisense strand to SEQ ID NO: 870834
agcuuaaucaaggacaaau

SEQ ID NO: 870836 - RNA, 19 nt, Artificial Sequence
  Description of Artificial Sequence: Synthetic oligonucleotide
  Sense strand starting at position 2031 of SEQ ID NO: 588518
ugauuaagcuucucaguag

SEQ ID NO: 870837 - RNA, 19 nt, Artificial Sequence
  Description of Artificial Sequence: Synthetic oligonucleotide
  Antisense strand to SEQ ID NO: 870836
cuacugagaagcuuaauca

SEQ ID NO: 870838 - RNA, 19 nt, Artificial Sequence
  Description of Artificial Sequence: Synthetic oligonucleotide
  Sense strand starting at position 2055 of SEQ ID NO: 588518
gguuacacuucugagauca

SEQ ID NO: 870839 - RNA, 19 nt, Artificial Sequence
  Description of Artificial Sequence: Synthetic oligonucleotide
  Antisense strand to SEQ ID NO: 870838
ugaucucagaaguguaacc

SEQ ID NO: 870840 - RNA, 19 nt, Artificial Sequence
  Description of Artificial Sequence: Synthetic oligonucleotide
  Sense strand starting at position 2069 of SEQ ID NO: 588518
gaucaauugugguuccaag

SEQ ID NO: 870841 - RNA, 19 nt, Artificial Sequence
  Description of Artificial Sequence: Synthetic oligonucleotide
  Antisense strand to SEQ ID NO: 870840
cuuggaaccacaauugauc

SEQ ID NO: 870842 - RNA, 19 nt, Artificial Sequence
  Description of Artificial Sequence: Synthetic oligonucleotide
  Sense strand starting at position 2087 of SEQ ID NO: 588518
gaaacaaugagucggugaa

SEQ ID NO: 870843 - RNA, 19 nt, Artificial Sequence
  Description of Artificial Sequence: Synthetic oligonucleotide
  Antisense strand to SEQ ID NO: 870842
uucaccgacucauuguuuc

SEQ ID NO: 870844 - RNA, 19 nt, Artificial Sequence
  Description of Artificial Sequence: Synthetic oligonucleotide
  Sense strand starting at position 2088 of SEQ ID NO: 588518
aaacaaugagucggugaau

SEQ ID NO: 870845 - RNA, 19 nt, Artificial Sequence
  Description of Artificial Sequence: Synthetic oligonucleotide
  Antisense strand to SEQ ID NO: 870844
auucaccgacucauuguuu

SEQ ID NO: 870846 - RNA, 19 nt, Artificial Sequence
  Description of Artificial Sequence: Synthetic oligonucleotide
  Sense strand starting at position 2089 of SEQ ID NO: 588518
aacaaugagucggugaauu

SEQ ID NO: 870847 - RNA, 19 nt, Artificial Sequence
  Description of Artificial Sequence: Synthetic oligonucleotide
  Antisense strand to SEQ ID NO: 870846
aauucaccgacucauuguu

SEQ ID NO: 870848 - RNA, 19 nt, Artificial Sequence
  Description of Artificial Sequence: Synthetic oligonucleotide
  Sense strand starting at position 2091 of SEQ ID NO: 588518
caaugagucggugaauuau

SEQ ID NO: 870849 - RNA, 19 nt, Artificial Sequence
  Description of Artificial Sequence: Synthetic oligonucleotide
  Antisense strand to SEQ ID NO: 870848
auaauucaccgacucauug

SEQ ID NO: 870850 - RNA, 19 nt, Artificial Sequence
  Description of Artificial Sequence: Synthetic oligonucleotide
  Sense strand starting at position 2100 of SEQ ID NO: 588518
ggugaauuaucucagguac

SEQ ID NO: 870851 - RNA, 19 nt, Artificial Sequence
  Description of Artificial Sequence: Synthetic oligonucleotide
  Antisense strand to SEQ ID NO: 870850
guaccugagauaauucacc

SEQ ID NO: 870852 - RNA, 19 nt, Artificial Sequence
  Description of Artificial Sequence: Synthetic oligonucleotide
  Sense strand starting at position 2273 of SEQ ID NO: 588518
ggagaaaccuggucuguac

SEQ ID NO: 870853 - RNA, 19 nt, Artificial Sequence
  Description of Artificial Sequence: Synthetic oligonucleotide
  Antisense strand to SEQ ID NO: 870852
guacagaccagguuucucc

SEQ ID NO: 870854 - RNA, 19 nt, Artificial Sequence
  Description of Artificial Sequence: Synthetic oligonucleotide
  Sense strand starting at position 2275 of SEQ ID NO: 588518
agaaaccuggucuguacua

SEQ ID NO: 870855 - RNA, 19 nt, Artificial Sequence
  Description of Artificial Sequence: Synthetic oligonucleotide
  Antisense strand to SEQ ID NO: 870854
uaguacagaccagguuucu

SEQ ID NO: 870856 - RNA, 19 nt, Artificial Sequence
  Description of Artificial Sequence: Synthetic oligonucleotide
  Sense strand starting at position 2656 of SEQ ID NO: 588518
guggcaaacggcuguaauc

SEQ ID NO: 870857 - RNA, 19 nt, Artificial Sequence
  Description of Artificial Sequence: Synthetic oligonucleotide
  Antisense strand to SEQ ID NO: 870856
gauuacagccguuugccac

SEQ ID NO: 870858 - RNA, 19 nt, Artificial Sequence
  Description of Artificial Sequence: Synthetic oligonucleotide
  Sense strand starting at position 2815 of SEQ ID NO: 588518
aauacauccgauuguggau

SEQ ID NO: 870859 - RNA, 19 nt, Artificial Sequence
  Description of Artificial Sequence: Synthetic oligonucleotide
  Antisense strand to SEQ ID NO: 870858
auccacaaucggauguauu

SEQ ID NO: 870860 - RNA, 19 nt, Artificial Sequence
  Description of Artificial Sequence: Synthetic oligonucleotide
  Sense strand starting at position 2954 of SEQ ID NO: 588518
gggcaaacuguugguaaug

SEQ ID NO: 870861 - RNA, 19 nt, Artificial Sequence
  Description of Artificial Sequence: Synthetic oligonucleotide
  Antisense strand to SEQ ID NO: 870860
cauuaccaacaguuugccc

SEQ ID NO: 870862 - RNA, 19 nt, Artificial Sequence
  Description of Artificial Sequence: Synthetic oligonucleotide
  Sense strand starting at position 2955 of SEQ ID NO: 588518
ggcaaacuguugguaauga

SEQ ID NO: 870863 - RNA, 19 nt, Artificial Sequence
  Description of Artificial Sequence: Synthetic oligonucleotide
  Antisense strand to SEQ ID NO: 870862
ucauuaccaacaguuugcc

SEQ ID NO: 870864 - RNA, 19 nt, Artificial Sequence
  Description of Artificial Sequence: Synthetic oligonucleotide
  Sense strand starting at position 2956 of SEQ ID NO: 588518
gcaaacuguugguaaugaa

SEQ ID NO: 870865 - RNA, 19 nt, Artificial Sequence
  Description of Artificial Sequence: Synthetic oligonucleotide
  Antisense strand to SEQ ID NO: 870864
uucauuaccaacaguuugc

SEQ ID NO: 870866 - RNA, 19 nt, Artificial Sequence
  Description of Artificial Sequence: Synthetic oligonucleotide
  Sense strand starting at position 3314 of SEQ ID NO: 588518
cagacaauuuguuuguugu

SEQ ID NO: 870867 - RNA, 19 nt, Artificial Sequence
  Description of Artificial Sequence: Synthetic oligonucleotide
  Antisense strand to SEQ ID NO: 870866
acaacaaacaaauugucug

SEQ ID NO: 870868 - RNA, 19 nt, Artificial Sequence
  Description of Artificial Sequence: Synthetic oligonucleotide
  Sense strand starting at position 3316 of SEQ ID NO: 588518
gacaauuuguuuguuguau

SEQ ID NO: 870869 - RNA, 19 nt, Artificial Sequence
  Description of Artificial Sequence: Synthetic oligonucleotide
  Antisense strand to SEQ ID NO: 870868
auacaacaaacaaauuguc

SEQ ID NO: 870870 - RNA, 19 nt, Artificial Sequence
  Description of Artificial Sequence: Synthetic oligonucleotide
  Sense strand starting at position 3318 of SEQ ID NO: 588518
caauuuguuuguuguauag

SEQ ID NO: 870871 - RNA, 19 nt, Artificial Sequence
  Description of Artificial Sequence: Synthetic oligonucleotide
  Antisense strand to SEQ ID NO: 870870
cuauacaacaaacaaauug

SEQ ID NO: 870872 - RNA, 19 nt, Artificial Sequence
  Description of Artificial Sequence: Synthetic oligonucleotide
  Sense strand starting at position 3330 of SEQ ID NO: 588518
uguauaggauaucaagaca

SEQ ID NO: 870873 - RNA, 19 nt, Artificial Sequence
  Description of Artificial Sequence: Synthetic oligonucleotide
  Antisense strand to SEQ ID NO: 870872
ugucuugauauccuauaca

SEQ ID NO: 870874 - RNA, 19 nt, Artificial Sequence
  Description of Artificial Sequence: Synthetic oligonucleotide
  Sense strand starting at position 3526 of SEQ ID NO: 588518
ccucauaggugguugagga

SEQ ID NO: 870875 - RNA, 19 nt, Artificial Sequence
  Description of Artificial Sequence: Synthetic oligonucleotide
  Antisense strand to SEQ ID NO: 870874
uccucaaccaccuaugagg

SEQ ID NO: 870876 - RNA, 19 nt, Artificial Sequence
  Description of Artificial Sequence: Synthetic oligonucleotide
  Sense strand starting at position 3574 of SEQ ID NO: 588518
uggguaagaucgccaggaa

SEQ ID NO: 870877 - RNA, 19 nt, Artificial Sequence
  Description of Artificial Sequence: Synthetic oligonucleotide
  Antisense strand to SEQ ID NO: 870876
uuccuggcgaucuuaccca

SEQ ID NO: 870878 - RNA, 19 nt, Artificial Sequence
  Description of Artificial Sequence: Synthetic oligonucleotide
  Sense strand starting at position 3575 of SEQ ID NO: 588518
ggguaagaucgccaggaaa

SEQ ID NO: 870879 - RNA, 19 nt, Artificial Sequence
  Description of Artificial Sequence: Synthetic oligonucleotide
  Antisense strand to SEQ ID NO: 870878
uuuccuggcgaucuuaccc

SEQ ID NO: 870880 - RNA, 19 nt, Artificial Sequence
  Description of Artificial Sequence: Synthetic oligonucleotide
  Sense strand starting at position 3577 of SEQ ID NO: 588518
guaagaucgccaggaaaua

SEQ ID NO: 870881 - RNA, 19 nt, Artificial Sequence
  Description of Artificial Sequence: Synthetic oligonucleotide
  Antisense strand to SEQ ID NO: 870880
uauuuccuggcgaucuuac

SEQ ID NO: 870882 - RNA, 19 nt, Artificial Sequence
  Description of Artificial Sequence: Synthetic oligonucleotide
  Sense strand starting at position 3630 of SEQ ID NO: 588518
ggguauacgacguggaaau

SEQ ID NO: 870883 - RNA, 19 nt, Artificial Sequence
  Description of Artificial Sequence: Synthetic oligonucleotide
  Antisense strand to SEQ ID NO: 870882
auuuccacgucguauaccc

SEQ ID NO: 870884 - RNA, 19 nt, Artificial Sequence
  Description of Artificial Sequence: Synthetic oligonucleotide
  Sense strand starting at position 3631 of SEQ ID NO: 588518
gguauacgacguggaaaua

SEQ ID NO: 870885 - RNA, 19 nt, Artificial Sequence
  Description of Artificial Sequence: Synthetic oligonucleotide
  Antisense strand to SEQ ID NO: 870884
uauuuccacgucguauacc

SEQ ID NO: 870886 - RNA, 19 nt, Artificial Sequence
  Description of Artificial Sequence: Synthetic oligonucleotide
  Sense strand starting at position 3708 of SEQ ID NO: 588518
acuugagacccuugagugu

SEQ ID NO: 870887 - RNA, 19 nt, Artificial Sequence
  Description of Artificial Sequence: Synthetic oligonucleotide
  Antisense strand to SEQ ID NO: 870886
acacucaagggucucaagu

SEQ ID NO: 870888 - RNA, 19 nt, Artificial Sequence
  Description of Artificial Sequence: Synthetic oligonucleotide
  Sense strand starting at position 3786 of SEQ ID NO: 588518
agagaugccugagauggau

SEQ ID NO: 870889 - RNA, 19 nt, Artificial Sequence
  Description of Artificial Sequence: Synthetic oligonucleotide
  Antisense strand to SEQ ID NO: 870888
auccaucucaggcaucucu

SEQ ID NO: 870890 - RNA, 19 nt, Artificial Sequence
  Description of Artificial Sequence: Synthetic oligonucleotide
  Sense strand starting at position 3814 of SEQ ID NO: 588518
ggcuaagucuuauuaccau

SEQ ID NO: 870891 - RNA, 19 nt, Artificial Sequence
  Description of Artificial Sequence: Synthetic oligonucleotide
  Antisense strand to SEQ ID NO: 870890
augguaauaagacuuagcc

SEQ ID NO: 870892 - RNA, 19 nt, Artificial Sequence
  Description of Artificial Sequence: Synthetic oligonucleotide
  Sense strand starting at position 34 of SEQ ID NO: 588519
cguaaugaaucaucacauu

SEQ ID NO: 870893 - RNA, 19 nt, Artificial Sequence
  Description of Artificial Sequence: Synthetic oligonucleotide
  Antisense strand to SEQ ID NO: 870892
aaugugaugauucauuacg

SEQ ID NO: 870894 - RNA, 19 nt, Artificial Sequence
  Description of Artificial Sequence: Synthetic oligonucleotide
  Sense strand starting at position 52 of SEQ ID NO: 588519
ucaauagugucucuuggaa

SEQ ID NO: 870895 - RNA, 19 nt, Artificial Sequence
  Description of Artificial Sequence: Synthetic oligonucleotide
  Antisense strand to SEQ ID NO: 870894
uuccaagagacacuauuga

SEQ ID NO: 870896 - RNA, 19 nt, Artificial Sequence
  Description of Artificial Sequence: Synthetic oligonucleotide
  Sense strand starting at position 205 of SEQ ID NO: 588519
augucauuuccaugcucca

SEQ ID NO: 870897 - RNA, 19 nt, Artificial Sequence
  Description of Artificial Sequence: Synthetic oligonucleotide
  Antisense strand to SEQ ID NO: 870896
uggagcauggaaaugacau

SEQ ID NO: 870898 - RNA, 19 nt, Artificial Sequence
  Description of Artificial Sequence: Synthetic oligonucleotide
  Sense strand starting at position 585 of SEQ ID NO: 588519
guccaaacuuguguauaac

SEQ ID NO: 870899 - RNA, 19 nt, Artificial Sequence
  Description of Artificial Sequence: Synthetic oligonucleotide
  Antisense strand to SEQ ID NO: 870898
guuauacacaaguuuggac

SEQ ID NO: 870900 - RNA, 19 nt, Artificial Sequence
  Description of Artificial Sequence: Synthetic oligonucleotide
  Sense strand starting at position 586 of SEQ ID NO: 588519
uccaaacuuguguauaacu

SEQ ID NO: 870901 - RNA, 19 nt, Artificial Sequence
  Description of Artificial Sequence: Synthetic oligonucleotide
  Antisense strand to SEQ ID NO: 870900
aguuauacacaaguuugga

SEQ ID NO: 870902 - RNA, 19 nt, Artificial Sequence
  Description of Artificial Sequence: Synthetic oligonucleotide
  Sense strand starting at position 596 of SEQ ID NO: 588519
uguauaacugcuuaucuga

SEQ ID NO: 870903 - RNA, 19 nt, Artificial Sequence
  Description of Artificial Sequence: Synthetic oligonucleotide
  Antisense strand to SEQ ID NO: 870902
ucagauaagcaguuauaca

SEQ ID NO: 870904 - RNA, 19 nt, Artificial Sequence
  Description of Artificial Sequence: Synthetic oligonucleotide
  Sense strand starting at position 616 of SEQ ID NO: 588519
accucuaauuaugugucua

SEQ ID NO: 870905 - RNA, 19 nt, Artificial Sequence
  Description of Artificial Sequence: Synthetic oligonucleotide
  Antisense strand to SEQ ID NO: 870904
uagacacauaauuagaggu

SEQ ID NO: 870906 - RNA, 19 nt, Artificial Sequence
  Description of Artificial Sequence: Synthetic oligonucleotide
  Sense strand starting at position 618 of SEQ ID NO: 588519
cucuaauuaugugucuaac

SEQ ID NO: 870907 - RNA, 19 nt, Artificial Sequence
  Description of Artificial Sequence: Synthetic oligonucleotide
  Antisense strand to SEQ ID NO: 870906
guuagacacauaauuagag

SEQ ID NO: 870908 - RNA, 19 nt, Artificial Sequence
  Description of Artificial Sequence: Synthetic oligonucleotide
  Sense strand starting at position 620 of SEQ ID NO: 588519
cuaauuaugugucuaacag

SEQ ID NO: 870909 - RNA, 19 nt, Artificial Sequence
  Description of Artificial Sequence: Synthetic oligonucleotide
  Antisense strand to SEQ ID NO: 870908
cuguuagacacauaauuag

SEQ ID NO: 870910 - RNA, 19 nt, Artificial Sequence
  Description of Artificial Sequence: Synthetic oligonucleotide
  Sense strand starting at position 621 of SEQ ID NO: 588519
uaauuaugugucuaacagg

SEQ ID NO: 870911 - RNA, 19 nt, Artificial Sequence
  Description of Artificial Sequence: Synthetic oligonucleotide
  Antisense strand to SEQ ID NO: 870910
ccuguuagacacauaauua

SEQ ID NO: 870912 - RNA, 19 nt, Artificial Sequence
  Description of Artificial Sequence: Synthetic oligonucleotide
  Sense strand starting at position 797 of SEQ ID NO: 588519
cugaguuacccuugacauu

SEQ ID NO: 870913 - RNA, 19 nt, Artificial Sequence
  Description of Artificial Sequence: Synthetic oligonucleotide
  Antisense strand to SEQ ID NO: 870912
aaugucaaggguaacucag

SEQ ID NO: 870914 - RNA, 19 nt, Artificial Sequence
  Description of Artificial Sequence: Synthetic oligonucleotide
  Sense strand starting at position 832 of SEQ ID NO: 588519
cacgcugaaccauaaguua

SEQ ID NO: 870915 - RNA, 19 nt, Artificial Sequence
  Description of Artificial Sequence: Synthetic oligonucleotide
  Antisense strand to SEQ ID NO: 870914
uaacuuaugguucagcgug

SEQ ID NO: 870916 - RNA, 19 nt, Artificial Sequence
  Description of Artificial Sequence: Synthetic oligonucleotide
  Sense strand starting at position 840 of SEQ ID NO: 588519
accauaaguuaguucucuu

SEQ ID NO: 870917 - RNA, 19 nt, Artificial Sequence
  Description of Artificial Sequence: Synthetic oligonucleotide
  Antisense strand to SEQ ID NO: 870916
aagagaacuaacuuauggu

SEQ ID NO: 870918 - RNA, 19 nt, Artificial Sequence
  Description of Artificial Sequence: Synthetic oligonucleotide
  Sense strand starting at position 857 of SEQ ID NO: 588519
uuaaaugucccuuacguca

SEQ ID NO: 870919 - RNA, 19 nt, Artificial Sequence
  Description of Artificial Sequence: Synthetic oligonucleotide
  Antisense strand to SEQ ID NO: 870918
ugacguaagggacauuuaa

SEQ ID NO: 870920 - RNA, 19 nt, Artificial Sequence
  Description of Artificial Sequence: Synthetic oligonucleotide
  Sense strand starting at position 1087 of SEQ ID NO: 588519
acucuauccggcuaacuuu

SEQ ID NO: 870921 - RNA, 19 nt, Artificial Sequence
  Description of Artificial Sequence: Synthetic oligonucleotide
  Antisense strand to SEQ ID NO: 870920
aaaguuagccggauagagu

SEQ ID NO: 870922 - RNA, 19 nt, Artificial Sequence
  Description of Artificial Sequence: Synthetic oligonucleotide
  Sense strand starting at position 1174 of SEQ ID NO: 588519
ugaaguacucccugagcuu

SEQ ID NO: 870923 - RNA, 19 nt, Artificial Sequence
  Description of Artificial Sequence: Synthetic oligonucleotide
  Antisense strand to SEQ ID NO: 870922
aagcucagggaguacuuca

SEQ ID NO: 870924 - RNA, 19 nt, Artificial Sequence
  Description of Artificial Sequence: Synthetic oligonucleotide
  Sense strand starting at position 1175 of SEQ ID NO: 588519
gaaguacucccugagcuuc

SEQ ID NO: 870925 - RNA, 19 nt, Artificial Sequence
  Description of Artificial Sequence: Synthetic oligonucleotide
  Antisense strand to SEQ ID NO: 870924
gaagcucagggaguacuuc

SEQ ID NO: 870926 - RNA, 19 nt, Artificial Sequence
  Description of Artificial Sequence: Synthetic oligonucleotide
  Sense strand starting at position 1268 of SEQ ID NO: 588519
cacuuagaaucugcguaca

SEQ ID NO: 870927 - RNA, 19 nt, Artificial Sequence
  Description of Artificial Sequence: Synthetic oligonucleotide
  Antisense strand to SEQ ID NO: 870926
uguacgcagauucuaagug

SEQ ID NO: 870928 - RNA, 19 nt, Artificial Sequence
  Description of Artificial Sequence: Synthetic oligonucleotide
  Sense strand starting at position 1271 of SEQ ID NO: 588519
uuagaaucugcguacauuc

SEQ ID NO: 870929 - RNA, 19 nt, Artificial Sequence
  Description of Artificial Sequence: Synthetic oligonucleotide
  Antisense strand to SEQ ID NO: 870928
gaauguacgcagauucuaa

SEQ ID NO: 870930 - RNA, 19 nt, Artificial Sequence
  Description of Artificial Sequence: Synthetic oligonucleotide
  Sense strand starting at position 1316 of SEQ ID NO: 588519
ggguuugugaaguagcaca

SEQ ID NO: 870931 - RNA, 19 nt, Artificial Sequence
  Description of Artificial Sequence: Synthetic oligonucleotide
  Antisense strand to SEQ ID NO: 870930
ugugcuacuucacaaaccc

SEQ ID NO: 870932 - RNA, 19 nt, Artificial Sequence
  Description of Artificial Sequence: Synthetic oligonucleotide
  Sense strand starting at position 2256 of SEQ ID NO: 588519
cuggcuggcgcgguuaaua

SEQ ID NO: 870933 - RNA, 19 nt, Artificial Sequence
  Description of Artificial Sequence: Synthetic oligonucleotide
  Antisense strand to SEQ ID NO: 870932
uauuaaccgcgccagccag

SEQ ID NO: 870934 - RNA, 19 nt, Artificial Sequence
  Description of Artificial Sequence: Synthetic oligonucleotide
  Sense strand starting at position 2329 of SEQ ID NO: 588519
guguguuaauuugcauacu

SEQ ID NO: 870935 - RNA, 19 nt, Artificial Sequence
  Description of Artificial Sequence: Synthetic oligonucleotide
  Antisense strand to SEQ ID NO: 870934
aguaugcaaauuaacacac

SEQ ID NO: 870936 - RNA, 19 nt, Artificial Sequence
  Description of Artificial Sequence: Synthetic oligonucleotide
  Sense strand starting at position 2378 of SEQ ID NO: 588519
ggguaucuugugagucgau

SEQ ID NO: 870937 - RNA, 19 nt, Artificial Sequence
  Description of Artificial Sequence: Synthetic oligonucleotide
  Antisense strand to SEQ ID NO: 870936
aucgacucacaagauaccc

SEQ ID NO: 870938 - RNA, 19 nt, Artificial Sequence
  Description of Artificial Sequence: Synthetic oligonucleotide
  Sense strand starting at position 2467 of SEQ ID NO: 588519
uuggcuuccugaucaauaa

SEQ ID NO: 870939 - RNA, 19 nt, Artificial Sequence
  Description of Artificial Sequence: Synthetic oligonucleotide
  Antisense strand to SEQ ID NO: 870938
uuauugaucaggaagccaa

SEQ ID NO: 870940 - RNA, 19 nt, Artificial Sequence
  Description of Artificial Sequence: Synthetic oligonucleotide
  Sense strand starting at position 2468 of SEQ ID NO: 588519
uggcuuccugaucaauaaa

SEQ ID NO: 870941 - RNA, 19 nt, Artificial Sequence
  Description of Artificial Sequence: Synthetic oligonucleotide
  Antisense strand to SEQ ID NO: 870940
uuuauugaucaggaagcca

SEQ ID NO: 870942 - RNA, 19 nt, Artificial Sequence
  Description of Artificial Sequence: Synthetic oligonucleotide
  Sense strand starting at position 2497 of SEQ ID NO: 588519
uuaagugauacgugcaaag

SEQ ID NO: 870943 - RNA, 19 nt, Artificial Sequence
  Description of Artificial Sequence: Synthetic oligonucleotide
  Antisense strand to SEQ ID NO: 870942
cuuugcacguaucacuuaa

SEQ ID NO: 870944 - RNA, 19 nt, Artificial Sequence
  Description of Artificial Sequence: Synthetic oligonucleotide
  Sense strand starting at position 2507 of SEQ ID NO: 588519
cgugcaaagcgcuuagcau

SEQ ID NO: 870945 - RNA, 19 nt, Artificial Sequence
  Description of Artificial Sequence: Synthetic oligonucleotide
  Antisense strand to SEQ ID NO: 870944
augcuaagcgcuuugcacg

SEQ ID NO: 870946 - RNA, 19 nt, Artificial Sequence
  Description of Artificial Sequence: Synthetic oligonucleotide
  Sense strand starting at position 2671 of SEQ ID NO: 588519
gcucgugucaagcaacaga

SEQ ID NO: 870947 - RNA, 19 nt, Artificial Sequence
  Description of Artificial Sequence: Synthetic oligonucleotide
  Antisense strand to SEQ ID NO: 870946
ucuguugcuugacacgagc

SEQ ID NO: 870948 - RNA, 19 nt, Artificial Sequence
  Description of Artificial Sequence: Synthetic oligonucleotide
  Sense strand starting at position 2674 of SEQ ID NO: 588519
cgugucaagcaacagaauu

SEQ ID NO: 870949 - RNA, 19 nt, Artificial Sequence
  Description of Artificial Sequence: Synthetic oligonucleotide
  Antisense strand to SEQ ID NO: 870948
aauucuguugcuugacacg

SEQ ID NO: 870950 - RNA, 19 nt, Artificial Sequence
  Description of Artificial Sequence: Synthetic oligonucleotide
  Sense strand starting at position 2696 of SEQ ID NO: 588519
uucuuuaacuguucuagag

SEQ ID NO: 870951 - RNA, 19 nt, Artificial Sequence
  Description of Artificial Sequence: Synthetic oligonucleotide
  Antisense strand to SEQ ID NO: 870950
cucuagaacaguuaaagaa

SEQ ID NO: 870952 - RNA, 19 nt, Artificial Sequence
  Description of Artificial Sequence: Synthetic oligonucleotide
  Sense strand starting at position 2700 of SEQ ID NO: 588519
uuaacuguucuagaggcaa

SEQ ID NO: 870953 - RNA, 19 nt, Artificial Sequence
  Description of Artificial Sequence: Synthetic oligonucleotide
  Antisense strand to SEQ ID NO: 870952
uugccucuagaacaguuaa

SEQ ID NO: 870954 - RNA, 19 nt, Artificial Sequence
  Description of Artificial Sequence: Synthetic oligonucleotide
  Sense strand starting at position 2704 of SEQ ID NO: 588519
cuguucuagaggcaagaau

SEQ ID NO: 870955 - RNA, 19 nt, Artificial Sequence
  Description of Artificial Sequence: Synthetic oligonucleotide
  Antisense strand to SEQ ID NO: 870954
auucuugccucuagaacag

SEQ ID NO: 870956 - RNA, 19 nt, Artificial Sequence
  Description of Artificial Sequence: Synthetic oligonucleotide
  Sense strand starting at position 3008 of SEQ ID NO: 588519
ucacauguccugggaguua

SEQ ID NO: 870957 - RNA, 19 nt, Artificial Sequence
  Description of Artificial Sequence: Synthetic oligonucleotide
  Antisense strand to SEQ ID NO: 870956
uaacucccaggacauguga

SEQ ID NO: 870958 - RNA, 19 nt, Artificial Sequence
  Description of Artificial Sequence: Synthetic oligonucleotide
  Sense strand starting at position 3163 of SEQ ID NO: 588519
agaguugaaacugguaauu

SEQ ID NO: 870959 - RNA, 19 nt, Artificial Sequence
  Description of Artificial Sequence: Synthetic oligonucleotide
  Antisense strand to SEQ ID NO: 870958
aauuaccaguuucaacucu

SEQ ID NO: 870960 - RNA, 19 nt, Artificial Sequence
  Description of Artificial Sequence: Synthetic oligonucleotide
  Sense strand starting at position 3188 of SEQ ID NO: 588519
acuguaugcuucuugauga

SEQ ID NO: 870961 - RNA, 19 nt, Artificial Sequence
  Description of Artificial Sequence: Synthetic oligonucleotide
  Antisense strand to SEQ ID NO: 870960
ucaucaagaagcauacagu

SEQ ID NO: 870962 - RNA, 19 nt, Artificial Sequence
  Description of Artificial Sequence: Synthetic oligonucleotide
  Sense strand starting at position 3249 of SEQ ID NO: 588519
gcacauagauacuugauaa

SEQ ID NO: 870963 - RNA, 19 nt, Artificial Sequence
  Description of Artificial Sequence: Synthetic oligonucleotide
  Antisense strand to SEQ ID NO: 870962
uuaucaaguaucuaugugc

SEQ ID NO: 870964 - RNA, 19 nt, Artificial Sequence
  Description of Artificial Sequence: Synthetic oligonucleotide
  Sense strand starting at position 3388 of SEQ ID NO: 588519
uccagugagccugacucua

SEQ ID NO: 870965 - RNA, 19 nt, Artificial Sequence
  Description of Artificial Sequence: Synthetic oligonucleotide
  Antisense strand to SEQ ID NO: 870964
uagagucaggcucacugga

SEQ ID NO: 870966 - RNA, 19 nt, Artificial Sequence
  Description of Artificial Sequence: Synthetic oligonucleotide
  Sense strand starting at position 3390 of SEQ ID NO: 588519
cagugagccugacucuaaa

SEQ ID NO: 870967 - RNA, 19 nt, Artificial Sequence
  Description of Artificial Sequence: Synthetic oligonucleotide
  Antisense strand to SEQ ID NO: 870966
uuuagagucaggcucacug

SEQ ID NO: 870968 - RNA, 19 nt, Artificial Sequence
  Description of Artificial Sequence: Synthetic oligonucleotide
  Sense strand starting at position 3510 of SEQ ID NO: 588519
gggcaaauagcauaguagu

SEQ ID NO: 870969 - RNA, 19 nt, Artificial Sequence
  Description of Artificial Sequence: Synthetic oligonucleotide
  Antisense strand to SEQ ID NO: 870968
acuacuaugcuauuugccc

SEQ ID NO: 870970 - RNA, 19 nt, Artificial Sequence
  Description of Artificial Sequence: Synthetic oligonucleotide
  Sense strand starting at position 3674 of SEQ ID NO: 588519
aagauagguccaugcaguu

SEQ ID NO: 870971 - RNA, 19 nt, Artificial Sequence
  Description of Artificial Sequence: Synthetic oligonucleotide
  Antisense strand to SEQ ID NO: 870970
aacugcauggaccuaucuu

SEQ ID NO: 870972 - RNA, 19 nt, Artificial Sequence
  Description of Artificial Sequence: Synthetic oligonucleotide
  Sense strand starting at position 271 of SEQ ID NO: 588520
ccgccuauucgugaccuuu

SEQ ID NO: 870973 - RNA, 19 nt, Artificial Sequence
  Description of Artificial Sequence: Synthetic oligonucleotide
  Antisense strand to SEQ ID NO: 870972
aaaggucacgaauaggcgg

SEQ ID NO: 870974 - RNA, 19 nt, Artificial Sequence
  Description of Artificial Sequence: Synthetic oligonucleotide
  Sense strand starting at position 280 of SEQ ID NO: 588520
cgugaccuuucggcugauu

SEQ ID NO: 870975 - RNA, 19 nt, Artificial Sequence
  Description of Artificial Sequence: Synthetic oligonucleotide
  Antisense strand to SEQ ID NO: 870974
aaucagccgaaaggucacg

SEQ ID NO: 870976 - RNA, 19 nt, Artificial Sequence
  Description of Artificial Sequence: Synthetic oligonucleotide
  Sense strand starting at position 282 of SEQ ID NO: 588520
ugaccuuucggcugauuac

SEQ ID NO: 870977 - RNA, 19 nt, Artificial Sequence
  Description of Artificial Sequence: Synthetic oligonucleotide
  Antisense strand to SEQ ID NO: 870976
guaaucagccgaaagguca

SEQ ID NO: 870978 - RNA, 19 nt, Artificial Sequence
  Description of Artificial Sequence: Synthetic oligonucleotide
  Sense strand starting at position 283 of SEQ ID NO: 588520
gaccuuucggcugauuacu

SEQ ID NO: 870979 - RNA, 19 nt, Artificial Sequence
  Description of Artificial Sequence: Synthetic oligonucleotide
  Antisense strand to SEQ ID NO: 870978
aguaaucagccgaaagguc

SEQ ID NO: 870980 - RNA, 19 nt, Artificial Sequence
  Description of Artificial Sequence: Synthetic oligonucleotide
  Sense strand starting at position 291 of SEQ ID NO: 588520
ggcugauuacuagaguguc

SEQ ID NO: 870981 - RNA, 19 nt, Artificial Sequence
  Description of Artificial Sequence: Synthetic oligonucleotide
  Antisense strand to SEQ ID NO: 870980
gacacucuaguaaucagcc

SEQ ID NO: 870982 - RNA, 19 nt, Artificial Sequence
  Description of Artificial Sequence: Synthetic oligonucleotide
  Sense strand starting at position 294 of SEQ ID NO: 588520
ugauuacuagagugucaca

SEQ ID NO: 870983 - RNA, 19 nt, Artificial Sequence
  Description of Artificial Sequence: Synthetic oligonucleotide
  Antisense strand to SEQ ID NO: 870982
ugugacacucuaguaauca

SEQ ID NO: 870984 - RNA, 19 nt, Artificial Sequence
  Description of Artificial Sequence: Synthetic oligonucleotide
  Sense strand starting at position 1848 of SEQ ID NO: 588520
aggcaagauuccuaaaguu

SEQ ID NO: 870985 - RNA, 19 nt, Artificial Sequence
  Description of Artificial Sequence: Synthetic oligonucleotide
  Antisense strand to SEQ ID NO: 870984
aacuuuaggaaucuugccu

SEQ ID NO: 870986 - RNA, 19 nt, Artificial Sequence
  Description of Artificial Sequence: Synthetic oligonucleotide
  Sense strand starting at position 1872 of SEQ ID NO: 588520
ggaaguaucuaugccuaug

SEQ ID NO: 870987 - RNA, 19 nt, Artificial Sequence
  Description of Artificial Sequence: Synthetic oligonucleotide
  Antisense strand to SEQ ID NO: 870986
cauaggcauagauacuucc

SEQ ID NO: 870988 - RNA, 19 nt, Artificial Sequence
  Description of Artificial Sequence: Synthetic oligonucleotide
  Sense strand starting at position 1875 of SEQ ID NO: 588520
aguaucuaugccuauguga

SEQ ID NO: 870989 - RNA, 19 nt, Artificial Sequence
  Description of Artificial Sequence: Synthetic oligonucleotide
  Antisense strand to SEQ ID NO: 870988
ucacauaggcauagauacu

SEQ ID NO: 870990 - RNA, 19 nt, Artificial Sequence
  Description of Artificial Sequence: Synthetic oligonucleotide
  Sense strand starting at position 1886 of SEQ ID NO: 588520
cuaugugagcucugagauu

SEQ ID NO: 870991 - RNA, 19 nt, Artificial Sequence
  Description of Artificial Sequence: Synthetic oligonucleotide
  Antisense strand to SEQ ID NO: 870990
aaucucagagcucacauag

SEQ ID NO: 870992 - RNA, 19 nt, Artificial Sequence
  Description of Artificial Sequence: Synthetic oligonucleotide
  Sense strand starting at position 1909 of SEQ ID NO: 588520
ucagauacccuauguucuu

SEQ ID NO: 870993 - RNA, 19 nt, Artificial Sequence
  Description of Artificial Sequence: Synthetic oligonucleotide
  Antisense strand to SEQ ID NO: 870992
aagaacauaggguaucuga

SEQ ID NO: 870994 - RNA, 19 nt, Artificial Sequence
  Description of Artificial Sequence: Synthetic oligonucleotide
  Sense strand starting at position 2036 of SEQ ID NO: 588520
gcauaauugcuguacuuua

SEQ ID NO: 870995 - RNA, 19 nt, Artificial Sequence
  Description of Artificial Sequence: Synthetic oligonucleotide
  Antisense strand to SEQ ID NO: 870994
uaaaguacagcaauuaugc

SEQ ID NO: 870996 - RNA, 19 nt, Artificial Sequence
  Description of Artificial Sequence: Synthetic oligonucleotide
  Sense strand starting at position 2041 of SEQ ID NO: 588520
auugcuguacuuuaaguga

SEQ ID NO: 870997 - RNA, 19 nt, Artificial Sequence
  Description of Artificial Sequence: Synthetic oligonucleotide
  Antisense strand to SEQ ID NO: 870996
ucacuuaaaguacagcaau

SEQ ID NO: 870998 - RNA, 19 nt, Artificial Sequence
  Description of Artificial Sequence: Synthetic oligonucleotide
  Sense strand starting at position 2045 of SEQ ID NO: 588520
cuguacuuuaagugauggu

SEQ ID NO: 870999 - RNA, 19 nt, Artificial Sequence
  Description of Artificial Sequence: Synthetic oligonucleotide
  Antisense strand to SEQ ID NO: 870998
accaucacuuaaaguacag

SEQ ID NO: 871000 - RNA, 19 nt, Artificial Sequence
  Description of Artificial Sequence: Synthetic oligonucleotide
  Sense strand starting at position 2046 of SEQ ID NO: 588520
uguacuuuaagugauggua

SEQ ID NO: 871001 - RNA, 19 nt, Artificial Sequence
  Description of Artificial Sequence: Synthetic oligonucleotide
  Antisense strand to SEQ ID NO: 871000
uaccaucacuuaaaguaca

SEQ ID NO: 871002 - RNA, 19 nt, Artificial Sequence
  Description of Artificial Sequence: Synthetic oligonucleotide
  Sense strand starting at position 2059 of SEQ ID NO: 588520
augguacugucauaacaaa

SEQ ID NO: 871003 - RNA, 19 nt, Artificial Sequence
  Description of Artificial Sequence: Synthetic oligonucleotide
  Antisense strand to SEQ ID NO: 871002
uuuguuaugacaguaccau

SEQ ID NO: 871004 - RNA, 19 nt, Artificial Sequence
  Description of Artificial Sequence: Synthetic oligonucleotide
  Sense strand starting at position 2195 of SEQ ID NO: 588520
uggaauauaugucauuccu

SEQ ID NO: 871005 - RNA, 19 nt, Artificial Sequence
  Description of Artificial Sequence: Synthetic oligonucleotide
  Antisense strand to SEQ ID NO: 871004
aggaaugacauauauucca

SEQ ID NO: 871006 - RNA, 19 nt, Artificial Sequence
  Description of Artificial Sequence: Synthetic oligonucleotide
  Sense strand starting at position 2634 of SEQ ID NO: 588520
ugcaaaugauuuggaguau

SEQ ID NO: 871007 - RNA, 19 nt, Artificial Sequence
  Description of Artificial Sequence: Synthetic oligonucleotide
  Antisense strand to SEQ ID NO: 871006
auacuccaaaucauuugca

SEQ ID NO: 871008 - RNA, 19 nt, Artificial Sequence
  Description of Artificial Sequence: Synthetic oligonucleotide
  Sense strand starting at position 2635 of SEQ ID NO: 588520
gcaaaugauuuggaguauc

SEQ ID NO: 871009 - RNA, 19 nt, Artificial Sequence
  Description of Artificial Sequence: Synthetic oligonucleotide
  Antisense strand to SEQ ID NO: 871008
gauacuccaaaucauuugc

SEQ ID NO: 871010 - RNA, 19 nt, Artificial Sequence
  Description of Artificial Sequence: Synthetic oligonucleotide
  Sense strand starting at position 2694 of SEQ ID NO: 588520
ucccacucugcagagaaau

SEQ ID NO: 871011 - RNA, 19 nt, Artificial Sequence
  Description of Artificial Sequence: Synthetic oligonucleotide
  Antisense strand to SEQ ID NO: 871010
auuucucugcagaguggga

SEQ ID NO: 871012 - RNA, 19 nt, Artificial Sequence
  Description of Artificial Sequence: Synthetic oligonucleotide
  Sense strand starting at position 2726 of SEQ ID NO: 588520
uacaguuaagugugcagaa

SEQ ID NO: 871013 - RNA, 19 nt, Artificial Sequence
  Description of Artificial Sequence: Synthetic oligonucleotide
  Antisense strand to SEQ ID NO: 871012
uucugcacacuuaacugua

SEQ ID NO: 871014 - RNA, 19 nt, Artificial Sequence
  Description of Artificial Sequence: Synthetic oligonucleotide
  Sense strand starting at position 2728 of SEQ ID NO: 588520
caguuaagugugcagaaga

SEQ ID NO: 871015 - RNA, 19 nt, Artificial Sequence
  Description of Artificial Sequence: Synthetic oligonucleotide
  Antisense strand to SEQ ID NO: 871014
ucuucugcacacuuaacug

SEQ ID NO: 871016 - RNA, 19 nt, Artificial Sequence
  Description of Artificial Sequence: Synthetic oligonucleotide
  Sense strand starting at position 2793 of SEQ ID NO: 588520
gggacagguuucuacaaua

SEQ ID NO: 871017 - RNA, 19 nt, Artificial Sequence
  Description of Artificial Sequence: Synthetic oligonucleotide
  Antisense strand to SEQ ID NO: 871016
uauuguagaaaccuguccc

SEQ ID NO: 871018 - RNA, 19 nt, Artificial Sequence
  Description of Artificial Sequence: Synthetic oligonucleotide
  Sense strand starting at position 2798 of SEQ ID NO: 588520
agguuucuacaauaaaguu

SEQ ID NO: 871019 - RNA, 19 nt, Artificial Sequence
  Description of Artificial Sequence: Synthetic oligonucleotide
  Antisense strand to SEQ ID NO: 871018
aacuuuauuguagaaaccu

SEQ ID NO: 871020 - RNA, 19 nt, Artificial Sequence
  Description of Artificial Sequence: Synthetic oligonucleotide
  Sense strand starting at position 2806 of SEQ ID NO: 588520
acaauaaaguucuggauca

SEQ ID NO: 871021 - RNA, 19 nt, Artificial Sequence
  Description of Artificial Sequence: Synthetic oligonucleotide
  Antisense strand to SEQ ID NO: 871020
ugauccagaacuuuauugu

SEQ ID NO: 871022 - RNA, 19 nt, Artificial Sequence
  Description of Artificial Sequence: Synthetic oligonucleotide
  Sense strand starting at position 2995 of SEQ ID NO: 588520
acaauagagagguguauac

SEQ ID NO: 871023 - RNA, 19 nt, Artificial Sequence
  Description of Artificial Sequence: Synthetic oligonucleotide
  Antisense strand to SEQ ID NO: 871022
guauacaccucucuauugu

SEQ ID NO: 871024 - RNA, 19 nt, Artificial Sequence
  Description of Artificial Sequence: Synthetic oligonucleotide
  Sense strand starting at position 3107 of SEQ ID NO: 588520
cuuacuguuuccgugacua

SEQ ID NO: 871025 - RNA, 19 nt, Artificial Sequence
  Description of Artificial Sequence: Synthetic oligonucleotide
  Antisense strand to SEQ ID NO: 871024
uagucacggaaacaguaag

SEQ ID NO: 871026 - RNA, 19 nt, Artificial Sequence
  Description of Artificial Sequence: Synthetic oligonucleotide
  Sense strand starting at position 3109 of SEQ ID NO: 588520
uacuguuuccgugacuaua

SEQ ID NO: 871027 - RNA, 19 nt, Artificial Sequence
  Description of Artificial Sequence: Synthetic oligonucleotide
  Antisense strand to SEQ ID NO: 871026
uauagucacggaaacagua

SEQ ID NO: 871028 - RNA, 19 nt, Artificial Sequence
  Description of Artificial Sequence: Synthetic oligonucleotide
  Sense strand starting at position 3111 of SEQ ID NO: 588520
cuguuuccgugacuauaga

SEQ ID NO: 871029 - RNA, 19 nt, Artificial Sequence
  Description of Artificial Sequence: Synthetic oligonucleotide
  Antisense strand to SEQ ID NO: 871028
ucuauagucacggaaacag

SEQ ID NO: 871030 - RNA, 19 nt, Artificial Sequence
  Description of Artificial Sequence: Synthetic oligonucleotide
  Sense strand starting at position 3112 of SEQ ID NO: 588520
uguuuccgugacuauagaa

SEQ ID NO: 871031 - RNA, 19 nt, Artificial Sequence
  Description of Artificial Sequence: Synthetic oligonucleotide
  Antisense strand to SEQ ID NO: 871030
uucuauagucacggaaaca

SEQ ID NO: 871032 - RNA, 19 nt, Artificial Sequence
  Description of Artificial Sequence: Synthetic oligonucleotide
  Sense strand starting at position 3230 of SEQ ID NO: 588520
aaacaauggguuuguuauu

SEQ ID NO: 871033 - RNA, 19 nt, Artificial Sequence
  Description of Artificial Sequence: Synthetic oligonucleotide
  Antisense strand to SEQ ID NO: 871032
aauaacaaacccauuguuu

SEQ ID NO: 871034 - RNA, 19 nt, Artificial Sequence
  Description of Artificial Sequence: Synthetic oligonucleotide
  Sense strand starting at position 3597 of SEQ ID NO: 588520
aggcaagacuaguuaacaa

SEQ ID NO: 871035 - RNA, 19 nt, Artificial Sequence
  Description of Artificial Sequence: Synthetic oligonucleotide
  Antisense strand to SEQ ID NO: 871034
uuguuaacuagucuugccu

SEQ ID NO: 871036 - RNA, 19 nt, Artificial Sequence
  Description of Artificial Sequence: Synthetic oligonucleotide
  Sense strand starting at position 3622 of SEQ ID NO: 588520
aguuccuccuaugaagaaa

SEQ ID NO: 871037 - RNA, 19 nt, Artificial Sequence
  Description of Artificial Sequence: Synthetic oligonucleotide
  Antisense strand to SEQ ID NO: 871036
uuucuucauaggaggaacu

SEQ ID NO: 871038 - RNA, 19 nt, Artificial Sequence
  Description of Artificial Sequence: Synthetic oligonucleotide
  Sense strand starting at position 3634 of SEQ ID NO: 588520
gaagaaauuccagguucuc

SEQ ID NO: 871039 - RNA, 19 nt, Artificial Sequence
  Description of Artificial Sequence: Synthetic oligonucleotide
  Antisense strand to SEQ ID NO: 871038
gagaaccuggaauuucuuc

SEQ ID NO: 871040 - RNA, 19 nt, Artificial Sequence
  Description of Artificial Sequence: Synthetic oligonucleotide
  Sense strand starting at position 3645 of SEQ ID NO: 588520
agguucucugcguguacaa

SEQ ID NO: 871041 - RNA, 19 nt, Artificial Sequence
  Description of Artificial Sequence: Synthetic oligonucleotide
  Antisense strand to SEQ ID NO: 871040
uuguacacgcagagaaccu

SEQ ID NO: 871042 - RNA, 19 nt, Artificial Sequence
  Description of Artificial Sequence: Synthetic oligonucleotide
  Sense strand starting at position 3647 of SEQ ID NO: 588520
guucucugcguguacaaau

SEQ ID NO: 871043 - RNA, 19 nt, Artificial Sequence
  Description of Artificial Sequence: Synthetic oligonucleotide
  Antisense strand to SEQ ID NO: 871042
auuuguacacgcagagaac

SEQ ID NO: 871044 - RNA, 19 nt, Artificial Sequence
  Description of Artificial Sequence: Synthetic oligonucleotide
  Sense strand starting at position 3654 of SEQ ID NO: 588520
gcguguacaaaucacauga

SEQ ID NO: 871045 - RNA, 19 nt, Artificial Sequence
  Description of Artificial Sequence: Synthetic oligonucleotide
  Antisense strand to SEQ ID NO: 871044
ucaugugauuuguacacgc

SEQ ID NO: 871046 - RNA, 19 nt, Artificial Sequence
  Description of Artificial Sequence: Synthetic oligonucleotide
  Sense strand starting at position 3656 of SEQ ID NO: 588520
guguacaaaucacaugaau

SEQ ID NO: 871047 - RNA, 19 nt, Artificial Sequence
  Description of Artificial Sequence: Synthetic oligonucleotide
  Antisense strand to SEQ ID NO: 871046
auucaugugauuuguacac

SEQ ID NO: 871048 - RNA, 19 nt, Artificial Sequence
  Description of Artificial Sequence: Synthetic oligonucleotide
  Sense strand starting at position 3667 of SEQ ID NO: 588520
acaugaauguguguacaca

SEQ ID NO: 871049 - RNA, 19 nt, Artificial Sequence
  Description of Artificial Sequence: Synthetic oligonucleotide
  Antisense strand to SEQ ID NO: 871048
uguguacacacauucaugu

SEQ ID NO: 871050 - RNA, 19 nt, Artificial Sequence
  Description of Artificial Sequence: Synthetic oligonucleotide
  Sense strand starting at position 3757 of SEQ ID NO: 588520
auguauuacagguguccuu

SEQ ID NO: 871051 - RNA, 19 nt, Artificial Sequence
  Description of Artificial Sequence: Synthetic oligonucleotide
  Antisense strand to SEQ ID NO: 871050
aaggacaccuguaauacau

SEQ ID NO: 871052 - RNA, 19 nt, Artificial Sequence
  Description of Artificial Sequence: Synthetic oligonucleotide
  Sense strand starting at position 49 of SEQ ID NO: 588521
auccuuggagcucaaaguu

SEQ ID NO: 871053 - RNA, 19 nt, Artificial Sequence
  Description of Artificial Sequence: Synthetic oligonucleotide
  Antisense strand to SEQ ID NO: 871052
aacuuugagcuccaaggau

SEQ ID NO: 871054 - RNA, 19 nt, Artificial Sequence
  Description of Artificial Sequence: Synthetic oligonucleotide
  Sense strand starting at position 64 of SEQ ID NO: 588521
aguugaacucuugggauuc

SEQ ID NO: 871055 - RNA, 19 nt, Artificial Sequence
  Description of Artificial Sequence: Synthetic oligonucleotide
  Antisense strand to SEQ ID NO: 871054
gaaucccaagaguucaacu

SEQ ID NO: 871056 - RNA, 19 nt, Artificial Sequence
  Description of Artificial Sequence: Synthetic oligonucleotide
  Sense strand starting at position 247 of SEQ ID NO: 588521
gagugcuaucuguggacca

SEQ ID NO: 871057 - RNA, 19 nt, Artificial Sequence
  Description of Artificial Sequence: Synthetic oligonucleotide
  Antisense strand to SEQ ID NO: 871056
ugguccacagauagcacuc

SEQ ID NO: 871058 - RNA, 19 nt, Artificial Sequence
  Description of Artificial Sequence: Synthetic oligonucleotide
  Sense strand starting at position 249 of SEQ ID NO: 588521
gugcuaucuguggaccauu

SEQ ID NO: 871059 - RNA, 19 nt, Artificial Sequence
  Description of Artificial Sequence: Synthetic oligonucleotide
  Antisense strand to SEQ ID NO: 871058
aaugguccacagauagcac

SEQ ID NO: 871060 - RNA, 19 nt, Artificial Sequence
  Description of Artificial Sequence: Synthetic oligonucleotide
  Sense strand starting at position 354 of SEQ ID NO: 588521
cgaguauucgguagcaggu

SEQ ID NO: 871061 - RNA, 19 nt, Artificial Sequence
  Description of Artificial Sequence: Synthetic oligonucleotide
  Antisense strand to SEQ ID NO: 871060
accugcuaccgaauacucg

SEQ ID NO: 871062 - RNA, 19 nt, Artificial Sequence
  Description of Artificial Sequence: Synthetic oligonucleotide
  Sense strand starting at position 421 of SEQ ID NO: 588521
cagagaaagcccugucaaa

SEQ ID NO: 871063 - RNA, 19 nt, Artificial Sequence
  Description of Artificial Sequence: Synthetic oligonucleotide
  Antisense strand to SEQ ID NO: 871062
uuugacagggcuuucucug

SEQ ID NO: 871064 - RNA, 19 nt, Artificial Sequence
  Description of Artificial Sequence: Synthetic oligonucleotide
  Sense strand starting at position 483 of SEQ ID NO: 588521
gcaucaugacagugggacu

SEQ ID NO: 871065 - RNA, 19 nt, Artificial Sequence
  Description of Artificial Sequence: Synthetic oligonucleotide
  Antisense strand to SEQ ID NO: 871064
agucccacugucaugaugc

SEQ ID NO: 871066 - RNA, 19 nt, Artificial Sequence
  Description of Artificial Sequence: Synthetic oligonucleotide
  Sense strand starting at position 575 of SEQ ID NO: 588521
guuaaacuguccucaucca

SEQ ID NO: 871067 - RNA, 19 nt, Artificial Sequence
  Description of Artificial Sequence: Synthetic oligonucleotide
  Antisense strand to SEQ ID NO: 871066
uggaugaggacaguuuaac

SEQ ID NO: 871068 - RNA, 19 nt, Artificial Sequence
  Description of Artificial Sequence: Synthetic oligonucleotide
  Sense strand starting at position 782 of SEQ ID NO: 588521
gcuaaaccucucugagucu

SEQ ID NO: 871069 - RNA, 19 nt, Artificial Sequence
  Description of Artificial Sequence: Synthetic oligonucleotide
  Antisense strand to SEQ ID NO: 871068
agacucagagagguuuagc

SEQ ID NO: 871070 - RNA, 19 nt, Artificial Sequence
  Description of Artificial Sequence: Synthetic oligonucleotide
  Sense strand starting at position 832 of SEQ ID NO: 588521
uguuguaagaguuauauga

SEQ ID NO: 871071 - RNA, 19 nt, Artificial Sequence
  Description of Artificial Sequence: Synthetic oligonucleotide
  Antisense strand to SEQ ID NO: 871070
ucauauaacucuuacaaca

SEQ ID NO: 871072 - RNA, 19 nt, Artificial Sequence
  Description of Artificial Sequence: Synthetic oligonucleotide
  Sense strand starting at position 836 of SEQ ID NO: 588521
guaagaguuauaugagaug

SEQ ID NO: 871073 - RNA, 19 nt, Artificial Sequence
  Description of Artificial Sequence: Synthetic oligonucleotide
  Antisense strand to SEQ ID NO: 871072
caucucauauaacucuuac

SEQ ID NO: 871074 - RNA, 19 nt, Artificial Sequence
  Description of Artificial Sequence: Synthetic oligonucleotide
  Sense strand starting at position 882 of SEQ ID NO: 588521
cguacuggugcucaacaau

SEQ ID NO: 871075 - RNA, 19 nt, Artificial Sequence
  Description of Artificial Sequence: Synthetic oligonucleotide
  Antisense strand to SEQ ID NO: 871074
auuguugagcaccaguacg

SEQ ID NO: 871076 - RNA, 19 nt, Artificial Sequence
  Description of Artificial Sequence: Synthetic oligonucleotide
  Sense strand starting at position 960 of SEQ ID NO: 588521
guuauuccaccugaucuua

SEQ ID NO: 871077 - RNA, 19 nt, Artificial Sequence
  Description of Artificial Sequence: Synthetic oligonucleotide
  Antisense strand to SEQ ID NO: 871076
uaagaucagguggaauaac

SEQ ID NO: 871078 - RNA, 19 nt, Artificial Sequence
  Description of Artificial Sequence: Synthetic oligonucleotide
  Sense strand starting at position 1084 of SEQ ID NO: 588521
aguuucugucuccacuaaa

SEQ ID NO: 871079 - RNA, 19 nt, Artificial Sequence
  Description of Artificial Sequence: Synthetic oligonucleotide
  Antisense strand to SEQ ID NO: 871078
uuuaguggagacagaaacu

SEQ ID NO: 871080 - RNA, 19 nt, Artificial Sequence
  Description of Artificial Sequence: Synthetic oligonucleotide
  Sense strand starting at position 2617 of SEQ ID NO: 588521
gaggcugugcugucgugua

SEQ ID NO: 871081 - RNA, 19 nt, Artificial Sequence
  Description of Artificial Sequence: Synthetic oligonucleotide
  Antisense strand to SEQ ID NO: 871080
uacacgacagcacagccuc

SEQ ID NO: 871082 - RNA, 19 nt, Artificial Sequence
  Description of Artificial Sequence: Synthetic oligonucleotide
  Sense strand starting at position 2679 of SEQ ID NO: 588521
acagcuagcuugucagaag

SEQ ID NO: 871083 - RNA, 19 nt, Artificial Sequence
  Description of Artificial Sequence: Synthetic oligonucleotide
  Antisense strand to SEQ ID NO: 871082
cuucugacaagcuagcugu

SEQ ID NO: 871084 - RNA, 19 nt, Artificial Sequence
  Description of Artificial Sequence: Synthetic oligonucleotide
  Sense strand starting at position 2701 of SEQ ID NO: 588521
agcaauucugagggcuaua

SEQ ID NO: 871085 - RNA, 19 nt, Artificial Sequence
  Description of Artificial Sequence: Synthetic oligonucleotide
  Antisense strand to SEQ ID NO: 871084
uauagcccucagaauugcu

SEQ ID NO: 871086 - RNA, 19 nt, Artificial Sequence
  Description of Artificial Sequence: Synthetic oligonucleotide
  Sense strand starting at position 2711 of SEQ ID NO: 588521
agggcuauaaugugcauua

SEQ ID NO: 871087 - RNA, 19 nt, Artificial Sequence
  Description of Artificial Sequence: Synthetic oligonucleotide
  Antisense strand to SEQ ID NO: 871086
uaaugcacauuauagcccu

SEQ ID NO: 871088 - RNA, 19 nt, Artificial Sequence
  Description of Artificial Sequence: Synthetic oligonucleotide
  Sense strand starting at position 2713 of SEQ ID NO: 588521
ggcuauaaugugcauuaca

SEQ ID NO: 871089 - RNA, 19 nt, Artificial Sequence
  Description of Artificial Sequence: Synthetic oligonucleotide
  Antisense strand to SEQ ID NO: 871088
uguaaugcacauuauagcc

SEQ ID NO: 871090 - RNA, 19 nt, Artificial Sequence
  Description of Artificial Sequence: Synthetic oligonucleotide
  Sense strand starting at position 2816 of SEQ ID NO: 588521
ugcaaaugauaugucgaga

SEQ ID NO: 871091 - RNA, 19 nt, Artificial Sequence
  Description of Artificial Sequence: Synthetic oligonucleotide
  Antisense strand to SEQ ID NO: 871090
ucucgacauaucauuugca

SEQ ID NO: 871092 - RNA, 19 nt, Artificial Sequence
  Description of Artificial Sequence: Synthetic oligonucleotide
  Sense strand starting at position 2821 of SEQ ID NO: 588521
augauaugucgagagcccu

SEQ ID NO: 871093 - RNA, 19 nt, Artificial Sequence
  Description of Artificial Sequence: Synthetic oligonucleotide
  Antisense strand to SEQ ID NO: 871092
agggcucucgacauaucau

SEQ ID NO: 871094 - RNA, 19 nt, Artificial Sequence
  Description of Artificial Sequence: Synthetic oligonucleotide
  Sense strand starting at position 2937 of SEQ ID NO: 588521
gcgucuaguauuuguuaca

SEQ ID NO: 871095 - RNA, 19 nt, Artificial Sequence
  Description of Artificial Sequence: Synthetic oligonucleotide
  Antisense strand to SEQ ID NO: 871094
uguaacaaauacuagacgc

SEQ ID NO: 871096 - RNA, 19 nt, Artificial Sequence
  Description of Artificial Sequence: Synthetic oligonucleotide
  Sense strand starting at position 2938 of SEQ ID NO: 588521
cgucuaguauuuguuacau

SEQ ID NO: 871097 - RNA, 19 nt, Artificial Sequence
  Description of Artificial Sequence: Synthetic oligonucleotide
  Antisense strand to SEQ ID NO: 871096
auguaacaaauacuagacg

SEQ ID NO: 871098 - RNA, 19 nt, Artificial Sequence
  Description of Artificial Sequence: Synthetic oligonucleotide
  Sense strand starting at position 3027 of SEQ ID NO: 588521
auauaaggcaaguauggua

SEQ ID NO: 871099 - RNA, 19 nt, Artificial Sequence
  Description of Artificial Sequence: Synthetic oligonucleotide
  Antisense strand to SEQ ID NO: 871098
uaccauacuugccuuauau

SEQ ID NO: 871100 - RNA, 19 nt, Artificial Sequence
  Description of Artificial Sequence: Synthetic oligonucleotide
  Sense strand starting at position 3040 of SEQ ID NO: 588521
augguauauuucuaucacu

SEQ ID NO: 871101 - RNA, 19 nt, Artificial Sequence
  Description of Artificial Sequence: Synthetic oligonucleotide
  Antisense strand to SEQ ID NO: 871100
agugauagaaauauaccau

SEQ ID NO: 871102 - RNA, 19 nt, Artificial Sequence
  Description of Artificial Sequence: Synthetic oligonucleotide
  Sense strand starting at position 3067 of SEQ ID NO: 588521
cgaagugccagguacuauu

SEQ ID NO: 871103 - RNA, 19 nt, Artificial Sequence
  Description of Artificial Sequence: Synthetic oligonucleotide
  Antisense strand to SEQ ID NO: 871102
aauaguaccuggcacuucg

SEQ ID NO: 871104 - RNA, 19 nt, Artificial Sequence
  Description of Artificial Sequence: Synthetic oligonucleotide
  Sense strand starting at position 3091 of SEQ ID NO: 588521
ugguuuaaauauguuguca

SEQ ID NO: 871105 - RNA, 19 nt, Artificial Sequence
  Description of Artificial Sequence: Synthetic oligonucleotide
  Antisense strand to SEQ ID NO: 871104
ugacaacauauuuaaacca

SEQ ID NO: 871106 - RNA, 19 nt, Artificial Sequence
  Description of Artificial Sequence: Synthetic oligonucleotide
  Sense strand starting at position 3119 of SEQ ID NO: 588521
acaccaucccuuugaggga

SEQ ID NO: 871107 - RNA, 19 nt, Artificial Sequence
  Description of Artificial Sequence: Synthetic oligonucleotide
  Antisense strand to SEQ ID NO: 871106
ucccucaaagggauggugu

SEQ ID NO: 871108 - RNA, 19 nt, Artificial Sequence
  Description of Artificial Sequence: Synthetic oligonucleotide
  Sense strand starting at position 3206 of SEQ ID NO: 588521
aaggucacauggcuaauau

SEQ ID NO: 871109 - RNA, 19 nt, Artificial Sequence
  Description of Artificial Sequence: Synthetic oligonucleotide
  Antisense strand to SEQ ID NO: 871108
auauuagccaugugaccuu

SEQ ID NO: 871110 - RNA, 19 nt, Artificial Sequence
  Description of Artificial Sequence: Synthetic oligonucleotide
  Sense strand starting at position 3214 of SEQ ID NO: 588521
auggcuaauaugugaugga

SEQ ID NO: 871111 - RNA, 19 nt, Artificial Sequence
  Description of Artificial Sequence: Synthetic oligonucleotide
  Antisense strand to SEQ ID NO: 871110
uccaucacauauuagccau

SEQ ID NO: 871112 - RNA, 19 nt, Artificial Sequence
  Description of Artificial Sequence: Synthetic oligonucleotide
  Sense strand starting at position 3221 of SEQ ID NO: 588521
auaugugauggaggugaga

SEQ ID NO: 871113 - RNA, 19 nt, Artificial Sequence
  Description of Artificial Sequence: Synthetic oligonucleotide
  Antisense strand to SEQ ID NO: 871112
ucucaccuccaucacauau

SEQ ID NO: 871114 - RNA, 19 nt, Artificial Sequence
  Description of Artificial Sequence: Synthetic oligonucleotide
  Sense strand starting at position 3223 of SEQ ID NO: 588521
augugauggaggugagacu

SEQ ID NO: 871115 - RNA, 19 nt, Artificial Sequence
  Description of Artificial Sequence: Synthetic oligonucleotide
  Antisense strand to SEQ ID NO: 871114
agucucaccuccaucacau

SEQ ID NO: 871116 - RNA, 19 nt, Artificial Sequence
  Description of Artificial Sequence: Synthetic oligonucleotide
  Sense strand starting at position 3285 of SEQ ID NO: 588521
caguccugccacugagaaa

SEQ ID NO: 871117 - RNA, 19 nt, Artificial Sequence
  Description of Artificial Sequence: Synthetic oligonucleotide
  Antisense strand to SEQ ID NO: 871116
uuucucaguggcaggacug

SEQ ID NO: 871118 - RNA, 19 nt, Artificial Sequence
  Description of Artificial Sequence: Synthetic oligonucleotide
  Sense strand starting at position 3538 of SEQ ID NO: 588521
uuauuucuaggcugucuga

SEQ ID NO: 871119 - RNA, 19 nt, Artificial Sequence
  Description of Artificial Sequence: Synthetic oligonucleotide
  Antisense strand to SEQ ID NO: 871118
ucagacagccuagaaauaa

SEQ ID NO: 871120 - RNA, 19 nt, Artificial Sequence
  Description of Artificial Sequence: Synthetic oligonucleotide
  Sense strand starting at position 3578 of SEQ ID NO: 588521
guuguaacaucaucauaua

SEQ ID NO: 871121 - RNA, 19 nt, Artificial Sequence
  Description of Artificial Sequence: Synthetic oligonucleotide
  Antisense strand to SEQ ID NO: 871120
uauaugaugauguuacaac

SEQ ID NO: 871122 - RNA, 19 nt, Artificial Sequence
  Description of Artificial Sequence: Synthetic oligonucleotide
  Sense strand starting at position 3591 of SEQ ID NO: 588521
cauauaaaucucugucggu

SEQ ID NO: 871123 - RNA, 19 nt, Artificial Sequence
  Description of Artificial Sequence: Synthetic oligonucleotide
  Antisense strand to SEQ ID NO: 871122
accgacagagauuuauaug

SEQ ID NO: 871124 - RNA, 19 nt, Artificial Sequence
  Description of Artificial Sequence: Synthetic oligonucleotide
  Sense strand starting at position 3592 of SEQ ID NO: 588521
auauaaaucucugucgguu

SEQ ID NO: 871125 - RNA, 19 nt, Artificial Sequence
  Description of Artificial Sequence: Synthetic oligonucleotide
  Antisense strand to SEQ ID NO: 871124
aaccgacagagauuuauau

SEQ ID NO: 871126 - RNA, 19 nt, Artificial Sequence
  Description of Artificial Sequence: Synthetic oligonucleotide
  Sense strand starting at position 3596 of SEQ ID NO: 588521
aaaucucugucgguuaauu

SEQ ID NO: 871127 - RNA, 19 nt, Artificial Sequence
  Description of Artificial Sequence: Synthetic oligonucleotide
  Antisense strand to SEQ ID NO: 871126
aauuaaccgacagagauuu

SEQ ID NO: 871128 - RNA, 19 nt, Artificial Sequence
  Description of Artificial Sequence: Synthetic oligonucleotide
  Sense strand starting at position 3934 of SEQ ID NO: 588521
uacauuguguaucuguaca

SEQ ID NO: 871129 - RNA, 19 nt, Artificial Sequence
  Description of Artificial Sequence: Synthetic oligonucleotide
  Antisense strand to SEQ ID NO: 871128
uguacagauacacaaugua

SEQ ID NO: 871130 - RNA, 19 nt, Artificial Sequence
  Description of Artificial Sequence: Synthetic oligonucleotide
  Sense strand starting at position 3958 of SEQ ID NO: 588521
aggcauugugcugagaacu

SEQ ID NO: 871131 - RNA, 19 nt, Artificial Sequence
  Description of Artificial Sequence: Synthetic oligonucleotide
  Antisense strand to SEQ ID NO: 871130
aguucucagcacaaugccu

SEQ ID NO: 871132 - RNA, 19 nt, Artificial Sequence
  Description of Artificial Sequence: Synthetic oligonucleotide
  Sense strand starting at position 290 of SEQ ID NO: 588522
caaggagaugccggaaaua

SEQ ID NO: 871133 - RNA, 19 nt, Artificial Sequence
  Description of Artificial Sequence: Synthetic oligonucleotide
  Antisense strand to SEQ ID NO: 871132
uauuuccggcaucuccuug

SEQ ID NO: 871134 - RNA, 19 nt, Artificial Sequence
  Description of Artificial Sequence: Synthetic oligonucleotide
  Sense strand starting at position 299 of SEQ ID NO: 588522
gccggaaauacucagguuu

SEQ ID NO: 871135 - RNA, 19 nt, Artificial Sequence
  Description of Artificial Sequence: Synthetic oligonucleotide
  Antisense strand to SEQ ID NO: 871134
aaaccugaguauuuccggc

SEQ ID NO: 871136 - RNA, 19 nt, Artificial Sequence
  Description of Artificial Sequence: Synthetic oligonucleotide
  Sense strand starting at position 349 of SEQ ID NO: 588522
ggagcagaauuugauccua

SEQ ID NO: 871137 - RNA, 19 nt, Artificial Sequence
  Description of Artificial Sequence: Synthetic oligonucleotide
  Antisense strand to SEQ ID NO: 871136
uaggaucaaauucugcucc

SEQ ID NO: 871138 - RNA, 19 nt, Artificial Sequence
  Description of Artificial Sequence: Synthetic oligonucleotide
  Sense strand starting at position 354 of SEQ ID NO: 588522
agaauuugauccuaaaugu

SEQ ID NO: 871139 - RNA, 19 nt, Artificial Sequence
  Description of Artificial Sequence: Synthetic oligonucleotide
  Antisense strand to SEQ ID NO: 871138
acauuuaggaucaaauucu

SEQ ID NO: 871140 - RNA, 19 nt, Artificial Sequence
  Description of Artificial Sequence: Synthetic oligonucleotide
  Sense strand starting at position 470 of SEQ ID NO: 588522
cuagcuggucuggaacaga

SEQ ID NO: 871141 - RNA, 19 nt, Artificial Sequence
  Description of Artificial Sequence: Synthetic oligonucleotide
  Antisense strand to SEQ ID NO: 871140
ucuguuccagaccagcuag

SEQ ID NO: 871142 - RNA, 19 nt, Artificial Sequence
  Description of Artificial Sequence: Synthetic oligonucleotide
  Sense strand starting at position 644 of SEQ ID NO: 588522
agaucacaccugugaguuu

SEQ ID NO: 871143 - RNA, 19 nt, Artificial Sequence
  Description of Artificial Sequence: Synthetic oligonucleotide
  Antisense strand to SEQ ID NO: 871142
aaacucacaggugugaucu

SEQ ID NO: 871144 - RNA, 19 nt, Artificial Sequence
  Description of Artificial Sequence: Synthetic oligonucleotide
  Sense strand starting at position 647 of SEQ ID NO: 588522
ucacaccugugaguuuaua

SEQ ID NO: 871145 - RNA, 19 nt, Artificial Sequence
  Description of Artificial Sequence: Synthetic oligonucleotide
  Antisense strand to SEQ ID NO: 871144
uauaaacucacagguguga

SEQ ID NO: 871146 - RNA, 19 nt, Artificial Sequence
  Description of Artificial Sequence: Synthetic oligonucleotide
  Sense strand starting at position 723 of SEQ ID NO: 588522
gagggucaguaucugaaga

SEQ ID NO: 871147 - RNA, 19 nt, Artificial Sequence
  Description of Artificial Sequence: Synthetic oligonucleotide
  Antisense strand to SEQ ID NO: 871146
ucuucagauacugacccuc

SEQ ID NO: 871148 - RNA, 19 nt, Artificial Sequence
  Description of Artificial Sequence: Synthetic oligonucleotide
  Sense strand starting at position 880 of SEQ ID NO: 588522
aucugaaguucuuugauga

SEQ ID NO: 871149 - RNA, 19 nt, Artificial Sequence
  Description of Artificial Sequence: Synthetic oligonucleotide
  Antisense strand to SEQ ID NO: 871148
ucaucaaagaacuucagau

SEQ ID NO: 871150 - RNA, 19 nt, Artificial Sequence
  Description of Artificial Sequence: Synthetic oligonucleotide
  Sense strand starting at position 881 of SEQ ID NO: 588522
ucugaaguucuuugaugaa

SEQ ID NO: 871151 - RNA, 19 nt, Artificial Sequence
  Description of Artificial Sequence: Synthetic oligonucleotide
  Antisense strand to SEQ ID NO: 871150
uucaucaaagaacuucaga

SEQ ID NO: 871152 - RNA, 19 nt, Artificial Sequence
  Description of Artificial Sequence: Synthetic oligonucleotide
  Sense strand starting at position 942 of SEQ ID NO: 588522
ccaugauagugucccaaau

SEQ ID NO: 871153 - RNA, 19 nt, Artificial Sequence
  Description of Artificial Sequence: Synthetic oligonucleotide
  Antisense strand to SEQ ID NO: 871152
auuugggacacuaucaugg

SEQ ID NO: 871154 - RNA, 19 nt, Artificial Sequence
  Description of Artificial Sequence: Synthetic oligonucleotide
  Sense strand starting at position 978 of SEQ ID NO: 588522
uucuaucaacaauguggaa

SEQ ID NO: 871155 - RNA, 19 nt, Artificial Sequence
  Description of Artificial Sequence: Synthetic oligonucleotide
  Antisense strand to SEQ ID NO: 871154
uuccacauuguugauagaa

SEQ ID NO: 871156 - RNA, 19 nt, Artificial Sequence
  Description of Artificial Sequence: Synthetic oligonucleotide
  Sense strand starting at position 1054 of SEQ ID NO: 588522
aaaggaacuugucugaagu

SEQ ID NO: 871157 - RNA, 19 nt, Artificial Sequence
  Description of Artificial Sequence: Synthetic oligonucleotide
  Antisense strand to SEQ ID NO: 871156
acuucagacaaguuccuuu

SEQ ID NO: 871158 - RNA, 19 nt, Artificial Sequence
  Description of Artificial Sequence: Synthetic oligonucleotide
  Sense strand starting at position 1065 of SEQ ID NO: 588522
ucugaaguuagccagguau

SEQ ID NO: 871159 - RNA, 19 nt, Artificial Sequence
  Description of Artificial Sequence: Synthetic oligonucleotide
  Antisense strand to SEQ ID NO: 871158
auaccuggcuaacuucaga

SEQ ID NO: 871160 - RNA, 19 nt, Artificial Sequence
  Description of Artificial Sequence: Synthetic oligonucleotide
  Sense strand starting at position 1067 of SEQ ID NO: 588522
ugaaguuagccagguauca

SEQ ID NO: 871161 - RNA, 19 nt, Artificial Sequence
  Description of Artificial Sequence: Synthetic oligonucleotide
  Antisense strand to SEQ ID NO: 871160
ugauaccuggcuaacuuca

SEQ ID NO: 871162 - RNA, 19 nt, Artificial Sequence
  Description of Artificial Sequence: Synthetic oligonucleotide
  Sense strand starting at position 1389 of SEQ ID NO: 588522
gccagagaccucuguaauc

SEQ ID NO: 871163 - RNA, 19 nt, Artificial Sequence
  Description of Artificial Sequence: Synthetic oligonucleotide
  Antisense strand to SEQ ID NO: 871162
gauuacagaggucucuggc

SEQ ID NO: 871164 - RNA, 19 nt, Artificial Sequence
  Description of Artificial Sequence: Synthetic oligonucleotide
  Sense strand starting at position 1553 of SEQ ID NO: 588522
uagaaucguuaguuggaca

SEQ ID NO: 871165 - RNA, 19 nt, Artificial Sequence
  Description of Artificial Sequence: Synthetic oligonucleotide
  Antisense strand to SEQ ID NO: 871164
uguccaacuaacgauucua

SEQ ID NO: 871166 - RNA, 19 nt, Artificial Sequence
  Description of Artificial Sequence: Synthetic oligonucleotide
  Sense strand starting at position 1588 of SEQ ID NO: 588522
ggaaaugucaaaggcaacu

SEQ ID NO: 871167 - RNA, 19 nt, Artificial Sequence
  Description of Artificial Sequence: Synthetic oligonucleotide
  Antisense strand to SEQ ID NO: 871166
aguugccuuugacauuucc

SEQ ID NO: 871168 - RNA, 19 nt, Artificial Sequence
  Description of Artificial Sequence: Synthetic oligonucleotide
  Sense strand starting at position 1665 of SEQ ID NO: 588522
gccuacauagccuggaaua

SEQ ID NO: 871169 - RNA, 19 nt, Artificial Sequence
  Description of Artificial Sequence: Synthetic oligonucleotide
  Antisense strand to SEQ ID NO: 871168
uauuccaggcuauguaggc

SEQ ID NO: 871170 - RNA, 19 nt, Artificial Sequence
  Description of Artificial Sequence: Synthetic oligonucleotide
  Sense strand starting at position 1667 of SEQ ID NO: 588522
cuacauagccuggaauacu

SEQ ID NO: 871171 - RNA, 19 nt, Artificial Sequence
  Description of Artificial Sequence: Synthetic oligonucleotide
  Antisense strand to SEQ ID NO: 871170
aguauuccaggcuauguag

SEQ ID NO: 871172 - RNA, 19 nt, Artificial Sequence
  Description of Artificial Sequence: Synthetic oligonucleotide
  Sense strand starting at position 1830 of SEQ ID NO: 588522
gcgaaaguucaggaaucgu

SEQ ID NO: 871173 - RNA, 19 nt, Artificial Sequence
  Description of Artificial Sequence: Synthetic oligonucleotide
  Antisense strand to SEQ ID NO: 871172
acgauuccugaacuuucgc

SEQ ID NO: 871174 - RNA, 19 nt, Artificial Sequence
  Description of Artificial Sequence: Synthetic oligonucleotide
  Sense strand starting at position 1954 of SEQ ID NO: 588522
gcgcuugaaccagagugaa

SEQ ID NO: 871175 - RNA, 19 nt, Artificial Sequence
  Description of Artificial Sequence: Synthetic oligonucleotide
  Antisense strand to SEQ ID NO: 871174
uucacucugguucaagcgc

SEQ ID NO: 871176 - RNA, 19 nt, Artificial Sequence
  Description of Artificial Sequence: Synthetic oligonucleotide
  Sense strand starting at position 2311 of SEQ ID NO: 588522
acauguaguucugcagaaa

SEQ ID NO: 871177 - RNA, 19 nt, Artificial Sequence
  Description of Artificial Sequence: Synthetic oligonucleotide
  Antisense strand to SEQ ID NO: 871176
uuucugcagaacuacaugu

SEQ ID NO: 871178 - RNA, 19 nt, Artificial Sequence
  Description of Artificial Sequence: Synthetic oligonucleotide
  Sense strand starting at position 2312 of SEQ ID NO: 588522
cauguaguucugcagaaag

SEQ ID NO: 871179 - RNA, 19 nt, Artificial Sequence
  Description of Artificial Sequence: Synthetic oligonucleotide
  Antisense strand to SEQ ID NO: 871178
cuuucugcagaacuacaug

SEQ ID NO: 871180 - RNA, 19 nt, Artificial Sequence
  Description of Artificial Sequence: Synthetic oligonucleotide
  Sense strand starting at position 2314 of SEQ ID NO: 588522
uguaguucugcagaaagga

SEQ ID NO: 871181 - RNA, 19 nt, Artificial Sequence
  Description of Artificial Sequence: Synthetic oligonucleotide
  Antisense strand to SEQ ID NO: 871180
uccuuucugcagaacuaca

SEQ ID NO: 871182 - RNA, 19 nt, Artificial Sequence
  Description of Artificial Sequence: Synthetic oligonucleotide
  Sense strand starting at position 2369 of SEQ ID NO: 588522
cuagguuuggaaugaggau

SEQ ID NO: 871183 - RNA, 19 nt, Artificial Sequence
  Description of Artificial Sequence: Synthetic oligonucleotide
  Antisense strand to SEQ ID NO: 871182
auccucauuccaaaccuag

SEQ ID NO: 871184 - RNA, 19 nt, Artificial Sequence
  Description of Artificial Sequence: Synthetic oligonucleotide
  Sense strand starting at position 2418 of SEQ ID NO: 588522
agagcuggccauuggaauu

SEQ ID NO: 871185 - RNA, 19 nt, Artificial Sequence
  Description of Artificial Sequence: Synthetic oligonucleotide
  Antisense strand to SEQ ID NO: 871184
aauuccaauggccagcucu

SEQ ID NO: 871186 - RNA, 19 nt, Artificial Sequence
  Description of Artificial Sequence: Synthetic oligonucleotide
  Sense strand starting at position 2461 of SEQ ID NO: 588522
ggaggccauaucgguauaa

SEQ ID NO: 871187 - RNA, 19 nt, Artificial Sequence
  Description of Artificial Sequence: Synthetic oligonucleotide
  Antisense strand to SEQ ID NO: 871186
uuauaccgauauggccucc

SEQ ID NO: 871188 - RNA, 19 nt, Artificial Sequence
  Description of Artificial Sequence: Synthetic oligonucleotide
  Sense strand starting at position 2494 of SEQ ID NO: 588522
cucagcuuuccauacggaa

SEQ ID NO: 871189 - RNA, 19 nt, Artificial Sequence
  Description of Artificial Sequence: Synthetic oligonucleotide
  Antisense strand to SEQ ID NO: 871188
uuccguauggaaagcugag

SEQ ID NO: 871190 - RNA, 19 nt, Artificial Sequence
  Description of Artificial Sequence: Synthetic oligonucleotide
  Sense strand starting at position 2522 of SEQ ID NO: 588522
cggaauuccgcgaguaucu

SEQ ID NO: 871191 - RNA, 19 nt, Artificial Sequence
  Description of Artificial Sequence: Synthetic oligonucleotide
  Antisense strand to SEQ ID NO: 871190
agauacucgcggaauuccg

SEQ ID NO: 871192 - RNA, 19 nt, Artificial Sequence
  Description of Artificial Sequence: Synthetic oligonucleotide
  Sense strand starting at position 2837 of SEQ ID NO: 588522
ugggcaagacucugagguu

SEQ ID NO: 871193 - RNA, 19 nt, Artificial Sequence
  Description of Artificial Sequence: Synthetic oligonucleotide
  Antisense strand to SEQ ID NO: 871192
aaccucagagucuugccca

SEQ ID NO: 871194 - RNA, 19 nt, Artificial Sequence
  Description of Artificial Sequence: Synthetic oligonucleotide
  Sense strand starting at position 3220 of SEQ ID NO: 588522
agugcaguggcguuaacau

SEQ ID NO: 871195 - RNA, 19 nt, Artificial Sequence
  Description of Artificial Sequence: Synthetic oligonucleotide
  Antisense strand to SEQ ID NO: 871194
auguuaacgccacugcacu

SEQ ID NO: 871196 - RNA, 19 nt, Artificial Sequence
  Description of Artificial Sequence: Synthetic oligonucleotide
  Sense strand starting at position 3287 of SEQ ID NO: 588522
ucaggcuccugaguaacuu

SEQ ID NO: 871197 - RNA, 19 nt, Artificial Sequence
  Description of Artificial Sequence: Synthetic oligonucleotide
  Antisense strand to SEQ ID NO: 871196
aaguuacucaggagccuga

SEQ ID NO: 871198 - RNA, 19 nt, Artificial Sequence
  Description of Artificial Sequence: Synthetic oligonucleotide
  Sense strand starting at position 3718 of SEQ ID NO: 588522
agcagagaucaagagcuuu

SEQ ID NO: 871199 - RNA, 19 nt, Artificial Sequence
  Description of Artificial Sequence: Synthetic oligonucleotide
  Antisense strand to SEQ ID NO: 871198
aaagcucuugaucucugcu

SEQ ID NO: 871200 - RNA, 19 nt, Artificial Sequence
  Description of Artificial Sequence: Synthetic oligonucleotide
  Sense strand starting at position 3730 of SEQ ID NO: 588522
gagcuuuggguguagggau

SEQ ID NO: 871201 - RNA, 19 nt, Artificial Sequence
  Description of Artificial Sequence: Synthetic oligonucleotide
  Antisense strand to SEQ ID NO: 871200
aucccuacacccaaagcuc

SEQ ID NO: 871202 - RNA, 19 nt, Artificial Sequence
  Description of Artificial Sequence: Synthetic oligonucleotide
  Sense strand starting at position 3738 of SEQ ID NO: 588522
gguguagggauaggucuuu

SEQ ID NO: 871203 - RNA, 19 nt, Artificial Sequence
  Description of Artificial Sequence: Synthetic oligonucleotide
  Antisense strand to SEQ ID NO: 871202
aaagaccuaucccuacacc

SEQ ID NO: 871204 - RNA, 19 nt, Artificial Sequence
  Description of Artificial Sequence: Synthetic oligonucleotide
  Sense strand starting at position 3743 of SEQ ID NO: 588522
agggauaggucuuugacug

SEQ ID NO: 871205 - RNA, 19 nt, Artificial Sequence
  Description of Artificial Sequence: Synthetic oligonucleotide
  Antisense strand to SEQ ID NO: 871204
cagucaaagaccuaucccu

SEQ ID NO: 871206 - RNA, 19 nt, Artificial Sequence
  Description of Artificial Sequence: Synthetic oligonucleotide
  Sense strand starting at position 3748 of SEQ ID NO: 588522
uaggucuuugacuguggaa

SEQ ID NO: 871207 - RNA, 19 nt, Artificial Sequence
  Description of Artificial Sequence: Synthetic oligonucleotide
  Antisense strand to SEQ ID NO: 871206
uuccacagucaaagaccua

SEQ ID NO: 871208 - RNA, 19 nt, Artificial Sequence
  Description of Artificial Sequence: Synthetic oligonucleotide
  Sense strand starting at position 3768 of SEQ ID NO: 588522
gaaggauucuggguccucu

SEQ ID NO: 871209 - RNA, 19 nt, Artificial Sequence
  Description of Artificial Sequence: Synthetic oligonucleotide
  Antisense strand to SEQ ID NO: 871208
agaggacccagaauccuuc

SEQ ID NO: 871210 - RNA, 19 nt, Artificial Sequence
  Description of Artificial Sequence: Synthetic oligonucleotide
  Sense strand starting at position 3926 of SEQ ID NO: 588522
aggauagcagcuggauaua

SEQ ID NO: 871211 - RNA, 19 nt, Artificial Sequence
  Description of Artificial Sequence: Synthetic oligonucleotide
  Antisense strand to SEQ ID NO: 871210
uauauccagcugcuauccu

SEQ ID NO: 871212 - RNA, 19 nt, Artificial Sequence
  Description of Artificial Sequence: Synthetic oligonucleotide
  Sense strand starting at position 24 of SEQ ID NO: 588523
uaaguaauguguguacaaa

SEQ ID NO: 871213 - RNA, 19 nt, Artificial Sequence
  Description of Artificial Sequence: Synthetic oligonucleotide
  Antisense strand to SEQ ID NO: 871212
uuuguacacacauuacuua

SEQ ID NO: 871214 - RNA, 19 nt, Artificial Sequence
  Description of Artificial Sequence: Synthetic oligonucleotide
  Sense strand starting at position 25 of SEQ ID NO: 588523
aaguaauguguguacaaau

SEQ ID NO: 871215 - RNA, 19 nt, Artificial Sequence
  Description of Artificial Sequence: Synthetic oligonucleotide
  Antisense strand to SEQ ID NO: 871214
auuuguacacacauuacuu

SEQ ID NO: 871216 - RNA, 19 nt, Artificial Sequence
  Description of Artificial Sequence: Synthetic oligonucleotide
  Sense strand starting at position 67 of SEQ ID NO: 588523
uuaggcaugcaauaauauu

SEQ ID NO: 871217 - RNA, 19 nt, Artificial Sequence
  Description of Artificial Sequence: Synthetic oligonucleotide
  Antisense strand to SEQ ID NO: 871216
aauauuauugcaugccuaa

SEQ ID NO: 871218 - RNA, 19 nt, Artificial Sequence
  Description of Artificial Sequence: Synthetic oligonucleotide
  Sense strand starting at position 88 of SEQ ID NO: 588523
ucuguuuaacugggacaag

SEQ ID NO: 871219 - RNA, 19 nt, Artificial Sequence
  Description of Artificial Sequence: Synthetic oligonucleotide
  Antisense strand to SEQ ID NO: 871218
cuugucccaguuaaacaga

SEQ ID NO: 871220 - RNA, 19 nt, Artificial Sequence
  Description of Artificial Sequence: Synthetic oligonucleotide
  Sense strand starting at position 206 of SEQ ID NO: 588523
auuguacacuguuuacuaa

SEQ ID NO: 871221 - RNA, 19 nt, Artificial Sequence
  Description of Artificial Sequence: Synthetic oligonucleotide
  Antisense strand to SEQ ID NO: 871220
uuaguaaacaguguacaau

SEQ ID NO: 871222 - RNA, 19 nt, Artificial Sequence
  Description of Artificial Sequence: Synthetic oligonucleotide
  Sense strand starting at position 324 of SEQ ID NO: 588523
uuuacauaugacuguccau

SEQ ID NO: 871223 - RNA, 19 nt, Artificial Sequence
  Description of Artificial Sequence: Synthetic oligonucleotide
  Antisense strand to SEQ ID NO: 871222
auggacagucauauguaaa

SEQ ID NO: 871224 - RNA, 19 nt, Artificial Sequence
  Description of Artificial Sequence: Synthetic oligonucleotide
  Sense strand starting at position 327 of SEQ ID NO: 588523
acauaugacuguccauaua

SEQ ID NO: 871225 - RNA, 19 nt, Artificial Sequence
  Description of Artificial Sequence: Synthetic oligonucleotide
  Antisense strand to SEQ ID NO: 871224
uauauggacagucauaugu

SEQ ID NO: 871226 - RNA, 19 nt, Artificial Sequence
  Description of Artificial Sequence: Synthetic oligonucleotide
  Sense strand starting at position 383 of SEQ ID NO: 588523
uuuaaucuccuggguaacu

SEQ ID NO: 871227 - RNA, 19 nt, Artificial Sequence
  Description of Artificial Sequence: Synthetic oligonucleotide
  Antisense strand to SEQ ID NO: 871226
aguuacccaggagauuaaa

SEQ ID NO: 871228 - RNA, 19 nt, Artificial Sequence
  Description of Artificial Sequence: Synthetic oligonucleotide
  Sense strand starting at position 463 of SEQ ID NO: 588523
ggagcaguagauugagauu

SEQ ID NO: 871229 - RNA, 19 nt, Artificial Sequence
  Description of Artificial Sequence: Synthetic oligonucleotide
  Antisense strand to SEQ ID NO: 871228
aaucucaaucuacugcucc

SEQ ID NO: 871230 - RNA, 19 nt, Artificial Sequence
  Description of Artificial Sequence: Synthetic oligonucleotide
  Sense strand starting at position 496 of SEQ ID NO: 588523
uccauaccugcguauuaaa

SEQ ID NO: 871231 - RNA, 19 nt, Artificial Sequence
  Description of Artificial Sequence: Synthetic oligonucleotide
  Antisense strand to SEQ ID NO: 871230
uuuaauacgcagguaugga

SEQ ID NO: 871232 - RNA, 19 nt, Artificial Sequence
  Description of Artificial Sequence: Synthetic oligonucleotide
  Sense strand starting at position 600 of SEQ ID NO: 588523
ugaagaaacuuagcuagcu

SEQ ID NO: 871233 - RNA, 19 nt, Artificial Sequence
  Description of Artificial Sequence: Synthetic oligonucleotide
  Antisense strand to SEQ ID NO: 871232
agcuagcuaaguuucuuca

SEQ ID NO: 871234 - RNA, 19 nt, Artificial Sequence
  Description of Artificial Sequence: Synthetic oligonucleotide
  Sense strand starting at position 699 of SEQ ID NO: 588523
uuggguuauauacguggaa

SEQ ID NO: 871235 - RNA, 19 nt, Artificial Sequence
  Description of Artificial Sequence: Synthetic oligonucleotide
  Antisense strand to SEQ ID NO: 871234
uuccacguauauaacccaa

SEQ ID NO: 871236 - RNA, 19 nt, Artificial Sequence
  Description of Artificial Sequence: Synthetic oligonucleotide
  Sense strand starting at position 700 of SEQ ID NO: 588523
uggguuauauacguggaau

SEQ ID NO: 871237 - RNA, 19 nt, Artificial Sequence
  Description of Artificial Sequence: Synthetic oligonucleotide
  Antisense strand to SEQ ID NO: 871236
auuccacguauauaaccca

SEQ ID NO: 871238 - RNA, 19 nt, Artificial Sequence
  Description of Artificial Sequence: Synthetic oligonucleotide
  Sense strand starting at position 701 of SEQ ID NO: 588523
ggguuauauacguggaaua

SEQ ID NO: 871239 - RNA, 19 nt, Artificial Sequence
  Description of Artificial Sequence: Synthetic oligonucleotide
  Antisense strand to SEQ ID NO: 871238
uauuccacguauauaaccc

SEQ ID NO: 871240 - RNA, 19 nt, Artificial Sequence
  Description of Artificial Sequence: Synthetic oligonucleotide
  Sense strand starting at position 702 of SEQ ID NO: 588523
gguuauauacguggaauaa

SEQ ID NO: 871241 - RNA, 19 nt, Artificial Sequence
  Description of Artificial Sequence: Synthetic oligonucleotide
  Antisense strand to SEQ ID NO: 871240
uuauuccacguauauaacc

SEQ ID NO: 871242 - RNA, 19 nt, Artificial Sequence
  Description of Artificial Sequence: Synthetic oligonucleotide
  Sense strand starting at position 703 of SEQ ID NO: 588523
guuauauacguggaauaaa

SEQ ID NO: 871243 - RNA, 19 nt, Artificial Sequence
  Description of Artificial Sequence: Synthetic oligonucleotide
  Antisense strand to SEQ ID NO: 871242
uuuauuccacguauauaac

SEQ ID NO: 871244 - RNA, 19 nt, Artificial Sequence
  Description of Artificial Sequence: Synthetic oligonucleotide
  Sense strand starting at position 838 of SEQ ID NO: 588523
gcuagaucauuguuuauug

SEQ ID NO: 871245 - RNA, 19 nt, Artificial Sequence
  Description of Artificial Sequence: Synthetic oligonucleotide
  Antisense strand to SEQ ID NO: 871244
caauaaacaaugaucuagc

SEQ ID NO: 871246 - RNA, 19 nt, Artificial Sequence
  Description of Artificial Sequence: Synthetic oligonucleotide
  Sense strand starting at position 880 of SEQ ID NO: 588523
ggaagcugucacuaccuga

SEQ ID NO: 871247 - RNA, 19 nt, Artificial Sequence
  Description of Artificial Sequence: Synthetic oligonucleotide
  Antisense strand to SEQ ID NO: 871246
ucagguagugacagcuucc

SEQ ID NO: 871248 - RNA, 19 nt, Artificial Sequence
  Description of Artificial Sequence: Synthetic oligonucleotide
  Sense strand starting at position 910 of SEQ ID NO: 588523
gcuguuuauuucgucggga

SEQ ID NO: 871249 - RNA, 19 nt, Artificial Sequence
  Description of Artificial Sequence: Synthetic oligonucleotide
  Antisense strand to SEQ ID NO: 871248
ucccgacgaaauaaacagc

SEQ ID NO: 871250 - RNA, 19 nt, Artificial Sequence
  Description of Artificial Sequence: Synthetic oligonucleotide
  Sense strand starting at position 911 of SEQ ID NO: 588523
cuguuuauuucgucgggag

SEQ ID NO: 871251 - RNA, 19 nt, Artificial Sequence
  Description of Artificial Sequence: Synthetic oligonucleotide
  Antisense strand to SEQ ID NO: 871250
cucccgacgaaauaaacag

SEQ ID NO: 871252 - RNA, 19 nt, Artificial Sequence
  Description of Artificial Sequence: Synthetic oligonucleotide
  Sense strand starting at position 912 of SEQ ID NO: 588523
uguuuauuucgucgggaga

SEQ ID NO: 871253 - RNA, 19 nt, Artificial Sequence
  Description of Artificial Sequence: Synthetic oligonucleotide
  Antisense strand to SEQ ID NO: 871252
ucucccgacgaaauaaaca

SEQ ID NO: 871254 - RNA, 19 nt, Artificial Sequence
  Description of Artificial Sequence: Synthetic oligonucleotide
  Sense strand starting at position 913 of SEQ ID NO: 588523
guuuauuucgucgggagag

SEQ ID NO: 871255 - RNA, 19 nt, Artificial Sequence
  Description of Artificial Sequence: Synthetic oligonucleotide
  Antisense strand to SEQ ID NO: 871254
cucucccgacgaaauaaac

SEQ ID NO: 871256 - RNA, 19 nt, Artificial Sequence
  Description of Artificial Sequence: Synthetic oligonucleotide
  Sense strand starting at position 948 of SEQ ID NO: 588523
uccuaacgaguucgggaaa

SEQ ID NO: 871257 - RNA, 19 nt, Artificial Sequence
  Description of Artificial Sequence: Synthetic oligonucleotide
  Antisense strand to SEQ ID NO: 871256
uuucccgaacucguuagga

SEQ ID NO: 871258 - RNA, 19 nt, Artificial Sequence
  Description of Artificial Sequence: Synthetic oligonucleotide
  Sense strand starting at position 1194 of SEQ ID NO: 588523
cucgauauauuugauaaca

SEQ ID NO: 871259 - RNA, 19 nt, Artificial Sequence
  Description of Artificial Sequence: Synthetic oligonucleotide
  Antisense strand to SEQ ID NO: 871258
uguuaucaaauauaucgag

SEQ ID NO: 871260 - RNA, 19 nt, Artificial Sequence
  Description of Artificial Sequence: Synthetic oligonucleotide
  Sense strand starting at position 2447 of SEQ ID NO: 588523
cgcuaugguccgaggaagu

SEQ ID NO: 871261 - RNA, 19 nt, Artificial Sequence
  Description of Artificial Sequence: Synthetic oligonucleotide
  Antisense strand to SEQ ID NO: 871260
acuuccucggaccauagcg

SEQ ID NO: 871262 - RNA, 19 nt, Artificial Sequence
  Description of Artificial Sequence: Synthetic oligonucleotide
  Sense strand starting at position 2573 of SEQ ID NO: 588523
ccgugaggugugugauuuc

SEQ ID NO: 871263 - RNA, 19 nt, Artificial Sequence
  Description of Artificial Sequence: Synthetic oligonucleotide
  Antisense strand to SEQ ID NO: 871262
gaaaucacacaccucacgg

SEQ ID NO: 871264 - RNA, 19 nt, Artificial Sequence
  Description of Artificial Sequence: Synthetic oligonucleotide
  Sense strand starting at position 2580 of SEQ ID NO: 588523
gugugugauuucccuuaua

SEQ ID NO: 871265 - RNA, 19 nt, Artificial Sequence
  Description of Artificial Sequence: Synthetic oligonucleotide
  Antisense strand to SEQ ID NO: 871264
uauaagggaaaucacacac

SEQ ID NO: 871266 - RNA, 19 nt, Artificial Sequence
  Description of Artificial Sequence: Synthetic oligonucleotide
  Sense strand starting at position 2593 of SEQ ID NO: 588523
cuuauaacgcauugaguag

SEQ ID NO: 871267 - RNA, 19 nt, Artificial Sequence
  Description of Artificial Sequence: Synthetic oligonucleotide
  Antisense strand to SEQ ID NO: 871266
cuacucaaugcguuauaag

SEQ ID NO: 871268 - RNA, 19 nt, Artificial Sequence
  Description of Artificial Sequence: Synthetic oligonucleotide
  Sense strand starting at position 2594 of SEQ ID NO: 588523
uuauaacgcauugaguaga

SEQ ID NO: 871269 - RNA, 19 nt, Artificial Sequence
  Description of Artificial Sequence: Synthetic oligonucleotide
  Antisense strand to SEQ ID NO: 871268
ucuacucaaugcguuauaa

SEQ ID NO: 871270 - RNA, 19 nt, Artificial Sequence
  Description of Artificial Sequence: Synthetic oligonucleotide
  Sense strand starting at position 2597 of SEQ ID NO: 588523
uaacgcauugaguagaguu

SEQ ID NO: 871271 - RNA, 19 nt, Artificial Sequence
  Description of Artificial Sequence: Synthetic oligonucleotide
  Antisense strand to SEQ ID NO: 871270
aacucuacucaaugcguua

SEQ ID NO: 871272 - RNA, 19 nt, Artificial Sequence
  Description of Artificial Sequence: Synthetic oligonucleotide
  Sense strand starting at position 2628 of SEQ ID NO: 588523
agggaugugcauuaacacu

SEQ ID NO: 871273 - RNA, 19 nt, Artificial Sequence
  Description of Artificial Sequence: Synthetic oligonucleotide
  Antisense strand to SEQ ID NO: 871272
aguguuaaugcacaucccu

SEQ ID NO: 871274 - RNA, 19 nt, Artificial Sequence
  Description of Artificial Sequence: Synthetic oligonucleotide
  Sense strand starting at position 2934 of SEQ ID NO: 588523
ugaguacuuagcgaauauu

SEQ ID NO: 871275 - RNA, 19 nt, Artificial Sequence
  Description of Artificial Sequence: Synthetic oligonucleotide
  Antisense strand to SEQ ID NO: 871274
aauauucgcuaaguacuca

SEQ ID NO: 871276 - RNA, 19 nt, Artificial Sequence
  Description of Artificial Sequence: Synthetic oligonucleotide
  Sense strand starting at position 2937 of SEQ ID NO: 588523
guacuuagcgaauauuaau

SEQ ID NO: 871277 - RNA, 19 nt, Artificial Sequence
  Description of Artificial Sequence: Synthetic oligonucleotide
  Antisense strand to SEQ ID NO: 871276
auuaauauucgcuaaguac

SEQ ID NO: 871278 - RNA, 19 nt, Artificial Sequence
  Description of Artificial Sequence: Synthetic oligonucleotide
  Sense strand starting at position 3082 of SEQ ID NO: 588523
ggauucauuccggacaguc

SEQ ID NO: 871279 - RNA, 19 nt, Artificial Sequence
  Description of Artificial Sequence: Synthetic oligonucleotide
  Antisense strand to SEQ ID NO: 871278
gacuguccggaaugaaucc

SEQ ID NO: 871280 - RNA, 19 nt, Artificial Sequence
  Description of Artificial Sequence: Synthetic oligonucleotide
  Sense strand starting at position 3264 of SEQ ID NO: 588523
guacccuuggaguagguaa

SEQ ID NO: 871281 - RNA, 19 nt, Artificial Sequence
  Description of Artificial Sequence: Synthetic oligonucleotide
  Antisense strand to SEQ ID NO: 871280
uuaccuacuccaaggguac

SEQ ID NO: 871282 - RNA, 19 nt, Artificial Sequence
  Description of Artificial Sequence: Synthetic oligonucleotide
  Sense strand starting at position 3487 of SEQ ID NO: 588523
ccaggucuaggcugaaauu

SEQ ID NO: 871283 - RNA, 19 nt, Artificial Sequence
  Description of Artificial Sequence: Synthetic oligonucleotide
  Antisense strand to SEQ ID NO: 871282
aauuucagccuagaccugg

SEQ ID NO: 871284 - RNA, 19 nt, Artificial Sequence
  Description of Artificial Sequence: Synthetic oligonucleotide
  Sense strand starting at position 3513 of SEQ ID NO: 588523
uguguaaauguugacacaa

SEQ ID NO: 871285 - RNA, 19 nt, Artificial Sequence
  Description of Artificial Sequence: Synthetic oligonucleotide
  Antisense strand to SEQ ID NO: 871284
uugugucaacauuuacaca

SEQ ID NO: 871286 - RNA, 19 nt, Artificial Sequence
  Description of Artificial Sequence: Synthetic oligonucleotide
  Sense strand starting at position 3526 of SEQ ID NO: 588523
acacaauaauguuuguaca

SEQ ID NO: 871287 - RNA, 19 nt, Artificial Sequence
  Description of Artificial Sequence: Synthetic oligonucleotide
  Antisense strand to SEQ ID NO: 871286
uguacaaacauuauugugu

SEQ ID NO: 871288 - RNA, 19 nt, Artificial Sequence
  Description of Artificial Sequence: Synthetic oligonucleotide
  Sense strand starting at position 3575 of SEQ ID NO: 588523
aguuaauugcugcauauuc

SEQ ID NO: 871289 - RNA, 19 nt, Artificial Sequence
  Description of Artificial Sequence: Synthetic oligonucleotide
  Antisense strand to SEQ ID NO: 871288
gaauaugcagcaauuaacu

SEQ ID NO: 871290 - RNA, 19 nt, Artificial Sequence
  Description of Artificial Sequence: Synthetic oligonucleotide
  Sense strand starting at position 3635 of SEQ ID NO: 588523
ugcugauaggaauguagau

SEQ ID NO: 871291 - RNA, 19 nt, Artificial Sequence
  Description of Artificial Sequence: Synthetic oligonucleotide
  Antisense strand to SEQ ID NO: 871290
aucuacauuccuaucagca

SEQ ID NO: 871292 - RNA, 19 nt, Artificial Sequence
  Description of Artificial Sequence: Synthetic oligonucleotide
  Sense strand starting at position 63 of SEQ ID NO: 588524
aggagcuauucuguaagag

SEQ ID NO: 871293 - RNA, 19 nt, Artificial Sequence
  Description of Artificial Sequence: Synthetic oligonucleotide
  Antisense strand to SEQ ID NO: 871292
cucuuacagaauagcuccu

SEQ ID NO: 871294 - RNA, 19 nt, Artificial Sequence
  Description of Artificial Sequence: Synthetic oligonucleotide
  Sense strand starting at position 64 of SEQ ID NO: 588524
ggagcuauucuguaagagc

SEQ ID NO: 871295 - RNA, 19 nt, Artificial Sequence
  Description of Artificial Sequence: Synthetic oligonucleotide
  Antisense strand to SEQ ID NO: 871294
gcucuuacagaauagcucc

SEQ ID NO: 871296 - RNA, 19 nt, Artificial Sequence
  Description of Artificial Sequence: Synthetic oligonucleotide
  Sense strand starting at position 72 of SEQ ID NO: 588524
ucuguaagagcacaaguau

SEQ ID NO: 871297 - RNA, 19 nt, Artificial Sequence
  Description of Artificial Sequence: Synthetic oligonucleotide
  Antisense strand to SEQ ID NO: 871296
auacuugugcucuuacaga

SEQ ID NO: 871298 - RNA, 19 nt, Artificial Sequence
  Description of Artificial Sequence: Synthetic oligonucleotide
  Sense strand starting at position 265 of SEQ ID NO: 588524
ccgcuugauagaugaggaa

SEQ ID NO: 871299 - RNA, 19 nt, Artificial Sequence
  Description of Artificial Sequence: Synthetic oligonucleotide
  Antisense strand to SEQ ID NO: 871298
uuccucaucuaucaagcgg

SEQ ID NO: 871300 - RNA, 19 nt, Artificial Sequence
  Description of Artificial Sequence: Synthetic oligonucleotide
  Sense strand starting at position 479 of SEQ ID NO: 588524
uccuccucuuguguuaaau

SEQ ID NO: 871301 - RNA, 19 nt, Artificial Sequence
  Description of Artificial Sequence: Synthetic oligonucleotide
  Antisense strand to SEQ ID NO: 871300
auuuaacacaagaggagga

SEQ ID NO: 871302 - RNA, 19 nt, Artificial Sequence
  Description of Artificial Sequence: Synthetic oligonucleotide
  Sense strand starting at position 502 of SEQ ID NO: 588524
ggauauauggguggcggau

SEQ ID NO: 871303 - RNA, 19 nt, Artificial Sequence
  Description of Artificial Sequence: Synthetic oligonucleotide
  Antisense strand to SEQ ID NO: 871302
auccgccacccauauaucc

SEQ ID NO: 871304 - RNA, 19 nt, Artificial Sequence
  Description of Artificial Sequence: Synthetic oligonucleotide
  Sense strand starting at position 527 of SEQ ID NO: 588524
agcacaguaucaucugacu

SEQ ID NO: 871305 - RNA, 19 nt, Artificial Sequence
  Description of Artificial Sequence: Synthetic oligonucleotide
  Antisense strand to SEQ ID NO: 871304
agucagaugauacugugcu

SEQ ID NO: 871306 - RNA, 19 nt, Artificial Sequence
  Description of Artificial Sequence: Synthetic oligonucleotide
  Sense strand starting at position 536 of SEQ ID NO: 588524
ucaucugacuugccuauga

SEQ ID NO: 871307 - RNA, 19 nt, Artificial Sequence
  Description of Artificial Sequence: Synthetic oligonucleotide
  Antisense strand to SEQ ID NO: 871306
ucauaggcaagucagauga

SEQ ID NO: 871308 - RNA, 19 nt, Artificial Sequence
  Description of Artificial Sequence: Synthetic oligonucleotide
  Sense strand starting at position 538 of SEQ ID NO: 588524
aucugacuugccuaugauu

SEQ ID NO: 871309 - RNA, 19 nt, Artificial Sequence
  Description of Artificial Sequence: Synthetic oligonucleotide
  Antisense strand to SEQ ID NO: 871308
aaucauaggcaagucagau

SEQ ID NO: 871310 - RNA, 19 nt, Artificial Sequence
  Description of Artificial Sequence: Synthetic oligonucleotide
  Sense strand starting at position 550 of SEQ ID NO: 588524
uaugauuucugguagaaua

SEQ ID NO: 871311 - RNA, 19 nt, Artificial Sequence
  Description of Artificial Sequence: Synthetic oligonucleotide
  Antisense strand to SEQ ID NO: 871310
uauucuaccagaaaucaua

SEQ ID NO: 871312 - RNA, 19 nt, Artificial Sequence
  Description of Artificial Sequence: Synthetic oligonucleotide
  Sense strand starting at position 600 of SEQ ID NO: 588524
guugaugcauucccuauua

SEQ ID NO: 871313 - RNA, 19 nt, Artificial Sequence
  Description of Artificial Sequence: Synthetic oligonucleotide
  Antisense strand to SEQ ID NO: 871312
uaauagggaaugcaucaac

SEQ ID NO: 871314 - RNA, 19 nt, Artificial Sequence
  Description of Artificial Sequence: Synthetic oligonucleotide
  Sense strand starting at position 701 of SEQ ID NO: 588524
cuccauaaaucuucgauga

SEQ ID NO: 871315 - RNA, 19 nt, Artificial Sequence
  Description of Artificial Sequence: Synthetic oligonucleotide
  Antisense strand to SEQ ID NO: 871314
ucaucgaagauuuauggag

SEQ ID NO: 871316 - RNA, 19 nt, Artificial Sequence
  Description of Artificial Sequence: Synthetic oligonucleotide
  Sense strand starting at position 702 of SEQ ID NO: 588524
uccauaaaucuucgaugac

SEQ ID NO: 871317 - RNA, 19 nt, Artificial Sequence
  Description of Artificial Sequence: Synthetic oligonucleotide
  Antisense strand to SEQ ID NO: 871316
gucaucgaagauuuaugga

SEQ ID NO: 871318 - RNA, 19 nt, Artificial Sequence
  Description of Artificial Sequence: Synthetic oligonucleotide
  Sense strand starting at position 705 of SEQ ID NO: 588524
auaaaucuucgaugaccga

SEQ ID NO: 871319 - RNA, 19 nt, Artificial Sequence
  Description of Artificial Sequence: Synthetic oligonucleotide
  Antisense strand to SEQ ID NO: 871318
ucggucaucgaagauuuau

SEQ ID NO: 871320 - RNA, 19 nt, Artificial Sequence
  Description of Artificial Sequence: Synthetic oligonucleotide
  Sense strand starting at position 718 of SEQ ID NO: 588524
gaccgacauggguaguaaa

SEQ ID NO: 871321 - RNA, 19 nt, Artificial Sequence
  Description of Artificial Sequence: Synthetic oligonucleotide
  Antisense strand to SEQ ID NO: 871320
uuuacuacccaugucgguc

SEQ ID NO: 871322 - RNA, 19 nt, Artificial Sequence
  Description of Artificial Sequence: Synthetic oligonucleotide
  Sense strand starting at position 1343 of SEQ ID NO: 588524
uggcgaacuucucuuccau

SEQ ID NO: 871323 - RNA, 19 nt, Artificial Sequence
  Description of Artificial Sequence: Synthetic oligonucleotide
  Antisense strand to SEQ ID NO: 871322
auggaagagaaguucgcca

SEQ ID NO: 871324 - RNA, 19 nt, Artificial Sequence
  Description of Artificial Sequence: Synthetic oligonucleotide
  Sense strand starting at position 2325 of SEQ ID NO: 588524
cgacaacugucaguuagaa

SEQ ID NO: 871325 - RNA, 19 nt, Artificial Sequence
  Description of Artificial Sequence: Synthetic oligonucleotide
  Antisense strand to SEQ ID NO: 871324
uucuaacugacaguugucg

SEQ ID NO: 871326 - RNA, 19 nt, Artificial Sequence
  Description of Artificial Sequence: Synthetic oligonucleotide
  Sense strand starting at position 2472 of SEQ ID NO: 588524
gcaugcguaguagaacaau

SEQ ID NO: 871327 - RNA, 19 nt, Artificial Sequence
  Description of Artificial Sequence: Synthetic oligonucleotide
  Antisense strand to SEQ ID NO: 871326
auuguucuacuacgcaugc

SEQ ID NO: 871328 - RNA, 19 nt, Artificial Sequence
  Description of Artificial Sequence: Synthetic oligonucleotide
  Sense strand starting at position 2613 of SEQ ID NO: 588524
gccaaucgaacauguugau

SEQ ID NO: 871329 - RNA, 19 nt, Artificial Sequence
  Description of Artificial Sequence: Synthetic oligonucleotide
  Antisense strand to SEQ ID NO: 871328
aucaacauguucgauuggc

SEQ ID NO: 871330 - RNA, 19 nt, Artificial Sequence
  Description of Artificial Sequence: Synthetic oligonucleotide
  Sense strand starting at position 2787 of SEQ ID NO: 588524
guuaauggcaaaugaauag

SEQ ID NO: 871331 - RNA, 19 nt, Artificial Sequence
  Description of Artificial Sequence: Synthetic oligonucleotide
  Antisense strand to SEQ ID NO: 871330
cuauucauuugccauuaac

SEQ ID NO: 871332 - RNA, 19 nt, Artificial Sequence
  Description of Artificial Sequence: Synthetic oligonucleotide
  Sense strand starting at position 2907 of SEQ ID NO: 588524
uugagaaguuuagaaagaa

SEQ ID NO: 871333 - RNA, 19 nt, Artificial Sequence
  Description of Artificial Sequence: Synthetic oligonucleotide
  Antisense strand to SEQ ID NO: 871332
uucuuucuaaacuucucaa

SEQ ID NO: 871334 - RNA, 19 nt, Artificial Sequence
  Description of Artificial Sequence: Synthetic oligonucleotide
  Sense strand starting at position 2926 of SEQ ID NO: 588524
aguuuaaggacucgaccau

SEQ ID NO: 871335 - RNA, 19 nt, Artificial Sequence
  Description of Artificial Sequence: Synthetic oligonucleotide
  Antisense strand to SEQ ID NO: 871334
auggucgaguccuuaaacu

SEQ ID NO: 871336 - RNA, 19 nt, Artificial Sequence
  Description of Artificial Sequence: Synthetic oligonucleotide
  Sense strand starting at position 2927 of SEQ ID NO: 588524
guuuaaggacucgaccaua

SEQ ID NO: 871337 - RNA, 19 nt, Artificial Sequence
  Description of Artificial Sequence: Synthetic oligonucleotide
  Antisense strand to SEQ ID NO: 871336
uauggucgaguccuuaaac

SEQ ID NO: 871338 - RNA, 19 nt, Artificial Sequence
  Description of Artificial Sequence: Synthetic oligonucleotide
  Sense strand starting at position 3100 of SEQ ID NO: 588524
acaaauucuugggacugaa

SEQ ID NO: 871339 - RNA, 19 nt, Artificial Sequence
  Description of Artificial Sequence: Synthetic oligonucleotide
  Antisense strand to SEQ ID NO: 871338
uucagucccaagaauuugu

SEQ ID NO: 871340 - RNA, 19 nt, Artificial Sequence
  Description of Artificial Sequence: Synthetic oligonucleotide
  Sense strand starting at position 3134 of SEQ ID NO: 588524
ucaugucugaguuguacag

SEQ ID NO: 871341 - RNA, 19 nt, Artificial Sequence
  Description of Artificial Sequence: Synthetic oligonucleotide
  Antisense strand to SEQ ID NO: 871340
cuguacaacucagacauga

SEQ ID NO: 871342 - RNA, 19 nt, Artificial Sequence
  Description of Artificial Sequence: Synthetic oligonucleotide
  Sense strand starting at position 3138 of SEQ ID NO: 588524
gucugaguuguacagcauu

SEQ ID NO: 871343 - RNA, 19 nt, Artificial Sequence
  Description of Artificial Sequence: Synthetic oligonucleotide
  Antisense strand to SEQ ID NO: 871342
aaugcuguacaacucagac

SEQ ID NO: 871344 - RNA, 19 nt, Artificial Sequence
  Description of Artificial Sequence: Synthetic oligonucleotide
  Sense strand starting at position 3141 of SEQ ID NO: 588524
ugaguuguacagcauuaaa

SEQ ID NO: 871345 - RNA, 19 nt, Artificial Sequence
  Description of Artificial Sequence: Synthetic oligonucleotide
  Antisense strand to SEQ ID NO: 871344
uuuaaugcuguacaacuca

SEQ ID NO: 871346 - RNA, 19 nt, Artificial Sequence
  Description of Artificial Sequence: Synthetic oligonucleotide
  Sense strand starting at position 3165 of SEQ ID NO: 588524
guuugcaugggcugauaau

SEQ ID NO: 871347 - RNA, 19 nt, Artificial Sequence
  Description of Artificial Sequence: Synthetic oligonucleotide
  Antisense strand to SEQ ID NO: 871346
auuaucagcccaugcaaac

SEQ ID NO: 871348 - RNA, 19 nt, Artificial Sequence
  Description of Artificial Sequence: Synthetic oligonucleotide
  Sense strand starting at position 3325 of SEQ ID NO: 588524
uugaaagacgcacauauua

SEQ ID NO: 871349 - RNA, 19 nt, Artificial Sequence
  Description of Artificial Sequence: Synthetic oligonucleotide
  Antisense strand to SEQ ID NO: 871348
uaauaugugcgucuuucaa

SEQ ID NO: 871350 - RNA, 19 nt, Artificial Sequence
  Description of Artificial Sequence: Synthetic oligonucleotide
  Sense strand starting at position 3449 of SEQ ID NO: 588524
ugauuaggauacucugacu

SEQ ID NO: 871351 - RNA, 19 nt, Artificial Sequence
  Description of Artificial Sequence: Synthetic oligonucleotide
  Antisense strand to SEQ ID NO: 871350
agucagaguauccuaauca

SEQ ID NO: 871352 - RNA, 19 nt, Artificial Sequence
  Description of Artificial Sequence: Synthetic oligonucleotide
  Sense strand starting at position 3477 of SEQ ID NO: 588524
guuuacuucucauuaaugu

SEQ ID NO: 871353 - RNA, 19 nt, Artificial Sequence
  Description of Artificial Sequence: Synthetic oligonucleotide
  Antisense strand to SEQ ID NO: 871352
acauuaaugagaaguaaac

SEQ ID NO: 871354 - RNA, 19 nt, Artificial Sequence
  Description of Artificial Sequence: Synthetic oligonucleotide
  Sense strand starting at position 3498 of SEQ ID NO: 588524
acuuuaaagcagugauaaa

SEQ ID NO: 871355 - RNA, 19 nt, Artificial Sequence
  Description of Artificial Sequence: Synthetic oligonucleotide
  Antisense strand to SEQ ID NO: 871354
uuuaucacugcuuuaaagu

SEQ ID NO: 871356 - RNA, 19 nt, Artificial Sequence
  Description of Artificial Sequence: Synthetic oligonucleotide
  Sense strand starting at position 3544 of SEQ ID NO: 588524
uguccaguaaguuaaguau

SEQ ID NO: 871357 - RNA, 19 nt, Artificial Sequence
  Description of Artificial Sequence: Synthetic oligonucleotide
  Antisense strand to SEQ ID NO: 871356
auacuuaacuuacuggaca

SEQ ID NO: 871358 - RNA, 19 nt, Artificial Sequence
  Description of Artificial Sequence: Synthetic oligonucleotide
  Sense strand starting at position 3553 of SEQ ID NO: 588524
aguuaaguaucacucuuaa

SEQ ID NO: 871359 - RNA, 19 nt, Artificial Sequence
  Description of Artificial Sequence: Synthetic oligonucleotide
  Antisense strand to SEQ ID NO: 871358
uuaagagugauacuuaacu

SEQ ID NO: 871360 - RNA, 19 nt, Artificial Sequence
  Description of Artificial Sequence: Synthetic oligonucleotide
  Sense strand starting at position 3648 of SEQ ID NO: 588524
ggucuccucucaucagaca

SEQ ID NO: 871361 - RNA, 19 nt, Artificial Sequence
  Description of Artificial Sequence: Synthetic oligonucleotide
  Antisense strand to SEQ ID NO: 871360
ugucugaugagaggagacc

SEQ ID NO: 871362 - RNA, 19 nt, Artificial Sequence
  Description of Artificial Sequence: Synthetic oligonucleotide
  Sense strand starting at position 3649 of SEQ ID NO: 588524
gucuccucucaucagacau

SEQ ID NO: 871363 - RNA, 19 nt, Artificial Sequence
  Description of Artificial Sequence: Synthetic oligonucleotide
  Antisense strand to SEQ ID NO: 871362
augucugaugagaggagac

SEQ ID NO: 871364 - RNA, 19 nt, Artificial Sequence
  Description of Artificial Sequence: Synthetic oligonucleotide
  Sense strand starting at position 3706 of SEQ ID NO: 588524
agagaagagucuguggacu

SEQ ID NO: 871365 - RNA, 19 nt, Artificial Sequence
  Description of Artificial Sequence: Synthetic oligonucleotide
  Antisense strand to SEQ ID NO: 871364
aguccacagacucuucucu

SEQ ID NO: 871366 - RNA, 19 nt, Artificial Sequence
  Description of Artificial Sequence: Synthetic oligonucleotide
  Sense strand starting at position 3802 of SEQ ID NO: 588524
acgugugucugacuagaca

SEQ ID NO: 871367 - RNA, 19 nt, Artificial Sequence
  Description of Artificial Sequence: Synthetic oligonucleotide
  Antisense strand to SEQ ID NO: 871366
ugucuagucagacacacgu

SEQ ID NO: 871368 - RNA, 19 nt, Artificial Sequence
  Description of Artificial Sequence: Synthetic oligonucleotide
  Sense strand starting at position 3921 of SEQ ID NO: 588524
uggacaauauuagcuuaca

SEQ ID NO: 871369 - RNA, 19 nt, Artificial Sequence
  Description of Artificial Sequence: Synthetic oligonucleotide
  Antisense strand to SEQ ID NO: 871368
uguaagcuaauauugucca

SEQ ID NO: 871370 - RNA, 19 nt, Artificial Sequence
  Description of Artificial Sequence: Synthetic oligonucleotide
  Sense strand starting at position 3922 of SEQ ID NO: 588524
ggacaauauuagcuuacau

SEQ ID NO: 871371 - RNA, 19 nt, Artificial Sequence
  Description of Artificial Sequence: Synthetic oligonucleotide
  Antisense strand to SEQ ID NO: 871370
auguaagcuaauauugucc

SEQ ID NO: 871372 - RNA, 19 nt, Artificial Sequence
  Description of Artificial Sequence: Synthetic oligonucleotide
  Sense strand starting at position 32 of SEQ ID NO: 588525
aggaguuuggaaggcagaa

SEQ ID NO: 871373 - RNA, 19 nt, Artificial Sequence
  Description of Artificial Sequence: Synthetic oligonucleotide
  Antisense strand to SEQ ID NO: 871372
uucugccuuccaaacuccu

SEQ ID NO: 871374 - RNA, 19 nt, Artificial Sequence
  Description of Artificial Sequence: Synthetic oligonucleotide
  Sense strand starting at position 86 of SEQ ID NO: 588525
gggccaugccuuugaauug

SEQ ID NO: 871375 - RNA, 19 nt, Artificial Sequence
  Description of Artificial Sequence: Synthetic oligonucleotide
  Antisense strand to SEQ ID NO: 871374
caauucaaaggcauggccc

SEQ ID NO: 871376 - RNA, 19 nt, Artificial Sequence
  Description of Artificial Sequence: Synthetic oligonucleotide
  Sense strand starting at position 96 of SEQ ID NO: 588525
uuugaauugugguuuacug

SEQ ID NO: 871377 - RNA, 19 nt, Artificial Sequence
  Description of Artificial Sequence: Synthetic oligonucleotide
  Antisense strand to SEQ ID NO: 871376
caguaaaccacaauucaaa

SEQ ID NO: 871378 - RNA, 19 nt, Artificial Sequence
  Description of Artificial Sequence: Synthetic oligonucleotide
  Sense strand starting at position 175 of SEQ ID NO: 588525
guccacacucagugaacaa

SEQ ID NO: 871379 - RNA, 19 nt, Artificial Sequence
  Description of Artificial Sequence: Synthetic oligonucleotide
  Antisense strand to SEQ ID NO: 871378
uuguucacugaguguggac

SEQ ID NO: 871380 - RNA, 19 nt, Artificial Sequence
  Description of Artificial Sequence: Synthetic oligonucleotide
  Sense strand starting at position 295 of SEQ ID NO: 588525
gcagcugcuccacauagaa

SEQ ID NO: 871381 - RNA, 19 nt, Artificial Sequence
  Description of Artificial Sequence: Synthetic oligonucleotide
  Antisense strand to SEQ ID NO: 871380
uucuauguggagcagcugc

SEQ ID NO: 871382 - RNA, 19 nt, Artificial Sequence
  Description of Artificial Sequence: Synthetic oligonucleotide
  Sense strand starting at position 317 of SEQ ID NO: 588525
ccgagucuuguuccagcga

SEQ ID NO: 871383 - RNA, 19 nt, Artificial Sequence
  Description of Artificial Sequence: Synthetic oligonucleotide
  Antisense strand to SEQ ID NO: 871382
ucgcuggaacaagacucgg

SEQ ID NO: 871384 - RNA, 19 nt, Artificial Sequence
  Description of Artificial Sequence: Synthetic oligonucleotide
  Sense strand starting at position 545 of SEQ ID NO: 588525
cuuaccugcucauuguaga

SEQ ID NO: 871385 - RNA, 19 nt, Artificial Sequence
  Description of Artificial Sequence: Synthetic oligonucleotide
  Antisense strand to SEQ ID NO: 871384
ucuacaaugagcagguaag

SEQ ID NO: 871386 - RNA, 19 nt, Artificial Sequence
  Description of Artificial Sequence: Synthetic oligonucleotide
  Sense strand starting at position 709 of SEQ ID NO: 588525
ucgucaucuccacaguaau

SEQ ID NO: 871387 - RNA, 19 nt, Artificial Sequence
  Description of Artificial Sequence: Synthetic oligonucleotide
  Antisense strand to SEQ ID NO: 871386
auuacuguggagaugacga

SEQ ID NO: 871388 - RNA, 19 nt, Artificial Sequence
  Description of Artificial Sequence: Synthetic oligonucleotide
  Sense strand starting at position 736 of SEQ ID NO: 588525
ucuguagcgcauguaugau

SEQ ID NO: 871389 - RNA, 19 nt, Artificial Sequence
  Description of Artificial Sequence: Synthetic oligonucleotide
  Antisense strand to SEQ ID NO: 871388
aucauacaugcgcuacaga

SEQ ID NO: 871390 - RNA, 19 nt, Artificial Sequence
  Description of Artificial Sequence: Synthetic oligonucleotide
  Sense strand starting at position 874 of SEQ ID NO: 588525
gcccaaaugcuccaaauug

SEQ ID NO: 871391 - RNA, 19 nt, Artificial Sequence
  Description of Artificial Sequence: Synthetic oligonucleotide
  Antisense strand to SEQ ID NO: 871390
caauuuggagcauuugggc

SEQ ID NO: 871392 - RNA, 19 nt, Artificial Sequence
  Description of Artificial Sequence: Synthetic oligonucleotide
  Sense strand starting at position 917 of SEQ ID NO: 588525
cagcguccucgucugcaaa

SEQ ID NO: 871393 - RNA, 19 nt, Artificial Sequence
  Description of Artificial Sequence: Synthetic oligonucleotide
  Antisense strand to SEQ ID NO: 871392
uuugcagacgaggacgcug

SEQ ID NO: 871394 - RNA, 19 nt, Artificial Sequence
  Description of Artificial Sequence: Synthetic oligonucleotide
  Sense strand starting at position 1078 of SEQ ID NO: 588525
ggguguaggucuucccaga

SEQ ID NO: 871395 - RNA, 19 nt, Artificial Sequence
  Description of Artificial Sequence: Synthetic oligonucleotide
  Antisense strand to SEQ ID NO: 871394
ucugggaagaccuacaccc

SEQ ID NO: 871396 - RNA, 19 nt, Artificial Sequence
  Description of Artificial Sequence: Synthetic oligonucleotide
  Sense strand starting at position 1991 of SEQ ID NO: 588525
gaugucuuccucgauccuu

SEQ ID NO: 871397 - RNA, 19 nt, Artificial Sequence
  Description of Artificial Sequence: Synthetic oligonucleotide
  Antisense strand to SEQ ID NO: 871396
aaggaucgaggaagacauc

SEQ ID NO: 871398 - RNA, 19 nt, Artificial Sequence
  Description of Artificial Sequence: Synthetic oligonucleotide
  Sense strand starting at position 2166 of SEQ ID NO: 588525
ccucgaaccugucugaaga

SEQ ID NO: 871399 - RNA, 19 nt, Artificial Sequence
  Description of Artificial Sequence: Synthetic oligonucleotide
  Antisense strand to SEQ ID NO: 871398
ucuucagacagguucgagg

SEQ ID NO: 871400 - RNA, 19 nt, Artificial Sequence
  Description of Artificial Sequence: Synthetic oligonucleotide
  Sense strand starting at position 2167 of SEQ ID NO: 588525
cucgaaccugucugaagau

SEQ ID NO: 871401 - RNA, 19 nt, Artificial Sequence
  Description of Artificial Sequence: Synthetic oligonucleotide
  Antisense strand to SEQ ID NO: 871400
aucuucagacagguucgag

SEQ ID NO: 871402 - RNA, 19 nt, Artificial Sequence
  Description of Artificial Sequence: Synthetic oligonucleotide
  Sense strand starting at position 2179 of SEQ ID NO: 588525
ugaagaucugcuuacccgu

SEQ ID NO: 871403 - RNA, 19 nt, Artificial Sequence
  Description of Artificial Sequence: Synthetic oligonucleotide
  Antisense strand to SEQ ID NO: 871402
acggguaagcagaucuuca

SEQ ID NO: 871404 - RNA, 19 nt, Artificial Sequence
  Description of Artificial Sequence: Synthetic oligonucleotide
  Sense strand starting at position 2384 of SEQ ID NO: 588525
gggcuagcucguuaaagau

SEQ ID NO: 871405 - RNA, 19 nt, Artificial Sequence
  Description of Artificial Sequence: Synthetic oligonucleotide
  Antisense strand to SEQ ID NO: 871404
aucuuuaacgagcuagccc

SEQ ID NO: 871406 - RNA, 19 nt, Artificial Sequence
  Description of Artificial Sequence: Synthetic oligonucleotide
  Sense strand starting at position 2425 of SEQ ID NO: 588525
uggagaaagucucucccaa

SEQ ID NO: 871407 - RNA, 19 nt, Artificial Sequence
  Description of Artificial Sequence: Synthetic oligonucleotide
  Antisense strand to SEQ ID NO: 871406
uugggagagacuuucucca

SEQ ID NO: 871408 - RNA, 19 nt, Artificial Sequence
  Description of Artificial Sequence: Synthetic oligonucleotide
  Sense strand starting at position 2725 of SEQ ID NO: 588525
uggauugaaucucugagcu

SEQ ID NO: 871409 - RNA, 19 nt, Artificial Sequence
  Description of Artificial Sequence: Synthetic oligonucleotide
  Antisense strand to SEQ ID NO: 871408
agcucagagauucaaucca

SEQ ID NO: 871410 - RNA, 19 nt, Artificial Sequence
  Description of Artificial Sequence: Synthetic oligonucleotide
  Sense strand starting at position 2812 of SEQ ID NO: 588525
auccuaggccagcaugauu

SEQ ID NO: 871411 - RNA, 19 nt, Artificial Sequence
  Description of Artificial Sequence: Synthetic oligonucleotide
  Antisense strand to SEQ ID NO: 871410
aaucaugcuggccuaggau

SEQ ID NO: 871412 - RNA, 19 nt, Artificial Sequence
  Description of Artificial Sequence: Synthetic oligonucleotide
  Sense strand starting at position 2843 of SEQ ID NO: 588525
ccuggucuggcuuaugaga

SEQ ID NO: 871413 - RNA, 19 nt, Artificial Sequence
  Description of Artificial Sequence: Synthetic oligonucleotide
  Antisense strand to SEQ ID NO: 871412
ucucauaagccagaccagg

SEQ ID NO: 871414 - RNA, 19 nt, Artificial Sequence
  Description of Artificial Sequence: Synthetic oligonucleotide
  Sense strand starting at position 2864 of SEQ ID NO: 588525
agcagagaugucugugaau

SEQ ID NO: 871415 - RNA, 19 nt, Artificial Sequence
  Description of Artificial Sequence: Synthetic oligonucleotide
  Antisense strand to SEQ ID NO: 871414
auucacagacaucucugcu

SEQ ID NO: 871416 - RNA, 19 nt, Artificial Sequence
  Description of Artificial Sequence: Synthetic oligonucleotide
  Sense strand starting at position 2866 of SEQ ID NO: 588525
cagagaugucugugaaugu

SEQ ID NO: 871417 - RNA, 19 nt, Artificial Sequence
  Description of Artificial Sequence: Synthetic oligonucleotide
  Antisense strand to SEQ ID NO: 871416
acauucacagacaucucug

SEQ ID NO: 871418 - RNA, 19 nt, Artificial Sequence
  Description of Artificial Sequence: Synthetic oligonucleotide
  Sense strand starting at position 2895 of SEQ ID NO: 588525
ggcaaucacuuauucugua

SEQ ID NO: 871419 - RNA, 19 nt, Artificial Sequence
  Description of Artificial Sequence: Synthetic oligonucleotide
  Antisense strand to SEQ ID NO: 871418
uacagaauaagugauugcc

SEQ ID NO: 871420 - RNA, 19 nt, Artificial Sequence
  Description of Artificial Sequence: Synthetic oligonucleotide
  Sense strand starting at position 2900 of SEQ ID NO: 588525
ucacuuauucuguaccagu

SEQ ID NO: 871421 - RNA, 19 nt, Artificial Sequence
  Description of Artificial Sequence: Synthetic oligonucleotide
  Antisense strand to SEQ ID NO: 871420
acugguacagaauaaguga

SEQ ID NO: 871422 - RNA, 19 nt, Artificial Sequence
  Description of Artificial Sequence: Synthetic oligonucleotide
  Sense strand starting at position 3078 of SEQ ID NO: 588525
gaggguauuccaggcaaag

SEQ ID NO: 871423 - RNA, 19 nt, Artificial Sequence
  Description of Artificial Sequence: Synthetic oligonucleotide
  Antisense strand to SEQ ID NO: 871422
cuuugccuggaauacccuc

SEQ ID NO: 871424 - RNA, 19 nt, Artificial Sequence
  Description of Artificial Sequence: Synthetic oligonucleotide
  Sense strand starting at position 3080 of SEQ ID NO: 588525
ggguauuccaggcaaagca

SEQ ID NO: 871425 - RNA, 19 nt, Artificial Sequence
  Description of Artificial Sequence: Synthetic oligonucleotide
  Antisense strand to SEQ ID NO: 871424
ugcuuugccuggaauaccc

SEQ ID NO: 871426 - RNA, 19 nt, Artificial Sequence
  Description of Artificial Sequence: Synthetic oligonucleotide
  Sense strand starting at position 3154 of SEQ ID NO: 588525
uaguuugaggcuggaucua

SEQ ID NO: 871427 - RNA, 19 nt, Artificial Sequence
  Description of Artificial Sequence: Synthetic oligonucleotide
  Antisense strand to SEQ ID NO: 871426
uagauccagccucaaacua

SEQ ID NO: 871428 - RNA, 19 nt, Artificial Sequence
  Description of Artificial Sequence: Synthetic oligonucleotide
  Sense strand starting at position 3235 of SEQ ID NO: 588525
ggguuauaaacagggaugu

SEQ ID NO: 871429 - RNA, 19 nt, Artificial Sequence
  Description of Artificial Sequence: Synthetic oligonucleotide
  Antisense strand to SEQ ID NO: 871428
acaucccuguuuauaaccc

SEQ ID NO: 871430 - RNA, 19 nt, Artificial Sequence
  Description of Artificial Sequence: Synthetic oligonucleotide
  Sense strand starting at position 3300 of SEQ ID NO: 588525
cuuuguauguucucugaau

SEQ ID NO: 871431 - RNA, 19 nt, Artificial Sequence
  Description of Artificial Sequence: Synthetic oligonucleotide
  Antisense strand to SEQ ID NO: 871430
auucagagaacauacaaag

SEQ ID NO: 871432 - RNA, 19 nt, Artificial Sequence
  Description of Artificial Sequence: Synthetic oligonucleotide
  Sense strand starting at position 3301 of SEQ ID NO: 588525
uuuguauguucucugaaua

SEQ ID NO: 871433 - RNA, 19 nt, Artificial Sequence
  Description of Artificial Sequence: Synthetic oligonucleotide
  Antisense strand to SEQ ID NO: 871432
uauucagagaacauacaaa

SEQ ID NO: 871434 - RNA, 19 nt, Artificial Sequence
  Description of Artificial Sequence: Synthetic oligonucleotide
  Sense strand starting at position 3302 of SEQ ID NO: 588525
uuguauguucucugaauau

SEQ ID NO: 871435 - RNA, 19 nt, Artificial Sequence
  Description of Artificial Sequence: Synthetic oligonucleotide
  Antisense strand to SEQ ID NO: 871434
auauucagagaacauacaa

SEQ ID NO: 871436 - RNA, 19 nt, Artificial Sequence
  Description of Artificial Sequence: Synthetic oligonucleotide
  Sense strand starting at position 3478 of SEQ ID NO: 588525
aggcaauggagauguauaa

SEQ ID NO: 871437 - RNA, 19 nt, Artificial Sequence
  Description of Artificial Sequence: Synthetic oligonucleotide
  Antisense strand to SEQ ID NO: 871436
uuauacaucuccauugccu

SEQ ID NO: 871438 - RNA, 19 nt, Artificial Sequence
  Description of Artificial Sequence: Synthetic oligonucleotide
  Sense strand starting at position 3546 of SEQ ID NO: 588525
agggaaaguucuguagaac

SEQ ID NO: 871439 - RNA, 19 nt, Artificial Sequence
  Description of Artificial Sequence: Synthetic oligonucleotide
  Antisense strand to SEQ ID NO: 871438
guucuacagaacuuucccu

SEQ ID NO: 871440 - RNA, 19 nt, Artificial Sequence
  Description of Artificial Sequence: Synthetic oligonucleotide
  Sense strand starting at position 3662 of SEQ ID NO: 588525
ugacauaguuguucugaga

SEQ ID NO: 871441 - RNA, 19 nt, Artificial Sequence
  Description of Artificial Sequence: Synthetic oligonucleotide
  Antisense strand to SEQ ID NO: 871440
ucucagaacaacuauguca

SEQ ID NO: 871442 - RNA, 19 nt, Artificial Sequence
  Description of Artificial Sequence: Synthetic oligonucleotide
  Sense strand starting at position 3687 of SEQ ID NO: 588525
ugagaugugucauugaaag

SEQ ID NO: 871443 - RNA, 19 nt, Artificial Sequence
  Description of Artificial Sequence: Synthetic oligonucleotide
  Antisense strand to SEQ ID NO: 871442
cuuucaaugacacaucuca

SEQ ID NO: 871444 - RNA, 19 nt, Artificial Sequence
  Description of Artificial Sequence: Synthetic oligonucleotide
  Sense strand starting at position 3689 of SEQ ID NO: 588525
agaugugucauugaaagug

SEQ ID NO: 871445 - RNA, 19 nt, Artificial Sequence
  Description of Artificial Sequence: Synthetic oligonucleotide
  Antisense strand to SEQ ID NO: 871444
cacuuucaaugacacaucu

SEQ ID NO: 871446 - RNA, 19 nt, Artificial Sequence
  Description of Artificial Sequence: Synthetic oligonucleotide
  Sense strand starting at position 3694 of SEQ ID NO: 588525
ugucauugaaagugaaagu

SEQ ID NO: 871447 - RNA, 19 nt, Artificial Sequence
  Description of Artificial Sequence: Synthetic oligonucleotide
  Antisense strand to SEQ ID NO: 871446
acuuucacuuucaaugaca

SEQ ID NO: 871448 - RNA, 19 nt, Artificial Sequence
  Description of Artificial Sequence: Synthetic oligonucleotide
  Sense strand starting at position 3695 of SEQ ID NO: 588525
gucauugaaagugaaaguu

SEQ ID NO: 871449 - RNA, 19 nt, Artificial Sequence
  Description of Artificial Sequence: Synthetic oligonucleotide
  Antisense strand to SEQ ID NO: 871448
aacuuucacuuucaaugac

SEQ ID NO: 871450 - RNA, 19 nt, Artificial Sequence
  Description of Artificial Sequence: Synthetic oligonucleotide
  Sense strand starting at position 3801 of SEQ ID NO: 588525
gaguccuugagguggauaa

SEQ ID NO: 871451 - RNA, 19 nt, Artificial Sequence
  Description of Artificial Sequence: Synthetic oligonucleotide
  Antisense strand to SEQ ID NO: 871450
uuauccaccucaaggacuc

SEQ ID NO: 871452 - RNA, 19 nt, Artificial Sequence
  Description of Artificial Sequence: Synthetic oligonucleotide
  Sense strand starting at position 15 of SEQ ID NO: 588526
gaggaucuacacugugcaa

SEQ ID NO: 871453 - RNA, 19 nt, Artificial Sequence
  Description of Artificial Sequence: Synthetic oligonucleotide
  Antisense strand to SEQ ID NO: 871452
uugcacaguguagauccuc

SEQ ID NO: 871454 - RNA, 19 nt, Artificial Sequence
  Description of Artificial Sequence: Synthetic oligonucleotide
  Sense strand starting at position 17 of SEQ ID NO: 588526
ggaucuacacugugcaaau

SEQ ID NO: 871455 - RNA, 19 nt, Artificial Sequence
  Description of Artificial Sequence: Synthetic oligonucleotide
  Antisense strand to SEQ ID NO: 871454
auuugcacaguguagaucc

SEQ ID NO: 871456 - RNA, 19 nt, Artificial Sequence
  Description of Artificial Sequence: Synthetic oligonucleotide
  Sense strand starting at position 171 of SEQ ID NO: 588526
ugugguucucccuaaacua

SEQ ID NO: 871457 - RNA, 19 nt, Artificial Sequence
  Description of Artificial Sequence: Synthetic oligonucleotide
  Antisense strand to SEQ ID NO: 871456
uaguuuagggagaaccaca

SEQ ID NO: 871458 - RNA, 19 nt, Artificial Sequence
  Description of Artificial Sequence: Synthetic oligonucleotide
  Sense strand starting at position 289 of SEQ ID NO: 588526
cuaucuuagcaguaaugug

SEQ ID NO: 871459 - RNA, 19 nt, Artificial Sequence
  Description of Artificial Sequence: Synthetic oligonucleotide
  Antisense strand to SEQ ID NO: 871458
cacauuacugcuaagauag

SEQ ID NO: 871460 - RNA, 19 nt, Artificial Sequence
  Description of Artificial Sequence: Synthetic oligonucleotide
  Sense strand starting at position 333 of SEQ ID NO: 588526
auauaaagcccuggauaca

SEQ ID NO: 871461 - RNA, 19 nt, Artificial Sequence
  Description of Artificial Sequence: Synthetic oligonucleotide
  Antisense strand to SEQ ID NO: 871460
uguauccagggcuuuauau

SEQ ID NO: 871462 - RNA, 19 nt, Artificial Sequence
  Description of Artificial Sequence: Synthetic oligonucleotide
  Sense strand starting at position 416 of SEQ ID NO: 588526
ucuguauggucuuuggaag

SEQ ID NO: 871463 - RNA, 19 nt, Artificial Sequence
  Description of Artificial Sequence: Synthetic oligonucleotide
  Antisense strand to SEQ ID NO: 871462
cuuccaaagaccauacaga

SEQ ID NO: 871464 - RNA, 19 nt, Artificial Sequence
  Description of Artificial Sequence: Synthetic oligonucleotide
  Sense strand starting at position 440 of SEQ ID NO: 588526
gaguguguggucuaccuga

SEQ ID NO: 871465 - RNA, 19 nt, Artificial Sequence
  Description of Artificial Sequence: Synthetic oligonucleotide
  Antisense strand to SEQ ID NO: 871464
ucagguagaccacacacuc

SEQ ID NO: 871466 - RNA, 19 nt, Artificial Sequence
  Description of Artificial Sequence: Synthetic oligonucleotide
  Sense strand starting at position 445 of SEQ ID NO: 588526
uguggucuaccugacauca

SEQ ID NO: 871467 - RNA, 19 nt, Artificial Sequence
  Description of Artificial Sequence: Synthetic oligonucleotide
  Antisense strand to SEQ ID NO: 871466
ugaugucagguagaccaca

SEQ ID NO: 871468 - RNA, 19 nt, Artificial Sequence
  Description of Artificial Sequence: Synthetic oligonucleotide
  Sense strand starting at position 665 of SEQ ID NO: 588526
gggacuaaaugacuugcaa

SEQ ID NO: 871469 - RNA, 19 nt, Artificial Sequence
  Description of Artificial Sequence: Synthetic oligonucleotide
  Antisense strand to SEQ ID NO: 871468
uugcaagucauuuaguccc

SEQ ID NO: 871470 - RNA, 19 nt, Artificial Sequence
  Description of Artificial Sequence: Synthetic oligonucleotide
  Sense strand starting at position 739 of SEQ ID NO: 588526
guggguuuccacuacaugu

SEQ ID NO: 871471 - RNA, 19 nt, Artificial Sequence
  Description of Artificial Sequence: Synthetic oligonucleotide
  Antisense strand to SEQ ID NO: 871470
acauguaguggaaacccac

SEQ ID NO: 871472 - RNA, 19 nt, Artificial Sequence
  Description of Artificial Sequence: Synthetic oligonucleotide
  Sense strand starting at position 754 of SEQ ID NO: 588526
augucacagcuauaaggua

SEQ ID NO: 871473 - RNA, 19 nt, Artificial Sequence
  Description of Artificial Sequence: Synthetic oligonucleotide
  Antisense strand to SEQ ID NO: 871472
uaccuuauagcugugacau

SEQ ID NO: 871474 - RNA, 19 nt, Artificial Sequence
  Description of Artificial Sequence: Synthetic oligonucleotide
  Sense strand starting at position 858 of SEQ ID NO: 588526
cuaugaauuugauauaagg

SEQ ID NO: 871475 - RNA, 19 nt, Artificial Sequence
  Description of Artificial Sequence: Synthetic oligonucleotide
  Antisense strand to SEQ ID NO: 871474
ccuuauaucaaauucauag

SEQ ID NO: 871476 - RNA, 19 nt, Artificial Sequence
  Description of Artificial Sequence: Synthetic oligonucleotide
  Sense strand starting at position 890 of SEQ ID NO: 588526
acaaucaggcugugaauau

SEQ ID NO: 871477 - RNA, 19 nt, Artificial Sequence
  Description of Artificial Sequence: Synthetic oligonucleotide
  Antisense strand to SEQ ID NO: 871476
auauucacagccugauugu

SEQ ID NO: 871478 - RNA, 19 nt, Artificial Sequence
  Description of Artificial Sequence: Synthetic oligonucleotide
  Sense strand starting at position 894 of SEQ ID NO: 588526
ucaggcugugaauauauaa

SEQ ID NO: 871479 - RNA, 19 nt, Artificial Sequence
  Description of Artificial Sequence: Synthetic oligonucleotide
  Antisense strand to SEQ ID NO: 871478
uuauauauucacagccuga

SEQ ID NO: 871480 - RNA, 19 nt, Artificial Sequence
  Description of Artificial Sequence: Synthetic oligonucleotide
  Sense strand starting at position 933 of SEQ ID NO: 588526
cagucuuaggaacgcaauu

SEQ ID NO: 871481 - RNA, 19 nt, Artificial Sequence
  Description of Artificial Sequence: Synthetic oligonucleotide
  Antisense strand to SEQ ID NO: 871480
aauugcguuccuaagacug

SEQ ID NO: 871482 - RNA, 19 nt, Artificial Sequence
  Description of Artificial Sequence: Synthetic oligonucleotide
  Sense strand starting at position 1034 of SEQ ID NO: 588526
cuacuuguagaauacaagu

SEQ ID NO: 871483 - RNA, 19 nt, Artificial Sequence
  Description of Artificial Sequence: Synthetic oligonucleotide
  Antisense strand to SEQ ID NO: 871482
acuuguauucuacaaguag

SEQ ID NO: 871484 - RNA, 19 nt, Artificial Sequence
  Description of Artificial Sequence: Synthetic oligonucleotide
  Sense strand starting at position 1482 of SEQ ID NO: 588526
ugugcaagacauugugaac

SEQ ID NO: 871485 - RNA, 19 nt, Artificial Sequence
  Description of Artificial Sequence: Synthetic oligonucleotide
  Antisense strand to SEQ ID NO: 871484
guucacaaugucuugcaca

SEQ ID NO: 871486 - RNA, 19 nt, Artificial Sequence
  Description of Artificial Sequence: Synthetic oligonucleotide
  Sense strand starting at position 1553 of SEQ ID NO: 588526
acgggcuucccggaaguaa

SEQ ID NO: 871487 - RNA, 19 nt, Artificial Sequence
  Description of Artificial Sequence: Synthetic oligonucleotide
  Antisense strand to SEQ ID NO: 871486
uuacuuccgggaagcccgu

SEQ ID NO: 871488 - RNA, 19 nt, Artificial Sequence
  Description of Artificial Sequence: Synthetic oligonucleotide
  Sense strand starting at position 1634 of SEQ ID NO: 588526
gcaagaaggcuuugggacu

SEQ ID NO: 871489 - RNA, 19 nt, Artificial Sequence
  Description of Artificial Sequence: Synthetic oligonucleotide
  Antisense strand to SEQ ID NO: 871488
agucccaaagccuucuugc

SEQ ID NO: 871490 - RNA, 19 nt, Artificial Sequence
  Description of Artificial Sequence: Synthetic oligonucleotide
  Sense strand starting at position 1641 of SEQ ID NO: 588526
ggcuuugggacucaagagu

SEQ ID NO: 871491 - RNA, 19 nt, Artificial Sequence
  Description of Artificial Sequence: Synthetic oligonucleotide
  Antisense strand to SEQ ID NO: 871490
acucuugagucccaaagcc

SEQ ID NO: 871492 - RNA, 19 nt, Artificial Sequence
  Description of Artificial Sequence: Synthetic oligonucleotide
  Sense strand starting at position 1652 of SEQ ID NO: 588526
ucaagaguuuagucuccca

SEQ ID NO: 871493 - RNA, 19 nt, Artificial Sequence
  Description of Artificial Sequence: Synthetic oligonucleotide
  Antisense strand to SEQ ID NO: 871492
ugggagacuaaacucuuga

SEQ ID NO: 871494 - RNA, 19 nt, Artificial Sequence
  Description of Artificial Sequence: Synthetic oligonucleotide
  Sense strand starting at position 1655 of SEQ ID NO: 588526
agaguuuagucucccaaag

SEQ ID NO: 871495 - RNA, 19 nt, Artificial Sequence
  Description of Artificial Sequence: Synthetic oligonucleotide
  Antisense strand to SEQ ID NO: 871494
cuuugggagacuaaacucu

SEQ ID NO: 871496 - RNA, 19 nt, Artificial Sequence
  Description of Artificial Sequence: Synthetic oligonucleotide
  Sense strand starting at position 1678 of SEQ ID NO: 588526
agaaguggcguucaagaua

SEQ ID NO: 871497 - RNA, 19 nt, Artificial Sequence
  Description of Artificial Sequence: Synthetic oligonucleotide
  Antisense strand to SEQ ID NO: 871496
uaucuugaacgccacuucu

SEQ ID NO: 871498 - RNA, 19 nt, Artificial Sequence
  Description of Artificial Sequence: Synthetic oligonucleotide
  Sense strand starting at position 1681 of SEQ ID NO: 588526
aguggcguucaagauaauu

SEQ ID NO: 871499 - RNA, 19 nt, Artificial Sequence
  Description of Artificial Sequence: Synthetic oligonucleotide
  Antisense strand to SEQ ID NO: 871498
aauuaucuugaacgccacu

SEQ ID NO: 871500 - RNA, 19 nt, Artificial Sequence
  Description of Artificial Sequence: Synthetic oligonucleotide
  Sense strand starting at position 1725 of SEQ ID NO: 588526
gaugaaagauaggaaagua

SEQ ID NO: 871501 - RNA, 19 nt, Artificial Sequence
  Description of Artificial Sequence: Synthetic oligonucleotide
  Antisense strand to SEQ ID NO: 871500
uacuuuccuaucuuucauc

SEQ ID NO: 871502 - RNA, 19 nt, Artificial Sequence
  Description of Artificial Sequence: Synthetic oligonucleotide
  Sense strand starting at position 2143 of SEQ ID NO: 588526
guugacuucuccucuggaa

SEQ ID NO: 871503 - RNA, 19 nt, Artificial Sequence
  Description of Artificial Sequence: Synthetic oligonucleotide
  Antisense strand to SEQ ID NO: 871502
uuccagaggagaagucaac

SEQ ID NO: 871504 - RNA, 19 nt, Artificial Sequence
  Description of Artificial Sequence: Synthetic oligonucleotide
  Sense strand starting at position 2145 of SEQ ID NO: 588526
ugacuucuccucuggaaga

SEQ ID NO: 871505 - RNA, 19 nt, Artificial Sequence
  Description of Artificial Sequence: Synthetic oligonucleotide
  Antisense strand to SEQ ID NO: 871504
ucuuccagaggagaaguca

SEQ ID NO: 871506 - RNA, 19 nt, Artificial Sequence
  Description of Artificial Sequence: Synthetic oligonucleotide
  Sense strand starting at position 2286 of SEQ ID NO: 588526
gaagauccuucugccgaau

SEQ ID NO: 871507 - RNA, 19 nt, Artificial Sequence
  Description of Artificial Sequence: Synthetic oligonucleotide
  Antisense strand to SEQ ID NO: 871506
auucggcagaaggaucuuc

SEQ ID NO: 871508 - RNA, 19 nt, Artificial Sequence
  Description of Artificial Sequence: Synthetic oligonucleotide
  Sense strand starting at position 2427 of SEQ ID NO: 588526
uuuaguucucaguggagga

SEQ ID NO: 871509 - RNA, 19 nt, Artificial Sequence
  Description of Artificial Sequence: Synthetic oligonucleotide
  Antisense strand to SEQ ID NO: 871508
uccuccacugagaacuaaa

SEQ ID NO: 871510 - RNA, 19 nt, Artificial Sequence
  Description of Artificial Sequence: Synthetic oligonucleotide
  Sense strand starting at position 2679 of SEQ ID NO: 588526
gggagagguccagguuuag

SEQ ID NO: 871511 - RNA, 19 nt, Artificial Sequence
  Description of Artificial Sequence: Synthetic oligonucleotide
  Antisense strand to SEQ ID NO: 871510
cuaaaccuggaccucuccc

SEQ ID NO: 871512 - RNA, 19 nt, Artificial Sequence
  Description of Artificial Sequence: Synthetic oligonucleotide
  Sense strand starting at position 2810 of SEQ ID NO: 588526
ucaguuauugaauggauaa

SEQ ID NO: 871513 - RNA, 19 nt, Artificial Sequence
  Description of Artificial Sequence: Synthetic oligonucleotide
  Antisense strand to SEQ ID NO: 871512
uuauccauucaauaacuga

SEQ ID NO: 871514 - RNA, 19 nt, Artificial Sequence
  Description of Artificial Sequence: Synthetic oligonucleotide
  Sense strand starting at position 2836 of SEQ ID NO: 588526
gcaguuauagcagaaguaa

SEQ ID NO: 871515 - RNA, 19 nt, Artificial Sequence
  Description of Artificial Sequence: Synthetic oligonucleotide
  Antisense strand to SEQ ID NO: 871514
uuacuucugcuauaacugc

SEQ ID NO: 871516 - RNA, 19 nt, Artificial Sequence
  Description of Artificial Sequence: Synthetic oligonucleotide
  Sense strand starting at position 3076 of SEQ ID NO: 588526
gcacguauagucccugcua

SEQ ID NO: 871517 - RNA, 19 nt, Artificial Sequence
  Description of Artificial Sequence: Synthetic oligonucleotide
  Antisense strand to SEQ ID NO: 871516
uagcagggacuauacgugc

SEQ ID NO: 871518 - RNA, 19 nt, Artificial Sequence
  Description of Artificial Sequence: Synthetic oligonucleotide
  Sense strand starting at position 3236 of SEQ ID NO: 588526
gcaaucaaauugucaaaug

SEQ ID NO: 871519 - RNA, 19 nt, Artificial Sequence
  Description of Artificial Sequence: Synthetic oligonucleotide
  Antisense strand to SEQ ID NO: 871518
cauuugacaauuugauugc

SEQ ID NO: 871520 - RNA, 19 nt, Artificial Sequence
  Description of Artificial Sequence: Synthetic oligonucleotide
  Sense strand starting at position 3276 of SEQ ID NO: 588526
agguuaagaucauugaugu

SEQ ID NO: 871521 - RNA, 19 nt, Artificial Sequence
  Description of Artificial Sequence: Synthetic oligonucleotide
  Antisense strand to SEQ ID NO: 871520
acaucaaugaucuuaaccu

SEQ ID NO: 871522 - RNA, 19 nt, Artificial Sequence
  Description of Artificial Sequence: Synthetic oligonucleotide
  Sense strand starting at position 3277 of SEQ ID NO: 588526
gguuaagaucauugauguu

SEQ ID NO: 871523 - RNA, 19 nt, Artificial Sequence
  Description of Artificial Sequence: Synthetic oligonucleotide
  Antisense strand to SEQ ID NO: 871522
aacaucaaugaucuuaacc

SEQ ID NO: 871524 - RNA, 19 nt, Artificial Sequence
  Description of Artificial Sequence: Synthetic oligonucleotide
  Sense strand starting at position 3321 of SEQ ID NO: 588526
gucacuuacccagacaucu

SEQ ID NO: 871525 - RNA, 19 nt, Artificial Sequence
  Description of Artificial Sequence: Synthetic oligonucleotide
  Antisense strand to SEQ ID NO: 871524
agaugucuggguaagugac

SEQ ID NO: 871526 - RNA, 19 nt, Artificial Sequence
  Description of Artificial Sequence: Synthetic oligonucleotide
  Sense strand starting at position 3329 of SEQ ID NO: 588526
cccagacaucucugagcua

SEQ ID NO: 871527 - RNA, 19 nt, Artificial Sequence
  Description of Artificial Sequence: Synthetic oligonucleotide
  Antisense strand to SEQ ID NO: 871526
uagcucagagaugucuggg

SEQ ID NO: 871528 - RNA, 19 nt, Artificial Sequence
  Description of Artificial Sequence: Synthetic oligonucleotide
  Sense strand starting at position 3332 of SEQ ID NO: 588526
agacaucucugagcuauag

SEQ ID NO: 871529 - RNA, 19 nt, Artificial Sequence
  Description of Artificial Sequence: Synthetic oligonucleotide
  Antisense strand to SEQ ID NO: 871528
cuauagcucagagaugucu

SEQ ID NO: 871530 - RNA, 19 nt, Artificial Sequence
  Description of Artificial Sequence: Synthetic oligonucleotide
  Sense strand starting at position 3772 of SEQ ID NO: 588526
gguagcuauuauucuuaua

SEQ ID NO: 871531 - RNA, 19 nt, Artificial Sequence
  Description of Artificial Sequence: Synthetic oligonucleotide
  Antisense strand to SEQ ID NO: 871530
uauaagaauaauagcuacc

SEQ ID NO: 871532 - RNA, 19 nt, Artificial Sequence
  Description of Artificial Sequence: Synthetic oligonucleotide
  Sense strand starting at position 54 of SEQ ID NO: 588528
cguugauguccgccagguu

SEQ ID NO: 871533 - RNA, 19 nt, Artificial Sequence
  Description of Artificial Sequence: Synthetic oligonucleotide
  Antisense strand to SEQ ID NO: 871532
aaccuggcggacaucaacg

SEQ ID NO: 871534 - RNA, 19 nt, Artificial Sequence
  Description of Artificial Sequence: Synthetic oligonucleotide
  Sense strand starting at position 57 of SEQ ID NO: 588528
ugauguccgccagguugaa

SEQ ID NO: 871535 - RNA, 19 nt, Artificial Sequence
  Description of Artificial Sequence: Synthetic oligonucleotide
  Antisense strand to SEQ ID NO: 871534
uucaaccuggcggacauca

SEQ ID NO: 871536 - RNA, 19 nt, Artificial Sequence
  Description of Artificial Sequence: Synthetic oligonucleotide
  Sense strand starting at position 279 of SEQ ID NO: 588528
gaggaugggucagcgaauu

SEQ ID NO: 871537 - RNA, 19 nt, Artificial Sequence
  Description of Artificial Sequence: Synthetic oligonucleotide
  Antisense strand to SEQ ID NO: 871536
aauucgcugacccauccuc

SEQ ID NO: 871538 - RNA, 19 nt, Artificial Sequence
  Description of Artificial Sequence: Synthetic oligonucleotide
  Sense strand starting at position 315 of SEQ ID NO: 588528
gguccaggagaucguugaa

SEQ ID NO: 871539 - RNA, 19 nt, Artificial Sequence
  Description of Artificial Sequence: Synthetic oligonucleotide
  Antisense strand to SEQ ID NO: 871538
uucaacgaucuccuggacc

SEQ ID NO: 871540 - RNA, 19 nt, Artificial Sequence
  Description of Artificial Sequence: Synthetic oligonucleotide
  Sense strand starting at position 318 of SEQ ID NO: 588528
ccaggagaucguugaacuc

SEQ ID NO: 871541 - RNA, 19 nt, Artificial Sequence
  Description of Artificial Sequence: Synthetic oligonucleotide
  Antisense strand to SEQ ID NO: 871540
gaguucaacgaucuccugg

SEQ ID NO: 871542 - RNA, 19 nt, Artificial Sequence
  Description of Artificial Sequence: Synthetic oligonucleotide
  Sense strand starting at position 467 of SEQ ID NO: 588528
agucgcuucaugugggaga

SEQ ID NO: 871543 - RNA, 19 nt, Artificial Sequence
  Description of Artificial Sequence: Synthetic oligonucleotide
  Antisense strand to SEQ ID NO: 871542
ucucccacaugaagcgacu

SEQ ID NO: 871544 - RNA, 19 nt, Artificial Sequence
  Description of Artificial Sequence: Synthetic oligonucleotide
  Sense strand starting at position 515 of SEQ ID NO: 588528
gcgggagagaccugucagu

SEQ ID NO: 871545 - RNA, 19 nt, Artificial Sequence
  Description of Artificial Sequence: Synthetic oligonucleotide
  Antisense strand to SEQ ID NO: 871544
acugacaggucucucccgc

SEQ ID NO: 871546 - RNA, 19 nt, Artificial Sequence
  Description of Artificial Sequence: Synthetic oligonucleotide
  Sense strand starting at position 693 of SEQ ID NO: 588528
ucuguauugcggguguuau

SEQ ID NO: 871547 - RNA, 19 nt, Artificial Sequence
  Description of Artificial Sequence: Synthetic oligonucleotide
  Antisense strand to SEQ ID NO: 871546
auaacacccgcaauacaga

SEQ ID NO: 871548 - RNA, 19 nt, Artificial Sequence
  Description of Artificial Sequence: Synthetic oligonucleotide
  Sense strand starting at position 1016 of SEQ ID NO: 588528
gaagcuaucccgggaaggu

SEQ ID NO: 871549 - RNA, 19 nt, Artificial Sequence
  Description of Artificial Sequence: Synthetic oligonucleotide
  Antisense strand to SEQ ID NO: 871548
accuucccgggauagcuuc

SEQ ID NO: 871550 - RNA, 19 nt, Artificial Sequence
  Description of Artificial Sequence: Synthetic oligonucleotide
  Sense strand starting at position 1017 of SEQ ID NO: 588528
aagcuaucccgggaagguu

SEQ ID NO: 871551 - RNA, 19 nt, Artificial Sequence
  Description of Artificial Sequence: Synthetic oligonucleotide
  Antisense strand to SEQ ID NO: 871550
aaccuucccgggauagcuu

SEQ ID NO: 871552 - RNA, 19 nt, Artificial Sequence
  Description of Artificial Sequence: Synthetic oligonucleotide
  Sense strand starting at position 1149 of SEQ ID NO: 588528
cggagcgauacucacguua

SEQ ID NO: 871553 - RNA, 19 nt, Artificial Sequence
  Description of Artificial Sequence: Synthetic oligonucleotide
  Antisense strand to SEQ ID NO: 871552
uaacgugaguaucgcuccg

SEQ ID NO: 871554 - RNA, 19 nt, Artificial Sequence
  Description of Artificial Sequence: Synthetic oligonucleotide
  Sense strand starting at position 1507 of SEQ ID NO: 588528
caaauuggccgagauccuu

SEQ ID NO: 871555 - RNA, 19 nt, Artificial Sequence
  Description of Artificial Sequence: Synthetic oligonucleotide
  Antisense strand to SEQ ID NO: 871554
aaggaucucggccaauuug

SEQ ID NO: 871556 - RNA, 19 nt, Artificial Sequence
  Description of Artificial Sequence: Synthetic oligonucleotide
  Sense strand starting at position 1515 of SEQ ID NO: 588528
ccgagauccuucuucuuug

SEQ ID NO: 871557 - RNA, 19 nt, Artificial Sequence
  Description of Artificial Sequence: Synthetic oligonucleotide
  Antisense strand to SEQ ID NO: 871556
caaagaagaaggaucucgg

SEQ ID NO: 871558 - RNA, 19 nt, Artificial Sequence
  Description of Artificial Sequence: Synthetic oligonucleotide
  Sense strand starting at position 1518 of SEQ ID NO: 588528
agauccuucuucuuuggau

SEQ ID NO: 871559 - RNA, 19 nt, Artificial Sequence
  Description of Artificial Sequence: Synthetic oligonucleotide
  Antisense strand to SEQ ID NO: 871558
auccaaagaagaaggaucu

SEQ ID NO: 871560 - RNA, 19 nt, Artificial Sequence
  Description of Artificial Sequence: Synthetic oligonucleotide
  Sense strand starting at position 1980 of SEQ ID NO: 588528
guucucucuggucgggaaa

SEQ ID NO: 871561 - RNA, 19 nt, Artificial Sequence
  Description of Artificial Sequence: Synthetic oligonucleotide
  Antisense strand to SEQ ID NO: 871560
uuucccgaccagagagaac

SEQ ID NO: 871562 - RNA, 19 nt, Artificial Sequence
  Description of Artificial Sequence: Synthetic oligonucleotide
  Sense strand starting at position 2468 of SEQ ID NO: 588528
uggagaagagcgcgauuau

SEQ ID NO: 871563 - RNA, 19 nt, Artificial Sequence
  Description of Artificial Sequence: Synthetic oligonucleotide
  Antisense strand to SEQ ID NO: 871562
auaaucgcgcucuucucca

SEQ ID NO: 871564 - RNA, 19 nt, Artificial Sequence
  Description of Artificial Sequence: Synthetic oligonucleotide
  Sense strand starting at position 2469 of SEQ ID NO: 588528
ggagaagagcgcgauuauc

SEQ ID NO: 871565 - RNA, 19 nt, Artificial Sequence
  Description of Artificial Sequence: Synthetic oligonucleotide
  Antisense strand to SEQ ID NO: 871564
gauaaucgcgcucuucucc

SEQ ID NO: 871566 - RNA, 19 nt, Artificial Sequence
  Description of Artificial Sequence: Synthetic oligonucleotide
  Sense strand starting at position 2479 of SEQ ID NO: 588528
gcgauuauccgcgugacuc

SEQ ID NO: 871567 - RNA, 19 nt, Artificial Sequence
  Description of Artificial Sequence: Synthetic oligonucleotide
  Antisense strand to SEQ ID NO: 871566
gagucacgcggauaaucgc

SEQ ID NO: 871568 - RNA, 19 nt, Artificial Sequence
  Description of Artificial Sequence: Synthetic oligonucleotide
  Sense strand starting at position 2481 of SEQ ID NO: 588528
gauuauccgcgugacucau

SEQ ID NO: 871569 - RNA, 19 nt, Artificial Sequence
  Description of Artificial Sequence: Synthetic oligonucleotide
  Antisense strand to SEQ ID NO: 871568
augagucacgcggauaauc

SEQ ID NO: 871570 - RNA, 19 nt, Artificial Sequence
  Description of Artificial Sequence: Synthetic oligonucleotide
  Sense strand starting at position 3181 of SEQ ID NO: 588528
ugagccacugccuguaaua

SEQ ID NO: 871571 - RNA, 19 nt, Artificial Sequence
  Description of Artificial Sequence: Synthetic oligonucleotide
  Antisense strand to SEQ ID NO: 871570
uauuacaggcaguggcuca

SEQ ID NO: 871572 - RNA, 19 nt, Artificial Sequence
  Description of Artificial Sequence: Synthetic oligonucleotide
  Sense strand starting at position 3183 of SEQ ID NO: 588528
agccacugccuguaauauu

SEQ ID NO: 871573 - RNA, 19 nt, Artificial Sequence
  Description of Artificial Sequence: Synthetic oligonucleotide
  Antisense strand to SEQ ID NO: 871572
aauauuacaggcaguggcu

SEQ ID NO: 871574 - RNA, 19 nt, Artificial Sequence
  Description of Artificial Sequence: Synthetic oligonucleotide
  Sense strand starting at position 3191 of SEQ ID NO: 588528
ccuguaauauuugaugacu

SEQ ID NO: 871575 - RNA, 19 nt, Artificial Sequence
  Description of Artificial Sequence: Synthetic oligonucleotide
  Antisense strand to SEQ ID NO: 871574
agucaucaaauauuacagg

SEQ ID NO: 871576 - RNA, 19 nt, Artificial Sequence
  Description of Artificial Sequence: Synthetic oligonucleotide
  Sense strand starting at position 3320 of SEQ ID NO: 588528
gaaauugagucauaaagag

SEQ ID NO: 871577 - RNA, 19 nt, Artificial Sequence
  Description of Artificial Sequence: Synthetic oligonucleotide
  Antisense strand to SEQ ID NO: 871576
cucuuuaugacucaauuuc

SEQ ID NO: 871578 - RNA, 19 nt, Artificial Sequence
  Description of Artificial Sequence: Synthetic oligonucleotide
  Sense strand starting at position 3340 of SEQ ID NO: 588528
ugaaauggccaguaaaggu

SEQ ID NO: 871579 - RNA, 19 nt, Artificial Sequence
  Description of Artificial Sequence: Synthetic oligonucleotide
  Antisense strand to SEQ ID NO: 871578
accuuuacuggccauuuca

SEQ ID NO: 871580 - RNA, 19 nt, Artificial Sequence
  Description of Artificial Sequence: Synthetic oligonucleotide
  Sense strand starting at position 3413 of SEQ ID NO: 588528
agggacuucccugggaagu

SEQ ID NO: 871581 - RNA, 19 nt, Artificial Sequence
  Description of Artificial Sequence: Synthetic oligonucleotide
  Antisense strand to SEQ ID NO: 871580
acuucccagggaagucccu

SEQ ID NO: 871582 - RNA, 19 nt, Artificial Sequence
  Description of Artificial Sequence: Synthetic oligonucleotide
  Sense strand starting at position 3461 of SEQ ID NO: 588528
gugggauccuagcucucaa

SEQ ID NO: 871583 - RNA, 19 nt, Artificial Sequence
  Description of Artificial Sequence: Synthetic oligonucleotide
  Antisense strand to SEQ ID NO: 871582
uugagagcuaggaucccac

SEQ ID NO: 871584 - RNA, 19 nt, Artificial Sequence
  Description of Artificial Sequence: Synthetic oligonucleotide
  Sense strand starting at position 3529 of SEQ ID NO: 588528
auaggaaacggcgaucuuu

SEQ ID NO: 871585 - RNA, 19 nt, Artificial Sequence
  Description of Artificial Sequence: Synthetic oligonucleotide
  Antisense strand to SEQ ID NO: 871584
aaagaucgccguuuccuau

SEQ ID NO: 871586 - RNA, 19 nt, Artificial Sequence
  Description of Artificial Sequence: Synthetic oligonucleotide
  Sense strand starting at position 3590 of SEQ ID NO: 588528
cuugguuugugaucaguaa

SEQ ID NO: 871587 - RNA, 19 nt, Artificial Sequence
  Description of Artificial Sequence: Synthetic oligonucleotide
  Antisense strand to SEQ ID NO: 871586
uuacugaucacaaaccaag

SEQ ID NO: 871588 - RNA, 19 nt, Artificial Sequence
  Description of Artificial Sequence: Synthetic oligonucleotide
  Sense strand starting at position 3591 of SEQ ID NO: 588528
uugguuugugaucaguaau

SEQ ID NO: 871589 - RNA, 19 nt, Artificial Sequence
  Description of Artificial Sequence: Synthetic oligonucleotide
  Antisense strand to SEQ ID NO: 871588
auuacugaucacaaaccaa

SEQ ID NO: 871590 - RNA, 19 nt, Artificial Sequence
  Description of Artificial Sequence: Synthetic oligonucleotide
  Sense strand starting at position 3675 of SEQ ID NO: 588528
ugugguguucgguaucacu

SEQ ID NO: 871591 - RNA, 19 nt, Artificial Sequence
  Description of Artificial Sequence: Synthetic oligonucleotide
  Antisense strand to SEQ ID NO: 871590
agugauaccgaacaccaca

SEQ ID NO: 871592 - RNA, 19 nt, Artificial Sequence
  Description of Artificial Sequence: Synthetic oligonucleotide
  Sense strand starting at position 3702 of SEQ ID NO: 588528
guagguuuggcgagguguu

SEQ ID NO: 871593 - RNA, 19 nt, Artificial Sequence
  Description of Artificial Sequence: Synthetic oligonucleotide
  Antisense strand to SEQ ID NO: 871592
aacaccucgccaaaccuac

SEQ ID NO: 871594 - RNA, 19 nt, Artificial Sequence
  Description of Artificial Sequence: Synthetic oligonucleotide
  Sense strand starting at position 3712 of SEQ ID NO: 588528
cgagguguuuacuuuggau

SEQ ID NO: 871595 - RNA, 19 nt, Artificial Sequence
  Description of Artificial Sequence: Synthetic oligonucleotide
  Antisense strand to SEQ ID NO: 871594
auccaaaguaaacaccucg

SEQ ID NO: 871596 - RNA, 19 nt, Artificial Sequence
  Description of Artificial Sequence: Synthetic oligonucleotide
  Sense strand starting at position 3714 of SEQ ID NO: 588528
agguguuuacuuuggauuc

SEQ ID NO: 871597 - RNA, 19 nt, Artificial Sequence
  Description of Artificial Sequence: Synthetic oligonucleotide
  Antisense strand to SEQ ID NO: 871596
gaauccaaaguaaacaccu

SEQ ID NO: 871598 - RNA, 19 nt, Artificial Sequence
  Description of Artificial Sequence: Synthetic oligonucleotide
  Sense strand starting at position 3793 of SEQ ID NO: 588528
gcgcuuaggcuggugucaa

SEQ ID NO: 871599 - RNA, 19 nt, Artificial Sequence
  Description of Artificial Sequence: Synthetic oligonucleotide
  Antisense strand to SEQ ID NO: 871598
uugacaccagccuaagcgc

SEQ ID NO: 871600 - RNA, 19 nt, Artificial Sequence
  Description of Artificial Sequence: Synthetic oligonucleotide
  Sense strand starting at position 3804 of SEQ ID NO: 588528
ggugucaaccuaggaaaga

SEQ ID NO: 871601 - RNA, 19 nt, Artificial Sequence
  Description of Artificial Sequence: Synthetic oligonucleotide
  Antisense strand to SEQ ID NO: 871600
ucuuuccuagguugacacc

SEQ ID NO: 871602 - RNA, 19 nt, Artificial Sequence
  Description of Artificial Sequence: Synthetic oligonucleotide
  Sense strand starting at position 3893 of SEQ ID NO: 588528
gaguucuaguugccaaugu

SEQ ID NO: 871603 - RNA, 19 nt, Artificial Sequence
  Description of Artificial Sequence: Synthetic oligonucleotide
  Antisense strand to SEQ ID NO: 871602
acauuggcaacuagaacuc

SEQ ID NO: 871604 - RNA, 19 nt, Artificial Sequence
  Description of Artificial Sequence: Synthetic oligonucleotide
  Sense strand starting at position 3953 of SEQ ID NO: 588528
ccuauuagguuuccucaga

SEQ ID NO: 871605 - RNA, 19 nt, Artificial Sequence
  Description of Artificial Sequence: Synthetic oligonucleotide
  Antisense strand to SEQ ID NO: 871604
ucugaggaaaccuaauagg

SEQ ID NO: 871606 - RNA, 19 nt, Artificial Sequence
  Description of Artificial Sequence: Synthetic oligonucleotide
  Sense strand starting at position 3954 of SEQ ID NO: 588528
cuauuagguuuccucagaa

SEQ ID NO: 871607 - RNA, 19 nt, Artificial Sequence
  Description of Artificial Sequence: Synthetic oligonucleotide
  Antisense strand to SEQ ID NO: 871606
uucugaggaaaccuaauag

SEQ ID NO: 871608 - RNA, 19 nt, Artificial Sequence
  Description of Artificial Sequence: Synthetic oligonucleotide
  Sense strand starting at position 3967 of SEQ ID NO: 588528
ucagaauauuugugauacc

SEQ ID NO: 871609 - RNA, 19 nt, Artificial Sequence
  Description of Artificial Sequence: Synthetic oligonucleotide
  Antisense strand to SEQ ID NO: 871608
gguaucacaaauauucuga

SEQ ID NO: 871610 - RNA, 19 nt, Artificial Sequence
  Description of Artificial Sequence: Synthetic oligonucleotide
  Sense strand starting at position 3970 of SEQ ID NO: 588528
gaauauuugugauaccuga

SEQ ID NO: 871611 - RNA, 19 nt, Artificial Sequence
  Description of Artificial Sequence: Synthetic oligonucleotide
  Antisense strand to SEQ ID NO: 871610
ucagguaucacaaauauuc

SEQ ID NO: 871612 - RNA, 19 nt, Artificial Sequence
  Description of Artificial Sequence: Synthetic oligonucleotide
  Sense strand starting at position 69 of SEQ ID NO: 588529
agaguuaaaccgcaucuua

SEQ ID NO: 871613 - RNA, 19 nt, Artificial Sequence
  Description of Artificial Sequence: Synthetic oligonucleotide
  Antisense strand to SEQ ID NO: 871612
uaagaugcgguuuaacucu

SEQ ID NO: 871614 - RNA, 19 nt, Artificial Sequence
  Description of Artificial Sequence: Synthetic oligonucleotide
  Sense strand starting at position 214 of SEQ ID NO: 588529
uguaaugggcuuugagaug

SEQ ID NO: 871615 - RNA, 19 nt, Artificial Sequence
  Description of Artificial Sequence: Synthetic oligonucleotide
  Antisense strand to SEQ ID NO: 871614
caucucaaagcccauuaca

SEQ ID NO: 871616 - RNA, 19 nt, Artificial Sequence
  Description of Artificial Sequence: Synthetic oligonucleotide
  Sense strand starting at position 221 of SEQ ID NO: 588529
ggcuuugagaugggaggau

SEQ ID NO: 871617 - RNA, 19 nt, Artificial Sequence
  Description of Artificial Sequence: Synthetic oligonucleotide
  Antisense strand to SEQ ID NO: 871616
auccucccaucucaaagcc

SEQ ID NO: 871618 - RNA, 19 nt, Artificial Sequence
  Description of Artificial Sequence: Synthetic oligonucleotide
  Sense strand starting at position 413 of SEQ ID NO: 588529
gucgcugucggaucccaua

SEQ ID NO: 871619 - RNA, 19 nt, Artificial Sequence
  Description of Artificial Sequence: Synthetic oligonucleotide
  Antisense strand to SEQ ID NO: 871618
uaugggauccgacagcgac

SEQ ID NO: 871620 - RNA, 19 nt, Artificial Sequence
  Description of Artificial Sequence: Synthetic oligonucleotide
  Sense strand starting at position 1280 of SEQ ID NO: 588529
cggcauucucuugcucagu

SEQ ID NO: 871621 - RNA, 19 nt, Artificial Sequence
  Description of Artificial Sequence: Synthetic oligonucleotide
  Antisense strand to SEQ ID NO: 871620
acugagcaagagaaugccg

SEQ ID NO: 871622 - RNA, 19 nt, Artificial Sequence
  Description of Artificial Sequence: Synthetic oligonucleotide
  Sense strand starting at position 1308 of SEQ ID NO: 588529
gcagaaucccaucacguca

SEQ ID NO: 871623 - RNA, 19 nt, Artificial Sequence
  Description of Artificial Sequence: Synthetic oligonucleotide
  Antisense strand to SEQ ID NO: 871622
ugacgugaugggauucugc

SEQ ID NO: 871624 - RNA, 19 nt, Artificial Sequence
  Description of Artificial Sequence: Synthetic oligonucleotide
  Sense strand starting at position 1490 of SEQ ID NO: 588529
cucgaacacugacauuuaa

SEQ ID NO: 871625 - RNA, 19 nt, Artificial Sequence
  Description of Artificial Sequence: Synthetic oligonucleotide
  Antisense strand to SEQ ID NO: 871624
uuaaaugucaguguucgag

SEQ ID NO: 871626 - RNA, 19 nt, Artificial Sequence
  Description of Artificial Sequence: Synthetic oligonucleotide
  Sense strand starting at position 1700 of SEQ ID NO: 588529
uuaagugacuuccugcaaa

SEQ ID NO: 871627 - RNA, 19 nt, Artificial Sequence
  Description of Artificial Sequence: Synthetic oligonucleotide
  Antisense strand to SEQ ID NO: 871626
uuugcaggaagucacuuaa

SEQ ID NO: 871628 - RNA, 19 nt, Artificial Sequence
  Description of Artificial Sequence: Synthetic oligonucleotide
  Sense strand starting at position 1852 of SEQ ID NO: 588529
cuggacacaucuuuguauu

SEQ ID NO: 871629 - RNA, 19 nt, Artificial Sequence
  Description of Artificial Sequence: Synthetic oligonucleotide
  Antisense strand to SEQ ID NO: 871628
aauacaaagauguguccag

SEQ ID NO: 871630 - RNA, 19 nt, Artificial Sequence
  Description of Artificial Sequence: Synthetic oligonucleotide
  Sense strand starting at position 1887 of SEQ ID NO: 588529
aaauuugaguuauggauga

SEQ ID NO: 871631 - RNA, 19 nt, Artificial Sequence
  Description of Artificial Sequence: Synthetic oligonucleotide
  Antisense strand to SEQ ID NO: 871630
ucauccauaacucaaauuu

SEQ ID NO: 871632 - RNA, 19 nt, Artificial Sequence
  Description of Artificial Sequence: Synthetic oligonucleotide
  Sense strand starting at position 1921 of SEQ ID NO: 588529
gaauaaaugcagugugaau

SEQ ID NO: 871633 - RNA, 19 nt, Artificial Sequence
  Description of Artificial Sequence: Synthetic oligonucleotide
  Antisense strand to SEQ ID NO: 871632
auucacacugcauuuauuc

SEQ ID NO: 871634 - RNA, 19 nt, Artificial Sequence
  Description of Artificial Sequence: Synthetic oligonucleotide
  Sense strand starting at position 1957 of SEQ ID NO: 588529
ccauuaugucaggauaagu

SEQ ID NO: 871635 - RNA, 19 nt, Artificial Sequence
  Description of Artificial Sequence: Synthetic oligonucleotide
  Antisense strand to SEQ ID NO: 871634
acuuauccugacauaaugg

SEQ ID NO: 871636 - RNA, 19 nt, Artificial Sequence
  Description of Artificial Sequence: Synthetic oligonucleotide
  Sense strand starting at position 2246 of SEQ ID NO: 588529
gcuuuauuuggaggcuauu

SEQ ID NO: 871637 - RNA, 19 nt, Artificial Sequence
  Description of Artificial Sequence: Synthetic oligonucleotide
  Antisense strand to SEQ ID NO: 871636
aauagccuccaaauaaagc

SEQ ID NO: 871638 - RNA, 19 nt, Artificial Sequence
  Description of Artificial Sequence: Synthetic oligonucleotide
  Sense strand starting at position 2418 of SEQ ID NO: 588529
guuacagagaagugacuua

SEQ ID NO: 871639 - RNA, 19 nt, Artificial Sequence
  Description of Artificial Sequence: Synthetic oligonucleotide
  Antisense strand to SEQ ID NO: 871638
uaagucacuucucuguaac

SEQ ID NO: 871640 - RNA, 19 nt, Artificial Sequence
  Description of Artificial Sequence: Synthetic oligonucleotide
  Sense strand starting at position 2496 of SEQ ID NO: 588529
uagcucuuugugcuugcaa

SEQ ID NO: 871641 - RNA, 19 nt, Artificial Sequence
  Description of Artificial Sequence: Synthetic oligonucleotide
  Antisense strand to SEQ ID NO: 871640
uugcaagcacaaagagcua

SEQ ID NO: 871642 - RNA, 19 nt, Artificial Sequence
  Description of Artificial Sequence: Synthetic oligonucleotide
  Sense strand starting at position 2578 of SEQ ID NO: 588529
gcuggaaauccuuagccau

SEQ ID NO: 871643 - RNA, 19 nt, Artificial Sequence
  Description of Artificial Sequence: Synthetic oligonucleotide
  Antisense strand to SEQ ID NO: 871642
auggcuaaggauuuccagc

SEQ ID NO: 871644 - RNA, 19 nt, Artificial Sequence
  Description of Artificial Sequence: Synthetic oligonucleotide
  Sense strand starting at position 2581 of SEQ ID NO: 588529
ggaaauccuuagccaugga

SEQ ID NO: 871645 - RNA, 19 nt, Artificial Sequence
  Description of Artificial Sequence: Synthetic oligonucleotide
  Antisense strand to SEQ ID NO: 871644
uccauggcuaaggauuucc

SEQ ID NO: 871646 - RNA, 19 nt, Artificial Sequence
  Description of Artificial Sequence: Synthetic oligonucleotide
  Sense strand starting at position 2594 of SEQ ID NO: 588529
cauggaauacuguggcauu

SEQ ID NO: 871647 - RNA, 19 nt, Artificial Sequence
  Description of Artificial Sequence: Synthetic oligonucleotide
  Antisense strand to SEQ ID NO: 871646
aaugccacaguauuccaug

SEQ ID NO: 871648 - RNA, 19 nt, Artificial Sequence
  Description of Artificial Sequence: Synthetic oligonucleotide
  Sense strand starting at position 2607 of SEQ ID NO: 588529
ggcauuacuuggucaacaa

SEQ ID NO: 871649 - RNA, 19 nt, Artificial Sequence
  Description of Artificial Sequence: Synthetic oligonucleotide
  Antisense strand to SEQ ID NO: 871648
uuguugaccaaguaaugcc

SEQ ID NO: 871650 - RNA, 19 nt, Artificial Sequence
  Description of Artificial Sequence: Synthetic oligonucleotide
  Sense strand starting at position 2608 of SEQ ID NO: 588529
gcauuacuuggucaacaau

SEQ ID NO: 871651 - RNA, 19 nt, Artificial Sequence
  Description of Artificial Sequence: Synthetic oligonucleotide
  Antisense strand to SEQ ID NO: 871650
auuguugaccaaguaaugc

SEQ ID NO: 871652 - RNA, 19 nt, Artificial Sequence
  Description of Artificial Sequence: Synthetic oligonucleotide
  Sense strand starting at position 2634 of SEQ ID NO: 588529
ggucuuggagucugauuaa

SEQ ID NO: 871653 - RNA, 19 nt, Artificial Sequence
  Description of Artificial Sequence: Synthetic oligonucleotide
  Antisense strand to SEQ ID NO: 871652
uuaaucagacuccaagacc

SEQ ID NO: 871654 - RNA, 19 nt, Artificial Sequence
  Description of Artificial Sequence: Synthetic oligonucleotide
  Sense strand starting at position 2637 of SEQ ID NO: 588529
cuuggagucugauuaacuu

SEQ ID NO: 871655 - RNA, 19 nt, Artificial Sequence
  Description of Artificial Sequence: Synthetic oligonucleotide
  Antisense strand to SEQ ID NO: 871654
aaguuaaucagacuccaag

SEQ ID NO: 871656 - RNA, 19 nt, Artificial Sequence
  Description of Artificial Sequence: Synthetic oligonucleotide
  Sense strand starting at position 2665 of SEQ ID NO: 588529
cuccgucugaauuaacgau

SEQ ID NO: 871657 - RNA, 19 nt, Artificial Sequence
  Description of Artificial Sequence: Synthetic oligonucleotide
  Antisense strand to SEQ ID NO: 871656
aucguuaauucagacggag

SEQ ID NO: 871658 - RNA, 19 nt, Artificial Sequence
  Description of Artificial Sequence: Synthetic oligonucleotide
  Sense strand starting at position 2695 of SEQ ID NO: 588529
ccaucuugauagcuagaaa

SEQ ID NO: 871659 - RNA, 19 nt, Artificial Sequence
  Description of Artificial Sequence: Synthetic oligonucleotide
  Antisense strand to SEQ ID NO: 871658
uuucuagcuaucaagaugg

SEQ ID NO: 871660 - RNA, 19 nt, Artificial Sequence
  Description of Artificial Sequence: Synthetic oligonucleotide
  Sense strand starting at position 2790 of SEQ ID NO: 588529
gugagagguaccugauucu

SEQ ID NO: 871661 - RNA, 19 nt, Artificial Sequence
  Description of Artificial Sequence: Synthetic oligonucleotide
  Antisense strand to SEQ ID NO: 871660
agaaucagguaccucucac

SEQ ID NO: 871662 - RNA, 19 nt, Artificial Sequence
  Description of Artificial Sequence: Synthetic oligonucleotide
  Sense strand starting at position 2793 of SEQ ID NO: 588529
agagguaccugauucuaug

SEQ ID NO: 871663 - RNA, 19 nt, Artificial Sequence
  Description of Artificial Sequence: Synthetic oligonucleotide
  Antisense strand to SEQ ID NO: 871662
cauagaaucagguaccucu

SEQ ID NO: 871664 - RNA, 19 nt, Artificial Sequence
  Description of Artificial Sequence: Synthetic oligonucleotide
  Sense strand starting at position 2916 of SEQ ID NO: 588529
ugacucuaccaaugugaga

SEQ ID NO: 871665 - RNA, 19 nt, Artificial Sequence
  Description of Artificial Sequence: Synthetic oligonucleotide
  Antisense strand to SEQ ID NO: 871664
ucucacauugguagaguca

SEQ ID NO: 871666 - RNA, 19 nt, Artificial Sequence
  Description of Artificial Sequence: Synthetic oligonucleotide
  Sense strand starting at position 2927 of SEQ ID NO: 588529
augugagaucuacaguagu

SEQ ID NO: 871667 - RNA, 19 nt, Artificial Sequence
  Description of Artificial Sequence: Synthetic oligonucleotide
  Antisense strand to SEQ ID NO: 871666
acuacuguagaucucacau

SEQ ID NO: 871668 - RNA, 19 nt, Artificial Sequence
  Description of Artificial Sequence: Synthetic oligonucleotide
  Sense strand starting at position 3183 of SEQ ID NO: 588529
ggcucagguaaguaagagu

SEQ ID NO: 871669 - RNA, 19 nt, Artificial Sequence
  Description of Artificial Sequence: Synthetic oligonucleotide
  Antisense strand to SEQ ID NO: 871668
acucuuacuuaccugagcc

SEQ ID NO: 871670 - RNA, 19 nt, Artificial Sequence
  Description of Artificial Sequence: Synthetic oligonucleotide
  Sense strand starting at position 3312 of SEQ ID NO: 588529
aagauauugcaguagguga

SEQ ID NO: 871671 - RNA, 19 nt, Artificial Sequence
  Description of Artificial Sequence: Synthetic oligonucleotide
  Antisense strand to SEQ ID NO: 871670
ucaccuacugcaauaucuu

SEQ ID NO: 871672 - RNA, 19 nt, Artificial Sequence
  Description of Artificial Sequence: Synthetic oligonucleotide
  Sense strand starting at position 3337 of SEQ ID NO: 588529
guggaagaaagguguagau

SEQ ID NO: 871673 - RNA, 19 nt, Artificial Sequence
  Description of Artificial Sequence: Synthetic oligonucleotide
  Antisense strand to SEQ ID NO: 871672
aucuacaccuuucuuccac

SEQ ID NO: 871674 - RNA, 19 nt, Artificial Sequence
  Description of Artificial Sequence: Synthetic oligonucleotide
  Sense strand starting at position 3460 of SEQ ID NO: 588529
caugcaucccuguaaggua

SEQ ID NO: 871675 - RNA, 19 nt, Artificial Sequence
  Description of Artificial Sequence: Synthetic oligonucleotide
  Antisense strand to SEQ ID NO: 871674
uaccuuacagggaugcaug

SEQ ID NO: 871676 - RNA, 19 nt, Artificial Sequence
  Description of Artificial Sequence: Synthetic oligonucleotide
  Sense strand starting at position 3468 of SEQ ID NO: 588529
ccuguaagguagguauaca

SEQ ID NO: 871677 - RNA, 19 nt, Artificial Sequence
  Description of Artificial Sequence: Synthetic oligonucleotide
  Antisense strand to SEQ ID NO: 871676
uguauaccuaccuuacagg

SEQ ID NO: 871678 - RNA, 19 nt, Artificial Sequence
  Description of Artificial Sequence: Synthetic oligonucleotide
  Sense strand starting at position 3683 of SEQ ID NO: 588529
gcgggaucucuccaggauc

SEQ ID NO: 871679 - RNA, 19 nt, Artificial Sequence
  Description of Artificial Sequence: Synthetic oligonucleotide
  Antisense strand to SEQ ID NO: 871678
gauccuggagagaucccgc

SEQ ID NO: 871680 - RNA, 19 nt, Artificial Sequence
  Description of Artificial Sequence: Synthetic oligonucleotide
  Sense strand starting at position 3694 of SEQ ID NO: 588529
ccaggaucucuaugaucau

SEQ ID NO: 871681 - RNA, 19 nt, Artificial Sequence
  Description of Artificial Sequence: Synthetic oligonucleotide
  Antisense strand to SEQ ID NO: 871680
augaucauagagauccugg

SEQ ID NO: 871682 - RNA, 19 nt, Artificial Sequence
  Description of Artificial Sequence: Synthetic oligonucleotide
  Sense strand starting at position 3705 of SEQ ID NO: 588529
augaucauggccuguacaa

SEQ ID NO: 871683 - RNA, 19 nt, Artificial Sequence
  Description of Artificial Sequence: Synthetic oligonucleotide
  Antisense strand to SEQ ID NO: 871682
uuguacaggccaugaucau

SEQ ID NO: 871684 - RNA, 19 nt, Artificial Sequence
  Description of Artificial Sequence: Synthetic oligonucleotide
  Sense strand starting at position 3746 of SEQ ID NO: 588529
ugggauuguacuggugaaa

SEQ ID NO: 871685 - RNA, 19 nt, Artificial Sequence
  Description of Artificial Sequence: Synthetic oligonucleotide
  Antisense strand to SEQ ID NO: 871684
uuucaccaguacaauccca

SEQ ID NO: 871686 - RNA, 19 nt, Artificial Sequence
  Description of Artificial Sequence: Synthetic oligonucleotide
  Sense strand starting at position 3840 of SEQ ID NO: 588529
cuguaucuuuccuugaaga

SEQ ID NO: 871687 - RNA, 19 nt, Artificial Sequence
  Description of Artificial Sequence: Synthetic oligonucleotide
  Antisense strand to SEQ ID NO: 871686
ucuucaaggaaagauacag

SEQ ID NO: 871688 - RNA, 19 nt, Artificial Sequence
  Description of Artificial Sequence: Synthetic oligonucleotide
  Sense strand starting at position 3841 of SEQ ID NO: 588529
uguaucuuuccuugaagau

SEQ ID NO: 871689 - RNA, 19 nt, Artificial Sequence
  Description of Artificial Sequence: Synthetic oligonucleotide
  Antisense strand to SEQ ID NO: 871688
aucuucaaggaaagauaca

SEQ ID NO: 871690 - RNA, 19 nt, Artificial Sequence
  Description of Artificial Sequence: Synthetic oligonucleotide
  Sense strand starting at position 3842 of SEQ ID NO: 588529
guaucuuuccuugaagauu

SEQ ID NO: 871691 - RNA, 19 nt, Artificial Sequence
  Description of Artificial Sequence: Synthetic oligonucleotide
  Antisense strand to SEQ ID NO: 871690
aaucuucaaggaaagauac

SEQ ID NO: 871692 - RNA, 19 nt, Artificial Sequence
  Description of Artificial Sequence: Synthetic oligonucleotide
  Sense strand starting at position 53 of SEQ ID NO: 588530
gaaagugucauggguaauu

SEQ ID NO: 871693 - RNA, 19 nt, Artificial Sequence
  Description of Artificial Sequence: Synthetic oligonucleotide
  Antisense strand to SEQ ID NO: 871692
aauuacccaugacacuuuc

SEQ ID NO: 871694 - RNA, 19 nt, Artificial Sequence
  Description of Artificial Sequence: Synthetic oligonucleotide
  Sense strand starting at position 62 of SEQ ID NO: 588530
auggguaauuccuccugaa

SEQ ID NO: 871695 - RNA, 19 nt, Artificial Sequence
  Description of Artificial Sequence: Synthetic oligonucleotide
  Antisense strand to SEQ ID NO: 871694
uucaggaggaauuacccau

SEQ ID NO: 871696 - RNA, 19 nt, Artificial Sequence
  Description of Artificial Sequence: Synthetic oligonucleotide
  Sense strand starting at position 240 of SEQ ID NO: 588530
agggcacucaagugaaaga

SEQ ID NO: 871697 - RNA, 19 nt, Artificial Sequence
  Description of Artificial Sequence: Synthetic oligonucleotide
  Antisense strand to SEQ ID NO: 871696
ucuuucacuugagugcccu

SEQ ID NO: 871698 - RNA, 19 nt, Artificial Sequence
  Description of Artificial Sequence: Synthetic oligonucleotide
  Sense strand starting at position 297 of SEQ ID NO: 588530
uuauuauaccgaggaucaa

SEQ ID NO: 871699 - RNA, 19 nt, Artificial Sequence
  Description of Artificial Sequence: Synthetic oligonucleotide
  Antisense strand to SEQ ID NO: 871698
uugauccucgguauaauaa

SEQ ID NO: 871700 - RNA, 19 nt, Artificial Sequence
  Description of Artificial Sequence: Synthetic oligonucleotide
  Sense strand starting at position 385 of SEQ ID NO: 588530
gaaaguuuccaaugacagc

SEQ ID NO: 871701 - RNA, 19 nt, Artificial Sequence
  Description of Artificial Sequence: Synthetic oligonucleotide
  Antisense strand to SEQ ID NO: 871700
gcugucauuggaaacuuuc

SEQ ID NO: 871702 - RNA, 19 nt, Artificial Sequence
  Description of Artificial Sequence: Synthetic oligonucleotide
  Sense strand starting at position 437 of SEQ ID NO: 588530
ggcuaaagaucuccauucu

SEQ ID NO: 871703 - RNA, 19 nt, Artificial Sequence
  Description of Artificial Sequence: Synthetic oligonucleotide
  Antisense strand to SEQ ID NO: 871702
agaauggagaucuuuagcc

SEQ ID NO: 871704 - RNA, 19 nt, Artificial Sequence
  Description of Artificial Sequence: Synthetic oligonucleotide
  Sense strand starting at position 475 of SEQ ID NO: 588530
uccguaauucuuuacugac

SEQ ID NO: 871705 - RNA, 19 nt, Artificial Sequence
  Description of Artificial Sequence: Synthetic oligonucleotide
  Antisense strand to SEQ ID NO: 871704
gucaguaaagaauuacgga

SEQ ID NO: 871706 - RNA, 19 nt, Artificial Sequence
  Description of Artificial Sequence: Synthetic oligonucleotide
  Sense strand starting at position 641 of SEQ ID NO: 588530
gucuguucucaugaaaucu

SEQ ID NO: 871707 - RNA, 19 nt, Artificial Sequence
  Description of Artificial Sequence: Synthetic oligonucleotide
  Antisense strand to SEQ ID NO: 871706
agauuucaugagaacagac

SEQ ID NO: 871708 - RNA, 19 nt, Artificial Sequence
  Description of Artificial Sequence: Synthetic oligonucleotide
  Sense strand starting at position 696 of SEQ ID NO: 588530
aucaguggaaaucgaauau

SEQ ID NO: 871709 - RNA, 19 nt, Artificial Sequence
  Description of Artificial Sequence: Synthetic oligonucleotide
  Antisense strand to SEQ ID NO: 871708
auauucgauuuccacugau

SEQ ID NO: 871710 - RNA, 19 nt, Artificial Sequence
  Description of Artificial Sequence: Synthetic oligonucleotide
  Sense strand starting at position 700 of SEQ ID NO: 588530
guggaaaucgaauauucuu

SEQ ID NO: 871711 - RNA, 19 nt, Artificial Sequence
  Description of Artificial Sequence: Synthetic oligonucleotide
  Antisense strand to SEQ ID NO: 871710
aagaauauucgauuuccac

SEQ ID NO: 871712 - RNA, 19 nt, Artificial Sequence
  Description of Artificial Sequence: Synthetic oligonucleotide
  Sense strand starting at position 802 of SEQ ID NO: 588530
agugcuuaagacuauuacu

SEQ ID NO: 871713 - RNA, 19 nt, Artificial Sequence
  Description of Artificial Sequence: Synthetic oligonucleotide
  Antisense strand to SEQ ID NO: 871712
aguaauagucuuaagcacu

SEQ ID NO: 871714 - RNA, 19 nt, Artificial Sequence
  Description of Artificial Sequence: Synthetic oligonucleotide
  Sense strand starting at position 882 of SEQ ID NO: 588530
gcaggaaaguucuucagga

SEQ ID NO: 871715 - RNA, 19 nt, Artificial Sequence
  Description of Artificial Sequence: Synthetic oligonucleotide
  Antisense strand to SEQ ID NO: 871714
uccugaagaacuuuccugc

SEQ ID NO: 871716 - RNA, 19 nt, Artificial Sequence
  Description of Artificial Sequence: Synthetic oligonucleotide
  Sense strand starting at position 930 of SEQ ID NO: 588530
auaagauuguagguguuag

SEQ ID NO: 871717 - RNA, 19 nt, Artificial Sequence
  Description of Artificial Sequence: Synthetic oligonucleotide
  Antisense strand to SEQ ID NO: 871716
cuaacaccuacaaucuuau

SEQ ID NO: 871718 - RNA, 19 nt, Artificial Sequence
  Description of Artificial Sequence: Synthetic oligonucleotide
  Sense strand starting at position 1059 of SEQ ID NO: 588530
uccugaagauuguccauau

SEQ ID NO: 871719 - RNA, 19 nt, Artificial Sequence
  Description of Artificial Sequence: Synthetic oligonucleotide
  Antisense strand to SEQ ID NO: 871718
auauggacaaucuucagga

SEQ ID NO: 871720 - RNA, 19 nt, Artificial Sequence
  Description of Artificial Sequence: Synthetic oligonucleotide
  Sense strand starting at position 1060 of SEQ ID NO: 588530
ccugaagauuguccauauu

SEQ ID NO: 871721 - RNA, 19 nt, Artificial Sequence
  Description of Artificial Sequence: Synthetic oligonucleotide
  Antisense strand to SEQ ID NO: 871720
aauauggacaaucuucagg

SEQ ID NO: 871722 - RNA, 19 nt, Artificial Sequence
  Description of Artificial Sequence: Synthetic oligonucleotide
  Sense strand starting at position 1183 of SEQ ID NO: 588530
cugugaacauggcuuugaa

SEQ ID NO: 871723 - RNA, 19 nt, Artificial Sequence
  Description of Artificial Sequence: Synthetic oligonucleotide
  Antisense strand to SEQ ID NO: 871722
uucaaagccauguucacag

SEQ ID NO: 871724 - RNA, 19 nt, Artificial Sequence
  Description of Artificial Sequence: Synthetic oligonucleotide
  Sense strand starting at position 1186 of SEQ ID NO: 588530
ugaacauggcuuugaaaua

SEQ ID NO: 871725 - RNA, 19 nt, Artificial Sequence
  Description of Artificial Sequence: Synthetic oligonucleotide
  Antisense strand to SEQ ID NO: 871724
uauuucaaagccauguuca

SEQ ID NO: 871726 - RNA, 19 nt, Artificial Sequence
  Description of Artificial Sequence: Synthetic oligonucleotide
  Sense strand starting at position 1221 of SEQ ID NO: 588530
aucauagcucugugaacag

SEQ ID NO: 871727 - RNA, 19 nt, Artificial Sequence
  Description of Artificial Sequence: Synthetic oligonucleotide
  Antisense strand to SEQ ID NO: 871726
cuguucacagagcuaugau

SEQ ID NO: 871728 - RNA, 19 nt, Artificial Sequence
  Description of Artificial Sequence: Synthetic oligonucleotide
  Sense strand starting at position 1470 of SEQ ID NO: 588530
agaaguuauaaccggaaug

SEQ ID NO: 871729 - RNA, 19 nt, Artificial Sequence
  Description of Artificial Sequence: Synthetic oligonucleotide
  Antisense strand to SEQ ID NO: 871728
cauuccgguuauaacuucu

SEQ ID NO: 871730 - RNA, 19 nt, Artificial Sequence
  Description of Artificial Sequence: Synthetic oligonucleotide
  Sense strand starting at position 1472 of SEQ ID NO: 588530
aaguuauaaccggaauguu

SEQ ID NO: 871731 - RNA, 19 nt, Artificial Sequence
  Description of Artificial Sequence: Synthetic oligonucleotide
  Antisense strand to SEQ ID NO: 871730
aacauuccgguuauaacuu

SEQ ID NO: 871732 - RNA, 19 nt, Artificial Sequence
  Description of Artificial Sequence: Synthetic oligonucleotide
  Sense strand starting at position 1498 of SEQ ID NO: 588530
uaacgagguguccagaaag

SEQ ID NO: 871733 - RNA, 19 nt, Artificial Sequence
  Description of Artificial Sequence: Synthetic oligonucleotide
  Antisense strand to SEQ ID NO: 871732
cuuucuggacaccucguua

SEQ ID NO: 871734 - RNA, 19 nt, Artificial Sequence
  Description of Artificial Sequence: Synthetic oligonucleotide
  Sense strand starting at position 1666 of SEQ ID NO: 588530
ccugaaggcgguuaaauga

SEQ ID NO: 871735 - RNA, 19 nt, Artificial Sequence
  Description of Artificial Sequence: Synthetic oligonucleotide
  Antisense strand to SEQ ID NO: 871734
ucauuuaaccgccuucagg

SEQ ID NO: 871736 - RNA, 19 nt, Artificial Sequence
  Description of Artificial Sequence: Synthetic oligonucleotide
  Sense strand starting at position 1899 of SEQ ID NO: 588530
ugggcuugggccuagaaua

SEQ ID NO: 871737 - RNA, 19 nt, Artificial Sequence
  Description of Artificial Sequence: Synthetic oligonucleotide
  Antisense strand to SEQ ID NO: 871736
uauucuaggcccaagccca

SEQ ID NO: 871738 - RNA, 19 nt, Artificial Sequence
  Description of Artificial Sequence: Synthetic oligonucleotide
  Sense strand starting at position 2169 of SEQ ID NO: 588530
acagaaugugugcaagcaa

SEQ ID NO: 871739 - RNA, 19 nt, Artificial Sequence
  Description of Artificial Sequence: Synthetic oligonucleotide
  Antisense strand to SEQ ID NO: 871738
uugcuugcacacauucugu

SEQ ID NO: 871740 - RNA, 19 nt, Artificial Sequence
  Description of Artificial Sequence: Synthetic oligonucleotide
  Sense strand starting at position 2178 of SEQ ID NO: 588530
gugcaagcaaguguguuau

SEQ ID NO: 871741 - RNA, 19 nt, Artificial Sequence
  Description of Artificial Sequence: Synthetic oligonucleotide
  Antisense strand to SEQ ID NO: 871740
auaacacacuugcuugcac

SEQ ID NO: 871742 - RNA, 19 nt, Artificial Sequence
  Description of Artificial Sequence: Synthetic oligonucleotide
  Sense strand starting at position 2302 of SEQ ID NO: 588530
agugaaaugcggcauuugu

SEQ ID NO: 871743 - RNA, 19 nt, Artificial Sequence
  Description of Artificial Sequence: Synthetic oligonucleotide
  Antisense strand to SEQ ID NO: 871742
acaaaugccgcauuucacu

SEQ ID NO: 871744 - RNA, 19 nt, Artificial Sequence
  Description of Artificial Sequence: Synthetic oligonucleotide
  Sense strand starting at position 2331 of SEQ ID NO: 588530
aggaaaccuggaugcuuaa

SEQ ID NO: 871745 - RNA, 19 nt, Artificial Sequence
  Description of Artificial Sequence: Synthetic oligonucleotide
  Antisense strand to SEQ ID NO: 871744
uuaagcauccagguuuccu

SEQ ID NO: 871746 - RNA, 19 nt, Artificial Sequence
  Description of Artificial Sequence: Synthetic oligonucleotide
  Sense strand starting at position 2376 of SEQ ID NO: 588530
auuguuaucccacauuaug

SEQ ID NO: 871747 - RNA, 19 nt, Artificial Sequence
  Description of Artificial Sequence: Synthetic oligonucleotide
  Antisense strand to SEQ ID NO: 871746
cauaaugugggauaacaau

SEQ ID NO: 871748 - RNA, 19 nt, Artificial Sequence
  Description of Artificial Sequence: Synthetic oligonucleotide
  Sense strand starting at position 2463 of SEQ ID NO: 588530
uugucuuuacuagauuguu

SEQ ID NO: 871749 - RNA, 19 nt, Artificial Sequence
  Description of Artificial Sequence: Synthetic oligonucleotide
  Antisense strand to SEQ ID NO: 871748
aacaaucuaguaaagacaa

SEQ ID NO: 871750 - RNA, 19 nt, Artificial Sequence
  Description of Artificial Sequence: Synthetic oligonucleotide
  Sense strand starting at position 2691 of SEQ ID NO: 588530
cccuguuauggauaauauu

SEQ ID NO: 871751 - RNA, 19 nt, Artificial Sequence
  Description of Artificial Sequence: Synthetic oligonucleotide
  Antisense strand to SEQ ID NO: 871750
aauauuauccauaacaggg

SEQ ID NO: 871752 - RNA, 19 nt, Artificial Sequence
  Description of Artificial Sequence: Synthetic oligonucleotide
  Sense strand starting at position 3048 of SEQ ID NO: 588530
cuuccugaauuaguguaga

SEQ ID NO: 871753 - RNA, 19 nt, Artificial Sequence
  Description of Artificial Sequence: Synthetic oligonucleotide
  Antisense strand to SEQ ID NO: 871752
ucuacacuaauucaggaag

SEQ ID NO: 871754 - RNA, 19 nt, Artificial Sequence
  Description of Artificial Sequence: Synthetic oligonucleotide
  Sense strand starting at position 3270 of SEQ ID NO: 588530
acaagagguugguuggaau

SEQ ID NO: 871755 - RNA, 19 nt, Artificial Sequence
  Description of Artificial Sequence: Synthetic oligonucleotide
  Antisense strand to SEQ ID NO: 871754
auuccaaccaaccucuugu

SEQ ID NO: 871756 - RNA, 19 nt, Artificial Sequence
  Description of Artificial Sequence: Synthetic oligonucleotide
  Sense strand starting at position 3417 of SEQ ID NO: 588530
agcuacuuccaaggaauca

SEQ ID NO: 871757 - RNA, 19 nt, Artificial Sequence
  Description of Artificial Sequence: Synthetic oligonucleotide
  Antisense strand to SEQ ID NO: 871756
ugauuccuuggaaguagcu

SEQ ID NO: 871758 - RNA, 19 nt, Artificial Sequence
  Description of Artificial Sequence: Synthetic oligonucleotide
  Sense strand starting at position 3432 of SEQ ID NO: 588530
aucagucucuaucuggaaa

SEQ ID NO: 871759 - RNA, 19 nt, Artificial Sequence
  Description of Artificial Sequence: Synthetic oligonucleotide
  Antisense strand to SEQ ID NO: 871758
uuuccagauagagacugau

SEQ ID NO: 871760 - RNA, 19 nt, Artificial Sequence
  Description of Artificial Sequence: Synthetic oligonucleotide
  Sense strand starting at position 3457 of SEQ ID NO: 588530
aagagagccucuguacaug

SEQ ID NO: 871761 - RNA, 19 nt, Artificial Sequence
  Description of Artificial Sequence: Synthetic oligonucleotide
  Antisense strand to SEQ ID NO: 871760
cauguacagaggcucucuu

SEQ ID NO: 871762 - RNA, 19 nt, Artificial Sequence
  Description of Artificial Sequence: Synthetic oligonucleotide
  Sense strand starting at position 3598 of SEQ ID NO: 588530
uucccauauguuuaguuau

SEQ ID NO: 871763 - RNA, 19 nt, Artificial Sequence
  Description of Artificial Sequence: Synthetic oligonucleotide
  Antisense strand to SEQ ID NO: 871762
auaacuaaacauaugggaa

SEQ ID NO: 871764 - RNA, 19 nt, Artificial Sequence
  Description of Artificial Sequence: Synthetic oligonucleotide
  Sense strand starting at position 3669 of SEQ ID NO: 588530
ucacaauacuuguugguaa

SEQ ID NO: 871765 - RNA, 19 nt, Artificial Sequence
  Description of Artificial Sequence: Synthetic oligonucleotide
  Antisense strand to SEQ ID NO: 871764
uuaccaacaaguauuguga

SEQ ID NO: 871766 - RNA, 19 nt, Artificial Sequence
  Description of Artificial Sequence: Synthetic oligonucleotide
  Sense strand starting at position 3671 of SEQ ID NO: 588530
acaauacuuguugguaaug

SEQ ID NO: 871767 - RNA, 19 nt, Artificial Sequence
  Description of Artificial Sequence: Synthetic oligonucleotide
  Antisense strand to SEQ ID NO: 871766
cauuaccaacaaguauugu

SEQ ID NO: 871768 - RNA, 19 nt, Artificial Sequence
  Description of Artificial Sequence: Synthetic oligonucleotide
  Sense strand starting at position 3727 of SEQ ID NO: 588530
gcauuagcucaccauggau

SEQ ID NO: 871769 - RNA, 19 nt, Artificial Sequence
  Description of Artificial Sequence: Synthetic oligonucleotide
  Antisense strand to SEQ ID NO: 871768
auccauggugagcuaaugc

SEQ ID NO: 871770 - RNA, 19 nt, Artificial Sequence
  Description of Artificial Sequence: Synthetic oligonucleotide
  Sense strand starting at position 3733 of SEQ ID NO: 588530
gcucaccauggaugauauu

SEQ ID NO: 871771 - RNA, 19 nt, Artificial Sequence
  Description of Artificial Sequence: Synthetic oligonucleotide
  Antisense strand to SEQ ID NO: 871770
aauaucauccauggugagc

SEQ ID NO: 871772 - RNA, 19 nt, Artificial Sequence
  Description of Artificial Sequence: Synthetic oligonucleotide
  Sense strand starting at position 275 of SEQ ID NO: 588532
gcugcaaugcccugcaaau

SEQ ID NO: 871773 - RNA, 19 nt, Artificial Sequence
  Description of Artificial Sequence: Synthetic oligonucleotide
  Antisense strand to SEQ ID NO: 871772
auuugcagggcauugcagc

SEQ ID NO: 871774 - RNA, 19 nt, Artificial Sequence
  Description of Artificial Sequence: Synthetic oligonucleotide
  Sense strand starting at position 653 of SEQ ID NO: 588532
ggucauugccagggucagu

SEQ ID NO: 871775 - RNA, 19 nt, Artificial Sequence
  Description of Artificial Sequence: Synthetic oligonucleotide
  Antisense strand to SEQ ID NO: 871774
acugacccuggcaaugacc

SEQ ID NO: 871776 - RNA, 19 nt, Artificial Sequence
  Description of Artificial Sequence: Synthetic oligonucleotide
  Sense strand starting at position 666 of SEQ ID NO: 588532
gucagugacuuccugagau

SEQ ID NO: 871777 - RNA, 19 nt, Artificial Sequence
  Description of Artificial Sequence: Synthetic oligonucleotide
  Antisense strand to SEQ ID NO: 871776
aucucaggaagucacugac

SEQ ID NO: 871778 - RNA, 19 nt, Artificial Sequence
  Description of Artificial Sequence: Synthetic oligonucleotide
  Sense strand starting at position 668 of SEQ ID NO: 588532
cagugacuuccugagauuc

SEQ ID NO: 871779 - RNA, 19 nt, Artificial Sequence
  Description of Artificial Sequence: Synthetic oligonucleotide
  Antisense strand to SEQ ID NO: 871778
gaaucucaggaagucacug

SEQ ID NO: 871780 - RNA, 19 nt, Artificial Sequence
  Description of Artificial Sequence: Synthetic oligonucleotide
  Sense strand starting at position 731 of SEQ ID NO: 588532
gagccaugcgggugaaauc

SEQ ID NO: 871781 - RNA, 19 nt, Artificial Sequence
  Description of Artificial Sequence: Synthetic oligonucleotide
  Antisense strand to SEQ ID NO: 871780
gauuucacccgcauggcuc

SEQ ID NO: 871782 - RNA, 19 nt, Artificial Sequence
  Description of Artificial Sequence: Synthetic oligonucleotide
  Sense strand starting at position 1757 of SEQ ID NO: 588532
gagggucuccuuggaugga

SEQ ID NO: 871783 - RNA, 19 nt, Artificial Sequence
  Description of Artificial Sequence: Synthetic oligonucleotide
  Antisense strand to SEQ ID NO: 871782
uccauccaaggagacccuc

SEQ ID NO: 871784 - RNA, 19 nt, Artificial Sequence
  Description of Artificial Sequence: Synthetic oligonucleotide
  Sense strand starting at position 1844 of SEQ ID NO: 588532
ggccucacauccugaaucu

SEQ ID NO: 871785 - RNA, 19 nt, Artificial Sequence
  Description of Artificial Sequence: Synthetic oligonucleotide
  Antisense strand to SEQ ID NO: 871784
agauucaggaugugaggcc

SEQ ID NO: 871786 - RNA, 19 nt, Artificial Sequence
  Description of Artificial Sequence: Synthetic oligonucleotide
  Sense strand starting at position 2088 of SEQ ID NO: 588532
gauguaaaccacugccagu

SEQ ID NO: 871787 - RNA, 19 nt, Artificial Sequence
  Description of Artificial Sequence: Synthetic oligonucleotide
  Antisense strand to SEQ ID NO: 871786
acuggcagugguuuacauc

SEQ ID NO: 871788 - RNA, 19 nt, Artificial Sequence
  Description of Artificial Sequence: Synthetic oligonucleotide
  Sense strand starting at position 2099 of SEQ ID NO: 588532
cugccaguucugcaaugga

SEQ ID NO: 871789 - RNA, 19 nt, Artificial Sequence
  Description of Artificial Sequence: Synthetic oligonucleotide
  Antisense strand to SEQ ID NO: 871788
uccauugcagaacuggcag

SEQ ID NO: 871790 - RNA, 19 nt, Artificial Sequence
  Description of Artificial Sequence: Synthetic oligonucleotide
  Sense strand starting at position 2138 of SEQ ID NO: 588532
guuggaggcuggugaauaa

SEQ ID NO: 871791 - RNA, 19 nt, Artificial Sequence
  Description of Artificial Sequence: Synthetic oligonucleotide
  Antisense strand to SEQ ID NO: 871790
uuauucaccagccuccaac

SEQ ID NO: 871792 - RNA, 19 nt, Artificial Sequence
  Description of Artificial Sequence: Synthetic oligonucleotide
  Sense strand starting at position 2156 of SEQ ID NO: 588532
acagcuuguuaaucccaga

SEQ ID NO: 871793 - RNA, 19 nt, Artificial Sequence
  Description of Artificial Sequence: Synthetic oligonucleotide
  Antisense strand to SEQ ID NO: 871792
ucugggauuaacaagcugu

SEQ ID NO: 871794 - RNA, 19 nt, Artificial Sequence
  Description of Artificial Sequence: Synthetic oligonucleotide
  Sense strand starting at position 2159 of SEQ ID NO: 588532
gcuuguuaaucccagagga

SEQ ID NO: 871795 - RNA, 19 nt, Artificial Sequence
  Description of Artificial Sequence: Synthetic oligonucleotide
  Antisense strand to SEQ ID NO: 871794
uccucugggauuaacaagc

SEQ ID NO: 871796 - RNA, 19 nt, Artificial Sequence
  Description of Artificial Sequence: Synthetic oligonucleotide
  Sense strand starting at position 2203 of SEQ ID NO: 588532
ggagcagauuugcagauuu

SEQ ID NO: 871797 - RNA, 19 nt, Artificial Sequence
  Description of Artificial Sequence: Synthetic oligonucleotide
  Antisense strand to SEQ ID NO: 871796
aaaucugcaaaucugcucc

SEQ ID NO: 871798 - RNA, 19 nt, Artificial Sequence
  Description of Artificial Sequence: Synthetic oligonucleotide
  Sense strand starting at position 2454 of SEQ ID NO: 588532
acacgaucccgugugcauu

SEQ ID NO: 871799 - RNA, 19 nt, Artificial Sequence
  Description of Artificial Sequence: Synthetic oligonucleotide
  Antisense strand to SEQ ID NO: 871798
aaugcacacgggaucgugu

SEQ ID NO: 871800 - RNA, 19 nt, Artificial Sequence
  Description of Artificial Sequence: Synthetic oligonucleotide
  Sense strand starting at position 2808 of SEQ ID NO: 588532
ggcuguaacuucguauaac

SEQ ID NO: 871801 - RNA, 19 nt, Artificial Sequence
  Description of Artificial Sequence: Synthetic oligonucleotide
  Antisense strand to SEQ ID NO: 871800
guuauacgaaguuacagcc

SEQ ID NO: 871802 - RNA, 19 nt, Artificial Sequence
  Description of Artificial Sequence: Synthetic oligonucleotide
  Sense strand starting at position 3197 of SEQ ID NO: 588532
gcaggaguaugaucaagau

SEQ ID NO: 871803 - RNA, 19 nt, Artificial Sequence
  Description of Artificial Sequence: Synthetic oligonucleotide
  Antisense strand to SEQ ID NO: 871802
aucuugaucauacuccugc

SEQ ID NO: 871804 - RNA, 19 nt, Artificial Sequence
  Description of Artificial Sequence: Synthetic oligonucleotide
  Sense strand starting at position 3201 of SEQ ID NO: 588532
gaguaugaucaagaugccu

SEQ ID NO: 871805 - RNA, 19 nt, Artificial Sequence
  Description of Artificial Sequence: Synthetic oligonucleotide
  Antisense strand to SEQ ID NO: 871804
aggcaucuugaucauacuc

SEQ ID NO: 871806 - RNA, 19 nt, Artificial Sequence
  Description of Artificial Sequence: Synthetic oligonucleotide
  Sense strand starting at position 3203 of SEQ ID NO: 588532
guaugaucaagaugccuag

SEQ ID NO: 871807 - RNA, 19 nt, Artificial Sequence
  Description of Artificial Sequence: Synthetic oligonucleotide
  Antisense strand to SEQ ID NO: 871806
cuaggcaucuugaucauac

SEQ ID NO: 871808 - RNA, 19 nt, Artificial Sequence
  Description of Artificial Sequence: Synthetic oligonucleotide
  Sense strand starting at position 3206 of SEQ ID NO: 588532
ugaucaagaugccuaguga

SEQ ID NO: 871809 - RNA, 19 nt, Artificial Sequence
  Description of Artificial Sequence: Synthetic oligonucleotide
  Antisense strand to SEQ ID NO: 871808
ucacuaggcaucuugauca

SEQ ID NO: 871810 - RNA, 19 nt, Artificial Sequence
  Description of Artificial Sequence: Synthetic oligonucleotide
  Sense strand starting at position 3207 of SEQ ID NO: 588532
gaucaagaugccuagugau

SEQ ID NO: 871811 - RNA, 19 nt, Artificial Sequence
  Description of Artificial Sequence: Synthetic oligonucleotide
  Antisense strand to SEQ ID NO: 871810
aucacuaggcaucuugauc

SEQ ID NO: 871812 - RNA, 19 nt, Artificial Sequence
  Description of Artificial Sequence: Synthetic oligonucleotide
  Sense strand starting at position 3210 of SEQ ID NO: 588532
caagaugccuagugauuua

SEQ ID NO: 871813 - RNA, 19 nt, Artificial Sequence
  Description of Artificial Sequence: Synthetic oligonucleotide
  Antisense strand to SEQ ID NO: 871812
uaaaucacuaggcaucuug

SEQ ID NO: 871814 - RNA, 19 nt, Artificial Sequence
  Description of Artificial Sequence: Synthetic oligonucleotide
  Sense strand starting at position 3394 of SEQ ID NO: 588532
ggaagauaguacuaacaaa

SEQ ID NO: 871815 - RNA, 19 nt, Artificial Sequence
  Description of Artificial Sequence: Synthetic oligonucleotide
  Antisense strand to SEQ ID NO: 871814
uuuguuaguacuaucuucc

SEQ ID NO: 871816 - RNA, 19 nt, Artificial Sequence
  Description of Artificial Sequence: Synthetic oligonucleotide
  Sense strand starting at position 3437 of SEQ ID NO: 588532
aagagaaauugagguguua

SEQ ID NO: 871817 - RNA, 19 nt, Artificial Sequence
  Description of Artificial Sequence: Synthetic oligonucleotide
  Antisense strand to SEQ ID NO: 871816
uaacaccucaauuucucuu

SEQ ID NO: 871818 - RNA, 19 nt, Artificial Sequence
  Description of Artificial Sequence: Synthetic oligonucleotide
  Sense strand starting at position 3439 of SEQ ID NO: 588532
gagaaauugagguguuaca

SEQ ID NO: 871819 - RNA, 19 nt, Artificial Sequence
  Description of Artificial Sequence: Synthetic oligonucleotide
  Antisense strand to SEQ ID NO: 871818
uguaacaccucaauuucuc

SEQ ID NO: 871820 - RNA, 19 nt, Artificial Sequence
  Description of Artificial Sequence: Synthetic oligonucleotide
  Sense strand starting at position 3472 of SEQ ID NO: 588532
ccagccuggagcuaguaau

SEQ ID NO: 871821 - RNA, 19 nt, Artificial Sequence
  Description of Artificial Sequence: Synthetic oligonucleotide
  Antisense strand to SEQ ID NO: 871820
auuacuagcuccaggcugg

SEQ ID NO: 871822 - RNA, 19 nt, Artificial Sequence
  Description of Artificial Sequence: Synthetic oligonucleotide
  Sense strand starting at position 3782 of SEQ ID NO: 588532
gagaauagaucaggagguu

SEQ ID NO: 871823 - RNA, 19 nt, Artificial Sequence
  Description of Artificial Sequence: Synthetic oligonucleotide
  Antisense strand to SEQ ID NO: 871822
aaccuccugaucuauucuc

SEQ ID NO: 871824 - RNA, 19 nt, Artificial Sequence
  Description of Artificial Sequence: Synthetic oligonucleotide
  Sense strand starting at position 3956 of SEQ ID NO: 588532
ccuagaauauuacagugaa

SEQ ID NO: 871825 - RNA, 19 nt, Artificial Sequence
  Description of Artificial Sequence: Synthetic oligonucleotide
  Antisense strand to SEQ ID NO: 871824
uucacuguaauauucuagg

SEQ ID NO: 871826 - RNA, 19 nt, Artificial Sequence
  Description of Artificial Sequence: Synthetic oligonucleotide
  Sense strand starting at position 3968 of SEQ ID NO: 588532
cagugaaaugcagaucauc

SEQ ID NO: 871827 - RNA, 19 nt, Artificial Sequence
  Description of Artificial Sequence: Synthetic oligonucleotide
  Antisense strand to SEQ ID NO: 871826
gaugaucugcauuucacug

SEQ ID NO: 871828 - RNA, 19 nt, Artificial Sequence
  Description of Artificial Sequence: Synthetic oligonucleotide
  Sense strand starting at position 356 of SEQ ID NO: 588533
ucccgucuuuccucaggau

SEQ ID NO: 871829 - RNA, 19 nt, Artificial Sequence
  Description of Artificial Sequence: Synthetic oligonucleotide
  Antisense strand to SEQ ID NO: 871828
auccugaggaaagacggga

SEQ ID NO: 871830 - RNA, 19 nt, Artificial Sequence
  Description of Artificial Sequence: Synthetic oligonucleotide
  Sense strand starting at position 553 of SEQ ID NO: 588533
cuauccaacucgugucaau

SEQ ID NO: 871831 - RNA, 19 nt, Artificial Sequence
  Description of Artificial Sequence: Synthetic oligonucleotide
  Antisense strand to SEQ ID NO: 871830
auugacacgaguuggauag

SEQ ID NO: 871832 - RNA, 19 nt, Artificial Sequence
  Description of Artificial Sequence: Synthetic oligonucleotide
  Sense strand starting at position 576 of SEQ ID NO: 588533
ggcucugugguuugaggau

SEQ ID NO: 871833 - RNA, 19 nt, Artificial Sequence
  Description of Artificial Sequence: Synthetic oligonucleotide
  Antisense strand to SEQ ID NO: 871832
auccucaaaccacagagcc

SEQ ID NO: 871834 - RNA, 19 nt, Artificial Sequence
  Description of Artificial Sequence: Synthetic oligonucleotide
  Sense strand starting at position 768 of SEQ ID NO: 588533
gguggcuuccucugaguuu

SEQ ID NO: 871835 - RNA, 19 nt, Artificial Sequence
  Description of Artificial Sequence: Synthetic oligonucleotide
  Antisense strand to SEQ ID NO: 871834
aaacucagaggaagccacc

SEQ ID NO: 871836 - RNA, 19 nt, Artificial Sequence
  Description of Artificial Sequence: Synthetic oligonucleotide
  Sense strand starting at position 769 of SEQ ID NO: 588533
guggcuuccucugaguuua

SEQ ID NO: 871837 - RNA, 19 nt, Artificial Sequence
  Description of Artificial Sequence: Synthetic oligonucleotide
  Antisense strand to SEQ ID NO: 871836
uaaacucagaggaagccac

SEQ ID NO: 871838 - RNA, 19 nt, Artificial Sequence
  Description of Artificial Sequence: Synthetic oligonucleotide
  Sense strand starting at position 805 of SEQ ID NO: 588533
gacgguucuuguggaacuu

SEQ ID NO: 871839 - RNA, 19 nt, Artificial Sequence
  Description of Artificial Sequence: Synthetic oligonucleotide
  Antisense strand to SEQ ID NO: 871838
aaguuccacaagaaccguc

SEQ ID NO: 871840 - RNA, 19 nt, Artificial Sequence
  Description of Artificial Sequence: Synthetic oligonucleotide
  Sense strand starting at position 996 of SEQ ID NO: 588533
gucccuggccggcaagaau

SEQ ID NO: 871841 - RNA, 19 nt, Artificial Sequence
  Description of Artificial Sequence: Synthetic oligonucleotide
  Antisense strand to SEQ ID NO: 871840
auucuugccggccagggac

SEQ ID NO: 871842 - RNA, 19 nt, Artificial Sequence
  Description of Artificial Sequence: Synthetic oligonucleotide
  Sense strand starting at position 1964 of SEQ ID NO: 588533
ccgccaaggccaguguuua

SEQ ID NO: 871843 - RNA, 19 nt, Artificial Sequence
  Description of Artificial Sequence: Synthetic oligonucleotide
  Antisense strand to SEQ ID NO: 871842
uaaacacuggccuuggcgg

SEQ ID NO: 871844 - RNA, 19 nt, Artificial Sequence
  Description of Artificial Sequence: Synthetic oligonucleotide
  Sense strand starting at position 1965 of SEQ ID NO: 588533
cgccaaggccaguguuuaa

SEQ ID NO: 871845 - RNA, 19 nt, Artificial Sequence
  Description of Artificial Sequence: Synthetic oligonucleotide
  Antisense strand to SEQ ID NO: 871844
uuaaacacuggccuuggcg

SEQ ID NO: 871846 - RNA, 19 nt, Artificial Sequence
  Description of Artificial Sequence: Synthetic oligonucleotide
  Sense strand starting at position 2459 of SEQ ID NO: 588533
gugggugugugcucacaug

SEQ ID NO: 871847 - RNA, 19 nt, Artificial Sequence
  Description of Artificial Sequence: Synthetic oligonucleotide
  Antisense strand to SEQ ID NO: 871846
caugugagcacacacccac

SEQ ID NO: 871848 - RNA, 19 nt, Artificial Sequence
  Description of Artificial Sequence: Synthetic oligonucleotide
  Sense strand starting at position 2894 of SEQ ID NO: 588533
gaguuugggugucugaaga

SEQ ID NO: 871849 - RNA, 19 nt, Artificial Sequence
  Description of Artificial Sequence: Synthetic oligonucleotide
  Antisense strand to SEQ ID NO: 871848
ucuucagacacccaaacuc

SEQ ID NO: 871850 - RNA, 19 nt, Artificial Sequence
  Description of Artificial Sequence: Synthetic oligonucleotide
  Sense strand starting at position 3053 of SEQ ID NO: 588533
cuugguuugcuguggaauc

SEQ ID NO: 871851 - RNA, 19 nt, Artificial Sequence
  Description of Artificial Sequence: Synthetic oligonucleotide
  Antisense strand to SEQ ID NO: 871850
gauuccacagcaaaccaag

SEQ ID NO: 871852 - RNA, 19 nt, Artificial Sequence
  Description of Artificial Sequence: Synthetic oligonucleotide
  Sense strand starting at position 3064 of SEQ ID NO: 588533
guggaaucgcuuuauucug

SEQ ID NO: 871853 - RNA, 19 nt, Artificial Sequence
  Description of Artificial Sequence: Synthetic oligonucleotide
  Antisense strand to SEQ ID NO: 871852
cagaauaaagcgauuccac

SEQ ID NO: 871854 - RNA, 19 nt, Artificial Sequence
  Description of Artificial Sequence: Synthetic oligonucleotide
  Sense strand starting at position 3072 of SEQ ID NO: 588533
gcuuuauucugagcuggug

SEQ ID NO: 871855 - RNA, 19 nt, Artificial Sequence
  Description of Artificial Sequence: Synthetic oligonucleotide
  Antisense strand to SEQ ID NO: 871854
caccagcucagaauaaagc

SEQ ID NO: 871856 - RNA, 19 nt, Artificial Sequence
  Description of Artificial Sequence: Synthetic oligonucleotide
  Sense strand starting at position 3370 of SEQ ID NO: 588533
ggcggcuuaccagaaggau

SEQ ID NO: 871857 - RNA, 19 nt, Artificial Sequence
  Description of Artificial Sequence: Synthetic oligonucleotide
  Antisense strand to SEQ ID NO: 871856
auccuucugguaagccgcc

SEQ ID NO: 871858 - RNA, 19 nt, Artificial Sequence
  Description of Artificial Sequence: Synthetic oligonucleotide
  Sense strand starting at position 3382 of SEQ ID NO: 588533
gaaggaucuugugagcaca

SEQ ID NO: 871859 - RNA, 19 nt, Artificial Sequence
  Description of Artificial Sequence: Synthetic oligonucleotide
  Antisense strand to SEQ ID NO: 871858
ugugcucacaagauccuuc

SEQ ID NO: 871860 - RNA, 19 nt, Artificial Sequence
  Description of Artificial Sequence: Synthetic oligonucleotide
  Sense strand starting at position 3763 of SEQ ID NO: 588533
gcuggcugucuccgucaga

SEQ ID NO: 871861 - RNA, 19 nt, Artificial Sequence
  Description of Artificial Sequence: Synthetic oligonucleotide
  Antisense strand to SEQ ID NO: 871860
ucugacggagacagccagc

SEQ ID NO: 871862 - RNA, 19 nt, Artificial Sequence
  Description of Artificial Sequence: Synthetic oligonucleotide
  Sense strand starting at position 734 of SEQ ID NO: 588534
aagcgucaugaguggagau

SEQ ID NO: 871863 - RNA, 19 nt, Artificial Sequence
  Description of Artificial Sequence: Synthetic oligonucleotide
  Antisense strand to SEQ ID NO: 871862
aucuccacucaugacgcuu

SEQ ID NO: 871864 - RNA, 19 nt, Artificial Sequence
  Description of Artificial Sequence: Synthetic oligonucleotide
  Sense strand starting at position 746 of SEQ ID NO: 588534
uggagauggugucuaacua

SEQ ID NO: 871865 - RNA, 19 nt, Artificial Sequence
  Description of Artificial Sequence: Synthetic oligonucleotide
  Antisense strand to SEQ ID NO: 871864
uaguuagacaccaucucca

SEQ ID NO: 871866 - RNA, 19 nt, Artificial Sequence
  Description of Artificial Sequence: Synthetic oligonucleotide
  Sense strand starting at position 747 of SEQ ID NO: 588534
ggagauggugucuaacuau

SEQ ID NO: 871867 - RNA, 19 nt, Artificial Sequence
  Description of Artificial Sequence: Synthetic oligonucleotide
  Antisense strand to SEQ ID NO: 871866
auaguuagacaccaucucc

SEQ ID NO: 871868 - RNA, 19 nt, Artificial Sequence
  Description of Artificial Sequence: Synthetic oligonucleotide
  Sense strand starting at position 992 of SEQ ID NO: 588534
cccugaaguccugggauua

SEQ ID NO: 871869 - RNA, 19 nt, Artificial Sequence
  Description of Artificial Sequence: Synthetic oligonucleotide
  Antisense strand to SEQ ID NO: 871868
uaaucccaggacuucaggg

SEQ ID NO: 871870 - RNA, 19 nt, Artificial Sequence
  Description of Artificial Sequence: Synthetic oligonucleotide
  Sense strand starting at position 1847 of SEQ ID NO: 588534
ugcuucuccuuccgucaaa

SEQ ID NO: 871871 - RNA, 19 nt, Artificial Sequence
  Description of Artificial Sequence: Synthetic oligonucleotide
  Antisense strand to SEQ ID NO: 871870
uuugacggaaggagaagca

SEQ ID NO: 871872 - RNA, 19 nt, Artificial Sequence
  Description of Artificial Sequence: Synthetic oligonucleotide
  Sense strand starting at position 1872 of SEQ ID NO: 588534
guaccugguuuccuuggaa

SEQ ID NO: 871873 - RNA, 19 nt, Artificial Sequence
  Description of Artificial Sequence: Synthetic oligonucleotide
  Antisense strand to SEQ ID NO: 871872
uuccaaggaaaccagguac

SEQ ID NO: 871874 - RNA, 19 nt, Artificial Sequence
  Description of Artificial Sequence: Synthetic oligonucleotide
  Sense strand starting at position 2841 of SEQ ID NO: 588534
uugacaucacccuggacaa

SEQ ID NO: 871875 - RNA, 19 nt, Artificial Sequence
  Description of Artificial Sequence: Synthetic oligonucleotide
  Antisense strand to SEQ ID NO: 871874
uuguccagggugaugucaa

SEQ ID NO: 871876 - RNA, 19 nt, Artificial Sequence
  Description of Artificial Sequence: Synthetic oligonucleotide
  Sense strand starting at position 3021 of SEQ ID NO: 588534
gggcaagacugagaucuca

SEQ ID NO: 871877 - RNA, 19 nt, Artificial Sequence
  Description of Artificial Sequence: Synthetic oligonucleotide
  Antisense strand to SEQ ID NO: 871876
ugagaucucagucuugccc

SEQ ID NO: 871878 - RNA, 19 nt, Artificial Sequence
  Description of Artificial Sequence: Synthetic oligonucleotide
  Sense strand starting at position 3203 of SEQ ID NO: 588534
ggugcuggacuccauguua

SEQ ID NO: 871879 - RNA, 19 nt, Artificial Sequence
  Description of Artificial Sequence: Synthetic oligonucleotide
  Antisense strand to SEQ ID NO: 871878
uaacauggaguccagcacc

SEQ ID NO: 871880 - RNA, 19 nt, Artificial Sequence
  Description of Artificial Sequence: Synthetic oligonucleotide
  Sense strand starting at position 3739 of SEQ ID NO: 588534
cgucuuaucgcagggcacu

SEQ ID NO: 871881 - RNA, 19 nt, Artificial Sequence
  Description of Artificial Sequence: Synthetic oligonucleotide
  Antisense strand to SEQ ID NO: 871880
agugcccugcgauaagacg

SEQ ID NO: 871882 - RNA, 19 nt, Artificial Sequence
  Description of Artificial Sequence: Synthetic oligonucleotide
  Sense strand starting at position 682 of SEQ ID NO: 588535
agccuaaacucggccuaaa

SEQ ID NO: 871883 - RNA, 19 nt, Artificial Sequence
  Description of Artificial Sequence: Synthetic oligonucleotide
  Antisense strand to SEQ ID NO: 871882
uuuaggccgaguuuaggcu

SEQ ID NO: 871884 - RNA, 19 nt, Artificial Sequence
  Description of Artificial Sequence: Synthetic oligonucleotide
  Sense strand starting at position 874 of SEQ ID NO: 588535
ccuccagcuccuuguagau

SEQ ID NO: 871885 - RNA, 19 nt, Artificial Sequence
  Description of Artificial Sequence: Synthetic oligonucleotide
  Antisense strand to SEQ ID NO: 871884
aucuacaaggagcuggagg

SEQ ID NO: 871886 - RNA, 19 nt, Artificial Sequence
  Description of Artificial Sequence: Synthetic oligonucleotide
  Sense strand starting at position 880 of SEQ ID NO: 588535
gcuccuuguagauguaaag

SEQ ID NO: 871887 - RNA, 19 nt, Artificial Sequence
  Description of Artificial Sequence: Synthetic oligonucleotide
  Antisense strand to SEQ ID NO: 871886
cuuuacaucuacaaggagc

SEQ ID NO: 871888 - RNA, 19 nt, Artificial Sequence
  Description of Artificial Sequence: Synthetic oligonucleotide
  Sense strand starting at position 913 of SEQ ID NO: 588535
uguagucuguguccacgau

SEQ ID NO: 871889 - RNA, 19 nt, Artificial Sequence
  Description of Artificial Sequence: Synthetic oligonucleotide
  Antisense strand to SEQ ID NO: 871888
aucguggacacagacuaca

SEQ ID NO: 871890 - RNA, 19 nt, Artificial Sequence
  Description of Artificial Sequence: Synthetic oligonucleotide
  Sense strand starting at position 1430 of SEQ ID NO: 588535
gguccuucuugcccaggaa

SEQ ID NO: 871891 - RNA, 19 nt, Artificial Sequence
  Description of Artificial Sequence: Synthetic oligonucleotide
  Antisense strand to SEQ ID NO: 871890
uuccugggcaagaaggacc

SEQ ID NO: 871892 - RNA, 19 nt, Artificial Sequence
  Description of Artificial Sequence: Synthetic oligonucleotide
  Sense strand starting at position 1605 of SEQ ID NO: 588535
ggccaugucuuggguguga

SEQ ID NO: 871893 - RNA, 19 nt, Artificial Sequence
  Description of Artificial Sequence: Synthetic oligonucleotide
  Antisense strand to SEQ ID NO: 871892
ucacacccaagacauggcc

SEQ ID NO: 871894 - RNA, 19 nt, Artificial Sequence
  Description of Artificial Sequence: Synthetic oligonucleotide
  Sense strand starting at position 1643 of SEQ ID NO: 588535
gaacucaucuuggguaggu

SEQ ID NO: 871895 - RNA, 19 nt, Artificial Sequence
  Description of Artificial Sequence: Synthetic oligonucleotide
  Antisense strand to SEQ ID NO: 871894
accuacccaagaugaguuc

SEQ ID NO: 871896 - RNA, 19 nt, Artificial Sequence
  Description of Artificial Sequence: Synthetic oligonucleotide
  Sense strand starting at position 1681 of SEQ ID NO: 588535
ucaguucccagcugugaag

SEQ ID NO: 871897 - RNA, 19 nt, Artificial Sequence
  Description of Artificial Sequence: Synthetic oligonucleotide
  Antisense strand to SEQ ID NO: 871896
cuucacagcugggaacuga

SEQ ID NO: 871898 - RNA, 19 nt, Artificial Sequence
  Description of Artificial Sequence: Synthetic oligonucleotide
  Sense strand starting at position 1723 of SEQ ID NO: 588535
cagguugguuuaggauuaa

SEQ ID NO: 871899 - RNA, 19 nt, Artificial Sequence
  Description of Artificial Sequence: Synthetic oligonucleotide
  Antisense strand to SEQ ID NO: 871898
uuaauccuaaaccaaccug

SEQ ID NO: 871900 - RNA, 19 nt, Artificial Sequence
  Description of Artificial Sequence: Synthetic oligonucleotide
  Sense strand starting at position 1794 of SEQ ID NO: 588535
aggaaaggcaguugucaca

SEQ ID NO: 871901 - RNA, 19 nt, Artificial Sequence
  Description of Artificial Sequence: Synthetic oligonucleotide
  Antisense strand to SEQ ID NO: 871900
ugugacaacugccuuuccu

SEQ ID NO: 871902 - RNA, 19 nt, Artificial Sequence
  Description of Artificial Sequence: Synthetic oligonucleotide
  Sense strand starting at position 1797 of SEQ ID NO: 588535
aaaggcaguugucacaauu

SEQ ID NO: 871903 - RNA, 19 nt, Artificial Sequence
  Description of Artificial Sequence: Synthetic oligonucleotide
  Antisense strand to SEQ ID NO: 871902
aauugugacaacugccuuu

SEQ ID NO: 871904 - RNA, 19 nt, Artificial Sequence
  Description of Artificial Sequence: Synthetic oligonucleotide
  Sense strand starting at position 2094 of SEQ ID NO: 588535
gcacuucggcucugagacu

SEQ ID NO: 871905 - RNA, 19 nt, Artificial Sequence
  Description of Artificial Sequence: Synthetic oligonucleotide
  Antisense strand to SEQ ID NO: 871904
agucucagagccgaagugc

SEQ ID NO: 871906 - RNA, 19 nt, Artificial Sequence
  Description of Artificial Sequence: Synthetic oligonucleotide
  Sense strand starting at position 2123 of SEQ ID NO: 588535
uguccauuguuuggcacaa

SEQ ID NO: 871907 - RNA, 19 nt, Artificial Sequence
  Description of Artificial Sequence: Synthetic oligonucleotide
  Antisense strand to SEQ ID NO: 871906
uugugccaaacaauggaca

SEQ ID NO: 871908 - RNA, 19 nt, Artificial Sequence
  Description of Artificial Sequence: Synthetic oligonucleotide
  Sense strand starting at position 2124 of SEQ ID NO: 588535
guccauuguuuggcacaau

SEQ ID NO: 871909 - RNA, 19 nt, Artificial Sequence
  Description of Artificial Sequence: Synthetic oligonucleotide
  Antisense strand to SEQ ID NO: 871908
auugugccaaacaauggac

SEQ ID NO: 871910 - RNA, 19 nt, Artificial Sequence
  Description of Artificial Sequence: Synthetic oligonucleotide
  Sense strand starting at position 2135 of SEQ ID NO: 588535
ggcacaaucacucggaugu

SEQ ID NO: 871911 - RNA, 19 nt, Artificial Sequence
  Description of Artificial Sequence: Synthetic oligonucleotide
  Antisense strand to SEQ ID NO: 871910
acauccgagugauugugcc

SEQ ID NO: 871912 - RNA, 19 nt, Artificial Sequence
  Description of Artificial Sequence: Synthetic oligonucleotide
  Sense strand starting at position 2661 of SEQ ID NO: 588535
uggauaccgccuuaucacu

SEQ ID NO: 871913 - RNA, 19 nt, Artificial Sequence
  Description of Artificial Sequence: Synthetic oligonucleotide
  Antisense strand to SEQ ID NO: 871912
agugauaaggcgguaucca

SEQ ID NO: 871914 - RNA, 19 nt, Artificial Sequence
  Description of Artificial Sequence: Synthetic oligonucleotide
  Sense strand starting at position 2668 of SEQ ID NO: 588535
cgccuuaucacugguugua

SEQ ID NO: 871915 - RNA, 19 nt, Artificial Sequence
  Description of Artificial Sequence: Synthetic oligonucleotide
  Antisense strand to SEQ ID NO: 871914
uacaaccagugauaaggcg

SEQ ID NO: 871916 - RNA, 19 nt, Artificial Sequence
  Description of Artificial Sequence: Synthetic oligonucleotide
  Sense strand starting at position 2670 of SEQ ID NO: 588535
ccuuaucacugguuguaua

SEQ ID NO: 871917 - RNA, 19 nt, Artificial Sequence
  Description of Artificial Sequence: Synthetic oligonucleotide
  Antisense strand to SEQ ID NO: 871916
uauacaaccagugauaagg

SEQ ID NO: 871918 - RNA, 19 nt, Artificial Sequence
  Description of Artificial Sequence: Synthetic oligonucleotide
  Sense strand starting at position 2671 of SEQ ID NO: 588535
cuuaucacugguuguauaa

SEQ ID NO: 871919 - RNA, 19 nt, Artificial Sequence
  Description of Artificial Sequence: Synthetic oligonucleotide
  Antisense strand to SEQ ID NO: 871918
uuauacaaccagugauaag

SEQ ID NO: 871920 - RNA, 19 nt, Artificial Sequence
  Description of Artificial Sequence: Synthetic oligonucleotide
  Sense strand starting at position 2876 of SEQ ID NO: 588535
aguccucuggagugagagu

SEQ ID NO: 871921 - RNA, 19 nt, Artificial Sequence
  Description of Artificial Sequence: Synthetic oligonucleotide
  Antisense strand to SEQ ID NO: 871920
acucucacuccagaggacu

SEQ ID NO: 871922 - RNA, 19 nt, Artificial Sequence
  Description of Artificial Sequence: Synthetic oligonucleotide
  Sense strand starting at position 2967 of SEQ ID NO: 588535
cgaugacgggaaugugaau

SEQ ID NO: 871923 - RNA, 19 nt, Artificial Sequence
  Description of Artificial Sequence: Synthetic oligonucleotide
  Antisense strand to SEQ ID NO: 871922
auucacauucccgucaucg

SEQ ID NO: 871924 - RNA, 19 nt, Artificial Sequence
  Description of Artificial Sequence: Synthetic oligonucleotide
  Sense strand starting at position 2973 of SEQ ID NO: 588535
cgggaaugugaauggcuuu

SEQ ID NO: 871925 - RNA, 19 nt, Artificial Sequence
  Description of Artificial Sequence: Synthetic oligonucleotide
  Antisense strand to SEQ ID NO: 871924
aaagccauucacauucccg

SEQ ID NO: 871926 - RNA, 19 nt, Artificial Sequence
  Description of Artificial Sequence: Synthetic oligonucleotide
  Sense strand starting at position 2979 of SEQ ID NO: 588535
ugugaauggcuuuguaccu

SEQ ID NO: 871927 - RNA, 19 nt, Artificial Sequence
  Description of Artificial Sequence: Synthetic oligonucleotide
  Antisense strand to SEQ ID NO: 871926
agguacaaagccauucaca

SEQ ID NO: 871928 - RNA, 19 nt, Artificial Sequence
  Description of Artificial Sequence: Synthetic oligonucleotide
  Sense strand starting at position 2980 of SEQ ID NO: 588535
gugaauggcuuuguaccuu

SEQ ID NO: 871929 - RNA, 19 nt, Artificial Sequence
  Description of Artificial Sequence: Synthetic oligonucleotide
  Antisense strand to SEQ ID NO: 871928
aagguacaaagccauucac

SEQ ID NO: 871930 - RNA, 19 nt, Artificial Sequence
  Description of Artificial Sequence: Synthetic oligonucleotide
  Sense strand starting at position 3025 of SEQ ID NO: 588535
gcucauaccgaguacauga

SEQ ID NO: 871931 - RNA, 19 nt, Artificial Sequence
  Description of Artificial Sequence: Synthetic oligonucleotide
  Antisense strand to SEQ ID NO: 871930
ucauguacucgguaugagc

SEQ ID NO: 871932 - RNA, 19 nt, Artificial Sequence
  Description of Artificial Sequence: Synthetic oligonucleotide
  Sense strand starting at position 3334 of SEQ ID NO: 588535
acaguaugcucagccgaga

SEQ ID NO: 871933 - RNA, 19 nt, Artificial Sequence
  Description of Artificial Sequence: Synthetic oligonucleotide
  Antisense strand to SEQ ID NO: 871932
ucucggcugagcauacugu

SEQ ID NO: 871934 - RNA, 19 nt, Artificial Sequence
  Description of Artificial Sequence: Synthetic oligonucleotide
  Sense strand starting at position 3409 of SEQ ID NO: 588535
gguaaaccgcuagaggaua

SEQ ID NO: 871935 - RNA, 19 nt, Artificial Sequence
  Description of Artificial Sequence: Synthetic oligonucleotide
  Antisense strand to SEQ ID NO: 871934
uauccucuagcgguuuacc

SEQ ID NO: 871936 - RNA, 19 nt, Artificial Sequence
  Description of Artificial Sequence: Synthetic oligonucleotide
  Sense strand starting at position 3417 of SEQ ID NO: 588535
gcuagaggauauugaaaca

SEQ ID NO: 871937 - RNA, 19 nt, Artificial Sequence
  Description of Artificial Sequence: Synthetic oligonucleotide
  Antisense strand to SEQ ID NO: 871936
uguuucaauauccucuagc

SEQ ID NO: 871938 - RNA, 19 nt, Artificial Sequence
  Description of Artificial Sequence: Synthetic oligonucleotide
  Sense strand starting at position 906 of SEQ ID NO: 588536
gugugucugcauggaaaug

SEQ ID NO: 871939 - RNA, 19 nt, Artificial Sequence
  Description of Artificial Sequence: Synthetic oligonucleotide
  Antisense strand to SEQ ID NO: 871938
cauuuccaugcagacacac

SEQ ID NO: 871940 - RNA, 19 nt, Artificial Sequence
  Description of Artificial Sequence: Synthetic oligonucleotide
  Sense strand starting at position 907 of SEQ ID NO: 588536
ugugucugcauggaaaugu

SEQ ID NO: 871941 - RNA, 19 nt, Artificial Sequence
  Description of Artificial Sequence: Synthetic oligonucleotide
  Antisense strand to SEQ ID NO: 871940
acauuuccaugcagacaca

SEQ ID NO: 871942 - RNA, 19 nt, Artificial Sequence
  Description of Artificial Sequence: Synthetic oligonucleotide
  Sense strand starting at position 916 of SEQ ID NO: 588536
auggaaaugugcuauaaac

SEQ ID NO: 871943 - RNA, 19 nt, Artificial Sequence
  Description of Artificial Sequence: Synthetic oligonucleotide
  Antisense strand to SEQ ID NO: 871942
guuuauagcacauuuccau

SEQ ID NO: 871944 - RNA, 19 nt, Artificial Sequence
  Description of Artificial Sequence: Synthetic oligonucleotide
  Sense strand starting at position 918 of SEQ ID NO: 588536
ggaaaugugcuauaaacgu

SEQ ID NO: 871945 - RNA, 19 nt, Artificial Sequence
  Description of Artificial Sequence: Synthetic oligonucleotide
  Antisense strand to SEQ ID NO: 871944
acguuuauagcacauuucc

SEQ ID NO: 871946 - RNA, 19 nt, Artificial Sequence
  Description of Artificial Sequence: Synthetic oligonucleotide
  Sense strand starting at position 924 of SEQ ID NO: 588536
gugcuauaaacguugcucu

SEQ ID NO: 871947 - RNA, 19 nt, Artificial Sequence
  Description of Artificial Sequence: Synthetic oligonucleotide
  Antisense strand to SEQ ID NO: 871946
agagcaacguuuauagcac

SEQ ID NO: 871948 - RNA, 19 nt, Artificial Sequence
  Description of Artificial Sequence: Synthetic oligonucleotide
  Sense strand starting at position 925 of SEQ ID NO: 588536
ugcuauaaacguugcucua

SEQ ID NO: 871949 - RNA, 19 nt, Artificial Sequence
  Description of Artificial Sequence: Synthetic oligonucleotide
  Antisense strand to SEQ ID NO: 871948
uagagcaacguuuauagca

SEQ ID NO: 871950 - RNA, 19 nt, Artificial Sequence
  Description of Artificial Sequence: Synthetic oligonucleotide
  Sense strand starting at position 967 of SEQ ID NO: 588536
agaugaauuccgggcagaa

SEQ ID NO: 871951 - RNA, 19 nt, Artificial Sequence
  Description of Artificial Sequence: Synthetic oligonucleotide
  Antisense strand to SEQ ID NO: 871950
uucugcccggaauucaucu

SEQ ID NO: 871952 - RNA, 19 nt, Artificial Sequence
  Description of Artificial Sequence: Synthetic oligonucleotide
  Sense strand starting at position 1684 of SEQ ID NO: 588536
cuccuagaguccugcccaa

SEQ ID NO: 871953 - RNA, 19 nt, Artificial Sequence
  Description of Artificial Sequence: Synthetic oligonucleotide
  Antisense strand to SEQ ID NO: 871952
uugggcaggacucuaggag

SEQ ID NO: 871954 - RNA, 19 nt, Artificial Sequence
  Description of Artificial Sequence: Synthetic oligonucleotide
  Sense strand starting at position 1787 of SEQ ID NO: 588536
uuacuugguuguccuggaa

SEQ ID NO: 871955 - RNA, 19 nt, Artificial Sequence
  Description of Artificial Sequence: Synthetic oligonucleotide
  Antisense strand to SEQ ID NO: 871954
uuccaggacaaccaaguaa

SEQ ID NO: 871956 - RNA, 19 nt, Artificial Sequence
  Description of Artificial Sequence: Synthetic oligonucleotide
  Sense strand starting at position 2019 of SEQ ID NO: 588536
ggcccuauuuaugggaucu

SEQ ID NO: 871957 - RNA, 19 nt, Artificial Sequence
  Description of Artificial Sequence: Synthetic oligonucleotide
  Antisense strand to SEQ ID NO: 871956
agaucccauaaauagggcc

SEQ ID NO: 871958 - RNA, 19 nt, Artificial Sequence
  Description of Artificial Sequence: Synthetic oligonucleotide
  Sense strand starting at position 2067 of SEQ ID NO: 588536
ccaggaaugugaggcaauu

SEQ ID NO: 871959 - RNA, 19 nt, Artificial Sequence
  Description of Artificial Sequence: Synthetic oligonucleotide
  Antisense strand to SEQ ID NO: 871958
aauugccucacauuccugg

SEQ ID NO: 871960 - RNA, 19 nt, Artificial Sequence
  Description of Artificial Sequence: Synthetic oligonucleotide
  Sense strand starting at position 2100 of SEQ ID NO: 588536
cggaaacacuuggcaagau

SEQ ID NO: 871961 - RNA, 19 nt, Artificial Sequence
  Description of Artificial Sequence: Synthetic oligonucleotide
  Antisense strand to SEQ ID NO: 871960
aucuugccaaguguuuccg

SEQ ID NO: 871962 - RNA, 19 nt, Artificial Sequence
  Description of Artificial Sequence: Synthetic oligonucleotide
  Sense strand starting at position 2101 of SEQ ID NO: 588536
ggaaacacuuggcaagauu

SEQ ID NO: 871963 - RNA, 19 nt, Artificial Sequence
  Description of Artificial Sequence: Synthetic oligonucleotide
  Antisense strand to SEQ ID NO: 871962
aaucuugccaaguguuucc

SEQ ID NO: 871964 - RNA, 19 nt, Artificial Sequence
  Description of Artificial Sequence: Synthetic oligonucleotide
  Sense strand starting at position 2110 of SEQ ID NO: 588536
uggcaagauuucugcaccu

SEQ ID NO: 871965 - RNA, 19 nt, Artificial Sequence
  Description of Artificial Sequence: Synthetic oligonucleotide
  Antisense strand to SEQ ID NO: 871964
aggugcagaaaucuugcca

SEQ ID NO: 871966 - RNA, 19 nt, Artificial Sequence
  Description of Artificial Sequence: Synthetic oligonucleotide
  Sense strand starting at position 2167 of SEQ ID NO: 588536
gggacauucccggagugcu

SEQ ID NO: 871967 - RNA, 19 nt, Artificial Sequence
  Description of Artificial Sequence: Synthetic oligonucleotide
  Antisense strand to SEQ ID NO: 871966
agcacuccgggaauguccc

SEQ ID NO: 871968 - RNA, 19 nt, Artificial Sequence
  Description of Artificial Sequence: Synthetic oligonucleotide
  Sense strand starting at position 2228 of SEQ ID NO: 588536
ugcuguuucuuucuucuga

SEQ ID NO: 871969 - RNA, 19 nt, Artificial Sequence
  Description of Artificial Sequence: Synthetic oligonucleotide
  Antisense strand to SEQ ID NO: 871968
ucagaagaaagaaacagca

SEQ ID NO: 871970 - RNA, 19 nt, Artificial Sequence
  Description of Artificial Sequence: Synthetic oligonucleotide
  Sense strand starting at position 2229 of SEQ ID NO: 588536
gcuguuucuuucuucugau

SEQ ID NO: 871971 - RNA, 19 nt, Artificial Sequence
  Description of Artificial Sequence: Synthetic oligonucleotide
  Antisense strand to SEQ ID NO: 871970
aucagaagaaagaaacagc

SEQ ID NO: 871972 - RNA, 19 nt, Artificial Sequence
  Description of Artificial Sequence: Synthetic oligonucleotide
  Sense strand starting at position 2230 of SEQ ID NO: 588536
cuguuucuuucuucugauu

SEQ ID NO: 871973 - RNA, 19 nt, Artificial Sequence
  Description of Artificial Sequence: Synthetic oligonucleotide
  Antisense strand to SEQ ID NO: 871972
aaucagaagaaagaaacag

SEQ ID NO: 871974 - RNA, 19 nt, Artificial Sequence
  Description of Artificial Sequence: Synthetic oligonucleotide
  Sense strand starting at position 2241 of SEQ ID NO: 588536
uucugauugcccuguaugu

SEQ ID NO: 871975 - RNA, 19 nt, Artificial Sequence
  Description of Artificial Sequence: Synthetic oligonucleotide
  Antisense strand to SEQ ID NO: 871974
acauacagggcaaucagaa

SEQ ID NO: 871976 - RNA, 19 nt, Artificial Sequence
  Description of Artificial Sequence: Synthetic oligonucleotide
  Sense strand starting at position 2391 of SEQ ID NO: 588536
aacagaucaugugcuguuu

SEQ ID NO: 871977 - RNA, 19 nt, Artificial Sequence
  Description of Artificial Sequence: Synthetic oligonucleotide
  Antisense strand to SEQ ID NO: 871976
aaacagcacaugaucuguu

SEQ ID NO: 871978 - RNA, 19 nt, Artificial Sequence
  Description of Artificial Sequence: Synthetic oligonucleotide
  Sense strand starting at position 2671 of SEQ ID NO: 588536
ggguugagugcugaggcua

SEQ ID NO: 871979 - RNA, 19 nt, Artificial Sequence
  Description of Artificial Sequence: Synthetic oligonucleotide
  Antisense strand to SEQ ID NO: 871978
uagccucagcacucaaccc

SEQ ID NO: 871980 - RNA, 19 nt, Artificial Sequence
  Description of Artificial Sequence: Synthetic oligonucleotide
  Sense strand starting at position 2705 of SEQ ID NO: 588536
gugaguugggcugaugugu

SEQ ID NO: 871981 - RNA, 19 nt, Artificial Sequence
  Description of Artificial Sequence: Synthetic oligonucleotide
  Antisense strand to SEQ ID NO: 871980
acacaucagcccaacucac

SEQ ID NO: 871982 - RNA, 19 nt, Artificial Sequence
  Description of Artificial Sequence: Synthetic oligonucleotide
  Sense strand starting at position 2782 of SEQ ID NO: 588536
gugcaaggaucuggccuua

SEQ ID NO: 871983 - RNA, 19 nt, Artificial Sequence
  Description of Artificial Sequence: Synthetic oligonucleotide
  Antisense strand to SEQ ID NO: 871982
uaaggccagauccuugcac

SEQ ID NO: 871984 - RNA, 19 nt, Artificial Sequence
  Description of Artificial Sequence: Synthetic oligonucleotide
  Sense strand starting at position 2793 of SEQ ID NO: 588536
uggccuuauccuugagguc

SEQ ID NO: 871985 - RNA, 19 nt, Artificial Sequence
  Description of Artificial Sequence: Synthetic oligonucleotide
  Antisense strand to SEQ ID NO: 871984
gaccucaaggauaaggcca

SEQ ID NO: 871986 - RNA, 19 nt, Artificial Sequence
  Description of Artificial Sequence: Synthetic oligonucleotide
  Sense strand starting at position 2794 of SEQ ID NO: 588536
ggccuuauccuugagguca

SEQ ID NO: 871987 - RNA, 19 nt, Artificial Sequence
  Description of Artificial Sequence: Synthetic oligonucleotide
  Antisense strand to SEQ ID NO: 871986
ugaccucaaggauaaggcc

SEQ ID NO: 871988 - RNA, 19 nt, Artificial Sequence
  Description of Artificial Sequence: Synthetic oligonucleotide
  Sense strand starting at position 2881 of SEQ ID NO: 588536
cuggaacugucaccgagau

SEQ ID NO: 871989 - RNA, 19 nt, Artificial Sequence
  Description of Artificial Sequence: Synthetic oligonucleotide
  Antisense strand to SEQ ID NO: 871988
aucucggugacaguuccag

SEQ ID NO: 871990 - RNA, 19 nt, Artificial Sequence
  Description of Artificial Sequence: Synthetic oligonucleotide
  Sense strand starting at position 2910 of SEQ ID NO: 588536
agccuuguccagcagggaa

SEQ ID NO: 871991 - RNA, 19 nt, Artificial Sequence
  Description of Artificial Sequence: Synthetic oligonucleotide
  Antisense strand to SEQ ID NO: 871990
uucccugcuggacaaggcu

SEQ ID NO: 871992 - RNA, 19 nt, Artificial Sequence
  Description of Artificial Sequence: Synthetic oligonucleotide
  Sense strand starting at position 2992 of SEQ ID NO: 588536
ugcaguguccgcagagaug

SEQ ID NO: 871993 - RNA, 19 nt, Artificial Sequence
  Description of Artificial Sequence: Synthetic oligonucleotide
  Antisense strand to SEQ ID NO: 871992
caucucugcggacacugca

SEQ ID NO: 871994 - RNA, 19 nt, Artificial Sequence
  Description of Artificial Sequence: Synthetic oligonucleotide
  Sense strand starting at position 3004 of SEQ ID NO: 588536
agagauggcucacccauga

SEQ ID NO: 871995 - RNA, 19 nt, Artificial Sequence
  Description of Artificial Sequence: Synthetic oligonucleotide
  Antisense strand to SEQ ID NO: 871994
ucaugggugagccaucucu

SEQ ID NO: 871996 - RNA, 19 nt, Artificial Sequence
  Description of Artificial Sequence: Synthetic oligonucleotide
  Sense strand starting at position 3200 of SEQ ID NO: 588536
ggguuagucuagagaggca

SEQ ID NO: 871997 - RNA, 19 nt, Artificial Sequence
  Description of Artificial Sequence: Synthetic oligonucleotide
  Antisense strand to SEQ ID NO: 871996
ugccucucuagacuaaccc

SEQ ID NO: 871998 - RNA, 19 nt, Artificial Sequence
  Description of Artificial Sequence: Synthetic oligonucleotide
  Sense strand starting at position 3417 of SEQ ID NO: 588536
gcuacugucuuugaccuua

SEQ ID NO: 871999 - RNA, 19 nt, Artificial Sequence
  Description of Artificial Sequence: Synthetic oligonucleotide
  Antisense strand to SEQ ID NO: 871998
uaaggucaaagacaguagc

SEQ ID NO: 872000 - RNA, 19 nt, Artificial Sequence
  Description of Artificial Sequence: Synthetic oligonucleotide
  Sense strand starting at position 3694 of SEQ ID NO: 588536
ugcacuuuagccuggaaca

SEQ ID NO: 872001 - RNA, 19 nt, Artificial Sequence
  Description of Artificial Sequence: Synthetic oligonucleotide
  Antisense strand to SEQ ID NO: 872000
uguuccaggcuaaagugca

SEQ ID NO: 872002 - RNA, 19 nt, Artificial Sequence
  Description of Artificial Sequence: Synthetic oligonucleotide
  Sense strand starting at position 3704 of SEQ ID NO: 588536
ccuggaacagagcgauauu

SEQ ID NO: 872003 - RNA, 19 nt, Artificial Sequence
  Description of Artificial Sequence: Synthetic oligonucleotide
  Antisense strand to SEQ ID NO: 872002
aauaucgcucuguuccagg

SEQ ID NO: 872004 - RNA, 19 nt, Artificial Sequence
  Description of Artificial Sequence: Synthetic oligonucleotide
  Sense strand starting at position 265 of SEQ ID NO: 588537
aggccacucuucugugaag

SEQ ID NO: 872005 - RNA, 19 nt, Artificial Sequence
  Description of Artificial Sequence: Synthetic oligonucleotide
  Antisense strand to SEQ ID NO: 872004
cuucacagaagaguggccu

SEQ ID NO: 872006 - RNA, 19 nt, Artificial Sequence
  Description of Artificial Sequence: Synthetic oligonucleotide
  Sense strand starting at position 268 of SEQ ID NO: 588537
ccacucuucugugaaggga

SEQ ID NO: 872007 - RNA, 19 nt, Artificial Sequence
  Description of Artificial Sequence: Synthetic oligonucleotide
  Antisense strand to SEQ ID NO: 872006
ucccuucacagaagagugg

SEQ ID NO: 872008 - RNA, 19 nt, Artificial Sequence
  Description of Artificial Sequence: Synthetic oligonucleotide
  Sense strand starting at position 465 of SEQ ID NO: 588537
cguccaugaccauauuguu

SEQ ID NO: 872009 - RNA, 19 nt, Artificial Sequence
  Description of Artificial Sequence: Synthetic oligonucleotide
  Antisense strand to SEQ ID NO: 872008
aacaauauggucauggacg

SEQ ID NO: 872010 - RNA, 19 nt, Artificial Sequence
  Description of Artificial Sequence: Synthetic oligonucleotide
  Sense strand starting at position 487 of SEQ ID NO: 588537
ggauuuauguuaugaaaga

SEQ ID NO: 872011 - RNA, 19 nt, Artificial Sequence
  Description of Artificial Sequence: Synthetic oligonucleotide
  Antisense strand to SEQ ID NO: 872010
ucuuucauaacauaaaucc

SEQ ID NO: 872012 - RNA, 19 nt, Artificial Sequence
  Description of Artificial Sequence: Synthetic oligonucleotide
  Sense strand starting at position 509 of SEQ ID NO: 588537
agugguucuuagguccgaa

SEQ ID NO: 872013 - RNA, 19 nt, Artificial Sequence
  Description of Artificial Sequence: Synthetic oligonucleotide
  Antisense strand to SEQ ID NO: 872012
uucggaccuaagaaccacu

SEQ ID NO: 872014 - RNA, 19 nt, Artificial Sequence
  Description of Artificial Sequence: Synthetic oligonucleotide
  Sense strand starting at position 513 of SEQ ID NO: 588537
guucuuagguccgaaugca

SEQ ID NO: 872015 - RNA, 19 nt, Artificial Sequence
  Description of Artificial Sequence: Synthetic oligonucleotide
  Antisense strand to SEQ ID NO: 872014
ugcauucggaccuaagaac

SEQ ID NO: 872016 - RNA, 19 nt, Artificial Sequence
  Description of Artificial Sequence: Synthetic oligonucleotide
  Sense strand starting at position 2032 of SEQ ID NO: 588537
ugaauuucuccgugugggu

SEQ ID NO: 872017 - RNA, 19 nt, Artificial Sequence
  Description of Artificial Sequence: Synthetic oligonucleotide
  Antisense strand to SEQ ID NO: 872016
acccacacggagaaauuca

SEQ ID NO: 872018 - RNA, 19 nt, Artificial Sequence
  Description of Artificial Sequence: Synthetic oligonucleotide
  Sense strand starting at position 2161 of SEQ ID NO: 588537
ucuggaguguguggaucaa

SEQ ID NO: 872019 - RNA, 19 nt, Artificial Sequence
  Description of Artificial Sequence: Synthetic oligonucleotide
  Antisense strand to SEQ ID NO: 872018
uugauccacacacuccaga

SEQ ID NO: 872020 - RNA, 19 nt, Artificial Sequence
  Description of Artificial Sequence: Synthetic oligonucleotide
  Sense strand starting at position 2165 of SEQ ID NO: 588537
gaguguguggaucaaccau

SEQ ID NO: 872021 - RNA, 19 nt, Artificial Sequence
  Description of Artificial Sequence: Synthetic oligonucleotide
  Antisense strand to SEQ ID NO: 872020
augguugauccacacacuc

SEQ ID NO: 872022 - RNA, 19 nt, Artificial Sequence
  Description of Artificial Sequence: Synthetic oligonucleotide
  Sense strand starting at position 2202 of SEQ ID NO: 588537
uuucuuccaccagaagguu

SEQ ID NO: 872023 - RNA, 19 nt, Artificial Sequence
  Description of Artificial Sequence: Synthetic oligonucleotide
  Antisense strand to SEQ ID NO: 872022
aaccuucugguggaagaaa

SEQ ID NO: 872024 - RNA, 19 nt, Artificial Sequence
  Description of Artificial Sequence: Synthetic oligonucleotide
  Sense strand starting at position 3861 of SEQ ID NO: 588537
ggauaaaccucagagucua

SEQ ID NO: 872025 - RNA, 19 nt, Artificial Sequence
  Description of Artificial Sequence: Synthetic oligonucleotide
  Antisense strand to SEQ ID NO: 872024
uagacucugagguuuaucc

SEQ ID NO: 872026 - RNA, 19 nt, Artificial Sequence
  Description of Artificial Sequence: Synthetic oligonucleotide
  Sense strand starting at position 3869 of SEQ ID NO: 588537
cucagagucuaaugagacu

SEQ ID NO: 872027 - RNA, 19 nt, Artificial Sequence
  Description of Artificial Sequence: Synthetic oligonucleotide
  Antisense strand to SEQ ID NO: 872026
agucucauuagacucugag

SEQ ID NO: 872028 - RNA, 19 nt, Artificial Sequence
  Description of Artificial Sequence: Synthetic oligonucleotide
  Sense strand starting at position 79 of SEQ ID NO: 588538
gggaauaguucagggaaca

SEQ ID NO: 872029 - RNA, 19 nt, Artificial Sequence
  Description of Artificial Sequence: Synthetic oligonucleotide
  Antisense strand to SEQ ID NO: 872028
uguucccugaacuauuccc

SEQ ID NO: 872030 - RNA, 19 nt, Artificial Sequence
  Description of Artificial Sequence: Synthetic oligonucleotide
  Sense strand starting at position 325 of SEQ ID NO: 588538
caaagugcccaucgguaaa

SEQ ID NO: 872031 - RNA, 19 nt, Artificial Sequence
  Description of Artificial Sequence: Synthetic oligonucleotide
  Antisense strand to SEQ ID NO: 872030
uuuaccgaugggcacuuug

SEQ ID NO: 872032 - RNA, 19 nt, Artificial Sequence
  Description of Artificial Sequence: Synthetic oligonucleotide
  Sense strand starting at position 565 of SEQ ID NO: 588538
augcuuauauuugggauaa

SEQ ID NO: 872033 - RNA, 19 nt, Artificial Sequence
  Description of Artificial Sequence: Synthetic oligonucleotide
  Antisense strand to SEQ ID NO: 872032
uuaucccaaauauaagcau

SEQ ID NO: 872034 - RNA, 19 nt, Artificial Sequence
  Description of Artificial Sequence: Synthetic oligonucleotide
  Sense strand starting at position 566 of SEQ ID NO: 588538
ugcuuauauuugggauaaa

SEQ ID NO: 872035 - RNA, 19 nt, Artificial Sequence
  Description of Artificial Sequence: Synthetic oligonucleotide
  Antisense strand to SEQ ID NO: 872034
uuuaucccaaauauaagca

SEQ ID NO: 872036 - RNA, 19 nt, Artificial Sequence
  Description of Artificial Sequence: Synthetic oligonucleotide
  Sense strand starting at position 781 of SEQ ID NO: 588538
ucagguuacucccgcucaa

SEQ ID NO: 872037 - RNA, 19 nt, Artificial Sequence
  Description of Artificial Sequence: Synthetic oligonucleotide
  Antisense strand to SEQ ID NO: 872036
uugagcgggaguaaccuga

SEQ ID NO: 872038 - RNA, 19 nt, Artificial Sequence
  Description of Artificial Sequence: Synthetic oligonucleotide
  Sense strand starting at position 864 of SEQ ID NO: 588538
ccgacuucccuccagaauc

SEQ ID NO: 872039 - RNA, 19 nt, Artificial Sequence
  Description of Artificial Sequence: Synthetic oligonucleotide
  Antisense strand to SEQ ID NO: 872038
gauucuggagggaagucgg

SEQ ID NO: 872040 - RNA, 19 nt, Artificial Sequence
  Description of Artificial Sequence: Synthetic oligonucleotide
  Sense strand starting at position 1162 of SEQ ID NO: 588538
ugcgacaugucgggaggaa

SEQ ID NO: 872041 - RNA, 19 nt, Artificial Sequence
  Description of Artificial Sequence: Synthetic oligonucleotide
  Antisense strand to SEQ ID NO: 872040
uuccucccgacaugucgca

SEQ ID NO: 872042 - RNA, 19 nt, Artificial Sequence
  Description of Artificial Sequence: Synthetic oligonucleotide
  Sense strand starting at position 1163 of SEQ ID NO: 588538
gcgacaugucgggaggaac

SEQ ID NO: 872043 - RNA, 19 nt, Artificial Sequence
  Description of Artificial Sequence: Synthetic oligonucleotide
  Antisense strand to SEQ ID NO: 872042
guuccucccgacaugucgc

SEQ ID NO: 872044 - RNA, 19 nt, Artificial Sequence
  Description of Artificial Sequence: Synthetic oligonucleotide
  Sense strand starting at position 1359 of SEQ ID NO: 588538
cgggacuuccgcugagacu

SEQ ID NO: 872045 - RNA, 19 nt, Artificial Sequence
  Description of Artificial Sequence: Synthetic oligonucleotide
  Antisense strand to SEQ ID NO: 872044
agucucagcggaagucccg

SEQ ID NO: 872046 - RNA, 19 nt, Artificial Sequence
  Description of Artificial Sequence: Synthetic oligonucleotide
  Sense strand starting at position 1360 of SEQ ID NO: 588538
gggacuuccgcugagacuu

SEQ ID NO: 872047 - RNA, 19 nt, Artificial Sequence
  Description of Artificial Sequence: Synthetic oligonucleotide
  Antisense strand to SEQ ID NO: 872046
aagucucagcggaaguccc

SEQ ID NO: 872048 - RNA, 19 nt, Artificial Sequence
  Description of Artificial Sequence: Synthetic oligonucleotide
  Sense strand starting at position 1408 of SEQ ID NO: 588538
gaaucuucgucuccggcau

SEQ ID NO: 872049 - RNA, 19 nt, Artificial Sequence
  Description of Artificial Sequence: Synthetic oligonucleotide
  Antisense strand to SEQ ID NO: 872048
augccggagacgaagauuc

SEQ ID NO: 872050 - RNA, 19 nt, Artificial Sequence
  Description of Artificial Sequence: Synthetic oligonucleotide
  Sense strand starting at position 1800 of SEQ ID NO: 588538
ccgggaaugucaucaggac

SEQ ID NO: 872051 - RNA, 19 nt, Artificial Sequence
  Description of Artificial Sequence: Synthetic oligonucleotide
  Antisense strand to SEQ ID NO: 872050
guccugaugacauucccgg

SEQ ID NO: 872052 - RNA, 19 nt, Artificial Sequence
  Description of Artificial Sequence: Synthetic oligonucleotide
  Sense strand starting at position 2152 of SEQ ID NO: 588538
cuuugaaaugugugccaga

SEQ ID NO: 872053 - RNA, 19 nt, Artificial Sequence
  Description of Artificial Sequence: Synthetic oligonucleotide
  Antisense strand to SEQ ID NO: 872052
ucuggcacacauuucaaag

SEQ ID NO: 872054 - RNA, 19 nt, Artificial Sequence
  Description of Artificial Sequence: Synthetic oligonucleotide
  Sense strand starting at position 2343 of SEQ ID NO: 588538
ugugcagccuuggauaagu

SEQ ID NO: 872055 - RNA, 19 nt, Artificial Sequence
  Description of Artificial Sequence: Synthetic oligonucleotide
  Antisense strand to SEQ ID NO: 872054
acuuauccaaggcugcaca

SEQ ID NO: 872056 - RNA, 19 nt, Artificial Sequence
  Description of Artificial Sequence: Synthetic oligonucleotide
  Sense strand starting at position 2376 of SEQ ID NO: 588538
gugccucgguuucuugauu

SEQ ID NO: 872057 - RNA, 19 nt, Artificial Sequence
  Description of Artificial Sequence: Synthetic oligonucleotide
  Antisense strand to SEQ ID NO: 872056
aaucaagaaaccgaggcac

SEQ ID NO: 872058 - RNA, 19 nt, Artificial Sequence
  Description of Artificial Sequence: Synthetic oligonucleotide
  Sense strand starting at position 2561 of SEQ ID NO: 588538
ccgguuaagucuuguauuu

SEQ ID NO: 872059 - RNA, 19 nt, Artificial Sequence
  Description of Artificial Sequence: Synthetic oligonucleotide
  Antisense strand to SEQ ID NO: 872058
aaauacaagacuuaaccgg

SEQ ID NO: 872060 - RNA, 19 nt, Artificial Sequence
  Description of Artificial Sequence: Synthetic oligonucleotide
  Sense strand starting at position 2697 of SEQ ID NO: 588538
aggccaguuuccugaucuu

SEQ ID NO: 872061 - RNA, 19 nt, Artificial Sequence
  Description of Artificial Sequence: Synthetic oligonucleotide
  Antisense strand to SEQ ID NO: 872060
aagaucaggaaacuggccu

SEQ ID NO: 872062 - RNA, 19 nt, Artificial Sequence
  Description of Artificial Sequence: Synthetic oligonucleotide
  Sense strand starting at position 2700 of SEQ ID NO: 588538
ccaguuuccugaucuuuga

SEQ ID NO: 872063 - RNA, 19 nt, Artificial Sequence
  Description of Artificial Sequence: Synthetic oligonucleotide
  Antisense strand to SEQ ID NO: 872062
ucaaagaucaggaaacugg

SEQ ID NO: 872064 - RNA, 19 nt, Artificial Sequence
  Description of Artificial Sequence: Synthetic oligonucleotide
  Sense strand starting at position 2828 of SEQ ID NO: 588538
ccaggugcccacgaucaua

SEQ ID NO: 872065 - RNA, 19 nt, Artificial Sequence
  Description of Artificial Sequence: Synthetic oligonucleotide
  Antisense strand to SEQ ID NO: 872064
uaugaucgugggcaccugg

SEQ ID NO: 872066 - RNA, 19 nt, Artificial Sequence
  Description of Artificial Sequence: Synthetic oligonucleotide
  Sense strand starting at position 2838 of SEQ ID NO: 588538
acgaucauaucagugguga

SEQ ID NO: 872067 - RNA, 19 nt, Artificial Sequence
  Description of Artificial Sequence: Synthetic oligonucleotide
  Antisense strand to SEQ ID NO: 872066
ucaccacugauaugaucgu

SEQ ID NO: 872068 - RNA, 19 nt, Artificial Sequence
  Description of Artificial Sequence: Synthetic oligonucleotide
  Sense strand starting at position 2839 of SEQ ID NO: 588538
cgaucauaucaguggugag

SEQ ID NO: 872069 - RNA, 19 nt, Artificial Sequence
  Description of Artificial Sequence: Synthetic oligonucleotide
  Antisense strand to SEQ ID NO: 872068
cucaccacugauaugaucg

SEQ ID NO: 872070 - RNA, 19 nt, Artificial Sequence
  Description of Artificial Sequence: Synthetic oligonucleotide
  Sense strand starting at position 3358 of SEQ ID NO: 588538
ggcugcagcaucuguuuau

SEQ ID NO: 872071 - RNA, 19 nt, Artificial Sequence
  Description of Artificial Sequence: Synthetic oligonucleotide
  Antisense strand to SEQ ID NO: 872070
auaaacagaugcugcagcc

SEQ ID NO: 872072 - RNA, 19 nt, Artificial Sequence
  Description of Artificial Sequence: Synthetic oligonucleotide
  Sense strand starting at position 3359 of SEQ ID NO: 588538
gcugcagcaucuguuuauu

SEQ ID NO: 872073 - RNA, 19 nt, Artificial Sequence
  Description of Artificial Sequence: Synthetic oligonucleotide
  Antisense strand to SEQ ID NO: 872072
aauaaacagaugcugcagc

SEQ ID NO: 872074 - RNA, 19 nt, Artificial Sequence
  Description of Artificial Sequence: Synthetic oligonucleotide
  Sense strand starting at position 3361 of SEQ ID NO: 588538
ugcagcaucuguuuauuga

SEQ ID NO: 872075 - RNA, 19 nt, Artificial Sequence
  Description of Artificial Sequence: Synthetic oligonucleotide
  Antisense strand to SEQ ID NO: 872074
ucaauaaacagaugcugca

SEQ ID NO: 872076 - RNA, 19 nt, Artificial Sequence
  Description of Artificial Sequence: Synthetic oligonucleotide
  Sense strand starting at position 3362 of SEQ ID NO: 588538
gcagcaucuguuuauugaa

SEQ ID NO: 872077 - RNA, 19 nt, Artificial Sequence
  Description of Artificial Sequence: Synthetic oligonucleotide
  Antisense strand to SEQ ID NO: 872076
uucaauaaacagaugcugc

SEQ ID NO: 872078 - RNA, 19 nt, Artificial Sequence
  Description of Artificial Sequence: Synthetic oligonucleotide
  Sense strand starting at position 3364 of SEQ ID NO: 588538
agcaucuguuuauugaaua

SEQ ID NO: 872079 - RNA, 19 nt, Artificial Sequence
  Description of Artificial Sequence: Synthetic oligonucleotide
  Antisense strand to SEQ ID NO: 872078
uauucaauaaacagaugcu

SEQ ID NO: 872080 - RNA, 19 nt, Artificial Sequence
  Description of Artificial Sequence: Synthetic oligonucleotide
  Sense strand starting at position 3365 of SEQ ID NO: 588538
gcaucuguuuauugaauag

SEQ ID NO: 872081 - RNA, 19 nt, Artificial Sequence
  Description of Artificial Sequence: Synthetic oligonucleotide
  Antisense strand to SEQ ID NO: 872080
cuauucaauaaacagaugc

SEQ ID NO: 872082 - RNA, 19 nt, Artificial Sequence
  Description of Artificial Sequence: Synthetic oligonucleotide
  Sense strand starting at position 3576 of SEQ ID NO: 588538
gggcaucacucuuccaaag

SEQ ID NO: 872083 - RNA, 19 nt, Artificial Sequence
  Description of Artificial Sequence: Synthetic oligonucleotide
  Antisense strand to SEQ ID NO: 872082
cuuuggaagagugaugccc

SEQ ID NO: 872084 - RNA, 19 nt, Artificial Sequence
  Description of Artificial Sequence: Synthetic oligonucleotide
  Sense strand starting at position 3954 of SEQ ID NO: 588538
gcuacauguucugcccaca

SEQ ID NO: 872085 - RNA, 19 nt, Artificial Sequence
  Description of Artificial Sequence: Synthetic oligonucleotide
  Antisense strand to SEQ ID NO: 872084
ugugggcagaacauguagc

SEQ ID NO: 872086 - RNA, 19 nt, Artificial Sequence
  Description of Artificial Sequence: Synthetic oligonucleotide
  Sense strand starting at position 3957 of SEQ ID NO: 588538
acauguucugcccacagaa

SEQ ID NO: 872087 - RNA, 19 nt, Artificial Sequence
  Description of Artificial Sequence: Synthetic oligonucleotide
  Antisense strand to SEQ ID NO: 872086
uucugugggcagaacaugu

SEQ ID NO: 872088 - RNA, 19 nt, Artificial Sequence
  Description of Artificial Sequence: Synthetic oligonucleotide
  Sense strand starting at position 440 of SEQ ID NO: 588539
agagucagugcucaccaga

SEQ ID NO: 872089 - RNA, 19 nt, Artificial Sequence
  Description of Artificial Sequence: Synthetic oligonucleotide
  Antisense strand to SEQ ID NO: 872088
ucuggugagcacugacucu

SEQ ID NO: 872090 - RNA, 19 nt, Artificial Sequence
  Description of Artificial Sequence: Synthetic oligonucleotide
  Sense strand starting at position 443 of SEQ ID NO: 588539
gucagugcucaccagaaua

SEQ ID NO: 872091 - RNA, 19 nt, Artificial Sequence
  Description of Artificial Sequence: Synthetic oligonucleotide
  Antisense strand to SEQ ID NO: 872090
uauucuggugagcacugac

SEQ ID NO: 872092 - RNA, 19 nt, Artificial Sequence
  Description of Artificial Sequence: Synthetic oligonucleotide
  Sense strand starting at position 445 of SEQ ID NO: 588539
cagugcucaccagaauaug

SEQ ID NO: 872093 - RNA, 19 nt, Artificial Sequence
  Description of Artificial Sequence: Synthetic oligonucleotide
  Antisense strand to SEQ ID NO: 872092
cauauucuggugagcacug

SEQ ID NO: 872094 - RNA, 19 nt, Artificial Sequence
  Description of Artificial Sequence: Synthetic oligonucleotide
  Sense strand starting at position 523 of SEQ ID NO: 588539
cuuacaguugauggaguau

SEQ ID NO: 872095 - RNA, 19 nt, Artificial Sequence
  Description of Artificial Sequence: Synthetic oligonucleotide
  Antisense strand to SEQ ID NO: 872094
auacuccaucaacuguaag

SEQ ID NO: 872096 - RNA, 19 nt, Artificial Sequence
  Description of Artificial Sequence: Synthetic oligonucleotide
  Sense strand starting at position 981 of SEQ ID NO: 588539
gggcaugggucuuccugau

SEQ ID NO: 872097 - RNA, 19 nt, Artificial Sequence
  Description of Artificial Sequence: Synthetic oligonucleotide
  Antisense strand to SEQ ID NO: 872096
aucaggaagacccaugccc

SEQ ID NO: 872098 - RNA, 19 nt, Artificial Sequence
  Description of Artificial Sequence: Synthetic oligonucleotide
  Sense strand starting at position 1019 of SEQ ID NO: 588539
acgcacauguauucgaaau

SEQ ID NO: 872099 - RNA, 19 nt, Artificial Sequence
  Description of Artificial Sequence: Synthetic oligonucleotide
  Antisense strand to SEQ ID NO: 872098
auuucgaauacaugugcgu

SEQ ID NO: 872100 - RNA, 19 nt, Artificial Sequence
  Description of Artificial Sequence: Synthetic oligonucleotide
  Sense strand starting at position 1020 of SEQ ID NO: 588539
cgcacauguauucgaaauc

SEQ ID NO: 872101 - RNA, 19 nt, Artificial Sequence
  Description of Artificial Sequence: Synthetic oligonucleotide
  Antisense strand to SEQ ID NO: 872100
gauuucgaauacaugugcg

SEQ ID NO: 872102 - RNA, 19 nt, Artificial Sequence
  Description of Artificial Sequence: Synthetic oligonucleotide
  Sense strand starting at position 1021 of SEQ ID NO: 588539
gcacauguauucgaaauca

SEQ ID NO: 872103 - RNA, 19 nt, Artificial Sequence
  Description of Artificial Sequence: Synthetic oligonucleotide
  Antisense strand to SEQ ID NO: 872102
ugauuucgaauacaugugc

SEQ ID NO: 872104 - RNA, 19 nt, Artificial Sequence
  Description of Artificial Sequence: Synthetic oligonucleotide
  Sense strand starting at position 1809 of SEQ ID NO: 588539
accaguugcccuggucaca

SEQ ID NO: 872105 - RNA, 19 nt, Artificial Sequence
  Description of Artificial Sequence: Synthetic oligonucleotide
  Antisense strand to SEQ ID NO: 872104
ugugaccagggcaacuggu

SEQ ID NO: 872106 - RNA, 19 nt, Artificial Sequence
  Description of Artificial Sequence: Synthetic oligonucleotide
  Sense strand starting at position 2188 of SEQ ID NO: 588539
gggagcuuccuggauccau

SEQ ID NO: 872107 - RNA, 19 nt, Artificial Sequence
  Description of Artificial Sequence: Synthetic oligonucleotide
  Antisense strand to SEQ ID NO: 872106
auggauccaggaagcuccc

SEQ ID NO: 872108 - RNA, 19 nt, Artificial Sequence
  Description of Artificial Sequence: Synthetic oligonucleotide
  Sense strand starting at position 2428 of SEQ ID NO: 588539
ggcgcuuauucgcuccuua

SEQ ID NO: 872109 - RNA, 19 nt, Artificial Sequence
  Description of Artificial Sequence: Synthetic oligonucleotide
  Antisense strand to SEQ ID NO: 872108
uaaggagcgaauaagcgcc

SEQ ID NO: 872110 - RNA, 19 nt, Artificial Sequence
  Description of Artificial Sequence: Synthetic oligonucleotide
  Sense strand starting at position 2429 of SEQ ID NO: 588539
gcgcuuauucgcuccuuau

SEQ ID NO: 872111 - RNA, 19 nt, Artificial Sequence
  Description of Artificial Sequence: Synthetic oligonucleotide
  Antisense strand to SEQ ID NO: 872110
auaaggagcgaauaagcgc

SEQ ID NO: 872112 - RNA, 19 nt, Artificial Sequence
  Description of Artificial Sequence: Synthetic oligonucleotide
  Sense strand starting at position 2430 of SEQ ID NO: 588539
cgcuuauucgcuccuuauu

SEQ ID NO: 872113 - RNA, 19 nt, Artificial Sequence
  Description of Artificial Sequence: Synthetic oligonucleotide
  Antisense strand to SEQ ID NO: 872112
aauaaggagcgaauaagcg

SEQ ID NO: 872114 - RNA, 19 nt, Artificial Sequence
  Description of Artificial Sequence: Synthetic oligonucleotide
  Sense strand starting at position 2488 of SEQ ID NO: 588539
aagagaguuugcuucuguc

SEQ ID NO: 872115 - RNA, 19 nt, Artificial Sequence
  Description of Artificial Sequence: Synthetic oligonucleotide
  Antisense strand to SEQ ID NO: 872114
gacagaagcaaacucucuu

SEQ ID NO: 872116 - RNA, 19 nt, Artificial Sequence
  Description of Artificial Sequence: Synthetic oligonucleotide
  Sense strand starting at position 2572 of SEQ ID NO: 588539
cuuauauaucuucgaagcu

SEQ ID NO: 872117 - RNA, 19 nt, Artificial Sequence
  Description of Artificial Sequence: Synthetic oligonucleotide
  Antisense strand to SEQ ID NO: 872116
agcuucgaagauauauaag

SEQ ID NO: 872118 - RNA, 19 nt, Artificial Sequence
  Description of Artificial Sequence: Synthetic oligonucleotide
  Sense strand starting at position 2587 of SEQ ID NO: 588539
agcuguaggucuacgugua

SEQ ID NO: 872119 - RNA, 19 nt, Artificial Sequence
  Description of Artificial Sequence: Synthetic oligonucleotide
  Antisense strand to SEQ ID NO: 872118
uacacguagaccuacagcu

SEQ ID NO: 872120 - RNA, 19 nt, Artificial Sequence
  Description of Artificial Sequence: Synthetic oligonucleotide
  Sense strand starting at position 2588 of SEQ ID NO: 588539
gcuguaggucuacguguaa

SEQ ID NO: 872121 - RNA, 19 nt, Artificial Sequence
  Description of Artificial Sequence: Synthetic oligonucleotide
  Antisense strand to SEQ ID NO: 872120
uuacacguagaccuacagc

SEQ ID NO: 872122 - RNA, 19 nt, Artificial Sequence
  Description of Artificial Sequence: Synthetic oligonucleotide
  Sense strand starting at position 3040 of SEQ ID NO: 588539
cugucaaauuaugcaugau

SEQ ID NO: 872123 - RNA, 19 nt, Artificial Sequence
  Description of Artificial Sequence: Synthetic oligonucleotide
  Antisense strand to SEQ ID NO: 872122
aucaugcauaauuugacag

SEQ ID NO: 872124 - RNA, 19 nt, Artificial Sequence
  Description of Artificial Sequence: Synthetic oligonucleotide
  Sense strand starting at position 3050 of SEQ ID NO: 588539
augcaugauugcuaucaug

SEQ ID NO: 872125 - RNA, 19 nt, Artificial Sequence
  Description of Artificial Sequence: Synthetic oligonucleotide
  Antisense strand to SEQ ID NO: 872124
caugauagcaaucaugcau

SEQ ID NO: 872126 - RNA, 19 nt, Artificial Sequence
  Description of Artificial Sequence: Synthetic oligonucleotide
  Sense strand starting at position 3058 of SEQ ID NO: 588539
uugcuaucaugcuuguaua

SEQ ID NO: 872127 - RNA, 19 nt, Artificial Sequence
  Description of Artificial Sequence: Synthetic oligonucleotide
  Antisense strand to SEQ ID NO: 872126
uauacaagcaugauagcaa

SEQ ID NO: 872128 - RNA, 19 nt, Artificial Sequence
  Description of Artificial Sequence: Synthetic oligonucleotide
  Sense strand starting at position 3059 of SEQ ID NO: 588539
ugcuaucaugcuuguauau

SEQ ID NO: 872129 - RNA, 19 nt, Artificial Sequence
  Description of Artificial Sequence: Synthetic oligonucleotide
  Antisense strand to SEQ ID NO: 872128
auauacaagcaugauagca

SEQ ID NO: 872130 - RNA, 19 nt, Artificial Sequence
  Description of Artificial Sequence: Synthetic oligonucleotide
  Sense strand starting at position 3137 of SEQ ID NO: 588539
cugauaggaggucauuguu

SEQ ID NO: 872131 - RNA, 19 nt, Artificial Sequence
  Description of Artificial Sequence: Synthetic oligonucleotide
  Antisense strand to SEQ ID NO: 872130
aacaaugaccuccuaucag

SEQ ID NO: 872132 - RNA, 19 nt, Artificial Sequence
  Description of Artificial Sequence: Synthetic oligonucleotide
  Sense strand starting at position 3171 of SEQ ID NO: 588539
caguguuggagugaaagau

SEQ ID NO: 872133 - RNA, 19 nt, Artificial Sequence
  Description of Artificial Sequence: Synthetic oligonucleotide
  Antisense strand to SEQ ID NO: 872132
aucuuucacuccaacacug

SEQ ID NO: 872134 - RNA, 19 nt, Artificial Sequence
  Description of Artificial Sequence: Synthetic oligonucleotide
  Sense strand starting at position 3177 of SEQ ID NO: 588539
uggagugaaagauguugau

SEQ ID NO: 872135 - RNA, 19 nt, Artificial Sequence
  Description of Artificial Sequence: Synthetic oligonucleotide
  Antisense strand to SEQ ID NO: 872134
aucaacaucuuucacucca

SEQ ID NO: 872136 - RNA, 19 nt, Artificial Sequence
  Description of Artificial Sequence: Synthetic oligonucleotide
  Sense strand starting at position 3180 of SEQ ID NO: 588539
agugaaagauguugauuug

SEQ ID NO: 872137 - RNA, 19 nt, Artificial Sequence
  Description of Artificial Sequence: Synthetic oligonucleotide
  Antisense strand to SEQ ID NO: 872136
caaaucaacaucuuucacu

SEQ ID NO: 872138 - RNA, 19 nt, Artificial Sequence
  Description of Artificial Sequence: Synthetic oligonucleotide
  Sense strand starting at position 3190 of SEQ ID NO: 588539
guugauuuguucccaguag

SEQ ID NO: 872139 - RNA, 19 nt, Artificial Sequence
  Description of Artificial Sequence: Synthetic oligonucleotide
  Antisense strand to SEQ ID NO: 872138
cuacugggaacaaaucaac

SEQ ID NO: 872140 - RNA, 19 nt, Artificial Sequence
  Description of Artificial Sequence: Synthetic oligonucleotide
  Sense strand starting at position 3191 of SEQ ID NO: 588539
uugauuuguucccaguagu

SEQ ID NO: 872141 - RNA, 19 nt, Artificial Sequence
  Description of Artificial Sequence: Synthetic oligonucleotide
  Antisense strand to SEQ ID NO: 872140
acuacugggaacaaaucaa

SEQ ID NO: 872142 - RNA, 19 nt, Artificial Sequence
  Description of Artificial Sequence: Synthetic oligonucleotide
  Sense strand starting at position 3230 of SEQ ID NO: 588539
agagaaagcgccuguugaa

SEQ ID NO: 872143 - RNA, 19 nt, Artificial Sequence
  Description of Artificial Sequence: Synthetic oligonucleotide
  Antisense strand to SEQ ID NO: 872142
uucaacaggcgcuuucucu

SEQ ID NO: 872144 - RNA, 19 nt, Artificial Sequence
  Description of Artificial Sequence: Synthetic oligonucleotide
  Sense strand starting at position 3384 of SEQ ID NO: 588539
caugaugugguucggucau

SEQ ID NO: 872145 - RNA, 19 nt, Artificial Sequence
  Description of Artificial Sequence: Synthetic oligonucleotide
  Antisense strand to SEQ ID NO: 872144
augaccgaaccacaucaug

SEQ ID NO: 872146 - RNA, 19 nt, Artificial Sequence
  Description of Artificial Sequence: Synthetic oligonucleotide
  Sense strand starting at position 3386 of SEQ ID NO: 588539
ugaugugguucggucauua

SEQ ID NO: 872147 - RNA, 19 nt, Artificial Sequence
  Description of Artificial Sequence: Synthetic oligonucleotide
  Antisense strand to SEQ ID NO: 872146
uaaugaccgaaccacauca

SEQ ID NO: 872148 - RNA, 19 nt, Artificial Sequence
  Description of Artificial Sequence: Synthetic oligonucleotide
  Sense strand starting at position 3394 of SEQ ID NO: 588539
uucggucauuaaccgauaa

SEQ ID NO: 872149 - RNA, 19 nt, Artificial Sequence
  Description of Artificial Sequence: Synthetic oligonucleotide
  Antisense strand to SEQ ID NO: 872148
uuaucgguuaaugaccgaa

SEQ ID NO: 872150 - RNA, 19 nt, Artificial Sequence
  Description of Artificial Sequence: Synthetic oligonucleotide
  Sense strand starting at position 3398 of SEQ ID NO: 588539
gucauuaaccgauaaccua

SEQ ID NO: 872151 - RNA, 19 nt, Artificial Sequence
  Description of Artificial Sequence: Synthetic oligonucleotide
  Antisense strand to SEQ ID NO: 872150
uagguuaucgguuaaugac

SEQ ID NO: 872152 - RNA, 19 nt, Artificial Sequence
  Description of Artificial Sequence: Synthetic oligonucleotide
  Sense strand starting at position 3422 of SEQ ID NO: 588539
ggagaugaccugcaucugu

SEQ ID NO: 872153 - RNA, 19 nt, Artificial Sequence
  Description of Artificial Sequence: Synthetic oligonucleotide
  Antisense strand to SEQ ID NO: 872152
acagaugcaggucaucucc

SEQ ID NO: 872154 - RNA, 19 nt, Artificial Sequence
  Description of Artificial Sequence: Synthetic oligonucleotide
  Sense strand starting at position 3430 of SEQ ID NO: 588539
ccugcaucuguggacgaua

SEQ ID NO: 872155 - RNA, 19 nt, Artificial Sequence
  Description of Artificial Sequence: Synthetic oligonucleotide
  Antisense strand to SEQ ID NO: 872154
uaucguccacagaugcagg

SEQ ID NO: 872156 - RNA, 19 nt, Artificial Sequence
  Description of Artificial Sequence: Synthetic oligonucleotide
  Sense strand starting at position 3765 of SEQ ID NO: 588539
gagaaauauucccggaauu

SEQ ID NO: 872157 - RNA, 19 nt, Artificial Sequence
  Description of Artificial Sequence: Synthetic oligonucleotide
  Antisense strand to SEQ ID NO: 872156
aauuccgggaauauuucuc

SEQ ID NO: 872158 - RNA, 19 nt, Artificial Sequence
  Description of Artificial Sequence: Synthetic oligonucleotide
  Sense strand starting at position 3766 of SEQ ID NO: 588539
agaaauauucccggaauug

SEQ ID NO: 872159 - RNA, 19 nt, Artificial Sequence
  Description of Artificial Sequence: Synthetic oligonucleotide
  Antisense strand to SEQ ID NO: 872158
caauuccgggaauauuucu

SEQ ID NO: 872160 - RNA, 19 nt, Artificial Sequence
  Description of Artificial Sequence: Synthetic oligonucleotide
  Sense strand starting at position 3767 of SEQ ID NO: 588539
gaaauauucccggaauugu

SEQ ID NO: 872161 - RNA, 19 nt, Artificial Sequence
  Description of Artificial Sequence: Synthetic oligonucleotide
  Antisense strand to SEQ ID NO: 872160
acaauuccgggaauauuuc

SEQ ID NO: 872162 - RNA, 19 nt, Artificial Sequence
  Description of Artificial Sequence: Synthetic oligonucleotide
  Sense strand starting at position 3797 of SEQ ID NO: 588539
augcaauauucgguucuga

SEQ ID NO: 872163 - RNA, 19 nt, Artificial Sequence
  Description of Artificial Sequence: Synthetic oligonucleotide
  Antisense strand to SEQ ID NO: 872162
ucagaaccgaauauugcau

SEQ ID NO: 872164 - RNA, 19 nt, Artificial Sequence
  Description of Artificial Sequence: Synthetic oligonucleotide
  Sense strand starting at position 3846 of SEQ ID NO: 588539
uuagaaugucuagggccau

SEQ ID NO: 872165 - RNA, 19 nt, Artificial Sequence
  Description of Artificial Sequence: Synthetic oligonucleotide
  Antisense strand to SEQ ID NO: 872164
auggcccuagacauucuaa

SEQ ID NO: 872166 - RNA, 19 nt, Artificial Sequence
  Description of Artificial Sequence: Synthetic oligonucleotide
  Sense strand starting at position 3875 of SEQ ID NO: 588539
aggauagcuuuccaccuau

SEQ ID NO: 872167 - RNA, 19 nt, Artificial Sequence
  Description of Artificial Sequence: Synthetic oligonucleotide
  Antisense strand to SEQ ID NO: 872166
auagguggaaagcuauccu

SEQ ID NO: 872168 - RNA, 19 nt, Artificial Sequence
  Description of Artificial Sequence: Synthetic oligonucleotide
  Sense strand starting at position 903 of SEQ ID NO: 588540
agacgcauacagugauaca

SEQ ID NO: 872169 - RNA, 19 nt, Artificial Sequence
  Description of Artificial Sequence: Synthetic oligonucleotide
  Antisense strand to SEQ ID NO: 872168
uguaucacuguaugcgucu

SEQ ID NO: 872170 - RNA, 19 nt, Artificial Sequence
  Description of Artificial Sequence: Synthetic oligonucleotide
  Sense strand starting at position 1025 of SEQ ID NO: 588540
agccacauacagugauaca

SEQ ID NO: 872171 - RNA, 19 nt, Artificial Sequence
  Description of Artificial Sequence: Synthetic oligonucleotide
  Antisense strand to SEQ ID NO: 872170
uguaucacuguauguggcu

SEQ ID NO: 872172 - RNA, 19 nt, Artificial Sequence
  Description of Artificial Sequence: Synthetic oligonucleotide
  Sense strand starting at position 1266 of SEQ ID NO: 588540
gggcucguguggucacuua

SEQ ID NO: 872173 - RNA, 19 nt, Artificial Sequence
  Description of Artificial Sequence: Synthetic oligonucleotide
  Antisense strand to SEQ ID NO: 872172
uaagugaccacacgagccc

SEQ ID NO: 872174 - RNA, 19 nt, Artificial Sequence
  Description of Artificial Sequence: Synthetic oligonucleotide
  Sense strand starting at position 2178 of SEQ ID NO: 588540
gugacaggcuucugaucaa

SEQ ID NO: 872175 - RNA, 19 nt, Artificial Sequence
  Description of Artificial Sequence: Synthetic oligonucleotide
  Antisense strand to SEQ ID NO: 872174
uugaucagaagccugucac

SEQ ID NO: 872176 - RNA, 19 nt, Artificial Sequence
  Description of Artificial Sequence: Synthetic oligonucleotide
  Sense strand starting at position 2181 of SEQ ID NO: 588540
acaggcuucugaucaaguu

SEQ ID NO: 872177 - RNA, 19 nt, Artificial Sequence
  Description of Artificial Sequence: Synthetic oligonucleotide
  Antisense strand to SEQ ID NO: 872176
aacuugaucagaagccugu

SEQ ID NO: 872178 - RNA, 19 nt, Artificial Sequence
  Description of Artificial Sequence: Synthetic oligonucleotide
  Sense strand starting at position 2520 of SEQ ID NO: 588540
cacagugaguccugcacau

SEQ ID NO: 872179 - RNA, 19 nt, Artificial Sequence
  Description of Artificial Sequence: Synthetic oligonucleotide
  Antisense strand to SEQ ID NO: 872178
augugcaggacucacugug

SEQ ID NO: 872180 - RNA, 19 nt, Artificial Sequence
  Description of Artificial Sequence: Synthetic oligonucleotide
  Sense strand starting at position 2522 of SEQ ID NO: 588540
cagugaguccugcacauug

SEQ ID NO: 872181 - RNA, 19 nt, Artificial Sequence
  Description of Artificial Sequence: Synthetic oligonucleotide
  Antisense strand to SEQ ID NO: 872180
caaugugcaggacucacug

SEQ ID NO: 872182 - RNA, 19 nt, Artificial Sequence
  Description of Artificial Sequence: Synthetic oligonucleotide
  Sense strand starting at position 2534 of SEQ ID NO: 588540
cacauuguguaccugagaa

SEQ ID NO: 872183 - RNA, 19 nt, Artificial Sequence
  Description of Artificial Sequence: Synthetic oligonucleotide
  Antisense strand to SEQ ID NO: 872182
uucucagguacacaaugug

SEQ ID NO: 872184 - RNA, 19 nt, Artificial Sequence
  Description of Artificial Sequence: Synthetic oligonucleotide
  Sense strand starting at position 2536 of SEQ ID NO: 588540
cauuguguaccugagaaug

SEQ ID NO: 872185 - RNA, 19 nt, Artificial Sequence
  Description of Artificial Sequence: Synthetic oligonucleotide
  Antisense strand to SEQ ID NO: 872184
cauucucagguacacaaug

SEQ ID NO: 872186 - RNA, 19 nt, Artificial Sequence
  Description of Artificial Sequence: Synthetic oligonucleotide
  Sense strand starting at position 2761 of SEQ ID NO: 588540
gagacacucuggcauguuu

SEQ ID NO: 872187 - RNA, 19 nt, Artificial Sequence
  Description of Artificial Sequence: Synthetic oligonucleotide
  Antisense strand to SEQ ID NO: 872186
aaacaugccagagugucuc

SEQ ID NO: 872188 - RNA, 19 nt, Artificial Sequence
  Description of Artificial Sequence: Synthetic oligonucleotide
  Sense strand starting at position 2821 of SEQ ID NO: 588540
gcccaaucucagugcguua

SEQ ID NO: 872189 - RNA, 19 nt, Artificial Sequence
  Description of Artificial Sequence: Synthetic oligonucleotide
  Antisense strand to SEQ ID NO: 872188
uaacgcacugagauugggc

SEQ ID NO: 872190 - RNA, 19 nt, Artificial Sequence
  Description of Artificial Sequence: Synthetic oligonucleotide
  Sense strand starting at position 2823 of SEQ ID NO: 588540
ccaaucucagugcguuaau

SEQ ID NO: 872191 - RNA, 19 nt, Artificial Sequence
  Description of Artificial Sequence: Synthetic oligonucleotide
  Antisense strand to SEQ ID NO: 872190
auuaacgcacugagauugg

SEQ ID NO: 872192 - RNA, 19 nt, Artificial Sequence
  Description of Artificial Sequence: Synthetic oligonucleotide
  Sense strand starting at position 2824 of SEQ ID NO: 588540
caaucucagugcguuaauc

SEQ ID NO: 872193 - RNA, 19 nt, Artificial Sequence
  Description of Artificial Sequence: Synthetic oligonucleotide
  Antisense strand to SEQ ID NO: 872192
gauuaacgcacugagauug

SEQ ID NO: 872194 - RNA, 19 nt, Artificial Sequence
  Description of Artificial Sequence: Synthetic oligonucleotide
  Sense strand starting at position 2834 of SEQ ID NO: 588540
gcguuaaucccacaccuca

SEQ ID NO: 872195 - RNA, 19 nt, Artificial Sequence
  Description of Artificial Sequence: Synthetic oligonucleotide
  Antisense strand to SEQ ID NO: 872194
ugaggugugggauuaacgc

SEQ ID NO: 872196 - RNA, 19 nt, Artificial Sequence
  Description of Artificial Sequence: Synthetic oligonucleotide
  Sense strand starting at position 2943 of SEQ ID NO: 588540
gcaccugccuaagggauua

SEQ ID NO: 872197 - RNA, 19 nt, Artificial Sequence
  Description of Artificial Sequence: Synthetic oligonucleotide
  Antisense strand to SEQ ID NO: 872196
uaaucccuuaggcaggugc

SEQ ID NO: 872198 - RNA, 19 nt, Artificial Sequence
  Description of Artificial Sequence: Synthetic oligonucleotide
  Sense strand starting at position 3098 of SEQ ID NO: 588540
ccuagcuguccugacucaa

SEQ ID NO: 872199 - RNA, 19 nt, Artificial Sequence
  Description of Artificial Sequence: Synthetic oligonucleotide
  Antisense strand to SEQ ID NO: 872198
uugagucaggacagcuagg

SEQ ID NO: 872200 - RNA, 19 nt, Artificial Sequence
  Description of Artificial Sequence: Synthetic oligonucleotide
  Sense strand starting at position 3815 of SEQ ID NO: 588540
ccagguggucccuguggua

SEQ ID NO: 872201 - RNA, 19 nt, Artificial Sequence
  Description of Artificial Sequence: Synthetic oligonucleotide
  Antisense strand to SEQ ID NO: 872200
uaccacagggaccaccugg

SEQ ID NO: 872202 - RNA, 19 nt, Artificial Sequence
  Description of Artificial Sequence: Synthetic oligonucleotide
  Sense strand starting at position 3894 of SEQ ID NO: 588540
aggagucagcccuguucca

SEQ ID NO: 872203 - RNA, 19 nt, Artificial Sequence
  Description of Artificial Sequence: Synthetic oligonucleotide
  Antisense strand to SEQ ID NO: 872202
uggaacagggcugacuccu

SEQ ID NO: 872204 - RNA, 19 nt, Artificial Sequence
  Description of Artificial Sequence: Synthetic oligonucleotide
  Sense strand starting at position 77 of SEQ ID NO: 588541
agaauccucuuuggagaga

SEQ ID NO: 872205 - RNA, 19 nt, Artificial Sequence
  Description of Artificial Sequence: Synthetic oligonucleotide
  Antisense strand to SEQ ID NO: 872204
ucucuccaaagaggauucu

SEQ ID NO: 872206 - RNA, 19 nt, Artificial Sequence
  Description of Artificial Sequence: Synthetic oligonucleotide
  Sense strand starting at position 121 of SEQ ID NO: 588541
cagugaucccuggauccuu

SEQ ID NO: 872207 - RNA, 19 nt, Artificial Sequence
  Description of Artificial Sequence: Synthetic oligonucleotide
  Antisense strand to SEQ ID NO: 872206
aaggauccagggaucacug

SEQ ID NO: 872208 - RNA, 19 nt, Artificial Sequence
  Description of Artificial Sequence: Synthetic oligonucleotide
  Sense strand starting at position 129 of SEQ ID NO: 588541
ccuggauccuuagaccaga

SEQ ID NO: 872209 - RNA, 19 nt, Artificial Sequence
  Description of Artificial Sequence: Synthetic oligonucleotide
  Antisense strand to SEQ ID NO: 872208
ucuggucuaaggauccagg

SEQ ID NO: 872210 - RNA, 19 nt, Artificial Sequence
  Description of Artificial Sequence: Synthetic oligonucleotide
  Sense strand starting at position 248 of SEQ ID NO: 588541
cucaaaguccgugggugaa

SEQ ID NO: 872211 - RNA, 19 nt, Artificial Sequence
  Description of Artificial Sequence: Synthetic oligonucleotide
  Antisense strand to SEQ ID NO: 872210
uucacccacggacuuugag

SEQ ID NO: 872212 - RNA, 19 nt, Artificial Sequence
  Description of Artificial Sequence: Synthetic oligonucleotide
  Sense strand starting at position 595 of SEQ ID NO: 588541
ggcuaagucugaccaguca

SEQ ID NO: 872213 - RNA, 19 nt, Artificial Sequence
  Description of Artificial Sequence: Synthetic oligonucleotide
  Antisense strand to SEQ ID NO: 872212
ugacuggucagacuuagcc

SEQ ID NO: 872214 - RNA, 19 nt, Artificial Sequence
  Description of Artificial Sequence: Synthetic oligonucleotide
  Sense strand starting at position 655 of SEQ ID NO: 588541
gacuucggccucugaaacu

SEQ ID NO: 872215 - RNA, 19 nt, Artificial Sequence
  Description of Artificial Sequence: Synthetic oligonucleotide
  Antisense strand to SEQ ID NO: 872214
aguuucagaggccgaaguc

SEQ ID NO: 872216 - RNA, 19 nt, Artificial Sequence
  Description of Artificial Sequence: Synthetic oligonucleotide
  Sense strand starting at position 1005 of SEQ ID NO: 588541
cuugcauucugaccgagga

SEQ ID NO: 872217 - RNA, 19 nt, Artificial Sequence
  Description of Artificial Sequence: Synthetic oligonucleotide
  Antisense strand to SEQ ID NO: 872216
uccucggucagaaugcaag

SEQ ID NO: 872218 - RNA, 19 nt, Artificial Sequence
  Description of Artificial Sequence: Synthetic oligonucleotide
  Sense strand starting at position 1006 of SEQ ID NO: 588541
uugcauucugaccgaggau

SEQ ID NO: 872219 - RNA, 19 nt, Artificial Sequence
  Description of Artificial Sequence: Synthetic oligonucleotide
  Antisense strand to SEQ ID NO: 872218
auccucggucagaaugcaa

SEQ ID NO: 872220 - RNA, 19 nt, Artificial Sequence
  Description of Artificial Sequence: Synthetic oligonucleotide
  Sense strand starting at position 2740 of SEQ ID NO: 588541
aaccuuaggcagugacuua

SEQ ID NO: 872221 - RNA, 19 nt, Artificial Sequence
  Description of Artificial Sequence: Synthetic oligonucleotide
  Antisense strand to SEQ ID NO: 872220
uaagucacugccuaagguu

SEQ ID NO: 872222 - RNA, 19 nt, Artificial Sequence
  Description of Artificial Sequence: Synthetic oligonucleotide
  Sense strand starting at position 2750 of SEQ ID NO: 588541
agugacuuauccucccuua

SEQ ID NO: 872223 - RNA, 19 nt, Artificial Sequence
  Description of Artificial Sequence: Synthetic oligonucleotide
  Antisense strand to SEQ ID NO: 872222
uaagggaggauaagucacu

SEQ ID NO: 872224 - RNA, 19 nt, Artificial Sequence
  Description of Artificial Sequence: Synthetic oligonucleotide
  Sense strand starting at position 2769 of SEQ ID NO: 588541
gccuguuucugaccuuuau

SEQ ID NO: 872225 - RNA, 19 nt, Artificial Sequence
  Description of Artificial Sequence: Synthetic oligonucleotide
  Antisense strand to SEQ ID NO: 872224
auaaaggucagaaacaggc

SEQ ID NO: 872226 - RNA, 19 nt, Artificial Sequence
  Description of Artificial Sequence: Synthetic oligonucleotide
  Sense strand starting at position 2773 of SEQ ID NO: 588541
guuucugaccuuuauaaug

SEQ ID NO: 872227 - RNA, 19 nt, Artificial Sequence
  Description of Artificial Sequence: Synthetic oligonucleotide
  Antisense strand to SEQ ID NO: 872226
cauuauaaaggucagaaac

SEQ ID NO: 872228 - RNA, 19 nt, Artificial Sequence
  Description of Artificial Sequence: Synthetic oligonucleotide
  Sense strand starting at position 2781 of SEQ ID NO: 588541
ccuuuauaaugggcgacaa

SEQ ID NO: 872229 - RNA, 19 nt, Artificial Sequence
  Description of Artificial Sequence: Synthetic oligonucleotide
  Antisense strand to SEQ ID NO: 872228
uugucgcccauuauaaagg

SEQ ID NO: 872230 - RNA, 19 nt, Artificial Sequence
  Description of Artificial Sequence: Synthetic oligonucleotide
  Sense strand starting at position 2814 of SEQ ID NO: 588541
cauggacguguugauugaa

SEQ ID NO: 872231 - RNA, 19 nt, Artificial Sequence
  Description of Artificial Sequence: Synthetic oligonucleotide
  Antisense strand to SEQ ID NO: 872230
uucaaucaacacguccaug

SEQ ID NO: 872232 - RNA, 19 nt, Artificial Sequence
  Description of Artificial Sequence: Synthetic oligonucleotide
  Sense strand starting at position 2817 of SEQ ID NO: 588541
ggacguguugauugaaaga

SEQ ID NO: 872233 - RNA, 19 nt, Artificial Sequence
  Description of Artificial Sequence: Synthetic oligonucleotide
  Antisense strand to SEQ ID NO: 872232
ucuuucaaucaacacgucc

SEQ ID NO: 872234 - RNA, 19 nt, Artificial Sequence
  Description of Artificial Sequence: Synthetic oligonucleotide
  Sense strand starting at position 2933 of SEQ ID NO: 588541
agacacauucgauaucagu

SEQ ID NO: 872235 - RNA, 19 nt, Artificial Sequence
  Description of Artificial Sequence: Synthetic oligonucleotide
  Antisense strand to SEQ ID NO: 872234
acugauaucgaaugugucu

SEQ ID NO: 872236 - RNA, 19 nt, Artificial Sequence
  Description of Artificial Sequence: Synthetic oligonucleotide
  Sense strand starting at position 2939 of SEQ ID NO: 588541
auucgauaucagugagguu

SEQ ID NO: 872237 - RNA, 19 nt, Artificial Sequence
  Description of Artificial Sequence: Synthetic oligonucleotide
  Antisense strand to SEQ ID NO: 872236
aaccucacugauaucgaau

SEQ ID NO: 872238 - RNA, 19 nt, Artificial Sequence
  Description of Artificial Sequence: Synthetic oligonucleotide
  Sense strand starting at position 2940 of SEQ ID NO: 588541
uucgauaucagugagguuc

SEQ ID NO: 872239 - RNA, 19 nt, Artificial Sequence
  Description of Artificial Sequence: Synthetic oligonucleotide
  Antisense strand to SEQ ID NO: 872238
gaaccucacugauaucgaa

SEQ ID NO: 872240 - RNA, 19 nt, Artificial Sequence
  Description of Artificial Sequence: Synthetic oligonucleotide
  Sense strand starting at position 3152 of SEQ ID NO: 588541
gggaaauacccaggugucu

SEQ ID NO: 872241 - RNA, 19 nt, Artificial Sequence
  Description of Artificial Sequence: Synthetic oligonucleotide
  Antisense strand to SEQ ID NO: 872240
agacaccuggguauuuccc

SEQ ID NO: 872242 - RNA, 19 nt, Artificial Sequence
  Description of Artificial Sequence: Synthetic oligonucleotide
  Sense strand starting at position 3262 of SEQ ID NO: 588541
gcagguuuggcuccgucua

SEQ ID NO: 872243 - RNA, 19 nt, Artificial Sequence
  Description of Artificial Sequence: Synthetic oligonucleotide
  Antisense strand to SEQ ID NO: 872242
uagacggagccaaaccugc

SEQ ID NO: 872244 - RNA, 19 nt, Artificial Sequence
  Description of Artificial Sequence: Synthetic oligonucleotide
  Sense strand starting at position 3263 of SEQ ID NO: 588541
cagguuuggcuccgucuaa

SEQ ID NO: 872245 - RNA, 19 nt, Artificial Sequence
  Description of Artificial Sequence: Synthetic oligonucleotide
  Antisense strand to SEQ ID NO: 872244
uuagacggagccaaaccug

SEQ ID NO: 872246 - RNA, 19 nt, Artificial Sequence
  Description of Artificial Sequence: Synthetic oligonucleotide
  Sense strand starting at position 3264 of SEQ ID NO: 588541
agguuuggcuccgucuaau

SEQ ID NO: 872247 - RNA, 19 nt, Artificial Sequence
  Description of Artificial Sequence: Synthetic oligonucleotide
  Antisense strand to SEQ ID NO: 872246
auuagacggagccaaaccu

SEQ ID NO: 872248 - RNA, 19 nt, Artificial Sequence
  Description of Artificial Sequence: Synthetic oligonucleotide
  Sense strand starting at position 3305 of SEQ ID NO: 588541
ugaaaugacuuguuugcca

SEQ ID NO: 872249 - RNA, 19 nt, Artificial Sequence
  Description of Artificial Sequence: Synthetic oligonucleotide
  Antisense strand to SEQ ID NO: 872248
uggcaaacaagucauuuca

SEQ ID NO: 872250 - RNA, 19 nt, Artificial Sequence
  Description of Artificial Sequence: Synthetic oligonucleotide
  Sense strand starting at position 3372 of SEQ ID NO: 588541
agaguugaggcaugaaauc

SEQ ID NO: 872251 - RNA, 19 nt, Artificial Sequence
  Description of Artificial Sequence: Synthetic oligonucleotide
  Antisense strand to SEQ ID NO: 872250
gauuucaugccucaacucu

SEQ ID NO: 872252 - RNA, 19 nt, Artificial Sequence
  Description of Artificial Sequence: Synthetic oligonucleotide
  Sense strand starting at position 3423 of SEQ ID NO: 588541
acaaauauaugugugcaca

SEQ ID NO: 872253 - RNA, 19 nt, Artificial Sequence
  Description of Artificial Sequence: Synthetic oligonucleotide
  Antisense strand to SEQ ID NO: 872252
ugugcacacauauauuugu

SEQ ID NO: 872254 - RNA, 19 nt, Artificial Sequence
  Description of Artificial Sequence: Synthetic oligonucleotide
  Sense strand starting at position 3441 of SEQ ID NO: 588541
aaauauauguaugcgugua

SEQ ID NO: 872255 - RNA, 19 nt, Artificial Sequence
  Description of Artificial Sequence: Synthetic oligonucleotide
  Antisense strand to SEQ ID NO: 872254
uacacgcauacauauauuu

SEQ ID NO: 872256 - RNA, 19 nt, Artificial Sequence
  Description of Artificial Sequence: Synthetic oligonucleotide
  Sense strand starting at position 3476 of SEQ ID NO: 588541
acuuguguucaugugugca

SEQ ID NO: 872257 - RNA, 19 nt, Artificial Sequence
  Description of Artificial Sequence: Synthetic oligonucleotide
  Antisense strand to SEQ ID NO: 872256
ugcacacaugaacacaagu

SEQ ID NO: 872258 - RNA, 19 nt, Artificial Sequence
  Description of Artificial Sequence: Synthetic oligonucleotide
  Sense strand starting at position 3478 of SEQ ID NO: 588541
uuguguucaugugugcaaa

SEQ ID NO: 872259 - RNA, 19 nt, Artificial Sequence
  Description of Artificial Sequence: Synthetic oligonucleotide
  Antisense strand to SEQ ID NO: 872258
uuugcacacaugaacacaa

SEQ ID NO: 872260 - RNA, 19 nt, Artificial Sequence
  Description of Artificial Sequence: Synthetic oligonucleotide
  Sense strand starting at position 3480 of SEQ ID NO: 588541
guguucaugugugcaaaua

SEQ ID NO: 872261 - RNA, 19 nt, Artificial Sequence
  Description of Artificial Sequence: Synthetic oligonucleotide
  Antisense strand to SEQ ID NO: 872260
uauuugcacacaugaacac

SEQ ID NO: 872262 - RNA, 19 nt, Artificial Sequence
  Description of Artificial Sequence: Synthetic oligonucleotide
  Sense strand starting at position 3506 of SEQ ID NO: 588541
ucaucucuguuggcaauaa

SEQ ID NO: 872263 - RNA, 19 nt, Artificial Sequence
  Description of Artificial Sequence: Synthetic oligonucleotide
  Antisense strand to SEQ ID NO: 872262
uuauugccaacagagauga

SEQ ID NO: 872264 - RNA, 19 nt, Artificial Sequence
  Description of Artificial Sequence: Synthetic oligonucleotide
  Sense strand starting at position 3510 of SEQ ID NO: 588541
cucuguuggcaauaacaca

SEQ ID NO: 872265 - RNA, 19 nt, Artificial Sequence
  Description of Artificial Sequence: Synthetic oligonucleotide
  Antisense strand to SEQ ID NO: 872264
uguguuauugccaacagag

SEQ ID NO: 872266 - RNA, 19 nt, Artificial Sequence
  Description of Artificial Sequence: Synthetic oligonucleotide
  Sense strand starting at position 3586 of SEQ ID NO: 588541
gggucuuacacaugcgcau

SEQ ID NO: 872267 - RNA, 19 nt, Artificial Sequence
  Description of Artificial Sequence: Synthetic oligonucleotide
  Antisense strand to SEQ ID NO: 872266
augcgcauguguaagaccc

SEQ ID NO: 872268 - RNA, 19 nt, Artificial Sequence
  Description of Artificial Sequence: Synthetic oligonucleotide
  Sense strand starting at position 3607 of SEQ ID NO: 588541
gguguaagugucuagagcu

SEQ ID NO: 872269 - RNA, 19 nt, Artificial Sequence
  Description of Artificial Sequence: Synthetic oligonucleotide
  Antisense strand to SEQ ID NO: 872268
agcucuagacacuuacacc

SEQ ID NO: 872270 - RNA, 19 nt, Artificial Sequence
  Description of Artificial Sequence: Synthetic oligonucleotide
  Sense strand starting at position 3614 of SEQ ID NO: 588541
gugucuagagcugggaaga

SEQ ID NO: 872271 - RNA, 19 nt, Artificial Sequence
  Description of Artificial Sequence: Synthetic oligonucleotide
  Antisense strand to SEQ ID NO: 872270
ucuucccagcucuagacac

SEQ ID NO: 872272 - RNA, 19 nt, Artificial Sequence
  Description of Artificial Sequence: Synthetic oligonucleotide
  Sense strand starting at position 3615 of SEQ ID NO: 588541
ugucuagagcugggaagaa

SEQ ID NO: 872273 - RNA, 19 nt, Artificial Sequence
  Description of Artificial Sequence: Synthetic oligonucleotide
  Antisense strand to SEQ ID NO: 872272
uucuucccagcucuagaca

SEQ ID NO: 872274 - RNA, 19 nt, Artificial Sequence
  Description of Artificial Sequence: Synthetic oligonucleotide
  Sense strand starting at position 3650 of SEQ ID NO: 588541
ugguaaauugcacguuaua

SEQ ID NO: 872275 - RNA, 19 nt, Artificial Sequence
  Description of Artificial Sequence: Synthetic oligonucleotide
  Antisense strand to SEQ ID NO: 872274
uauaacgugcaauuuacca

SEQ ID NO: 872276 - RNA, 19 nt, Artificial Sequence
  Description of Artificial Sequence: Synthetic oligonucleotide
  Sense strand starting at position 3763 of SEQ ID NO: 588541
auauguguauauucugcau

SEQ ID NO: 872277 - RNA, 19 nt, Artificial Sequence
  Description of Artificial Sequence: Synthetic oligonucleotide
  Antisense strand to SEQ ID NO: 872276
augcagaauauacacauau

SEQ ID NO: 872278 - RNA, 19 nt, Artificial Sequence
  Description of Artificial Sequence: Synthetic oligonucleotide
  Sense strand starting at position 3767 of SEQ ID NO: 588541
guguauauucugcaugugu

SEQ ID NO: 872279 - RNA, 19 nt, Artificial Sequence
  Description of Artificial Sequence: Synthetic oligonucleotide
  Antisense strand to SEQ ID NO: 872278
acacaugcagaauauacac

SEQ ID NO: 872280 - RNA, 19 nt, Artificial Sequence
  Description of Artificial Sequence: Synthetic oligonucleotide
  Sense strand starting at position 3769 of SEQ ID NO: 588541
guauauucugcauguguac

SEQ ID NO: 872281 - RNA, 19 nt, Artificial Sequence
  Description of Artificial Sequence: Synthetic oligonucleotide
  Antisense strand to SEQ ID NO: 872280
guacacaugcagaauauac

SEQ ID NO: 872282 - RNA, 19 nt, Artificial Sequence
  Description of Artificial Sequence: Synthetic oligonucleotide
  Sense strand starting at position 3907 of SEQ ID NO: 588541
cgaauacauaggcauguuu

SEQ ID NO: 872283 - RNA, 19 nt, Artificial Sequence
  Description of Artificial Sequence: Synthetic oligonucleotide
  Antisense strand to SEQ ID NO: 872282
aaacaugccuauguauucg

SEQ ID NO: 872284 - RNA, 19 nt, Artificial Sequence
  Description of Artificial Sequence: Synthetic oligonucleotide
  Sense strand starting at position 66 of SEQ ID NO: 588542
agggacuccucgcaaaugu

SEQ ID NO: 872285 - RNA, 19 nt, Artificial Sequence
  Description of Artificial Sequence: Synthetic oligonucleotide
  Antisense strand to SEQ ID NO: 872284
acauuugcgaggagucccu

SEQ ID NO: 872286 - RNA, 19 nt, Artificial Sequence
  Description of Artificial Sequence: Synthetic oligonucleotide
  Sense strand starting at position 123 of SEQ ID NO: 588542
gguaaauaucaaugccuuc

SEQ ID NO: 872287 - RNA, 19 nt, Artificial Sequence
  Description of Artificial Sequence: Synthetic oligonucleotide
  Antisense strand to SEQ ID NO: 872286
gaaggcauugauauuuacc

SEQ ID NO: 872288 - RNA, 19 nt, Artificial Sequence
  Description of Artificial Sequence: Synthetic oligonucleotide
  Sense strand starting at position 230 of SEQ ID NO: 588542
ccgucagaguuacucaaac

SEQ ID NO: 872289 - RNA, 19 nt, Artificial Sequence
  Description of Artificial Sequence: Synthetic oligonucleotide
  Antisense strand to SEQ ID NO: 872288
guuugaguaacucugacgg

SEQ ID NO: 872290 - RNA, 19 nt, Artificial Sequence
  Description of Artificial Sequence: Synthetic oligonucleotide
  Sense strand starting at position 232 of SEQ ID NO: 588542
gucagaguuacucaaacgu

SEQ ID NO: 872291 - RNA, 19 nt, Artificial Sequence
  Description of Artificial Sequence: Synthetic oligonucleotide
  Antisense strand to SEQ ID NO: 872290
acguuugaguaacucugac

SEQ ID NO: 872292 - RNA, 19 nt, Artificial Sequence
  Description of Artificial Sequence: Synthetic oligonucleotide
  Sense strand starting at position 448 of SEQ ID NO: 588542
gggauuuacugacauauug

SEQ ID NO: 872293 - RNA, 19 nt, Artificial Sequence
  Description of Artificial Sequence: Synthetic oligonucleotide
  Antisense strand to SEQ ID NO: 872292
caauaugucaguaaauccc

SEQ ID NO: 872294 - RNA, 19 nt, Artificial Sequence
  Description of Artificial Sequence: Synthetic oligonucleotide
  Sense strand starting at position 591 of SEQ ID NO: 588542
cgggaaaccggcgaugaau

SEQ ID NO: 872295 - RNA, 19 nt, Artificial Sequence
  Description of Artificial Sequence: Synthetic oligonucleotide
  Antisense strand to SEQ ID NO: 872294
auucaucgccgguuucccg

SEQ ID NO: 872296 - RNA, 19 nt, Artificial Sequence
  Description of Artificial Sequence: Synthetic oligonucleotide
  Sense strand starting at position 1191 of SEQ ID NO: 588542
ugcccagguucccuaagaa

SEQ ID NO: 872297 - RNA, 19 nt, Artificial Sequence
  Description of Artificial Sequence: Synthetic oligonucleotide
  Antisense strand to SEQ ID NO: 872296
uucuuagggaaccugggca

SEQ ID NO: 872298 - RNA, 19 nt, Artificial Sequence
  Description of Artificial Sequence: Synthetic oligonucleotide
  Sense strand starting at position 2306 of SEQ ID NO: 588542
ggcuaagguucccgggaga

SEQ ID NO: 872299 - RNA, 19 nt, Artificial Sequence
  Description of Artificial Sequence: Synthetic oligonucleotide
  Antisense strand to SEQ ID NO: 872298
ucucccgggaaccuuagcc

SEQ ID NO: 872300 - RNA, 19 nt, Artificial Sequence
  Description of Artificial Sequence: Synthetic oligonucleotide
  Sense strand starting at position 2718 of SEQ ID NO: 588542
gugagcucuccagaaccca

SEQ ID NO: 872301 - RNA, 19 nt, Artificial Sequence
  Description of Artificial Sequence: Synthetic oligonucleotide
  Antisense strand to SEQ ID NO: 872300
uggguucuggagagcucac

SEQ ID NO: 872302 - RNA, 19 nt, Artificial Sequence
  Description of Artificial Sequence: Synthetic oligonucleotide
  Sense strand starting at position 2992 of SEQ ID NO: 588542
ucuggacugugagcuuuaa

SEQ ID NO: 872303 - RNA, 19 nt, Artificial Sequence
  Description of Artificial Sequence: Synthetic oligonucleotide
  Antisense strand to SEQ ID NO: 872302
uuaaagcucacaguccaga

SEQ ID NO: 872304 - RNA, 19 nt, Artificial Sequence
  Description of Artificial Sequence: Synthetic oligonucleotide
  Sense strand starting at position 3136 of SEQ ID NO: 588542
agcacuuguuacccaagaa

SEQ ID NO: 872305 - RNA, 19 nt, Artificial Sequence
  Description of Artificial Sequence: Synthetic oligonucleotide
  Antisense strand to SEQ ID NO: 872304
uucuuggguaacaagugcu

SEQ ID NO: 872306 - RNA, 19 nt, Artificial Sequence
  Description of Artificial Sequence: Synthetic oligonucleotide
  Sense strand starting at position 355 of SEQ ID NO: 588543
ggcuaagguucccgggaga

SEQ ID NO: 872307 - RNA, 19 nt, Artificial Sequence
  Description of Artificial Sequence: Synthetic oligonucleotide
  Antisense strand to SEQ ID NO: 872306
ucucccgggaaccuuagcc

SEQ ID NO: 872308 - RNA, 19 nt, Artificial Sequence
  Description of Artificial Sequence: Synthetic oligonucleotide
  Sense strand starting at position 767 of SEQ ID NO: 588543
gugagcucuccagaaccca

SEQ ID NO: 872309 - RNA, 19 nt, Artificial Sequence
  Description of Artificial Sequence: Synthetic oligonucleotide
  Antisense strand to SEQ ID NO: 872308
uggguucuggagagcucac

SEQ ID NO: 872310 - RNA, 19 nt, Artificial Sequence
  Description of Artificial Sequence: Synthetic oligonucleotide
  Sense strand starting at position 1041 of SEQ ID NO: 588543
ucuggacugugagcuuuaa

SEQ ID NO: 872311 - RNA, 19 nt, Artificial Sequence
  Description of Artificial Sequence: Synthetic oligonucleotide
  Antisense strand to SEQ ID NO: 872310
uuaaagcucacaguccaga

SEQ ID NO: 872312 - RNA, 19 nt, Artificial Sequence
  Description of Artificial Sequence: Synthetic oligonucleotide
  Sense strand starting at position 1185 of SEQ ID NO: 588543
agcacuuguuacccaagaa

SEQ ID NO: 872313 - RNA, 19 nt, Artificial Sequence
  Description of Artificial Sequence: Synthetic oligonucleotide
  Antisense strand to SEQ ID NO: 872312
uucuuggguaacaagugcu

SEQ ID NO: 872314 - RNA, 19 nt, Artificial Sequence
  Description of Artificial Sequence: Synthetic oligonucleotide
  Sense strand starting at position 2573 of SEQ ID NO: 588543
gacucaagaccuugggcau

SEQ ID NO: 872315 - RNA, 19 nt, Artificial Sequence
  Description of Artificial Sequence: Synthetic oligonucleotide
  Antisense strand to SEQ ID NO: 872314
augcccaaggucuugaguc

SEQ ID NO: 872316 - RNA, 19 nt, Artificial Sequence
  Description of Artificial Sequence: Synthetic oligonucleotide
  Sense strand starting at position 2574 of SEQ ID NO: 588543
acucaagaccuugggcaua

SEQ ID NO: 872317 - RNA, 19 nt, Artificial Sequence
  Description of Artificial Sequence: Synthetic oligonucleotide
  Antisense strand to SEQ ID NO: 872316
uaugcccaaggucuugagu

SEQ ID NO: 872318 - RNA, 19 nt, Artificial Sequence
  Description of Artificial Sequence: Synthetic oligonucleotide
  Sense strand starting at position 2603 of SEQ ID NO: 588543
gaaggaaucgcccaguaca

SEQ ID NO: 872319 - RNA, 19 nt, Artificial Sequence
  Description of Artificial Sequence: Synthetic oligonucleotide
  Antisense strand to SEQ ID NO: 872318
uguacugggcgauuccuuc

SEQ ID NO: 872320 - RNA, 19 nt, Artificial Sequence
  Description of Artificial Sequence: Synthetic oligonucleotide
  Sense strand starting at position 2919 of SEQ ID NO: 588543
cgcgcgugcucuuugaagu

SEQ ID NO: 872321 - RNA, 19 nt, Artificial Sequence
  Description of Artificial Sequence: Synthetic oligonucleotide
  Antisense strand to SEQ ID NO: 872320
acuucaaagagcacgcgcg

SEQ ID NO: 872322 - RNA, 19 nt, Artificial Sequence
  Description of Artificial Sequence: Synthetic oligonucleotide
  Sense strand starting at position 2920 of SEQ ID NO: 588543
gcgcgugcucuuugaagug

SEQ ID NO: 872323 - RNA, 19 nt, Artificial Sequence
  Description of Artificial Sequence: Synthetic oligonucleotide
  Antisense strand to SEQ ID NO: 872322
cacuucaaagagcacgcgc

SEQ ID NO: 872324 - RNA, 19 nt, Artificial Sequence
  Description of Artificial Sequence: Synthetic oligonucleotide
  Sense strand starting at position 2929 of SEQ ID NO: 588543
cuuugaaguguguagcuga

SEQ ID NO: 872325 - RNA, 19 nt, Artificial Sequence
  Description of Artificial Sequence: Synthetic oligonucleotide
  Antisense strand to SEQ ID NO: 872324
ucagcuacacacuucaaag

SEQ ID NO: 872326 - RNA, 19 nt, Artificial Sequence
  Description of Artificial Sequence: Synthetic oligonucleotide
  Sense strand starting at position 2932 of SEQ ID NO: 588543
ugaaguguguagcugacau

SEQ ID NO: 872327 - RNA, 19 nt, Artificial Sequence
  Description of Artificial Sequence: Synthetic oligonucleotide
  Antisense strand to SEQ ID NO: 872326
augucagcuacacacuuca

SEQ ID NO: 872328 - RNA, 19 nt, Artificial Sequence
  Description of Artificial Sequence: Synthetic oligonucleotide
  Sense strand starting at position 2936 of SEQ ID NO: 588543
guguguagcugacaugcau

SEQ ID NO: 872329 - RNA, 19 nt, Artificial Sequence
  Description of Artificial Sequence: Synthetic oligonucleotide
  Antisense strand to SEQ ID NO: 872328
augcaugucagcuacacac

SEQ ID NO: 872330 - RNA, 19 nt, Artificial Sequence
  Description of Artificial Sequence: Synthetic oligonucleotide
  Sense strand starting at position 2985 of SEQ ID NO: 588543
agggucuuguccugugagu

SEQ ID NO: 872331 - RNA, 19 nt, Artificial Sequence
  Description of Artificial Sequence: Synthetic oligonucleotide
  Antisense strand to SEQ ID NO: 872330
acucacaggacaagacccu

SEQ ID NO: 872332 - RNA, 19 nt, Artificial Sequence
  Description of Artificial Sequence: Synthetic oligonucleotide
  Sense strand starting at position 2987 of SEQ ID NO: 588543
ggucuuguccugugagucu

SEQ ID NO: 872333 - RNA, 19 nt, Artificial Sequence
  Description of Artificial Sequence: Synthetic oligonucleotide
  Antisense strand to SEQ ID NO: 872332
agacucacaggacaagacc

SEQ ID NO: 872334 - RNA, 19 nt, Artificial Sequence
  Description of Artificial Sequence: Synthetic oligonucleotide
  Sense strand starting at position 2996 of SEQ ID NO: 588543
cugugagucucguccagau

SEQ ID NO: 872335 - RNA, 19 nt, Artificial Sequence
  Description of Artificial Sequence: Synthetic oligonucleotide
  Antisense strand to SEQ ID NO: 872334
aucuggacgagacucacag

SEQ ID NO: 872336 - RNA, 19 nt, Artificial Sequence
  Description of Artificial Sequence: Synthetic oligonucleotide
  Sense strand starting at position 2998 of SEQ ID NO: 588543
gugagucucguccagauca

SEQ ID NO: 872337 - RNA, 19 nt, Artificial Sequence
  Description of Artificial Sequence: Synthetic oligonucleotide
  Antisense strand to SEQ ID NO: 872336
ugaucuggacgagacucac

SEQ ID NO: 872338 - RNA, 19 nt, Artificial Sequence
  Description of Artificial Sequence: Synthetic oligonucleotide
  Sense strand starting at position 3011 of SEQ ID NO: 588543
agaucagcuccagggagau

SEQ ID NO: 872339 - RNA, 19 nt, Artificial Sequence
  Description of Artificial Sequence: Synthetic oligonucleotide
  Antisense strand to SEQ ID NO: 872338
aucucccuggagcugaucu

SEQ ID NO: 872340 - RNA, 19 nt, Artificial Sequence
  Description of Artificial Sequence: Synthetic oligonucleotide
  Sense strand starting at position 3017 of SEQ ID NO: 588543
gcuccagggagaugaucua

SEQ ID NO: 872341 - RNA, 19 nt, Artificial Sequence
  Description of Artificial Sequence: Synthetic oligonucleotide
  Antisense strand to SEQ ID NO: 872340
uagaucaucucccuggagc

SEQ ID NO: 872342 - RNA, 19 nt, Artificial Sequence
  Description of Artificial Sequence: Synthetic oligonucleotide
  Sense strand starting at position 3088 of SEQ ID NO: 588543
agccaaugauucgauagga

SEQ ID NO: 872343 - RNA, 19 nt, Artificial Sequence
  Description of Artificial Sequence: Synthetic oligonucleotide
  Antisense strand to SEQ ID NO: 872342
uccuaucgaaucauuggcu

SEQ ID NO: 872344 - RNA, 19 nt, Artificial Sequence
  Description of Artificial Sequence: Synthetic oligonucleotide
  Sense strand starting at position 3121 of SEQ ID NO: 588543
ucagauguccaguacguga

SEQ ID NO: 872345 - RNA, 19 nt, Artificial Sequence
  Description of Artificial Sequence: Synthetic oligonucleotide
  Antisense strand to SEQ ID NO: 872344
ucacguacuggacaucuga

SEQ ID NO: 872346 - RNA, 19 nt, Artificial Sequence
  Description of Artificial Sequence: Synthetic oligonucleotide
  Sense strand starting at position 3125 of SEQ ID NO: 588543
auguccaguacgugaacaa

SEQ ID NO: 872347 - RNA, 19 nt, Artificial Sequence
  Description of Artificial Sequence: Synthetic oligonucleotide
  Antisense strand to SEQ ID NO: 872346
uuguucacguacuggacau

SEQ ID NO: 872348 - RNA, 19 nt, Artificial Sequence
  Description of Artificial Sequence: Synthetic oligonucleotide
  Sense strand starting at position 3126 of SEQ ID NO: 588543
uguccaguacgugaacaaa

SEQ ID NO: 872349 - RNA, 19 nt, Artificial Sequence
  Description of Artificial Sequence: Synthetic oligonucleotide
  Antisense strand to SEQ ID NO: 872348
uuuguucacguacuggaca

SEQ ID NO: 872350 - RNA, 19 nt, Artificial Sequence
  Description of Artificial Sequence: Synthetic oligonucleotide
  Sense strand starting at position 3454 of SEQ ID NO: 588543
cuaaacauugccuaaaggu

SEQ ID NO: 872351 - RNA, 19 nt, Artificial Sequence
  Description of Artificial Sequence: Synthetic oligonucleotide
  Antisense strand to SEQ ID NO: 872350
accuuuaggcaauguuuag

SEQ ID NO: 872352 - RNA, 19 nt, Artificial Sequence
  Description of Artificial Sequence: Synthetic oligonucleotide
  Sense strand starting at position 3498 of SEQ ID NO: 588543
caaggugugucugaguaug

SEQ ID NO: 872353 - RNA, 19 nt, Artificial Sequence
  Description of Artificial Sequence: Synthetic oligonucleotide
  Antisense strand to SEQ ID NO: 872352
cauacucagacacaccuug

SEQ ID NO: 872354 - RNA, 19 nt, Artificial Sequence
  Description of Artificial Sequence: Synthetic oligonucleotide
  Sense strand starting at position 3504 of SEQ ID NO: 588543
gugucugaguauggccaua

SEQ ID NO: 872355 - RNA, 19 nt, Artificial Sequence
  Description of Artificial Sequence: Synthetic oligonucleotide
  Antisense strand to SEQ ID NO: 872354
uauggccauacucagacac

SEQ ID NO: 872356 - RNA, 19 nt, Artificial Sequence
  Description of Artificial Sequence: Synthetic oligonucleotide
  Sense strand starting at position 3506 of SEQ ID NO: 588543
gucugaguauggccauaug

SEQ ID NO: 872357 - RNA, 19 nt, Artificial Sequence
  Description of Artificial Sequence: Synthetic oligonucleotide
  Antisense strand to SEQ ID NO: 872356
cauauggccauacucagac

SEQ ID NO: 872358 - RNA, 19 nt, Artificial Sequence
  Description of Artificial Sequence: Synthetic oligonucleotide
  Sense strand starting at position 3509 of SEQ ID NO: 588543
ugaguauggccauaugacu

SEQ ID NO: 872359 - RNA, 19 nt, Artificial Sequence
  Description of Artificial Sequence: Synthetic oligonucleotide
  Antisense strand to SEQ ID NO: 872358
agucauauggccauacuca

SEQ ID NO: 872360 - RNA, 19 nt, Artificial Sequence
  Description of Artificial Sequence: Synthetic oligonucleotide
  Sense strand starting at position 3771 of SEQ ID NO: 588543
ggcuaaaguuuaguuugaa

SEQ ID NO: 872361 - RNA, 19 nt, Artificial Sequence
  Description of Artificial Sequence: Synthetic oligonucleotide
  Antisense strand to SEQ ID NO: 872360
uucaaacuaaacuuuagcc

SEQ ID NO: 872362 - RNA, 19 nt, Artificial Sequence
  Description of Artificial Sequence: Synthetic oligonucleotide
  Sense strand starting at position 3772 of SEQ ID NO: 588543
gcuaaaguuuaguuugaag

SEQ ID NO: 872363 - RNA, 19 nt, Artificial Sequence
  Description of Artificial Sequence: Synthetic oligonucleotide
  Antisense strand to SEQ ID NO: 872362
cuucaaacuaaacuuuagc

SEQ ID NO: 872364 - RNA, 19 nt, Artificial Sequence
  Description of Artificial Sequence: Synthetic oligonucleotide
  Sense strand starting at position 3807 of SEQ ID NO: 588543
cacugaaacccacguguaa

SEQ ID NO: 872365 - RNA, 19 nt, Artificial Sequence
  Description of Artificial Sequence: Synthetic oligonucleotide
  Antisense strand to SEQ ID NO: 872364
uuacacguggguuucagug

SEQ ID NO: 872366 - RNA, 19 nt, Artificial Sequence
  Description of Artificial Sequence: Synthetic oligonucleotide
  Sense strand starting at position 3819 of SEQ ID NO: 588543
cguguaaaccugccugguu

SEQ ID NO: 872367 - RNA, 19 nt, Artificial Sequence
  Description of Artificial Sequence: Synthetic oligonucleotide
  Antisense strand to SEQ ID NO: 872366
aaccaggcagguuuacacg

SEQ ID NO: 872368 - RNA, 19 nt, Artificial Sequence
  Description of Artificial Sequence: Synthetic oligonucleotide
  Sense strand starting at position 3954 of SEQ ID NO: 588543
agaagcaacucucgaguga

SEQ ID NO: 872369 - RNA, 19 nt, Artificial Sequence
  Description of Artificial Sequence: Synthetic oligonucleotide
  Antisense strand to SEQ ID NO: 872368
ucacucgagaguugcuucu

SEQ ID NO: 872370 - RNA, 19 nt, Artificial Sequence
  Description of Artificial Sequence: Synthetic oligonucleotide
  Sense strand starting at position 3958 of SEQ ID NO: 588543
gcaacucucgagugagaca

SEQ ID NO: 872371 - RNA, 19 nt, Artificial Sequence
  Description of Artificial Sequence: Synthetic oligonucleotide
  Antisense strand to SEQ ID NO: 872370
ugucucacucgagaguugc

SEQ ID NO: 872372 - RNA, 19 nt, Artificial Sequence
  Description of Artificial Sequence: Synthetic oligonucleotide
  Sense strand starting at position 168 of SEQ ID NO: 588544
ucagaaggugcaugcgauu

SEQ ID NO: 872373 - RNA, 19 nt, Artificial Sequence
  Description of Artificial Sequence: Synthetic oligonucleotide
  Antisense strand to SEQ ID NO: 872372
aaucgcaugcaccuucuga

SEQ ID NO: 872374 - RNA, 19 nt, Artificial Sequence
  Description of Artificial Sequence: Synthetic oligonucleotide
  Sense strand starting at position 276 of SEQ ID NO: 588544
cccuaagucuugcccaaag

SEQ ID NO: 872375 - RNA, 19 nt, Artificial Sequence
  Description of Artificial Sequence: Synthetic oligonucleotide
  Antisense strand to SEQ ID NO: 872374
cuuugggcaagacuuaggg

SEQ ID NO: 872376 - RNA, 19 nt, Artificial Sequence
  Description of Artificial Sequence: Synthetic oligonucleotide
  Sense strand starting at position 278 of SEQ ID NO: 588544
cuaagucuugcccaaagcu

SEQ ID NO: 872377 - RNA, 19 nt, Artificial Sequence
  Description of Artificial Sequence: Synthetic oligonucleotide
  Antisense strand to SEQ ID NO: 872376
agcuuugggcaagacuuag

SEQ ID NO: 872378 - RNA, 19 nt, Artificial Sequence
  Description of Artificial Sequence: Synthetic oligonucleotide
  Sense strand starting at position 316 of SEQ ID NO: 588544
gagccaggauuuggaagua

SEQ ID NO: 872379 - RNA, 19 nt, Artificial Sequence
  Description of Artificial Sequence: Synthetic oligonucleotide
  Antisense strand to SEQ ID NO: 872378
uacuuccaaauccuggcuc

SEQ ID NO: 872380 - RNA, 19 nt, Artificial Sequence
  Description of Artificial Sequence: Synthetic oligonucleotide
  Sense strand starting at position 411 of SEQ ID NO: 588544
cugucucaccuugagcaga

SEQ ID NO: 872381 - RNA, 19 nt, Artificial Sequence
  Description of Artificial Sequence: Synthetic oligonucleotide
  Antisense strand to SEQ ID NO: 872380
ucugcucaaggugagacag

SEQ ID NO: 872382 - RNA, 19 nt, Artificial Sequence
  Description of Artificial Sequence: Synthetic oligonucleotide
  Sense strand starting at position 413 of SEQ ID NO: 588544
gucucaccuugagcagaua

SEQ ID NO: 872383 - RNA, 19 nt, Artificial Sequence
  Description of Artificial Sequence: Synthetic oligonucleotide
  Antisense strand to SEQ ID NO: 872382
uaucugcucaaggugagac

SEQ ID NO: 872384 - RNA, 19 nt, Artificial Sequence
  Description of Artificial Sequence: Synthetic oligonucleotide
  Sense strand starting at position 426 of SEQ ID NO: 588544
cagauaucgguccaggauc

SEQ ID NO: 872385 - RNA, 19 nt, Artificial Sequence
  Description of Artificial Sequence: Synthetic oligonucleotide
  Antisense strand to SEQ ID NO: 872384
gauccuggaccgauaucug

SEQ ID NO: 872386 - RNA, 19 nt, Artificial Sequence
  Description of Artificial Sequence: Synthetic oligonucleotide
  Sense strand starting at position 464 of SEQ ID NO: 588544
agauguucuugccugcaga

SEQ ID NO: 872387 - RNA, 19 nt, Artificial Sequence
  Description of Artificial Sequence: Synthetic oligonucleotide
  Antisense strand to SEQ ID NO: 872386
ucugcaggcaagaacaucu

SEQ ID NO: 872388 - RNA, 19 nt, Artificial Sequence
  Description of Artificial Sequence: Synthetic oligonucleotide
  Sense strand starting at position 655 of SEQ ID NO: 588544
ggcugccuuggagacaaau

SEQ ID NO: 872389 - RNA, 19 nt, Artificial Sequence
  Description of Artificial Sequence: Synthetic oligonucleotide
  Antisense strand to SEQ ID NO: 872388
auuugucuccaaggcagcc

SEQ ID NO: 872390 - RNA, 19 nt, Artificial Sequence
  Description of Artificial Sequence: Synthetic oligonucleotide
  Sense strand starting at position 810 of SEQ ID NO: 588544
agcgguuaaagccaacauu

SEQ ID NO: 872391 - RNA, 19 nt, Artificial Sequence
  Description of Artificial Sequence: Synthetic oligonucleotide
  Antisense strand to SEQ ID NO: 872390
aauguuggcuuuaaccgcu

SEQ ID NO: 872392 - RNA, 19 nt, Artificial Sequence
  Description of Artificial Sequence: Synthetic oligonucleotide
  Sense strand starting at position 1206 of SEQ ID NO: 588544
agcggugucucucuaauga

SEQ ID NO: 872393 - RNA, 19 nt, Artificial Sequence
  Description of Artificial Sequence: Synthetic oligonucleotide
  Antisense strand to SEQ ID NO: 872392
ucauuagagagacaccgcu

SEQ ID NO: 872394 - RNA, 19 nt, Artificial Sequence
  Description of Artificial Sequence: Synthetic oligonucleotide
  Sense strand starting at position 1295 of SEQ ID NO: 588544
gaaguaaucgcuuaguucc

SEQ ID NO: 872395 - RNA, 19 nt, Artificial Sequence
  Description of Artificial Sequence: Synthetic oligonucleotide
  Antisense strand to SEQ ID NO: 872394
ggaacuaagcgauuacuuc

SEQ ID NO: 872396 - RNA, 19 nt, Artificial Sequence
  Description of Artificial Sequence: Synthetic oligonucleotide
  Sense strand starting at position 1303 of SEQ ID NO: 588544
cgcuuaguucccuugcaau

SEQ ID NO: 872397 - RNA, 19 nt, Artificial Sequence
  Description of Artificial Sequence: Synthetic oligonucleotide
  Antisense strand to SEQ ID NO: 872396
auugcaagggaacuaagcg

SEQ ID NO: 872398 - RNA, 19 nt, Artificial Sequence
  Description of Artificial Sequence: Synthetic oligonucleotide
  Sense strand starting at position 1386 of SEQ ID NO: 588544
ugucgugaaugcccaagau

SEQ ID NO: 872399 - RNA, 19 nt, Artificial Sequence
  Description of Artificial Sequence: Synthetic oligonucleotide
  Antisense strand to SEQ ID NO: 872398
aucuugggcauucacgaca

SEQ ID NO: 872400 - RNA, 19 nt, Artificial Sequence
  Description of Artificial Sequence: Synthetic oligonucleotide
  Sense strand starting at position 1430 of SEQ ID NO: 588544
aacugucaaucagugagau

SEQ ID NO: 872401 - RNA, 19 nt, Artificial Sequence
  Description of Artificial Sequence: Synthetic oligonucleotide
  Antisense strand to SEQ ID NO: 872400
aucucacugauugacaguu

SEQ ID NO: 872402 - RNA, 19 nt, Artificial Sequence
  Description of Artificial Sequence: Synthetic oligonucleotide
  Sense strand starting at position 1431 of SEQ ID NO: 588544
acugucaaucagugagauc

SEQ ID NO: 872403 - RNA, 19 nt, Artificial Sequence
  Description of Artificial Sequence: Synthetic oligonucleotide
  Antisense strand to SEQ ID NO: 872402
gaucucacugauugacagu

SEQ ID NO: 872404 - RNA, 19 nt, Artificial Sequence
  Description of Artificial Sequence: Synthetic oligonucleotide
  Sense strand starting at position 1706 of SEQ ID NO: 588544
gcgaaauugaagcagcuau

SEQ ID NO: 872405 - RNA, 19 nt, Artificial Sequence
  Description of Artificial Sequence: Synthetic oligonucleotide
  Antisense strand to SEQ ID NO: 872404
auagcugcuucaauuucgc

SEQ ID NO: 872406 - RNA, 19 nt, Artificial Sequence
  Description of Artificial Sequence: Synthetic oligonucleotide
  Sense strand starting at position 1720 of SEQ ID NO: 588544
gcuauauugacacggauuc

SEQ ID NO: 872407 - RNA, 19 nt, Artificial Sequence
  Description of Artificial Sequence: Synthetic oligonucleotide
  Antisense strand to SEQ ID NO: 872406
gaauccgugucaauauagc

SEQ ID NO: 872408 - RNA, 19 nt, Artificial Sequence
  Description of Artificial Sequence: Synthetic oligonucleotide
  Sense strand starting at position 1978 of SEQ ID NO: 588544
cuugauucgccugugucuu

SEQ ID NO: 872409 - RNA, 19 nt, Artificial Sequence
  Description of Artificial Sequence: Synthetic oligonucleotide
  Antisense strand to SEQ ID NO: 872408
aagacacaggcgaaucaag

SEQ ID NO: 872410 - RNA, 19 nt, Artificial Sequence
  Description of Artificial Sequence: Synthetic oligonucleotide
  Sense strand starting at position 1983 of SEQ ID NO: 588544
uucgccugugucuuuacua

SEQ ID NO: 872411 - RNA, 19 nt, Artificial Sequence
  Description of Artificial Sequence: Synthetic oligonucleotide
  Antisense strand to SEQ ID NO: 872410
uaguaaagacacaggcgaa

SEQ ID NO: 872412 - RNA, 19 nt, Artificial Sequence
  Description of Artificial Sequence: Synthetic oligonucleotide
  Sense strand starting at position 2033 of SEQ ID NO: 588544
gcauaauguguucccgcuu

SEQ ID NO: 872413 - RNA, 19 nt, Artificial Sequence
  Description of Artificial Sequence: Synthetic oligonucleotide
  Antisense strand to SEQ ID NO: 872412
aagcgggaacacauuaugc

SEQ ID NO: 872414 - RNA, 19 nt, Artificial Sequence
  Description of Artificial Sequence: Synthetic oligonucleotide
  Sense strand starting at position 2673 of SEQ ID NO: 588544
augagucaugcgugaccaa

SEQ ID NO: 872415 - RNA, 19 nt, Artificial Sequence
  Description of Artificial Sequence: Synthetic oligonucleotide
  Antisense strand to SEQ ID NO: 872414
uuggucacgcaugacucau

SEQ ID NO: 872416 - RNA, 19 nt, Artificial Sequence
  Description of Artificial Sequence: Synthetic oligonucleotide
  Sense strand starting at position 2674 of SEQ ID NO: 588544
ugagucaugcgugaccaau

SEQ ID NO: 872417 - RNA, 19 nt, Artificial Sequence
  Description of Artificial Sequence: Synthetic oligonucleotide
  Antisense strand to SEQ ID NO: 872416
auuggucacgcaugacuca

SEQ ID NO: 872418 - RNA, 19 nt, Artificial Sequence
  Description of Artificial Sequence: Synthetic oligonucleotide
  Sense strand starting at position 2941 of SEQ ID NO: 588544
accaucugcggagauagau

SEQ ID NO: 872419 - RNA, 19 nt, Artificial Sequence
  Description of Artificial Sequence: Synthetic oligonucleotide
  Antisense strand to SEQ ID NO: 872418
aucuaucuccgcagauggu

SEQ ID NO: 872420 - RNA, 19 nt, Artificial Sequence
  Description of Artificial Sequence: Synthetic oligonucleotide
  Sense strand starting at position 2951 of SEQ ID NO: 588544
gagauagauuccguaggag

SEQ ID NO: 872421 - RNA, 19 nt, Artificial Sequence
  Description of Artificial Sequence: Synthetic oligonucleotide
  Antisense strand to SEQ ID NO: 872420
cuccuacggaaucuaucuc

SEQ ID NO: 872422 - RNA, 19 nt, Artificial Sequence
  Description of Artificial Sequence: Synthetic oligonucleotide
  Sense strand starting at position 2967 of SEQ ID NO: 588544
gaggucacacguuauuaca

SEQ ID NO: 872423 - RNA, 19 nt, Artificial Sequence
  Description of Artificial Sequence: Synthetic oligonucleotide
  Antisense strand to SEQ ID NO: 872422
uguaauaacgugugaccuc

SEQ ID NO: 872424 - RNA, 19 nt, Artificial Sequence
  Description of Artificial Sequence: Synthetic oligonucleotide
  Sense strand starting at position 2977 of SEQ ID NO: 588544
guuauuacacuguguugau

SEQ ID NO: 872425 - RNA, 19 nt, Artificial Sequence
  Description of Artificial Sequence: Synthetic oligonucleotide
  Antisense strand to SEQ ID NO: 872424
aucaacacaguguaauaac

SEQ ID NO: 872426 - RNA, 19 nt, Artificial Sequence
  Description of Artificial Sequence: Synthetic oligonucleotide
  Sense strand starting at position 3007 of SEQ ID NO: 588544
ccugguacauuuguguaca

SEQ ID NO: 872427 - RNA, 19 nt, Artificial Sequence
  Description of Artificial Sequence: Synthetic oligonucleotide
  Antisense strand to SEQ ID NO: 872426
uguacacaaauguaccagg

SEQ ID NO: 872428 - RNA, 19 nt, Artificial Sequence
  Description of Artificial Sequence: Synthetic oligonucleotide
  Sense strand starting at position 3017 of SEQ ID NO: 588544
uuguguacacacuaaugua

SEQ ID NO: 872429 - RNA, 19 nt, Artificial Sequence
  Description of Artificial Sequence: Synthetic oligonucleotide
  Antisense strand to SEQ ID NO: 872428
uacauuaguguguacacaa

SEQ ID NO: 872430 - RNA, 19 nt, Artificial Sequence
  Description of Artificial Sequence: Synthetic oligonucleotide
  Sense strand starting at position 3025 of SEQ ID NO: 588544
acacuaauguaagugauua

SEQ ID NO: 872431 - RNA, 19 nt, Artificial Sequence
  Description of Artificial Sequence: Synthetic oligonucleotide
  Antisense strand to SEQ ID NO: 872430
uaaucacuuacauuagugu

SEQ ID NO: 872432 - RNA, 19 nt, Artificial Sequence
  Description of Artificial Sequence: Synthetic oligonucleotide
  Sense strand starting at position 3164 of SEQ ID NO: 588544
gaggguaguuucccugaau

SEQ ID NO: 872433 - RNA, 19 nt, Artificial Sequence
  Description of Artificial Sequence: Synthetic oligonucleotide
  Antisense strand to SEQ ID NO: 872432
auucagggaaacuacccuc

SEQ ID NO: 872434 - RNA, 19 nt, Artificial Sequence
  Description of Artificial Sequence: Synthetic oligonucleotide
  Sense strand starting at position 3165 of SEQ ID NO: 588544
aggguaguuucccugaauu

SEQ ID NO: 872435 - RNA, 19 nt, Artificial Sequence
  Description of Artificial Sequence: Synthetic oligonucleotide
  Antisense strand to SEQ ID NO: 872434
aauucagggaaacuacccu

SEQ ID NO: 872436 - RNA, 19 nt, Artificial Sequence
  Description of Artificial Sequence: Synthetic oligonucleotide
  Sense strand starting at position 3167 of SEQ ID NO: 588544
gguaguuucccugaauucu

SEQ ID NO: 872437 - RNA, 19 nt, Artificial Sequence
  Description of Artificial Sequence: Synthetic oligonucleotide
  Antisense strand to SEQ ID NO: 872436
agaauucagggaaacuacc

SEQ ID NO: 872438 - RNA, 19 nt, Artificial Sequence
  Description of Artificial Sequence: Synthetic oligonucleotide
  Sense strand starting at position 3178 of SEQ ID NO: 588544
ugaauucucuuggaaggga

SEQ ID NO: 872439 - RNA, 19 nt, Artificial Sequence
  Description of Artificial Sequence: Synthetic oligonucleotide
  Antisense strand to SEQ ID NO: 872438
ucccuuccaagagaauuca

SEQ ID NO: 872440 - RNA, 19 nt, Artificial Sequence
  Description of Artificial Sequence: Synthetic oligonucleotide
  Sense strand starting at position 3191 of SEQ ID NO: 588544
aagggauugcuuggcacau

SEQ ID NO: 872441 - RNA, 19 nt, Artificial Sequence
  Description of Artificial Sequence: Synthetic oligonucleotide
  Antisense strand to SEQ ID NO: 872440
augugccaagcaaucccuu

SEQ ID NO: 872442 - RNA, 19 nt, Artificial Sequence
  Description of Artificial Sequence: Synthetic oligonucleotide
  Sense strand starting at position 3192 of SEQ ID NO: 588544
agggauugcuuggcacauu

SEQ ID NO: 872443 - RNA, 19 nt, Artificial Sequence
  Description of Artificial Sequence: Synthetic oligonucleotide
  Antisense strand to SEQ ID NO: 872442
aaugugccaagcaaucccu

SEQ ID NO: 872444 - RNA, 19 nt, Artificial Sequence
  Description of Artificial Sequence: Synthetic oligonucleotide
  Sense strand starting at position 3281 of SEQ ID NO: 588544
caaugagaaugguagggaa

SEQ ID NO: 872445 - RNA, 19 nt, Artificial Sequence
  Description of Artificial Sequence: Synthetic oligonucleotide
  Antisense strand to SEQ ID NO: 872444
uucccuaccauucucauug

SEQ ID NO: 872446 - RNA, 19 nt, Artificial Sequence
  Description of Artificial Sequence: Synthetic oligonucleotide
  Sense strand starting at position 3731 of SEQ ID NO: 588544
guacuuacauccuuacaga

SEQ ID NO: 872447 - RNA, 19 nt, Artificial Sequence
  Description of Artificial Sequence: Synthetic oligonucleotide
  Antisense strand to SEQ ID NO: 872446
ucuguaaggauguaaguac

SEQ ID NO: 872448 - RNA, 19 nt, Artificial Sequence
  Description of Artificial Sequence: Synthetic oligonucleotide
  Sense strand starting at position 3893 of SEQ ID NO: 588544
ccaacacgauacuaaagau

SEQ ID NO: 872449 - RNA, 19 nt, Artificial Sequence
  Description of Artificial Sequence: Synthetic oligonucleotide
  Antisense strand to SEQ ID NO: 872448
aucuuuaguaucguguugg

SEQ ID NO: 872450 - RNA, 19 nt, Artificial Sequence
  Description of Artificial Sequence: Synthetic oligonucleotide
  Sense strand starting at position 3949 of SEQ ID NO: 588544
cuuuacuggcaucaaggua

SEQ ID NO: 872451 - RNA, 19 nt, Artificial Sequence
  Description of Artificial Sequence: Synthetic oligonucleotide
  Antisense strand to SEQ ID NO: 872450
uaccuugaugccaguaaag

SEQ ID NO: 872452 - RNA, 19 nt, Artificial Sequence
  Description of Artificial Sequence: Synthetic oligonucleotide
  Sense strand starting at position 163 of SEQ ID NO: 588545
gggaaugaguugagaugga

SEQ ID NO: 872453 - RNA, 19 nt, Artificial Sequence
  Description of Artificial Sequence: Synthetic oligonucleotide
  Antisense strand to SEQ ID NO: 872452
uccaucucaacucauuccc

SEQ ID NO: 872454 - RNA, 19 nt, Artificial Sequence
  Description of Artificial Sequence: Synthetic oligonucleotide
  Sense strand starting at position 392 of SEQ ID NO: 588545
gcccgaacgcacuggaaau

SEQ ID NO: 872455 - RNA, 19 nt, Artificial Sequence
  Description of Artificial Sequence: Synthetic oligonucleotide
  Antisense strand to SEQ ID NO: 872454
auuuccagugcguucgggc

SEQ ID NO: 872456 - RNA, 19 nt, Artificial Sequence
  Description of Artificial Sequence: Synthetic oligonucleotide
  Sense strand starting at position 437 of SEQ ID NO: 588545
guggguccgggccagaaau

SEQ ID NO: 872457 - RNA, 19 nt, Artificial Sequence
  Description of Artificial Sequence: Synthetic oligonucleotide
  Antisense strand to SEQ ID NO: 872456
auuucuggcccggacccac

SEQ ID NO: 872458 - RNA, 19 nt, Artificial Sequence
  Description of Artificial Sequence: Synthetic oligonucleotide
  Sense strand starting at position 491 of SEQ ID NO: 588545
agaacugaagccugagacu

SEQ ID NO: 872459 - RNA, 19 nt, Artificial Sequence
  Description of Artificial Sequence: Synthetic oligonucleotide
  Antisense strand to SEQ ID NO: 872458
agucucaggcuucaguucu

SEQ ID NO: 872460 - RNA, 19 nt, Artificial Sequence
  Description of Artificial Sequence: Synthetic oligonucleotide
  Sense strand starting at position 806 of SEQ ID NO: 588545
ugcagaagaucuccuuguu

SEQ ID NO: 872461 - RNA, 19 nt, Artificial Sequence
  Description of Artificial Sequence: Synthetic oligonucleotide
  Antisense strand to SEQ ID NO: 872460
aacaaggagaucuucugca

SEQ ID NO: 872462 - RNA, 19 nt, Artificial Sequence
  Description of Artificial Sequence: Synthetic oligonucleotide
  Sense strand starting at position 809 of SEQ ID NO: 588545
agaagaucuccuuguucuu

SEQ ID NO: 872463 - RNA, 19 nt, Artificial Sequence
  Description of Artificial Sequence: Synthetic oligonucleotide
  Antisense strand to SEQ ID NO: 872462
aagaacaaggagaucuucu

SEQ ID NO: 872464 - RNA, 19 nt, Artificial Sequence
  Description of Artificial Sequence: Synthetic oligonucleotide
  Sense strand starting at position 1010 of SEQ ID NO: 588545
ucagaaggugcaugcgauu

SEQ ID NO: 872465 - RNA, 19 nt, Artificial Sequence
  Description of Artificial Sequence: Synthetic oligonucleotide
  Antisense strand to SEQ ID NO: 872464
aaucgcaugcaccuucuga

SEQ ID NO: 872466 - RNA, 19 nt, Artificial Sequence
  Description of Artificial Sequence: Synthetic oligonucleotide
  Sense strand starting at position 1049 of SEQ ID NO: 588545
uacugagacucagggaaau

SEQ ID NO: 872467 - RNA, 19 nt, Artificial Sequence
  Description of Artificial Sequence: Synthetic oligonucleotide
  Antisense strand to SEQ ID NO: 872466
auuucccugagucucagua

SEQ ID NO: 872468 - RNA, 19 nt, Artificial Sequence
  Description of Artificial Sequence: Synthetic oligonucleotide
  Sense strand starting at position 1118 of SEQ ID NO: 588545
cccuaagucuugcccaaag

SEQ ID NO: 872469 - RNA, 19 nt, Artificial Sequence
  Description of Artificial Sequence: Synthetic oligonucleotide
  Antisense strand to SEQ ID NO: 872468
cuuugggcaagacuuaggg

SEQ ID NO: 872470 - RNA, 19 nt, Artificial Sequence
  Description of Artificial Sequence: Synthetic oligonucleotide
  Sense strand starting at position 1120 of SEQ ID NO: 588545
cuaagucuugcccaaagcu

SEQ ID NO: 872471 - RNA, 19 nt, Artificial Sequence
  Description of Artificial Sequence: Synthetic oligonucleotide
  Antisense strand to SEQ ID NO: 872470
agcuuugggcaagacuuag

SEQ ID NO: 872472 - RNA, 19 nt, Artificial Sequence
  Description of Artificial Sequence: Synthetic oligonucleotide
  Sense strand starting at position 1158 of SEQ ID NO: 588545
gagccaggauuuggaagua

SEQ ID NO: 872473 - RNA, 19 nt, Artificial Sequence
  Description of Artificial Sequence: Synthetic oligonucleotide
  Antisense strand to SEQ ID NO: 872472
uacuuccaaauccuggcuc

SEQ ID NO: 872474 - RNA, 19 nt, Artificial Sequence
  Description of Artificial Sequence: Synthetic oligonucleotide
  Sense strand starting at position 1253 of SEQ ID NO: 588545
cugucucaccuugagcaga

SEQ ID NO: 872475 - RNA, 19 nt, Artificial Sequence
  Description of Artificial Sequence: Synthetic oligonucleotide
  Antisense strand to SEQ ID NO: 872474
ucugcucaaggugagacag

SEQ ID NO: 872476 - RNA, 19 nt, Artificial Sequence
  Description of Artificial Sequence: Synthetic oligonucleotide
  Sense strand starting at position 1255 of SEQ ID NO: 588545
gucucaccuugagcagaua

SEQ ID NO: 872477 - RNA, 19 nt, Artificial Sequence
  Description of Artificial Sequence: Synthetic oligonucleotide
  Antisense strand to SEQ ID NO: 872476
uaucugcucaaggugagac

SEQ ID NO: 872478 - RNA, 19 nt, Artificial Sequence
  Description of Artificial Sequence: Synthetic oligonucleotide
  Sense strand starting at position 1268 of SEQ ID NO: 588545
cagauaucgguccaggauc

SEQ ID NO: 872479 - RNA, 19 nt, Artificial Sequence
  Description of Artificial Sequence: Synthetic oligonucleotide
  Antisense strand to SEQ ID NO: 872478
gauccuggaccgauaucug

SEQ ID NO: 872480 - RNA, 19 nt, Artificial Sequence
  Description of Artificial Sequence: Synthetic oligonucleotide
  Sense strand starting at position 1306 of SEQ ID NO: 588545
agauguucuugccugcaga

SEQ ID NO: 872481 - RNA, 19 nt, Artificial Sequence
  Description of Artificial Sequence: Synthetic oligonucleotide
  Antisense strand to SEQ ID NO: 872480
ucugcaggcaagaacaucu

SEQ ID NO: 872482 - RNA, 19 nt, Artificial Sequence
  Description of Artificial Sequence: Synthetic oligonucleotide
  Sense strand starting at position 1307 of SEQ ID NO: 588545
gauguucuugccugcagac

SEQ ID NO: 872483 - RNA, 19 nt, Artificial Sequence
  Description of Artificial Sequence: Synthetic oligonucleotide
  Antisense strand to SEQ ID NO: 872482
gucugcaggcaagaacauc

SEQ ID NO: 872484 - RNA, 19 nt, Artificial Sequence
  Description of Artificial Sequence: Synthetic oligonucleotide
  Sense strand starting at position 1497 of SEQ ID NO: 588545
ggcugccuuggagacaaau

SEQ ID NO: 872485 - RNA, 19 nt, Artificial Sequence
  Description of Artificial Sequence: Synthetic oligonucleotide
  Antisense strand to SEQ ID NO: 872484
auuugucuccaaggcagcc

SEQ ID NO: 872486 - RNA, 19 nt, Artificial Sequence
  Description of Artificial Sequence: Synthetic oligonucleotide
  Sense strand starting at position 1643 of SEQ ID NO: 588545
ggugcugggagcgguuaaa

SEQ ID NO: 872487 - RNA, 19 nt, Artificial Sequence
  Description of Artificial Sequence: Synthetic oligonucleotide
  Antisense strand to SEQ ID NO: 872486
uuuaaccgcucccagcacc

SEQ ID NO: 872488 - RNA, 19 nt, Artificial Sequence
  Description of Artificial Sequence: Synthetic oligonucleotide
  Sense strand starting at position 1652 of SEQ ID NO: 588545
agcgguuaaagccaacauu

SEQ ID NO: 872489 - RNA, 19 nt, Artificial Sequence
  Description of Artificial Sequence: Synthetic oligonucleotide
  Antisense strand to SEQ ID NO: 872488
aauguuggcuuuaaccgcu

SEQ ID NO: 872490 - RNA, 19 nt, Artificial Sequence
  Description of Artificial Sequence: Synthetic oligonucleotide
  Sense strand starting at position 2048 of SEQ ID NO: 588545
agcggugucucucuaauga

SEQ ID NO: 872491 - RNA, 19 nt, Artificial Sequence
  Description of Artificial Sequence: Synthetic oligonucleotide
  Antisense strand to SEQ ID NO: 872490
ucauuagagagacaccgcu

SEQ ID NO: 872492 - RNA, 19 nt, Artificial Sequence
  Description of Artificial Sequence: Synthetic oligonucleotide
  Sense strand starting at position 2137 of SEQ ID NO: 588545
gaaguaaucgcuuaguucc

SEQ ID NO: 872493 - RNA, 19 nt, Artificial Sequence
  Description of Artificial Sequence: Synthetic oligonucleotide
  Antisense strand to SEQ ID NO: 872492
ggaacuaagcgauuacuuc

SEQ ID NO: 872494 - RNA, 19 nt, Artificial Sequence
  Description of Artificial Sequence: Synthetic oligonucleotide
  Sense strand starting at position 2145 of SEQ ID NO: 588545
cgcuuaguucccuugcaau

SEQ ID NO: 872495 - RNA, 19 nt, Artificial Sequence
  Description of Artificial Sequence: Synthetic oligonucleotide
  Antisense strand to SEQ ID NO: 872494
auugcaagggaacuaagcg

SEQ ID NO: 872496 - RNA, 19 nt, Artificial Sequence
  Description of Artificial Sequence: Synthetic oligonucleotide
  Sense strand starting at position 2228 of SEQ ID NO: 588545
ugucgugaaugcccaagau

SEQ ID NO: 872497 - RNA, 19 nt, Artificial Sequence
  Description of Artificial Sequence: Synthetic oligonucleotide
  Antisense strand to SEQ ID NO: 872496
aucuugggcauucacgaca

SEQ ID NO: 872498 - RNA, 19 nt, Artificial Sequence
  Description of Artificial Sequence: Synthetic oligonucleotide
  Sense strand starting at position 2272 of SEQ ID NO: 588545
aacugucaaucagugagau

SEQ ID NO: 872499 - RNA, 19 nt, Artificial Sequence
  Description of Artificial Sequence: Synthetic oligonucleotide
  Antisense strand to SEQ ID NO: 872498
aucucacugauugacaguu

SEQ ID NO: 872500 - RNA, 19 nt, Artificial Sequence
  Description of Artificial Sequence: Synthetic oligonucleotide
  Sense strand starting at position 2273 of SEQ ID NO: 588545
acugucaaucagugagauc

SEQ ID NO: 872501 - RNA, 19 nt, Artificial Sequence
  Description of Artificial Sequence: Synthetic oligonucleotide
  Antisense strand to SEQ ID NO: 872500
gaucucacugauugacagu

SEQ ID NO: 872502 - RNA, 19 nt, Artificial Sequence
  Description of Artificial Sequence: Synthetic oligonucleotide
  Sense strand starting at position 2548 of SEQ ID NO: 588545
gcgaaauugaagcagcuau

SEQ ID NO: 872503 - RNA, 19 nt, Artificial Sequence
  Description of Artificial Sequence: Synthetic oligonucleotide
  Antisense strand to SEQ ID NO: 872502
auagcugcuucaauuucgc

SEQ ID NO: 872504 - RNA, 19 nt, Artificial Sequence
  Description of Artificial Sequence: Synthetic oligonucleotide
  Sense strand starting at position 2562 of SEQ ID NO: 588545
gcuauauugacacggauuc

SEQ ID NO: 872505 - RNA, 19 nt, Artificial Sequence
  Description of Artificial Sequence: Synthetic oligonucleotide
  Antisense strand to SEQ ID NO: 872504
gaauccgugucaauauagc

SEQ ID NO: 872506 - RNA, 19 nt, Artificial Sequence
  Description of Artificial Sequence: Synthetic oligonucleotide
  Sense strand starting at position 2820 of SEQ ID NO: 588545
cuugauucgccugugucuu

SEQ ID NO: 872507 - RNA, 19 nt, Artificial Sequence
  Description of Artificial Sequence: Synthetic oligonucleotide
  Antisense strand to SEQ ID NO: 872506
aagacacaggcgaaucaag

SEQ ID NO: 872508 - RNA, 19 nt, Artificial Sequence
  Description of Artificial Sequence: Synthetic oligonucleotide
  Sense strand starting at position 2825 of SEQ ID NO: 588545
uucgccugugucuuuacua

SEQ ID NO: 872509 - RNA, 19 nt, Artificial Sequence
  Description of Artificial Sequence: Synthetic oligonucleotide
  Antisense strand to SEQ ID NO: 872508
uaguaaagacacaggcgaa

SEQ ID NO: 872510 - RNA, 19 nt, Artificial Sequence
  Description of Artificial Sequence: Synthetic oligonucleotide
  Sense strand starting at position 2875 of SEQ ID NO: 588545
gcauaauguguucccgcuu

SEQ ID NO: 872511 - RNA, 19 nt, Artificial Sequence
  Description of Artificial Sequence: Synthetic oligonucleotide
  Antisense strand to SEQ ID NO: 872510
aagcgggaacacauuaugc

SEQ ID NO: 872512 - RNA, 19 nt, Artificial Sequence
  Description of Artificial Sequence: Synthetic oligonucleotide
  Sense strand starting at position 3356 of SEQ ID NO: 588545
ggaagaaggucccgacaaa

SEQ ID NO: 872513 - RNA, 19 nt, Artificial Sequence
  Description of Artificial Sequence: Synthetic oligonucleotide
  Antisense strand to SEQ ID NO: 872512
uuugucgggaccuucuucc

SEQ ID NO: 872514 - RNA, 19 nt, Artificial Sequence
  Description of Artificial Sequence: Synthetic oligonucleotide
  Sense strand starting at position 3515 of SEQ ID NO: 588545
augagucaugcgugaccaa

SEQ ID NO: 872515 - RNA, 19 nt, Artificial Sequence
  Description of Artificial Sequence: Synthetic oligonucleotide
  Antisense strand to SEQ ID NO: 872514
uuggucacgcaugacucau

SEQ ID NO: 872516 - RNA, 19 nt, Artificial Sequence
  Description of Artificial Sequence: Synthetic oligonucleotide
  Sense strand starting at position 3516 of SEQ ID NO: 588545
ugagucaugcgugaccaau

SEQ ID NO: 872517 - RNA, 19 nt, Artificial Sequence
  Description of Artificial Sequence: Synthetic oligonucleotide
  Antisense strand to SEQ ID NO: 872516
auuggucacgcaugacuca

SEQ ID NO: 872518 - RNA, 19 nt, Artificial Sequence
  Description of Artificial Sequence: Synthetic oligonucleotide
  Sense strand starting at position 3783 of SEQ ID NO: 588545
accaucugcggagauagau

SEQ ID NO: 872519 - RNA, 19 nt, Artificial Sequence
  Description of Artificial Sequence: Synthetic oligonucleotide
  Antisense strand to SEQ ID NO: 872518
aucuaucuccgcagauggu

SEQ ID NO: 872520 - RNA, 19 nt, Artificial Sequence
  Description of Artificial Sequence: Synthetic oligonucleotide
  Sense strand starting at position 3793 of SEQ ID NO: 588545
gagauagauuccguaggag

SEQ ID NO: 872521 - RNA, 19 nt, Artificial Sequence
  Description of Artificial Sequence: Synthetic oligonucleotide
  Antisense strand to SEQ ID NO: 872520
cuccuacggaaucuaucuc

SEQ ID NO: 872522 - RNA, 19 nt, Artificial Sequence
  Description of Artificial Sequence: Synthetic oligonucleotide
  Sense strand starting at position 3809 of SEQ ID NO: 588545
gaggucacacguuauuaca

SEQ ID NO: 872523 - RNA, 19 nt, Artificial Sequence
  Description of Artificial Sequence: Synthetic oligonucleotide
  Antisense strand to SEQ ID NO: 872522
uguaauaacgugugaccuc

SEQ ID NO: 872524 - RNA, 19 nt, Artificial Sequence
  Description of Artificial Sequence: Synthetic oligonucleotide
  Sense strand starting at position 3819 of SEQ ID NO: 588545
guuauuacacuguguugau

SEQ ID NO: 872525 - RNA, 19 nt, Artificial Sequence
  Description of Artificial Sequence: Synthetic oligonucleotide
  Antisense strand to SEQ ID NO: 872524
aucaacacaguguaauaac

SEQ ID NO: 872526 - RNA, 19 nt, Artificial Sequence
  Description of Artificial Sequence: Synthetic oligonucleotide
  Sense strand starting at position 3849 of SEQ ID NO: 588545
ccugguacauuuguguaca

SEQ ID NO: 872527 - RNA, 19 nt, Artificial Sequence
  Description of Artificial Sequence: Synthetic oligonucleotide
  Antisense strand to SEQ ID NO: 872526
uguacacaaauguaccagg

SEQ ID NO: 872528 - RNA, 19 nt, Artificial Sequence
  Description of Artificial Sequence: Synthetic oligonucleotide
  Sense strand starting at position 3859 of SEQ ID NO: 588545
uuguguacacacuaaugua

SEQ ID NO: 872529 - RNA, 19 nt, Artificial Sequence
  Description of Artificial Sequence: Synthetic oligonucleotide
  Antisense strand to SEQ ID NO: 872528
uacauuaguguguacacaa

SEQ ID NO: 872530 - RNA, 19 nt, Artificial Sequence
  Description of Artificial Sequence: Synthetic oligonucleotide
  Sense strand starting at position 3867 of SEQ ID NO: 588545
acacuaauguaagugauua

SEQ ID NO: 872531 - RNA, 19 nt, Artificial Sequence
  Description of Artificial Sequence: Synthetic oligonucleotide
  Antisense strand to SEQ ID NO: 872530
uaaucacuuacauuagugu

SEQ ID NO: 872532 - RNA, 19 nt, Artificial Sequence
  Description of Artificial Sequence: Synthetic oligonucleotide
  Sense strand starting at position 96 of SEQ ID NO: 588546
gcuggaaucccgcauggau

SEQ ID NO: 872533 - RNA, 19 nt, Artificial Sequence
  Description of Artificial Sequence: Synthetic oligonucleotide
  Antisense strand to SEQ ID NO: 872532
auccaugcgggauuccagc

SEQ ID NO: 872534 - RNA, 19 nt, Artificial Sequence
  Description of Artificial Sequence: Synthetic oligonucleotide
  Sense strand starting at position 431 of SEQ ID NO: 588546
cagucacaguguccucaua

SEQ ID NO: 872535 - RNA, 19 nt, Artificial Sequence
  Description of Artificial Sequence: Synthetic oligonucleotide
  Antisense strand to SEQ ID NO: 872534
uaugaggacacugugacug

SEQ ID NO: 872536 - RNA, 19 nt, Artificial Sequence
  Description of Artificial Sequence: Synthetic oligonucleotide
  Sense strand starting at position 475 of SEQ ID NO: 588546
agugaacucucagcaacuu

SEQ ID NO: 872537 - RNA, 19 nt, Artificial Sequence
  Description of Artificial Sequence: Synthetic oligonucleotide
  Antisense strand to SEQ ID NO: 872536
aaguugcugagaguucacu

SEQ ID NO: 872538 - RNA, 19 nt, Artificial Sequence
  Description of Artificial Sequence: Synthetic oligonucleotide
  Sense strand starting at position 476 of SEQ ID NO: 588546
gugaacucucagcaacuuu

SEQ ID NO: 872539 - RNA, 19 nt, Artificial Sequence
  Description of Artificial Sequence: Synthetic oligonucleotide
  Antisense strand to SEQ ID NO: 872538
aaaguugcugagaguucac

SEQ ID NO: 872540 - RNA, 19 nt, Artificial Sequence
  Description of Artificial Sequence: Synthetic oligonucleotide
  Sense strand starting at position 566 of SEQ ID NO: 588546
cucagcucaguuuacgaaa

SEQ ID NO: 872541 - RNA, 19 nt, Artificial Sequence
  Description of Artificial Sequence: Synthetic oligonucleotide
  Antisense strand to SEQ ID NO: 872540
uuucguaaacugagcugag

SEQ ID NO: 872542 - RNA, 19 nt, Artificial Sequence
  Description of Artificial Sequence: Synthetic oligonucleotide
  Sense strand starting at position 621 of SEQ ID NO: 588546
gggauuauguagguuuggu

SEQ ID NO: 872543 - RNA, 19 nt, Artificial Sequence
  Description of Artificial Sequence: Synthetic oligonucleotide
  Antisense strand to SEQ ID NO: 872542
accaaaccuacauaauccc

SEQ ID NO: 872544 - RNA, 19 nt, Artificial Sequence
  Description of Artificial Sequence: Synthetic oligonucleotide
  Sense strand starting at position 702 of SEQ ID NO: 588546
cgcgaggaggcuuaucgau

SEQ ID NO: 872545 - RNA, 19 nt, Artificial Sequence
  Description of Artificial Sequence: Synthetic oligonucleotide
  Antisense strand to SEQ ID NO: 872544
aucgauaagccuccucgcg

SEQ ID NO: 872546 - RNA, 19 nt, Artificial Sequence
  Description of Artificial Sequence: Synthetic oligonucleotide
  Sense strand starting at position 980 of SEQ ID NO: 588546
agguguuacugcucauccu

SEQ ID NO: 872547 - RNA, 19 nt, Artificial Sequence
  Description of Artificial Sequence: Synthetic oligonucleotide
  Antisense strand to SEQ ID NO: 872546
aggaugagcaguaacaccu

SEQ ID NO: 872548 - RNA, 19 nt, Artificial Sequence
  Description of Artificial Sequence: Synthetic oligonucleotide
  Sense strand starting at position 1064 of SEQ ID NO: 588546
agcagagauaucuggguac

SEQ ID NO: 872549 - RNA, 19 nt, Artificial Sequence
  Description of Artificial Sequence: Synthetic oligonucleotide
  Antisense strand to SEQ ID NO: 872548
guacccagauaucucugcu

SEQ ID NO: 872550 - RNA, 19 nt, Artificial Sequence
  Description of Artificial Sequence: Synthetic oligonucleotide
  Sense strand starting at position 1066 of SEQ ID NO: 588546
cagagauaucuggguacuc

SEQ ID NO: 872551 - RNA, 19 nt, Artificial Sequence
  Description of Artificial Sequence: Synthetic oligonucleotide
  Antisense strand to SEQ ID NO: 872550
gaguacccagauaucucug

SEQ ID NO: 872552 - RNA, 19 nt, Artificial Sequence
  Description of Artificial Sequence: Synthetic oligonucleotide
  Sense strand starting at position 1068 of SEQ ID NO: 588546
gagauaucuggguacucgu

SEQ ID NO: 872553 - RNA, 19 nt, Artificial Sequence
  Description of Artificial Sequence: Synthetic oligonucleotide
  Antisense strand to SEQ ID NO: 872552
acgaguacccagauaucuc

SEQ ID NO: 872554 - RNA, 19 nt, Artificial Sequence
  Description of Artificial Sequence: Synthetic oligonucleotide
  Sense strand starting at position 1075 of SEQ ID NO: 588546
cuggguacucgugguuaua

SEQ ID NO: 872555 - RNA, 19 nt, Artificial Sequence
  Description of Artificial Sequence: Synthetic oligonucleotide
  Antisense strand to SEQ ID NO: 872554
uauaaccacgaguacccag

SEQ ID NO: 872556 - RNA, 19 nt, Artificial Sequence
  Description of Artificial Sequence: Synthetic oligonucleotide
  Sense strand starting at position 1077 of SEQ ID NO: 588546
ggguacucgugguuauaug

SEQ ID NO: 872557 - RNA, 19 nt, Artificial Sequence
  Description of Artificial Sequence: Synthetic oligonucleotide
  Antisense strand to SEQ ID NO: 872556
cauauaaccacgaguaccc

SEQ ID NO: 872558 - RNA, 19 nt, Artificial Sequence
  Description of Artificial Sequence: Synthetic oligonucleotide
  Sense strand starting at position 1078 of SEQ ID NO: 588546
gguacucgugguuauauga

SEQ ID NO: 872559 - RNA, 19 nt, Artificial Sequence
  Description of Artificial Sequence: Synthetic oligonucleotide
  Antisense strand to SEQ ID NO: 872558
ucauauaaccacgaguacc

SEQ ID NO: 872560 - RNA, 19 nt, Artificial Sequence
  Description of Artificial Sequence: Synthetic oligonucleotide
  Sense strand starting at position 1287 of SEQ ID NO: 588546
uggaaacgccaauguuagu

SEQ ID NO: 872561 - RNA, 19 nt, Artificial Sequence
  Description of Artificial Sequence: Synthetic oligonucleotide
  Antisense strand to SEQ ID NO: 872560
acuaacauuggcguuucca

SEQ ID NO: 872562 - RNA, 19 nt, Artificial Sequence
  Description of Artificial Sequence: Synthetic oligonucleotide
  Sense strand starting at position 1293 of SEQ ID NO: 588546
cgccaauguuaguuaccaa

SEQ ID NO: 872563 - RNA, 19 nt, Artificial Sequence
  Description of Artificial Sequence: Synthetic oligonucleotide
  Antisense strand to SEQ ID NO: 872562
uugguaacuaacauuggcg

SEQ ID NO: 872564 - RNA, 19 nt, Artificial Sequence
  Description of Artificial Sequence: Synthetic oligonucleotide
  Sense strand starting at position 1904 of SEQ ID NO: 588546
accgcagugaccugauauu

SEQ ID NO: 872565 - RNA, 19 nt, Artificial Sequence
  Description of Artificial Sequence: Synthetic oligonucleotide
  Antisense strand to SEQ ID NO: 872564
aauaucaggucacugcggu

SEQ ID NO: 872566 - RNA, 19 nt, Artificial Sequence
  Description of Artificial Sequence: Synthetic oligonucleotide
  Sense strand starting at position 1913 of SEQ ID NO: 588546
accugauauugacaaaggu

SEQ ID NO: 872567 - RNA, 19 nt, Artificial Sequence
  Description of Artificial Sequence: Synthetic oligonucleotide
  Antisense strand to SEQ ID NO: 872566
accuuugucaauaucaggu

SEQ ID NO: 872568 - RNA, 19 nt, Artificial Sequence
  Description of Artificial Sequence: Synthetic oligonucleotide
  Sense strand starting at position 2040 of SEQ ID NO: 588546
cucuuuggaucagcagaga

SEQ ID NO: 872569 - RNA, 19 nt, Artificial Sequence
  Description of Artificial Sequence: Synthetic oligonucleotide
  Antisense strand to SEQ ID NO: 872568
ucucugcugauccaaagag

SEQ ID NO: 872570 - RNA, 19 nt, Artificial Sequence
  Description of Artificial Sequence: Synthetic oligonucleotide
  Sense strand starting at position 2156 of SEQ ID NO: 588546
gggcuuaucuagucucuac

SEQ ID NO: 872571 - RNA, 19 nt, Artificial Sequence
  Description of Artificial Sequence: Synthetic oligonucleotide
  Antisense strand to SEQ ID NO: 872570
guagagacuagauaagccc

SEQ ID NO: 872572 - RNA, 19 nt, Artificial Sequence
  Description of Artificial Sequence: Synthetic oligonucleotide
  Sense strand starting at position 2231 of SEQ ID NO: 588546
gccaccauacugugggauu

SEQ ID NO: 872573 - RNA, 19 nt, Artificial Sequence
  Description of Artificial Sequence: Synthetic oligonucleotide
  Antisense strand to SEQ ID NO: 872572
aaucccacaguaugguggc

SEQ ID NO: 872574 - RNA, 19 nt, Artificial Sequence
  Description of Artificial Sequence: Synthetic oligonucleotide
  Sense strand starting at position 2233 of SEQ ID NO: 588546
caccauacugugggauuau

SEQ ID NO: 872575 - RNA, 19 nt, Artificial Sequence
  Description of Artificial Sequence: Synthetic oligonucleotide
  Antisense strand to SEQ ID NO: 872574
auaaucccacaguauggug

SEQ ID NO: 872576 - RNA, 19 nt, Artificial Sequence
  Description of Artificial Sequence: Synthetic oligonucleotide
  Sense strand starting at position 2248 of SEQ ID NO: 588546
uuaugagaguaucauacac

SEQ ID NO: 872577 - RNA, 19 nt, Artificial Sequence
  Description of Artificial Sequence: Synthetic oligonucleotide
  Antisense strand to SEQ ID NO: 872576
guguaugauacucucauaa

SEQ ID NO: 872578 - RNA, 19 nt, Artificial Sequence
  Description of Artificial Sequence: Synthetic oligonucleotide
  Sense strand starting at position 2250 of SEQ ID NO: 588546
augagaguaucauacacac

SEQ ID NO: 872579 - RNA, 19 nt, Artificial Sequence
  Description of Artificial Sequence: Synthetic oligonucleotide
  Antisense strand to SEQ ID NO: 872578
guguguaugauacucucau

SEQ ID NO: 872580 - RNA, 19 nt, Artificial Sequence
  Description of Artificial Sequence: Synthetic oligonucleotide
  Sense strand starting at position 2384 of SEQ ID NO: 588546
ggcacuuucccaggacauu

SEQ ID NO: 872581 - RNA, 19 nt, Artificial Sequence
  Description of Artificial Sequence: Synthetic oligonucleotide
  Antisense strand to SEQ ID NO: 872580
aauguccugggaaagugcc

SEQ ID NO: 872582 - RNA, 19 nt, Artificial Sequence
  Description of Artificial Sequence: Synthetic oligonucleotide
  Sense strand starting at position 2385 of SEQ ID NO: 588546
gcacuuucccaggacauua

SEQ ID NO: 872583 - RNA, 19 nt, Artificial Sequence
  Description of Artificial Sequence: Synthetic oligonucleotide
  Antisense strand to SEQ ID NO: 872582
uaauguccugggaaagugc

SEQ ID NO: 872584 - RNA, 19 nt, Artificial Sequence
  Description of Artificial Sequence: Synthetic oligonucleotide
  Sense strand starting at position 2471 of SEQ ID NO: 588546
cgggccaugcccuauugua

SEQ ID NO: 872585 - RNA, 19 nt, Artificial Sequence
  Description of Artificial Sequence: Synthetic oligonucleotide
  Antisense strand to SEQ ID NO: 872584
uacaauagggcauggcccg

SEQ ID NO: 872586 - RNA, 19 nt, Artificial Sequence
  Description of Artificial Sequence: Synthetic oligonucleotide
  Sense strand starting at position 2539 of SEQ ID NO: 588546
aaaugugaaugucccggaa

SEQ ID NO: 872587 - RNA, 19 nt, Artificial Sequence
  Description of Artificial Sequence: Synthetic oligonucleotide
  Antisense strand to SEQ ID NO: 872586
uuccgggacauucacauuu

SEQ ID NO: 872588 - RNA, 19 nt, Artificial Sequence
  Description of Artificial Sequence: Synthetic oligonucleotide
  Sense strand starting at position 2543 of SEQ ID NO: 588546
gugaaugucccggaaagga

SEQ ID NO: 872589 - RNA, 19 nt, Artificial Sequence
  Description of Artificial Sequence: Synthetic oligonucleotide
  Antisense strand to SEQ ID NO: 872588
uccuuuccgggacauucac

SEQ ID NO: 872590 - RNA, 19 nt, Artificial Sequence
  Description of Artificial Sequence: Synthetic oligonucleotide
  Sense strand starting at position 2744 of SEQ ID NO: 588546
uaaggacccuguuuagagu

SEQ ID NO: 872591 - RNA, 19 nt, Artificial Sequence
  Description of Artificial Sequence: Synthetic oligonucleotide
  Antisense strand to SEQ ID NO: 872590
acucuaaacaggguccuua

SEQ ID NO: 872592 - RNA, 19 nt, Artificial Sequence
  Description of Artificial Sequence: Synthetic oligonucleotide
  Sense strand starting at position 2750 of SEQ ID NO: 588546
cccuguuuagagugugaau

SEQ ID NO: 872593 - RNA, 19 nt, Artificial Sequence
  Description of Artificial Sequence: Synthetic oligonucleotide
  Antisense strand to SEQ ID NO: 872592
auucacacucuaaacaggg

SEQ ID NO: 872594 - RNA, 19 nt, Artificial Sequence
  Description of Artificial Sequence: Synthetic oligonucleotide
  Sense strand starting at position 2752 of SEQ ID NO: 588546
cuguuuagagugugaauug

SEQ ID NO: 872595 - RNA, 19 nt, Artificial Sequence
  Description of Artificial Sequence: Synthetic oligonucleotide
  Antisense strand to SEQ ID NO: 872594
caauucacacucuaaacag

SEQ ID NO: 872596 - RNA, 19 nt, Artificial Sequence
  Description of Artificial Sequence: Synthetic oligonucleotide
  Sense strand starting at position 2757 of SEQ ID NO: 588546
uagagugugaauuggagaa

SEQ ID NO: 872597 - RNA, 19 nt, Artificial Sequence
  Description of Artificial Sequence: Synthetic oligonucleotide
  Antisense strand to SEQ ID NO: 872596
uucuccaauucacacucua

SEQ ID NO: 872598 - RNA, 19 nt, Artificial Sequence
  Description of Artificial Sequence: Synthetic oligonucleotide
  Sense strand starting at position 2915 of SEQ ID NO: 588546
uggaguuccuuccuaaccu

SEQ ID NO: 872599 - RNA, 19 nt, Artificial Sequence
  Description of Artificial Sequence: Synthetic oligonucleotide
  Antisense strand to SEQ ID NO: 872598
agguuaggaaggaacucca

SEQ ID NO: 872600 - RNA, 19 nt, Artificial Sequence
  Description of Artificial Sequence: Synthetic oligonucleotide
  Sense strand starting at position 3312 of SEQ ID NO: 588546
ggaagaacuuccucauagc

SEQ ID NO: 872601 - RNA, 19 nt, Artificial Sequence
  Description of Artificial Sequence: Synthetic oligonucleotide
  Antisense strand to SEQ ID NO: 872600
gcuaugaggaaguucuucc

SEQ ID NO: 872602 - RNA, 19 nt, Artificial Sequence
  Description of Artificial Sequence: Synthetic oligonucleotide
  Sense strand starting at position 3472 of SEQ ID NO: 588546
gagaaaugaucagaagagc

SEQ ID NO: 872603 - RNA, 19 nt, Artificial Sequence
  Description of Artificial Sequence: Synthetic oligonucleotide
  Antisense strand to SEQ ID NO: 872602
gcucuucugaucauuucuc

SEQ ID NO: 872604 - RNA, 19 nt, Artificial Sequence
  Description of Artificial Sequence: Synthetic oligonucleotide
  Sense strand starting at position 3547 of SEQ ID NO: 588546
ccagaaaucugguuuaguu

SEQ ID NO: 872605 - RNA, 19 nt, Artificial Sequence
  Description of Artificial Sequence: Synthetic oligonucleotide
  Antisense strand to SEQ ID NO: 872604
aacuaaaccagauuucugg

SEQ ID NO: 872606 - RNA, 19 nt, Artificial Sequence
  Description of Artificial Sequence: Synthetic oligonucleotide
  Sense strand starting at position 3575 of SEQ ID NO: 588546
gggcucuugucauuggaaa

SEQ ID NO: 872607 - RNA, 19 nt, Artificial Sequence
  Description of Artificial Sequence: Synthetic oligonucleotide
  Antisense strand to SEQ ID NO: 872606
uuuccaaugacaagagccc

SEQ ID NO: 872608 - RNA, 19 nt, Artificial Sequence
  Description of Artificial Sequence: Synthetic oligonucleotide
  Sense strand starting at position 3593 of SEQ ID NO: 588546
aaagauuagugcucagaac

SEQ ID NO: 872609 - RNA, 19 nt, Artificial Sequence
  Description of Artificial Sequence: Synthetic oligonucleotide
  Antisense strand to SEQ ID NO: 872608
guucugagcacuaaucuuu

SEQ ID NO: 872610 - RNA, 19 nt, Artificial Sequence
  Description of Artificial Sequence: Synthetic oligonucleotide
  Sense strand starting at position 3728 of SEQ ID NO: 588546
agugauaaucgaggcauuc

SEQ ID NO: 872611 - RNA, 19 nt, Artificial Sequence
  Description of Artificial Sequence: Synthetic oligonucleotide
  Antisense strand to SEQ ID NO: 872610
gaaugccucgauuaucacu

SEQ ID NO: 872612 - RNA, 19 nt, Artificial Sequence
  Description of Artificial Sequence: Synthetic oligonucleotide
  Sense strand starting at position 27 of SEQ ID NO: 588547
cugucucaccuugagcaga

SEQ ID NO: 872613 - RNA, 19 nt, Artificial Sequence
  Description of Artificial Sequence: Synthetic oligonucleotide
  Antisense strand to SEQ ID NO: 872612
ucugcucaaggugagacag

SEQ ID NO: 872614 - RNA, 19 nt, Artificial Sequence
  Description of Artificial Sequence: Synthetic oligonucleotide
  Sense strand starting at position 29 of SEQ ID NO: 588547
gucucaccuugagcagaua

SEQ ID NO: 872615 - RNA, 19 nt, Artificial Sequence
  Description of Artificial Sequence: Synthetic oligonucleotide
  Antisense strand to SEQ ID NO: 872614
uaucugcucaaggugagac

SEQ ID NO: 872616 - RNA, 19 nt, Artificial Sequence
  Description of Artificial Sequence: Synthetic oligonucleotide
  Sense strand starting at position 42 of SEQ ID NO: 588547
cagauaucgguccaggauc

SEQ ID NO: 872617 - RNA, 19 nt, Artificial Sequence
  Description of Artificial Sequence: Synthetic oligonucleotide
  Antisense strand to SEQ ID NO: 872616
gauccuggaccgauaucug

SEQ ID NO: 872618 - RNA, 19 nt, Artificial Sequence
  Description of Artificial Sequence: Synthetic oligonucleotide
  Sense strand starting at position 80 of SEQ ID NO: 588547
agauguucuugccugcaga

SEQ ID NO: 872619 - RNA, 19 nt, Artificial Sequence
  Description of Artificial Sequence: Synthetic oligonucleotide
  Antisense strand to SEQ ID NO: 872618
ucugcaggcaagaacaucu

SEQ ID NO: 872620 - RNA, 19 nt, Artificial Sequence
  Description of Artificial Sequence: Synthetic oligonucleotide
  Sense strand starting at position 271 of SEQ ID NO: 588547
ggcugccuuggagacaaau

SEQ ID NO: 872621 - RNA, 19 nt, Artificial Sequence
  Description of Artificial Sequence: Synthetic oligonucleotide
  Antisense strand to SEQ ID NO: 872620
auuugucuccaaggcagcc

SEQ ID NO: 872622 - RNA, 19 nt, Artificial Sequence
  Description of Artificial Sequence: Synthetic oligonucleotide
  Sense strand starting at position 426 of SEQ ID NO: 588547
agcgguuaaagccaacauu

SEQ ID NO: 872623 - RNA, 19 nt, Artificial Sequence
  Description of Artificial Sequence: Synthetic oligonucleotide
  Antisense strand to SEQ ID NO: 872622
aauguuggcuuuaaccgcu

SEQ ID NO: 872624 - RNA, 19 nt, Artificial Sequence
  Description of Artificial Sequence: Synthetic oligonucleotide
  Sense strand starting at position 911 of SEQ ID NO: 588547
gaaguaaucgcuuaguucc

SEQ ID NO: 872625 - RNA, 19 nt, Artificial Sequence
  Description of Artificial Sequence: Synthetic oligonucleotide
  Antisense strand to SEQ ID NO: 872624
ggaacuaagcgauuacuuc

SEQ ID NO: 872626 - RNA, 19 nt, Artificial Sequence
  Description of Artificial Sequence: Synthetic oligonucleotide
  Sense strand starting at position 919 of SEQ ID NO: 588547
cgcuuaguucccuugcaau

SEQ ID NO: 872627 - RNA, 19 nt, Artificial Sequence
  Description of Artificial Sequence: Synthetic oligonucleotide
  Antisense strand to SEQ ID NO: 872626
auugcaagggaacuaagcg

SEQ ID NO: 872628 - RNA, 19 nt, Artificial Sequence
  Description of Artificial Sequence: Synthetic oligonucleotide
  Sense strand starting at position 1002 of SEQ ID NO: 588547
ugucgugaaugcccaagau

SEQ ID NO: 872629 - RNA, 19 nt, Artificial Sequence
  Description of Artificial Sequence: Synthetic oligonucleotide
  Antisense strand to SEQ ID NO: 872628
aucuugggcauucacgaca

SEQ ID NO: 872630 - RNA, 19 nt, Artificial Sequence
  Description of Artificial Sequence: Synthetic oligonucleotide
  Sense strand starting at position 1046 of SEQ ID NO: 588547
aacugucaaucagugagau

SEQ ID NO: 872631 - RNA, 19 nt, Artificial Sequence
  Description of Artificial Sequence: Synthetic oligonucleotide
  Antisense strand to SEQ ID NO: 872630
aucucacugauugacaguu

SEQ ID NO: 872632 - RNA, 19 nt, Artificial Sequence
  Description of Artificial Sequence: Synthetic oligonucleotide
  Sense strand starting at position 1047 of SEQ ID NO: 588547
acugucaaucagugagauc

SEQ ID NO: 872633 - RNA, 19 nt, Artificial Sequence
  Description of Artificial Sequence: Synthetic oligonucleotide
  Antisense strand to SEQ ID NO: 872632
gaucucacugauugacagu

SEQ ID NO: 872634 - RNA, 19 nt, Artificial Sequence
  Description of Artificial Sequence: Synthetic oligonucleotide
  Sense strand starting at position 1322 of SEQ ID NO: 588547
gcgaaauugaagcagcuau

SEQ ID NO: 872635 - RNA, 19 nt, Artificial Sequence
  Description of Artificial Sequence: Synthetic oligonucleotide
  Antisense strand to SEQ ID NO: 872634
auagcugcuucaauuucgc

SEQ ID NO: 872636 - RNA, 19 nt, Artificial Sequence
  Description of Artificial Sequence: Synthetic oligonucleotide
  Sense strand starting at position 1336 of SEQ ID NO: 588547
gcuauauugacacggauuc

SEQ ID NO: 872637 - RNA, 19 nt, Artificial Sequence
  Description of Artificial Sequence: Synthetic oligonucleotide
  Antisense strand to SEQ ID NO: 872636
gaauccgugucaauauagc

SEQ ID NO: 872638 - RNA, 19 nt, Artificial Sequence
  Description of Artificial Sequence: Synthetic oligonucleotide
  Sense strand starting at position 1594 of SEQ ID NO: 588547
cuugauucgccugugucuu

SEQ ID NO: 872639 - RNA, 19 nt, Artificial Sequence
  Description of Artificial Sequence: Synthetic oligonucleotide
  Antisense strand to SEQ ID NO: 872638
aagacacaggcgaaucaag

SEQ ID NO: 872640 - RNA, 19 nt, Artificial Sequence
  Description of Artificial Sequence: Synthetic oligonucleotide
  Sense strand starting at position 1599 of SEQ ID NO: 588547
uucgccugugucuuuacua

SEQ ID NO: 872641 - RNA, 19 nt, Artificial Sequence
  Description of Artificial Sequence: Synthetic oligonucleotide
  Antisense strand to SEQ ID NO: 872640
uaguaaagacacaggcgaa

SEQ ID NO: 872642 - RNA, 19 nt, Artificial Sequence
  Description of Artificial Sequence: Synthetic oligonucleotide
  Sense strand starting at position 1649 of SEQ ID NO: 588547
gcauaauguguucccgcuu

SEQ ID NO: 872643 - RNA, 19 nt, Artificial Sequence
  Description of Artificial Sequence: Synthetic oligonucleotide
  Antisense strand to SEQ ID NO: 872642
aagcgggaacacauuaugc

SEQ ID NO: 872644 - RNA, 19 nt, Artificial Sequence
  Description of Artificial Sequence: Synthetic oligonucleotide
  Sense strand starting at position 2289 of SEQ ID NO: 588547
augagucaugcgugaccaa

SEQ ID NO: 872645 - RNA, 19 nt, Artificial Sequence
  Description of Artificial Sequence: Synthetic oligonucleotide
  Antisense strand to SEQ ID NO: 872644
uuggucacgcaugacucau

SEQ ID NO: 872646 - RNA, 19 nt, Artificial Sequence
  Description of Artificial Sequence: Synthetic oligonucleotide
  Sense strand starting at position 2290 of SEQ ID NO: 588547
ugagucaugcgugaccaau

SEQ ID NO: 872647 - RNA, 19 nt, Artificial Sequence
  Description of Artificial Sequence: Synthetic oligonucleotide
  Antisense strand to SEQ ID NO: 872646
auuggucacgcaugacuca

SEQ ID NO: 872648 - RNA, 19 nt, Artificial Sequence
  Description of Artificial Sequence: Synthetic oligonucleotide
  Sense strand starting at position 2557 of SEQ ID NO: 588547
accaucugcggagauagau

SEQ ID NO: 872649 - RNA, 19 nt, Artificial Sequence
  Description of Artificial Sequence: Synthetic oligonucleotide
  Antisense strand to SEQ ID NO: 872648
aucuaucuccgcagauggu

SEQ ID NO: 872650 - RNA, 19 nt, Artificial Sequence
  Description of Artificial Sequence: Synthetic oligonucleotide
  Sense strand starting at position 2567 of SEQ ID NO: 588547
gagauagauuccguaggag

SEQ ID NO: 872651 - RNA, 19 nt, Artificial Sequence
  Description of Artificial Sequence: Synthetic oligonucleotide
  Antisense strand to SEQ ID NO: 872650
cuccuacggaaucuaucuc

SEQ ID NO: 872652 - RNA, 19 nt, Artificial Sequence
  Description of Artificial Sequence: Synthetic oligonucleotide
  Sense strand starting at position 2583 of SEQ ID NO: 588547
gaggucacacguuauuaca

SEQ ID NO: 872653 - RNA, 19 nt, Artificial Sequence
  Description of Artificial Sequence: Synthetic oligonucleotide
  Antisense strand to SEQ ID NO: 872652
uguaauaacgugugaccuc

SEQ ID NO: 872654 - RNA, 19 nt, Artificial Sequence
  Description of Artificial Sequence: Synthetic oligonucleotide
  Sense strand starting at position 2593 of SEQ ID NO: 588547
guuauuacacuguguugau

SEQ ID NO: 872655 - RNA, 19 nt, Artificial Sequence
  Description of Artificial Sequence: Synthetic oligonucleotide
  Antisense strand to SEQ ID NO: 872654
aucaacacaguguaauaac

SEQ ID NO: 872656 - RNA, 19 nt, Artificial Sequence
  Description of Artificial Sequence: Synthetic oligonucleotide
  Sense strand starting at position 2623 of SEQ ID NO: 588547
ccugguacauuuguguaca

SEQ ID NO: 872657 - RNA, 19 nt, Artificial Sequence
  Description of Artificial Sequence: Synthetic oligonucleotide
  Antisense strand to SEQ ID NO: 872656
uguacacaaauguaccagg

SEQ ID NO: 872658 - RNA, 19 nt, Artificial Sequence
  Description of Artificial Sequence: Synthetic oligonucleotide
  Sense strand starting at position 2633 of SEQ ID NO: 588547
uuguguacacacuaaugua

SEQ ID NO: 872659 - RNA, 19 nt, Artificial Sequence
  Description of Artificial Sequence: Synthetic oligonucleotide
  Antisense strand to SEQ ID NO: 872658
uacauuaguguguacacaa

SEQ ID NO: 872660 - RNA, 19 nt, Artificial Sequence
  Description of Artificial Sequence: Synthetic oligonucleotide
  Sense strand starting at position 2641 of SEQ ID NO: 588547
acacuaauguaagugauua

SEQ ID NO: 872661 - RNA, 19 nt, Artificial Sequence
  Description of Artificial Sequence: Synthetic oligonucleotide
  Antisense strand to SEQ ID NO: 872660
uaaucacuuacauuagugu

SEQ ID NO: 872662 - RNA, 19 nt, Artificial Sequence
  Description of Artificial Sequence: Synthetic oligonucleotide
  Sense strand starting at position 2780 of SEQ ID NO: 588547
gaggguaguuucccugaau

SEQ ID NO: 872663 - RNA, 19 nt, Artificial Sequence
  Description of Artificial Sequence: Synthetic oligonucleotide
  Antisense strand to SEQ ID NO: 872662
auucagggaaacuacccuc

SEQ ID NO: 872664 - RNA, 19 nt, Artificial Sequence
  Description of Artificial Sequence: Synthetic oligonucleotide
  Sense strand starting at position 2781 of SEQ ID NO: 588547
aggguaguuucccugaauu

SEQ ID NO: 872665 - RNA, 19 nt, Artificial Sequence
  Description of Artificial Sequence: Synthetic oligonucleotide
  Antisense strand to SEQ ID NO: 872664
aauucagggaaacuacccu

SEQ ID NO: 872666 - RNA, 19 nt, Artificial Sequence
  Description of Artificial Sequence: Synthetic oligonucleotide
  Sense strand starting at position 2783 of SEQ ID NO: 588547
gguaguuucccugaauucu

SEQ ID NO: 872667 - RNA, 19 nt, Artificial Sequence
  Description of Artificial Sequence: Synthetic oligonucleotide
  Antisense strand to SEQ ID NO: 872666
agaauucagggaaacuacc

SEQ ID NO: 872668 - RNA, 19 nt, Artificial Sequence
  Description of Artificial Sequence: Synthetic oligonucleotide
  Sense strand starting at position 2794 of SEQ ID NO: 588547
ugaauucucuuggaaggga

SEQ ID NO: 872669 - RNA, 19 nt, Artificial Sequence
  Description of Artificial Sequence: Synthetic oligonucleotide
  Antisense strand to SEQ ID NO: 872668
ucccuuccaagagaauuca

SEQ ID NO: 872670 - RNA, 19 nt, Artificial Sequence
  Description of Artificial Sequence: Synthetic oligonucleotide
  Sense strand starting at position 2807 of SEQ ID NO: 588547
aagggauugcuuggcacau

SEQ ID NO: 872671 - RNA, 19 nt, Artificial Sequence
  Description of Artificial Sequence: Synthetic oligonucleotide
  Antisense strand to SEQ ID NO: 872670
augugccaagcaaucccuu

SEQ ID NO: 872672 - RNA, 19 nt, Artificial Sequence
  Description of Artificial Sequence: Synthetic oligonucleotide
  Sense strand starting at position 2808 of SEQ ID NO: 588547
agggauugcuuggcacauu

SEQ ID NO: 872673 - RNA, 19 nt, Artificial Sequence
  Description of Artificial Sequence: Synthetic oligonucleotide
  Antisense strand to SEQ ID NO: 872672
aaugugccaagcaaucccu

SEQ ID NO: 872674 - RNA, 19 nt, Artificial Sequence
  Description of Artificial Sequence: Synthetic oligonucleotide
  Sense strand starting at position 2897 of SEQ ID NO: 588547
caaugagaaugguagggaa

SEQ ID NO: 872675 - RNA, 19 nt, Artificial Sequence
  Description of Artificial Sequence: Synthetic oligonucleotide
  Antisense strand to SEQ ID NO: 872674
uucccuaccauucucauug

SEQ ID NO: 872676 - RNA, 19 nt, Artificial Sequence
  Description of Artificial Sequence: Synthetic oligonucleotide
  Sense strand starting at position 3347 of SEQ ID NO: 588547
guacuuacauccuuacaga

SEQ ID NO: 872677 - RNA, 19 nt, Artificial Sequence
  Description of Artificial Sequence: Synthetic oligonucleotide
  Antisense strand to SEQ ID NO: 872676
ucuguaaggauguaaguac

SEQ ID NO: 872678 - RNA, 19 nt, Artificial Sequence
  Description of Artificial Sequence: Synthetic oligonucleotide
  Sense strand starting at position 3565 of SEQ ID NO: 588547
cuuuacuggcaucaaggua

SEQ ID NO: 872679 - RNA, 19 nt, Artificial Sequence
  Description of Artificial Sequence: Synthetic oligonucleotide
  Antisense strand to SEQ ID NO: 872678
uaccuugaugccaguaaag

SEQ ID NO: 872680 - RNA, 19 nt, Artificial Sequence
  Description of Artificial Sequence: Synthetic oligonucleotide
  Sense strand starting at position 3849 of SEQ ID NO: 588547
cagcuacuacugggauuau

SEQ ID NO: 872681 - RNA, 19 nt, Artificial Sequence
  Description of Artificial Sequence: Synthetic oligonucleotide
  Antisense strand to SEQ ID NO: 872680
auaaucccaguaguagcug

SEQ ID NO: 872682 - RNA, 19 nt, Artificial Sequence
  Description of Artificial Sequence: Synthetic oligonucleotide
  Sense strand starting at position 3858 of SEQ ID NO: 588547
cugggauuauucccaguua

SEQ ID NO: 872683 - RNA, 19 nt, Artificial Sequence
  Description of Artificial Sequence: Synthetic oligonucleotide
  Antisense strand to SEQ ID NO: 872682
uaacugggaauaaucccag

SEQ ID NO: 872684 - RNA, 19 nt, Artificial Sequence
  Description of Artificial Sequence: Synthetic oligonucleotide
  Sense strand starting at position 3889 of SEQ ID NO: 588547
aucugugccaggcaugaua

SEQ ID NO: 872685 - RNA, 19 nt, Artificial Sequence
  Description of Artificial Sequence: Synthetic oligonucleotide
  Antisense strand to SEQ ID NO: 872684
uaucaugccuggcacagau

SEQ ID NO: 872686 - RNA, 19 nt, Artificial Sequence
  Description of Artificial Sequence: Synthetic oligonucleotide
  Sense strand starting at position 3917 of SEQ ID NO: 588547
uuacaaucgugaucucauu

SEQ ID NO: 872687 - RNA, 19 nt, Artificial Sequence
  Description of Artificial Sequence: Synthetic oligonucleotide
  Antisense strand to SEQ ID NO: 872686
aaugagaucacgauuguaa

SEQ ID NO: 872688 - RNA, 19 nt, Artificial Sequence
  Description of Artificial Sequence: Synthetic oligonucleotide
  Sense strand starting at position 3944 of SEQ ID NO: 588547
acaauaaucccgugaggua

SEQ ID NO: 872689 - RNA, 19 nt, Artificial Sequence
  Description of Artificial Sequence: Synthetic oligonucleotide
  Antisense strand to SEQ ID NO: 872688
uaccucacgggauuauugu

SEQ ID NO: 872690 - RNA, 19 nt, Artificial Sequence
  Description of Artificial Sequence: Synthetic oligonucleotide
  Sense strand starting at position 3945 of SEQ ID NO: 588547
caauaaucccgugagguag

SEQ ID NO: 872691 - RNA, 19 nt, Artificial Sequence
  Description of Artificial Sequence: Synthetic oligonucleotide
  Antisense strand to SEQ ID NO: 872690
cuaccucacgggauuauug

SEQ ID NO: 872692 - RNA, 19 nt, Artificial Sequence
  Description of Artificial Sequence: Synthetic oligonucleotide
  Sense strand starting at position 107 of SEQ ID NO: 588550
agcccugagguuuggguua

SEQ ID NO: 872693 - RNA, 19 nt, Artificial Sequence
  Description of Artificial Sequence: Synthetic oligonucleotide
  Antisense strand to SEQ ID NO: 872692
uaacccaaaccucagggcu

SEQ ID NO: 872694 - RNA, 19 nt, Artificial Sequence
  Description of Artificial Sequence: Synthetic oligonucleotide
  Sense strand starting at position 109 of SEQ ID NO: 588550
cccugagguuuggguuaua

SEQ ID NO: 872695 - RNA, 19 nt, Artificial Sequence
  Description of Artificial Sequence: Synthetic oligonucleotide
  Antisense strand to SEQ ID NO: 872694
uauaacccaaaccucaggg

SEQ ID NO: 872696 - RNA, 19 nt, Artificial Sequence
  Description of Artificial Sequence: Synthetic oligonucleotide
  Sense strand starting at position 112 of SEQ ID NO: 588550
ugagguuuggguuauacca

SEQ ID NO: 872697 - RNA, 19 nt, Artificial Sequence
  Description of Artificial Sequence: Synthetic oligonucleotide
  Antisense strand to SEQ ID NO: 872696
ugguauaacccaaaccuca

SEQ ID NO: 872698 - RNA, 19 nt, Artificial Sequence
  Description of Artificial Sequence: Synthetic oligonucleotide
  Sense strand starting at position 119 of SEQ ID NO: 588550
uggguuauaccagggcaga

SEQ ID NO: 872699 - RNA, 19 nt, Artificial Sequence
  Description of Artificial Sequence: Synthetic oligonucleotide
  Antisense strand to SEQ ID NO: 872698
ucugcccugguauaaccca

SEQ ID NO: 872700 - RNA, 19 nt, Artificial Sequence
  Description of Artificial Sequence: Synthetic oligonucleotide
  Sense strand starting at position 251 of SEQ ID NO: 588550
uugagauccucuuccuaga

SEQ ID NO: 872701 - RNA, 19 nt, Artificial Sequence
  Description of Artificial Sequence: Synthetic oligonucleotide
  Antisense strand to SEQ ID NO: 872700
ucuaggaagaggaucucaa

SEQ ID NO: 872702 - RNA, 19 nt, Artificial Sequence
  Description of Artificial Sequence: Synthetic oligonucleotide
  Sense strand starting at position 253 of SEQ ID NO: 588550
gagauccucuuccuagagu

SEQ ID NO: 872703 - RNA, 19 nt, Artificial Sequence
  Description of Artificial Sequence: Synthetic oligonucleotide
  Antisense strand to SEQ ID NO: 872702
acucuaggaagaggaucuc

SEQ ID NO: 872704 - RNA, 19 nt, Artificial Sequence
  Description of Artificial Sequence: Synthetic oligonucleotide
  Sense strand starting at position 860 of SEQ ID NO: 588550
acgagaagcgcuuacuguu

SEQ ID NO: 872705 - RNA, 19 nt, Artificial Sequence
  Description of Artificial Sequence: Synthetic oligonucleotide
  Antisense strand to SEQ ID NO: 872704
aacaguaagcgcuucucgu

SEQ ID NO: 872706 - RNA, 19 nt, Artificial Sequence
  Description of Artificial Sequence: Synthetic oligonucleotide
  Sense strand starting at position 1430 of SEQ ID NO: 588550
uggcguucguggucuucua

SEQ ID NO: 872707 - RNA, 19 nt, Artificial Sequence
  Description of Artificial Sequence: Synthetic oligonucleotide
  Antisense strand to SEQ ID NO: 872706
uagaagaccacgaacgcca

SEQ ID NO: 872708 - RNA, 19 nt, Artificial Sequence
  Description of Artificial Sequence: Synthetic oligonucleotide
  Sense strand starting at position 1431 of SEQ ID NO: 588550
ggcguucguggucuucuau

SEQ ID NO: 872709 - RNA, 19 nt, Artificial Sequence
  Description of Artificial Sequence: Synthetic oligonucleotide
  Antisense strand to SEQ ID NO: 872708
auagaagaccacgaacgcc

SEQ ID NO: 872710 - RNA, 19 nt, Artificial Sequence
  Description of Artificial Sequence: Synthetic oligonucleotide
  Sense strand starting at position 1464 of SEQ ID NO: 588550
aaaucugugguuugaguga

SEQ ID NO: 872711 - RNA, 19 nt, Artificial Sequence
  Description of Artificial Sequence: Synthetic oligonucleotide
  Antisense strand to SEQ ID NO: 872710
ucacucaaaccacagauuu

SEQ ID NO: 872712 - RNA, 19 nt, Artificial Sequence
  Description of Artificial Sequence: Synthetic oligonucleotide
  Sense strand starting at position 1705 of SEQ ID NO: 588550
uggcgaucacuccaggagu

SEQ ID NO: 872713 - RNA, 19 nt, Artificial Sequence
  Description of Artificial Sequence: Synthetic oligonucleotide
  Antisense strand to SEQ ID NO: 872712
acuccuggagugaucgcca

SEQ ID NO: 872714 - RNA, 19 nt, Artificial Sequence
  Description of Artificial Sequence: Synthetic oligonucleotide
  Sense strand starting at position 2538 of SEQ ID NO: 588550
gccucaccucccgaaacuu

SEQ ID NO: 872715 - RNA, 19 nt, Artificial Sequence
  Description of Artificial Sequence: Synthetic oligonucleotide
  Antisense strand to SEQ ID NO: 872714
aaguuucgggaggugaggc

SEQ ID NO: 872716 - RNA, 19 nt, Artificial Sequence
  Description of Artificial Sequence: Synthetic oligonucleotide
  Sense strand starting at position 2546 of SEQ ID NO: 588550
ucccgaaacuuccugacau

SEQ ID NO: 872717 - RNA, 19 nt, Artificial Sequence
  Description of Artificial Sequence: Synthetic oligonucleotide
  Antisense strand to SEQ ID NO: 872716
augucaggaaguuucggga

SEQ ID NO: 872718 - RNA, 19 nt, Artificial Sequence
  Description of Artificial Sequence: Synthetic oligonucleotide
  Sense strand starting at position 2547 of SEQ ID NO: 588550
cccgaaacuuccugacauu

SEQ ID NO: 872719 - RNA, 19 nt, Artificial Sequence
  Description of Artificial Sequence: Synthetic oligonucleotide
  Antisense strand to SEQ ID NO: 872718
aaugucaggaaguuucggg

SEQ ID NO: 872720 - RNA, 19 nt, Artificial Sequence
  Description of Artificial Sequence: Synthetic oligonucleotide
  Sense strand starting at position 2604 of SEQ ID NO: 588550
gccggcuccacgucaaaua

SEQ ID NO: 872721 - RNA, 19 nt, Artificial Sequence
  Description of Artificial Sequence: Synthetic oligonucleotide
  Antisense strand to SEQ ID NO: 872720
uauuugacguggagccggc

SEQ ID NO: 872722 - RNA, 19 nt, Artificial Sequence
  Description of Artificial Sequence: Synthetic oligonucleotide
  Sense strand starting at position 2749 of SEQ ID NO: 588550
uuugaucgucuucgaaaca

SEQ ID NO: 872723 - RNA, 19 nt, Artificial Sequence
  Description of Artificial Sequence: Synthetic oligonucleotide
  Antisense strand to SEQ ID NO: 872722
uguuucgaagacgaucaaa

SEQ ID NO: 872724 - RNA, 19 nt, Artificial Sequence
  Description of Artificial Sequence: Synthetic oligonucleotide
  Sense strand starting at position 2750 of SEQ ID NO: 588550
uugaucgucuucgaaacaa

SEQ ID NO: 872725 - RNA, 19 nt, Artificial Sequence
  Description of Artificial Sequence: Synthetic oligonucleotide
  Antisense strand to SEQ ID NO: 872724
uuguuucgaagacgaucaa

SEQ ID NO: 872726 - RNA, 19 nt, Artificial Sequence
  Description of Artificial Sequence: Synthetic oligonucleotide
  Sense strand starting at position 3436 of SEQ ID NO: 588550
gguagcggcucugaagaaa

SEQ ID NO: 872727 - RNA, 19 nt, Artificial Sequence
  Description of Artificial Sequence: Synthetic oligonucleotide
  Antisense strand to SEQ ID NO: 872726
uuucuucagagccgcuacc

SEQ ID NO: 872728 - RNA, 19 nt, Artificial Sequence
  Description of Artificial Sequence: Synthetic oligonucleotide
  Sense strand starting at position 3439 of SEQ ID NO: 588550
agcggcucugaagaaauua

SEQ ID NO: 872729 - RNA, 19 nt, Artificial Sequence
  Description of Artificial Sequence: Synthetic oligonucleotide
  Antisense strand to SEQ ID NO: 872728
uaauuucuucagagccgcu

SEQ ID NO: 872730 - RNA, 19 nt, Artificial Sequence
  Description of Artificial Sequence: Synthetic oligonucleotide
  Sense strand starting at position 3891 of SEQ ID NO: 588550
gcgggaggcuuggucagaa

SEQ ID NO: 872731 - RNA, 19 nt, Artificial Sequence
  Description of Artificial Sequence: Synthetic oligonucleotide
  Antisense strand to SEQ ID NO: 872730
uucugaccaagccucccgc

SEQ ID NO: 872732 - RNA, 19 nt, Artificial Sequence
  Description of Artificial Sequence: Synthetic oligonucleotide
  Sense strand starting at position 3893 of SEQ ID NO: 588550
gggaggcuuggucagaagu

SEQ ID NO: 872733 - RNA, 19 nt, Artificial Sequence
  Description of Artificial Sequence: Synthetic oligonucleotide
  Antisense strand to SEQ ID NO: 872732
acuucugaccaagccuccc

SEQ ID NO: 872734 - RNA, 19 nt, Artificial Sequence
  Description of Artificial Sequence: Synthetic oligonucleotide
  Sense strand starting at position 3944 of SEQ ID NO: 588550
cccggcuuuguggaggauu

SEQ ID NO: 872735 - RNA, 19 nt, Artificial Sequence
  Description of Artificial Sequence: Synthetic oligonucleotide
  Antisense strand to SEQ ID NO: 872734
aauccuccacaaagccggg

SEQ ID NO: 872736 - RNA, 19 nt, Artificial Sequence
  Description of Artificial Sequence: Synthetic oligonucleotide
  Sense strand starting at position 3945 of SEQ ID NO: 588550
ccggcuuuguggaggauua

SEQ ID NO: 872737 - RNA, 19 nt, Artificial Sequence
  Description of Artificial Sequence: Synthetic oligonucleotide
  Antisense strand to SEQ ID NO: 872736
uaauccuccacaaagccgg

SEQ ID NO: 872738 - RNA, 19 nt, Artificial Sequence
  Description of Artificial Sequence: Synthetic oligonucleotide
  Sense strand starting at position 364 of SEQ ID NO: 588551
agguucuguuguccagaga

SEQ ID NO: 872739 - RNA, 19 nt, Artificial Sequence
  Description of Artificial Sequence: Synthetic oligonucleotide
  Antisense strand to SEQ ID NO: 872738
ucucuggacaacagaaccu

SEQ ID NO: 872740 - RNA, 19 nt, Artificial Sequence
  Description of Artificial Sequence: Synthetic oligonucleotide
  Sense strand starting at position 365 of SEQ ID NO: 588551
gguucuguuguccagagag

SEQ ID NO: 872741 - RNA, 19 nt, Artificial Sequence
  Description of Artificial Sequence: Synthetic oligonucleotide
  Antisense strand to SEQ ID NO: 872740
cucucuggacaacagaacc

SEQ ID NO: 872742 - RNA, 19 nt, Artificial Sequence
  Description of Artificial Sequence: Synthetic oligonucleotide
  Sense strand starting at position 399 of SEQ ID NO: 588551
uagccucugguuugacaaa

SEQ ID NO: 872743 - RNA, 19 nt, Artificial Sequence
  Description of Artificial Sequence: Synthetic oligonucleotide
  Antisense strand to SEQ ID NO: 872742
uuugucaaaccagaggcua

SEQ ID NO: 872744 - RNA, 19 nt, Artificial Sequence
  Description of Artificial Sequence: Synthetic oligonucleotide
  Sense strand starting at position 406 of SEQ ID NO: 588551
ugguuugacaaauggugaa

SEQ ID NO: 872745 - RNA, 19 nt, Artificial Sequence
  Description of Artificial Sequence: Synthetic oligonucleotide
  Antisense strand to SEQ ID NO: 872744
uucaccauuugucaaacca

SEQ ID NO: 872746 - RNA, 19 nt, Artificial Sequence
  Description of Artificial Sequence: Synthetic oligonucleotide
  Sense strand starting at position 528 of SEQ ID NO: 588551
agccaaugacaguggugaa

SEQ ID NO: 872747 - RNA, 19 nt, Artificial Sequence
  Description of Artificial Sequence: Synthetic oligonucleotide
  Antisense strand to SEQ ID NO: 872746
uucaccacugucauuggcu

SEQ ID NO: 872748 - RNA, 19 nt, Artificial Sequence
  Description of Artificial Sequence: Synthetic oligonucleotide
  Sense strand starting at position 633 of SEQ ID NO: 588551
ccacauuccuaggugacga

SEQ ID NO: 872749 - RNA, 19 nt, Artificial Sequence
  Description of Artificial Sequence: Synthetic oligonucleotide
  Antisense strand to SEQ ID NO: 872748
ucgucaccuaggaaugugg

SEQ ID NO: 872750 - RNA, 19 nt, Artificial Sequence
  Description of Artificial Sequence: Synthetic oligonucleotide
  Sense strand starting at position 650 of SEQ ID NO: 588551
gauggauugcccuguaacc

SEQ ID NO: 872751 - RNA, 19 nt, Artificial Sequence
  Description of Artificial Sequence: Synthetic oligonucleotide
  Antisense strand to SEQ ID NO: 872750
gguuacagggcaauccauc

SEQ ID NO: 872752 - RNA, 19 nt, Artificial Sequence
  Description of Artificial Sequence: Synthetic oligonucleotide
  Sense strand starting at position 719 of SEQ ID NO: 588551
augaaacucccuugguaac

SEQ ID NO: 872753 - RNA, 19 nt, Artificial Sequence
  Description of Artificial Sequence: Synthetic oligonucleotide
  Antisense strand to SEQ ID NO: 872752
guuaccaagggaguuucau

SEQ ID NO: 872754 - RNA, 19 nt, Artificial Sequence
  Description of Artificial Sequence: Synthetic oligonucleotide
  Sense strand starting at position 974 of SEQ ID NO: 588551
gcagcuuauggauauacaa

SEQ ID NO: 872755 - RNA, 19 nt, Artificial Sequence
  Description of Artificial Sequence: Synthetic oligonucleotide
  Antisense strand to SEQ ID NO: 872754
uuguauauccauaagcugc

SEQ ID NO: 872756 - RNA, 19 nt, Artificial Sequence
  Description of Artificial Sequence: Synthetic oligonucleotide
  Sense strand starting at position 1034 of SEQ ID NO: 588551
ugcaaaugauagcuuacua

SEQ ID NO: 872757 - RNA, 19 nt, Artificial Sequence
  Description of Artificial Sequence: Synthetic oligonucleotide
  Antisense strand to SEQ ID NO: 872756
uaguaagcuaucauuugca

SEQ ID NO: 872758 - RNA, 19 nt, Artificial Sequence
  Description of Artificial Sequence: Synthetic oligonucleotide
  Sense strand starting at position 1097 of SEQ ID NO: 588551
cguggagaucguccguauu

SEQ ID NO: 872759 - RNA, 19 nt, Artificial Sequence
  Description of Artificial Sequence: Synthetic oligonucleotide
  Antisense strand to SEQ ID NO: 872758
aauacggacgaucuccacg

SEQ ID NO: 872760 - RNA, 19 nt, Artificial Sequence
  Description of Artificial Sequence: Synthetic oligonucleotide
  Sense strand starting at position 1289 of SEQ ID NO: 588551
gggagagcaguguaucagu

SEQ ID NO: 872761 - RNA, 19 nt, Artificial Sequence
  Description of Artificial Sequence: Synthetic oligonucleotide
  Antisense strand to SEQ ID NO: 872760
acugauacacugcucuccc

SEQ ID NO: 872762 - RNA, 19 nt, Artificial Sequence
  Description of Artificial Sequence: Synthetic oligonucleotide
  Sense strand starting at position 1327 of SEQ ID NO: 588551
gguauaauucuuggagauc

SEQ ID NO: 872763 - RNA, 19 nt, Artificial Sequence
  Description of Artificial Sequence: Synthetic oligonucleotide
  Antisense strand to SEQ ID NO: 872762
gaucuccaagaauuauacc

SEQ ID NO: 872764 - RNA, 19 nt, Artificial Sequence
  Description of Artificial Sequence: Synthetic oligonucleotide
  Sense strand starting at position 1346 of SEQ ID NO: 588551
uacuguuagcuaggaaauu

SEQ ID NO: 872765 - RNA, 19 nt, Artificial Sequence
  Description of Artificial Sequence: Synthetic oligonucleotide
  Antisense strand to SEQ ID NO: 872764
aauuuccuagcuaacagua

SEQ ID NO: 872766 - RNA, 19 nt, Artificial Sequence
  Description of Artificial Sequence: Synthetic oligonucleotide
  Sense strand starting at position 1491 of SEQ ID NO: 588551
uggugugucguaaaggcuu

SEQ ID NO: 872767 - RNA, 19 nt, Artificial Sequence
  Description of Artificial Sequence: Synthetic oligonucleotide
  Antisense strand to SEQ ID NO: 872766
aagccuuuacgacacacca

SEQ ID NO: 872768 - RNA, 19 nt, Artificial Sequence
  Description of Artificial Sequence: Synthetic oligonucleotide
  Sense strand starting at position 1497 of SEQ ID NO: 588551
gucguaaaggcuuaauaaa

SEQ ID NO: 872769 - RNA, 19 nt, Artificial Sequence
  Description of Artificial Sequence: Synthetic oligonucleotide
  Antisense strand to SEQ ID NO: 872768
uuuauuaagccuuuacgac

SEQ ID NO: 872770 - RNA, 19 nt, Artificial Sequence
  Description of Artificial Sequence: Synthetic oligonucleotide
  Sense strand starting at position 1526 of SEQ ID NO: 588551
gguucugaugcugaugaau

SEQ ID NO: 872771 - RNA, 19 nt, Artificial Sequence
  Description of Artificial Sequence: Synthetic oligonucleotide
  Antisense strand to SEQ ID NO: 872770
auucaucagcaucagaacc

SEQ ID NO: 872772 - RNA, 19 nt, Artificial Sequence
  Description of Artificial Sequence: Synthetic oligonucleotide
  Sense strand starting at position 1680 of SEQ ID NO: 588551
auugcacuuugaucagaag

SEQ ID NO: 872773 - RNA, 19 nt, Artificial Sequence
  Description of Artificial Sequence: Synthetic oligonucleotide
  Antisense strand to SEQ ID NO: 872772
cuucugaucaaagugcaau

SEQ ID NO: 872774 - RNA, 19 nt, Artificial Sequence
  Description of Artificial Sequence: Synthetic oligonucleotide
  Sense strand starting at position 1964 of SEQ ID NO: 588551
acagaaggcugucugugau

SEQ ID NO: 872775 - RNA, 19 nt, Artificial Sequence
  Description of Artificial Sequence: Synthetic oligonucleotide
  Antisense strand to SEQ ID NO: 872774
aucacagacagccuucugu

SEQ ID NO: 872776 - RNA, 19 nt, Artificial Sequence
  Description of Artificial Sequence: Synthetic oligonucleotide
  Sense strand starting at position 2019 of SEQ ID NO: 588551
ggauguuuggacuggacca

SEQ ID NO: 872777 - RNA, 19 nt, Artificial Sequence
  Description of Artificial Sequence: Synthetic oligonucleotide
  Antisense strand to SEQ ID NO: 872776
ugguccaguccaaacaucc

SEQ ID NO: 872778 - RNA, 19 nt, Artificial Sequence
  Description of Artificial Sequence: Synthetic oligonucleotide
  Sense strand starting at position 2580 of SEQ ID NO: 588551
ucgccuggccaggaauaau

SEQ ID NO: 872779 - RNA, 19 nt, Artificial Sequence
  Description of Artificial Sequence: Synthetic oligonucleotide
  Antisense strand to SEQ ID NO: 872778
auuauuccuggccaggcga

SEQ ID NO: 872780 - RNA, 19 nt, Artificial Sequence
  Description of Artificial Sequence: Synthetic oligonucleotide
  Sense strand starting at position 2646 of SEQ ID NO: 588551
guaaacauuuaacauggua

SEQ ID NO: 872781 - RNA, 19 nt, Artificial Sequence
  Description of Artificial Sequence: Synthetic oligonucleotide
  Antisense strand to SEQ ID NO: 872780
uaccauguuaaauguuuac

SEQ ID NO: 872782 - RNA, 19 nt, Artificial Sequence
  Description of Artificial Sequence: Synthetic oligonucleotide
  Sense strand starting at position 2654 of SEQ ID NO: 588551
uuaacaugguaucuagaug

SEQ ID NO: 872783 - RNA, 19 nt, Artificial Sequence
  Description of Artificial Sequence: Synthetic oligonucleotide
  Antisense strand to SEQ ID NO: 872782
caucuagauaccauguuaa

SEQ ID NO: 872784 - RNA, 19 nt, Artificial Sequence
  Description of Artificial Sequence: Synthetic oligonucleotide
  Sense strand starting at position 2659 of SEQ ID NO: 588551
augguaucuagauguagua

SEQ ID NO: 872785 - RNA, 19 nt, Artificial Sequence
  Description of Artificial Sequence: Synthetic oligonucleotide
  Antisense strand to SEQ ID NO: 872784
uacuacaucuagauaccau

SEQ ID NO: 872786 - RNA, 19 nt, Artificial Sequence
  Description of Artificial Sequence: Synthetic oligonucleotide
  Sense strand starting at position 2661 of SEQ ID NO: 588551
gguaucuagauguaguaag

SEQ ID NO: 872787 - RNA, 19 nt, Artificial Sequence
  Description of Artificial Sequence: Synthetic oligonucleotide
  Antisense strand to SEQ ID NO: 872786
cuuacuacaucuagauacc

SEQ ID NO: 872788 - RNA, 19 nt, Artificial Sequence
  Description of Artificial Sequence: Synthetic oligonucleotide
  Sense strand starting at position 2681 of SEQ ID NO: 588551
acuuuaagaaaggguaguu

SEQ ID NO: 872789 - RNA, 19 nt, Artificial Sequence
  Description of Artificial Sequence: Synthetic oligonucleotide
  Antisense strand to SEQ ID NO: 872788
aacuacccuuucuuaaagu

SEQ ID NO: 872790 - RNA, 19 nt, Artificial Sequence
  Description of Artificial Sequence: Synthetic oligonucleotide
  Sense strand starting at position 2759 of SEQ ID NO: 588551
aaggaaucacuuuguauug

SEQ ID NO: 872791 - RNA, 19 nt, Artificial Sequence
  Description of Artificial Sequence: Synthetic oligonucleotide
  Antisense strand to SEQ ID NO: 872790
caauacaaagugauuccuu

SEQ ID NO: 872792 - RNA, 19 nt, Artificial Sequence
  Description of Artificial Sequence: Synthetic oligonucleotide
  Sense strand starting at position 2871 of SEQ ID NO: 588551
ggauuaacauguucucaau

SEQ ID NO: 872793 - RNA, 19 nt, Artificial Sequence
  Description of Artificial Sequence: Synthetic oligonucleotide
  Antisense strand to SEQ ID NO: 872792
auugagaacauguuaaucc

SEQ ID NO: 872794 - RNA, 19 nt, Artificial Sequence
  Description of Artificial Sequence: Synthetic oligonucleotide
  Sense strand starting at position 3564 of SEQ ID NO: 588551
ggugauucuugaguauaau

SEQ ID NO: 872795 - RNA, 19 nt, Artificial Sequence
  Description of Artificial Sequence: Synthetic oligonucleotide
  Antisense strand to SEQ ID NO: 872794
auuauacucaagaaucacc

SEQ ID NO: 872796 - RNA, 19 nt, Artificial Sequence
  Description of Artificial Sequence: Synthetic oligonucleotide
  Sense strand starting at position 3565 of SEQ ID NO: 588551
gugauucuugaguauaauc

SEQ ID NO: 872797 - RNA, 19 nt, Artificial Sequence
  Description of Artificial Sequence: Synthetic oligonucleotide
  Antisense strand to SEQ ID NO: 872796
gauuauacucaagaaucac

SEQ ID NO: 872798 - RNA, 19 nt, Artificial Sequence
  Description of Artificial Sequence: Synthetic oligonucleotide
  Sense strand starting at position 3600 of SEQ ID NO: 588551
cauugugcaggucauuaua

SEQ ID NO: 872799 - RNA, 19 nt, Artificial Sequence
  Description of Artificial Sequence: Synthetic oligonucleotide
  Antisense strand to SEQ ID NO: 872798
uauaaugaccugcacaaug

SEQ ID NO: 872800 - RNA, 19 nt, Artificial Sequence
  Description of Artificial Sequence: Synthetic oligonucleotide
  Sense strand starting at position 3637 of SEQ ID NO: 588551
cucagaucaggcuguauau

SEQ ID NO: 872801 - RNA, 19 nt, Artificial Sequence
  Description of Artificial Sequence: Synthetic oligonucleotide
  Antisense strand to SEQ ID NO: 872800
auauacagccugaucugag

SEQ ID NO: 872802 - RNA, 19 nt, Artificial Sequence
  Description of Artificial Sequence: Synthetic oligonucleotide
  Sense strand starting at position 3639 of SEQ ID NO: 588551
cagaucaggcuguauauua

SEQ ID NO: 872803 - RNA, 19 nt, Artificial Sequence
  Description of Artificial Sequence: Synthetic oligonucleotide
  Antisense strand to SEQ ID NO: 872802
uaauauacagccugaucug

SEQ ID NO: 872804 - RNA, 19 nt, Artificial Sequence
  Description of Artificial Sequence: Synthetic oligonucleotide
  Sense strand starting at position 3736 of SEQ ID NO: 588551
ggcccaggugucgauagau

SEQ ID NO: 872805 - RNA, 19 nt, Artificial Sequence
  Description of Artificial Sequence: Synthetic oligonucleotide
  Antisense strand to SEQ ID NO: 872804
aucuaucgacaccugggcc

SEQ ID NO: 872806 - RNA, 19 nt, Artificial Sequence
  Description of Artificial Sequence: Synthetic oligonucleotide
  Sense strand starting at position 3799 of SEQ ID NO: 588551
acuacugauuuauagaggu

SEQ ID NO: 872807 - RNA, 19 nt, Artificial Sequence
  Description of Artificial Sequence: Synthetic oligonucleotide
  Antisense strand to SEQ ID NO: 872806
accucuauaaaucaguagu

SEQ ID NO: 872808 - RNA, 19 nt, Artificial Sequence
  Description of Artificial Sequence: Synthetic oligonucleotide
  Sense strand starting at position 3977 of SEQ ID NO: 588551
ugagguuaaagauguguau

SEQ ID NO: 872809 - RNA, 19 nt, Artificial Sequence
  Description of Artificial Sequence: Synthetic oligonucleotide
  Antisense strand to SEQ ID NO: 872808
auacacaucuuuaaccuca

SEQ ID NO: 872810 - RNA, 19 nt, Artificial Sequence
  Description of Artificial Sequence: Synthetic oligonucleotide
  Sense strand starting at position 3979 of SEQ ID NO: 588551
agguuaaagauguguauga

SEQ ID NO: 872811 - RNA, 19 nt, Artificial Sequence
  Description of Artificial Sequence: Synthetic oligonucleotide
  Antisense strand to SEQ ID NO: 872810
ucauacacaucuuuaaccu

SEQ ID NO: 872812 - RNA, 19 nt, Artificial Sequence
  Description of Artificial Sequence: Synthetic oligonucleotide
  Sense strand starting at position 3980 of SEQ ID NO: 588551
gguuaaagauguguaugaa

SEQ ID NO: 872813 - RNA, 19 nt, Artificial Sequence
  Description of Artificial Sequence: Synthetic oligonucleotide
  Antisense strand to SEQ ID NO: 872812
uucauacacaucuuuaacc

SEQ ID NO: 872814 - RNA, 19 nt, Artificial Sequence
  Description of Artificial Sequence: Synthetic oligonucleotide
  Sense strand starting at position 3981 of SEQ ID NO: 588551
guuaaagauguguaugaag

SEQ ID NO: 872815 - RNA, 19 nt, Artificial Sequence
  Description of Artificial Sequence: Synthetic oligonucleotide
  Antisense strand to SEQ ID NO: 872814
cuucauacacaucuuuaac

SEQ ID NO: 872816 - RNA, 19 nt, Artificial Sequence
  Description of Artificial Sequence: Synthetic oligonucleotide
  Sense strand starting at position 3983 of SEQ ID NO: 588551
uaaagauguguaugaagca

SEQ ID NO: 872817 - RNA, 19 nt, Artificial Sequence
  Description of Artificial Sequence: Synthetic oligonucleotide
  Antisense strand to SEQ ID NO: 872816
ugcuucauacacaucuuua

SEQ ID NO: 872818 - RNA, 19 nt, Artificial Sequence
  Description of Artificial Sequence: Synthetic oligonucleotide
  Sense strand starting at position 119 of SEQ ID NO: 588552
uugguuauuaauggacaga

SEQ ID NO: 872819 - RNA, 19 nt, Artificial Sequence
  Description of Artificial Sequence: Synthetic oligonucleotide
  Antisense strand to SEQ ID NO: 872818
ucuguccauuaauaaccaa

SEQ ID NO: 872820 - RNA, 19 nt, Artificial Sequence
  Description of Artificial Sequence: Synthetic oligonucleotide
  Sense strand starting at position 330 of SEQ ID NO: 588552
ugagcuauauccucuagga

SEQ ID NO: 872821 - RNA, 19 nt, Artificial Sequence
  Description of Artificial Sequence: Synthetic oligonucleotide
  Antisense strand to SEQ ID NO: 872820
uccuagaggauauagcuca

SEQ ID NO: 872822 - RNA, 19 nt, Artificial Sequence
  Description of Artificial Sequence: Synthetic oligonucleotide
  Sense strand starting at position 332 of SEQ ID NO: 588552
agcuauauccucuaggaua

SEQ ID NO: 872823 - RNA, 19 nt, Artificial Sequence
  Description of Artificial Sequence: Synthetic oligonucleotide
  Antisense strand to SEQ ID NO: 872822
uauccuagaggauauagcu

SEQ ID NO: 872824 - RNA, 19 nt, Artificial Sequence
  Description of Artificial Sequence: Synthetic oligonucleotide
  Sense strand starting at position 334 of SEQ ID NO: 588552
cuauauccucuaggauagu

SEQ ID NO: 872825 - RNA, 19 nt, Artificial Sequence
  Description of Artificial Sequence: Synthetic oligonucleotide
  Antisense strand to SEQ ID NO: 872824
acuauccuagaggauauag

SEQ ID NO: 872826 - RNA, 19 nt, Artificial Sequence
  Description of Artificial Sequence: Synthetic oligonucleotide
  Sense strand starting at position 399 of SEQ ID NO: 588552
gaauuuagauguuauugag

SEQ ID NO: 872827 - RNA, 19 nt, Artificial Sequence
  Description of Artificial Sequence: Synthetic oligonucleotide
  Antisense strand to SEQ ID NO: 872826
cucaauaacaucuaaauuc

SEQ ID NO: 872828 - RNA, 19 nt, Artificial Sequence
  Description of Artificial Sequence: Synthetic oligonucleotide
  Sense strand starting at position 801 of SEQ ID NO: 588552
agcuuaaguugagccauuu

SEQ ID NO: 872829 - RNA, 19 nt, Artificial Sequence
  Description of Artificial Sequence: Synthetic oligonucleotide
  Antisense strand to SEQ ID NO: 872828
aaauggcucaacuuaagcu

SEQ ID NO: 872830 - RNA, 19 nt, Artificial Sequence
  Description of Artificial Sequence: Synthetic oligonucleotide
  Sense strand starting at position 859 of SEQ ID NO: 588552
guaaacauaugaucaaagu

SEQ ID NO: 872831 - RNA, 19 nt, Artificial Sequence
  Description of Artificial Sequence: Synthetic oligonucleotide
  Antisense strand to SEQ ID NO: 872830
acuuugaucauauguuuac

SEQ ID NO: 872832 - RNA, 19 nt, Artificial Sequence
  Description of Artificial Sequence: Synthetic oligonucleotide
  Sense strand starting at position 988 of SEQ ID NO: 588552
ggcuuauucgcuguaaugu

SEQ ID NO: 872833 - RNA, 19 nt, Artificial Sequence
  Description of Artificial Sequence: Synthetic oligonucleotide
  Antisense strand to SEQ ID NO: 872832
acauuacagcgaauaagcc

SEQ ID NO: 872834 - RNA, 19 nt, Artificial Sequence
  Description of Artificial Sequence: Synthetic oligonucleotide
  Sense strand starting at position 998 of SEQ ID NO: 588552
cuguaauguggauaauccu

SEQ ID NO: 872835 - RNA, 19 nt, Artificial Sequence
  Description of Artificial Sequence: Synthetic oligonucleotide
  Antisense strand to SEQ ID NO: 872834
aggauuauccacauuacag

SEQ ID NO: 872836 - RNA, 19 nt, Artificial Sequence
  Description of Artificial Sequence: Synthetic oligonucleotide
  Sense strand starting at position 1242 of SEQ ID NO: 588552
aaaguaaugcuguaaauug

SEQ ID NO: 872837 - RNA, 19 nt, Artificial Sequence
  Description of Artificial Sequence: Synthetic oligonucleotide
  Antisense strand to SEQ ID NO: 872836
caauuuacagcauuacuuu

SEQ ID NO: 872838 - RNA, 19 nt, Artificial Sequence
  Description of Artificial Sequence: Synthetic oligonucleotide
  Sense strand starting at position 1462 of SEQ ID NO: 588552
aggaacuuaucaucuaguu

SEQ ID NO: 872839 - RNA, 19 nt, Artificial Sequence
  Description of Artificial Sequence: Synthetic oligonucleotide
  Antisense strand to SEQ ID NO: 872838
aacuagaugauaaguuccu

SEQ ID NO: 872840 - RNA, 19 nt, Artificial Sequence
  Description of Artificial Sequence: Synthetic oligonucleotide
  Sense strand starting at position 1482 of SEQ ID NO: 588552
ugucuuuaaccuuauggaa

SEQ ID NO: 872841 - RNA, 19 nt, Artificial Sequence
  Description of Artificial Sequence: Synthetic oligonucleotide
  Antisense strand to SEQ ID NO: 872840
uuccauaagguuaaagaca

SEQ ID NO: 872842 - RNA, 19 nt, Artificial Sequence
  Description of Artificial Sequence: Synthetic oligonucleotide
  Sense strand starting at position 1587 of SEQ ID NO: 588552
agugcuaugguacaagaaa

SEQ ID NO: 872843 - RNA, 19 nt, Artificial Sequence
  Description of Artificial Sequence: Synthetic oligonucleotide
  Antisense strand to SEQ ID NO: 872842
uuucuuguaccauagcacu

SEQ ID NO: 872844 - RNA, 19 nt, Artificial Sequence
  Description of Artificial Sequence: Synthetic oligonucleotide
  Sense strand starting at position 1623 of SEQ ID NO: 588552
auaugacaagccgaaguuu

SEQ ID NO: 872845 - RNA, 19 nt, Artificial Sequence
  Description of Artificial Sequence: Synthetic oligonucleotide
  Antisense strand to SEQ ID NO: 872844
aaacuucggcuugucauau

SEQ ID NO: 872846 - RNA, 19 nt, Artificial Sequence
  Description of Artificial Sequence: Synthetic oligonucleotide
  Sense strand starting at position 1690 of SEQ ID NO: 588552
gaucaauaauguuccugag

SEQ ID NO: 872847 - RNA, 19 nt, Artificial Sequence
  Description of Artificial Sequence: Synthetic oligonucleotide
  Antisense strand to SEQ ID NO: 872846
cucaggaacauuauugauc

SEQ ID NO: 872848 - RNA, 19 nt, Artificial Sequence
  Description of Artificial Sequence: Synthetic oligonucleotide
  Sense strand starting at position 1696 of SEQ ID NO: 588552
uaauguuccugagugaaau

SEQ ID NO: 872849 - RNA, 19 nt, Artificial Sequence
  Description of Artificial Sequence: Synthetic oligonucleotide
  Antisense strand to SEQ ID NO: 872848
auuucacucaggaacauua

SEQ ID NO: 872850 - RNA, 19 nt, Artificial Sequence
  Description of Artificial Sequence: Synthetic oligonucleotide
  Sense strand starting at position 1706 of SEQ ID NO: 588552
gagugaaauuauucucagu

SEQ ID NO: 872851 - RNA, 19 nt, Artificial Sequence
  Description of Artificial Sequence: Synthetic oligonucleotide
  Antisense strand to SEQ ID NO: 872850
acugagaauaauuucacuc

SEQ ID NO: 872852 - RNA, 19 nt, Artificial Sequence
  Description of Artificial Sequence: Synthetic oligonucleotide
  Sense strand starting at position 1724 of SEQ ID NO: 588552
uguaaucuuggccagaauc

SEQ ID NO: 872853 - RNA, 19 nt, Artificial Sequence
  Description of Artificial Sequence: Synthetic oligonucleotide
  Antisense strand to SEQ ID NO: 872852
gauucuggccaagauuaca

SEQ ID NO: 872854 - RNA, 19 nt, Artificial Sequence
  Description of Artificial Sequence: Synthetic oligonucleotide
  Sense strand starting at position 2069 of SEQ ID NO: 588552
uggugucaacucuauuauu

SEQ ID NO: 872855 - RNA, 19 nt, Artificial Sequence
  Description of Artificial Sequence: Synthetic oligonucleotide
  Antisense strand to SEQ ID NO: 872854
aauaauagaguugacacca

SEQ ID NO: 872856 - RNA, 19 nt, Artificial Sequence
  Description of Artificial Sequence: Synthetic oligonucleotide
  Sense strand starting at position 2228 of SEQ ID NO: 588552
agaagagacguuuggaagu

SEQ ID NO: 872857 - RNA, 19 nt, Artificial Sequence
  Description of Artificial Sequence: Synthetic oligonucleotide
  Antisense strand to SEQ ID NO: 872856
acuuccaaacgucucuucu

SEQ ID NO: 872858 - RNA, 19 nt, Artificial Sequence
  Description of Artificial Sequence: Synthetic oligonucleotide
  Sense strand starting at position 2259 of SEQ ID NO: 588552
gcuuacuuacuguggauuu

SEQ ID NO: 872859 - RNA, 19 nt, Artificial Sequence
  Description of Artificial Sequence: Synthetic oligonucleotide
  Antisense strand to SEQ ID NO: 872858
aaauccacaguaaguaagc

SEQ ID NO: 872860 - RNA, 19 nt, Artificial Sequence
  Description of Artificial Sequence: Synthetic oligonucleotide
  Sense strand starting at position 2348 of SEQ ID NO: 588552
ugagaucauuuacauugga

SEQ ID NO: 872861 - RNA, 19 nt, Artificial Sequence
  Description of Artificial Sequence: Synthetic oligonucleotide
  Antisense strand to SEQ ID NO: 872860
uccaauguaaaugaucuca

SEQ ID NO: 872862 - RNA, 19 nt, Artificial Sequence
  Description of Artificial Sequence: Synthetic oligonucleotide
  Sense strand starting at position 2411 of SEQ ID NO: 588552
ugggaauuacugcaguaca

SEQ ID NO: 872863 - RNA, 19 nt, Artificial Sequence
  Description of Artificial Sequence: Synthetic oligonucleotide
  Antisense strand to SEQ ID NO: 872862
uguacugcaguaauuccca

SEQ ID NO: 872864 - RNA, 19 nt, Artificial Sequence
  Description of Artificial Sequence: Synthetic oligonucleotide
  Sense strand starting at position 2579 of SEQ ID NO: 588552
cacugcuaugucgcaaagu

SEQ ID NO: 872865 - RNA, 19 nt, Artificial Sequence
  Description of Artificial Sequence: Synthetic oligonucleotide
  Antisense strand to SEQ ID NO: 872864
acuuugcgacauagcagug

SEQ ID NO: 872866 - RNA, 19 nt, Artificial Sequence
  Description of Artificial Sequence: Synthetic oligonucleotide
  Sense strand starting at position 2850 of SEQ ID NO: 588552
cuguaauguuaguugauuu

SEQ ID NO: 872867 - RNA, 19 nt, Artificial Sequence
  Description of Artificial Sequence: Synthetic oligonucleotide
  Antisense strand to SEQ ID NO: 872866
aaaucaacuaacauuacag

SEQ ID NO: 872868 - RNA, 19 nt, Artificial Sequence
  Description of Artificial Sequence: Synthetic oligonucleotide
  Sense strand starting at position 2954 of SEQ ID NO: 588552
uuaagaugaccuugcaauu

SEQ ID NO: 872869 - RNA, 19 nt, Artificial Sequence
  Description of Artificial Sequence: Synthetic oligonucleotide
  Antisense strand to SEQ ID NO: 872868
aauugcaaggucaucuuaa

SEQ ID NO: 872870 - RNA, 19 nt, Artificial Sequence
  Description of Artificial Sequence: Synthetic oligonucleotide
  Sense strand starting at position 2964 of SEQ ID NO: 588552
cuugcaauuugucccugaa

SEQ ID NO: 872871 - RNA, 19 nt, Artificial Sequence
  Description of Artificial Sequence: Synthetic oligonucleotide
  Antisense strand to SEQ ID NO: 872870
uucagggacaaauugcaag

SEQ ID NO: 872872 - RNA, 19 nt, Artificial Sequence
  Description of Artificial Sequence: Synthetic oligonucleotide
  Sense strand starting at position 3004 of SEQ ID NO: 588552
ccugcauuaggugaauauu

SEQ ID NO: 872873 - RNA, 19 nt, Artificial Sequence
  Description of Artificial Sequence: Synthetic oligonucleotide
  Antisense strand to SEQ ID NO: 872872
aauauucaccuaaugcagg

SEQ ID NO: 872874 - RNA, 19 nt, Artificial Sequence
  Description of Artificial Sequence: Synthetic oligonucleotide
  Sense strand starting at position 3185 of SEQ ID NO: 588552
uguguaauguggguuauuu

SEQ ID NO: 872875 - RNA, 19 nt, Artificial Sequence
  Description of Artificial Sequence: Synthetic oligonucleotide
  Antisense strand to SEQ ID NO: 872874
aaauaacccacauuacaca

SEQ ID NO: 872876 - RNA, 19 nt, Artificial Sequence
  Description of Artificial Sequence: Synthetic oligonucleotide
  Sense strand starting at position 3253 of SEQ ID NO: 588552
ucaguaauccuguauugau

SEQ ID NO: 872877 - RNA, 19 nt, Artificial Sequence
  Description of Artificial Sequence: Synthetic oligonucleotide
  Antisense strand to SEQ ID NO: 872876
aucaauacaggauuacuga

SEQ ID NO: 872878 - RNA, 19 nt, Artificial Sequence
  Description of Artificial Sequence: Synthetic oligonucleotide
  Sense strand starting at position 3280 of SEQ ID NO: 588552
auguuucuagcgcugugau

SEQ ID NO: 872879 - RNA, 19 nt, Artificial Sequence
  Description of Artificial Sequence: Synthetic oligonucleotide
  Antisense strand to SEQ ID NO: 872878
aucacagcgcuagaaacau

SEQ ID NO: 872880 - RNA, 19 nt, Artificial Sequence
  Description of Artificial Sequence: Synthetic oligonucleotide
  Sense strand starting at position 3432 of SEQ ID NO: 588552
cugguagaugucuagaugu

SEQ ID NO: 872881 - RNA, 19 nt, Artificial Sequence
  Description of Artificial Sequence: Synthetic oligonucleotide
  Antisense strand to SEQ ID NO: 872880
acaucuagacaucuaccag

SEQ ID NO: 872882 - RNA, 19 nt, Artificial Sequence
  Description of Artificial Sequence: Synthetic oligonucleotide
  Sense strand starting at position 3434 of SEQ ID NO: 588552
gguagaugucuagauguag

SEQ ID NO: 872883 - RNA, 19 nt, Artificial Sequence
  Description of Artificial Sequence: Synthetic oligonucleotide
  Antisense strand to SEQ ID NO: 872882
cuacaucuagacaucuacc

SEQ ID NO: 872884 - RNA, 19 nt, Artificial Sequence
  Description of Artificial Sequence: Synthetic oligonucleotide
  Sense strand starting at position 3450 of SEQ ID NO: 588552
uagccuguuguggagaaau

SEQ ID NO: 872885 - RNA, 19 nt, Artificial Sequence
  Description of Artificial Sequence: Synthetic oligonucleotide
  Antisense strand to SEQ ID NO: 872884
auuucuccacaacaggcua

SEQ ID NO: 872886 - RNA, 19 nt, Artificial Sequence
  Description of Artificial Sequence: Synthetic oligonucleotide
  Sense strand starting at position 3452 of SEQ ID NO: 588552
gccuguuguggagaaauaa

SEQ ID NO: 872887 - RNA, 19 nt, Artificial Sequence
  Description of Artificial Sequence: Synthetic oligonucleotide
  Antisense strand to SEQ ID NO: 872886
uuauuucuccacaacaggc

SEQ ID NO: 872888 - RNA, 19 nt, Artificial Sequence
  Description of Artificial Sequence: Synthetic oligonucleotide
  Sense strand starting at position 3588 of SEQ ID NO: 588552
agaauuagaucuguggcca

SEQ ID NO: 872889 - RNA, 19 nt, Artificial Sequence
  Description of Artificial Sequence: Synthetic oligonucleotide
  Antisense strand to SEQ ID NO: 872888
uggccacagaucuaauucu

SEQ ID NO: 872890 - RNA, 19 nt, Artificial Sequence
  Description of Artificial Sequence: Synthetic oligonucleotide
  Sense strand starting at position 3602 of SEQ ID NO: 588552
ggccauuuaucugcuugau

SEQ ID NO: 872891 - RNA, 19 nt, Artificial Sequence
  Description of Artificial Sequence: Synthetic oligonucleotide
  Antisense strand to SEQ ID NO: 872890
aucaagcagauaaauggcc

SEQ ID NO: 872892 - RNA, 19 nt, Artificial Sequence
  Description of Artificial Sequence: Synthetic oligonucleotide
  Sense strand starting at position 3788 of SEQ ID NO: 588552
cccagugauuugucuagca

SEQ ID NO: 872893 - RNA, 19 nt, Artificial Sequence
  Description of Artificial Sequence: Synthetic oligonucleotide
  Antisense strand to SEQ ID NO: 872892
ugcuagacaaaucacuggg

SEQ ID NO: 872894 - RNA, 19 nt, Artificial Sequence
  Description of Artificial Sequence: Synthetic oligonucleotide
  Sense strand starting at position 3842 of SEQ ID NO: 588552
gugagaagucaggaucuuu

SEQ ID NO: 872895 - RNA, 19 nt, Artificial Sequence
  Description of Artificial Sequence: Synthetic oligonucleotide
  Antisense strand to SEQ ID NO: 872894
aaagauccugacuucucac

SEQ ID NO: 872896 - RNA, 19 nt, Artificial Sequence
  Description of Artificial Sequence: Synthetic oligonucleotide
  Sense strand starting at position 3973 of SEQ ID NO: 588552
guuucucaccuauggaaua

SEQ ID NO: 872897 - RNA, 19 nt, Artificial Sequence
  Description of Artificial Sequence: Synthetic oligonucleotide
  Antisense strand to SEQ ID NO: 872896
uauuccauaggugagaaac

SEQ ID NO: 872898 - RNA, 19 nt, Artificial Sequence
  Description of Artificial Sequence: Synthetic oligonucleotide
  Sense strand starting at position 266 of SEQ ID NO: 588553
gacuuuaacgcaggaauca

SEQ ID NO: 872899 - RNA, 19 nt, Artificial Sequence
  Description of Artificial Sequence: Synthetic oligonucleotide
  Antisense strand to SEQ ID NO: 872898
ugauuccugcguuaaaguc

SEQ ID NO: 872900 - RNA, 19 nt, Artificial Sequence
  Description of Artificial Sequence: Synthetic oligonucleotide
  Sense strand starting at position 333 of SEQ ID NO: 588553
gggaauuauuucugacagg

SEQ ID NO: 872901 - RNA, 19 nt, Artificial Sequence
  Description of Artificial Sequence: Synthetic oligonucleotide
  Antisense strand to SEQ ID NO: 872900
ccugucagaaauaauuccc

SEQ ID NO: 872902 - RNA, 19 nt, Artificial Sequence
  Description of Artificial Sequence: Synthetic oligonucleotide
  Sense strand starting at position 334 of SEQ ID NO: 588553
ggaauuauuucugacagga

SEQ ID NO: 872903 - RNA, 19 nt, Artificial Sequence
  Description of Artificial Sequence: Synthetic oligonucleotide
  Antisense strand to SEQ ID NO: 872902
uccugucagaaauaauucc

SEQ ID NO: 872904 - RNA, 19 nt, Artificial Sequence
  Description of Artificial Sequence: Synthetic oligonucleotide
  Sense strand starting at position 514 of SEQ ID NO: 588553
uucgauucucaauguaacu

SEQ ID NO: 872905 - RNA, 19 nt, Artificial Sequence
  Description of Artificial Sequence: Synthetic oligonucleotide
  Antisense strand to SEQ ID NO: 872904
aguuacauugagaaucgaa

SEQ ID NO: 872906 - RNA, 19 nt, Artificial Sequence
  Description of Artificial Sequence: Synthetic oligonucleotide
  Sense strand starting at position 535 of SEQ ID NO: 588553
ucugcuccggguuaaauua

SEQ ID NO: 872907 - RNA, 19 nt, Artificial Sequence
  Description of Artificial Sequence: Synthetic oligonucleotide
  Antisense strand to SEQ ID NO: 872906
uaauuuaacccggagcaga

SEQ ID NO: 872908 - RNA, 19 nt, Artificial Sequence
  Description of Artificial Sequence: Synthetic oligonucleotide
  Sense strand starting at position 599 of SEQ ID NO: 588553
cguguaguucuggccucua

SEQ ID NO: 872909 - RNA, 19 nt, Artificial Sequence
  Description of Artificial Sequence: Synthetic oligonucleotide
  Antisense strand to SEQ ID NO: 872908
uagaggccagaacuacacg

SEQ ID NO: 872910 - RNA, 19 nt, Artificial Sequence
  Description of Artificial Sequence: Synthetic oligonucleotide
  Sense strand starting at position 720 of SEQ ID NO: 588553
ugguguuugggagauaauc

SEQ ID NO: 872911 - RNA, 19 nt, Artificial Sequence
  Description of Artificial Sequence: Synthetic oligonucleotide
  Antisense strand to SEQ ID NO: 872910
gauuaucucccaaacacca

SEQ ID NO: 872912 - RNA, 19 nt, Artificial Sequence
  Description of Artificial Sequence: Synthetic oligonucleotide
  Sense strand starting at position 828 of SEQ ID NO: 588553
ccguuuaccagucagaaag

SEQ ID NO: 872913 - RNA, 19 nt, Artificial Sequence
  Description of Artificial Sequence: Synthetic oligonucleotide
  Antisense strand to SEQ ID NO: 872912
cuuucugacugguaaacgg

SEQ ID NO: 872914 - RNA, 19 nt, Artificial Sequence
  Description of Artificial Sequence: Synthetic oligonucleotide
  Sense strand starting at position 937 of SEQ ID NO: 588553
gccaccaguccaggauauu

SEQ ID NO: 872915 - RNA, 19 nt, Artificial Sequence
  Description of Artificial Sequence: Synthetic oligonucleotide
  Antisense strand to SEQ ID NO: 872914
aauauccuggacugguggc

SEQ ID NO: 872916 - RNA, 19 nt, Artificial Sequence
  Description of Artificial Sequence: Synthetic oligonucleotide
  Sense strand starting at position 959 of SEQ ID NO: 588553
uuaugaagcgacuaugaca

SEQ ID NO: 872917 - RNA, 19 nt, Artificial Sequence
  Description of Artificial Sequence: Synthetic oligonucleotide
  Antisense strand to SEQ ID NO: 872916
ugucauagucgcuucauaa

SEQ ID NO: 872918 - RNA, 19 nt, Artificial Sequence
  Description of Artificial Sequence: Synthetic oligonucleotide
  Sense strand starting at position 1085 of SEQ ID NO: 588553
gaauuagcuccuuagggcu

SEQ ID NO: 872919 - RNA, 19 nt, Artificial Sequence
  Description of Artificial Sequence: Synthetic oligonucleotide
  Antisense strand to SEQ ID NO: 872918
agcccuaaggagcuaauuc

SEQ ID NO: 872920 - RNA, 19 nt, Artificial Sequence
  Description of Artificial Sequence: Synthetic oligonucleotide
  Sense strand starting at position 1461 of SEQ ID NO: 588553
ccacgaucucucugaaggu

SEQ ID NO: 872921 - RNA, 19 nt, Artificial Sequence
  Description of Artificial Sequence: Synthetic oligonucleotide
  Antisense strand to SEQ ID NO: 872920
accuucagagagaucgugg

SEQ ID NO: 872922 - RNA, 19 nt, Artificial Sequence
  Description of Artificial Sequence: Synthetic oligonucleotide
  Sense strand starting at position 1640 of SEQ ID NO: 588553
ucuacuagucaauggacuu

SEQ ID NO: 872923 - RNA, 19 nt, Artificial Sequence
  Description of Artificial Sequence: Synthetic oligonucleotide
  Antisense strand to SEQ ID NO: 872922
aaguccauugacuaguaga

SEQ ID NO: 872924 - RNA, 19 nt, Artificial Sequence
  Description of Artificial Sequence: Synthetic oligonucleotide
  Sense strand starting at position 1765 of SEQ ID NO: 588553
aggacuuggagcuaucuuu

SEQ ID NO: 872925 - RNA, 19 nt, Artificial Sequence
  Description of Artificial Sequence: Synthetic oligonucleotide
  Antisense strand to SEQ ID NO: 872924
aaagauagcuccaaguccu

SEQ ID NO: 872926 - RNA, 19 nt, Artificial Sequence
  Description of Artificial Sequence: Synthetic oligonucleotide
  Sense strand starting at position 1942 of SEQ ID NO: 588553
gcaucuggucuccacaaca

SEQ ID NO: 872927 - RNA, 19 nt, Artificial Sequence
  Description of Artificial Sequence: Synthetic oligonucleotide
  Antisense strand to SEQ ID NO: 872926
uguuguggagaccagaugc

SEQ ID NO: 872928 - RNA, 19 nt, Artificial Sequence
  Description of Artificial Sequence: Synthetic oligonucleotide
  Sense strand starting at position 2100 of SEQ ID NO: 588553
guugcaaugcuggagacaa

SEQ ID NO: 872929 - RNA, 19 nt, Artificial Sequence
  Description of Artificial Sequence: Synthetic oligonucleotide
  Antisense strand to SEQ ID NO: 872928
uugucuccagcauugcaac

SEQ ID NO: 872930 - RNA, 19 nt, Artificial Sequence
  Description of Artificial Sequence: Synthetic oligonucleotide
  Sense strand starting at position 2128 of SEQ ID NO: 588553
gccaguugugccuuguuag

SEQ ID NO: 872931 - RNA, 19 nt, Artificial Sequence
  Description of Artificial Sequence: Synthetic oligonucleotide
  Antisense strand to SEQ ID NO: 872930
cuaacaaggcacaacuggc

SEQ ID NO: 872932 - RNA, 19 nt, Artificial Sequence
  Description of Artificial Sequence: Synthetic oligonucleotide
  Sense strand starting at position 2170 of SEQ ID NO: 588553
uggauuccauugucaccaa

SEQ ID NO: 872933 - RNA, 19 nt, Artificial Sequence
  Description of Artificial Sequence: Synthetic oligonucleotide
  Antisense strand to SEQ ID NO: 872932
uuggugacaauggaaucca

SEQ ID NO: 872934 - RNA, 19 nt, Artificial Sequence
  Description of Artificial Sequence: Synthetic oligonucleotide
  Sense strand starting at position 2406 of SEQ ID NO: 588553
agcacagacuccuccagaa

SEQ ID NO: 872935 - RNA, 19 nt, Artificial Sequence
  Description of Artificial Sequence: Synthetic oligonucleotide
  Antisense strand to SEQ ID NO: 872934
uucuggaggagucugugcu

SEQ ID NO: 872936 - RNA, 19 nt, Artificial Sequence
  Description of Artificial Sequence: Synthetic oligonucleotide
  Sense strand starting at position 2544 of SEQ ID NO: 588553
auggcaaucccaggaaacu

SEQ ID NO: 872937 - RNA, 19 nt, Artificial Sequence
  Description of Artificial Sequence: Synthetic oligonucleotide
  Antisense strand to SEQ ID NO: 872936
aguuuccugggauugccau

SEQ ID NO: 872938 - RNA, 19 nt, Artificial Sequence
  Description of Artificial Sequence: Synthetic oligonucleotide
  Sense strand starting at position 2553 of SEQ ID NO: 588553
ccaggaaacugccugugaa

SEQ ID NO: 872939 - RNA, 19 nt, Artificial Sequence
  Description of Artificial Sequence: Synthetic oligonucleotide
  Antisense strand to SEQ ID NO: 872938
uucacaggcaguuuccugg

SEQ ID NO: 872940 - RNA, 19 nt, Artificial Sequence
  Description of Artificial Sequence: Synthetic oligonucleotide
  Sense strand starting at position 2554 of SEQ ID NO: 588553
caggaaacugccugugaau

SEQ ID NO: 872941 - RNA, 19 nt, Artificial Sequence
  Description of Artificial Sequence: Synthetic oligonucleotide
  Antisense strand to SEQ ID NO: 872940
auucacaggcaguuuccug

SEQ ID NO: 872942 - RNA, 19 nt, Artificial Sequence
  Description of Artificial Sequence: Synthetic oligonucleotide
  Sense strand starting at position 2556 of SEQ ID NO: 588553
ggaaacugccugugaauaa

SEQ ID NO: 872943 - RNA, 19 nt, Artificial Sequence
  Description of Artificial Sequence: Synthetic oligonucleotide
  Antisense strand to SEQ ID NO: 872942
uuauucacaggcaguuucc

SEQ ID NO: 872944 - RNA, 19 nt, Artificial Sequence
  Description of Artificial Sequence: Synthetic oligonucleotide
  Sense strand starting at position 2613 of SEQ ID NO: 588553
gcucaaauuguccagcuga

SEQ ID NO: 872945 - RNA, 19 nt, Artificial Sequence
  Description of Artificial Sequence: Synthetic oligonucleotide
  Antisense strand to SEQ ID NO: 872944
ucagcuggacaauuugagc

SEQ ID NO: 872946 - RNA, 19 nt, Artificial Sequence
  Description of Artificial Sequence: Synthetic oligonucleotide
  Sense strand starting at position 2752 of SEQ ID NO: 588553
ucuccauugugaccacaga

SEQ ID NO: 872947 - RNA, 19 nt, Artificial Sequence
  Description of Artificial Sequence: Synthetic oligonucleotide
  Antisense strand to SEQ ID NO: 872946
ucuguggucacaauggaga

SEQ ID NO: 872948 - RNA, 19 nt, Artificial Sequence
  Description of Artificial Sequence: Synthetic oligonucleotide
  Sense strand starting at position 2905 of SEQ ID NO: 588553
uuccucauucggcacaauu

SEQ ID NO: 872949 - RNA, 19 nt, Artificial Sequence
  Description of Artificial Sequence: Synthetic oligonucleotide
  Antisense strand to SEQ ID NO: 872948
aauugugccgaaugaggaa

SEQ ID NO: 872950 - RNA, 19 nt, Artificial Sequence
  Description of Artificial Sequence: Synthetic oligonucleotide
  Sense strand starting at position 3008 of SEQ ID NO: 588553
aggagcgguaucuaauacu

SEQ ID NO: 872951 - RNA, 19 nt, Artificial Sequence
  Description of Artificial Sequence: Synthetic oligonucleotide
  Antisense strand to SEQ ID NO: 872950
aguauuagauaccgcuccu

SEQ ID NO: 872952 - RNA, 19 nt, Artificial Sequence
  Description of Artificial Sequence: Synthetic oligonucleotide
  Sense strand starting at position 3014 of SEQ ID NO: 588553
gguaucuaauacuuuggaa

SEQ ID NO: 872953 - RNA, 19 nt, Artificial Sequence
  Description of Artificial Sequence: Synthetic oligonucleotide
  Antisense strand to SEQ ID NO: 872952
uuccaaaguauuagauacc

SEQ ID NO: 872954 - RNA, 19 nt, Artificial Sequence
  Description of Artificial Sequence: Synthetic oligonucleotide
  Sense strand starting at position 3062 of SEQ ID NO: 588553
uugauucuacauugaaagu

SEQ ID NO: 872955 - RNA, 19 nt, Artificial Sequence
  Description of Artificial Sequence: Synthetic oligonucleotide
  Antisense strand to SEQ ID NO: 872954
acuuucaauguagaaucaa

SEQ ID NO: 872956 - RNA, 19 nt, Artificial Sequence
  Description of Artificial Sequence: Synthetic oligonucleotide
  Sense strand starting at position 3084 of SEQ ID NO: 588553
ggaucuuguuaugcagauc

SEQ ID NO: 872957 - RNA, 19 nt, Artificial Sequence
  Description of Artificial Sequence: Synthetic oligonucleotide
  Antisense strand to SEQ ID NO: 872956
gaucugcauaacaagaucc

SEQ ID NO: 872958 - RNA, 19 nt, Artificial Sequence
  Description of Artificial Sequence: Synthetic oligonucleotide
  Sense strand starting at position 3087 of SEQ ID NO: 588553
ucuuguuaugcagauccua

SEQ ID NO: 872959 - RNA, 19 nt, Artificial Sequence
  Description of Artificial Sequence: Synthetic oligonucleotide
  Antisense strand to SEQ ID NO: 872958
uaggaucugcauaacaaga

SEQ ID NO: 872960 - RNA, 19 nt, Artificial Sequence
  Description of Artificial Sequence: Synthetic oligonucleotide
  Sense strand starting at position 3160 of SEQ ID NO: 588553
gugguaagcaguuagcaga

SEQ ID NO: 872961 - RNA, 19 nt, Artificial Sequence
  Description of Artificial Sequence: Synthetic oligonucleotide
  Antisense strand to SEQ ID NO: 872960
ucugcuaacugcuuaccac

SEQ ID NO: 872962 - RNA, 19 nt, Artificial Sequence
  Description of Artificial Sequence: Synthetic oligonucleotide
  Sense strand starting at position 3271 of SEQ ID NO: 588553
uuauguaagcaugaugaau

SEQ ID NO: 872963 - RNA, 19 nt, Artificial Sequence
  Description of Artificial Sequence: Synthetic oligonucleotide
  Antisense strand to SEQ ID NO: 872962
auucaucaugcuuacauaa

SEQ ID NO: 872964 - RNA, 19 nt, Artificial Sequence
  Description of Artificial Sequence: Synthetic oligonucleotide
  Sense strand starting at position 3430 of SEQ ID NO: 588553
ggaagucagaucuagcagu

SEQ ID NO: 872965 - RNA, 19 nt, Artificial Sequence
  Description of Artificial Sequence: Synthetic oligonucleotide
  Antisense strand to SEQ ID NO: 872964
acugcuagaucugacuucc

SEQ ID NO: 872966 - RNA, 19 nt, Artificial Sequence
  Description of Artificial Sequence: Synthetic oligonucleotide
  Sense strand starting at position 3436 of SEQ ID NO: 588553
cagaucuagcagugaguaa

SEQ ID NO: 872967 - RNA, 19 nt, Artificial Sequence
  Description of Artificial Sequence: Synthetic oligonucleotide
  Antisense strand to SEQ ID NO: 872966
uuacucacugcuagaucug

SEQ ID NO: 872968 - RNA, 19 nt, Artificial Sequence
  Description of Artificial Sequence: Synthetic oligonucleotide
  Sense strand starting at position 3578 of SEQ ID NO: 588553
ggaauaucccagugggcua

SEQ ID NO: 872969 - RNA, 19 nt, Artificial Sequence
  Description of Artificial Sequence: Synthetic oligonucleotide
  Antisense strand to SEQ ID NO: 872968
uagcccacugggauauucc

SEQ ID NO: 872970 - RNA, 19 nt, Artificial Sequence
  Description of Artificial Sequence: Synthetic oligonucleotide
  Sense strand starting at position 3717 of SEQ ID NO: 588553
uguugucacuuucuagaga

SEQ ID NO: 872971 - RNA, 19 nt, Artificial Sequence
  Description of Artificial Sequence: Synthetic oligonucleotide
  Antisense strand to SEQ ID NO: 872970
ucucuagaaagugacaaca

SEQ ID NO: 872972 - RNA, 19 nt, Artificial Sequence
  Description of Artificial Sequence: Synthetic oligonucleotide
  Sense strand starting at position 3764 of SEQ ID NO: 588553
gacccaggucuaggugaaa

SEQ ID NO: 872973 - RNA, 19 nt, Artificial Sequence
  Description of Artificial Sequence: Synthetic oligonucleotide
  Antisense strand to SEQ ID NO: 872972
uuucaccuagaccuggguc

SEQ ID NO: 872974 - RNA, 19 nt, Artificial Sequence
  Description of Artificial Sequence: Synthetic oligonucleotide
  Sense strand starting at position 3923 of SEQ ID NO: 588553
guuuaagaguuccucaaca

SEQ ID NO: 872975 - RNA, 19 nt, Artificial Sequence
  Description of Artificial Sequence: Synthetic oligonucleotide
  Antisense strand to SEQ ID NO: 872974
uguugaggaacucuuaaac

SEQ ID NO: 872976 - RNA, 19 nt, Artificial Sequence
  Description of Artificial Sequence: Synthetic oligonucleotide
  Sense strand starting at position 3977 of SEQ ID NO: 588553
agagaaaccuuugcaugca

SEQ ID NO: 872977 - RNA, 19 nt, Artificial Sequence
  Description of Artificial Sequence: Synthetic oligonucleotide
  Antisense strand to SEQ ID NO: 872976
ugcaugcaaagguuucucu

SEQ ID NO: 872978 - RNA, 19 nt, Artificial Sequence
  Description of Artificial Sequence: Synthetic oligonucleotide
  Sense strand starting at position 687 of SEQ ID NO: 588554
cugauaauauuugauggga

SEQ ID NO: 872979 - RNA, 19 nt, Artificial Sequence
  Description of Artificial Sequence: Synthetic oligonucleotide
  Antisense strand to SEQ ID NO: 872978
ucccaucaaauauuaucag

SEQ ID NO: 872980 - RNA, 19 nt, Artificial Sequence
  Description of Artificial Sequence: Synthetic oligonucleotide
  Sense strand starting at position 689 of SEQ ID NO: 588554
gauaauauuugaugggaug

SEQ ID NO: 872981 - RNA, 19 nt, Artificial Sequence
  Description of Artificial Sequence: Synthetic oligonucleotide
  Antisense strand to SEQ ID NO: 872980
caucccaucaaauauuauc

SEQ ID NO: 872982 - RNA, 19 nt, Artificial Sequence
  Description of Artificial Sequence: Synthetic oligonucleotide
  Sense strand starting at position 778 of SEQ ID NO: 588554
ggguauauauggcuuaaac

SEQ ID NO: 872983 - RNA, 19 nt, Artificial Sequence
  Description of Artificial Sequence: Synthetic oligonucleotide
  Antisense strand to SEQ ID NO: 872982
guuuaagccauauauaccc

SEQ ID NO: 872984 - RNA, 19 nt, Artificial Sequence
  Description of Artificial Sequence: Synthetic oligonucleotide
  Sense strand starting at position 780 of SEQ ID NO: 588554
guauauauggcuuaaacag

SEQ ID NO: 872985 - RNA, 19 nt, Artificial Sequence
  Description of Artificial Sequence: Synthetic oligonucleotide
  Antisense strand to SEQ ID NO: 872984
cuguuuaagccauauauac

SEQ ID NO: 872986 - RNA, 19 nt, Artificial Sequence
  Description of Artificial Sequence: Synthetic oligonucleotide
  Sense strand starting at position 787 of SEQ ID NO: 588554
uggcuuaaacagugaaaug

SEQ ID NO: 872987 - RNA, 19 nt, Artificial Sequence
  Description of Artificial Sequence: Synthetic oligonucleotide
  Antisense strand to SEQ ID NO: 872986
cauuucacuguuuaagcca

SEQ ID NO: 872988 - RNA, 19 nt, Artificial Sequence
  Description of Artificial Sequence: Synthetic oligonucleotide
  Sense strand starting at position 827 of SEQ ID NO: 588554
gagggacaaacgugaaagu

SEQ ID NO: 872989 - RNA, 19 nt, Artificial Sequence
  Description of Artificial Sequence: Synthetic oligonucleotide
  Antisense strand to SEQ ID NO: 872988
acuuucacguuugucccuc

SEQ ID NO: 872990 - RNA, 19 nt, Artificial Sequence
  Description of Artificial Sequence: Synthetic oligonucleotide
  Sense strand starting at position 1008 of SEQ ID NO: 588554
guauccugugaacaauagu

SEQ ID NO: 872991 - RNA, 19 nt, Artificial Sequence
  Description of Artificial Sequence: Synthetic oligonucleotide
  Antisense strand to SEQ ID NO: 872990
acuauuguucacaggauac

SEQ ID NO: 872992 - RNA, 19 nt, Artificial Sequence
  Description of Artificial Sequence: Synthetic oligonucleotide
  Sense strand starting at position 1011 of SEQ ID NO: 588554
uccugugaacaauaguaau

SEQ ID NO: 872993 - RNA, 19 nt, Artificial Sequence
  Description of Artificial Sequence: Synthetic oligonucleotide
  Antisense strand to SEQ ID NO: 872992
auuacuauuguucacagga

SEQ ID NO: 872994 - RNA, 19 nt, Artificial Sequence
  Description of Artificial Sequence: Synthetic oligonucleotide
  Sense strand starting at position 1031 of SEQ ID NO: 588554
cuuuaagggcuuuacuuaa

SEQ ID NO: 872995 - RNA, 19 nt, Artificial Sequence
  Description of Artificial Sequence: Synthetic oligonucleotide
  Antisense strand to SEQ ID NO: 872994
uuaaguaaagcccuuaaag

SEQ ID NO: 872996 - RNA, 19 nt, Artificial Sequence
  Description of Artificial Sequence: Synthetic oligonucleotide
  Sense strand starting at position 1130 of SEQ ID NO: 588554
uuaggaagccacuguagau

SEQ ID NO: 872997 - RNA, 19 nt, Artificial Sequence
  Description of Artificial Sequence: Synthetic oligonucleotide
  Antisense strand to SEQ ID NO: 872996
aucuacaguggcuuccuaa

SEQ ID NO: 872998 - RNA, 19 nt, Artificial Sequence
  Description of Artificial Sequence: Synthetic oligonucleotide
  Sense strand starting at position 1147 of SEQ ID NO: 588554
auuucugagugagagauga

SEQ ID NO: 872999 - RNA, 19 nt, Artificial Sequence
  Description of Artificial Sequence: Synthetic oligonucleotide
  Antisense strand to SEQ ID NO: 872998
ucaucucucacucagaaau

SEQ ID NO: 873000 - RNA, 19 nt, Artificial Sequence
  Description of Artificial Sequence: Synthetic oligonucleotide
  Sense strand starting at position 1151 of SEQ ID NO: 588554
cugagugagagaugagcau

SEQ ID NO: 873001 - RNA, 19 nt, Artificial Sequence
  Description of Artificial Sequence: Synthetic oligonucleotide
  Antisense strand to SEQ ID NO: 873000
augcucaucucucacucag

SEQ ID NO: 873002 - RNA, 19 nt, Artificial Sequence
  Description of Artificial Sequence: Synthetic oligonucleotide
  Sense strand starting at position 1155 of SEQ ID NO: 588554
gugagagaugagcauaguu

SEQ ID NO: 873003 - RNA, 19 nt, Artificial Sequence
  Description of Artificial Sequence: Synthetic oligonucleotide
  Antisense strand to SEQ ID NO: 873002
aacuaugcucaucucucac

SEQ ID NO: 873004 - RNA, 19 nt, Artificial Sequence
  Description of Artificial Sequence: Synthetic oligonucleotide
  Sense strand starting at position 1251 of SEQ ID NO: 588554
ccgacugcacccuaugaga

SEQ ID NO: 873005 - RNA, 19 nt, Artificial Sequence
  Description of Artificial Sequence: Synthetic oligonucleotide
  Antisense strand to SEQ ID NO: 873004
ucucauagggugcagucgg

SEQ ID NO: 873006 - RNA, 19 nt, Artificial Sequence
  Description of Artificial Sequence: Synthetic oligonucleotide
  Sense strand starting at position 1265 of SEQ ID NO: 588554
ugagaucaaucaccaaguu

SEQ ID NO: 873007 - RNA, 19 nt, Artificial Sequence
  Description of Artificial Sequence: Synthetic oligonucleotide
  Antisense strand to SEQ ID NO: 873006
aacuuggugauugaucuca

SEQ ID NO: 873008 - RNA, 19 nt, Artificial Sequence
  Description of Artificial Sequence: Synthetic oligonucleotide
  Sense strand starting at position 1437 of SEQ ID NO: 588554
ccuagugaaucucuucuga

SEQ ID NO: 873009 - RNA, 19 nt, Artificial Sequence
  Description of Artificial Sequence: Synthetic oligonucleotide
  Antisense strand to SEQ ID NO: 873008
ucagaagagauucacuagg

SEQ ID NO: 873010 - RNA, 19 nt, Artificial Sequence
  Description of Artificial Sequence: Synthetic oligonucleotide
  Sense strand starting at position 1542 of SEQ ID NO: 588554
gcaugagaaucaccugaca

SEQ ID NO: 873011 - RNA, 19 nt, Artificial Sequence
  Description of Artificial Sequence: Synthetic oligonucleotide
  Antisense strand to SEQ ID NO: 873010
ugucaggugauucucaugc

SEQ ID NO: 873012 - RNA, 19 nt, Artificial Sequence
  Description of Artificial Sequence: Synthetic oligonucleotide
  Sense strand starting at position 1690 of SEQ ID NO: 588554
augggaaucacugguuaau

SEQ ID NO: 873013 - RNA, 19 nt, Artificial Sequence
  Description of Artificial Sequence: Synthetic oligonucleotide
  Antisense strand to SEQ ID NO: 873012
auuaaccagugauucccau

SEQ ID NO: 873014 - RNA, 19 nt, Artificial Sequence
  Description of Artificial Sequence: Synthetic oligonucleotide
  Sense strand starting at position 1692 of SEQ ID NO: 588554
gggaaucacugguuaauca

SEQ ID NO: 873015 - RNA, 19 nt, Artificial Sequence
  Description of Artificial Sequence: Synthetic oligonucleotide
  Antisense strand to SEQ ID NO: 873014
ugauuaaccagugauuccc

SEQ ID NO: 873016 - RNA, 19 nt, Artificial Sequence
  Description of Artificial Sequence: Synthetic oligonucleotide
  Sense strand starting at position 1777 of SEQ ID NO: 588554
cugugacuuggucaaguga

SEQ ID NO: 873017 - RNA, 19 nt, Artificial Sequence
  Description of Artificial Sequence: Synthetic oligonucleotide
  Antisense strand to SEQ ID NO: 873016
ucacuugaccaagucacag

SEQ ID NO: 873018 - RNA, 19 nt, Artificial Sequence
  Description of Artificial Sequence: Synthetic oligonucleotide
  Sense strand starting at position 1919 of SEQ ID NO: 588554
guuccaugugccuugcaua

SEQ ID NO: 873019 - RNA, 19 nt, Artificial Sequence
  Description of Artificial Sequence: Synthetic oligonucleotide
  Antisense strand to SEQ ID NO: 873018
uaugcaaggcacauggaac

SEQ ID NO: 873020 - RNA, 19 nt, Artificial Sequence
  Description of Artificial Sequence: Synthetic oligonucleotide
  Sense strand starting at position 2039 of SEQ ID NO: 588554
uuaacagucguggaaagga

SEQ ID NO: 873021 - RNA, 19 nt, Artificial Sequence
  Description of Artificial Sequence: Synthetic oligonucleotide
  Antisense strand to SEQ ID NO: 873020
uccuuuccacgacuguuaa

SEQ ID NO: 873022 - RNA, 19 nt, Artificial Sequence
  Description of Artificial Sequence: Synthetic oligonucleotide
  Sense strand starting at position 2094 of SEQ ID NO: 588554
gguaaauucucagcaggau

SEQ ID NO: 873023 - RNA, 19 nt, Artificial Sequence
  Description of Artificial Sequence: Synthetic oligonucleotide
  Antisense strand to SEQ ID NO: 873022
auccugcugagaauuuacc

SEQ ID NO: 873024 - RNA, 19 nt, Artificial Sequence
  Description of Artificial Sequence: Synthetic oligonucleotide
  Sense strand starting at position 2095 of SEQ ID NO: 588554
guaaauucucagcaggauu

SEQ ID NO: 873025 - RNA, 19 nt, Artificial Sequence
  Description of Artificial Sequence: Synthetic oligonucleotide
  Antisense strand to SEQ ID NO: 873024
aauccugcugagaauuuac

SEQ ID NO: 873026 - RNA, 19 nt, Artificial Sequence
  Description of Artificial Sequence: Synthetic oligonucleotide
  Sense strand starting at position 2108 of SEQ ID NO: 588554
aggauugugcauuagguga

SEQ ID NO: 873027 - RNA, 19 nt, Artificial Sequence
  Description of Artificial Sequence: Synthetic oligonucleotide
  Antisense strand to SEQ ID NO: 873026
ucaccuaaugcacaauccu

SEQ ID NO: 873028 - RNA, 19 nt, Artificial Sequence
  Description of Artificial Sequence: Synthetic oligonucleotide
  Sense strand starting at position 2343 of SEQ ID NO: 588554
uaucaaguggugugagaag

SEQ ID NO: 873029 - RNA, 19 nt, Artificial Sequence
  Description of Artificial Sequence: Synthetic oligonucleotide
  Antisense strand to SEQ ID NO: 873028
cuucucacaccacuugaua

SEQ ID NO: 873030 - RNA, 19 nt, Artificial Sequence
  Description of Artificial Sequence: Synthetic oligonucleotide
  Sense strand starting at position 2375 of SEQ ID NO: 588554
gagacuuugucauccaagu

SEQ ID NO: 873031 - RNA, 19 nt, Artificial Sequence
  Description of Artificial Sequence: Synthetic oligonucleotide
  Antisense strand to SEQ ID NO: 873030
acuuggaugacaaagucuc

SEQ ID NO: 873032 - RNA, 19 nt, Artificial Sequence
  Description of Artificial Sequence: Synthetic oligonucleotide
  Sense strand starting at position 2407 of SEQ ID NO: 588554
ggauuccuuagcgauaaga

SEQ ID NO: 873033 - RNA, 19 nt, Artificial Sequence
  Description of Artificial Sequence: Synthetic oligonucleotide
  Antisense strand to SEQ ID NO: 873032
ucuuaucgcuaaggaaucc

SEQ ID NO: 873034 - RNA, 19 nt, Artificial Sequence
  Description of Artificial Sequence: Synthetic oligonucleotide
  Sense strand starting at position 2409 of SEQ ID NO: 588554
auuccuuagcgauaagaca

SEQ ID NO: 873035 - RNA, 19 nt, Artificial Sequence
  Description of Artificial Sequence: Synthetic oligonucleotide
  Antisense strand to SEQ ID NO: 873034
ugucuuaucgcuaaggaau

SEQ ID NO: 873036 - RNA, 19 nt, Artificial Sequence
  Description of Artificial Sequence: Synthetic oligonucleotide
  Sense strand starting at position 2425 of SEQ ID NO: 588554
acaugcauggcucauuaca

SEQ ID NO: 873037 - RNA, 19 nt, Artificial Sequence
  Description of Artificial Sequence: Synthetic oligonucleotide
  Antisense strand to SEQ ID NO: 873036
uguaaugagccaugcaugu

SEQ ID NO: 873038 - RNA, 19 nt, Artificial Sequence
  Description of Artificial Sequence: Synthetic oligonucleotide
  Sense strand starting at position 2700 of SEQ ID NO: 588554
agagccagacauuagcaau

SEQ ID NO: 873039 - RNA, 19 nt, Artificial Sequence
  Description of Artificial Sequence: Synthetic oligonucleotide
  Antisense strand to SEQ ID NO: 873038
auugcuaaugucuggcucu

SEQ ID NO: 873040 - RNA, 19 nt, Artificial Sequence
  Description of Artificial Sequence: Synthetic oligonucleotide
  Sense strand starting at position 2862 of SEQ ID NO: 588554
guaacuuugaaaugagguc

SEQ ID NO: 873041 - RNA, 19 nt, Artificial Sequence
  Description of Artificial Sequence: Synthetic oligonucleotide
  Antisense strand to SEQ ID NO: 873040
gaccucauuucaaaguuac

SEQ ID NO: 873042 - RNA, 19 nt, Artificial Sequence
  Description of Artificial Sequence: Synthetic oligonucleotide
  Sense strand starting at position 3015 of SEQ ID NO: 588554
uggccacuugaaugaaaca

SEQ ID NO: 873043 - RNA, 19 nt, Artificial Sequence
  Description of Artificial Sequence: Synthetic oligonucleotide
  Antisense strand to SEQ ID NO: 873042
uguuucauucaaguggcca

SEQ ID NO: 873044 - RNA, 19 nt, Artificial Sequence
  Description of Artificial Sequence: Synthetic oligonucleotide
  Sense strand starting at position 3189 of SEQ ID NO: 588554
guucucaaaguauauugau

SEQ ID NO: 873045 - RNA, 19 nt, Artificial Sequence
  Description of Artificial Sequence: Synthetic oligonucleotide
  Antisense strand to SEQ ID NO: 873044
aucaauauacuuugagaac

SEQ ID NO: 873046 - RNA, 19 nt, Artificial Sequence
  Description of Artificial Sequence: Synthetic oligonucleotide
  Sense strand starting at position 3287 of SEQ ID NO: 588554
agacuuguuucuccaggga

SEQ ID NO: 873047 - RNA, 19 nt, Artificial Sequence
  Description of Artificial Sequence: Synthetic oligonucleotide
  Antisense strand to SEQ ID NO: 873046
ucccuggagaaacaagucu

SEQ ID NO: 873048 - RNA, 19 nt, Artificial Sequence
  Description of Artificial Sequence: Synthetic oligonucleotide
  Sense strand starting at position 3423 of SEQ ID NO: 588554
agggaaugcuaucugguca

SEQ ID NO: 873049 - RNA, 19 nt, Artificial Sequence
  Description of Artificial Sequence: Synthetic oligonucleotide
  Antisense strand to SEQ ID NO: 873048
ugaccagauagcauucccu

SEQ ID NO: 873050 - RNA, 19 nt, Artificial Sequence
  Description of Artificial Sequence: Synthetic oligonucleotide
  Sense strand starting at position 3424 of SEQ ID NO: 588554
gggaaugcuaucuggucaa

SEQ ID NO: 873051 - RNA, 19 nt, Artificial Sequence
  Description of Artificial Sequence: Synthetic oligonucleotide
  Antisense strand to SEQ ID NO: 873050
uugaccagauagcauuccc

SEQ ID NO: 873052 - RNA, 19 nt, Artificial Sequence
  Description of Artificial Sequence: Synthetic oligonucleotide
  Sense strand starting at position 3445 of SEQ ID NO: 588554
uuuguuuacuuucuggaga

SEQ ID NO: 873053 - RNA, 19 nt, Artificial Sequence
  Description of Artificial Sequence: Synthetic oligonucleotide
  Antisense strand to SEQ ID NO: 873052
ucuccagaaaguaaacaaa

SEQ ID NO: 873054 - RNA, 19 nt, Artificial Sequence
  Description of Artificial Sequence: Synthetic oligonucleotide
  Sense strand starting at position 3448 of SEQ ID NO: 588554
guuuacuuucuggagauac

SEQ ID NO: 873055 - RNA, 19 nt, Artificial Sequence
  Description of Artificial Sequence: Synthetic oligonucleotide
  Antisense strand to SEQ ID NO: 873054
guaucuccagaaaguaaac

SEQ ID NO: 873056 - RNA, 19 nt, Artificial Sequence
  Description of Artificial Sequence: Synthetic oligonucleotide
  Sense strand starting at position 3863 of SEQ ID NO: 588554
ucuguaauugcucauggaa

SEQ ID NO: 873057 - RNA, 19 nt, Artificial Sequence
  Description of Artificial Sequence: Synthetic oligonucleotide
  Antisense strand to SEQ ID NO: 873056
uuccaugagcaauuacaga

SEQ ID NO: 873058 - RNA, 19 nt, Artificial Sequence
  Description of Artificial Sequence: Synthetic oligonucleotide
  Sense strand starting at position 29 of SEQ ID NO: 588555
auucuuaccucuguuaguu

SEQ ID NO: 873059 - RNA, 19 nt, Artificial Sequence
  Description of Artificial Sequence: Synthetic oligonucleotide
  Antisense strand to SEQ ID NO: 873058
aacuaacagagguaagaau

SEQ ID NO: 873060 - RNA, 19 nt, Artificial Sequence
  Description of Artificial Sequence: Synthetic oligonucleotide
  Sense strand starting at position 69 of SEQ ID NO: 588555
gacugaaauccaugcugag

SEQ ID NO: 873061 - RNA, 19 nt, Artificial Sequence
  Description of Artificial Sequence: Synthetic oligonucleotide
  Antisense strand to SEQ ID NO: 873060
cucagcauggauuucaguc

SEQ ID NO: 873062 - RNA, 19 nt, Artificial Sequence
  Description of Artificial Sequence: Synthetic oligonucleotide
  Sense strand starting at position 105 of SEQ ID NO: 588555
aggagcuguucccuugaga

SEQ ID NO: 873063 - RNA, 19 nt, Artificial Sequence
  Description of Artificial Sequence: Synthetic oligonucleotide
  Antisense strand to SEQ ID NO: 873062
ucucaagggaacagcuccu

SEQ ID NO: 873064 - RNA, 19 nt, Artificial Sequence
  Description of Artificial Sequence: Synthetic oligonucleotide
  Sense strand starting at position 108 of SEQ ID NO: 588555
agcuguucccuugagagac

SEQ ID NO: 873065 - RNA, 19 nt, Artificial Sequence
  Description of Artificial Sequence: Synthetic oligonucleotide
  Antisense strand to SEQ ID NO: 873064
gucucucaagggaacagcu

SEQ ID NO: 873066 - RNA, 19 nt, Artificial Sequence
  Description of Artificial Sequence: Synthetic oligonucleotide
  Sense strand starting at position 131 of SEQ ID NO: 588555
augcaaaugagucaaguga

SEQ ID NO: 873067 - RNA, 19 nt, Artificial Sequence
  Description of Artificial Sequence: Synthetic oligonucleotide
  Antisense strand to SEQ ID NO: 873066
ucacuugacucauuugcau

SEQ ID NO: 873068 - RNA, 19 nt, Artificial Sequence
  Description of Artificial Sequence: Synthetic oligonucleotide
  Sense strand starting at position 142 of SEQ ID NO: 588555
ucaagugaugccuaguaga

SEQ ID NO: 873069 - RNA, 19 nt, Artificial Sequence
  Description of Artificial Sequence: Synthetic oligonucleotide
  Antisense strand to SEQ ID NO: 873068
ucuacuaggcaucacuuga

SEQ ID NO: 873070 - RNA, 19 nt, Artificial Sequence
  Description of Artificial Sequence: Synthetic oligonucleotide
  Sense strand starting at position 190 of SEQ ID NO: 588555
acccuagugcauuagcuaa

SEQ ID NO: 873071 - RNA, 19 nt, Artificial Sequence
  Description of Artificial Sequence: Synthetic oligonucleotide
  Antisense strand to SEQ ID NO: 873070
uuagcuaaugcacuagggu

SEQ ID NO: 873072 - RNA, 19 nt, Artificial Sequence
  Description of Artificial Sequence: Synthetic oligonucleotide
  Sense strand starting at position 271 of SEQ ID NO: 588555
uauugagucccuugaggaa

SEQ ID NO: 873073 - RNA, 19 nt, Artificial Sequence
  Description of Artificial Sequence: Synthetic oligonucleotide
  Antisense strand to SEQ ID NO: 873072
uuccucaagggacucaaua

SEQ ID NO: 873074 - RNA, 19 nt, Artificial Sequence
  Description of Artificial Sequence: Synthetic oligonucleotide
  Sense strand starting at position 456 of SEQ ID NO: 588555
guuucucgcuauuugggaa

SEQ ID NO: 873075 - RNA, 19 nt, Artificial Sequence
  Description of Artificial Sequence: Synthetic oligonucleotide
  Antisense strand to SEQ ID NO: 873074
uucccaaauagcgagaaac

SEQ ID NO: 873076 - RNA, 19 nt, Artificial Sequence
  Description of Artificial Sequence: Synthetic oligonucleotide
  Sense strand starting at position 700 of SEQ ID NO: 588555
ucagacaaguaucaagaaa

SEQ ID NO: 873077 - RNA, 19 nt, Artificial Sequence
  Description of Artificial Sequence: Synthetic oligonucleotide
  Antisense strand to SEQ ID NO: 873076
uuucuugauacuugucuga

SEQ ID NO: 873078 - RNA, 19 nt, Artificial Sequence
  Description of Artificial Sequence: Synthetic oligonucleotide
  Sense strand starting at position 922 of SEQ ID NO: 588555
ucuucuauccggcaaggga

SEQ ID NO: 873079 - RNA, 19 nt, Artificial Sequence
  Description of Artificial Sequence: Synthetic oligonucleotide
  Antisense strand to SEQ ID NO: 873078
ucccuugccggauagaaga

SEQ ID NO: 873080 - RNA, 19 nt, Artificial Sequence
  Description of Artificial Sequence: Synthetic oligonucleotide
  Sense strand starting at position 1010 of SEQ ID NO: 588555
aucacagaccucuggcuua

SEQ ID NO: 873081 - RNA, 19 nt, Artificial Sequence
  Description of Artificial Sequence: Synthetic oligonucleotide
  Antisense strand to SEQ ID NO: 873080
uaagccagaggucugugau

SEQ ID NO: 873082 - RNA, 19 nt, Artificial Sequence
  Description of Artificial Sequence: Synthetic oligonucleotide
  Sense strand starting at position 1015 of SEQ ID NO: 588555
agaccucuggcuuaccaau

SEQ ID NO: 873083 - RNA, 19 nt, Artificial Sequence
  Description of Artificial Sequence: Synthetic oligonucleotide
  Antisense strand to SEQ ID NO: 873082
auugguaagccagaggucu

SEQ ID NO: 873084 - RNA, 19 nt, Artificial Sequence
  Description of Artificial Sequence: Synthetic oligonucleotide
  Sense strand starting at position 1028 of SEQ ID NO: 588555
accaauuaugcuuagcuga

SEQ ID NO: 873085 - RNA, 19 nt, Artificial Sequence
  Description of Artificial Sequence: Synthetic oligonucleotide
  Antisense strand to SEQ ID NO: 873084
ucagcuaagcauaauuggu

SEQ ID NO: 873086 - RNA, 19 nt, Artificial Sequence
  Description of Artificial Sequence: Synthetic oligonucleotide
  Sense strand starting at position 1035 of SEQ ID NO: 588555
augcuuagcugagcaaaca

SEQ ID NO: 873087 - RNA, 19 nt, Artificial Sequence
  Description of Artificial Sequence: Synthetic oligonucleotide
  Antisense strand to SEQ ID NO: 873086
uguuugcucagcuaagcau

SEQ ID NO: 873088 - RNA, 19 nt, Artificial Sequence
  Description of Artificial Sequence: Synthetic oligonucleotide
  Sense strand starting at position 1080 of SEQ ID NO: 588555
acuguuagagccugaagga

SEQ ID NO: 873089 - RNA, 19 nt, Artificial Sequence
  Description of Artificial Sequence: Synthetic oligonucleotide
  Antisense strand to SEQ ID NO: 873088
uccuucaggcucuaacagu

SEQ ID NO: 873090 - RNA, 19 nt, Artificial Sequence
  Description of Artificial Sequence: Synthetic oligonucleotide
  Sense strand starting at position 1101 of SEQ ID NO: 588555
agaggauuucgcugugauc

SEQ ID NO: 873091 - RNA, 19 nt, Artificial Sequence
  Description of Artificial Sequence: Synthetic oligonucleotide
  Antisense strand to SEQ ID NO: 873090
gaucacagcgaaauccucu

SEQ ID NO: 873092 - RNA, 19 nt, Artificial Sequence
  Description of Artificial Sequence: Synthetic oligonucleotide
  Sense strand starting at position 1103 of SEQ ID NO: 588555
aggauuucgcugugaucau

SEQ ID NO: 873093 - RNA, 19 nt, Artificial Sequence
  Description of Artificial Sequence: Synthetic oligonucleotide
  Antisense strand to SEQ ID NO: 873092
augaucacagcgaaauccu

SEQ ID NO: 873094 - RNA, 19 nt, Artificial Sequence
  Description of Artificial Sequence: Synthetic oligonucleotide
  Sense strand starting at position 1107 of SEQ ID NO: 588555
uuucgcugugaucaucaau

SEQ ID NO: 873095 - RNA, 19 nt, Artificial Sequence
  Description of Artificial Sequence: Synthetic oligonucleotide
  Antisense strand to SEQ ID NO: 873094
auugaugaucacagcgaaa

SEQ ID NO: 873096 - RNA, 19 nt, Artificial Sequence
  Description of Artificial Sequence: Synthetic oligonucleotide
  Sense strand starting at position 1110 of SEQ ID NO: 588555
cgcugugaucaucaauaug

SEQ ID NO: 873097 - RNA, 19 nt, Artificial Sequence
  Description of Artificial Sequence: Synthetic oligonucleotide
  Antisense strand to SEQ ID NO: 873096
cauauugaugaucacagcg

SEQ ID NO: 873098 - RNA, 19 nt, Artificial Sequence
  Description of Artificial Sequence: Synthetic oligonucleotide
  Sense strand starting at position 1113 of SEQ ID NO: 588555
ugugaucaucaauauguga

SEQ ID NO: 873099 - RNA, 19 nt, Artificial Sequence
  Description of Artificial Sequence: Synthetic oligonucleotide
  Antisense strand to SEQ ID NO: 873098
ucacauauugaugaucaca

SEQ ID NO: 873100 - RNA, 19 nt, Artificial Sequence
  Description of Artificial Sequence: Synthetic oligonucleotide
  Sense strand starting at position 1186 of SEQ ID NO: 588555
cgacgcguccauagugaaa

SEQ ID NO: 873101 - RNA, 19 nt, Artificial Sequence
  Description of Artificial Sequence: Synthetic oligonucleotide
  Antisense strand to SEQ ID NO: 873100
uuucacuauggacgcgucg

SEQ ID NO: 873102 - RNA, 19 nt, Artificial Sequence
  Description of Artificial Sequence: Synthetic oligonucleotide
  Sense strand starting at position 1400 of SEQ ID NO: 588555
aaaggaguccuacgcaagu

SEQ ID NO: 873103 - RNA, 19 nt, Artificial Sequence
  Description of Artificial Sequence: Synthetic oligonucleotide
  Antisense strand to SEQ ID NO: 873102
acuugcguaggacuccuuu

SEQ ID NO: 873104 - RNA, 19 nt, Artificial Sequence
  Description of Artificial Sequence: Synthetic oligonucleotide
  Sense strand starting at position 1402 of SEQ ID NO: 588555
aggaguccuacgcaaguca

SEQ ID NO: 873105 - RNA, 19 nt, Artificial Sequence
  Description of Artificial Sequence: Synthetic oligonucleotide
  Antisense strand to SEQ ID NO: 873104
ugacuugcguaggacuccu

SEQ ID NO: 873106 - RNA, 19 nt, Artificial Sequence
  Description of Artificial Sequence: Synthetic oligonucleotide
  Sense strand starting at position 1493 of SEQ ID NO: 588555
uuguuaagcacguuuguua

SEQ ID NO: 873107 - RNA, 19 nt, Artificial Sequence
  Description of Artificial Sequence: Synthetic oligonucleotide
  Antisense strand to SEQ ID NO: 873106
uaacaaacgugcuuaacaa

SEQ ID NO: 873108 - RNA, 19 nt, Artificial Sequence
  Description of Artificial Sequence: Synthetic oligonucleotide
  Sense strand starting at position 2926 of SEQ ID NO: 588555
guggcucacuuucuaaacu

SEQ ID NO: 873109 - RNA, 19 nt, Artificial Sequence
  Description of Artificial Sequence: Synthetic oligonucleotide
  Antisense strand to SEQ ID NO: 873108
aguuuagaaagugagccac

SEQ ID NO: 873110 - RNA, 19 nt, Artificial Sequence
  Description of Artificial Sequence: Synthetic oligonucleotide
  Sense strand starting at position 3008 of SEQ ID NO: 588555
gcggcuuugcugcuaggaa

SEQ ID NO: 873111 - RNA, 19 nt, Artificial Sequence
  Description of Artificial Sequence: Synthetic oligonucleotide
  Antisense strand to SEQ ID NO: 873110
uuccuagcagcaaagccgc

SEQ ID NO: 873112 - RNA, 19 nt, Artificial Sequence
  Description of Artificial Sequence: Synthetic oligonucleotide
  Sense strand starting at position 3027 of SEQ ID NO: 588555
ggugcauacguuucuaguu

SEQ ID NO: 873113 - RNA, 19 nt, Artificial Sequence
  Description of Artificial Sequence: Synthetic oligonucleotide
  Antisense strand to SEQ ID NO: 873112
aacuagaaacguaugcacc

SEQ ID NO: 873114 - RNA, 19 nt, Artificial Sequence
  Description of Artificial Sequence: Synthetic oligonucleotide
  Sense strand starting at position 3064 of SEQ ID NO: 588555
ggaucuguaaacgaaagca

SEQ ID NO: 873115 - RNA, 19 nt, Artificial Sequence
  Description of Artificial Sequence: Synthetic oligonucleotide
  Antisense strand to SEQ ID NO: 873114
ugcuuucguuuacagaucc

SEQ ID NO: 873116 - RNA, 19 nt, Artificial Sequence
  Description of Artificial Sequence: Synthetic oligonucleotide
  Sense strand starting at position 3246 of SEQ ID NO: 588555
agggaacauucucaggaga

SEQ ID NO: 873117 - RNA, 19 nt, Artificial Sequence
  Description of Artificial Sequence: Synthetic oligonucleotide
  Antisense strand to SEQ ID NO: 873116
ucuccugagaauguucccu

SEQ ID NO: 873118 - RNA, 19 nt, Artificial Sequence
  Description of Artificial Sequence: Synthetic oligonucleotide
  Sense strand starting at position 3275 of SEQ ID NO: 588555
cagggauucgcccaggucu

SEQ ID NO: 873119 - RNA, 19 nt, Artificial Sequence
  Description of Artificial Sequence: Synthetic oligonucleotide
  Antisense strand to SEQ ID NO: 873118
agaccugggcgaaucccug

SEQ ID NO: 873120 - RNA, 19 nt, Artificial Sequence
  Description of Artificial Sequence: Synthetic oligonucleotide
  Sense strand starting at position 3523 of SEQ ID NO: 588555
gcaggacugaucugauuga

SEQ ID NO: 873121 - RNA, 19 nt, Artificial Sequence
  Description of Artificial Sequence: Synthetic oligonucleotide
  Antisense strand to SEQ ID NO: 873120
ucaaucagaucaguccugc

SEQ ID NO: 873122 - RNA, 19 nt, Artificial Sequence
  Description of Artificial Sequence: Synthetic oligonucleotide
  Sense strand starting at position 3530 of SEQ ID NO: 588555
ugaucugauugagagaaac

SEQ ID NO: 873123 - RNA, 19 nt, Artificial Sequence
  Description of Artificial Sequence: Synthetic oligonucleotide
  Antisense strand to SEQ ID NO: 873122
guuucucucaaucagauca

SEQ ID NO: 873124 - RNA, 19 nt, Artificial Sequence
  Description of Artificial Sequence: Synthetic oligonucleotide
  Sense strand starting at position 3596 of SEQ ID NO: 588555
gugggcuuugcagaagaga

SEQ ID NO: 873125 - RNA, 19 nt, Artificial Sequence
  Description of Artificial Sequence: Synthetic oligonucleotide
  Antisense strand to SEQ ID NO: 873124
ucucuucugcaaagcccac

SEQ ID NO: 873126 - RNA, 19 nt, Artificial Sequence
  Description of Artificial Sequence: Synthetic oligonucleotide
  Sense strand starting at position 3610 of SEQ ID NO: 588555
agagaaaggucacugcaaa

SEQ ID NO: 873127 - RNA, 19 nt, Artificial Sequence
  Description of Artificial Sequence: Synthetic oligonucleotide
  Antisense strand to SEQ ID NO: 873126
uuugcagugaccuuucucu

SEQ ID NO: 873128 - RNA, 19 nt, Artificial Sequence
  Description of Artificial Sequence: Synthetic oligonucleotide
  Sense strand starting at position 3611 of SEQ ID NO: 588555
gagaaaggucacugcaaac

SEQ ID NO: 873129 - RNA, 19 nt, Artificial Sequence
  Description of Artificial Sequence: Synthetic oligonucleotide
  Antisense strand to SEQ ID NO: 873128
guuugcagugaccuuucuc

SEQ ID NO: 873130 - RNA, 19 nt, Artificial Sequence
  Description of Artificial Sequence: Synthetic oligonucleotide
  Sense strand starting at position 3697 of SEQ ID NO: 588555
accggugacugcuuagaac

SEQ ID NO: 873131 - RNA, 19 nt, Artificial Sequence
  Description of Artificial Sequence: Synthetic oligonucleotide
  Antisense strand to SEQ ID NO: 873130
guucuaagcagucaccggu

SEQ ID NO: 873132 - RNA, 19 nt, Artificial Sequence
  Description of Artificial Sequence: Synthetic oligonucleotide
  Sense strand starting at position 3706 of SEQ ID NO: 588555
ugcuuagaaccuugaccaa

SEQ ID NO: 873133 - RNA, 19 nt, Artificial Sequence
  Description of Artificial Sequence: Synthetic oligonucleotide
  Antisense strand to SEQ ID NO: 873132
uuggucaagguucuaagca

SEQ ID NO: 873134 - RNA, 19 nt, Artificial Sequence
  Description of Artificial Sequence: Synthetic oligonucleotide
  Sense strand starting at position 3755 of SEQ ID NO: 588555
cugaguccuggcuguaaau

SEQ ID NO: 873135 - RNA, 19 nt, Artificial Sequence
  Description of Artificial Sequence: Synthetic oligonucleotide
  Antisense strand to SEQ ID NO: 873134
auuuacagccaggacucag

SEQ ID NO: 873136 - RNA, 19 nt, Artificial Sequence
  Description of Artificial Sequence: Synthetic oligonucleotide
  Sense strand starting at position 3757 of SEQ ID NO: 588555
gaguccuggcuguaaauaa

SEQ ID NO: 873137 - RNA, 19 nt, Artificial Sequence
  Description of Artificial Sequence: Synthetic oligonucleotide
  Antisense strand to SEQ ID NO: 873136
uuauuuacagccaggacuc

SEQ ID NO: 873138 - RNA, 19 nt, Artificial Sequence
  Description of Artificial Sequence: Synthetic oligonucleotide
  Sense strand starting at position 28 of SEQ ID NO: 588556
auugucugaauggaguuau

SEQ ID NO: 873139 - RNA, 19 nt, Artificial Sequence
  Description of Artificial Sequence: Synthetic oligonucleotide
  Antisense strand to SEQ ID NO: 873138
auaacuccauucagacaau

SEQ ID NO: 873140 - RNA, 19 nt, Artificial Sequence
  Description of Artificial Sequence: Synthetic oligonucleotide
  Sense strand starting at position 82 of SEQ ID NO: 588556
aagaauauguguuucuugu

SEQ ID NO: 873141 - RNA, 19 nt, Artificial Sequence
  Description of Artificial Sequence: Synthetic oligonucleotide
  Antisense strand to SEQ ID NO: 873140
acaagaaacacauauucuu

SEQ ID NO: 873142 - RNA, 19 nt, Artificial Sequence
  Description of Artificial Sequence: Synthetic oligonucleotide
  Sense strand starting at position 90 of SEQ ID NO: 588556
guguuucuuguugaaugau

SEQ ID NO: 873143 - RNA, 19 nt, Artificial Sequence
  Description of Artificial Sequence: Synthetic oligonucleotide
  Antisense strand to SEQ ID NO: 873142
aucauucaacaagaaacac

SEQ ID NO: 873144 - RNA, 19 nt, Artificial Sequence
  Description of Artificial Sequence: Synthetic oligonucleotide
  Sense strand starting at position 99 of SEQ ID NO: 588556
guugaaugaugaguucuuu

SEQ ID NO: 873145 - RNA, 19 nt, Artificial Sequence
  Description of Artificial Sequence: Synthetic oligonucleotide
  Antisense strand to SEQ ID NO: 873144
aaagaacucaucauucaac

SEQ ID NO: 873146 - RNA, 19 nt, Artificial Sequence
  Description of Artificial Sequence: Synthetic oligonucleotide
  Sense strand starting at position 138 of SEQ ID NO: 588556
agcuuaaauugagucuaua

SEQ ID NO: 873147 - RNA, 19 nt, Artificial Sequence
  Description of Artificial Sequence: Synthetic oligonucleotide
  Antisense strand to SEQ ID NO: 873146
uauagacucaauuuaagcu

SEQ ID NO: 873148 - RNA, 19 nt, Artificial Sequence
  Description of Artificial Sequence: Synthetic oligonucleotide
  Sense strand starting at position 146 of SEQ ID NO: 588556
uugagucuauauguaacuu

SEQ ID NO: 873149 - RNA, 19 nt, Artificial Sequence
  Description of Artificial Sequence: Synthetic oligonucleotide
  Antisense strand to SEQ ID NO: 873148
aaguuacauauagacucaa

SEQ ID NO: 873150 - RNA, 19 nt, Artificial Sequence
  Description of Artificial Sequence: Synthetic oligonucleotide
  Sense strand starting at position 157 of SEQ ID NO: 588556
uguaacuucgcuuauauua

SEQ ID NO: 873151 - RNA, 19 nt, Artificial Sequence
  Description of Artificial Sequence: Synthetic oligonucleotide
  Antisense strand to SEQ ID NO: 873150
uaauauaagcgaaguuaca

SEQ ID NO: 873152 - RNA, 19 nt, Artificial Sequence
  Description of Artificial Sequence: Synthetic oligonucleotide
  Sense strand starting at position 210 of SEQ ID NO: 588556
cugguucugcaauaugaac

SEQ ID NO: 873153 - RNA, 19 nt, Artificial Sequence
  Description of Artificial Sequence: Synthetic oligonucleotide
  Antisense strand to SEQ ID NO: 873152
guucauauugcagaaccag

SEQ ID NO: 873154 - RNA, 19 nt, Artificial Sequence
  Description of Artificial Sequence: Synthetic oligonucleotide
  Sense strand starting at position 287 of SEQ ID NO: 588556
aagcaaugucuauaaggug

SEQ ID NO: 873155 - RNA, 19 nt, Artificial Sequence
  Description of Artificial Sequence: Synthetic oligonucleotide
  Antisense strand to SEQ ID NO: 873154
caccuuauagacauugcuu

SEQ ID NO: 873156 - RNA, 19 nt, Artificial Sequence
  Description of Artificial Sequence: Synthetic oligonucleotide
  Sense strand starting at position 411 of SEQ ID NO: 588556
aaaguucuugucuaagugu

SEQ ID NO: 873157 - RNA, 19 nt, Artificial Sequence
  Description of Artificial Sequence: Synthetic oligonucleotide
  Antisense strand to SEQ ID NO: 873156
acacuuagacaagaacuuu

SEQ ID NO: 873158 - RNA, 19 nt, Artificial Sequence
  Description of Artificial Sequence: Synthetic oligonucleotide
  Sense strand starting at position 475 of SEQ ID NO: 588556
ugcuaauaugaguaguagu

SEQ ID NO: 873159 - RNA, 19 nt, Artificial Sequence
  Description of Artificial Sequence: Synthetic oligonucleotide
  Antisense strand to SEQ ID NO: 873158
acuacuacucauauuagca

SEQ ID NO: 873160 - RNA, 19 nt, Artificial Sequence
  Description of Artificial Sequence: Synthetic oligonucleotide
  Sense strand starting at position 483 of SEQ ID NO: 588556
ugaguaguaguuuaaccca

SEQ ID NO: 873161 - RNA, 19 nt, Artificial Sequence
  Description of Artificial Sequence: Synthetic oligonucleotide
  Antisense strand to SEQ ID NO: 873160
uggguuaaacuacuacuca

SEQ ID NO: 873162 - RNA, 19 nt, Artificial Sequence
  Description of Artificial Sequence: Synthetic oligonucleotide
  Sense strand starting at position 486 of SEQ ID NO: 588556
guaguaguuuaacccaacu

SEQ ID NO: 873163 - RNA, 19 nt, Artificial Sequence
  Description of Artificial Sequence: Synthetic oligonucleotide
  Antisense strand to SEQ ID NO: 873162
aguuggguuaaacuacuac

SEQ ID NO: 873164 - RNA, 19 nt, Artificial Sequence
  Description of Artificial Sequence: Synthetic oligonucleotide
  Sense strand starting at position 658 of SEQ ID NO: 588556
agcucuuuacacugucaua

SEQ ID NO: 873165 - RNA, 19 nt, Artificial Sequence
  Description of Artificial Sequence: Synthetic oligonucleotide
  Antisense strand to SEQ ID NO: 873164
uaugacaguguaaagagcu

SEQ ID NO: 873166 - RNA, 19 nt, Artificial Sequence
  Description of Artificial Sequence: Synthetic oligonucleotide
  Sense strand starting at position 681 of SEQ ID NO: 588556
aggucugaucuuuaggcua

SEQ ID NO: 873167 - RNA, 19 nt, Artificial Sequence
  Description of Artificial Sequence: Synthetic oligonucleotide
  Antisense strand to SEQ ID NO: 873166
uagccuaaagaucagaccu

SEQ ID NO: 873168 - RNA, 19 nt, Artificial Sequence
  Description of Artificial Sequence: Synthetic oligonucleotide
  Sense strand starting at position 832 of SEQ ID NO: 588556
cuuugucuccucuauagca

SEQ ID NO: 873169 - RNA, 19 nt, Artificial Sequence
  Description of Artificial Sequence: Synthetic oligonucleotide
  Antisense strand to SEQ ID NO: 873168
ugcuauagaggagacaaag

SEQ ID NO: 873170 - RNA, 19 nt, Artificial Sequence
  Description of Artificial Sequence: Synthetic oligonucleotide
  Sense strand starting at position 1576 of SEQ ID NO: 588556
aacuguccaggcugaaaua

SEQ ID NO: 873171 - RNA, 19 nt, Artificial Sequence
  Description of Artificial Sequence: Synthetic oligonucleotide
  Antisense strand to SEQ ID NO: 873170
uauuucagccuggacaguu

SEQ ID NO: 873172 - RNA, 19 nt, Artificial Sequence
  Description of Artificial Sequence: Synthetic oligonucleotide
  Sense strand starting at position 1627 of SEQ ID NO: 588556
ugagaagucccuuagguac

SEQ ID NO: 873173 - RNA, 19 nt, Artificial Sequence
  Description of Artificial Sequence: Synthetic oligonucleotide
  Antisense strand to SEQ ID NO: 873172
guaccuaagggacuucuca

SEQ ID NO: 873174 - RNA, 19 nt, Artificial Sequence
  Description of Artificial Sequence: Synthetic oligonucleotide
  Sense strand starting at position 1634 of SEQ ID NO: 588556
ucccuuagguacuuacaua

SEQ ID NO: 873175 - RNA, 19 nt, Artificial Sequence
  Description of Artificial Sequence: Synthetic oligonucleotide
  Antisense strand to SEQ ID NO: 873174
uauguaaguaccuaaggga

SEQ ID NO: 873176 - RNA, 19 nt, Artificial Sequence
  Description of Artificial Sequence: Synthetic oligonucleotide
  Sense strand starting at position 1706 of SEQ ID NO: 588556
gcaauacagugaucuacaa

SEQ ID NO: 873177 - RNA, 19 nt, Artificial Sequence
  Description of Artificial Sequence: Synthetic oligonucleotide
  Antisense strand to SEQ ID NO: 873176
uuguagaucacuguauugc

SEQ ID NO: 873178 - RNA, 19 nt, Artificial Sequence
  Description of Artificial Sequence: Synthetic oligonucleotide
  Sense strand starting at position 1771 of SEQ ID NO: 588556
auauacuugccaugaauag

SEQ ID NO: 873179 - RNA, 19 nt, Artificial Sequence
  Description of Artificial Sequence: Synthetic oligonucleotide
  Antisense strand to SEQ ID NO: 873178
cuauucauggcaaguauau

SEQ ID NO: 873180 - RNA, 19 nt, Artificial Sequence
  Description of Artificial Sequence: Synthetic oligonucleotide
  Sense strand starting at position 1991 of SEQ ID NO: 588556
ccuagagaauugucuguuu

SEQ ID NO: 873181 - RNA, 19 nt, Artificial Sequence
  Description of Artificial Sequence: Synthetic oligonucleotide
  Antisense strand to SEQ ID NO: 873180
aaacagacaauucucuagg

SEQ ID NO: 873182 - RNA, 19 nt, Artificial Sequence
  Description of Artificial Sequence: Synthetic oligonucleotide
  Sense strand starting at position 1993 of SEQ ID NO: 588556
uagagaauugucuguuuau

SEQ ID NO: 873183 - RNA, 19 nt, Artificial Sequence
  Description of Artificial Sequence: Synthetic oligonucleotide
  Antisense strand to SEQ ID NO: 873182
auaaacagacaauucucua

SEQ ID NO: 873184 - RNA, 19 nt, Artificial Sequence
  Description of Artificial Sequence: Synthetic oligonucleotide
  Sense strand starting at position 1994 of SEQ ID NO: 588556
agagaauugucuguuuaug

SEQ ID NO: 873185 - RNA, 19 nt, Artificial Sequence
  Description of Artificial Sequence: Synthetic oligonucleotide
  Antisense strand to SEQ ID NO: 873184
cauaaacagacaauucucu

SEQ ID NO: 873186 - RNA, 19 nt, Artificial Sequence
  Description of Artificial Sequence: Synthetic oligonucleotide
  Sense strand starting at position 2014 of SEQ ID NO: 588556
ucuggucucucccuuugaa

SEQ ID NO: 873187 - RNA, 19 nt, Artificial Sequence
  Description of Artificial Sequence: Synthetic oligonucleotide
  Antisense strand to SEQ ID NO: 873186
uucaaagggagagaccaga

SEQ ID NO: 873188 - RNA, 19 nt, Artificial Sequence
  Description of Artificial Sequence: Synthetic oligonucleotide
  Sense strand starting at position 2129 of SEQ ID NO: 588556
uuaauaugucaccgaucug

SEQ ID NO: 873189 - RNA, 19 nt, Artificial Sequence
  Description of Artificial Sequence: Synthetic oligonucleotide
  Antisense strand to SEQ ID NO: 873188
cagaucggugacauauuaa

SEQ ID NO: 873190 - RNA, 19 nt, Artificial Sequence
  Description of Artificial Sequence: Synthetic oligonucleotide
  Sense strand starting at position 2268 of SEQ ID NO: 588556
gcagauugucauuaaauau

SEQ ID NO: 873191 - RNA, 19 nt, Artificial Sequence
  Description of Artificial Sequence: Synthetic oligonucleotide
  Antisense strand to SEQ ID NO: 873190
auauuuaaugacaaucugc

SEQ ID NO: 873192 - RNA, 19 nt, Artificial Sequence
  Description of Artificial Sequence: Synthetic oligonucleotide
  Sense strand starting at position 2334 of SEQ ID NO: 588556
uuaggagauuaguuaguuu

SEQ ID NO: 873193 - RNA, 19 nt, Artificial Sequence
  Description of Artificial Sequence: Synthetic oligonucleotide
  Antisense strand to SEQ ID NO: 873192
aaacuaacuaaucuccuaa

SEQ ID NO: 873194 - RNA, 19 nt, Artificial Sequence
  Description of Artificial Sequence: Synthetic oligonucleotide
  Sense strand starting at position 3077 of SEQ ID NO: 588556
uacaguguuguauaucuga

SEQ ID NO: 873195 - RNA, 19 nt, Artificial Sequence
  Description of Artificial Sequence: Synthetic oligonucleotide
  Antisense strand to SEQ ID NO: 873194
ucagauauacaacacugua

SEQ ID NO: 873196 - RNA, 19 nt, Artificial Sequence
  Description of Artificial Sequence: Synthetic oligonucleotide
  Sense strand starting at position 3296 of SEQ ID NO: 588556
auauguauauggcuacaca

SEQ ID NO: 873197 - RNA, 19 nt, Artificial Sequence
  Description of Artificial Sequence: Synthetic oligonucleotide
  Antisense strand to SEQ ID NO: 873196
uguguagccauauacauau

SEQ ID NO: 873198 - RNA, 19 nt, Artificial Sequence
  Description of Artificial Sequence: Synthetic oligonucleotide
  Sense strand starting at position 3354 of SEQ ID NO: 588556
gaguaacuacagugaggua

SEQ ID NO: 873199 - RNA, 19 nt, Artificial Sequence
  Description of Artificial Sequence: Synthetic oligonucleotide
  Antisense strand to SEQ ID NO: 873198
uaccucacuguaguuacuc

SEQ ID NO: 873200 - RNA, 19 nt, Artificial Sequence
  Description of Artificial Sequence: Synthetic oligonucleotide
  Sense strand starting at position 3552 of SEQ ID NO: 588556
cagguaaucugcuuucuga

SEQ ID NO: 873201 - RNA, 19 nt, Artificial Sequence
  Description of Artificial Sequence: Synthetic oligonucleotide
  Antisense strand to SEQ ID NO: 873200
ucagaaagcagauuaccug

SEQ ID NO: 873202 - RNA, 19 nt, Artificial Sequence
  Description of Artificial Sequence: Synthetic oligonucleotide
  Sense strand starting at position 3562 of SEQ ID NO: 588556
gcuuucugacucuacagau

SEQ ID NO: 873203 - RNA, 19 nt, Artificial Sequence
  Description of Artificial Sequence: Synthetic oligonucleotide
  Antisense strand to SEQ ID NO: 873202
aucuguagagucagaaagc

SEQ ID NO: 873204 - RNA, 19 nt, Artificial Sequence
  Description of Artificial Sequence: Synthetic oligonucleotide
  Sense strand starting at position 3708 of SEQ ID NO: 588556
uuaacugccgaauaauauu

SEQ ID NO: 873205 - RNA, 19 nt, Artificial Sequence
  Description of Artificial Sequence: Synthetic oligonucleotide
  Antisense strand to SEQ ID NO: 873204
aauauuauucggcaguuaa

SEQ ID NO: 873206 - RNA, 19 nt, Artificial Sequence
  Description of Artificial Sequence: Synthetic oligonucleotide
  Sense strand starting at position 3794 of SEQ ID NO: 588556
uccaguauuugguuguauu

SEQ ID NO: 873207 - RNA, 19 nt, Artificial Sequence
  Description of Artificial Sequence: Synthetic oligonucleotide
  Antisense strand to SEQ ID NO: 873206
aauacaaccaaauacugga

SEQ ID NO: 873208 - RNA, 19 nt, Artificial Sequence
  Description of Artificial Sequence: Synthetic oligonucleotide
  Sense strand starting at position 3795 of SEQ ID NO: 588556
ccaguauuugguuguauuc

SEQ ID NO: 873209 - RNA, 19 nt, Artificial Sequence
  Description of Artificial Sequence: Synthetic oligonucleotide
  Antisense strand to SEQ ID NO: 873208
gaauacaaccaaauacugg

SEQ ID NO: 873210 - RNA, 19 nt, Artificial Sequence
  Description of Artificial Sequence: Synthetic oligonucleotide
  Sense strand starting at position 3833 of SEQ ID NO: 588556
cuaauaacaucugugugca

SEQ ID NO: 873211 - RNA, 19 nt, Artificial Sequence
  Description of Artificial Sequence: Synthetic oligonucleotide
  Antisense strand to SEQ ID NO: 873210
ugcacacagauguuauuag

SEQ ID NO: 873212 - RNA, 19 nt, Artificial Sequence
  Description of Artificial Sequence: Synthetic oligonucleotide
  Sense strand starting at position 3901 of SEQ ID NO: 588556
aagagaguugcugggucau

SEQ ID NO: 873213 - RNA, 19 nt, Artificial Sequence
  Description of Artificial Sequence: Synthetic oligonucleotide
  Antisense strand to SEQ ID NO: 873212
augacccagcaacucucuu

SEQ ID NO: 873214 - RNA, 19 nt, Artificial Sequence
  Description of Artificial Sequence: Synthetic oligonucleotide
  Sense strand starting at position 3903 of SEQ ID NO: 588556
gagaguugcugggucauac

SEQ ID NO: 873215 - RNA, 19 nt, Artificial Sequence
  Description of Artificial Sequence: Synthetic oligonucleotide
  Antisense strand to SEQ ID NO: 873214
guaugacccagcaacucuc

SEQ ID NO: 873216 - RNA, 19 nt, Artificial Sequence
  Description of Artificial Sequence: Synthetic oligonucleotide
  Sense strand starting at position 3912 of SEQ ID NO: 588556
ugggucauacguuaaauua

SEQ ID NO: 873217 - RNA, 19 nt, Artificial Sequence
  Description of Artificial Sequence: Synthetic oligonucleotide
  Antisense strand to SEQ ID NO: 873216
uaauuuaacguaugaccca

SEQ ID NO: 873218 - RNA, 19 nt, Artificial Sequence
  Description of Artificial Sequence: Synthetic oligonucleotide
  Sense strand starting at position 35 of SEQ ID NO: 588557
gcauaaguacuggaucuga

SEQ ID NO: 873219 - RNA, 19 nt, Artificial Sequence
  Description of Artificial Sequence: Synthetic oligonucleotide
  Antisense strand to SEQ ID NO: 873218
ucagauccaguacuuaugc

SEQ ID NO: 873220 - RNA, 19 nt, Artificial Sequence
  Description of Artificial Sequence: Synthetic oligonucleotide
  Sense strand starting at position 221 of SEQ ID NO: 588557
aggcacuuucuagaccuaa

SEQ ID NO: 873221 - RNA, 19 nt, Artificial Sequence
  Description of Artificial Sequence: Synthetic oligonucleotide
  Antisense strand to SEQ ID NO: 873220
uuaggucuagaaagugccu

SEQ ID NO: 873222 - RNA, 19 nt, Artificial Sequence
  Description of Artificial Sequence: Synthetic oligonucleotide
  Sense strand starting at position 258 of SEQ ID NO: 588557
ugcuaaauguuaucccaga

SEQ ID NO: 873223 - RNA, 19 nt, Artificial Sequence
  Description of Artificial Sequence: Synthetic oligonucleotide
  Antisense strand to SEQ ID NO: 873222
ucugggauaacauuuagca

SEQ ID NO: 873224 - RNA, 19 nt, Artificial Sequence
  Description of Artificial Sequence: Synthetic oligonucleotide
  Sense strand starting at position 259 of SEQ ID NO: 588557
gcuaaauguuaucccagaa

SEQ ID NO: 873225 - RNA, 19 nt, Artificial Sequence
  Description of Artificial Sequence: Synthetic oligonucleotide
  Antisense strand to SEQ ID NO: 873224
uucugggauaacauuuagc

SEQ ID NO: 873226 - RNA, 19 nt, Artificial Sequence
  Description of Artificial Sequence: Synthetic oligonucleotide
  Sense strand starting at position 388 of SEQ ID NO: 588557
cagugaaggcuguagugua

SEQ ID NO: 873227 - RNA, 19 nt, Artificial Sequence
  Description of Artificial Sequence: Synthetic oligonucleotide
  Antisense strand to SEQ ID NO: 873226
uacacuacagccuucacug

SEQ ID NO: 873228 - RNA, 19 nt, Artificial Sequence
  Description of Artificial Sequence: Synthetic oligonucleotide
  Sense strand starting at position 804 of SEQ ID NO: 588557
ccacacgugcgugucauaa

SEQ ID NO: 873229 - RNA, 19 nt, Artificial Sequence
  Description of Artificial Sequence: Synthetic oligonucleotide
  Antisense strand to SEQ ID NO: 873228
uuaugacacgcacgugugg

SEQ ID NO: 873230 - RNA, 19 nt, Artificial Sequence
  Description of Artificial Sequence: Synthetic oligonucleotide
  Sense strand starting at position 917 of SEQ ID NO: 588557
gauggugugcgugaagaca

SEQ ID NO: 873231 - RNA, 19 nt, Artificial Sequence
  Description of Artificial Sequence: Synthetic oligonucleotide
  Antisense strand to SEQ ID NO: 873230
ugucuucacgcacaccauc

SEQ ID NO: 873232 - RNA, 19 nt, Artificial Sequence
  Description of Artificial Sequence: Synthetic oligonucleotide
  Sense strand starting at position 970 of SEQ ID NO: 588557
uccguucuaggaggugauu

SEQ ID NO: 873233 - RNA, 19 nt, Artificial Sequence
  Description of Artificial Sequence: Synthetic oligonucleotide
  Antisense strand to SEQ ID NO: 873232
aaucaccuccuagaacgga

SEQ ID NO: 873234 - RNA, 19 nt, Artificial Sequence
  Description of Artificial Sequence: Synthetic oligonucleotide
  Sense strand starting at position 972 of SEQ ID NO: 588557
cguucuaggaggugauuau

SEQ ID NO: 873235 - RNA, 19 nt, Artificial Sequence
  Description of Artificial Sequence: Synthetic oligonucleotide
  Antisense strand to SEQ ID NO: 873234
auaaucaccuccuagaacg

SEQ ID NO: 873236 - RNA, 19 nt, Artificial Sequence
  Description of Artificial Sequence: Synthetic oligonucleotide
  Sense strand starting at position 1058 of SEQ ID NO: 588557
accggagcucgaugagaaa

SEQ ID NO: 873237 - RNA, 19 nt, Artificial Sequence
  Description of Artificial Sequence: Synthetic oligonucleotide
  Antisense strand to SEQ ID NO: 873236
uuucucaucgagcuccggu

SEQ ID NO: 873238 - RNA, 19 nt, Artificial Sequence
  Description of Artificial Sequence: Synthetic oligonucleotide
  Sense strand starting at position 1377 of SEQ ID NO: 588557
acguuucccagaugacaug

SEQ ID NO: 873239 - RNA, 19 nt, Artificial Sequence
  Description of Artificial Sequence: Synthetic oligonucleotide
  Antisense strand to SEQ ID NO: 873238
caugucaucugggaaacgu

SEQ ID NO: 873240 - RNA, 19 nt, Artificial Sequence
  Description of Artificial Sequence: Synthetic oligonucleotide
  Sense strand starting at position 1400 of SEQ ID NO: 588557
gaaaguuuaugagcaggga

SEQ ID NO: 873241 - RNA, 19 nt, Artificial Sequence
  Description of Artificial Sequence: Synthetic oligonucleotide
  Antisense strand to SEQ ID NO: 873240
ucccugcucauaaacuuuc

SEQ ID NO: 873242 - RNA, 19 nt, Artificial Sequence
  Description of Artificial Sequence: Synthetic oligonucleotide
  Sense strand starting at position 2595 of SEQ ID NO: 588557
agcgauaacucuuccaaac

SEQ ID NO: 873243 - RNA, 19 nt, Artificial Sequence
  Description of Artificial Sequence: Synthetic oligonucleotide
  Antisense strand to SEQ ID NO: 873242
guuuggaagaguuaucgcu

SEQ ID NO: 873244 - RNA, 19 nt, Artificial Sequence
  Description of Artificial Sequence: Synthetic oligonucleotide
  Sense strand starting at position 2633 of SEQ ID NO: 588557
gaaggugagucucugagga

SEQ ID NO: 873245 - RNA, 19 nt, Artificial Sequence
  Description of Artificial Sequence: Synthetic oligonucleotide
  Antisense strand to SEQ ID NO: 873244
uccucagagacucaccuuc

SEQ ID NO: 873246 - RNA, 19 nt, Artificial Sequence
  Description of Artificial Sequence: Synthetic oligonucleotide
  Sense strand starting at position 2659 of SEQ ID NO: 588557
cuaagccuccuuugaugau

SEQ ID NO: 873247 - RNA, 19 nt, Artificial Sequence
  Description of Artificial Sequence: Synthetic oligonucleotide
  Antisense strand to SEQ ID NO: 873246
aucaucaaaggaggcuuag

SEQ ID NO: 873248 - RNA, 19 nt, Artificial Sequence
  Description of Artificial Sequence: Synthetic oligonucleotide
  Sense strand starting at position 2762 of SEQ ID NO: 588557
cuagaaugccaacgcaauu

SEQ ID NO: 873249 - RNA, 19 nt, Artificial Sequence
  Description of Artificial Sequence: Synthetic oligonucleotide
  Antisense strand to SEQ ID NO: 873248
aauugcguuggcauucuag

SEQ ID NO: 873250 - RNA, 19 nt, Artificial Sequence
  Description of Artificial Sequence: Synthetic oligonucleotide
  Sense strand starting at position 2796 of SEQ ID NO: 588557
gccucuggcuauuugguaa

SEQ ID NO: 873251 - RNA, 19 nt, Artificial Sequence
  Description of Artificial Sequence: Synthetic oligonucleotide
  Antisense strand to SEQ ID NO: 873250
uuaccaaauagccagaggc

SEQ ID NO: 873252 - RNA, 19 nt, Artificial Sequence
  Description of Artificial Sequence: Synthetic oligonucleotide
  Sense strand starting at position 2799 of SEQ ID NO: 588557
ucuggcuauuugguaaagu

SEQ ID NO: 873253 - RNA, 19 nt, Artificial Sequence
  Description of Artificial Sequence: Synthetic oligonucleotide
  Antisense strand to SEQ ID NO: 873252
acuuuaccaaauagccaga

SEQ ID NO: 873254 - RNA, 19 nt, Artificial Sequence
  Description of Artificial Sequence: Synthetic oligonucleotide
  Sense strand starting at position 2915 of SEQ ID NO: 588557
gcaaguagaguggaaacuu

SEQ ID NO: 873255 - RNA, 19 nt, Artificial Sequence
  Description of Artificial Sequence: Synthetic oligonucleotide
  Antisense strand to SEQ ID NO: 873254
aaguuuccacucuacuugc

SEQ ID NO: 873256 - RNA, 19 nt, Artificial Sequence
  Description of Artificial Sequence: Synthetic oligonucleotide
  Sense strand starting at position 2923 of SEQ ID NO: 588557
aguggaaacuucuuggauc

SEQ ID NO: 873257 - RNA, 19 nt, Artificial Sequence
  Description of Artificial Sequence: Synthetic oligonucleotide
  Antisense strand to SEQ ID NO: 873256
gauccaagaaguuuccacu

SEQ ID NO: 873258 - RNA, 19 nt, Artificial Sequence
  Description of Artificial Sequence: Synthetic oligonucleotide
  Sense strand starting at position 2937 of SEQ ID NO: 588557
ggaucagauuguucuguga

SEQ ID NO: 873259 - RNA, 19 nt, Artificial Sequence
  Description of Artificial Sequence: Synthetic oligonucleotide
  Antisense strand to SEQ ID NO: 873258
ucacagaacaaucugaucc

SEQ ID NO: 873260 - RNA, 19 nt, Artificial Sequence
  Description of Artificial Sequence: Synthetic oligonucleotide
  Sense strand starting at position 2941 of SEQ ID NO: 588557
cagauuguucugugagcaa

SEQ ID NO: 873261 - RNA, 19 nt, Artificial Sequence
  Description of Artificial Sequence: Synthetic oligonucleotide
  Antisense strand to SEQ ID NO: 873260
uugcucacagaacaaucug

SEQ ID NO: 873262 - RNA, 19 nt, Artificial Sequence
  Description of Artificial Sequence: Synthetic oligonucleotide
  Sense strand starting at position 3007 of SEQ ID NO: 588557
cccuguuuaaucguucugu

SEQ ID NO: 873263 - RNA, 19 nt, Artificial Sequence
  Description of Artificial Sequence: Synthetic oligonucleotide
  Antisense strand to SEQ ID NO: 873262
acagaacgauuaaacaggg

SEQ ID NO: 873264 - RNA, 19 nt, Artificial Sequence
  Description of Artificial Sequence: Synthetic oligonucleotide
  Sense strand starting at position 3009 of SEQ ID NO: 588557
cuguuuaaucguucugucu

SEQ ID NO: 873265 - RNA, 19 nt, Artificial Sequence
  Description of Artificial Sequence: Synthetic oligonucleotide
  Antisense strand to SEQ ID NO: 873264
agacagaacgauuaaacag

SEQ ID NO: 873266 - RNA, 19 nt, Artificial Sequence
  Description of Artificial Sequence: Synthetic oligonucleotide
  Sense strand starting at position 3079 of SEQ ID NO: 588557
gcaggaaacucccuguaaa

SEQ ID NO: 873267 - RNA, 19 nt, Artificial Sequence
  Description of Artificial Sequence: Synthetic oligonucleotide
  Antisense strand to SEQ ID NO: 873266
uuuacagggaguuuccugc

SEQ ID NO: 873268 - RNA, 19 nt, Artificial Sequence
  Description of Artificial Sequence: Synthetic oligonucleotide
  Sense strand starting at position 3080 of SEQ ID NO: 588557
caggaaacucccuguaaag

SEQ ID NO: 873269 - RNA, 19 nt, Artificial Sequence
  Description of Artificial Sequence: Synthetic oligonucleotide
  Antisense strand to SEQ ID NO: 873268
cuuuacagggaguuuccug

SEQ ID NO: 873270 - RNA, 19 nt, Artificial Sequence
  Description of Artificial Sequence: Synthetic oligonucleotide
  Sense strand starting at position 3275 of SEQ ID NO: 588557
gcugaacucugacccacau

SEQ ID NO: 873271 - RNA, 19 nt, Artificial Sequence
  Description of Artificial Sequence: Synthetic oligonucleotide
  Antisense strand to SEQ ID NO: 873270
augugggucagaguucagc

SEQ ID NO: 873272 - RNA, 19 nt, Artificial Sequence
  Description of Artificial Sequence: Synthetic oligonucleotide
  Sense strand starting at position 3479 of SEQ ID NO: 588557
ggguguaguggcagguuua

SEQ ID NO: 873273 - RNA, 19 nt, Artificial Sequence
  Description of Artificial Sequence: Synthetic oligonucleotide
  Antisense strand to SEQ ID NO: 873272
uaaaccugccacuacaccc

SEQ ID NO: 873274 - RNA, 19 nt, Artificial Sequence
  Description of Artificial Sequence: Synthetic oligonucleotide
  Sense strand starting at position 3502 of SEQ ID NO: 588557
cucaguagauccuugaaag

SEQ ID NO: 873275 - RNA, 19 nt, Artificial Sequence
  Description of Artificial Sequence: Synthetic oligonucleotide
  Antisense strand to SEQ ID NO: 873274
cuuucaaggaucuacugag

SEQ ID NO: 873276 - RNA, 19 nt, Artificial Sequence
  Description of Artificial Sequence: Synthetic oligonucleotide
  Sense strand starting at position 3503 of SEQ ID NO: 588557
ucaguagauccuugaaaga

SEQ ID NO: 873277 - RNA, 19 nt, Artificial Sequence
  Description of Artificial Sequence: Synthetic oligonucleotide
  Antisense strand to SEQ ID NO: 873276
ucuuucaaggaucuacuga

SEQ ID NO: 873278 - RNA, 19 nt, Artificial Sequence
  Description of Artificial Sequence: Synthetic oligonucleotide
  Sense strand starting at position 3559 of SEQ ID NO: 588557
gagaguaagucuccaucca

SEQ ID NO: 873279 - RNA, 19 nt, Artificial Sequence
  Description of Artificial Sequence: Synthetic oligonucleotide
  Antisense strand to SEQ ID NO: 873278
uggauggagacuuacucuc

SEQ ID NO: 873280 - RNA, 19 nt, Artificial Sequence
  Description of Artificial Sequence: Synthetic oligonucleotide
  Sense strand starting at position 3588 of SEQ ID NO: 588557
gagaucagguucuccugaa

SEQ ID NO: 873281 - RNA, 19 nt, Artificial Sequence
  Description of Artificial Sequence: Synthetic oligonucleotide
  Antisense strand to SEQ ID NO: 873280
uucaggagaaccugaucuc

SEQ ID NO: 873282 - RNA, 19 nt, Artificial Sequence
  Description of Artificial Sequence: Synthetic oligonucleotide
  Sense strand starting at position 3624 of SEQ ID NO: 588557
uagugaaccauguagggua

SEQ ID NO: 873283 - RNA, 19 nt, Artificial Sequence
  Description of Artificial Sequence: Synthetic oligonucleotide
  Antisense strand to SEQ ID NO: 873282
uacccuacaugguucacua

SEQ ID NO: 873284 - RNA, 19 nt, Artificial Sequence
  Description of Artificial Sequence: Synthetic oligonucleotide
  Sense strand starting at position 3714 of SEQ ID NO: 588557
caagauagaucugccuugu

SEQ ID NO: 873285 - RNA, 19 nt, Artificial Sequence
  Description of Artificial Sequence: Synthetic oligonucleotide
  Antisense strand to SEQ ID NO: 873284
acaaggcagaucuaucuug

SEQ ID NO: 873286 - RNA, 19 nt, Artificial Sequence
  Description of Artificial Sequence: Synthetic oligonucleotide
  Sense strand starting at position 3768 of SEQ ID NO: 588557
cuagaauugcaagguguua

SEQ ID NO: 873287 - RNA, 19 nt, Artificial Sequence
  Description of Artificial Sequence: Synthetic oligonucleotide
  Antisense strand to SEQ ID NO: 873286
uaacaccuugcaauucuag

SEQ ID NO: 873288 - RNA, 19 nt, Artificial Sequence
  Description of Artificial Sequence: Synthetic oligonucleotide
  Sense strand starting at position 3770 of SEQ ID NO: 588557
agaauugcaagguguuagu

SEQ ID NO: 873289 - RNA, 19 nt, Artificial Sequence
  Description of Artificial Sequence: Synthetic oligonucleotide
  Antisense strand to SEQ ID NO: 873288
acuaacaccuugcaauucu

SEQ ID NO: 873290 - RNA, 19 nt, Artificial Sequence
  Description of Artificial Sequence: Synthetic oligonucleotide
  Sense strand starting at position 3784 of SEQ ID NO: 588557
uuaguauugguagggccaa

SEQ ID NO: 873291 - RNA, 19 nt, Artificial Sequence
  Description of Artificial Sequence: Synthetic oligonucleotide
  Antisense strand to SEQ ID NO: 873290
uuggcccuaccaauacuaa

SEQ ID NO: 873292 - RNA, 19 nt, Artificial Sequence
  Description of Artificial Sequence: Synthetic oligonucleotide
  Sense strand starting at position 3805 of SEQ ID NO: 588557
gcuuccuugaggcaagaua

SEQ ID NO: 873293 - RNA, 19 nt, Artificial Sequence
  Description of Artificial Sequence: Synthetic oligonucleotide
  Antisense strand to SEQ ID NO: 873292
uaucuugccucaaggaagc

SEQ ID NO: 873294 - RNA, 19 nt, Artificial Sequence
  Description of Artificial Sequence: Synthetic oligonucleotide
  Sense strand starting at position 3859 of SEQ ID NO: 588557
gagugacggcuuugaauuc

SEQ ID NO: 873295 - RNA, 19 nt, Artificial Sequence
  Description of Artificial Sequence: Synthetic oligonucleotide
  Antisense strand to SEQ ID NO: 873294
gaauucaaagccgucacuc

SEQ ID NO: 873296 - RNA, 19 nt, Artificial Sequence
  Description of Artificial Sequence: Synthetic oligonucleotide
  Sense strand starting at position 3960 of SEQ ID NO: 588557
aggguugccuggccaagaa

SEQ ID NO: 873297 - RNA, 19 nt, Artificial Sequence
  Description of Artificial Sequence: Synthetic oligonucleotide
  Antisense strand to SEQ ID NO: 873296
uucuuggccaggcaacccu

SEQ ID NO: 873298 - RNA, 19 nt, Artificial Sequence
  Description of Artificial Sequence: Synthetic oligonucleotide
  Sense strand starting at position 183 of SEQ ID NO: 588558
guuuaccuauguuuaauga

SEQ ID NO: 873299 - RNA, 19 nt, Artificial Sequence
  Description of Artificial Sequence: Synthetic oligonucleotide
  Antisense strand to SEQ ID NO: 873298
ucauuaaacauagguaaac

SEQ ID NO: 873300 - RNA, 19 nt, Artificial Sequence
  Description of Artificial Sequence: Synthetic oligonucleotide
  Sense strand starting at position 248 of SEQ ID NO: 588558
uucucaaugauguggugaa

SEQ ID NO: 873301 - RNA, 19 nt, Artificial Sequence
  Description of Artificial Sequence: Synthetic oligonucleotide
  Antisense strand to SEQ ID NO: 873300
uucaccacaucauugagaa

SEQ ID NO: 873302 - RNA, 19 nt, Artificial Sequence
  Description of Artificial Sequence: Synthetic oligonucleotide
  Sense strand starting at position 610 of SEQ ID NO: 588558
uggauagaucuuggaagca

SEQ ID NO: 873303 - RNA, 19 nt, Artificial Sequence
  Description of Artificial Sequence: Synthetic oligonucleotide
  Antisense strand to SEQ ID NO: 873302
ugcuuccaagaucuaucca

SEQ ID NO: 873304 - RNA, 19 nt, Artificial Sequence
  Description of Artificial Sequence: Synthetic oligonucleotide
  Sense strand starting at position 631 of SEQ ID NO: 588558
guauacucagcucaaggua

SEQ ID NO: 873305 - RNA, 19 nt, Artificial Sequence
  Description of Artificial Sequence: Synthetic oligonucleotide
  Antisense strand to SEQ ID NO: 873304
uaccuugagcugaguauac

SEQ ID NO: 873306 - RNA, 19 nt, Artificial Sequence
  Description of Artificial Sequence: Synthetic oligonucleotide
  Sense strand starting at position 644 of SEQ ID NO: 588558
aagguagauucuguacaag

SEQ ID NO: 873307 - RNA, 19 nt, Artificial Sequence
  Description of Artificial Sequence: Synthetic oligonucleotide
  Antisense strand to SEQ ID NO: 873306
cuuguacagaaucuaccuu

SEQ ID NO: 873308 - RNA, 19 nt, Artificial Sequence
  Description of Artificial Sequence: Synthetic oligonucleotide
  Sense strand starting at position 703 of SEQ ID NO: 588558
ugugaaauacauugauuga

SEQ ID NO: 873309 - RNA, 19 nt, Artificial Sequence
  Description of Artificial Sequence: Synthetic oligonucleotide
  Antisense strand to SEQ ID NO: 873308
ucaaucaauguauuucaca

SEQ ID NO: 873310 - RNA, 19 nt, Artificial Sequence
  Description of Artificial Sequence: Synthetic oligonucleotide
  Sense strand starting at position 722 of SEQ ID NO: 588558
uccauacuaucugugagag

SEQ ID NO: 873311 - RNA, 19 nt, Artificial Sequence
  Description of Artificial Sequence: Synthetic oligonucleotide
  Antisense strand to SEQ ID NO: 873310
cucucacagauaguaugga

SEQ ID NO: 873312 - RNA, 19 nt, Artificial Sequence
  Description of Artificial Sequence: Synthetic oligonucleotide
  Sense strand starting at position 723 of SEQ ID NO: 588558
ccauacuaucugugagagu

SEQ ID NO: 873313 - RNA, 19 nt, Artificial Sequence
  Description of Artificial Sequence: Synthetic oligonucleotide
  Antisense strand to SEQ ID NO: 873312
acucucacagauaguaugg

SEQ ID NO: 873314 - RNA, 19 nt, Artificial Sequence
  Description of Artificial Sequence: Synthetic oligonucleotide
  Sense strand starting at position 789 of SEQ ID NO: 588558
ggugaugucgauuaucaug

SEQ ID NO: 873315 - RNA, 19 nt, Artificial Sequence
  Description of Artificial Sequence: Synthetic oligonucleotide
  Antisense strand to SEQ ID NO: 873314
caugauaaucgacaucacc

SEQ ID NO: 873316 - RNA, 19 nt, Artificial Sequence
  Description of Artificial Sequence: Synthetic oligonucleotide
  Sense strand starting at position 800 of SEQ ID NO: 588558
uuaucaugacacugaguaa

SEQ ID NO: 873317 - RNA, 19 nt, Artificial Sequence
  Description of Artificial Sequence: Synthetic oligonucleotide
  Antisense strand to SEQ ID NO: 873316
uuacucagugucaugauaa

SEQ ID NO: 873318 - RNA, 19 nt, Artificial Sequence
  Description of Artificial Sequence: Synthetic oligonucleotide
  Sense strand starting at position 844 of SEQ ID NO: 588558
auuauugggugucuuuaaa

SEQ ID NO: 873319 - RNA, 19 nt, Artificial Sequence
  Description of Artificial Sequence: Synthetic oligonucleotide
  Antisense strand to SEQ ID NO: 873318
uuuaaagacacccaauaau

SEQ ID NO: 873320 - RNA, 19 nt, Artificial Sequence
  Description of Artificial Sequence: Synthetic oligonucleotide
  Sense strand starting at position 881 of SEQ ID NO: 588558
cagaauagcuggccaagua

SEQ ID NO: 873321 - RNA, 19 nt, Artificial Sequence
  Description of Artificial Sequence: Synthetic oligonucleotide
  Antisense strand to SEQ ID NO: 873320
uacuuggccagcuauucug

SEQ ID NO: 873322 - RNA, 19 nt, Artificial Sequence
  Description of Artificial Sequence: Synthetic oligonucleotide
  Sense strand starting at position 894 of SEQ ID NO: 588558
caaguagauuaugcagaaa

SEQ ID NO: 873323 - RNA, 19 nt, Artificial Sequence
  Description of Artificial Sequence: Synthetic oligonucleotide
  Antisense strand to SEQ ID NO: 873322
uuucugcauaaucuacuug

SEQ ID NO: 873324 - RNA, 19 nt, Artificial Sequence
  Description of Artificial Sequence: Synthetic oligonucleotide
  Sense strand starting at position 905 of SEQ ID NO: 588558
ugcagaaauuauccaucag

SEQ ID NO: 873325 - RNA, 19 nt, Artificial Sequence
  Description of Artificial Sequence: Synthetic oligonucleotide
  Antisense strand to SEQ ID NO: 873324
cugauggauaauuucugca

SEQ ID NO: 873326 - RNA, 19 nt, Artificial Sequence
  Description of Artificial Sequence: Synthetic oligonucleotide
  Sense strand starting at position 1017 of SEQ ID NO: 588558
uugaaaugauaguugaguu

SEQ ID NO: 873327 - RNA, 19 nt, Artificial Sequence
  Description of Artificial Sequence: Synthetic oligonucleotide
  Antisense strand to SEQ ID NO: 873326
aacucaacuaucauuucaa

SEQ ID NO: 873328 - RNA, 19 nt, Artificial Sequence
  Description of Artificial Sequence: Synthetic oligonucleotide
  Sense strand starting at position 1018 of SEQ ID NO: 588558
ugaaaugauaguugaguuu

SEQ ID NO: 873329 - RNA, 19 nt, Artificial Sequence
  Description of Artificial Sequence: Synthetic oligonucleotide
  Antisense strand to SEQ ID NO: 873328
aaacucaacuaucauuuca

SEQ ID NO: 873330 - RNA, 19 nt, Artificial Sequence
  Description of Artificial Sequence: Synthetic oligonucleotide
  Sense strand starting at position 1087 of SEQ ID NO: 588558
gauggaauaucaguuucuu

SEQ ID NO: 873331 - RNA, 19 nt, Artificial Sequence
  Description of Artificial Sequence: Synthetic oligonucleotide
  Antisense strand to SEQ ID NO: 873330
aagaaacugauauuccauc

SEQ ID NO: 873332 - RNA, 19 nt, Artificial Sequence
  Description of Artificial Sequence: Synthetic oligonucleotide
  Sense strand starting at position 1144 of SEQ ID NO: 588558
uaugaucuacguuacugaa

SEQ ID NO: 873333 - RNA, 19 nt, Artificial Sequence
  Description of Artificial Sequence: Synthetic oligonucleotide
  Antisense strand to SEQ ID NO: 873332
uucaguaacguagaucaua

SEQ ID NO: 873334 - RNA, 19 nt, Artificial Sequence
  Description of Artificial Sequence: Synthetic oligonucleotide
  Sense strand starting at position 1229 of SEQ ID NO: 588558
ucaaguacauguuucuuaa

SEQ ID NO: 873335 - RNA, 19 nt, Artificial Sequence
  Description of Artificial Sequence: Synthetic oligonucleotide
  Antisense strand to SEQ ID NO: 873334
uuaagaaacauguacuuga

SEQ ID NO: 873336 - RNA, 19 nt, Artificial Sequence
  Description of Artificial Sequence: Synthetic oligonucleotide
  Sense strand starting at position 1497 of SEQ ID NO: 588558
gaagaauaguuaucagccu

SEQ ID NO: 873337 - RNA, 19 nt, Artificial Sequence
  Description of Artificial Sequence: Synthetic oligonucleotide
  Antisense strand to SEQ ID NO: 873336
aggcugauaacuauucuuc

SEQ ID NO: 873338 - RNA, 19 nt, Artificial Sequence
  Description of Artificial Sequence: Synthetic oligonucleotide
  Sense strand starting at position 1587 of SEQ ID NO: 588558
ucagaaugcucugugauua

SEQ ID NO: 873339 - RNA, 19 nt, Artificial Sequence
  Description of Artificial Sequence: Synthetic oligonucleotide
  Antisense strand to SEQ ID NO: 873338
uaaucacagagcauucuga

SEQ ID NO: 873340 - RNA, 19 nt, Artificial Sequence
  Description of Artificial Sequence: Synthetic oligonucleotide
  Sense strand starting at position 1588 of SEQ ID NO: 588558
cagaaugcucugugauuaa

SEQ ID NO: 873341 - RNA, 19 nt, Artificial Sequence
  Description of Artificial Sequence: Synthetic oligonucleotide
  Antisense strand to SEQ ID NO: 873340
uuaaucacagagcauucug

SEQ ID NO: 873342 - RNA, 19 nt, Artificial Sequence
  Description of Artificial Sequence: Synthetic oligonucleotide
  Sense strand starting at position 1592 of SEQ ID NO: 588558
augcucugugauuaacaua

SEQ ID NO: 873343 - RNA, 19 nt, Artificial Sequence
  Description of Artificial Sequence: Synthetic oligonucleotide
  Antisense strand to SEQ ID NO: 873342
uauguuaaucacagagcau

SEQ ID NO: 873344 - RNA, 19 nt, Artificial Sequence
  Description of Artificial Sequence: Synthetic oligonucleotide
  Sense strand starting at position 1731 of SEQ ID NO: 588558
augucucagguauauagua

SEQ ID NO: 873345 - RNA, 19 nt, Artificial Sequence
  Description of Artificial Sequence: Synthetic oligonucleotide
  Antisense strand to SEQ ID NO: 873344
uacuauauaccugagacau

SEQ ID NO: 873346 - RNA, 19 nt, Artificial Sequence
  Description of Artificial Sequence: Synthetic oligonucleotide
  Sense strand starting at position 1733 of SEQ ID NO: 588558
gucucagguauauaguauu

SEQ ID NO: 873347 - RNA, 19 nt, Artificial Sequence
  Description of Artificial Sequence: Synthetic oligonucleotide
  Antisense strand to SEQ ID NO: 873346
aauacuauauaccugagac

SEQ ID NO: 873348 - RNA, 19 nt, Artificial Sequence
  Description of Artificial Sequence: Synthetic oligonucleotide
  Sense strand starting at position 1754 of SEQ ID NO: 588558
ugagguagaccaugugaaa

SEQ ID NO: 873349 - RNA, 19 nt, Artificial Sequence
  Description of Artificial Sequence: Synthetic oligonucleotide
  Antisense strand to SEQ ID NO: 873348
uuucacauggucuaccuca

SEQ ID NO: 873350 - RNA, 19 nt, Artificial Sequence
  Description of Artificial Sequence: Synthetic oligonucleotide
  Sense strand starting at position 1810 of SEQ ID NO: 588558
aggcaaagaugguuguaca

SEQ ID NO: 873351 - RNA, 19 nt, Artificial Sequence
  Description of Artificial Sequence: Synthetic oligonucleotide
  Antisense strand to SEQ ID NO: 873350
uguacaaccaucuuugccu

SEQ ID NO: 873352 - RNA, 19 nt, Artificial Sequence
  Description of Artificial Sequence: Synthetic oligonucleotide
  Sense strand starting at position 1811 of SEQ ID NO: 588558
ggcaaagaugguuguacag

SEQ ID NO: 873353 - RNA, 19 nt, Artificial Sequence
  Description of Artificial Sequence: Synthetic oligonucleotide
  Antisense strand to SEQ ID NO: 873352
cuguacaaccaucuuugcc

SEQ ID NO: 873354 - RNA, 19 nt, Artificial Sequence
  Description of Artificial Sequence: Synthetic oligonucleotide
  Sense strand starting at position 2577 of SEQ ID NO: 588558
uauguuuguccugauggua

SEQ ID NO: 873355 - RNA, 19 nt, Artificial Sequence
  Description of Artificial Sequence: Synthetic oligonucleotide
  Antisense strand to SEQ ID NO: 873354
uaccaucaggacaaacaua

SEQ ID NO: 873356 - RNA, 19 nt, Artificial Sequence
  Description of Artificial Sequence: Synthetic oligonucleotide
  Sense strand starting at position 2580 of SEQ ID NO: 588558
guuuguccugaugguauuu

SEQ ID NO: 873357 - RNA, 19 nt, Artificial Sequence
  Description of Artificial Sequence: Synthetic oligonucleotide
  Antisense strand to SEQ ID NO: 873356
aaauaccaucaggacaaac

SEQ ID NO: 873358 - RNA, 19 nt, Artificial Sequence
  Description of Artificial Sequence: Synthetic oligonucleotide
  Sense strand starting at position 2884 of SEQ ID NO: 588558
acaagugguaccugucaag

SEQ ID NO: 873359 - RNA, 19 nt, Artificial Sequence
  Description of Artificial Sequence: Synthetic oligonucleotide
  Antisense strand to SEQ ID NO: 873358
cuugacagguaccacuugu

SEQ ID NO: 873360 - RNA, 19 nt, Artificial Sequence
  Description of Artificial Sequence: Synthetic oligonucleotide
  Sense strand starting at position 3553 of SEQ ID NO: 588558
uuuagaaagucaguuacuu

SEQ ID NO: 873361 - RNA, 19 nt, Artificial Sequence
  Description of Artificial Sequence: Synthetic oligonucleotide
  Antisense strand to SEQ ID NO: 873360
aaguaacugacuuucuaaa

SEQ ID NO: 873362 - RNA, 19 nt, Artificial Sequence
  Description of Artificial Sequence: Synthetic oligonucleotide
  Sense strand starting at position 3579 of SEQ ID NO: 588558
gcuguaauuucuccucugu

SEQ ID NO: 873363 - RNA, 19 nt, Artificial Sequence
  Description of Artificial Sequence: Synthetic oligonucleotide
  Antisense strand to SEQ ID NO: 873362
acagaggagaaauuacagc

SEQ ID NO: 873364 - RNA, 19 nt, Artificial Sequence
  Description of Artificial Sequence: Synthetic oligonucleotide
  Sense strand starting at position 3653 of SEQ ID NO: 588558
acuguugguagucaguaau

SEQ ID NO: 873365 - RNA, 19 nt, Artificial Sequence
  Description of Artificial Sequence: Synthetic oligonucleotide
  Antisense strand to SEQ ID NO: 873364
auuacugacuaccaacagu

SEQ ID NO: 873366 - RNA, 19 nt, Artificial Sequence
  Description of Artificial Sequence: Synthetic oligonucleotide
  Sense strand starting at position 3656 of SEQ ID NO: 588558
guugguagucaguaaucaa

SEQ ID NO: 873367 - RNA, 19 nt, Artificial Sequence
  Description of Artificial Sequence: Synthetic oligonucleotide
  Antisense strand to SEQ ID NO: 873366
uugauuacugacuaccaac

SEQ ID NO: 873368 - RNA, 19 nt, Artificial Sequence
  Description of Artificial Sequence: Synthetic oligonucleotide
  Sense strand starting at position 3659 of SEQ ID NO: 588558
gguagucaguaaucaaauu

SEQ ID NO: 873369 - RNA, 19 nt, Artificial Sequence
  Description of Artificial Sequence: Synthetic oligonucleotide
  Antisense strand to SEQ ID NO: 873368
aauuugauuacugacuacc

SEQ ID NO: 873370 - RNA, 19 nt, Artificial Sequence
  Description of Artificial Sequence: Synthetic oligonucleotide
  Sense strand starting at position 3825 of SEQ ID NO: 588558
ugaagcuccaagugaagau

SEQ ID NO: 873371 - RNA, 19 nt, Artificial Sequence
  Description of Artificial Sequence: Synthetic oligonucleotide
  Antisense strand to SEQ ID NO: 873370
aucuucacuuggagcuuca

SEQ ID NO: 873372 - RNA, 19 nt, Artificial Sequence
  Description of Artificial Sequence: Synthetic oligonucleotide
  Sense strand starting at position 3942 of SEQ ID NO: 588558
agggaaauuucugaguuua

SEQ ID NO: 873373 - RNA, 19 nt, Artificial Sequence
  Description of Artificial Sequence: Synthetic oligonucleotide
  Antisense strand to SEQ ID NO: 873372
uaaacucagaaauuucccu

SEQ ID NO: 873374 - RNA, 19 nt, Artificial Sequence
  Description of Artificial Sequence: Synthetic oligonucleotide
  Sense strand starting at position 3974 of SEQ ID NO: 588558
aguaguaggauaugaaugu

SEQ ID NO: 873375 - RNA, 19 nt, Artificial Sequence
  Description of Artificial Sequence: Synthetic oligonucleotide
  Antisense strand to SEQ ID NO: 873374
acauucauauccuacuacu

SEQ ID NO: 873376 - RNA, 19 nt, Artificial Sequence
  Description of Artificial Sequence: Synthetic oligonucleotide
  Sense strand starting at position 3978 of SEQ ID NO: 588558
guaggauaugaauguguag

SEQ ID NO: 873377 - RNA, 19 nt, Artificial Sequence
  Description of Artificial Sequence: Synthetic oligonucleotide
  Antisense strand to SEQ ID NO: 873376
cuacacauucauauccuac

SEQ ID NO: 873378 - RNA, 19 nt, Artificial Sequence
  Description of Artificial Sequence: Synthetic oligonucleotide
  Sense strand starting at position 2487 of SEQ ID NO: 588559
ccaggacucuccugggaua

SEQ ID NO: 873379 - RNA, 19 nt, Artificial Sequence
  Description of Artificial Sequence: Synthetic oligonucleotide
  Antisense strand to SEQ ID NO: 873378
uaucccaggagaguccugg

SEQ ID NO: 873380 - RNA, 19 nt, Artificial Sequence
  Description of Artificial Sequence: Synthetic oligonucleotide
  Sense strand starting at position 2490 of SEQ ID NO: 588559
ggacucuccugggauagag

SEQ ID NO: 873381 - RNA, 19 nt, Artificial Sequence
  Description of Artificial Sequence: Synthetic oligonucleotide
  Antisense strand to SEQ ID NO: 873380
cucuaucccaggagagucc

SEQ ID NO: 873382 - RNA, 19 nt, Artificial Sequence
  Description of Artificial Sequence: Synthetic oligonucleotide
  Sense strand starting at position 2729 of SEQ ID NO: 588559
gcacucugcuuugaugaga

SEQ ID NO: 873383 - RNA, 19 nt, Artificial Sequence
  Description of Artificial Sequence: Synthetic oligonucleotide
  Antisense strand to SEQ ID NO: 873382
ucucaucaaagcagagugc

SEQ ID NO: 873384 - RNA, 19 nt, Artificial Sequence
  Description of Artificial Sequence: Synthetic oligonucleotide
  Sense strand starting at position 2734 of SEQ ID NO: 588559
cugcuuugaugagacccau

SEQ ID NO: 873385 - RNA, 19 nt, Artificial Sequence
  Description of Artificial Sequence: Synthetic oligonucleotide
  Antisense strand to SEQ ID NO: 873384
augggucucaucaaagcag

SEQ ID NO: 873386 - RNA, 19 nt, Artificial Sequence
  Description of Artificial Sequence: Synthetic oligonucleotide
  Sense strand starting at position 2889 of SEQ ID NO: 588559
gccacuaaauacgcuuuaa

SEQ ID NO: 873387 - RNA, 19 nt, Artificial Sequence
  Description of Artificial Sequence: Synthetic oligonucleotide
  Antisense strand to SEQ ID NO: 873386
uuaaagcguauuuaguggc

SEQ ID NO: 873388 - RNA, 19 nt, Artificial Sequence
  Description of Artificial Sequence: Synthetic oligonucleotide
  Sense strand starting at position 3384 of SEQ ID NO: 588559
acuugucucgggcauguuu

SEQ ID NO: 873389 - RNA, 19 nt, Artificial Sequence
  Description of Artificial Sequence: Synthetic oligonucleotide
  Antisense strand to SEQ ID NO: 873388
aaacaugcccgagacaagu

SEQ ID NO: 873390 - RNA, 19 nt, Artificial Sequence
  Description of Artificial Sequence: Synthetic oligonucleotide
  Sense strand starting at position 172 of SEQ ID NO: 588560
ccaagaggucuuggcccau

SEQ ID NO: 873391 - RNA, 19 nt, Artificial Sequence
  Description of Artificial Sequence: Synthetic oligonucleotide
  Antisense strand to SEQ ID NO: 873390
augggccaagaccucuugg

SEQ ID NO: 873392 - RNA, 19 nt, Artificial Sequence
  Description of Artificial Sequence: Synthetic oligonucleotide
  Sense strand starting at position 224 of SEQ ID NO: 588560
uggaaucagcucuacucua

SEQ ID NO: 873393 - RNA, 19 nt, Artificial Sequence
  Description of Artificial Sequence: Synthetic oligonucleotide
  Antisense strand to SEQ ID NO: 873392
uagaguagagcugauucca

SEQ ID NO: 873394 - RNA, 19 nt, Artificial Sequence
  Description of Artificial Sequence: Synthetic oligonucleotide
  Sense strand starting at position 330 of SEQ ID NO: 588560
ccacuucccugaguucuga

SEQ ID NO: 873395 - RNA, 19 nt, Artificial Sequence
  Description of Artificial Sequence: Synthetic oligonucleotide
  Antisense strand to SEQ ID NO: 873394
ucagaacucagggaagugg

SEQ ID NO: 873396 - RNA, 19 nt, Artificial Sequence
  Description of Artificial Sequence: Synthetic oligonucleotide
  Sense strand starting at position 431 of SEQ ID NO: 588560
gugccuaagggauggagaa

SEQ ID NO: 873397 - RNA, 19 nt, Artificial Sequence
  Description of Artificial Sequence: Synthetic oligonucleotide
  Antisense strand to SEQ ID NO: 873396
uucuccaucccuuaggcac

SEQ ID NO: 873398 - RNA, 19 nt, Artificial Sequence
  Description of Artificial Sequence: Synthetic oligonucleotide
  Sense strand starting at position 829 of SEQ ID NO: 588560
acccuauggucccuagaac

SEQ ID NO: 873399 - RNA, 19 nt, Artificial Sequence
  Description of Artificial Sequence: Synthetic oligonucleotide
  Antisense strand to SEQ ID NO: 873398
guucuagggaccauagggu

SEQ ID NO: 873400 - RNA, 19 nt, Artificial Sequence
  Description of Artificial Sequence: Synthetic oligonucleotide
  Sense strand starting at position 962 of SEQ ID NO: 588560
gucaucuguccuugccuca

SEQ ID NO: 873401 - RNA, 19 nt, Artificial Sequence
  Description of Artificial Sequence: Synthetic oligonucleotide
  Antisense strand to SEQ ID NO: 873400
ugaggcaaggacagaugac

SEQ ID NO: 873402 - RNA, 19 nt, Artificial Sequence
  Description of Artificial Sequence: Synthetic oligonucleotide
  Sense strand starting at position 1024 of SEQ ID NO: 588560
cagugagacugagcaauca

SEQ ID NO: 873403 - RNA, 19 nt, Artificial Sequence
  Description of Artificial Sequence: Synthetic oligonucleotide
  Antisense strand to SEQ ID NO: 873402
ugauugcucagucucacug

SEQ ID NO: 873404 - RNA, 19 nt, Artificial Sequence
  Description of Artificial Sequence: Synthetic oligonucleotide
  Sense strand starting at position 1187 of SEQ ID NO: 588560
gguuaagaguacuacuaac

SEQ ID NO: 873405 - RNA, 19 nt, Artificial Sequence
  Description of Artificial Sequence: Synthetic oligonucleotide
  Antisense strand to SEQ ID NO: 873404
guuaguaguacucuuaacc

SEQ ID NO: 873406 - RNA, 19 nt, Artificial Sequence
  Description of Artificial Sequence: Synthetic oligonucleotide
  Sense strand starting at position 1193 of SEQ ID NO: 588560
gaguacuacuaacagaaga

SEQ ID NO: 873407 - RNA, 19 nt, Artificial Sequence
  Description of Artificial Sequence: Synthetic oligonucleotide
  Antisense strand to SEQ ID NO: 873406
ucuucuguuaguaguacuc

SEQ ID NO: 873408 - RNA, 19 nt, Artificial Sequence
  Description of Artificial Sequence: Synthetic oligonucleotide
  Sense strand starting at position 1493 of SEQ ID NO: 588560
ggaagaagcagucagcgaa

SEQ ID NO: 873409 - RNA, 19 nt, Artificial Sequence
  Description of Artificial Sequence: Synthetic oligonucleotide
  Antisense strand to SEQ ID NO: 873408
uucgcugacugcuucuucc

SEQ ID NO: 873410 - RNA, 19 nt, Artificial Sequence
  Description of Artificial Sequence: Synthetic oligonucleotide
  Sense strand starting at position 1513 of SEQ ID NO: 588560
gcagcagaaucaucaugaa

SEQ ID NO: 873411 - RNA, 19 nt, Artificial Sequence
  Description of Artificial Sequence: Synthetic oligonucleotide
  Antisense strand to SEQ ID NO: 873410
uucaugaugauucugcugc

SEQ ID NO: 873412 - RNA, 19 nt, Artificial Sequence
  Description of Artificial Sequence: Synthetic oligonucleotide
  Sense strand starting at position 1516 of SEQ ID NO: 588560
gcagaaucaucaugaacuc

SEQ ID NO: 873413 - RNA, 19 nt, Artificial Sequence
  Description of Artificial Sequence: Synthetic oligonucleotide
  Antisense strand to SEQ ID NO: 873412
gaguucaugaugauucugc

SEQ ID NO: 873414 - RNA, 19 nt, Artificial Sequence
  Description of Artificial Sequence: Synthetic oligonucleotide
  Sense strand starting at position 2192 of SEQ ID NO: 588560
guguguaaguggguuucga

SEQ ID NO: 873415 - RNA, 19 nt, Artificial Sequence
  Description of Artificial Sequence: Synthetic oligonucleotide
  Antisense strand to SEQ ID NO: 873414
ucgaaacccacuuacacac

SEQ ID NO: 873416 - RNA, 19 nt, Artificial Sequence
  Description of Artificial Sequence: Synthetic oligonucleotide
  Sense strand starting at position 2199 of SEQ ID NO: 588560
aguggguuucgagagguga

SEQ ID NO: 873417 - RNA, 19 nt, Artificial Sequence
  Description of Artificial Sequence: Synthetic oligonucleotide
  Antisense strand to SEQ ID NO: 873416
ucaccucucgaaacccacu

SEQ ID NO: 873418 - RNA, 19 nt, Artificial Sequence
  Description of Artificial Sequence: Synthetic oligonucleotide
  Sense strand starting at position 2201 of SEQ ID NO: 588560
uggguuucgagaggugaca

SEQ ID NO: 873419 - RNA, 19 nt, Artificial Sequence
  Description of Artificial Sequence: Synthetic oligonucleotide
  Antisense strand to SEQ ID NO: 873418
ugucaccucucgaaaccca

SEQ ID NO: 873420 - RNA, 19 nt, Artificial Sequence
  Description of Artificial Sequence: Synthetic oligonucleotide
  Sense strand starting at position 2425 of SEQ ID NO: 588560
ggcgucgccaucuuuauga

SEQ ID NO: 873421 - RNA, 19 nt, Artificial Sequence
  Description of Artificial Sequence: Synthetic oligonucleotide
  Antisense strand to SEQ ID NO: 873420
ucauaaagauggcgacgcc

SEQ ID NO: 873422 - RNA, 19 nt, Artificial Sequence
  Description of Artificial Sequence: Synthetic oligonucleotide
  Sense strand starting at position 2430 of SEQ ID NO: 588560
cgccaucuuuaugaggaga

SEQ ID NO: 873423 - RNA, 19 nt, Artificial Sequence
  Description of Artificial Sequence: Synthetic oligonucleotide
  Antisense strand to SEQ ID NO: 873422
ucuccucauaaagauggcg

SEQ ID NO: 873424 - RNA, 19 nt, Artificial Sequence
  Description of Artificial Sequence: Synthetic oligonucleotide
  Sense strand starting at position 2432 of SEQ ID NO: 588560
ccaucuuuaugaggagaau

SEQ ID NO: 873425 - RNA, 19 nt, Artificial Sequence
  Description of Artificial Sequence: Synthetic oligonucleotide
  Antisense strand to SEQ ID NO: 873424
auucuccucauaaagaugg

SEQ ID NO: 873426 - RNA, 19 nt, Artificial Sequence
  Description of Artificial Sequence: Synthetic oligonucleotide
  Sense strand starting at position 2445 of SEQ ID NO: 588560
gagaauucuagcggcgcuu

SEQ ID NO: 873427 - RNA, 19 nt, Artificial Sequence
  Description of Artificial Sequence: Synthetic oligonucleotide
  Antisense strand to SEQ ID NO: 873426
aagcgccgcuagaauucuc

SEQ ID NO: 873428 - RNA, 19 nt, Artificial Sequence
  Description of Artificial Sequence: Synthetic oligonucleotide
  Sense strand starting at position 2606 of SEQ ID NO: 588560
ggugaguagcugugucgga

SEQ ID NO: 873429 - RNA, 19 nt, Artificial Sequence
  Description of Artificial Sequence: Synthetic oligonucleotide
  Antisense strand to SEQ ID NO: 873428
uccgacacagcuacucacc

SEQ ID NO: 873430 - RNA, 19 nt, Artificial Sequence
  Description of Artificial Sequence: Synthetic oligonucleotide
  Sense strand starting at position 2689 of SEQ ID NO: 588560
gugcuagagugcuuaauga

SEQ ID NO: 873431 - RNA, 19 nt, Artificial Sequence
  Description of Artificial Sequence: Synthetic oligonucleotide
  Antisense strand to SEQ ID NO: 873430
ucauuaagcacucuagcac

SEQ ID NO: 873432 - RNA, 19 nt, Artificial Sequence
  Description of Artificial Sequence: Synthetic oligonucleotide
  Sense strand starting at position 2696 of SEQ ID NO: 588560
agugcuuaaugaguuugau

SEQ ID NO: 873433 - RNA, 19 nt, Artificial Sequence
  Description of Artificial Sequence: Synthetic oligonucleotide
  Antisense strand to SEQ ID NO: 873432
aucaaacucauuaagcacu

SEQ ID NO: 873434 - RNA, 19 nt, Artificial Sequence
  Description of Artificial Sequence: Synthetic oligonucleotide
  Sense strand starting at position 2699 of SEQ ID NO: 588560
gcuuaaugaguuugaugcu

SEQ ID NO: 873435 - RNA, 19 nt, Artificial Sequence
  Description of Artificial Sequence: Synthetic oligonucleotide
  Antisense strand to SEQ ID NO: 873434
agcaucaaacucauuaagc

SEQ ID NO: 873436 - RNA, 19 nt, Artificial Sequence
  Description of Artificial Sequence: Synthetic oligonucleotide
  Sense strand starting at position 2700 of SEQ ID NO: 588560
cuuaaugaguuugaugcua

SEQ ID NO: 873437 - RNA, 19 nt, Artificial Sequence
  Description of Artificial Sequence: Synthetic oligonucleotide
  Antisense strand to SEQ ID NO: 873436
uagcaucaaacucauuaag

SEQ ID NO: 873438 - RNA, 19 nt, Artificial Sequence
  Description of Artificial Sequence: Synthetic oligonucleotide
  Sense strand starting at position 2705 of SEQ ID NO: 588560
ugaguuugaugcuacuaag

SEQ ID NO: 873439 - RNA, 19 nt, Artificial Sequence
  Description of Artificial Sequence: Synthetic oligonucleotide
  Antisense strand to SEQ ID NO: 873438
cuuaguagcaucaaacuca

SEQ ID NO: 873440 - RNA, 19 nt, Artificial Sequence
  Description of Artificial Sequence: Synthetic oligonucleotide
  Sense strand starting at position 2955 of SEQ ID NO: 588560
ucgcaaauucccuggcuga

SEQ ID NO: 873441 - RNA, 19 nt, Artificial Sequence
  Description of Artificial Sequence: Synthetic oligonucleotide
  Antisense strand to SEQ ID NO: 873440
ucagccagggaauuugcga

SEQ ID NO: 873442 - RNA, 19 nt, Artificial Sequence
  Description of Artificial Sequence: Synthetic oligonucleotide
  Sense strand starting at position 2956 of SEQ ID NO: 588560
cgcaaauucccuggcugau

SEQ ID NO: 873443 - RNA, 19 nt, Artificial Sequence
  Description of Artificial Sequence: Synthetic oligonucleotide
  Antisense strand to SEQ ID NO: 873442
aucagccagggaauuugcg

SEQ ID NO: 873444 - RNA, 19 nt, Artificial Sequence
  Description of Artificial Sequence: Synthetic oligonucleotide
  Sense strand starting at position 3060 of SEQ ID NO: 588560
aauguagggugacuucuaa

SEQ ID NO: 873445 - RNA, 19 nt, Artificial Sequence
  Description of Artificial Sequence: Synthetic oligonucleotide
  Antisense strand to SEQ ID NO: 873444
uuagaagucacccuacauu

SEQ ID NO: 873446 - RNA, 19 nt, Artificial Sequence
  Description of Artificial Sequence: Synthetic oligonucleotide
  Sense strand starting at position 3064 of SEQ ID NO: 588560
uagggugacuucuaagaua

SEQ ID NO: 873447 - RNA, 19 nt, Artificial Sequence
  Description of Artificial Sequence: Synthetic oligonucleotide
  Antisense strand to SEQ ID NO: 873446
uaucuuagaagucacccua

SEQ ID NO: 873448 - RNA, 19 nt, Artificial Sequence
  Description of Artificial Sequence: Synthetic oligonucleotide
  Sense strand starting at position 3067 of SEQ ID NO: 588560
ggugacuucuaagauaccu

SEQ ID NO: 873449 - RNA, 19 nt, Artificial Sequence
  Description of Artificial Sequence: Synthetic oligonucleotide
  Antisense strand to SEQ ID NO: 873448
agguaucuuagaagucacc

SEQ ID NO: 873450 - RNA, 19 nt, Artificial Sequence
  Description of Artificial Sequence: Synthetic oligonucleotide
  Sense strand starting at position 3430 of SEQ ID NO: 588560
gugcuauccaucuuugcgu

SEQ ID NO: 873451 - RNA, 19 nt, Artificial Sequence
  Description of Artificial Sequence: Synthetic oligonucleotide
  Antisense strand to SEQ ID NO: 873450
acgcaaagauggauagcac

SEQ ID NO: 873452 - RNA, 19 nt, Artificial Sequence
  Description of Artificial Sequence: Synthetic oligonucleotide
  Sense strand starting at position 3433 of SEQ ID NO: 588560
cuauccaucuuugcguaga

SEQ ID NO: 873453 - RNA, 19 nt, Artificial Sequence
  Description of Artificial Sequence: Synthetic oligonucleotide
  Antisense strand to SEQ ID NO: 873452
ucuacgcaaagauggauag

SEQ ID NO: 873454 - RNA, 19 nt, Artificial Sequence
  Description of Artificial Sequence: Synthetic oligonucleotide
  Sense strand starting at position 3485 of SEQ ID NO: 588560
gcgcgccagcugucugaua

SEQ ID NO: 873455 - RNA, 19 nt, Artificial Sequence
  Description of Artificial Sequence: Synthetic oligonucleotide
  Antisense strand to SEQ ID NO: 873454
uaucagacagcuggcgcgc

SEQ ID NO: 873456 - RNA, 19 nt, Artificial Sequence
  Description of Artificial Sequence: Synthetic oligonucleotide
  Sense strand starting at position 3487 of SEQ ID NO: 588560
gcgccagcugucugauaag

SEQ ID NO: 873457 - RNA, 19 nt, Artificial Sequence
  Description of Artificial Sequence: Synthetic oligonucleotide
  Antisense strand to SEQ ID NO: 873456
cuuaucagacagcuggcgc

SEQ ID NO: 873458 - RNA, 19 nt, Artificial Sequence
  Description of Artificial Sequence: Synthetic oligonucleotide
  Sense strand starting at position 3490 of SEQ ID NO: 588560
ccagcugucugauaagaug

SEQ ID NO: 873459 - RNA, 19 nt, Artificial Sequence
  Description of Artificial Sequence: Synthetic oligonucleotide
  Antisense strand to SEQ ID NO: 873458
caucuuaucagacagcugg

SEQ ID NO: 873460 - RNA, 19 nt, Artificial Sequence
  Description of Artificial Sequence: Synthetic oligonucleotide
  Sense strand starting at position 3514 of SEQ ID NO: 588560
gaaguuguuaauugcgguu

SEQ ID NO: 873461 - RNA, 19 nt, Artificial Sequence
  Description of Artificial Sequence: Synthetic oligonucleotide
  Antisense strand to SEQ ID NO: 873460
aaccgcaauuaacaacuuc

SEQ ID NO: 873462 - RNA, 19 nt, Artificial Sequence
  Description of Artificial Sequence: Synthetic oligonucleotide
  Sense strand starting at position 3526 of SEQ ID NO: 588560
ugcgguugucuccgacaga

SEQ ID NO: 873463 - RNA, 19 nt, Artificial Sequence
  Description of Artificial Sequence: Synthetic oligonucleotide
  Antisense strand to SEQ ID NO: 873462
ucugucggagacaaccgca

SEQ ID NO: 873464 - RNA, 19 nt, Artificial Sequence
  Description of Artificial Sequence: Synthetic oligonucleotide
  Sense strand starting at position 3529 of SEQ ID NO: 588560
gguugucuccgacagaauu

SEQ ID NO: 873465 - RNA, 19 nt, Artificial Sequence
  Description of Artificial Sequence: Synthetic oligonucleotide
  Antisense strand to SEQ ID NO: 873464
aauucugucggagacaacc

SEQ ID NO: 873466 - RNA, 19 nt, Artificial Sequence
  Description of Artificial Sequence: Synthetic oligonucleotide
  Sense strand starting at position 3573 of SEQ ID NO: 588560
cgagaaauuuacuaccaug

SEQ ID NO: 873467 - RNA, 19 nt, Artificial Sequence
  Description of Artificial Sequence: Synthetic oligonucleotide
  Antisense strand to SEQ ID NO: 873466
caugguaguaaauuucucg

SEQ ID NO: 873468 - RNA, 19 nt, Artificial Sequence
  Description of Artificial Sequence: Synthetic oligonucleotide
  Sense strand starting at position 3734 of SEQ ID NO: 588560
uuaggaaacuuagcaauau

SEQ ID NO: 873469 - RNA, 19 nt, Artificial Sequence
  Description of Artificial Sequence: Synthetic oligonucleotide
  Antisense strand to SEQ ID NO: 873468
auauugcuaaguuuccuaa

SEQ ID NO: 873470 - RNA, 19 nt, Artificial Sequence
  Description of Artificial Sequence: Synthetic oligonucleotide
  Sense strand starting at position 41 of SEQ ID NO: 588561
gugccuaagggauggagaa

SEQ ID NO: 873471 - RNA, 19 nt, Artificial Sequence
  Description of Artificial Sequence: Synthetic oligonucleotide
  Antisense strand to SEQ ID NO: 873470
uucuccaucccuuaggcac

SEQ ID NO: 873472 - RNA, 19 nt, Artificial Sequence
  Description of Artificial Sequence: Synthetic oligonucleotide
  Sense strand starting at position 439 of SEQ ID NO: 588561
acccuauggucccuagaac

SEQ ID NO: 873473 - RNA, 19 nt, Artificial Sequence
  Description of Artificial Sequence: Synthetic oligonucleotide
  Antisense strand to SEQ ID NO: 873472
guucuagggaccauagggu

SEQ ID NO: 873474 - RNA, 19 nt, Artificial Sequence
  Description of Artificial Sequence: Synthetic oligonucleotide
  Sense strand starting at position 572 of SEQ ID NO: 588561
gucaucuguccuugccuca

SEQ ID NO: 873475 - RNA, 19 nt, Artificial Sequence
  Description of Artificial Sequence: Synthetic oligonucleotide
  Antisense strand to SEQ ID NO: 873474
ugaggcaaggacagaugac

SEQ ID NO: 873476 - RNA, 19 nt, Artificial Sequence
  Description of Artificial Sequence: Synthetic oligonucleotide
  Sense strand starting at position 634 of SEQ ID NO: 588561
cagugagacugagcaauca

SEQ ID NO: 873477 - RNA, 19 nt, Artificial Sequence
  Description of Artificial Sequence: Synthetic oligonucleotide
  Antisense strand to SEQ ID NO: 873476
ugauugcucagucucacug

SEQ ID NO: 873478 - RNA, 19 nt, Artificial Sequence
  Description of Artificial Sequence: Synthetic oligonucleotide
  Sense strand starting at position 797 of SEQ ID NO: 588561
gguuaagaguacuacuaac

SEQ ID NO: 873479 - RNA, 19 nt, Artificial Sequence
  Description of Artificial Sequence: Synthetic oligonucleotide
  Antisense strand to SEQ ID NO: 873478
guuaguaguacucuuaacc

SEQ ID NO: 873480 - RNA, 19 nt, Artificial Sequence
  Description of Artificial Sequence: Synthetic oligonucleotide
  Sense strand starting at position 803 of SEQ ID NO: 588561
gaguacuacuaacagaaga

SEQ ID NO: 873481 - RNA, 19 nt, Artificial Sequence
  Description of Artificial Sequence: Synthetic oligonucleotide
  Antisense strand to SEQ ID NO: 873480
ucuucuguuaguaguacuc

SEQ ID NO: 873482 - RNA, 19 nt, Artificial Sequence
  Description of Artificial Sequence: Synthetic oligonucleotide
  Sense strand starting at position 1103 of SEQ ID NO: 588561
ggaagaagcagucagcgaa

SEQ ID NO: 873483 - RNA, 19 nt, Artificial Sequence
  Description of Artificial Sequence: Synthetic oligonucleotide
  Antisense strand to SEQ ID NO: 873482
uucgcugacugcuucuucc

SEQ ID NO: 873484 - RNA, 19 nt, Artificial Sequence
  Description of Artificial Sequence: Synthetic oligonucleotide
  Sense strand starting at position 1123 of SEQ ID NO: 588561
gcagcagaaucaucaugaa

SEQ ID NO: 873485 - RNA, 19 nt, Artificial Sequence
  Description of Artificial Sequence: Synthetic oligonucleotide
  Antisense strand to SEQ ID NO: 873484
uucaugaugauucugcugc

SEQ ID NO: 873486 - RNA, 19 nt, Artificial Sequence
  Description of Artificial Sequence: Synthetic oligonucleotide
  Sense strand starting at position 1802 of SEQ ID NO: 588561
guguguaaguggguuucga

SEQ ID NO: 873487 - RNA, 19 nt, Artificial Sequence
  Description of Artificial Sequence: Synthetic oligonucleotide
  Antisense strand to SEQ ID NO: 873486
ucgaaacccacuuacacac

SEQ ID NO: 873488 - RNA, 19 nt, Artificial Sequence
  Description of Artificial Sequence: Synthetic oligonucleotide
  Sense strand starting at position 1809 of SEQ ID NO: 588561
aguggguuucgagagguga

SEQ ID NO: 873489 - RNA, 19 nt, Artificial Sequence
  Description of Artificial Sequence: Synthetic oligonucleotide
  Antisense strand to SEQ ID NO: 873488
ucaccucucgaaacccacu

SEQ ID NO: 873490 - RNA, 19 nt, Artificial Sequence
  Description of Artificial Sequence: Synthetic oligonucleotide
  Sense strand starting at position 1811 of SEQ ID NO: 588561
uggguuucgagaggugaca

SEQ ID NO: 873491 - RNA, 19 nt, Artificial Sequence
  Description of Artificial Sequence: Synthetic oligonucleotide
  Antisense strand to SEQ ID NO: 873490
ugucaccucucgaaaccca

SEQ ID NO: 873492 - RNA, 19 nt, Artificial Sequence
  Description of Artificial Sequence: Synthetic oligonucleotide
  Sense strand starting at position 2035 of SEQ ID NO: 588561
ggcgucgccaucuuuauga

SEQ ID NO: 873493 - RNA, 19 nt, Artificial Sequence
  Description of Artificial Sequence: Synthetic oligonucleotide
  Antisense strand to SEQ ID NO: 873492
ucauaaagauggcgacgcc

SEQ ID NO: 873494 - RNA, 19 nt, Artificial Sequence
  Description of Artificial Sequence: Synthetic oligonucleotide
  Sense strand starting at position 2042 of SEQ ID NO: 588561
ccaucuuuaugaggagaau

SEQ ID NO: 873495 - RNA, 19 nt, Artificial Sequence
  Description of Artificial Sequence: Synthetic oligonucleotide
  Antisense strand to SEQ ID NO: 873494
auucuccucauaaagaugg

SEQ ID NO: 873496 - RNA, 19 nt, Artificial Sequence
  Description of Artificial Sequence: Synthetic oligonucleotide
  Sense strand starting at position 2055 of SEQ ID NO: 588561
gagaauucuagcggcgcuu

SEQ ID NO: 873497 - RNA, 19 nt, Artificial Sequence
  Description of Artificial Sequence: Synthetic oligonucleotide
  Antisense strand to SEQ ID NO: 873496
aagcgccgcuagaauucuc

SEQ ID NO: 873498 - RNA, 19 nt, Artificial Sequence
  Description of Artificial Sequence: Synthetic oligonucleotide
  Sense strand starting at position 2216 of SEQ ID NO: 588561
ggugaguagcugugucgga

SEQ ID NO: 873499 - RNA, 19 nt, Artificial Sequence
  Description of Artificial Sequence: Synthetic oligonucleotide
  Antisense strand to SEQ ID NO: 873498
uccgacacagcuacucacc

SEQ ID NO: 873500 - RNA, 19 nt, Artificial Sequence
  Description of Artificial Sequence: Synthetic oligonucleotide
  Sense strand starting at position 2299 of SEQ ID NO: 588561
gugcuagagugcuuaauga

SEQ ID NO: 873501 - RNA, 19 nt, Artificial Sequence
  Description of Artificial Sequence: Synthetic oligonucleotide
  Antisense strand to SEQ ID NO: 873500
ucauuaagcacucuagcac

SEQ ID NO: 873502 - RNA, 19 nt, Artificial Sequence
  Description of Artificial Sequence: Synthetic oligonucleotide
  Sense strand starting at position 2306 of SEQ ID NO: 588561
agugcuuaaugaguuugau

SEQ ID NO: 873503 - RNA, 19 nt, Artificial Sequence
  Description of Artificial Sequence: Synthetic oligonucleotide
  Antisense strand to SEQ ID NO: 873502
aucaaacucauuaagcacu

SEQ ID NO: 873504 - RNA, 19 nt, Artificial Sequence
  Description of Artificial Sequence: Synthetic oligonucleotide
  Sense strand starting at position 2309 of SEQ ID NO: 588561
gcuuaaugaguuugaugcu

SEQ ID NO: 873505 - RNA, 19 nt, Artificial Sequence
  Description of Artificial Sequence: Synthetic oligonucleotide
  Antisense strand to SEQ ID NO: 873504
agcaucaaacucauuaagc

SEQ ID NO: 873506 - RNA, 19 nt, Artificial Sequence
  Description of Artificial Sequence: Synthetic oligonucleotide
  Sense strand starting at position 2315 of SEQ ID NO: 588561
ugaguuugaugcuacuaag

SEQ ID NO: 873507 - RNA, 19 nt, Artificial Sequence
  Description of Artificial Sequence: Synthetic oligonucleotide
  Antisense strand to SEQ ID NO: 873506
cuuaguagcaucaaacuca

SEQ ID NO: 873508 - RNA, 19 nt, Artificial Sequence
  Description of Artificial Sequence: Synthetic oligonucleotide
  Sense strand starting at position 2565 of SEQ ID NO: 588561
ucgcaaauucccuggcuga

SEQ ID NO: 873509 - RNA, 19 nt, Artificial Sequence
  Description of Artificial Sequence: Synthetic oligonucleotide
  Antisense strand to SEQ ID NO: 873508
ucagccagggaauuugcga

SEQ ID NO: 873510 - RNA, 19 nt, Artificial Sequence
  Description of Artificial Sequence: Synthetic oligonucleotide
  Sense strand starting at position 2566 of SEQ ID NO: 588561
cgcaaauucccuggcugau

SEQ ID NO: 873511 - RNA, 19 nt, Artificial Sequence
  Description of Artificial Sequence: Synthetic oligonucleotide
  Antisense strand to SEQ ID NO: 873510
aucagccagggaauuugcg

SEQ ID NO: 873512 - RNA, 19 nt, Artificial Sequence
  Description of Artificial Sequence: Synthetic oligonucleotide
  Sense strand starting at position 2670 of SEQ ID NO: 588561
aauguagggugacuucuaa

SEQ ID NO: 873513 - RNA, 19 nt, Artificial Sequence
  Description of Artificial Sequence: Synthetic oligonucleotide
  Antisense strand to SEQ ID NO: 873512
uuagaagucacccuacauu

SEQ ID NO: 873514 - RNA, 19 nt, Artificial Sequence
  Description of Artificial Sequence: Synthetic oligonucleotide
  Sense strand starting at position 2674 of SEQ ID NO: 588561
uagggugacuucuaagaua

SEQ ID NO: 873515 - RNA, 19 nt, Artificial Sequence
  Description of Artificial Sequence: Synthetic oligonucleotide
  Antisense strand to SEQ ID NO: 873514
uaucuuagaagucacccua

SEQ ID NO: 873516 - RNA, 19 nt, Artificial Sequence
  Description of Artificial Sequence: Synthetic oligonucleotide
  Sense strand starting at position 2677 of SEQ ID NO: 588561
ggugacuucuaagauaccu

SEQ ID NO: 873517 - RNA, 19 nt, Artificial Sequence
  Description of Artificial Sequence: Synthetic oligonucleotide
  Antisense strand to SEQ ID NO: 873516
agguaucuuagaagucacc

SEQ ID NO: 873518 - RNA, 19 nt, Artificial Sequence
  Description of Artificial Sequence: Synthetic oligonucleotide
  Sense strand starting at position 3040 of SEQ ID NO: 588561
gugcuauccaucuuugcgu

SEQ ID NO: 873519 - RNA, 19 nt, Artificial Sequence
  Description of Artificial Sequence: Synthetic oligonucleotide
  Antisense strand to SEQ ID NO: 873518
acgcaaagauggauagcac

SEQ ID NO: 873520 - RNA, 19 nt, Artificial Sequence
  Description of Artificial Sequence: Synthetic oligonucleotide
  Sense strand starting at position 3043 of SEQ ID NO: 588561
cuauccaucuuugcguaga

SEQ ID NO: 873521 - RNA, 19 nt, Artificial Sequence
  Description of Artificial Sequence: Synthetic oligonucleotide
  Antisense strand to SEQ ID NO: 873520
ucuacgcaaagauggauag

SEQ ID NO: 873522 - RNA, 19 nt, Artificial Sequence
  Description of Artificial Sequence: Synthetic oligonucleotide
  Sense strand starting at position 3095 of SEQ ID NO: 588561
gcgcgccagcugucugaua

SEQ ID NO: 873523 - RNA, 19 nt, Artificial Sequence
  Description of Artificial Sequence: Synthetic oligonucleotide
  Antisense strand to SEQ ID NO: 873522
uaucagacagcuggcgcgc

SEQ ID NO: 873524 - RNA, 19 nt, Artificial Sequence
  Description of Artificial Sequence: Synthetic oligonucleotide
  Sense strand starting at position 3097 of SEQ ID NO: 588561
gcgccagcugucugauaag

SEQ ID NO: 873525 - RNA, 19 nt, Artificial Sequence
  Description of Artificial Sequence: Synthetic oligonucleotide
  Antisense strand to SEQ ID NO: 873524
cuuaucagacagcuggcgc

SEQ ID NO: 873526 - RNA, 19 nt, Artificial Sequence
  Description of Artificial Sequence: Synthetic oligonucleotide
  Sense strand starting at position 3100 of SEQ ID NO: 588561
ccagcugucugauaagaug

SEQ ID NO: 873527 - RNA, 19 nt, Artificial Sequence
  Description of Artificial Sequence: Synthetic oligonucleotide
  Antisense strand to SEQ ID NO: 873526
caucuuaucagacagcugg

SEQ ID NO: 873528 - RNA, 19 nt, Artificial Sequence
  Description of Artificial Sequence: Synthetic oligonucleotide
  Sense strand starting at position 3124 of SEQ ID NO: 588561
gaaguuguuaauugcgguu

SEQ ID NO: 873529 - RNA, 19 nt, Artificial Sequence
  Description of Artificial Sequence: Synthetic oligonucleotide
  Antisense strand to SEQ ID NO: 873528
aaccgcaauuaacaacuuc

SEQ ID NO: 873530 - RNA, 19 nt, Artificial Sequence
  Description of Artificial Sequence: Synthetic oligonucleotide
  Sense strand starting at position 3136 of SEQ ID NO: 588561
ugcgguugucuccgacaga

SEQ ID NO: 873531 - RNA, 19 nt, Artificial Sequence
  Description of Artificial Sequence: Synthetic oligonucleotide
  Antisense strand to SEQ ID NO: 873530
ucugucggagacaaccgca

SEQ ID NO: 873532 - RNA, 19 nt, Artificial Sequence
  Description of Artificial Sequence: Synthetic oligonucleotide
  Sense strand starting at position 3139 of SEQ ID NO: 588561
gguugucuccgacagaauu

SEQ ID NO: 873533 - RNA, 19 nt, Artificial Sequence
  Description of Artificial Sequence: Synthetic oligonucleotide
  Antisense strand to SEQ ID NO: 873532
aauucugucggagacaacc

SEQ ID NO: 873534 - RNA, 19 nt, Artificial Sequence
  Description of Artificial Sequence: Synthetic oligonucleotide
  Sense strand starting at position 3183 of SEQ ID NO: 588561
cgagaaauuuacuaccaug

SEQ ID NO: 873535 - RNA, 19 nt, Artificial Sequence
  Description of Artificial Sequence: Synthetic oligonucleotide
  Antisense strand to SEQ ID NO: 873534
caugguaguaaauuucucg

SEQ ID NO: 873536 - RNA, 19 nt, Artificial Sequence
  Description of Artificial Sequence: Synthetic oligonucleotide
  Sense strand starting at position 3344 of SEQ ID NO: 588561
uuaggaaacuuagcaauau

SEQ ID NO: 873537 - RNA, 19 nt, Artificial Sequence
  Description of Artificial Sequence: Synthetic oligonucleotide
  Antisense strand to SEQ ID NO: 873536
auauugcuaaguuuccuaa

SEQ ID NO: 873538 - RNA, 19 nt, Artificial Sequence
  Description of Artificial Sequence: Synthetic oligonucleotide
  Sense strand starting at position 3696 of SEQ ID NO: 588561
uuugaacccugggagauuu

SEQ ID NO: 873539 - RNA, 19 nt, Artificial Sequence
  Description of Artificial Sequence: Synthetic oligonucleotide
  Antisense strand to SEQ ID NO: 873538
aaaucucccaggguucaaa

SEQ ID NO: 873540 - RNA, 19 nt, Artificial Sequence
  Description of Artificial Sequence: Synthetic oligonucleotide
  Sense strand starting at position 3704 of SEQ ID NO: 588561
cugggagauuuacacuaau

SEQ ID NO: 873541 - RNA, 19 nt, Artificial Sequence
  Description of Artificial Sequence: Synthetic oligonucleotide
  Antisense strand to SEQ ID NO: 873540
auuaguguaaaucucccag

SEQ ID NO: 873542 - RNA, 19 nt, Artificial Sequence
  Description of Artificial Sequence: Synthetic oligonucleotide
  Sense strand starting at position 3762 of SEQ ID NO: 588561
uucuguugucagucacgca

SEQ ID NO: 873543 - RNA, 19 nt, Artificial Sequence
  Description of Artificial Sequence: Synthetic oligonucleotide
  Antisense strand to SEQ ID NO: 873542
ugcgugacugacaacagaa

SEQ ID NO: 873544 - RNA, 19 nt, Artificial Sequence
  Description of Artificial Sequence: Synthetic oligonucleotide
  Sense strand starting at position 3807 of SEQ ID NO: 588561
acaggcauccaguaacuau

SEQ ID NO: 873545 - RNA, 19 nt, Artificial Sequence
  Description of Artificial Sequence: Synthetic oligonucleotide
  Antisense strand to SEQ ID NO: 873544
auaguuacuggaugccugu

SEQ ID NO: 873546 - RNA, 19 nt, Artificial Sequence
  Description of Artificial Sequence: Synthetic oligonucleotide
  Sense strand starting at position 3818 of SEQ ID NO: 588561
guaacuauuuauugacaug

SEQ ID NO: 873547 - RNA, 19 nt, Artificial Sequence
  Description of Artificial Sequence: Synthetic oligonucleotide
  Antisense strand to SEQ ID NO: 873546
caugucaauaaauaguuac

SEQ ID NO: 873548 - RNA, 19 nt, Artificial Sequence
  Description of Artificial Sequence: Synthetic oligonucleotide
  Sense strand starting at position 3821 of SEQ ID NO: 588561
acuauuuauugacaugaug

SEQ ID NO: 873549 - RNA, 19 nt, Artificial Sequence
  Description of Artificial Sequence: Synthetic oligonucleotide
  Antisense strand to SEQ ID NO: 873548
caucaugucaauaaauagu

SEQ ID NO: 873550 - RNA, 19 nt, Artificial Sequence
  Description of Artificial Sequence: Synthetic oligonucleotide
  Sense strand starting at position 3 of SEQ ID NO: 588562
agaccucugcggugaauac

SEQ ID NO: 873551 - RNA, 19 nt, Artificial Sequence
  Description of Artificial Sequence: Synthetic oligonucleotide
  Antisense strand to SEQ ID NO: 873550
guauucaccgcagaggucu

SEQ ID NO: 873552 - RNA, 19 nt, Artificial Sequence
  Description of Artificial Sequence: Synthetic oligonucleotide
  Sense strand starting at position 4 of SEQ ID NO: 588562
gaccucugcggugaauaca

SEQ ID NO: 873553 - RNA, 19 nt, Artificial Sequence
  Description of Artificial Sequence: Synthetic oligonucleotide
  Antisense strand to SEQ ID NO: 873552
uguauucaccgcagagguc

SEQ ID NO: 873554 - RNA, 19 nt, Artificial Sequence
  Description of Artificial Sequence: Synthetic oligonucleotide
  Sense strand starting at position 44 of SEQ ID NO: 588562
uuaccacccucguuauuau

SEQ ID NO: 873555 - RNA, 19 nt, Artificial Sequence
  Description of Artificial Sequence: Synthetic oligonucleotide
  Antisense strand to SEQ ID NO: 873554
auaauaacgagggugguaa

SEQ ID NO: 873556 - RNA, 19 nt, Artificial Sequence
  Description of Artificial Sequence: Synthetic oligonucleotide
  Sense strand starting at position 51 of SEQ ID NO: 588562
ccucguuauuauuccauuu

SEQ ID NO: 873557 - RNA, 19 nt, Artificial Sequence
  Description of Artificial Sequence: Synthetic oligonucleotide
  Antisense strand to SEQ ID NO: 873556
aaauggaauaauaacgagg

SEQ ID NO: 873558 - RNA, 19 nt, Artificial Sequence
  Description of Artificial Sequence: Synthetic oligonucleotide
  Sense strand starting at position 373 of SEQ ID NO: 588562
gggagucucugucucagaa

SEQ ID NO: 873559 - RNA, 19 nt, Artificial Sequence
  Description of Artificial Sequence: Synthetic oligonucleotide
  Antisense strand to SEQ ID NO: 873558
uucugagacagagacuccc

SEQ ID NO: 873560 - RNA, 19 nt, Artificial Sequence
  Description of Artificial Sequence: Synthetic oligonucleotide
  Sense strand starting at position 417 of SEQ ID NO: 588562
ugaagaaguagaugcuuau

SEQ ID NO: 873561 - RNA, 19 nt, Artificial Sequence
  Description of Artificial Sequence: Synthetic oligonucleotide
  Antisense strand to SEQ ID NO: 873560
auaagcaucuacuucuuca

SEQ ID NO: 873562 - RNA, 19 nt, Artificial Sequence
  Description of Artificial Sequence: Synthetic oligonucleotide
  Sense strand starting at position 420 of SEQ ID NO: 588562
agaaguagaugcuuauuaa

SEQ ID NO: 873563 - RNA, 19 nt, Artificial Sequence
  Description of Artificial Sequence: Synthetic oligonucleotide
  Antisense strand to SEQ ID NO: 873562
uuaauaagcaucuacuucu

SEQ ID NO: 873564 - RNA, 19 nt, Artificial Sequence
  Description of Artificial Sequence: Synthetic oligonucleotide
  Sense strand starting at position 493 of SEQ ID NO: 588562
aguccugaccuaugggauu

SEQ ID NO: 873565 - RNA, 19 nt, Artificial Sequence
  Description of Artificial Sequence: Synthetic oligonucleotide
  Antisense strand to SEQ ID NO: 873564
aaucccauaggucaggacu

SEQ ID NO: 873566 - RNA, 19 nt, Artificial Sequence
  Description of Artificial Sequence: Synthetic oligonucleotide
  Sense strand starting at position 519 of SEQ ID NO: 588562
cugcuuggugcucacauaa

SEQ ID NO: 873567 - RNA, 19 nt, Artificial Sequence
  Description of Artificial Sequence: Synthetic oligonucleotide
  Antisense strand to SEQ ID NO: 873566
uuaugugagcaccaagcag

SEQ ID NO: 873568 - RNA, 19 nt, Artificial Sequence
  Description of Artificial Sequence: Synthetic oligonucleotide
  Sense strand starting at position 553 of SEQ ID NO: 588562
guacacuguccugaacuca

SEQ ID NO: 873569 - RNA, 19 nt, Artificial Sequence
  Description of Artificial Sequence: Synthetic oligonucleotide
  Antisense strand to SEQ ID NO: 873568
ugaguucaggacaguguac

SEQ ID NO: 873570 - RNA, 19 nt, Artificial Sequence
  Description of Artificial Sequence: Synthetic oligonucleotide
  Sense strand starting at position 602 of SEQ ID NO: 588562
ugcacagugucuguaaaua

SEQ ID NO: 873571 - RNA, 19 nt, Artificial Sequence
  Description of Artificial Sequence: Synthetic oligonucleotide
  Antisense strand to SEQ ID NO: 873570
uauuuacagacacugugca

SEQ ID NO: 873572 - RNA, 19 nt, Artificial Sequence
  Description of Artificial Sequence: Synthetic oligonucleotide
  Sense strand starting at position 627 of SEQ ID NO: 588562
cuggauaagggauggcaau

SEQ ID NO: 873573 - RNA, 19 nt, Artificial Sequence
  Description of Artificial Sequence: Synthetic oligonucleotide
  Antisense strand to SEQ ID NO: 873572
auugccaucccuuauccag

SEQ ID NO: 873574 - RNA, 19 nt, Artificial Sequence
  Description of Artificial Sequence: Synthetic oligonucleotide
  Sense strand starting at position 655 of SEQ ID NO: 588562
ggcaaucacccagggaagu

SEQ ID NO: 873575 - RNA, 19 nt, Artificial Sequence
  Description of Artificial Sequence: Synthetic oligonucleotide
  Antisense strand to SEQ ID NO: 873574
acuucccugggugauugcc

SEQ ID NO: 873576 - RNA, 19 nt, Artificial Sequence
  Description of Artificial Sequence: Synthetic oligonucleotide
  Sense strand starting at position 884 of SEQ ID NO: 588562
augagcgcucaauaaaugu

SEQ ID NO: 873577 - RNA, 19 nt, Artificial Sequence
  Description of Artificial Sequence: Synthetic oligonucleotide
  Antisense strand to SEQ ID NO: 873576
acauuuauugagcgcucau

SEQ ID NO: 873578 - RNA, 19 nt, Artificial Sequence
  Description of Artificial Sequence: Synthetic oligonucleotide
  Sense strand starting at position 2058 of SEQ ID NO: 588562
uggcuuguccgcgcgauuu

SEQ ID NO: 873579 - RNA, 19 nt, Artificial Sequence
  Description of Artificial Sequence: Synthetic oligonucleotide
  Antisense strand to SEQ ID NO: 873578
aaaucgcgcggacaagcca

SEQ ID NO: 873580 - RNA, 19 nt, Artificial Sequence
  Description of Artificial Sequence: Synthetic oligonucleotide
  Sense strand starting at position 2572 of SEQ ID NO: 588562
gugcuguuucgagaagagg

SEQ ID NO: 873581 - RNA, 19 nt, Artificial Sequence
  Description of Artificial Sequence: Synthetic oligonucleotide
  Antisense strand to SEQ ID NO: 873580
ccucuucucgaaacagcac

SEQ ID NO: 873582 - RNA, 19 nt, Artificial Sequence
  Description of Artificial Sequence: Synthetic oligonucleotide
  Sense strand starting at position 2906 of SEQ ID NO: 588562
aggaaggucgugugugaaa

SEQ ID NO: 873583 - RNA, 19 nt, Artificial Sequence
  Description of Artificial Sequence: Synthetic oligonucleotide
  Antisense strand to SEQ ID NO: 873582
uuucacacacgaccuuccu

SEQ ID NO: 873584 - RNA, 19 nt, Artificial Sequence
  Description of Artificial Sequence: Synthetic oligonucleotide
  Sense strand starting at position 2928 of SEQ ID NO: 588562
cgaaccuggugccuuuaaa

SEQ ID NO: 873585 - RNA, 19 nt, Artificial Sequence
  Description of Artificial Sequence: Synthetic oligonucleotide
  Antisense strand to SEQ ID NO: 873584
uuuaaaggcaccagguucg

SEQ ID NO: 873586 - RNA, 19 nt, Artificial Sequence
  Description of Artificial Sequence: Synthetic oligonucleotide
  Sense strand starting at position 2948 of SEQ ID NO: 588562
uguaauuagcuccaugugu

SEQ ID NO: 873587 - RNA, 19 nt, Artificial Sequence
  Description of Artificial Sequence: Synthetic oligonucleotide
  Antisense strand to SEQ ID NO: 873586
acacauggagcuaauuaca

SEQ ID NO: 873588 - RNA, 19 nt, Artificial Sequence
  Description of Artificial Sequence: Synthetic oligonucleotide
  Sense strand starting at position 3016 of SEQ ID NO: 588562
ugaaguuaggacuggcuua

SEQ ID NO: 873589 - RNA, 19 nt, Artificial Sequence
  Description of Artificial Sequence: Synthetic oligonucleotide
  Antisense strand to SEQ ID NO: 873588
uaagccaguccuaacuuca

SEQ ID NO: 873590 - RNA, 19 nt, Artificial Sequence
  Description of Artificial Sequence: Synthetic oligonucleotide
  Sense strand starting at position 3057 of SEQ ID NO: 588562
uguauuuccucgucaggaa

SEQ ID NO: 873591 - RNA, 19 nt, Artificial Sequence
  Description of Artificial Sequence: Synthetic oligonucleotide
  Antisense strand to SEQ ID NO: 873590
uuccugacgaggaaauaca

SEQ ID NO: 873592 - RNA, 19 nt, Artificial Sequence
  Description of Artificial Sequence: Synthetic oligonucleotide
  Sense strand starting at position 3115 of SEQ ID NO: 588562
ugaagauccagugagcguu

SEQ ID NO: 873593 - RNA, 19 nt, Artificial Sequence
  Description of Artificial Sequence: Synthetic oligonucleotide
  Antisense strand to SEQ ID NO: 873592
aacgcucacuggaucuuca

SEQ ID NO: 873594 - RNA, 19 nt, Artificial Sequence
  Description of Artificial Sequence: Synthetic oligonucleotide
  Sense strand starting at position 3127 of SEQ ID NO: 588562
gagcguuuccagcuguguu

SEQ ID NO: 873595 - RNA, 19 nt, Artificial Sequence
  Description of Artificial Sequence: Synthetic oligonucleotide
  Antisense strand to SEQ ID NO: 873594
aacacagcuggaaacgcuc

SEQ ID NO: 873596 - RNA, 19 nt, Artificial Sequence
  Description of Artificial Sequence: Synthetic oligonucleotide
  Sense strand starting at position 3137 of SEQ ID NO: 588562
agcuguguuguagauguaa

SEQ ID NO: 873597 - RNA, 19 nt, Artificial Sequence
  Description of Artificial Sequence: Synthetic oligonucleotide
  Antisense strand to SEQ ID NO: 873596
uuacaucuacaacacagcu

SEQ ID NO: 873598 - RNA, 19 nt, Artificial Sequence
  Description of Artificial Sequence: Synthetic oligonucleotide
  Sense strand starting at position 3139 of SEQ ID NO: 588562
cuguguuguagauguaaac

SEQ ID NO: 873599 - RNA, 19 nt, Artificial Sequence
  Description of Artificial Sequence: Synthetic oligonucleotide
  Antisense strand to SEQ ID NO: 873598
guuuacaucuacaacacag

SEQ ID NO: 873600 - RNA, 19 nt, Artificial Sequence
  Description of Artificial Sequence: Synthetic oligonucleotide
  Sense strand starting at position 3216 of SEQ ID NO: 588562
gucauucuguccucuugga

SEQ ID NO: 873601 - RNA, 19 nt, Artificial Sequence
  Description of Artificial Sequence: Synthetic oligonucleotide
  Antisense strand to SEQ ID NO: 873600
uccaagaggacagaaugac

SEQ ID NO: 873602 - RNA, 19 nt, Artificial Sequence
  Description of Artificial Sequence: Synthetic oligonucleotide
  Sense strand starting at position 3377 of SEQ ID NO: 588562
uccuguugaggcuaaggau

SEQ ID NO: 873603 - RNA, 19 nt, Artificial Sequence
  Description of Artificial Sequence: Synthetic oligonucleotide
  Antisense strand to SEQ ID NO: 873602
auccuuagccucaacagga

SEQ ID NO: 873604 - RNA, 19 nt, Artificial Sequence
  Description of Artificial Sequence: Synthetic oligonucleotide
  Sense strand starting at position 3452 of SEQ ID NO: 588562
ggacguggguggucugaca

SEQ ID NO: 873605 - RNA, 19 nt, Artificial Sequence
  Description of Artificial Sequence: Synthetic oligonucleotide
  Antisense strand to SEQ ID NO: 873604
ugucagaccacccacgucc

SEQ ID NO: 873606 - RNA, 19 nt, Artificial Sequence
  Description of Artificial Sequence: Synthetic oligonucleotide
  Sense strand starting at position 3485 of SEQ ID NO: 588562
uuugaaagcuccuuaggug

SEQ ID NO: 873607 - RNA, 19 nt, Artificial Sequence
  Description of Artificial Sequence: Synthetic oligonucleotide
  Antisense strand to SEQ ID NO: 873606
caccuaaggagcuuucaaa

SEQ ID NO: 873608 - RNA, 19 nt, Artificial Sequence
  Description of Artificial Sequence: Synthetic oligonucleotide
  Sense strand starting at position 3486 of SEQ ID NO: 588562
uugaaagcuccuuagguga

SEQ ID NO: 873609 - RNA, 19 nt, Artificial Sequence
  Description of Artificial Sequence: Synthetic oligonucleotide
  Antisense strand to SEQ ID NO: 873608
ucaccuaaggagcuuucaa

SEQ ID NO: 873610 - RNA, 19 nt, Artificial Sequence
  Description of Artificial Sequence: Synthetic oligonucleotide
  Sense strand starting at position 3579 of SEQ ID NO: 588562
uggccaagucugcaguuua

SEQ ID NO: 873611 - RNA, 19 nt, Artificial Sequence
  Description of Artificial Sequence: Synthetic oligonucleotide
  Antisense strand to SEQ ID NO: 873610
uaaacugcagacuuggcca

SEQ ID NO: 873612 - RNA, 19 nt, Artificial Sequence
  Description of Artificial Sequence: Synthetic oligonucleotide
  Sense strand starting at position 3645 of SEQ ID NO: 588562
cugugcucugauugagaag

SEQ ID NO: 873613 - RNA, 19 nt, Artificial Sequence
  Description of Artificial Sequence: Synthetic oligonucleotide
  Antisense strand to SEQ ID NO: 873612
cuucucaaucagagcacag

SEQ ID NO: 873614 - RNA, 19 nt, Artificial Sequence
  Description of Artificial Sequence: Synthetic oligonucleotide
  Sense strand starting at position 3666 of SEQ ID NO: 588562
gcccuuagguacuugagau

SEQ ID NO: 873615 - RNA, 19 nt, Artificial Sequence
  Description of Artificial Sequence: Synthetic oligonucleotide
  Antisense strand to SEQ ID NO: 873614
aucucaaguaccuaagggc
